United States Patent Application Publication US 2007/0042381 A1 - sequence listing, part 88

SEQ ID NO: 4010630 - RNA, 15 nt, Human papillomavirus type 45
gauuucgguugccug

SEQ ID NO: 4010631 - RNA, 11 nt, Human papillomavirus type 45
ggaaaaugcaa

SEQ ID NO: 4010632 - RNA, 18 nt, Human papillomavirus type 45
ggcagagcaagagacagc

SEQ ID NO: 4010633 - RNA, 20 nt, Human papillomavirus type 45
gggacaaaacagcagcaugu

SEQ ID NO: 4010634 - RNA, 19 nt, Human papillomavirus type 45
gguuguaccuaauggugca

SEQ ID NO: 4010635 - RNA, 12 nt, Human papillomavirus type 45
guaauggcuggu

SEQ ID NO: 4010636 - RNA, 18 nt, Human papillomavirus type 45
guaucccaccgugcagca

SEQ ID NO: 4010637 - RNA, 23 nt, Human papillomavirus type 45
guauggaaauuggucgugggcag

SEQ ID NO: 4010638 - RNA, 16 nt, Human papillomavirus type 45
gucuaugugugugcuu

SEQ ID NO: 4010639 - RNA, 14 nt, Human papillomavirus type 45
gugcucaugcagcu

SEQ ID NO: 4010640 - RNA, 23 nt, Human papillomavirus type 45
guucccgauuauuaacuguaggc

SEQ ID NO: 4010641 - RNA, 21 nt, Human papillomavirus type 45
guuguguaggguugcacccuu

SEQ ID NO: 4010642 - RNA, 13 nt, Human papillomavirus type 45
guuugcaggaggc

SEQ ID NO: 4010643 - RNA, 14 nt, Human papillomavirus type 45
uaauaguguugugu

SEQ ID NO: 4010644 - RNA, 17 nt, Human papillomavirus type 45
uacauuuguugcuauuu

SEQ ID NO: 4010645 - RNA, 17 nt, Human papillomavirus type 45
uacuauaauguacagua

SEQ ID NO: 4010646 - RNA, 13 nt, Human papillomavirus type 45
uaggggagcagcu

SEQ ID NO: 4010647 - RNA, 18 nt, Human papillomavirus type 45
uauaauaaauuggaugau

SEQ ID NO: 4010648 - RNA, 13 nt, Human papillomavirus type 45
uauauuacuguau

SEQ ID NO: 4010649 - RNA, 20 nt, Human papillomavirus type 45
uaucagaugaugaggaugaa

SEQ ID NO: 4010650 - RNA, 14 nt, Human papillomavirus type 45
uauguaacauuacu

SEQ ID NO: 4010651 - RNA, 16 nt, Human papillomavirus type 45
uauguuuguauuacau

SEQ ID NO: 4010652 - RNA, 13 nt, Human papillomavirus type 45
uauugaacugcaa

SEQ ID NO: 4010653 - RNA, 13 nt, Human papillomavirus type 45
ucaugcaggcagu

SEQ ID NO: 4010654 - RNA, 15 nt, Human papillomavirus type 45
uccauuuuacuuaua

SEQ ID NO: 4010655 - RNA, 17 nt, Human papillomavirus type 45
uccccauuaacagcauu

SEQ ID NO: 4010656 - RNA, 17 nt, Human papillomavirus type 45
ugauauauuacuguauu

SEQ ID NO: 4010657 - RNA, 11 nt, Human papillomavirus type 45
ugaugcacagg

SEQ ID NO: 4010658 - RNA, 20 nt, Human papillomavirus type 45
ugcaauacuauuuacagcaa

SEQ ID NO: 4010659 - RNA, 13 nt, Human papillomavirus type 45
ugcaggaggcagc

SEQ ID NO: 4010660 - RNA, 16 nt, Human papillomavirus type 45
ugcaggaggcagcaag

SEQ ID NO: 4010661 - RNA, 20 nt, Human papillomavirus type 45
ugcuaucuuuaguguuuuua

SEQ ID NO: 4010662 - RNA, 16 nt, Human papillomavirus type 45
uggaaccucagaauga

SEQ ID NO: 4010663 - RNA, 19 nt, Human papillomavirus type 45
uggacacugcaagauacau

SEQ ID NO: 4010664 - RNA, 19 nt, Human papillomavirus type 45
uggcaacaaggacaacugu

SEQ ID NO: 4010665 - RNA, 23 nt, Human papillomavirus type 45
ugguaucccaccgugcagcacgu

SEQ ID NO: 4010666 - RNA, 13 nt, Human papillomavirus type 45
ugguguuacugua

SEQ ID NO: 4010667 - RNA, 21 nt, Human papillomavirus type 45
ugguucuuuguagaaacaauu

SEQ ID NO: 4010668 - RNA, 21 nt, Human papillomavirus type 45
uguaggguugcacccuuguga

SEQ ID NO: 4010669 - RNA, 21 nt, Human papillomavirus type 45
aaaccaccagguggugccucc

SEQ ID NO: 4010670 - RNA, 14 nt, Human papillomavirus type 45
aaaccgugcacgua

SEQ ID NO: 4010671 - RNA, 18 nt, Human papillomavirus type 45
aaagcacauaaagcuauu

SEQ ID NO: 4010672 - RNA, 14 nt, Human papillomavirus type 45
aacaauuguagaga

SEQ ID NO: 4010673 - RNA, 18 nt, Human papillomavirus type 45
aacgaaaguuugcaggag

SEQ ID NO: 4010674 - RNA, 21 nt, Human papillomavirus type 45
aacuuauacguuuggaaaaug

SEQ ID NO: 4010675 - RNA, 16 nt, Human papillomavirus type 45
aauccauauuuuaggg

SEQ ID NO: 4010676 - RNA, 13 nt, Human papillomavirus type 45
aauguacaguaca

SEQ ID NO: 4010677 - RNA, 16 nt, Human papillomavirus type 45
acagcaagggaacaug

SEQ ID NO: 4010678 - RNA, 18 nt, Human papillomavirus type 45
acaguaaagacauaaaca

SEQ ID NO: 4010679 - RNA, 19 nt, Human papillomavirus type 45
acauaaagcuauugaacug

SEQ ID NO: 4010680 - RNA, 17 nt, Human papillomavirus type 45
acgagccgaaccacagc

SEQ ID NO: 4010681 - RNA, 20 nt, Human papillomavirus type 45
acuauaauguacaguacagu

SEQ ID NO: 4010682 - RNA, 16 nt, Human papillomavirus type 45
agagaaaaaaacaggg

SEQ ID NO: 4010683 - RNA, 13 nt, Human papillomavirus type 45
aguucagaaugau

SEQ ID NO: 4010684 - RNA, 23 nt, Human papillomavirus type 45
auaccuaaacuggcacauuuaca

SEQ ID NO: 4010685 - RNA, 15 nt, Human papillomavirus type 45
auauauaauccugaa

SEQ ID NO: 4010686 - RNA, 18 nt, Human papillomavirus type 45
auaugcaugcuuuacaca

SEQ ID NO: 4010687 - RNA, 21 nt, Human papillomavirus type 45
auauguauguuuguauguaug

SEQ ID NO: 4010688 - RNA, 16 nt, Human papillomavirus type 45
auauuguauacaguau

SEQ ID NO: 4010689 - RNA, 13 nt, Human papillomavirus type 45
aucagaugaugag

SEQ ID NO: 4010690 - RNA, 23 nt, Human papillomavirus type 45
auuguagagaaaaaaacagggga

SEQ ID NO: 4010691 - RNA, 14 nt, Human papillomavirus type 45
auuguauacaguau

SEQ ID NO: 4010692 - RNA, 21 nt, Human papillomavirus type 45
auuguuccaugcgcaggaagu

SEQ ID NO: 4010693 - RNA, 22 nt, Human papillomavirus type 45
caauacuauuuguguguaugug

SEQ ID NO: 4010694 - RNA, 13 nt, Human papillomavirus type 45
cagaaugaugcac

SEQ ID NO: 4010695 - RNA, 12 nt, Human papillomavirus type 45
cagcacaggcau

SEQ ID NO: 4010696 - RNA, 16 nt, Human papillomavirus type 45
cagcacaggcauuguu

SEQ ID NO: 4010697 - RNA, 12 nt, Human papillomavirus type 45
caggcuguuccu

SEQ ID NO: 4010698 - RNA, 22 nt, Human papillomavirus type 45
cagguggugccuccuauuaaca

SEQ ID NO: 4010699 - RNA, 19 nt, Human papillomavirus type 45
caguccauuaggggagcag

SEQ ID NO: 4010700 - RNA, 21 nt, Human papillomavirus type 45
cauacuacacagcauccauuu

SEQ ID NO: 4010701 - RNA, 14 nt, Human papillomavirus type 45
cauaugcaugcuuu

SEQ ID NO: 4010702 - RNA, 15 nt, Human papillomavirus type 45
cauguuguuguauuu

SEQ ID NO: 4010703 - RNA, 19 nt, Human papillomavirus type 45
cauuacuaugcuaucuuua

SEQ ID NO: 4010704 - RNA, 13 nt, Human papillomavirus type 45
cauuuugcugugc

SEQ ID NO: 4010705 - RNA, 15 nt, Human papillomavirus type 45
ccuugcacaaagcaa

SEQ ID NO: 4010706 - RNA, 13 nt, Human papillomavirus type 45
cuaccuauguuug

SEQ ID NO: 4010707 - RNA, 13 nt, Human papillomavirus type 45
cuauuuacagcaa

SEQ ID NO: 4010708 - RNA, 15 nt, Human papillomavirus type 45
cugcaagaaauugua

SEQ ID NO: 4010709 - RNA, 12 nt, Human papillomavirus type 45
cuguacauaauu

SEQ ID NO: 4010710 - RNA, 22 nt, Human papillomavirus type 45
cuuauacguuuggaaaaugcaa

SEQ ID NO: 4010711 - RNA, 14 nt, Human papillomavirus type 45
gaguuagucaugca

SEQ ID NO: 4010712 - RNA, 14 nt, Human papillomavirus type 45
gcaacagauacagg

SEQ ID NO: 4010713 - RNA, 15 nt, Human papillomavirus type 45
gcaaggaaaacaguc

SEQ ID NO: 4010714 - RNA, 15 nt, Human papillomavirus type 45
gcaauccauauuuua

SEQ ID NO: 4010715 - RNA, 12 nt, Human papillomavirus type 45
gcacaaagcaag

SEQ ID NO: 4010716 - RNA, 14 nt, Human papillomavirus type 45
gcuauugaacugca

SEQ ID NO: 4010717 - RNA, 16 nt, Human papillomavirus type 45
aaacgaugaagcagau

SEQ ID NO: 4010718 - RNA, 22 nt, Human papillomavirus type 45
aaauaaguuauuggcaacuuau

SEQ ID NO: 4010719 - RNA, 18 nt, Human papillomavirus type 45
aaauuggaugauacagaa

SEQ ID NO: 4010720 - RNA, 18 nt, Human papillomavirus type 45
aaauuucauuaaauagug

SEQ ID NO: 4010721 - RNA, 17 nt, Human papillomavirus type 45
aacuauggaauacagaa

SEQ ID NO: 4010722 - RNA, 19 nt, Human papillomavirus type 45
aagaaauuguauugcauuu

SEQ ID NO: 4010723 - RNA, 13 nt, Human papillomavirus type 45
aaggaaaacaguc

SEQ ID NO: 4010724 - RNA, 22 nt, Human papillomavirus type 45
aagggccuugcacaaagcaagu

SEQ ID NO: 4010725 - RNA, 13 nt, Human papillomavirus type 45
aaguauaacaaug

SEQ ID NO: 4010726 - RNA, 17 nt, Human papillomavirus type 45
aaguucagaaugaugca

SEQ ID NO: 4010727 - RNA, 15 nt, Human papillomavirus type 45
aauaaacaggcuguu

SEQ ID NO: 4010728 - RNA, 12 nt, Human papillomavirus type 45
aauguacaguac

SEQ ID NO: 4010729 - RNA, 13 nt, Human papillomavirus type 45
acaaaaaagcaaa

SEQ ID NO: 4010730 - RNA, 16 nt, Human papillomavirus type 45
acaaaacagcagcaug

SEQ ID NO: 4010731 - RNA, 16 nt, Human papillomavirus type 45
acaaggacaacuguau

SEQ ID NO: 4010732 - RNA, 17 nt, Human papillomavirus type 45
acaguacaguguaacau

SEQ ID NO: 4010733 - RNA, 19 nt, Human papillomavirus type 45
acauuuguugcuauuuacu

SEQ ID NO: 4010734 - RNA, 18 nt, Human papillomavirus type 45
accaccuucuguggccag

SEQ ID NO: 4010735 - RNA, 16 nt, Human papillomavirus type 45
accuuuuaaacauaau

SEQ ID NO: 4010736 - RNA, 14 nt, Human papillomavirus type 45
acuaaccaauaauc

SEQ ID NO: 4010737 - RNA, 12 nt, Human papillomavirus type 45
acuguacauaau

SEQ ID NO: 4010738 - RNA, 16 nt, Human papillomavirus type 45
acuguaggcaauccau

SEQ ID NO: 4010739 - RNA, 17 nt, Human papillomavirus type 45
acuuauacguuuggaaa

SEQ ID NO: 4010740 - RNA, 18 nt, Human papillomavirus type 45
agcaaagcacauaaagcu

SEQ ID NO: 4010741 - RNA, 18 nt, Human papillomavirus type 45
aggaggcagcaaggaaaa

SEQ ID NO: 4010742 - RNA, 17 nt, Human papillomavirus type 45
agguauccgcauaucag

SEQ ID NO: 4010743 - RNA, 13 nt, Human papillomavirus type 45
aguuauaaacuug

SEQ ID NO: 4010744 - RNA, 14 nt, Human papillomavirus type 45
aguuugcaggaggc

SEQ ID NO: 4010745 - RNA, 14 nt, Human papillomavirus type 45
auaaagcuauugaa

SEQ ID NO: 4010746 - RNA, 21 nt, Human papillomavirus type 45
auaauaaauuggaugauacag

SEQ ID NO: 4010747 - RNA, 13 nt, Human papillomavirus type 45
auaauugugguau

SEQ ID NO: 4010748 - RNA, 17 nt, Human papillomavirus type 45
auaccugugaugugcau

SEQ ID NO: 4010749 - RNA, 15 nt, Human papillomavirus type 45
auacuauuuacagca

SEQ ID NO: 4010750 - RNA, 14 nt, Human papillomavirus type 45
auauauuacuguau

SEQ ID NO: 4010751 - RNA, 11 nt, Human papillomavirus type 45
auaugggacaa

SEQ ID NO: 4010752 - RNA, 22 nt, Human papillomavirus type 45
aucuuccaccaccuucuguggc

SEQ ID NO: 4010753 - RNA, 13 nt, Human papillomavirus type 45
auggcaacaagga

SEQ ID NO: 4010754 - RNA, 16 nt, Human papillomavirus type 45
auggcaacaaggacaa

SEQ ID NO: 4010755 - RNA, 19 nt, Human papillomavirus type 45
auguaauaucagaugauga

SEQ ID NO: 4010756 - RNA, 18 nt, Human papillomavirus type 45
augugcauguuguuguau

SEQ ID NO: 4010757 - RNA, 20 nt, Human papillomavirus type 45
augugccuuguggcauguau

SEQ ID NO: 4010758 - RNA, 15 nt, Human papillomavirus type 45
auuucaaaaagcaaa

SEQ ID NO: 4010759 - RNA, 14 nt, Human papillomavirus type 45
caaaacagcagcau

SEQ ID NO: 4010760 - RNA, 22 nt, Human papillomavirus type 45
caacuaccagcccgacgagccg

SEQ ID NO: 4010761 - RNA, 23 nt, Human papillomavirus type 45
cacaagcauauuuuaucaugcag

SEQ ID NO: 4010762 - RNA, 17 nt, Human papillomavirus type 45
cacauaaagcuauugaa

SEQ ID NO: 4010763 - RNA, 18 nt, Human papillomavirus type 45
cagaaagugcucaugcag

SEQ ID NO: 4010764 - RNA, 14 nt, Human papillomavirus type 45
cauauauguauguu

SEQ ID NO: 4010765 - RNA, 20 nt, Human papillomavirus type 45
cauguaugguguuacuguac

SEQ ID NO: 4010766 - RNA, 15 nt, Human papillomavirus type 45
cauuuugcugugcaa

SEQ ID NO: 4010767 - RNA, 18 nt, Human papillomavirus type 45
ccaugguaucccaccgug

SEQ ID NO: 4010768 - RNA, 22 nt, Human papillomavirus type 45
ccugaaacacaacguuugguuu

SEQ ID NO: 4010769 - RNA, 14 nt, Human papillomavirus type 45
cgugcguguaugua

SEQ ID NO: 4010770 - RNA, 17 nt, Human papillomavirus type 45
cugguucuuuguagaaa

SEQ ID NO: 4010771 - RNA, 15 nt, Human papillomavirus type 45
cuuuuaaacauaaua

SEQ ID NO: 4010772 - RNA, 23 nt, Human papillomavirus type 45
gaaaaugcaauacuauuuacagc

SEQ ID NO: 4010773 - RNA, 21 nt, Human papillomavirus type 45
gaaaguuugcaggaggcagca

SEQ ID NO: 4010774 - RNA, 14 nt, Human papillomavirus type 45
gacagcacaggcau

SEQ ID NO: 4010775 - RNA, 19 nt, Human papillomavirus type 45
gaccccgggaaacacugca

SEQ ID NO: 4010776 - RNA, 16 nt, Human papillomavirus type 45
gagacagcacaggcau

SEQ ID NO: 4010777 - RNA, 20 nt, Human papillomavirus type 45
gauggcaacaaggacaacug

SEQ ID NO: 4010778 - RNA, 17 nt, Human papillomavirus type 45
gcaagagacagcacagg

SEQ ID NO: 4010779 - RNA, 13 nt, Human papillomavirus type 45
gcaaguauaacaa

SEQ ID NO: 4010780 - RNA, 20 nt, Human papillomavirus type 45
gcaauacuauuuacagcaag

SEQ ID NO: 4010781 - RNA, 15 nt, Human papillomavirus type 45
gcaggaggcagcaag

SEQ ID NO: 4010782 - RNA, 13 nt, Human papillomavirus type 45
gcaggcaguuccc

SEQ ID NO: 4010783 - RNA, 18 nt, Human papillomavirus type 45
gcauuugcuguauacauu

SEQ ID NO: 4010784 - RNA, 16 nt, Human papillomavirus type 45
gcgucacaaaauuuug

SEQ ID NO: 4010785 - RNA, 14 nt, Human papillomavirus type 45
gcuuuacacaccau

SEQ ID NO: 4010786 - RNA, 17 nt, Human papillomavirus type 45
gcuuuucugugugccuu

SEQ ID NO: 4010787 - RNA, 14 nt, Human papillomavirus type 45
ggaggcagcaagga

SEQ ID NO: 4010788 - RNA, 18 nt, Human papillomavirus type 45
ggccuugcacaaagcaag

SEQ ID NO: 4010789 - RNA, 21 nt, Human papillomavirus type 45
guagagaaaaaaacaggggau

SEQ ID NO: 4010790 - RNA, 16 nt, Human papillomavirus type 45
guauauuguauacagu

SEQ ID NO: 4010791 - RNA, 21 nt, Human papillomavirus type 45
uaacauaccugugaugugcau

SEQ ID NO: 4010792 - RNA, 14 nt, Human papillomavirus type 45
uaacuguaggcaau

SEQ ID NO: 4010793 - RNA, 16 nt, Human papillomavirus type 45
uacagcagcuguuuuu

SEQ ID NO: 4010794 - RNA, 20 nt, Human papillomavirus type 45
uacaguagagagcucggcag

SEQ ID NO: 4010795 - RNA, 18 nt, Human papillomavirus type 45
uaugggacaaaacagcag

SEQ ID NO: 4010796 - RNA, 13 nt, Human papillomavirus type 45
uauuacuguauuu

SEQ ID NO: 4010797 - RNA, 16 nt, Human papillomavirus type 45
uauuuuauauguuuaa

SEQ ID NO: 4010798 - RNA, 21 nt, Human papillomavirus type 45
ucuaugugugugcuuuugcuu

SEQ ID NO: 4010799 - RNA, 15 nt, Human papillomavirus type 45
ugcaggaggcagcaa

SEQ ID NO: 4010800 - RNA, 17 nt, Human papillomavirus type 45
ugcuguauacauuuguu

SEQ ID NO: 4010801 - RNA, 21 nt, Human papillomavirus type 45
ugcuuuacacaccauacaaua

SEQ ID NO: 4010802 - RNA, 16 nt, Human papillomavirus type 45
uggcggauccagaagg

SEQ ID NO: 4010803 - RNA, 20 nt, Human papillomavirus type 45
uguauacauuuguugcuauu

SEQ ID NO: 4010804 - RNA, 13 nt, Human papillomavirus type 45
uguauuuuuguau

SEQ ID NO: 4010805 - RNA, 18 nt, Human papillomavirus type 45
ugucuaugugugugcuuu

SEQ ID NO: 4010806 - RNA, 15 nt, Human papillomavirus type 45
uguuccaugcgcagg

SEQ ID NO: 4010807 - RNA, 14 nt, Human papillomavirus type 45
uuaacagcauuugc

SEQ ID NO: 4010808 - RNA, 19 nt, Human papillomavirus type 45
uuauccauuugugaacagg

SEQ ID NO: 4010809 - RNA, 18 nt, Human papillomavirus type 45
uugcacccuugugaguaa

SEQ ID NO: 4010810 - RNA, 15 nt, Human papillomavirus type 45
uuguguguaugugua

SEQ ID NO: 4010811 - RNA, 15 nt, Human papillomavirus type 45
aaagcaaagcacaua

SEQ ID NO: 4010812 - RNA, 23 nt, Human papillomavirus type 45
aaagggccuugcacaaagcaagu

SEQ ID NO: 4010813 - RNA, 16 nt, Human papillomavirus type 45
aacugcaacagauaca

SEQ ID NO: 4010814 - RNA, 14 nt, Human papillomavirus type 45
acaauaauuacuau

SEQ ID NO: 4010815 - RNA, 19 nt, Human papillomavirus type 45
acagcagcuguuuuugagc

SEQ ID NO: 4010816 - RNA, 14 nt, Human papillomavirus type 45
acaguauguaacau

SEQ ID NO: 4010817 - RNA, 22 nt, Human papillomavirus type 45
accagguggugccuccuauuaa

SEQ ID NO: 4010818 - RNA, 17 nt, Human papillomavirus type 45
agagacagcacaggcau

SEQ ID NO: 4010819 - RNA, 16 nt, Human papillomavirus type 45
agagcucggcagagga

SEQ ID NO: 4010820 - RNA, 21 nt, Human papillomavirus type 45
agcuauugaacugcaaauggc

SEQ ID NO: 4010821 - RNA, 19 nt, Human papillomavirus type 45
aguuugcaggaggcagcaa

SEQ ID NO: 4010822 - RNA, 13 nt, Human papillomavirus type 5
aaagcauacagga

SEQ ID NO: 4010823 - RNA, 22 nt, Human papillomavirus type 5
aaauuaccagauccuaacagau

SEQ ID NO: 4010824 - RNA, 21 nt, Human papillomavirus type 5
aacaaaggcuaaagaagccau

SEQ ID NO: 4010825 - RNA, 12 nt, Human papillomavirus type 5
aacaggcaggca

SEQ ID NO: 4010826 - RNA, 10 nt, Human papillomavirus type 5
aacugugagg

SEQ ID NO: 4010827 - RNA, 14 nt, Human papillomavirus type 5
aagcugacuguagu

SEQ ID NO: 4010828 - RNA, 19 nt, Human papillomavirus type 5
aaggcucuuugcagagcag

SEQ ID NO: 4010829 - RNA, 16 nt, Human papillomavirus type 5
aauagguaggggccag

SEQ ID NO: 4010830 - RNA, 15 nt, Human papillomavirus type 5
acaggagugugagca

SEQ ID NO: 4010831 - RNA, 15 nt, Human papillomavirus type 5
acagucuuuaacauu

SEQ ID NO: 4010832 - RNA, 12 nt, Human papillomavirus type 5
acauuuacuaau

SEQ ID NO: 4010833 - RNA, 13 nt, Human papillomavirus type 5
acucgagcugacu

SEQ ID NO: 4010834 - RNA, 14 nt, Human papillomavirus type 5
acugcaaacaugac

SEQ ID NO: 4010835 - RNA, 17 nt, Human papillomavirus type 5
acuugagucaauuucau

SEQ ID NO: 4010836 - RNA, 18 nt, Human papillomavirus type 5
agaggcuuagaaauaggu

SEQ ID NO: 4010837 - RNA, 17 nt, Human papillomavirus type 5
agcagaagucuaagcga

SEQ ID NO: 4010838 - RNA, 16 nt, Human papillomavirus type 5
agcgcuccagaagguc

SEQ ID NO: 4010839 - RNA, 23 nt, Human papillomavirus type 5
aggagccugacaacgaaaggauc

SEQ ID NO: 4010840 - RNA, 22 nt, Human papillomavirus type 5
aggggcggcuaacacacugaaa

SEQ ID NO: 4010841 - RNA, 16 nt, Human papillomavirus type 5
aucagaucagugccaa

SEQ ID NO: 4010842 - RNA, 12 nt, Human papillomavirus type 5
auggacucuagu

SEQ ID NO: 4010843 - RNA, 16 nt, Human papillomavirus type 5
auggcaaccuggacag

SEQ ID NO: 4010844 - RNA, 19 nt, Human papillomavirus type 5
auggugcugcagcuugagu

SEQ ID NO: 4010845 - RNA, 18 nt, Human papillomavirus type 5
caguaucagaaacaaagg

SEQ ID NO: 4010846 - RNA, 23 nt, Human papillomavirus type 5
cauuuagaagcgcuccagaaggu

SEQ ID NO: 4010847 - RNA, 17 nt, Human papillomavirus type 5
ccugcaaacaggcaggc

SEQ ID NO: 4010848 - RNA, 20 nt, Human papillomavirus type 5
ccuggucauggguggcagga

SEQ ID NO: 4010849 - RNA, 11 nt, Human papillomavirus type 5
cgagcaggaaa

SEQ ID NO: 4010850 - RNA, 14 nt, Human papillomavirus type 5
cgagcugacuuuaa

SEQ ID NO: 4010851 - RNA, 15 nt, Human papillomavirus type 5
cgugccacuugggga

SEQ ID NO: 4010852 - RNA, 17 nt, Human papillomavirus type 5
cuacugaccggagaucu

SEQ ID NO: 4010853 - RNA, 16 nt, Human papillomavirus type 5
cuauacucaaaggaga

SEQ ID NO: 4010854 - RNA, 21 nt, Human papillomavirus type 5
cuccgugcgguugcaggaacu

SEQ ID NO: 4010855 - RNA, 21 nt, Human papillomavirus type 5
cuuacgaaaagaaccuguauu

SEQ ID NO: 4010856 - RNA, 15 nt, Human papillomavirus type 5
cuuauuucaauguau

SEQ ID NO: 4010857 - RNA, 16 nt, Human papillomavirus type 5
cuuuaacauuuacuaa

SEQ ID NO: 4010858 - RNA, 15 nt, Human papillomavirus type 5
gaccuccccaaagaa

SEQ ID NO: 4010859 - RNA, 15 nt, Human papillomavirus type 5
gagucacuacagaca

SEQ ID NO: 4010860 - RNA, 22 nt, Human papillomavirus type 5
gauacugaacuggagcagggca

SEQ ID NO: 4010861 - RNA, 12 nt, Human papillomavirus type 5
gcgguugcagga

SEQ ID NO: 4010862 - RNA, 14 nt, Human papillomavirus type 5
gcgucuaggcaggc

SEQ ID NO: 4010863 - RNA, 13 nt, Human papillomavirus type 5
gcugacuguagug

SEQ ID NO: 4010864 - RNA, 18 nt, Human papillomavirus type 5
ggacucgagcugacuuua

SEQ ID NO: 4010865 - RNA, 18 nt, Human papillomavirus type 5
ggagcucagugaggugca

SEQ ID NO: 4010866 - RNA, 21 nt, Human papillomavirus type 5
ggagcucagugaggugcagcc

SEQ ID NO: 4010867 - RNA, 17 nt, Human papillomavirus type 5
ggagugugagcagagcg

SEQ ID NO: 4010868 - RNA, 17 nt, Human papillomavirus type 5
ggaugauaaguggcaua

SEQ ID NO: 4010869 - RNA, 19 nt, Human papillomavirus type 5
ggauuagggaccuccccaa

SEQ ID NO: 4010870 - RNA, 13 nt, Human papillomavirus type 5
gguggccuuggua

SEQ ID NO: 4010871 - RNA, 21 nt, Human papillomavirus type 5
gguguccgugucggaggaacc

SEQ ID NO: 4010872 - RNA, 22 nt, Human papillomavirus type 5
gugauugguguuuauuggaagc

SEQ ID NO: 4010873 - RNA, 17 nt, Human papillomavirus type 5
uaaacaaugaagcugaa

SEQ ID NO: 4010874 - RNA, 19 nt, Human papillomavirus type 5
uaaugcugcuuuugcuacu

SEQ ID NO: 4010875 - RNA, 20 nt, Human papillomavirus type 5
uacauuuuguauuugcuaug

SEQ ID NO: 4010876 - RNA, 16 nt, Human papillomavirus type 5
uacuggaagaagcucg

SEQ ID NO: 4010877 - RNA, 20 nt, Human papillomavirus type 5
uaggucauccuuauuucaau

SEQ ID NO: 4010878 - RNA, 18 nt, Human papillomavirus type 5
uauauuuuuuuuuacauu

SEQ ID NO: 4010879 - RNA, 23 nt, Human papillomavirus type 5
ucaacaggagugugagcagagcg

SEQ ID NO: 4010880 - RNA, 16 nt, Human papillomavirus type 5
ucauuuaguacuaccu

SEQ ID NO: 4010881 - RNA, 13 nt, Human papillomavirus type 5
uccugugcccuga

SEQ ID NO: 4010882 - RNA, 18 nt, Human papillomavirus type 5
ucggauuuguuagaugau

SEQ ID NO: 4010883 - RNA, 15 nt, Human papillomavirus type 5
ucuuuaacauuuacu

SEQ ID NO: 4010884 - RNA, 23 nt, Human papillomavirus type 5
ugaugaagcggugcgauacccca

SEQ ID NO: 4010885 - RNA, 23 nt, Human papillomavirus type 5
ugauugguguuuauuggaagcug

SEQ ID NO: 4010886 - RNA, 16 nt, Human papillomavirus type 5
ugcccauugauacagu

SEQ ID NO: 4010887 - RNA, 22 nt, Human papillomavirus type 5
ugcuuuugcuacuaacauacua

SEQ ID NO: 4010888 - RNA, 14 nt, Human papillomavirus type 5
ugggacaauuauuu

SEQ ID NO: 4010889 - RNA, 19 nt, Human papillomavirus type 5
uguauacaauguggaccua

SEQ ID NO: 4010890 - RNA, 18 nt, Human papillomavirus type 5
uuaguccgcgacuugagu

SEQ ID NO: 4010891 - RNA, 15 nt, Human papillomavirus type 5
uucaucaacaggagu

SEQ ID NO: 4010892 - RNA, 22 nt, Human papillomavirus type 5
uugccaauauagaaucagauca

SEQ ID NO: 4010893 - RNA, 15 nt, Human papillomavirus type 5
aaccugcaaacaggc

SEQ ID NO: 4010894 - RNA, 13 nt, Human papillomavirus type 5
aaugaagcugaag

SEQ ID NO: 4010895 - RNA, 18 nt, Human papillomavirus type 5
acauuuuguauuugcuau

SEQ ID NO: 4010896 - RNA, 21 nt, Human papillomavirus type 5
acucagucaaguuguugccaa

SEQ ID NO: 4010897 - RNA, 14 nt, Human papillomavirus type 5
acucgagcugacuu

SEQ ID NO: 4010898 - RNA, 22 nt, Human papillomavirus type 5
acuggucacccuuauuucaaua

SEQ ID NO: 4010899 - RNA, 13 nt, Human papillomavirus type 5
agaaccuguauua

SEQ ID NO: 4010900 - RNA, 19 nt, Human papillomavirus type 5
agcuuuccaacagcuacug

SEQ ID NO: 4010901 - RNA, 13 nt, Human papillomavirus type 5
aggacgacuugga

SEQ ID NO: 4010902 - RNA, 22 nt, Human papillomavirus type 5
aggccuauggcaaccuggacag

SEQ ID NO: 4010903 - RNA, 21 nt, Human papillomavirus type 5
aggucauccuuauuucaaugu

SEQ ID NO: 4010904 - RNA, 16 nt, Human papillomavirus type 5
aguacuaccuggucau

SEQ ID NO: 4010905 - RNA, 14 nt, Human papillomavirus type 5
agucuuccaaggau

SEQ ID NO: 4010906 - RNA, 18 nt, Human papillomavirus type 5
auauuauucuggagcuca

SEQ ID NO: 4010907 - RNA, 19 nt, Human papillomavirus type 5
auauuuaccaaaccugcaa

SEQ ID NO: 4010908 - RNA, 22 nt, Human papillomavirus type 5
aucugauuuugcucaugagcca

SEQ ID NO: 4010909 - RNA, 13 nt, Human papillomavirus type 5
augaagcugaaga

SEQ ID NO: 4010910 - RNA, 14 nt, Human papillomavirus type 5
auucccuggaacua

SEQ ID NO: 4010911 - RNA, 22 nt, Human papillomavirus type 5
auuuuaaaauauggcagugcug

SEQ ID NO: 4010912 - RNA, 16 nt, Human papillomavirus type 5
cagagcaggacagcgg

SEQ ID NO: 4010913 - RNA, 19 nt, Human papillomavirus type 5
caggagugugagcagagcg

SEQ ID NO: 4010914 - RNA, 22 nt, Human papillomavirus type 5
caggagugugagcagagcgagg

SEQ ID NO: 4010915 - RNA, 19 nt, Human papillomavirus type 5
caggccgaggaacuggggg

SEQ ID NO: 4010916 - RNA, 19 nt, Human papillomavirus type 5
caguaucagaaacaaaggc

SEQ ID NO: 4010917 - RNA, 13 nt, Human papillomavirus type 5
cauccuuauuuca

SEQ ID NO: 4010918 - RNA, 16 nt, Human papillomavirus type 5
ccagaguccaaagcac

SEQ ID NO: 4010919 - RNA, 20 nt, Human papillomavirus type 5
ccuuccuugguuccugaaac

SEQ ID NO: 4010920 - RNA, 17 nt, Human papillomavirus type 5
cgauaccccaaaggagu

SEQ ID NO: 4010921 - RNA, 16 nt, Human papillomavirus type 5
cuggaacuauuucauc

SEQ ID NO: 4010922 - RNA, 14 nt, Human papillomavirus type 5
cuguagugauguag

SEQ ID NO: 4010923 - RNA, 18 nt, Human papillomavirus type 5
gaaacaaaggcuaaagaa

SEQ ID NO: 4010924 - RNA, 12 nt, Human papillomavirus type 5
gaagcugaagau

SEQ ID NO: 4010925 - RNA, 15 nt, Human papillomavirus type 5
gaagguccugguguc

SEQ ID NO: 4010926 - RNA, 19 nt, Human papillomavirus type 5
gacagucuuuaacauuuac

SEQ ID NO: 4010927 - RNA, 20 nt, Human papillomavirus type 5
gagaaagguguuacaaggcu

SEQ ID NO: 4010928 - RNA, 13 nt, Human papillomavirus type 5
gagugugagcaga

SEQ ID NO: 4010929 - RNA, 12 nt, Human papillomavirus type 5
gaucugcagcuc

SEQ ID NO: 4010930 - RNA, 15 nt, Human papillomavirus type 5
gcaagaaguggggug

SEQ ID NO: 4010931 - RNA, 23 nt, Human papillomavirus type 5
gcagcuccugugcccugacuguc

SEQ ID NO: 4010932 - RNA, 21 nt, Human papillomavirus type 5
gcgauaccccaaaggaguuga

SEQ ID NO: 4010933 - RNA, 22 nt, Human papillomavirus type 5
gcuacaggguacgugccacuug

SEQ ID NO: 4010934 - RNA, 18 nt, Human papillomavirus type 5
gcucagugaggugcagcc

SEQ ID NO: 4010935 - RNA, 19 nt, Human papillomavirus type 5
gcuccugugcccugacugu

SEQ ID NO: 4010936 - RNA, 20 nt, Human papillomavirus type 5
gcucuuugcagagcaggaca

SEQ ID NO: 4010937 - RNA, 15 nt, Human papillomavirus type 5
gcuuuugcuacuaac

SEQ ID NO: 4010938 - RNA, 13 nt, Human papillomavirus type 5
ggaagcugacugu

SEQ ID NO: 4010939 - RNA, 19 nt, Human papillomavirus type 5
ggcaggcccagaaugcuca

SEQ ID NO: 4010940 - RNA, 14 nt, Human papillomavirus type 5
ggccuuccuugguu

SEQ ID NO: 4010941 - RNA, 17 nt, Human papillomavirus type 5
guacaggccgaggaacu

SEQ ID NO: 4010942 - RNA, 16 nt, Human papillomavirus type 5
gucauggguggcagga

SEQ ID NO: 4010943 - RNA, 13 nt, Human papillomavirus type 5
gucuaggcaggcc

SEQ ID NO: 4010944 - RNA, 16 nt, Human papillomavirus type 5
gugagcagagcgagga

SEQ ID NO: 4010945 - RNA, 15 nt, Human papillomavirus type 5
gugccacuuggggaa

SEQ ID NO: 4010946 - RNA, 16 nt, Human papillomavirus type 5
gugcgguugcaggaac

SEQ ID NO: 4010947 - RNA, 23 nt, Human papillomavirus type 5
gugcugguguauuuuuugguggc

SEQ ID NO: 4010948 - RNA, 18 nt, Human papillomavirus type 5
guuagaugauacugaacu

SEQ ID NO: 4010949 - RNA, 23 nt, Human papillomavirus type 5
uaaaauauggcagugcuggugua

SEQ ID NO: 4010950 - RNA, 14 nt, Human papillomavirus type 5
uaacagauuugcau

SEQ ID NO: 4010951 - RNA, 19 nt, Human papillomavirus type 5
uaccaaacgagcaggaaac

SEQ ID NO: 4010952 - RNA, 21 nt, Human papillomavirus type 5
uaccagauccuaacagauuug

SEQ ID NO: 4010953 - RNA, 21 nt, Human papillomavirus type 5
uacuaaugcugcuuuugcuac

SEQ ID NO: 4010954 - RNA, 14 nt, Human papillomavirus type 5
auuggaagcugacu

SEQ ID NO: 4010955 - RNA, 20 nt, Human papillomavirus type 5
auuuaguacuaccuggucau

SEQ ID NO: 4010956 - RNA, 16 nt, Human papillomavirus type 5
auuucgccuaaaauua

SEQ ID NO: 4010957 - RNA, 22 nt, Human papillomavirus type 5
caaaagcugucgcacagcuuag

SEQ ID NO: 4010958 - RNA, 20 nt, Human papillomavirus type 5
caaaccugcaaacaggcagg

SEQ ID NO: 4010959 - RNA, 22 nt, Human papillomavirus type 5
caaaggagagauuuugaugaag

SEQ ID NO: 4010960 - RNA, 16 nt, Human papillomavirus type 5
caacgaaaggaucucu

SEQ ID NO: 4010961 - RNA, 19 nt, Human papillomavirus type 5
caaugaagcugaagauguu

SEQ ID NO: 4010962 - RNA, 23 nt, Human papillomavirus type 5
cacagcuuaguccgcgacuugag

SEQ ID NO: 4010963 - RNA, 15 nt, Human papillomavirus type 5
caccccagcagaagu

SEQ ID NO: 4010964 - RNA, 14 nt, Human papillomavirus type 5
cacuucaaaaaagg

SEQ ID NO: 4010965 - RNA, 14 nt, Human papillomavirus type 5
cagcuccugugccc

SEQ ID NO: 4010966 - RNA, 18 nt, Human papillomavirus type 5
caggagugugagcagagc

SEQ ID NO: 4010967 - RNA, 19 nt, Human papillomavirus type 5
ccuguuuugugaagaggaa

SEQ ID NO: 4010968 - RNA, 22 nt, Human papillomavirus type 5
cgaaggcucuuugcagagcagg

SEQ ID NO: 4010969 - RNA, 17 nt, Human papillomavirus type 5
cuaaugcugcuuuugcu

SEQ ID NO: 4010970 - RNA, 16 nt, Human papillomavirus type 5
cuacagacaucugauu

SEQ ID NO: 4010971 - RNA, 19 nt, Human papillomavirus type 5
cucuuugcagagcaggaca

SEQ ID NO: 4010972 - RNA, 18 nt, Human papillomavirus type 5
cugagcgucuaggcaggc

SEQ ID NO: 4010973 - RNA, 23 nt, Human papillomavirus type 5
cugcagcuugagucacuacagac

SEQ ID NO: 4010974 - RNA, 14 nt, Human papillomavirus type 5
cuggagcucaguga

SEQ ID NO: 4010975 - RNA, 15 nt, Human papillomavirus type 5
gacaccgguggccag

SEQ ID NO: 4010976 - RNA, 14 nt, Human papillomavirus type 5
gauccuaacagauu

SEQ ID NO: 4010977 - RNA, 23 nt, Human papillomavirus type 5
gauugguguuuauuggaagcuga

SEQ ID NO: 4010978 - RNA, 14 nt, Human papillomavirus type 5
gcaaacaggcaggc

SEQ ID NO: 4010979 - RNA, 21 nt, Human papillomavirus type 5
gcacugagcgucuaggcaggc

SEQ ID NO: 4010980 - RNA, 22 nt, Human papillomavirus type 5
gcagcuccugugcccugacugu

SEQ ID NO: 4010981 - RNA, 14 nt, Human papillomavirus type 5
gccagaguccaaag

SEQ ID NO: 4010982 - RNA, 17 nt, Human papillomavirus type 5
gccauagcaauggugcu

SEQ ID NO: 4010983 - RNA, 15 nt, Human papillomavirus type 5
ggagauggcacugag

SEQ ID NO: 4010984 - RNA, 15 nt, Human papillomavirus type 5
ggcucuuugcagagc

SEQ ID NO: 4010985 - RNA, 18 nt, Human papillomavirus type 5
gguaguacaucuaaagaa

SEQ ID NO: 4010986 - RNA, 15 nt, Human papillomavirus type 5
guauaagucuuccaa

SEQ ID NO: 4010987 - RNA, 16 nt, Human papillomavirus type 5
gucgcacagcuuaguc

SEQ ID NO: 4010988 - RNA, 19 nt, Human papillomavirus type 5
gucuuuaacauuuacuaau

SEQ ID NO: 4010989 - RNA, 14 nt, Human papillomavirus type 5
guggcaggagaugg

SEQ ID NO: 4010990 - RNA, 23 nt, Human papillomavirus type 5
guuuauuggaagcugacuguagu

SEQ ID NO: 4010991 - RNA, 22 nt, Human papillomavirus type 5
uaacuguaggucauccuuauuu

SEQ ID NO: 4010992 - RNA, 17 nt, Human papillomavirus type 5
uaaugcugcuuuugcua

SEQ ID NO: 4010993 - RNA, 22 nt, Human papillomavirus type 5
uacaauguggaccuauguguau

SEQ ID NO: 4010994 - RNA, 18 nt, Human papillomavirus type 5
uacauucaaagaacaaau

SEQ ID NO: 4010995 - RNA, 19 nt, Human papillomavirus type 5
uacauuuuguauuugcuau

SEQ ID NO: 4010996 - RNA, 15 nt, Human papillomavirus type 5
uaguacaucuaaaga

SEQ ID NO: 4010997 - RNA, 22 nt, Human papillomavirus type 5
uccagauaaugccaauuuguau

SEQ ID NO: 4010998 - RNA, 13 nt, Human papillomavirus type 5
ucuuugcagagca

SEQ ID NO: 4010999 - RNA, 17 nt, Human papillomavirus type 5
ugacaaugauccagaua

SEQ ID NO: 4011000 - RNA, 13 nt, Human papillomavirus type 5
ugagguuccuaag

SEQ ID NO: 4011001 - RNA, 15 nt, Human papillomavirus type 5
ugcaagauauuauuc

SEQ ID NO: 4011002 - RNA, 14 nt, Human papillomavirus type 5
ugcagagcaggaca

SEQ ID NO: 4011003 - RNA, 23 nt, Human papillomavirus type 5
ugcagcccgaagugcuaccaguu

SEQ ID NO: 4011004 - RNA, 21 nt, Human papillomavirus type 5
uguaggucauccuuauuucaa

SEQ ID NO: 4011005 - RNA, 23 nt, Human papillomavirus type 5
uugauaccagcauagaaacauuu

SEQ ID NO: 4011006 - RNA, 17 nt, Human papillomavirus type 5
aaaggaguugauaaggc

SEQ ID NO: 4011007 - RNA, 23 nt, Human papillomavirus type 5
aaaggggcggcuaacacacugaa

SEQ ID NO: 4011008 - RNA, 19 nt, Human papillomavirus type 5
aaauuaccagauccuaaca

SEQ ID NO: 4011009 - RNA, 15 nt, Human papillomavirus type 5
aacagauuugcauua

SEQ ID NO: 4011010 - RNA, 22 nt, Human papillomavirus type 5
aacuggagcagggcaauucccu

SEQ ID NO: 4011011 - RNA, 18 nt, Human papillomavirus type 5
aagguaguacaucuaaag

SEQ ID NO: 4011012 - RNA, 23 nt, Human papillomavirus type 5
aaguuauuuaugacaaugaucca

SEQ ID NO: 4011013 - RNA, 15 nt, Human papillomavirus type 5
aauauagaaucagau

SEQ ID NO: 4011014 - RNA, 13 nt, Human papillomavirus type 5
acaaugaagcuga

SEQ ID NO: 4011015 - RNA, 16 nt, Human papillomavirus type 5
acccgguacacucagu

SEQ ID NO: 4011016 - RNA, 14 nt, Human papillomavirus type 5
acugaacuggagca

SEQ ID NO: 4011017 - RNA, 16 nt, Human papillomavirus type 5
acugagcgucuaggca

SEQ ID NO: 4011018 - RNA, 14 nt, Human papillomavirus type 5
acuggagcagggca

SEQ ID NO: 4011019 - RNA, 23 nt, Human papillomavirus type 5
acuguagugauguagaaaaugau

SEQ ID NO: 4011020 - RNA, 22 nt, Human papillomavirus type 5
acuuuaaacaaugaagcugaag

SEQ ID NO: 4011021 - RNA, 13 nt, Human papillomavirus type 5
agaacaaauaucu

SEQ ID NO: 4011022 - RNA, 15 nt, Human papillomavirus type 5
agaagcgcuccagaa

SEQ ID NO: 4011023 - RNA, 22 nt, Human papillomavirus type 5
agaaugcucauuagcuuuucuu

SEQ ID NO: 4011024 - RNA, 19 nt, Human papillomavirus type 5
agagcuaaaauuaaauaca

SEQ ID NO: 4011025 - RNA, 23 nt, Human papillomavirus type 5
agagcuaaaauuaaauacauggg

SEQ ID NO: 4011026 - RNA, 20 nt, Human papillomavirus type 5
agaggaauuaccaaacgagc

SEQ ID NO: 4011027 - RNA, 20 nt, Human papillomavirus type 5
agcaggaaacggaggaggag

SEQ ID NO: 4011028 - RNA, 15 nt, Human papillomavirus type 5
agcgucuaggcaggc

SEQ ID NO: 4011029 - RNA, 22 nt, Human papillomavirus type 5
agcuccgugcgguugcaggaac

SEQ ID NO: 4011030 - RNA, 14 nt, Human papillomavirus type 5
agguguuacaaggc

SEQ ID NO: 4011031 - RNA, 20 nt, Human papillomavirus type 5
aguugauaaggccuauggca

SEQ ID NO: 4011032 - RNA, 20 nt, Human papillomavirus type 5
auacauucaaagaacaaaua

SEQ ID NO: 4011033 - RNA, 22 nt, Human papillomavirus type 5
auacucaaaggagagauuuuga

SEQ ID NO: 4011034 - RNA, 16 nt, Human papillomavirus type 5
auccagauaaugccaa

SEQ ID NO: 4011035 - RNA, 16 nt, Human papillomavirus type 5
auuucaauaaaguaaa

SEQ ID NO: 4011036 - RNA, 22 nt, Human papillomavirus type 5
auuugagagagauacagacucu

SEQ ID NO: 4011037 - RNA, 13 nt, Human papillomavirus type 5
auuugcuauggcg

SEQ ID NO: 4011038 - RNA, 16 nt, Human papillomavirus type 5
caaauaucuacuauca

SEQ ID NO: 4011039 - RNA, 22 nt, Human papillomavirus type 5
caagauauuauucuggagcuca

SEQ ID NO: 4011040 - RNA, 15 nt, Human papillomavirus type 5
cacccuuauuucaau

SEQ ID NO: 4011041 - RNA, 17 nt, Human papillomavirus type 5
cagaacaaacauugcag

SEQ ID NO: 4011042 - RNA, 21 nt, Human papillomavirus type 5
caguugaccuguuuugugaag

SEQ ID NO: 4011043 - RNA, 17 nt, Human papillomavirus type 5
cauacuaacauacccua

SEQ ID NO: 4011044 - RNA, 15 nt, Human papillomavirus type 5
cauccuuauuucaau

SEQ ID NO: 4011045 - RNA, 17 nt, Human papillomavirus type 5
cauggguggcaggagau

SEQ ID NO: 4011046 - RNA, 14 nt, Human papillomavirus type 5
ccaaaccugcaaac

SEQ ID NO: 4011047 - RNA, 15 nt, Human papillomavirus type 5
ccaacagcuacugac

SEQ ID NO: 4011048 - RNA, 23 nt, Human papillomavirus type 5
ccgcgacuugagucaauuucauu

SEQ ID NO: 4011049 - RNA, 13 nt, Human papillomavirus type 5
ccugacaaagaac

SEQ ID NO: 4011050 - RNA, 21 nt, Human papillomavirus type 5
cgagcaggaaacggaggagga

SEQ ID NO: 4011051 - RNA, 11 nt, Human papillomavirus type 5
cggaggaggag

SEQ ID NO: 4011052 - RNA, 11 nt, Human papillomavirus type 5
cuaaugcugcu

SEQ ID NO: 4011053 - RNA, 17 nt, Human papillomavirus type 5
cugagcgucuaggcagg

SEQ ID NO: 4011054 - RNA, 16 nt, Human papillomavirus type 5
cugcaaacaggcaggc

SEQ ID NO: 4011055 - RNA, 17 nt, Human papillomavirus type 5
cuuggaagauuacugga

SEQ ID NO: 4011056 - RNA, 23 nt, Human papillomavirus type 5
gaaacggaggaggagccugacaa

SEQ ID NO: 4011057 - RNA, 13 nt, Human papillomavirus type 5
gaacuauuucauc

SEQ ID NO: 4011058 - RNA, 12 nt, Human papillomavirus type 5
gaagcugacugu

SEQ ID NO: 4011059 - RNA, 17 nt, Human papillomavirus type 5
gacaauuauuugagaga

SEQ ID NO: 4011060 - RNA, 20 nt, Human papillomavirus type 5
gaccuguuuugugaagagga

SEQ ID NO: 4011061 - RNA, 21 nt, Human papillomavirus type 5
gacucuguaacucauauuuac

SEQ ID NO: 4011062 - RNA, 14 nt, Human papillomavirus type 5
gagucaauuucauu

SEQ ID NO: 4011063 - RNA, 13 nt, Human papillomavirus type 5
gcaaccuggacag

SEQ ID NO: 4011064 - RNA, 15 nt, Human papillomavirus type 5
gcagagcgaggagca

SEQ ID NO: 4011065 - RNA, 22 nt, Human papillomavirus type 5
gcccugacugucgcggaaacug

SEQ ID NO: 4011066 - RNA, 17 nt, Human papillomavirus type 5
gcuccugugcccugacu

SEQ ID NO: 4011067 - RNA, 18 nt, Human papillomavirus type 5
ggaagcugacuguaguga

SEQ ID NO: 4011068 - RNA, 12 nt, Human papillomavirus type 5
ggagcucaguga

SEQ ID NO: 4011069 - RNA, 15 nt, Human papillomavirus type 5
ggcccagaaugcuca

SEQ ID NO: 4011070 - RNA, 14 nt, Human papillomavirus type 5
gugccacuugggga

SEQ ID NO: 4011071 - RNA, 18 nt, Human papillomavirus type 5
guguccgugucggaggaa

SEQ ID NO: 4011072 - RNA, 19 nt, Human papillomavirus type 5
guugauauuuugcccauug

SEQ ID NO: 4011073 - RNA, 20 nt, Human papillomavirus type 5
uaacauuuacuaaugcugcu

SEQ ID NO: 4011074 - RNA, 17 nt, Human papillomavirus type 5
uacauuuuguauuugcu

SEQ ID NO: 4011075 - RNA, 21 nt, Human papillomavirus type 5
uaggcaggcccagaaugcuca

SEQ ID NO: 4011076 - RNA, 16 nt, Human papillomavirus type 5
uagggaccuccccaaa

SEQ ID NO: 4011077 - RNA, 20 nt, Human papillomavirus type 5
uaucaaccugugccuguaaa

SEQ ID NO: 4011078 - RNA, 14 nt, Human papillomavirus type 5
uauuggaagcugac

SEQ ID NO: 4011079 - RNA, 22 nt, Human papillomavirus type 5
ucaugcauuuagugacagauug

SEQ ID NO: 4011080 - RNA, 16 nt, Human papillomavirus type 5
ugagucacuacagaca

SEQ ID NO: 4011081 - RNA, 18 nt, Human papillomavirus type 5
ugcauuuagugacagauu

SEQ ID NO: 4011082 - RNA, 16 nt, Human papillomavirus type 5
uggacucagaacagac

SEQ ID NO: 4011083 - RNA, 17 nt, Human papillomavirus type 5
uguuagaugauacugaa

SEQ ID NO: 4011084 - RNA, 17 nt, Human papillomavirus type 5
uguuuaggucauuuagu

SEQ ID NO: 4011085 - RNA, 16 nt, Human papillomavirus type 5
uugguauuaguacagg

SEQ ID NO: 4011086 - RNA, 22 nt, Human papillomavirus type 5
uuugcucaugagccauggacuc

SEQ ID NO: 4011087 - RNA, 14 nt, Human papillomavirus type 5
aaacgagcaggaaa

SEQ ID NO: 4011088 - RNA, 12 nt, Human papillomavirus type 5
aaggcuaaagaa

SEQ ID NO: 4011089 - RNA, 16 nt, Human papillomavirus type 5
aaguggcauaaggcaa

SEQ ID NO: 4011090 - RNA, 16 nt, Human papillomavirus type 5
aaugcugcuuuugcua

SEQ ID NO: 4011091 - RNA, 17 nt, Human papillomavirus type 5
aaugcugcuuuugcuac

SEQ ID NO: 4011092 - RNA, 17 nt, Human papillomavirus type 5
acaacaguugcugacaa

SEQ ID NO: 4011093 - RNA, 17 nt, Human papillomavirus type 5
acuaacauacccuagca

SEQ ID NO: 4011094 - RNA, 15 nt, Human papillomavirus type 5
acuaucaugcauuua

SEQ ID NO: 4011095 - RNA, 13 nt, Human papillomavirus type 5
agaaacaaaggcu

SEQ ID NO: 4011096 - RNA, 19 nt, Human papillomavirus type 5
agaaacaaaggcuaaagaa

SEQ ID NO: 4011097 - RNA, 17 nt, Human papillomavirus type 5
agagauacagacucuga

SEQ ID NO: 4011098 - RNA, 15 nt, Human papillomavirus type 5
agauccuaacagauu

SEQ ID NO: 4011099 - RNA, 14 nt, Human papillomavirus type 5
agaucugcagcucc

SEQ ID NO: 4011100 - RNA, 16 nt, Human papillomavirus type 5
agaucugcagcuccug

SEQ ID NO: 4011101 - RNA, 13 nt, Human papillomavirus type 5
agcaauggugcug

SEQ ID NO: 4011102 - RNA, 20 nt, Human papillomavirus type 5
agcucagugaggugcagccc

SEQ ID NO: 4011103 - RNA, 16 nt, Human papillomavirus type 5
aggaacugugagguca

SEQ ID NO: 4011104 - RNA, 13 nt, Human papillomavirus type 5
aguacuaccuggu

SEQ ID NO: 4011105 - RNA, 22 nt, Human papillomavirus type 5
aguacuggucacccuuauuuca

SEQ ID NO: 4011106 - RNA, 22 nt, Human papillomavirus type 5
aucaacaggagugugagcagag

SEQ ID NO: 4011107 - RNA, 20 nt, Human papillomavirus type 5
aucagugccaaacacaccgu

SEQ ID NO: 4011108 - RNA, 21 nt, Human papillomavirus type 5
augauacugaacuggagcagg

SEQ ID NO: 4011109 - RNA, 15 nt, Human papillomavirus type 5
auguauacaauauua

SEQ ID NO: 4011110 - RNA, 13 nt, Human papillomavirus type 5
auucaaagaacaa

SEQ ID NO: 4011111 - RNA, 18 nt, Human papillomavirus type 5
caaagcauacaggacgac

SEQ ID NO: 4011112 - RNA, 16 nt, Human papillomavirus type 5
caaaggaguugauaag

SEQ ID NO: 4011113 - RNA, 13 nt, Human papillomavirus type 5
caaugaagcugaa

SEQ ID NO: 4011114 - RNA, 17 nt, Human papillomavirus type 5
caggagauggcacugag

SEQ ID NO: 4011115 - RNA, 23 nt, Human papillomavirus type 5
uacugaccggagaucugcagcuc

SEQ ID NO: 4011116 - RNA, 18 nt, Human papillomavirus type 5
uacuggucacccuuauuu

SEQ ID NO: 4011117 - RNA, 22 nt, Human papillomavirus type 5
uacuggucacccuuauuucaau

SEQ ID NO: 4011118 - RNA, 21 nt, Human papillomavirus type 5
uagaaucagaucagugccaaa

SEQ ID NO: 4011119 - RNA, 21 nt, Human papillomavirus type 5
uccgugcgguugcaggaacug

SEQ ID NO: 4011120 - RNA, 20 nt, Human papillomavirus type 5
ucuccuggugaagugggagg

SEQ ID NO: 4011121 - RNA, 22 nt, Human papillomavirus type 5
ugcaggcacaaauuaaacauug

SEQ ID NO: 4011122 - RNA, 18 nt, Human papillomavirus type 5
ugcuaccaguugaccugu

SEQ ID NO: 4011123 - RNA, 20 nt, Human papillomavirus type 5
ugcugguguauuuuuuggug

SEQ ID NO: 4011124 - RNA, 13 nt, Human papillomavirus type 5
uggaagaagcucg

SEQ ID NO: 4011125 - RNA, 11 nt, Human papillomavirus type 5
uggaagcugac

SEQ ID NO: 4011126 - RNA, 21 nt, Human papillomavirus type 5
uggcaaaccuuacgaaaagaa

SEQ ID NO: 4011127 - RNA, 19 nt, Human papillomavirus type 5
uuuaaacaaugaagcugaa

SEQ ID NO: 4011128 - RNA, 15 nt, Human papillomavirus type 5
uuuugugaagaggaa

SEQ ID NO: 4011129 - RNA, 18 nt, Human papillomavirus type 6
aaaacaguacugaccuaa

SEQ ID NO: 4011130 - RNA, 16 nt, Human papillomavirus type 6
aaacaaguuaugaaau

SEQ ID NO: 4011131 - RNA, 15 nt, Human papillomavirus type 6
aaacuuacaagacag

SEQ ID NO: 4011132 - RNA, 13 nt, Human papillomavirus type 6
aaagacugaguau

SEQ ID NO: 4011133 - RNA, 23 nt, Human papillomavirus type 6
aacaguuuuuaaauguuguaaaa

SEQ ID NO: 4011134 - RNA, 16 nt, Human papillomavirus type 6
aacauuaccaaauagu

SEQ ID NO: 4011135 - RNA, 12 nt, Human papillomavirus type 6
aagguaaagcga

SEQ ID NO: 4011136 - RNA, 22 nt, Human papillomavirus type 6
aaguagugccaccauuaaaggu

SEQ ID NO: 4011137 - RNA, 23 nt, Human papillomavirus type 6
aauauauauauuuuuguuuccaa

SEQ ID NO: 4011138 - RNA, 15 nt, Human papillomavirus type 6
aauaucagacgauga

SEQ ID NO: 4011139 - RNA, 22 nt, Human papillomavirus type 6
aauuugauggcugugcaaacaa

SEQ ID NO: 4011140 - RNA, 17 nt, Human papillomavirus type 6
acaacuguaaugaugau

SEQ ID NO: 4011141 - RNA, 22 nt, Human papillomavirus type 6
acaauuaacuacauuauuguau

SEQ ID NO: 4011142 - RNA, 19 nt, Human papillomavirus type 6
acacaacuguaaugaugau

SEQ ID NO: 4011143 - RNA, 17 nt, Human papillomavirus type 6
acauuacaagaaacaag

SEQ ID NO: 4011144 - RNA, 14 nt, Human papillomavirus type 6
acauugugaacaca

SEQ ID NO: 4011145 - RNA, 16 nt, Human papillomavirus type 6
acauuuauuugauuua

SEQ ID NO: 4011146 - RNA, 18 nt, Human papillomavirus type 6
acuauagagcuguacaag

SEQ ID NO: 4011147 - RNA, 17 nt, Human papillomavirus type 6
acuguagaaguuaaauu

SEQ ID NO: 4011148 - RNA, 16 nt, Human papillomavirus type 6
acuuacaagacagcca

SEQ ID NO: 4011149 - RNA, 19 nt, Human papillomavirus type 6
agaaacagacaucagagaa

SEQ ID NO: 4011150 - RNA, 19 nt, Human papillomavirus type 6
agacaucagagaagugcaa

SEQ ID NO: 4011151 - RNA, 14 nt, Human papillomavirus type 6
agacaugaaagugu

SEQ ID NO: 4011152 - RNA, 20 nt, Human papillomavirus type 6
agacaugaaaguguauuauu

SEQ ID NO: 4011153 - RNA, 20 nt, Human papillomavirus type 6
agacugaguauaguauggaa

SEQ ID NO: 4011154 - RNA, 20 nt, Human papillomavirus type 6
agcucagaagaugaggugga

SEQ ID NO: 4011155 - RNA, 17 nt, Human papillomavirus type 6
aggaggcggacacccau

SEQ ID NO: 4011156 - RNA, 18 nt, Human papillomavirus type 6
agguggaggacagugggu

SEQ ID NO: 4011157 - RNA, 22 nt, Human papillomavirus type 6
agguguggguguaaguggacau

SEQ ID NO: 4011158 - RNA, 20 nt, Human papillomavirus type 6
aguggguaugacauggugga

SEQ ID NO: 4011159 - RNA, 17 nt, Human papillomavirus type 6
aguguaacaaacacaac

SEQ ID NO: 4011160 - RNA, 19 nt, Human papillomavirus type 6
aguguacagaaacagacau

SEQ ID NO: 4011161 - RNA, 21 nt, Human papillomavirus type 6
auacuuacuauuguggcugcu

SEQ ID NO: 4011162 - RNA, 13 nt, Human papillomavirus type 6
auauaaagcaaaa

SEQ ID NO: 4011163 - RNA, 12 nt, Human papillomavirus type 6
auauauguguau

SEQ ID NO: 4011164 - RNA, 14 nt, Human papillomavirus type 6
auauauguguguau

SEQ ID NO: 4011165 - RNA, 13 nt, Human papillomavirus type 6
auauguaaaugug

SEQ ID NO: 4011166 - RNA, 15 nt, Human papillomavirus type 6
auauuacacacaauu

SEQ ID NO: 4011167 - RNA, 13 nt, Human papillomavirus type 6
augaggaugagga

SEQ ID NO: 4011168 - RNA, 23 nt, Human papillomavirus type 6
augaugauuauguaacuaugcau

SEQ ID NO: 4011169 - RNA, 22 nt, Human papillomavirus type 6
augauuauguaacuaugcauua

SEQ ID NO: 4011170 - RNA, 14 nt, Human papillomavirus type 6
auguauauguguuu

SEQ ID NO: 4011171 - RNA, 22 nt, Human papillomavirus type 6
augugccuccuccuaacccugu

SEQ ID NO: 4011172 - RNA, 11 nt, Human papillomavirus type 6
auguguaugug

SEQ ID NO: 4011173 - RNA, 20 nt, Human papillomavirus type 6
auguguguuuaugugcaaua

SEQ ID NO: 4011174 - RNA, 21 nt, Human papillomavirus type 6
auuccuuggaagcacaggcau

SEQ ID NO: 4011175 - RNA, 13 nt, Human papillomavirus type 6
auugaugacagca

SEQ ID NO: 4011176 - RNA, 13 nt, Human papillomavirus type 6
auuguaacuguaa

SEQ ID NO: 4011177 - RNA, 14 nt, Human papillomavirus type 6
auuguguacacauc

SEQ ID NO: 4011178 - RNA, 15 nt, Human papillomavirus type 6
caaacaauacaaugg

SEQ ID NO: 4011179 - RNA, 12 nt, Human papillomavirus type 6
caagacagccaa

SEQ ID NO: 4011180 - RNA, 19 nt, Human papillomavirus type 6
caaugcaccuauuguaauu

SEQ ID NO: 4011181 - RNA, 19 nt, Human papillomavirus type 6
caccgguuccggcacuggg

SEQ ID NO: 4011182 - RNA, 15 nt, Human papillomavirus type 6
cacuauagccgaggc

SEQ ID NO: 4011183 - RNA, 14 nt, Human papillomavirus type 6
cagacaucagagaa

SEQ ID NO: 4011184 - RNA, 19 nt, Human papillomavirus type 6
cagcacauuaauacugccu

SEQ ID NO: 4011185 - RNA, 14 nt, Human papillomavirus type 6
cauaagacaugaaa

SEQ ID NO: 4011186 - RNA, 17 nt, Human papillomavirus type 6
caucagagaagugcaac

SEQ ID NO: 4011187 - RNA, 20 nt, Human papillomavirus type 6
cauuaauacugccuguuaua

SEQ ID NO: 4011188 - RNA, 15 nt, Human papillomavirus type 6
cauuaugauacugcu

SEQ ID NO: 4011189 - RNA, 14 nt, Human papillomavirus type 6
cauuggaaaugcau

SEQ ID NO: 4011190 - RNA, 14 nt, Human papillomavirus type 6
ccacuacauuguga

SEQ ID NO: 4011191 - RNA, 15 nt, Human papillomavirus type 6
ccuauuguaauuugu

SEQ ID NO: 4011192 - RNA, 22 nt, Human papillomavirus type 6
cgauggcggacgauucagguac

SEQ ID NO: 4011193 - RNA, 12 nt, Human papillomavirus type 6
cuaauuguuuaa

SEQ ID NO: 4011194 - RNA, 20 nt, Human papillomavirus type 6
cuacauugugaacacacagc

SEQ ID NO: 4011195 - RNA, 19 nt, Human papillomavirus type 6
cuagacuucuugcaguggg

SEQ ID NO: 4011196 - RNA, 16 nt, Human papillomavirus type 6
cuaguacuaacacugc

SEQ ID NO: 4011197 - RNA, 17 nt, Human papillomavirus type 6
cuauuguggcugcuauu

SEQ ID NO: 4011198 - RNA, 14 nt, Human papillomavirus type 6
cugggguuuauguc

SEQ ID NO: 4011199 - RNA, 20 nt, Human papillomavirus type 6
gaaacaaguuaugaaaugug

SEQ ID NO: 4011200 - RNA, 11 nt, Human papillomavirus type 6
gaagcacaggc

SEQ ID NO: 4011201 - RNA, 20 nt, Human papillomavirus type 6
gaaucuaauuguuuaaagug

SEQ ID NO: 4011202 - RNA, 13 nt, Human papillomavirus type 6
gacaucagagaag

SEQ ID NO: 4011203 - RNA, 13 nt, Human papillomavirus type 6
gauggcugugcaa

SEQ ID NO: 4011204 - RNA, 19 nt, Human papillomavirus type 6
gauuaugugguauggacag

SEQ ID NO: 4011205 - RNA, 14 nt, Human papillomavirus type 6
gcaaacaauacaau

SEQ ID NO: 4011206 - RNA, 12 nt, Human papillomavirus type 6
gcauuaugauac

SEQ ID NO: 4011207 - RNA, 16 nt, Human papillomavirus type 6
gccacauaggaaugca

SEQ ID NO: 4011208 - RNA, 14 nt, Human papillomavirus type 6
gccauugaaaugca

SEQ ID NO: 4011209 - RNA, 17 nt, Human papillomavirus type 6
gcucguccuccuguggu

SEQ ID NO: 4011210 - RNA, 21 nt, Human papillomavirus type 6
ggcggacgauucagguacaga

SEQ ID NO: 4011211 - RNA, 23 nt, Human papillomavirus type 6
gggaguggugguaacccuggaca

SEQ ID NO: 4011212 - RNA, 15 nt, Human papillomavirus type 6
ggguguaaguggaca

SEQ ID NO: 4011213 - RNA, 13 nt, Human papillomavirus type 6
ggguguacaggau

SEQ ID NO: 4011214 - RNA, 19 nt, Human papillomavirus type 6
gguaacccuggacaggaua

SEQ ID NO: 4011215 - RNA, 14 nt, Human papillomavirus type 6
guacauguauggaa

SEQ ID NO: 4011216 - RNA, 14 nt, Human papillomavirus type 6
guacuaacacugcu

SEQ ID NO: 4011217 - RNA, 16 nt, Human papillomavirus type 6
guauaucuuguuacac

SEQ ID NO: 4011218 - RNA, 17 nt, Human papillomavirus type 6
guauguguguauaugua

SEQ ID NO: 4011219 - RNA, 18 nt, Human papillomavirus type 6
guauguguguauauguau

SEQ ID NO: 4011220 - RNA, 19 nt, Human papillomavirus type 6
guccgaagcaaaaggacau

SEQ ID NO: 4011221 - RNA, 12 nt, Human papillomavirus type 6
gugccuuuauug

SEQ ID NO: 4011222 - RNA, 23 nt, Human papillomavirus type 6
gugguauggacagauguguaugu

SEQ ID NO: 4011223 - RNA, 15 nt, Human papillomavirus type 6
guguaaguggacauc

SEQ ID NO: 4011224 - RNA, 20 nt, Human papillomavirus type 6
guguguauauauguguaugu

SEQ ID NO: 4011225 - RNA, 17 nt, Human papillomavirus type 6
guuauguauauguguuu

SEQ ID NO: 4011226 - RNA, 20 nt, Human papillomavirus type 6
uaacaacccccuugcaauuu

SEQ ID NO: 4011227 - RNA, 16 nt, Human papillomavirus type 6
uaauguguaugugugu

SEQ ID NO: 4011228 - RNA, 20 nt, Human papillomavirus type 6
uacaauggauuaugugguau

SEQ ID NO: 4011229 - RNA, 15 nt, Human papillomavirus type 6
uacacaucugugcua

SEQ ID NO: 4011230 - RNA, 13 nt, Human papillomavirus type 6
uacugccuguuau

SEQ ID NO: 4011231 - RNA, 19 nt, Human papillomavirus type 6
uagaagcuauagugcaaca

SEQ ID NO: 4011232 - RNA, 14 nt, Human papillomavirus type 6
uagaggugggcagg

SEQ ID NO: 4011233 - RNA, 13 nt, Human papillomavirus type 6
uagugaggaacaa

SEQ ID NO: 4011234 - RNA, 13 nt, Human papillomavirus type 6
uauaauugcauuu

SEQ ID NO: 4011235 - RNA, 24 nt, Human papillomavirus type 6
uauaccauggcacauaguagggcc

SEQ ID NO: 4011236 - RNA, 17 nt, Human papillomavirus type 6
uauagugcaacacccaa

SEQ ID NO: 4011237 - RNA, 13 nt, Human papillomavirus type 6
uauauauguguau

SEQ ID NO: 4011238 - RNA, 18 nt, Human papillomavirus type 6
uaucaugccagcaguucu

SEQ ID NO: 4011239 - RNA, 22 nt, Human papillomavirus type 6
uaucuuguuacacccugugacu

SEQ ID NO: 4011240 - RNA, 18 nt, Human papillomavirus type 6
uaugauacugcuggugau

SEQ ID NO: 4011241 - RNA, 17 nt, Human papillomavirus type 6
uauggacagauguguau

SEQ ID NO: 4011242 - RNA, 18 nt, Human papillomavirus type 6
uauguauauguguuuaug

SEQ ID NO: 4011243 - RNA, 17 nt, Human papillomavirus type 6
uaugugccuuuauugua

SEQ ID NO: 4011244 - RNA, 14 nt, Human papillomavirus type 6
uauguguguauaua

SEQ ID NO: 4011245 - RNA, 22 nt, Human papillomavirus type 6
uauuaacaacccccuugcaauu

SEQ ID NO: 4011246 - RNA, 16 nt, Human papillomavirus type 6
ucagagaagugcaaca

SEQ ID NO: 4011247 - RNA, 21 nt, Human papillomavirus type 6
ucagcuacacagcuauaucaa

SEQ ID NO: 4011248 - RNA, 17 nt, Human papillomavirus type 6
ucauccuuauuuuucca

SEQ ID NO: 4011249 - RNA, 22 nt, Human papillomavirus type 6
uccauauguuaguccuauaaac

SEQ ID NO: 4011250 - RNA, 14 nt, Human papillomavirus type 6
uccuccuguggugg

SEQ ID NO: 4011251 - RNA, 16 nt, Human papillomavirus type 6
ugaaaauucagggagu

SEQ ID NO: 4011252 - RNA, 15 nt, Human papillomavirus type 6
ugaaaugcaaaugca

SEQ ID NO: 4011253 - RNA, 19 nt, Human papillomavirus type 6
ugagcaauuaguagacagc

SEQ ID NO: 4011254 - RNA, 20 nt, Human papillomavirus type 6
ugcaacacccaacagguaca

SEQ ID NO: 4011255 - RNA, 13 nt, Human papillomavirus type 6
uggagccuguggc

SEQ ID NO: 4011256 - RNA, 14 nt, Human papillomavirus type 6
ugggcaugcacagg

SEQ ID NO: 4011257 - RNA, 14 nt, Human papillomavirus type 6
uguaacuguaacau

SEQ ID NO: 4011258 - RNA, 19 nt, Human papillomavirus type 6
uguaauacaacuguacaug

SEQ ID NO: 4011259 - RNA, 14 nt, Human papillomavirus type 6
uguauaccauggca

SEQ ID NO: 4011260 - RNA, 19 nt, Human papillomavirus type 6
ugugcaggaccuaaaacga

SEQ ID NO: 4011261 - RNA, 17 nt, Human papillomavirus type 6
uguguauauauguguau

SEQ ID NO: 4011262 - RNA, 17 nt, Human papillomavirus type 6
uguguauguacuguuau

SEQ ID NO: 4011263 - RNA, 17 nt, Human papillomavirus type 6
uguguuauguguguaau

SEQ ID NO: 4011264 - RNA, 19 nt, Human papillomavirus type 6
uguguuuauguacuguuau

SEQ ID NO: 4011265 - RNA, 14 nt, Human papillomavirus type 6
uguuaccagauccu

SEQ ID NO: 4011266 - RNA, 22 nt, Human papillomavirus type 6
uuaaaaaacggggcaaaacugu

SEQ ID NO: 4011267 - RNA, 20 nt, Human papillomavirus type 6
uuauauauauguguguaugu

SEQ ID NO: 4011268 - RNA, 23 nt, Human papillomavirus type 6
uuauauauauguguguauguacu

SEQ ID NO: 4011269 - RNA, 23 nt, Human papillomavirus type 6
uuauguauauguguuuauguacu

SEQ ID NO: 4011270 - RNA, 12 nt, Human papillomavirus type 6
uuguaacuguaa

SEQ ID NO: 4011271 - RNA, 15 nt, Human papillomavirus type 6
uuguuacaacguguu

SEQ ID NO: 4011272 - RNA, 14 nt, Human papillomavirus type 6
uuuguuagcaucau

SEQ ID NO: 4011273 - RNA, 16 nt, Human papillomavirus type 6
uuuuaaauguuguaaa

SEQ ID NO: 4011274 - RNA, 11 nt, Human papillomavirus type 6
aaacaaacaug

SEQ ID NO: 4011275 - RNA, 12 nt, Human papillomavirus type 6
aaacaauacaau

SEQ ID NO: 4011276 - RNA, 13 nt, Human papillomavirus type 6
aaacacagacauu

SEQ ID NO: 4011277 - RNA, 15 nt, Human papillomavirus type 6
aaacuguagaaguua

SEQ ID NO: 4011278 - RNA, 16 nt, Human papillomavirus type 6
aaagcaaaacaaaugg

SEQ ID NO: 4011279 - RNA, 15 nt, Human papillomavirus type 6
aaaggugcauaguau

SEQ ID NO: 4011280 - RNA, 19 nt, Human papillomavirus type 6
aaagguguccgaagcaaaa

SEQ ID NO: 4011281 - RNA, 18 nt, Human papillomavirus type 6
aacaccaccuaaacgcug

SEQ ID NO: 4011282 - RNA, 11 nt, Human papillomavirus type 6
aacaggcagga

SEQ ID NO: 4011283 - RNA, 21 nt, Human papillomavirus type 6
aagccacauaggaaugcaagu

SEQ ID NO: 4011284 - RNA, 21 nt, Human papillomavirus type 6
aauauauuuuuauauuugcaa

SEQ ID NO: 4011285 - RNA, 22 nt, Human papillomavirus type 6
aauuccuaagguggaacacaac

SEQ ID NO: 4011286 - RNA, 14 nt, Human papillomavirus type 6
aauuuaaugaugga

SEQ ID NO: 4011287 - RNA, 22 nt, Human papillomavirus type 6
aauuuguauauauguaaaugug

SEQ ID NO: 4011288 - RNA, 17 nt, Human papillomavirus type 6
uauuguaauuuguauau

SEQ ID NO: 4011289 - RNA, 13 nt, Human papillomavirus type 6
uauuguguacaca

SEQ ID NO: 4011290 - RNA, 23 nt, Human papillomavirus type 6
ucagggaguggugguaacccugg

SEQ ID NO: 4011291 - RNA, 13 nt, Human papillomavirus type 6
ucagguacagaaa

SEQ ID NO: 4011292 - RNA, 18 nt, Human papillomavirus type 6
uccaccaauuuguuacaa

SEQ ID NO: 4011293 - RNA, 17 nt, Human papillomavirus type 6
ucuauuacuagugggcc

SEQ ID NO: 4011294 - RNA, 21 nt, Human papillomavirus type 6
ucugacuuuauuguguacaca

SEQ ID NO: 4011295 - RNA, 13 nt, Human papillomavirus type 6
ugauuuaauauca

SEQ ID NO: 4011296 - RNA, 20 nt, Human papillomavirus type 6
ugcaguguacagaaacagac

SEQ ID NO: 4011297 - RNA, 16 nt, Human papillomavirus type 6
ugcauuggaaaugcau

SEQ ID NO: 4011298 - RNA, 22 nt, Human papillomavirus type 6
uggagccuguggccccuucgga

SEQ ID NO: 4011299 - RNA, 13 nt, Human papillomavirus type 6
ugguaugggcaug

SEQ ID NO: 4011300 - RNA, 15 nt, Human papillomavirus type 6
uguauauguacuguu

SEQ ID NO: 4011301 - RNA, 19 nt, Human papillomavirus type 6
uguguauauguacuguuau

SEQ ID NO: 4011302 - RNA, 18 nt, Human papillomavirus type 6
uguuacacccugugacuc

SEQ ID NO: 4011303 - RNA, 16 nt, Human papillomavirus type 6
uuauaauugcauuugu

SEQ ID NO: 4011304 - RNA, 18 nt, Human papillomavirus type 6
uuccauaaaacgggcuaa

SEQ ID NO: 4011305 - RNA, 22 nt, Human papillomavirus type 6
uugcauugccugacucgucucu

SEQ ID NO: 4011306 - RNA, 22 nt, Human papillomavirus type 6
uugguguaauacaacuguacau

SEQ ID NO: 4011307 - RNA, 18 nt, Human papillomavirus type 6
uuguuagcaucauacuua

SEQ ID NO: 4011308 - RNA, 16 nt, Human papillomavirus type 6
uuuguauauauguaaa

SEQ ID NO: 4011309 - RNA, 18 nt, Human papillomavirus type 6
acaaacacaacuguaaug

SEQ ID NO: 4011310 - RNA, 22 nt, Human papillomavirus type 6
acaauggauuaugugguaugga

SEQ ID NO: 4011311 - RNA, 14 nt, Human papillomavirus type 6
acacaucugugcua

SEQ ID NO: 4011312 - RNA, 21 nt, Human papillomavirus type 6
acagaaacagacaucagagaa

SEQ ID NO: 4011313 - RNA, 14 nt, Human papillomavirus type 6
acagcaaugaugcu

SEQ ID NO: 4011314 - RNA, 16 nt, Human papillomavirus type 6
acagcucagaagauga

SEQ ID NO: 4011315 - RNA, 19 nt, Human papillomavirus type 6
acauauuuuaucaugccag

SEQ ID NO: 4011316 - RNA, 13 nt, Human papillomavirus type 6
accuaaacgcugu

SEQ ID NO: 4011317 - RNA, 16 nt, Human papillomavirus type 6
acuauagccgaggcag

SEQ ID NO: 4011318 - RNA, 15 nt, Human papillomavirus type 6
acuuuauuguguaca

SEQ ID NO: 4011319 - RNA, 18 nt, Human papillomavirus type 6
agaagcuauagugcaaca

SEQ ID NO: 4011320 - RNA, 19 nt, Human papillomavirus type 6
agaagcuauagugcaacac

SEQ ID NO: 4011321 - RNA, 15 nt, Human papillomavirus type 6
agccgaggcagugga

SEQ ID NO: 4011322 - RNA, 19 nt, Human papillomavirus type 6
aggaugguuuaugguagaa

SEQ ID NO: 4011323 - RNA, 20 nt, Human papillomavirus type 6
aggcaggaggcggacaccca

SEQ ID NO: 4011324 - RNA, 23 nt, Human papillomavirus type 6
aguguauuauuauauaaagcaaa

SEQ ID NO: 4011325 - RNA, 14 nt, Human papillomavirus type 6
aguuuuuaaauguu

SEQ ID NO: 4011326 - RNA, 22 nt, Human papillomavirus type 6
auaaacacuauagccgaggcag

SEQ ID NO: 4011327 - RNA, 16 nt, Human papillomavirus type 6
auaaugccauugaaau

SEQ ID NO: 4011328 - RNA, 17 nt, Human papillomavirus type 6
auacuuauuguauggau

SEQ ID NO: 4011329 - RNA, 14 nt, Human papillomavirus type 6
auagagcuguacaa

SEQ ID NO: 4011330 - RNA, 11 nt, Human papillomavirus type 6
auauguaaaug

SEQ ID NO: 4011331 - RNA, 15 nt, Human papillomavirus type 6
auguauauguaugug

SEQ ID NO: 4011332 - RNA, 13 nt, Human papillomavirus type 6
auguguguauaua

SEQ ID NO: 4011333 - RNA, 16 nt, Human papillomavirus type 6
auuaggugugggugua

SEQ ID NO: 4011334 - RNA, 16 nt, Human papillomavirus type 6
auuuuuauauuugcaa

SEQ ID NO: 4011335 - RNA, 23 nt, Human papillomavirus type 6
caaaacuguugugccaaaggugu

SEQ ID NO: 4011336 - RNA, 17 nt, Human papillomavirus type 6
caaacacaacuguaaug

SEQ ID NO: 4011337 - RNA, 19 nt, Human papillomavirus type 6
caaacacaacuguaaugau

SEQ ID NO: 4011338 - RNA, 16 nt, Human papillomavirus type 6
caaauaucagacgaug

SEQ ID NO: 4011339 - RNA, 18 nt, Human papillomavirus type 6
caacaguuuuuaaauguu

SEQ ID NO: 4011340 - RNA, 21 nt, Human papillomavirus type 6
caacaguuuuuaaauguugua

SEQ ID NO: 4011341 - RNA, 12 nt, Human papillomavirus type 6
caauuuaaugau

SEQ ID NO: 4011342 - RNA, 15 nt, Human papillomavirus type 6
cagaagaugaggugg

SEQ ID NO: 4011343 - RNA, 17 nt, Human papillomavirus type 6
cagacgaugaggaugag

SEQ ID NO: 4011344 - RNA, 23 nt, Human papillomavirus type 6
cagauccuaacaaauuugcauug

SEQ ID NO: 4011345 - RNA, 23 nt, Human papillomavirus type 6
cagauguguaugugcaggacacu

SEQ ID NO: 4011346 - RNA, 19 nt, Human papillomavirus type 6
caggaugguuuaugguaga

SEQ ID NO: 4011347 - RNA, 23 nt, Human papillomavirus type 6
caggcauuguuuaacaggcagga

SEQ ID NO: 4011348 - RNA, 22 nt, Human papillomavirus type 6
cauaaugccauugaaaugcaaa

SEQ ID NO: 4011349 - RNA, 19 nt, Human papillomavirus type 6
cauugaaaugcaaaugcau

SEQ ID NO: 4011350 - RNA, 15 nt, Human papillomavirus type 6
cauuuguuguauguu

SEQ ID NO: 4011351 - RNA, 12 nt, Human papillomavirus type 6
cccuugcaauuu

SEQ ID NO: 4011352 - RNA, 18 nt, Human papillomavirus type 6
ccgaagcaaaaggacaua

SEQ ID NO: 4011353 - RNA, 15 nt, Human papillomavirus type 6
ccuggguaaaggugc

SEQ ID NO: 4011354 - RNA, 15 nt, Human papillomavirus type 6
cggggcaaaacugua

SEQ ID NO: 4011355 - RNA, 17 nt, Human papillomavirus type 6
cuaagguggaacacaac

SEQ ID NO: 4011356 - RNA, 13 nt, Human papillomavirus type 6
cuccuaacccugu

SEQ ID NO: 4011357 - RNA, 15 nt, Human papillomavirus type 6
cucguccuccugugg

SEQ ID NO: 4011358 - RNA, 15 nt, Human papillomavirus type 6
cugacuuuauugugu

SEQ ID NO: 4011359 - RNA, 21 nt, Human papillomavirus type 6
cugccuguuauaauugcauuu

SEQ ID NO: 4011360 - RNA, 16 nt, Human papillomavirus type 6
cuguauccaaaguugu

SEQ ID NO: 4011361 - RNA, 20 nt, Human papillomavirus type 6
cuguugcuguggaugugaca

SEQ ID NO: 4011362 - RNA, 13 nt, Human papillomavirus type 6
cuuguuauauaca

SEQ ID NO: 4011363 - RNA, 16 nt, Human papillomavirus type 6
gaacacuaaacauagu

SEQ ID NO: 4011364 - RNA, 15 nt, Human papillomavirus type 6
gaagugcaacagcuu

SEQ ID NO: 4011365 - RNA, 17 nt, Human papillomavirus type 6
gacuucuugcagugggu

SEQ ID NO: 4011366 - RNA, 18 nt, Human papillomavirus type 6
gcaguguacagaaacaga

SEQ ID NO: 4011367 - RNA, 15 nt, Human papillomavirus type 6
gcauuuguuguaugu

SEQ ID NO: 4011368 - RNA, 19 nt, Human papillomavirus type 6
gccaaaaaagguaaagcga

SEQ ID NO: 4011369 - RNA, 17 nt, Human papillomavirus type 6
gccaccauuaaaggugu

SEQ ID NO: 4011370 - RNA, 20 nt, Human papillomavirus type 6
gccgaggcaguggaaaguga

SEQ ID NO: 4011371 - RNA, 13 nt, Human papillomavirus type 6
gcuauagugcaac

SEQ ID NO: 4011372 - RNA, 19 nt, Human papillomavirus type 6
gcucagaagaugaggugga

SEQ ID NO: 4011373 - RNA, 13 nt, Human papillomavirus type 6
gcugugcaaacaa

SEQ ID NO: 4011374 - RNA, 14 nt, Human papillomavirus type 6
gcuguggaugugac

SEQ ID NO: 4011375 - RNA, 17 nt, Human papillomavirus type 6
ggaacuucugcaaaacc

SEQ ID NO: 4011376 - RNA, 12 nt, Human papillomavirus type 6
ggagccuguggc

SEQ ID NO: 4011377 - RNA, 21 nt, Human papillomavirus type 6
ggccuagaggugggcagggga

SEQ ID NO: 4011378 - RNA, 16 nt, Human papillomavirus type 6
gggcaugcacaggccu

SEQ ID NO: 4011379 - RNA, 18 nt, Human papillomavirus type 6
guaacuaugcauuaugau

SEQ ID NO: 4011380 - RNA, 17 nt, Human papillomavirus type 6
guauauauguaaaugug

SEQ ID NO: 4011381 - RNA, 18 nt, Human papillomavirus type 6
guauguacuguuauguau

SEQ ID NO: 4011382 - RNA, 14 nt, Human papillomavirus type 6
gucuggguguacag

SEQ ID NO: 4011383 - RNA, 17 nt, Human papillomavirus type 6
gucuggguguacaggau

SEQ ID NO: 4011384 - RNA, 18 nt, Human papillomavirus type 6
gugcaacacccaacaggu

SEQ ID NO: 4011385 - RNA, 13 nt, Human papillomavirus type 6
gugccuccuccua

SEQ ID NO: 4011386 - RNA, 18 nt, Human papillomavirus type 6
gugcuaguacuaacacug

SEQ ID NO: 4011387 - RNA, 16 nt, Human papillomavirus type 6
gugggcaggggacagc

SEQ ID NO: 4011388 - RNA, 22 nt, Human papillomavirus type 6
gugguaccuguacaaauagcug

SEQ ID NO: 4011389 - RNA, 23 nt, Human papillomavirus type 6
guguaugcuuuguauaccauggc

SEQ ID NO: 4011390 - RNA, 13 nt, Human papillomavirus type 6
guguguauguacu

SEQ ID NO: 4011391 - RNA, 17 nt, Human papillomavirus type 6
guuagcaucauacuuau

SEQ ID NO: 4011392 - RNA, 12 nt, Human papillomavirus type 6
guuuaugucaau

SEQ ID NO: 4011393 - RNA, 20 nt, Human papillomavirus type 6
uaaacuuacaagacagccaa

SEQ ID NO: 4011394 - RNA, 12 nt, Human papillomavirus type 6
uaaauguuguaa

SEQ ID NO: 4011395 - RNA, 16 nt, Human papillomavirus type 6
uaacuacauuauugua

SEQ ID NO: 4011396 - RNA, 18 nt, Human papillomavirus type 6
uaauacaacuguacaugu

SEQ ID NO: 4011397 - RNA, 13 nt, Human papillomavirus type 6
uacaacuguacau

SEQ ID NO: 4011398 - RNA, 21 nt, Human papillomavirus type 6
uacaagaaacaaguuaugaaa

SEQ ID NO: 4011399 - RNA, 11 nt, Human papillomavirus type 6
uacuagugggc

SEQ ID NO: 4011400 - RNA, 15 nt, Human papillomavirus type 6
uacuguuauguauau

SEQ ID NO: 4011401 - RNA, 17 nt, Human papillomavirus type 6
uagaccugcaaccucca

SEQ ID NO: 4011402 - RNA, 14 nt, Human papillomavirus type 6
uagguaguccauau

SEQ ID NO: 4011403 - RNA, 19 nt, Human papillomavirus type 6
uagguguggguguaagugg

SEQ ID NO: 4011404 - RNA, 16 nt, Human papillomavirus type 6
uauagugcaacaccca

SEQ ID NO: 4011405 - RNA, 19 nt, Human papillomavirus type 6
uauauauguguaugugugu

SEQ ID NO: 4011406 - RNA, 15 nt, Human papillomavirus type 6
uauauguacuguuau

SEQ ID NO: 4011407 - RNA, 13 nt, Human papillomavirus type 6
uaucuuguuacac

SEQ ID NO: 4011408 - RNA, 16 nt, Human papillomavirus type 6
uauguacuguuaugua

SEQ ID NO: 4011409 - RNA, 18 nt, Human papillomavirus type 6
uauguacuguuauguaua

SEQ ID NO: 4011410 - RNA, 22 nt, Human papillomavirus type 6
uauguacuguuauguauaugug

SEQ ID NO: 4011411 - RNA, 16 nt, Human papillomavirus type 6
uauguauauguaugug

SEQ ID NO: 4011412 - RNA, 9 nt, Human papillomavirus type 6
uaugugugu

SEQ ID NO: 4011413 - RNA, 14 nt, Human papillomavirus type 6
uauguguguuuaug

SEQ ID NO: 4011414 - RNA, 22 nt, Human papillomavirus type 6
aaacacuauagccgaggcagug

SEQ ID NO: 4011415 - RNA, 13 nt, Human papillomavirus type 6
aaacucacuggaa

SEQ ID NO: 4011416 - RNA, 15 nt, Human papillomavirus type 6
aacaaccagcacauu

SEQ ID NO: 4011417 - RNA, 14 nt, Human papillomavirus type 6
aacuguaaugauga

SEQ ID NO: 4011418 - RNA, 18 nt, Human papillomavirus type 6
aaucauuauuaaagacug

SEQ ID NO: 4011419 - RNA, 13 nt, Human papillomavirus type 6
acagaaaaugagg

SEQ ID NO: 4011420 - RNA, 21 nt, Human papillomavirus type 6
acaggcauuguuuaacaggca

SEQ ID NO: 4011421 - RNA, 21 nt, Human papillomavirus type 6
acaugccccccagauguaauu

SEQ ID NO: 4011422 - RNA, 13 nt, Human papillomavirus type 6
accgaagacauaa

SEQ ID NO: 4011423 - RNA, 16 nt, Human papillomavirus type 6
accuaaacaaacaugu

SEQ ID NO: 4011424 - RNA, 17 nt, Human papillomavirus type 6
acuccuggguaaaggug

SEQ ID NO: 4011425 - RNA, 16 nt, Human papillomavirus type 6
agaagcuauagugcaa

SEQ ID NO: 4011426 - RNA, 19 nt, Human papillomavirus type 6
agacugaguauaguaugga

SEQ ID NO: 4011427 - RNA, 15 nt, Human papillomavirus type 6
agacuucuugcagug

SEQ ID NO: 4011428 - RNA, 18 nt, Human papillomavirus type 6
agacuucuugcagugggu

SEQ ID NO: 4011429 - RNA, 14 nt, Human papillomavirus type 6
agagaagugcaaca

SEQ ID NO: 4011430 - RNA, 16 nt, Human papillomavirus type 6
agaggugggcagggga

SEQ ID NO: 4011431 - RNA, 14 nt, Human papillomavirus type 6
agcaucauacuuau

SEQ ID NO: 4011432 - RNA, 19 nt, Human papillomavirus type 6
agccacauaggaaugcaag

SEQ ID NO: 4011433 - RNA, 14 nt, Human papillomavirus type 6
agcuauagugcaac

SEQ ID NO: 4011434 - RNA, 21 nt, Human papillomavirus type 6
agcucagaagaugagguggac

SEQ ID NO: 4011435 - RNA, 21 nt, Human papillomavirus type 6
aggagguggaggacagugggu

SEQ ID NO: 4011436 - RNA, 19 nt, Human papillomavirus type 6
agugaccuguugcugugga

SEQ ID NO: 4011437 - RNA, 14 nt, Human papillomavirus type 6
agugggucauccuu

SEQ ID NO: 4011438 - RNA, 13 nt, Human papillomavirus type 6
agugguaccugua

SEQ ID NO: 4011439 - RNA, 13 nt, Human papillomavirus type 6
aguuaugaaaugu

SEQ ID NO: 4011440 - RNA, 14 nt, Human papillomavirus type 6
aguuaugaaaugug

SEQ ID NO: 4011441 - RNA, 19 nt, Human papillomavirus type 6
aguucuagacuucuugcag

SEQ ID NO: 4011442 - RNA, 13 nt, Human papillomavirus type 6
auaauugcauuug

SEQ ID NO: 4011443 - RNA, 12 nt, Human papillomavirus type 6
auaccauggcac

SEQ ID NO: 4011444 - RNA, 19 nt, Human papillomavirus type 6
auauauuuuuauauuugca

SEQ ID NO: 4011445 - RNA, 15 nt, Human papillomavirus type 6
auaucaaacauguaa

SEQ ID NO: 4011446 - RNA, 17 nt, Human papillomavirus type 6
aucauuauuaaagacug

SEQ ID NO: 4011447 - RNA, 14 nt, Human papillomavirus type 6
aucuaauuguuuaa

SEQ ID NO: 4011448 - RNA, 23 nt, Human papillomavirus type 6
aucugugcuaguacuaacacugc

SEQ ID NO: 4011449 - RNA, 17 nt, Human papillomavirus type 6
augaugauuauguaacu

SEQ ID NO: 4011450 - RNA, 23 nt, Human papillomavirus type 6
augcauaagacaugaaaguguau

SEQ ID NO: 4011451 - RNA, 23 nt, Human papillomavirus type 6
augccauugaaaugcaaaugcau

SEQ ID NO: 4011452 - RNA, 21 nt, Human papillomavirus type 6
auggcugugcaaacaauacaa

SEQ ID NO: 4011453 - RNA, 19 nt, Human papillomavirus type 6
augguauugguguaauaca

SEQ ID NO: 4011454 - RNA, 22 nt, Human papillomavirus type 6
augucaauuuaaugauggagau

SEQ ID NO: 4011455 - RNA, 18 nt, Human papillomavirus type 6
auguggcaaacaccaccu

SEQ ID NO: 4011456 - RNA, 15 nt, Human papillomavirus type 6
auguguuuauguacu

SEQ ID NO: 4011457 - RNA, 22 nt, Human papillomavirus type 6
auguuaguccuauaaacacuau

SEQ ID NO: 4011458 - RNA, 16 nt, Human papillomavirus type 6
auuaauacugccuguu

SEQ ID NO: 4011459 - RNA, 20 nt, Human papillomavirus type 6
auuugauuuaauaucaucaa

SEQ ID NO: 4011460 - RNA, 16 nt, Human papillomavirus type 6
auuuguaacaguguau

SEQ ID NO: 4011461 - RNA, 22 nt, Human papillomavirus type 6
caacagguacacaaauaucaga

SEQ ID NO: 4011462 - RNA, 20 nt, Human papillomavirus type 6
caacuguacauguauggaag

SEQ ID NO: 4011463 - RNA, 16 nt, Human papillomavirus type 6
caaguagugccaccau

SEQ ID NO: 4011464 - RNA, 14 nt, Human papillomavirus type 6
aaacacaacuguaa

SEQ ID NO: 4011465 - RNA, 17 nt, Human papillomavirus type 6
aaacaugccauuguaac

SEQ ID NO: 4011466 - RNA, 18 nt, Human papillomavirus type 6
aaacggggcaaaacugua

SEQ ID NO: 4011467 - RNA, 17 nt, Human papillomavirus type 6
aaaugcauuuagaauca

SEQ ID NO: 4011468 - RNA, 21 nt, Human papillomavirus type 6
aagaaacaaguuaugaaaugu

SEQ ID NO: 4011469 - RNA, 24 nt, Human papillomavirus type 6
aagcgugcgucagcuacacagcua

SEQ ID NO: 4011470 - RNA, 18 nt, Human papillomavirus type 6
aaggcgauaaacacacca

SEQ ID NO: 4011471 - RNA, 17 nt, Human papillomavirus type 6
aagugguaccuguacaa

SEQ ID NO: 4011472 - RNA, 13 nt, Human papillomavirus type 6
aauacaacuguac

SEQ ID NO: 4011473 - RNA, 16 nt, Human papillomavirus type 6
aauacaauggauuaug

SEQ ID NO: 4011474 - RNA, 19 nt, Human papillomavirus type 6
aaugacaaacacagacauu

SEQ ID NO: 4011475 - RNA, 13 nt, Human papillomavirus type 6
aaugcaaaugcau

SEQ ID NO: 4011476 - RNA, 19 nt, Human papillomavirus type 6
aauguguaaauauauggua

SEQ ID NO: 4011477 - RNA, 16 nt, Human papillomavirus type 6
acaaguuaugaaaugu

SEQ ID NO: 4011478 - RNA, 15 nt, Human papillomavirus type 6
acagcaaugaugcua

SEQ ID NO: 4011479 - RNA, 21 nt, Human papillomavirus type 6
acagcaaugaugcuaacaugu

SEQ ID NO: 4011480 - RNA, 21 nt, Human papillomavirus type 6
acagccauuaggugugggugu

SEQ ID NO: 4011481 - RNA, 22 nt, Human papillomavirus type 6
acaggguauuuaaggugguguu

SEQ ID NO: 4011482 - RNA, 19 nt, Human papillomavirus type 6
acauaaugccauugaaaug

SEQ ID NO: 4011483 - RNA, 20 nt, Human papillomavirus type 6
acaucagagaagugcaacag

SEQ ID NO: 4011484 - RNA, 16 nt, Human papillomavirus type 6
acaugccauuguaacu

SEQ ID NO: 4011485 - RNA, 20 nt, Human papillomavirus type 6
acauguauggaagugguacc

SEQ ID NO: 4011486 - RNA, 19 nt, Human papillomavirus type 6
accacauaaacaugccauu

SEQ ID NO: 4011487 - RNA, 23 nt, Human papillomavirus type 6
acuaacacugcuuuuauacuuac

SEQ ID NO: 4011488 - RNA, 15 nt, Human papillomavirus type 6
acugcauuggaaaug

SEQ ID NO: 4011489 - RNA, 18 nt, Human papillomavirus type 6
acugcauuggaaaugcau

SEQ ID NO: 4011490 - RNA, 16 nt, Human papillomavirus type 6
acuuuauugaugacag

SEQ ID NO: 4011491 - RNA, 21 nt, Human papillomavirus type 6
agauauaggcuaaaugacaaa

SEQ ID NO: 4011492 - RNA, 15 nt, Human papillomavirus type 6
agcaaaaggacauaa

SEQ ID NO: 4011493 - RNA, 22 nt, Human papillomavirus type 6
agcgugcgucagcuacacagcu

SEQ ID NO: 4011494 - RNA, 12 nt, Human papillomavirus type 6
aggacagugggu

SEQ ID NO: 4011495 - RNA, 16 nt, Human papillomavirus type 6
aggaugaggaggugga

SEQ ID NO: 4011496 - RNA, 22 nt, Human papillomavirus type 6
aguacugaccuaaacaaacaug

SEQ ID NO: 4011497 - RNA, 13 nt, Human papillomavirus type 6
agugcaacaccca

SEQ ID NO: 4011498 - RNA, 17 nt, Human papillomavirus type 6
aguggugguaacccugg

SEQ ID NO: 4011499 - RNA, 21 nt, Human papillomavirus type 6
aguggugguaacccuggacag

SEQ ID NO: 4011500 - RNA, 14 nt, Human papillomavirus type 6
auaaacaugccauu

SEQ ID NO: 4011501 - RNA, 21 nt, Human papillomavirus type 6
auaaacaugccauuguaacug

SEQ ID NO: 4011502 - RNA, 15 nt, Human papillomavirus type 6
auaagacaugaaagu

SEQ ID NO: 4011503 - RNA, 19 nt, Human papillomavirus type 6
auaauugcauuuguuguau

SEQ ID NO: 4011504 - RNA, 20 nt, Human papillomavirus type 6
auacaggguauuuaaggugg

SEQ ID NO: 4011505 - RNA, 17 nt, Human papillomavirus type 6
auauauuuuuguuucca

SEQ ID NO: 4011506 - RNA, 12 nt, Human papillomavirus type 6
auauuuguaaca

SEQ ID NO: 4011507 - RNA, 16 nt, Human papillomavirus type 6
aucauacuuauuguau

SEQ ID NO: 4011508 - RNA, 21 nt, Human papillomavirus type 6
aucauagugaggaacaaaggc

SEQ ID NO: 4011509 - RNA, 16 nt, Human papillomavirus type 6
augcgacugugcagga

SEQ ID NO: 4011510 - RNA, 18 nt, Human papillomavirus type 6
auguauauguauguguug

SEQ ID NO: 4011511 - RNA, 13 nt, Human papillomavirus type 6
auguguguaugua

SEQ ID NO: 4011512 - RNA, 16 nt, Human papillomavirus type 6
auguguuguguauaua

SEQ ID NO: 4011513 - RNA, 17 nt, Human papillomavirus type 6
auuauuaaugcacuaua

SEQ ID NO: 4011514 - RNA, 15 nt, Human papillomavirus type 6
auugcauuuguugua

SEQ ID NO: 4011515 - RNA, 14 nt, Human papillomavirus type 6
caacaccauugcag

SEQ ID NO: 4011516 - RNA, 19 nt, Human papillomavirus type 6
caaguguaacaaacacaac

SEQ ID NO: 4011517 - RNA, 13 nt, Human papillomavirus type 6
caauuuguuacaa

SEQ ID NO: 4011518 - RNA, 18 nt, Human papillomavirus type 6
caauuuuuccuacuaacu

SEQ ID NO: 4011519 - RNA, 23 nt, Human papillomavirus type 6
cacaauuccuuggaagcacaggc

SEQ ID NO: 4011520 - RNA, 14 nt, Human papillomavirus type 6
cacagcaaugaugc

SEQ ID NO: 4011521 - RNA, 21 nt, Human papillomavirus type 6
cacagcaaugaugcuaacaug

SEQ ID NO: 4011522 - RNA, 22 nt, Human papillomavirus type 6
cacaucugugcuaguacuaaca

SEQ ID NO: 4011523 - RNA, 15 nt, Human papillomavirus type 6
caccuauuguaauuu

SEQ ID NO: 4011524 - RNA, 13 nt, Human papillomavirus type 6
cagacgaugagga

SEQ ID NO: 4011525 - RNA, 15 nt, Human papillomavirus type 6
cagcucagaagauga

SEQ ID NO: 4011526 - RNA, 22 nt, Human papillomavirus type 6
caggaccuaaaacgaaaguauu

SEQ ID NO: 4011527 - RNA, 18 nt, Human papillomavirus type 6
cauaacaacgauggcgga

SEQ ID NO: 4011528 - RNA, 19 nt, Human papillomavirus type 6
cauacuuauuguauggaua

SEQ ID NO: 4011529 - RNA, 19 nt, Human papillomavirus type 6
ccaauaauauauuuuuaua

SEQ ID NO: 4011530 - RNA, 14 nt, Human papillomavirus type 6
ccauugaaaugcaa

SEQ ID NO: 4011531 - RNA, 12 nt, Human papillomavirus type 6
cccuggacagga

SEQ ID NO: 4011532 - RNA, 16 nt, Human papillomavirus type 6
ccuaaacgcuguuuua

SEQ ID NO: 4011533 - RNA, 23 nt, Human papillomavirus type 6
ccuaagccacauaggaaugcaag

SEQ ID NO: 4011534 - RNA, 20 nt, Human papillomavirus type 6
ccuauuguaauuuguauaua

SEQ ID NO: 4011535 - RNA, 22 nt, Human papillomavirus type 6
cgacugguugugcaguguacag

SEQ ID NO: 4011536 - RNA, 14 nt, Human papillomavirus type 6
cuaaacaaacaugu

SEQ ID NO: 4011537 - RNA, 19 nt, Human papillomavirus type 6
cuaacaugucaauuuaaug

SEQ ID NO: 4011538 - RNA, 23 nt, Human papillomavirus type 6
cuaacuuuacuuguguguuacug

SEQ ID NO: 4011539 - RNA, 16 nt, Human papillomavirus type 6
cuacauugugaacaca

SEQ ID NO: 4011540 - RNA, 16 nt, Human papillomavirus type 6
cuagaggugggcaggg

SEQ ID NO: 4011541 - RNA, 18 nt, Human papillomavirus type 6
cuagaggugggcagggga

SEQ ID NO: 4011542 - RNA, 18 nt, Human papillomavirus type 6
cuaguacuaacacugcuu

SEQ ID NO: 4011543 - RNA, 18 nt, Human papillomavirus type 6
gaaaauucagggaguggu

SEQ ID NO: 4011544 - RNA, 19 nt, Human papillomavirus type 6
gacagauguguaugugcag

SEQ ID NO: 4011545 - RNA, 13 nt, Human papillomavirus type 6
gacagccaaaaaa

SEQ ID NO: 4011546 - RNA, 16 nt, Human papillomavirus type 6
gacuucuugcaguggg

SEQ ID NO: 4011547 - RNA, 12 nt, Human papillomavirus type 6
gagaagugcaac

SEQ ID NO: 4011548 - RNA, 17 nt, Human papillomavirus type 6
gaugaggagguggagga

SEQ ID NO: 4011549 - RNA, 14 nt, Human papillomavirus type 6
gcauuggaaaugca

SEQ ID NO: 4011550 - RNA, 21 nt, Human papillomavirus type 6
gccauuagguguggguguaag

SEQ ID NO: 4011551 - RNA, 23 nt, Human papillomavirus type 6
gccgaggcaguggaaagugaaau

SEQ ID NO: 4011552 - RNA, 13 nt, Human papillomavirus type 6
ggagauaccuggc

SEQ ID NO: 4011553 - RNA, 15 nt, Human papillomavirus type 6
ggaggcggacaccca

SEQ ID NO: 4011554 - RNA, 18 nt, Human papillomavirus type 6
ggauuaugugguauggac

SEQ ID NO: 4011555 - RNA, 21 nt, Human papillomavirus type 6
gguugugcaguguacagaaac

SEQ ID NO: 4011556 - RNA, 12 nt, Human papillomavirus type 6
guaacaagugua

SEQ ID NO: 4011557 - RNA, 15 nt, Human papillomavirus type 6
guaauacaacuguac

SEQ ID NO: 4011558 - RNA, 19 nt, Human papillomavirus type 6
guagaagcuauagugcaac

SEQ ID NO: 4011559 - RNA, 19 nt, Human papillomavirus type 6
guauguguguuuaugugca

SEQ ID NO: 4011560 - RNA, 21 nt, Human papillomavirus type 6
guauuauuauauaaagcaaaa

SEQ ID NO: 4011561 - RNA, 18 nt, Human papillomavirus type 6
gucuggguguacaggaug

SEQ ID NO: 4011562 - RNA, 13 nt, Human papillomavirus type 6
guggaaagugaaa

SEQ ID NO: 4011563 - RNA, 15 nt, Human papillomavirus type 6
guguaauguguaugu

SEQ ID NO: 4011564 - RNA, 21 nt, Human papillomavirus type 6
guguguauauauguguaugug

SEQ ID NO: 4011565 - RNA, 18 nt, Human papillomavirus type 6
guuauauauaugugugua

SEQ ID NO: 4011566 - RNA, 21 nt, Human papillomavirus type 6
guuaugaaauguggcaaacac

SEQ ID NO: 4011567 - RNA, 18 nt, Human papillomavirus type 6
uaaauguguaaauauaug

SEQ ID NO: 4011568 - RNA, 19 nt, Human papillomavirus type 6
uaacuacauuauuguauau

SEQ ID NO: 4011569 - RNA, 16 nt, Human papillomavirus type 6
uaacuguaacauauca

SEQ ID NO: 4011570 - RNA, 16 nt, Human papillomavirus type 6
uaaugaugauuaugua

SEQ ID NO: 4011571 - RNA, 22 nt, Human papillomavirus type 6
uaauguaauuuauuuguguaau

SEQ ID NO: 4011572 - RNA, 15 nt, Human papillomavirus type 6
uaauguguaugugug

SEQ ID NO: 4011573 - RNA, 16 nt, Human papillomavirus type 6
uacagaaacagacauc

SEQ ID NO: 4011574 - RNA, 22 nt, Human papillomavirus type 6
uacuauuagacacaaacugggg

SEQ ID NO: 4011575 - RNA, 23 nt, Human papillomavirus type 6
uacuguuauauauauguguguau

SEQ ID NO: 4011576 - RNA, 19 nt, Human papillomavirus type 6
uacuguuauauguguguau

SEQ ID NO: 4011577 - RNA, 15 nt, Human papillomavirus type 6
uacuuguguguuacu

SEQ ID NO: 4011578 - RNA, 14 nt, Human papillomavirus type 6
uagcaucauacuua

SEQ ID NO: 4011579 - RNA, 15 nt, Human papillomavirus type 6
uagcugcaggaacaa

SEQ ID NO: 4011580 - RNA, 22 nt, Human papillomavirus type 6
uagugccaccauuaaagguguc

SEQ ID NO: 4011581 - RNA, 12 nt, Human papillomavirus type 6
uauaauugcauu

SEQ ID NO: 4011582 - RNA, 23 nt, Human papillomavirus type 6
uauagugcaacacccaacaggua

SEQ ID NO: 4011583 - RNA, 15 nt, Human papillomavirus type 6
uauauauguguaugu

SEQ ID NO: 4011584 - RNA, 17 nt, Human papillomavirus type 6
uauggauaucugacuuu

SEQ ID NO: 4011585 - RNA, 12 nt, Human papillomavirus type 6
uauguaaaugug

SEQ ID NO: 4011586 - RNA, 14 nt, Human papillomavirus type 6
uauguaacuaugca

SEQ ID NO: 4011587 - RNA, 23 nt, Human papillomavirus type 6
ucaaacauguaaacucacuggaa

SEQ ID NO: 4011588 - RNA, 15 nt, Human papillomavirus type 6
ucagagaagugcaac

SEQ ID NO: 4011589 - RNA, 18 nt, Human papillomavirus type 6
ucagagaagugcaacagc

SEQ ID NO: 4011590 - RNA, 14 nt, Human papillomavirus type 6
uccggcacuggggg

SEQ ID NO: 4011591 - RNA, 20 nt, Human papillomavirus type 6
ugagcaauuaguagacagcu

SEQ ID NO: 4011592 - RNA, 24 nt, Human papillomavirus type 6
ugaugcuaacaugucaauuuaaug

SEQ ID NO: 4011593 - RNA, 21 nt, Human papillomavirus type 6
ugccauugaaaugcaaaugca

SEQ ID NO: 4011594 - RNA, 15 nt, Human papillomavirus type 6
ugcgcaccgaagaca

SEQ ID NO: 4011595 - RNA, 22 nt, Human papillomavirus type 6
ugcuaugagcaauuaguagaca

SEQ ID NO: 4011596 - RNA, 14 nt, Human papillomavirus type 6
ugcuuuuauacuua

SEQ ID NO: 4011597 - RNA, 11 nt, Human papillomavirus type 6
uggcacugggc

SEQ ID NO: 4011598 - RNA, 19 nt, Human papillomavirus type 6
uggcuauguucccuuagga

SEQ ID NO: 4011599 - RNA, 19 nt, Human papillomavirus type 6
uggcucguccuccuguggu

SEQ ID NO: 4011600 - RNA, 14 nt, Human papillomavirus type 6
uggguaaaggugca

SEQ ID NO: 4011601 - RNA, 14 nt, Human papillomavirus type 6
uguauauaugugua

SEQ ID NO: 4011602 - RNA, 16 nt, Human papillomavirus type 6
uguauauguacuguua

SEQ ID NO: 4011603 - RNA, 23 nt, Human papillomavirus type 6
uguauauguguuuauguacuguu

SEQ ID NO: 4011604 - RNA, 15 nt, Human papillomavirus type 6
uguauguacuguuau

SEQ ID NO: 4011605 - RNA, 20 nt, Human papillomavirus type 6
uguauguacuguuauguaua

SEQ ID NO: 4011606 - RNA, 14 nt, Human papillomavirus type 6
uguguaauguguau

SEQ ID NO: 4011607 - RNA, 15 nt, Human papillomavirus type 6
uguguuuaugugcaa

SEQ ID NO: 4011608 - RNA, 16 nt, Human papillomavirus type 6
uguguuuaugugcaau

SEQ ID NO: 4011609 - RNA, 22 nt, Human papillomavirus type 6
uguuauauacaccacuacauug

SEQ ID NO: 4011610 - RNA, 16 nt, Human papillomavirus type 6
uguuuauguacuguua

SEQ ID NO: 4011611 - RNA, 18 nt, Human papillomavirus type 6
uuaacaggcaggaggcgg

SEQ ID NO: 4011612 - RNA, 18 nt, Human papillomavirus type 6
uucagggaguggugguaa

SEQ ID NO: 4011613 - RNA, 18 nt, Human papillomavirus type 6
uuuccuacuaacuuuacu

SEQ ID NO: 4011614 - RNA, 13 nt, Human papillomavirus type 6
uuuuaucaugcca

SEQ ID NO: 4011615 - RNA, 16 nt, Human papillomavirus type 6
caaugcaccuauugua

SEQ ID NO: 4011616 - RNA, 15 nt, Human papillomavirus type 6
cacaacuguaaugau

SEQ ID NO: 4011617 - RNA, 18 nt, Human papillomavirus type 6
cacuauagagcuguacaa

SEQ ID NO: 4011618 - RNA, 21 nt, Human papillomavirus type 6
cagaaacagacaucagagaag

SEQ ID NO: 4011619 - RNA, 17 nt, Human papillomavirus type 6
cagccauuagguguggg

SEQ ID NO: 4011620 - RNA, 18 nt, Human papillomavirus type 6
caggaggcggacacccau

SEQ ID NO: 4011621 - RNA, 21 nt, Human papillomavirus type 6
caggccuagaggugggcaggg

SEQ ID NO: 4011622 - RNA, 14 nt, Human papillomavirus type 6
cagggagugguggu

SEQ ID NO: 4011623 - RNA, 16 nt, Human papillomavirus type 6
cagguacacaaauauc

SEQ ID NO: 4011624 - RNA, 21 nt, Human papillomavirus type 6
ccaacauauuuuaucaugcca

SEQ ID NO: 4011625 - RNA, 16 nt, Human papillomavirus type 6
ccacauaggaaugcaa

SEQ ID NO: 4011626 - RNA, 23 nt, Human papillomavirus type 6
ccccuacuauuagacacaaacug

SEQ ID NO: 4011627 - RNA, 18 nt, Human papillomavirus type 6
ccuagaggugggcagggg

SEQ ID NO: 4011628 - RNA, 23 nt, Human papillomavirus type 6
cgacugguugugcaguguacaga

SEQ ID NO: 4011629 - RNA, 17 nt, Human papillomavirus type 6
cuauagagcuguacaag

SEQ ID NO: 4011630 - RNA, 12 nt, Human papillomavirus type 6
cuauagugcaac

SEQ ID NO: 4011631 - RNA, 19 nt, Human papillomavirus type 6
cuauaucaaacauguaaac

SEQ ID NO: 4011632 - RNA, 12 nt, Human papillomavirus type 6
cugacuuuauug

SEQ ID NO: 4011633 - RNA, 17 nt, Human papillomavirus type 6
cugcauuggaaaugcau

SEQ ID NO: 4011634 - RNA, 13 nt, Human papillomavirus type 6
cuuacuauugugg

SEQ ID NO: 4011635 - RNA, 14 nt, Human papillomavirus type 6
cuugcaguggguca

SEQ ID NO: 4011636 - RNA, 18 nt, Human papillomavirus type 6
cuugcagugggucauccu

SEQ ID NO: 4011637 - RNA, 21 nt, Human papillomavirus type 6
gaagcuauagugcaacaccca

SEQ ID NO: 4011638 - RNA, 22 nt, Human papillomavirus type 6
gacugguugugcaguguacaga

SEQ ID NO: 4011639 - RNA, 20 nt, Human papillomavirus type 6
gagcaauuaguagacagcuc

SEQ ID NO: 4011640 - RNA, 21 nt, Human papillomavirus type 6
gaggggucuggguguacagga

SEQ ID NO: 4011641 - RNA, 14 nt, Human papillomavirus type 6
gaugaggaggugga

SEQ ID NO: 4011642 - RNA, 18 nt, Human papillomavirus type 6
gauggagauaccuggcug

SEQ ID NO: 4011643 - RNA, 16 nt, Human papillomavirus type 6
gcacuauagagcugua

SEQ ID NO: 4011644 - RNA, 21 nt, Human papillomavirus type 6
gcacugggccuccucaaaggc

SEQ ID NO: 4011645 - RNA, 22 nt, Human papillomavirus type 6
gcaguguacagaaacagacauc

SEQ ID NO: 4011646 - RNA, 14 nt, Human papillomavirus type 6
gccaaaggugucag

SEQ ID NO: 4011647 - RNA, 17 nt, Human papillomavirus type 6
gcgacugugcaggaccu

SEQ ID NO: 4011648 - RNA, 22 nt, Human papillomavirus type 6
gcuaacaugucaauuuaaugau

SEQ ID NO: 4011649 - RNA, 21 nt, Human papillomavirus type 6
gcuguuucaaaccagggaacu

SEQ ID NO: 4011650 - RNA, 14 nt, Human papillomavirus type 6
ggaagcacaggcau

SEQ ID NO: 4011651 - RNA, 21 nt, Human papillomavirus type 6
ggacgauucagguacagaaaa

SEQ ID NO: 4011652 - RNA, 22 nt, Human papillomavirus type 6
ggaggacaguggguaugacaug

SEQ ID NO: 4011653 - RNA, 17 nt, Human papillomavirus type 6
gggcaggggacagccau

SEQ ID NO: 4011654 - RNA, 17 nt, Human papillomavirus type 6
ggguaaaggugcauagu

SEQ ID NO: 4011655 - RNA, 21 nt, Human papillomavirus type 6
ggugauuauauauauaugaau

SEQ ID NO: 4011656 - RNA, 22 nt, Human papillomavirus type 6
gguggacuuuauugaugacagc

SEQ ID NO: 4011657 - RNA, 15 nt, Human papillomavirus type 6
guaacccuggacagg

SEQ ID NO: 4011658 - RNA, 18 nt, Human papillomavirus type 6
guagaagcuauagugcaa

SEQ ID NO: 4011659 - RNA, 13 nt, Human papillomavirus type 6
guauauauguaaa

SEQ ID NO: 4011660 - RNA, 16 nt, Human papillomavirus type 6
guauauguauguguug

SEQ ID NO: 4011661 - RNA, 21 nt, Human papillomavirus type 6
guaugggcaugcacaggccua

SEQ ID NO: 4011662 - RNA, 21 nt, Human papillomavirus type 6
gucaaugcaccuauuguaauu

SEQ ID NO: 4011663 - RNA, 17 nt, Human papillomavirus type 6
gucaauuuaaugaugga

SEQ ID NO: 4011664 - RNA, 22 nt, Human papillomavirus type 6
gucaggauaucaauacagggua

SEQ ID NO: 4011665 - RNA, 13 nt, Human papillomavirus type 6
guccgaagcaaaa

SEQ ID NO: 4011666 - RNA, 16 nt, Human papillomavirus type 6
guugugcaguguacag

SEQ ID NO: 4011667 - RNA, 14 nt, Human papillomavirus type 6
uaaacaaacaugua

SEQ ID NO: 4011668 - RNA, 24 nt, Human papillomavirus type 6
uaacacugcuuuuauacuuacuau

SEQ ID NO: 4011669 - RNA, 14 nt, Human papillomavirus type 6
uaacccuggacagg

SEQ ID NO: 4011670 - RNA, 13 nt, Human papillomavirus type 6
uaauacugccugu

SEQ ID NO: 4011671 - RNA, 14 nt, Human papillomavirus type 6
uacagaaacagaca

SEQ ID NO: 4011672 - RNA, 16 nt, Human papillomavirus type 6
uacuaacuuuacuugu

SEQ ID NO: 4011673 - RNA, 16 nt, Human papillomavirus type 6
uagcaucauacuuauu

SEQ ID NO: 4011674 - RNA, 14 nt, Human papillomavirus type 6
uagccgaggcagug

SEQ ID NO: 4011675 - RNA, 22 nt, Human papillomavirus type 6
uauaauugcauuuguuguaugu

SEQ ID NO: 4011676 - RNA, 14 nt, Human papillomavirus type 6
uauagccgaggcag

SEQ ID NO: 4011677 - RNA, 12 nt, Human papillomavirus type 6
uauauaaagcaa

SEQ ID NO: 4011678 - RNA, 20 nt, Human papillomavirus type 6
uauauacaccacuacauugu

SEQ ID NO: 4011679 - RNA, 15 nt, Human papillomavirus type 6
uauauauaugugugu

SEQ ID NO: 4011680 - RNA, 22 nt, Human papillomavirus type 6
uauguacuguuauauauaugug

SEQ ID NO: 4011681 - RNA, 18 nt, Human papillomavirus type 6
uauguacuguuauaugug

SEQ ID NO: 4011682 - RNA, 21 nt, Human papillomavirus type 6
uauguacuguuauaugugugu

SEQ ID NO: 4011683 - RNA, 15 nt, Human papillomavirus type 6
uauguauauguaugu

SEQ ID NO: 4011684 - RNA, 13 nt, Human papillomavirus type 6
uauguguguauau

SEQ ID NO: 4011685 - RNA, 16 nt, Human papillomavirus type 6
uauguguuguguauau

SEQ ID NO: 4011686 - RNA, 23 nt, Human papillomavirus type 6
uccacgauuggacgccauuaaac

SEQ ID NO: 4011687 - RNA, 14 nt, Human papillomavirus type 6
uccuauaaacacua

SEQ ID NO: 4011688 - RNA, 16 nt, Human papillomavirus type 6
ucucuuuuugauccca

SEQ ID NO: 4011689 - RNA, 15 nt, Human papillomavirus type 6
ugauacugcugguga

SEQ ID NO: 4011690 - RNA, 15 nt, Human papillomavirus type 6
ugaugacagcaauau

SEQ ID NO: 4011691 - RNA, 20 nt, Human papillomavirus type 6
ugauggagauaccuggcugg

SEQ ID NO: 4011692 - RNA, 17 nt, Human papillomavirus type 6
ugcaguguacagaaaca

SEQ ID NO: 4011693 - RNA, 17 nt, Human papillomavirus type 6
ugcauuggaaaugcaua

SEQ ID NO: 4011694 - RNA, 23 nt, Human papillomavirus type 6
ugccauugaaaugcaaaugcauu

SEQ ID NO: 4011695 - RNA, 15 nt, Human papillomavirus type 6
uggcacauaguaggg

SEQ ID NO: 4011696 - RNA, 18 nt, Human papillomavirus type 6
ugggaacacuaaacauag

SEQ ID NO: 4011697 - RNA, 21 nt, Human papillomavirus type 6
ugguagaagcuauagugcaac

SEQ ID NO: 4011698 - RNA, 21 nt, Human papillomavirus type 6
uggugguaacccuggacagga

SEQ ID NO: 4011699 - RNA, 22 nt, Human papillomavirus type 6
uguacacaucugugcuaguacu

SEQ ID NO: 4011700 - RNA, 16 nt, Human papillomavirus type 6
uguacagaaacagaca

SEQ ID NO: 4011701 - RNA, 20 nt, Human papillomavirus type 6
uguacugcauuggaaaugca

SEQ ID NO: 4011702 - RNA, 20 nt, Human papillomavirus type 6
uguauccaaaguuguugcca

SEQ ID NO: 4011703 - RNA, 14 nt, Human papillomavirus type 6
uguauguacuguua

SEQ ID NO: 4011704 - RNA, 12 nt, Human papillomavirus type 6
uguguuacuguc

SEQ ID NO: 4011705 - RNA, 13 nt, Human papillomavirus type 6
uguguuguguaua

SEQ ID NO: 4011706 - RNA, 14 nt, Human papillomavirus type 6
uuauacuuacuauu

SEQ ID NO: 4011707 - RNA, 16 nt, Human papillomavirus type 6
uuaugaaauguggcaa

SEQ ID NO: 4011708 - RNA, 18 nt, Human papillomavirus type 6
uuauguguguaauguaau

SEQ ID NO: 4011709 - RNA, 17 nt, Human papillomavirus type 6
uuggaagcacaggcauu

SEQ ID NO: 4011710 - RNA, 15 nt, Human papillomavirus type 6
uuguguaauguguau

SEQ ID NO: 4011711 - RNA, 21 nt, Human papillomavirus type 6
uuuuaucaugccagcaguucu

SEQ ID NO: 4011712 - RNA, 14 nt, Human papillomavirus type 8
aaacaggcagguac

SEQ ID NO: 4011713 - RNA, 20 nt, Human papillomavirus type 8
aacagccugacaaugccaau

SEQ ID NO: 4011714 - RNA, 22 nt, Human papillomavirus type 8
aauguuuguuuauucugacuca

SEQ ID NO: 4011715 - RNA, 16 nt, Human papillomavirus type 8
acacuugaggcacaga

SEQ ID NO: 4011716 - RNA, 13 nt, Human papillomavirus type 8
acagacucaguuu

SEQ ID NO: 4011717 - RNA, 21 nt, Human papillomavirus type 8
aaacacuugaggcacagauug

SEQ ID NO: 4011718 - RNA, 16 nt, Human papillomavirus type 8
aacaggagugugagca

SEQ ID NO: 4011719 - RNA, 19 nt, Human papillomavirus type 8
aacuguauucaaaauuguu

SEQ ID NO: 4011720 - RNA, 16 nt, Human papillomavirus type 8
aagaauugcuguucag

SEQ ID NO: 4011721 - RNA, 22 nt, Human papillomavirus type 8
aagaauugcuguucagagaccu

SEQ ID NO: 4011722 - RNA, 14 nt, Human papillomavirus type 8
aagcaaaagccaag

SEQ ID NO: 4011723 - RNA, 17 nt, Human papillomavirus type 8
acaacaguugcugacaa

SEQ ID NO: 4011724 - RNA, 13 nt, Human papillomavirus type 8
acaaugaagcuga

SEQ ID NO: 4011725 - RNA, 22 nt, Human papillomavirus type 8
acagauggcaguguggcaaucg

SEQ ID NO: 4011726 - RNA, 16 nt, Human papillomavirus type 8
acauuaguggacacaa

SEQ ID NO: 4011727 - RNA, 15 nt, Human papillomavirus type 8
accggccgugguaca

SEQ ID NO: 4011728 - RNA, 21 nt, Human papillomavirus type 8
accguguggcugcagcugcug

SEQ ID NO: 4011729 - RNA, 22 nt, Human papillomavirus type 8
acuauguggaagcacauuuacu

SEQ ID NO: 4011730 - RNA, 21 nt, Human papillomavirus type 8
acucuuaacaaugaagcugaa

SEQ ID NO: 4011731 - RNA, 15 nt, Human papillomavirus type 8
agaaaccgaccgcac

SEQ ID NO: 4011732 - RNA, 21 nt, Human papillomavirus type 8
agaaaucugaguuugcagaug

SEQ ID NO: 4011733 - RNA, 15 nt, Human papillomavirus type 8
agaagcgguaggucc

SEQ ID NO: 4011734 - RNA, 20 nt, Human papillomavirus type 8
agacaucgaaagaacuguau

SEQ ID NO: 4011735 - RNA, 17 nt, Human papillomavirus type 8
agccaagcaggcuauag

SEQ ID NO: 4011736 - RNA, 17 nt, Human papillomavirus type 8
aggaauguuuguuuauu

SEQ ID NO: 4011737 - RNA, 17 nt, Human papillomavirus type 8
aggucgccugccaagga

SEQ ID NO: 4011738 - RNA, 22 nt, Human papillomavirus type 8
aguugccaaaacagacucaguu

SEQ ID NO: 4011739 - RNA, 20 nt, Human papillomavirus type 8
aucggcuaccgguaagguuu

SEQ ID NO: 4011740 - RNA, 15 nt, Human papillomavirus type 8
auguagacaaugauu

SEQ ID NO: 4011741 - RNA, 15 nt, Human papillomavirus type 8
auguugcagcugcag

SEQ ID NO: 4011742 - RNA, 16 nt, Human papillomavirus type 8
auguuucucaugaggu

SEQ ID NO: 4011743 - RNA, 16 nt, Human papillomavirus type 8
auucaaaauuguugca

SEQ ID NO: 4011744 - RNA, 16 nt, Human papillomavirus type 8
auucugacucagcauc

SEQ ID NO: 4011745 - RNA, 17 nt, Human papillomavirus type 8
auucugacucagcauca

SEQ ID NO: 4011746 - RNA, 12 nt, Human papillomavirus type 8
caaacaacaguu

SEQ ID NO: 4011747 - RNA, 15 nt, Human papillomavirus type 8
caaagaacuaacauc

SEQ ID NO: 4011748 - RNA, 22 nt, Human papillomavirus type 8
caaagcacggaugaauacauuc

SEQ ID NO: 4011749 - RNA, 21 nt, Human papillomavirus type 8
caagaauugcuguucagagac

SEQ ID NO: 4011750 - RNA, 17 nt, Human papillomavirus type 8
caauuauuugagcgaga

SEQ ID NO: 4011751 - RNA, 12 nt, Human papillomavirus type 8
cacaccugugga

SEQ ID NO: 4011752 - RNA, 17 nt, Human papillomavirus type 8
cagauugcgcauuggcu

SEQ ID NO: 4011753 - RNA, 20 nt, Human papillomavirus type 8
cagcugcagucacuacagaa

SEQ ID NO: 4011754 - RNA, 23 nt, Human papillomavirus type 8
caggaaacggaggaggagcuaga

SEQ ID NO: 4011755 - RNA, 20 nt, Human papillomavirus type 8
cauuuacuacacugaugcag

SEQ ID NO: 4011756 - RNA, 12 nt, Human papillomavirus type 8
ccugccaaggaa

SEQ ID NO: 4011757 - RNA, 20 nt, Human papillomavirus type 8
cuaaagaaggguuaagugag

SEQ ID NO: 4011758 - RNA, 18 nt, Human papillomavirus type 8
cugcagucacuacagaaa

SEQ ID NO: 4011759 - RNA, 21 nt, Human papillomavirus type 8
cuuauaagaaugcuccagaaa

SEQ ID NO: 4011760 - RNA, 17 nt, Human papillomavirus type 8
gaaaagaagcuguguug

SEQ ID NO: 4011761 - RNA, 18 nt, Human papillomavirus type 8
gagcuagacaucgaaaga

SEQ ID NO: 4011762 - RNA, 22 nt, Human papillomavirus type 8
gauccaaauagguuugcacugg

SEQ ID NO: 4011763 - RNA, 17 nt, Human papillomavirus type 8
gcaaaagccaagcaggc

SEQ ID NO: 4011764 - RNA, 16 nt, Human papillomavirus type 8
gccaauacugacagac

SEQ ID NO: 4011765 - RNA, 19 nt, Human papillomavirus type 8
gcuacuaacacacuaacau

SEQ ID NO: 4011766 - RNA, 13 nt, Human papillomavirus type 8
gcuaggcaaaaag

SEQ ID NO: 4011767 - RNA, 17 nt, Human papillomavirus type 8
gcuccagaaaaucauuu

SEQ ID NO: 4011768 - RNA, 21 nt, Human papillomavirus type 8
gcuguucagagaccuacagcu

SEQ ID NO: 4011769 - RNA, 18 nt, Human papillomavirus type 8
ggaaauacucccacagug

SEQ ID NO: 4011770 - RNA, 21 nt, Human papillomavirus type 8
ggaauaauguugcagcugcag

SEQ ID NO: 4011771 - RNA, 23 nt, Human papillomavirus type 8
gggacaaccauuagguguuggga

SEQ ID NO: 4011772 - RNA, 21 nt, Human papillomavirus type 8
gucugaagcaaaagccaagca

SEQ ID NO: 4011773 - RNA, 15 nt, Human papillomavirus type 8
gugagcagagcgagg

SEQ ID NO: 4011774 - RNA, 19 nt, Human papillomavirus type 8
guucaaacaugcucggauu

SEQ ID NO: 4011775 - RNA, 19 nt, Human papillomavirus type 8
guuuguuuauucugacuca

SEQ ID NO: 4011776 - RNA, 22 nt, Human papillomavirus type 8
uaacucuuaacaaugaagcuga

SEQ ID NO: 4011777 - RNA, 16 nt, Human papillomavirus type 8
uauuuuggaagcugaa

SEQ ID NO: 4011778 - RNA, 20 nt, Human papillomavirus type 8
ugaacaauuauuugagcgag

SEQ ID NO: 4011779 - RNA, 15 nt, Human papillomavirus type 8
ugacagacugcucac

SEQ ID NO: 4011780 - RNA, 12 nt, Human papillomavirus type 8
uugucaacgcaa

SEQ ID NO: 4011781 - RNA, 14 nt, Human papillomavirus type 8
acauucaaagaacu

SEQ ID NO: 4011782 - RNA, 22 nt, Human papillomavirus type 8
accaguggccagggugcaaagc

SEQ ID NO: 4011783 - RNA, 12 nt, Human papillomavirus type 8
acuaacacacua

SEQ ID NO: 4011784 - RNA, 13 nt, Human papillomavirus type 8
acuaacacacuaa

SEQ ID NO: 4011785 - RNA, 19 nt, Human papillomavirus type 8
agaauagaccauguucguu

SEQ ID NO: 4011786 - RNA, 18 nt, Human papillomavirus type 8
agaauugcuguucagaga

SEQ ID NO: 4011787 - RNA, 13 nt, Human papillomavirus type 8
agacuuauaagaa

SEQ ID NO: 4011788 - RNA, 17 nt, Human papillomavirus type 8
agauacagacucagaua

SEQ ID NO: 4011789 - RNA, 19 nt, Human papillomavirus type 8
aggaauaauguugcagcug

SEQ ID NO: 4011790 - RNA, 21 nt, Human papillomavirus type 8
aggaccuuucaagaauugcug

SEQ ID NO: 4011791 - RNA, 19 nt, Human papillomavirus type 8
aguugaccugcuuugugaa

SEQ ID NO: 4011792 - RNA, 15 nt, Human papillomavirus type 8
auaugucuguauaca

SEQ ID NO: 4011793 - RNA, 14 nt, Human papillomavirus type 8
aucugaguuugcag

SEQ ID NO: 4011794 - RNA, 17 nt, Human papillomavirus type 8
auuagguguugggagca

SEQ ID NO: 4011795 - RNA, 17 nt, Human papillomavirus type 8
caaucuauuuuggcagc

SEQ ID NO: 4011796 - RNA, 22 nt, Human papillomavirus type 8
cacauuuaucaaaccugcaaac

SEQ ID NO: 4011797 - RNA, 18 nt, Human papillomavirus type 8
caccaguggccagggugc

SEQ ID NO: 4011798 - RNA, 20 nt, Human papillomavirus type 8
cagagaccuacagcuucugu

SEQ ID NO: 4011799 - RNA, 21 nt, Human papillomavirus type 8
cagaugagccuuggacauuag

SEQ ID NO: 4011800 - RNA, 19 nt, Human papillomavirus type 8
caggagugugagcagagcg

SEQ ID NO: 4011801 - RNA, 23 nt, Human papillomavirus type 8
ccaggauuggauaucaaccugug

SEQ ID NO: 4011802 - RNA, 18 nt, Human papillomavirus type 8
ccaguugaccugcuuugu

SEQ ID NO: 4011803 - RNA, 14 nt, Human papillomavirus type 8
ccaucccuauuuua

SEQ ID NO: 4011804 - RNA, 21 nt, Human papillomavirus type 8
ccuggaucagggaaauucucu

SEQ ID NO: 4011805 - RNA, 15 nt, Human papillomavirus type 8
cgaaaagaagcugug

SEQ ID NO: 4011806 - RNA, 16 nt, Human papillomavirus type 8
cguguuggaaauacuc

SEQ ID NO: 4011807 - RNA, 19 nt, Human papillomavirus type 8
cuauggacauacugccaau

SEQ ID NO: 4011808 - RNA, 16 nt, Human papillomavirus type 8
cuauuuuaauaaagug

SEQ ID NO: 4011809 - RNA, 20 nt, Human papillomavirus type 8
cugauucggguaucaggacc

SEQ ID NO: 4011810 - RNA, 16 nt, Human papillomavirus type 8
cugucgcgcagcucag

SEQ ID NO: 4011811 - RNA, 20 nt, Human papillomavirus type 8
cuuauaagaaugcuccagaa

SEQ ID NO: 4011812 - RNA, 18 nt, Human papillomavirus type 8
gaacaauuauuugagcga

SEQ ID NO: 4011813 - RNA, 17 nt, Human papillomavirus type 8
gacaaccauuagguguu

SEQ ID NO: 4011814 - RNA, 14 nt, Human papillomavirus type 8
gacauacugccaau

SEQ ID NO: 4011815 - RNA, 23 nt, Human papillomavirus type 8
gaccgcacccgguacauaaaggu

SEQ ID NO: 4011816 - RNA, 20 nt, Human papillomavirus type 8
gaccuuucaagaauugcugu

SEQ ID NO: 4011817 - RNA, 15 nt, Human papillomavirus type 8
gauggcaguguggca

SEQ ID NO: 4011818 - RNA, 22 nt, Human papillomavirus type 8
gauuggauaucaaccugugccg

SEQ ID NO: 4011819 - RNA, 19 nt, Human papillomavirus type 8
gcagagcaggacagcggag

SEQ ID NO: 4011820 - RNA, 21 nt, Human papillomavirus type 8
gcuagacaucgaaagaacugu

SEQ ID NO: 4011821 - RNA, 17 nt, Human papillomavirus type 8
gcuauaggaauaauguu

SEQ ID NO: 4011822 - RNA, 12 nt, Human papillomavirus type 8
ggcagugcuggu

SEQ ID NO: 4011823 - RNA, 22 nt, Human papillomavirus type 8
ggggccugguauccguguugga

SEQ ID NO: 4011824 - RNA, 19 nt, Human papillomavirus type 8
guauacacuauguggaagc

SEQ ID NO: 4011825 - RNA, 21 nt, Human papillomavirus type 8
gugagauacaaccugaagugu

SEQ ID NO: 4011826 - RNA, 16 nt, Human papillomavirus type 8
gugagcagagcgagga

SEQ ID NO: 4011827 - RNA, 18 nt, Human papillomavirus type 8
guguauuuuggaagcuga

SEQ ID NO: 4011828 - RNA, 12 nt, Human papillomavirus type 8
guucguucaaac

SEQ ID NO: 4011829 - RNA, 16 nt, Human papillomavirus type 8
guuuucgguacaaaac

SEQ ID NO: 4011830 - RNA, 16 nt, Human papillomavirus type 8
uaacaucuacuaucac

SEQ ID NO: 4011831 - RNA, 22 nt, Human papillomavirus type 8
uaucaaccugugccgccacuag

SEQ ID NO: 4011832 - RNA, 22 nt, Human papillomavirus type 8
ucccaaaguaucgggaaaucaa

SEQ ID NO: 4011833 - RNA, 14 nt, Human papillomavirus type 8
ugaaguuaagugag

SEQ ID NO: 4011834 - RNA, 11 nt, Human papillomavirus type 8
uuggcaucucc

SEQ ID NO: 4011835 - RNA, 13 nt, Human papillomavirus type 8
gcgguaacugcaa

SEQ ID NO: 4011836 - RNA, 15 nt, Human papillomavirus type 8
gcuaggcaaaaaggc

SEQ ID NO: 4011837 - RNA, 20 nt, Human papillomavirus type 8
gcucuuugcagagcaggaca

SEQ ID NO: 4011838 - RNA, 15 nt, Human papillomavirus type 8
ggcucuuugcagagc

SEQ ID NO: 4011839 - RNA, 11 nt, Human papillomavirus type 8
gguaacugcaa

SEQ ID NO: 4011840 - RNA, 21 nt, Human papillomavirus type 8
guacaaaaccauaaacuuuua

SEQ ID NO: 4011841 - RNA, 18 nt, Human papillomavirus type 8
guauucaaggaauguuug

SEQ ID NO: 4011842 - RNA, 14 nt, Human papillomavirus type 8
guccuaaagcuguc

SEQ ID NO: 4011843 - RNA, 13 nt, Human papillomavirus type 8
gucgccugccaag

SEQ ID NO: 4011844 - RNA, 13 nt, Human papillomavirus type 8
guugagcaaacaa

SEQ ID NO: 4011845 - RNA, 19 nt, Human papillomavirus type 8
guuuauucugacucagcau

SEQ ID NO: 4011846 - RNA, 22 nt, Human papillomavirus type 8
uagacaucgaaagaacuguauu

SEQ ID NO: 4011847 - RNA, 21 nt, Human papillomavirus type 8
uauggcagugcugguguauuu

SEQ ID NO: 4011848 - RNA, 18 nt, Human papillomavirus type 8
ucacucuaccuaagaaac

SEQ ID NO: 4011849 - RNA, 15 nt, Human papillomavirus type 8
ucacugucaccucag

SEQ ID NO: 4011850 - RNA, 17 nt, Human papillomavirus type 8
ucaguuuagugccagaa

SEQ ID NO: 4011851 - RNA, 18 nt, Human papillomavirus type 8
uccguguuggaaauacuc

SEQ ID NO: 4011852 - RNA, 14 nt, Human papillomavirus type 8
ucugucacacacau

SEQ ID NO: 4011853 - RNA, 13 nt, Human papillomavirus type 8
ucuuugcagagca

SEQ ID NO: 4011854 - RNA, 13 nt, Human papillomavirus type 8
ugaguaguugcca

SEQ ID NO: 4011855 - RNA, 20 nt, Human papillomavirus type 8
ugcucggauuaggucgccug

SEQ ID NO: 4011856 - RNA, 17 nt, Human papillomavirus type 8
ugcuuugugaagaggaa

SEQ ID NO: 4011857 - RNA, 19 nt, Human papillomavirus type 8
uuugcuuuuuacuauauuu

SEQ ID NO: 4011858 - RNA, 22 nt, Human papillomavirus type 8
aacucuuaacaaugaagcugaa

SEQ ID NO: 4011859 - RNA, 14 nt, Human papillomavirus type 8
aauacauucaaaga

SEQ ID NO: 4011860 - RNA, 17 nt, Human papillomavirus type 8
acagauggcaguguggc

SEQ ID NO: 4011861 - RNA, 22 nt, Human papillomavirus type 8
acauuacagguucccaaaguau

SEQ ID NO: 4011862 - RNA, 22 nt, Human papillomavirus type 8
accguuuucgguacaaaaccau

SEQ ID NO: 4011863 - RNA, 13 nt, Human papillomavirus type 8
accuuucaagaau

SEQ ID NO: 4011864 - RNA, 13 nt, Human papillomavirus type 8
acuagcagugucu

SEQ ID NO: 4011865 - RNA, 11 nt, Human papillomavirus type 8
acuauguggaa

SEQ ID NO: 4011866 - RNA, 18 nt, Human papillomavirus type 8
acugccaaucgacacuau

SEQ ID NO: 4011867 - RNA, 15 nt, Human papillomavirus type 8
acuguauucaaaauu

SEQ ID NO: 4011868 - RNA, 15 nt, Human papillomavirus type 8
agaaauccaagcgaa

SEQ ID NO: 4011869 - RNA, 13 nt, Human papillomavirus type 8
agcugcagucacu

SEQ ID NO: 4011870 - RNA, 20 nt, Human papillomavirus type 8
agcugcugucaggucaagcu

SEQ ID NO: 4011871 - RNA, 22 nt, Human papillomavirus type 8
agcuguguugcuauauuucgcu

SEQ ID NO: 4011872 - RNA, 18 nt, Human papillomavirus type 8
agguugguaugggcuugc

SEQ ID NO: 4011873 - RNA, 12 nt, Human papillomavirus type 8
aucgggaaauca

SEQ ID NO: 4011874 - RNA, 16 nt, Human papillomavirus type 8
auguucguucaaacau

SEQ ID NO: 4011875 - RNA, 20 nt, Human papillomavirus type 8
auuacaaaaacuaaaacgaa

SEQ ID NO: 4011876 - RNA, 22 nt, Human papillomavirus type 8
auuuuaaaauauggcagugcug

SEQ ID NO: 4011877 - RNA, 15 nt, Human papillomavirus type 8
auuuuggaagcugaa

SEQ ID NO: 4011878 - RNA, 16 nt, Human papillomavirus type 8
caaacgaacaggaaac

SEQ ID NO: 4011879 - RNA, 17 nt, Human papillomavirus type 8
caauauuuuaaaauaug

SEQ ID NO: 4011880 - RNA, 14 nt, Human papillomavirus type 8
cacuagcagugucu

SEQ ID NO: 4011881 - RNA, 23 nt, Human papillomavirus type 8
cagacucaguuuagugccagaau

SEQ ID NO: 4011882 - RNA, 16 nt, Human papillomavirus type 8
cagagcaggacagcgg

SEQ ID NO: 4011883 - RNA, 22 nt, Human papillomavirus type 8
caggagugugagcagagcgagg

SEQ ID NO: 4011884 - RNA, 23 nt, Human papillomavirus type 8
ccaaucuauuuuggcagcgcuuu

SEQ ID NO: 4011885 - RNA, 22 nt, Human papillomavirus type 8
cgaaggcucuuugcagagcagg

SEQ ID NO: 4011886 - RNA, 14 nt, Human papillomavirus type 8
cgccugccaaggaa

SEQ ID NO: 4011887 - RNA, 11 nt, Human papillomavirus type 8
cggaggaggag

SEQ ID NO: 4011888 - RNA, 20 nt, Human papillomavirus type 8
cuauaggaauaauguugcag

SEQ ID NO: 4011889 - RNA, 15 nt, Human papillomavirus type 8
cucugucacacacau

SEQ ID NO: 4011890 - RNA, 18 nt, Human papillomavirus type 8
cuuaacaaugaagcugaa

SEQ ID NO: 4011891 - RNA, 18 nt, Human papillomavirus type 8
cuugccaaucuauuuugg

SEQ ID NO: 4011892 - RNA, 14 nt, Human papillomavirus type 8
gaaaagaagcugug

SEQ ID NO: 4011893 - RNA, 19 nt, Human papillomavirus type 8
gaacuaacaucuacuauca

SEQ ID NO: 4011894 - RNA, 17 nt, Human papillomavirus type 8
gacagacugcucacugu

SEQ ID NO: 4011895 - RNA, 13 nt, Human papillomavirus type 8
gacuuauuagaua

SEQ ID NO: 4011896 - RNA, 14 nt, Human papillomavirus type 8
gaguaguugccaaa

SEQ ID NO: 4011897 - RNA, 13 nt, Human papillomavirus type 8
gagugugagcaga

SEQ ID NO: 4011898 - RNA, 15 nt, Human papillomavirus type 8
gauaaguggcacaaa

SEQ ID NO: 4011899 - RNA, 16 nt, Human papillomavirus type 8
gauccaaauagguuug

SEQ ID NO: 4011900 - RNA, 15 nt, Human papillomavirus type 8
gaugaauacauucaa

SEQ ID NO: 4011901 - RNA, 15 nt, Human papillomavirus type 8
gauguagacaaugau

SEQ ID NO: 4011902 - RNA, 19 nt, Human papillomavirus type 8
gcaaacaggcagguacaug

SEQ ID NO: 4011903 - RNA, 19 nt, Human papillomavirus type 8
gcaaagcacggaugaauac

SEQ ID NO: 4011904 - RNA, 21 nt, Human papillomavirus type 8
gccaaucuauuuuggcagcgc

SEQ ID NO: 4011905 - RNA, 14 nt, Human papillomavirus type 8
ggaagcacauuuac

SEQ ID NO: 4011906 - RNA, 16 nt, Human papillomavirus type 8
ggacauuaguggacac

SEQ ID NO: 4011907 - RNA, 17 nt, Human papillomavirus type 8
ggagugugagcagagcg

SEQ ID NO: 4011908 - RNA, 14 nt, Human papillomavirus type 8
gucugaagcaaaag

SEQ ID NO: 4011909 - RNA, 23 nt, Human papillomavirus type 8
guguugcuauauuucgcuaggca

SEQ ID NO: 4011910 - RNA, 21 nt, Human papillomavirus type 8
uaaagcugucgcgcagcucag

SEQ ID NO: 4011911 - RNA, 14 nt, Human papillomavirus type 8
uaucaaaccugcaa

SEQ ID NO: 4011912 - RNA, 23 nt, Human papillomavirus type 8
ucaacaggagugugagcagagcg

SEQ ID NO: 4011913 - RNA, 16 nt, Human papillomavirus type 8
uccuauggacauacug

SEQ ID NO: 4011914 - RNA, 21 nt, Human papillomavirus type 8
ugaacaauuauuugagcgaga

SEQ ID NO: 4011915 - RNA, 20 nt, Human papillomavirus type 8
ugagcgagauacagacucag

SEQ ID NO: 4011916 - RNA, 11 nt, Human papillomavirus type 8
uggaagcugaa

SEQ ID NO: 4011917 - RNA, 16 nt, Human papillomavirus type 8
uguugaaguuaaguga

SEQ ID NO: 4011918 - RNA, 17 nt, Human papillomavirus type 8
uucaauguuuacaacaa

SEQ ID NO: 4011919 - RNA, 21 nt, Human papillomavirus type 8
uugcagaggcuuagaaaucag

SEQ ID NO: 4011920 - RNA, 18 nt, Human papillomavirus type 8
uugcagaugagccuugga

SEQ ID NO: 4011921 - RNA, 18 nt, Human papillomavirus type 8
uugucaacgcaacugauu

SEQ ID NO: 4011922 - RNA, 21 nt, Human papillomavirus type 8
aaaguugagcaaacaacaguu

SEQ ID NO: 4011923 - RNA, 16 nt, Human papillomavirus type 8
aacucuuaacaaugaa

SEQ ID NO: 4011924 - RNA, 15 nt, Human papillomavirus type 8
aacuguauucaaaau

SEQ ID NO: 4011925 - RNA, 22 nt, Human papillomavirus type 8
aagagagacucugucacacaca

SEQ ID NO: 4011926 - RNA, 19 nt, Human papillomavirus type 8
aaggcucuuugcagagcag

SEQ ID NO: 4011927 - RNA, 13 nt, Human papillomavirus type 8
aaggguuaaguga

SEQ ID NO: 4011928 - RNA, 20 nt, Human papillomavirus type 8
acaaugaagcugaagauguu

SEQ ID NO: 4011929 - RNA, 17 nt, Human papillomavirus type 8
accaguggccagggugc

SEQ ID NO: 4011930 - RNA, 18 nt, Human papillomavirus type 8
accaguggccagggugca

SEQ ID NO: 4011931 - RNA, 14 nt, Human papillomavirus type 8
accuacagcuucug

SEQ ID NO: 4011932 - RNA, 22 nt, Human papillomavirus type 8
acugauucggguaucaggaccu

SEQ ID NO: 4011933 - RNA, 22 nt, Human papillomavirus type 8
agacaaugauuuugaacaauua

SEQ ID NO: 4011934 - RNA, 13 nt, Human papillomavirus type 8
agacgauaagugg

SEQ ID NO: 4011935 - RNA, 14 nt, Human papillomavirus type 8
agacucagauauuu

SEQ ID NO: 4011936 - RNA, 17 nt, Human papillomavirus type 8
agagacuuauaagaaug

SEQ ID NO: 4011937 - RNA, 18 nt, Human papillomavirus type 8
agccuuggacauuagugg

SEQ ID NO: 4011938 - RNA, 20 nt, Human papillomavirus type 8
agccuuggacauuaguggac

SEQ ID NO: 4011939 - RNA, 19 nt, Human papillomavirus type 8
agcuaacucuuaacaauga

SEQ ID NO: 4011940 - RNA, 17 nt, Human papillomavirus type 8
agggaaauucucuggaa

SEQ ID NO: 4011941 - RNA, 13 nt, Human papillomavirus type 8
aggucgccugcca

SEQ ID NO: 4011942 - RNA, 16 nt, Human papillomavirus type 8
auaaacagccugacaa

SEQ ID NO: 4011943 - RNA, 14 nt, Human papillomavirus type 8
auaauggugacaca

SEQ ID NO: 4011944 - RNA, 13 nt, Human papillomavirus type 8
auacauucaaaga

SEQ ID NO: 4011945 - RNA, 14 nt, Human papillomavirus type 8
auauaugauaaaca

SEQ ID NO: 4011946 - RNA, 13 nt, Human papillomavirus type 8
augaagcugaaga

SEQ ID NO: 4011947 - RNA, 21 nt, Human papillomavirus type 8
auggugacacauuacagguuc

SEQ ID NO: 4011948 - RNA, 19 nt, Human papillomavirus type 8
auuacagguucccaaagua

SEQ ID NO: 4011949 - RNA, 18 nt, Human papillomavirus type 8
auuagauaauugugaccu

SEQ ID NO: 4011950 - RNA, 17 nt, Human papillomavirus type 8
auuucaucaacaggagu

SEQ ID NO: 4011951 - RNA, 17 nt, Human papillomavirus type 8
caauacugacagacugc

SEQ ID NO: 4011952 - RNA, 14 nt, Human papillomavirus type 8
cacacuaacauauu

SEQ ID NO: 4011953 - RNA, 13 nt, Human papillomavirus type 8
cacagugguacgg

SEQ ID NO: 4011954 - RNA, 18 nt, Human papillomavirus type 8
ccaaucuauuuuggcagc

SEQ ID NO: 4011955 - RNA, 17 nt, Human papillomavirus type 8
ccauauuucaauguuua

SEQ ID NO: 4011956 - RNA, 14 nt, Human papillomavirus type 8
cccacagugguacg

SEQ ID NO: 4011957 - RNA, 11 nt, Human papillomavirus type 8
ccugcaaacag

SEQ ID NO: 4011958 - RNA, 19 nt, Human papillomavirus type 8
cucuuugcagagcaggaca

SEQ ID NO: 4011959 - RNA, 14 nt, Human papillomavirus type 8
cugcugucagguca

SEQ ID NO: 4011960 - RNA, 16 nt, Human papillomavirus type 8
cuuucgcuuaaaguua

SEQ ID NO: 4011961 - RNA, 22 nt, Human papillomavirus type 8
gaacuguauucaaaauuguugc

SEQ ID NO: 4011962 - RNA, 19 nt, Human papillomavirus type 8
gaaguauugaucuugccaa

SEQ ID NO: 4011963 - RNA, 16 nt, Human papillomavirus type 8
gaccuggaucagggaa

SEQ ID NO: 4011964 - RNA, 11 nt, Human papillomavirus type 8
gaggcacagau

SEQ ID NO: 4011965 - RNA, 22 nt, Human papillomavirus type 8
gcaaacaacaguugcugacaau

SEQ ID NO: 4011966 - RNA, 17 nt, Human papillomavirus type 8
gcagaacaaacacuuga

SEQ ID NO: 4011967 - RNA, 15 nt, Human papillomavirus type 8
gcagagcgaggagca

SEQ ID NO: 4011968 - RNA, 13 nt, Human papillomavirus type 8
gccgugguacagg

SEQ ID NO: 4011969 - RNA, 21 nt, Human parainfluenza virus 1 strain Washington/1964
aaaaccagauaugauguauaa

SEQ ID NO: 4011970 - RNA, 20 nt, Human parainfluenza virus 1 strain Washington/1964
aaagcucccucaaaacaauu

SEQ ID NO: 4011971 - RNA, 18 nt, Human parainfluenza virus 1 strain Washington/1964
aaaucaauauccagagcc

SEQ ID NO: 4011972 - RNA, 13 nt, Human parainfluenza virus 1 strain Washington/1964
aaaucuauccaca

SEQ ID NO: 4011973 - RNA, 14 nt, Human parainfluenza virus 1 strain Washington/1964
aacaagugaaaaua

SEQ ID NO: 4011974 - RNA, 20 nt, Human parainfluenza virus 1 strain Washington/1964
aaccacaaccacagaaaaac

SEQ ID NO: 4011975 - RNA, 15 nt, Human parainfluenza virus 1 strain Washington/1964
aagccagaucaaaag

SEQ ID NO: 4011976 - RNA, 16 nt, Human parainfluenza virus 1 strain Washington/1964
aaggucaaaaagacaa

SEQ ID NO: 4011977 - RNA, 17 nt, Human parainfluenza virus 1 strain Washington/1964
aauauccagagccaacu

SEQ ID NO: 4011978 - RNA, 20 nt, Human parainfluenza virus 1 strain Washington/1964
aauauccagagccaacucaa

SEQ ID NO: 4011979 - RNA, 22 nt, Human parainfluenza virus 1 strain Washington/1964
aauauccagagccaacucaaaa

SEQ ID NO: 4011980 - RNA, 21 nt, Human parainfluenza virus 1 strain Washington/1964
aaucaaaucuauccacaacuu

SEQ ID NO: 4011981 - RNA, 18 nt, Human parainfluenza virus 1 strain Washington/1964
aaucaauauccagagcca

SEQ ID NO: 4011982 - RNA, 14 nt, Human parainfluenza virus 1 strain Washington/1964
aaucccuuuaacug

SEQ ID NO: 4011983 - RNA, 16 nt, Human parainfluenza virus 1 strain Washington/1964
aaucuacaauuucaac

SEQ ID NO: 4011984 - RNA, 20 nt, Human parainfluenza virus 1 strain Washington/1964
acaauuucaaccagcaauca

SEQ ID NO: 4011985 - RNA, 14 nt, Human parainfluenza virus 1 strain Washington/1964
acacagaguucaga

SEQ ID NO: 4011986 - RNA, 18 nt, Human parainfluenza virus 1 strain Washington/1964
acuucaccaaucaggugu

SEQ ID NO: 4011987 - RNA, 19 nt, Human parainfluenza virus 1 strain Washington/1964
acuuggacaauagaagcca

SEQ ID NO: 4011988 - RNA, 20 nt, Human parainfluenza virus 1 strain Washington/1964
acuuggacaauagaagccag

SEQ ID NO: 4011989 - RNA, 21 nt, Human parainfluenza virus 1 strain Washington/1964
acuuggacaauagaagccaga

SEQ ID NO: 4011990 - RNA, 15 nt, Human parainfluenza virus 1 strain Washington/1964
agaaaacaacaauga

SEQ ID NO: 4011991 - RNA, 21 nt, Human parainfluenza virus 1 strain Washington/1964
agaagccagaucaaaaguaag

SEQ ID NO: 4011992 - RNA, 22 nt, Human parainfluenza virus 1 strain Washington/1964
agagccaacucaaaaagcuccc

SEQ ID NO: 4011993 - RNA, 18 nt, Human parainfluenza virus 1 strain Washington/1964
agccaacucaaaaagcuc

SEQ ID NO: 4011994 - RNA, 21 nt, Human parainfluenza virus 1 strain Washington/1964
aggauacuuggacaauagaag

SEQ ID NO: 4011995 - RNA, 19 nt, Human parainfluenza virus 1 strain Washington/1964
aggucaaaaagacaagguu

SEQ ID NO: 4011996 - RNA, 16 nt, Human parainfluenza virus 1 strain Washington/1964
auacaaucaguucaaa

SEQ ID NO: 4011997 - RNA, 18 nt, Human parainfluenza virus 1 strain Washington/1964
auagacauuuauaugaca

SEQ ID NO: 4011998 - RNA, 18 nt, Human parainfluenza virus 1 strain Washington/1964
aucaagacccaacacuau

SEQ ID NO: 4011999 - RNA, 13 nt, Human parainfluenza virus 1 strain Washington/1964
aucaguucaaaua

SEQ ID NO: 4012000 - RNA, 17 nt, Human parainfluenza virus 1 strain Washington/1964
auccagggaucuucaca

SEQ ID NO: 4012001 - RNA, 17 nt, Human parainfluenza virus 1 strain Washington/1964
augaaaucacaacauga

SEQ ID NO: 4012002 - RNA, 23 nt, Human parainfluenza virus 1 strain Washington/1964
augaaucuacaauuucaaccagc

SEQ ID NO: 4012003 - RNA, 13 nt, Human parainfluenza virus 1 strain Washington/1964
augaguuaacaag

SEQ ID NO: 4012004 - RNA, 16 nt, Human parainfluenza virus 1 strain Washington/1964
auuucaaccagcaauc

SEQ ID NO: 4012005 - RNA, 18 nt, Human parainfluenza virus 1 strain Washington/1964
auuucaaccagcaaucaa

SEQ ID NO: 4012006 - RNA, 23 nt, Human parainfluenza virus 1 strain Washington/1964
auuucaaccagcaaucaaaauca

SEQ ID NO: 4012007 - RNA, 13 nt, Human parainfluenza virus 1 strain Washington/1964
caaaaagcucccu

SEQ ID NO: 4012008 - RNA, 23 nt, Human parainfluenza virus 1 strain Washington/1964
caaaaucaauauccagagccaac

SEQ ID NO: 4012009 - RNA, 23 nt, Human parainfluenza virus 1 strain Washington/1964
caaggucaccaucagucuucaca

SEQ ID NO: 4012010 - RNA, 15 nt, Human parainfluenza virus 1 strain Washington/1964
caauauccagagcca

SEQ ID NO: 4012011 - RNA, 16 nt, Human parainfluenza virus 1 strain Washington/1964
cagagccaacucaaaa

SEQ ID NO: 4012012 - RNA, 21 nt, Human parainfluenza virus 1 strain Washington/1964
caggauacuuggacaauagaa

SEQ ID NO: 4012013 - RNA, 18 nt, Human parainfluenza virus 1 strain Washington/1964
cagugauacuacaagguc

SEQ ID NO: 4012014 - RNA, 12 nt, Human parainfluenza virus 1 strain Washington/1964
cauuagcucuaa

SEQ ID NO: 4012015 - RNA, 15 nt, Human parainfluenza virus 1 strain Washington/1964
ccagagccaacucaa

SEQ ID NO: 4012016 - RNA, 21 nt, Human parainfluenza virus 1 strain Washington/1964
cgcauguuaaaaucugcaaau

SEQ ID NO: 4012017 - RNA, 18 nt, Human parainfluenza virus 1 strain Washington/1964
cuaaaucguaccauuaau

SEQ ID NO: 4012018 - RNA, 16 nt, Human parainfluenza virus 1 strain Washington/1964
cuaguuaucgaaaaca

SEQ ID NO: 4012019 - RNA, 16 nt, Human parainfluenza virus 1 strain Washington/1964
cucaaaacaauuaaga

SEQ ID NO: 4012020 - RNA, 20 nt, Human parainfluenza virus 1 strain Washington/1964
cucaauaaugacacccauua

SEQ ID NO: 4012021 - RNA, 14 nt, Human parainfluenza virus 1 strain Washington/1964
cugcaaauuacaaa

SEQ ID NO: 4012022 - RNA, 15 nt, Human parainfluenza virus 1 strain Washington/1964
cuucaccaaucaggu

SEQ ID NO: 4012023 - RNA, 15 nt, Human parainfluenza virus 1 strain Washington/1964
cuucucaucuuuauu

SEQ ID NO: 4012024 - RNA, 16 nt, Human parainfluenza virus 1 strain Washington/1964
cuuggacaauagaagc

SEQ ID NO: 4012025 - RNA, 21 nt, Human parainfluenza virus 1 strain Washington/1964
cuuggacaauagaagccagau

SEQ ID NO: 4012026 - RNA, 13 nt, Human parainfluenza virus 1 strain Washington/1964
cuuuauuaucuaa

SEQ ID NO: 4012027 - RNA, 20 nt, Human parainfluenza virus 1 strain Washington/1964
gagccaacucaaaaagcucc

SEQ ID NO: 4012028 - RNA, 16 nt, Human parainfluenza virus 1 strain Washington/1964
gagccucaagcaucca

SEQ ID NO: 4012029 - RNA, 18 nt, Human parainfluenza virus 1 strain Washington/1964
gauacuuggacaauagaa

SEQ ID NO: 4012030 - RNA, 15 nt, Human parainfluenza virus 1 strain Washington/1964
gaucaaaaguaagaa

SEQ ID NO: 4012031 - RNA, 14 nt, Human parainfluenza virus 1 strain Washington/1964
gaugagauggccaa

SEQ ID NO: 4012032 - RNA, 17 nt, Human parainfluenza virus 1 strain Washington/1964
gcaaucaaaaucaauau

SEQ ID NO: 4012033 - RNA, 23 nt, Human parainfluenza virus 1 strain Washington/1964
gcaaucaaaaucaauauccagag

SEQ ID NO: 4012034 - RNA, 19 nt, Human parainfluenza virus 1 strain Washington/1964
gcucuaggaggucaagagu

SEQ ID NO: 4012035 - RNA, 24 nt, Human parainfluenza virus 1 strain Washington/1964
gcuugaagaugccguucuacaaag

SEQ ID NO: 4012036 - RNA, 16 nt, Human parainfluenza virus 1 strain Washington/1964
ggacaauagaagccag

SEQ ID NO: 4012037 - RNA, 23 nt, Human parainfluenza virus 1 strain Washington/1964
guaccauuaaucaaauacagauc

SEQ ID NO: 4012038 - RNA, 12 nt, Human parainfluenza virus 1 strain Washington/1964
gucuucacaaaa

SEQ ID NO: 4012039 - RNA, 20 nt, Human parainfluenza virus 1 strain Washington/1964
guuaaaaucugcaaauuaca

SEQ ID NO: 4012040 - RNA, 18 nt, Human parainfluenza virus 1 strain Washington/1964
guuuaaagagaugaguua

SEQ ID NO: 4012041 - RNA, 20 nt, Human parainfluenza virus 1 strain Washington/1964
uaaacaugaaucuacaauuu

SEQ ID NO: 4012042 - RNA, 13 nt, Human parainfluenza virus 1 strain Washington/1964
uaaugacacccau

SEQ ID NO: 4012043 - RNA, 20 nt, Human parainfluenza virus 1 strain Washington/1964
uacauacaacaaucaaaucu

SEQ ID NO: 4012044 - RNA, 22 nt, Human parainfluenza virus 1 strain Washington/1964
uaccauuaaucaaauacagauc

SEQ ID NO: 4012045 - RNA, 15 nt, Human parainfluenza virus 1 strain Washington/1964
uacuuaaacaaauuc

SEQ ID NO: 4012046 - RNA, 23 nt, Human parainfluenza virus 1 strain Washington/1964
uacuuggacaauagaagccagau

SEQ ID NO: 4012047 - RNA, 12 nt, Human parainfluenza virus 1 strain Washington/1964
uauccagagcca

SEQ ID NO: 4012048 - RNA, 14 nt, Human parainfluenza virus 1 strain Washington/1964
uaugacaaauagaa

SEQ ID NO: 4012049 - RNA, 18 nt, Human parainfluenza virus 1 strain Washington/1964
ucaguucaaauaagaaaa

SEQ ID NO: 4012050 - RNA, 18 nt, Human parainfluenza virus 1 strain Washington/1964
ucauccagggaucuucac

SEQ ID NO: 4012051 - RNA, 23 nt, Human parainfluenza virus 1 strain Washington/1964
uccguccacugaaaaacacacuc

SEQ ID NO: 4012052 - RNA, 22 nt, Human parainfluenza virus 1 strain Washington/1964
ucuucacaaaagggaaagacaa

SEQ ID NO: 4012053 - RNA, 11 nt, Human parainfluenza virus 1 strain Washington/1964
ucuucacaaac

SEQ ID NO: 4012054 - RNA, 20 nt, Human parainfluenza virus 1 strain Washington/1964
ugaaaucacaacaugaauuu

SEQ ID NO: 4012055 - RNA, 19 nt, Human parainfluenza virus 1 strain Washington/1964
ugaagaugccguucuacaa

SEQ ID NO: 4012056 - RNA, 16 nt, Human parainfluenza virus 1 strain Washington/1964
ugacaaauagaauaag

SEQ ID NO: 4012057 - RNA, 21 nt, Human parainfluenza virus 1 strain Washington/1964
ugagccucaagcauccaaugc

SEQ ID NO: 4012058 - RNA, 22 nt, Human parainfluenza virus 1 strain Washington/1964
uggaagcucuaggaggucaaga

SEQ ID NO: 4012059 - RNA, 22 nt, Human parainfluenza virus 1 strain Washington/1964
ugugaaaaccagauaugaugua

SEQ ID NO: 4012060 - RNA, 20 nt, Human parainfluenza virus 1 strain Washington/1964
uucacaaaagggaaagacaa

SEQ ID NO: 4012061 - RNA, 15 nt, Human parainfluenza virus 1 strain Washington/1964
cagagccaacucaaa

SEQ ID NO: 4012062 - RNA, 18 nt, Human parainfluenza virus 1 strain Washington/1964
cagaucaaaaguaagaaa

SEQ ID NO: 4012063 - RNA, 14 nt, Human parainfluenza virus 1 strain Washington/1964
cagggaucuucaca

SEQ ID NO: 4012064 - RNA, 17 nt, Human parainfluenza virus 1 strain Washington/1964
cauuaaucaaauacaga

SEQ ID NO: 4012065 - RNA, 19 nt, Human parainfluenza virus 1 strain Washington/1964
ccaacacuauaucaauuau

SEQ ID NO: 4012066 - RNA, 19 nt, Human parainfluenza virus 1 strain Washington/1964
ccaacucaaaaagcucccu

SEQ ID NO: 4012067 - RNA, 13 nt, Human parainfluenza virus 1 strain Washington/1964
ccagaucaaaagu

SEQ ID NO: 4012068 - RNA, 20 nt, Human parainfluenza virus 1 strain Washington/1964
ccagaucaaaaguaagaaaa

SEQ ID NO: 4012069 - RNA, 22 nt, Human parainfluenza virus 1 strain Washington/1964
cccaacacuauaucaauuaugu

SEQ ID NO: 4012070 - RNA, 21 nt, Human parainfluenza virus 1 strain Washington/1964
ccucuaagcagaguagagaag

SEQ ID NO: 4012071 - RNA, 13 nt, Human parainfluenza virus 1 strain Washington/1964
cuacaauuucaac

SEQ ID NO: 4012072 - RNA, 13 nt, Human parainfluenza virus 1 strain Washington/1964
cuagaagaaaaca

SEQ ID NO: 4012073 - RNA, 16 nt, Human parainfluenza virus 1 strain Washington/1964
cugaaaaacacacucu

SEQ ID NO: 4012074 - RNA, 21 nt, Human parainfluenza virus 1 strain Washington/1964
gaaaucccuuuaacugacuca

SEQ ID NO: 4012075 - RNA, 17 nt, Human parainfluenza virus 1 strain Washington/1964
gaaucuacaauuucaac

SEQ ID NO: 4012076 - RNA, 21 nt, Human parainfluenza virus 1 strain Washington/1964
gaaucuacaauuucaaccagc

SEQ ID NO: 4012077 - RNA, 23 nt, Human parainfluenza virus 1 strain Washington/1964
gagccaacucaaaaagcucccuc

SEQ ID NO: 4012078 - RNA, 20 nt, Human parainfluenza virus 1 strain Washington/1964
gcauacauacaacaaucaaa

SEQ ID NO: 4012079 - RNA, 18 nt, Human parainfluenza virus 1 strain Washington/1964
ggacaauagaagccagau

SEQ ID NO: 4012080 - RNA, 17 nt, Human parainfluenza virus 1 strain Washington/1964
gucaaaaagacaagguu

SEQ ID NO: 4012081 - RNA, 16 nt, Human parainfluenza virus 1 strain Washington/1964
gugauacuacaagguc

SEQ ID NO: 4012082 - RNA, 19 nt, Human parainfluenza virus 1 strain Washington/1964
guguacaacaaguaagaaa

SEQ ID NO: 4012083 - RNA, 16 nt, Human parainfluenza virus 1 strain Washington/1964
uacaacaaucaaaucu

SEQ ID NO: 4012084 - RNA, 12 nt, Human parainfluenza virus 1 strain Washington/1964
uacaauuucaac

SEQ ID NO: 4012085 - RNA, 14 nt, Human parainfluenza virus 1 strain Washington/1964
uacaauuucaacca

SEQ ID NO: 4012086 - RNA, 22 nt, Human parainfluenza virus 1 strain Washington/1964
uaccaaaaagaacagaacucac

SEQ ID NO: 4012087 - RNA, 19 nt, Human parainfluenza virus 1 strain Washington/1964
uagaagccagaucaaaagu

SEQ ID NO: 4012088 - RNA, 13 nt, Human parainfluenza virus 1 strain Washington/1964
uauccagagccaa

SEQ ID NO: 4012089 - RNA, 21 nt, Human parainfluenza virus 1 strain Washington/1964
uauccagagccaacucaaaaa

SEQ ID NO: 4012090 - RNA, 21 nt, Human parainfluenza virus 1 strain Washington/1964
ucaaaucuauccacaacuuca

SEQ ID NO: 4012091 - RNA, 23 nt, Human parainfluenza virus 1 strain Washington/1964
ucagaacuccacaaaucaacaag

SEQ ID NO: 4012092 - RNA, 12 nt, Human parainfluenza virus 1 strain Washington/1964
ucagguguacaa

SEQ ID NO: 4012093 - RNA, 22 nt, Human parainfluenza virus 1 strain Washington/1964
ucauaaaaacauaguaagaaaa

SEQ ID NO: 4012094 - RNA, 19 nt, Human parainfluenza virus 1 strain Washington/1964
ucccucaaaacaauuaaga

SEQ ID NO: 4012095 - RNA, 20 nt, Human parainfluenza virus 1 strain Washington/1964
ucuaauuuguuuaaagagau

SEQ ID NO: 4012096 - RNA, 16 nt, Human parainfluenza virus 1 strain Washington/1964
ucugcacucacucaaa

SEQ ID NO: 4012097 - RNA, 14 nt, Human parainfluenza virus 1 strain Washington/1964
ucuucucaucuuua

SEQ ID NO: 4012098 - RNA, 18 nt, Human parainfluenza virus 1 strain Washington/1964
uggacaauagaagccaga

SEQ ID NO: 4012099 - RNA, 14 nt, Human parainfluenza virus 1 strain Washington/1964
uguagcauacauac

SEQ ID NO: 4012100 - RNA, 21 nt, Human parainfluenza virus 1 strain Washington/1964
uguagcauacauacaacaauc

SEQ ID NO: 4012101 - RNA, 15 nt, Human parainfluenza virus 1 strain Washington/1964
uuaugugaaaaccag

SEQ ID NO: 4012102 - RNA, 18 nt, Human parainfluenza virus 1 strain Washington/1964
uucacuaacuaacuaaac

SEQ ID NO: 4012103 - RNA, 17 nt, Human parainfluenza virus 1 strain Washington/1964
uuggacaauagaagcca

SEQ ID NO: 4012104 - RNA, 15 nt, Human parainfluenza virus 1 strain Washington/1964
uuuauaugacaaaua

SEQ ID NO: 4012105 - RNA, 12 nt, Human parainfluenza virus 1 strain Washington/1964
caaguaagaaaa

SEQ ID NO: 4012106 - RNA, 15 nt, Human parainfluenza virus 1 strain Washington/1964
caaucagguguacaa

SEQ ID NO: 4012107 - RNA, 20 nt, Human parainfluenza virus 1 strain Washington/1964
caauuaugugaaaaccagau

SEQ ID NO: 4012108 - RNA, 21 nt, Human parainfluenza virus 1 strain Washington/1964
caauuucaaccagcaaucaaa

SEQ ID NO: 4012109 - RNA, 13 nt, Human parainfluenza virus 1 strain Washington/1964
cagagccaacuca

SEQ ID NO: 4012110 - RNA, 23 nt, Human parainfluenza virus 1 strain Washington/1964
aaaaagcucccucaaaacaauua

SEQ ID NO: 4012111 - RNA, 18 nt, Human parainfluenza virus 1 strain Washington/1964
aaagcaugaauagacauu

SEQ ID NO: 4012112 - RNA, 17 nt, Human parainfluenza virus 1 strain Washington/1964
aaaguccaccaacuccc

SEQ ID NO: 4012113 - RNA, 14 nt, Human parainfluenza virus 1 strain Washington/1964
aacaaagcaugaau

SEQ ID NO: 4012114 - RNA, 22 nt, Human parainfluenza virus 1 strain Washington/1964
aacacuauaucaauuaugugaa

SEQ ID NO: 4012115 - RNA, 18 nt, Human parainfluenza virus 1 strain Washington/1964
aagaacgaagagucagca

SEQ ID NO: 4012116 - RNA, 15 nt, Human parainfluenza virus 1 strain Washington/1964
aauuaugugaaaacc

SEQ ID NO: 4012117 - RNA, 19 nt, Human parainfluenza virus 1 strain Washington/1964
aauuuaaaaacaaagcaug

SEQ ID NO: 4012118 - RNA, 17 nt, Human parainfluenza virus 1 strain Washington/1964
acaauuucaaccagcaa

SEQ ID NO: 4012119 - RNA, 22 nt, Human parainfluenza virus 1 strain Washington/1964
acuccucaauaaugacacccau

SEQ ID NO: 4012120 - RNA, 20 nt, Human parainfluenza virus 1 strain Washington/1964
acuucaccaaucagguguac

SEQ ID NO: 4012121 - RNA, 19 nt, Human parainfluenza virus 1 strain Washington/1964
agagccaacucaaaaagcu

SEQ ID NO: 4012122 - RNA, 20 nt, Human parainfluenza virus 1 strain Washington/1964
auacauacaacaaucaaauc

SEQ ID NO: 4012123 - RNA, 17 nt, Human parainfluenza virus 1 strain Washington/1964
auacuuggacaauagaa

SEQ ID NO: 4012124 - RNA, 21 nt, Human parainfluenza virus 1 strain Washington/1964
auagaagccagaucaaaagua

SEQ ID NO: 4012125 - RNA, 14 nt, Human parainfluenza virus 1 strain Washington/1964
auauaauuacagau

SEQ ID NO: 4012126 - RNA, 17 nt, Human parainfluenza virus 1 strain Washington/1964
auaucaauuaugugaaa

SEQ ID NO: 4012127 - RNA, 13 nt, Human parainfluenza virus 1 strain Washington/1964
auauccagagcca

SEQ ID NO: 4012128 - RNA, 15 nt, Human parainfluenza virus 1 strain Washington/1964
aucaauauccagagc

SEQ ID NO: 4012129 - RNA, 13 nt, Human parainfluenza virus 1 strain Washington/1964
aucagucuucaca

SEQ ID NO: 4012130 - RNA, 12 nt, Human parainfluenza virus 1 strain Washington/1964
auuaaucaaaua

SEQ ID NO: 4012131 - RNA, 14 nt, Human parainfluenza virus 1 strain Washington/1964
auuuauaugacaaa

SEQ ID NO: 4012132 - RNA, 16 nt, Human parainfluenza virus 1 strain Washington/1964
auuuauaugacaaaua

SEQ ID NO: 4012133 - RNA, 14 nt, Human parainfluenza virus 1 strain Washington/1964
caaaaagcucccuc

SEQ ID NO: 4012134 - RNA, 19 nt, Human parainfluenza virus 1 strain Washington/1964
caaaaucaauauccagagc

SEQ ID NO: 4012135 - RNA, 16 nt, Human parainfluenza virus 1 strain Washington/1964
caaagcaugaauagac

SEQ ID NO: 4012136 - RNA, 15 nt, Human parainfluenza virus 1 strain Washington/1964
caaaugaagaggaaa

SEQ ID NO: 4012137 - RNA, 13 nt, Human parainfluenza virus 1 strain Washington/1964
caagaggaaauaa

SEQ ID NO: 4012138 - RNA, 14 nt, Human parainfluenza virus 1 strain Washington/1964
caauagaagccaga

SEQ ID NO: 4012139 - RNA, 14 nt, Human parainfluenza virus 1 strain Washington/1964
caauauccagagcc

SEQ ID NO: 4012140 - RNA, 17 nt, Human parainfluenza virus 1 strain Washington/1964
cacuccucaauaaugac

SEQ ID NO: 4012141 - RNA, 20 nt, Human parainfluenza virus 1 strain Washington/1964
cagaucaaaaguaagaaaaa

SEQ ID NO: 4012142 - RNA, 16 nt, Human parainfluenza virus 1 strain Washington/1964
cagggaucuucacaaa

SEQ ID NO: 4012143 - RNA, 17 nt, Human parainfluenza virus 1 strain Washington/1964
caugaauagacauuuau

SEQ ID NO: 4012144 - RNA, 14 nt, Human parainfluenza virus 1 strain Washington/1964
cauuguagcauaca

SEQ ID NO: 4012145 - RNA, 18 nt, Human parainfluenza virus 1 strain Washington/1964
cauuguagcauacauaca

SEQ ID NO: 4012146 - RNA, 21 nt, Human parainfluenza virus 1 strain Washington/1964
ccaacucaaaaagcucccuca

SEQ ID NO: 4012147 - RNA, 16 nt, Human parainfluenza virus 1 strain Washington/1964
cccuuuaacugacuca

SEQ ID NO: 4012148 - RNA, 21 nt, Human parainfluenza virus 1 strain Washington/1964
ccucaauaaugacacccauua

SEQ ID NO: 4012149 - RNA, 15 nt, Human parainfluenza virus 1 strain Washington/1964
ccuuuaacugacuca

SEQ ID NO: 4012150 - RNA, 15 nt, Human parainfluenza virus 1 strain Washington/1964
cgguacuagaagaaa

SEQ ID NO: 4012151 - RNA, 18 nt, Human parainfluenza virus 1 strain Washington/1964
cuauaucaauuaugugaa

SEQ ID NO: 4012152 - RNA, 23 nt, Human parainfluenza virus 1 strain Washington/1964
cucaauaaugacacccauuagcu

SEQ ID NO: 4012153 - RNA, 21 nt, Human parainfluenza virus 1 strain Washington/1964
cucccucaaaacaauuaagaa

SEQ ID NO: 4012154 - RNA, 22 nt, Human parainfluenza virus 1 strain Washington/1964
cuccucaauaaugacacccauu

SEQ ID NO: 4012155 - RNA, 22 nt, Human parainfluenza virus 1 strain Washington/1964
cuucaccaaucagguguacaac

SEQ ID NO: 4012156 - RNA, 20 nt, Human parainfluenza virus 1 strain Washington/1964
gaagccagaucaaaaguaag

SEQ ID NO: 4012157 - RNA, 17 nt, Human parainfluenza virus 1 strain Washington/1964
gacaauagaagccagau

SEQ ID NO: 4012158 - RNA, 16 nt, Human parainfluenza virus 1 strain Washington/1964
gagagaugacaucaaa

SEQ ID NO: 4012159 - RNA, 19 nt, Human parainfluenza virus 1 strain Washington/1964
gagccaacucaaaaagcuc

SEQ ID NO: 4012160 - RNA, 22 nt, Human parainfluenza virus 1 strain Washington/1964
gagucagcagccacuccaaaga

SEQ ID NO: 4012161 - RNA, 17 nt, Human parainfluenza virus 1 strain Washington/1964
gauaagaaaucccuuua

SEQ ID NO: 4012162 - RNA, 14 nt, Human parainfluenza virus 1 strain Washington/1964
gauacuacaagguc

SEQ ID NO: 4012163 - RNA, 14 nt, Human parainfluenza virus 1 strain Washington/1964
gcaaucaaaaucaa

SEQ ID NO: 4012164 - RNA, 18 nt, Human parainfluenza virus 1 strain Washington/1964
ggucaaaaagacaagguu

SEQ ID NO: 4012165 - RNA, 15 nt, Human parainfluenza virus 1 strain Washington/1964
uaaaaucugcaaauu

SEQ ID NO: 4012166 - RNA, 13 nt, Human parainfluenza virus 1 strain Washington/1964
uaaagagaugagu

SEQ ID NO: 4012167 - RNA, 22 nt, Human parainfluenza virus 1 strain Washington/1964
uaacuaaacaugaaucuacaau

SEQ ID NO: 4012168 - RNA, 20 nt, Human parainfluenza virus 1 strain Washington/1964
uaccaaaaagaacagaacuc

SEQ ID NO: 4012169 - RNA, 17 nt, Human parainfluenza virus 1 strain Washington/1964
uagaagaaaacaacaau

SEQ ID NO: 4012170 - RNA, 16 nt, Human parainfluenza virus 1 strain Washington/1964
ucaaccagcaaucaaa

SEQ ID NO: 4012171 - RNA, 20 nt, Human parainfluenza virus 1 strain Washington/1964
aaaagcucccucaaaacaau

SEQ ID NO: 4012172 - RNA, 20 nt, Human parainfluenza virus 1 strain Washington/1964
aaaaucugcaaauuacaaag

SEQ ID NO: 4012173 - RNA, 12 nt, Human parainfluenza virus 1 strain Washington/1964
aagcucccucaa

SEQ ID NO: 4012174 - RNA, 17 nt, Human parainfluenza virus 1 strain Washington/1964
aaucaaaucuauccaca

SEQ ID NO: 4012175 - RNA, 14 nt, Human parainfluenza virus 1 strain Washington/1964
aaucaauauccaga

SEQ ID NO: 4012176 - RNA, 15 nt, Human parainfluenza virus 1 strain Washington/1964
aaucuacaauuucaa

SEQ ID NO: 4012177 - RNA, 22 nt, Human parainfluenza virus 1 strain Washington/1964
aaucuacaauuucaaccagcaa

SEQ ID NO: 4012178 - RNA, 15 nt, Human parainfluenza virus 1 strain Washington/1964
aauuucaaccagcaa

SEQ ID NO: 4012179 - RNA, 14 nt, Human parainfluenza virus 1 strain Washington/1964
acaacaaacaaugc

SEQ ID NO: 4012180 - RNA, 19 nt, Human parainfluenza virus 1 strain Washington/1964
acaacaaucaaaucuaucc

SEQ ID NO: 4012181 - RNA, 22 nt, Human parainfluenza virus 1 strain Washington/1964
acacuauaucaauuaugugaaa

SEQ ID NO: 4012182 - RNA, 20 nt, Human parainfluenza virus 1 strain Washington/1964
acaguccucuaagcagagua

SEQ ID NO: 4012183 - RNA, 19 nt, Human parainfluenza virus 1 strain Washington/1964
acucaaaaagcucccucaa

SEQ ID NO: 4012184 - RNA, 12 nt, Human parainfluenza virus 1 strain Washington/1964
acuccacaaauc

SEQ ID NO: 4012185 - RNA, 20 nt, Human parainfluenza virus 1 strain Washington/1964
agaacgaagagucagcagcc

SEQ ID NO: 4012186 - RNA, 16 nt, Human parainfluenza virus 1 strain Washington/1964
agacaauaaggucaaa

SEQ ID NO: 4012187 - RNA, 14 nt, Human parainfluenza virus 1 strain Washington/1964
agaucaaaaguaag

SEQ ID NO: 4012188 - RNA, 18 nt, Human parainfluenza virus 1 strain Washington/1964
agccagaucaaaaguaag

SEQ ID NO: 4012189 - RNA, 15 nt, Human parainfluenza virus 1 strain Washington/1964
aguugaaaaaucacu

SEQ ID NO: 4012190 - RNA, 21 nt, Human parainfluenza virus 1 strain Washington/1964
aucaaaucuauccacaacuuc

SEQ ID NO: 4012191 - RNA, 14 nt, Human parainfluenza virus 1 strain Washington/1964
auccagagccaacu

SEQ ID NO: 4012192 - RNA, 20 nt, Human parainfluenza virus 1 strain Washington/1964
aucguaccauuaaucaaaua

SEQ ID NO: 4012193 - RNA, 14 nt, Human parainfluenza virus 1 strain Washington/1964
augagccucaagca

SEQ ID NO: 4012194 - RNA, 13 nt, Human parainfluenza virus 1 strain Washington/1964
auuucaaccagca

SEQ ID NO: 4012195 - RNA, 16 nt, Human parainfluenza virus 1 strain Washington/1964
caaaaagcucccucaa

SEQ ID NO: 4012196 - RNA, 21 nt, Human parainfluenza virus 1 strain Washington/1964
caaagcaugaauagacauuua

SEQ ID NO: 4012197 - RNA, 17 nt, Human parainfluenza virus 1 strain Washington/1964
caaccagcaaucaaaau

SEQ ID NO: 4012198 - RNA, 17 nt, Human parainfluenza virus 1 strain Washington/1964
caauauccagagccaac

SEQ ID NO: 4012199 - RNA, 15 nt, Human parainfluenza virus 1 strain Washington/1964
caaucaaaaucaaua

SEQ ID NO: 4012200 - RNA, 18 nt, Human parainfluenza virus 1 strain Washington/1964
caauuucaaccagcaauc

SEQ ID NO: 4012201 - RNA, 21 nt, Human parainfluenza virus 1 strain Washington/1964
cagagccaacucaaaaagcuc

SEQ ID NO: 4012202 - RNA, 12 nt, Human parainfluenza virus 1 strain Washington/1964
caugaauagaca

SEQ ID NO: 4012203 - RNA, 20 nt, Human parainfluenza virus 1 strain Washington/1964
ccaagagguuaaaaauguaa

SEQ ID NO: 4012204 - RNA, 17 nt, Human parainfluenza virus 1 strain Washington/1964
ccagcaaucaaaaucaa

SEQ ID NO: 4012205 - RNA, 19 nt, Human parainfluenza virus 1 strain Washington/1964
cgacgcaaccgcaaaugaa

SEQ ID NO: 4012206 - RNA, 16 nt, Human parainfluenza virus 1 strain Washington/1964
cuaaaucguaccauua

SEQ ID NO: 4012207 - RNA, 18 nt, Human parainfluenza virus 1 strain Washington/1964
cucaaaacaauuaagaaa

SEQ ID NO: 4012208 - RNA, 17 nt, Human parainfluenza virus 1 strain Washington/1964
aaaacaaagcaugaaua

SEQ ID NO: 4012209 - RNA, 13 nt, Human parainfluenza virus 1 strain Washington/1964
aaacaauuaagaa

SEQ ID NO: 4012210 - RNA, 21 nt, Human parainfluenza virus 1 strain Washington/1964
aaaccagauaugauguauaaa

SEQ ID NO: 4012211 - RNA, 17 nt, Human parainfluenza virus 1 strain Washington/1964
aaccagcaaucaaaauc

SEQ ID NO: 4012212 - RNA, 18 nt, Human parainfluenza virus 1 strain Washington/1964
aaccagcaaucaaaauca

SEQ ID NO: 4012213 - RNA, 19 nt, Human parainfluenza virus 1 strain Washington/1964
aagaugccguucuacaaag

SEQ ID NO: 4012214 - RNA, 17 nt, Human parainfluenza virus 1 strain Washington/1964
aaucacuugagaauaaa

SEQ ID NO: 4012215 - RNA, 15 nt, Human parainfluenza virus 1 strain Washington/1964
aaucaguucaaauaa

SEQ ID NO: 4012216 - RNA, 21 nt, Human parainfluenza virus 1 strain Washington/1964
aauucgauacaaucaguucaa

SEQ ID NO: 4012217 - RNA, 16 nt, Human parainfluenza virus 1 strain Washington/1964
acaauagaagccagau

SEQ ID NO: 4012218 - RNA, 19 nt, Human parainfluenza virus 1 strain Washington/1964
acaauuucaaccagcaauc

SEQ ID NO: 4012219 - RNA, 20 nt, Human parainfluenza virus 1 strain Washington/1964
acuauaucaauuaugugaaa

SEQ ID NO: 4012220 - RNA, 21 nt, Human parainfluenza virus 1 strain Washington/1964
acuccucaauaaugacaccca

SEQ ID NO: 4012221 - RNA, 23 nt, Human parainfluenza virus 1 strain Washington/1964
acuuaaacaaauucaagaggaaa

SEQ ID NO: 4012222 - RNA, 18 nt, Human parainfluenza virus 1 strain Washington/1964
acuugauaagagaggaug

SEQ ID NO: 4012223 - RNA, 15 nt, Human parainfluenza virus 1 strain Washington/1964
agaagccagaucaaa

SEQ ID NO: 4012224 - RNA, 21 nt, Human parainfluenza virus 1 strain Washington/1964
agaaggcuuacaucaaauccc

SEQ ID NO: 4012225 - RNA, 19 nt, Human parainfluenza virus 1 strain Washington/1964
agaugaguuaacaagauaa

SEQ ID NO: 4012226 - RNA, 17 nt, Human parainfluenza virus 1 strain Washington/1964
agccagaucaaaaguaa

SEQ ID NO: 4012227 - RNA, 17 nt, Human parainfluenza virus 1 strain Washington/1964
agugauacuacaagguc

SEQ ID NO: 4012228 - RNA, 23 nt, Human parainfluenza virus 1 strain Washington/1964
auacuuggacaauagaagccaga

SEQ ID NO: 4012229 - RNA, 14 nt, Human parainfluenza virus 1 strain Washington/1964
aucaaaaucaauau

SEQ ID NO: 4012230 - RNA, 19 nt, Human parainfluenza virus 1 strain Washington/1964
aucaaguacauuguagcau

SEQ ID NO: 4012231 - RNA, 23 nt, Human parainfluenza virus 1 strain Washington/1964
aucuacaauuucaaccagcaauc

SEQ ID NO: 4012232 - RNA, 17 nt, Human parainfluenza virus 1 strain Washington/1964
augacaaauagaauaag

SEQ ID NO: 4012233 - RNA, 22 nt, Human parainfluenza virus 1 strain Washington/1964
auuaucuaauuuguuuaaagag

SEQ ID NO: 4012234 - RNA, 13 nt, Human parainfluenza virus 1 strain Washington/1964
caaauagaauaag

SEQ ID NO: 4012235 - RNA, 22 nt, Human parainfluenza virus 1 strain Washington/1964
caacaaucaaaucuauccacaa

SEQ ID NO: 4012236 - RNA, 14 nt, Human parainfluenza virus 1 strain Washington/1964
caacucaaaaagcu

SEQ ID NO: 4012237 - RNA, 18 nt, Human parainfluenza virus 1 strain Washington/1964
caacucaaaaagcucccu

SEQ ID NO: 4012238 - RNA, 19 nt, Human parainfluenza virus 1 strain Washington/1964
caacucaaaaagcucccuc

SEQ ID NO: 4012239 - RNA, 22 nt, Human parainfluenza virus 1 strain Washington/1964
uugagaauaaaguagaagaaaa

SEQ ID NO: 4012240 - RNA, 13 nt, Human parainfluenza virus 1 strain Washington/1964
cucaucuuuauua

SEQ ID NO: 4012241 - RNA, 19 nt, Human parainfluenza virus 1 strain Washington/1964
cuuaaacaaauucaagagg

SEQ ID NO: 4012242 - RNA, 22 nt, Human parainfluenza virus 1 strain Washington/1964
cuugagaauaaaguagaagaaa

SEQ ID NO: 4012243 - RNA, 19 nt, Human parainfluenza virus 1 strain Washington/1964
cuuggacaauagaagccag

SEQ ID NO: 4012244 - RNA, 13 nt, Human parainfluenza virus 1 strain Washington/1964
gagccaacucaaa

SEQ ID NO: 4012245 - RNA, 22 nt, Human parainfluenza virus 1 strain Washington/1964
gagccaacucaaaaagcucccu

SEQ ID NO: 4012246 - RNA, 24 nt, Human parainfluenza virus 1 strain Washington/1964
gagccaacucaaaaagcucccuca

SEQ ID NO: 4012247 - RNA, 22 nt, Human parainfluenza virus 1 strain Washington/1964
gauacuuggacaauagaagcca

SEQ ID NO: 4012248 - RNA, 20 nt, Human parainfluenza virus 1 strain Washington/1964
gaucaagacccaacacuaua

SEQ ID NO: 4012249 - RNA, 20 nt, Human parainfluenza virus 1 strain Washington/1964
gccagaucaaaaguaagaaa

SEQ ID NO: 4012250 - RNA, 17 nt, Human parainfluenza virus 1 strain Washington/1964
ggacaauagaagccaga

SEQ ID NO: 4012251 - RNA, 21 nt, Human parainfluenza virus 1 strain Washington/1964
ggacaauagaagccagaucaa

SEQ ID NO: 4012252 - RNA, 18 nt, Human parainfluenza virus 1 strain Washington/1964
gucaccaucagucuucac

SEQ ID NO: 4012253 - RNA, 23 nt, Human parainfluenza virus 1 strain Washington/1964
guuaaaaucugcaaauuacaaag

SEQ ID NO: 4012254 - RNA, 16 nt, Human parainfluenza virus 1 strain Washington/1964
guuuaaagagaugagu

SEQ ID NO: 4012255 - RNA, 21 nt, Human parainfluenza virus 1 strain Washington/1964
uaaugacacccauuagcucua

SEQ ID NO: 4012256 - RNA, 14 nt, Human parainfluenza virus 1 strain Washington/1964
uacaaagaaaugac

SEQ ID NO: 4012257 - RNA, 21 nt, Human parainfluenza virus 1 strain Washington/1964
uaccaacccaaguccagagcu

SEQ ID NO: 4012258 - RNA, 20 nt, Human parainfluenza virus 1 strain Washington/1964
uaccauuaaucaaauacaga

SEQ ID NO: 4012259 - RNA, 21 nt, Human parainfluenza virus 1 strain Washington/1964
ucaaaaucaauauccagagcc

SEQ ID NO: 4012260 - RNA, 13 nt, Human parainfluenza virus 1 strain Washington/1964
ucaagaguucaag

SEQ ID NO: 4012261 - RNA, 16 nt, Human parainfluenza virus 1 strain Washington/1964
ucaauaaugacaccca

SEQ ID NO: 4012262 - RNA, 16 nt, Human parainfluenza virus 1 strain Washington/1964
ucaauauccagagcca

SEQ ID NO: 4012263 - RNA, 22 nt, Human parainfluenza virus 1 strain Washington/1964
ucagcagccacuccaaagaaca

SEQ ID NO: 4012264 - RNA, 15 nt, Human parainfluenza virus 1 strain Washington/1964
uccacaacuucacca

SEQ ID NO: 4012265 - RNA, 14 nt, Human parainfluenza virus 1 strain Washington/1964
uccagagccaacuc

SEQ ID NO: 4012266 - RNA, 22 nt, Human parainfluenza virus 1 strain Washington/1964
ucccucaaaacaauuaagaaaa

SEQ ID NO: 4012267 - RNA, 14 nt, Human parainfluenza virus 1 strain Washington/1964
ucuauccacacucc

SEQ ID NO: 4012268 - RNA, 12 nt, Human parainfluenza virus 1 strain Washington/1964
ugaaucuacaau

SEQ ID NO: 4012269 - RNA, 10 nt, Human parainfluenza virus 1 strain Washington/1964
ugauggccaa

SEQ ID NO: 4012270 - RNA, 14 nt, Human parainfluenza virus 1 strain Washington/1964
uuaaucaaauacag

SEQ ID NO: 4012271 - RNA, 21 nt, Human parainfluenza virus 1 strain Washington/1964
uucaaccagcaaucaaaauca

SEQ ID NO: 4012272 - RNA, 21 nt, Human parainfluenza virus 1 strain Washington/1964
uuuaaaaacaaagcaugaaua

SEQ ID NO: 4012273 - RNA, 12 nt, Human parainfluenza virus 1 strain Washington/1964
ucaaguacauug

SEQ ID NO: 4012274 - RNA, 17 nt, Human parainfluenza virus 1 strain Washington/1964
ucaauauccagagccaa

SEQ ID NO: 4012275 - RNA, 16 nt, Human parainfluenza virus 1 strain Washington/1964
ucacuugagaauaaag

SEQ ID NO: 4012276 - RNA, 17 nt, Human parainfluenza virus 1 strain Washington/1964
ucagcagccacuccaaa

SEQ ID NO: 4012277 - RNA, 12 nt, Human parainfluenza virus 1 strain Washington/1964
ucgauacaauca

SEQ ID NO: 4012278 - RNA, 20 nt, Human parainfluenza virus 1 strain Washington/1964
ucggaauaccaaaaagaaca

SEQ ID NO: 4012279 - RNA, 13 nt, Human parainfluenza virus 1 strain Washington/1964
ucuacaauuucaa

SEQ ID NO: 4012280 - RNA, 15 nt, Human parainfluenza virus 1 strain Washington/1964
ucugcaaauuacaaa

SEQ ID NO: 4012281 - RNA, 20 nt, Human parainfluenza virus 1 strain Washington/1964
ugagagaugacaucaaaaau

SEQ ID NO: 4012282 - RNA, 18 nt, Human parainfluenza virus 1 strain Washington/1964
ugaguuaacaagauaaga

SEQ ID NO: 4012283 - RNA, 21 nt, Human parainfluenza virus 1 strain Washington/1964
ugaguuaacaagauaagaaau

SEQ ID NO: 4012284 - RNA, 12 nt, Human parainfluenza virus 1 strain Washington/1964
ugauacuacaag

SEQ ID NO: 4012285 - RNA, 16 nt, Human parainfluenza virus 1 strain Washington/1964
uggacaauagaagcca

SEQ ID NO: 4012286 - RNA, 14 nt, Human parainfluenza virus 1 strain Washington/1964
uguaaugaaaucac

SEQ ID NO: 4012287 - RNA, 15 nt, Human parainfluenza virus 1 strain Washington/1964
uguaaugaaaucaca

SEQ ID NO: 4012288 - RNA, 19 nt, Human parainfluenza virus 2
aaaaauuaacauuaagccu

SEQ ID NO: 4012289 - RNA, 19 nt, Human parainfluenza virus 2
aaaggcucucuaucuuaug

SEQ ID NO: 4012290 - RNA, 14 nt, Human parainfluenza virus 2
aaaugaaaugacua

SEQ ID NO: 4012291 - RNA, 14 nt, Human parainfluenza virus 2
acaagagacacuca

SEQ ID NO: 4012292 - RNA, 19 nt, Human parainfluenza virus 2
acaaugauuauaagaacuc

SEQ ID NO: 4012293 - RNA, 17 nt, Human parainfluenza virus 2
acacacucauccagaca

SEQ ID NO: 4012294 - RNA, 22 nt, Human parainfluenza virus 2
acaccaagaaacaaccacagcc

SEQ ID NO: 4012295 - RNA, 13 nt, Human parainfluenza virus 2
acacucauccaga

SEQ ID NO: 4012296 - RNA, 10 nt, Human parainfluenza virus 2
agaacucaug

SEQ ID NO: 4012297 - RNA, 17 nt, Human parainfluenza virus 2
agacuccauccauccaa

SEQ ID NO: 4012298 - RNA, 13 nt, Human parainfluenza virus 2
agcguaguacaau

SEQ ID NO: 4012299 - RNA, 17 nt, Human parainfluenza virus 2
aggcgaguguugcaacu

SEQ ID NO: 4012300 - RNA, 11 nt, Human parainfluenza virus 2
aggcuggacau

SEQ ID NO: 4012301 - RNA, 15 nt, Human parainfluenza virus 2
aguacaauuuaagaa

SEQ ID NO: 4012302 - RNA, 15 nt, Human parainfluenza virus 2
aguuuuauuuaagaa

SEQ ID NO: 4012303 - RNA, 19 nt, Human parainfluenza virus 2
auaguuuuauuuaagaaaa

SEQ ID NO: 4012304 - RNA, 20 nt, Human parainfluenza virus 2
auauaaaaugaggugcaguc

SEQ ID NO: 4012305 - RNA, 18 nt, Human parainfluenza virus 2
aucaaucuuaaaaaugaa

SEQ ID NO: 4012306 - RNA, 14 nt, Human parainfluenza virus 2
augcagcuugcaaa

SEQ ID NO: 4012307 - RNA, 20 nt, Human parainfluenza virus 2
augcagcuugcaaaugacug

SEQ ID NO: 4012308 - RNA, 11 nt, Human parainfluenza virus 2
auguuaucaua

SEQ ID NO: 4012309 - RNA, 18 nt, Human parainfluenza virus 2
auuuucucaucauuuacu

SEQ ID NO: 4012310 - RNA, 15 nt, Human parainfluenza virus 2
caacaccaagaaaca

SEQ ID NO: 4012311 - RNA, 15 nt, Human parainfluenza virus 2
caacaccucacauca

SEQ ID NO: 4012312 - RNA, 21 nt, Human parainfluenza virus 2
caaccaaaagacccaaacaac

SEQ ID NO: 4012313 - RNA, 23 nt, Human parainfluenza virus 2
caacuaguggaggcuucacagcc

SEQ ID NO: 4012314 - RNA, 14 nt, Human parainfluenza virus 2
caacuucugcaacu

SEQ ID NO: 4012315 - RNA, 17 nt, Human parainfluenza virus 2
caagaaacaaccacagc

SEQ ID NO: 4012316 - RNA, 10 nt, Human parainfluenza virus 2
cacucagaga

SEQ ID NO: 4012317 - RNA, 20 nt, Human parainfluenza virus 2
cagauaccaagacugaguuc

SEQ ID NO: 4012318 - RNA, 15 nt, Human parainfluenza virus 2
cagccgaaccaugcu

SEQ ID NO: 4012319 - RNA, 13 nt, Human parainfluenza virus 2
caugauaguuuua

SEQ ID NO: 4012320 - RNA, 12 nt, Human parainfluenza virus 2
ccaaacaacacc

SEQ ID NO: 4012321 - RNA, 21 nt, Human parainfluenza virus 2
ccacagccgaaccaugcucaa

SEQ ID NO: 4012322 - RNA, 15 nt, Human parainfluenza virus 2
ccagauauacacauc

SEQ ID NO: 4012323 - RNA, 15 nt, Human parainfluenza virus 2
cggaaacaauucucu

SEQ ID NO: 4012324 - RNA, 19 nt, Human parainfluenza virus 2
cguaguacaauuuaagaaa

SEQ ID NO: 4012325 - RNA, 14 nt, Human parainfluenza virus 2
gcugccacucacac

SEQ ID NO: 4012326 - RNA, 13 nt, Human parainfluenza virus 2
guccgaacugauc

SEQ ID NO: 4012327 - RNA, 14 nt, Human parainfluenza virus 2
uaacgaaauuaaac

SEQ ID NO: 4012328 - RNA, 20 nt, Human parainfluenza virus 2
uaagauucaggcagcaacca

SEQ ID NO: 4012329 - RNA, 20 nt, Human parainfluenza virus 2
uacuacuagucacuauacaa

SEQ ID NO: 4012330 - RNA, 18 nt, Human parainfluenza virus 2
uaucuuaugcaauaguua

SEQ ID NO: 4012331 - RNA, 19 nt, Human parainfluenza virus 2
uauugaaugaagacuccag

SEQ ID NO: 4012332 - RNA, 21 nt, Human parainfluenza virus 2
uccaaucaagauccagacucc

SEQ ID NO: 4012333 - RNA, 13 nt, Human parainfluenza virus 2
uccauccauccaa

SEQ ID NO: 4012334 - RNA, 18 nt, Human parainfluenza virus 2
ugauuauaagaacucaug

SEQ ID NO: 4012335 - RNA, 15 nt, Human parainfluenza virus 2
ugcauccaaucaaga

SEQ ID NO: 4012336 - RNA, 19 nt, Human parainfluenza virus 2
uugucaacaccaagaaaca

SEQ ID NO: 4012337 - RNA, 17 nt, Human parainfluenza virus 2
aaagaguuuacacaaug

SEQ ID NO: 4012338 - RNA, 23 nt, Human parainfluenza virus 2
aacaccaagaaacaaccacagcc

SEQ ID NO: 4012339 - RNA, 22 nt, Human parainfluenza virus 2
aagaacucaugauaguuuuauu

SEQ ID NO: 4012340 - RNA, 13 nt, Human parainfluenza virus 2
acaucaauagaag

SEQ ID NO: 4012341 - RNA, 17 nt, Human parainfluenza virus 2
accacagaaucacagcu

SEQ ID NO: 4012342 - RNA, 21 nt, Human parainfluenza virus 2
acuaagauucaggcagcaacc

SEQ ID NO: 4012343 - RNA, 21 nt, Human parainfluenza virus 2
acuaguggaggcuucacagcc

SEQ ID NO: 4012344 - RNA, 14 nt, Human parainfluenza virus 2
acucaugauaguuu

SEQ ID NO: 4012345 - RNA, 16 nt, Human parainfluenza virus 2
acucaugauaguuuua

SEQ ID NO: 4012346 - RNA, 15 nt, Human parainfluenza virus 2
acuuagguucaauuu

SEQ ID NO: 4012347 - RNA, 13 nt, Human parainfluenza virus 2
agaaggcuggaca

SEQ ID NO: 4012348 - RNA, 14 nt, Human parainfluenza virus 2
agaaggcuggacau

SEQ ID NO: 4012349 - RNA, 17 nt, Human parainfluenza virus 2
agccugaauccaagaaa

SEQ ID NO: 4012350 - RNA, 16 nt, Human parainfluenza virus 2
aguauaauaguuuaaa

SEQ ID NO: 4012351 - RNA, 12 nt, Human parainfluenza virus 2
auaaucaacaau

SEQ ID NO: 4012352 - RNA, 11 nt, Human parainfluenza virus 2
aucacucagag

SEQ ID NO: 4012353 - RNA, 14 nt, Human parainfluenza virus 2
auuagaauguuaua

SEQ ID NO: 4012354 - RNA, 22 nt, Human parainfluenza virus 2
auuuacuguuguaauucaaucu

SEQ ID NO: 4012355 - RNA, 20 nt, Human parainfluenza virus 2
caagagacacucaacaugca

SEQ ID NO: 4012356 - RNA, 15 nt, Human parainfluenza virus 2
caaucaagucauacu

SEQ ID NO: 4012357 - RNA, 19 nt, Human parainfluenza virus 2
caaugauuauaagaacuca

SEQ ID NO: 4012358 - RNA, 15 nt, Human parainfluenza virus 2
cacagaaucacagcu

SEQ ID NO: 4012359 - RNA, 18 nt, Human parainfluenza virus 2
cagcaucugagaauagaa

SEQ ID NO: 4012360 - RNA, 17 nt, Human parainfluenza virus 2
cagccgaaccaugcuca

SEQ ID NO: 4012361 - RNA, 12 nt, Human parainfluenza virus 2
cauaugaagcaa

SEQ ID NO: 4012362 - RNA, 17 nt, Human parainfluenza virus 2
cauccacaucacucaga

SEQ ID NO: 4012363 - RNA, 20 nt, Human parainfluenza virus 2
ccaaaagacccaaacaacac

SEQ ID NO: 4012364 - RNA, 21 nt, Human parainfluenza virus 2
ccaagaaagauuuaacaggca

SEQ ID NO: 4012365 - RNA, 18 nt, Human parainfluenza virus 2
ccaaucaagauccagacu

SEQ ID NO: 4012366 - RNA, 16 nt, Human parainfluenza virus 2
ccacaauugucaacac

SEQ ID NO: 4012367 - RNA, 19 nt, Human parainfluenza virus 2
ccacagaaucacagcuuaa

SEQ ID NO: 4012368 - RNA, 23 nt, Human parainfluenza virus 2
ccacucacacacucauccagaca

SEQ ID NO: 4012369 - RNA, 23 nt, Human parainfluenza virus 2
ccagacuccauccauccaaaaac

SEQ ID NO: 4012370 - RNA, 13 nt, Human parainfluenza virus 2
ccauaugaagcaa

SEQ ID NO: 4012371 - RNA, 16 nt, Human parainfluenza virus 2
cuagucacuauacaau

SEQ ID NO: 4012372 - RNA, 18 nt, Human parainfluenza virus 2
cuccauccauccaaaaac

SEQ ID NO: 4012373 - RNA, 17 nt, Human parainfluenza virus 2
cugcaauauaaaaugag

SEQ ID NO: 4012374 - RNA, 21 nt, Human parainfluenza virus 2
gaaagccugaauccaagaaag

SEQ ID NO: 4012375 - RNA, 13 nt, Human parainfluenza virus 2
gacucacaucauu

SEQ ID NO: 4012376 - RNA, 16 nt, Human parainfluenza virus 2
gauuauaagaacucau

SEQ ID NO: 4012377 - RNA, 20 nt, Human parainfluenza virus 2
gcuggacaugauaaauuuaa

SEQ ID NO: 4012378 - RNA, 15 nt, Human parainfluenza virus 2
ggcagcaaccacaga

SEQ ID NO: 4012379 - RNA, 15 nt, Human parainfluenza virus 2
gucaacaccaagaaa

SEQ ID NO: 4012380 - RNA, 20 nt, Human parainfluenza virus 2
gucacacaagagacacucaa

SEQ ID NO: 4012381 - RNA, 20 nt, Human parainfluenza virus 2
guccgaacugaucaaucuaa

SEQ ID NO: 4012382 - RNA, 15 nt, Human parainfluenza virus 2
uacacaauguuccag

SEQ ID NO: 4012383 - RNA, 20 nt, Human parainfluenza virus 2
uacaccaacuaaugucccug

SEQ ID NO: 4012384 - RNA, 14 nt, Human parainfluenza virus 2
uauaucucuuagaa

SEQ ID NO: 4012385 - RNA, 20 nt, Human parainfluenza virus 2
uaugauaacaacaauuaaaa

SEQ ID NO: 4012386 - RNA, 17 nt, Human parainfluenza virus 2
ucaaacuagacucacau

SEQ ID NO: 4012387 - RNA, 21 nt, Human parainfluenza virus 2
ucaacaugcauccaaucaaga

SEQ ID NO: 4012388 - RNA, 13 nt, Human parainfluenza virus 2
ucauacaaccaga

SEQ ID NO: 4012389 - RNA, 17 nt, Human parainfluenza virus 2
ucucaucauuuacuguu

SEQ ID NO: 4012390 - RNA, 16 nt, Human parainfluenza virus 2
ugauuauuaugugaua

SEQ ID NO: 4012391 - RNA, 19 nt, Human parainfluenza virus 2
ugcagucacacaagagaca

SEQ ID NO: 4012392 - RNA, 14 nt, Human parainfluenza virus 2
uguuguaauucaau

SEQ ID NO: 4012393 - RNA, 19 nt, Human parainfluenza virus 2
uuaacaggcauaaaacuaa

SEQ ID NO: 4012394 - RNA, 13 nt, Human parainfluenza virus 2
uuaacgaaauuaa

SEQ ID NO: 4012395 - RNA, 13 nt, Human parainfluenza virus 2
uuauuuaagaaaa

SEQ ID NO: 4012396 - RNA, 20 nt, Human parainfluenza virus 2
aacaaugauuauaagaacuc

SEQ ID NO: 4012397 - RNA, 18 nt, Human parainfluenza virus 2
aagguaugauaacaacaa

SEQ ID NO: 4012398 - RNA, 18 nt, Human parainfluenza virus 2
aaucaaacuagacucaca

SEQ ID NO: 4012399 - RNA, 21 nt, Human parainfluenza virus 2
aauuuucucaucauuuacugu

SEQ ID NO: 4012400 - RNA, 13 nt, Human parainfluenza virus 2
acauuaagccucc

SEQ ID NO: 4012401 - RNA, 17 nt, Human parainfluenza virus 2
acucaacaugcauccaa

SEQ ID NO: 4012402 - RNA, 15 nt, Human parainfluenza virus 2
agagauacagcugcc

SEQ ID NO: 4012403 - RNA, 19 nt, Human parainfluenza virus 2
agauaaaauucuugcaacu

SEQ ID NO: 4012404 - RNA, 15 nt, Human parainfluenza virus 2
agauacagcugccac

SEQ ID NO: 4012405 - RNA, 15 nt, Human parainfluenza virus 2
agauaccaaugaaua

SEQ ID NO: 4012406 - RNA, 13 nt, Human parainfluenza virus 2
aggcuucacagcc

SEQ ID NO: 4012407 - RNA, 23 nt, Human parainfluenza virus 2
auaauaguuuaaaaauuaacauu

SEQ ID NO: 4012408 - RNA, 13 nt, Human parainfluenza virus 2
auacacauccaca

SEQ ID NO: 4012409 - RNA, 13 nt, Human parainfluenza virus 2
auccagacaaauc

SEQ ID NO: 4012410 - RNA, 19 nt, Human parainfluenza virus 2
augauaguuuuauuuaaga

SEQ ID NO: 4012411 - RNA, 15 nt, Human parainfluenza virus 2
auuauaagaacucau

SEQ ID NO: 4012412 - RNA, 18 nt, Human parainfluenza virus 2
auuauaagaacucaugau

SEQ ID NO: 4012413 - RNA, 23 nt, Human parainfluenza virus 2
auucaggcagcaaccacagaauc

SEQ ID NO: 4012414 - RNA, 19 nt, Human parainfluenza virus 2
auucuugcaacuucugcaa

SEQ ID NO: 4012415 - RNA, 13 nt, Human parainfluenza virus 2
caacaccaagaaa

SEQ ID NO: 4012416 - RNA, 15 nt, Human parainfluenza virus 2
caauuuuagucaacu

SEQ ID NO: 4012417 - RNA, 18 nt, Human parainfluenza virus 2
cacaauugucaacaccaa

SEQ ID NO: 4012418 - RNA, 21 nt, Human parainfluenza virus 2
cacagccgaaccaugcucaac

SEQ ID NO: 4012419 - RNA, 15 nt, Human parainfluenza virus 2
cacauccacaucacu

SEQ ID NO: 4012420 - RNA, 21 nt, Human parainfluenza virus 2
caccaagaaacaaccacagcc

SEQ ID NO: 4012421 - RNA, 19 nt, Human parainfluenza virus 2
cacucagagauacagcugc

SEQ ID NO: 4012422 - RNA, 23 nt, Human parainfluenza virus 2
cacucagagauacagcugccacu

SEQ ID NO: 4012423 - RNA, 13 nt, Human parainfluenza virus 2
cagacuccaucca

SEQ ID NO: 4012424 - RNA, 17 nt, Human parainfluenza virus 2
cagcugccacucacaca

SEQ ID NO: 4012425 - RNA, 17 nt, Human parainfluenza virus 2
cauccauccaaaaacac

SEQ ID NO: 4012426 - RNA, 15 nt, Human parainfluenza virus 2
caugauaaauuuaau

SEQ ID NO: 4012427 - RNA, 22 nt, Human parainfluenza virus 2
caugauaguuuuauuuaagaaa

SEQ ID NO: 4012428 - RNA, 18 nt, Human parainfluenza virus 2
aagaacucaugauaguuu

SEQ ID NO: 4012429 - RNA, 21 nt, Human parainfluenza virus 2
acaaugauuauaagaacucau

SEQ ID NO: 4012430 - RNA, 12 nt, Human parainfluenza virus 2
acaccaagaaac

SEQ ID NO: 4012431 - RNA, 12 nt, Human parainfluenza virus 2
acucaacaugca

SEQ ID NO: 4012432 - RNA, 15 nt, Human parainfluenza virus 2
agaaccaacuuccaa

SEQ ID NO: 4012433 - RNA, 16 nt, Human parainfluenza virus 2
agaaggcuggacauga

SEQ ID NO: 4012434 - RNA, 13 nt, Human parainfluenza virus 2
agacucacaucau

SEQ ID NO: 4012435 - RNA, 18 nt, Human parainfluenza virus 2
auacagcugccacucaca

SEQ ID NO: 4012436 - RNA, 14 nt, Human parainfluenza virus 2
auacgcucugcaau

SEQ ID NO: 4012437 - RNA, 18 nt, Human parainfluenza virus 2
auagaaggcuggacauga

SEQ ID NO: 4012438 - RNA, 15 nt, Human parainfluenza virus 2
aucaagauccagacu

SEQ ID NO: 4012439 - RNA, 16 nt, Human parainfluenza virus 2
auuauaagaacucaug

SEQ ID NO: 4012440 - RNA, 17 nt, Human parainfluenza virus 2
auuauaagaacucauga

SEQ ID NO: 4012441 - RNA, 17 nt, Human parainfluenza virus 2
caaaagacccaaacaac

SEQ ID NO: 4012442 - RNA, 16 nt, Human parainfluenza virus 2
caaacuagacucacau

SEQ ID NO: 4012443 - RNA, 17 nt, Human parainfluenza virus 2
caacaccaagaaacaac

SEQ ID NO: 4012444 - RNA, 19 nt, Human parainfluenza virus 2
caaggcgaguguugcaacu

SEQ ID NO: 4012445 - RNA, 19 nt, Human parainfluenza virus 2
caaugucauacaaccagau

SEQ ID NO: 4012446 - RNA, 21 nt, Human parainfluenza virus 2
cacucacacacucauccagac

SEQ ID NO: 4012447 - RNA, 20 nt, Human parainfluenza virus 2
cacucucaucaacaaaaagg

SEQ ID NO: 4012448 - RNA, 19 nt, Human parainfluenza virus 2
caggcagcaaccacagaau

SEQ ID NO: 4012449 - RNA, 17 nt, Human parainfluenza virus 2
cagucacacaagagaca

SEQ ID NO: 4012450 - RNA, 12 nt, Human parainfluenza virus 2
caucauuuacug

SEQ ID NO: 4012451 - RNA, 21 nt, Human parainfluenza virus 2
caugcauccaaucaagaucca

SEQ ID NO: 4012452 - RNA, 17 nt, Human parainfluenza virus 2
ccaaaagacccaaacaa

SEQ ID NO: 4012453 - RNA, 14 nt, Human parainfluenza virus 2
ccacucacacacuc

SEQ ID NO: 4012454 - RNA, 14 nt, Human parainfluenza virus 2
ccguuaaauuuaag

SEQ ID NO: 4012455 - RNA, 21 nt, Human parainfluenza virus 2
cgaaagccugaauccaagaaa

SEQ ID NO: 4012456 - RNA, 20 nt, Human parainfluenza virus 2
cucaaggcgaguguugcaac

SEQ ID NO: 4012457 - RNA, 18 nt, Human parainfluenza virus 2
gaacucaugauaguuuua

SEQ ID NO: 4012458 - RNA, 15 nt, Human parainfluenza virus 2
gagaucagaaagagu

SEQ ID NO: 4012459 - RNA, 17 nt, Human parainfluenza virus 2
gaggagaucagaaagag

SEQ ID NO: 4012460 - RNA, 13 nt, Human parainfluenza virus 2
gcauccaaucaag

SEQ ID NO: 4012461 - RNA, 21 nt, Human parainfluenza virus 2
gccgaaccaugcucaaccaaa

SEQ ID NO: 4012462 - RNA, 12 nt, Human parainfluenza virus 2
ccaagaaacaac

SEQ ID NO: 4012463 - RNA, 18 nt, Human parainfluenza virus 2
ccaagaaacaaccacagc

SEQ ID NO: 4012464 - RNA, 17 nt, Human parainfluenza virus 2
ccacaauugucaacacc

SEQ ID NO: 4012465 - RNA, 21 nt, Human parainfluenza virus 2
ccuucagacuguagaagggaa

SEQ ID NO: 4012466 - RNA, 16 nt, Human parainfluenza virus 2
cguaguacaauuuaag

SEQ ID NO: 4012467 - RNA, 19 nt, Human parainfluenza virus 2
cuaagauucaggcagcaac

SEQ ID NO: 4012468 - RNA, 11 nt, Human parainfluenza virus 2
cucaacaugca

SEQ ID NO: 4012469 - RNA, 14 nt, Human parainfluenza virus 2
cucaaccaaaagac

SEQ ID NO: 4012470 - RNA, 17 nt, Human parainfluenza virus 2
cugaauccaagaaagau

SEQ ID NO: 4012471 - RNA, 17 nt, Human parainfluenza virus 2
cuugcaacuucugcaac

SEQ ID NO: 4012472 - RNA, 14 nt, Human parainfluenza virus 2
gaaacaaccacagc

SEQ ID NO: 4012473 - RNA, 17 nt, Human parainfluenza virus 2
gaacucaugauaguuuu

SEQ ID NO: 4012474 - RNA, 12 nt, Human parainfluenza virus 2
gaaggcuggaca

SEQ ID NO: 4012475 - RNA, 19 nt, Human parainfluenza virus 2
gauacagcugccacucaca

SEQ ID NO: 4012476 - RNA, 14 nt, Human parainfluenza virus 2
gcagcaaccacaga

SEQ ID NO: 4012477 - RNA, 21 nt, Human parainfluenza virus 2
gcuguuuuucccauaugaagc

SEQ ID NO: 4012478 - RNA, 16 nt, Human parainfluenza virus 2
gcuuaacgaaauuaaa

SEQ ID NO: 4012479 - RNA, 13 nt, Human parainfluenza virus 2
guuaaauuuaagu

SEQ ID NO: 4012480 - RNA, 17 nt, Human parainfluenza virus 2
uaaaaaugaaaugacua

SEQ ID NO: 4012481 - RNA, 21 nt, Human parainfluenza virus 2
uacuguuguaauucaaucuua

SEQ ID NO: 4012482 - RNA, 16 nt, Human parainfluenza virus 2
uagaaccacaaucaag

SEQ ID NO: 4012483 - RNA, 17 nt, Human parainfluenza virus 2
uauaagaacucaugaua

SEQ ID NO: 4012484 - RNA, 17 nt, Human parainfluenza virus 2
uauacguuuuggcugua

SEQ ID NO: 4012485 - RNA, 15 nt, Human parainfluenza virus 2
ucaacaccaagaaac

SEQ ID NO: 4012486 - RNA, 17 nt, Human parainfluenza virus 2
ucaacaccaagaaacaa

SEQ ID NO: 4012487 - RNA, 17 nt, Human parainfluenza virus 2
ucacacacucauccaga

SEQ ID NO: 4012488 - RNA, 21 nt, Human parainfluenza virus 2
ucaugauaguuuuauuuaaga

SEQ ID NO: 4012489 - RNA, 16 nt, Human parainfluenza virus 2
uccacaucacucagag

SEQ ID NO: 4012490 - RNA, 19 nt, Human parainfluenza virus 2
ugcagcuugcaaaugacug

SEQ ID NO: 4012491 - RNA, 15 nt, Human parainfluenza virus 2
ugcucaaccaaaaga

SEQ ID NO: 4012492 - RNA, 13 nt, Human parainfluenza virus 2
uucugcuguuuuu

SEQ ID NO: 4012493 - RNA, 15 nt, Human parainfluenza virus 2
uugacccuuaagaac

SEQ ID NO: 4012494 - RNA, 22 nt, Human parainfluenza virus 2
uugaugcagcuugcaaaugacu

SEQ ID NO: 4012495 - RNA, 20 nt, Human parainfluenza virus 2
ggcuucacagccgaacaggu

SEQ ID NO: 4012496 - RNA, 11 nt, Human parainfluenza virus 2
gucaacugauu

SEQ ID NO: 4012497 - RNA, 18 nt, Human parainfluenza virus 2
guuauacguuuuggcugu

SEQ ID NO: 4012498 - RNA, 13 nt, Human parainfluenza virus 2
uacagcugccacu

SEQ ID NO: 4012499 - RNA, 23 nt, Human parainfluenza virus 2
uagaccuacacucucaucaacaa

SEQ ID NO: 4012500 - RNA, 18 nt, Human parainfluenza virus 2
ucaacaccgacuuagguu

SEQ ID NO: 4012501 - RNA, 14 nt, Human parainfluenza virus 2
ucaauaauaauuga

SEQ ID NO: 4012502 - RNA, 17 nt, Human parainfluenza virus 2
ucacacaagagacacuc

SEQ ID NO: 4012503 - RNA, 13 nt, Human parainfluenza virus 2
ucacaucaauaga

SEQ ID NO: 4012504 - RNA, 11 nt, Human parainfluenza virus 2
ucacucagaga

SEQ ID NO: 4012505 - RNA, 11 nt, Human parainfluenza virus 2
uccacaucacu

SEQ ID NO: 4012506 - RNA, 17 nt, Human parainfluenza virus 2
uggcuguauuagaaugu

SEQ ID NO: 4012507 - RNA, 13 nt, Human parainfluenza virus 2
uguuauagauucu

SEQ ID NO: 4012508 - RNA, 17 nt, Human parainfluenza virus 2
uuaaaaaugaaaugacu

SEQ ID NO: 4012509 - RNA, 12 nt, Human parainfluenza virus 2
uucugcuguuuu

SEQ ID NO: 4012510 - RNA, 22 nt, Human parainfluenza virus 2
uugaaugaagacuccagauuca

SEQ ID NO: 4012511 - RNA, 13 nt, Human parainfluenza virus 2
uuuggcuguauua

SEQ ID NO: 4012512 - RNA, 15 nt, Human parainfluenza virus 3
aaaaauggaacccag

SEQ ID NO: 4012513 - RNA, 20 nt, Human parainfluenza virus 3
aaaacaaaaaguacagaaca

SEQ ID NO: 4012514 - RNA, 17 nt, Human parainfluenza virus 3
aaaacacuaaucccaga

SEQ ID NO: 4012515 - RNA, 14 nt, Human parainfluenza virus 3
aaaacuacagcaug

SEQ ID NO: 4012516 - RNA, 14 nt, Human parainfluenza virus 3
aaaagauagaacua

SEQ ID NO: 4012517 - RNA, 19 nt, Human parainfluenza virus 3
aaaaucaaaccaacagaaa

SEQ ID NO: 4012518 - RNA, 13 nt, Human parainfluenza virus 3
aaaauuauaacac

SEQ ID NO: 4012519 - RNA, 16 nt, Human parainfluenza virus 3
aaacacuagcaaguca

SEQ ID NO: 4012520 - RNA, 22 nt, Human parainfluenza virus 3
aaacagagauuccaaaaagcug

SEQ ID NO: 4012521 - RNA, 18 nt, Human parainfluenza virus 3
aaacaugguuuacuauca

SEQ ID NO: 4012522 - RNA, 22 nt, Human parainfluenza virus 3
aaacgaguuguauguguagcaa

SEQ ID NO: 4012523 - RNA, 18 nt, Human parainfluenza virus 3
aaacuuaggauuaaagaa

SEQ ID NO: 4012524 - RNA, 16 nt, Human parainfluenza virus 3
aaagccauacagauga

SEQ ID NO: 4012525 - RNA, 22 nt, Human parainfluenza virus 3
aaagggaugaagauaucacaaa

SEQ ID NO: 4012526 - RNA, 14 nt, Human parainfluenza virus 3
aaauacuaaugaaa

SEQ ID NO: 4012527 - RNA, 14 nt, Human parainfluenza virus 3
aaauaucacagaaa

SEQ ID NO: 4012528 - RNA, 16 nt, Human parainfluenza virus 3
aaaucaaaacaaaaag

SEQ ID NO: 4012529 - RNA, 17 nt, Human parainfluenza virus 3
aaauccaccaaaacaug

SEQ ID NO: 4012530 - RNA, 15 nt, Human parainfluenza virus 3
aaauuaauaauauau

SEQ ID NO: 4012531 - RNA, 14 nt, Human parainfluenza virus 3
aaauuccuaaguca

SEQ ID NO: 4012532 - RNA, 16 nt, Human parainfluenza virus 3
aaauuccuaagucaau

SEQ ID NO: 4012533 - RNA, 14 nt, Human parainfluenza virus 3
aacaaacaaauaac

SEQ ID NO: 4012534 - RNA, 15 nt, Human parainfluenza virus 3
aacaacaaaaccaaa

SEQ ID NO: 4012535 - RNA, 13 nt, Human parainfluenza virus 3
aacaagugagaaa

SEQ ID NO: 4012536 - RNA, 21 nt, Human parainfluenza virus 3
aacacaagaacccagcaacuc

SEQ ID NO: 4012537 - RNA, 17 nt, Human parainfluenza virus 3
aacccaagacacaaaag

SEQ ID NO: 4012538 - RNA, 18 nt, Human parainfluenza virus 3
aacccaagacacaaaaga

SEQ ID NO: 4012539 - RNA, 24 nt, Human parainfluenza virus 3
aacgcagcauuacucagaauuaac

SEQ ID NO: 4012540 - RNA, 20 nt, Human parainfluenza virus 3
aagaagcuuggaaucuauca

SEQ ID NO: 4012541 - RNA, 19 nt, Human parainfluenza virus 3
aagaccaaaaugaauccaa

SEQ ID NO: 4012542 - RNA, 16 nt, Human parainfluenza virus 3
aaguaagaaaaacaug

SEQ ID NO: 4012543 - RNA, 14 nt, Human parainfluenza virus 3
aaguguacaauaau

SEQ ID NO: 4012544 - RNA, 17 nt, Human parainfluenza virus 3
aaguuggcauagcaaau

SEQ ID NO: 4012545 - RNA, 15 nt, Human parainfluenza virus 3
aauaauauaggaaaa

SEQ ID NO: 4012546 - RNA, 15 nt, Human parainfluenza virus 3
aauacaauaaagaua

SEQ ID NO: 4012547 - RNA, 16 nt, Human parainfluenza virus 3
aauacuguaaacagaa

SEQ ID NO: 4012548 - RNA, 20 nt, Human parainfluenza virus 3
aauaggagaaaucaaaacaa

SEQ ID NO: 4012549 - RNA, 14 nt, Human parainfluenza virus 3
aauauacaaauaag

SEQ ID NO: 4012550 - RNA, 13 nt, Human parainfluenza virus 3
aaucaaagagaac

SEQ ID NO: 4012551 - RNA, 22 nt, Human parainfluenza virus 3
aaucagggacacaaacaaagca

SEQ ID NO: 4012552 - RNA, 12 nt, Human parainfluenza virus 3
aaucccaaaaga

SEQ ID NO: 4012553 - RNA, 23 nt, Human parainfluenza virus 3
aaucccagguucucucauacuuu

SEQ ID NO: 4012554 - RNA, 22 nt, Human parainfluenza virus 3
aaucggaaauccaccaaaacau

SEQ ID NO: 4012555 - RNA, 18 nt, Human parainfluenza virus 3
aaucugcagauguuccaa

SEQ ID NO: 4012556 - RNA, 14 nt, Human parainfluenza virus 3
aaugaaucuacaau

SEQ ID NO: 4012557 - RNA, 15 nt, Human parainfluenza virus 3
aaugacuuaggaaaa

SEQ ID NO: 4012558 - RNA, 19 nt, Human parainfluenza virus 3
aaugagagaguauccauga

SEQ ID NO: 4012559 - RNA, 22 nt, Human parainfluenza virus 3
aaugagagcuacacaaguuuua

SEQ ID NO: 4012560 - RNA, 14 nt, Human parainfluenza virus 3
aauuaggaauaauu

SEQ ID NO: 4012561 - RNA, 16 nt, Human parainfluenza virus 3
aauucuaaaaauggaa

SEQ ID NO: 4012562 - RNA, 15 nt, Human parainfluenza virus 3
acaaaauugaaagaa

SEQ ID NO: 4012563 - RNA, 19 nt, Human parainfluenza virus 3
acaaaauugaaagaagaaa

SEQ ID NO: 4012564 - RNA, 19 nt, Human parainfluenza virus 3
acaacuuauaaaucagaua

SEQ ID NO: 4012565 - RNA, 11 nt, Human parainfluenza virus 3
acaagcugcau

SEQ ID NO: 4012566 - RNA, 20 nt, Human parainfluenza virus 3
acaauaaagauauaucuuaa

SEQ ID NO: 4012567 - RNA, 20 nt, Human parainfluenza virus 3
acaauagauaucaaucaaua

SEQ ID NO: 4012568 - RNA, 16 nt, Human parainfluenza virus 3
acaauuagaaaugaua

SEQ ID NO: 4012569 - RNA, 18 nt, Human parainfluenza virus 3
acacaaaauuaacacaga

SEQ ID NO: 4012570 - RNA, 15 nt, Human parainfluenza virus 3
acacacacaaaauca

SEQ ID NO: 4012571 - RNA, 18 nt, Human parainfluenza virus 3
acaccaagaagaugacaa

SEQ ID NO: 4012572 - RNA, 23 nt, Human parainfluenza virus 3
acagaaaauaaaacucaauaaau

SEQ ID NO: 4012573 - RNA, 22 nt, Human parainfluenza virus 3
acagaaacaagugagaaagaua

SEQ ID NO: 4012574 - RNA, 14 nt, Human parainfluenza virus 3
accacucaaaguca

SEQ ID NO: 4012575 - RNA, 21 nt, Human parainfluenza virus 3
accauuaccacucaaagucaa

SEQ ID NO: 4012576 - RNA, 15 nt, Human parainfluenza virus 3
acgaaucaaagacaa

SEQ ID NO: 4012577 - RNA, 21 nt, Human parainfluenza virus 3
acgaugugcaaguuaaaucag

SEQ ID NO: 4012578 - RNA, 16 nt, Human parainfluenza virus 3
acgugcuaucaaaauu

SEQ ID NO: 4012579 - RNA, 22 nt, Human parainfluenza virus 3
acuaacucugcaauauacacau

SEQ ID NO: 4012580 - RNA, 19 nt, Human parainfluenza virus 3
acuaauacccaaaaaagug

SEQ ID NO: 4012581 - RNA, 15 nt, Human parainfluenza virus 3
acuagacucacagaa

SEQ ID NO: 4012582 - RNA, 22 nt, Human parainfluenza virus 3
acuagauuuauaucaagacaaa

SEQ ID NO: 4012583 - RNA, 18 nt, Human parainfluenza virus 3
acucuuugcaaaaaugac

SEQ ID NO: 4012584 - RNA, 14 nt, Human parainfluenza virus 3
acugagaaagugaa

SEQ ID NO: 4012585 - RNA, 21 nt, Human parainfluenza virus 3
acugagagaggaggaaagaaa

SEQ ID NO: 4012586 - RNA, 16 nt, Human parainfluenza virus 3
acugcugcaacaccag

SEQ ID NO: 4012587 - RNA, 14 nt, Human parainfluenza virus 3
acuguaaacagaaa

SEQ ID NO: 4012588 - RNA, 22 nt, Human parainfluenza virus 3
acuguacagagaggaccuggga

SEQ ID NO: 4012589 - RNA, 14 nt, Human parainfluenza virus 3
acuuaggaaaauac

SEQ ID NO: 4012590 - RNA, 17 nt, Human parainfluenza virus 3
agaaaaugagauugaua

SEQ ID NO: 4012591 - RNA, 18 nt, Human parainfluenza virus 3
agaaaauggaugaaucac

SEQ ID NO: 4012592 - RNA, 20 nt, Human parainfluenza virus 3
agaaacaagugagaaagaua

SEQ ID NO: 4012593 - RNA, 21 nt, Human parainfluenza virus 3
agaaacagugaucauggaaga

SEQ ID NO: 4012594 - RNA, 17 nt, Human parainfluenza virus 3
agaaacccaaaaauaag

SEQ ID NO: 4012595 - RNA, 17 nt, Human parainfluenza virus 3
agaaauaaauaaugagu

SEQ ID NO: 4012596 - RNA, 22 nt, Human parainfluenza virus 3
agaagauauuguacuugauauu

SEQ ID NO: 4012597 - RNA, 18 nt, Human parainfluenza virus 3
agaagauugauagaaaau

SEQ ID NO: 4012598 - RNA, 14 nt, Human parainfluenza virus 3
agaaugaaacaaua

SEQ ID NO: 4012599 - RNA, 14 nt, Human parainfluenza virus 3
agacaaaaaguaag

SEQ ID NO: 4012600 - RNA, 16 nt, Human parainfluenza virus 3
agacaagaaacaacag

SEQ ID NO: 4012601 - RNA, 22 nt, Human parainfluenza virus 3
agaccuaucggaaaacgacaca

SEQ ID NO: 4012602 - RNA, 20 nt, Human parainfluenza virus 3
agaggaccugggagaagaag

SEQ ID NO: 4012603 - RNA, 22 nt, Human parainfluenza virus 3
agagucauguccagaauuauau

SEQ ID NO: 4012604 - RNA, 15 nt, Human parainfluenza virus 3
agauacaaaaugaaa

SEQ ID NO: 4012605 - RNA, 20 nt, Human parainfluenza virus 3
agauagaacauauagucaaa

SEQ ID NO: 4012606 - RNA, 20 nt, Human parainfluenza virus 3
agauaucaaucaauauacaa

SEQ ID NO: 4012607 - RNA, 19 nt, Human parainfluenza virus 3
agauauugagaaacucaaa

SEQ ID NO: 4012608 - RNA, 16 nt, Human parainfluenza virus 3
agauauuuuuaaugaa

SEQ ID NO: 4012609 - RNA, 16 nt, Human parainfluenza virus 3
agaucaagaaaacuag

SEQ ID NO: 4012610 - RNA, 17 nt, Human parainfluenza virus 3
agaucaagcaauacaag

SEQ ID NO: 4012611 - RNA, 23 nt, Human parainfluenza virus 3
agauuuguuauccuuuaauggau

SEQ ID NO: 4012612 - RNA, 18 nt, Human parainfluenza virus 3
agcaaauguacuaaacaa

SEQ ID NO: 4012613 - RNA, 12 nt, Human parainfluenza virus 3
agcacaaaucac

SEQ ID NO: 4012614 - RNA, 20 nt, Human parainfluenza virus 3
agcaccgacccccaagaaga

SEQ ID NO: 4012615 - RNA, 21 nt, Human parainfluenza virus 3
agcacuccuaaauacagaugu

SEQ ID NO: 4012616 - RNA, 18 nt, Human parainfluenza virus 3
agcccaaggauagacaaa

SEQ ID NO: 4012617 - RNA, 20 nt, Human parainfluenza virus 3
agcgugcucggaaaauggac

SEQ ID NO: 4012618 - RNA, 19 nt, Human parainfluenza virus 3
aggauauaggaaaaucaua

SEQ ID NO: 4012619 - RNA, 17 nt, Human parainfluenza virus 3
agggcaauuacucuauu

SEQ ID NO: 4012620 - RNA, 19 nt, Human parainfluenza virus 3
agguaauaaccuaugggaa

SEQ ID NO: 4012621 - RNA, 16 nt, Human parainfluenza virus 3
aguacaccugauacaa

SEQ ID NO: 4012622 - RNA, 12 nt, Human parainfluenza virus 3
aguuacaaaguu

SEQ ID NO: 4012623 - RNA, 20 nt, Human parainfluenza virus 3
aguucuucaauacaccaaga

SEQ ID NO: 4012624 - RNA, 16 nt, Human parainfluenza virus 3
auaaagauauaucuua

SEQ ID NO: 4012625 - RNA, 21 nt, Human parainfluenza virus 3
auaaauacaauaaagauauau

SEQ ID NO: 4012626 - RNA, 13 nt, Human parainfluenza virus 3
auaagaaaaacuu

SEQ ID NO: 4012627 - RNA, 14 nt, Human parainfluenza virus 3
auacaauaaagaua

SEQ ID NO: 4012628 - RNA, 15 nt, Human parainfluenza virus 3
auaccaagcagaguu

SEQ ID NO: 4012629 - RNA, 21 nt, Human parainfluenza virus 3
auacucgcaggaacaagaaag

SEQ ID NO: 4012630 - RNA, 18 nt, Human parainfluenza virus 3
auacugcaucaaagauag

SEQ ID NO: 4012631 - RNA, 16 nt, Human parainfluenza virus 3
auacuguaaacagaaa

SEQ ID NO: 4012632 - RNA, 22 nt, Human parainfluenza virus 3
auacuuucaacauaaaugacaa

SEQ ID NO: 4012633 - RNA, 21 nt, Human parainfluenza virus 3
auagauaucaaucaauauaca

SEQ ID NO: 4012634 - RNA, 15 nt, Human parainfluenza virus 3
auagcagauaguaaa

SEQ ID NO: 4012635 - RNA, 15 nt, Human parainfluenza virus 3
auagucaaaugacug

SEQ ID NO: 4012636 - RNA, 21 nt, Human parainfluenza virus 3
auagugaaaagguccauaauu

SEQ ID NO: 4012637 - RNA, 22 nt, Human parainfluenza virus 3
auauaccugaucuauaucgaca

SEQ ID NO: 4012638 - RNA, 14 nt, Human parainfluenza virus 3
auauauauauacca

SEQ ID NO: 4012639 - RNA, 12 nt, Human parainfluenza virus 3
auaucaagacaa

SEQ ID NO: 4012640 - RNA, 21 nt, Human parainfluenza virus 3
auauggaugacgacucaauac

SEQ ID NO: 4012641 - RNA, 15 nt, Human parainfluenza virus 3
auauuacaaaggcaa

SEQ ID NO: 4012642 - RNA, 14 nt, Human parainfluenza virus 3
aucaaaaucuauca

SEQ ID NO: 4012643 - RNA, 12 nt, Human parainfluenza virus 3
aucaaagagaac

SEQ ID NO: 4012644 - RNA, 16 nt, Human parainfluenza virus 3
aucaaaugcaacaaga

SEQ ID NO: 4012645 - RNA, 23 nt, Human parainfluenza virus 3
aucaagaagugccgcaacaaaga

SEQ ID NO: 4012646 - RNA, 21 nt, Human parainfluenza virus 3
aucagagauauuaaguucaua

SEQ ID NO: 4012647 - RNA, 15 nt, Human parainfluenza virus 3
aucaggaacacaauc

SEQ ID NO: 4012648 - RNA, 12 nt, Human parainfluenza virus 3
auccaacaaaga

SEQ ID NO: 4012649 - RNA, 15 nt, Human parainfluenza virus 3
auccaacaaagaaac

SEQ ID NO: 4012650 - RNA, 16 nt, Human parainfluenza virus 3
auccacaucaaaacua

SEQ ID NO: 4012651 - RNA, 22 nt, Human parainfluenza virus 3
auccaugaucaaaacaaaauug

SEQ ID NO: 4012652 - RNA, 19 nt, Human parainfluenza virus 3
aucuaauaguagcaaucaa

SEQ ID NO: 4012653 - RNA, 17 nt, Human parainfluenza virus 3
aucuauuauuuacagaa

SEQ ID NO: 4012654 - RNA, 18 nt, Human parainfluenza virus 3
aucucucacaaagcacaa

SEQ ID NO: 4012655 - RNA, 15 nt, Human parainfluenza virus 3
augaagaagaaauac

SEQ ID NO: 4012656 - RNA, 14 nt, Human parainfluenza virus 3
augaagauaucaca

SEQ ID NO: 4012657 - RNA, 16 nt, Human parainfluenza virus 3
augacauacaaaauga

SEQ ID NO: 4012658 - RNA, 14 nt, Human parainfluenza virus 3
augagacaaaauua

SEQ ID NO: 4012659 - RNA, 17 nt, Human parainfluenza virus 3
augaucaaaacaaaauu

SEQ ID NO: 4012660 - RNA, 16 nt, Human parainfluenza virus 3
auguacaacagaagca

SEQ ID NO: 4012661 - RNA, 21 nt, Human parainfluenza virus 3
auuaacgugcuaucaaaauua

SEQ ID NO: 4012662 - RNA, 22 nt, Human parainfluenza virus 3
auuaacuaggcugcugaacacu

SEQ ID NO: 4012663 - RNA, 22 nt, Human parainfluenza virus 3
auuaauccuuauccaaaaugag

SEQ ID NO: 4012664 - RNA, 17 nt, Human parainfluenza virus 3
auuacaagaaaaaggaa

SEQ ID NO: 4012665 - RNA, 12 nt, Human parainfluenza virus 3
auuccaaaauua

SEQ ID NO: 4012666 - RNA, 12 nt, Human parainfluenza virus 3
auucuaaaaaug

SEQ ID NO: 4012667 - RNA, 14 nt, Human parainfluenza virus 3
caaaaaaagcaaaa

SEQ ID NO: 4012668 - RNA, 16 nt, Human parainfluenza virus 3
caaaauauaaaaccag

SEQ ID NO: 4012669 - RNA, 19 nt, Human parainfluenza virus 3
caaaaucuaucaacacaca

SEQ ID NO: 4012670 - RNA, 15 nt, Human parainfluenza virus 3
caaacacuaaacaca

SEQ ID NO: 4012671 - RNA, 15 nt, Human parainfluenza virus 3
caaacccaagacaca

SEQ ID NO: 4012672 - RNA, 15 nt, Human parainfluenza virus 3
caaacuguauaacaa

SEQ ID NO: 4012673 - RNA, 18 nt, Human parainfluenza virus 3
caaagaaacgacaccgaa

SEQ ID NO: 4012674 - RNA, 19 nt, Human parainfluenza virus 3
caaaguuuguggcucugga

SEQ ID NO: 4012675 - RNA, 13 nt, Human parainfluenza virus 3
caaauuacaauua

SEQ ID NO: 4012676 - RNA, 19 nt, Human parainfluenza virus 3
caacacagcaaacacuaaa

SEQ ID NO: 4012677 - RNA, 17 nt, Human parainfluenza virus 3
caacuggauccauauca

SEQ ID NO: 4012678 - RNA, 19 nt, Human parainfluenza virus 3
caagaucuauauauauaca

SEQ ID NO: 4012679 - RNA, 17 nt, Human parainfluenza virus 3
caaggauagacaaaaag

SEQ ID NO: 4012680 - RNA, 13 nt, Human parainfluenza virus 3
caaguaugauaug

SEQ ID NO: 4012681 - RNA, 22 nt, Human parainfluenza virus 3
caagucaacggauaucuacaau

SEQ ID NO: 4012682 - RNA, 16 nt, Human parainfluenza virus 3
caaucacggaaaggau

SEQ ID NO: 4012683 - RNA, 17 nt, Human parainfluenza virus 3
caaucagggacacaaac

SEQ ID NO: 4012684 - RNA, 20 nt, Human parainfluenza virus 3
caaucagggacacaaacaaa

SEQ ID NO: 4012685 - RNA, 18 nt, Human parainfluenza virus 3
caaugaaauuagaaagau

SEQ ID NO: 4012686 - RNA, 15 nt, Human parainfluenza virus 3
cacaaaacuacagca

SEQ ID NO: 4012687 - RNA, 15 nt, Human parainfluenza virus 3
cacaaauaucacaga

SEQ ID NO: 4012688 - RNA, 11 nt, Human parainfluenza virus 3
cacauagaaga

SEQ ID NO: 4012689 - RNA, 18 nt, Human parainfluenza virus 3
caccagaugauauaacau

SEQ ID NO: 4012690 - RNA, 22 nt, Human parainfluenza virus 3
cacucucagcuggauauacaac

SEQ ID NO: 4012691 - RNA, 21 nt, Human parainfluenza virus 3
cagaacuccguccuuaauuau

SEQ ID NO: 4012692 - RNA, 13 nt, Human parainfluenza virus 3
cagacaagaaaca

SEQ ID NO: 4012693 - RNA, 13 nt, Human parainfluenza virus 3
cucaaaaaaugau

SEQ ID NO: 4012694 - RNA, 22 nt, Human parainfluenza virus 3
cucaauaaauuagauaaaagac

SEQ ID NO: 4012695 - RNA, 17 nt, Human parainfluenza virus 3
cucuacucauacaauug

SEQ ID NO: 4012696 - RNA, 15 nt, Human parainfluenza virus 3
cugccaaauagauau

SEQ ID NO: 4012697 - RNA, 14 nt, Human parainfluenza virus 3
cuggacauagaagu

SEQ ID NO: 4012698 - RNA, 19 nt, Human parainfluenza virus 3
cuggauccauaucaaaaac

SEQ ID NO: 4012699 - RNA, 15 nt, Human parainfluenza virus 3
cugguauucaaaagg

SEQ ID NO: 4012700 - RNA, 19 nt, Human parainfluenza virus 3
cuuaaaauuaugacugaga

SEQ ID NO: 4012701 - RNA, 20 nt, Human parainfluenza virus 3
cuuaaaauuaugacugagag

SEQ ID NO: 4012702 - RNA, 23 nt, Human parainfluenza virus 3
cuuccacuagauaggagcauaaa

SEQ ID NO: 4012703 - RNA, 14 nt, Human parainfluenza virus 3
cuuuaucuuugagc

SEQ ID NO: 4012704 - RNA, 18 nt, Human parainfluenza virus 3
cuuuaucuuugagcccaa

SEQ ID NO: 4012705 - RNA, 19 nt, Human parainfluenza virus 3
cuuuaucuuugagcccaag

SEQ ID NO: 4012706 - RNA, 21 nt, Human parainfluenza virus 3
gaaaacacagagagacugcaa

SEQ ID NO: 4012707 - RNA, 23 nt, Human parainfluenza virus 3
gaaaagcaguaccccacauuaga

SEQ ID NO: 4012708 - RNA, 22 nt, Human parainfluenza virus 3
gaaaauacacauuuaucagaua

SEQ ID NO: 4012709 - RNA, 14 nt, Human parainfluenza virus 3
gaaaaucaaagaga

SEQ ID NO: 4012710 - RNA, 14 nt, Human parainfluenza virus 3
gaaagaaagaccaa

SEQ ID NO: 4012711 - RNA, 14 nt, Human parainfluenza virus 3
gaaauaaaucagaa

SEQ ID NO: 4012712 - RNA, 15 nt, Human parainfluenza virus 3
gaaauuaauaauaua

SEQ ID NO: 4012713 - RNA, 18 nt, Human parainfluenza virus 3
gaaauuaauaauauauca

SEQ ID NO: 4012714 - RNA, 21 nt, Human parainfluenza virus 3
gaacaaacagacaagaaacaa

SEQ ID NO: 4012715 - RNA, 16 nt, Human parainfluenza virus 3
gaacagacaaacacaa

SEQ ID NO: 4012716 - RNA, 16 nt, Human parainfluenza virus 3
gaaccauugcucuggg

SEQ ID NO: 4012717 - RNA, 16 nt, Human parainfluenza virus 3
gaacgaaucaaagaca

SEQ ID NO: 4012718 - RNA, 21 nt, Human parainfluenza virus 3
gaacuaauaaucucuacuuca

SEQ ID NO: 4012719 - RNA, 17 nt, Human parainfluenza virus 3
gaagaaaagaucaagaa

SEQ ID NO: 4012720 - RNA, 16 nt, Human parainfluenza virus 3
gaagaggaaucaagag

SEQ ID NO: 4012721 - RNA, 17 nt, Human parainfluenza virus 3
gaaggauacagaagaga

SEQ ID NO: 4012722 - RNA, 23 nt, Human parainfluenza virus 3
gaaucuaauaguagcaaucaaau

SEQ ID NO: 4012723 - RNA, 22 nt, Human parainfluenza virus 3
gaaugcuguucaauacaaacaa

SEQ ID NO: 4012724 - RNA, 14 nt, Human parainfluenza virus 3
gaauuaacaaacau

SEQ ID NO: 4012725 - RNA, 14 nt, Human parainfluenza virus 3
gacaaaaaaagcaa

SEQ ID NO: 4012726 - RNA, 13 nt, Human parainfluenza virus 3
gacacaacagaug

SEQ ID NO: 4012727 - RNA, 13 nt, Human parainfluenza virus 3
gacacaguuuauc

SEQ ID NO: 4012728 - RNA, 19 nt, Human parainfluenza virus 3
gacaccgaacaaacagaca

SEQ ID NO: 4012729 - RNA, 21 nt, Human parainfluenza virus 3
gacagugacccgaguuacaaa

SEQ ID NO: 4012730 - RNA, 12 nt, Human parainfluenza virus 3
gaccaacagauc

SEQ ID NO: 4012731 - RNA, 15 nt, Human parainfluenza virus 3
gagaaacucaaagaa

SEQ ID NO: 4012732 - RNA, 23 nt, Human parainfluenza virus 3
gagaauguaaucugcaacacaac

SEQ ID NO: 4012733 - RNA, 16 nt, Human parainfluenza virus 3
gagcaguacaaugaga

SEQ ID NO: 4012734 - RNA, 12 nt, Human parainfluenza virus 3
gagcccaaggau

SEQ ID NO: 4012735 - RNA, 14 nt, Human parainfluenza virus 3
gaggaaucaagaga

SEQ ID NO: 4012736 - RNA, 20 nt, Human parainfluenza virus 3
gaguuccacgguauaaugaa

SEQ ID NO: 4012737 - RNA, 13 nt, Human parainfluenza virus 3
gaguucuucucuu

SEQ ID NO: 4012738 - RNA, 18 nt, Human parainfluenza virus 3
gauaaaugguauaaucca

SEQ ID NO: 4012739 - RNA, 14 nt, Human parainfluenza virus 3
gauacagaagagag

SEQ ID NO: 4012740 - RNA, 21 nt, Human parainfluenza virus 3
gauagacaaaaaguaagaaaa

SEQ ID NO: 4012741 - RNA, 20 nt, Human parainfluenza virus 3
gaucaacuuauacaaaagaa

SEQ ID NO: 4012742 - RNA, 20 nt, Human parainfluenza virus 3
gaucaggaaacuguacagag

SEQ ID NO: 4012743 - RNA, 15 nt, Human parainfluenza virus 3
gauccucaucagaua

SEQ ID NO: 4012744 - RNA, 12 nt, Human parainfluenza virus 3
gcaaaauaauau

SEQ ID NO: 4012745 - RNA, 19 nt, Human parainfluenza virus 3
gcaaauaagggauaaucaa

SEQ ID NO: 4012746 - RNA, 17 nt, Human parainfluenza virus 3
gcaaauguacuaaacaa

SEQ ID NO: 4012747 - RNA, 21 nt, Human parainfluenza virus 3
gcaacaccagaugaugaagaa

SEQ ID NO: 4012748 - RNA, 20 nt, Human parainfluenza virus 3
gcaauuaugaucuuaaugaa

SEQ ID NO: 4012749 - RNA, 22 nt, Human parainfluenza virus 3
gcagaaugaaacaauagauauc

SEQ ID NO: 4012750 - RNA, 15 nt, Human parainfluenza virus 3
gcagaguucuucucu

SEQ ID NO: 4012751 - RNA, 23 nt, Human parainfluenza virus 3
gcaucauuauaccgcacaaauau

SEQ ID NO: 4012752 - RNA, 12 nt, Human parainfluenza virus 3
gccgaagcaaau

SEQ ID NO: 4012753 - RNA, 17 nt, Human parainfluenza virus 3
gcuaucaagaccaggaa

SEQ ID NO: 4012754 - RNA, 13 nt, Human parainfluenza virus 3
gcucgaaaugaga

SEQ ID NO: 4012755 - RNA, 23 nt, Human parainfluenza virus 3
gcuuaucaggaaacauaucccaa

SEQ ID NO: 4012756 - RNA, 15 nt, Human parainfluenza virus 3
ggaauccaaugaaaa

SEQ ID NO: 4012757 - RNA, 17 nt, Human parainfluenza virus 3
ggaucauuacaagaaaa

SEQ ID NO: 4012758 - RNA, 14 nt, Human parainfluenza virus 3
ggaucuuaggaaau

SEQ ID NO: 4012759 - RNA, 19 nt, Human parainfluenza virus 3
ggaugaaucacauagaaga

SEQ ID NO: 4012760 - RNA, 19 nt, Human parainfluenza virus 3
ggauuaguuggaggaauca

SEQ ID NO: 4012761 - RNA, 15 nt, Human parainfluenza virus 3
ggcaaacagaaauac

SEQ ID NO: 4012762 - RNA, 15 nt, Human parainfluenza virus 3
ggcgguugcucuggu

SEQ ID NO: 4012763 - RNA, 13 nt, Human parainfluenza virus 3
gggcagaagaaaa

SEQ ID NO: 4012764 - RNA, 23 nt, Human parainfluenza virus 3
guaauuggaaccauugcucuggg

SEQ ID NO: 4012765 - RNA, 16 nt, Human parainfluenza virus 3
guauaauccauucaaa

SEQ ID NO: 4012766 - RNA, 18 nt, Human parainfluenza virus 3
guauccacuaaaucccac

SEQ ID NO: 4012767 - RNA, 14 nt, Human parainfluenza virus 3
gucaaaugacugau

SEQ ID NO: 4012768 - RNA, 18 nt, Human parainfluenza virus 3
gugaaaagguccauaauu

SEQ ID NO: 4012769 - RNA, 23 nt, Human parainfluenza virus 3
gugcaaguuaaaucagagauauu

SEQ ID NO: 4012770 - RNA, 19 nt, Human parainfluenza virus 3
uaaaacucaauaaauuaga

SEQ ID NO: 4012771 - RNA, 20 nt, Human parainfluenza virus 3
uaaagaaaauggaugaauca

SEQ ID NO: 4012772 - RNA, 16 nt, Human parainfluenza virus 3
uaaagauauaucuuaa

SEQ ID NO: 4012773 - RNA, 21 nt, Human parainfluenza virus 3
uaagaaaaacauguaauauau

SEQ ID NO: 4012774 - RNA, 22 nt, Human parainfluenza virus 3
uaagggauaaucaaaaacuuag

SEQ ID NO: 4012775 - RNA, 22 nt, Human parainfluenza virus 3
uaauauauauauaccaagcaga

SEQ ID NO: 4012776 - RNA, 19 nt, Human parainfluenza virus 3
uaauccuuauccaaaauga

SEQ ID NO: 4012777 - RNA, 11 nt, Human parainfluenza virus 3
uaccaagcaga

SEQ ID NO: 4012778 - RNA, 21 nt, Human parainfluenza virus 3
uacccaacacaauaucaauca

SEQ ID NO: 4012779 - RNA, 23 nt, Human parainfluenza virus 3
uacucauacaauugagaaagaac

SEQ ID NO: 4012780 - RNA, 22 nt, Human parainfluenza virus 3
uagaacauauagucaaaugacu

SEQ ID NO: 4012781 - RNA, 18 nt, Human parainfluenza virus 3
uagacaaaaaguaagaaa

SEQ ID NO: 4012782 - RNA, 19 nt, Human parainfluenza virus 3
uagacaaaaaguaagaaaa

SEQ ID NO: 4012783 - RNA, 15 nt, Human parainfluenza virus 3
uagauaucaaucaau

SEQ ID NO: 4012784 - RNA, 15 nt, Human parainfluenza virus 3
uagauuacauugaua

SEQ ID NO: 4012785 - RNA, 15 nt, Human parainfluenza virus 3
uagcacaauuacaca

SEQ ID NO: 4012786 - RNA, 13 nt, Human parainfluenza virus 3
uaggacaaaagag

SEQ ID NO: 4012787 - RNA, 13 nt, Human parainfluenza virus 3
uauauaccaagca

SEQ ID NO: 4012788 - RNA, 15 nt, Human parainfluenza virus 3
uauauaccaagcaga

SEQ ID NO: 4012789 - RNA, 14 nt, Human parainfluenza virus 3
uauauuauggacaa

SEQ ID NO: 4012790 - RNA, 15 nt, Human parainfluenza virus 3
uaucuuaaccuuuau

SEQ ID NO: 4012791 - RNA, 18 nt, Human parainfluenza virus 3
uauuagcagucauacucg

SEQ ID NO: 4012792 - RNA, 16 nt, Human parainfluenza virus 3
ucaaaaacaacaacca

SEQ ID NO: 4012793 - RNA, 12 nt, Human parainfluenza virus 3
ucaaaacaaaaa

SEQ ID NO: 4012794 - RNA, 15 nt, Human parainfluenza virus 3
ucaaaacaaaauuga

SEQ ID NO: 4012795 - RNA, 12 nt, Human parainfluenza virus 3
ucaacacaagaa

SEQ ID NO: 4012796 - RNA, 17 nt, Human parainfluenza virus 3
ucaacaccgacacaaag

SEQ ID NO: 4012797 - RNA, 16 nt, Human parainfluenza virus 3
ucaaucucaacaacaa

SEQ ID NO: 4012798 - RNA, 23 nt, Human parainfluenza virus 3
uccaagauuaugucaacaaagaa

SEQ ID NO: 4012799 - RNA, 13 nt, Human parainfluenza virus 3
ucccaaaagagac

SEQ ID NO: 4012800 - RNA, 12 nt, Human parainfluenza virus 3
ucgcaaaaggag

SEQ ID NO: 4012801 - RNA, 20 nt, Human parainfluenza virus 3
ucuauuauuuacagaaucaa

SEQ ID NO: 4012802 - RNA, 14 nt, Human parainfluenza virus 3
ugaaacaauagaua

SEQ ID NO: 4012803 - RNA, 12 nt, Human parainfluenza virus 3
ugaaagaagaaa

SEQ ID NO: 4012804 - RNA, 14 nt, Human parainfluenza virus 3
ugaaguguacaaua

SEQ ID NO: 4012805 - RNA, 19 nt, Human parainfluenza virus 3
ugaauccaaugagagagua

SEQ ID NO: 4012806 - RNA, 20 nt, Human parainfluenza virus 3
ugaaugacuuaggaaaauac

SEQ ID NO: 4012807 - RNA, 14 nt, Human parainfluenza virus 3
ugacaauaggaagu

SEQ ID NO: 4012808 - RNA, 20 nt, Human parainfluenza virus 3
ugaccuuaaaaccuacaaua

SEQ ID NO: 4012809 - RNA, 13 nt, Human parainfluenza virus 3
ugacuuaggaaaa

SEQ ID NO: 4012810 - RNA, 23 nt, Human parainfluenza virus 3
ugagaaacucaaagaagcaauca

SEQ ID NO: 4012811 - RNA, 19 nt, Human parainfluenza virus 3
ugagaagaacagucaaagc

SEQ ID NO: 4012812 - RNA, 22 nt, Human parainfluenza virus 3
ugauagaaaaucaaagagaaca

SEQ ID NO: 4012813 - RNA, 22 nt, Human parainfluenza virus 3
uggaauauaagugcaugugcua

SEQ ID NO: 4012814 - RNA, 20 nt, Human parainfluenza virus 3
uggaggaaucuccagaagca

SEQ ID NO: 4012815 - RNA, 17 nt, Human parainfluenza virus 3
uggaucaacugacaaaa

SEQ ID NO: 4012816 - RNA, 13 nt, Human parainfluenza virus 3
ugguuuaagaaau

SEQ ID NO: 4012817 - RNA, 17 nt, Human parainfluenza virus 3
uuaaccuaucuauaaua

SEQ ID NO: 4012818 - RNA, 16 nt, Human parainfluenza virus 3
uuaauaauaaauaaga

SEQ ID NO: 4012819 - RNA, 22 nt, Human parainfluenza virus 3
uuacaaaaagcucgaaaugaga

SEQ ID NO: 4012820 - RNA, 15 nt, Human parainfluenza virus 3
uuccaucaauaguga

SEQ ID NO: 4012821 - RNA, 19 nt, Human parainfluenza virus 3
uugaaugauuacucaauca

SEQ ID NO: 4012822 - RNA, 14 nt, Human parainfluenza virus 3
uugcaacucaauca

SEQ ID NO: 4012823 - RNA, 13 nt, Human parainfluenza virus 3
aaaaaaagcaaaa

SEQ ID NO: 4012824 - RNA, 22 nt, Human parainfluenza virus 3
aaaacauguaauauauauauac

SEQ ID NO: 4012825 - RNA, 23 nt, Human parainfluenza virus 3
aaacaaaaaguacagaacaccaa

SEQ ID NO: 4012826 - RNA, 21 nt, Human parainfluenza virus 3
aaacaacaaccaucaacaccg

SEQ ID NO: 4012827 - RNA, 17 nt, Human parainfluenza virus 3
aaacacuaaacacaaug

SEQ ID NO: 4012828 - RNA, 17 nt, Human parainfluenza virus 3
aaacuuaggacaaaaga

SEQ ID NO: 4012829 - RNA, 13 nt, Human parainfluenza virus 3
aaagaaaauggau

SEQ ID NO: 4012830 - RNA, 16 nt, Human parainfluenza virus 3
aaagggauaguucaaa

SEQ ID NO: 4012831 - RNA, 19 nt, Human parainfluenza virus 3
aaaguaagaaaaacaugua

SEQ ID NO: 4012832 - RNA, 20 nt, Human parainfluenza virus 3
aaagugagcaguacaaugag

SEQ ID NO: 4012833 - RNA, 17 nt, Human parainfluenza virus 3
aaauguucaaauuauau

SEQ ID NO: 4012834 - RNA, 17 nt, Human parainfluenza virus 3
aaauuacaauuagaaau

SEQ ID NO: 4012835 - RNA, 13 nt, Human parainfluenza virus 3
aacaaaguagaaa

SEQ ID NO: 4012836 - RNA, 22 nt, Human parainfluenza virus 3
aacaacaguagaucaaaaucua

SEQ ID NO: 4012837 - RNA, 22 nt, Human parainfluenza virus 3
aacaauggcacuguaucugaca

SEQ ID NO: 4012838 - RNA, 13 nt, Human parainfluenza virus 3
aacaauguagaua

SEQ ID NO: 4012839 - RNA, 21 nt, Human parainfluenza virus 3
aacacucagaucuacaaagua

SEQ ID NO: 4012840 - RNA, 16 nt, Human parainfluenza virus 3
aacaucaacaguugau

SEQ ID NO: 4012841 - RNA, 16 nt, Human parainfluenza virus 3
aacauuuugauccaaa

SEQ ID NO: 4012842 - RNA, 18 nt, Human parainfluenza virus 3
aaccaacagaaacaagug

SEQ ID NO: 4012843 - RNA, 18 nt, Human parainfluenza virus 3
aaccaaucaggaauccaa

SEQ ID NO: 4012844 - RNA, 19 nt, Human parainfluenza virus 3
aaccaaucaggaauccaau

SEQ ID NO: 4012845 - RNA, 20 nt, Human parainfluenza virus 3
aaccuuuaucuuugagccca

SEQ ID NO: 4012846 - RNA, 22 nt, Human parainfluenza virus 3
aaccuuuaucuuugagcccaag

SEQ ID NO: 4012847 - RNA, 18 nt, Human parainfluenza virus 3
aacuucgaaacaagauau

SEQ ID NO: 4012848 - RNA, 23 nt, Human parainfluenza virus 3
aagaaacgacaccgaacaaacag

SEQ ID NO: 4012849 - RNA, 22 nt, Human parainfluenza virus 3
aagaaaucaaaagauacugaca

SEQ ID NO: 4012850 - RNA, 21 nt, Human parainfluenza virus 3
aagaagaugacaaaagaauua

SEQ ID NO: 4012851 - RNA, 20 nt, Human parainfluenza virus 3
aagagacuggcaacacagca

SEQ ID NO: 4012852 - RNA, 14 nt, Human parainfluenza virus 3
aagauauaucuuaa

SEQ ID NO: 4012853 - RNA, 18 nt, Human parainfluenza virus 3
aagaucuauauauauaca

SEQ ID NO: 4012854 - RNA, 12 nt, Human parainfluenza virus 3
aagauuacagaa

SEQ ID NO: 4012855 - RNA, 14 nt, Human parainfluenza virus 3
aagauuacagaaag

SEQ ID NO: 4012856 - RNA, 19 nt, Human parainfluenza virus 3
aagauuaugucaacaaaga

SEQ ID NO: 4012857 - RNA, 20 nt, Human parainfluenza virus 3
aagauugauagaaaaucaaa

SEQ ID NO: 4012858 - RNA, 22 nt, Human parainfluenza virus 3
aagcaaauaagggauaaucaaa

SEQ ID NO: 4012859 - RNA, 13 nt, Human parainfluenza virus 3
aagcagaaugaaa

SEQ ID NO: 4012860 - RNA, 14 nt, Human parainfluenza virus 3
aagcagaguucuuc

SEQ ID NO: 4012861 - RNA, 13 nt, Human parainfluenza virus 3
aaggauacagaag

SEQ ID NO: 4012862 - RNA, 18 nt, Human parainfluenza virus 3
aaggauagacaaaaagua

SEQ ID NO: 4012863 - RNA, 13 nt, Human parainfluenza virus 3
aaggccaaaucag

SEQ ID NO: 4012864 - RNA, 18 nt, Human parainfluenza virus 3
aagggauaaucaaaaacu

SEQ ID NO: 4012865 - RNA, 14 nt, Human parainfluenza virus 3
aaguacagaacacc

SEQ ID NO: 4012866 - RNA, 17 nt, Human parainfluenza virus 3
aagucaaugaacagaga

SEQ ID NO: 4012867 - RNA, 20 nt, Human parainfluenza virus 3
aaguuggcauagcaaauuac

SEQ ID NO: 4012868 - RNA, 15 nt, Human parainfluenza virus 3
aauaaaacucaauaa

SEQ ID NO: 4012869 - RNA, 23 nt, Human parainfluenza virus 3
aauaucauugacacaacagaugu

SEQ ID NO: 4012870 - RNA, 17 nt, Human parainfluenza virus 3
aaucacccuccaaguca

SEQ ID NO: 4012871 - RNA, 19 nt, Human parainfluenza virus 3
aaucaggaauccaaugaaa

SEQ ID NO: 4012872 - RNA, 23 nt, Human parainfluenza virus 3
aaucauaccaagucuuacaggua

SEQ ID NO: 4012873 - RNA, 15 nt, Human parainfluenza virus 3
aaugaaguguacaau

SEQ ID NO: 4012874 - RNA, 19 nt, Human parainfluenza virus 3
aaugacauacaaaaugaga

SEQ ID NO: 4012875 - RNA, 14 nt, Human parainfluenza virus 3
aauuauaaaugauc

SEQ ID NO: 4012876 - RNA, 19 nt, Human parainfluenza virus 3
acaaaacuucgaaacaaga

SEQ ID NO: 4012877 - RNA, 16 nt, Human parainfluenza virus 3
acaaauaacauaucua

SEQ ID NO: 4012878 - RNA, 14 nt, Human parainfluenza virus 3
acaacaacaagcug

SEQ ID NO: 4012879 - RNA, 18 nt, Human parainfluenza virus 3
acaagacuaauacccaaa

SEQ ID NO: 4012880 - RNA, 17 nt, Human parainfluenza virus 3
acaagaucuacaaguug

SEQ ID NO: 4012881 - RNA, 13 nt, Human parainfluenza virus 3
acaauaauaauua

SEQ ID NO: 4012882 - RNA, 14 nt, Human parainfluenza virus 3
acaaucaacacaag

SEQ ID NO: 4012883 - RNA, 17 nt, Human parainfluenza virus 3
acacaaaauuaacacag

SEQ ID NO: 4012884 - RNA, 20 nt, Human parainfluenza virus 3
acacaaaggggcaaacagaa

SEQ ID NO: 4012885 - RNA, 13 nt, Human parainfluenza virus 3
acaccaaaacaac

SEQ ID NO: 4012886 - RNA, 16 nt, Human parainfluenza virus 3
acagaaucaucaggaa

SEQ ID NO: 4012887 - RNA, 16 nt, Human parainfluenza virus 3
acagucccaaagggau

SEQ ID NO: 4012888 - RNA, 15 nt, Human parainfluenza virus 3
acauaucaaaacagg

SEQ ID NO: 4012889 - RNA, 16 nt, Human parainfluenza virus 3
acauugcaaaaaugau

SEQ ID NO: 4012890 - RNA, 13 nt, Human parainfluenza virus 3
accaaaaauagaa

SEQ ID NO: 4012891 - RNA, 20 nt, Human parainfluenza virus 3
accagaugaugaagaagaaa

SEQ ID NO: 4012892 - RNA, 14 nt, Human parainfluenza virus 3
accaugaaauggag

SEQ ID NO: 4012893 - RNA, 13 nt, Human parainfluenza virus 3
accauugcucugg

SEQ ID NO: 4012894 - RNA, 17 nt, Human parainfluenza virus 3
acgaauguacaacagaa

SEQ ID NO: 4012895 - RNA, 20 nt, Human parainfluenza virus 3
acucaaacauugcaaaaaug

SEQ ID NO: 4012896 - RNA, 22 nt, Human parainfluenza virus 3
acucaaacauugcaaaaaugau

SEQ ID NO: 4012897 - RNA, 23 nt, Human parainfluenza virus 3
acucaaagucaaugaacagagaa

SEQ ID NO: 4012898 - RNA, 21 nt, Human parainfluenza virus 3
acuggauccauaucaaaaaca

SEQ ID NO: 4012899 - RNA, 13 nt, Human parainfluenza virus 3
acuguaaacagaa

SEQ ID NO: 4012900 - RNA, 13 nt, Human parainfluenza virus 3
acuuaggaaaaua

SEQ ID NO: 4012901 - RNA, 13 nt, Human parainfluenza virus 3
acuucgaaacaag

SEQ ID NO: 4012902 - RNA, 21 nt, Human parainfluenza virus 3
agaaaagguuagaaaauauau

SEQ ID NO: 4012903 - RNA, 16 nt, Human parainfluenza virus 3
agaaaaucaaagagaa

SEQ ID NO: 4012904 - RNA, 14 nt, Human parainfluenza virus 3
agaaacucaaagaa

SEQ ID NO: 4012905 - RNA, 15 nt, Human parainfluenza virus 3
agaaacucaaagaag

SEQ ID NO: 4012906 - RNA, 16 nt, Human parainfluenza virus 3
agaaagaccaaaauga

SEQ ID NO: 4012907 - RNA, 15 nt, Human parainfluenza virus 3
agaaagucaaaucaa

SEQ ID NO: 4012908 - RNA, 16 nt, Human parainfluenza virus 3
agaaauacuaaugaaa

SEQ ID NO: 4012909 - RNA, 15 nt, Human parainfluenza virus 3
agaagaacagucaaa

SEQ ID NO: 4012910 - RNA, 15 nt, Human parainfluenza virus 3
agaagggacaaaaaa

SEQ ID NO: 4012911 - RNA, 22 nt, Human parainfluenza virus 3
agaagggacaaaaaaagcaaaa

SEQ ID NO: 4012912 - RNA, 15 nt, Human parainfluenza virus 3
agaagugagaagaac

SEQ ID NO: 4012913 - RNA, 15 nt, Human parainfluenza virus 3
agaaugaaacaauag

SEQ ID NO: 4012914 - RNA, 13 nt, Human parainfluenza virus 3
agacaaauccaaa

SEQ ID NO: 4012915 - RNA, 16 nt, Human parainfluenza virus 3
agacuaagaaaaggaa

SEQ ID NO: 4012916 - RNA, 23 nt, Human parainfluenza virus 3
agagacacuacuugcaaauaaua

SEQ ID NO: 4012917 - RNA, 21 nt, Human parainfluenza virus 3
agagauauuaaguucauacaa

SEQ ID NO: 4012918 - RNA, 20 nt, Human parainfluenza virus 3
agaggucaacaccaacaacu

SEQ ID NO: 4012919 - RNA, 12 nt, Human parainfluenza virus 3
agaguucuucuc

SEQ ID NO: 4012920 - RNA, 16 nt, Human parainfluenza virus 3
agauaauauauauauu

SEQ ID NO: 4012921 - RNA, 13 nt, Human parainfluenza virus 3
agauacaaaauga

SEQ ID NO: 4012922 - RNA, 19 nt, Human parainfluenza virus 3
agauauccagaaaugucaa

SEQ ID NO: 4012923 - RNA, 23 nt, Human parainfluenza virus 3
agauauuaaguucauacaaugaa

SEQ ID NO: 4012924 - RNA, 19 nt, Human parainfluenza virus 3
agaucgaaccgaacagaca

SEQ ID NO: 4012925 - RNA, 19 nt, Human parainfluenza virus 3
agaucuaaagaaaauggau

SEQ ID NO: 4012926 - RNA, 14 nt, Human parainfluenza virus 3
agaugacaaaagaa

SEQ ID NO: 4012927 - RNA, 13 nt, Human parainfluenza virus 3
agauuaugucaac

SEQ ID NO: 4012928 - RNA, 21 nt, Human parainfluenza virus 3
agcaaauguacuaaacaaugu

SEQ ID NO: 4012929 - RNA, 13 nt, Human parainfluenza virus 3
agcacaaaacaau

SEQ ID NO: 4012930 - RNA, 15 nt, Human parainfluenza virus 3
agcagaguucuucuc

SEQ ID NO: 4012931 - RNA, 18 nt, Human parainfluenza virus 3
agcagaucuaaagaaaau

SEQ ID NO: 4012932 - RNA, 21 nt, Human parainfluenza virus 3
agcucaacaaggccaaaucag

SEQ ID NO: 4012933 - RNA, 14 nt, Human parainfluenza virus 3
agcucgaaaugaga

SEQ ID NO: 4012934 - RNA, 21 nt, Human parainfluenza virus 3
aggaaaggaaggauacagaag

SEQ ID NO: 4012935 - RNA, 14 nt, Human parainfluenza virus 3
aggaggaaagaaag

SEQ ID NO: 4012936 - RNA, 14 nt, Human parainfluenza virus 3
aggauaaaauggac

SEQ ID NO: 4012937 - RNA, 13 nt, Human parainfluenza virus 3
aggcaaaauaaua

SEQ ID NO: 4012938 - RNA, 14 nt, Human parainfluenza virus 3
agggcagaagaaaa

SEQ ID NO: 4012939 - RNA, 19 nt, Human parainfluenza virus 3
agguggagcagaugucaaa

SEQ ID NO: 4012940 - RNA, 15 nt, Human parainfluenza virus 3
aguaagaaaaacaug

SEQ ID NO: 4012941 - RNA, 16 nt, Human parainfluenza virus 3
aguaagaaaaacaugu

SEQ ID NO: 4012942 - RNA, 18 nt, Human parainfluenza virus 3
aguaagaaaaacauguaa

SEQ ID NO: 4012943 - RNA, 22 nt, Human parainfluenza virus 3
aguacaaaauauaaaaccagaa

SEQ ID NO: 4012944 - RNA, 20 nt, Human parainfluenza virus 3
aguagaaauaaaucagaaaa

SEQ ID NO: 4012945 - RNA, 18 nt, Human parainfluenza virus 3
agucaacggauaucuaca

SEQ ID NO: 4012946 - RNA, 15 nt, Human parainfluenza virus 3
auaaaaccagaacua

SEQ ID NO: 4012947 - RNA, 14 nt, Human parainfluenza virus 3
auaaaugagaaugu

SEQ ID NO: 4012948 - RNA, 13 nt, Human parainfluenza virus 3
auaacaacacaga

SEQ ID NO: 4012949 - RNA, 14 nt, Human parainfluenza virus 3
auacaagaucuaca

SEQ ID NO: 4012950 - RNA, 19 nt, Human parainfluenza virus 3
auacaccaagaagaugaca

SEQ ID NO: 4012951 - RNA, 15 nt, Human parainfluenza virus 3
auacagacagaauca

SEQ ID NO: 4012952 - RNA, 12 nt, Human parainfluenza virus 3
auaccaagcaga

SEQ ID NO: 4012953 - RNA, 19 nt, Human parainfluenza virus 3
auaccugguauuaacagua

SEQ ID NO: 4012954 - RNA, 13 nt, Human parainfluenza virus 3
auagauaucacaa

SEQ ID NO: 4012955 - RNA, 22 nt, Human parainfluenza virus 3
auaggaggauggucaacuccau

SEQ ID NO: 4012956 - RNA, 18 nt, Human parainfluenza virus 3
auaguaggacaaagaaaa

SEQ ID NO: 4012957 - RNA, 20 nt, Human parainfluenza virus 3
auauaccaauaucauugaca

SEQ ID NO: 4012958 - RNA, 13 nt, Human parainfluenza virus 3
auauaggaaaauc

SEQ ID NO: 4012959 - RNA, 18 nt, Human parainfluenza virus 3
auauuauggacaauaauc

SEQ ID NO: 4012960 - RNA, 23 nt, Human parainfluenza virus 3
aucaacaguugauaaauaugaua

SEQ ID NO: 4012961 - RNA, 16 nt, Human parainfluenza virus 3
aucaacuuauacaaaa

SEQ ID NO: 4012962 - RNA, 21 nt, Human parainfluenza virus 3
aucacacgaauguacaacaga

SEQ ID NO: 4012963 - RNA, 19 nt, Human parainfluenza virus 3
aucagggacacaaacaaag

SEQ ID NO: 4012964 - RNA, 19 nt, Human parainfluenza virus 3
aucauucuuugaaaauggu

SEQ ID NO: 4012965 - RNA, 11 nt, Human parainfluenza virus 3
auccaaaauua

SEQ ID NO: 4012966 - RNA, 12 nt, Human parainfluenza virus 3
aucuaaagaaaa

SEQ ID NO: 4012967 - RNA, 18 nt, Human parainfluenza virus 3
aucucuacccaacacaau

SEQ ID NO: 4012968 - RNA, 15 nt, Human parainfluenza virus 3
aucuuugagcccaag

SEQ ID NO: 4012969 - RNA, 14 nt, Human parainfluenza virus 3
augaagaugucaau

SEQ ID NO: 4012970 - RNA, 12 nt, Human parainfluenza virus 3
augaugaagaag

SEQ ID NO: 4012971 - RNA, 23 nt, Human parainfluenza virus 3
auggacacugaaucuaacaaugg

SEQ ID NO: 4012972 - RNA, 22 nt, Human parainfluenza virus 3
auggagacacaagggauugaca

SEQ ID NO: 4012973 - RNA, 14 nt, Human parainfluenza virus 3
auguccagaauuau

SEQ ID NO: 4012974 - RNA, 23 nt, Human parainfluenza virus 3
auuaaaaaagggggaaaagggaa

SEQ ID NO: 4012975 - RNA, 17 nt, Human parainfluenza virus 3
auuaaccauaauaugca

SEQ ID NO: 4012976 - RNA, 19 nt, Human parainfluenza virus 3
auuaauaauauaucaaaag

SEQ ID NO: 4012977 - RNA, 19 nt, Human parainfluenza virus 3
auuaccagagcuucauagg

SEQ ID NO: 4012978 - RNA, 14 nt, Human parainfluenza virus 3
auuacucagaauua

SEQ ID NO: 4012979 - RNA, 17 nt, Human parainfluenza virus 3
auuauccuuaauucaaa

SEQ ID NO: 4012980 - RNA, 15 nt, Human parainfluenza virus 3
auuauuuacagaauc

SEQ ID NO: 4012981 - RNA, 14 nt, Human parainfluenza virus 3
auucaucauaaaug

SEQ ID NO: 4012982 - RNA, 15 nt, Human parainfluenza virus 3
auuccaaaaagcugc

SEQ ID NO: 4012983 - RNA, 15 nt, Human parainfluenza virus 3
auugaucaagagaaa

SEQ ID NO: 4012984 - RNA, 14 nt, Human parainfluenza virus 3
caaaaaugaugaag

SEQ ID NO: 4012985 - RNA, 16 nt, Human parainfluenza virus 3
caaaaaugaugaagaa

SEQ ID NO: 4012986 - RNA, 11 nt, Human parainfluenza virus 3
caaaacaaaaa

SEQ ID NO: 4012987 - RNA, 12 nt, Human parainfluenza virus 3
caaaauuacaau

SEQ ID NO: 4012988 - RNA, 23 nt, Human parainfluenza virus 3
caaaauuagccucaaaaaaugau

SEQ ID NO: 4012989 - RNA, 21 nt, Human parainfluenza virus 3
caaacacuaaacacaaugcca

SEQ ID NO: 4012990 - RNA, 14 nt, Human parainfluenza virus 3
caaacagaaauaca

SEQ ID NO: 4012991 - RNA, 18 nt, Human parainfluenza virus 3
caaacccaagacacaaaa

SEQ ID NO: 4012992 - RNA, 23 nt, Human parainfluenza virus 3
caaacgaguuguauguguagcaa

SEQ ID NO: 4012993 - RNA, 15 nt, Human parainfluenza virus 3
caaaugcaacaagac

SEQ ID NO: 4012994 - RNA, 14 nt, Human parainfluenza virus 3
caacacacacaaaa

SEQ ID NO: 4012995 - RNA, 14 nt, Human parainfluenza virus 3
caacacagcaaaca

SEQ ID NO: 4012996 - RNA, 13 nt, Human parainfluenza virus 3
caacaccaacaac

SEQ ID NO: 4012997 - RNA, 19 nt, Human parainfluenza virus 3
caacagaacaaaguagaaa

SEQ ID NO: 4012998 - RNA, 15 nt, Human parainfluenza virus 3
caacagaucaagcaa

SEQ ID NO: 4012999 - RNA, 23 nt, Human parainfluenza virus 3
caacauuuugauccaaauuaaua

SEQ ID NO: 4013000 - RNA, 13 nt, Human parainfluenza virus 3
caagaaacaacag

SEQ ID NO: 4013001 - RNA, 20 nt, Human parainfluenza virus 3
caagaaagaagggacaaaaa

SEQ ID NO: 4013002 - RNA, 17 nt, Human parainfluenza virus 3
caagacuaauacccaaa

SEQ ID NO: 4013003 - RNA, 23 nt, Human parainfluenza virus 3
caaggauagacaaaaaguaagaa

SEQ ID NO: 4013004 - RNA, 14 nt, Human parainfluenza virus 3
caauagauaucaau

SEQ ID NO: 4013005 - RNA, 14 nt, Human parainfluenza virus 3
caauaucaaucaau

SEQ ID NO: 4013006 - RNA, 14 nt, Human parainfluenza virus 3
cacaaaucacagcg

SEQ ID NO: 4013007 - RNA, 18 nt, Human parainfluenza virus 3
cacaacucccccaacaac

SEQ ID NO: 4013008 - RNA, 16 nt, Human parainfluenza virus 3
caccauugauaacaac

SEQ ID NO: 4013009 - RNA, 16 nt, Human parainfluenza virus 3
caccgaacaaacagac

SEQ ID NO: 4013010 - RNA, 16 nt, Human parainfluenza virus 3
cacugaaucuaacaau

SEQ ID NO: 4013011 - RNA, 15 nt, Human parainfluenza virus 3
cagaaauacagacag

SEQ ID NO: 4013012 - RNA, 12 nt, Human parainfluenza virus 3
cagaacaccaaa

SEQ ID NO: 4013013 - RNA, 19 nt, Human parainfluenza virus 3
cagaauugguuuugauauu

SEQ ID NO: 4013014 - RNA, 12 nt, Human parainfluenza virus 3
cagacaaacaca

SEQ ID NO: 4013015 - RNA, 16 nt, Human parainfluenza virus 3
cagacugauuccaaag

SEQ ID NO: 4013016 - RNA, 24 nt, Human parainfluenza virus 3
cagaucgaaccgaacagacaaaca

SEQ ID NO: 4013017 - RNA, 12 nt, Human parainfluenza virus 3
cagaugaugaag

SEQ ID NO: 4013018 - RNA, 12 nt, Human parainfluenza virus 3
cagccuuaugau

SEQ ID NO: 4013019 - RNA, 21 nt, Human parainfluenza virus 3
cagcugguauucaaaagggag

SEQ ID NO: 4013020 - RNA, 15 nt, Human parainfluenza virus 3
cagggauauauuaca

SEQ ID NO: 4013021 - RNA, 16 nt, Human parainfluenza virus 3
caguaaagugacugaa

SEQ ID NO: 4013022 - RNA, 15 nt, Human parainfluenza virus 3
caguuauaagcaaca

SEQ ID NO: 4013023 - RNA, 22 nt, Human parainfluenza virus 3
cauaaauacaauaaagauauau

SEQ ID NO: 4013024 - RNA, 13 nt, Human parainfluenza virus 3
cauacaaugaauc

SEQ ID NO: 4013025 - RNA, 18 nt, Human parainfluenza virus 3
cauaccaaaaauagaaga

SEQ ID NO: 4013026 - RNA, 19 nt, Human parainfluenza virus 3
cauacuagacucacagaaa

SEQ ID NO: 4013027 - RNA, 20 nt, Human parainfluenza virus 3
caucaaaagggcagaagaaa

SEQ ID NO: 4013028 - RNA, 19 nt, Human parainfluenza virus 3
ccaagauuaugucaacaaa

SEQ ID NO: 4013029 - RNA, 16 nt, Human parainfluenza virus 3
ccacgguauaaugaag

SEQ ID NO: 4013030 - RNA, 18 nt, Human parainfluenza virus 3
ccaugaucaaaacaaaau

SEQ ID NO: 4013031 - RNA, 16 nt, Human parainfluenza virus 3
ccauugauaacaacac

SEQ ID NO: 4013032 - RNA, 14 nt, Human parainfluenza virus 3
cccaaggauagaca

SEQ ID NO: 4013033 - RNA, 14 nt, Human parainfluenza virus 3
cccccaacaacaac

SEQ ID NO: 4013034 - RNA, 23 nt, Human parainfluenza virus 3
ccgaacaaacagacaagaaacaa

SEQ ID NO: 4013035 - RNA, 19 nt, Human parainfluenza virus 3
ccgggaaaacacagagaga

SEQ ID NO: 4013036 - RNA, 18 nt, Human parainfluenza virus 3
ccugaucuauaucgacau

SEQ ID NO: 4013037 - RNA, 18 nt, Human parainfluenza virus 3
cgaaauggaauugauauu

SEQ ID NO: 4013038 - RNA, 15 nt, Human parainfluenza virus 3
cgaacagacaaacac

SEQ ID NO: 4013039 - RNA, 21 nt, Human parainfluenza virus 3
cuacagauccacaucaaaagg

SEQ ID NO: 4013040 - RNA, 12 nt, Human parainfluenza virus 3
cuacuugcaaau

SEQ ID NO: 4013041 - RNA, 19 nt, Human parainfluenza virus 3
cugaucuauuaaaaauaaa

SEQ ID NO: 4013042 - RNA, 12 nt, Human parainfluenza virus 3
cugcaacaccag

SEQ ID NO: 4013043 - RNA, 20 nt, Human parainfluenza virus 3
cugcagguacauaucaaaac

SEQ ID NO: 4013044 - RNA, 22 nt, Human parainfluenza virus 3
cugcagguacauaucaaaacag

SEQ ID NO: 4013045 - RNA, 13 nt, Human parainfluenza virus 3
cuguacaauaaua

SEQ ID NO: 4013046 - RNA, 13 nt, Human parainfluenza virus 3
cuuaauuauaaau

SEQ ID NO: 4013047 - RNA, 14 nt, Human parainfluenza virus 3
cuuauaaaucagau

SEQ ID NO: 4013048 - RNA, 23 nt, Human parainfluenza virus 3
cuucaauacaccaagaagaugac

SEQ ID NO: 4013049 - RNA, 17 nt, Human parainfluenza virus 3
cuucgaaacaagauauu

SEQ ID NO: 4013050 - RNA, 13 nt, Human parainfluenza virus 3
cuucuuacaauuc

SEQ ID NO: 4013051 - RNA, 22 nt, Human parainfluenza virus 3
cuugaacauccaauaaaugaga

SEQ ID NO: 4013052 - RNA, 21 nt, Human parainfluenza virus 3
gaaacgacaccgaacaaacag

SEQ ID NO: 4013053 - RNA, 15 nt, Human parainfluenza virus 3
gaaagaaagaccaaa

SEQ ID NO: 4013054 - RNA, 14 nt, Human parainfluenza virus 3
gaaauuaauaauau

SEQ ID NO: 4013055 - RNA, 19 nt, Human parainfluenza virus 3
gaaguauuuauagcagaua

SEQ ID NO: 4013056 - RNA, 15 nt, Human parainfluenza virus 3
gaagugagaagaaca

SEQ ID NO: 4013057 - RNA, 15 nt, Human parainfluenza virus 3
gaaucaaagacaaau

SEQ ID NO: 4013058 - RNA, 15 nt, Human parainfluenza virus 3
gaaucacauagaaga

SEQ ID NO: 4013059 - RNA, 17 nt, Human parainfluenza virus 3
gaauucagauacuaucc

SEQ ID NO: 4013060 - RNA, 15 nt, Human parainfluenza virus 3
gacaaaaaguaagaa

SEQ ID NO: 4013061 - RNA, 22 nt, Human parainfluenza virus 3
gacaaauggaaaggaaaggaag

SEQ ID NO: 4013062 - RNA, 16 nt, Human parainfluenza virus 3
gacaauuuauaugaaa

SEQ ID NO: 4013063 - RNA, 20 nt, Human parainfluenza virus 3
gacaauuuauaugaaagaua

SEQ ID NO: 4013064 - RNA, 23 nt, Human parainfluenza virus 3
gacagaaucaucaggaacacaau

SEQ ID NO: 4013065 - RNA, 21 nt, Human parainfluenza virus 3
gacauaaauacaauaaagaua

SEQ ID NO: 4013066 - RNA, 16 nt, Human parainfluenza virus 3
gacauacaaaaugaga

SEQ ID NO: 4013067 - RNA, 21 nt, Human parainfluenza virus 3
gacauagaagugagaagaaca

SEQ ID NO: 4013068 - RNA, 22 nt, Human parainfluenza virus 3
gaccaaaaugaauccaaugaga

SEQ ID NO: 4013069 - RNA, 23 nt, Human parainfluenza virus 3
gagaaaagacauuugaugugaua

SEQ ID NO: 4013070 - RNA, 21 nt, Human parainfluenza virus 3
gagagcaaucgauuuacagag

SEQ ID NO: 4013071 - RNA, 22 nt, Human parainfluenza virus 3
gagagcaaucgauuuacagaga

SEQ ID NO: 4013072 - RNA, 11 nt, Human parainfluenza virus 3
gagcccaagga

SEQ ID NO: 4013073 - RNA, 19 nt, Human parainfluenza virus 3
gaguuuauggagauuacag

SEQ ID NO: 4013074 - RNA, 17 nt, Human parainfluenza virus 3
gauaaauaugauaucua

SEQ ID NO: 4013075 - RNA, 12 nt, Human parainfluenza virus 3
gaucaaaacaaa

SEQ ID NO: 4013076 - RNA, 12 nt, Human parainfluenza virus 3
gaucaagagaaa

SEQ ID NO: 4013077 - RNA, 21 nt, Human parainfluenza virus 3
gaucaggaaacuguacagaga

SEQ ID NO: 4013078 - RNA, 14 nt, Human parainfluenza virus 3
gauccagaguuuaa

SEQ ID NO: 4013079 - RNA, 12 nt, Human parainfluenza virus 3
gaugacaaaaga

SEQ ID NO: 4013080 - RNA, 20 nt, Human parainfluenza virus 3
gcaacacagcaaacacuaaa

SEQ ID NO: 4013081 - RNA, 20 nt, Human parainfluenza virus 3
gcaacaccagaugaugaaga

SEQ ID NO: 4013082 - RNA, 13 nt, Human parainfluenza virus 3
gcaaguuaaauca

SEQ ID NO: 4013083 - RNA, 17 nt, Human parainfluenza virus 3
gcaaucagggacacaaa

SEQ ID NO: 4013084 - RNA, 16 nt, Human parainfluenza virus 3
gcaaucucucacaaag

SEQ ID NO: 4013085 - RNA, 22 nt, Human parainfluenza virus 3
gcagaaucuugguguaauucaa

SEQ ID NO: 4013086 - RNA, 19 nt, Human parainfluenza virus 3
gcauccaacgaaucacgaa

SEQ ID NO: 4013087 - RNA, 23 nt, Human parainfluenza virus 3
gcauccauuaagccgaagcaaau

SEQ ID NO: 4013088 - RNA, 20 nt, Human parainfluenza virus 3
gccucauaccaaaaauagaa

SEQ ID NO: 4013089 - RNA, 15 nt, Human parainfluenza virus 3
gcuaucaaaauuagc

SEQ ID NO: 4013090 - RNA, 18 nt, Human parainfluenza virus 3
gcuuaaacucaauuccaa

SEQ ID NO: 4013091 - RNA, 18 nt, Human parainfluenza virus 3
gcuucaucaguagagauu

SEQ ID NO: 4013092 - RNA, 23 nt, Human parainfluenza virus 3
gcuucaucaguagagauuacaag

SEQ ID NO: 4013093 - RNA, 23 nt, Human parainfluenza virus 3
gcuugcaacucaaucaauagaga

SEQ ID NO: 4013094 - RNA, 12 nt, Human parainfluenza virus 3
ggaacaagaaag

SEQ ID NO: 4013095 - RNA, 15 nt, Human parainfluenza virus 3
ggacaacgacacaaa

SEQ ID NO: 4013096 - RNA, 19 nt, Human parainfluenza virus 3
ggacauguucaaugaagau

SEQ ID NO: 4013097 - RNA, 20 nt, Human parainfluenza virus 3
ggaucaacuuauacaaaaga

SEQ ID NO: 4013098 - RNA, 18 nt, Human parainfluenza virus 3
ggcaucuuucugccaaau

SEQ ID NO: 4013099 - RNA, 17 nt, Human parainfluenza virus 3
ggccaucagaaacagaa

SEQ ID NO: 4013100 - RNA, 22 nt, Human parainfluenza virus 3
ggccaucagaaacagaacacuc

SEQ ID NO: 4013101 - RNA, 11 nt, Human parainfluenza virus 3
gggaugaagau

SEQ ID NO: 4013102 - RNA, 21 nt, Human parainfluenza virus 3
guacaccugauacaagaucaa

SEQ ID NO: 4013103 - RNA, 21 nt, Human parainfluenza virus 3
guacuaaacaauguagauacu

SEQ ID NO: 4013104 - RNA, 15 nt, Human parainfluenza virus 3
guaggacaaagaaaa

SEQ ID NO: 4013105 - RNA, 23 nt, Human parainfluenza virus 3
gucucuggaggaaucuccagaag

SEQ ID NO: 4013106 - RNA, 18 nt, Human parainfluenza virus 3
gugagaagaacagucaaa

SEQ ID NO: 4013107 - RNA, 18 nt, Human parainfluenza virus 3
uaaaaccuuuaaauccag

SEQ ID NO: 4013108 - RNA, 21 nt, Human parainfluenza virus 3
uaaaucagaaaaguucaaaca

SEQ ID NO: 4013109 - RNA, 16 nt, Human parainfluenza virus 3
uaacacagauacaaaa

SEQ ID NO: 4013110 - RNA, 13 nt, Human parainfluenza virus 3
uaagaaaaacaug

SEQ ID NO: 4013111 - RNA, 15 nt, Human parainfluenza virus 3
uaauaaauucauaga

SEQ ID NO: 4013112 - RNA, 23 nt, Human parainfluenza virus 3
uaauaacuguaaacucagacuug

SEQ ID NO: 4013113 - RNA, 15 nt, Human parainfluenza virus 3
uaauaguagcaauca

SEQ ID NO: 4013114 - RNA, 19 nt, Human parainfluenza virus 3
uaaucccagaacaaaacga

SEQ ID NO: 4013115 - RNA, 14 nt, Human parainfluenza virus 3
uacaaaagaaucaa

SEQ ID NO: 4013116 - RNA, 18 nt, Human parainfluenza virus 3
uacagaacaccaaaacaa

SEQ ID NO: 4013117 - RNA, 14 nt, Human parainfluenza virus 3
uacccaacacaaua

SEQ ID NO: 4013118 - RNA, 22 nt, Human parainfluenza virus 3
uacugacaaccagauaccaaca

SEQ ID NO: 4013119 - RNA, 22 nt, Human parainfluenza virus 3
uagacucuuugcaaaaaugaca

SEQ ID NO: 4013120 - RNA, 20 nt, Human parainfluenza virus 3
uagauacugcaucaaagaua

SEQ ID NO: 4013121 - RNA, 15 nt, Human parainfluenza virus 3
uagcaaucaaaucag

SEQ ID NO: 4013122 - RNA, 12 nt, Human parainfluenza virus 3
uaggacaaagaa

SEQ ID NO: 4013123 - RNA, 19 nt, Human parainfluenza virus 3
uaggaucauuacaagaaaa

SEQ ID NO: 4013124 - RNA, 15 nt, Human parainfluenza virus 3
uauaccaagcagagu

SEQ ID NO: 4013125 - RNA, 16 nt, Human parainfluenza virus 3
uauaucuuaaccuuua

SEQ ID NO: 4013126 - RNA, 13 nt, Human parainfluenza virus 3
uaucauugacaca

SEQ ID NO: 4013127 - RNA, 18 nt, Human parainfluenza virus 3
uauccacuaaaucccaca

SEQ ID NO: 4013128 - RNA, 20 nt, Human parainfluenza virus 3
uaucggaaaacgacacaauc

SEQ ID NO: 4013129 - RNA, 15 nt, Human parainfluenza virus 3
uaucuuugagcccaa

SEQ ID NO: 4013130 - RNA, 17 nt, Human parainfluenza virus 3
uauguacuaacaaacaa

SEQ ID NO: 4013131 - RNA, 18 nt, Human parainfluenza virus 3
uauuaaguucauacaaug

SEQ ID NO: 4013132 - RNA, 13 nt, Human parainfluenza virus 3
ucaaaaacaacaa

SEQ ID NO: 4013133 - RNA, 23 nt, Human parainfluenza virus 3
ucaaaagaaauguucaaauuaua

SEQ ID NO: 4013134 - RNA, 15 nt, Human parainfluenza virus 3
ucaaaccaacagaaa

SEQ ID NO: 4013135 - RNA, 14 nt, Human parainfluenza virus 3
ucaacuuauacaaa

SEQ ID NO: 4013136 - RNA, 13 nt, Human parainfluenza virus 3
ucaagaaaacuag

SEQ ID NO: 4013137 - RNA, 15 nt, Human parainfluenza virus 3
ucaagagaaaaauag

SEQ ID NO: 4013138 - RNA, 16 nt, Human parainfluenza virus 3
ucaagagauaaaucaa

SEQ ID NO: 4013139 - RNA, 13 nt, Human parainfluenza virus 3
ucaauacaaacaa

SEQ ID NO: 4013140 - RNA, 15 nt, Human parainfluenza virus 3
ucaauauacaaauaa

SEQ ID NO: 4013141 - RNA, 20 nt, Human parainfluenza virus 3
ucaauccacaucaaaacuag

SEQ ID NO: 4013142 - RNA, 14 nt, Human parainfluenza virus 3
ucaaugaaauuaga

SEQ ID NO: 4013143 - RNA, 20 nt, Human parainfluenza virus 3
ucaauggacaacgacacaaa

SEQ ID NO: 4013144 - RNA, 21 nt, Human parainfluenza virus 3
ucagauauugagaaacucaaa

SEQ ID NO: 4013145 - RNA, 17 nt, Human parainfluenza virus 3
ucagggacacaaacaaa

SEQ ID NO: 4013146 - RNA, 14 nt, Human parainfluenza virus 3
ucauacuuucaaca

SEQ ID NO: 4013147 - RNA, 15 nt, Human parainfluenza virus 3
ucgauuuacagagag

SEQ ID NO: 4013148 - RNA, 20 nt, Human parainfluenza virus 3
ucgcaggaacaagaaagaag

SEQ ID NO: 4013149 - RNA, 20 nt, Human parainfluenza virus 3
ucggaaaacgacacaaucaa

SEQ ID NO: 4013150 - RNA, 18 nt, Human parainfluenza virus 3
ucggauugaucaagagaa

SEQ ID NO: 4013151 - RNA, 16 nt, Human parainfluenza virus 3
ucggcaauagaaucaa

SEQ ID NO: 4013152 - RNA, 12 nt, Human parainfluenza virus 3
ucuaacaauggc

SEQ ID NO: 4013153 - RNA, 14 nt, Human parainfluenza virus 3
ucuagaagaaucaa

SEQ ID NO: 4013154 - RNA, 17 nt, Human parainfluenza virus 3
ucuaucaacacacacaa

SEQ ID NO: 4013155 - RNA, 16 nt, Human parainfluenza virus 3
ucuuaaccuuuaucuu

SEQ ID NO: 4013156 - RNA, 21 nt, Human parainfluenza virus 3
ugagaagaacagucaaagcga

SEQ ID NO: 4013157 - RNA, 12 nt, Human parainfluenza virus 3
ugauaacaacac

SEQ ID NO: 4013158 - RNA, 16 nt, Human parainfluenza virus 3
ugauaacauaggauca

SEQ ID NO: 4013159 - RNA, 14 nt, Human parainfluenza virus 3
ugauagaaaaucaa

SEQ ID NO: 4013160 - RNA, 23 nt, Human parainfluenza virus 3
ugauaguaaccaaucaggaaucc

SEQ ID NO: 4013161 - RNA, 23 nt, Human parainfluenza virus 3
ugauauaaggauaaaauggacau

SEQ ID NO: 4013162 - RNA, 15 nt, Human parainfluenza virus 3
ugaucaagagaaaaa

SEQ ID NO: 4013163 - RNA, 14 nt, Human parainfluenza virus 3
ugaugaagaagaaa

SEQ ID NO: 4013164 - RNA, 19 nt, Human parainfluenza virus 3
ugcaaauaauauaggaaaa

SEQ ID NO: 4013165 - RNA, 19 nt, Human parainfluenza virus 3
ugcuaucuucuguacaaua

SEQ ID NO: 4013166 - RNA, 18 nt, Human parainfluenza virus 3
ugcucggaaaauggacac

SEQ ID NO: 4013167 - RNA, 17 nt, Human parainfluenza virus 3
uggauauacaacaacaa

SEQ ID NO: 4013168 - RNA, 15 nt, Human parainfluenza virus 3
uggcauaaugugcua

SEQ ID NO: 4013169 - RNA, 22 nt, Human parainfluenza virus 3
uguaauauauauauaccaagca

SEQ ID NO: 4013170 - RNA, 15 nt, Human parainfluenza virus 3
uguacuaacaaacaa

SEQ ID NO: 4013171 - RNA, 19 nt, Human parainfluenza virus 3
uuaauaauaaauaagaaaa

SEQ ID NO: 4013172 - RNA, 22 nt, Human parainfluenza virus 3
uuaauauuaacugagaaaguga

SEQ ID NO: 4013173 - RNA, 14 nt, Human parainfluenza virus 3
uuaauuucaaaucu

SEQ ID NO: 4013174 - RNA, 20 nt, Human parainfluenza virus 3
uuacaacagaacaaaguaga

SEQ ID NO: 4013175 - RNA, 16 nt, Human parainfluenza virus 3
uuaccacucaaaguca

SEQ ID NO: 4013176 - RNA, 18 nt, Human parainfluenza virus 3
uuagaagauuaaaauuaa

SEQ ID NO: 4013177 - RNA, 17 nt, Human parainfluenza virus 3
uuaggauuaaagaauaa

SEQ ID NO: 4013178 - RNA, 17 nt, Human parainfluenza virus 3
uuaucuuugagcccaag

SEQ ID NO: 4013179 - RNA, 19 nt, Human parainfluenza virus 3
uucgaaauggaacgaauca

SEQ ID NO: 4013180 - RNA, 22 nt, Human parainfluenza virus 3
uucuaaaaauggaacccagaac

SEQ ID NO: 4013181 - RNA, 20 nt, Human parainfluenza virus 3
uugaacauccaauaaaugag

SEQ ID NO: 4013182 - RNA, 14 nt, Human parainfluenza virus 3
uugcaaaaaugaca

SEQ ID NO: 4013183 - RNA, 17 nt, Human parainfluenza virus 3
uugcaguuauaagcaac

SEQ ID NO: 4013184 - RNA, 13 nt, Human parainfluenza virus 3
uugggaaaaucaa

SEQ ID NO: 4013185 - RNA, 17 nt, Human parainfluenza virus 3
uuuaagaaaucaaaaga

SEQ ID NO: 4013186 - RNA, 15 nt, Human parainfluenza virus 3
agcaggcaagaucag

SEQ ID NO: 4013187 - RNA, 22 nt, Human parainfluenza virus 3
agccauauguacuaacaaacaa

SEQ ID NO: 4013188 - RNA, 22 nt, Human parainfluenza virus 3
agcuguuuccuaacaacagauc

SEQ ID NO: 4013189 - RNA, 21 nt, Human parainfluenza virus 3
aggaaaauucuuucaagagaa

SEQ ID NO: 4013190 - RNA, 17 nt, Human parainfluenza virus 3
aggaaacuguacagaga

SEQ ID NO: 4013191 - RNA, 18 nt, Human parainfluenza virus 3
aggauacagaagagagca

SEQ ID NO: 4013192 - RNA, 14 nt, Human parainfluenza virus 3
aggaucauuacaag

SEQ ID NO: 4013193 - RNA, 16 nt, Human parainfluenza virus 3
agggauugacaagaau

SEQ ID NO: 4013194 - RNA, 15 nt, Human parainfluenza virus 3
agggcgaaaaaucac

SEQ ID NO: 4013195 - RNA, 15 nt, Human parainfluenza virus 3
agguuagaaaauaua

SEQ ID NO: 4013196 - RNA, 18 nt, Human parainfluenza virus 3
agucagcugguauucaaa

SEQ ID NO: 4013197 - RNA, 15 nt, Human parainfluenza virus 3
agucuucaugucaau

SEQ ID NO: 4013198 - RNA, 14 nt, Human parainfluenza virus 3
aguuaaaucagaga

SEQ ID NO: 4013199 - RNA, 20 nt, Human parainfluenza virus 3
aguuuauggagauuacagaa

SEQ ID NO: 4013200 - RNA, 17 nt, Human parainfluenza virus 3
auaaagauauaucuuaa

SEQ ID NO: 4013201 - RNA, 17 nt, Human parainfluenza virus 3
auaaagcauuaucucca

SEQ ID NO: 4013202 - RNA, 15 nt, Human parainfluenza virus 3
auaaaucagaaaagu

SEQ ID NO: 4013203 - RNA, 13 nt, Human parainfluenza virus 3
auaaaucagauaa

SEQ ID NO: 4013204 - RNA, 14 nt, Human parainfluenza virus 3
auaacaacaagcuc

SEQ ID NO: 4013205 - RNA, 19 nt, Human parainfluenza virus 3
auaaccuuguucaaaauuc

SEQ ID NO: 4013206 - RNA, 16 nt, Human parainfluenza virus 3
auaacuuguuagaaga

SEQ ID NO: 4013207 - RNA, 14 nt, Human parainfluenza virus 3
auaagauaauauau

SEQ ID NO: 4013208 - RNA, 15 nt, Human parainfluenza virus 3
auaauacaaguauau

SEQ ID NO: 4013209 - RNA, 21 nt, Human parainfluenza virus 3
auaaucaaaaacuuaggacaa

SEQ ID NO: 4013210 - RNA, 17 nt, Human parainfluenza virus 3
auacaaauaagaaaaac

SEQ ID NO: 4013211 - RNA, 16 nt, Human parainfluenza virus 3
auacaaguauaugaua

SEQ ID NO: 4013212 - RNA, 11 nt, Human parainfluenza virus 3
auagacugauc

SEQ ID NO: 4013213 - RNA, 19 nt, Human parainfluenza virus 3
auaguagcaaucaaaucag

SEQ ID NO: 4013214 - RNA, 16 nt, Human parainfluenza virus 3
auauaccaagcagagu

SEQ ID NO: 4013215 - RNA, 14 nt, Human parainfluenza virus 3
auaucacaaaacua

SEQ ID NO: 4013216 - RNA, 14 nt, Human parainfluenza virus 3
auauccagaaaugu

SEQ ID NO: 4013217 - RNA, 17 nt, Human parainfluenza virus 3
auauuaacugagaaagu

SEQ ID NO: 4013218 - RNA, 15 nt, Human parainfluenza virus 3
aucaaaccaacagaa

SEQ ID NO: 4013219 - RNA, 23 nt, Human parainfluenza virus 3
aucaaaccaacagaaacaaguga

SEQ ID NO: 4013220 - RNA, 21 nt, Human parainfluenza virus 3
aucaacugacaaaaauagaca

SEQ ID NO: 4013221 - RNA, 19 nt, Human parainfluenza virus 3
aucaacuuauacaaaagaa

SEQ ID NO: 4013222 - RNA, 22 nt, Human parainfluenza virus 3
aucacagcggcgguugcucugg

SEQ ID NO: 4013223 - RNA, 19 nt, Human parainfluenza virus 3
aucagaaaucuaagaaauu

SEQ ID NO: 4013224 - RNA, 14 nt, Human parainfluenza virus 3
aucagauaaauggu

SEQ ID NO: 4013225 - RNA, 15 nt, Human parainfluenza virus 3
aucagauaaauggua

SEQ ID NO: 4013226 - RNA, 23 nt, Human parainfluenza virus 3
aucauguguuauccgaaauggaa

SEQ ID NO: 4013227 - RNA, 18 nt, Human parainfluenza virus 3
auccaaaaugaguauaac

SEQ ID NO: 4013228 - RNA, 17 nt, Human parainfluenza virus 3
auccaugaucaaaacaa

SEQ ID NO: 4013229 - RNA, 14 nt, Human parainfluenza virus 3
aucgagaaaaugag

SEQ ID NO: 4013230 - RNA, 22 nt, Human parainfluenza virus 3
aucuaucaacacacacaaaauc

SEQ ID NO: 4013231 - RNA, 21 nt, Human parainfluenza virus 3
aucuauuauuuacagaaucaa

SEQ ID NO: 4013232 - RNA, 23 nt, Human parainfluenza virus 3
aucucaaaaacaacaaccaucaa

SEQ ID NO: 4013233 - RNA, 20 nt, Human parainfluenza virus 3
aucucuacccaacacaauau

SEQ ID NO: 4013234 - RNA, 22 nt, Human parainfluenza virus 3
aucugauuuaugcuuauaccuc

SEQ ID NO: 4013235 - RNA, 21 nt, Human parainfluenza virus 3
augagaagggcgaaaaaucac

SEQ ID NO: 4013236 - RNA, 14 nt, Human parainfluenza virus 3
augauaaucaagaa

SEQ ID NO: 4013237 - RNA, 18 nt, Human parainfluenza virus 3
augauaugagaagauuac

SEQ ID NO: 4013238 - RNA, 23 nt, Human parainfluenza virus 3
auggaaagcgaugcuaaaaacua

SEQ ID NO: 4013239 - RNA, 19 nt, Human parainfluenza virus 3
auggaacgaaucaaagaca

SEQ ID NO: 4013240 - RNA, 20 nt, Human parainfluenza virus 3
auggacaacgacacaaaauu

SEQ ID NO: 4013241 - RNA, 21 nt, Human parainfluenza virus 3
auggacaacgacacaaaauua

SEQ ID NO: 4013242 - RNA, 18 nt, Human parainfluenza virus 3
auggcacuguaucugaca

SEQ ID NO: 4013243 - RNA, 23 nt, Human parainfluenza virus 3
auggcaucuuucugccaaauaga

SEQ ID NO: 4013244 - RNA, 14 nt, Human parainfluenza virus 3
auguauaucaacug

SEQ ID NO: 4013245 - RNA, 13 nt, Human parainfluenza virus 3
augucaacaaaga

SEQ ID NO: 4013246 - RNA, 21 nt, Human parainfluenza virus 3
auuaacacagauacaaaauga

SEQ ID NO: 4013247 - RNA, 22 nt, Human parainfluenza virus 3
auuaacacagauacaaaaugaa

SEQ ID NO: 4013248 - RNA, 19 nt, Human parainfluenza virus 3
auuaacaguaaagugacug

SEQ ID NO: 4013249 - RNA, 22 nt, Human parainfluenza virus 3
auuaauggacauguucaaugaa

SEQ ID NO: 4013250 - RNA, 20 nt, Human parainfluenza virus 3
auuacaagguauagcaucau

SEQ ID NO: 4013251 - RNA, 18 nt, Human parainfluenza virus 3
auuacacacuaugacaaa

SEQ ID NO: 4013252 - RNA, 12 nt, Human parainfluenza virus 3
auuauauauacc

SEQ ID NO: 4013253 - RNA, 23 nt, Human parainfluenza virus 3
auuaucuccaaaaaaaucaaauu

SEQ ID NO: 4013254 - RNA, 19 nt, Human parainfluenza virus 3
auuaugggagaaaagacau

SEQ ID NO: 4013255 - RNA, 19 nt, Human parainfluenza virus 3
auuaugucaacaaagaaau

SEQ ID NO: 4013256 - RNA, 14 nt, Human parainfluenza virus 3
auucacaacaucaa

SEQ ID NO: 4013257 - RNA, 18 nt, Human parainfluenza virus 3
auucauuagugaaauuac

SEQ ID NO: 4013258 - RNA, 16 nt, Human parainfluenza virus 3
auugacaagaauauac

SEQ ID NO: 4013259 - RNA, 15 nt, Human parainfluenza virus 3
auugaucucaaugaa

SEQ ID NO: 4013260 - RNA, 14 nt, Human parainfluenza virus 3
auuuacagaaucaa

SEQ ID NO: 4013261 - RNA, 19 nt, Human parainfluenza virus 3
auuucaaaucuuaaaauua

SEQ ID NO: 4013262 - RNA, 21 nt, Human parainfluenza virus 3
auuuucucuuuuuuuagaaca

SEQ ID NO: 4013263 - RNA, 15 nt, Human parainfluenza virus 3
caaaacuauaauggu

SEQ ID NO: 4013264 - RNA, 14 nt, Human parainfluenza virus 3
caaaaggaaaauau

SEQ ID NO: 4013265 - RNA, 16 nt, Human parainfluenza virus 3
caaaagggcagaagaa

SEQ ID NO: 4013266 - RNA, 21 nt, Human parainfluenza virus 3
caaaaugacaagccauaugua

SEQ ID NO: 4013267 - RNA, 14 nt, Human parainfluenza virus 3
caaagaagcaauca

SEQ ID NO: 4013268 - RNA, 18 nt, Human parainfluenza virus 3
caaagaauguauagaagc

SEQ ID NO: 4013269 - RNA, 19 nt, Human parainfluenza virus 3
caaaguagauuccauauca

SEQ ID NO: 4013270 - RNA, 21 nt, Human parainfluenza virus 3
caacaagacuaauacccaaaa

SEQ ID NO: 4013271 - RNA, 14 nt, Human parainfluenza virus 3
caacagaucaagca

SEQ ID NO: 4013272 - RNA, 22 nt, Human parainfluenza virus 3
caacagcaacugaaagaguaaa

SEQ ID NO: 4013273 - RNA, 13 nt, Human parainfluenza virus 3
caacgacacaaaa

SEQ ID NO: 4013274 - RNA, 16 nt, Human parainfluenza virus 3
caagaagaugacaaaa

SEQ ID NO: 4013275 - RNA, 20 nt, Human parainfluenza virus 3
caaucaggaauccaaugaaa

SEQ ID NO: 4013276 - RNA, 22 nt, Human parainfluenza virus 3
caaucagggacacaaacaaagc

SEQ ID NO: 4013277 - RNA, 23 nt, Human parainfluenza virus 3
caaucucucacaaagcacaaaac

SEQ ID NO: 4013278 - RNA, 14 nt, Human parainfluenza virus 3
caauuagaaaugau

SEQ ID NO: 4013279 - RNA, 19 nt, Human parainfluenza virus 3
cacaaaggggcaaacagaa

SEQ ID NO: 4013280 - RNA, 14 nt, Human parainfluenza virus 3
cacaaauaucacag

SEQ ID NO: 4013281 - RNA, 12 nt, Human parainfluenza virus 3
cacaauaucaau

SEQ ID NO: 4013282 - RNA, 15 nt, Human parainfluenza virus 3
caccaaaacaacaaa

SEQ ID NO: 4013283 - RNA, 21 nt, Human parainfluenza virus 3
caccagaugaugaagaagaaa

SEQ ID NO: 4013284 - RNA, 23 nt, Human parainfluenza virus 3
cagaaaaucgagaaaaugagauu

SEQ ID NO: 4013285 - RNA, 18 nt, Human parainfluenza virus 3
cagaacaaaguagaaaca

SEQ ID NO: 4013286 - RNA, 21 nt, Human parainfluenza virus 3
cagaacaccaaaacaacaaaa

SEQ ID NO: 4013287 - RNA, 18 nt, Human parainfluenza virus 3
cagaagcaaaagauagaa

SEQ ID NO: 4013288 - RNA, 23 nt, Human parainfluenza virus 3
cagauaguagagcugagacugug

SEQ ID NO: 4013289 - RNA, 13 nt, Human parainfluenza virus 3
cagauauuaagau

SEQ ID NO: 4013290 - RNA, 22 nt, Human parainfluenza virus 3
cagaugaugaagaagaaauacu

SEQ ID NO: 4013291 - RNA, 19 nt, Human parainfluenza virus 3
cagcaaucucucacaaagc

SEQ ID NO: 4013292 - RNA, 22 nt, Human parainfluenza virus 3
cagcaaucucucacaaagcaca

SEQ ID NO: 4013293 - RNA, 23 nt, Human parainfluenza virus 3
cagcagaaaagguuagaaaauau

SEQ ID NO: 4013294 - RNA, 16 nt, Human parainfluenza virus 3
caggagugaacacaag

SEQ ID NO: 4013295 - RNA, 17 nt, Human parainfluenza virus 3
cauacuuucaacauaaa

SEQ ID NO: 4013296 - RNA, 15 nt, Human parainfluenza virus 3
cauagaagauugaua

SEQ ID NO: 4013297 - RNA, 23 nt, Human parainfluenza virus 3
cauauaguagaaauaaaucagaa

SEQ ID NO: 4013298 - RNA, 12 nt, Human parainfluenza virus 3
caugaaauggag

SEQ ID NO: 4013299 - RNA, 21 nt, Human parainfluenza virus 3
cauguguuauccgaaauggaa

SEQ ID NO: 4013300 - RNA, 15 nt, Human parainfluenza virus 3
ccaaggauagacaaa

SEQ ID NO: 4013301 - RNA, 19 nt, Human parainfluenza virus 3
ccaaugauccaacaaagaa

SEQ ID NO: 4013302 - RNA, 23 nt, Human parainfluenza virus 3
ccugguauuaacaguaaagugac

SEQ ID NO: 4013303 - RNA, 18 nt, Human parainfluenza virus 3
ccuuuaucuuugagccca

SEQ ID NO: 4013304 - RNA, 14 nt, Human parainfluenza virus 3
cgaaucaaagacaa

SEQ ID NO: 4013305 - RNA, 18 nt, Human parainfluenza virus 3
cgacaugcaggaaauaca

SEQ ID NO: 4013306 - RNA, 15 nt, Human parainfluenza virus 3
cgauaauuacaauug

SEQ ID NO: 4013307 - RNA, 17 nt, Human parainfluenza virus 3
cgcaggaacaagaaaga

SEQ ID NO: 4013308 - RNA, 14 nt, Human parainfluenza virus 3
cuacaauagaugaa

SEQ ID NO: 4013309 - RNA, 20 nt, Human parainfluenza virus 3
cuacaaugauggauaugaga

SEQ ID NO: 4013310 - RNA, 15 nt, Human parainfluenza virus 3
cuagauuuauaucaa

SEQ ID NO: 4013311 - RNA, 16 nt, Human parainfluenza virus 3
cuagguugugaagcag

SEQ ID NO: 4013312 - RNA, 15 nt, Human parainfluenza virus 3
cuauauauauacaag

SEQ ID NO: 4013313 - RNA, 16 nt, Human parainfluenza virus 3
cuaucaacacacacaa

SEQ ID NO: 4013314 - RNA, 12 nt, Human parainfluenza virus 3
cucaaaaaauac

SEQ ID NO: 4013315 - RNA, 20 nt, Human parainfluenza virus 3
cuguucgaugccaacaaagu

SEQ ID NO: 4013316 - RNA, 12 nt, Human parainfluenza virus 3
cuuaaaucccag

SEQ ID NO: 4013317 - RNA, 13 nt, Human parainfluenza virus 3
cuuccaaucagaa

SEQ ID NO: 4013318 - RNA, 17 nt, Human parainfluenza virus 3
gaaaacacuaaucccag

SEQ ID NO: 4013319 - RNA, 22 nt, Human parainfluenza virus 3
gaaaacacuaaucccagaacaa

SEQ ID NO: 4013320 - RNA, 16 nt, Human parainfluenza virus 3
gaaaagaucaagaaaa

SEQ ID NO: 4013321 - RNA, 16 nt, Human parainfluenza virus 3
gaaaaucaaacaaugg

SEQ ID NO: 4013322 - RNA, 13 nt, Human parainfluenza virus 3
gaaaaucaaagag

SEQ ID NO: 4013323 - RNA, 19 nt, Human parainfluenza virus 3
gaaaaucgagaaaaugaga

SEQ ID NO: 4013324 - RNA, 18 nt, Human parainfluenza virus 3
gaaacucaaagaagcaau

SEQ ID NO: 4013325 - RNA, 20 nt, Human parainfluenza virus 3
gaaagacugguuuaagaaau

SEQ ID NO: 4013326 - RNA, 13 nt, Human parainfluenza virus 3
gaaaugauaauca

SEQ ID NO: 4013327 - RNA, 23 nt, Human parainfluenza virus 3
gaacagucaaagcgaaagagaug

SEQ ID NO: 4013328 - RNA, 14 nt, Human parainfluenza virus 3
gaagaaaagaucaa

SEQ ID NO: 4013329 - RNA, 20 nt, Human parainfluenza virus 3
gaaggauacagaagagagca

SEQ ID NO: 4013330 - RNA, 13 nt, Human parainfluenza virus 3
gaagugagaagaa

SEQ ID NO: 4013331 - RNA, 17 nt, Human parainfluenza virus 3
gaaucaaagacaaauac

SEQ ID NO: 4013332 - RNA, 17 nt, Human parainfluenza virus 3
gaaucaauccgaacaaa

SEQ ID NO: 4013333 - RNA, 21 nt, Human parainfluenza virus 3
gacacaaaauuaacacagaua

SEQ ID NO: 4013334 - RNA, 21 nt, Human parainfluenza virus 3
gacacaaaggggcaaacagaa

SEQ ID NO: 4013335 - RNA, 22 nt, Human parainfluenza virus 3
gacacuacuugcaaauaauaua

SEQ ID NO: 4013336 - RNA, 15 nt, Human parainfluenza virus 3
gacacuguuaauaaa

SEQ ID NO: 4013337 - RNA, 16 nt, Human parainfluenza virus 3
gacugguuuaagaaau

SEQ ID NO: 4013338 - RNA, 23 nt, Human parainfluenza virus 3
gacugguuuaagaaaucaaaaga

SEQ ID NO: 4013339 - RNA, 16 nt, Human parainfluenza virus 3
gagaaacucaaagaag

SEQ ID NO: 4013340 - RNA, 10 nt, Human parainfluenza virus 3
gagcccaagg

SEQ ID NO: 4013341 - RNA, 16 nt, Human parainfluenza virus 3
gagcccaaggauagac

SEQ ID NO: 4013342 - RNA, 15 nt, Human parainfluenza virus 3
gauaagaaagucaaa

SEQ ID NO: 4013343 - RNA, 16 nt, Human parainfluenza virus 3
gauacugcaucaaaga

SEQ ID NO: 4013344 - RNA, 17 nt, Human parainfluenza virus 3
gauauuacugauuacag

SEQ ID NO: 4013345 - RNA, 19 nt, Human parainfluenza virus 3
gaucuauuaaaaauaaaaa

SEQ ID NO: 4013346 - RNA, 22 nt, Human parainfluenza virus 3
gaugaggauuugacaauuuaua

SEQ ID NO: 4013347 - RNA, 13 nt, Human parainfluenza virus 3
gaugaugaagaag

SEQ ID NO: 4013348 - RNA, 17 nt, Human parainfluenza virus 3
gauugauagaaaaucaa

SEQ ID NO: 4013349 - RNA, 12 nt, Human parainfluenza virus 3
gcaaaaaugaug

SEQ ID NO: 4013350 - RNA, 17 nt, Human parainfluenza virus 3
gcaaaaaugaugaagaa

SEQ ID NO: 4013351 - RNA, 20 nt, Human parainfluenza virus 3
gcagguacauaucaaaacag

SEQ ID NO: 4013352 - RNA, 22 nt, Human parainfluenza virus 3
gcagucauacucgcaggaacaa

SEQ ID NO: 4013353 - RNA, 20 nt, Human parainfluenza virus 3
gccaaauagauaucacaaaa

SEQ ID NO: 4013354 - RNA, 18 nt, Human parainfluenza virus 3
gcuaaaccucaaagcaga

SEQ ID NO: 4013355 - RNA, 17 nt, Human parainfluenza virus 3
ggaaugaccaggaauua

SEQ ID NO: 4013356 - RNA, 13 nt, Human parainfluenza virus 3
ggauauaggaaaa

SEQ ID NO: 4013357 - RNA, 23 nt, Human parainfluenza virus 3
ggcacuguaucugacauacucua

SEQ ID NO: 4013358 - RNA, 13 nt, Human parainfluenza virus 3
ggccaaaucagau

SEQ ID NO: 4013359 - RNA, 23 nt, Human parainfluenza virus 3
guacagaacaccaaaacaacaaa

SEQ ID NO: 4013360 - RNA, 16 nt, Human parainfluenza virus 3
guagaaauaaaucaga

SEQ ID NO: 4013361 - RNA, 18 nt, Human parainfluenza virus 3
guccaugguuuucagaua

SEQ ID NO: 4013362 - RNA, 15 nt, Human parainfluenza virus 3
gucuuccaaucagaa

SEQ ID NO: 4013363 - RNA, 23 nt, Human parainfluenza virus 3
guuacugcugcaacaccagauga

SEQ ID NO: 4013364 - RNA, 23 nt, Human parainfluenza virus 3
guucacacaacuuauaaaucaga

SEQ ID NO: 4013365 - RNA, 13 nt, Human parainfluenza virus 3
uaaagauauaucu

SEQ ID NO: 4013366 - RNA, 15 nt, Human parainfluenza virus 3
uaagaaaucaaaaga

SEQ ID NO: 4013367 - RNA, 17 nt, Human parainfluenza virus 3
uaagaaaucaaaagaua

SEQ ID NO: 4013368 - RNA, 13 nt, Human parainfluenza virus 3
uacagaacaccaa

SEQ ID NO: 4013369 - RNA, 21 nt, Human parainfluenza virus 3
uacagaacaccaaaacaacaa

SEQ ID NO: 4013370 - RNA, 23 nt, Human parainfluenza virus 3
uaccaagcagaguucuucucuug

SEQ ID NO: 4013371 - RNA, 13 nt, Human parainfluenza virus 3
uaccucagccuua

SEQ ID NO: 4013372 - RNA, 16 nt, Human parainfluenza virus 3
uagaaaaucaaagaga

SEQ ID NO: 4013373 - RNA, 17 nt, Human parainfluenza virus 3
uagaaaaucaaagagaa

SEQ ID NO: 4013374 - RNA, 18 nt, Human parainfluenza virus 3
uagaagugagaagaacag

SEQ ID NO: 4013375 - RNA, 22 nt, Human parainfluenza virus 3
uagacaaaaaguaagaaaaaca

SEQ ID NO: 4013376 - RNA, 14 nt, Human parainfluenza virus 3
uagauaucaaucaa

SEQ ID NO: 4013377 - RNA, 15 nt, Human parainfluenza virus 3
uagauccaaaauuac

SEQ ID NO: 4013378 - RNA, 21 nt, Human parainfluenza virus 3
uagcaaccucagcacaaauca

SEQ ID NO: 4013379 - RNA, 13 nt, Human parainfluenza virus 3
uaggagaaaucaa

SEQ ID NO: 4013380 - RNA, 14 nt, Human parainfluenza virus 3
uauaccaagcagag

SEQ ID NO: 4013381 - RNA, 23 nt, Human parainfluenza virus 3
uauaccaagcagaguucuucucu

SEQ ID NO: 4013382 - RNA, 17 nt, Human parainfluenza virus 3
uauauaccaagcagagu

SEQ ID NO: 4013383 - RNA, 19 nt, Human parainfluenza virus 3
uauaucaaaaguucacaca

SEQ ID NO: 4013384 - RNA, 14 nt, Human parainfluenza virus 3
uauaucuuaaccuu

SEQ ID NO: 4013385 - RNA, 20 nt, Human parainfluenza virus 3
ucaaaagauacugacaacca

SEQ ID NO: 4013386 - RNA, 21 nt, Human parainfluenza virus 3
ucaaaagauacugacaaccag

SEQ ID NO: 4013387 - RNA, 22 nt, Human parainfluenza virus 3
ucaaaaucuaucaacacacaca

SEQ ID NO: 4013388 - RNA, 23 nt, Human parainfluenza virus 3
ucaaaauuagccucaaaaaauga

SEQ ID NO: 4013389 - RNA, 16 nt, Human parainfluenza virus 3
ucaaagcgaaagagau

SEQ ID NO: 4013390 - RNA, 19 nt, Human parainfluenza virus 3
ucaacauaaaugacaauag

SEQ ID NO: 4013391 - RNA, 15 nt, Human parainfluenza virus 3
ucaaugaacagagaa

SEQ ID NO: 4013392 - RNA, 22 nt, Human parainfluenza virus 3
ucaauggacaacgacacaaaau

SEQ ID NO: 4013393 - RNA, 17 nt, Human parainfluenza virus 3
ucagaauuaacaaacau

SEQ ID NO: 4013394 - RNA, 13 nt, Human parainfluenza virus 3
ucagaucuacaaa

SEQ ID NO: 4013395 - RNA, 19 nt, Human parainfluenza virus 3
ucagcaaucagacaaugga

SEQ ID NO: 4013396 - RNA, 14 nt, Human parainfluenza virus 3
ucagcacaaaucac

SEQ ID NO: 4013397 - RNA, 16 nt, Human parainfluenza virus 3
ucagggacacaaacaa

SEQ ID NO: 4013398 - RNA, 14 nt, Human parainfluenza virus 3
uccagaagcaucac

SEQ ID NO: 4013399 - RNA, 16 nt, Human parainfluenza virus 3
uccaugaucaaaacaa

SEQ ID NO: 4013400 - RNA, 23 nt, Human parainfluenza virus 3
uccauggcuacucauaacaacaa

SEQ ID NO: 4013401 - RNA, 15 nt, Human parainfluenza virus 3
uccuaaauacagaug

SEQ ID NO: 4013402 - RNA, 21 nt, Human parainfluenza virus 3
ucgaaccgaacagacaaacac

SEQ ID NO: 4013403 - RNA, 23 nt, Human parainfluenza virus 3
ucuaucaacacacacaaaaucaa

SEQ ID NO: 4013404 - RNA, 20 nt, Human parainfluenza virus 3
ucucacaaagcacaaaacaa

SEQ ID NO: 4013405 - RNA, 18 nt, Human parainfluenza virus 3
ucuuaaccuuuaucuuug

SEQ ID NO: 4013406 - RNA, 20 nt, Human parainfluenza virus 3
ucuucaauacaccaagaaga

SEQ ID NO: 4013407 - RNA, 19 nt, Human parainfluenza virus 3
ugaagaaguaucugaauua

SEQ ID NO: 4013408 - RNA, 21 nt, Human parainfluenza virus 3
ugagcuguuuccuaacaacag

SEQ ID NO: 4013409 - RNA, 17 nt, Human parainfluenza virus 3
ugcuaaaccucaaagca

SEQ ID NO: 4013410 - RNA, 20 nt, Human parainfluenza virus 3
uggagaaucgauuagggaau

SEQ ID NO: 4013411 - RNA, 15 nt, Human parainfluenza virus 3
uguacaacagaagca

SEQ ID NO: 4013412 - RNA, 12 nt, Human parainfluenza virus 3
uguauaacagga

SEQ ID NO: 4013413 - RNA, 21 nt, Human parainfluenza virus 3
ugucccgggaaaacacagaga

SEQ ID NO: 4013414 - RNA, 16 nt, Human parainfluenza virus 3
uuaaagaauaaauuaa

SEQ ID NO: 4013415 - RNA, 21 nt, Human parainfluenza virus 3
uuaaguucauacaaugaauca

SEQ ID NO: 4013416 - RNA, 20 nt, Human parainfluenza virus 3
uucaaaucuuaaaauuauga

SEQ ID NO: 4013417 - RNA, 21 nt, Human parainfluenza virus 3
uugagaaacucaaagaagcaa

SEQ ID NO: 4013418 - RNA, 12 nt, Human parainfluenza virus 3
uugagcccaagg

SEQ ID NO: 4013419 - RNA, 22 nt, Human parainfluenza virus 3
uugauauuacugauuacaguga

SEQ ID NO: 4013420 - RNA, 16 nt, Human parainfluenza virus 3
uuguucaaaacagaga

SEQ ID NO: 4013421 - RNA, 13 nt, Human parainfluenza virus 3
aagacaaauggaa

SEQ ID NO: 4013422 - RNA, 17 nt, Human parainfluenza virus 3
aagaggucaacaccaac

SEQ ID NO: 4013423 - RNA, 13 nt, Human parainfluenza virus 3
aagcacaaaacaa

SEQ ID NO: 4013424 - RNA, 17 nt, Human parainfluenza virus 3
aagcuagauccaaaauu

SEQ ID NO: 4013425 - RNA, 14 nt, Human parainfluenza virus 3
aagcugcaaccaaa

SEQ ID NO: 4013426 - RNA, 12 nt, Human parainfluenza virus 3
aagucaaaucaa

SEQ ID NO: 4013427 - RNA, 17 nt, Human parainfluenza virus 3
aagucaaaucaaaaacu

SEQ ID NO: 4013428 - RNA, 17 nt, Human parainfluenza virus 3
aaguuacgcaauccaac

SEQ ID NO: 4013429 - RNA, 21 nt, Human parainfluenza virus 3
aaguucauacaaugaaucaaa

SEQ ID NO: 4013430 - RNA, 17 nt, Human parainfluenza virus 3
aaguuuguggcucugga

SEQ ID NO: 4013431 - RNA, 16 nt, Human parainfluenza virus 3
aauaaagauauaucuu

SEQ ID NO: 4013432 - RNA, 20 nt, Human parainfluenza virus 3
aauacgggaguguaaaugau

SEQ ID NO: 4013433 - RNA, 12 nt, Human parainfluenza virus 3
aaucaaaacaaa

SEQ ID NO: 4013434 - RNA, 12 nt, Human parainfluenza virus 3
aaucaaauggau

SEQ ID NO: 4013435 - RNA, 17 nt, Human parainfluenza virus 3
aaucaauauacaaauaa

SEQ ID NO: 4013436 - RNA, 17 nt, Human parainfluenza virus 3
aauccacaucaaaacua

SEQ ID NO: 4013437 - RNA, 16 nt, Human parainfluenza virus 3
aaugacaauaggaagu

SEQ ID NO: 4013438 - RNA, 14 nt, Human parainfluenza virus 3
aaugacuuaggaaa

SEQ ID NO: 4013439 - RNA, 12 nt, Human parainfluenza virus 3
aaugaguuuaug

SEQ ID NO: 4013440 - RNA, 13 nt, Human parainfluenza virus 3
aaugcaacuggau

SEQ ID NO: 4013441 - RNA, 14 nt, Human parainfluenza virus 3
aaugucaaaagaaa

SEQ ID NO: 4013442 - RNA, 22 nt, Human parainfluenza virus 3
aauugguuuugauauuagauaa

SEQ ID NO: 4013443 - RNA, 22 nt, Human parainfluenza virus 3
aauuugucuuccaaucagaaau

SEQ ID NO: 4013444 - RNA, 21 nt, Human parainfluenza virus 3
acaaaaucaagcagaaugaaa

SEQ ID NO: 4013445 - RNA, 19 nt, Human parainfluenza virus 3
acaaaggcuuaaacucaau

SEQ ID NO: 4013446 - RNA, 15 nt, Human parainfluenza virus 3
acaaauaucacagaa

SEQ ID NO: 4013447 - RNA, 20 nt, Human parainfluenza virus 3
acaacaagcugcauuacaca

SEQ ID NO: 4013448 - RNA, 16 nt, Human parainfluenza virus 3
acaagaaaaaggaaua

SEQ ID NO: 4013449 - RNA, 14 nt, Human parainfluenza virus 3
acaauaaaauaagu

SEQ ID NO: 4013450 - RNA, 14 nt, Human parainfluenza virus 3
acaauaaagauaua

SEQ ID NO: 4013451 - RNA, 22 nt, Human parainfluenza virus 3
acaauaucuaugagacaaaauu

SEQ ID NO: 4013452 - RNA, 19 nt, Human parainfluenza virus 3
acacaaaaucaagcagaau

SEQ ID NO: 4013453 - RNA, 19 nt, Human parainfluenza virus 3
acacaaaggggcaaacaga

SEQ ID NO: 4013454 - RNA, 16 nt, Human parainfluenza virus 3
acacagauacaaaaug

SEQ ID NO: 4013455 - RNA, 16 nt, Human parainfluenza virus 3
acacauuuaucagaua

SEQ ID NO: 4013456 - RNA, 19 nt, Human parainfluenza virus 3
acaccgaacaaacagacaa

SEQ ID NO: 4013457 - RNA, 14 nt, Human parainfluenza virus 3
acacuaaacacaau

SEQ ID NO: 4013458 - RNA, 13 nt, Human parainfluenza virus 3
acagacaagaaac

SEQ ID NO: 4013459 - RNA, 22 nt, Human parainfluenza virus 3
acagacaagaaacaacaguaga

SEQ ID NO: 4013460 - RNA, 19 nt, Human parainfluenza virus 3
acagagaggaccugggaga

SEQ ID NO: 4013461 - RNA, 16 nt, Human parainfluenza virus 3
acagauacaaaaugaa

SEQ ID NO: 4013462 - RNA, 20 nt, Human parainfluenza virus 3
acagcaaacacuaaacacaa

SEQ ID NO: 4013463 - RNA, 17 nt, Human parainfluenza virus 3
acauauagucaaaugac

SEQ ID NO: 4013464 - RNA, 21 nt, Human parainfluenza virus 3
accaagaagaugacaaaagaa

SEQ ID NO: 4013465 - RNA, 14 nt, Human parainfluenza virus 3
accgaacaaacaga

SEQ ID NO: 4013466 - RNA, 19 nt, Human parainfluenza virus 3
accgaacagacaaacacaa

SEQ ID NO: 4013467 - RNA, 17 nt, Human parainfluenza virus 3
accugauacaagaucaa

SEQ ID NO: 4013468 - RNA, 13 nt, Human parainfluenza virus 3
acuaaacacaaug

SEQ ID NO: 4013469 - RNA, 19 nt, Human parainfluenza virus 3
acuaaacacaaugccaacu

SEQ ID NO: 4013470 - RNA, 17 nt, Human parainfluenza virus 3
acuaauaagauaauaua

SEQ ID NO: 4013471 - RNA, 22 nt, Human parainfluenza virus 3
acuaggcuucuucgaaauggaa

SEQ ID NO: 4013472 - RNA, 19 nt, Human parainfluenza virus 3
agaaaaacauguaauauau

SEQ ID NO: 4013473 - RNA, 15 nt, Human parainfluenza virus 3
agaaaagaucaagaa

SEQ ID NO: 4013474 - RNA, 18 nt, Human parainfluenza virus 3
agaaaauauauguauauu

SEQ ID NO: 4013475 - RNA, 18 nt, Human parainfluenza virus 3
agaaaaucgagaaaauga

SEQ ID NO: 4013476 - RNA, 21 nt, Human parainfluenza virus 3
agaaacaauuaaaauuugaca

SEQ ID NO: 4013477 - RNA, 17 nt, Human parainfluenza virus 3
agaaagaccaaaaugaa

SEQ ID NO: 4013478 - RNA, 15 nt, Human parainfluenza virus 3
agaaaucaaauggau

SEQ ID NO: 4013479 - RNA, 21 nt, Human parainfluenza virus 3
agaacaaaguagaaacaguga

SEQ ID NO: 4013480 - RNA, 13 nt, Human parainfluenza virus 3
agaaucaauaaag

SEQ ID NO: 4013481 - RNA, 20 nt, Human parainfluenza virus 3
agaaucuugguguaauucaa

SEQ ID NO: 4013482 - RNA, 12 nt, Human parainfluenza virus 3
agacaaauggaa

SEQ ID NO: 4013483 - RNA, 19 nt, Human parainfluenza virus 3
agacuaauacccaaaaaag

SEQ ID NO: 4013484 - RNA, 14 nt, Human parainfluenza virus 3
agagauugaauuac

SEQ ID NO: 4013485 - RNA, 18 nt, Human parainfluenza virus 3
agauaaacaaaacuauaa

SEQ ID NO: 4013486 - RNA, 19 nt, Human parainfluenza virus 3
agauacugcaucaaagaua

SEQ ID NO: 4013487 - RNA, 16 nt, Human parainfluenza virus 3
agaucacuuuuaaugu

SEQ ID NO: 4013488 - RNA, 14 nt, Human parainfluenza virus 3
agaucuacaaagua

SEQ ID NO: 4013489 - RNA, 17 nt, Human parainfluenza virus 3
agaugaugaagaagaaa

SEQ ID NO: 4013490 - RNA, 15 nt, Human parainfluenza virus 3
agcaacugaaagagu

SEQ ID NO: 4013491 - RNA, 13 nt, Human parainfluenza virus 3
agcaaucaaauca

SEQ ID NO: 4013492 - RNA, 22 nt, Human parainfluenza virus 3
agcaaucagggacacaaacaaa

SEQ ID NO: 4013493 - RNA, 20 nt, Human parainfluenza virus 3
agcaaucgauuuacagagag

SEQ ID NO: 4013494 - RNA, 23 nt, Human parainfluenza virus 3
agcaaucucucacaaagcacaaa

SEQ ID NO: 4013495 - RNA, 16 nt, Human parainfluenza virus 3
agcagaucuaaagaaa

SEQ ID NO: 4013496 - RNA, 11 nt, Human parainfluenza virus 3
agcccaaggau

SEQ ID NO: 4013497 - RNA, 21 nt, Human parainfluenza virus 3
agcccaaggauagacaaaaag

SEQ ID NO: 4013498 - RNA, 16 nt, Human parainfluenza virus 3
agccucaaaaaaugau

SEQ ID NO: 4013499 - RNA, 17 nt, Human parainfluenza virus 3
agccucaaaaaaugaug

SEQ ID NO: 4013500 - RNA, 22 nt, Human parainfluenza virus 3
agccucauaccaaaaauagaag

SEQ ID NO: 4013501 - RNA, 17 nt, Human parainfluenza virus 3
agcuggccaucagaaac

SEQ ID NO: 4013502 - RNA, 18 nt, Human parainfluenza virus 3
aggaaauacacuagagaa

SEQ ID NO: 4013503 - RNA, 14 nt, Human parainfluenza virus 3
aggaauaauugaua

SEQ ID NO: 4013504 - RNA, 15 nt, Human parainfluenza virus 3
aggaaucaagagaua

SEQ ID NO: 4013505 - RNA, 14 nt, Human parainfluenza virus 3
aggauauaggaaaa

SEQ ID NO: 4013506 - RNA, 22 nt, Human parainfluenza virus 3
agggauugacaagaauauaccu

SEQ ID NO: 4013507 - RNA, 13 nt, Human parainfluenza virus 3
agggcagaagaaa

SEQ ID NO: 4013508 - RNA, 23 nt, Human parainfluenza virus 3
aguauuuauagcagauaguaaau

SEQ ID NO: 4013509 - RNA, 16 nt, Human parainfluenza virus 3
agucaaugaacagaga

SEQ ID NO: 4013510 - RNA, 17 nt, Human parainfluenza virus 3
auaaaaucuuagauauu

SEQ ID NO: 4013511 - RNA, 12 nt, Human parainfluenza virus 3
auaaaucagaaa

SEQ ID NO: 4013512 - RNA, 22 nt, Human parainfluenza virus 3
auaacuaacucugcaauauaca

SEQ ID NO: 4013513 - RNA, 17 nt, Human parainfluenza virus 3
auaaggauaaaauggac

SEQ ID NO: 4013514 - RNA, 21 nt, Human parainfluenza virus 3
auaaugugcuaucaagaccag

SEQ ID NO: 4013515 - RNA, 16 nt, Human parainfluenza virus 3
auacaaugaaucaaau

SEQ ID NO: 4013516 - RNA, 15 nt, Human parainfluenza virus 3
auacaguacaaaaua

SEQ ID NO: 4013517 - RNA, 14 nt, Human parainfluenza virus 3
auaccaacaucaga

SEQ ID NO: 4013518 - RNA, 22 nt, Human parainfluenza virus 3
auaccaagcagaguucuucucu

SEQ ID NO: 4013519 - RNA, 14 nt, Human parainfluenza virus 3
auacuagacucaca

SEQ ID NO: 4013520 - RNA, 15 nt, Human parainfluenza virus 3
auagucucaaagaaa

SEQ ID NO: 4013521 - RNA, 20 nt, Human parainfluenza virus 3
auauaucuuaaccuuuaucu

SEQ ID NO: 4013522 - RNA, 14 nt, Human parainfluenza virus 3
aucaaaacaaaaag

SEQ ID NO: 4013523 - RNA, 21 nt, Human parainfluenza virus 3
aucaagaccaggaaacgauga

SEQ ID NO: 4013524 - RNA, 22 nt, Human parainfluenza virus 3
uuaaacucaauuccaaaauuaa

SEQ ID NO: 4013525 - RNA, 23 nt, Human parainfluenza virus 3
uuaacugagaaagugaaugacuu

SEQ ID NO: 4013526 - RNA, 12 nt, Human parainfluenza virus 3
uuaagaaaucaa

SEQ ID NO: 4013527 - RNA, 13 nt, Human parainfluenza virus 3
uuaauuauaaaug

SEQ ID NO: 4013528 - RNA, 14 nt, Human parainfluenza virus 3
uuacaaccauaauu

SEQ ID NO: 4013529 - RNA, 16 nt, Human parainfluenza virus 3
uucaacauaaaugaca

SEQ ID NO: 4013530 - RNA, 15 nt, Human parainfluenza virus 3
uuccaauuaugggag

SEQ ID NO: 4013531 - RNA, 15 nt, Human parainfluenza virus 3
uugaauucauacuua

SEQ ID NO: 4013532 - RNA, 20 nt, Human parainfluenza virus 3
uugagcccaaggauagacaa

SEQ ID NO: 4013533 - RNA, 16 nt, Human parainfluenza virus 3
uugggaaaaucaaaca

SEQ ID NO: 4013534 - RNA, 19 nt, Human parainfluenza virus 3
caggaaacuguacagagag

SEQ ID NO: 4013535 - RNA, 19 nt, Human parainfluenza virus 3
caggaaauacacuagagaa

SEQ ID NO: 4013536 - RNA, 12 nt, Human parainfluenza virus 3
caggaacaagaa

SEQ ID NO: 4013537 - RNA, 14 nt, Human parainfluenza virus 3
caggaguauauacu

SEQ ID NO: 4013538 - RNA, 16 nt, Human parainfluenza virus 3
cauagaagauauugua

SEQ ID NO: 4013539 - RNA, 15 nt, Human parainfluenza virus 3
caugaucaaaacaaa

SEQ ID NO: 4013540 - RNA, 18 nt, Human parainfluenza virus 3
cauuagugaaauuacaau

SEQ ID NO: 4013541 - RNA, 12 nt, Human parainfluenza virus 3
cauuauauuguu

SEQ ID NO: 4013542 - RNA, 15 nt, Human parainfluenza virus 3
cauugcuacaagaaa

SEQ ID NO: 4013543 - RNA, 15 nt, Human parainfluenza virus 3
ccaaaacaacaaaac

SEQ ID NO: 4013544 - RNA, 20 nt, Human parainfluenza virus 3
ccaaagggaugaagauauca

SEQ ID NO: 4013545 - RNA, 14 nt, Human parainfluenza virus 3
ccaaauagauauca

SEQ ID NO: 4013546 - RNA, 20 nt, Human parainfluenza virus 3
ccaaauagauaucacaaaac

SEQ ID NO: 4013547 - RNA, 23 nt, Human parainfluenza virus 3
ccaaauagauaucacaaaacuac

SEQ ID NO: 4013548 - RNA, 19 nt, Human parainfluenza virus 3
ccaaauggauguauaacag

SEQ ID NO: 4013549 - RNA, 20 nt, Human parainfluenza virus 3
ccaagaagaugacaaaagaa

SEQ ID NO: 4013550 - RNA, 18 nt, Human parainfluenza virus 3
ccauauguacuaacaaac

SEQ ID NO: 4013551 - RNA, 21 nt, Human parainfluenza virus 3
ccauuaagccgaagcaaauaa

SEQ ID NO: 4013552 - RNA, 23 nt, Human parainfluenza virus 3
cccaaaguugaugaaagaucaga

SEQ ID NO: 4013553 - RNA, 19 nt, Human parainfluenza virus 3
ccgaacaaacagacaagaa

SEQ ID NO: 4013554 - RNA, 12 nt, Human parainfluenza virus 3
ccgcaacaaaga

SEQ ID NO: 4013555 - RNA, 15 nt, Human parainfluenza virus 3
cuaauaagauaauau

SEQ ID NO: 4013556 - RNA, 21 nt, Human parainfluenza virus 3
aaaaagugagcaguacaauga

SEQ ID NO: 4013557 - RNA, 18 nt, Human parainfluenza virus 3
aaaaauaggcagaaugua

SEQ ID NO: 4013558 - RNA, 21 nt, Human parainfluenza virus 3
aaaacuuaggauuaaagaaua

SEQ ID NO: 4013559 - RNA, 12 nt, Human parainfluenza virus 3
aaaaggaaaaua

SEQ ID NO: 4013560 - RNA, 17 nt, Human parainfluenza virus 3
aaaaguaagaaaaacau

SEQ ID NO: 4013561 - RNA, 21 nt, Human parainfluenza virus 3
aaaaguaagaaaaacauguaa

SEQ ID NO: 4013562 - RNA, 16 nt, Human parainfluenza virus 3
aaaauaaaaaucccaa

SEQ ID NO: 4013563 - RNA, 16 nt, Human parainfluenza virus 3
aaaaucaagcagaaug

SEQ ID NO: 4013564 - RNA, 21 nt, Human parainfluenza virus 3
aaaaugaauccaaugagagag

SEQ ID NO: 4013565 - RNA, 19 nt, Human parainfluenza virus 3
aaaauuaugacugagagag

SEQ ID NO: 4013566 - RNA, 23 nt, Human parainfluenza virus 3
aaacagaaaaucgagaaaaugag

SEQ ID NO: 4013567 - RNA, 14 nt, Human parainfluenza virus 3
aaacagacaagaaa

SEQ ID NO: 4013568 - RNA, 14 nt, Human parainfluenza virus 3
aaacauaucccaau

SEQ ID NO: 4013569 - RNA, 13 nt, Human parainfluenza virus 3
aaaccucaaagca

SEQ ID NO: 4013570 - RNA, 18 nt, Human parainfluenza virus 3
aaacuucgaaacaagaua

SEQ ID NO: 4013571 - RNA, 17 nt, Human parainfluenza virus 3
aaagaggucaacaccaa

SEQ ID NO: 4013572 - RNA, 17 nt, Human parainfluenza virus 3
aaagaguaaacgagcug

SEQ ID NO: 4013573 - RNA, 18 nt, Human parainfluenza virus 3
aaagauauaucuuaaccu

SEQ ID NO: 4013574 - RNA, 19 nt, Human parainfluenza virus 3
aaagcgugcucggaaaaug

SEQ ID NO: 4013575 - RNA, 22 nt, Human parainfluenza virus 3
aaagcgugcucggaaaauggac

SEQ ID NO: 4013576 - RNA, 13 nt, Human parainfluenza virus 3
aaagguuagaaaa

SEQ ID NO: 4013577 - RNA, 19 nt, Human parainfluenza virus 3
aaaguugaugaaagaucag

SEQ ID NO: 4013578 - RNA, 16 nt, Human parainfluenza virus 3
aaauacagacagaauc

SEQ ID NO: 4013579 - RNA, 16 nt, Human parainfluenza virus 3
aaaugaauccaaugag

SEQ ID NO: 4013580 - RNA, 17 nt, Human parainfluenza virus 3
aaauguacuaaacaaug

SEQ ID NO: 4013581 - RNA, 20 nt, Human parainfluenza virus 3
aaauguacuaaacaauguag

SEQ ID NO: 4013582 - RNA, 23 nt, Human parainfluenza virus 3
aaauugaaagaagaaaagaucaa

SEQ ID NO: 4013583 - RNA, 15 nt, Human parainfluenza virus 3
aacaacagaucucaa

SEQ ID NO: 4013584 - RNA, 20 nt, Human parainfluenza virus 3
aacaaucauauauaaacgaa

SEQ ID NO: 4013585 - RNA, 15 nt, Human parainfluenza virus 3
aacacagcaaacacu

SEQ ID NO: 4013586 - RNA, 14 nt, Human parainfluenza virus 3
aacaguagaucaaa

SEQ ID NO: 4013587 - RNA, 22 nt, Human parainfluenza virus 3
aacauaggaucauuacaagaaa

SEQ ID NO: 4013588 - RNA, 13 nt, Human parainfluenza virus 3
aaccuuuaucuuu

SEQ ID NO: 4013589 - RNA, 22 nt, Human parainfluenza virus 3
aagaaacgacaccgaacaaaca

SEQ ID NO: 4013590 - RNA, 20 nt, Human parainfluenza virus 3
aagaaagucaaaucaaaaac

SEQ ID NO: 4013591 - RNA, 23 nt, Human parainfluenza virus 3
gacacaagggauugacaagaaua

SEQ ID NO: 4013592 - RNA, 13 nt, Human parainfluenza virus 3
gacaccgaacaaa

SEQ ID NO: 4013593 - RNA, 22 nt, Human parainfluenza virus 3
gacagaaucaucaggaacacaa

SEQ ID NO: 4013594 - RNA, 19 nt, Human parainfluenza virus 3
gaccaacagaucaagcaau

SEQ ID NO: 4013595 - RNA, 17 nt, Human parainfluenza virus 3
gacugauuccaaaggga

SEQ ID NO: 4013596 - RNA, 20 nt, Human parainfluenza virus 3
gagaagaacagucaaagcga

SEQ ID NO: 4013597 - RNA, 12 nt, Human parainfluenza virus 3
gagauaaaucaa

SEQ ID NO: 4013598 - RNA, 17 nt, Human parainfluenza virus 3
gagcagaugucaaagaa

SEQ ID NO: 4013599 - RNA, 14 nt, Human parainfluenza virus 3
gaggaaagaaagac

SEQ ID NO: 4013600 - RNA, 23 nt, Human parainfluenza virus 3
gaggaaucagucuucaugucaau

SEQ ID NO: 4013601 - RNA, 18 nt, Human parainfluenza virus 3
gauaauaccaaugaucua

SEQ ID NO: 4013602 - RNA, 17 nt, Human parainfluenza virus 3
gauacuauccuaauauu

SEQ ID NO: 4013603 - RNA, 18 nt, Human parainfluenza virus 3
gauagaaaaucaaagaga

SEQ ID NO: 4013604 - RNA, 17 nt, Human parainfluenza virus 3
gauagacaaaaaguaag

SEQ ID NO: 4013605 - RNA, 16 nt, Human parainfluenza virus 3
gauauuuuuaaugaau

SEQ ID NO: 4013606 - RNA, 19 nt, Human parainfluenza virus 3
gaucaacuuauacaaaaga

SEQ ID NO: 4013607 - RNA, 23 nt, Human parainfluenza virus 3
gaucaucagauauuaagauuaua

SEQ ID NO: 4013608 - RNA, 14 nt, Human parainfluenza virus 3
gauccaacaaagaa

SEQ ID NO: 4013609 - RNA, 15 nt, Human parainfluenza virus 3
gaucuacaaaguaga

SEQ ID NO: 4013610 - RNA, 12 nt, Human parainfluenza virus 3
gaucuuaaugaa

SEQ ID NO: 4013611 - RNA, 18 nt, Human parainfluenza virus 3
gaugaagauaucacaaaa

SEQ ID NO: 4013612 - RNA, 21 nt, Human parainfluenza virus 3
gauguauaacaggaguauaua

SEQ ID NO: 4013613 - RNA, 14 nt, Human parainfluenza virus 3
gauuccaaagggau

SEQ ID NO: 4013614 - RNA, 14 nt, Human parainfluenza virus 3
gauugaucaagaga

SEQ ID NO: 4013615 - RNA, 19 nt, Human parainfluenza virus 3
gcaaaauaggagaaaucaa

SEQ ID NO: 4013616 - RNA, 18 nt, Human parainfluenza virus 3
gcaaacacuaaacacaau

SEQ ID NO: 4013617 - RNA, 18 nt, Human parainfluenza virus 3
gcaaauaagggauaauca

SEQ ID NO: 4013618 - RNA, 19 nt, Human parainfluenza virus 3
gcaaucagacaauggacaa

SEQ ID NO: 4013619 - RNA, 19 nt, Human parainfluenza virus 3
gcacuccuaaauacagaug

SEQ ID NO: 4013620 - RNA, 14 nt, Human parainfluenza virus 3
gcagaguucuucuc

SEQ ID NO: 4013621 - RNA, 16 nt, Human parainfluenza virus 3
gcagaguucuucucuu

SEQ ID NO: 4013622 - RNA, 18 nt, Human parainfluenza virus 3
gcagaguucuucucuugu

SEQ ID NO: 4013623 - RNA, 12 nt, Human parainfluenza virus 3
gccauacagaug

SEQ ID NO: 4013624 - RNA, 14 nt, Human parainfluenza virus 3
gcgguugcucuggu

SEQ ID NO: 4013625 - RNA, 17 nt, Human parainfluenza virus 3
gcuucuucgaaauggaa

SEQ ID NO: 4013626 - RNA, 15 nt, Human parainfluenza virus 3
ggaacgaaucaaaga

SEQ ID NO: 4013627 - RNA, 11 nt, Human parainfluenza virus 3
ggagauuacag

SEQ ID NO: 4013628 - RNA, 21 nt, Human parainfluenza virus 3
ggauagacaaaaaguaagaaa

SEQ ID NO: 4013629 - RNA, 22 nt, Human parainfluenza virus 3
ggauagacaaaaaguaagaaaa

SEQ ID NO: 4013630 - RNA, 21 nt, Human parainfluenza virus 3
ggauaucuacaaugauggaua

SEQ ID NO: 4013631 - RNA, 17 nt, Human parainfluenza virus 3
guaaucagcaaucagac

SEQ ID NO: 4013632 - RNA, 17 nt, Human parainfluenza virus 3
guagauacugcaucaaa

SEQ ID NO: 4013633 - RNA, 12 nt, Human parainfluenza virus 3
guagcaaucaaa

SEQ ID NO: 4013634 - RNA, 14 nt, Human parainfluenza virus 3
gucaaucauaauua

SEQ ID NO: 4013635 - RNA, 23 nt, Human parainfluenza virus 3
gucaaucauaauuaaccauaaua

SEQ ID NO: 4013636 - RNA, 17 nt, Human parainfluenza virus 3
gugaaauuacaauuaga

SEQ ID NO: 4013637 - RNA, 13 nt, Human parainfluenza virus 3
guuaagauuacag

SEQ ID NO: 4013638 - RNA, 23 nt, Human parainfluenza virus 3
guuacaaaguuuguggcucugga

SEQ ID NO: 4013639 - RNA, 15 nt, Human parainfluenza virus 3
uaaagauauaucuua

SEQ ID NO: 4013640 - RNA, 19 nt, Human parainfluenza virus 3
uaacacagauacaaaauga

SEQ ID NO: 4013641 - RNA, 16 nt, Human parainfluenza virus 3
uaaccuuuaucuuuga

SEQ ID NO: 4013642 - RNA, 17 nt, Human parainfluenza virus 3
uacaaaauauaaaacca

SEQ ID NO: 4013643 - RNA, 14 nt, Human parainfluenza virus 3
uacagacagaauca

SEQ ID NO: 4013644 - RNA, 17 nt, Human parainfluenza virus 3
uacuaaacaauguagau

SEQ ID NO: 4013645 - RNA, 14 nt, Human parainfluenza virus 3
uagauacugcauca

SEQ ID NO: 4013646 - RNA, 14 nt, Human parainfluenza virus 3
uagcaaucaaauca

SEQ ID NO: 4013647 - RNA, 14 nt, Human parainfluenza virus 3
uaggacaaagaaaa

SEQ ID NO: 4013648 - RNA, 18 nt, Human parainfluenza virus 3
uaggagaaaucaaaacaa

SEQ ID NO: 4013649 - RNA, 14 nt, Human parainfluenza virus 3
uauacaguacaaaa

SEQ ID NO: 4013650 - RNA, 16 nt, Human parainfluenza virus 3
uauaccaagcagaguu

SEQ ID NO: 4013651 - RNA, 17 nt, Human parainfluenza virus 3
uauccaugaucaaaaca

SEQ ID NO: 4013652 - RNA, 19 nt, Human parainfluenza virus 3
uauccugagugucaccuua

SEQ ID NO: 4013653 - RNA, 20 nt, Human parainfluenza virus 3
uaucgacaugcaggaaauac

SEQ ID NO: 4013654 - RNA, 22 nt, Human parainfluenza virus 3
uaucuuaaccuuuaucuuugag

SEQ ID NO: 4013655 - RNA, 23 nt, Human parainfluenza virus 3
uauuaaaaauaaaaaucccaaaa

SEQ ID NO: 4013656 - RNA, 20 nt, Human parainfluenza virus 3
uauuaccagagcuucauagg

SEQ ID NO: 4013657 - RNA, 20 nt, Human parainfluenza virus 3
uauuccucuucccagccaua

SEQ ID NO: 4013658 - RNA, 17 nt, Human parainfluenza virus 3
ucaaaaacaacaaccau

SEQ ID NO: 4013659 - RNA, 18 nt, Human parainfluenza virus 3
ucaaaccaacagaaacaa

SEQ ID NO: 4013660 - RNA, 15 nt, Human parainfluenza virus 3
ucaaagagaacaacu

SEQ ID NO: 4013661 - RNA, 16 nt, Human parainfluenza virus 3
ucaaaucaaaaacuag

SEQ ID NO: 4013662 - RNA, 14 nt, Human parainfluenza virus 3
ucaacacacacaaa

SEQ ID NO: 4013663 - RNA, 16 nt, Human parainfluenza virus 3
ucaacaccgacacaaa

SEQ ID NO: 4013664 - RNA, 23 nt, Human parainfluenza virus 3
ucaagaagugccgcaacaaagaa

SEQ ID NO: 4013665 - RNA, 13 nt, Human parainfluenza virus 3
ucaagacaaacga

SEQ ID NO: 4013666 - RNA, 12 nt, Human parainfluenza virus 3
ucaauauacaaa

SEQ ID NO: 4013667 - RNA, 20 nt, Human parainfluenza virus 3
ucaauauacaaauaagaaaa

SEQ ID NO: 4013668 - RNA, 17 nt, Human parainfluenza virus 3
ucacaaagcacaaaaca

SEQ ID NO: 4013669 - RNA, 18 nt, Human parainfluenza virus 3
ucacuagacagaaaauaa

SEQ ID NO: 4013670 - RNA, 19 nt, Human parainfluenza virus 3
ucagcugguauucaaaagg

SEQ ID NO: 4013671 - RNA, 19 nt, Human parainfluenza virus 3
ucaggaaacuguacagaga

SEQ ID NO: 4013672 - RNA, 17 nt, Human parainfluenza virus 3
ucaggaauccaaugaaa

SEQ ID NO: 4013673 - RNA, 21 nt, Human parainfluenza virus 3
ucauauauaaacgaacucaaa

SEQ ID NO: 4013674 - RNA, 23 nt, Human parainfluenza virus 3
uccaaaauuaaagguauggacaa

SEQ ID NO: 4013675 - RNA, 22 nt, Human parainfluenza virus 3
uccaagaaccacgaucacauca

SEQ ID NO: 4013676 - RNA, 14 nt, Human parainfluenza virus 3
uccacaucaaaagg

SEQ ID NO: 4013677 - RNA, 18 nt, Human parainfluenza virus 3
ucgaaauggaacgaauca

SEQ ID NO: 4013678 - RNA, 17 nt, Human parainfluenza virus 3
ucgaaccgaacagacaa

SEQ ID NO: 4013679 - RNA, 24 nt, Human parainfluenza virus 3
ucuggauccaaacccaagacacaa

SEQ ID NO: 4013680 - RNA, 14 nt, Human parainfluenza virus 3
ucuuaaccuuuauc

SEQ ID NO: 4013681 - RNA, 14 nt, Human parainfluenza virus 3
ugaaauuacaauua

SEQ ID NO: 4013682 - RNA, 20 nt, Human parainfluenza virus 3
ugaaguauuuauagcagaua

SEQ ID NO: 4013683 - RNA, 15 nt, Human parainfluenza virus 3
ugacaaaagaauuaa

SEQ ID NO: 4013684 - RNA, 13 nt, Human parainfluenza virus 3
ugacaagaauaua

SEQ ID NO: 4013685 - RNA, 13 nt, Human parainfluenza virus 3
ugagcccaaggau

SEQ ID NO: 4013686 - RNA, 22 nt, Human parainfluenza virus 3
ugaguuuauggagauuacagaa

SEQ ID NO: 4013687 - RNA, 14 nt, Human parainfluenza virus 3
ugauuacagugaua

SEQ ID NO: 4013688 - RNA, 14 nt, Human parainfluenza virus 3
ugcaaguuaaauca

SEQ ID NO: 4013689 - RNA, 20 nt, Human parainfluenza virus 3
ugcuaaaaacuaucaaauca

SEQ ID NO: 4013690 - RNA, 18 nt, Human parainfluenza virus 3
ugcuguucgaugccaaca

SEQ ID NO: 4013691 - RNA, 18 nt, Human parainfluenza virus 3
uggaacgaaucaaagaca

SEQ ID NO: 4013692 - RNA, 14 nt, Human parainfluenza virus 3
ugguauuaacagua

SEQ ID NO: 4013693 - RNA, 19 nt, Human parainfluenza virus 3
uuaaaaauaaaaaucccaa

SEQ ID NO: 4013694 - RNA, 13 nt, Human parainfluenza virus 3
aaaacauguaaua

SEQ ID NO: 4013695 - RNA, 21 nt, Human parainfluenza virus 3
aaaaccuuuaaauccagauga

SEQ ID NO: 4013696 - RNA, 15 nt, Human parainfluenza virus 3
aaaauaggcagaaug

SEQ ID NO: 4013697 - RNA, 23 nt, Human parainfluenza virus 3
aaaauuaacacagauacaaaaug

SEQ ID NO: 4013698 - RNA, 14 nt, Human parainfluenza virus 3
aaaauuacaaucua

SEQ ID NO: 4013699 - RNA, 22 nt, Human parainfluenza virus 3
aaaauuagccucaaaaaaugau

SEQ ID NO: 4013700 - RNA, 17 nt, Human parainfluenza virus 3
aaacaaaaaguacagaa

SEQ ID NO: 4013701 - RNA, 12 nt, Human parainfluenza virus 3
aaacagaacacu

SEQ ID NO: 4013702 - RNA, 20 nt, Human parainfluenza virus 3
aaacucaauaaauuagauaa

SEQ ID NO: 4013703 - RNA, 16 nt, Human parainfluenza virus 3
aaagggcagaagaaaa

SEQ ID NO: 4013704 - RNA, 18 nt, Human parainfluenza virus 3
aaagggggaaaagggaaa

SEQ ID NO: 4013705 - RNA, 13 nt, Human parainfluenza virus 3
aaaucaaacaaug

SEQ ID NO: 4013706 - RNA, 15 nt, Human parainfluenza virus 3
aaauggaaaggaaag

SEQ ID NO: 4013707 - RNA, 18 nt, Human parainfluenza virus 3
aacauccaauaaaugaga

SEQ ID NO: 4013708 - RNA, 15 nt, Human parainfluenza virus 3
aaccauugcucuggg

SEQ ID NO: 4013709 - RNA, 17 nt, Human parainfluenza virus 3
aacgaacucaaacauug

SEQ ID NO: 4013710 - RNA, 15 nt, Human parainfluenza virus 3
aacuuauacaaaaga

SEQ ID NO: 4013711 - RNA, 13 nt, Human parainfluenza virus 3
aagaaaaacaugu

SEQ ID NO: 4013712 - RNA, 16 nt, Human parainfluenza virus 3
aagaacccaauagaca

SEQ ID NO: 4013713 - RNA, 17 nt, Human parainfluenza virus 3
aagaagcuuggaaucua

SEQ ID NO: 4013714 - RNA, 15 nt, Human parainfluenza virus 3
aagaaucaauccgaa

SEQ ID NO: 4013715 - RNA, 16 nt, Human parainfluenza virus 3
aagacacaaaagacaa

SEQ ID NO: 4013716 - RNA, 22 nt, Human parainfluenza virus 3
aagacugguuuaagaaaucaaa

SEQ ID NO: 4013717 - RNA, 12 nt, Human parainfluenza virus 3
aagauaucacaa

SEQ ID NO: 4013718 - RNA, 16 nt, Human parainfluenza virus 3
aagauuacagaaagau

SEQ ID NO: 4013719 - RNA, 22 nt, Human parainfluenza virus 3
aagcaaaauaggagaaaucaaa

SEQ ID NO: 4013720 - RNA, 18 nt, Human parainfluenza virus 3
aagcagaucuaaagaaaa

SEQ ID NO: 4013721 - RNA, 17 nt, Human parainfluenza virus 3
aagccgaagcaaauaag

SEQ ID NO: 4013722 - RNA, 20 nt, Human parainfluenza virus 3
aauaagggauaaucaaaaac

SEQ ID NO: 4013723 - RNA, 16 nt, Human parainfluenza virus 3
aauacccaaaaaagug

SEQ ID NO: 4013724 - RNA, 15 nt, Human parainfluenza virus 3
aauagauaucacaaa

SEQ ID NO: 4013725 - RNA, 13 nt, Human parainfluenza virus 3
aauauacaaauaa

SEQ ID NO: 4013726 - RNA, 14 nt, Human parainfluenza virus 3
aauauaggaaaauu

SEQ ID NO: 4013727 - RNA, 17 nt, Human parainfluenza virus 3
aauauauauauaccaag

SEQ ID NO: 4013728 - RNA, 16 nt, Human parainfluenza virus 3
aaucaaagagaacaac

SEQ ID NO: 4013729 - RNA, 14 nt, Human parainfluenza virus 3
aauccaccaaaaca

SEQ ID NO: 4013730 - RNA, 15 nt, Human parainfluenza virus 3
aaucgauuagggaau

SEQ ID NO: 4013731 - RNA, 22 nt, Human parainfluenza virus 3
aaucuaucaacacacacaaaau

SEQ ID NO: 4013732 - RNA, 16 nt, Human parainfluenza virus 3
aaucucucacaaagca

SEQ ID NO: 4013733 - RNA, 21 nt, Human parainfluenza virus 3
aaucugaucuauuaaaaauaa

SEQ ID NO: 4013734 - RNA, 18 nt, Human parainfluenza virus 3
aauggaugaaucacauag

SEQ ID NO: 4013735 - RNA, 17 nt, Human parainfluenza virus 3
aauuaaguauuacagaa

SEQ ID NO: 4013736 - RNA, 15 nt, Human parainfluenza virus 3
aauuacaauuagaaa

SEQ ID NO: 4013737 - RNA, 22 nt, Human parainfluenza virus 3
aauuacucuauugcagaaucuu

SEQ ID NO: 4013738 - RNA, 14 nt, Human parainfluenza virus 3
aauuagaaaugaua

SEQ ID NO: 4013739 - RNA, 17 nt, Human parainfluenza virus 3
aauuagauaaaagacaa

SEQ ID NO: 4013740 - RNA, 21 nt, Human parainfluenza virus 3
aauuagccucaaaaaaugaug

SEQ ID NO: 4013741 - RNA, 14 nt, Human parainfluenza virus 3
aauuauauaccaau

SEQ ID NO: 4013742 - RNA, 18 nt, Human parainfluenza virus 3
aauuuauaugaaagauaa

SEQ ID NO: 4013743 - RNA, 15 nt, Human parainfluenza virus 3
acaaacaaagcagug

SEQ ID NO: 4013744 - RNA, 11 nt, Human parainfluenza virus 3
acaaacacaac

SEQ ID NO: 4013745 - RNA, 20 nt, Human parainfluenza virus 3
acaacagaacaaaguagaaa

SEQ ID NO: 4013746 - RNA, 18 nt, Human parainfluenza virus 3
acaaguuuuaucagagac

SEQ ID NO: 4013747 - RNA, 18 nt, Human parainfluenza virus 3
acaauaaagauauaucuu

SEQ ID NO: 4013748 - RNA, 20 nt, Human parainfluenza virus 3
acaauggaacuaauaaucuc

SEQ ID NO: 4013749 - RNA, 15 nt, Human parainfluenza virus 3
acaauuagaaaugau

SEQ ID NO: 4013750 - RNA, 16 nt, Human parainfluenza virus 3
acacaaaagacaaaug

SEQ ID NO: 4013751 - RNA, 18 nt, Human parainfluenza virus 3
acacaaaaucaagcagaa

SEQ ID NO: 4013752 - RNA, 22 nt, Human parainfluenza virus 3
acacaagggauugacaagaaua

SEQ ID NO: 4013753 - RNA, 16 nt, Human parainfluenza virus 3
acacaaucaacacaag

SEQ ID NO: 4013754 - RNA, 19 nt, Human parainfluenza virus 3
acacacaaaaucaagcaga

SEQ ID NO: 4013755 - RNA, 19 nt, Human parainfluenza virus 3
acacagauacaaaaugaaa

SEQ ID NO: 4013756 - RNA, 21 nt, Human parainfluenza virus 3
acaccaagaagaugacaaaag

SEQ ID NO: 4013757 - RNA, 15 nt, Human parainfluenza virus 3
acagaaaaucgagaa

SEQ ID NO: 4013758 - RNA, 18 nt, Human parainfluenza virus 3
acagaaaaucgagaaaau

SEQ ID NO: 4013759 - RNA, 22 nt, Human parainfluenza virus 3
acagaacaaaguagaaacagug

SEQ ID NO: 4013760 - RNA, 16 nt, Human parainfluenza virus 3
acagaagcaaaagaua

SEQ ID NO: 4013761 - RNA, 14 nt, Human parainfluenza virus 3
acagauacaaaaug

SEQ ID NO: 4013762 - RNA, 19 nt, Human parainfluenza virus 3
acaucaaaagggcagaaga

SEQ ID NO: 4013763 - RNA, 20 nt, Human parainfluenza virus 3
acauucauguccaaauggau

SEQ ID NO: 4013764 - RNA, 21 nt, Human parainfluenza virus 3
accaaaaaaucugaucuauua

SEQ ID NO: 4013765 - RNA, 11 nt, Human parainfluenza virus 3
accaaaaugaa

SEQ ID NO: 4013766 - RNA, 15 nt, Human parainfluenza virus 3
accaagcagaguucu

SEQ ID NO: 4013767 - RNA, 11 nt, Human parainfluenza virus 3
accaucuauca

SEQ ID NO: 4013768 - RNA, 17 nt, Human parainfluenza virus 3
accaucuaucaaccaaa

SEQ ID NO: 4013769 - RNA, 15 nt, Human parainfluenza virus 3
accgaacaaacagac

SEQ ID NO: 4013770 - RNA, 18 nt, Human parainfluenza virus 3
accuuuaucuuugagccc

SEQ ID NO: 4013771 - RNA, 21 nt, Human parainfluenza virus 3
acgacaccgaacaaacagaca

SEQ ID NO: 4013772 - RNA, 15 nt, Human parainfluenza virus 3
acuaaugaaaaauag

SEQ ID NO: 4013773 - RNA, 13 nt, Human parainfluenza virus 3
acucaaagucaau

SEQ ID NO: 4013774 - RNA, 20 nt, Human parainfluenza virus 3
acuuauaaaucagauaaaug

SEQ ID NO: 4013775 - RNA, 18 nt, Human parainfluenza virus 3
acuuucaacauaaaugac

SEQ ID NO: 4013776 - RNA, 21 nt, Human parainfluenza virus 3
agaaaaagagauuaaacaaga

SEQ ID NO: 4013777 - RNA, 19 nt, Human parainfluenza virus 3
agaaagaccaaaaugaauc

SEQ ID NO: 4013778 - RNA, 15 nt, Human parainfluenza virus 3
agaaauaaauaauga

SEQ ID NO: 4013779 - RNA, 15 nt, Human parainfluenza virus 3
agaaaucaaaagaua

SEQ ID NO: 4013780 - RNA, 15 nt, Human parainfluenza virus 3
agaacaccaaaacaa

SEQ ID NO: 4013781 - RNA, 21 nt, Human parainfluenza virus 3
agaacauauagucaaaugacu

SEQ ID NO: 4013782 - RNA, 17 nt, Human parainfluenza virus 3
agaagugagaagaacag

SEQ ID NO: 4013783 - RNA, 16 nt, Human parainfluenza virus 3
agacaaaaaguaagaa

SEQ ID NO: 4013784 - RNA, 17 nt, Human parainfluenza virus 3
agacaaauggaaaggaa

SEQ ID NO: 4013785 - RNA, 17 nt, Human parainfluenza virus 3
agacaauggacaaaagg

SEQ ID NO: 4013786 - RNA, 21 nt, Human parainfluenza virus 3
agagagacugcaaucaggcau

SEQ ID NO: 4013787 - RNA, 21 nt, Human parainfluenza virus 3
agagauuccaaaaagcugcag

SEQ ID NO: 4013788 - RNA, 22 nt, Human parainfluenza virus 3
agaguauccaugaucaaaacaa

SEQ ID NO: 4013789 - RNA, 19 nt, Human parainfluenza virus 3
agauacugacaaccagaua

SEQ ID NO: 4013790 - RNA, 13 nt, Human parainfluenza virus 3
agauagaacauau

SEQ ID NO: 4013791 - RNA, 18 nt, Human parainfluenza virus 3
agauugauagaaaaucaa

SEQ ID NO: 4013792 - RNA, 19 nt, Human parainfluenza virus 3
agauuuauaucaagacaaa

SEQ ID NO: 4013793 - RNA, 14 nt, Human parainfluenza virus 3
agcaaucaaaucag

SEQ ID NO: 4013794 - RNA, 18 nt, Human parainfluenza virus 3
agcaaucagggacacaaa

SEQ ID NO: 4013795 - RNA, 21 nt, Human parainfluenza virus 3
agcaaucagggacacaaacaa

SEQ ID NO: 4013796 - RNA, 17 nt, Human parainfluenza virus 3
agcagaugucaaagaau

SEQ ID NO: 4013797 - RNA, 23 nt, Human parainfluenza virus 3
aucacagcggcgguugcucuggu

SEQ ID NO: 4013798 - RNA, 23 nt, Human parainfluenza virus 3
aucacauagaagauugauagaaa

SEQ ID NO: 4013799 - RNA, 20 nt, Human parainfluenza virus 3
aucacgucauuaauuucaaa

SEQ ID NO: 4013800 - RNA, 22 nt, Human parainfluenza virus 3
aucauauauaaacgaacucaaa

SEQ ID NO: 4013801 - RNA, 17 nt, Human parainfluenza virus 3
aucaucaggaacacaau

SEQ ID NO: 4013802 - RNA, 14 nt, Human parainfluenza virus 3
aucucaaaaacaac

SEQ ID NO: 4013803 - RNA, 22 nt, Human parainfluenza virus 3
aucucggauugaucaagagaaa

SEQ ID NO: 4013804 - RNA, 16 nt, Human parainfluenza virus 3
aucugcaacacaacug

SEQ ID NO: 4013805 - RNA, 21 nt, Human parainfluenza virus 3
aucugcagguacauaucaaaa

SEQ ID NO: 4013806 - RNA, 15 nt, Human parainfluenza virus 3
aucuuaaccuuuauc

SEQ ID NO: 4013807 - RNA, 19 nt, Human parainfluenza virus 3
aucuuucugccaaauagau

SEQ ID NO: 4013808 - RNA, 19 nt, Human parainfluenza virus 3
augaguuuauggagauuac

SEQ ID NO: 4013809 - RNA, 18 nt, Human parainfluenza virus 3
augaucaaaacaaaauug

SEQ ID NO: 4013810 - RNA, 14 nt, Human parainfluenza virus 3
augccaacaaaguu

SEQ ID NO: 4013811 - RNA, 21 nt, Human parainfluenza virus 3
auguauauugagaaacaauua

SEQ ID NO: 4013812 - RNA, 19 nt, Human parainfluenza virus 3
augucggaucuuaggaaau

SEQ ID NO: 4013813 - RNA, 13 nt, Human parainfluenza virus 3
auuaaagaauaaa

SEQ ID NO: 4013814 - RNA, 12 nt, Human parainfluenza virus 3
auuaacacagau

SEQ ID NO: 4013815 - RNA, 12 nt, Human parainfluenza virus 3
auuaacaguaaa

SEQ ID NO: 4013816 - RNA, 17 nt, Human parainfluenza virus 3
auuaacaguaaagugac

SEQ ID NO: 4013817 - RNA, 18 nt, Human parainfluenza virus 3
auuaacgaccauaucaau

SEQ ID NO: 4013818 - RNA, 17 nt, Human parainfluenza virus 3
auuaauaauauaucaaa

SEQ ID NO: 4013819 - RNA, 16 nt, Human parainfluenza virus 3
auuacaaccauaauua

SEQ ID NO: 4013820 - RNA, 17 nt, Human parainfluenza virus 3
auuacaauuagaaauga

SEQ ID NO: 4013821 - RNA, 14 nt, Human parainfluenza virus 3
auuacugauuacag

SEQ ID NO: 4013822 - RNA, 13 nt, Human parainfluenza virus 3
auuauaaaugauc

SEQ ID NO: 4013823 - RNA, 12 nt, Human parainfluenza virus 3
auuauaccagaa

SEQ ID NO: 4013824 - RNA, 16 nt, Human parainfluenza virus 3
auucaauccacaucaa

SEQ ID NO: 4013825 - RNA, 21 nt, Human parainfluenza virus 3
auugaaagaagaaaagaucaa

SEQ ID NO: 4013826 - RNA, 22 nt, Human parainfluenza virus 3
auuguuuucauauaguagaaau

SEQ ID NO: 4013827 - RNA, 18 nt, Human parainfluenza virus 3
auuuaauaaauucauaga

SEQ ID NO: 4013828 - RNA, 17 nt, Human parainfluenza virus 3
caaaacaacaaaaccaa

SEQ ID NO: 4013829 - RNA, 23 nt, Human parainfluenza virus 3
caaaacagggguucagacugauu

SEQ ID NO: 4013830 - RNA, 15 nt, Human parainfluenza virus 3
caaagaauaacacau

SEQ ID NO: 4013831 - RNA, 14 nt, Human parainfluenza virus 3
caaaggauauuguu

SEQ ID NO: 4013832 - RNA, 14 nt, Human parainfluenza virus 3
caacaagacuaaua

SEQ ID NO: 4013833 - RNA, 22 nt, Human parainfluenza virus 3
caacaagacuaauacccaaaaa

SEQ ID NO: 4013834 - RNA, 20 nt, Human parainfluenza virus 3
caacagaaacaagugagaaa

SEQ ID NO: 4013835 - RNA, 14 nt, Human parainfluenza virus 3
caacagaagcaaaa

SEQ ID NO: 4013836 - RNA, 17 nt, Human parainfluenza virus 3
caacaucagacuacaga

SEQ ID NO: 4013837 - RNA, 20 nt, Human parainfluenza virus 3
caaccaaaaaucaaaccaac

SEQ ID NO: 4013838 - RNA, 21 nt, Human parainfluenza virus 3
caacucccaaaguugaugaaa

SEQ ID NO: 4013839 - RNA, 18 nt, Human parainfluenza virus 3
caacucccccaacaacaa

SEQ ID NO: 4013840 - RNA, 17 nt, Human parainfluenza virus 3
caacuuauaaaucagau

SEQ ID NO: 4013841 - RNA, 21 nt, Human parainfluenza virus 3
caagaaagaagggacaaaaaa

SEQ ID NO: 4013842 - RNA, 14 nt, Human parainfluenza virus 3
caagugagaaagau

SEQ ID NO: 4013843 - RNA, 15 nt, Human parainfluenza virus 3
caauacaaacaaaga

SEQ ID NO: 4013844 - RNA, 12 nt, Human parainfluenza virus 3
caauacaccaag

SEQ ID NO: 4013845 - RNA, 23 nt, Human parainfluenza virus 3
caauccaacucuacucauacaau

SEQ ID NO: 4013846 - RNA, 18 nt, Human parainfluenza virus 3
caaugagagaguauccau

SEQ ID NO: 4013847 - RNA, 19 nt, Human parainfluenza virus 3
caauggacaacgacacaaa

SEQ ID NO: 4013848 - RNA, 18 nt, Human parainfluenza virus 3
caauuaggaauaauugau

SEQ ID NO: 4013849 - RNA, 14 nt, Human parainfluenza virus 3
cacaaaaucaagca

SEQ ID NO: 4013850 - RNA, 21 nt, Human parainfluenza virus 3
cacagaucgaaccgaacagac

SEQ ID NO: 4013851 - RNA, 22 nt, Human parainfluenza virus 3
caccauugauaacaacacagau

SEQ ID NO: 4013852 - RNA, 19 nt, Human parainfluenza virus 3
cacgaauguacaacagaag

SEQ ID NO: 4013853 - RNA, 13 nt, Human parainfluenza virus 3
cacuagacagaaa

SEQ ID NO: 4013854 - RNA, 15 nt, Human parainfluenza virus 3
cagaauuaacaaaca

SEQ ID NO: 4013855 - RNA, 14 nt, Human parainfluenza virus 3
cagaauuauauacc

SEQ ID NO: 4013856 - RNA, 22 nt, Human parainfluenza virus 3
cagagaggaccugggagaagaa

SEQ ID NO: 4013857 - RNA, 16 nt, Human parainfluenza virus 3
cagaucaagcaauaca

SEQ ID NO: 4013858 - RNA, 15 nt, Human parainfluenza virus 3
cagaugauauaacau

SEQ ID NO: 4013859 - RNA, 14 nt, Human parainfluenza virus 3
cagcaacugaaaga

SEQ ID NO: 4013860 - RNA, 12 nt, Human parainfluenza virus 3
cagcaaucagac

SEQ ID NO: 4013861 - RNA, 15 nt, Human parainfluenza virus 3
cagccuuaugauaug

SEQ ID NO: 4013862 - RNA, 16 nt, Human parainfluenza virus 3
cauccaauaaaugaga

SEQ ID NO: 4013863 - RNA, 19 nt, Human parainfluenza virus 3
cauguaauauauauauacc

SEQ ID NO: 4013864 - RNA, 16 nt, Human parainfluenza virus 3
ccaagacacaaaagac

SEQ ID NO: 4013865 - RNA, 22 nt, Human parainfluenza virus 3
ccaagauuaugucaacaaagaa

SEQ ID NO: 4013866 - RNA, 18 nt, Human parainfluenza virus 3
ccaagcagaguucuucuc

SEQ ID NO: 4013867 - RNA, 20 nt, Human parainfluenza virus 3
ccaaucagaaaucuaagaaa

SEQ ID NO: 4013868 - RNA, 16 nt, Human parainfluenza virus 3
ccaaugauccaacaaa

SEQ ID NO: 4013869 - RNA, 12 nt, Human parainfluenza virus 3
ccagaacaaaac

SEQ ID NO: 4013870 - RNA, 12 nt, Human parainfluenza virus 3
ccagccauauca

SEQ ID NO: 4013871 - RNA, 13 nt, Human parainfluenza virus 3
ccaugaucaaaac

SEQ ID NO: 4013872 - RNA, 14 nt, Human parainfluenza virus 3
ccauuuuuaaugag

SEQ ID NO: 4013873 - RNA, 16 nt, Human parainfluenza virus 3
ccucaguuagaugagg

SEQ ID NO: 4013874 - RNA, 23 nt, Human parainfluenza virus 3
ccuuuaucuuugagcccaaggau

SEQ ID NO: 4013875 - RNA, 13 nt, Human parainfluenza virus 3
cgaugccaacaaa

SEQ ID NO: 4013876 - RNA, 16 nt, Human parainfluenza virus 3
cuaauaguagcaauca

SEQ ID NO: 4013877 - RNA, 14 nt, Human parainfluenza virus 3
cuaaugaaaaauag

SEQ ID NO: 4013878 - RNA, 20 nt, Human parainfluenza virus 3
cuauugaucaggaaacugua

SEQ ID NO: 4013879 - RNA, 12 nt, Human parainfluenza virus 3
cucaaaaacaac

SEQ ID NO: 4013880 - RNA, 16 nt, Human parainfluenza virus 3
cucacaaagcacaaaa

SEQ ID NO: 4013881 - RNA, 16 nt, Human parainfluenza virus 3
cucuacccaacacaau

SEQ ID NO: 4013882 - RNA, 12 nt, Human parainfluenza virus 3
cucuuugcaaaa

SEQ ID NO: 4013883 - RNA, 20 nt, Human parainfluenza virus 3
cugauacaagaucaauaagu

SEQ ID NO: 4013884 - RNA, 19 nt, Human parainfluenza virus 3
cuuaggauuaaagaauaaa

SEQ ID NO: 4013885 - RNA, 23 nt, Human parainfluenza virus 3
cuugcaacucaaucaauagagag

SEQ ID NO: 4013886 - RNA, 20 nt, Human parainfluenza virus 3
gaaaaaggaauaaaauuaca

SEQ ID NO: 4013887 - RNA, 17 nt, Human parainfluenza virus 3
gaaaaguucaaacacau

SEQ ID NO: 4013888 - RNA, 15 nt, Human parainfluenza virus 3
gaaauaaauaaugag

SEQ ID NO: 4013889 - RNA, 16 nt, Human parainfluenza virus 3
gaaauacuaaugaaaa

SEQ ID NO: 4013890 - RNA, 14 nt, Human parainfluenza virus 3
gaacaagaaagaag

SEQ ID NO: 4013891 - RNA, 14 nt, Human parainfluenza virus 3
gaacaccaaaacaa

SEQ ID NO: 4013892 - RNA, 19 nt, Human parainfluenza virus 3
gaacaccaaaacaacaaaa

SEQ ID NO: 4013893 - RNA, 17 nt, Human parainfluenza virus 3
gaacagacaaacacaac

SEQ ID NO: 4013894 - RNA, 13 nt, Human parainfluenza virus 3
gaagaagaaauac

SEQ ID NO: 4013895 - RNA, 21 nt, Human parainfluenza virus 3
gaagggacaaaaaaagcaaaa

SEQ ID NO: 4013896 - RNA, 13 nt, Human parainfluenza virus 3
gaaucaaagacaa

SEQ ID NO: 4013897 - RNA, 19 nt, Human parainfluenza virus 3
gacaaaaaguaagaaaaac

SEQ ID NO: 4013898 - RNA, 21 nt, Human parainfluenza virus 3
gacaaaagaggucaacaccaa

SEQ ID NO: 4013899 - RNA, 16 nt, Human parainfluenza virus 3
gacacaaaagacaaau

SEQ ID NO: 4013900 - RNA, 19 nt, Human respiratory syncytial virus
agaccgaacaaacaaaugu

SEQ ID NO: 4013901 - RNA, 15 nt, Human respiratory syncytial virus
agagacccaaaaaca

SEQ ID NO: 4013902 - RNA, 19 nt, Human respiratory syncytial virus
agauauagaaguaaccaaa

SEQ ID NO: 4013903 - RNA, 19 nt, Human respiratory syncytial virus
agaucaggucuuacagcag

SEQ ID NO: 4013904 - RNA, 21 nt, Human respiratory syncytial virus
agauggcucuuagcaaaguca

SEQ ID NO: 4013905 - RNA, 16 nt, Human respiratory syncytial virus
agcaauagaaaaaaca

SEQ ID NO: 4013906 - RNA, 13 nt, Human respiratory syncytial virus
agcagaagaacag

SEQ ID NO: 4013907 - RNA, 17 nt, Human respiratory syncytial virus
agcauauauuaugugac

SEQ ID NO: 4013908 - RNA, 22 nt, Human respiratory syncytial virus
agcauaugaaucuuaaaaaacu

SEQ ID NO: 4013909 - RNA, 21 nt, Human respiratory syncytial virus
agcauaugcagagcaacucaa

SEQ ID NO: 4013910 - RNA, 21 nt, Human respiratory syncytial virus
aggaagaaguccuugcauaug

SEQ ID NO: 4013911 - RNA, 16 nt, Human respiratory syncytial virus
aggauauagcuaacag

SEQ ID NO: 4013912 - RNA, 15 nt, Human respiratory syncytial virus
agggcaaguaaugcu

SEQ ID NO: 4013913 - RNA, 16 nt, Human respiratory syncytial virus
agguauguuauaugcu

SEQ ID NO: 4013914 - RNA, 11 nt, Human respiratory syncytial virus
aguaauuacuu

SEQ ID NO: 4013915 - RNA, 14 nt, Human respiratory syncytial virus
agucaacauggaga

SEQ ID NO: 4013916 - RNA, 15 nt, Human respiratory syncytial virus
agucagaaacacacc

SEQ ID NO: 4013917 - RNA, 14 nt, Human respiratory syncytial virus
agucauaauuacuu

SEQ ID NO: 4013918 - RNA, 21 nt, Human respiratory syncytial virus
agugucauaacaauagaauua

SEQ ID NO: 4013919 - RNA, 21 nt, Human respiratory syncytial virus
aguguccaggcagaaauggag

SEQ ID NO: 4013920 - RNA, 16 nt, Human respiratory syncytial virus
aguuauuuaaaaauua

SEQ ID NO: 4013921 - RNA, 13 nt, Human respiratory syncytial virus
auaaguggagcug

SEQ ID NO: 4013922 - RNA, 13 nt, Human respiratory syncytial virus
auaauacaaaaua

SEQ ID NO: 4013923 - RNA, 15 nt, Human respiratory syncytial virus
auacaaaauauggca

SEQ ID NO: 4013924 - RNA, 11 nt, Human respiratory syncytial virus
auacaaagaug

SEQ ID NO: 4013925 - RNA, 13 nt, Human respiratory syncytial virus
auacucucaauca

SEQ ID NO: 4013926 - RNA, 14 nt, Human respiratory syncytial virus
auacucucaaucau

SEQ ID NO: 4013927 - RNA, 20 nt, Human respiratory syncytial virus
auagaaucuagaaaauccua

SEQ ID NO: 4013928 - RNA, 22 nt, Human respiratory syncytial virus
auagcaagugguauagcuguau

SEQ ID NO: 4013929 - RNA, 20 nt, Human respiratory syncytial virus
auauaaaaacucaucaaagg

SEQ ID NO: 4013930 - RNA, 20 nt, Human respiratory syncytial virus
auauaguaacaaaaaaagaa

SEQ ID NO: 4013931 - RNA, 22 nt, Human respiratory syncytial virus
auaugaagagauaaaugaucaa

SEQ ID NO: 4013932 - RNA, 12 nt, Human respiratory syncytial virus
auauugaacaau

SEQ ID NO: 4013933 - RNA, 12 nt, Human respiratory syncytial virus
aucaaaaacaac

SEQ ID NO: 4013934 - RNA, 13 nt, Human respiratory syncytial virus
aucaaacacuaaa

SEQ ID NO: 4013935 - RNA, 19 nt, Human respiratory syncytial virus
aucaaucaaacuaugagca

SEQ ID NO: 4013936 - RNA, 16 nt, Human respiratory syncytial virus
aucauaaauucacagg

SEQ ID NO: 4013937 - RNA, 21 nt, Human respiratory syncytial virus
aucaucucugccaaucacaaa

SEQ ID NO: 4013938 - RNA, 16 nt, Human respiratory syncytial virus
aucaugaacaucuaca

SEQ ID NO: 4013939 - RNA, 22 nt, Human respiratory syncytial virus
aucauggcggguuucuagaaug

SEQ ID NO: 4013940 - RNA, 13 nt, Human respiratory syncytial virus
auccuacaaaaaa

SEQ ID NO: 4013941 - RNA, 19 nt, Human respiratory syncytial virus
aucuaauuguaauauccuc

SEQ ID NO: 4013942 - RNA, 21 nt, Human respiratory syncytial virus
aucucucaccaaagaaaucau

SEQ ID NO: 4013943 - RNA, 15 nt, Human respiratory syncytial virus
aucuguaccagcaga

SEQ ID NO: 4013944 - RNA, 16 nt, Human respiratory syncytial virus
aucuuaaaaaacuaac

SEQ ID NO: 4013945 - RNA, 14 nt, Human respiratory syncytial virus
augaacuauacaau

SEQ ID NO: 4013946 - RNA, 20 nt, Human respiratory syncytial virus
augaaguguuugaaaaacac

SEQ ID NO: 4013947 - RNA, 19 nt, Human respiratory syncytial virus
augagcacuacaaaugaca

SEQ ID NO: 4013948 - RNA, 17 nt, Human respiratory syncytial virus
augauacauuaaauaag

SEQ ID NO: 4013949 - RNA, 15 nt, Human respiratory syncytial virus
augcuauuaaucacu

SEQ ID NO: 4013950 - RNA, 15 nt, Human respiratory syncytial virus
augggaucaaaaaca

SEQ ID NO: 4013951 - RNA, 15 nt, Human respiratory syncytial virus
augugcaaaaacacc

SEQ ID NO: 4013952 - RNA, 18 nt, Human respiratory syncytial virus
auguuugcuuaauuacuu

SEQ ID NO: 4013953 - RNA, 14 nt, Human respiratory syncytial virus
auuaaugaucacgg

SEQ ID NO: 4013954 - RNA, 13 nt, Human respiratory syncytial virus
auuaugacaucaa

SEQ ID NO: 4013955 - RNA, 15 nt, Human respiratory syncytial virus
auuaugauugcaaua

SEQ ID NO: 4013956 - RNA, 13 nt, Human respiratory syncytial virus
auucacaaaauua

SEQ ID NO: 4013957 - RNA, 15 nt, Human respiratory syncytial virus
auucgaaguauuaac

SEQ ID NO: 4013958 - RNA, 20 nt, Human respiratory syncytial virus
auugcaaagccaaaaacaca

SEQ ID NO: 4013959 - RNA, 20 nt, Human respiratory syncytial virus
auuuaaaaauuaacauaaug

SEQ ID NO: 4013960 - RNA, 15 nt, Human respiratory syncytial virus
auuuacaacacaacg

SEQ ID NO: 4013961 - RNA, 12 nt, Human respiratory syncytial virus
auuucauggaga

SEQ ID NO: 4013962 - RNA, 12 nt, Human respiratory syncytial virus
caaaaaaaccaa

SEQ ID NO: 4013963 - RNA, 19 nt, Human respiratory syncytial virus
caaaaaaaugcuaaaagag

SEQ ID NO: 4013964 - RNA, 21 nt, Human respiratory syncytial virus
caaaaaauacggggcaaauaa

SEQ ID NO: 4013965 - RNA, 17 nt, Human respiratory syncytial virus
caaaaaucacucaguaa

SEQ ID NO: 4013966 - RNA, 15 nt, Human respiratory syncytial virus
caaaacacaccagcu

SEQ ID NO: 4013967 - RNA, 13 nt, Human respiratory syncytial virus
caaaauuaaauaa

SEQ ID NO: 4013968 - RNA, 13 nt, Human respiratory syncytial virus
caaacaacaaugc

SEQ ID NO: 4013969 - RNA, 14 nt, Human respiratory syncytial virus
caaacccacaaaca

SEQ ID NO: 4013970 - RNA, 19 nt, Human respiratory syncytial virus
caaacuaugagcacuacaa

SEQ ID NO: 4013971 - RNA, 17 nt, Human respiratory syncytial virus
caaagaaacaauagaaa

SEQ ID NO: 4013972 - RNA, 21 nt, Human respiratory syncytial virus
caaagauccuaagaagaaaga

SEQ ID NO: 4013973 - RNA, 19 nt, Human respiratory syncytial virus
caaagucaaguuaaaugau

SEQ ID NO: 4013974 - RNA, 16 nt, Human respiratory syncytial virus
caaauauaucaagcca

SEQ ID NO: 4013975 - RNA, 17 nt, Human respiratory syncytial virus
caaauauggaaacauac

SEQ ID NO: 4013976 - RNA, 15 nt, Human respiratory syncytial virus
caaaucuguaaaaaa

SEQ ID NO: 4013977 - RNA, 15 nt, Human respiratory syncytial virus
caaaugacaacacua

SEQ ID NO: 4013978 - RNA, 16 nt, Human respiratory syncytial virus
caacacuacuaugcaa

SEQ ID NO: 4013979 - RNA, 14 nt, Human respiratory syncytial virus
caacauaacaaaac

SEQ ID NO: 4013980 - RNA, 16 nt, Human respiratory syncytial virus
caacaucaucaaucca

SEQ ID NO: 4013981 - RNA, 17 nt, Human respiratory syncytial virus
caagaaauacacugaau

SEQ ID NO: 4013982 - RNA, 20 nt, Human respiratory syncytial virus
caagaaucaacgcacugcca

SEQ ID NO: 4013983 - RNA, 16 nt, Human respiratory syncytial virus
caagccgagcacaaaa

SEQ ID NO: 4013984 - RNA, 19 nt, Human respiratory syncytial virus
caagccgagcacaaaacca

SEQ ID NO: 4013985 - RNA, 18 nt, Human respiratory syncytial virus
caagcuauuccucaaaca

SEQ ID NO: 4013986 - RNA, 23 nt, Human respiratory syncytial virus
caauaauaacaucucucaccaaa

SEQ ID NO: 4013987 - RNA, 14 nt, Human respiratory syncytial virus
caauaccaagcaac

SEQ ID NO: 4013988 - RNA, 23 nt, Human respiratory syncytial virus
caauaccaagcaacaaaccaaag

SEQ ID NO: 4013989 - RNA, 13 nt, Human respiratory syncytial virus
caaucaaaccacu

SEQ ID NO: 4013990 - RNA, 23 nt, Human respiratory syncytial virus
caaucaaccaacugauccaucag

SEQ ID NO: 4013991 - RNA, 13 nt, Human respiratory syncytial virus
cacaaacaaacca

SEQ ID NO: 4013992 - RNA, 20 nt, Human respiratory syncytial virus
cacaacagcacaaaccaaag

SEQ ID NO: 4013993 - RNA, 19 nt, Human respiratory syncytial virus
cacagaaguugggaggaga

SEQ ID NO: 4013994 - RNA, 20 nt, Human respiratory syncytial virus
caccaacccaacaaaaaaac

SEQ ID NO: 4013995 - RNA, 16 nt, Human respiratory syncytial virus
caccaauccacacaaa

SEQ ID NO: 4013996 - RNA, 16 nt, Human respiratory syncytial virus
cacccccgaaaacaca

SEQ ID NO: 4013997 - RNA, 17 nt, Human respiratory syncytial virus
cacguuuuucaaucaaa

SEQ ID NO: 4013998 - RNA, 24 nt, Human respiratory syncytial virus
cacuacaaaugacaacacuacuau

SEQ ID NO: 4013999 - RNA, 16 nt, Human respiratory syncytial virus
cacuaccagccacuau

SEQ ID NO: 4014000 - RNA, 17 nt, Human respiratory syncytial virus
cacucccaauuaugaug

SEQ ID NO: 4014001 - RNA, 15 nt, Human respiratory syncytial virus
cagcaaauacacuau

SEQ ID NO: 4014002 - RNA, 20 nt, Human respiratory syncytial virus
cagcaaucaacaacaucaau

SEQ ID NO: 4014003 - RNA, 13 nt, Human respiratory syncytial virus
cagcugcugucau

SEQ ID NO: 4014004 - RNA, 14 nt, Human respiratory syncytial virus
caggacucuagaaa

SEQ ID NO: 4014005 - RNA, 17 nt, Human respiratory syncytial virus
caggacucuagaaaaga

SEQ ID NO: 4014006 - RNA, 15 nt, Human respiratory syncytial virus
caggcagaaauggag

SEQ ID NO: 4014007 - RNA, 15 nt, Human respiratory syncytial virus
cagguuaggaaggga

SEQ ID NO: 4014008 - RNA, 11 nt, Human respiratory syncytial virus
caguaaaucaa

SEQ ID NO: 4014009 - RNA, 21 nt, Human respiratory syncytial virus
caguaauuaggagggcaaaca

SEQ ID NO: 4014010 - RNA, 20 nt, Human respiratory syncytial virus
caguaccccagaaaccaaag

SEQ ID NO: 4014011 - RNA, 19 nt, Human respiratory syncytial virus
cauccagcaaauacacuau

SEQ ID NO: 4014012 - RNA, 16 nt, Human respiratory syncytial virus
caucuguaccagcaga

SEQ ID NO: 4014013 - RNA, 17 nt, Human respiratory syncytial virus
cauuggggcaaaugcaa

SEQ ID NO: 4014014 - RNA, 20 nt, Human respiratory syncytial virus
cauuuggauaaccaccagcg

SEQ ID NO: 4014015 - RNA, 13 nt, Human respiratory syncytial virus
ccaaaaaaaccaa

SEQ ID NO: 4014016 - RNA, 11 nt, Human respiratory syncytial virus
ccaaaccaaaa

SEQ ID NO: 4014017 - RNA, 21 nt, Human respiratory syncytial virus
ccaaaccaagcuauuccucaa

SEQ ID NO: 4014018 - RNA, 15 nt, Human respiratory syncytial virus
ccaacccaacaaaaa

SEQ ID NO: 4014019 - RNA, 15 nt, Human respiratory syncytial virus
ccaacccaaccaaac

SEQ ID NO: 4014020 - RNA, 9 nt, Human respiratory syncytial virus
ccacaaaca

SEQ ID NO: 4014021 - RNA, 18 nt, Human respiratory syncytial virus
ccacaaacaaaccaacca

SEQ ID NO: 4014022 - RNA, 14 nt, Human respiratory syncytial virus
ccacagaaagagac

SEQ ID NO: 4014023 - RNA, 16 nt, Human respiratory syncytial virus
ccgagcacaaaaccac

SEQ ID NO: 4014024 - RNA, 23 nt, Human respiratory syncytial virus
ccgucagcggaaccaccaaccaa

SEQ ID NO: 4014025 - RNA, 13 nt, Human respiratory syncytial virus
ccuaucaagcaag

SEQ ID NO: 4014026 - RNA, 17 nt, Human respiratory syncytial virus
cguaaauuccaacaaaa

SEQ ID NO: 4014027 - RNA, 19 nt, Human respiratory syncytial virus
cuaaacaaacuauguggua

SEQ ID NO: 4014028 - RNA, 16 nt, Human respiratory syncytial virus
cuaggacagaugcauc

SEQ ID NO: 4014029 - RNA, 16 nt, Human respiratory syncytial virus
cuaggcaaugcagcag

SEQ ID NO: 4014030 - RNA, 18 nt, Human respiratory syncytial virus
cuaguaagcuucaaagaa

SEQ ID NO: 4014031 - RNA, 17 nt, Human respiratory syncytial virus
cuaugagcacuacaaau

SEQ ID NO: 4014032 - RNA, 14 nt, Human respiratory syncytial virus
cuaugcaccaccaa

SEQ ID NO: 4014033 - RNA, 16 nt, Human respiratory syncytial virus
cucaaacuacacacua

SEQ ID NO: 4014034 - RNA, 18 nt, Human respiratory syncytial virus
cucaaucaucuaauugua

SEQ ID NO: 4014035 - RNA, 13 nt, Human respiratory syncytial virus
cucuuagcaaagu

SEQ ID NO: 4014036 - RNA, 15 nt, Human respiratory syncytial virus
cugaacucacuagaa

SEQ ID NO: 4014037 - RNA, 19 nt, Human respiratory syncytial virus
cugaagauauauauacaau

SEQ ID NO: 4014038 - RNA, 14 nt, Human respiratory syncytial virus
cugaagaugcaaau

SEQ ID NO: 4014039 - RNA, 22 nt, Human respiratory syncytial virus
cugaaucauuucuucacaucau

SEQ ID NO: 4014040 - RNA, 17 nt, Human respiratory syncytial virus
cugccagaccgaacaaa

SEQ ID NO: 4014041 - RNA, 19 nt, Human respiratory syncytial virus
cugcugucauccagcaaau

SEQ ID NO: 4014042 - RNA, 22 nt, Human respiratory syncytial virus
cuggaaauuacacacaucaccu

SEQ ID NO: 4014043 - RNA, 22 nt, Human respiratory syncytial virus
cuuaacucauaguuacauaaaa

SEQ ID NO: 4014044 - RNA, 13 nt, Human respiratory syncytial virus
cuuacagcaguaa

SEQ ID NO: 4014045 - RNA, 19 nt, Human respiratory syncytial virus
cuuaccaugaagacauuca

SEQ ID NO: 4014046 - RNA, 17 nt, Human respiratory syncytial virus
gaaagauagcauaauau

SEQ ID NO: 4014047 - RNA, 20 nt, Human respiratory syncytial virus
gaaaucaucacacacaaauu

SEQ ID NO: 4014048 - RNA, 15 nt, Human respiratory syncytial virus
gaagaaaugauagaa

SEQ ID NO: 4014049 - RNA, 20 nt, Human respiratory syncytial virus
gaauuucauggagaagaugc

SEQ ID NO: 4014050 - RNA, 21 nt, Human respiratory syncytial virus
gacaagcuacauuuacauucu

SEQ ID NO: 4014051 - RNA, 13 nt, Human respiratory syncytial virus
gacacuauaaaga

SEQ ID NO: 4014052 - RNA, 14 nt, Human respiratory syncytial virus
gaccgaacaaacaa

SEQ ID NO: 4014053 - RNA, 17 nt, Human respiratory syncytial virus
gagaaguggcuccagaa

SEQ ID NO: 4014054 - RNA, 12 nt, Human respiratory syncytial virus
gagacaccagca

SEQ ID NO: 4014055 - RNA, 12 nt, Human respiratory syncytial virus
gagcaacucaaa

SEQ ID NO: 4014056 - RNA, 15 nt, Human respiratory syncytial virus
gauaacaaugaagaa

SEQ ID NO: 4014057 - RNA, 14 nt, Human respiratory syncytial virus
gaugcaaauaacaa

SEQ ID NO: 4014058 - RNA, 22 nt, Human respiratory syncytial virus
gauggcucuuagcaaagucaag

SEQ ID NO: 4014059 - RNA, 18 nt, Human respiratory syncytial virus
gauuaaauuuaaaaucua

SEQ ID NO: 4014060 - RNA, 22 nt, Human respiratory syncytial virus
gcaaauaagucaacauggagaa

SEQ ID NO: 4014061 - RNA, 21 nt, Human respiratory syncytial virus
gcaagacuuaggaaugaggaa

SEQ ID NO: 4014062 - RNA, 20 nt, Human respiratory syncytial virus
gcacugcauccaacaaaaau

SEQ ID NO: 4014063 - RNA, 21 nt, Human respiratory syncytial virus
gcacugccaggacucuagaaa

SEQ ID NO: 4014064 - RNA, 21 nt, Human respiratory syncytial virus
gcauaauaucuguuaacucaa

SEQ ID NO: 4014065 - RNA, 22 nt, Human respiratory syncytial virus
gcggaaccaccaaccaaucaau

SEQ ID NO: 4014066 - RNA, 23 nt, Human respiratory syncytial virus
gcugaucaccaaucccaaaucaa

SEQ ID NO: 4014067 - RNA, 18 nt, Human respiratory syncytial virus
gcugucauccagcaaaua

SEQ ID NO: 4014068 - RNA, 14 nt, Human respiratory syncytial virus
ggacucuagaaaag

SEQ ID NO: 4014069 - RNA, 17 nt, Human respiratory syncytial virus
ggcaugauucuccagac

SEQ ID NO: 4014070 - RNA, 14 nt, Human respiratory syncytial virus
guaacaaaaaaaga

SEQ ID NO: 4014071 - RNA, 19 nt, Human respiratory syncytial virus
guaccaaauacaagaaaua

SEQ ID NO: 4014072 - RNA, 13 nt, Human respiratory syncytial virus
guacgccaagaaa

SEQ ID NO: 4014073 - RNA, 14 nt, Human respiratory syncytial virus
guauaguuggagug

SEQ ID NO: 4014074 - RNA, 22 nt, Human respiratory syncytial virus
gucaaugaaaaaaucaaucaaa

SEQ ID NO: 4014075 - RNA, 18 nt, Human respiratory syncytial virus
gucagcggaaccaccaac

SEQ ID NO: 4014076 - RNA, 14 nt, Human respiratory syncytial virus
gucauuaacucaau

SEQ ID NO: 4014077 - RNA, 22 nt, Human respiratory syncytial virus
gucuaugaguaugcacagaagu

SEQ ID NO: 4014078 - RNA, 16 nt, Human respiratory syncytial virus
guuagaguucaaucaa

SEQ ID NO: 4014079 - RNA, 16 nt, Human respiratory syncytial virus
guucaaacaauaaaaa

SEQ ID NO: 4014080 - RNA, 22 nt, Human respiratory syncytial virus
guucaguacaauguucuagaaa

SEQ ID NO: 4014081 - RNA, 12 nt, Human respiratory syncytial virus
guucuagaaaaa

SEQ ID NO: 4014082 - RNA, 16 nt, Human respiratory syncytial virus
guuuauuuuaaaucaa

SEQ ID NO: 4014083 - RNA, 18 nt, Human respiratory syncytial virus
uaaaacuuauaaaacaag

SEQ ID NO: 4014084 - RNA, 19 nt, Human respiratory syncytial virus
uaaaaugggaaauacaucc

SEQ ID NO: 4014085 - RNA, 17 nt, Human respiratory syncytial virus
uaaauaaccaauuauua

SEQ ID NO: 4014086 - RNA, 20 nt, Human respiratory syncytial virus
uaaauguaucaauaagcaag

SEQ ID NO: 4014087 - RNA, 15 nt, Human respiratory syncytial virus
uaaauuuaaaaucua

SEQ ID NO: 4014088 - RNA, 20 nt, Human respiratory syncytial virus
uaauaaccaaauuagcagca

SEQ ID NO: 4014089 - RNA, 20 nt, Human respiratory syncytial virus
uaauacuguguauagcagca

SEQ ID NO: 4014090 - RNA, 17 nt, Human respiratory syncytial virus
uaauagguauguuauau

SEQ ID NO: 4014091 - RNA, 12 nt, Human respiratory syncytial virus
uaugcaaagauu

SEQ ID NO: 4014092 - RNA, 18 nt, Human respiratory syncytial virus
uaugcaaagauuaaugau

SEQ ID NO: 4014093 - RNA, 22 nt, Human respiratory syncytial virus
uaugcacagaaguugggaggag

SEQ ID NO: 4014094 - RNA, 17 nt, Human respiratory syncytial virus
uauuagacuuaacagca

SEQ ID NO: 4014095 - RNA, 15 nt, Human respiratory syncytial virus
uauuaugacaucaaa

SEQ ID NO: 4014096 - RNA, 21 nt, Human respiratory syncytial virus
uauuccucaaacaacaaugcu

SEQ ID NO: 4014097 - RNA, 13 nt, Human respiratory syncytial virus
ucaaaaacaacau

SEQ ID NO: 4014098 - RNA, 12 nt, Human respiratory syncytial virus
ucaaaacaacac

SEQ ID NO: 4014099 - RNA, 21 nt, Human respiratory syncytial virus
ucaacaacaucaauaaaacag

SEQ ID NO: 4014100 - RNA, 18 nt, Human respiratory syncytial virus
ucaacccauaacaaacac

SEQ ID NO: 4014101 - RNA, 12 nt, Human respiratory syncytial virus
ucacaauuauuu

SEQ ID NO: 4014102 - RNA, 23 nt, Human respiratory syncytial virus
ucagcaaauagacaaaaaaccac

SEQ ID NO: 4014103 - RNA, 12 nt, Human respiratory syncytial virus
ucagcaaucaac

SEQ ID NO: 4014104 - RNA, 18 nt, Human respiratory syncytial virus
ucagggcaaguaaugcua

SEQ ID NO: 4014105 - RNA, 22 nt, Human respiratory syncytial virus
ucauaaaagaacuugcaagcau

SEQ ID NO: 4014106 - RNA, 19 nt, Human respiratory syncytial virus
ucauccaaagauccuaaga

SEQ ID NO: 4014107 - RNA, 18 nt, Human respiratory syncytial virus
ucauccagcaaauacacu

SEQ ID NO: 4014108 - RNA, 14 nt, Human respiratory syncytial virus
ucauguuaaagcua

SEQ ID NO: 4014109 - RNA, 22 nt, Human respiratory syncytial virus
uccaaacaaccuacaaccacau

SEQ ID NO: 4014110 - RNA, 11 nt, Human respiratory syncytial virus
ucccacucaaa

SEQ ID NO: 4014111 - RNA, 12 nt, Human respiratory syncytial virus
ucgcaaaaccac

SEQ ID NO: 4014112 - RNA, 20 nt, Human respiratory syncytial virus
ucuagaaaauccuacaaaaa

SEQ ID NO: 4014113 - RNA, 21 nt, Human respiratory syncytial virus
ucucaagugugguccuaggca

SEQ ID NO: 4014114 - RNA, 18 nt, Human respiratory syncytial virus
ugaauaaaagucuaaaac

SEQ ID NO: 4014115 - RNA, 17 nt, Human respiratory syncytial virus
ugaauauaauacaaaau

SEQ ID NO: 4014116 - RNA, 16 nt, Human respiratory syncytial virus
ugacgaaauuaacaau

SEQ ID NO: 4014117 - RNA, 18 nt, Human respiratory syncytial virus
ugauaacuacaauuauua

SEQ ID NO: 4014118 - RNA, 20 nt, Human respiratory syncytial virus
ugaucaacucacucagcaau

SEQ ID NO: 4014119 - RNA, 17 nt, Human respiratory syncytial virus
ugaugcagccaaagcau

SEQ ID NO: 4014120 - RNA, 13 nt, Human respiratory syncytial virus
ugcaagcaucaac

SEQ ID NO: 4014121 - RNA, 20 nt, Human respiratory syncytial virus
ugccucuuaauccaacuucc

SEQ ID NO: 4014122 - RNA, 16 nt, Human respiratory syncytial virus
ugcuaguguccaggca

SEQ ID NO: 4014123 - RNA, 18 nt, Human respiratory syncytial virus
ugcucaauaguuaagaag

SEQ ID NO: 4014124 - RNA, 19 nt, Human respiratory syncytial virus
uggaagccauaaagaauca

SEQ ID NO: 4014125 - RNA, 18 nt, Human respiratory syncytial virus
uggagaagaugcaaauaa

SEQ ID NO: 4014126 - RNA, 18 nt, Human respiratory syncytial virus
uggggcaaauaaacucac

SEQ ID NO: 4014127 - RNA, 14 nt, Human respiratory syncytial virus
ugguaugcuauuaa

SEQ ID NO: 4014128 - RNA, 14 nt, Human respiratory syncytial virus
uuaaaaauaaaagu

SEQ ID NO: 4014129 - RNA, 12 nt, Human respiratory syncytial virus
uuaaagaugcug

SEQ ID NO: 4014130 - RNA, 19 nt, Human respiratory syncytial virus
uuaagcccaacaauaauuc

SEQ ID NO: 4014131 - RNA, 22 nt, Human respiratory syncytial virus
uuaagcccaacaauaauucagg

SEQ ID NO: 4014132 - RNA, 13 nt, Human respiratory syncytial virus
uuacaacacaacg

SEQ ID NO: 4014133 - RNA, 18 nt, Human respiratory syncytial virus
uuacacuaauacauauga

SEQ ID NO: 4014134 - RNA, 12 nt, Human respiratory syncytial virus
uucaacaucaca

SEQ ID NO: 4014135 - RNA, 18 nt, Human respiratory syncytial virus
uucagccacaacaucacc

SEQ ID NO: 4014136 - RNA, 15 nt, Human respiratory syncytial virus
uucaucacacaaacc

SEQ ID NO: 4014137 - RNA, 23 nt, Human respiratory syncytial virus
uugacacucccaauuaugaugug

SEQ ID NO: 4014138 - RNA, 20 nt, Human respiratory syncytial virus
uuggucaaauuuagaugcua

SEQ ID NO: 4014139 - RNA, 18 nt, Human respiratory syncytial virus
uugugacacuaugaacag

SEQ ID NO: 4014140 - RNA, 20 nt, Human respiratory syncytial virus
uuuaaguuaacaaaaaauac

SEQ ID NO: 4014141 - RNA, 18 nt, Human respiratory syncytial virus
auauacaaaauuaaauaa

SEQ ID NO: 4014142 - RNA, 13 nt, Human respiratory syncytial virus
auaucauguuaaa

SEQ ID NO: 4014143 - RNA, 12 nt, Human respiratory syncytial virus
auaugaagagau

SEQ ID NO: 4014144 - RNA, 22 nt, Human respiratory syncytial virus
auaugcaaacuuuucaauaauu

SEQ ID NO: 4014145 - RNA, 17 nt, Human respiratory syncytial virus
aucaacaacaucaauaa

SEQ ID NO: 4014146 - RNA, 22 nt, Human respiratory syncytial virus
aucaacauacuagugaagcaga

SEQ ID NO: 4014147 - RNA, 21 nt, Human respiratory syncytial virus
aucaacucaacccuaaagaag

SEQ ID NO: 4014148 - RNA, 15 nt, Human respiratory syncytial virus
aucaauaaaacagac

SEQ ID NO: 4014149 - RNA, 23 nt, Human respiratory syncytial virus
aucaaucauggcggguuucuaga

SEQ ID NO: 4014150 - RNA, 18 nt, Human respiratory syncytial virus
aucacaauagaauucaca

SEQ ID NO: 4014151 - RNA, 13 nt, Human respiratory syncytial virus
aucacuaacaaua

SEQ ID NO: 4014152 - RNA, 13 nt, Human respiratory syncytial virus
aucacucaguaaa

SEQ ID NO: 4014153 - RNA, 18 nt, Human respiratory syncytial virus
aucaggucuuacagcagu

SEQ ID NO: 4014154 - RNA, 16 nt, Human respiratory syncytial virus
auccaaucuucucaca

SEQ ID NO: 4014155 - RNA, 14 nt, Human respiratory syncytial virus
aucuuuaugaugca

SEQ ID NO: 4014156 - RNA, 16 nt, Human respiratory syncytial virus
augaagcuacugcaca

SEQ ID NO: 4014157 - RNA, 22 nt, Human respiratory syncytial virus
augauaauacuguguauagcag

SEQ ID NO: 4014158 - RNA, 14 nt, Human respiratory syncytial virus
augauacaugugca

SEQ ID NO: 4014159 - RNA, 12 nt, Human respiratory syncytial virus
augcaaaacaca

SEQ ID NO: 4014160 - RNA, 22 nt, Human respiratory syncytial virus
augcaaccauguccaaacacaa

SEQ ID NO: 4014161 - RNA, 24 nt, Human respiratory syncytial virus
auggcaaaagacaccucagaugaa

SEQ ID NO: 4014162 - RNA, 21 nt, Human respiratory syncytial virus
auguccagguuaggaagggaa

SEQ ID NO: 4014163 - RNA, 22 nt, Human respiratory syncytial virus
augucuuaaaaaaugaaauaaa

SEQ ID NO: 4014164 - RNA, 23 nt, Human respiratory syncytial virus
auguuguguuaucacaauuauuu

SEQ ID NO: 4014165 - RNA, 23 nt, Human respiratory syncytial virus
auuaacaaguuuggucaaauuua

SEQ ID NO: 4014166 - RNA, 20 nt, Human respiratory syncytial virus
auuaggagggcaaacaaugu

SEQ ID NO: 4014167 - RNA, 15 nt, Human respiratory syncytial virus
auuaugaugugcaaa

SEQ ID NO: 4014168 - RNA, 19 nt, Human respiratory syncytial virus
auucuaccauauauugaac

SEQ ID NO: 4014169 - RNA, 16 nt, Human respiratory syncytial virus
auucuuagucaauuau

SEQ ID NO: 4014170 - RNA, 15 nt, Human respiratory syncytial virus
auugaugaaaaauua

SEQ ID NO: 4014171 - RNA, 16 nt, Human respiratory syncytial virus
auugcucuaugugaau

SEQ ID NO: 4014172 - RNA, 19 nt, Human respiratory syncytial virus
auuuuugaucagugaucaa

SEQ ID NO: 4014173 - RNA, 14 nt, Human respiratory syncytial virus
caaaaacaccagcc

SEQ ID NO: 4014174 - RNA, 10 nt, Human respiratory syncytial virus
caaaaccaca

SEQ ID NO: 4014175 - RNA, 20 nt, Human respiratory syncytial virus
caaaaccacgccaacuauca

SEQ ID NO: 4014176 - RNA, 17 nt, Human respiratory syncytial virus
caaaccaaccaccaaaa

SEQ ID NO: 4014177 - RNA, 21 nt, Human respiratory syncytial virus
caaagagagcccgauaacauc

SEQ ID NO: 4014178 - RNA, 18 nt, Human respiratory syncytial virus
caaaggcagaaccaccac

SEQ ID NO: 4014179 - RNA, 13 nt, Human respiratory syncytial virus
caaauacaaagau

SEQ ID NO: 4014180 - RNA, 20 nt, Human respiratory syncytial virus
caaauagacaaaaaaccacc

SEQ ID NO: 4014181 - RNA, 18 nt, Human respiratory syncytial virus
caacaauaauucagguga

SEQ ID NO: 4014182 - RNA, 13 nt, Human respiratory syncytial virus
caaccacaucacc

SEQ ID NO: 4014183 - RNA, 19 nt, Human respiratory syncytial virus
caaccacaucaccaaucca

SEQ ID NO: 4014184 - RNA, 15 nt, Human respiratory syncytial virus
caacccucacgacca

SEQ ID NO: 4014185 - RNA, 14 nt, Human respiratory syncytial virus
caaccuacaaccac

SEQ ID NO: 4014186 - RNA, 19 nt, Human respiratory syncytial virus
caacguaguacaggagaua

SEQ ID NO: 4014187 - RNA, 21 nt, Human respiratory syncytial virus
caacuacuacuuacaaucaau

SEQ ID NO: 4014188 - RNA, 15 nt, Human respiratory syncytial virus
caacuccacacaaac

SEQ ID NO: 4014189 - RNA, 22 nt, Human respiratory syncytial virus
caagcuauuccucaaacaacaa

SEQ ID NO: 4014190 - RNA, 19 nt, Human respiratory syncytial virus
caagucccaccagaaaggg

SEQ ID NO: 4014191 - RNA, 15 nt, Human respiratory syncytial virus
caauaaaaaaccaca

SEQ ID NO: 4014192 - RNA, 16 nt, Human respiratory syncytial virus
caauagaaaaaacaac

SEQ ID NO: 4014193 - RNA, 17 nt, Human respiratory syncytial virus
caauuuauauacaaaau

SEQ ID NO: 4014194 - RNA, 17 nt, Human respiratory syncytial virus
cacaacagcacaaacca

SEQ ID NO: 4014195 - RNA, 21 nt, Human respiratory syncytial virus
cacaauagaauucacaagcaa

SEQ ID NO: 4014196 - RNA, 17 nt, Human respiratory syncytial virus
cacacaaaccaauccca

SEQ ID NO: 4014197 - RNA, 14 nt, Human respiratory syncytial virus
cacagaccaacaag

SEQ ID NO: 4014198 - RNA, 23 nt, Human respiratory syncytial virus
cacauauauccucaaacuacaca

SEQ ID NO: 4014199 - RNA, 16 nt, Human respiratory syncytial virus
caccagccaaaacgac

SEQ ID NO: 4014200 - RNA, 23 nt, Human respiratory syncytial virus
cacucaaccacccccgaaaacac

SEQ ID NO: 4014201 - RNA, 22 nt, Human respiratory syncytial virus
cacuccuauaauauacaaauau

SEQ ID NO: 4014202 - RNA, 18 nt, Human respiratory syncytial virus
cacugaauauaauacaaa

SEQ ID NO: 4014203 - RNA, 20 nt, Human respiratory syncytial virus
cacugaauauaauacaaaau

SEQ ID NO: 4014204 - RNA, 20 nt, Human respiratory syncytial virus
cacuuguaaaguacagucca

SEQ ID NO: 4014205 - RNA, 16 nt, Human respiratory syncytial virus
cagaccgaacaaacaa

SEQ ID NO: 4014206 - RNA, 15 nt, Human respiratory syncytial virus
cagacuugcucauaa

SEQ ID NO: 4014207 - RNA, 17 nt, Human respiratory syncytial virus
cagaugcaucaaaucaa

SEQ ID NO: 4014208 - RNA, 11 nt, Human respiratory syncytial virus
cagcacaaacc

SEQ ID NO: 4014209 - RNA, 21 nt, Human respiratory syncytial virus
cagcagauuguuggaaaucaa

SEQ ID NO: 4014210 - RNA, 21 nt, Human respiratory syncytial virus
cagccaaagcauaugcagagc

SEQ ID NO: 4014211 - RNA, 15 nt, Human respiratory syncytial virus
cagcggaaccaccaa

SEQ ID NO: 4014212 - RNA, 11 nt, Human respiratory syncytial virus
cagggcaagua

SEQ ID NO: 4014213 - RNA, 22 nt, Human respiratory syncytial virus
caguucaaacaauaaaaaacca

SEQ ID NO: 4014214 - RNA, 11 nt, Human respiratory syncytial virus
cauaacaaaca

SEQ ID NO: 4014215 - RNA, 19 nt, Human respiratory syncytial virus
cauagugcucuaccaucau

SEQ ID NO: 4014216 - RNA, 20 nt, Human respiratory syncytial virus
cauggugucgcaaaaccacg

SEQ ID NO: 4014217 - RNA, 14 nt, Human respiratory syncytial virus
cauguuaacaaaca

SEQ ID NO: 4014218 - RNA, 12 nt, Human respiratory syncytial virus
cauugcugucau

SEQ ID NO: 4014219 - RNA, 22 nt, Human respiratory syncytial virus
ccaaacaucaugaacaucuaca

SEQ ID NO: 4014220 - RNA, 22 nt, Human respiratory syncytial virus
ccaaagccaacuacccaagaaa

SEQ ID NO: 4014221 - RNA, 16 nt, Human respiratory syncytial virus
ccaaauuagcagcagg

SEQ ID NO: 4014222 - RNA, 14 nt, Human respiratory syncytial virus
ccaagcaacaaacc

SEQ ID NO: 4014223 - RNA, 13 nt, Human respiratory syncytial virus
ccacaaacaaacc

SEQ ID NO: 4014224 - RNA, 18 nt, Human respiratory syncytial virus
ccaccaaaaaaaccaaaa

SEQ ID NO: 4014225 - RNA, 16 nt, Human respiratory syncytial virus
ccaccaaaaccacaaa

SEQ ID NO: 4014226 - RNA, 20 nt, Human respiratory syncytial virus
ccaggaucuuuaugaugcag

SEQ ID NO: 4014227 - RNA, 18 nt, Human respiratory syncytial virus
ccucaaacuacacacuau

SEQ ID NO: 4014228 - RNA, 15 nt, Human respiratory syncytial virus
cgaacaaacaaaugu

SEQ ID NO: 4014229 - RNA, 22 nt, Human respiratory syncytial virus
cgccaagaaaccaggaucuuua

SEQ ID NO: 4014230 - RNA, 19 nt, Human respiratory syncytial virus
cuaaagaagaugauguaga

SEQ ID NO: 4014231 - RNA, 23 nt, Human respiratory syncytial virus
cuaacaaugauacaugugcauuu

SEQ ID NO: 4014232 - RNA, 21 nt, Human respiratory syncytial virus
cuaagugaacauaaaacauuc

SEQ ID NO: 4014233 - RNA, 15 nt, Human respiratory syncytial virus
cuacacuacacacuu

SEQ ID NO: 4014234 - RNA, 15 nt, Human respiratory syncytial virus
cuaugaguaugcaca

SEQ ID NO: 4014235 - RNA, 20 nt, Human respiratory syncytial virus
cucaagugugguccuaggca

SEQ ID NO: 4014236 - RNA, 23 nt, Human respiratory syncytial virus
cucuaccaucaugcugugucaaa

SEQ ID NO: 4014237 - RNA, 17 nt, Human respiratory syncytial virus
cugaaaaaaacaucacc

SEQ ID NO: 4014238 - RNA, 15 nt, Human respiratory syncytial virus
cuggcaaugauaauc

SEQ ID NO: 4014239 - RNA, 13 nt, Human respiratory syncytial virus
cuuaaaaaaugaa

SEQ ID NO: 4014240 - RNA, 18 nt, Human respiratory syncytial virus
cuugugaaaucaaagcau

SEQ ID NO: 4014241 - RNA, 16 nt, Human respiratory syncytial virus
cuuuaaguuaacaaaa

SEQ ID NO: 4014242 - RNA, 21 nt, Human respiratory syncytial virus
cuuuaugaugcagccaaagca

SEQ ID NO: 4014243 - RNA, 18 nt, Human respiratory syncytial virus
gaaaucaucacacacaaa

SEQ ID NO: 4014244 - RNA, 15 nt, Human respiratory syncytial virus
gaaaugauagaaaaa

SEQ ID NO: 4014245 - RNA, 20 nt, Human respiratory syncytial virus
gaacaauccaaaagcaucau

SEQ ID NO: 4014246 - RNA, 14 nt, Human respiratory syncytial virus
gaagccauaaagaa

SEQ ID NO: 4014247 - RNA, 18 nt, Human respiratory syncytial virus
gaagccauaaagaaucaa

SEQ ID NO: 4014248 - RNA, 15 nt, Human respiratory syncytial virus
gaaguggcuccagaa

SEQ ID NO: 4014249 - RNA, 16 nt, Human respiratory syncytial virus
gaauauaauacaaaau

SEQ ID NO: 4014250 - RNA, 17 nt, Human respiratory syncytial virus
gaauauaauacaaaaua

SEQ ID NO: 4014251 - RNA, 14 nt, Human respiratory syncytial virus
gacaaaaaaccacc

SEQ ID NO: 4014252 - RNA, 22 nt, Human respiratory syncytial virus
gacuagauagaauugaugaaaa

SEQ ID NO: 4014253 - RNA, 20 nt, Human respiratory syncytial virus
gagacccaaaaacaccagcc

SEQ ID NO: 4014254 - RNA, 23 nt, Human respiratory syncytial virus
gagauagaaucuagaaaauccua

SEQ ID NO: 4014255 - RNA, 17 nt, Human respiratory syncytial virus
gagcaacucaaagaaaa

SEQ ID NO: 4014256 - RNA, 12 nt, Human respiratory syncytial virus
gaguucaaucaa

SEQ ID NO: 4014257 - RNA, 15 nt, Human respiratory syncytial virus
gauacucucaaucau

SEQ ID NO: 4014258 - RNA, 17 nt, Human respiratory syncytial virus
gaucagaaaaaauuaau

SEQ ID NO: 4014259 - RNA, 16 nt, Human respiratory syncytial virus
gaugaaagacaagcua

SEQ ID NO: 4014260 - RNA, 21 nt, Human respiratory syncytial virus
gaugcaucaaaucaacacaua

SEQ ID NO: 4014261 - RNA, 23 nt, Human respiratory syncytial virus
gauuaauagguauguuauaugcu

SEQ ID NO: 4014262 - RNA, 19 nt, Human respiratory syncytial virus
gcaaaaacaccuaaacaaa

SEQ ID NO: 4014263 - RNA, 19 nt, Human respiratory syncytial virus
gcaaacaaugucuuaaaaa

SEQ ID NO: 4014264 - RNA, 20 nt, Human respiratory syncytial virus
gcaaacaaugucuuaaaaaa

SEQ ID NO: 4014265 - RNA, 20 nt, Human respiratory syncytial virus
gcaaagucaaguuaaaugau

SEQ ID NO: 4014266 - RNA, 12 nt, Human respiratory syncytial virus
gcaacaaucaac

SEQ ID NO: 4014267 - RNA, 17 nt, Human respiratory syncytial virus
gcaagaacgaaauuaaa

SEQ ID NO: 4014268 - RNA, 18 nt, Human respiratory syncytial virus
gcaauacuaaauaagcua

SEQ ID NO: 4014269 - RNA, 19 nt, Human respiratory syncytial virus
gcaauagaaaaaacaacaa

SEQ ID NO: 4014270 - RNA, 14 nt, Human respiratory syncytial virus
gcaaucaacaacau

SEQ ID NO: 4014271 - RNA, 21 nt, Human respiratory syncytial virus
gcagacuugcucauaaaagaa

SEQ ID NO: 4014272 - RNA, 15 nt, Human respiratory syncytial virus
gcagagcaacucaaa

SEQ ID NO: 4014273 - RNA, 20 nt, Human respiratory syncytial virus
gccauaaagaaucaacucaa

SEQ ID NO: 4014274 - RNA, 11 nt, Human respiratory syncytial virus
gccuacaaaac

SEQ ID NO: 4014275 - RNA, 17 nt, Human respiratory syncytial virus
gcuacucauaugaagag

SEQ ID NO: 4014276 - RNA, 15 nt, Human respiratory syncytial virus
ggaaaggaaaugaaa

SEQ ID NO: 4014277 - RNA, 17 nt, Human respiratory syncytial virus
ggaaauggggcaaauaa

SEQ ID NO: 4014278 - RNA, 15 nt, Human respiratory syncytial virus
ggaagccauaaagaa

SEQ ID NO: 4014279 - RNA, 22 nt, Human respiratory syncytial virus
ggaucugaacucacuagaaaac

SEQ ID NO: 4014280 - RNA, 20 nt, Human respiratory syncytial virus
gucuaggcauaaugggagag

SEQ ID NO: 4014281 - RNA, 16 nt, Human respiratory syncytial virus
gucuuaaaaaaugaaa

SEQ ID NO: 4014282 - RNA, 14 nt, Human respiratory syncytial virus
gugaacauaaaaca

SEQ ID NO: 4014283 - RNA, 17 nt, Human respiratory syncytial virus
gugccuaccuagaaaaa

SEQ ID NO: 4014284 - RNA, 16 nt, Human respiratory syncytial virus
gugucgcaaaaccacg

SEQ ID NO: 4014285 - RNA, 21 nt, Human respiratory syncytial virus
guuaaaugauacauuaaauaa

SEQ ID NO: 4014286 - RNA, 13 nt, Human respiratory syncytial virus
guuaauauaaaaa

SEQ ID NO: 4014287 - RNA, 13 nt, Human respiratory syncytial virus
guuuuuaugaagu

SEQ ID NO: 4014288 - RNA, 16 nt, Human respiratory syncytial virus
uaaaaaauaucaugcu

SEQ ID NO: 4014289 - RNA, 14 nt, Human respiratory syncytial virus
uaaaaaauaugcaa

SEQ ID NO: 4014290 - RNA, 16 nt, Human respiratory syncytial virus
uaaaaguaaagccaau

SEQ ID NO: 4014291 - RNA, 16 nt, Human respiratory syncytial virus
uaaagaagaugaugua

SEQ ID NO: 4014292 - RNA, 13 nt, Human respiratory syncytial virus
uaaauaaaaccaa

SEQ ID NO: 4014293 - RNA, 17 nt, Human respiratory syncytial virus
uaaaugaucaaacaaau

SEQ ID NO: 4014294 - RNA, 17 nt, Human respiratory syncytial virus
uaaauuggggcaaauac

SEQ ID NO: 4014295 - RNA, 23 nt, Human respiratory syncytial virus
uaaauuggggcaaauacaaagau

SEQ ID NO: 4014296 - RNA, 19 nt, Human respiratory syncytial virus
uaacaaugauacaugugca

SEQ ID NO: 4014297 - RNA, 12 nt, Human respiratory syncytial virus
uaaccaccagcg

SEQ ID NO: 4014298 - RNA, 15 nt, Human respiratory syncytial virus
uaacuacaauuauua

SEQ ID NO: 4014299 - RNA, 15 nt, Human respiratory syncytial virus
uacaagaaauacacu

SEQ ID NO: 4014300 - RNA, 15 nt, Human respiratory syncytial virus
uacauauacuauaaa

SEQ ID NO: 4014301 - RNA, 14 nt, Human respiratory syncytial virus
uacugaaauuauuu

SEQ ID NO: 4014302 - RNA, 22 nt, Human respiratory syncytial virus
uacuuaugcaaaacacaccagc

SEQ ID NO: 4014303 - RNA, 18 nt, Human respiratory syncytial virus
uagaaguaaccaaagaga

SEQ ID NO: 4014304 - RNA, 15 nt, Human respiratory syncytial virus
uagaauucacaagca

SEQ ID NO: 4014305 - RNA, 15 nt, Human respiratory syncytial virus
uagacaaaaaaccac

SEQ ID NO: 4014306 - RNA, 17 nt, Human respiratory syncytial virus
uagaguugaaggaaucu

SEQ ID NO: 4014307 - RNA, 18 nt, Human respiratory syncytial virus
uagggaguaccaaauaca

SEQ ID NO: 4014308 - RNA, 21 nt, Human respiratory syncytial virus
uagguaaauaaaaccaaaaua

SEQ ID NO: 4014309 - RNA, 17 nt, Human respiratory syncytial virus
uaguaagcuucaaagaa

SEQ ID NO: 4014310 - RNA, 13 nt, Human respiratory syncytial virus
uauaaacaaacaa

SEQ ID NO: 4014311 - RNA, 14 nt, Human respiratory syncytial virus
uaucacaauuauuu

SEQ ID NO: 4014312 - RNA, 13 nt, Human respiratory syncytial virus
aauucaaaaaugc

SEQ ID NO: 4014313 - RNA, 16 nt, Human respiratory syncytial virus
acaaauaugaccucaa

SEQ ID NO: 4014314 - RNA, 15 nt, Human respiratory syncytial virus
acaauaaaaaaccac

SEQ ID NO: 4014315 - RNA, 12 nt, Human respiratory syncytial virus
acaauagaauuc

SEQ ID NO: 4014316 - RNA, 21 nt, Human respiratory syncytial virus
acaaucagcauguguugcuau

SEQ ID NO: 4014317 - RNA, 20 nt, Human respiratory syncytial virus
acacaaauucauauacuuga

SEQ ID NO: 4014318 - RNA, 19 nt, Human respiratory syncytial virus
acacacaauccaacagcaa

SEQ ID NO: 4014319 - RNA, 17 nt, Human respiratory syncytial virus
acacuacuaugcaaaga

SEQ ID NO: 4014320 - RNA, 13 nt, Human respiratory syncytial virus
acagcagaagaau

SEQ ID NO: 4014321 - RNA, 21 nt, Human respiratory syncytial virus
acagcagaagaauuggaagcc

SEQ ID NO: 4014322 - RNA, 13 nt, Human respiratory syncytial virus
acauaaugaugaa

SEQ ID NO: 4014323 - RNA, 16 nt, Human respiratory syncytial virus
acauuaaaaagcugag

SEQ ID NO: 4014324 - RNA, 18 nt, Human respiratory syncytial virus
accaaccaccaaaaccac

SEQ ID NO: 4014325 - RNA, 11 nt, Human respiratory syncytial virus
accaauuauua

SEQ ID NO: 4014326 - RNA, 22 nt, Human respiratory syncytial virus
accauauauugaacaauccaaa

SEQ ID NO: 4014327 - RNA, 17 nt, Human respiratory syncytial virus
accauguccaaacacaa

SEQ ID NO: 4014328 - RNA, 22 nt, Human respiratory syncytial virus
accauuuauaccgccaauucaa

SEQ ID NO: 4014329 - RNA, 17 nt, Human respiratory syncytial virus
acccaaaaacaccagcc

SEQ ID NO: 4014330 - RNA, 13 nt, Human respiratory syncytial virus
accucucucauaa

SEQ ID NO: 4014331 - RNA, 15 nt, Human respiratory syncytial virus
accuugugaaaucaa

SEQ ID NO: 4014332 - RNA, 18 nt, Human respiratory syncytial virus
acuacagucaaagaucuu

SEQ ID NO: 4014333 - RNA, 15 nt, Human respiratory syncytial virus
acuacuaugcaaaga

SEQ ID NO: 4014334 - RNA, 20 nt, Human respiratory syncytial virus
acuauaaagauacuuaaaga

SEQ ID NO: 4014335 - RNA, 16 nt, Human respiratory syncytial virus
acuuuggcauugcaca

SEQ ID NO: 4014336 - RNA, 21 nt, Human respiratory syncytial virus
agaaacauuugauaacaauga

SEQ ID NO: 4014337 - RNA, 16 nt, Human respiratory syncytial virus
agaagaaccaacuuau

SEQ ID NO: 4014338 - RNA, 13 nt, Human respiratory syncytial virus
agaauuacauaaa

SEQ ID NO: 4014339 - RNA, 16 nt, Human respiratory syncytial virus
agacacuauaaagaua

SEQ ID NO: 4014340 - RNA, 19 nt, Human respiratory syncytial virus
agacuuaggaaugaggaaa

SEQ ID NO: 4014341 - RNA, 20 nt, Human respiratory syncytial virus
agagcaauagaaaaaacaac

SEQ ID NO: 4014342 - RNA, 23 nt, Human respiratory syncytial virus
agaugauguagagcuuuaaguua

SEQ ID NO: 4014343 - RNA, 22 nt, Human respiratory syncytial virus
agauggggaguuuuagccaaau

SEQ ID NO: 4014344 - RNA, 21 nt, Human respiratory syncytial virus
agcaacucaaagaaaauggag

SEQ ID NO: 4014345 - RNA, 18 nt, Human respiratory syncytial virus
agcaagacuagauagaau

SEQ ID NO: 4014346 - RNA, 18 nt, Human respiratory syncytial virus
agcaaucaacaacaucaa

SEQ ID NO: 4014347 - RNA, 17 nt, Human respiratory syncytial virus
agcuauuccucaaacaa

SEQ ID NO: 4014348 - RNA, 15 nt, Human respiratory syncytial virus
agcucauccaaacaa

SEQ ID NO: 4014349 - RNA, 18 nt, Human respiratory syncytial virus
aggaagggaagacacuau

SEQ ID NO: 4014350 - RNA, 15 nt, Human respiratory syncytial virus
aggauauagcuaaca

SEQ ID NO: 4014351 - RNA, 22 nt, Human respiratory syncytial virus
agucaaguuaaaugauacauua

SEQ ID NO: 4014352 - RNA, 18 nt, Human respiratory syncytial virus
aguguccaggcagaaaug

SEQ ID NO: 4014353 - RNA, 20 nt, Human respiratory syncytial virus
aguguccaggcagaaaugga

SEQ ID NO: 4014354 - RNA, 16 nt, Human respiratory syncytial virus
aguuaacaaaaaauac

SEQ ID NO: 4014355 - RNA, 20 nt, Human respiratory syncytial virus
auaaaacauucuguaacaau

SEQ ID NO: 4014356 - RNA, 19 nt, Human respiratory syncytial virus
auaaauuggggcaaauaca

SEQ ID NO: 4014357 - RNA, 15 nt, Human respiratory syncytial virus
auaaccauggagcug

SEQ ID NO: 4014358 - RNA, 14 nt, Human respiratory syncytial virus
auaauacuguguau

SEQ ID NO: 4014359 - RNA, 16 nt, Human respiratory syncytial virus
auagacauguguuuau

SEQ ID NO: 4014360 - RNA, 16 nt, Human respiratory syncytial virus
auaguaaggcaacaaa

SEQ ID NO: 4014361 - RNA, 13 nt, Human respiratory syncytial virus
auaguuacauaaa

SEQ ID NO: 4014362 - RNA, 13 nt, Human respiratory syncytial virus
auauacaaaauua

SEQ ID NO: 4014363 - RNA, 14 nt, Human respiratory syncytial virus
auauacaaauauga

SEQ ID NO: 4014364 - RNA, 15 nt, Human respiratory syncytial virus
auauauccucaaacu

SEQ ID NO: 4014365 - RNA, 13 nt, Human respiratory syncytial virus
auauccaaacauc

SEQ ID NO: 4014366 - RNA, 15 nt, Human respiratory syncytial virus
auauuuaucaaucau

SEQ ID NO: 4014367 - RNA, 17 nt, Human respiratory syncytial virus
aucaacucacucagcaa

SEQ ID NO: 4014368 - RNA, 20 nt, Human respiratory syncytial virus
aucauaaaggugaacugaaa

SEQ ID NO: 4014369 - RNA, 21 nt, Human respiratory syncytial virus
aucauaagcgcaaauguauca

SEQ ID NO: 4014370 - RNA, 12 nt, Human respiratory syncytial virus
aucauuaacaag

SEQ ID NO: 4014371 - RNA, 13 nt, Human respiratory syncytial virus
auccugcaucacu

SEQ ID NO: 4014372 - RNA, 22 nt, Human respiratory syncytial virus
aucgucaagauauaaauggaaa

SEQ ID NO: 4014373 - RNA, 21 nt, Human respiratory syncytial virus
aucuggcaccaacaucaucaa

SEQ ID NO: 4014374 - RNA, 14 nt, Human respiratory syncytial virus
aucuguaaaacaau

SEQ ID NO: 4014375 - RNA, 12 nt, Human respiratory syncytial virus
aucuuuaugaug

SEQ ID NO: 4014376 - RNA, 16 nt, Human respiratory syncytial virus
augaucaaacaaauga

SEQ ID NO: 4014377 - RNA, 15 nt, Human respiratory syncytial virus
augaugcagccaaag

SEQ ID NO: 4014378 - RNA, 17 nt, Human respiratory syncytial virus
augaugcagccaaagca

SEQ ID NO: 4014379 - RNA, 17 nt, Human respiratory syncytial virus
augcacagaaguuggga

SEQ ID NO: 4014380 - RNA, 16 nt, Human respiratory syncytial virus
augcuaguguccaggc

SEQ ID NO: 4014381 - RNA, 15 nt, Human respiratory syncytial virus
augcuauguccaggu

SEQ ID NO: 4014382 - RNA, 20 nt, Human respiratory syncytial virus
auggcucuuagcaaagucaa

SEQ ID NO: 4014383 - RNA, 21 nt, Human respiratory syncytial virus
augucacuacagucauaauua

SEQ ID NO: 4014384 - RNA, 13 nt, Human respiratory syncytial virus
auuaacucaagaa

SEQ ID NO: 4014385 - RNA, 21 nt, Human respiratory syncytial virus
auuaaucacugaagaugcaaa

SEQ ID NO: 4014386 - RNA, 21 nt, Human respiratory syncytial virus
auuagacuuaacagcagaaga

SEQ ID NO: 4014387 - RNA, 13 nt, Human respiratory syncytial virus
auuagaugaaaga

SEQ ID NO: 4014388 - RNA, 18 nt, Human respiratory syncytial virus
auucaauaauaacaucuc

SEQ ID NO: 4014389 - RNA, 12 nt, Human respiratory syncytial virus
auuccaaaauua

SEQ ID NO: 4014390 - RNA, 14 nt, Human respiratory syncytial virus
auuguuuaugaaug

SEQ ID NO: 4014391 - RNA, 24 nt, Human respiratory syncytial virus
auuuauaccgccaauucaauacau

SEQ ID NO: 4014392 - RNA, 13 nt, Human respiratory syncytial virus
caaaaaaaugcua

SEQ ID NO: 4014393 - RNA, 18 nt, Human respiratory syncytial virus
caaacaaauguccgucag

SEQ ID NO: 4014394 - RNA, 19 nt, Human respiratory syncytial virus
caaacacuucaacaucaca

SEQ ID NO: 4014395 - RNA, 20 nt, Human respiratory syncytial virus
caaaccaaaggcagaaccac

SEQ ID NO: 4014396 - RNA, 21 nt, Human respiratory syncytial virus
caaaccaaccaccaaaaccac

SEQ ID NO: 4014397 - RNA, 14 nt, Human respiratory syncytial virus
caaacuacacacua

SEQ ID NO: 4014398 - RNA, 15 nt, Human respiratory syncytial virus
caaaguuacacuaac

SEQ ID NO: 4014399 - RNA, 21 nt, Human respiratory syncytial virus
caaauaagucaacauggagaa

SEQ ID NO: 4014400 - RNA, 23 nt, Human respiratory syncytial virus
caaauacacuauucaacguagua

SEQ ID NO: 4014401 - RNA, 15 nt, Human respiratory syncytial virus
uaauauaaaaacuca

SEQ ID NO: 4014402 - RNA, 15 nt, Human respiratory syncytial virus
uacaaccacaucacc

SEQ ID NO: 4014403 - RNA, 17 nt, Human respiratory syncytial virus
uacaagaaauacacuga

SEQ ID NO: 4014404 - RNA, 23 nt, Human respiratory syncytial virus
uacacacuucaucacacaaacca

SEQ ID NO: 4014405 - RNA, 22 nt, Human respiratory syncytial virus
uaccaaauacaagaaauacacu

SEQ ID NO: 4014406 - RNA, 18 nt, Human respiratory syncytial virus
uaccauuuuaguuaauau

SEQ ID NO: 4014407 - RNA, 15 nt, Human respiratory syncytial virus
uacuaugcaaagauu

SEQ ID NO: 4014408 - RNA, 20 nt, Human respiratory syncytial virus
uagaaacauuugauaacaau

SEQ ID NO: 4014409 - RNA, 23 nt, Human respiratory syncytial virus
uagcaaccaccgaauucaaaaau

SEQ ID NO: 4014410 - RNA, 15 nt, Human respiratory syncytial virus
uagggaguaccaaau

SEQ ID NO: 4014411 - RNA, 17 nt, Human respiratory syncytial virus
uauagaaguaaccaaag

SEQ ID NO: 4014412 - RNA, 20 nt, Human respiratory syncytial virus
uaugcaaagauuaaugauca

SEQ ID NO: 4014413 - RNA, 23 nt, Human respiratory syncytial virus
uauugaacaauccaaaagcauca

SEQ ID NO: 4014414 - RNA, 14 nt, Human respiratory syncytial virus
uauuuaucaaucau

SEQ ID NO: 4014415 - RNA, 17 nt, Human respiratory syncytial virus
ucaaaaugaccaaacca

SEQ ID NO: 4014416 - RNA, 18 nt, Human respiratory syncytial virus
ucaaacaaaugacaacau

SEQ ID NO: 4014417 - RNA, 23 nt, Human respiratory syncytial virus
ucaaagggaaauggggcaaauaa

SEQ ID NO: 4014418 - RNA, 14 nt, Human respiratory syncytial virus
ucaaaucaacacau

SEQ ID NO: 4014419 - RNA, 16 nt, Human respiratory syncytial virus
ucaacauggagaaguu

SEQ ID NO: 4014420 - RNA, 21 nt, Human respiratory syncytial virus
ucaaccaacugauccaucagc

SEQ ID NO: 4014421 - RNA, 19 nt, Human respiratory syncytial virus
ucaacguaguacaggagau

SEQ ID NO: 4014422 - RNA, 17 nt, Human respiratory syncytial virus
ucaccaauccacacaaa

SEQ ID NO: 4014423 - RNA, 15 nt, Human respiratory syncytial virus
ucauccaaagauccu

SEQ ID NO: 4014424 - RNA, 22 nt, Human respiratory syncytial virus
ucaugcuaguguccaggcagaa

SEQ ID NO: 4014425 - RNA, 20 nt, Human respiratory syncytial virus
ucauggugucgcaaaaccac

SEQ ID NO: 4014426 - RNA, 19 nt, Human respiratory syncytial virus
uccaaacaaccuacaacca

SEQ ID NO: 4014427 - RNA, 21 nt, Human respiratory syncytial virus
uccagcaaauacacuauucaa

SEQ ID NO: 4014428 - RNA, 22 nt, Human respiratory syncytial virus
uccaucacaauagaauucacaa

SEQ ID NO: 4014429 - RNA, 11 nt, Human respiratory syncytial virus
ucuacaaacaa

SEQ ID NO: 4014430 - RNA, 13 nt, Human respiratory syncytial virus
ucuagaaaaagau

SEQ ID NO: 4014431 - RNA, 17 nt, Human respiratory syncytial virus
ugaaaucaaagcaugca

SEQ ID NO: 4014432 - RNA, 24 nt, Human respiratory syncytial virus
ugaacaucuacacuacacacuuca

SEQ ID NO: 4014433 - RNA, 19 nt, Human respiratory syncytial virus
ugaacucacuagaaaacau

SEQ ID NO: 4014434 - RNA, 23 nt, Human respiratory syncytial virus
ugaacucacuagaaaacauagca

SEQ ID NO: 4014435 - RNA, 23 nt, Human respiratory syncytial virus
ugacaacacuacuaugcaaagau

SEQ ID NO: 4014436 - RNA, 19 nt, Human respiratory syncytial virus
ugaugcagccaaagcauau

SEQ ID NO: 4014437 - RNA, 17 nt, Human respiratory syncytial virus
ugcaaauaacaaagcua

SEQ ID NO: 4014438 - RNA, 15 nt, Human respiratory syncytial virus
ugcaagcaucaacau

SEQ ID NO: 4014439 - RNA, 21 nt, Human respiratory syncytial virus
ugccaacaaccgggccagaag

SEQ ID NO: 4014440 - RNA, 21 nt, Human respiratory syncytial virus
ugccagaccgaacaaacaaau

SEQ ID NO: 4014441 - RNA, 23 nt, Human respiratory syncytial virus
ugcgaauagguaaauaaaaccaa

SEQ ID NO: 4014442 - RNA, 20 nt, Human respiratory syncytial virus
ugcuauuaaucacugaagau

SEQ ID NO: 4014443 - RNA, 23 nt, Human respiratory syncytial virus
ugcuggaaauuacacacaucacc

SEQ ID NO: 4014444 - RNA, 23 nt, Human respiratory syncytial virus
uggaaaucaacagagaauucagu

SEQ ID NO: 4014445 - RNA, 15 nt, Human respiratory syncytial virus
uggaagacaacgaua

SEQ ID NO: 4014446 - RNA, 17 nt, Human respiratory syncytial virus
uggaauaagagaugcua

SEQ ID NO: 4014447 - RNA, 15 nt, Human respiratory syncytial virus
uggauucuaccauau

SEQ ID NO: 4014448 - RNA, 18 nt, Human respiratory syncytial virus
uggcauuaagccuacaaa

SEQ ID NO: 4014449 - RNA, 22 nt, Human respiratory syncytial virus
ugggaaauacauccaucacaau

SEQ ID NO: 4014450 - RNA, 18 nt, Human respiratory syncytial virus
ugguccuaggcaaugcag

SEQ ID NO: 4014451 - RNA, 13 nt, Human respiratory syncytial virus
uguauagcagcac

SEQ ID NO: 4014452 - RNA, 20 nt, Human respiratory syncytial virus
uguauuagacuuaacagcag

SEQ ID NO: 4014453 - RNA, 12 nt, Human respiratory syncytial virus
ugucauccagca

SEQ ID NO: 4014454 - RNA, 20 nt, Human respiratory syncytial virus
ugucauccagcaaauacacu

SEQ ID NO: 4014455 - RNA, 22 nt, Human respiratory syncytial virus
uuaauccaacuuccaaaaaauu

SEQ ID NO: 4014456 - RNA, 15 nt, Human respiratory syncytial virus
uuagacuuaacagca

SEQ ID NO: 4014457 - RNA, 22 nt, Human respiratory syncytial virus
uuaguuaauauaaaaacucauc

SEQ ID NO: 4014458 - RNA, 21 nt, Human respiratory syncytial virus
uuauguuuagucuaacucaau

SEQ ID NO: 4014459 - RNA, 18 nt, Human respiratory syncytial virus
uucaaagaagaucucacc

SEQ ID NO: 4014460 - RNA, 12 nt, Human respiratory syncytial virus
uucaauacauau

SEQ ID NO: 4014461 - RNA, 18 nt, Human respiratory syncytial virus
uugguauaccagugucau

SEQ ID NO: 4014462 - RNA, 23 nt, Human respiratory syncytial virus
uuuaugaaguguuugaaaaacac

SEQ ID NO: 4014463 - RNA, 19 nt, Human respiratory syncytial virus
uuuauuuuaaaucaauaug

SEQ ID NO: 4014464 - RNA, 15 nt, Human respiratory syncytial virus
uuucuucacaucaug

SEQ ID NO: 4014465 - RNA, 22 nt, Human respiratory syncytial virus
aaaacaccuaaacaaacuaugu

SEQ ID NO: 4014466 - RNA, 16 nt, Human respiratory syncytial virus
aaaaucaaucaaaguu

SEQ ID NO: 4014467 - RNA, 19 nt, Human respiratory syncytial virus
aaaauccaccaaaaaaacc

SEQ ID NO: 4014468 - RNA, 18 nt, Human respiratory syncytial virus
aaacaaacuaugugguau

SEQ ID NO: 4014469 - RNA, 21 nt, Human respiratory syncytial virus
aaacaacauuggggcaaaugc

SEQ ID NO: 4014470 - RNA, 17 nt, Human respiratory syncytial virus
aaacgacgaaaaaagaa

SEQ ID NO: 4014471 - RNA, 12 nt, Human respiratory syncytial virus
aaacuacacacu

SEQ ID NO: 4014472 - RNA, 13 nt, Human respiratory syncytial virus
aaagaaaauggag

SEQ ID NO: 4014473 - RNA, 12 nt, Human respiratory syncytial virus
aaagaagaucuc

SEQ ID NO: 4014474 - RNA, 16 nt, Human respiratory syncytial virus
aaagacuaccagcaga

SEQ ID NO: 4014475 - RNA, 15 nt, Human respiratory syncytial virus
aaagcgaaaaaaugg

SEQ ID NO: 4014476 - RNA, 14 nt, Human respiratory syncytial virus
aaauaaaaguaaag

SEQ ID NO: 4014477 - RNA, 12 nt, Human respiratory syncytial virus
aaauaaggauca

SEQ ID NO: 4014478 - RNA, 17 nt, Human respiratory syncytial virus
aaauccaccaaaaaaac

SEQ ID NO: 4014479 - RNA, 22 nt, Human respiratory syncytial virus
aaaugacaacauuacagcaaga

SEQ ID NO: 4014480 - RNA, 15 nt, Human respiratory syncytial virus
aaauuccuagaauca

SEQ ID NO: 4014481 - RNA, 16 nt, Human respiratory syncytial virus
aacaaaaaaagaacaa

SEQ ID NO: 4014482 - RNA, 19 nt, Human respiratory syncytial virus
aacaacauaacaaaacaau

SEQ ID NO: 4014483 - RNA, 23 nt, Human respiratory syncytial virus
aacaacggucacaguucaaacaa

SEQ ID NO: 4014484 - RNA, 22 nt, Human respiratory syncytial virus
aacacaagaaucaacgcacugc

SEQ ID NO: 4014485 - RNA, 20 nt, Human respiratory syncytial virus
aacacacaauccaacagcaa

SEQ ID NO: 4014486 - RNA, 21 nt, Human respiratory syncytial virus
aacacaccacacaacagcaca

SEQ ID NO: 4014487 - RNA, 12 nt, Human respiratory syncytial virus
aacacaccagcu

SEQ ID NO: 4014488 - RNA, 22 nt, Human respiratory syncytial virus
aacacacuccuauaauauacaa

SEQ ID NO: 4014489 - RNA, 18 nt, Human respiratory syncytial virus
aacacuacuaugcaaaga

SEQ ID NO: 4014490 - RNA, 16 nt, Human respiratory syncytial virus
aacaucaucaauccaa

SEQ ID NO: 4014491 - RNA, 17 nt, Human respiratory syncytial virus
aacauucuguaacaaua

SEQ ID NO: 4014492 - RNA, 23 nt, Human respiratory syncytial virus
aaccaaauuagcagcaggagaca

SEQ ID NO: 4014493 - RNA, 18 nt, Human respiratory syncytial virus
aaccacgccaacuaucau

SEQ ID NO: 4014494 - RNA, 21 nt, Human respiratory syncytial virus
aaccugacgaaauuaacaaua

SEQ ID NO: 4014495 - RNA, 12 nt, Human respiratory syncytial virus
aacuaccaccaa

SEQ ID NO: 4014496 - RNA, 17 nt, Human respiratory syncytial virus
aacuugaugaaagacaa

SEQ ID NO: 4014497 - RNA, 20 nt, Human respiratory syncytial virus
aacuugcaagcaucaacaua

SEQ ID NO: 4014498 - RNA, 18 nt, Human respiratory syncytial virus
aagaaacaauagaaacau

SEQ ID NO: 4014499 - RNA, 16 nt, Human respiratory syncytial virus
aagaaaccaggaucuu

SEQ ID NO: 4014500 - RNA, 22 nt, Human respiratory syncytial virus
aagaaaugauagaaaaaauaag

SEQ ID NO: 4014501 - RNA, 14 nt, Human respiratory syncytial virus
aagagcggaagcau

SEQ ID NO: 4014502 - RNA, 13 nt, Human respiratory syncytial virus
aagaugauguaga

SEQ ID NO: 4014503 - RNA, 18 nt, Human respiratory syncytial virus
aagaugcaaauaacaaag

SEQ ID NO: 4014504 - RNA, 12 nt, Human respiratory syncytial virus
aagcauaugcag

SEQ ID NO: 4014505 - RNA, 17 nt, Human respiratory syncytial virus
aagcuacugcacaaagu

SEQ ID NO: 4014506 - RNA, 15 nt, Human respiratory syncytial virus
aaggcuccacauaca

SEQ ID NO: 4014507 - RNA, 13 nt, Human respiratory syncytial virus
aaguaaccaaaga

SEQ ID NO: 4014508 - RNA, 18 nt, Human respiratory syncytial virus
aagucaaguuaaaugaua

SEQ ID NO: 4014509 - RNA, 17 nt, Human respiratory syncytial virus
aagugugguccuaggca

SEQ ID NO: 4014510 - RNA, 13 nt, Human respiratory syncytial virus
aauaaaagcuuag

SEQ ID NO: 4014511 - RNA, 14 nt, Human respiratory syncytial virus
aauaaccaaauuag

SEQ ID NO: 4014512 - RNA, 18 nt, Human respiratory syncytial virus
aauaagucaacauggaga

SEQ ID NO: 4014513 - RNA, 19 nt, Human respiratory syncytial virus
aauagguaaauaaaaccaa

SEQ ID NO: 4014514 - RNA, 23 nt, Human respiratory syncytial virus
aauagguauguuauaugcuaugu

SEQ ID NO: 4014515 - RNA, 19 nt, Human respiratory syncytial virus
aauaguuaagaaggagcua

SEQ ID NO: 4014516 - RNA, 15 nt, Human respiratory syncytial virus
aaucaaucauauaca

SEQ ID NO: 4014517 - RNA, 17 nt, Human respiratory syncytial virus
aaucacugaagaugcaa

SEQ ID NO: 4014518 - RNA, 18 nt, Human respiratory syncytial virus
aauuaacauaaugaugaa

SEQ ID NO: 4014519 - RNA, 17 nt, Human respiratory syncytial virus
aauuagcagcaggagac

SEQ ID NO: 4014520 - RNA, 15 nt, Human respiratory syncytial virus
aauuaugaugugcaa

SEQ ID NO: 4014521 - RNA, 15 nt, Human respiratory syncytial virus
aauucaaaaaugcua

SEQ ID NO: 4014522 - RNA, 20 nt, Human respiratory syncytial virus
aauucaaaaaugcuaucacc

SEQ ID NO: 4014523 - RNA, 14 nt, Human respiratory syncytial virus
aauuggaagccaua

SEQ ID NO: 4014524 - RNA, 15 nt, Human respiratory syncytial virus
aauuggaagccauaa

SEQ ID NO: 4014525 - RNA, 22 nt, Human respiratory syncytial virus
aauuuaaaaucuauagcacaaa

SEQ ID NO: 4014526 - RNA, 16 nt, Human respiratory syncytial virus
acaaacaaagcuguag

SEQ ID NO: 4014527 - RNA, 16 nt, Human respiratory syncytial virus
acaaauagcacuauca

SEQ ID NO: 4014528 - RNA, 16 nt, Human respiratory syncytial virus
acaagaaauacacuga

SEQ ID NO: 4014529 - RNA, 18 nt, Human respiratory syncytial virus
acaagauggggcaaauau

SEQ ID NO: 4014530 - RNA, 22 nt, Human respiratory syncytial virus
acaagggucucauaccaaagga

SEQ ID NO: 4014531 - RNA, 14 nt, Human respiratory syncytial virus
acaauccaaaagca

SEQ ID NO: 4014532 - RNA, 18 nt, Human respiratory syncytial virus
acacucccaauuaugaug

SEQ ID NO: 4014533 - RNA, 21 nt, Human respiratory syncytial virus
acagauuaaauuuaaaaucua

SEQ ID NO: 4014534 - RNA, 15 nt, Human respiratory syncytial virus
acauaaauuggggca

SEQ ID NO: 4014535 - RNA, 16 nt, Human respiratory syncytial virus
acaucaccaauccaca

SEQ ID NO: 4014536 - RNA, 18 nt, Human respiratory syncytial virus
acaucaccaauccacaca

SEQ ID NO: 4014537 - RNA, 19 nt, Human respiratory syncytial virus
acaucaccaauccacacaa

SEQ ID NO: 4014538 - RNA, 18 nt, Human respiratory syncytial virus
accauuuuaguuaauaua

SEQ ID NO: 4014539 - RNA, 16 nt, Human respiratory syncytial virus
acccuaaagaagauga

SEQ ID NO: 4014540 - RNA, 15 nt, Human respiratory syncytial virus
acuaauacauaugau

SEQ ID NO: 4014541 - RNA, 14 nt, Human respiratory syncytial virus
acuaauuauaauca

SEQ ID NO: 4014542 - RNA, 16 nt, Human respiratory syncytial virus
acuacaccuugugaaa

SEQ ID NO: 4014543 - RNA, 23 nt, Human respiratory syncytial virus
acuauaaaucuuaaaaugggaaa

SEQ ID NO: 4014544 - RNA, 21 nt, Human respiratory syncytial virus
acuaugagcacuacaaaugac

SEQ ID NO: 4014545 - RNA, 23 nt, Human respiratory syncytial virus
acuauucaacguaguacaggaga

SEQ ID NO: 4014546 - RNA, 14 nt, Human respiratory syncytial virus
acucaaaauccaaa

SEQ ID NO: 4014547 - RNA, 22 nt, Human respiratory syncytial virus
acugaaugacagguccacauau

SEQ ID NO: 4014548 - RNA, 15 nt, Human respiratory syncytial virus
acuuccaaaaaauug

SEQ ID NO: 4014549 - RNA, 15 nt, Human respiratory syncytial virus
agaaaccaaagccaa

SEQ ID NO: 4014550 - RNA, 13 nt, Human respiratory syncytial virus
agaaguugggagg

SEQ ID NO: 4014551 - RNA, 10 nt, Human respiratory syncytial virus
aaaacacacc

SEQ ID NO: 4014552 - RNA, 21 nt, Human respiratory syncytial virus
aaaaccccuaguaagcuucaa

SEQ ID NO: 4014553 - RNA, 24 nt, Human respiratory syncytial virus
aaaauaugggguaaauagacauua

SEQ ID NO: 4014554 - RNA, 15 nt, Human respiratory syncytial virus
aaacacaccacacaa

SEQ ID NO: 4014555 - RNA, 22 nt, Human respiratory syncytial virus
aaacacacccaacuccacacaa

SEQ ID NO: 4014556 - RNA, 13 nt, Human respiratory syncytial virus
aaacuacacacua

SEQ ID NO: 4014557 - RNA, 15 nt, Human respiratory syncytial virus
aaacuugaugaaaga

SEQ ID NO: 4014558 - RNA, 20 nt, Human respiratory syncytial virus
aaagaacuugcaagcaucaa

SEQ ID NO: 4014559 - RNA, 14 nt, Human respiratory syncytial virus
aaagaaucaacuca

SEQ ID NO: 4014560 - RNA, 22 nt, Human respiratory syncytial virus
aaagcauaugcagagcaacuca

SEQ ID NO: 4014561 - RNA, 19 nt, Human respiratory syncytial virus
aaauaaaaguaaagccaau

SEQ ID NO: 4014562 - RNA, 13 nt, Human respiratory syncytial virus
aaauacaagucaa

SEQ ID NO: 4014563 - RNA, 15 nt, Human respiratory syncytial virus
aaaucaaagcaugca

SEQ ID NO: 4014564 - RNA, 18 nt, Human respiratory syncytial virus
aaaucaauaugguuguau

SEQ ID NO: 4014565 - RNA, 21 nt, Human respiratory syncytial virus
aaaucaucacacacaaauuca

SEQ ID NO: 4014566 - RNA, 14 nt, Human respiratory syncytial virus
aaaugaucaaacaa

SEQ ID NO: 4014567 - RNA, 23 nt, Human respiratory syncytial virus
aaaugcaaccauguccaaacaca

SEQ ID NO: 4014568 - RNA, 17 nt, Human respiratory syncytial virus
aaauuacacacaucacc

SEQ ID NO: 4014569 - RNA, 22 nt, Human respiratory syncytial virus
aacaaugauacaugugcauuua

SEQ ID NO: 4014570 - RNA, 16 nt, Human respiratory syncytial virus
aacacacaauccaaca

SEQ ID NO: 4014571 - RNA, 18 nt, Human respiratory syncytial virus
aacacacaauccaacagc

SEQ ID NO: 4014572 - RNA, 15 nt, Human respiratory syncytial virus
aacacccacagcauc

SEQ ID NO: 4014573 - RNA, 16 nt, Human respiratory syncytial virus
aacaguuauagaauuc

SEQ ID NO: 4014574 - RNA, 23 nt, Human respiratory syncytial virus
aacaguuauagaauuccagcaga

SEQ ID NO: 4014575 - RNA, 12 nt, Human respiratory syncytial virus
aaccacaaacaa

SEQ ID NO: 4014576 - RNA, 21 nt, Human respiratory syncytial virus
aacccuaaagaagaugaugua

SEQ ID NO: 4014577 - RNA, 22 nt, Human respiratory syncytial virus
aacuacacacuauauccaaaca

SEQ ID NO: 4014578 - RNA, 16 nt, Human respiratory syncytial virus
aacuacagucaaagau

SEQ ID NO: 4014579 - RNA, 13 nt, Human respiratory syncytial virus
aacucaaagaaaa

SEQ ID NO: 4014580 - RNA, 15 nt, Human respiratory syncytial virus
aacuuauaaaacaag

SEQ ID NO: 4014581 - RNA, 15 nt, Human respiratory syncytial virus
aacuuccaaaaaauu

SEQ ID NO: 4014582 - RNA, 16 nt, Human respiratory syncytial virus
aagaacuugcaagcau

SEQ ID NO: 4014583 - RNA, 20 nt, Human respiratory syncytial virus
aagaauuggaagccauaaag

SEQ ID NO: 4014584 - RNA, 17 nt, Human respiratory syncytial virus
aagacacuauaaagaua

SEQ ID NO: 4014585 - RNA, 23 nt, Human respiratory syncytial virus
aagaccaauuagugucaaaaaca

SEQ ID NO: 4014586 - RNA, 14 nt, Human respiratory syncytial virus
aagaugcaaauaac

SEQ ID NO: 4014587 - RNA, 17 nt, Human respiratory syncytial virus
aagaugcuggauaucau

SEQ ID NO: 4014588 - RNA, 19 nt, Human respiratory syncytial virus
aagaugcuggauaucaugu

SEQ ID NO: 4014589 - RNA, 20 nt, Human respiratory syncytial virus
aagauggcucuuagcaaagu

SEQ ID NO: 4014590 - RNA, 12 nt, Human respiratory syncytial virus
aagccaaaaaca

SEQ ID NO: 4014591 - RNA, 14 nt, Human respiratory syncytial virus
aagccuacaaaaca

SEQ ID NO: 4014592 - RNA, 19 nt, Human respiratory syncytial virus
aagcuugacaucagaaaua

SEQ ID NO: 4014593 - RNA, 14 nt, Human respiratory syncytial virus
aaguguuugaaaaa

SEQ ID NO: 4014594 - RNA, 17 nt, Human respiratory syncytial virus
aauaucuguuaacucaa

SEQ ID NO: 4014595 - RNA, 23 nt, Human respiratory syncytial virus
aaucacugaagaugcaaaucaua

SEQ ID NO: 4014596 - RNA, 19 nt, Human respiratory syncytial virus
aaugaucaaacaaaugaca

SEQ ID NO: 4014597 - RNA, 14 nt, Human respiratory syncytial virus
aaugaucugucacu

SEQ ID NO: 4014598 - RNA, 22 nt, Human respiratory syncytial virus
aauggaguagauauaacaacau

SEQ ID NO: 4014599 - RNA, 19 nt, Human respiratory syncytial virus
aauuacuuggauaaguaau

SEQ ID NO: 4014600 - RNA, 18 nt, Human respiratory syncytial virus
aauuagcauaugauguaa

SEQ ID NO: 4014601 - RNA, 14 nt, Human respiratory syncytial virus
aauuaugaugugca

SEQ ID NO: 4014602 - RNA, 12 nt, Human respiratory syncytial virus
acaaacaaaugu

SEQ ID NO: 4014603 - RNA, 21 nt, Human respiratory syncytial virus
acaaaccaaucccacucaaaa

SEQ ID NO: 4014604 - RNA, 13 nt, Human respiratory syncytial virus
acaacaucaauaa

SEQ ID NO: 4014605 - RNA, 15 nt, Human respiratory syncytial virus
acaacauuacagcaa

SEQ ID NO: 4014606 - RNA, 21 nt, Human respiratory syncytial virus
acaagccgagcacaaaaccac

SEQ ID NO: 4014607 - RNA, 17 nt, Human respiratory syncytial virus
acaaugaucugucacuu

SEQ ID NO: 4014608 - RNA, 19 nt, Human respiratory syncytial virus
acauaagcagcucaguaau

SEQ ID NO: 4014609 - RNA, 14 nt, Human respiratory syncytial virus
acauacacagcagc

SEQ ID NO: 4014610 - RNA, 12 nt, Human respiratory syncytial virus
acaucaaaaaca

SEQ ID NO: 4014611 - RNA, 16 nt, Human respiratory syncytial virus
acaucaugaacaucua

SEQ ID NO: 4014612 - RNA, 23 nt, Human respiratory syncytial virus
acaugcuuaguuauucaaaaacu

SEQ ID NO: 4014613 - RNA, 22 nt, Human respiratory syncytial virus
acauuaguuagaguucaaucaa

SEQ ID NO: 4014614 - RNA, 18 nt, Human respiratory syncytial virus
acauuggggcaaaugcaa

SEQ ID NO: 4014615 - RNA, 13 nt, Human respiratory syncytial virus
accaacaucauca

SEQ ID NO: 4014616 - RNA, 16 nt, Human respiratory syncytial virus
accaaccaaucaauca

SEQ ID NO: 4014617 - RNA, 13 nt, Human respiratory syncytial virus
accaaucaaucaa

SEQ ID NO: 4014618 - RNA, 22 nt, Human respiratory syncytial virus
accaaucaaucaaccaacugau

SEQ ID NO: 4014619 - RNA, 16 nt, Human respiratory syncytial virus
accacacaacagcaca

SEQ ID NO: 4014620 - RNA, 14 nt, Human respiratory syncytial virus
accuagaaaaagag

SEQ ID NO: 4014621 - RNA, 16 nt, Human respiratory syncytial virus
acuauaaagauacuua

SEQ ID NO: 4014622 - RNA, 19 nt, Human respiratory syncytial virus
acuaugcaaagauuaauga

SEQ ID NO: 4014623 - RNA, 23 nt, Human respiratory syncytial virus
acucaccuaaucaaucaaacuau

SEQ ID NO: 4014624 - RNA, 13 nt, Human respiratory syncytial virus
acugaaauuauuu

SEQ ID NO: 4014625 - RNA, 22 nt, Human respiratory syncytial virus
acugccagaccgaacaaacaaa

SEQ ID NO: 4014626 - RNA, 20 nt, Human respiratory syncytial virus
acuugaugaaagacaagcua

SEQ ID NO: 4014627 - RNA, 15 nt, Human respiratory syncytial virus
acuugcaagcaucaa

SEQ ID NO: 4014628 - RNA, 18 nt, Human respiratory syncytial virus
agaaaauggaguaauaaa

SEQ ID NO: 4014629 - RNA, 16 nt, Human respiratory syncytial virus
agaaauggagcaaguu

SEQ ID NO: 4014630 - RNA, 17 nt, Human respiratory syncytial virus
agaauugaugaaaaauu

SEQ ID NO: 4014631 - RNA, 15 nt, Human respiratory syncytial virus
agacaauaaaaaaca

SEQ ID NO: 4014632 - RNA, 13 nt, Human respiratory syncytial virus
agagaagaaauga

SEQ ID NO: 4014633 - RNA, 19 nt, Human respiratory syncytial virus
agagaagaaaugauagaaa

SEQ ID NO: 4014634 - RNA, 20 nt, Human respiratory syncytial virus
agauccuaagaagaaagaua

SEQ ID NO: 4014635 - RNA, 20 nt, Human respiratory syncytial virus
agaugcuggauaucauguua

SEQ ID NO: 4014636 - RNA, 14 nt, Human respiratory syncytial virus
agcaaagucaaguu

SEQ ID NO: 4014637 - RNA, 15 nt, Human respiratory syncytial virus
agcaaagucaaguua

SEQ ID NO: 4014638 - RNA, 21 nt, Human respiratory syncytial virus
agcaaauagacaaaaaaccac

SEQ ID NO: 4014639 - RNA, 17 nt, Human respiratory syncytial virus
agcagaagaacagcaga

SEQ ID NO: 4014640 - RNA, 23 nt, Human respiratory syncytial virus
agcauauauuaugugacuacuaa

SEQ ID NO: 4014641 - RNA, 21 nt, Human respiratory syncytial virus
agccauaaagaaucaacucaa

SEQ ID NO: 4014642 - RNA, 21 nt, Human respiratory syncytial virus
agcuacucauaugaagagaua

SEQ ID NO: 4014643 - RNA, 18 nt, Human respiratory syncytial virus
agcuuuaaguuaacaaaa

SEQ ID NO: 4014644 - RNA, 18 nt, Human respiratory syncytial virus
aggaucuuuaugaugcag

SEQ ID NO: 4014645 - RNA, 15 nt, Human respiratory syncytial virus
aggcauaaugggaga

SEQ ID NO: 4014646 - RNA, 21 nt, Human respiratory syncytial virus
agggaagacacuauaaagaua

SEQ ID NO: 4014647 - RNA, 16 nt, Human respiratory syncytial virus
aguauaugaacuauac

SEQ ID NO: 4014648 - RNA, 17 nt, Human respiratory syncytial virus
agucagucuaucaaaug

SEQ ID NO: 4014649 - RNA, 15 nt, Human respiratory syncytial virus
aguggcuccagaaua

SEQ ID NO: 4014650 - RNA, 15 nt, Human respiratory syncytial virus
agugucaaaaacaag

SEQ ID NO: 4014651 - RNA, 18 nt, Human respiratory syncytial virus
aguuaaaugauacauuaa

SEQ ID NO: 4014652 - RNA, 16 nt, Human respiratory syncytial virus
auaaaacaagaauuag

SEQ ID NO: 4014653 - RNA, 18 nt, Human respiratory syncytial virus
auaaacucaccuaaucaa

SEQ ID NO: 4014654 - RNA, 14 nt, Human respiratory syncytial virus
auaaagauacuuaa

SEQ ID NO: 4014655 - RNA, 21 nt, Human respiratory syncytial virus
auaaagauacuuaaagaugcu

SEQ ID NO: 4014656 - RNA, 22 nt, Human respiratory syncytial virus
auaaugaaggcuucuacauaau

SEQ ID NO: 4014657 - RNA, 14 nt, Human respiratory syncytial virus
auaaugaugaauua

SEQ ID NO: 4014658 - RNA, 14 nt, Human respiratory syncytial virus
auacaaauaugacc

SEQ ID NO: 4014659 - RNA, 13 nt, Human respiratory syncytial virus
auacauuaaauaa

SEQ ID NO: 4014660 - RNA, 15 nt, Human respiratory syncytial virus
auaccaagcaacaaa

SEQ ID NO: 4014661 - RNA, 21 nt, Human respiratory syncytial virus
auacuugauaaacaaugaaug

SEQ ID NO: 4014662 - RNA, 18 nt, Human respiratory syncytial virus
auagaaguaaccaaagag

SEQ ID NO: 4014663 - RNA, 22 nt, Human respiratory syncytial virus
auagcuaacaguuuuuaugaag

SEQ ID NO: 4014664 - RNA, 22 nt, Human respiratory syncytial virus
auaguuauuaaaaaauaugcaa

SEQ ID NO: 4014665 - RNA, 14 nt, Human respiratory syncytial virus
auaucgaucaaaug

SEQ ID NO: 4014666 - RNA, 18 nt, Human respiratory syncytial virus
auaucuguuaacucaaua

SEQ ID NO: 4014667 - RNA, 15 nt, Human respiratory syncytial virus
auauguggcaacaau

SEQ ID NO: 4014668 - RNA, 18 nt, Human respiratory syncytial virus
aucaagcuugacaucaga

SEQ ID NO: 4014669 - RNA, 13 nt, Human respiratory syncytial virus
aucauccaaagau

SEQ ID NO: 4014670 - RNA, 16 nt, Human respiratory syncytial virus
auccaaacaucaugaa

SEQ ID NO: 4014671 - RNA, 18 nt, Human respiratory syncytial virus
aucgucaagauauaaaug

SEQ ID NO: 4014672 - RNA, 13 nt, Human respiratory syncytial virus
aucuauagcacaa

SEQ ID NO: 4014673 - RNA, 17 nt, Human respiratory syncytial virus
aucucucaccaaagaaa

SEQ ID NO: 4014674 - RNA, 16 nt, Human respiratory syncytial virus
aucugaugaauuacua

SEQ ID NO: 4014675 - RNA, 23 nt, Human respiratory syncytial virus
aucugaugaauuacuacauaaug

SEQ ID NO: 4014676 - RNA, 15 nt, Human respiratory syncytial virus
augacugcaaaauua

SEQ ID NO: 4014677 - RNA, 20 nt, Human respiratory syncytial virus
augaguaugcacagaaguug

SEQ ID NO: 4014678 - RNA, 14 nt, Human respiratory syncytial virus
augauaugccuaua

SEQ ID NO: 4014679 - RNA, 18 nt, Human respiratory syncytial virus
augcagcaggucuaggca

SEQ ID NO: 4014680 - RNA, 12 nt, Human respiratory syncytial virus
augcuaaaagag

SEQ ID NO: 4014681 - RNA, 17 nt, Human respiratory syncytial virus
auggaacugacacuaaa

SEQ ID NO: 4014682 - RNA, 16 nt, Human respiratory syncytial virus
auggagcaaguugugg

SEQ ID NO: 4014683 - RNA, 12 nt, Human respiratory syncytial virus
augucaagcaau

SEQ ID NO: 4014684 - RNA, 18 nt, Human respiratory syncytial virus
auguccagguuaggaagg

SEQ ID NO: 4014685 - RNA, 22 nt, Human respiratory syncytial virus
auguccagguuaggaagggaag

SEQ ID NO: 4014686 - RNA, 14 nt, Human respiratory syncytial virus
augugcaaaaacac

SEQ ID NO: 4014687 - RNA, 14 nt, Human respiratory syncytial virus
auuaagccuacaaa

SEQ ID NO: 4014688 - RNA, 18 nt, Human respiratory syncytial virus
auuaaucacugaagaugc

SEQ ID NO: 4014689 - RNA, 13 nt, Human respiratory syncytial virus
auuagaacacaca

SEQ ID NO: 4014690 - RNA, 18 nt, Human respiratory syncytial virus
auuagacuuaacagcaga

SEQ ID NO: 4014691 - RNA, 19 nt, Human respiratory syncytial virus
auuaugacaucaaaaagag

SEQ ID NO: 4014692 - RNA, 22 nt, Human respiratory syncytial virus
auuaugauaacuacaauuauua

SEQ ID NO: 4014693 - RNA, 13 nt, Human respiratory syncytial virus
auucacaagcaaa

SEQ ID NO: 4014694 - RNA, 14 nt, Human respiratory syncytial virus
auuccaacaaaaaa

SEQ ID NO: 4014695 - RNA, 17 nt, Human respiratory syncytial virus
auuccuagaaucaauaa

SEQ ID NO: 4014696 - RNA, 22 nt, Human respiratory syncytial virus
auucuuagucaauuaugagaug

SEQ ID NO: 4014697 - RNA, 22 nt, Human respiratory syncytial virus
auugcaaagccaaaaacacacc

SEQ ID NO: 4014698 - RNA, 18 nt, Human respiratory syncytial virus
auugguuugcuguuguau

SEQ ID NO: 4014699 - RNA, 20 nt, Human respiratory syncytial virus
auuuagaugcuaacacauca

SEQ ID NO: 4014700 - RNA, 14 nt, Human respiratory syncytial virus
auuucauggagaag

SEQ ID NO: 4014701 - RNA, 20 nt, Human respiratory syncytial virus
auuucauggagaagaugcaa

SEQ ID NO: 4014702 - RNA, 19 nt, Human respiratory syncytial virus
caaaaaaagaacaagaugg

SEQ ID NO: 4014703 - RNA, 14 nt, Human respiratory syncytial virus
caaaaaugcuauca

SEQ ID NO: 4014704 - RNA, 23 nt, Human respiratory syncytial virus
caaaaaugcuaucaccaaugcga

SEQ ID NO: 4014705 - RNA, 21 nt, Human respiratory syncytial virus
caaaacacacuccuauaauau

SEQ ID NO: 4014706 - RNA, 15 nt, Human respiratory syncytial virus
caaaaccacaaacaa

SEQ ID NO: 4014707 - RNA, 17 nt, Human respiratory syncytial virus
caaaauccaaaaucacu

SEQ ID NO: 4014708 - RNA, 17 nt, Human respiratory syncytial virus
caaacaucaugaacauc

SEQ ID NO: 4014709 - RNA, 15 nt, Human respiratory syncytial virus
caaaccaaccaccaa

SEQ ID NO: 4014710 - RNA, 22 nt, Human respiratory syncytial virus
caaagaaaucaucacacacaaa

SEQ ID NO: 4014711 - RNA, 23 nt, Human respiratory syncytial virus
caaagaaaucaucacacacaaau

SEQ ID NO: 4014712 - RNA, 15 nt, Human respiratory syncytial virus
caaagcauaugcaga

SEQ ID NO: 4014713 - RNA, 19 nt, Human respiratory syncytial virus
caaagcauaugcagagcaa

SEQ ID NO: 4014714 - RNA, 19 nt, Human respiratory syncytial virus
caaaucuacuacaaauauu

SEQ ID NO: 4014715 - RNA, 18 nt, Human respiratory syncytial virus
caaauuagcagcaggaga

SEQ ID NO: 4014716 - RNA, 20 nt, Human respiratory syncytial virus
caaauuagcagcaggagaca

SEQ ID NO: 4014717 - RNA, 16 nt, Human respiratory syncytial virus
caaauuagcauaugau

SEQ ID NO: 4014718 - RNA, 22 nt, Human respiratory syncytial virus
caaauucagccacaacaucacc

SEQ ID NO: 4014719 - RNA, 18 nt, Human respiratory syncytial virus
caaauuuagaugcuaaca

SEQ ID NO: 4014720 - RNA, 14 nt, Human respiratory syncytial virus
caacagcacaaacc

SEQ ID NO: 4014721 - RNA, 17 nt, Human respiratory syncytial virus
caaccaacugauccauc

SEQ ID NO: 4014722 - RNA, 17 nt, Human respiratory syncytial virus
caaccaccaaaaccaca

SEQ ID NO: 4014723 - RNA, 17 nt, Human respiratory syncytial virus
caacguaguacaggaga

SEQ ID NO: 4014724 - RNA, 20 nt, Human respiratory syncytial virus
caagauauaaauggaaagga

SEQ ID NO: 4014725 - RNA, 20 nt, Human respiratory syncytial virus
caagccgagcacaaaaccac

SEQ ID NO: 4014726 - RNA, 14 nt, Human respiratory syncytial virus
caauaaaaaacaca

SEQ ID NO: 4014727 - RNA, 19 nt, Human respiratory syncytial virus
caaucaaacacuaaaucaa

SEQ ID NO: 4014728 - RNA, 11 nt, Human respiratory syncytial virus
caaucaaucaa

SEQ ID NO: 4014729 - RNA, 18 nt, Human respiratory syncytial virus
caaucaaucauauacaaa

SEQ ID NO: 4014730 - RNA, 19 nt, Human respiratory syncytial virus
caauuaugagaugaagcua

SEQ ID NO: 4014731 - RNA, 16 nt, Human respiratory syncytial virus
caccagcugccaacaa

SEQ ID NO: 4014732 - RNA, 15 nt, Human respiratory syncytial virus
cacccccgaaaacac

SEQ ID NO: 4014733 - RNA, 16 nt, Human respiratory syncytial virus
caccuugugaaaucaa

SEQ ID NO: 4014734 - RNA, 16 nt, Human respiratory syncytial virus
cacguuuuucaaucaa

SEQ ID NO: 4014735 - RNA, 20 nt, Human respiratory syncytial virus
cacuaaaucaacacaucauu

SEQ ID NO: 4014736 - RNA, 20 nt, Human respiratory syncytial virus
cacugugcucgacacaacca

SEQ ID NO: 4014737 - RNA, 18 nt, Human respiratory syncytial virus
cagaaagagacaccagca

SEQ ID NO: 4014738 - RNA, 15 nt, Human respiratory syncytial virus
cagaccgaacaaaca

SEQ ID NO: 4014739 - RNA, 17 nt, Human respiratory syncytial virus
cauaaaagaacuugcaa

SEQ ID NO: 4014740 - RNA, 14 nt, Human respiratory syncytial virus
caucaaaaacagac

SEQ ID NO: 4014741 - RNA, 14 nt, Human respiratory syncytial virus
caucacacacaaau

SEQ ID NO: 4014742 - RNA, 19 nt, Human respiratory syncytial virus
cauggugucgcaaaaccac

SEQ ID NO: 4014743 - RNA, 16 nt, Human respiratory syncytial virus
ccaacaaaaaaaccaa

SEQ ID NO: 4014744 - RNA, 21 nt, Human respiratory syncytial virus
ccaacaucaucaauccaacaa

SEQ ID NO: 4014745 - RNA, 19 nt, Human respiratory syncytial virus
ccacacaacagcacaaacc

SEQ ID NO: 4014746 - RNA, 20 nt, Human respiratory syncytial virus
ccuguauauauaaacaaaca

SEQ ID NO: 4014747 - RNA, 23 nt, Human respiratory syncytial virus
cgaauagguaaauaaaaccaaaa

SEQ ID NO: 4014748 - RNA, 16 nt, Human respiratory syncytial virus
cuaacaaugauacaug

SEQ ID NO: 4014749 - RNA, 14 nt, Human respiratory syncytial virus
cuaauacauaugau

SEQ ID NO: 4014750 - RNA, 14 nt, Human respiratory syncytial virus
cuacaaaaaaaugc

SEQ ID NO: 4014751 - RNA, 16 nt, Human respiratory syncytial virus
cuacauuuacauucuu

SEQ ID NO: 4014752 - RNA, 13 nt, Human respiratory syncytial virus
cuaccuagaaaaa

SEQ ID NO: 4014753 - RNA, 15 nt, Human respiratory syncytial virus
cuagaaucaauaaag

SEQ ID NO: 4014754 - RNA, 18 nt, Human respiratory syncytial virus
cuagaggauuaaauuuaa

SEQ ID NO: 4014755 - RNA, 23 nt, Human respiratory syncytial virus
cuaggucaugcuaguguccaggc

SEQ ID NO: 4014756 - RNA, 15 nt, Human respiratory syncytial virus
cuauauccaaacauc

SEQ ID NO: 4014757 - RNA, 12 nt, Human respiratory syncytial virus
cuauguccaggu

SEQ ID NO: 4014758 - RNA, 15 nt, Human respiratory syncytial virus
cugaaaaaaacauca

SEQ ID NO: 4014759 - RNA, 18 nt, Human respiratory syncytial virus
cugaaaaaaacaucacca

SEQ ID NO: 4014760 - RNA, 16 nt, Human respiratory syncytial virus
cugugucaaauuauaa

SEQ ID NO: 4014761 - RNA, 20 nt, Human respiratory syncytial virus
cuugaugauuuuugaucagu

SEQ ID NO: 4014762 - RNA, 15 nt, Human respiratory syncytial virus
gaaaaagaugaugau

SEQ ID NO: 4014763 - RNA, 22 nt, Human respiratory syncytial virus
gaaaauccuacaaaaaaaugcu

SEQ ID NO: 4014764 - RNA, 20 nt, Human respiratory syncytial virus
gaaacaauagaaacauuuga

SEQ ID NO: 4014765 - RNA, 15 nt, Human respiratory syncytial virus
gaaauacaagucaau

SEQ ID NO: 4014766 - RNA, 15 nt, Human respiratory syncytial virus
gaaguaaccaaagag

SEQ ID NO: 4014767 - RNA, 13 nt, Human respiratory syncytial virus
gaaucaacucaac

SEQ ID NO: 4014768 - RNA, 20 nt, Human respiratory syncytial virus
gaaugacagguccacauaua

SEQ ID NO: 4014769 - RNA, 16 nt, Human respiratory syncytial virus
gaauucaaaaaugcua

SEQ ID NO: 4014770 - RNA, 11 nt, Human respiratory syncytial virus
gagagaagaaa

SEQ ID NO: 4014771 - RNA, 18 nt, Human respiratory syncytial virus
gauaacaaugaagaagaa

SEQ ID NO: 4014772 - RNA, 14 nt, Human respiratory syncytial virus
gauaaccaccagcg

SEQ ID NO: 4014773 - RNA, 13 nt, Human respiratory syncytial virus
gaucaaacaaaug

SEQ ID NO: 4014774 - RNA, 19 nt, Human respiratory syncytial virus
gaucugaacucacuagaaa

SEQ ID NO: 4014775 - RNA, 21 nt, Human respiratory syncytial virus
gaucuuggugccuaccuagaa

SEQ ID NO: 4014776 - RNA, 22 nt, Human respiratory syncytial virus
gaugaagcuacugcacaaagua

SEQ ID NO: 4014777 - RNA, 23 nt, Human respiratory syncytial virus
gauuaaauuuaauuaucaacacu

SEQ ID NO: 4014778 - RNA, 14 nt, Human respiratory syncytial virus
gcaaaaacaccuaa

SEQ ID NO: 4014779 - RNA, 18 nt, Human respiratory syncytial virus
gcaaaaacaccuaaacaa

SEQ ID NO: 4014780 - RNA, 15 nt, Human respiratory syncytial virus
gcaaagauuaaugau

SEQ ID NO: 4014781 - RNA, 16 nt, Human respiratory syncytial virus
gcaaauaaacucaccu

SEQ ID NO: 4014782 - RNA, 23 nt, Human respiratory syncytial virus
gcaaguucgcaucauccaaagau

SEQ ID NO: 4014783 - RNA, 14 nt, Human respiratory syncytial virus
gcaauacuaaauaa

SEQ ID NO: 4014784 - RNA, 14 nt, Human respiratory syncytial virus
gcaaugauaaucuc

SEQ ID NO: 4014785 - RNA, 14 nt, Human respiratory syncytial virus
gcagagcaacucaa

SEQ ID NO: 4014786 - RNA, 21 nt, Human respiratory syncytial virus
gcagccaaagcauaugcagag

SEQ ID NO: 4014787 - RNA, 14 nt, Human respiratory syncytial virus
gccaauaacauaaa

SEQ ID NO: 4014788 - RNA, 15 nt, Human respiratory syncytial virus
gccucuuaauccaac

SEQ ID NO: 4014789 - RNA, 20 nt, Human respiratory syncytial virus
gcuaagugaacauaaaacau

SEQ ID NO: 4014790 - RNA, 20 nt, Human respiratory syncytial virus
gcuacacguuuuucaaucaa

SEQ ID NO: 4014791 - RNA, 24 nt, Human respiratory syncytial virus
ggaaacauacgugaacaagcuuca

SEQ ID NO: 4014792 - RNA, 13 nt, Human respiratory syncytial virus
ggagaagaugcaa

SEQ ID NO: 4014793 - RNA, 21 nt, Human respiratory syncytial virus
ggauucaauaauaacaucucu

SEQ ID NO: 4014794 - RNA, 15 nt, Human respiratory syncytial virus
ggcaaauaagucaac

SEQ ID NO: 4014795 - RNA, 15 nt, Human respiratory syncytial virus
ggcauaaugggagag

SEQ ID NO: 4014796 - RNA, 15 nt, Human respiratory syncytial virus
gggcaaauaagucaa

SEQ ID NO: 4014797 - RNA, 15 nt, Human respiratory syncytial virus
guaccaaauacaaga

SEQ ID NO: 4014798 - RNA, 20 nt, Human respiratory syncytial virus
guaguuauuuaaaaauuaac

SEQ ID NO: 4014799 - RNA, 22 nt, Human respiratory syncytial virus
guauaugaacuauacaaucaau

SEQ ID NO: 4014800 - RNA, 19 nt, Human respiratory syncytial virus
guaucauuagaugaaagaa

SEQ ID NO: 4014801 - RNA, 15 nt, Human respiratory syncytial virus
gucaacauggagaag

SEQ ID NO: 4014802 - RNA, 24 nt, Human respiratory syncytial virus
gugcaaaaacaccuaaacaaacua

SEQ ID NO: 4014803 - RNA, 22 nt, Human respiratory syncytial virus
guucaaacaauaaaaaaccaca

SEQ ID NO: 4014804 - RNA, 19 nt, Human respiratory syncytial virus
guuuuucaaucaaaccacu

SEQ ID NO: 4014805 - RNA, 15 nt, Human respiratory syncytial virus
uaaaacuaacaauga

SEQ ID NO: 4014806 - RNA, 15 nt, Human respiratory syncytial virus
uaaagccaauaacau

SEQ ID NO: 4014807 - RNA, 13 nt, Human respiratory syncytial virus
uaaauaaggauca

SEQ ID NO: 4014808 - RNA, 21 nt, Human respiratory syncytial virus
uaacaucuggcaccaacauca

SEQ ID NO: 4014809 - RNA, 13 nt, Human respiratory syncytial virus
uaaccaauuauua

SEQ ID NO: 4014810 - RNA, 18 nt, Human respiratory syncytial virus
uaagucaacauggagaag

SEQ ID NO: 4014811 - RNA, 15 nt, Human respiratory syncytial virus
uaaucauuguaguau

SEQ ID NO: 4014812 - RNA, 15 nt, Human respiratory syncytial virus
uaaugucaagcaaug

SEQ ID NO: 4014813 - RNA, 15 nt, Human respiratory syncytial virus
uacaaagaaacaaua

SEQ ID NO: 4014814 - RNA, 16 nt, Human respiratory syncytial virus
uacacacuucaucaca

SEQ ID NO: 4014815 - RNA, 23 nt, Human respiratory syncytial virus
uacauaggaucuauaaacaacau

SEQ ID NO: 4014816 - RNA, 17 nt, Human respiratory syncytial virus
uacauguuaacaaacag

SEQ ID NO: 4014817 - RNA, 17 nt, Human respiratory syncytial virus
uaccaagcaacaaacca

SEQ ID NO: 4014818 - RNA, 17 nt, Human respiratory syncytial virus
uacuaauuauaaucacu

SEQ ID NO: 4014819 - RNA, 21 nt, Human respiratory syncytial virus
uacuaugcaaagauuaaugau

SEQ ID NO: 4014820 - RNA, 20 nt, Human respiratory syncytial virus
uagcuuacugauuccaaaau

SEQ ID NO: 4014821 - RNA, 20 nt, Human respiratory syncytial virus
uaggaagggaagacacuaua

SEQ ID NO: 4014822 - RNA, 14 nt, Human respiratory syncytial virus
uauaaaaacucauc

SEQ ID NO: 4014823 - RNA, 17 nt, Human respiratory syncytial virus
uauaaaagaaaccaaau

SEQ ID NO: 4014824 - RNA, 15 nt, Human respiratory syncytial virus
uaugagcacuacaaa

SEQ ID NO: 4014825 - RNA, 14 nt, Human respiratory syncytial virus
uauguuauaugcua

SEQ ID NO: 4014826 - RNA, 12 nt, Human respiratory syncytial virus
uauuagugucau

SEQ ID NO: 4014827 - RNA, 19 nt, Human respiratory syncytial virus
ucaaacaauaaaaaaccac

SEQ ID NO: 4014828 - RNA, 16 nt, Human respiratory syncytial virus
ucaaacccacaaacaa

SEQ ID NO: 4014829 - RNA, 17 nt, Human respiratory syncytial virus
ucaaagaaaauggagua

SEQ ID NO: 4014830 - RNA, 18 nt, Human respiratory syncytial virus
ucaacaacaucaauaaaa

SEQ ID NO: 4014831 - RNA, 18 nt, Human respiratory syncytial virus
ucaacguaguacaggaga

SEQ ID NO: 4014832 - RNA, 22 nt, Human respiratory syncytial virus
ucaacucaacccuaaagaagau

SEQ ID NO: 4014833 - RNA, 18 nt, Human respiratory syncytial virus
ucaaguaucacaaucaaa

SEQ ID NO: 4014834 - RNA, 21 nt, Human respiratory syncytial virus
ucaagugugguccuaggcaau

SEQ ID NO: 4014835 - RNA, 15 nt, Human respiratory syncytial virus
ucaaguuaaaugaua

SEQ ID NO: 4014836 - RNA, 19 nt, Human respiratory syncytial virus
ucaauaucucaagucaaug

SEQ ID NO: 4014837 - RNA, 21 nt, Human respiratory syncytial virus
ucaaucauauacaaauucaga

SEQ ID NO: 4014838 - RNA, 17 nt, Human respiratory syncytial virus
ucacaguucaaacaaua

SEQ ID NO: 4014839 - RNA, 20 nt, Human respiratory syncytial virus
ucacaguucaaacaauaaaa

SEQ ID NO: 4014840 - RNA, 22 nt, Human respiratory syncytial virus
ucagcaaauagacaaaaaacca

SEQ ID NO: 4014841 - RNA, 14 nt, Human respiratory syncytial virus
ucaucacacaaacc

SEQ ID NO: 4014842 - RNA, 19 nt, Human respiratory syncytial virus
ucauggagaagaugcaaau

SEQ ID NO: 4014843 - RNA, 17 nt, Human respiratory syncytial virus
ucauguuucaacaacag

SEQ ID NO: 4014844 - RNA, 12 nt, Human respiratory syncytial virus
uccacacaaaca

SEQ ID NO: 4014845 - RNA, 13 nt, Human respiratory syncytial virus
uccacacaaacac

SEQ ID NO: 4014846 - RNA, 13 nt, Human respiratory syncytial virus
uccuaagaagaaa

SEQ ID NO: 4014847 - RNA, 12 nt, Human respiratory syncytial virus
ucuagaaaaucc

SEQ ID NO: 4014848 - RNA, 15 nt, Human respiratory syncytial virus
ugaaauucgaaguau

SEQ ID NO: 4014849 - RNA, 22 nt, Human respiratory syncytial virus
ugaacaucuacacuacacacuu

SEQ ID NO: 4014850 - RNA, 19 nt, Human respiratory syncytial virus
ugaauuucauggagaagau

SEQ ID NO: 4014851 - RNA, 13 nt, Human respiratory syncytial virus
ugagcacuacaaa

SEQ ID NO: 4014852 - RNA, 17 nt, Human respiratory syncytial virus
ugcagcaggucuaggca

SEQ ID NO: 4014853 - RNA, 15 nt, Human respiratory syncytial virus
ugcuaacacaucauu

SEQ ID NO: 4014854 - RNA, 20 nt, Human respiratory syncytial virus
uggaguagauauaacaacau

SEQ ID NO: 4014855 - RNA, 14 nt, Human respiratory syncytial virus
uggcaccaacauca

SEQ ID NO: 4014856 - RNA, 19 nt, Human respiratory syncytial virus
uguauauauaaacaaacaa

SEQ ID NO: 4014857 - RNA, 21 nt, Human respiratory syncytial virus
uguuaacuacagucaaagauc

SEQ ID NO: 4014858 - RNA, 17 nt, Human respiratory syncytial virus
uuaaagcuaauggagua

SEQ ID NO: 4014859 - RNA, 16 nt, Human respiratory syncytial virus
uuaacauuaucaagcu

SEQ ID NO: 4014860 - RNA, 15 nt, Human respiratory syncytial virus
uuaaguuaacaaaaa

SEQ ID NO: 4014861 - RNA, 18 nt, Human respiratory syncytial virus
uuacauguuaacaaacag

SEQ ID NO: 4014862 - RNA, 17 nt, Human respiratory syncytial virus
uuaguuuuugacacuuu

SEQ ID NO: 4014863 - RNA, 19 nt, Human respiratory syncytial virus
uuccuagaaucaauaaagg

SEQ ID NO: 4014864 - RNA, 13 nt, Human respiratory syncytial virus
uugaugaaaaauu

SEQ ID NO: 4014865 - RNA, 14 nt, Human respiratory syncytial virus
uugcucauaaaaga

SEQ ID NO: 4014866 - RNA, 21 nt, Human respiratory syncytial virus
uuggaagccauaaagaaucaa

SEQ ID NO: 4014867 - RNA, 12 nt, Human respiratory syncytial virus
uuuauuaaauaa

SEQ ID NO: 4014868 - RNA, 13 nt, Human respiratory syncytial virus
uuucauggagaag

SEQ ID NO: 4014869 - RNA, 21 nt, Human respiratory syncytial virus
aaaaaacaacaagcaaacaau

SEQ ID NO: 4014870 - RNA, 13 nt, Human respiratory syncytial virus
aaaaagaacaaga

SEQ ID NO: 4014871 - RNA, 16 nt, Human respiratory syncytial virus
aaaaagaacaagaugg

SEQ ID NO: 4014872 - RNA, 14 nt, Human respiratory syncytial virus
aaaacuaacuauaa

SEQ ID NO: 4014873 - RNA, 14 nt, Human respiratory syncytial virus
aaaagagacccaaa

SEQ ID NO: 4014874 - RNA, 22 nt, Human respiratory syncytial virus
aaaagucuaaaacuaacaauga

SEQ ID NO: 4014875 - RNA, 18 nt, Human respiratory syncytial virus
aaaauaucauuaacaagu

SEQ ID NO: 4014876 - RNA, 15 nt, Human respiratory syncytial virus
aaagagaugggagaa

SEQ ID NO: 4014877 - RNA, 23 nt, Human respiratory syncytial virus
aaaguguuagaucucaagaauua

SEQ ID NO: 4014878 - RNA, 23 nt, Human respiratory syncytial virus
caggauuguuuaugaaugccuau

SEQ ID NO: 4014879 - RNA, 20 nt, Human respiratory syncytial virus
caguuacugacaauaaagga

SEQ ID NO: 4014880 - RNA, 13 nt, Human respiratory syncytial virus
caucacacaaacc

SEQ ID NO: 4014881 - RNA, 13 nt, Human respiratory syncytial virus
caucuuauagaug

SEQ ID NO: 4014882 - RNA, 14 nt, Human respiratory syncytial virus
cauguccaaacaca

SEQ ID NO: 4014883 - RNA, 20 nt, Human respiratory syncytial virus
cauuaagccuacaaaacaca

SEQ ID NO: 4014884 - RNA, 18 nt, Human respiratory syncytial virus
cauuuggauaaccaccag

SEQ ID NO: 4014885 - RNA, 15 nt, Human respiratory syncytial virus
ccaaaaccacaaaca

SEQ ID NO: 4014886 - RNA, 19 nt, Human respiratory syncytial virus
ccaaaaccacaaacaaaag

SEQ ID NO: 4014887 - RNA, 19 nt, Human respiratory syncytial virus
ccaaagaagaaaccaacca

SEQ ID NO: 4014888 - RNA, 17 nt, Human respiratory syncytial virus
ccaaccaccaaaaccac

SEQ ID NO: 4014889 - RNA, 17 nt, Human respiratory syncytial virus
ccacaaacaaaagagac

SEQ ID NO: 4014890 - RNA, 15 nt, Human respiratory syncytial virus
ccaccaacccaacaa

SEQ ID NO: 4014891 - RNA, 18 nt, Human respiratory syncytial virus
ccagcguuuauuaaauaa

SEQ ID NO: 4014892 - RNA, 18 nt, Human respiratory syncytial virus
ccaggcagaaauggagca

SEQ ID NO: 4014893 - RNA, 18 nt, Human respiratory syncytial virus
ccuaggcaaugcagcagg

SEQ ID NO: 4014894 - RNA, 17 nt, Human respiratory syncytial virus
cuaaguuguacaaagaa

SEQ ID NO: 4014895 - RNA, 22 nt, Human respiratory syncytial virus
cuaaucucuuuacuaauuauaa

SEQ ID NO: 4014896 - RNA, 17 nt, Human respiratory syncytial virus
cuacaaccacaucacca

SEQ ID NO: 4014897 - RNA, 22 nt, Human respiratory syncytial virus
cuagaaaagaccugggauacuc

SEQ ID NO: 4014898 - RNA, 23 nt, Human respiratory syncytial virus
cuaggacagaugcaucaaaucaa

SEQ ID NO: 4014899 - RNA, 16 nt, Human respiratory syncytial virus
cuauaucauccaacca

SEQ ID NO: 4014900 - RNA, 17 nt, Human respiratory syncytial virus
cuaucaccaaugcgaaa

SEQ ID NO: 4014901 - RNA, 15 nt, Human respiratory syncytial virus
cuauuuuacacuaau

SEQ ID NO: 4014902 - RNA, 20 nt, Human respiratory syncytial virus
cucuaaucucuuuacuaauu

SEQ ID NO: 4014903 - RNA, 13 nt, Human respiratory syncytial virus
cucucaccaaaga

SEQ ID NO: 4014904 - RNA, 17 nt, Human respiratory syncytial virus
cugaauauaauacaaaa

SEQ ID NO: 4014905 - RNA, 14 nt, Human respiratory syncytial virus
cugacgaaauuaac

SEQ ID NO: 4014906 - RNA, 17 nt, Human respiratory syncytial virus
cugcaucacuaacaaua

SEQ ID NO: 4014907 - RNA, 19 nt, Human respiratory syncytial virus
cugccagaccgaacaaaca

SEQ ID NO: 4014908 - RNA, 23 nt, Human respiratory syncytial virus
cuguauauauaaacaaacaaauc

SEQ ID NO: 4014909 - RNA, 13 nt, Human respiratory syncytial virus
cuuaacagcagaa

SEQ ID NO: 4014910 - RNA, 14 nt, Human respiratory syncytial virus
cuuagcaaagucaa

SEQ ID NO: 4014911 - RNA, 15 nt, Human respiratory syncytial virus
cuucaucacacaaac

SEQ ID NO: 4014912 - RNA, 16 nt, Human respiratory syncytial virus
cuuguaauaaccaaau

SEQ ID NO: 4014913 - RNA, 18 nt, Human respiratory syncytial virus
cuuuaaguuaacaaaaaa

SEQ ID NO: 4014914 - RNA, 13 nt, Human respiratory syncytial virus
gaaagcaaucaau

SEQ ID NO: 4014915 - RNA, 22 nt, Human respiratory syncytial virus
gaagaugcaaauaacaaagcua

SEQ ID NO: 4014916 - RNA, 23 nt, Human respiratory syncytial virus
gaaggagaagugaacaagaucaa

SEQ ID NO: 4014917 - RNA, 22 nt, Human respiratory syncytial virus
gaccacagaaagagacaccagc

SEQ ID NO: 4014918 - RNA, 17 nt, Human respiratory syncytial virus
gacccaaaaacaccagc

SEQ ID NO: 4014919 - RNA, 13 nt, Human respiratory syncytial virus
gaccgaacaaaca

SEQ ID NO: 4014920 - RNA, 17 nt, Human respiratory syncytial virus
gacuugcucauaaaaga

SEQ ID NO: 4014921 - RNA, 16 nt, Human respiratory syncytial virus
gagaagaaaugauaga

SEQ ID NO: 4014922 - RNA, 18 nt, Human respiratory syncytial virus
gagcaacucaaagaaaau

SEQ ID NO: 4014923 - RNA, 21 nt, Human respiratory syncytial virus
gauacauuaaauaaggaucag

SEQ ID NO: 4014924 - RNA, 20 nt, Human respiratory syncytial virus
gauauaaauggaaaggaaau

SEQ ID NO: 4014925 - RNA, 13 nt, Human respiratory syncytial virus
gaucaaaaacaac

SEQ ID NO: 4014926 - RNA, 14 nt, Human respiratory syncytial virus
gaucaaacaaauga

SEQ ID NO: 4014927 - RNA, 21 nt, Human respiratory syncytial virus
gaugcagccaaagcauaugca

SEQ ID NO: 4014928 - RNA, 12 nt, Human respiratory syncytial virus
gcaaagccaaaa

SEQ ID NO: 4014929 - RNA, 15 nt, Human respiratory syncytial virus
gcaaauacaaagaug

SEQ ID NO: 4014930 - RNA, 17 nt, Human respiratory syncytial virus
gcaaauuagcauaugau

SEQ ID NO: 4014931 - RNA, 19 nt, Human respiratory syncytial virus
gcaaccaccgaauucaaaa

SEQ ID NO: 4014932 - RNA, 18 nt, Human respiratory syncytial virus
gcagagcaacucaaagaa

SEQ ID NO: 4014933 - RNA, 20 nt, Human respiratory syncytial virus
gcagagcaacucaaagaaaa

SEQ ID NO: 4014934 - RNA, 19 nt, Human respiratory syncytial virus
gcagauuguuggaaaucaa

SEQ ID NO: 4014935 - RNA, 14 nt, Human respiratory syncytial virus
gcagcaggagacag

SEQ ID NO: 4014936 - RNA, 13 nt, Human respiratory syncytial virus
gcauaaugggaga

SEQ ID NO: 4014937 - RNA, 12 nt, Human respiratory syncytial virus
gcaucaaaucaa

SEQ ID NO: 4014938 - RNA, 16 nt, Human respiratory syncytial virus
gcauuuacaacacaac

SEQ ID NO: 4014939 - RNA, 18 nt, Human respiratory syncytial virus
gccgagcacaaaaccacg

SEQ ID NO: 4014940 - RNA, 16 nt, Human respiratory syncytial virus
gcgaauagguaaauaa

SEQ ID NO: 4014941 - RNA, 19 nt, Human respiratory syncytial virus
gcuaccaaauuccuagaau

SEQ ID NO: 4014942 - RNA, 23 nt, Human respiratory syncytial virus
gcuauuaaucacugaagaugcaa

SEQ ID NO: 4014943 - RNA, 19 nt, Human respiratory syncytial virus
ggaagccauaaagaaucaa

SEQ ID NO: 4014944 - RNA, 18 nt, Human respiratory syncytial virus
ggauaucauguuaaagcu

SEQ ID NO: 4014945 - RNA, 13 nt, Human respiratory syncytial virus
ggcagaaauggag

SEQ ID NO: 4014946 - RNA, 21 nt, Human respiratory syncytial virus
guacaauguucuagaaaaaga

SEQ ID NO: 4014947 - RNA, 20 nt, Human respiratory syncytial virus
guagagcuuuaaguuaacaa

SEQ ID NO: 4014948 - RNA, 14 nt, Human respiratory syncytial virus
guauauauaaacaa

SEQ ID NO: 4014949 - RNA, 14 nt, Human respiratory syncytial virus
guauguuauaugcu

SEQ ID NO: 4014950 - RNA, 20 nt, Human respiratory syncytial virus
gucacaguucaaacaauaaa

SEQ ID NO: 4014951 - RNA, 15 nt, Human respiratory syncytial virus
gucugagagaagaaa

SEQ ID NO: 4014952 - RNA, 19 nt, Human respiratory syncytial virus
gugacuuguuggaagacaa

SEQ ID NO: 4014953 - RNA, 18 nt, Human respiratory syncytial virus
gugaucaacucacucagc

SEQ ID NO: 4014954 - RNA, 15 nt, Human respiratory syncytial virus
gugcuuuaagaacag

SEQ ID NO: 4014955 - RNA, 18 nt, Human respiratory syncytial virus
guuacugacaauaaagga

SEQ ID NO: 4014956 - RNA, 21 nt, Human respiratory syncytial virus
guucuagaaaaagaugaugau

SEQ ID NO: 4014957 - RNA, 15 nt, Human respiratory syncytial virus
guuggucugagagaa

SEQ ID NO: 4014958 - RNA, 18 nt, Human respiratory syncytial virus
uaaaagaacuugcaagca

SEQ ID NO: 4014959 - RNA, 22 nt, Human respiratory syncytial virus
uaagaaaacuugaugaaagaca

SEQ ID NO: 4014960 - RNA, 14 nt, Human respiratory syncytial virus
uaaguauaagaaug

SEQ ID NO: 4014961 - RNA, 20 nt, Human respiratory syncytial virus
uaauauaaaaacucaucaaa

SEQ ID NO: 4014962 - RNA, 15 nt, Human respiratory syncytial virus
uaauauacaaauaug

SEQ ID NO: 4014963 - RNA, 14 nt, Human respiratory syncytial virus
uaauccguuuuagu

SEQ ID NO: 4014964 - RNA, 12 nt, Human respiratory syncytial virus
uaauuuagcuua

SEQ ID NO: 4014965 - RNA, 21 nt, Human respiratory syncytial virus
uacacugaauauaauacaaaa

SEQ ID NO: 4014966 - RNA, 17 nt, Human respiratory syncytial virus
uagaucucaagaauuac

SEQ ID NO: 4014967 - RNA, 15 nt, Human respiratory syncytial virus
uagaugaaagaagca

SEQ ID NO: 4014968 - RNA, 18 nt, Human respiratory syncytial virus
uaggaagggaagacacua

SEQ ID NO: 4014969 - RNA, 18 nt, Human respiratory syncytial virus
uagguauguuauaugcua

SEQ ID NO: 4014970 - RNA, 11 nt, Human respiratory syncytial virus
uaguaaaucaa

SEQ ID NO: 4014971 - RNA, 23 nt, Human respiratory syncytial virus
uaguacaggagauaauauugaca

SEQ ID NO: 4014972 - RNA, 19 nt, Human respiratory syncytial virus
uaguuagaguucaaucaau

SEQ ID NO: 4014973 - RNA, 17 nt, Human respiratory syncytial virus
uaucauugaucaaugau

SEQ ID NO: 4014974 - RNA, 16 nt, Human respiratory syncytial virus
uauccaaacaucauga

SEQ ID NO: 4014975 - RNA, 14 nt, Human respiratory syncytial virus
uauuccucaaacaa

SEQ ID NO: 4014976 - RNA, 15 nt, Human respiratory syncytial virus
ucaaacccacaaaca

SEQ ID NO: 4014977 - RNA, 17 nt, Human respiratory syncytial virus
ucaaacuaugagcacua

SEQ ID NO: 4014978 - RNA, 13 nt, Human respiratory syncytial virus
ucaacacaucauu

SEQ ID NO: 4014979 - RNA, 14 nt, Human respiratory syncytial virus
ucaacauggagaag

SEQ ID NO: 4014980 - RNA, 17 nt, Human respiratory syncytial virus
ucaaucucaacaaccau

SEQ ID NO: 4014981 - RNA, 21 nt, Human respiratory syncytial virus
ucacaguuacugacaauaaag

SEQ ID NO: 4014982 - RNA, 19 nt, Human respiratory syncytial virus
ucagggcaaguaaugcuaa

SEQ ID NO: 4014983 - RNA, 14 nt, Human respiratory syncytial virus
ucaucacacacaaa

SEQ ID NO: 4014984 - RNA, 17 nt, Human respiratory syncytial virus
ucaugcuacccacacaa

SEQ ID NO: 4014985 - RNA, 16 nt, Human respiratory syncytial virus
ucauggagaagaugca

SEQ ID NO: 4014986 - RNA, 13 nt, Human respiratory syncytial virus
ucgacacaaccac

SEQ ID NO: 4014987 - RNA, 23 nt, Human respiratory syncytial virus
ucgcaaaaccacgccaacuauca

SEQ ID NO: 4014988 - RNA, 18 nt, Human respiratory syncytial virus
ucgcaucauccaaagauc

SEQ ID NO: 4014989 - RNA, 16 nt, Human respiratory syncytial virus
ucuaaaacuaacaaug

SEQ ID NO: 4014990 - RNA, 18 nt, Human respiratory syncytial virus
ucuaaguuguacaaagaa

SEQ ID NO: 4014991 - RNA, 20 nt, Human respiratory syncytial virus
ucuuggagcuauagugucau

SEQ ID NO: 4014992 - RNA, 15 nt, Human respiratory syncytial virus
ugaaauaaaacgcua

SEQ ID NO: 4014993 - RNA, 19 nt, Human respiratory syncytial virus
ugaacaucuacacuacaca

SEQ ID NO: 4014994 - RNA, 23 nt, Human respiratory syncytial virus
ugacaauaaaggagcauucaaau

SEQ ID NO: 4014995 - RNA, 17 nt, Human respiratory syncytial virus
ugagagaagaaaugaua

SEQ ID NO: 4014996 - RNA, 18 nt, Human respiratory syncytial virus
ugaguaugcacagaaguu

SEQ ID NO: 4014997 - RNA, 20 nt, Human respiratory syncytial virus
ugauaacaaugaagaagaau

SEQ ID NO: 4014998 - RNA, 16 nt, Human respiratory syncytial virus
ugauacaugugcauuu

SEQ ID NO: 4014999 - RNA, 13 nt, Human respiratory syncytial virus
ugauucuccagac

SEQ ID NO: 4015000 - RNA, 19 nt, Human respiratory syncytial virus
ugcaaaucauaaauucaca

SEQ ID NO: 4015001 - RNA, 22 nt, Human respiratory syncytial virus
ugcaagugcaggacccacuuca

SEQ ID NO: 4015002 - RNA, 21 nt, Human respiratory syncytial virus
ugcagagcaacucaaagaaaa

SEQ ID NO: 4015003 - RNA, 17 nt, Human respiratory syncytial virus
ugcagguguaacaacac

SEQ ID NO: 4015004 - RNA, 12 nt, Human respiratory syncytial virus
ugcaucacuaac

SEQ ID NO: 4015005 - RNA, 21 nt, Human respiratory syncytial virus
ugcuuuguuaucuacaaacaa

SEQ ID NO: 4015006 - RNA, 20 nt, Human respiratory syncytial virus
uggauaucauguuaaagcua

SEQ ID NO: 4015007 - RNA, 17 nt, Human respiratory syncytial virus
ugucauccagcaaauac

SEQ ID NO: 4015008 - RNA, 23 nt, Human respiratory syncytial virus
ugucauccagcaaauacacuauu

SEQ ID NO: 4015009 - RNA, 13 nt, Human respiratory syncytial virus
uguucuagaaaaa

SEQ ID NO: 4015010 - RNA, 20 nt, Human respiratory syncytial virus
uuaacaauauaguaacaaaa

SEQ ID NO: 4015011 - RNA, 19 nt, Human respiratory syncytial virus
uuaaguuaacaaaaaauac

SEQ ID NO: 4015012 - RNA, 14 nt, Human respiratory syncytial virus
uuaaucacugaaga

SEQ ID NO: 4015013 - RNA, 18 nt, Human respiratory syncytial virus
uuaaucacugaagaugca

SEQ ID NO: 4015014 - RNA, 16 nt, Human respiratory syncytial virus
uuacacuaauacauau

SEQ ID NO: 4015015 - RNA, 20 nt, Human respiratory syncytial virus
uuagaugcuaacacaucauu

SEQ ID NO: 4015016 - RNA, 16 nt, Human respiratory syncytial virus
uuaggagggcaaacaa

SEQ ID NO: 4015017 - RNA, 21 nt, Human respiratory syncytial virus
uuaguuaauauaaaaacucau

SEQ ID NO: 4015018 - RNA, 17 nt, Human respiratory syncytial virus
uucauggagaagaugca

SEQ ID NO: 4015019 - RNA, 20 nt, Human respiratory syncytial virus
uugugauaaugcaggaucag

SEQ ID NO: 4015020 - RNA, 21 nt, Human respiratory syncytial virus
uuucggcuguggaaagcaauc

SEQ ID NO: 4015021 - RNA, 20 nt, Human respiratory syncytial virus
caaaucauaaauucacagga

SEQ ID NO: 4015022 - RNA, 23 nt, Human respiratory syncytial virus
caaauucagccacaacaucaccc

SEQ ID NO: 4015023 - RNA, 22 nt, Human respiratory syncytial virus
caacaacaucaauaaaacagac

SEQ ID NO: 4015024 - RNA, 21 nt, Human respiratory syncytial virus
caacaaccgggccagaagaga

SEQ ID NO: 4015025 - RNA, 20 nt, Human respiratory syncytial virus
caacaucacccaacacaaag

SEQ ID NO: 4015026 - RNA, 16 nt, Human respiratory syncytial virus
caaccauguccaaaca

SEQ ID NO: 4015027 - RNA, 18 nt, Human respiratory syncytial virus
caacguaguacaggagau

SEQ ID NO: 4015028 - RNA, 23 nt, Human respiratory syncytial virus
caacucaacccuaaagaagauga

SEQ ID NO: 4015029 - RNA, 16 nt, Human respiratory syncytial virus
caacuccacacaaaca

SEQ ID NO: 4015030 - RNA, 21 nt, Human respiratory syncytial virus
caagccgagcacaaaaccacg

SEQ ID NO: 4015031 - RNA, 22 nt, Human respiratory syncytial virus
caaggaucugaacucacuagaa

SEQ ID NO: 4015032 - RNA, 22 nt, Human respiratory syncytial virus
caaguucgcaucauccaaagau

SEQ ID NO: 4015033 - RNA, 19 nt, Human respiratory syncytial virus
caauagaauucacaagcaa

SEQ ID NO: 4015034 - RNA, 15 nt, Human respiratory syncytial virus
caauuuauauacaaa

SEQ ID NO: 4015035 - RNA, 21 nt, Human respiratory syncytial virus
cacaaagucagaaacacacca

SEQ ID NO: 4015036 - RNA, 19 nt, Human respiratory syncytial virus
cacaaaguuacacuaacaa

SEQ ID NO: 4015037 - RNA, 20 nt, Human respiratory syncytial virus
cacagaaguugggaggagaa

SEQ ID NO: 4015038 - RNA, 17 nt, Human respiratory syncytial virus
caccaauccacacaaau

SEQ ID NO: 4015039 - RNA, 12 nt, Human respiratory syncytial virus
caccagccaaaa

SEQ ID NO: 4015040 - RNA, 16 nt, Human respiratory syncytial virus
caccaguuacacuaag

SEQ ID NO: 4015041 - RNA, 12 nt, Human respiratory syncytial virus
cacgccaacuau

SEQ ID NO: 4015042 - RNA, 12 nt, Human respiratory syncytial virus
cacuacacacuu

SEQ ID NO: 4015043 - RNA, 20 nt, Human respiratory syncytial virus
cacucaaaauccaaaaucac

SEQ ID NO: 4015044 - RNA, 16 nt, Human respiratory syncytial virus
cacugcauccaacaaa

SEQ ID NO: 4015045 - RNA, 18 nt, Human respiratory syncytial virus
cacugcauccaacaaaaa

SEQ ID NO: 4015046 - RNA, 13 nt, Human respiratory syncytial virus
cagaaauggagca

SEQ ID NO: 4015047 - RNA, 14 nt, Human respiratory syncytial virus
cagacaucaaucca

SEQ ID NO: 4015048 - RNA, 17 nt, Human respiratory syncytial virus
cagagcaacucaaagaa

SEQ ID NO: 4015049 - RNA, 14 nt, Human respiratory syncytial virus
cagauuaaauuuaa

SEQ ID NO: 4015050 - RNA, 15 nt, Human respiratory syncytial virus
cagcaagacuagaua

SEQ ID NO: 4015051 - RNA, 18 nt, Human respiratory syncytial virus
cagcaggagacagaucag

SEQ ID NO: 4015052 - RNA, 19 nt, Human respiratory syncytial virus
aaaacacacuccuauaaua

SEQ ID NO: 4015053 - RNA, 15 nt, Human respiratory syncytial virus
aaaacaccuaaacaa

SEQ ID NO: 4015054 - RNA, 15 nt, Human respiratory syncytial virus
aaaacucaguacuua

SEQ ID NO: 4015055 - RNA, 15 nt, Human respiratory syncytial virus
aaaagcaucauugcu

SEQ ID NO: 4015056 - RNA, 17 nt, Human respiratory syncytial virus
aaaauuaacauaaugau

SEQ ID NO: 4015057 - RNA, 16 nt, Human respiratory syncytial virus
aaacaacaaugcucaa

SEQ ID NO: 4015058 - RNA, 15 nt, Human respiratory syncytial virus
aaacaaggaucugaa

SEQ ID NO: 4015059 - RNA, 15 nt, Human respiratory syncytial virus
aaacaauaaaaaacc

SEQ ID NO: 4015060 - RNA, 23 nt, Human respiratory syncytial virus
aaacaauaaaaaaccacacugaa

SEQ ID NO: 4015061 - RNA, 15 nt, Human respiratory syncytial virus
aaauacauccaucac

SEQ ID NO: 4015062 - RNA, 15 nt, Human respiratory syncytial virus
aaauauggaaacaua

SEQ ID NO: 4015063 - RNA, 21 nt, Human respiratory syncytial virus
aaauauggaaacauacgugaa

SEQ ID NO: 4015064 - RNA, 18 nt, Human respiratory syncytial virus
aaaucaacacaucauuca

SEQ ID NO: 4015065 - RNA, 19 nt, Human respiratory syncytial virus
aaauccuacaaaaaaaugc

SEQ ID NO: 4015066 - RNA, 21 nt, Human respiratory syncytial virus
aaauuggggcaaauacaaaga

SEQ ID NO: 4015067 - RNA, 12 nt, Human respiratory syncytial virus
aacaaauccaau

SEQ ID NO: 4015068 - RNA, 15 nt, Human respiratory syncytial virus
aacacacaauccaac

SEQ ID NO: 4015069 - RNA, 20 nt, Human respiratory syncytial virus
aacacacccaacuccacaca

SEQ ID NO: 4015070 - RNA, 20 nt, Human respiratory syncytial virus
aacaguuugacauuaccaag

SEQ ID NO: 4015071 - RNA, 12 nt, Human respiratory syncytial virus
aacaucuacacu

SEQ ID NO: 4015072 - RNA, 16 nt, Human respiratory syncytial virus
aaccaacccaaccaaa

SEQ ID NO: 4015073 - RNA, 16 nt, Human respiratory syncytial virus
aacuaacaaugauaca

SEQ ID NO: 4015074 - RNA, 22 nt, Human respiratory syncytial virus
aacucaccuaaucaaucaaacu

SEQ ID NO: 4015075 - RNA, 22 nt, Human respiratory syncytial virus
aacugccagaccgaacaaacaa

SEQ ID NO: 4015076 - RNA, 19 nt, Human respiratory syncytial virus
aacuugcaagcaucaacau

SEQ ID NO: 4015077 - RNA, 12 nt, Human respiratory syncytial virus
aagaagaaagau

SEQ ID NO: 4015078 - RNA, 13 nt, Human respiratory syncytial virus
aagaagaugaugu

SEQ ID NO: 4015079 - RNA, 14 nt, Human respiratory syncytial virus
aagacacuauaaag

SEQ ID NO: 4015080 - RNA, 17 nt, Human respiratory syncytial virus
aagacuagauagaauug

SEQ ID NO: 4015081 - RNA, 13 nt, Human respiratory syncytial virus
aagagaugggaga

SEQ ID NO: 4015082 - RNA, 17 nt, Human respiratory syncytial virus
aagauccuaagaagaaa

SEQ ID NO: 4015083 - RNA, 19 nt, Human respiratory syncytial virus
aagaucuuaccaugaagac

SEQ ID NO: 4015084 - RNA, 19 nt, Human respiratory syncytial virus
aagauggcucuuagcaaag

SEQ ID NO: 4015085 - RNA, 15 nt, Human respiratory syncytial virus
aagcaacaaaccaaa

SEQ ID NO: 4015086 - RNA, 13 nt, Human respiratory syncytial virus
aagcaagaagagg

SEQ ID NO: 4015087 - RNA, 17 nt, Human respiratory syncytial virus
aagccaauaacauaaau

SEQ ID NO: 4015088 - RNA, 21 nt, Human respiratory syncytial virus
aagcuugacaucagaaauaca

SEQ ID NO: 4015089 - RNA, 15 nt, Human respiratory syncytial virus
aaguuaaaugauaca

SEQ ID NO: 4015090 - RNA, 24 nt, Human respiratory syncytial virus
aauaaccaaauuagcagcaggaga

SEQ ID NO: 4015091 - RNA, 14 nt, Human respiratory syncytial virus
aauacaaaauaugg

SEQ ID NO: 4015092 - RNA, 17 nt, Human respiratory syncytial virus
aauacuaaauaagcuaa

SEQ ID NO: 4015093 - RNA, 12 nt, Human respiratory syncytial virus
aaucaaucucaa

SEQ ID NO: 4015094 - RNA, 17 nt, Human respiratory syncytial virus
aaucacuaccagccacu

SEQ ID NO: 4015095 - RNA, 21 nt, Human respiratory syncytial virus
aaucacugaagaugcaaauca

SEQ ID NO: 4015096 - RNA, 20 nt, Human respiratory syncytial virus
aaucuagcuacucauaugaa

SEQ ID NO: 4015097 - RNA, 13 nt, Human respiratory syncytial virus
aaugaagaagaau

SEQ ID NO: 4015098 - RNA, 13 nt, Human respiratory syncytial virus
aaugaucaaacaa

SEQ ID NO: 4015099 - RNA, 17 nt, Human respiratory syncytial virus
aaugucuuaaaaaauga

SEQ ID NO: 4015100 - RNA, 18 nt, Human respiratory syncytial virus
aaauaaaaguaaagccaa

SEQ ID NO: 4015101 - RNA, 12 nt, Human respiratory syncytial virus
aaauaaacucac

SEQ ID NO: 4015102 - RNA, 13 nt, Human respiratory syncytial virus
aaauaacauauua

SEQ ID NO: 4015103 - RNA, 18 nt, Human respiratory syncytial virus
aaauacggggcaaauaag

SEQ ID NO: 4015104 - RNA, 22 nt, Human respiratory syncytial virus
aaauacggggcaaauaagucaa

SEQ ID NO: 4015105 - RNA, 17 nt, Human respiratory syncytial virus
aaaucuguaaaaaauau

SEQ ID NO: 4015106 - RNA, 17 nt, Human respiratory syncytial virus
aaauuccacccaaaaua

SEQ ID NO: 4015107 - RNA, 14 nt, Human respiratory syncytial virus
aacacaccagcugc

SEQ ID NO: 4015108 - RNA, 16 nt, Human respiratory syncytial virus
aacacugacauauuca

SEQ ID NO: 4015109 - RNA, 19 nt, Human respiratory syncytial virus
aacaucaauaaaacagaca

SEQ ID NO: 4015110 - RNA, 20 nt, Human respiratory syncytial virus
aacaucuacacuacacacuu

SEQ ID NO: 4015111 - RNA, 18 nt, Human respiratory syncytial virus
aacauuacagcaagacua

SEQ ID NO: 4015112 - RNA, 18 nt, Human respiratory syncytial virus
aacauuggggcaaaugca

SEQ ID NO: 4015113 - RNA, 22 nt, Human respiratory syncytial virus
aaccacaucaccaauccacaca

SEQ ID NO: 4015114 - RNA, 22 nt, Human respiratory syncytial virus
aaccaggaucuuuaugaugcag

SEQ ID NO: 4015115 - RNA, 21 nt, Human respiratory syncytial virus
aacuacaauuauuauaguaau

SEQ ID NO: 4015116 - RNA, 21 nt, Human respiratory syncytial virus
aacuauaacacagucauuaau

SEQ ID NO: 4015117 - RNA, 11 nt, Human respiratory syncytial virus
aagaaaugaua

SEQ ID NO: 4015118 - RNA, 23 nt, Human respiratory syncytial virus
aagaacaagauggggcaaauaug

SEQ ID NO: 4015119 - RNA, 22 nt, Human respiratory syncytial virus
aagaaugcagugacagaauuac

SEQ ID NO: 4015120 - RNA, 17 nt, Human respiratory syncytial virus
aagaugcaaauaacaaa

SEQ ID NO: 4015121 - RNA, 14 nt, Human respiratory syncytial virus
aaguaaugcuaaga

SEQ ID NO: 4015122 - RNA, 16 nt, Human respiratory syncytial virus
aaguaucacaaucaaa

SEQ ID NO: 4015123 - RNA, 21 nt, Human respiratory syncytial virus
aagucuaugaguaugcacaga

SEQ ID NO: 4015124 - RNA, 21 nt, Human respiratory syncytial virus
aaguugggaggagaagcugga

SEQ ID NO: 4015125 - RNA, 15 nt, Human respiratory syncytial virus
aauaaacuaggacua

SEQ ID NO: 4015126 - RNA, 21 nt, Human respiratory syncytial virus
aauaacaucucucaccaaaga

SEQ ID NO: 4015127 - RNA, 19 nt, Human respiratory syncytial virus
aauaagucaacauggagaa

SEQ ID NO: 4015128 - RNA, 23 nt, Human respiratory syncytial virus
aauaagucaacauggagaaguuu

SEQ ID NO: 4015129 - RNA, 20 nt, Human respiratory syncytial virus
aauacacugaauauaauaca

SEQ ID NO: 4015130 - RNA, 14 nt, Human respiratory syncytial virus
aauacauuaaauaa

SEQ ID NO: 4015131 - RNA, 13 nt, Human respiratory syncytial virus
aauauacaaauau

SEQ ID NO: 4015132 - RNA, 16 nt, Human respiratory syncytial virus
aaucucaacaaccauu

SEQ ID NO: 4015133 - RNA, 17 nt, Human respiratory syncytial virus
aauggaaaggaaaugaa

SEQ ID NO: 4015134 - RNA, 18 nt, Human respiratory syncytial virus
aaugucuuaaaaaaugaa

SEQ ID NO: 4015135 - RNA, 18 nt, Human respiratory syncytial virus
aauguucuagaaaaagau

SEQ ID NO: 4015136 - RNA, 15 nt, Human respiratory syncytial virus
aauuaacauaaugau

SEQ ID NO: 4015137 - RNA, 14 nt, Human respiratory syncytial virus
aauuacuacauaau

SEQ ID NO: 4015138 - RNA, 16 nt, Human respiratory syncytial virus
aauuaucaacacugaa

SEQ ID NO: 4015139 - RNA, 17 nt, Human respiratory syncytial virus
aauuaugaugugcaaaa

SEQ ID NO: 4015140 - RNA, 13 nt, Human respiratory syncytial virus
acaaaaaaaccaa

SEQ ID NO: 4015141 - RNA, 22 nt, Human respiratory syncytial virus
acaaaguagggaguaccaaaua

SEQ ID NO: 4015142 - RNA, 13 nt, Human respiratory syncytial virus
acaauagaauuaa

SEQ ID NO: 4015143 - RNA, 15 nt, Human respiratory syncytial virus
acaauagaauucaca

SEQ ID NO: 4015144 - RNA, 18 nt, Human respiratory syncytial virus
acaaugaagaagaaucua

SEQ ID NO: 4015145 - RNA, 12 nt, Human respiratory syncytial virus
acacuacacacu

SEQ ID NO: 4015146 - RNA, 17 nt, Human respiratory syncytial virus
acacuucaucacacaaa

SEQ ID NO: 4015147 - RNA, 16 nt, Human respiratory syncytial virus
acagaaguugggagga

SEQ ID NO: 4015148 - RNA, 18 nt, Human respiratory syncytial virus
acagaaguugggaggaga

SEQ ID NO: 4015149 - RNA, 19 nt, Human respiratory syncytial virus
acagaaguugggaggagaa

SEQ ID NO: 4015150 - RNA, 22 nt, Human respiratory syncytial virus
acagaaguugggaggagaagcu

SEQ ID NO: 4015151 - RNA, 14 nt, Human respiratory syncytial virus
acaggauuaauagg

SEQ ID NO: 4015152 - RNA, 13 nt, Human respiratory syncytial virus
acaucaaaaagag

SEQ ID NO: 4015153 - RNA, 21 nt, Human respiratory syncytial virus
acaucacccaacacaaaguca

SEQ ID NO: 4015154 - RNA, 13 nt, Human respiratory syncytial virus
acaucauucacaa

SEQ ID NO: 4015155 - RNA, 17 nt, Human respiratory syncytial virus
acaucucucaccaaaga

SEQ ID NO: 4015156 - RNA, 18 nt, Human respiratory syncytial virus
acaugcuuaaaagugaaa

SEQ ID NO: 4015157 - RNA, 14 nt, Human respiratory syncytial virus
accaaaaaaaccaa

SEQ ID NO: 4015158 - RNA, 14 nt, Human respiratory syncytial virus
accaccaaaaccac

SEQ ID NO: 4015159 - RNA, 15 nt, Human respiratory syncytial virus
acgaaauuaacaaua

SEQ ID NO: 4015160 - RNA, 15 nt, Human respiratory syncytial virus
acgacgaaaaaagaa

SEQ ID NO: 4015161 - RNA, 16 nt, Human respiratory syncytial virus
acucaucaaagggaaa

SEQ ID NO: 4015162 - RNA, 23 nt, Human respiratory syncytial virus
acugacaauaaaggagcauucaa

SEQ ID NO: 4015163 - RNA, 16 nt, Human respiratory syncytial virus
acuguguauagcagca

SEQ ID NO: 4015164 - RNA, 18 nt, Human respiratory syncytial virus
acuuaugcaaaacacacc

SEQ ID NO: 4015165 - RNA, 16 nt, Human respiratory syncytial virus
acuugauaaacaauga

SEQ ID NO: 4015166 - RNA, 13 nt, Human respiratory syncytial virus
agaaaaagaugau

SEQ ID NO: 4015167 - RNA, 16 nt, Human respiratory syncytial virus
agaaauacacugaaua

SEQ ID NO: 4015168 - RNA, 13 nt, Human respiratory syncytial virus
agaauauaggcau

SEQ ID NO: 4015169 - RNA, 21 nt, Human respiratory syncytial virus
agacaacgauagugacaauga

SEQ ID NO: 4015170 - RNA, 14 nt, Human respiratory syncytial virus
agauauaaauggaa

SEQ ID NO: 4015171 - RNA, 16 nt, Human respiratory syncytial virus
agauccuaagaagaaa

SEQ ID NO: 4015172 - RNA, 18 nt, Human respiratory syncytial virus
agaucuuaccaugaagac

SEQ ID NO: 4015173 - RNA, 13 nt, Human respiratory syncytial virus
agaugcaaaucau

SEQ ID NO: 4015174 - RNA, 22 nt, Human respiratory syncytial virus
agaugcaucaaaucaacacaua

SEQ ID NO: 4015175 - RNA, 19 nt, Human respiratory syncytial virus
agcaaauagacaaaaaacc

SEQ ID NO: 4015176 - RNA, 17 nt, Human respiratory syncytial virus
agcaacucaaagaaaau

SEQ ID NO: 4015177 - RNA, 19 nt, Human respiratory syncytial virus
agcacuuguaauaaccaaa

SEQ ID NO: 4015178 - RNA, 14 nt, Human respiratory syncytial virus
agcaggucuaggca

SEQ ID NO: 4015179 - RNA, 22 nt, Human respiratory syncytial virus
agcauaugcagagcaacucaaa

SEQ ID NO: 4015180 - RNA, 17 nt, Human respiratory syncytial virus
agcuacucauaugaaga

SEQ ID NO: 4015181 - RNA, 19 nt, Human respiratory syncytial virus
aggauuguuuaugaaugcc

SEQ ID NO: 4015182 - RNA, 16 nt, Human respiratory syncytial virus
aguaacaaaaaaagaa

SEQ ID NO: 4015183 - RNA, 21 nt, Human respiratory syncytial virus
aguaauuaggagggcaaacaa

SEQ ID NO: 4015184 - RNA, 24 nt, Human respiratory syncytial virus
aguaccaaauacaagaaauacacu

SEQ ID NO: 4015185 - RNA, 20 nt, Human respiratory syncytial virus
aguaccccagaaaccaaagc

SEQ ID NO: 4015186 - RNA, 17 nt, Human respiratory syncytial virus
aguacuuacaacuauaa

SEQ ID NO: 4015187 - RNA, 21 nt, Human respiratory syncytial virus
auaaaacauucuguaacaaua

SEQ ID NO: 4015188 - RNA, 11 nt, Human respiratory syncytial virus
auaaaaguaaa

SEQ ID NO: 4015189 - RNA, 21 nt, Human respiratory syncytial virus
auaaaugaucaaacaaaugac

SEQ ID NO: 4015190 - RNA, 22 nt, Human respiratory syncytial virus
auaacaucucucaccaaagaaa

SEQ ID NO: 4015191 - RNA, 14 nt, Human respiratory syncytial virus
auaauaaauuacua

SEQ ID NO: 4015192 - RNA, 16 nt, Human respiratory syncytial virus
auaauauacaaauaug

SEQ ID NO: 4015193 - RNA, 13 nt, Human respiratory syncytial virus
auauaaauggaaa

SEQ ID NO: 4015194 - RNA, 15 nt, Human respiratory syncytial virus
auauaaauggaaagg

SEQ ID NO: 4015195 - RNA, 15 nt, Human T-lymphotropic virus 1
caggcccuacagcca

SEQ ID NO: 4015196 - RNA, 13 nt, Human T-lymphotropic virus 1
caggcccuccugc

SEQ ID NO: 4015197 - RNA, 15 nt, Human T-lymphotropic virus 1
caggcccuccugccc

SEQ ID NO: 4015198 - RNA, 14 nt, Human T-lymphotropic virus 1
caggcuaggcccug

SEQ ID NO: 4015199 - RNA, 12 nt, Human T-lymphotropic virus 1
cagggcccagaa

SEQ ID NO: 4015200 - RNA, 15 nt, Human T-lymphotropic virus 1
cagggggccaaaccc

SEQ ID NO: 4015201 - RNA, 16 nt, Human T-lymphotropic virus 1
caguggccacuugucu

SEQ ID NO: 4015202 - RNA, 19 nt, Human T-lymphotropic virus 1
caguucugcccccucaucc

SEQ ID NO: 4015203 - RNA, 14 nt, Human T-lymphotropic virus 1
caguuuccuccucc

SEQ ID NO: 4015204 - RNA, 19 nt, Human T-lymphotropic virus 1
cauacaguacucuuccuuu

SEQ ID NO: 4015205 - RNA, 22 nt, Human T-lymphotropic virus 1
cauaccacucuaaacccugcaa

SEQ ID NO: 4015206 - RNA, 16 nt, Human T-lymphotropic virus 1
cauauccucgagcccu

SEQ ID NO: 4015207 - RNA, 16 nt, Human T-lymphotropic virus 1
caucaaauccuccuuc

SEQ ID NO: 4015208 - RNA, 13 nt, Human T-lymphotropic virus 1
cauccccuucuuc

SEQ ID NO: 4015209 - RNA, 15 nt, Human T-lymphotropic virus 1
cauccugccccccuu

SEQ ID NO: 4015210 - RNA, 14 nt, Human T-lymphotropic virus 1
caucgaaacagccc

SEQ ID NO: 4015211 - RNA, 13 nt, Human T-lymphotropic virus 1
caugcccaagacc

SEQ ID NO: 4015212 - RNA, 20 nt, Human T-lymphotropic virus 1
caugcgcaaauacucccccu

SEQ ID NO: 4015213 - RNA, 23 nt, Human T-lymphotropic virus 1
caugcuuauuaucagcccacuuc

SEQ ID NO: 4015214 - RNA, 19 nt, Human T-lymphotropic virus 1
caugggagccggaguggcu

SEQ ID NO: 4015215 - RNA, 15 nt, Human T-lymphotropic virus 1
cauguaccucuacca

SEQ ID NO: 4015216 - RNA, 12 nt, Human T-lymphotropic virus 1
cauuccacccuc

SEQ ID NO: 4015217 - RNA, 17 nt, Human T-lymphotropic virus 1
ccaaaucccccuaccua

SEQ ID NO: 4015218 - RNA, 16 nt, Human T-lymphotropic virus 1
ccaacaucuauucugc

SEQ ID NO: 4015219 - RNA, 20 nt, Human T-lymphotropic virus 1
ccaacaucuauucugccagu

SEQ ID NO: 4015220 - RNA, 15 nt, Human T-lymphotropic virus 1
ccaagcagcaguggc

SEQ ID NO: 4015221 - RNA, 20 nt, Human T-lymphotropic virus 1
ccaaucauggaccugccccu

SEQ ID NO: 4015222 - RNA, 14 nt, Human T-lymphotropic virus 1
ccaauggaaccugg

SEQ ID NO: 4015223 - RNA, 16 nt, Human T-lymphotropic virus 1
ccacagucaccgauuc

SEQ ID NO: 4015224 - RNA, 18 nt, Human T-lymphotropic virus 1
ccacaucgccuccagccu

SEQ ID NO: 4015225 - RNA, 12 nt, Human T-lymphotropic virus 1
ccacccaaaccu

SEQ ID NO: 4015226 - RNA, 19 nt, Human T-lymphotropic virus 1
ccacccauuuccuccccau

SEQ ID NO: 4015227 - RNA, 12 nt, Human T-lymphotropic virus 1
ccaccccagugu

SEQ ID NO: 4015228 - RNA, 15 nt, Human T-lymphotropic virus 1
ccaccccggccagcu

SEQ ID NO: 4015229 - RNA, 16 nt, Human T-lymphotropic virus 1
ccacccuccuuccucc

SEQ ID NO: 4015230 - RNA, 12 nt, Human T-lymphotropic virus 1
ccacccugcccu

SEQ ID NO: 4015231 - RNA, 21 nt, Human T-lymphotropic virus 1
ccaccgggaaccacccauuuc

SEQ ID NO: 4015232 - RNA, 12 nt, Human T-lymphotropic virus 1
ccaccucccagg

SEQ ID NO: 4015233 - RNA, 16 nt, Human T-lymphotropic virus 1
ccacguucgcagccau

SEQ ID NO: 4015234 - RNA, 21 nt, Human T-lymphotropic virus 1
ccacugugguguuccagucca

SEQ ID NO: 4015235 - RNA, 21 nt, Human T-lymphotropic virus 1
ccagaacagacgaggccuuga

SEQ ID NO: 4015236 - RNA, 18 nt, Human T-lymphotropic virus 1
ccagcagguccuccgggc

SEQ ID NO: 4015237 - RNA, 16 nt, Human T-lymphotropic virus 1
ccagccaacugccucc

SEQ ID NO: 4015238 - RNA, 13 nt, Human T-lymphotropic virus 1
ccagccgauccca

SEQ ID NO: 4015239 - RNA, 19 nt, Human T-lymphotropic virus 1
ccaggcucaacgcucucac

SEQ ID NO: 4015240 - RNA, 23 nt, Human T-lymphotropic virus 1
ccaucaacccccaacuccugcau

SEQ ID NO: 4015241 - RNA, 14 nt, Human T-lymphotropic virus 1
ccaucaccuggccc

SEQ ID NO: 4015242 - RNA, 15 nt, Human T-lymphotropic virus 1
ccaugcauccuccgu

SEQ ID NO: 4015243 - RNA, 19 nt, Human T-lymphotropic virus 1
cccaacccugucuuuucca

SEQ ID NO: 4015244 - RNA, 23 nt, Human T-lymphotropic virus 1
cccaacccugucuuuuccagacc

SEQ ID NO: 4015245 - RNA, 15 nt, Human T-lymphotropic virus 1
cccaagguaccuaua

SEQ ID NO: 4015246 - RNA, 17 nt, Human T-lymphotropic virus 1
uccaccucgccuuccaa

SEQ ID NO: 4015247 - RNA, 16 nt, Human T-lymphotropic virus 1
uccagccccccaccug

SEQ ID NO: 4015248 - RNA, 12 nt, Human T-lymphotropic virus 1
uccagccccuac

SEQ ID NO: 4015249 - RNA, 19 nt, Human T-lymphotropic virus 1
uccagcuaccaugccaccu

SEQ ID NO: 4015250 - RNA, 20 nt, Human T-lymphotropic virus 1
uccagcuaccaugccaccua

SEQ ID NO: 4015251 - RNA, 17 nt, Human T-lymphotropic virus 1
uccaggauaugacccca

SEQ ID NO: 4015252 - RNA, 19 nt, Human T-lymphotropic virus 1
uccaggccauugccuaucu

SEQ ID NO: 4015253 - RNA, 23 nt, Human T-lymphotropic virus 1
ucccaacccugucuuuuccagac

SEQ ID NO: 4015254 - RNA, 14 nt, Human T-lymphotropic virus 1
ucccacccuguucg

SEQ ID NO: 4015255 - RNA, 14 nt, Human T-lymphotropic virus 1
ucccaccgccccuc

SEQ ID NO: 4015256 - RNA, 15 nt, Human T-lymphotropic virus 1
ucccaucuccaggcu

SEQ ID NO: 4015257 - RNA, 11 nt, Human T-lymphotropic virus 1
ucccccuuccg

SEQ ID NO: 4015258 - RNA, 22 nt, Human T-lymphotropic virus 1
ucccgccuguggugccuccuga

SEQ ID NO: 4015259 - RNA, 15 nt, Human T-lymphotropic virus 1
ucccuaaucucccau

SEQ ID NO: 4015260 - RNA, 21 nt, Human T-lymphotropic virus 1
uccgucagcuacgacaccucc

SEQ ID NO: 4015261 - RNA, 13 nt, Human T-lymphotropic virus 1
uccguucagccuc

SEQ ID NO: 4015262 - RNA, 22 nt, Human T-lymphotropic virus 1
uccuaggggcuauuaugcugac

SEQ ID NO: 4015263 - RNA, 21 nt, Human T-lymphotropic virus 1
uccuccgcccgcuuccugcgc

SEQ ID NO: 4015264 - RNA, 17 nt, Human T-lymphotropic virus 1
uccuccguucagccucc

SEQ ID NO: 4015265 - RNA, 20 nt, Human T-lymphotropic virus 1
uccucggugauuacagcccc

SEQ ID NO: 4015266 - RNA, 16 nt, Human T-lymphotropic virus 1
uccucuacucucccac

SEQ ID NO: 4015267 - RNA, 18 nt, Human T-lymphotropic virus 1
uccucucaggcccccuuu

SEQ ID NO: 4015268 - RNA, 14 nt, Human T-lymphotropic virus 1
uccucuuucucccg

SEQ ID NO: 4015269 - RNA, 18 nt, Human T-lymphotropic virus 1
uccugcagcaaccuccuc

SEQ ID NO: 4015270 - RNA, 19 nt, Human T-lymphotropic virus 1
uccugcagcucucuccugc

SEQ ID NO: 4015271 - RNA, 17 nt, Human T-lymphotropic virus 1
uccuggcaagccccucc

SEQ ID NO: 4015272 - RNA, 16 nt, Human T-lymphotropic virus 1
uccuguaccucccuga

SEQ ID NO: 4015273 - RNA, 23 nt, Human T-lymphotropic virus 1
uccuucacgcgcccgccgccuua

SEQ ID NO: 4015274 - RNA, 16 nt, Human T-lymphotropic virus 1
ucgaccugcuggcccu

SEQ ID NO: 4015275 - RNA, 20 nt, Human T-lymphotropic virus 1
ucgccacuuugauuuuauuc

SEQ ID NO: 4015276 - RNA, 23 nt, Human T-lymphotropic virus 1
ucgcuuccucuucuccucagccc

SEQ ID NO: 4015277 - RNA, 20 nt, Human T-lymphotropic virus 1
ucggacuuuugcauggccuc

SEQ ID NO: 4015278 - RNA, 16 nt, Human T-lymphotropic virus 1
ucguggcgcugucuca

SEQ ID NO: 4015279 - RNA, 21 nt, Human T-lymphotropic virus 1
ucuaguauagccaucaacccc

SEQ ID NO: 4015280 - RNA, 18 nt, Human T-lymphotropic virus 1
ucucagccccuugucucc

SEQ ID NO: 4015281 - RNA, 23 nt, Human T-lymphotropic virus 1
ucuccgggcgaagucagcggccu

SEQ ID NO: 4015282 - RNA, 16 nt, Human T-lymphotropic virus 1
ucuccugcagcaaccu

SEQ ID NO: 4015283 - RNA, 13 nt, Human T-lymphotropic virus 1
ucugcuuuuccuc

SEQ ID NO: 4015284 - RNA, 20 nt, Human T-lymphotropic virus 1
ucuggcuacaugccccccua

SEQ ID NO: 4015285 - RNA, 20 nt, Human T-lymphotropic virus 1
ucuuccaguucugcccccuc

SEQ ID NO: 4015286 - RNA, 15 nt, Human T-lymphotropic virus 1
ucuucuccucagccc

SEQ ID NO: 4015287 - RNA, 23 nt, Human T-lymphotropic virus 1
ugacacccagaccagccacccaa

SEQ ID NO: 4015288 - RNA, 16 nt, Human T-lymphotropic virus 1
ugacuuguccagccug

SEQ ID NO: 4015289 - RNA, 17 nt, Human T-lymphotropic virus 1
ugaucccaucuccaggc

SEQ ID NO: 4015290 - RNA, 17 nt, Human T-lymphotropic virus 1
ugcaauccugcccagcc

SEQ ID NO: 4015291 - RNA, 19 nt, Human T-lymphotropic virus 1
ugcaccacguucgcagcca

SEQ ID NO: 4015292 - RNA, 22 nt, Human T-lymphotropic virus 1
ugcagcucucuccugcagaccu

SEQ ID NO: 4015293 - RNA, 15 nt, Human T-lymphotropic virus 1
ugcaugcccaagacc

SEQ ID NO: 4015294 - RNA, 13 nt, Human T-lymphotropic virus 1
ugcauggccucuc

SEQ ID NO: 4015295 - RNA, 19 nt, Human T-lymphotropic virus 1
ugccaacuacacuagccca

SEQ ID NO: 4015296 - RNA, 12 nt, Human T-lymphotropic virus 1
ugccccccuacc

SEQ ID NO: 4015297 - RNA, 19 nt, Human T-lymphotropic virus 1
ugcccuaggcaccuuccaa

SEQ ID NO: 4015298 - RNA, 22 nt, Human T-lymphotropic virus 1
ugcccuaggcaccuuccaaggc

SEQ ID NO: 4015299 - RNA, 18 nt, Human T-lymphotropic virus 1
ugcgcaaauacucccccu

SEQ ID NO: 4015300 - RNA, 16 nt, Human T-lymphotropic virus 1
ugcucuauccauagcc

SEQ ID NO: 4015301 - RNA, 13 nt, Human T-lymphotropic virus 1
ugcucuuccugcu

SEQ ID NO: 4015302 - RNA, 21 nt, Human T-lymphotropic virus 1
uggaucccguggaggcuccuc

SEQ ID NO: 4015303 - RNA, 13 nt, Human T-lymphotropic virus 1
uggcccuuucagc

SEQ ID NO: 4015304 - RNA, 22 nt, Human T-lymphotropic virus 1
uggcggaggcuauuauucagcc

SEQ ID NO: 4015305 - RNA, 17 nt, Human T-lymphotropic virus 1
ugucaagccguccucag

SEQ ID NO: 4015306 - RNA, 17 nt, Human T-lymphotropic virus 1
ugucgcgcuacuccuuc

SEQ ID NO: 4015307 - RNA, 23 nt, Human T-lymphotropic virus 1
ugugaucauaaacaccgccccuu

SEQ ID NO: 4015308 - RNA, 14 nt, Human T-lymphotropic virus 1
uguggugccuccug

SEQ ID NO: 4015309 - RNA, 22 nt, Human T-lymphotropic virus 1
uguuuucagacggauccaccuc

SEQ ID NO: 4015310 - RNA, 19 nt, Human T-lymphotropic virus 1
uuaauaccgaacccagcca

SEQ ID NO: 4015311 - RNA, 14 nt, Human T-lymphotropic virus 1
uuacgccagccccu

SEQ ID NO: 4015312 - RNA, 13 nt, Human T-lymphotropic virus 1
uuaggugcccaga

SEQ ID NO: 4015313 - RNA, 21 nt, Human T-lymphotropic virus 1
uuaguacuacaguccuccucc

SEQ ID NO: 4015314 - RNA, 15 nt, Human T-lymphotropic virus 1
uucaccuaaucaccu

SEQ ID NO: 4015315 - RNA, 21 nt, Human T-lymphotropic virus 1
gccuucuccuccgcccgcuuc

SEQ ID NO: 4015316 - RNA, 15 nt, Human T-lymphotropic virus 1
gccuugaucuccugu

SEQ ID NO: 4015317 - RNA, 16 nt, Human T-lymphotropic virus 1
gcggcuuuccucuucu

SEQ ID NO: 4015318 - RNA, 17 nt, Human T-lymphotropic virus 1
gcuacgacaccuccccu

SEQ ID NO: 4015319 - RNA, 18 nt, Human T-lymphotropic virus 1
gcuacuugccucagcugu

SEQ ID NO: 4015320 - RNA, 19 nt, Human T-lymphotropic virus 1
gcucaccucccuuccugug

SEQ ID NO: 4015321 - RNA, 23 nt, Human T-lymphotropic virus 1
gcucacggcgcuccugcucuucc

SEQ ID NO: 4015322 - RNA, 24 nt, Human T-lymphotropic virus 1
gcuccucaagcgagcugcaugccc

SEQ ID NO: 4015323 - RNA, 14 nt, Human T-lymphotropic virus 1
gcucugacgucucc

SEQ ID NO: 4015324 - RNA, 14 nt, Human T-lymphotropic virus 1
gcucuuccugcuuu

SEQ ID NO: 4015325 - RNA, 13 nt, Human T-lymphotropic virus 1
gcugacagccugg

SEQ ID NO: 4015326 - RNA, 13 nt, Human T-lymphotropic virus 1
gcugcaugcccaa

SEQ ID NO: 4015327 - RNA, 17 nt, Human T-lymphotropic virus 1
gcuuccagccccccacc

SEQ ID NO: 4015328 - RNA, 19 nt, Human T-lymphotropic virus 1
ggacaaagauauuucccaa

SEQ ID NO: 4015329 - RNA, 21 nt, Human T-lymphotropic virus 1
ggacuguuugcccaccacccu

SEQ ID NO: 4015330 - RNA, 15 nt, Human T-lymphotropic virus 1
ggagccgucuccagc

SEQ ID NO: 4015331 - RNA, 21 nt, Human T-lymphotropic virus 1
ggauacauggaacccacccuu

SEQ ID NO: 4015332 - RNA, 23 nt, Human T-lymphotropic virus 1
ggaugacauucuccuggcaagcc

SEQ ID NO: 4015333 - RNA, 22 nt, Human T-lymphotropic virus 1
ggcacguccuauacucucccaa

SEQ ID NO: 4015334 - RNA, 23 nt, Human T-lymphotropic virus 1
ggcagcaccucccaacccugucu

SEQ ID NO: 4015335 - RNA, 16 nt, Human T-lymphotropic virus 1
ggcagguccucucagg

SEQ ID NO: 4015336 - RNA, 18 nt, Human T-lymphotropic virus 1
ggcccauauccugcagcc

SEQ ID NO: 4015337 - RNA, 14 nt, Human T-lymphotropic virus 1
ggcccuccugcccc

SEQ ID NO: 4015338 - RNA, 13 nt, Human T-lymphotropic virus 1
ggccucuccagcg

SEQ ID NO: 4015339 - RNA, 18 nt, Human T-lymphotropic virus 1
ggcuagaacaccucccaa

SEQ ID NO: 4015340 - RNA, 17 nt, Human T-lymphotropic virus 1
gggagccggaguggcug

SEQ ID NO: 4015341 - RNA, 21 nt, Human T-lymphotropic virus 1
gggccaggaaauaacccagua

SEQ ID NO: 4015342 - RNA, 21 nt, Human T-lymphotropic virus 1
gguaagcgcuaguucugccca

SEQ ID NO: 4015343 - RNA, 15 nt, Human T-lymphotropic virus 1
guaccucccugaggc

SEQ ID NO: 4015344 - RNA, 13 nt, Human T-lymphotropic virus 1
guaugcugcccag

SEQ ID NO: 4015345 - RNA, 14 nt, Human T-lymphotropic virus 1
guccagagcaucag

SEQ ID NO: 4015346 - RNA, 14 nt, Human T-lymphotropic virus 1
guccuuaccccgcc

SEQ ID NO: 4015347 - RNA, 12 nt, Human T-lymphotropic virus 1
gucuccagcccc

SEQ ID NO: 4015348 - RNA, 15 nt, Human T-lymphotropic virus 1
gugauuacagcccca

SEQ ID NO: 4015349 - RNA, 18 nt, Human T-lymphotropic virus 1
gugauuacagccccagcu

SEQ ID NO: 4015350 - RNA, 21 nt, Human T-lymphotropic virus 1
gugcagcugcggcaggcccug

SEQ ID NO: 4015351 - RNA, 13 nt, Human T-lymphotropic virus 1
gugccagccuauc

SEQ ID NO: 4015352 - RNA, 21 nt, Human T-lymphotropic virus 1
gugccccugggggcagcuacu

SEQ ID NO: 4015353 - RNA, 21 nt, Human T-lymphotropic virus 1
guugacgacaaccccucaccu

SEQ ID NO: 4015354 - RNA, 18 nt, Human T-lymphotropic virus 1
uaaacccugcaauccugc

SEQ ID NO: 4015355 - RNA, 21 nt, Human T-lymphotropic virus 1
uaaacccugcaauccugccca

SEQ ID NO: 4015356 - RNA, 16 nt, Human T-lymphotropic virus 1
uaaagauggccagcca

SEQ ID NO: 4015357 - RNA, 14 nt, Human T-lymphotropic virus 1
uaacaucuccaccc

SEQ ID NO: 4015358 - RNA, 19 nt, Human T-lymphotropic virus 1
uaaccaagacccaacaucu

SEQ ID NO: 4015359 - RNA, 14 nt, Human T-lymphotropic virus 1
uaacucuuccucca

SEQ ID NO: 4015360 - RNA, 14 nt, Human T-lymphotropic virus 1
uaagcucagaccuc

SEQ ID NO: 4015361 - RNA, 18 nt, Human T-lymphotropic virus 1
uaaguuacuccagcuacc

SEQ ID NO: 4015362 - RNA, 11 nt, Human T-lymphotropic virus 1
uaaucucccau

SEQ ID NO: 4015363 - RNA, 18 nt, Human T-lymphotropic virus 1
uaauggcauucuuaaaac

SEQ ID NO: 4015364 - RNA, 22 nt, Human T-lymphotropic virus 1
uaauuaaccucucccaucaaau

SEQ ID NO: 4015365 - RNA, 13 nt, Human T-lymphotropic virus 1
uacacccucuggg

SEQ ID NO: 4015366 - RNA, 17 nt, Human T-lymphotropic virus 1
uacagccccagcugcug

SEQ ID NO: 4015367 - RNA, 19 nt, Human T-lymphotropic virus 1
uacaggagccgucuccagc

SEQ ID NO: 4015368 - RNA, 22 nt, Human T-lymphotropic virus 1
uacaggagccgucuccagcccc

SEQ ID NO: 4015369 - RNA, 22 nt, Human T-lymphotropic virus 1
uacauggaugacauucuccugg

SEQ ID NO: 4015370 - RNA, 20 nt, Human T-lymphotropic virus 1
uacccaucguuagcgcuucc

SEQ ID NO: 4015371 - RNA, 14 nt, Human T-lymphotropic virus 1
uaccgaacccagcc

SEQ ID NO: 4015372 - RNA, 16 nt, Human T-lymphotropic virus 1
uacgccagccccuuca

SEQ ID NO: 4015373 - RNA, 19 nt, Human T-lymphotropic virus 1
uacgccagccccuucacag

SEQ ID NO: 4015374 - RNA, 17 nt, Human T-lymphotropic virus 1
uacuacaguccuccucc

SEQ ID NO: 4015375 - RNA, 14 nt, Human T-lymphotropic virus 1
uacucccccuuccg

SEQ ID NO: 4015376 - RNA, 15 nt, Human T-lymphotropic virus 1
uagaacaccucccaa

SEQ ID NO: 4015377 - RNA, 19 nt, Human T-lymphotropic virus 1
uagaacaccucccaaggcc

SEQ ID NO: 4015378 - RNA, 13 nt, Human T-lymphotropic virus 1
uagacaccuuuuc

SEQ ID NO: 4015379 - RNA, 23 nt, Human T-lymphotropic virus 1
uagaccuuaaagacgccuuuuuc

SEQ ID NO: 4015380 - RNA, 12 nt, Human T-lymphotropic virus 1
uagacucagccg

SEQ ID NO: 4015381 - RNA, 16 nt, Human T-lymphotropic virus 1
aaaaauuuaggugccc

SEQ ID NO: 4015382 - RNA, 12 nt, Human T-lymphotropic virus 1
aaaagaggcaga

SEQ ID NO: 4015383 - RNA, 21 nt, Human T-lymphotropic virus 1
aaaagcguggggacaguucag

SEQ ID NO: 4015384 - RNA, 22 nt, Human T-lymphotropic virus 1
aaaaugcgguuuuuccuucucc

SEQ ID NO: 4015385 - RNA, 14 nt, Human T-lymphotropic virus 1
aaacaguuccagcc

SEQ ID NO: 4015386 - RNA, 14 nt, Human T-lymphotropic virus 1
aaacuccucuauaa

SEQ ID NO: 4015387 - RNA, 11 nt, Human T-lymphotropic virus 1
aaagagccucc

SEQ ID NO: 4015388 - RNA, 15 nt, Human T-lymphotropic virus 1
aacaauuaaguuccu

SEQ ID NO: 4015389 - RNA, 16 nt, Human T-lymphotropic virus 1
aacaccucccaaggcc

SEQ ID NO: 4015390 - RNA, 15 nt, Human T-lymphotropic virus 1
aacacuuuucuuaaa

SEQ ID NO: 4015391 - RNA, 23 nt, Human T-lymphotropic virus 1
aacagaagucugagaaggucagg

SEQ ID NO: 4015392 - RNA, 19 nt, Human T-lymphotropic virus 1
aacagugcuguuuucuaaa

SEQ ID NO: 4015393 - RNA, 15 nt, Human T-lymphotropic virus 1
aacccgaccuaccua

SEQ ID NO: 4015394 - RNA, 16 nt, Human T-lymphotropic virus 1
aaccuagaccauaucc

SEQ ID NO: 4015395 - RNA, 21 nt, Human T-lymphotropic virus 1
aaccuccuccguucagccucc

SEQ ID NO: 4015396 - RNA, 14 nt, Human T-lymphotropic virus 1
aacgccuccaggcc

SEQ ID NO: 4015397 - RNA, 13 nt, Human T-lymphotropic virus 1
aacucccucaucc

SEQ ID NO: 4015398 - RNA, 18 nt, Human T-lymphotropic virus 1
aacucccucauccugccc

SEQ ID NO: 4015399 - RNA, 20 nt, Human T-lymphotropic virus 1
aacucccucauccugccccc

SEQ ID NO: 4015400 - RNA, 17 nt, Human T-lymphotropic virus 1
aacucuuccuccaagga

SEQ ID NO: 4015401 - RNA, 21 nt, Human T-lymphotropic virus 1
aagacaaaucauaagcucaga

SEQ ID NO: 4015402 - RNA, 13 nt, Human T-lymphotropic virus 1
aagccccucccau

SEQ ID NO: 4015403 - RNA, 16 nt, Human T-lymphotropic virus 1
aaguacuuuacugaca

SEQ ID NO: 4015404 - RNA, 17 nt, Human T-lymphotropic virus 1
aauccuccuucuccugc

SEQ ID NO: 4015405 - RNA, 20 nt, Human T-lymphotropic virus 1
acaaggcgacuggugcccca

SEQ ID NO: 4015406 - RNA, 15 nt, Human T-lymphotropic virus 1
acacuagcccacuua

SEQ ID NO: 4015407 - RNA, 17 nt, Human T-lymphotropic virus 1
acacuuuucuuaaaaca

SEQ ID NO: 4015408 - RNA, 12 nt, Human T-lymphotropic virus 1
acagaacugccg

SEQ ID NO: 4015409 - RNA, 15 nt, Human T-lymphotropic virus 1
acagacgaggccuug

SEQ ID NO: 4015410 - RNA, 22 nt, Human T-lymphotropic virus 1
acagacgaggccuugaucuccu

SEQ ID NO: 4015411 - RNA, 20 nt, Human T-lymphotropic virus 1
acagcucagcaccagcucag

SEQ ID NO: 4015412 - RNA, 13 nt, Human T-lymphotropic virus 1
acaguccuccucc

SEQ ID NO: 4015413 - RNA, 16 nt, Human T-lymphotropic virus 1
acaguuggagucuccu

SEQ ID NO: 4015414 - RNA, 20 nt, Human T-lymphotropic virus 1
acaucugaccaccccagugu

SEQ ID NO: 4015415 - RNA, 20 nt, Human T-lymphotropic virus 1
acauuacccauuucaaauau

SEQ ID NO: 4015416 - RNA, 22 nt, Human T-lymphotropic virus 1
acauucuccuggcaagccccuc

SEQ ID NO: 4015417 - RNA, 18 nt, Human T-lymphotropic virus 1
accacccuuuuccagccu

SEQ ID NO: 4015418 - RNA, 19 nt, Human T-lymphotropic virus 1
accagaacgccuccaggcc

SEQ ID NO: 4015419 - RNA, 13 nt, Human T-lymphotropic virus 1
accagcuuucccc

SEQ ID NO: 4015420 - RNA, 14 nt, Human T-lymphotropic virus 1
accagcuuuccccc

SEQ ID NO: 4015421 - RNA, 20 nt, Human T-lymphotropic virus 1
accagcuuuccccccccauc

SEQ ID NO: 4015422 - RNA, 12 nt, Human T-lymphotropic virus 1
acccuccuuccu

SEQ ID NO: 4015423 - RNA, 18 nt, Human T-lymphotropic virus 1
acccuccuuccuccaggc

SEQ ID NO: 4015424 - RNA, 20 nt, Human T-lymphotropic virus 1
acccuccuuccuccaggcca

SEQ ID NO: 4015425 - RNA, 23 nt, Human T-lymphotropic virus 1
acccugcaauccugcccagccag

SEQ ID NO: 4015426 - RNA, 19 nt, Human T-lymphotropic virus 1
acccugucuuuuccagacc

SEQ ID NO: 4015427 - RNA, 21 nt, Human T-lymphotropic virus 1
acccuguucgaaaugcagcug

SEQ ID NO: 4015428 - RNA, 13 nt, Human T-lymphotropic virus 1
accgccccuccuc

SEQ ID NO: 4015429 - RNA, 22 nt, Human T-lymphotropic virus 1
accgccccuccucuacucuccc

SEQ ID NO: 4015430 - RNA, 16 nt, Human T-lymphotropic virus 1
accggcuccauguccc

SEQ ID NO: 4015431 - RNA, 17 nt, Human T-lymphotropic virus 1
accggcuccaugucccu

SEQ ID NO: 4015432 - RNA, 15 nt, Human T-lymphotropic virus 1
accuauggauaaugc

SEQ ID NO: 4015433 - RNA, 16 nt, Human T-lymphotropic virus 1
acgcuuugccugaccc

SEQ ID NO: 4015434 - RNA, 17 nt, Human T-lymphotropic virus 1
acggauccaccucccag

SEQ ID NO: 4015435 - RNA, 17 nt, Human T-lymphotropic virus 1
acguccuauacucuccc

SEQ ID NO: 4015436 - RNA, 13 nt, Human T-lymphotropic virus 1
acuacccaugucc

SEQ ID NO: 4015437 - RNA, 14 nt, Human T-lymphotropic virus 1
acuccaccacaguc

SEQ ID NO: 4015438 - RNA, 13 nt, Human T-lymphotropic virus 1
acuccagcuacca

SEQ ID NO: 4015439 - RNA, 22 nt, Human T-lymphotropic virus 1
acuccagcuaccaugccaccua

SEQ ID NO: 4015440 - RNA, 17 nt, Human T-lymphotropic virus 1
acucccucauccugccc

SEQ ID NO: 4015441 - RNA, 16 nt, Human T-lymphotropic virus 1
acuccugacucuuguc

SEQ ID NO: 4015442 - RNA, 13 nt, Human T-lymphotropic virus 1
acucucccacucu

SEQ ID NO: 4015443 - RNA, 21 nt, Human T-lymphotropic virus 1
acugacaaacccgaccuaccu

SEQ ID NO: 4015444 - RNA, 12 nt, Human T-lymphotropic virus 1
acugccucccac

SEQ ID NO: 4015445 - RNA, 13 nt, Human T-lymphotropic virus 1
acuggcaccacca

SEQ ID NO: 4015446 - RNA, 18 nt, Human T-lymphotropic virus 1
agaccgggccuuuguccg

SEQ ID NO: 4015447 - RNA, 21 nt, Human T-lymphotropic virus 1
agaucaggcccuacagccacc

SEQ ID NO: 4015448 - RNA, 22 nt, Human T-lymphotropic virus 1
agcaaccuccuccguucagccu

SEQ ID NO: 4015449 - RNA, 15 nt, Human T-lymphotropic virus 1
agcacaguuuccucc

SEQ ID NO: 4015450 - RNA, 19 nt, Human T-lymphotropic virus 1
agccacccugcccuaaucu

SEQ ID NO: 4015451 - RNA, 20 nt, Human T-lymphotropic virus 1
agccauaccaaucuaccuga

SEQ ID NO: 4015452 - RNA, 17 nt, Human T-lymphotropic virus 1
agcccuacuuugcuuuc

SEQ ID NO: 4015453 - RNA, 14 nt, Human T-lymphotropic virus 1
agccgucuccagcc

SEQ ID NO: 4015454 - RNA, 16 nt, Human T-lymphotropic virus 1
agccgucuccagcccc

SEQ ID NO: 4015455 - RNA, 21 nt, Human T-lymphotropic virus 1
agccgucuccagccccuacug

SEQ ID NO: 4015456 - RNA, 12 nt, Human T-lymphotropic virus 1
agccuccaagga

SEQ ID NO: 4015457 - RNA, 20 nt, Human T-lymphotropic virus 1
agccuccaaggacuccaccu

SEQ ID NO: 4015458 - RNA, 23 nt, Human T-lymphotropic virus 1
agccugccaacuacacuagccca

SEQ ID NO: 4015459 - RNA, 23 nt, Human T-lymphotropic virus 1
agccuggcaaaacggccuccuuc

SEQ ID NO: 4015460 - RNA, 16 nt, Human T-lymphotropic virus 1
agcgcuaguucugccc

SEQ ID NO: 4015461 - RNA, 21 nt, Human T-lymphotropic virus 1
agcgcuaguucugcccagugg

SEQ ID NO: 4015462 - RNA, 22 nt, Human T-lymphotropic virus 1
agcgcuaguucugcccagugga

SEQ ID NO: 4015463 - RNA, 22 nt, Human T-lymphotropic virus 1
agcggccuucuccuccgcccgc

SEQ ID NO: 4015464 - RNA, 13 nt, Human T-lymphotropic virus 1
agcucaccucccu

SEQ ID NO: 4015465 - RNA, 19 nt, Human T-lymphotropic virus 1
agcucagcaccagcucagg

SEQ ID NO: 4015466 - RNA, 21 nt, Human T-lymphotropic virus 1
agcuggcccauauccugcagc

SEQ ID NO: 4015467 - RNA, 15 nt, Human T-lymphotropic virus 1
agcuucaccacuccc

SEQ ID NO: 4015468 - RNA, 21 nt, Human T-lymphotropic virus 1
aggagccaucucagcuaccca

SEQ ID NO: 4015469 - RNA, 20 nt, Human T-lymphotropic virus 1
aggagccgucuccagccccu

SEQ ID NO: 4015470 - RNA, 19 nt, Human T-lymphotropic virus 1
aggcccuacagccacccug

SEQ ID NO: 4015471 - RNA, 14 nt, Human T-lymphotropic virus 1
aggcccuccugccc

SEQ ID NO: 4015472 - RNA, 22 nt, Human T-lymphotropic virus 1
aggggcaaccacaacugaggcc

SEQ ID NO: 4015473 - RNA, 21 nt, Human T-lymphotropic virus 1
agguaaguuuagagcucaggu

SEQ ID NO: 4015474 - RNA, 16 nt, Human T-lymphotropic virus 1
agguggcgcuuucccc

SEQ ID NO: 4015475 - RNA, 18 nt, Human T-lymphotropic virus 1
aguacucuuccuuucaua

SEQ ID NO: 4015476 - RNA, 14 nt, Human T-lymphotropic virus 1
aguucugcccccuc

SEQ ID NO: 4015477 - RNA, 12 nt, Human T-lymphotropic virus 1
aguuuccuccuc

SEQ ID NO: 4015478 - RNA, 16 nt, Human T-lymphotropic virus 1
aguuucucgccacuuu

SEQ ID NO: 4015479 - RNA, 19 nt, Human T-lymphotropic virus 1
auaaguacuuuacugacaa

SEQ ID NO: 4015480 - RNA, 14 nt, Human T-lymphotropic virus 1
auacaucauaacau

SEQ ID NO: 4015481 - RNA, 16 nt, Human T-lymphotropic virus 1
auagccuuguucucaa

SEQ ID NO: 4015482 - RNA, 14 nt, Human T-lymphotropic virus 1
auagucccacccug

SEQ ID NO: 4015483 - RNA, 16 nt, Human T-lymphotropic virus 1
auauccucgagcccuc

SEQ ID NO: 4015484 - RNA, 22 nt, Human T-lymphotropic virus 1
aucaccccuguccugcagcucu

SEQ ID NO: 4015485 - RNA, 13 nt, Human T-lymphotropic virus 1
aucaccuggcccc

SEQ ID NO: 4015486 - RNA, 22 nt, Human T-lymphotropic virus 1
aucauaggucgugaugccuuac

SEQ ID NO: 4015487 - RNA, 20 nt, Human T-lymphotropic virus 1
aucaucuucccccgggcccc

SEQ ID NO: 4015488 - RNA, 20 nt, Human T-lymphotropic virus 1
aucauggaccugccccuaua

SEQ ID NO: 4015489 - RNA, 14 nt, Human T-lymphotropic virus 1
auccaaccagcucc

SEQ ID NO: 4015490 - RNA, 15 nt, Human T-lymphotropic virus 1
aucccaucuccaggc

SEQ ID NO: 4015491 - RNA, 19 nt, Human T-lymphotropic virus 1
aucccucgacuccccuccu

SEQ ID NO: 4015492 - RNA, 22 nt, Human T-lymphotropic virus 1
auccgccguggccuacucccua

SEQ ID NO: 4015493 - RNA, 14 nt, Human T-lymphotropic virus 1
aucuauucccucau

SEQ ID NO: 4015494 - RNA, 22 nt, Human T-lymphotropic virus 1
aucugcuuuuccuccucuuucu

SEQ ID NO: 4015495 - RNA, 15 nt, Human T-lymphotropic virus 1
aucuuuaucauuacc

SEQ ID NO: 4015496 - RNA, 18 nt, Human T-lymphotropic virus 1
augacauucuccuggcaa

SEQ ID NO: 4015497 - RNA, 22 nt, Human T-lymphotropic virus 1
augacauucuccuggcaagccc

SEQ ID NO: 4015498 - RNA, 21 nt, Human T-lymphotropic virus 1
augauuuccgggcccugcccu

SEQ ID NO: 4015499 - RNA, 14 nt, Human T-lymphotropic virus 1
augcagcuggccca

SEQ ID NO: 4015500 - RNA, 13 nt, Human T-lymphotropic virus 1
augcugcccagaa

SEQ ID NO: 4015501 - RNA, 15 nt, Human T-lymphotropic virus 1
auuaaccaacugcca

SEQ ID NO: 4015502 - RNA, 12 nt, Human T-lymphotropic virus 1
auuacagcccca

SEQ ID NO: 4015503 - RNA, 23 nt, Human T-lymphotropic virus 1
auucaaacaucugaccaccccag

SEQ ID NO: 4015504 - RNA, 11 nt, Human T-lymphotropic virus 1
auuccacccuc

SEQ ID NO: 4015505 - RNA, 14 nt, Human T-lymphotropic virus 1
auucuuccaguucu

SEQ ID NO: 4015506 - RNA, 16 nt, Human T-lymphotropic virus 1
auugacacccagacca

SEQ ID NO: 4015507 - RNA, 20 nt, Human T-lymphotropic virus 1
auugcacaguaugcugccca

SEQ ID NO: 4015508 - RNA, 20 nt, Human T-lymphotropic virus 1
auuuaacuggacccacugcu

SEQ ID NO: 4015509 - RNA, 16 nt, Human T-lymphotropic virus 1
auuuccgggcccugcc

SEQ ID NO: 4015510 - RNA, 22 nt, Human T-lymphotropic virus 1
auuugcaccacguucgcagcca

SEQ ID NO: 4015511 - RNA, 15 nt, Human T-lymphotropic virus 1
caaaaagccaaaccg

SEQ ID NO: 4015512 - RNA, 19 nt, Human T-lymphotropic virus 1
caaaaauuuaggugcccag

SEQ ID NO: 4015513 - RNA, 19 nt, Human T-lymphotropic virus 1
caaaacccagcaaaccccu

SEQ ID NO: 4015514 - RNA, 20 nt, Human T-lymphotropic virus 1
caaauccuccuucuccugca

SEQ ID NO: 4015515 - RNA, 23 nt, Human T-lymphotropic virus 1
caacacuugguccggaaggcccu

SEQ ID NO: 4015516 - RNA, 17 nt, Human T-lymphotropic virus 1
caacaucuauucugcca

SEQ ID NO: 4015517 - RNA, 22 nt, Human T-lymphotropic virus 1
caacauuccacccuccuuccuc

SEQ ID NO: 4015518 - RNA, 18 nt, Human T-lymphotropic virus 1
caagaaguuucacaccuc

SEQ ID NO: 4015519 - RNA, 23 nt, Human T-lymphotropic virus 1
caaggacuccaccucgccuucca

SEQ ID NO: 4015520 - RNA, 19 nt, Human T-lymphotropic virus 1
caauaauuaaccucuccca

SEQ ID NO: 4015521 - RNA, 14 nt, Human T-lymphotropic virus 1
caauccugcccagc

SEQ ID NO: 4015522 - RNA, 15 nt, Human T-lymphotropic virus 1
caaucugcuuuuccu

SEQ ID NO: 4015523 - RNA, 14 nt, Human T-lymphotropic virus 1
cacagaugcccuac

SEQ ID NO: 4015524 - RNA, 18 nt, Human T-lymphotropic virus 1
cacagaugcccuacuaau

SEQ ID NO: 4015525 - RNA, 18 nt, Human T-lymphotropic virus 1
cacaguuggagucuccuc

SEQ ID NO: 4015526 - RNA, 18 nt, Human T-lymphotropic virus 1
caccacccuuuuccagcc

SEQ ID NO: 4015527 - RNA, 23 nt, Human T-lymphotropic virus 1
caccacuccccccgacuccagcc

SEQ ID NO: 4015528 - RNA, 16 nt, Human T-lymphotropic virus 1
uagcgcuuccagcccc

SEQ ID NO: 4015529 - RNA, 17 nt, Human T-lymphotropic virus 1
uagcgcuuccagccccc

SEQ ID NO: 4015530 - RNA, 18 nt, Human T-lymphotropic virus 1
uaggcaccuuccaaggca

SEQ ID NO: 4015531 - RNA, 23 nt, Human T-lymphotropic virus 1
uaggggcuauuaugcugacccuc

SEQ ID NO: 4015532 - RNA, 12 nt, Human T-lymphotropic virus 1
uaggugcccaga

SEQ ID NO: 4015533 - RNA, 16 nt, Human T-lymphotropic virus 1
uauucccaguuaaaaa

SEQ ID NO: 4015534 - RNA, 18 nt, Human T-lymphotropic virus 1
uauuuaaauccuucucaa

SEQ ID NO: 4015535 - RNA, 16 nt, Human T-lymphotropic virus 1
ucaaaacuccugacuc

SEQ ID NO: 4015536 - RNA, 20 nt, Human T-lymphotropic virus 1
ucaaacaucugaccacccca

SEQ ID NO: 4015537 - RNA, 21 nt, Human T-lymphotropic virus 1
ucaacccucaccacuccaggc

SEQ ID NO: 4015538 - RNA, 14 nt, Human T-lymphotropic virus 1
ucaacgcucucaca

SEQ ID NO: 4015539 - RNA, 19 nt, Human T-lymphotropic virus 1
ucaagcacaguuuccuccu

SEQ ID NO: 4015540 - RNA, 20 nt, Human T-lymphotropic virus 1
ucaagcacaguuuccuccuc

SEQ ID NO: 4015541 - RNA, 21 nt, Human T-lymphotropic virus 1
ucaaucauuagugcagcugcg

SEQ ID NO: 4015542 - RNA, 20 nt, Human T-lymphotropic virus 1
ucacaguuggagucuccuca

SEQ ID NO: 4015543 - RNA, 15 nt, Human T-lymphotropic virus 1
ucacgcgcccgccgc

SEQ ID NO: 4015544 - RNA, 16 nt, Human T-lymphotropic virus 1
ucacgcgcccgccgcc

SEQ ID NO: 4015545 - RNA, 20 nt, Human T-lymphotropic virus 1
ucacuuuaagcucaccuccc

SEQ ID NO: 4015546 - RNA, 20 nt, Human T-lymphotropic virus 1
ucagcaaucugcuuuuccuc

SEQ ID NO: 4015547 - RNA, 21 nt, Human T-lymphotropic virus 1
ucagcaccagcucaggcuagg

SEQ ID NO: 4015548 - RNA, 21 nt, Human T-lymphotropic virus 1
ucagcagaucaggcccuacag

SEQ ID NO: 4015549 - RNA, 16 nt, Human T-lymphotropic virus 1
ucaggcccuccugccc

SEQ ID NO: 4015550 - RNA, 14 nt, Human T-lymphotropic virus 1
ucaucaucuucccc

SEQ ID NO: 4015551 - RNA, 15 nt, Human T-lymphotropic virus 1
ucauucaaacaucug

SEQ ID NO: 4015552 - RNA, 17 nt, Human T-lymphotropic virus 1
uccaaacccugccccuc

SEQ ID NO: 4015553 - RNA, 14 nt, Human T-lymphotropic virus 1
uccaaccagcuccg

SEQ ID NO: 4015554 - RNA, 18 nt, Human T-lymphotropic virus 1
uccaaggacuccaccucg

SEQ ID NO: 4015555 - RNA, 20 nt, Human T-lymphotropic virus 1
uccaaggacuccaccucgcc

SEQ ID NO: 4015556 - RNA, 13 nt, Human T-lymphotropic virus 1
uccaauauccugc

SEQ ID NO: 4015557 - RNA, 21 nt, Human T-lymphotropic virus 1
uccaccagcagguccuccggg

SEQ ID NO: 4015558 - RNA, 20 nt, Human T-lymphotropic virus 1
uccacccuccuuccuccagg

SEQ ID NO: 4015559 - RNA, 19 nt, Human T-lymphotropic virus 1
uccagccgaucccagagac

SEQ ID NO: 4015560 - RNA, 14 nt, Human T-lymphotropic virus 1
uccagccuccccug

SEQ ID NO: 4015561 - RNA, 17 nt, Human T-lymphotropic virus 1
uccagccuccccugcca

SEQ ID NO: 4015562 - RNA, 13 nt, Human T-lymphotropic virus 1
uccagccugccaa

SEQ ID NO: 4015563 - RNA, 15 nt, Human T-lymphotropic virus 1
uccagccugccaacu

SEQ ID NO: 4015564 - RNA, 13 nt, Human T-lymphotropic virus 1
uccaguccaagca

SEQ ID NO: 4015565 - RNA, 18 nt, Human T-lymphotropic virus 1
uccaguucugcccccuca

SEQ ID NO: 4015566 - RNA, 18 nt, Human T-lymphotropic virus 1
ucccaguuaaaaaagcca

SEQ ID NO: 4015567 - RNA, 16 nt, Human T-lymphotropic virus 1
uccccauuucucuacu

SEQ ID NO: 4015568 - RNA, 14 nt, Human T-lymphotropic virus 1
uccccccccaucac

SEQ ID NO: 4015569 - RNA, 18 nt, Human T-lymphotropic virus 1
uccccccgacuccagccg

SEQ ID NO: 4015570 - RNA, 23 nt, Human T-lymphotropic virus 1
ucccccuaccuaaacaguuccag

SEQ ID NO: 4015571 - RNA, 18 nt, Human T-lymphotropic virus 1
ucccccuuccgccaccgc

SEQ ID NO: 4015572 - RNA, 21 nt, Human T-lymphotropic virus 1
ucccgccuguggugccuccug

SEQ ID NO: 4015573 - RNA, 15 nt, Human T-lymphotropic virus 1
ucccucauccugccc

SEQ ID NO: 4015574 - RNA, 15 nt, Human T-lymphotropic virus 1
ucccucgacuccccu

SEQ ID NO: 4015575 - RNA, 16 nt, Human T-lymphotropic virus 1
uccgcccgcuuccugc

SEQ ID NO: 4015576 - RNA, 21 nt, Human T-lymphotropic virus 1
uccuaccuuacgccagccccu

SEQ ID NO: 4015577 - RNA, 16 nt, Human T-lymphotropic virus 1
uccuccguucagccuc

SEQ ID NO: 4015578 - RNA, 15 nt, Human T-lymphotropic virus 1
uccuccuccuugucc

SEQ ID NO: 4015579 - RNA, 18 nt, Human T-lymphotropic virus 1
uccuccuucuccugcagc

SEQ ID NO: 4015580 - RNA, 15 nt, Human T-lymphotropic virus 1
uccugcagcaaccuc

SEQ ID NO: 4015581 - RNA, 14 nt, Human T-lymphotropic virus 1
uccugccccccuuu

SEQ ID NO: 4015582 - RNA, 18 nt, Human T-lymphotropic virus 1
uccugcgccgugccuucu

SEQ ID NO: 4015583 - RNA, 19 nt, Human T-lymphotropic virus 1
uccuggcaagccccuccca

SEQ ID NO: 4015584 - RNA, 22 nt, Human T-lymphotropic virus 1
uccuggcaagccccucccaugc

SEQ ID NO: 4015585 - RNA, 22 nt, Human T-lymphotropic virus 1
uccuugggcuagaacaccuccc

SEQ ID NO: 4015586 - RNA, 21 nt, Human T-lymphotropic virus 1
ucgaccugcuggcccuuucag

SEQ ID NO: 4015587 - RNA, 14 nt, Human T-lymphotropic virus 1
ucgacgcuccagga

SEQ ID NO: 4015588 - RNA, 13 nt, Human T-lymphotropic virus 1
ucgcaucucuccu

SEQ ID NO: 4015589 - RNA, 17 nt, Human T-lymphotropic virus 1
ucgcaucucuccuucac

SEQ ID NO: 4015590 - RNA, 13 nt, Human T-lymphotropic virus 1
ucgccuccagccu

SEQ ID NO: 4015591 - RNA, 15 nt, Human T-lymphotropic virus 1
ucgccuucucagccc

SEQ ID NO: 4015592 - RNA, 12 nt, Human T-lymphotropic virus 1
ucggcccgccua

SEQ ID NO: 4015593 - RNA, 22 nt, Human T-lymphotropic virus 1
ucggugauuacagccccagcug

SEQ ID NO: 4015594 - RNA, 20 nt, Human T-lymphotropic virus 1
ucuagucgacgcuccaggau

SEQ ID NO: 4015595 - RNA, 16 nt, Human T-lymphotropic virus 1
ucuauaaaauuucccu

SEQ ID NO: 4015596 - RNA, 22 nt, Human T-lymphotropic virus 1
ucucaaguaauacuccccucaa

SEQ ID NO: 4015597 - RNA, 23 nt, Human T-lymphotropic virus 1
ucuccacgcuuugccugacccug

SEQ ID NO: 4015598 - RNA, 13 nt, Human T-lymphotropic virus 1
ucuccagccccua

SEQ ID NO: 4015599 - RNA, 15 nt, Human T-lymphotropic virus 1
ucuccauuuuucaaa

SEQ ID NO: 4015600 - RNA, 14 nt, Human T-lymphotropic virus 1
ucuccgcccuggcc

SEQ ID NO: 4015601 - RNA, 18 nt, Human T-lymphotropic virus 1
ucuccuggcaagccccuc

SEQ ID NO: 4015602 - RNA, 21 nt, Human T-lymphotropic virus 1
ucuccuucacgcgcccgccgc

SEQ ID NO: 4015603 - RNA, 12 nt, Human T-lymphotropic virus 1
ucugcccagugg

SEQ ID NO: 4015604 - RNA, 22 nt, Human T-lymphotropic virus 1
ucuguaucgaucgugccagccu

SEQ ID NO: 4015605 - RNA, 14 nt, Human T-lymphotropic virus 1
ucuuaaaacaacug

SEQ ID NO: 4015606 - RNA, 20 nt, Human T-lymphotropic virus 1
ucuuaaaacaacugccccau

SEQ ID NO: 4015607 - RNA, 14 nt, Human T-lymphotropic virus 1
ucuuauaaacccug

SEQ ID NO: 4015608 - RNA, 15 nt, Human T-lymphotropic virus 1
ugacauucuccuggc

SEQ ID NO: 4015609 - RNA, 18 nt, Human T-lymphotropic virus 1
aaaaagaccaccaacacc

SEQ ID NO: 4015610 - RNA, 12 nt, Human T-lymphotropic virus 1
aaaacggccucc

SEQ ID NO: 4015611 - RNA, 16 nt, Human T-lymphotropic virus 1
aaacaucgaaacagcc

SEQ ID NO: 4015612 - RNA, 18 nt, Human T-lymphotropic virus 1
aaacccugagucaucccu

SEQ ID NO: 4015613 - RNA, 13 nt, Human T-lymphotropic virus 1
aaauauuacuaau

SEQ ID NO: 4015614 - RNA, 15 nt, Human T-lymphotropic virus 1
aaauccuccuucucc

SEQ ID NO: 4015615 - RNA, 23 nt, Human T-lymphotropic virus 1
aacacagacaauggcccugccua

SEQ ID NO: 4015616 - RNA, 20 nt, Human T-lymphotropic virus 1
aaccaacugccacaaaaccc

SEQ ID NO: 4015617 - RNA, 19 nt, Human T-lymphotropic virus 1
aaccacccauuuccucccc

SEQ ID NO: 4015618 - RNA, 12 nt, Human T-lymphotropic virus 1
aaccccucaccu

SEQ ID NO: 4015619 - RNA, 19 nt, Human T-lymphotropic virus 1
aacccugcaauccugccca

SEQ ID NO: 4015620 - RNA, 15 nt, Human T-lymphotropic virus 1
aacccugccccuccu

SEQ ID NO: 4015621 - RNA, 16 nt, Human T-lymphotropic virus 1
aacccugccccuccua

SEQ ID NO: 4015622 - RNA, 19 nt, Human T-lymphotropic virus 1
aacucccucauccugcccc

SEQ ID NO: 4015623 - RNA, 18 nt, Human T-lymphotropic virus 1
aacuccuaccuuacgcca

SEQ ID NO: 4015624 - RNA, 12 nt, Human T-lymphotropic virus 1
aagaagcugccg

SEQ ID NO: 4015625 - RNA, 14 nt, Human T-lymphotropic virus 1
aagcccuuaugcca

SEQ ID NO: 4015626 - RNA, 22 nt, Human T-lymphotropic virus 1
aagccuagcuacauaaacacag

SEQ ID NO: 4015627 - RNA, 12 nt, Human T-lymphotropic virus 1
aagcucaccucc

SEQ ID NO: 4015628 - RNA, 23 nt, Human T-lymphotropic virus 1
aagcucuacuagauacaggagca

SEQ ID NO: 4015629 - RNA, 17 nt, Human T-lymphotropic virus 1
aaggcagguccucucag

SEQ ID NO: 4015630 - RNA, 13 nt, Human T-lymphotropic virus 1
aauaacccacaac

SEQ ID NO: 4015631 - RNA, 21 nt, Human T-lymphotropic virus 1
aauauccugcgcucuugccac

SEQ ID NO: 4015632 - RNA, 15 nt, Human T-lymphotropic virus 1
acaaagauauuuccc

SEQ ID NO: 4015633 - RNA, 14 nt, Human T-lymphotropic virus 1
acacaguuucaccc

SEQ ID NO: 4015634 - RNA, 19 nt, Human T-lymphotropic virus 1
acacuuuucuuaaaacaac

SEQ ID NO: 4015635 - RNA, 13 nt, Human T-lymphotropic virus 1
acagccccagcug

SEQ ID NO: 4015636 - RNA, 15 nt, Human T-lymphotropic virus 1
acagccccagcugcu

SEQ ID NO: 4015637 - RNA, 16 nt, Human T-lymphotropic virus 1
acagccccagcugcug

SEQ ID NO: 4015638 - RNA, 20 nt, Human T-lymphotropic virus 1
acaggagccgucuccagccc

SEQ ID NO: 4015639 - RNA, 18 nt, Human T-lymphotropic virus 1
acaucgccuccagccucc

SEQ ID NO: 4015640 - RNA, 12 nt, Human T-lymphotropic virus 1
accaaaaacaac

SEQ ID NO: 4015641 - RNA, 23 nt, Human T-lymphotropic virus 1
accaaucuaccugaucccaucuc

SEQ ID NO: 4015642 - RNA, 19 nt, Human T-lymphotropic virus 1
accacaucgccuccagccu

SEQ ID NO: 4015643 - RNA, 13 nt, Human T-lymphotropic virus 1
accagcucaggcu

SEQ ID NO: 4015644 - RNA, 21 nt, Human T-lymphotropic virus 1
accagcuuuccccccccauca

SEQ ID NO: 4015645 - RNA, 13 nt, Human T-lymphotropic virus 1
accaugccaccua

SEQ ID NO: 4015646 - RNA, 20 nt, Human T-lymphotropic virus 1
accaugccaccuauucccua

SEQ ID NO: 4015647 - RNA, 21 nt, Human T-lymphotropic virus 1
acccacccuugggcagcaccu

SEQ ID NO: 4015648 - RNA, 16 nt, Human T-lymphotropic virus 1
acccagccaacugccu

SEQ ID NO: 4015649 - RNA, 18 nt, Human T-lymphotropic virus 1
accccaucugguuccuua

SEQ ID NO: 4015650 - RNA, 22 nt, Human T-lymphotropic virus 1
acccccaacauuccacccuccu

SEQ ID NO: 4015651 - RNA, 15 nt, Human T-lymphotropic virus 1
accccggccagcucg

SEQ ID NO: 4015652 - RNA, 23 nt, Human T-lymphotropic virus 1
accccuguccugcagcucucucc

SEQ ID NO: 4015653 - RNA, 18 nt, Human T-lymphotropic virus 1
acccucaccacuccaggc

SEQ ID NO: 4015654 - RNA, 20 nt, Human T-lymphotropic virus 1
acccucaccacuccaggccu

SEQ ID NO: 4015655 - RNA, 14 nt, Human T-lymphotropic virus 1
acccugcccuaauc

SEQ ID NO: 4015656 - RNA, 22 nt, Human T-lymphotropic virus 1
acccuguucgaaaugcagcugg

SEQ ID NO: 4015657 - RNA, 19 nt, Human T-lymphotropic virus 1
acccuuaagguccuuaccc

SEQ ID NO: 4015658 - RNA, 14 nt, Human T-lymphotropic virus 1
acccuuuuccagcc

SEQ ID NO: 4015659 - RNA, 14 nt, Human T-lymphotropic virus 1
accgccccuccucu

SEQ ID NO: 4015660 - RNA, 22 nt, Human T-lymphotropic virus 1
accggcuccaugucccucgccu

SEQ ID NO: 4015661 - RNA, 22 nt, Human T-lymphotropic virus 1
accucuaccagcuuuccccccc

SEQ ID NO: 4015662 - RNA, 16 nt, Human T-lymphotropic virus 1
accugaucccaucucc

SEQ ID NO: 4015663 - RNA, 17 nt, Human T-lymphotropic virus 1
accugaucccaucucca

SEQ ID NO: 4015664 - RNA, 17 nt, Human T-lymphotropic virus 1
accugcaacuacucuca

SEQ ID NO: 4015665 - RNA, 18 nt, Human T-lymphotropic virus 1
accugcaacuacucucag

SEQ ID NO: 4015666 - RNA, 14 nt, Human T-lymphotropic virus 1
accugcgggccacu

SEQ ID NO: 4015667 - RNA, 23 nt, Human T-lymphotropic virus 1
accugcgggccacuaacucucua

SEQ ID NO: 4015668 - RNA, 20 nt, Human T-lymphotropic virus 1
accuggccccuccugcccca

SEQ ID NO: 4015669 - RNA, 15 nt, Human T-lymphotropic virus 1
accugggaccccauc

SEQ ID NO: 4015670 - RNA, 13 nt, Human T-lymphotropic virus 1
accuuggccucuc

SEQ ID NO: 4015671 - RNA, 16 nt, Human T-lymphotropic virus 1
acgaugcguuuccccg

SEQ ID NO: 4015672 - RNA, 19 nt, Human T-lymphotropic virus 1
acgcccuacuggccaccug

SEQ ID NO: 4015673 - RNA, 20 nt, Human T-lymphotropic virus 1
acuacaagagagaccccccc

SEQ ID NO: 4015674 - RNA, 15 nt, Human T-lymphotropic virus 1
acucaacccucacca

SEQ ID NO: 4015675 - RNA, 16 nt, Human T-lymphotropic virus 1
acucagccggcucucc

SEQ ID NO: 4015676 - RNA, 13 nt, Human T-lymphotropic virus 1
acuccaccucgcc

SEQ ID NO: 4015677 - RNA, 17 nt, Human T-lymphotropic virus 1
acuccaccucgccuucc

SEQ ID NO: 4015678 - RNA, 18 nt, Human T-lymphotropic virus 1
acuccaccucgccuucca

SEQ ID NO: 4015679 - RNA, 12 nt, Human T-lymphotropic virus 1
acuccaggccuu

SEQ ID NO: 4015680 - RNA, 18 nt, Human T-lymphotropic virus 1
acuccccccgacuccagc

SEQ ID NO: 4015681 - RNA, 13 nt, Human T-lymphotropic virus 1
acuccccuccuuc

SEQ ID NO: 4015682 - RNA, 15 nt, Human T-lymphotropic virus 1
acucccucauccugc

SEQ ID NO: 4015683 - RNA, 18 nt, Human T-lymphotropic virus 1
acuggcaccaccacugug

SEQ ID NO: 4015684 - RNA, 18 nt, Human T-lymphotropic virus 1
acuuuaagcucaccuccc

SEQ ID NO: 4015685 - RNA, 13 nt, Human T-lymphotropic virus 1
agaacugccgcag

SEQ ID NO: 4015686 - RNA, 19 nt, Human T-lymphotropic virus 1
agacaaaucauaagcucag

SEQ ID NO: 4015687 - RNA, 16 nt, Human T-lymphotropic virus 1
agacacauucccucag

SEQ ID NO: 4015688 - RNA, 17 nt, Human T-lymphotropic virus 1
agaccccggacuccggc

SEQ ID NO: 4015689 - RNA, 17 nt, Human T-lymphotropic virus 1
agacccuuguuccuuaa

SEQ ID NO: 4015690 - RNA, 18 nt, Human T-lymphotropic virus 1
agacuaguccaaacccug

SEQ ID NO: 4015691 - RNA, 16 nt, Human T-lymphotropic virus 1
agagccuccuacauga

SEQ ID NO: 4015692 - RNA, 13 nt, Human T-lymphotropic virus 1
agaguacuacccc

SEQ ID NO: 4015693 - RNA, 23 nt, Human T-lymphotropic virus 1
agaucacuuuaagcucaccuccc

SEQ ID NO: 4015694 - RNA, 13 nt, Human T-lymphotropic virus 1
agaucaggcccua

SEQ ID NO: 4015695 - RNA, 23 nt, Human T-lymphotropic virus 1
agaucauucccccuuccgccacc

SEQ ID NO: 4015696 - RNA, 13 nt, Human T-lymphotropic virus 1
agcaaccuccucc

SEQ ID NO: 4015697 - RNA, 22 nt, Human T-lymphotropic virus 1
agcagaucaggcccuacagcca

SEQ ID NO: 4015698 - RNA, 11 nt, Human T-lymphotropic virus 1
agccccagcug

SEQ ID NO: 4015699 - RNA, 13 nt, Human T-lymphotropic virus 1
agccgccagugga

SEQ ID NO: 4015700 - RNA, 17 nt, Human T-lymphotropic virus 1
agcgcuaguucugccca

SEQ ID NO: 4015701 - RNA, 14 nt, Human T-lymphotropic virus 1
agcgcuuccagccc

SEQ ID NO: 4015702 - RNA, 19 nt, Human T-lymphotropic virus 1
agcgcuuccagccccccac

SEQ ID NO: 4015703 - RNA, 23 nt, Human T-lymphotropic virus 1
agcgcuuccagccccccaccuga

SEQ ID NO: 4015704 - RNA, 22 nt, Human T-lymphotropic virus 1
agcuaccaugccaccuauuccc

SEQ ID NO: 4015705 - RNA, 18 nt, Human T-lymphotropic virus 1
agcucggggccuuccuca

SEQ ID NO: 4015706 - RNA, 17 nt, Human T-lymphotropic virus 1
agcucuacaguuccuua

SEQ ID NO: 4015707 - RNA, 18 nt, Human T-lymphotropic virus 1
agcugcuguacucucaca

SEQ ID NO: 4015708 - RNA, 15 nt, Human T-lymphotropic virus 1
aggcaagccuagcua

SEQ ID NO: 4015709 - RNA, 19 nt, Human T-lymphotropic virus 1
aggcagguccucucaggcc

SEQ ID NO: 4015710 - RNA, 23 nt, Human T-lymphotropic virus 1
aggcagguccucucaggcccccu

SEQ ID NO: 4015711 - RNA, 21 nt, Human T-lymphotropic virus 1
aggccccccgaaaucagccag

SEQ ID NO: 4015712 - RNA, 20 nt, Human T-lymphotropic virus 1
aggcccccuuucaggcccuc

SEQ ID NO: 4015713 - RNA, 18 nt, Human T-lymphotropic virus 1
aggcccuacagccacccu

SEQ ID NO: 4015714 - RNA, 15 nt, Human T-lymphotropic virus 1
aggcgacauuaccca

SEQ ID NO: 4015715 - RNA, 18 nt, Human T-lymphotropic virus 1
aggcucaacgcucucaca

SEQ ID NO: 4015716 - RNA, 21 nt, Human T-lymphotropic virus 1
agggggccaaacccaagauca

SEQ ID NO: 4015717 - RNA, 13 nt, Human T-lymphotropic virus 1
aguacucuuccuu

SEQ ID NO: 4015718 - RNA, 14 nt, Human T-lymphotropic virus 1
aguccaaacccugc

SEQ ID NO: 4015719 - RNA, 20 nt, Human T-lymphotropic virus 1
aguccuuccuaaccaagacc

SEQ ID NO: 4015720 - RNA, 21 nt, Human T-lymphotropic virus 1
agugaaaaacauuuccgugaa

SEQ ID NO: 4015721 - RNA, 21 nt, Human T-lymphotropic virus 1
aguucccuuuaaaccagaacg

SEQ ID NO: 4015722 - RNA, 21 nt, Human T-lymphotropic virus 1
auaccaaaaacaacugggcca

SEQ ID NO: 4015723 - RNA, 14 nt, Human T-lymphotropic virus 1
auaugaccccaucu

SEQ ID NO: 4015724 - RNA, 12 nt, Human T-lymphotropic virus 1
aucaaaaagcca

SEQ ID NO: 4015725 - RNA, 14 nt, Human T-lymphotropic virus 1
aucaaaacuccuga

SEQ ID NO: 4015726 - RNA, 19 nt, Human T-lymphotropic virus 1
aucaacccccaacuccugc

SEQ ID NO: 4015727 - RNA, 14 nt, Human T-lymphotropic virus 1
aucagccaguuccc

SEQ ID NO: 4015728 - RNA, 19 nt, Human T-lymphotropic virus 1
aucaggcccuacagccacc

SEQ ID NO: 4015729 - RNA, 17 nt, Human T-lymphotropic virus 1
aucauggaccugccccu

SEQ ID NO: 4015730 - RNA, 16 nt, Human T-lymphotropic virus 1
aucauuagugcagcug

SEQ ID NO: 4015731 - RNA, 15 nt, Human T-lymphotropic virus 1
aucccucgacucccc

SEQ ID NO: 4015732 - RNA, 21 nt, Human T-lymphotropic virus 1
auccucggugauuacagcccc

SEQ ID NO: 4015733 - RNA, 11 nt, Human T-lymphotropic virus 1
auccugcccag

SEQ ID NO: 4015734 - RNA, 21 nt, Human T-lymphotropic virus 1
auccugcgcucuugccacgcc

SEQ ID NO: 4015735 - RNA, 12 nt, Human T-lymphotropic virus 1
auccuucucaag

SEQ ID NO: 4015736 - RNA, 15 nt, Human T-lymphotropic virus 1
aucgccuccagccuc

SEQ ID NO: 4015737 - RNA, 19 nt, Human T-lymphotropic virus 1
aucgccuccagccuccccu

SEQ ID NO: 4015738 - RNA, 21 nt, Human T-lymphotropic virus 1
aucgucacgcccuacuggcca

SEQ ID NO: 4015739 - RNA, 14 nt, Human T-lymphotropic virus 1
aucgugccagccua

SEQ ID NO: 4015740 - RNA, 14 nt, Human T-lymphotropic virus 1
aucuaggcaagccu

SEQ ID NO: 4015741 - RNA, 13 nt, Human T-lymphotropic virus 1
aucugaccacccc

SEQ ID NO: 4015742 - RNA, 18 nt, Human T-lymphotropic virus 1
gcugggcgcuaccugaac

SEQ ID NO: 4015743 - RNA, 12 nt, Human T-lymphotropic virus 1
gcuucccuaauc

SEQ ID NO: 4015744 - RNA, 17 nt, Human T-lymphotropic virus 1
gcuucccuaaucuccca

SEQ ID NO: 4015745 - RNA, 22 nt, Human T-lymphotropic virus 1
gcuuuccccccuggagggcccc

SEQ ID NO: 4015746 - RNA, 12 nt, Human T-lymphotropic virus 1
ggacccacugcu

SEQ ID NO: 4015747 - RNA, 18 nt, Human T-lymphotropic virus 1
ggaccuuggccucucaca

SEQ ID NO: 4015748 - RNA, 15 nt, Human T-lymphotropic virus 1
ggacuacucugccaa

SEQ ID NO: 4015749 - RNA, 14 nt, Human T-lymphotropic virus 1
ggagccgucuccag

SEQ ID NO: 4015750 - RNA, 19 nt, Human T-lymphotropic virus 1
ggagccuaccuagacucag

SEQ ID NO: 4015751 - RNA, 14 nt, Human T-lymphotropic virus 1
ggaggacagcucag

SEQ ID NO: 4015752 - RNA, 17 nt, Human T-lymphotropic virus 1
ggaggcuauuauucagc

SEQ ID NO: 4015753 - RNA, 17 nt, Human T-lymphotropic virus 1
ggcccauauccugcagc

SEQ ID NO: 4015754 - RNA, 22 nt, Human T-lymphotropic virus 1
ggcccuacagccacccugcccu

SEQ ID NO: 4015755 - RNA, 20 nt, Human T-lymphotropic virus 1
ggcccugacgugucccccua

SEQ ID NO: 4015756 - RNA, 23 nt, Human T-lymphotropic virus 1
ggcccugccuauauuucccaaga

SEQ ID NO: 4015757 - RNA, 17 nt, Human T-lymphotropic virus 1
ggcccuggaggcaggcc

SEQ ID NO: 4015758 - RNA, 20 nt, Human T-lymphotropic virus 1
ggccgcggcuuuccucuucu

SEQ ID NO: 4015759 - RNA, 13 nt, Human T-lymphotropic virus 1
ggccuaccacccc

SEQ ID NO: 4015760 - RNA, 18 nt, Human T-lymphotropic virus 1
ggccuaccaccccucauu

SEQ ID NO: 4015761 - RNA, 19 nt, Human T-lymphotropic virus 1
ggccuccuuccguuccacu

SEQ ID NO: 4015762 - RNA, 12 nt, Human T-lymphotropic virus 1
ggccucuccagc

SEQ ID NO: 4015763 - RNA, 16 nt, Human T-lymphotropic virus 1
ggcgcuuuccccccug

SEQ ID NO: 4015764 - RNA, 23 nt, Human T-lymphotropic virus 1
ggcuucccuaaucucccaugggu

SEQ ID NO: 4015765 - RNA, 15 nt, Human T-lymphotropic virus 1
gggcagcaccuccca

SEQ ID NO: 4015766 - RNA, 12 nt, Human T-lymphotropic virus 1
gggcccugcccu

SEQ ID NO: 4015767 - RNA, 20 nt, Human T-lymphotropic virus 1
gguaaguuuagagcucaggu

SEQ ID NO: 4015768 - RNA, 19 nt, Human T-lymphotropic virus 1
ggucgagaccgggccuuug

SEQ ID NO: 4015769 - RNA, 16 nt, Human T-lymphotropic virus 1
ggugauuacagcccca

SEQ ID NO: 4015770 - RNA, 12 nt, Human T-lymphotropic virus 1
ggugcccagacu

SEQ ID NO: 4015771 - RNA, 10 nt, Human T-lymphotropic virus 1
gguuccuuaa

SEQ ID NO: 4015772 - RNA, 23 nt, Human T-lymphotropic virus 1
gguugagucgcguucugccgccu

SEQ ID NO: 4015773 - RNA, 21 nt, Human T-lymphotropic virus 1
guaagcgcuaguucugcccag

SEQ ID NO: 4015774 - RNA, 17 nt, Human T-lymphotropic virus 1
guaaguuuagagcucag

SEQ ID NO: 4015775 - RNA, 14 nt, Human T-lymphotropic virus 1
guaugcugcccaga

SEQ ID NO: 4015776 - RNA, 18 nt, Human T-lymphotropic virus 1
gucacaaagaucauuccc

SEQ ID NO: 4015777 - RNA, 17 nt, Human T-lymphotropic virus 1
gucacgcugacagccug

SEQ ID NO: 4015778 - RNA, 15 nt, Human T-lymphotropic virus 1
guccccaagguaccu

SEQ ID NO: 4015779 - RNA, 20 nt, Human T-lymphotropic virus 1
guccgaaaacaaaacccagc

SEQ ID NO: 4015780 - RNA, 20 nt, Human T-lymphotropic virus 1
gucuccccccggaggacagc

SEQ ID NO: 4015781 - RNA, 21 nt, Human T-lymphotropic virus 1
gucugagaaggucagggccca

SEQ ID NO: 4015782 - RNA, 16 nt, Human T-lymphotropic virus 1
gucuggcuugucuccg

SEQ ID NO: 4015783 - RNA, 12 nt, Human T-lymphotropic virus 1
gucuuuuccaga

SEQ ID NO: 4015784 - RNA, 17 nt, Human T-lymphotropic virus 1
guuccuaucuuacucca

SEQ ID NO: 4015785 - RNA, 17 nt, Human T-lymphotropic virus 1
guuugcccaccacccuu

SEQ ID NO: 4015786 - RNA, 17 nt, Human T-lymphotropic virus 1
uaaaaauagucccaccc

SEQ ID NO: 4015787 - RNA, 21 nt, Human T-lymphotropic virus 1
uaaaccagaacgccuccaggc

SEQ ID NO: 4015788 - RNA, 22 nt, Human T-lymphotropic virus 1
uaaccaugcuuauuaucagccc

SEQ ID NO: 4015789 - RNA, 15 nt, Human T-lymphotropic virus 1
uaacuggacccacug

SEQ ID NO: 4015790 - RNA, 16 nt, Human T-lymphotropic virus 1
uaagcucaccucccuu

SEQ ID NO: 4015791 - RNA, 17 nt, Human T-lymphotropic virus 1
uaauaccgaacccagcc

SEQ ID NO: 4015792 - RNA, 18 nt, Human T-lymphotropic virus 1
uacaacaaugccaaggcg

SEQ ID NO: 4015793 - RNA, 18 nt, Human T-lymphotropic virus 1
uacaggcgccagcugucc

SEQ ID NO: 4015794 - RNA, 23 nt, Human T-lymphotropic virus 1
uacaugccccccuaccccacacu

SEQ ID NO: 4015795 - RNA, 21 nt, Human T-lymphotropic virus 1
uaccaccccucauuucuacuc

SEQ ID NO: 4015796 - RNA, 19 nt, Human T-lymphotropic virus 1
uaccuaaacaguuccagcc

SEQ ID NO: 4015797 - RNA, 15 nt, Human T-lymphotropic virus 1
uaccucccugaggca

SEQ ID NO: 4015798 - RNA, 16 nt, Human T-lymphotropic virus 1
uagccagugccccugg

SEQ ID NO: 4015799 - RNA, 17 nt, Human T-lymphotropic virus 1
uagccagugccccuggg

SEQ ID NO: 4015800 - RNA, 15 nt, Human T-lymphotropic virus 1
uaguacuacaguccu

SEQ ID NO: 4015801 - RNA, 19 nt, Human T-lymphotropic virus 1
uaguacuacaguccuccuc

SEQ ID NO: 4015802 - RNA, 17 nt, Human T-lymphotropic virus 1
ucaacccccaacuccug

SEQ ID NO: 4015803 - RNA, 22 nt, Human T-lymphotropic virus 1
ucacaaauuucaaaccaaggcc

SEQ ID NO: 4015804 - RNA, 16 nt, Human T-lymphotropic virus 1
ucaccucccuuccugu

SEQ ID NO: 4015805 - RNA, 21 nt, Human T-lymphotropic virus 1
ucacgcccuacuggccaccug

SEQ ID NO: 4015806 - RNA, 12 nt, Human T-lymphotropic virus 1
ucagcaccagcu

SEQ ID NO: 4015807 - RNA, 13 nt, Human T-lymphotropic virus 1
ucagcaccagcuc

SEQ ID NO: 4015808 - RNA, 13 nt, Human T-lymphotropic virus 1
ucagccuccaagg

SEQ ID NO: 4015809 - RNA, 20 nt, Human T-lymphotropic virus 1
ucagccucuuauucagaccc

SEQ ID NO: 4015810 - RNA, 13 nt, Human T-lymphotropic virus 1
ucaggagccaucu

SEQ ID NO: 4015811 - RNA, 22 nt, Human T-lymphotropic virus 1
ucaggcccccuuucaggcccuc

SEQ ID NO: 4015812 - RNA, 22 nt, Human T-lymphotropic virus 1
ucauaacaucuccacccaaacc

SEQ ID NO: 4015813 - RNA, 16 nt, Human T-lymphotropic virus 1
ucauccugccccccuu

SEQ ID NO: 4015814 - RNA, 22 nt, Human T-lymphotropic virus 1
ucaucuucccccgggcccccug

SEQ ID NO: 4015815 - RNA, 15 nt, Human T-lymphotropic virus 1
ucauggacccucgac

SEQ ID NO: 4015816 - RNA, 13 nt, Human T-lymphotropic virus 1
ucauucccccuuc

SEQ ID NO: 4015817 - RNA, 20 nt, Human T-lymphotropic virus 1
ucauucccccuuccgccacc

SEQ ID NO: 4015818 - RNA, 16 nt, Human T-lymphotropic virus 1
ucauuucuacucucac

SEQ ID NO: 4015819 - RNA, 21 nt, Human T-lymphotropic virus 1
uccaaacccugccccuccuag

SEQ ID NO: 4015820 - RNA, 15 nt, Human T-lymphotropic virus 1
uccaaaucccccuac

SEQ ID NO: 4015821 - RNA, 17 nt, Human T-lymphotropic virus 1
uccaccaauuccuccac

SEQ ID NO: 4015822 - RNA, 17 nt, Human T-lymphotropic virus 1
uccacccuccuuccucc

SEQ ID NO: 4015823 - RNA, 19 nt, Human T-lymphotropic virus 1
uccacccuccuuccuccag

SEQ ID NO: 4015824 - RNA, 21 nt, Human T-lymphotropic virus 1
uccacccuccuuccuccaggc

SEQ ID NO: 4015825 - RNA, 16 nt, Human T-lymphotropic virus 1
uccaccucgccuucca

SEQ ID NO: 4015826 - RNA, 21 nt, Human T-lymphotropic virus 1
uccaggauaugaccccaucug

SEQ ID NO: 4015827 - RNA, 17 nt, Human T-lymphotropic virus 1
uccauccccuucuucua

SEQ ID NO: 4015828 - RNA, 19 nt, Human T-lymphotropic virus 1
uccaugucccucgccucag

SEQ ID NO: 4015829 - RNA, 22 nt, Human T-lymphotropic virus 1
ucccaacgucucuguuccaucc

SEQ ID NO: 4015830 - RNA, 15 nt, Human T-lymphotropic virus 1
ucccaaggccccccg

SEQ ID NO: 4015831 - RNA, 20 nt, Human T-lymphotropic virus 1
uccccuccuuccccacccag

SEQ ID NO: 4015832 - RNA, 18 nt, Human T-lymphotropic virus 1
uccgcccuggccauggga

SEQ ID NO: 4015833 - RNA, 20 nt, Human T-lymphotropic virus 1
uccuaccuuacgccagcccc

SEQ ID NO: 4015834 - RNA, 16 nt, Human T-lymphotropic virus 1
uccuauacucucccaa

SEQ ID NO: 4015835 - RNA, 13 nt, Human T-lymphotropic virus 1
uccuccuccuuua

SEQ ID NO: 4015836 - RNA, 20 nt, Human T-lymphotropic virus 1
uccuccuuguccuuuaacuc

SEQ ID NO: 4015837 - RNA, 14 nt, Human T-lymphotropic virus 1
uccucgagcccucu

SEQ ID NO: 4015838 - RNA, 17 nt, Human T-lymphotropic virus 1
uccucucaggcccccuu

SEQ ID NO: 4015839 - RNA, 14 nt, Human T-lymphotropic virus 1
uccucuucuccuca

SEQ ID NO: 4015840 - RNA, 15 nt, Human T-lymphotropic virus 1
uccucuucuccucag

SEQ ID NO: 4015841 - RNA, 19 nt, Human T-lymphotropic virus 1
uccugcagcaaccuccucc

SEQ ID NO: 4015842 - RNA, 17 nt, Human T-lymphotropic virus 1
uccugcagcucucuccu

SEQ ID NO: 4015843 - RNA, 20 nt, Human T-lymphotropic virus 1
uccugugcuaauacgccucc

SEQ ID NO: 4015844 - RNA, 12 nt, Human T-lymphotropic virus 1
uccuuccuccag

SEQ ID NO: 4015845 - RNA, 14 nt, Human T-lymphotropic virus 1
uccuucucccuucu

SEQ ID NO: 4015846 - RNA, 12 nt, Human T-lymphotropic virus 1
uccuucuccugc

SEQ ID NO: 4015847 - RNA, 17 nt, Human T-lymphotropic virus 1
uccuugucaccuguucc

SEQ ID NO: 4015848 - RNA, 15 nt, Human T-lymphotropic virus 1
ucgacaaauacaccu

SEQ ID NO: 4015849 - RNA, 17 nt, Human T-lymphotropic virus 1
ucgaccugcuggcccuu

SEQ ID NO: 4015850 - RNA, 13 nt, Human T-lymphotropic virus 1
ucgagcccucuau

SEQ ID NO: 4015851 - RNA, 21 nt, Human T-lymphotropic virus 1
ucgccucaggaaagagccucc

SEQ ID NO: 4015852 - RNA, 16 nt, Human T-lymphotropic virus 1
ucgccuccagccuccc

SEQ ID NO: 4015853 - RNA, 12 nt, Human T-lymphotropic virus 1
ucgcuuccucuu

SEQ ID NO: 4015854 - RNA, 19 nt, Human T-lymphotropic virus 1
ucguuagcgcuuccagccc

SEQ ID NO: 4015855 - RNA, 21 nt, Human T-lymphotropic virus 1
ucguuagcgcuuccagccccc

SEQ ID NO: 4015856 - RNA, 18 nt, Human T-lymphotropic virus 1
ucuaccugaucccaucuc

SEQ ID NO: 4015857 - RNA, 20 nt, Human T-lymphotropic virus 1
ucuaguaaguuacuccagcu

SEQ ID NO: 4015858 - RNA, 23 nt, Human T-lymphotropic virus 1
ucucacaguuggagucuccucau

SEQ ID NO: 4015859 - RNA, 15 nt, Human T-lymphotropic virus 1
ucugagaaggucagg

SEQ ID NO: 4015860 - RNA, 14 nt, Human T-lymphotropic virus 1
ucugccgccucccg

SEQ ID NO: 4015861 - RNA, 17 nt, Human T-lymphotropic virus 1
ucugcuuuuccuccucu

SEQ ID NO: 4015862 - RNA, 13 nt, Human T-lymphotropic virus 1
ucuguuccauccc

SEQ ID NO: 4015863 - RNA, 20 nt, Human T-lymphotropic virus 1
ucuuccugcuuucuccgggc

SEQ ID NO: 4015864 - RNA, 23 nt, Human T-lymphotropic virus 1
ugaagaauacaccaacaucccca

SEQ ID NO: 4015865 - RNA, 14 nt, Human T-lymphotropic virus 1
ugacauucuccugg

SEQ ID NO: 4015866 - RNA, 18 nt, Human T-lymphotropic virus 1
ugacauucuccuggcaag

SEQ ID NO: 4015867 - RNA, 17 nt, Human T-lymphotropic virus 1
ugacgacaaccccucac

SEQ ID NO: 4015868 - RNA, 14 nt, Human T-lymphotropic virus 1
ugacuuguccagcc

SEQ ID NO: 4015869 - RNA, 15 nt, Human T-lymphotropic virus 1
ugacuuguccagccu

SEQ ID NO: 4015870 - RNA, 12 nt, Human T-lymphotropic virus 1
ugauuacagccc

SEQ ID NO: 4015871 - RNA, 23 nt, Human T-lymphotropic virus 1
ugcagcuggcccauauccugcag

SEQ ID NO: 4015872 - RNA, 18 nt, Human T-lymphotropic virus 1
ugcaggaccaugcauccu

SEQ ID NO: 4015873 - RNA, 17 nt, Human T-lymphotropic virus 1
ugcauccuccgucagcu

SEQ ID NO: 4015874 - RNA, 16 nt, Human T-lymphotropic virus 1
ugcauggccucuccag

SEQ ID NO: 4015875 - RNA, 18 nt, Human T-lymphotropic virus 1
ugccaccccggccagcuc

SEQ ID NO: 4015876 - RNA, 13 nt, Human T-lymphotropic virus 1
ugcccaccacccu

SEQ ID NO: 4015877 - RNA, 23 nt, Human T-lymphotropic virus 1
ugcccaccacccuuuuccagccu

SEQ ID NO: 4015878 - RNA, 15 nt, Human T-lymphotropic virus 1
ugccuauauuuccca

SEQ ID NO: 4015879 - RNA, 22 nt, Human T-lymphotropic virus 1
ugcgcaaauacucccccuuccg

SEQ ID NO: 4015880 - RNA, 12 nt, Human T-lymphotropic virus 1
ugcucuuccugc

SEQ ID NO: 4015881 - RNA, 15 nt, Human T-lymphotropic virus 1
ugcuguacucucaca

SEQ ID NO: 4015882 - RNA, 16 nt, Human T-lymphotropic virus 1
ugcuguacucucacag

SEQ ID NO: 4015883 - RNA, 14 nt, Human T-lymphotropic virus 1
ugcuuuuccuccuc

SEQ ID NO: 4015884 - RNA, 23 nt, Human T-lymphotropic virus 1
uggagccuaccuagacucagccg

SEQ ID NO: 4015885 - RNA, 15 nt, Human T-lymphotropic virus 1
uggaggcuccucaag

SEQ ID NO: 4015886 - RNA, 22 nt, Human T-lymphotropic virus 1
uggcaagccccucccaugcgga

SEQ ID NO: 4015887 - RNA, 16 nt, Human T-lymphotropic virus 1
uggcaccaccacugug

SEQ ID NO: 4015888 - RNA, 17 nt, Human T-lymphotropic virus 1
uggccuacucccuaacc

SEQ ID NO: 4015889 - RNA, 19 nt, Human T-lymphotropic virus 1
ugguccggaaggcccugga

SEQ ID NO: 4015890 - RNA, 19 nt, Human T-lymphotropic virus 1
ugguguuccaguccaagca

SEQ ID NO: 4015891 - RNA, 18 nt, Human T-lymphotropic virus 1
uguauuaaccaacugcca

SEQ ID NO: 4015892 - RNA, 21 nt, Human T-lymphotropic virus 1
ugucacagaacugccgcagua

SEQ ID NO: 4015893 - RNA, 21 nt, Human T-lymphotropic virus 1
uguccuugggcuagaacaccu

SEQ ID NO: 4015894 - RNA, 22 nt, Human T-lymphotropic virus 1
uguccuuuaacucuuccuccaa

SEQ ID NO: 4015895 - RNA, 18 nt, Human T-lymphotropic virus 1
ugucuccgcccuggccau

SEQ ID NO: 4015896 - RNA, 15 nt, Human T-lymphotropic virus 1
uguggugccuccuga

SEQ ID NO: 4015897 - RNA, 17 nt, Human T-lymphotropic virus 1
uguucgaaaugcagcug

SEQ ID NO: 4015898 - RNA, 17 nt, Human T-lymphotropic virus 1
uuaacuggacccacugc

SEQ ID NO: 4015899 - RNA, 17 nt, Human T-lymphotropic virus 1
uuaugcugacccucacu

SEQ ID NO: 4015900 - RNA, 17 nt, Human T-lymphotropic virus 1
uucagacggauccaccu

SEQ ID NO: 4015901 - RNA, 19 nt, Human T-lymphotropic virus 1
uucaggagccaucucagcu

SEQ ID NO: 4015902 - RNA, 11 nt, Human T-lymphotropic virus 1
uucauucaaac

SEQ ID NO: 4015903 - RNA, 18 nt, Human T-lymphotropic virus 1
uuccacucaacccucacc

SEQ ID NO: 4015904 - RNA, 17 nt, Human T-lymphotropic virus 1
uucgcuuccucuucucc

SEQ ID NO: 4015905 - RNA, 19 nt, Human T-lymphotropic virus 1
uucuccuggcaagccccuc

SEQ ID NO: 4015906 - RNA, 16 nt, Human T-lymphotropic virus 1
uugcuuucacuguccc

SEQ ID NO: 4015907 - RNA, 16 nt, Human T-lymphotropic virus 1
uugggcagcaccuccc

SEQ ID NO: 4015908 - RNA, 20 nt, Human T-lymphotropic virus 1
uugucacaaagaucauuccc

SEQ ID NO: 4015909 - RNA, 13 nt, Human T-lymphotropic virus 1
uuucacaccucaa

SEQ ID NO: 4015910 - RNA, 17 nt, Human T-lymphotropic virus 1
uuucgccuucucagccc

SEQ ID NO: 4015911 - RNA, 18 nt, Human T-lymphotropic virus 1
uuugucaagccguccuca

SEQ ID NO: 4015912 - RNA, 22 nt, Human T-lymphotropic virus 1
ccaugcgcaaauacucccccuu

SEQ ID NO: 4015913 - RNA, 21 nt, Human T-lymphotropic virus 1
ccaugcuuauuaucagcccac

SEQ ID NO: 4015914 - RNA, 22 nt, Human T-lymphotropic virus 1
ccauggaaaucaaaacuccuga

SEQ ID NO: 4015915 - RNA, 18 nt, Human T-lymphotropic virus 1
ccauguccccuacaaucc

SEQ ID NO: 4015916 - RNA, 13 nt, Human T-lymphotropic virus 1
cccacuucccagg

SEQ ID NO: 4015917 - RNA, 14 nt, Human T-lymphotropic virus 1
cccacuucccaggg

SEQ ID NO: 4015918 - RNA, 16 nt, Human T-lymphotropic virus 1
cccagaccagccaccc

SEQ ID NO: 4015919 - RNA, 15 nt, Human T-lymphotropic virus 1
cccagagacacauuc

SEQ ID NO: 4015920 - RNA, 23 nt, Human T-lymphotropic virus 1
cccagauugacacccagaccagc

SEQ ID NO: 4015921 - RNA, 18 nt, Human T-lymphotropic virus 1
cccagcaaaccccuggaa

SEQ ID NO: 4015922 - RNA, 17 nt, Human T-lymphotropic virus 1
cccagccaacugccucc

SEQ ID NO: 4015923 - RNA, 21 nt, Human T-lymphotropic virus 1
ccccaaaaccuguacacccuc

SEQ ID NO: 4015924 - RNA, 13 nt, Human T-lymphotropic virus 1
ccccaacauucca

SEQ ID NO: 4015925 - RNA, 19 nt, Human T-lymphotropic virus 1
ccccacacuagccagugcc

SEQ ID NO: 4015926 - RNA, 10 nt, Human T-lymphotropic virus 1
cccccccuug

SEQ ID NO: 4015927 - RNA, 21 nt, Human T-lymphotropic virus 1
cccccuaccuaaacaguucca

SEQ ID NO: 4015928 - RNA, 18 nt, Human T-lymphotropic virus 1
ccccuacaauccaaccag

SEQ ID NO: 4015929 - RNA, 17 nt, Human T-lymphotropic virus 1
ccccuuucaggcccucc

SEQ ID NO: 4015930 - RNA, 14 nt, Human T-lymphotropic virus 1
cccggaggacagcu

SEQ ID NO: 4015931 - RNA, 20 nt, Human T-lymphotropic virus 1
cccgggggcuuagagccucu

SEQ ID NO: 4015932 - RNA, 17 nt, Human T-lymphotropic virus 1
cccguggaggcuccuca

SEQ ID NO: 4015933 - RNA, 19 nt, Human T-lymphotropic virus 1
cccguggaggcuccucaag

SEQ ID NO: 4015934 - RNA, 20 nt, Human T-lymphotropic virus 1
cccuacuaaucaccccuguc

SEQ ID NO: 4015935 - RNA, 16 nt, Human T-lymphotropic virus 1
cccucaaaaacacauc

SEQ ID NO: 4015936 - RNA, 18 nt, Human T-lymphotropic virus 1
cccuccucuacucuccca

SEQ ID NO: 4015937 - RNA, 13 nt, Human T-lymphotropic virus 1
cccucgccucagg

SEQ ID NO: 4015938 - RNA, 21 nt, Human T-lymphotropic virus 1
cccugcaauccugcccagcca

SEQ ID NO: 4015939 - RNA, 14 nt, Human T-lymphotropic virus 1
cccugcuugcucaa

SEQ ID NO: 4015940 - RNA, 17 nt, Human T-lymphotropic virus 1
cccugcuugcucaacuc

SEQ ID NO: 4015941 - RNA, 21 nt, Human T-lymphotropic virus 1
cccugucauaacucccucauc

SEQ ID NO: 4015942 - RNA, 13 nt, Human T-lymphotropic virus 1
cccuguccugcag

SEQ ID NO: 4015943 - RNA, 13 nt, Human T-lymphotropic virus 1
ccgacuccagccg

SEQ ID NO: 4015944 - RNA, 16 nt, Human T-lymphotropic virus 1
ccgauggcagcuucac

SEQ ID NO: 4015945 - RNA, 14 nt, Human T-lymphotropic virus 1
ccgccccuccucua

SEQ ID NO: 4015946 - RNA, 12 nt, Human T-lymphotropic virus 1
ccgcccuggcca

SEQ ID NO: 4015947 - RNA, 23 nt, Human T-lymphotropic virus 1
ccgccuguaaucuugccaauaca

SEQ ID NO: 4015948 - RNA, 21 nt, Human T-lymphotropic virus 1
ccgccuguggugccuccugaa

SEQ ID NO: 4015949 - RNA, 20 nt, Human T-lymphotropic virus 1
ccgccuuaccugaggccgcc

SEQ ID NO: 4015950 - RNA, 14 nt, Human T-lymphotropic virus 1
ccggaggacagcuc

SEQ ID NO: 4015951 - RNA, 12 nt, Human T-lymphotropic virus 1
ccggccagcucg

SEQ ID NO: 4015952 - RNA, 17 nt, Human T-lymphotropic virus 1
ccgucggaggccccgcc

SEQ ID NO: 4015953 - RNA, 12 nt, Human T-lymphotropic virus 1
ccgucuccagcc

SEQ ID NO: 4015954 - RNA, 21 nt, Human T-lymphotropic virus 1
ccuacacaguuucacccauug

SEQ ID NO: 4015955 - RNA, 19 nt, Human T-lymphotropic virus 1
ccuacaccgggccaggaaa

SEQ ID NO: 4015956 - RNA, 12 nt, Human T-lymphotropic virus 1
ccuacagccacc

SEQ ID NO: 4015957 - RNA, 15 nt, Human T-lymphotropic virus 1
ccuaccaccccucau

SEQ ID NO: 4015958 - RNA, 19 nt, Human T-lymphotropic virus 1
ccuacuggccaccugucca

SEQ ID NO: 4015959 - RNA, 12 nt, Human T-lymphotropic virus 1
ccuccagccucc

SEQ ID NO: 4015960 - RNA, 15 nt, Human T-lymphotropic virus 1
ccucccgccuguggu

SEQ ID NO: 4015961 - RNA, 13 nt, Human T-lymphotropic virus 1
ccuccugaacuac

SEQ ID NO: 4015962 - RNA, 13 nt, Human T-lymphotropic virus 1
ccuccugccccgc

SEQ ID NO: 4015963 - RNA, 14 nt, Human T-lymphotropic virus 1
ccuccuuccuccag

SEQ ID NO: 4015964 - RNA, 19 nt, Human T-lymphotropic virus 1
ccucucaggcccccuuuca

SEQ ID NO: 4015965 - RNA, 16 nt, Human T-lymphotropic virus 1
ccugacgugucccccu

SEQ ID NO: 4015966 - RNA, 12 nt, Human T-lymphotropic virus 1
ccugacuugucc

SEQ ID NO: 4015967 - RNA, 15 nt, Human T-lymphotropic virus 1
ccugacuuguccagc

SEQ ID NO: 4015968 - RNA, 22 nt, Human T-lymphotropic virus 1
ccugcccuaaagauggccagcc

SEQ ID NO: 4015969 - RNA, 19 nt, Human T-lymphotropic virus 1
ccuggccccuccugcccca

SEQ ID NO: 4015970 - RNA, 20 nt, Human T-lymphotropic virus 1
ccugucacagaacugccgca

SEQ ID NO: 4015971 - RNA, 19 nt, Human T-lymphotropic virus 1
ccugucauaacucccucau

SEQ ID NO: 4015972 - RNA, 17 nt, Human T-lymphotropic virus 1
ccuguccugcagcucuc

SEQ ID NO: 4015973 - RNA, 22 nt, Human T-lymphotropic virus 1
ccuguccugcagcucucuccug

SEQ ID NO: 4015974 - RNA, 19 nt, Human T-lymphotropic virus 1
ccugugcuaauacgccucc

SEQ ID NO: 4015975 - RNA, 14 nt, Human T-lymphotropic virus 1
ccuuccgccaccgc

SEQ ID NO: 4015976 - RNA, 20 nt, Human T-lymphotropic virus 1
ccuucuagucgacgcuccag

SEQ ID NO: 4015977 - RNA, 14 nt, Human T-lymphotropic virus 1
ccuucuccucuucc

SEQ ID NO: 4015978 - RNA, 15 nt, Human T-lymphotropic virus 1
ccuugcaacacuugg

SEQ ID NO: 4015979 - RNA, 15 nt, Human T-lymphotropic virus 1
ccuugggcagcaccu

SEQ ID NO: 4015980 - RNA, 21 nt, Human T-lymphotropic virus 1
ccuuucauaauuugcaucucc

SEQ ID NO: 4015981 - RNA, 12 nt, Human T-lymphotropic virus 1
cgaacccagcca

SEQ ID NO: 4015982 - RNA, 13 nt, Human T-lymphotropic virus 1
cgacgcuccagga

SEQ ID NO: 4015983 - RNA, 22 nt, Human T-lymphotropic virus 1
cgacuccccuccuuccccaccc

SEQ ID NO: 4015984 - RNA, 15 nt, Human T-lymphotropic virus 1
cgaucgugccagccu

SEQ ID NO: 4015985 - RNA, 14 nt, Human T-lymphotropic virus 1
cgauggcagcuuca

SEQ ID NO: 4015986 - RNA, 20 nt, Human T-lymphotropic virus 1
cgcaaauacucccccuuccg

SEQ ID NO: 4015987 - RNA, 13 nt, Human T-lymphotropic virus 1
cgccuccagccuc

SEQ ID NO: 4015988 - RNA, 17 nt, Human T-lymphotropic virus 1
cgccuguggugccuccu

SEQ ID NO: 4015989 - RNA, 13 nt, Human T-lymphotropic virus 1
cgccuucucagcc

SEQ ID NO: 4015990 - RNA, 14 nt, Human T-lymphotropic virus 1
cgccuucucagccc

SEQ ID NO: 4015991 - RNA, 19 nt, Human T-lymphotropic virus 1
cgcuccugcucuuccugcu

SEQ ID NO: 4015992 - RNA, 18 nt, Human T-lymphotropic virus 1
cgcucuugccacgccugc

SEQ ID NO: 4015993 - RNA, 13 nt, Human T-lymphotropic virus 1
cgcuuccagcccc

SEQ ID NO: 4015994 - RNA, 20 nt, Human T-lymphotropic virus 1
cgcuuccagccccccaccug

SEQ ID NO: 4015995 - RNA, 15 nt, Human T-lymphotropic virus 1
cggaaggcccuggag

SEQ ID NO: 4015996 - RNA, 18 nt, Human T-lymphotropic virus 1
cggacccuugcccuaggc

SEQ ID NO: 4015997 - RNA, 23 nt, Human T-lymphotropic virus 1
cgggcccccugacuuguccagcc

SEQ ID NO: 4015998 - RNA, 17 nt, Human T-lymphotropic virus 1
cggggccuuccucacca

SEQ ID NO: 4015999 - RNA, 18 nt, Human T-lymphotropic virus 1
cggucuggcuugucuccg

SEQ ID NO: 4016000 - RNA, 20 nt, Human T-lymphotropic virus 1
cgucacgcccuacuggccac

SEQ ID NO: 4016001 - RNA, 18 nt, Human T-lymphotropic virus 1
cgucacgcugacagccug

SEQ ID NO: 4016002 - RNA, 16 nt, Human T-lymphotropic virus 1
cguccuauacucuccc

SEQ ID NO: 4016003 - RNA, 15 nt, Human T-lymphotropic virus 1
cgucuccagccccua

SEQ ID NO: 4016004 - RNA, 11 nt, Human T-lymphotropic virus 1
cgugccagccu

SEQ ID NO: 4016005 - RNA, 18 nt, Human T-lymphotropic virus 1
cguucugccgccucccgc

SEQ ID NO: 4016006 - RNA, 19 nt, Human T-lymphotropic virus 1
cuaaacccugcaauccugc

SEQ ID NO: 4016007 - RNA, 18 nt, Human T-lymphotropic virus 1
cuaaucuaguaaguuacu

SEQ ID NO: 4016008 - RNA, 17 nt, Human T-lymphotropic virus 1
cuacacuagcccacuua

SEQ ID NO: 4016009 - RNA, 15 nt, Human T-lymphotropic virus 1
cuacaguccuccucc

SEQ ID NO: 4016010 - RNA, 17 nt, Human T-lymphotropic virus 1
cuacaguccuccuccuu

SEQ ID NO: 4016011 - RNA, 18 nt, Human T-lymphotropic virus 1
cuaccccacacuagccag

SEQ ID NO: 4016012 - RNA, 16 nt, Human T-lymphotropic virus 1
cuaccuagacucagcc

SEQ ID NO: 4016013 - RNA, 15 nt, Human T-lymphotropic virus 1
cuacuggccaccugu

SEQ ID NO: 4016014 - RNA, 12 nt, Human T-lymphotropic virus 1
gcagcaccuccc

SEQ ID NO: 4016015 - RNA, 19 nt, Human T-lymphotropic virus 1
gcagccuauauucucuggg

SEQ ID NO: 4016016 - RNA, 16 nt, Human T-lymphotropic virus 1
gcagcuacuugccuca

SEQ ID NO: 4016017 - RNA, 23 nt, Human T-lymphotropic virus 1
gcagguccucucaggcccccuuu

SEQ ID NO: 4016018 - RNA, 15 nt, Human T-lymphotropic virus 1
gcaucucuccuucac

SEQ ID NO: 4016019 - RNA, 15 nt, Human T-lymphotropic virus 1
gcauguaccucuacc

SEQ ID NO: 4016020 - RNA, 15 nt, Human T-lymphotropic virus 1
gccaccccggccagc

SEQ ID NO: 4016021 - RNA, 15 nt, Human T-lymphotropic virus 1
gccacccugcccuaa

SEQ ID NO: 4016022 - RNA, 21 nt, Human T-lymphotropic virus 1
gccagcucggggccuuccuca

SEQ ID NO: 4016023 - RNA, 23 nt, Human T-lymphotropic virus 1
gccaugcgcaaauacucccccuu

SEQ ID NO: 4016024 - RNA, 21 nt, Human T-lymphotropic virus 1
gcccaccacccuuuuccagcc

SEQ ID NO: 4016025 - RNA, 22 nt, Human T-lymphotropic virus 1
gcccaccacccuuuuccagccu

SEQ ID NO: 4016026 - RNA, 23 nt, Human T-lymphotropic virus 1
gcccaccacccuuuuccagccug

SEQ ID NO: 4016027 - RNA, 18 nt, Human T-lymphotropic virus 1
gcccauauccugcagccc

SEQ ID NO: 4016028 - RNA, 19 nt, Human T-lymphotropic virus 1
gccccauuggcuccuguga

SEQ ID NO: 4016029 - RNA, 22 nt, Human T-lymphotropic virus 1
gccccccuuuuccuugucaccu

SEQ ID NO: 4016030 - RNA, 12 nt, Human T-lymphotropic virus 1
gcccccucaucc

SEQ ID NO: 4016031 - RNA, 17 nt, Human T-lymphotropic virus 1
gccccuauacaggagcc

SEQ ID NO: 4016032 - RNA, 14 nt, Human T-lymphotropic virus 1
gcccgcuuccugcg

SEQ ID NO: 4016033 - RNA, 22 nt, Human T-lymphotropic virus 1
gcccugucacagaacugccgca

SEQ ID NO: 4016034 - RNA, 21 nt, Human T-lymphotropic virus 1
gcccuuucagcagaucaggcc

SEQ ID NO: 4016035 - RNA, 23 nt, Human T-lymphotropic virus 1
gcccuuucagcagaucaggcccu

SEQ ID NO: 4016036 - RNA, 15 nt, Human T-lymphotropic virus 1
gccgccauccacgcc

SEQ ID NO: 4016037 - RNA, 20 nt, Human T-lymphotropic virus 1
gccgccuuaccugaggccgc

SEQ ID NO: 4016038 - RNA, 21 nt, Human T-lymphotropic virus 1
gccgccuuaccugaggccgcc

SEQ ID NO: 4016039 - RNA, 18 nt, Human T-lymphotropic virus 1
gccuaccuagacucagcc

SEQ ID NO: 4016040 - RNA, 21 nt, Human T-lymphotropic virus 1
gccucaggaaagagccuccua

SEQ ID NO: 4016041 - RNA, 14 nt, Human T-lymphotropic virus 1
gccuccagccuccc

SEQ ID NO: 4016042 - RNA, 14 nt, Human T-lymphotropic virus 1
gccuccaggccuug

SEQ ID NO: 4016043 - RNA, 17 nt, Human T-lymphotropic virus 1
gccugacccugcuugcu

SEQ ID NO: 4016044 - RNA, 21 nt, Human T-lymphotropic virus 1
gccuggcaaaacggccuccuu

SEQ ID NO: 4016045 - RNA, 23 nt, Human T-lymphotropic virus 1
gccuggcaaaacggccuccuucc

SEQ ID NO: 4016046 - RNA, 13 nt, Human T-lymphotropic virus 1
gccuucucagccc

SEQ ID NO: 4016047 - RNA, 15 nt, Human T-lymphotropic virus 1
gccuucuccucuucc

SEQ ID NO: 4016048 - RNA, 23 nt, Human T-lymphotropic virus 1
gcgagguggcgcuuuccccccug

SEQ ID NO: 4016049 - RNA, 18 nt, Human T-lymphotropic virus 1
gcgcaaauacucccccuu

SEQ ID NO: 4016050 - RNA, 14 nt, Human T-lymphotropic virus 1
gcgccagcuguccu

SEQ ID NO: 4016051 - RNA, 14 nt, Human T-lymphotropic virus 1
gcgccgugccuucu

SEQ ID NO: 4016052 - RNA, 17 nt, Human T-lymphotropic virus 1
gcgcuccugcucuuccu

SEQ ID NO: 4016053 - RNA, 20 nt, Human T-lymphotropic virus 1
gcgcuccugcucuuccugcu

SEQ ID NO: 4016054 - RNA, 12 nt, Human T-lymphotropic virus 1
gcgcucuugcca

SEQ ID NO: 4016055 - RNA, 12 nt, Human T-lymphotropic virus 1
gcgcuuccagcc

SEQ ID NO: 4016056 - RNA, 13 nt, Human T-lymphotropic virus 1
gcggcaggcccug

SEQ ID NO: 4016057 - RNA, 15 nt, Human T-lymphotropic virus 1
gcggcuuuccucuuc

SEQ ID NO: 4016058 - RNA, 20 nt, Human T-lymphotropic virus 1
gcuaggaucccgcucccgcc

SEQ ID NO: 4016059 - RNA, 19 nt, Human T-lymphotropic virus 1
gcucagcaccagcucaggc

SEQ ID NO: 4016060 - RNA, 12 nt, Human T-lymphotropic virus 1
gcuccaggccau

SEQ ID NO: 4016061 - RNA, 19 nt, Human T-lymphotropic virus 1
gcuccaugucccucgccuc

SEQ ID NO: 4016062 - RNA, 17 nt, Human T-lymphotropic virus 1
gcucgcaucucuccuuc

SEQ ID NO: 4016063 - RNA, 18 nt, Human T-lymphotropic virus 1
gcucuuccugcuuucucc

SEQ ID NO: 4016064 - RNA, 16 nt, Human T-lymphotropic virus 1
gcugggcgcuaccuga

SEQ ID NO: 4016065 - RNA, 18 nt, Human T-lymphotropic virus 1
gcuggggccuuaacuggg

SEQ ID NO: 4016066 - RNA, 12 nt, Human T-lymphotropic virus 1
gcuuccagcccc

SEQ ID NO: 4016067 - RNA, 12 nt, Human T-lymphotropic virus 1
gcuuccucuucu

SEQ ID NO: 4016068 - RNA, 18 nt, Human T-lymphotropic virus 1
gcuuccucuucuccucag

SEQ ID NO: 4016069 - RNA, 21 nt, Human T-lymphotropic virus 1
gcuuccucuucuccucagccc

SEQ ID NO: 4016070 - RNA, 13 nt, Human T-lymphotropic virus 1
ggacagcucagca

SEQ ID NO: 4016071 - RNA, 22 nt, Human T-lymphotropic virus 1
ggacccacugcuuugaccccca

SEQ ID NO: 4016072 - RNA, 14 nt, Human T-lymphotropic virus 1
ggagccaucucagc

SEQ ID NO: 4016073 - RNA, 15 nt, Human T-lymphotropic virus 1
ggaggacagcucagc

SEQ ID NO: 4016074 - RNA, 17 nt, Human T-lymphotropic virus 1
ggaugacauucuccugg

SEQ ID NO: 4016075 - RNA, 17 nt, Human T-lymphotropic virus 1
ggcaagccuucccccaa

SEQ ID NO: 4016076 - RNA, 23 nt, Human T-lymphotropic virus 1
ggcacccgucacgcugacagccu

SEQ ID NO: 4016077 - RNA, 23 nt, Human T-lymphotropic virus 1
ggccacaauggcuucccuaaucu

SEQ ID NO: 4016078 - RNA, 19 nt, Human T-lymphotropic virus 1
ggccaggaaauaacccagu

SEQ ID NO: 4016079 - RNA, 19 nt, Human T-lymphotropic virus 1
ggcccagaauaaggcucug

SEQ ID NO: 4016080 - RNA, 20 nt, Human T-lymphotropic virus 1
ggccccccgaaaucagccag

SEQ ID NO: 4016081 - RNA, 19 nt, Human T-lymphotropic virus 1
ggcccuggaggcaggccau

SEQ ID NO: 4016082 - RNA, 21 nt, Human T-lymphotropic virus 1
ggcgcucccuuggagccuacc

SEQ ID NO: 4016083 - RNA, 17 nt, Human T-lymphotropic virus 1
ggcuacaugccccccua

SEQ ID NO: 4016084 - RNA, 18 nt, Human T-lymphotropic virus 1
ggcucuccacgcuuugcc

SEQ ID NO: 4016085 - RNA, 18 nt, Human T-lymphotropic virus 1
gggcuagaacaccuccca

SEQ ID NO: 4016086 - RNA, 21 nt, Human T-lymphotropic virus 1
ggggacuauguucggcccgcc

SEQ ID NO: 4016087 - RNA, 18 nt, Human T-lymphotropic virus 1
ggggccuuaacugggacc

SEQ ID NO: 4016088 - RNA, 16 nt, Human T-lymphotropic virus 1
guaaguuacuccagcu

SEQ ID NO: 4016089 - RNA, 23 nt, Human T-lymphotropic virus 1
guaccuauacggucccgcugggc

SEQ ID NO: 4016090 - RNA, 20 nt, Human T-lymphotropic virus 1
gucaagccguccucaggcgu

SEQ ID NO: 4016091 - RNA, 23 nt, Human T-lymphotropic virus 1
gucacaaagaucauucccccuuc

SEQ ID NO: 4016092 - RNA, 18 nt, Human T-lymphotropic virus 1
gucacagaacugccgcag

SEQ ID NO: 4016093 - RNA, 15 nt, Human T-lymphotropic virus 1
gucaccgauucaaaa

SEQ ID NO: 4016094 - RNA, 18 nt, Human T-lymphotropic virus 1
gucauaacucccucaucc

SEQ ID NO: 4016095 - RNA, 12 nt, Human T-lymphotropic virus 1
guccaaacccug

SEQ ID NO: 4016096 - RNA, 18 nt, Human T-lymphotropic virus 1
guccugacuggcuggggc

SEQ ID NO: 4016097 - RNA, 19 nt, Human T-lymphotropic virus 1
guccuuuaacucuuccucc

SEQ ID NO: 4016098 - RNA, 21 nt, Human T-lymphotropic virus 1
gucggcccaacgggccgaacu

SEQ ID NO: 4016099 - RNA, 11 nt, Human T-lymphotropic virus 1
gucuccucccc

SEQ ID NO: 4016100 - RNA, 16 nt, Human T-lymphotropic virus 1
gucucuacugugccuu

SEQ ID NO: 4016101 - RNA, 18 nt, Human T-lymphotropic virus 1
gucugcauguaccucuac

SEQ ID NO: 4016102 - RNA, 16 nt, Human T-lymphotropic virus 1
gugaucauaaacaccg

SEQ ID NO: 4016103 - RNA, 19 nt, Human T-lymphotropic virus 1
gugauuacagccccagcug

SEQ ID NO: 4016104 - RNA, 21 nt, Human T-lymphotropic virus 1
guucucaaguaauacuccccu

SEQ ID NO: 4016105 - RNA, 12 nt, Human T-lymphotropic virus 1
guucugcccagu

SEQ ID NO: 4016106 - RNA, 18 nt, Human T-lymphotropic virus 1
guuucgccuucucagccc

SEQ ID NO: 4016107 - RNA, 15 nt, Human T-lymphotropic virus 1
uaaaaugcccauacc

SEQ ID NO: 4016108 - RNA, 22 nt, Human T-lymphotropic virus 1
uaaagacaaaucauaagcucag

SEQ ID NO: 4016109 - RNA, 13 nt, Human T-lymphotropic virus 1
uaaccucucccau

SEQ ID NO: 4016110 - RNA, 20 nt, Human T-lymphotropic virus 1
uaacucccucauccugcccc

SEQ ID NO: 4016111 - RNA, 16 nt, Human T-lymphotropic virus 1
uaacuggacccacugc

SEQ ID NO: 4016112 - RNA, 15 nt, Human T-lymphotropic virus 1
uaaggcucugacguc

SEQ ID NO: 4016113 - RNA, 16 nt, Human T-lymphotropic virus 1
uacaauccaaccagcu

SEQ ID NO: 4016114 - RNA, 18 nt, Human T-lymphotropic virus 1
uacaauccaaccagcucc

SEQ ID NO: 4016115 - RNA, 19 nt, Human T-lymphotropic virus 1
uggacaaagauauuuccca

SEQ ID NO: 4016116 - RNA, 14 nt, Human T-lymphotropic virus 1
uggaggcaggccau

SEQ ID NO: 4016117 - RNA, 24 nt, Human T-lymphotropic virus 1
uggaucccguggaggcuccucaag

SEQ ID NO: 4016118 - RNA, 17 nt, Human T-lymphotropic virus 1
uggcaagccccucccau

SEQ ID NO: 4016119 - RNA, 15 nt, Human T-lymphotropic virus 1
uggcccauauccugc

SEQ ID NO: 4016120 - RNA, 21 nt, Human T-lymphotropic virus 1
uggcccugccuauauuuccca

SEQ ID NO: 4016121 - RNA, 12 nt, Human T-lymphotropic virus 1
uggccucuccag

SEQ ID NO: 4016122 - RNA, 15 nt, Human T-lymphotropic virus 1
ugggaccuuggccuc

SEQ ID NO: 4016123 - RNA, 19 nt, Human T-lymphotropic virus 1
uggggccuuaacugggacc

SEQ ID NO: 4016124 - RNA, 18 nt, Human T-lymphotropic virus 1
ugguguuccaguccaagc

SEQ ID NO: 4016125 - RNA, 19 nt, Human T-lymphotropic virus 1
uguccccuacaauccaacc

SEQ ID NO: 4016126 - RNA, 16 nt, Human T-lymphotropic virus 1
ugucuccgcccuggcc

SEQ ID NO: 4016127 - RNA, 12 nt, Human T-lymphotropic virus 1
ugugaaagcccu

SEQ ID NO: 4016128 - RNA, 13 nt, Human T-lymphotropic virus 1
uguuccuuaaaau

SEQ ID NO: 4016129 - RNA, 22 nt, Human T-lymphotropic virus 1
uguucucaaguaauacuccccu

SEQ ID NO: 4016130 - RNA, 19 nt, Human T-lymphotropic virus 1
uuaagguccuuaccccgcc

SEQ ID NO: 4016131 - RNA, 20 nt, Human T-lymphotropic virus 1
uuaccauuuaacuggaccca

SEQ ID NO: 4016132 - RNA, 18 nt, Human T-lymphotropic virus 1
uuagcgcuuccagccccc

SEQ ID NO: 4016133 - RNA, 19 nt, Human T-lymphotropic virus 1
uuauugcaaccacaucgcc

SEQ ID NO: 4016134 - RNA, 22 nt, Human T-lymphotropic virus 1
uucaaaaauuuaggugcccaga

SEQ ID NO: 4016135 - RNA, 19 nt, Human T-lymphotropic virus 1
uucagacggauccaccucc

SEQ ID NO: 4016136 - RNA, 20 nt, Human T-lymphotropic virus 1
uucagacggauccaccuccc

SEQ ID NO: 4016137 - RNA, 18 nt, Human T-lymphotropic virus 1
uucauucaaacaucugac

SEQ ID NO: 4016138 - RNA, 22 nt, Human T-lymphotropic virus 1
uuccaacugucuaguauagcca

SEQ ID NO: 4016139 - RNA, 16 nt, Human T-lymphotropic virus 1
uuccagccccccaccu

SEQ ID NO: 4016140 - RNA, 13 nt, Human T-lymphotropic virus 1
uuccaguccaagc

SEQ ID NO: 4016141 - RNA, 19 nt, Human T-lymphotropic virus 1
uuccucaccaauguucccu

SEQ ID NO: 4016142 - RNA, 19 nt, Human T-lymphotropic virus 1
uuccucuuugcuccaggcc

SEQ ID NO: 4016143 - RNA, 13 nt, Human T-lymphotropic virus 1
uucuacucucaca

SEQ ID NO: 4016144 - RNA, 22 nt, Human T-lymphotropic virus 1
uucucagccccuugucuccacu

SEQ ID NO: 4016145 - RNA, 15 nt, Human T-lymphotropic virus 1
uucugccgccucccg

SEQ ID NO: 4016146 - RNA, 17 nt, Human T-lymphotropic virus 1
uuggacagagucuucuu

SEQ ID NO: 4016147 - RNA, 14 nt, Human T-lymphotropic virus 1
uuggcuccugugaa

SEQ ID NO: 4016148 - RNA, 13 nt, Human T-lymphotropic virus 1
uuuaacucuuccu

SEQ ID NO: 4016149 - RNA, 11 nt, Human T-lymphotropic virus 1
uuuccuccucc

SEQ ID NO: 4016150 - RNA, 22 nt, Human T-lymphotropic virus 1
uuuucagacggauccaccuccc

SEQ ID NO: 4016151 - RNA, 13 nt, Human T-lymphotropic virus 1
uuuuccuccucuu

SEQ ID NO: 4016152 - RNA, 12 nt, Human T-lymphotropic virus 1
uuuucuuaaaac

SEQ ID NO: 4016153 - RNA, 16 nt, Human T-lymphotropic virus 1
uuuuuccuucucccuu

SEQ ID NO: 4016154 - RNA, 12 nt, Human T-lymphotropic virus 1
uuuuugccaccc

SEQ ID NO: 4016155 - RNA, 13 nt, Human T-lymphotropic virus 1
aaaacaacugccc

SEQ ID NO: 4016156 - RNA, 19 nt, Human T-lymphotropic virus 1
aaaccuguacacccucugg

SEQ ID NO: 4016157 - RNA, 21 nt, Human T-lymphotropic virus 1
aaaucauaagcucagaccucc

SEQ ID NO: 4016158 - RNA, 18 nt, Human T-lymphotropic virus 1
aaaucgaguccugacugg

SEQ ID NO: 4016159 - RNA, 13 nt, Human T-lymphotropic virus 1
aacaguuccagcc

SEQ ID NO: 4016160 - RNA, 15 nt, Human T-lymphotropic virus 1
aaccacaacugaggc

SEQ ID NO: 4016161 - RNA, 11 nt, Human T-lymphotropic virus 1
aacucccucau

SEQ ID NO: 4016162 - RNA, 11 nt, Human T-lymphotropic virus 1
aacuccugcau

SEQ ID NO: 4016163 - RNA, 10 nt, Human T-lymphotropic virus 1
aacugcccca

SEQ ID NO: 4016164 - RNA, 23 nt, Human T-lymphotropic virus 1
aagacccaacaucuauucugcca

SEQ ID NO: 4016165 - RNA, 20 nt, Human T-lymphotropic virus 1
aagcccagauugacacccag

SEQ ID NO: 4016166 - RNA, 18 nt, Human T-lymphotropic virus 1
aagcccuuaugccagugu

SEQ ID NO: 4016167 - RNA, 19 nt, Human T-lymphotropic virus 1
aagcuauagucuccucccc

SEQ ID NO: 4016168 - RNA, 18 nt, Human T-lymphotropic virus 1
aagucagcggccuucucc

SEQ ID NO: 4016169 - RNA, 14 nt, Human T-lymphotropic virus 1
aaguuacuccagcu

SEQ ID NO: 4016170 - RNA, 20 nt, Human T-lymphotropic virus 1
aauacaggcgccagcugucc

SEQ ID NO: 4016171 - RNA, 20 nt, Human T-lymphotropic virus 1
aaucauggaccugccccuau

SEQ ID NO: 4016172 - RNA, 22 nt, Human T-lymphotropic virus 1
aauccuauggacuacucugcca

SEQ ID NO: 4016173 - RNA, 14 nt, Human T-lymphotropic virus 1
aauccugcccagcc

SEQ ID NO: 4016174 - RNA, 13 nt, Human T-lymphotropic virus 1
aaucugcucaaaa

SEQ ID NO: 4016175 - RNA, 16 nt, Human T-lymphotropic virus 1
acaacugaggccucca

SEQ ID NO: 4016176 - RNA, 19 nt, Human T-lymphotropic virus 1
acaccauggguaaguuucu

SEQ ID NO: 4016177 - RNA, 20 nt, Human T-lymphotropic virus 1
acacccagaccagccaccca

SEQ ID NO: 4016178 - RNA, 20 nt, Human T-lymphotropic virus 1
acacccucuggggaggcucc

SEQ ID NO: 4016179 - RNA, 12 nt, Human T-lymphotropic virus 1
acaccucaauau

SEQ ID NO: 4016180 - RNA, 11 nt, Human T-lymphotropic virus 1
acaccuccccu

SEQ ID NO: 4016181 - RNA, 15 nt, Human T-lymphotropic virus 1
acagacggcccucac

SEQ ID NO: 4016182 - RNA, 22 nt, Human T-lymphotropic virus 1
acaguuccuuaucccucgacuc

SEQ ID NO: 4016183 - RNA, 16 nt, Human T-lymphotropic virus 1
acaucgccuccagccu

SEQ ID NO: 4016184 - RNA, 19 nt, Human T-lymphotropic virus 1
acaucgccuccagccuccc

SEQ ID NO: 4016185 - RNA, 12 nt, Human T-lymphotropic virus 1
acaucuccaccc

SEQ ID NO: 4016186 - RNA, 21 nt, Human T-lymphotropic virus 1
accacaggaggcucuucaaga

SEQ ID NO: 4016187 - RNA, 12 nt, Human T-lymphotropic virus 1
cuagacucagcc

SEQ ID NO: 4016188 - RNA, 20 nt, Human T-lymphotropic virus 1
cuaguccaaacccugccccu

SEQ ID NO: 4016189 - RNA, 18 nt, Human T-lymphotropic virus 1
cuagucgacgcuccagga

SEQ ID NO: 4016190 - RNA, 13 nt, Human T-lymphotropic virus 1
cuauacucuccca

SEQ ID NO: 4016191 - RNA, 18 nt, Human T-lymphotropic virus 1
cuauagucuccucccccu

SEQ ID NO: 4016192 - RNA, 19 nt, Human T-lymphotropic virus 1
cuaucuaggcaagccuagc

SEQ ID NO: 4016193 - RNA, 16 nt, Human T-lymphotropic virus 1
cuaucuuacuccacca

SEQ ID NO: 4016194 - RNA, 19 nt, Human T-lymphotropic virus 1
cuaugcuguuucgccuucu

SEQ ID NO: 4016195 - RNA, 16 nt, Human T-lymphotropic virus 1
cuauggacuacucugc

SEQ ID NO: 4016196 - RNA, 21 nt, Human T-lymphotropic virus 1
cucaacccucaccacuccagg

SEQ ID NO: 4016197 - RNA, 17 nt, Human T-lymphotropic virus 1
cucaacgcucucacaga

SEQ ID NO: 4016198 - RNA, 24 nt, Human T-lymphotropic virus 1
cucaacgcucucacagaugcccua

SEQ ID NO: 4016199 - RNA, 20 nt, Human T-lymphotropic virus 1
cucaagaaguuucacaccuc

SEQ ID NO: 4016200 - RNA, 23 nt, Human T-lymphotropic virus 1
cucaauaaaauaacaggagucua

SEQ ID NO: 4016201 - RNA, 22 nt, Human T-lymphotropic virus 1
cucacaguuggagucuccucau

SEQ ID NO: 4016202 - RNA, 15 nt, Human T-lymphotropic virus 1
cucagccccuugucu

SEQ ID NO: 4016203 - RNA, 21 nt, Human T-lymphotropic virus 1
cucagccccuugucuccacuu

SEQ ID NO: 4016204 - RNA, 13 nt, Human T-lymphotropic virus 1
cucagccggcucu

SEQ ID NO: 4016205 - RNA, 19 nt, Human T-lymphotropic virus 1
cucagccggcucuccacgc

SEQ ID NO: 4016206 - RNA, 22 nt, Human T-lymphotropic virus 1
cucaggaaagagccuccuacau

SEQ ID NO: 4016207 - RNA, 23 nt, Human T-lymphotropic virus 1
cucauccucggugauuacagccc

SEQ ID NO: 4016208 - RNA, 17 nt, Human T-lymphotropic virus 1
cuccagccgaucccaga

SEQ ID NO: 4016209 - RNA, 13 nt, Human T-lymphotropic virus 1
cuccagccucccc

SEQ ID NO: 4016210 - RNA, 15 nt, Human T-lymphotropic virus 1
cuccagcuaccaugc

SEQ ID NO: 4016211 - RNA, 17 nt, Human T-lymphotropic virus 1
cuccagcuaccaugcca

SEQ ID NO: 4016212 - RNA, 20 nt, Human T-lymphotropic virus 1
cuccagcuaccaugccaccu

SEQ ID NO: 4016213 - RNA, 23 nt, Human T-lymphotropic virus 1
cuccaggauaugaccccaucugg

SEQ ID NO: 4016214 - RNA, 17 nt, Human T-lymphotropic virus 1
cucccaacgucucuguu

SEQ ID NO: 4016215 - RNA, 19 nt, Human T-lymphotropic virus 1
cuccccccgacuccagccg

SEQ ID NO: 4016216 - RNA, 15 nt, Human T-lymphotropic virus 1
cuccccuccuucccc

SEQ ID NO: 4016217 - RNA, 15 nt, Human T-lymphotropic virus 1
cuccucccccuguca

SEQ ID NO: 4016218 - RNA, 16 nt, Human T-lymphotropic virus 1
cuccucuacucuccca

SEQ ID NO: 4016219 - RNA, 20 nt, Human T-lymphotropic virus 1
cuccugcagcaaccuccucc

SEQ ID NO: 4016220 - RNA, 19 nt, Human T-lymphotropic virus 1
cuccugugaaagcccuuau

SEQ ID NO: 4016221 - RNA, 21 nt, Human T-lymphotropic virus 1
cuccuucacgcgcccgccgcc

SEQ ID NO: 4016222 - RNA, 20 nt, Human T-lymphotropic virus 1
cucgacuccccuccuucccc

SEQ ID NO: 4016223 - RNA, 24 nt, Human T-lymphotropic virus 1
cucggugauuacagccccagcugc

SEQ ID NO: 4016224 - RNA, 15 nt, Human T-lymphotropic virus 1
cucuaccagcuuucc

SEQ ID NO: 4016225 - RNA, 22 nt, Human T-lymphotropic virus 1
cucuauaaaauuucccuuacca

SEQ ID NO: 4016226 - RNA, 14 nt, Human T-lymphotropic virus 1
cucucacacggccu

SEQ ID NO: 4016227 - RNA, 19 nt, Human T-lymphotropic virus 1
cucucacagaugcccuacu

SEQ ID NO: 4016228 - RNA, 14 nt, Human T-lymphotropic virus 1
cucucacagugggc

SEQ ID NO: 4016229 - RNA, 23 nt, Human T-lymphotropic virus 1
cucucaggcccccuuucaggccc

SEQ ID NO: 4016230 - RNA, 13 nt, Human T-lymphotropic virus 1
cucuccagcgccc

SEQ ID NO: 4016231 - RNA, 18 nt, Human T-lymphotropic virus 1
cucuguuccauccccuuc

SEQ ID NO: 4016232 - RNA, 14 nt, Human T-lymphotropic virus 1
cucuucuccucagc

SEQ ID NO: 4016233 - RNA, 20 nt, Human T-lymphotropic virus 1
cucuugccacgccugccgca

SEQ ID NO: 4016234 - RNA, 14 nt, Human T-lymphotropic virus 1
cugaucccaucucc

SEQ ID NO: 4016235 - RNA, 17 nt, Human T-lymphotropic virus 1
cugcaacuacucucaga

SEQ ID NO: 4016236 - RNA, 20 nt, Human T-lymphotropic virus 1
cugcaaggggcaaccacaac

SEQ ID NO: 4016237 - RNA, 21 nt, Human T-lymphotropic virus 1
cugcaauccugcccagccagu

SEQ ID NO: 4016238 - RNA, 22 nt, Human T-lymphotropic virus 1
cugcccuaaagauggccagcca

SEQ ID NO: 4016239 - RNA, 23 nt, Human T-lymphotropic virus 1
cugcccuaaagauggccagccau

SEQ ID NO: 4016240 - RNA, 14 nt, Human T-lymphotropic virus 1
cugccucccaccgc

SEQ ID NO: 4016241 - RNA, 19 nt, Human T-lymphotropic virus 1
cugcuuuuccuccucuuuc

SEQ ID NO: 4016242 - RNA, 13 nt, Human T-lymphotropic virus 1
cuggcaagccccu

SEQ ID NO: 4016243 - RNA, 21 nt, Human T-lymphotropic virus 1
cuggcuacaugccccccuacc

SEQ ID NO: 4016244 - RNA, 18 nt, Human T-lymphotropic virus 1
cuguaccucccugaggca

SEQ ID NO: 4016245 - RNA, 15 nt, Human T-lymphotropic virus 1
cugucauaacucccu

SEQ ID NO: 4016246 - RNA, 19 nt, Human T-lymphotropic virus 1
cuguuugcccaccacccuu

SEQ ID NO: 4016247 - RNA, 22 nt, Human T-lymphotropic virus 1
cuuaauaccgaacccagccaac

SEQ ID NO: 4016248 - RNA, 19 nt, Human T-lymphotropic virus 1
cuucacagucucuacugug

SEQ ID NO: 4016249 - RNA, 22 nt, Human T-lymphotropic virus 1
cuucacagucucuacugugccu

SEQ ID NO: 4016250 - RNA, 19 nt, Human T-lymphotropic virus 1
cuucaccacuccccccgac

SEQ ID NO: 4016251 - RNA, 19 nt, Human T-lymphotropic virus 1
cuucccccgggcccccuga

SEQ ID NO: 4016252 - RNA, 20 nt, Human T-lymphotropic virus 1
cuucccccgggcccccugac

SEQ ID NO: 4016253 - RNA, 14 nt, Human T-lymphotropic virus 1
cuucuccugcagca

SEQ ID NO: 4016254 - RNA, 15 nt, Human T-lymphotropic virus 1
cuucuccugcagcaa

SEQ ID NO: 4016255 - RNA, 14 nt, Human T-lymphotropic virus 1
cuuguccagccugc

SEQ ID NO: 4016256 - RNA, 18 nt, Human T-lymphotropic virus 1
cuugucuccgcccuggcc

SEQ ID NO: 4016257 - RNA, 19 nt, Human T-lymphotropic virus 1
cuuucagcagaucaggccc

SEQ ID NO: 4016258 - RNA, 14 nt, Human T-lymphotropic virus 1
cuuuccccugugau

SEQ ID NO: 4016259 - RNA, 17 nt, Human T-lymphotropic virus 1
cuuuggaacacuuuucu

SEQ ID NO: 4016260 - RNA, 19 nt, Human T-lymphotropic virus 1
cuuuuccuugucaccuguu

SEQ ID NO: 4016261 - RNA, 19 nt, Human T-lymphotropic virus 1
cuuuucuuaaaacaacugc

SEQ ID NO: 4016262 - RNA, 17 nt, Human T-lymphotropic virus 1
gaaccacccauuuccuc

SEQ ID NO: 4016263 - RNA, 19 nt, Human T-lymphotropic virus 1
gaacccuacaccgggccag

SEQ ID NO: 4016264 - RNA, 18 nt, Human T-lymphotropic virus 1
gaacgccuccaggccuug

SEQ ID NO: 4016265 - RNA, 14 nt, Human T-lymphotropic virus 1
gaacuccuaccuua

SEQ ID NO: 4016266 - RNA, 16 nt, Human T-lymphotropic virus 1
gacaaagauauuuccc

SEQ ID NO: 4016267 - RNA, 20 nt, Human T-lymphotropic virus 1
gacaguucaggagggggcuc

SEQ ID NO: 4016268 - RNA, 16 nt, Human T-lymphotropic virus 1
gaccacaggaggcucu

SEQ ID NO: 4016269 - RNA, 20 nt, Human T-lymphotropic virus 1
gacccucacuggcaccacca

SEQ ID NO: 4016270 - RNA, 15 nt, Human T-lymphotropic virus 1
gaccugccccuauac

SEQ ID NO: 4016271 - RNA, 15 nt, Human T-lymphotropic virus 1
gacgucuccccccgg

SEQ ID NO: 4016272 - RNA, 22 nt, Human T-lymphotropic virus 1
gacuaguccaaacccugccccu

SEQ ID NO: 4016273 - RNA, 17 nt, Human T-lymphotropic virus 1
gacucagccggcucucc

SEQ ID NO: 4016274 - RNA, 14 nt, Human T-lymphotropic virus 1
gacuccccuccuuc

SEQ ID NO: 4016275 - RNA, 15 nt, Human T-lymphotropic virus 1
gagccgucuccagcc

SEQ ID NO: 4016276 - RNA, 20 nt, Human T-lymphotropic virus 1
gagguggcgcuuuccccccu

SEQ ID NO: 4016277 - RNA, 18 nt, Human T-lymphotropic virus 1
gauccaccucccaggcag

SEQ ID NO: 4016278 - RNA, 20 nt, Human T-lymphotropic virus 1
gaucucucaucaucuucccc

SEQ ID NO: 4016279 - RNA, 20 nt, Human T-lymphotropic virus 1
gcaaacaucgaaacagcccu

SEQ ID NO: 4016280 - RNA, 16 nt, Human T-lymphotropic virus 1
gcaagccccucccaug

SEQ ID NO: 4016281 - RNA, 14 nt, Human T-lymphotropic virus 1
gcaauccugcccag

SEQ ID NO: 4016282 - RNA, 18 nt, Human T-lymphotropic virus 1
gcacaguuuccuccuccu

SEQ ID NO: 4016283 - RNA, 15 nt, Human T-lymphotropic virus 1
gcaccuuccaaggca

SEQ ID NO: 4016284 - RNA, 17 nt, Human T-lymphotropic virus 1
gcacgcauacggcucaa

SEQ ID NO: 4016285 - RNA, 22 nt, Human T-lymphotropic virus 1
gcacgcauacggcucaauaaaa

SEQ ID NO: 4016286 - RNA, 15 nt, Human T-lymphotropic virus 1
gcagaucaggcccua

SEQ ID NO: 4016287 - RNA, 20 nt, Human T-lymphotropic virus 1
cggaggacagcucagcacca

SEQ ID NO: 4016288 - RNA, 14 nt, Human T-lymphotropic virus 1
cggauccaccuccc

SEQ ID NO: 4016289 - RNA, 19 nt, Human T-lymphotropic virus 1
cgguuuuuccuucucccuu

SEQ ID NO: 4016290 - RNA, 11 nt, Human T-lymphotropic virus 1
cgucaagcaca

SEQ ID NO: 4016291 - RNA, 20 nt, Human T-lymphotropic virus 1
cgucagcuacgacaccuccc

SEQ ID NO: 4016292 - RNA, 18 nt, Human T-lymphotropic virus 1
cguccuauacucucccaa

SEQ ID NO: 4016293 - RNA, 19 nt, Human T-lymphotropic virus 1
cguggccuacucccuaacc

SEQ ID NO: 4016294 - RNA, 17 nt, Human T-lymphotropic virus 1
cguuaucggcucagcuc

SEQ ID NO: 4016295 - RNA, 19 nt, Human T-lymphotropic virus 1
cuaaacaguuccagcccua

SEQ ID NO: 4016296 - RNA, 18 nt, Human T-lymphotropic virus 1
cuaaccacaucuggcaag

SEQ ID NO: 4016297 - RNA, 14 nt, Human T-lymphotropic virus 1
cuacaguccuccuc

SEQ ID NO: 4016298 - RNA, 20 nt, Human T-lymphotropic virus 1
cuacaugccccccuacccca

SEQ ID NO: 4016299 - RNA, 15 nt, Human T-lymphotropic virus 1
cuaccccacacuagc

SEQ ID NO: 4016300 - RNA, 17 nt, Human T-lymphotropic virus 1
cuaccuagacucagccg

SEQ ID NO: 4016301 - RNA, 16 nt, Human T-lymphotropic virus 1
cuaccuuacgccagcc

SEQ ID NO: 4016302 - RNA, 12 nt, Human T-lymphotropic virus 1
cuacucucacac

SEQ ID NO: 4016303 - RNA, 16 nt, Human T-lymphotropic virus 1
cuacuggccaccuguc

SEQ ID NO: 4016304 - RNA, 16 nt, Human T-lymphotropic virus 1
cuagaacaccucccaa

SEQ ID NO: 4016305 - RNA, 13 nt, Human T-lymphotropic virus 1
cuagacucagccg

SEQ ID NO: 4016306 - RNA, 21 nt, Human T-lymphotropic virus 1
cuaugauuuccgggcccugcc

SEQ ID NO: 4016307 - RNA, 18 nt, Human T-lymphotropic virus 1
cuauggacuacucugcca

SEQ ID NO: 4016308 - RNA, 15 nt, Human T-lymphotropic virus 1
cuauuauucagccuc

SEQ ID NO: 4016309 - RNA, 18 nt, Human T-lymphotropic virus 1
cucaagcgagcugcaugc

SEQ ID NO: 4016310 - RNA, 20 nt, Human T-lymphotropic virus 1
cucacaguuggagucuccuc

SEQ ID NO: 4016311 - RNA, 21 nt, Human T-lymphotropic virus 1
cucaccucaaaaaacuuuuca

SEQ ID NO: 4016312 - RNA, 15 nt, Human T-lymphotropic virus 1
cucaccucccuuccu

SEQ ID NO: 4016313 - RNA, 17 nt, Human T-lymphotropic virus 1
cucacggcgcuccugcu

SEQ ID NO: 4016314 - RNA, 19 nt, Human T-lymphotropic virus 1
cucacggcgcuccugcucu

SEQ ID NO: 4016315 - RNA, 14 nt, Human T-lymphotropic virus 1
cucagaccuccggg

SEQ ID NO: 4016316 - RNA, 15 nt, Human T-lymphotropic virus 1
cucagcaccagcuca

SEQ ID NO: 4016317 - RNA, 16 nt, Human T-lymphotropic virus 1
cucagcaccagcucag

SEQ ID NO: 4016318 - RNA, 22 nt, Human T-lymphotropic virus 1
cucagcaccagcucaggcuagg

SEQ ID NO: 4016319 - RNA, 18 nt, Human T-lymphotropic virus 1
cucauacaguacucuucc

SEQ ID NO: 4016320 - RNA, 13 nt, Human T-lymphotropic virus 1
cucauaccacucu

SEQ ID NO: 4016321 - RNA, 22 nt, Human T-lymphotropic virus 1
cucauccugccccccuuuuccu

SEQ ID NO: 4016322 - RNA, 22 nt, Human T-lymphotropic virus 1
cuccaccagcagguccuccggg

SEQ ID NO: 4016323 - RNA, 17 nt, Human T-lymphotropic virus 1
cuccaccucgccuucca

SEQ ID NO: 4016324 - RNA, 18 nt, Human T-lymphotropic virus 1
cuccagccuccccugcca

SEQ ID NO: 4016325 - RNA, 18 nt, Human T-lymphotropic virus 1
cuccaggauaugacccca

SEQ ID NO: 4016326 - RNA, 24 nt, Human T-lymphotropic virus 1
cucccaucaaauccuccuucuccu

SEQ ID NO: 4016327 - RNA, 20 nt, Human T-lymphotropic virus 1
cucccuuggagccuaccuag

SEQ ID NO: 4016328 - RNA, 20 nt, Human T-lymphotropic virus 1
cuccgucagcuacgacaccu

SEQ ID NO: 4016329 - RNA, 11 nt, Human T-lymphotropic virus 1
cuccucagccc

SEQ ID NO: 4016330 - RNA, 15 nt, Human T-lymphotropic virus 1
cuccuccuccuuguc

SEQ ID NO: 4016331 - RNA, 20 nt, Human T-lymphotropic virus 1
cuccucuauaaaauuucccu

SEQ ID NO: 4016332 - RNA, 22 nt, Human T-lymphotropic virus 1
cuccugcagaccuacacaguuu

SEQ ID NO: 4016333 - RNA, 23 nt, Human T-lymphotropic virus 1
cuccugugaaagcccuuaugcca

SEQ ID NO: 4016334 - RNA, 14 nt, Human T-lymphotropic virus 1
cuccuuccuccagg

SEQ ID NO: 4016335 - RNA, 14 nt, Human T-lymphotropic virus 1
cuccuucuccugca

SEQ ID NO: 4016336 - RNA, 22 nt, Human T-lymphotropic virus 1
cuccuucuuguuauccuugcag

SEQ ID NO: 4016337 - RNA, 21 nt, Human T-lymphotropic virus 1
cucgacaaauacaccuugcaa

SEQ ID NO: 4016338 - RNA, 16 nt, Human T-lymphotropic virus 1
cucggggccuuccuca

SEQ ID NO: 4016339 - RNA, 15 nt, Human T-lymphotropic virus 1
cucuaaacccugcaa

SEQ ID NO: 4016340 - RNA, 12 nt, Human T-lymphotropic virus 1
cucuacaguucc

SEQ ID NO: 4016341 - RNA, 16 nt, Human T-lymphotropic virus 1
cucuaccagcuuuccc

SEQ ID NO: 4016342 - RNA, 14 nt, Human T-lymphotropic virus 1
cugacccucacugg

SEQ ID NO: 4016343 - RNA, 18 nt, Human T-lymphotropic virus 1
cugacgucuccccccgga

SEQ ID NO: 4016344 - RNA, 17 nt, Human T-lymphotropic virus 1
cugaucccaucuccagg

SEQ ID NO: 4016345 - RNA, 13 nt, Human T-lymphotropic virus 1
cugcagaccuaca

SEQ ID NO: 4016346 - RNA, 17 nt, Human T-lymphotropic virus 1
cugcagcaaccuccucc

SEQ ID NO: 4016347 - RNA, 17 nt, Human T-lymphotropic virus 1
cugcagcucucuccugc

SEQ ID NO: 4016348 - RNA, 22 nt, Human T-lymphotropic virus 1
cugcauguaccucuaccagcuu

SEQ ID NO: 4016349 - RNA, 21 nt, Human T-lymphotropic virus 1
cugcccuaaagauggccagcc

SEQ ID NO: 4016350 - RNA, 21 nt, Human T-lymphotropic virus 1
cugccggcgcugcucucaucc

SEQ ID NO: 4016351 - RNA, 22 nt, Human T-lymphotropic virus 1
cugccggcgcugcucucauccc

SEQ ID NO: 4016352 - RNA, 21 nt, Human T-lymphotropic virus 1
cugccucccaccgccccuccu

SEQ ID NO: 4016353 - RNA, 22 nt, Human T-lymphotropic virus 1
cugcgccgugccuucuccucuu

SEQ ID NO: 4016354 - RNA, 15 nt, Human T-lymphotropic virus 1
cugcgcucuugccac

SEQ ID NO: 4016355 - RNA, 14 nt, Human T-lymphotropic virus 1
cugcuuuuccuccu

SEQ ID NO: 4016356 - RNA, 15 nt, Human T-lymphotropic virus 1
cugcuuuuccuccuc

SEQ ID NO: 4016357 - RNA, 22 nt, Human T-lymphotropic virus 1
cuggcaaaacggccuccuuccg

SEQ ID NO: 4016358 - RNA, 17 nt, Human T-lymphotropic virus 1
cuggcaagccccuccca

SEQ ID NO: 4016359 - RNA, 22 nt, Human T-lymphotropic virus 1
cuggcccauauccugcagccca

SEQ ID NO: 4016360 - RNA, 18 nt, Human T-lymphotropic virus 1
cuguaaaccaagcacaca

SEQ ID NO: 4016361 - RNA, 19 nt, Human T-lymphotropic virus 1
cuguccugcagcucucucc

SEQ ID NO: 4016362 - RNA, 19 nt, Human T-lymphotropic virus 1
cugucucaacauauuucua

SEQ ID NO: 4016363 - RNA, 16 nt, Human T-lymphotropic virus 1
cuguuucgccuucuca

SEQ ID NO: 4016364 - RNA, 20 nt, Human T-lymphotropic virus 1
cuuccagccccccaccugac

SEQ ID NO: 4016365 - RNA, 13 nt, Human T-lymphotropic virus 1
cuuccccacccag

SEQ ID NO: 4016366 - RNA, 16 nt, Human T-lymphotropic virus 1
cuuccuaaccaagacc

SEQ ID NO: 4016367 - RNA, 19 nt, Human T-lymphotropic virus 1
cuuccucuucuccucagcc

SEQ ID NO: 4016368 - RNA, 20 nt, Human T-lymphotropic virus 1
cuuccuuuucaaauacucag

SEQ ID NO: 4016369 - RNA, 19 nt, Human T-lymphotropic virus 1
cuucuaccccccuccuuua

SEQ ID NO: 4016370 - RNA, 13 nt, Human T-lymphotropic virus 1
cuucucagccccu

SEQ ID NO: 4016371 - RNA, 15 nt, Human T-lymphotropic virus 1
cuucuccucagcccg

SEQ ID NO: 4016372 - RNA, 21 nt, Human T-lymphotropic virus 1
cuugaaaaucgaguccugacu

SEQ ID NO: 4016373 - RNA, 22 nt, Human T-lymphotropic virus 1
cuugcaggaccaugcauccucc

SEQ ID NO: 4016374 - RNA, 21 nt, Human T-lymphotropic virus 1
cuuggccucucacagugggcu

SEQ ID NO: 4016375 - RNA, 20 nt, Human T-lymphotropic virus 1
cuugggcuagaacaccuccc

SEQ ID NO: 4016376 - RNA, 18 nt, Human T-lymphotropic virus 1
cuuuaacucuuccuccaa

SEQ ID NO: 4016377 - RNA, 19 nt, Human T-lymphotropic virus 1
cuuuaacucuuccuccaag

SEQ ID NO: 4016378 - RNA, 14 nt, Human T-lymphotropic virus 1
cuuugccugacccu

SEQ ID NO: 4016379 - RNA, 18 nt, Human T-lymphotropic virus 1
gacaaaucauaagcucag

SEQ ID NO: 4016380 - RNA, 20 nt, Human T-lymphotropic virus 1
gacaaaucauaagcucagac

SEQ ID NO: 4016381 - RNA, 13 nt, Human T-lymphotropic virus 1
gacagcucagcac

SEQ ID NO: 4016382 - RNA, 19 nt, Human T-lymphotropic virus 1
gacauucuccuggcaagcc

SEQ ID NO: 4016383 - RNA, 13 nt, Human T-lymphotropic virus 1
gaccaugcauccu

SEQ ID NO: 4016384 - RNA, 23 nt, Human T-lymphotropic virus 1
gacccacugcuuugacccccaga

SEQ ID NO: 4016385 - RNA, 17 nt, Human T-lymphotropic virus 1
gacccucgaccugcugg

SEQ ID NO: 4016386 - RNA, 12 nt, Human T-lymphotropic virus 1
gacccuugcccu

SEQ ID NO: 4016387 - RNA, 23 nt, Human T-lymphotropic virus 1
gacccuuguuccuuaaaaugccc

SEQ ID NO: 4016388 - RNA, 20 nt, Human T-lymphotropic virus 1
gacguuaccauuuaacugga

SEQ ID NO: 4016389 - RNA, 14 nt, Human T-lymphotropic virus 1
gacucagccggcuc

SEQ ID NO: 4016390 - RNA, 18 nt, Human T-lymphotropic virus 1
gagccaucucagcuaccc

SEQ ID NO: 4016391 - RNA, 16 nt, Human T-lymphotropic virus 1
gagccuaccuagacuc

SEQ ID NO: 4016392 - RNA, 21 nt, Human T-lymphotropic virus 1
gagccuaccuagacucagccg

SEQ ID NO: 4016393 - RNA, 21 nt, Human T-lymphotropic virus 1
gaggacagcucagcaccagcu

SEQ ID NO: 4016394 - RNA, 14 nt, Human T-lymphotropic virus 1
gaggccgccaucca

SEQ ID NO: 4016395 - RNA, 16 nt, Human T-lymphotropic virus 1
gaguacuaccccaagg

SEQ ID NO: 4016396 - RNA, 21 nt, Human T-lymphotropic virus 1
gauccaccucccaggcagccu

SEQ ID NO: 4016397 - RNA, 18 nt, Human T-lymphotropic virus 1
gaucucucaucaucuucc

SEQ ID NO: 4016398 - RNA, 18 nt, Human T-lymphotropic virus 1
gauuacagccccagcugc

SEQ ID NO: 4016399 - RNA, 19 nt, Human T-lymphotropic virus 1
gauuuccgggcccugcccu

SEQ ID NO: 4016400 - RNA, 17 nt, Human T-lymphotropic virus 1
gcaaauacucccccuuc

SEQ ID NO: 4016401 - RNA, 16 nt, Human T-lymphotropic virus 1
gcaauccugcccagcc

SEQ ID NO: 4016402 - RNA, 14 nt, Human T-lymphotropic virus 1
gcaccagcucaggc

SEQ ID NO: 4016403 - RNA, 15 nt, Human T-lymphotropic virus 1
gcaccagcucaggcu

SEQ ID NO: 4016404 - RNA, 19 nt, Human T-lymphotropic virus 1
gcagcccauucggcaagcc

SEQ ID NO: 4016405 - RNA, 16 nt, Human T-lymphotropic virus 1
gcagcuucaccacucc

SEQ ID NO: 4016406 - RNA, 16 nt, Human T-lymphotropic virus 1
gcagguccuccgggca

SEQ ID NO: 4016407 - RNA, 19 nt, Human T-lymphotropic virus 1
gccagcucggggccuuccu

SEQ ID NO: 4016408 - RNA, 23 nt, Human T-lymphotropic virus 1
gccaucuuuaguacuacaguccu

SEQ ID NO: 4016409 - RNA, 23 nt, Human T-lymphotropic virus 1
gccauugccuaucuaggcaagcc

SEQ ID NO: 4016410 - RNA, 20 nt, Human T-lymphotropic virus 1
gcccagaauaaggcucugac

SEQ ID NO: 4016411 - RNA, 19 nt, Human T-lymphotropic virus 1
gccccgccgaucccaaaga

SEQ ID NO: 4016412 - RNA, 17 nt, Human T-lymphotropic virus 1
gccccuucacagucucu

SEQ ID NO: 4016413 - RNA, 16 nt, Human T-lymphotropic virus 1
gccccuugucuccacu

SEQ ID NO: 4016414 - RNA, 14 nt, Human T-lymphotropic virus 1
gcccuacagccacc

SEQ ID NO: 4016415 - RNA, 19 nt, Human T-lymphotropic virus 1
gccgccuguaaucuugcca

SEQ ID NO: 4016416 - RNA, 18 nt, Human T-lymphotropic virus 1
gccgccuuaccugaggcc

SEQ ID NO: 4016417 - RNA, 14 nt, Human T-lymphotropic virus 1
gccgcggcuuuccu

SEQ ID NO: 4016418 - RNA, 13 nt, Human T-lymphotropic virus 1
gccguccucaggc

SEQ ID NO: 4016419 - RNA, 15 nt, Human T-lymphotropic virus 1
gccgucuccagcccc

SEQ ID NO: 4016420 - RNA, 18 nt, Human T-lymphotropic virus 1
gccuccaauauccugcgc

SEQ ID NO: 4016421 - RNA, 23 nt, Human T-lymphotropic virus 1
gccuccaggccuugcaacacuug

SEQ ID NO: 4016422 - RNA, 18 nt, Human T-lymphotropic virus 1
gccucccgccuguggugc

SEQ ID NO: 4016423 - RNA, 12 nt, Human T-lymphotropic virus 1
gccucucaguga

SEQ ID NO: 4016424 - RNA, 15 nt, Human T-lymphotropic virus 1
gccuuaccugaggcc

SEQ ID NO: 4016425 - RNA, 20 nt, Human T-lymphotropic virus 1
uagaucucucaucaucuucc

SEQ ID NO: 4016426 - RNA, 21 nt, Human T-lymphotropic virus 1
uauugcaaccacaucgccucc

SEQ ID NO: 4016427 - RNA, 14 nt, Human T-lymphotropic virus 1
uauuucccaagacu

SEQ ID NO: 4016428 - RNA, 22 nt, Human T-lymphotropic virus 1
uauuuccucuuugcuccaggcc

SEQ ID NO: 4016429 - RNA, 12 nt, Human T-lymphotropic virus 1
ucaaaacuccug

SEQ ID NO: 4016430 - RNA, 14 nt, Human T-lymphotropic virus 1
ucaaauccuccuuc

SEQ ID NO: 4016431 - RNA, 15 nt, Human T-lymphotropic virus 1
ucaagcacaguuucc

SEQ ID NO: 4016432 - RNA, 18 nt, Human T-lymphotropic virus 1
ucaagcacaguuuccucc

SEQ ID NO: 4016433 - RNA, 20 nt, Human T-lymphotropic virus 1
ucaccccuguccugcagcuc

SEQ ID NO: 4016434 - RNA, 14 nt, Human T-lymphotropic virus 1
ucaccucccuuccu

SEQ ID NO: 4016435 - RNA, 13 nt, Human T-lymphotropic virus 1
ucaccuggccccu

SEQ ID NO: 4016436 - RNA, 16 nt, Human T-lymphotropic virus 1
ucacucauacaacccc

SEQ ID NO: 4016437 - RNA, 22 nt, Human T-lymphotropic virus 1
ucagaagcuauuuccucuuugc

SEQ ID NO: 4016438 - RNA, 13 nt, Human T-lymphotropic virus 1
ucagaccuccggg

SEQ ID NO: 4016439 - RNA, 22 nt, Human T-lymphotropic virus 1
ucagaccuccgggaagccaccg

SEQ ID NO: 4016440 - RNA, 19 nt, Human T-lymphotropic virus 1
ucagcaauaaacaaaccca

SEQ ID NO: 4016441 - RNA, 16 nt, Human T-lymphotropic virus 1
ucagcaccagcucagg

SEQ ID NO: 4016442 - RNA, 18 nt, Human T-lymphotropic virus 1
ucagcccacuucccaggg

SEQ ID NO: 4016443 - RNA, 18 nt, Human T-lymphotropic virus 1
ucagcuacgacaccuccc

SEQ ID NO: 4016444 - RNA, 18 nt, Human T-lymphotropic virus 1
ucaggaaagagccuccua

SEQ ID NO: 4016445 - RNA, 12 nt, Human T-lymphotropic virus 1
ucaggcccccuu

SEQ ID NO: 4016446 - RNA, 16 nt, Human T-lymphotropic virus 1
ucaggcccccuuucag

SEQ ID NO: 4016447 - RNA, 20 nt, Human T-lymphotropic virus 1
ucaggcccuacagccacccu

SEQ ID NO: 4016448 - RNA, 14 nt, Human T-lymphotropic virus 1
ucaggcuaggcccu

SEQ ID NO: 4016449 - RNA, 20 nt, Human T-lymphotropic virus 1
ucauaaacaccgccccuugc

SEQ ID NO: 4016450 - RNA, 15 nt, Human T-lymphotropic virus 1
ucauccugccccccu

SEQ ID NO: 4016451 - RNA, 14 nt, Human T-lymphotropic virus 1
ucauggaccugccc

SEQ ID NO: 4016452 - RNA, 17 nt, Human T-lymphotropic virus 1
ucauggaccugccccua

SEQ ID NO: 4016453 - RNA, 20 nt, Human T-lymphotropic virus 1
ucauggaccugccccuauac

SEQ ID NO: 4016454 - RNA, 15 nt, Human T-lymphotropic virus 1
ucauuagugcagcug

SEQ ID NO: 4016455 - RNA, 17 nt, Human T-lymphotropic virus 1
uccaaggacuccaccuc

SEQ ID NO: 4016456 - RNA, 17 nt, Human T-lymphotropic virus 1
uccaaggauaauagccc

SEQ ID NO: 4016457 - RNA, 21 nt, Human T-lymphotropic virus 1
uccaauauccugcgcucuugc

SEQ ID NO: 4016458 - RNA, 19 nt, Human T-lymphotropic virus 1
accucccaggcagccuaua

SEQ ID NO: 4016459 - RNA, 20 nt, Human T-lymphotropic virus 1
accuccuccguucagccucc

SEQ ID NO: 4016460 - RNA, 21 nt, Human T-lymphotropic virus 1
accuccuccguucagccucca

SEQ ID NO: 4016461 - RNA, 23 nt, Human T-lymphotropic virus 1
accucucccaucaaauccuccuu

SEQ ID NO: 4016462 - RNA, 16 nt, Human T-lymphotropic virus 1
accugggaccccaucg

SEQ ID NO: 4016463 - RNA, 20 nt, Human T-lymphotropic virus 1
accuuccaaggcagguccuc

SEQ ID NO: 4016464 - RNA, 21 nt, Human T-lymphotropic virus 1
accuucggacccuugcccuag

SEQ ID NO: 4016465 - RNA, 19 nt, Human T-lymphotropic virus 1
acggcccucacacugcaag

SEQ ID NO: 4016466 - RNA, 21 nt, Human T-lymphotropic virus 1
acucagccggcucuccacgcu

SEQ ID NO: 4016467 - RNA, 16 nt, Human T-lymphotropic virus 1
acuccaaguaucuuua

SEQ ID NO: 4016468 - RNA, 17 nt, Human T-lymphotropic virus 1
acuccagcuaccaugcc

SEQ ID NO: 4016469 - RNA, 21 nt, Human T-lymphotropic virus 1
acuccccuccuuccccaccca

SEQ ID NO: 4016470 - RNA, 18 nt, Human T-lymphotropic virus 1
acucccuaaccacaucug

SEQ ID NO: 4016471 - RNA, 22 nt, Human T-lymphotropic virus 1
acugcaaggggcaaccacaacu

SEQ ID NO: 4016472 - RNA, 18 nt, Human T-lymphotropic virus 1
acugccucccaccgcccc

SEQ ID NO: 4016473 - RNA, 12 nt, Human T-lymphotropic virus 1
acuggccaccug

SEQ ID NO: 4016474 - RNA, 19 nt, Human T-lymphotropic virus 1
acuggcuggggccuuaacu

SEQ ID NO: 4016475 - RNA, 15 nt, Human T-lymphotropic virus 1
acuggugccccaucu

SEQ ID NO: 4016476 - RNA, 17 nt, Human T-lymphotropic virus 1
acuuaugaugcaguccc

SEQ ID NO: 4016477 - RNA, 14 nt, Human T-lymphotropic virus 1
acuuggcacguccu

SEQ ID NO: 4016478 - RNA, 19 nt, Human T-lymphotropic virus 1
acuuugcuuucacuguccc

SEQ ID NO: 4016479 - RNA, 23 nt, Human T-lymphotropic virus 1
acuuuucuuaaaacaacugcccc

SEQ ID NO: 4016480 - RNA, 13 nt, Human T-lymphotropic virus 1
agaagucugagaa

SEQ ID NO: 4016481 - RNA, 21 nt, Human T-lymphotropic virus 1
agacaccuuuucaggagccau

SEQ ID NO: 4016482 - RNA, 13 nt, Human T-lymphotropic virus 1
agacggcccucac

SEQ ID NO: 4016483 - RNA, 23 nt, Human T-lymphotropic virus 1
agacuaguccaaacccugccccu

SEQ ID NO: 4016484 - RNA, 23 nt, Human T-lymphotropic virus 1
agcaaccuccuccguucagccuc

SEQ ID NO: 4016485 - RNA, 14 nt, Human T-lymphotropic virus 1
agccacccugcccu

SEQ ID NO: 4016486 - RNA, 18 nt, Human T-lymphotropic virus 1
agccauaccaaucuaccu

SEQ ID NO: 4016487 - RNA, 19 nt, Human T-lymphotropic virus 1
agccaucaacccccaacuc

SEQ ID NO: 4016488 - RNA, 18 nt, Human T-lymphotropic virus 1
agcccagauugacaccca

SEQ ID NO: 4016489 - RNA, 12 nt, Human T-lymphotropic virus 1
agccccuucaca

SEQ ID NO: 4016490 - RNA, 12 nt, Human T-lymphotropic virus 1
agccgccagugg

SEQ ID NO: 4016491 - RNA, 22 nt, Human T-lymphotropic virus 1
agccggccgcggcuuuccucuu

SEQ ID NO: 4016492 - RNA, 13 nt, Human T-lymphotropic virus 1
agccguccucagg

SEQ ID NO: 4016493 - RNA, 15 nt, Human T-lymphotropic virus 1
agccgucuccagccc

SEQ ID NO: 4016494 - RNA, 22 nt, Human T-lymphotropic virus 1
agccgucuccagccccuacugg

SEQ ID NO: 4016495 - RNA, 21 nt, Human T-lymphotropic virus 1
agccuggcaaaacggccuccu

SEQ ID NO: 4016496 - RNA, 22 nt, Human T-lymphotropic virus 1
agccuggcaaaacggccuccuu

SEQ ID NO: 4016497 - RNA, 13 nt, Human T-lymphotropic virus 1
agcgcuuccagcc

SEQ ID NO: 4016498 - RNA, 16 nt, Human T-lymphotropic virus 1
agcuaccaugccaccu

SEQ ID NO: 4016499 - RNA, 16 nt, Human T-lymphotropic virus 1
agcucagcaccagcuc

SEQ ID NO: 4016500 - RNA, 15 nt, Human T-lymphotropic virus 1
agcucggggccuucc

SEQ ID NO: 4016501 - RNA, 20 nt, Human T-lymphotropic virus 1
agcucggggccuuccucacc

SEQ ID NO: 4016502 - RNA, 17 nt, Human T-lymphotropic virus 1
aggagccaucucagcua

SEQ ID NO: 4016503 - RNA, 20 nt, Human T-lymphotropic virus 1
aggcccuacagccacccugc

SEQ ID NO: 4016504 - RNA, 15 nt, Human T-lymphotropic virus 1
aggcccuccugcccc

SEQ ID NO: 4016505 - RNA, 16 nt, Human T-lymphotropic virus 1
aggcccuccugccccg

SEQ ID NO: 4016506 - RNA, 13 nt, Human T-lymphotropic virus 1
aggcccugucaca

SEQ ID NO: 4016507 - RNA, 13 nt, Human T-lymphotropic virus 1
agguccucucagg

SEQ ID NO: 4016508 - RNA, 18 nt, Human T-lymphotropic virus 1
agguccucucaggccccc

SEQ ID NO: 4016509 - RNA, 22 nt, Human T-lymphotropic virus 1
aguagacuaguccaaacccugc

SEQ ID NO: 4016510 - RNA, 13 nt, Human T-lymphotropic virus 1
aguccuccuccuu

SEQ ID NO: 4016511 - RNA, 20 nt, Human T-lymphotropic virus 1
agucuccucccccugucaua

SEQ ID NO: 4016512 - RNA, 23 nt, Human T-lymphotropic virus 1
aguguuccuaucuuacuccacca

SEQ ID NO: 4016513 - RNA, 13 nt, Human T-lymphotropic virus 1
aguuacuccagcu

SEQ ID NO: 4016514 - RNA, 18 nt, Human T-lymphotropic virus 1
auaacucccucauccugc

SEQ ID NO: 4016515 - RNA, 21 nt, Human T-lymphotropic virus 1
auaccacucuaaacccugcaa

SEQ ID NO: 4016516 - RNA, 15 nt, Human T-lymphotropic virus 1
auacucccccuuccg

SEQ ID NO: 4016517 - RNA, 14 nt, Human T-lymphotropic virus 1
aucaaauccuccuu

SEQ ID NO: 4016518 - RNA, 15 nt, Human T-lymphotropic virus 1
accuagacucagccg

SEQ ID NO: 4016519 - RNA, 19 nt, Human T-lymphotropic virus 1
accucaauauuaaucucca

SEQ ID NO: 4016520 - RNA, 18 nt, Human T-lymphotropic virus 1
accuccuccguucagccu

SEQ ID NO: 4016521 - RNA, 17 nt, Human T-lymphotropic virus 1
accugaacuucaagccc

SEQ ID NO: 4016522 - RNA, 16 nt, Human T-lymphotropic virus 1
accugaggccgccauc

SEQ ID NO: 4016523 - RNA, 16 nt, Human T-lymphotropic virus 1
accuuggccucucaca

SEQ ID NO: 4016524 - RNA, 18 nt, Human T-lymphotropic virus 1
acgccuuuuuccaaaucc

SEQ ID NO: 4016525 - RNA, 17 nt, Human T-lymphotropic virus 1
cccugcaauccugccca

SEQ ID NO: 4016526 - RNA, 16 nt, Human T-lymphotropic virus 1
cccugccccuccuagg

SEQ ID NO: 4016527 - RNA, 18 nt, Human T-lymphotropic virus 1
cccugucauaacucccuc

SEQ ID NO: 4016528 - RNA, 23 nt, Human T-lymphotropic virus 1
cccuugaaaaucgaguccugacu

SEQ ID NO: 4016529 - RNA, 16 nt, Human T-lymphotropic virus 1
ccgaacccagccaacu

SEQ ID NO: 4016530 - RNA, 13 nt, Human T-lymphotropic virus 1
ccgccccuccucu

SEQ ID NO: 4016531 - RNA, 17 nt, Human T-lymphotropic virus 1
ccgccguggccuacucc

SEQ ID NO: 4016532 - RNA, 23 nt, Human T-lymphotropic virus 1
ccggaggacagcucagcaccagc

SEQ ID NO: 4016533 - RNA, 15 nt, Human T-lymphotropic virus 1
ccggcuccauguccc

SEQ ID NO: 4016534 - RNA, 13 nt, Human T-lymphotropic virus 1
ccgucuccagccc

SEQ ID NO: 4016535 - RNA, 16 nt, Human T-lymphotropic virus 1
ccgugccuucuccucu

SEQ ID NO: 4016536 - RNA, 14 nt, Human T-lymphotropic virus 1
ccuaaccacaucug

SEQ ID NO: 4016537 - RNA, 19 nt, Human T-lymphotropic virus 1
ccuaccuaaacaguuccag

SEQ ID NO: 4016538 - RNA, 17 nt, Human T-lymphotropic virus 1
ccuaccuagacucagcc

SEQ ID NO: 4016539 - RNA, 19 nt, Human T-lymphotropic virus 1
ccuacucccuaaccacauc

SEQ ID NO: 4016540 - RNA, 16 nt, Human T-lymphotropic virus 1
ccuaguugauaccaaa

SEQ ID NO: 4016541 - RNA, 17 nt, Human T-lymphotropic virus 1
ccuaucuuacuccacca

SEQ ID NO: 4016542 - RNA, 17 nt, Human T-lymphotropic virus 1
ccuauggacuacucugc

SEQ ID NO: 4016543 - RNA, 15 nt, Human T-lymphotropic virus 1
ccucaagcgagcugc

SEQ ID NO: 4016544 - RNA, 19 nt, Human T-lymphotropic virus 1
ccucacuggcaccaccacu

SEQ ID NO: 4016545 - RNA, 15 nt, Human T-lymphotropic virus 1
ccucauaccacucua

SEQ ID NO: 4016546 - RNA, 19 nt, Human T-lymphotropic virus 1
ccucauuucuacucucaca

SEQ ID NO: 4016547 - RNA, 21 nt, Human T-lymphotropic virus 1
ccuccaaggacuccaccucgc

SEQ ID NO: 4016548 - RNA, 19 nt, Human T-lymphotropic virus 1
ccuccagccuccccugcca

SEQ ID NO: 4016549 - RNA, 16 nt, Human T-lymphotropic virus 1
ccucgacuccccuccu

SEQ ID NO: 4016550 - RNA, 13 nt, Human T-lymphotropic virus 1
ccucuacucuccc

SEQ ID NO: 4016551 - RNA, 14 nt, Human T-lymphotropic virus 1
ccucuacucuccca

SEQ ID NO: 4016552 - RNA, 20 nt, Human T-lymphotropic virus 1
ccucuauaaaauuucccuua

SEQ ID NO: 4016553 - RNA, 18 nt, Human T-lymphotropic virus 1
ccucuggggaggcuccgu

SEQ ID NO: 4016554 - RNA, 13 nt, Human T-lymphotropic virus 1
ccucuuccuuccu

SEQ ID NO: 4016555 - RNA, 16 nt, Human T-lymphotropic virus 1
ccucuucuccucagcc

SEQ ID NO: 4016556 - RNA, 16 nt, Human T-lymphotropic virus 1
ccucuuugcuccaggc

SEQ ID NO: 4016557 - RNA, 19 nt, Human T-lymphotropic virus 1
ccugcaauccugcccagcc

SEQ ID NO: 4016558 - RNA, 17 nt, Human T-lymphotropic virus 1
ccugcagcaaccuccuc

SEQ ID NO: 4016559 - RNA, 19 nt, Human T-lymphotropic virus 1
ccugccaacuacacuagcc

SEQ ID NO: 4016560 - RNA, 14 nt, Human T-lymphotropic virus 1
ccugcccagccagu

SEQ ID NO: 4016561 - RNA, 13 nt, Human T-lymphotropic virus 1
ccugccccccuuu

SEQ ID NO: 4016562 - RNA, 12 nt, Human T-lymphotropic virus 1
ccugcucuuccu

SEQ ID NO: 4016563 - RNA, 14 nt, Human T-lymphotropic virus 1
ccugcuuucuccgg

SEQ ID NO: 4016564 - RNA, 17 nt, Human T-lymphotropic virus 1
ccugcuuucuccgggcg

SEQ ID NO: 4016565 - RNA, 13 nt, Human T-lymphotropic virus 1
ccuggccccuccu

SEQ ID NO: 4016566 - RNA, 13 nt, Human T-lymphotropic virus 1
ccuguacacccuc

SEQ ID NO: 4016567 - RNA, 19 nt, Human T-lymphotropic virus 1
ccugucuuuuccagacccc

SEQ ID NO: 4016568 - RNA, 21 nt, Human T-lymphotropic virus 1
ccuguucgaaaugcagcuggc

SEQ ID NO: 4016569 - RNA, 19 nt, Human T-lymphotropic virus 1
ccuuaacugggaccuuggc

SEQ ID NO: 4016570 - RNA, 24 nt, Human T-lymphotropic virus 1
ccuuaauaccgaacccagccaacu

SEQ ID NO: 4016571 - RNA, 16 nt, Human T-lymphotropic virus 1
ccuuacgccagccccu

SEQ ID NO: 4016572 - RNA, 19 nt, Human T-lymphotropic virus 1
ccuuacgccagccccuuca

SEQ ID NO: 4016573 - RNA, 13 nt, Human T-lymphotropic virus 1
ccuuccuccaggc

SEQ ID NO: 4016574 - RNA, 15 nt, Human T-lymphotropic virus 1
ccuuccuccaggcca

SEQ ID NO: 4016575 - RNA, 16 nt, Human T-lymphotropic virus 1
ccuucggacccuugcc

SEQ ID NO: 4016576 - RNA, 22 nt, Human T-lymphotropic virus 1
ccuucuagucgacgcuccagga

SEQ ID NO: 4016577 - RNA, 14 nt, Human T-lymphotropic virus 1
ccuucucccuucua

SEQ ID NO: 4016578 - RNA, 14 nt, Human T-lymphotropic virus 1
ccuucuccugcagc

SEQ ID NO: 4016579 - RNA, 20 nt, Human T-lymphotropic virus 1
ccuucuucuaccccccuccu

SEQ ID NO: 4016580 - RNA, 14 nt, Human T-lymphotropic virus 1
ccuugaucuccugu

SEQ ID NO: 4016581 - RNA, 17 nt, Human T-lymphotropic virus 1
ccuugaucuccuguucu

SEQ ID NO: 4016582 - RNA, 21 nt, Human T-lymphotropic virus 1
ccuugcccuaggcaccuucca

SEQ ID NO: 4016583 - RNA, 23 nt, Human T-lymphotropic virus 1
ccuugcuauucgccauacuaccc

SEQ ID NO: 4016584 - RNA, 19 nt, Human T-lymphotropic virus 1
ccuuucaggcccuccugcc

SEQ ID NO: 4016585 - RNA, 20 nt, Human T-lymphotropic virus 1
ccuuuuuccaaaucccccua

SEQ ID NO: 4016586 - RNA, 13 nt, Human T-lymphotropic virus 1
cgaaacagcccua

SEQ ID NO: 4016587 - RNA, 18 nt, Human T-lymphotropic virus 1
cgaacccagccaacugcc

SEQ ID NO: 4016588 - RNA, 18 nt, Human T-lymphotropic virus 1
cgaggccuugaucuccug

SEQ ID NO: 4016589 - RNA, 14 nt, Human T-lymphotropic virus 1
cgaucgugccagcc

SEQ ID NO: 4016590 - RNA, 16 nt, Human T-lymphotropic virus 1
cgaucgugccagccua

SEQ ID NO: 4016591 - RNA, 22 nt, Human T-lymphotropic virus 1
cgauggcagcuucaccacuccc

SEQ ID NO: 4016592 - RNA, 17 nt, Human T-lymphotropic virus 1
cgcccuacuggccaccu

SEQ ID NO: 4016593 - RNA, 13 nt, Human T-lymphotropic virus 1
cgccgccuuaccu

SEQ ID NO: 4016594 - RNA, 18 nt, Human T-lymphotropic virus 1
cgccgccuuaccugaggc

SEQ ID NO: 4016595 - RNA, 23 nt, Human T-lymphotropic virus 1
cgccuacaucgucacgcccuacu

SEQ ID NO: 4016596 - RNA, 11 nt, Human T-lymphotropic virus 1
cgccuccagcc

SEQ ID NO: 4016597 - RNA, 12 nt, Human T-lymphotropic virus 1
cgccuccaggcc

SEQ ID NO: 4016598 - RNA, 19 nt, Human T-lymphotropic virus 1
cgccuguggugccuccuga

SEQ ID NO: 4016599 - RNA, 20 nt, Human T-lymphotropic virus 1
cgcucccuuggagccuaccu

SEQ ID NO: 4016600 - RNA, 13 nt, Human T-lymphotropic virus 1
cgcugacagccug

SEQ ID NO: 4016601 - RNA, 21 nt, Human T-lymphotropic virus 1
cgcuuccucuucuccucagcc

SEQ ID NO: 4016602 - RNA, 22 nt, Human T-lymphotropic virus 1
cgcuuccucuucuccucagccc

SEQ ID NO: 4016603 - RNA, 12 nt, Human T-lymphotropic virus 1
cggaaggcccug

SEQ ID NO: 4016604 - RNA, 16 nt, Human T-lymphotropic virus 1
cggaggacagcucagc

SEQ ID NO: 4016605 - RNA, 22 nt, Human T-lymphotropic virus 1
cggcacuagauacgccuggaga

SEQ ID NO: 4016606 - RNA, 12 nt, Human T-lymphotropic virus 1
cggcaggcccug

SEQ ID NO: 4016607 - RNA, 14 nt, Human T-lymphotropic virus 1
cgggaaccacccau

SEQ ID NO: 4016608 - RNA, 23 nt, Human T-lymphotropic virus 1
cgggaaccacccauuuccucccc

SEQ ID NO: 4016609 - RNA, 22 nt, Human T-lymphotropic virus 1
cgggccuuuguccggcgcuccc

SEQ ID NO: 4016610 - RNA, 21 nt, Human T-lymphotropic virus 1
cgucagcuacgacaccucccc

SEQ ID NO: 4016611 - RNA, 12 nt, Human T-lymphotropic virus 1
cgucuccagccc

SEQ ID NO: 4016612 - RNA, 16 nt, Human T-lymphotropic virus 1
cguuaucggcucagcu

SEQ ID NO: 4016613 - RNA, 23 nt, Human T-lymphotropic virus 1
cuaaacccugcaauccugcccag

SEQ ID NO: 4016614 - RNA, 21 nt, Human T-lymphotropic virus 1
cuacacaguuucacccauugc

SEQ ID NO: 4016615 - RNA, 18 nt, Human T-lymphotropic virus 1
cuacaugccccccuaccc

SEQ ID NO: 4016616 - RNA, 21 nt, Human T-lymphotropic virus 1
cuaccagcuuuccccccccau

SEQ ID NO: 4016617 - RNA, 16 nt, Human T-lymphotropic virus 1
cuaccaugccaccuau

SEQ ID NO: 4016618 - RNA, 21 nt, Human T-lymphotropic virus 1
cuaccuaaacaguuccagccc

SEQ ID NO: 4016619 - RNA, 21 nt, Human T-lymphotropic virus 1
cuacucccuaaccacaucugg

SEQ ID NO: 4016620 - RNA, 16 nt, Human T-lymphotropic virus 1
cuacucugccaaacca

SEQ ID NO: 4016621 - RNA, 16 nt, Human T-lymphotropic virus 1
cuagacucagccggcu

SEQ ID NO: 4016622 - RNA, 14 nt, Human T-lymphotropic virus 1
cuaggcaccuucca

SEQ ID NO: 4016623 - RNA, 16 nt, Human T-lymphotropic virus 1
cuaguccaaacccugc

SEQ ID NO: 4016624 - RNA, 13 nt, Human T-lymphotropic virus 1
caccagcucaggc

SEQ ID NO: 4016625 - RNA, 23 nt, Human T-lymphotropic virus 1
caccauggguaaguuucucgcca

SEQ ID NO: 4016626 - RNA, 16 nt, Human T-lymphotropic virus 1
cacccagaccagccac

SEQ ID NO: 4016627 - RNA, 15 nt, Human T-lymphotropic virus 1
caccccggccagcuc

SEQ ID NO: 4016628 - RNA, 24 nt, Human T-lymphotropic virus 1
cacccuccuuccuccaggccaugc

SEQ ID NO: 4016629 - RNA, 18 nt, Human T-lymphotropic virus 1
cacccuugggcagcaccu

SEQ ID NO: 4016630 - RNA, 23 nt, Human T-lymphotropic virus 1
cacccuugggcagcaccucccaa

SEQ ID NO: 4016631 - RNA, 17 nt, Human T-lymphotropic virus 1
cacccuugucgcgcuac

SEQ ID NO: 4016632 - RNA, 17 nt, Human T-lymphotropic virus 1
cacccuuuuccagccug

SEQ ID NO: 4016633 - RNA, 18 nt, Human T-lymphotropic virus 1
caccucccaacccugucu

SEQ ID NO: 4016634 - RNA, 14 nt, Human T-lymphotropic virus 1
caccucgccuucca

SEQ ID NO: 4016635 - RNA, 16 nt, Human T-lymphotropic virus 1
caccuuuucaggagcc

SEQ ID NO: 4016636 - RNA, 19 nt, Human T-lymphotropic virus 1
cacguccuauacucuccca

SEQ ID NO: 4016637 - RNA, 16 nt, Human T-lymphotropic virus 1
cacuccccccgacucc

SEQ ID NO: 4016638 - RNA, 22 nt, Human T-lymphotropic virus 1
cacucuaaccuagaccauaucc

SEQ ID NO: 4016639 - RNA, 19 nt, Human T-lymphotropic virus 1
cacugugguguuccagucc

SEQ ID NO: 4016640 - RNA, 15 nt, Human T-lymphotropic virus 1
cagacaauggcccug

SEQ ID NO: 4016641 - RNA, 22 nt, Human T-lymphotropic virus 1
cagcaaucugcuuuuccuccuc

SEQ ID NO: 4016642 - RNA, 16 nt, Human T-lymphotropic virus 1
cagcaccagcucaggc

SEQ ID NO: 4016643 - RNA, 14 nt, Human T-lymphotropic virus 1
cagcagaucaggcc

SEQ ID NO: 4016644 - RNA, 20 nt, Human T-lymphotropic virus 1
cagcagaucaggcccuacag

SEQ ID NO: 4016645 - RNA, 13 nt, Human T-lymphotropic virus 1
cagccaacugccu

SEQ ID NO: 4016646 - RNA, 14 nt, Human T-lymphotropic virus 1
cagccacccaaaga

SEQ ID NO: 4016647 - RNA, 13 nt, Human T-lymphotropic virus 1
cagccacccugcc

SEQ ID NO: 4016648 - RNA, 15 nt, Human T-lymphotropic virus 1
cagccacccugcccu

SEQ ID NO: 4016649 - RNA, 23 nt, Human T-lymphotropic virus 1
cagccaguuuguucauggacccu

SEQ ID NO: 4016650 - RNA, 18 nt, Human T-lymphotropic virus 1
cagccccuugucuccacu

SEQ ID NO: 4016651 - RNA, 21 nt, Human T-lymphotropic virus 1
cagccuccaaggacuccaccu

SEQ ID NO: 4016652 - RNA, 17 nt, Human T-lymphotropic virus 1
cagcuaccaugccaccu

SEQ ID NO: 4016653 - RNA, 16 nt, Human T-lymphotropic virus 1
cagcucagcaccagcu

SEQ ID NO: 4016654 - RNA, 19 nt, Human T-lymphotropic virus 1
cagcuucaccacucccccc

SEQ ID NO: 4016655 - RNA, 13 nt, Human T-lymphotropic virus 1
caggagccaucuc

SEQ ID NO: 4016656 - RNA, 16 nt, Human T-lymphotropic virus 1
caggagccaucucagc

SEQ ID NO: 4016657 - RNA, 12 nt, Human T-lymphotropic virus 1
caggccauaucg

SEQ ID NO: 4016658 - RNA, 22 nt, Human T-lymphotropic virus 1
cagggcccagaauaaggcucug

SEQ ID NO: 4016659 - RNA, 19 nt, Human T-lymphotropic virus 1
caguccaagcagcaguggc

SEQ ID NO: 4016660 - RNA, 14 nt, Human T-lymphotropic virus 1
caguuccagcccua

SEQ ID NO: 4016661 - RNA, 19 nt, Human T-lymphotropic virus 1
cauaacucccucauccugc

SEQ ID NO: 4016662 - RNA, 19 nt, Human T-lymphotropic virus 1
cauauccucgagcccucua

SEQ ID NO: 4016663 - RNA, 15 nt, Human T-lymphotropic virus 1
cauauccugcagccc

SEQ ID NO: 4016664 - RNA, 20 nt, Human T-lymphotropic virus 1
cauccucggugauuacagcc

SEQ ID NO: 4016665 - RNA, 21 nt, Human T-lymphotropic virus 1
caucguuagcgcuuccagccc

SEQ ID NO: 4016666 - RNA, 18 nt, Human T-lymphotropic virus 1
caugcuuauuaucagccc

SEQ ID NO: 4016667 - RNA, 19 nt, Human T-lymphotropic virus 1
caugcuuauuaucagccca

SEQ ID NO: 4016668 - RNA, 17 nt, Human T-lymphotropic virus 1
cauggacccucgaccug

SEQ ID NO: 4016669 - RNA, 13 nt, Human T-lymphotropic virus 1
cauucccccuucc

SEQ ID NO: 4016670 - RNA, 12 nt, Human T-lymphotropic virus 1
cauucuccuggc

SEQ ID NO: 4016671 - RNA, 22 nt, Human T-lymphotropic virus 1
cauucuccuggcaagccccucc

SEQ ID NO: 4016672 - RNA, 14 nt, Human T-lymphotropic virus 1
cauucuuaaaaccc

SEQ ID NO: 4016673 - RNA, 22 nt, Human T-lymphotropic virus 1
ccaaacccugccccuccuaggg

SEQ ID NO: 4016674 - RNA, 12 nt, Human T-lymphotropic virus 1
ccaacugccaca

SEQ ID NO: 4016675 - RNA, 19 nt, Human T-lymphotropic virus 1
ccaaggauaauagcccguc

SEQ ID NO: 4016676 - RNA, 13 nt, Human T-lymphotropic virus 1
ccaauuccuccac

SEQ ID NO: 4016677 - RNA, 15 nt, Human T-lymphotropic virus 1
ccaauuccuccacca

SEQ ID NO: 4016678 - RNA, 19 nt, Human T-lymphotropic virus 1
ccacaucgccuccagccuc

SEQ ID NO: 4016679 - RNA, 17 nt, Human T-lymphotropic virus 1
ccaccaauuccuccacc

SEQ ID NO: 4016680 - RNA, 16 nt, Human T-lymphotropic virus 1
ccacccauuuccuccc

SEQ ID NO: 4016681 - RNA, 13 nt, Human T-lymphotropic virus 1
ccaccccggccag

SEQ ID NO: 4016682 - RNA, 19 nt, Human T-lymphotropic virus 1
ccacccuccuuccuccagg

SEQ ID NO: 4016683 - RNA, 18 nt, Human T-lymphotropic virus 1
ccaccucgccuuccaacu

SEQ ID NO: 4016684 - RNA, 16 nt, Human T-lymphotropic virus 1
ccacucaacccucacc

SEQ ID NO: 4016685 - RNA, 18 nt, Human T-lymphotropic virus 1
ccacucaacccucaccac

SEQ ID NO: 4016686 - RNA, 18 nt, Human T-lymphotropic virus 1
ccagaacgccuccaggcc

SEQ ID NO: 4016687 - RNA, 23 nt, Human T-lymphotropic virus 1
ccagauugacacccagaccagcc

SEQ ID NO: 4016688 - RNA, 15 nt, Human T-lymphotropic virus 1
ccagcaaaccccugg

SEQ ID NO: 4016689 - RNA, 14 nt, Human T-lymphotropic virus 1
ccagccugccaacu

SEQ ID NO: 4016690 - RNA, 15 nt, Human T-lymphotropic virus 1
ccagcuaccaugcca

SEQ ID NO: 4016691 - RNA, 22 nt, Human T-lymphotropic virus 1
ccagcucggggccuuccucacc

SEQ ID NO: 4016692 - RNA, 19 nt, Human T-lymphotropic virus 1
ccagcuuuccccccccauc

SEQ ID NO: 4016693 - RNA, 20 nt, Human T-lymphotropic virus 1
ccaggcucaacgcucucaca

SEQ ID NO: 4016694 - RNA, 13 nt, Human T-lymphotropic virus 1
ccauagaucucuc

SEQ ID NO: 4016695 - RNA, 22 nt, Human T-lymphotropic virus 1
ccaugcuuauuaucagcccacu

SEQ ID NO: 4016696 - RNA, 16 nt, Human T-lymphotropic virus 1
ccaugucccucgccuc

SEQ ID NO: 4016697 - RNA, 23 nt, Human T-lymphotropic virus 1
ccaugugauuuuuugccaccccg

SEQ ID NO: 4016698 - RNA, 21 nt, Human T-lymphotropic virus 1
ccauuacucucuuauaaaccc

SEQ ID NO: 4016699 - RNA, 15 nt, Human T-lymphotropic virus 1
ccauuuccuccccau

SEQ ID NO: 4016700 - RNA, 13 nt, Human T-lymphotropic virus 1
cccaacuccugca

SEQ ID NO: 4016701 - RNA, 21 nt, Human T-lymphotropic virus 1
cccacccuugggcagcaccuc

SEQ ID NO: 4016702 - RNA, 20 nt, Human T-lymphotropic virus 1
cccacugcuuugacccccag

SEQ ID NO: 4016703 - RNA, 18 nt, Human T-lymphotropic virus 1
cccagaauaaggcucuga

SEQ ID NO: 4016704 - RNA, 21 nt, Human T-lymphotropic virus 1
cccagccaacugccucccacc

SEQ ID NO: 4016705 - RNA, 12 nt, Human T-lymphotropic virus 1
cccauauccugc

SEQ ID NO: 4016706 - RNA, 17 nt, Human T-lymphotropic virus 1
cccaucaccuggccccu

SEQ ID NO: 4016707 - RNA, 23 nt, Human T-lymphotropic virus 1
cccaucaccuggccccuccugcc

SEQ ID NO: 4016708 - RNA, 15 nt, Human T-lymphotropic virus 1
ccccaacauuccacc

SEQ ID NO: 4016709 - RNA, 23 nt, Human T-lymphotropic virus 1
ccccaguguuccuaucuuacucc

SEQ ID NO: 4016710 - RNA, 22 nt, Human T-lymphotropic virus 1
ccccauguuugucaagccgucc

SEQ ID NO: 4016711 - RNA, 18 nt, Human T-lymphotropic virus 1
cccccgaaaucagccagu

SEQ ID NO: 4016712 - RNA, 23 nt, Human T-lymphotropic virus 1
ccccuacaauccaaccagcuccg

SEQ ID NO: 4016713 - RNA, 19 nt, Human T-lymphotropic virus 1
ccccuacuggaaauuucag

SEQ ID NO: 4016714 - RNA, 12 nt, Human T-lymphotropic virus 1
cccgacuccagc

SEQ ID NO: 4016715 - RNA, 13 nt, Human T-lymphotropic virus 1
cccgcuuccugcg

SEQ ID NO: 4016716 - RNA, 16 nt, Human T-lymphotropic virus 1
cccguaauuaaagccc

SEQ ID NO: 4016717 - RNA, 14 nt, Human T-lymphotropic virus 1
cccguggaggcucc

SEQ ID NO: 4016718 - RNA, 15 nt, Human T-lymphotropic virus 1
cccguggaggcuccu

SEQ ID NO: 4016719 - RNA, 17 nt, Human T-lymphotropic virus 1
cccuaauaauucuaccc

SEQ ID NO: 4016720 - RNA, 18 nt, Human T-lymphotropic virus 1
cccuaaucucccaugggu

SEQ ID NO: 4016721 - RNA, 16 nt, Human T-lymphotropic virus 1
cccuacuggccaccug

SEQ ID NO: 4016722 - RNA, 17 nt, Human T-lymphotropic virus 1
cccuccuuccuccaggc

SEQ ID NO: 4016723 - RNA, 16 nt, Human T-lymphotropic virus 1
cccucgaccugcuggc

SEQ ID NO: 4016724 - RNA, 14 nt, Human T-lymphotropic virus 1
cccucgacuccccu

SEQ ID NO: 4016725 - RNA, 22 nt, Human T-lymphotropic virus 1
cccugacuuguccagccugcca

SEQ ID NO: 4016726 - RNA, 15 nt, Human T-lymphotropic virus 1
aaacaguuccagccc

SEQ ID NO: 4016727 - RNA, 15 nt, Human T-lymphotropic virus 1
aaagauggccagcca

SEQ ID NO: 4016728 - RNA, 14 nt, Human T-lymphotropic virus 1
aaauugcacaguau

SEQ ID NO: 4016729 - RNA, 22 nt, Human T-lymphotropic virus 1
aacacuuuucuuaaaacaacug

SEQ ID NO: 4016730 - RNA, 17 nt, Human T-lymphotropic virus 1
aacaucagaugccucaa

SEQ ID NO: 4016731 - RNA, 14 nt, Human T-lymphotropic virus 1
aacaucuugccuag

SEQ ID NO: 4016732 - RNA, 22 nt, Human T-lymphotropic virus 1
aaccaauucauucaaacaucug

SEQ ID NO: 4016733 - RNA, 19 nt, Human T-lymphotropic virus 1
aaccacaacugaggccucc

SEQ ID NO: 4016734 - RNA, 22 nt, Human T-lymphotropic virus 1
aaccacaucgccuccagccucc

SEQ ID NO: 4016735 - RNA, 23 nt, Human T-lymphotropic virus 1
aacgcucuaauggcauucuuaaa

SEQ ID NO: 4016736 - RNA, 19 nt, Human T-lymphotropic virus 1
aagcgcuaguucugcccag

SEQ ID NO: 4016737 - RNA, 16 nt, Human T-lymphotropic virus 1
aagucagcggccuucu

SEQ ID NO: 4016738 - RNA, 19 nt, Human T-lymphotropic virus 1
aagucagcggccuucuccu

SEQ ID NO: 4016739 - RNA, 18 nt, Human T-lymphotropic virus 1
aauagaaaaacuccucua

SEQ ID NO: 4016740 - RNA, 16 nt, Human T-lymphotropic virus 1
aaucauggaccugccc

SEQ ID NO: 4016741 - RNA, 19 nt, Human T-lymphotropic virus 1
aauccuccuucuccugcag

SEQ ID NO: 4016742 - RNA, 20 nt, Human T-lymphotropic virus 1
aaucugcuuuuccuccucuu

SEQ ID NO: 4016743 - RNA, 12 nt, Human T-lymphotropic virus 1
aaugccaaggcg

SEQ ID NO: 4016744 - RNA, 13 nt, Human T-lymphotropic virus 1
acaaaacccagca

SEQ ID NO: 4016745 - RNA, 14 nt, Human T-lymphotropic virus 1
acaaccccucaccu

SEQ ID NO: 4016746 - RNA, 19 nt, Human T-lymphotropic virus 1
acaaccccucaccucaaaa

SEQ ID NO: 4016747 - RNA, 22 nt, Human T-lymphotropic virus 1
acaagcucagaagcuauuuccu

SEQ ID NO: 4016748 - RNA, 13 nt, Human T-lymphotropic virus 1
acaaucaaccacc

SEQ ID NO: 4016749 - RNA, 16 nt, Human T-lymphotropic virus 1
acaauccaaccagcuc

SEQ ID NO: 4016750 - RNA, 20 nt, Human T-lymphotropic virus 1
acacauucccucagcaauaa

SEQ ID NO: 4016751 - RNA, 23 nt, Human T-lymphotropic virus 1
acaccuuuucaggagccaucuca

SEQ ID NO: 4016752 - RNA, 15 nt, Human T-lymphotropic virus 1
acacuagccagugcc

SEQ ID NO: 4016753 - RNA, 11 nt, Human T-lymphotropic virus 1
acagcucagca

SEQ ID NO: 4016754 - RNA, 15 nt, Human T-lymphotropic virus 1
acaguuuccuccucc

SEQ ID NO: 4016755 - RNA, 17 nt, Human T-lymphotropic virus 1
acaucauaacaucucca

SEQ ID NO: 4016756 - RNA, 21 nt, Human T-lymphotropic virus 1
acaucgccuccagccuccccu

SEQ ID NO: 4016757 - RNA, 18 nt, Human T-lymphotropic virus 1
acauggaugacauucucc

SEQ ID NO: 4016758 - RNA, 17 nt, Human T-lymphotropic virus 1
acauuccacccuccuuc

SEQ ID NO: 4016759 - RNA, 19 nt, Human T-lymphotropic virus 1
accacaaaaaucugcucaa

SEQ ID NO: 4016760 - RNA, 16 nt, Human T-lymphotropic virus 1
accacccauuuccucc

SEQ ID NO: 4016761 - RNA, 13 nt, Human T-lymphotropic virus 1
accacccuuuucc

SEQ ID NO: 4016762 - RNA, 23 nt, Human T-lymphotropic virus 1
accacuccccccgacuccagccg

SEQ ID NO: 4016763 - RNA, 16 nt, Human T-lymphotropic virus 1
accacucuaaacccug

SEQ ID NO: 4016764 - RNA, 17 nt, Human T-lymphotropic virus 1
accaugcauccuccguc

SEQ ID NO: 4016765 - RNA, 16 nt, Human T-lymphotropic virus 1
accccuguccugcagc

SEQ ID NO: 4016766 - RNA, 16 nt, Human T-lymphotropic virus 1
acccucgaccugcugg

SEQ ID NO: 4016767 - RNA, 18 nt, Human T-lymphotropic virus 1
acccucgaccugcuggcc

SEQ ID NO: 4016768 - RNA, 17 nt, Human T-lymphotropic virus 1
acccugcaauccugccc

SEQ ID NO: 4016769 - RNA, 18 nt, Human T-lymphotropic virus 1
acccugcaauccugccca

SEQ ID NO: 4016770 - RNA, 13 nt, Human T-lymphotropic virus 1
acccugccccucc

SEQ ID NO: 4016771 - RNA, 20 nt, Human T-lymphotropic virus 1
acccuguucgaaaugcagcu

SEQ ID NO: 4016772 - RNA, 16 nt, Human T-lymphotropic virus 1
acccuugcccuaggca

SEQ ID NO: 4016773 - RNA, 14 nt, Human T-lymphotropic virus 1
acccuuguuccuua

SEQ ID NO: 4016774 - RNA, 23 nt, Human T-lymphotropic virus 1
acccuuguuccuuaaaaugccca

SEQ ID NO: 4016775 - RNA, 16 nt, Human T-lymphotropic virus 1
cucaacccucaccacu

SEQ ID NO: 4016776 - RNA, 21 nt, Human T-lymphotropic virus 1
cucaccucccuuccugugcua

SEQ ID NO: 4016777 - RNA, 23 nt, Human T-lymphotropic virus 1
cucacggcgcuccugcucuuccu

SEQ ID NO: 4016778 - RNA, 23 nt, Human T-lymphotropic virus 1
cucagcaaucugcuuuuccuccu

SEQ ID NO: 4016779 - RNA, 21 nt, Human T-lymphotropic virus 1
cucaggcccccuuucaggccc

SEQ ID NO: 4016780 - RNA, 16 nt, Human T-lymphotropic virus 1
cucaggcuaggcccug

SEQ ID NO: 4016781 - RNA, 19 nt, Human T-lymphotropic virus 1
cucagugaaaaacauuucc

SEQ ID NO: 4016782 - RNA, 22 nt, Human T-lymphotropic virus 1
cucauacaguacucuuccuuuc

SEQ ID NO: 4016783 - RNA, 14 nt, Human T-lymphotropic virus 1
cuccacgcuuugcc

SEQ ID NO: 4016784 - RNA, 16 nt, Human T-lymphotropic virus 1
cuccagccuccccugc

SEQ ID NO: 4016785 - RNA, 19 nt, Human T-lymphotropic virus 1
cuccagccuccccugccaa

SEQ ID NO: 4016786 - RNA, 23 nt, Human T-lymphotropic virus 1
cuccaggccaugcgcaaauacuc

SEQ ID NO: 4016787 - RNA, 20 nt, Human T-lymphotropic virus 1
cucccaucaaauccuccuuc

SEQ ID NO: 4016788 - RNA, 21 nt, Human T-lymphotropic virus 1
cucccccugucauaacucccu

SEQ ID NO: 4016789 - RNA, 11 nt, Human T-lymphotropic virus 1
cucccccuucc

SEQ ID NO: 4016790 - RNA, 19 nt, Human T-lymphotropic virus 1
cucccuuggagccuaccua

SEQ ID NO: 4016791 - RNA, 14 nt, Human T-lymphotropic virus 1
cuccgcccuggcca

SEQ ID NO: 4016792 - RNA, 16 nt, Human T-lymphotropic virus 1
cuccgggaagccaccg

SEQ ID NO: 4016793 - RNA, 17 nt, Human T-lymphotropic virus 1
cuccgggaagccaccgg

SEQ ID NO: 4016794 - RNA, 22 nt, Human T-lymphotropic virus 1
cuccgucagcuacgacaccucc

SEQ ID NO: 4016795 - RNA, 14 nt, Human T-lymphotropic virus 1
cuccguucagccuc

SEQ ID NO: 4016796 - RNA, 15 nt, Human T-lymphotropic virus 1
cuccguugucugcau

SEQ ID NO: 4016797 - RNA, 13 nt, Human T-lymphotropic virus 1
cuccucuuccuuc

SEQ ID NO: 4016798 - RNA, 20 nt, Human T-lymphotropic virus 1
cuccucuuccuuccuuuuca

SEQ ID NO: 4016799 - RNA, 22 nt, Human T-lymphotropic virus 1
cuccugcauuuuuucuuuccua

SEQ ID NO: 4016800 - RNA, 18 nt, Human T-lymphotropic virus 1
cuccuggcaagccccucc

SEQ ID NO: 4016801 - RNA, 18 nt, Human T-lymphotropic virus 1
cuccugugaaagcccuua

SEQ ID NO: 4016802 - RNA, 15 nt, Human T-lymphotropic virus 1
cuccuucuccugcag

SEQ ID NO: 4016803 - RNA, 16 nt, Human T-lymphotropic virus 1
cuccuucuccugcagc

SEQ ID NO: 4016804 - RNA, 22 nt, Human T-lymphotropic virus 1
cuccuuguccuuuaacucuucc

SEQ ID NO: 4016805 - RNA, 12 nt, Human T-lymphotropic virus 1
cucgagaagccu

SEQ ID NO: 4016806 - RNA, 20 nt, Human T-lymphotropic virus 1
cucgccucaggaaagagccu

SEQ ID NO: 4016807 - RNA, 17 nt, Human T-lymphotropic virus 1
cucuacucucccacucu

SEQ ID NO: 4016808 - RNA, 17 nt, Human T-lymphotropic virus 1
cucucaggcccccuuuc

SEQ ID NO: 4016809 - RNA, 18 nt, Human T-lymphotropic virus 1
cucucaggcccccuuuca

SEQ ID NO: 4016810 - RNA, 15 nt, Human T-lymphotropic virus 1
cucucuuauaaaccc

SEQ ID NO: 4016811 - RNA, 17 nt, Human T-lymphotropic virus 1
cucugccaaaccauaca

SEQ ID NO: 4016812 - RNA, 22 nt, Human T-lymphotropic virus 1
cucuguuccauccccuucuucu

SEQ ID NO: 4016813 - RNA, 12 nt, Human T-lymphotropic virus 1
cucuuccuccaa

SEQ ID NO: 4016814 - RNA, 14 nt, Human T-lymphotropic virus 1
cucuuccugcuuuc

SEQ ID NO: 4016815 - RNA, 12 nt, Human T-lymphotropic virus 1
cucuuccuuccu

SEQ ID NO: 4016816 - RNA, 13 nt, Human T-lymphotropic virus 1
cucuucuccucag

SEQ ID NO: 4016817 - RNA, 15 nt, Human T-lymphotropic virus 1
cucuugccacgccug

SEQ ID NO: 4016818 - RNA, 16 nt, Human T-lymphotropic virus 1
cucuuugcuccaggcc

SEQ ID NO: 4016819 - RNA, 16 nt, Human T-lymphotropic virus 1
cugaacuucaagcccu

SEQ ID NO: 4016820 - RNA, 20 nt, Human T-lymphotropic virus 1
cugacaaacccgaccuaccu

SEQ ID NO: 4016821 - RNA, 21 nt, Human T-lymphotropic virus 1
cugacaaacccgaccuaccua

SEQ ID NO: 4016822 - RNA, 15 nt, Human T-lymphotropic virus 1
cugacgucucccccc

SEQ ID NO: 4016823 - RNA, 20 nt, Human T-lymphotropic virus 1
cugacuuguccagccugcca

SEQ ID NO: 4016824 - RNA, 18 nt, Human T-lymphotropic virus 1
cugaucccaucuccaggc

SEQ ID NO: 4016825 - RNA, 18 nt, Human T-lymphotropic virus 1
cugauccccgagaccaaa

SEQ ID NO: 4016826 - RNA, 21 nt, Human T-lymphotropic virus 1
cugcaacuacucucagaggcc

SEQ ID NO: 4016827 - RNA, 16 nt, Human T-lymphotropic virus 1
cugcaauccugcccag

SEQ ID NO: 4016828 - RNA, 19 nt, Human T-lymphotropic virus 1
cugcagcccauucggcaag

SEQ ID NO: 4016829 - RNA, 16 nt, Human T-lymphotropic virus 1
cugcagcucucuccug

SEQ ID NO: 4016830 - RNA, 15 nt, Human T-lymphotropic virus 1
cugcaugcccaagac

SEQ ID NO: 4016831 - RNA, 22 nt, Human T-lymphotropic virus 1
cugccaauaauuaaccucuccc

SEQ ID NO: 4016832 - RNA, 13 nt, Human T-lymphotropic virus 1
cugccccuccuag

SEQ ID NO: 4016833 - RNA, 20 nt, Human T-lymphotropic virus 1
cugcccuaaagauggccagc

SEQ ID NO: 4016834 - RNA, 15 nt, Human T-lymphotropic virus 1
cugccuauauuuccc

SEQ ID NO: 4016835 - RNA, 16 nt, Human T-lymphotropic virus 1
cugccuauauuuccca

SEQ ID NO: 4016836 - RNA, 23 nt, Human T-lymphotropic virus 1
cugccucccaccgccccuccucu

SEQ ID NO: 4016837 - RNA, 13 nt, Human T-lymphotropic virus 1
cugcuagggcacc

SEQ ID NO: 4016838 - RNA, 13 nt, Human T-lymphotropic virus 1
cugcuggcccuuu

SEQ ID NO: 4016839 - RNA, 15 nt, Human T-lymphotropic virus 1
cugcuggcccuuuca

SEQ ID NO: 4016840 - RNA, 16 nt, Human T-lymphotropic virus 1
cuggccaccuguccag

SEQ ID NO: 4016841 - RNA, 14 nt, Human T-lymphotropic virus 1
cuggccccuccugc

SEQ ID NO: 4016842 - RNA, 16 nt, Human T-lymphotropic virus 1
cuggccccuccugccc

SEQ ID NO: 4016843 - RNA, 16 nt, Human T-lymphotropic virus 1
cuuaaaacaacugccc

SEQ ID NO: 4016844 - RNA, 19 nt, Human T-lymphotropic virus 1
cuuacuccaccacagucac

SEQ ID NO: 4016845 - RNA, 14 nt, Human T-lymphotropic virus 1
cuuauaaacccuga

SEQ ID NO: 4016846 - RNA, 15 nt, Human T-lymphotropic virus 1
cuuaugccaguguuu

SEQ ID NO: 4016847 - RNA, 22 nt, Human T-lymphotropic virus 1
cuucauguauggguagacaccu

SEQ ID NO: 4016848 - RNA, 19 nt, Human T-lymphotropic virus 1
cuuccagccccccaccuga

SEQ ID NO: 4016849 - RNA, 18 nt, Human T-lymphotropic virus 1
cuuccaguucugcccccu

SEQ ID NO: 4016850 - RNA, 18 nt, Human T-lymphotropic virus 1
cuucuccugcagcaaccu

SEQ ID NO: 4016851 - RNA, 19 nt, Human T-lymphotropic virus 1
cuucuuuucggauacccag

SEQ ID NO: 4016852 - RNA, 19 nt, Human T-lymphotropic virus 1
cuuggagccuaccuagacu

SEQ ID NO: 4016853 - RNA, 16 nt, Human T-lymphotropic virus 1
cuugggcagcaccucc

SEQ ID NO: 4016854 - RNA, 19 nt, Human T-lymphotropic virus 1
cuuguccagccugccaacu

SEQ ID NO: 4016855 - RNA, 22 nt, Human T-lymphotropic virus 1
cuugucuccgcccuggccaugg

SEQ ID NO: 4016856 - RNA, 15 nt, Human T-lymphotropic virus 1
cuuuggaacacuuuu

SEQ ID NO: 4016857 - RNA, 13 nt, Human T-lymphotropic virus 1
cuuuuccagccug

SEQ ID NO: 4016858 - RNA, 16 nt, Human T-lymphotropic virus 1
cuuuuccuugucaccu

SEQ ID NO: 4016859 - RNA, 19 nt, Human T-lymphotropic virus 1
gaaaggaccacaggaggcu

SEQ ID NO: 4016860 - RNA, 21 nt, Human T-lymphotropic virus 1
gaaauaacccaguauucccag

SEQ ID NO: 4016861 - RNA, 16 nt, Human T-lymphotropic virus 1
gaacccacccuugggc

SEQ ID NO: 4016862 - RNA, 14 nt, Human T-lymphotropic virus 1
gacacccagaccag

SEQ ID NO: 4016863 - RNA, 15 nt, Human T-lymphotropic virus 1
gacaccuccccucgc

SEQ ID NO: 4016864 - RNA, 19 nt, Human T-lymphotropic virus 1
gaccaccaacaccaugggu

SEQ ID NO: 4016865 - RNA, 22 nt, Human T-lymphotropic virus 1
gacccaacaucuauucugccag

SEQ ID NO: 4016866 - RNA, 11 nt, Human T-lymphotropic virus 1
gacccccccuu

SEQ ID NO: 4016867 - RNA, 19 nt, Human T-lymphotropic virus 1
gacccugcuugcucaacuc

SEQ ID NO: 4016868 - RNA, 14 nt, Human T-lymphotropic virus 1
gacccuugcccuag

SEQ ID NO: 4016869 - RNA, 18 nt, Human T-lymphotropic virus 1
gaccuccgggaagccacc

SEQ ID NO: 4016870 - RNA, 17 nt, Human T-lymphotropic virus 1
gacuccaccucgccuuc

SEQ ID NO: 4016871 - RNA, 15 nt, Human T-lymphotropic virus 1
gacuuguccagccug

SEQ ID NO: 4016872 - RNA, 13 nt, Human T-lymphotropic virus 1
gagagaccccccc

SEQ ID NO: 4016873 - RNA, 19 nt, Human T-lymphotropic virus 1
gagagacccccccuugaaa

SEQ ID NO: 4016874 - RNA, 14 nt, Human T-lymphotropic virus 1
gagauucagugggu

SEQ ID NO: 4016875 - RNA, 14 nt, Human T-lymphotropic virus 1
gagcugcaugccca

SEQ ID NO: 4016876 - RNA, 19 nt, Human T-lymphotropic virus 1
gaggacagcucagcaccag

SEQ ID NO: 4016877 - RNA, 18 nt, Human T-lymphotropic virus 1
gaggcuauuauucagccu

SEQ ID NO: 4016878 - RNA, 20 nt, Human T-lymphotropic virus 1
gauacauggaacccacccuu

SEQ ID NO: 4016879 - RNA, 14 nt, Human T-lymphotropic virus 1
gaucaccugggacc

SEQ ID NO: 4016880 - RNA, 22 nt, Human T-lymphotropic virus 1
gaucaggcccuacagccacccu

SEQ ID NO: 4016881 - RNA, 14 nt, Human T-lymphotropic virus 1
gauccaccucccag

SEQ ID NO: 4016882 - RNA, 19 nt, Human T-lymphotropic virus 1
gaucccguggaggcuccuc

SEQ ID NO: 4016883 - RNA, 23 nt, Human T-lymphotropic virus 1
gauucaaaaauuuaggugcccag

SEQ ID NO: 4016884 - RNA, 14 nt, Human T-lymphotropic virus 1
gcaaauacuccccc

SEQ ID NO: 4016885 - RNA, 18 nt, Human T-lymphotropic virus 1
gcaaccacaucgccucca

SEQ ID NO: 4016886 - RNA, 22 nt, Human T-lymphotropic virus 1
gcaauagucaaaaaccacaaaa

SEQ ID NO: 4016887 - RNA, 18 nt, Human T-lymphotropic virus 1
gcacaguaugcugcccag

SEQ ID NO: 4016888 - RNA, 13 nt, Human T-lymphotropic virus 1
gcaccaccacugu

SEQ ID NO: 4016889 - RNA, 22 nt, Human T-lymphotropic virus 1
gcacuaugcuguuucgccuucu

SEQ ID NO: 4016890 - RNA, 18 nt, Human T-lymphotropic virus 1
gcagccuauauucucugg

SEQ ID NO: 4016891 - RNA, 13 nt, Human T-lymphotropic virus 1
gcaguccccaagg

SEQ ID NO: 4016892 - RNA, 14 nt, Human T-lymphotropic virus 1
gcaucagaucaccu

SEQ ID NO: 4016893 - RNA, 13 nt, Human T-lymphotropic virus 1
gcaugcccaagac

SEQ ID NO: 4016894 - RNA, 14 nt, Human T-lymphotropic virus 1
gcauucuuaaaacc

SEQ ID NO: 4016895 - RNA, 19 nt, Human T-lymphotropic virus 1
gccaguucccuuuaaacca

SEQ ID NO: 4016896 - RNA, 20 nt, Human T-lymphotropic virus 1
gcccaccacccuuuuccagc

SEQ ID NO: 4016897 - RNA, 14 nt, Human T-lymphotropic virus 1
gccccagcugcugu

SEQ ID NO: 4016898 - RNA, 19 nt, Human T-lymphotropic virus 1
gcccuacagccacccugcc

SEQ ID NO: 4016899 - RNA, 14 nt, Human T-lymphotropic virus 1
gcccuacuggccac

SEQ ID NO: 4016900 - RNA, 19 nt, Human T-lymphotropic virus 1
gcccuacuuugcuuucacu

SEQ ID NO: 4016901 - RNA, 23 nt, Human T-lymphotropic virus 1
gcccugccuauauuucccaagac

SEQ ID NO: 4016902 - RNA, 16 nt, Human T-lymphotropic virus 1
gccgucuccagccccu

SEQ ID NO: 4016903 - RNA, 22 nt, Human T-lymphotropic virus 1
gccgucuccagccccuacugga

SEQ ID NO: 4016904 - RNA, 23 nt, Human T-lymphotropic virus 1
gccguggccuacucccuaaccac

SEQ ID NO: 4016905 - RNA, 17 nt, Human T-lymphotropic virus 1
gccuaucuaggcaagcc

SEQ ID NO: 4016906 - RNA, 18 nt, Human T-lymphotropic virus 1
gccuaugauuuccgggcc

SEQ ID NO: 4016907 - RNA, 20 nt, Human T-lymphotropic virus 1
gccuaugauuuccgggcccu

SEQ ID NO: 4016908 - RNA, 19 nt, Human T-lymphotropic virus 1
gccucaggaaagagccucc

SEQ ID NO: 4016909 - RNA, 21 nt, Human T-lymphotropic virus 1
gccucccaccgccccuccucu

SEQ ID NO: 4016910 - RNA, 15 nt, Human T-lymphotropic virus 1
gccuucucagccccu

SEQ ID NO: 4016911 - RNA, 18 nt, Human T-lymphotropic virus 1
gccuucuccucuuccuuc

SEQ ID NO: 4016912 - RNA, 16 nt, Human T-lymphotropic virus 1
gcgccgugccuucucc

SEQ ID NO: 4016913 - RNA, 16 nt, Human T-lymphotropic virus 1
gcgcuaguucugccca

SEQ ID NO: 4016914 - RNA, 13 nt, Human T-lymphotropic virus 1
gcgcuccugcucu

SEQ ID NO: 4016915 - RNA, 13 nt, Human T-lymphotropic virus 1
gcgcuuccagccc

SEQ ID NO: 4016916 - RNA, 13 nt, Human T-lymphotropic virus 1
gcuagaacaccuc

SEQ ID NO: 4016917 - RNA, 18 nt, Human T-lymphotropic virus 1
gcucagaagcuauuuccu

SEQ ID NO: 4016918 - RNA, 18 nt, Human T-lymphotropic virus 1
gcucagcaccagcucagg

SEQ ID NO: 4016919 - RNA, 19 nt, Human T-lymphotropic virus 1
gcucaggcuaggcccugac

SEQ ID NO: 4016920 - RNA, 18 nt, Human T-lymphotropic virus 1
gcuccugcucuuccugcu

SEQ ID NO: 4016921 - RNA, 14 nt, Human T-lymphotropic virus 1
gcucucacagaugc

SEQ ID NO: 4016922 - RNA, 19 nt, Human T-lymphotropic virus 1
gcucucacagaugcccuac

SEQ ID NO: 4016923 - RNA, 17 nt, Human T-lymphotropic virus 1
gcucuucaagaagcugc

SEQ ID NO: 4016924 - RNA, 13 nt, Human T-lymphotropic virus 1
gcugcccagaaca

SEQ ID NO: 4016925 - RNA, 14 nt, Human T-lymphotropic virus 1
gcuucaccacuccc

SEQ ID NO: 4016926 - RNA, 16 nt, Human T-lymphotropic virus 1
gcuuccucuucuccuc

SEQ ID NO: 4016927 - RNA, 19 nt, Human T-lymphotropic virus 1
gcuuccucuucuccucagc

SEQ ID NO: 4016928 - RNA, 23 nt, Human T-lymphotropic virus 1
gcuuccucuucuccucagcccgu

SEQ ID NO: 4016929 - RNA, 14 nt, Human T-lymphotropic virus 1
gcuugcucaacucu

SEQ ID NO: 4016930 - RNA, 14 nt, Human T-lymphotropic virus 1
ggaaauaacccagu

SEQ ID NO: 4016931 - RNA, 23 nt, Human T-lymphotropic virus 1
ggacuccaccucgccuuccaacu

SEQ ID NO: 4016932 - RNA, 22 nt, Human T-lymphotropic virus 1
ggagccuaccuagacucagccg

SEQ ID NO: 4016933 - RNA, 21 nt, Human T-lymphotropic virus 1
ggaggcuauuauucagccucu

SEQ ID NO: 4016934 - RNA, 14 nt, Human T-lymphotropic virus 1
ggauccaccuccca

SEQ ID NO: 4016935 - RNA, 15 nt, Human T-lymphotropic virus 1
ggauccaccucccag

SEQ ID NO: 4016936 - RNA, 23 nt, Human T-lymphotropic virus 1
ggcacgccuaugauuuccgggcc

SEQ ID NO: 4016937 - RNA, 15 nt, Human T-lymphotropic virus 1
ggcagguccucucag

SEQ ID NO: 4016938 - RNA, 21 nt, Human T-lymphotropic virus 1
ggcccagaauaaggcucugac

SEQ ID NO: 4016939 - RNA, 15 nt, Human T-lymphotropic virus 1
ggccccuccugcccc

SEQ ID NO: 4016940 - RNA, 16 nt, Human T-lymphotropic virus 1
ggccccuccugcccca

SEQ ID NO: 4016941 - RNA, 22 nt, Human T-lymphotropic virus 1
ggccuacucccuaaccacaucu

SEQ ID NO: 4016942 - RNA, 18 nt, Human T-lymphotropic virus 1
ggcgcucccuuggagccu

SEQ ID NO: 4016943 - RNA, 15 nt, Human T-lymphotropic virus 1
ggcgcuuuccccccu

SEQ ID NO: 4016944 - RNA, 16 nt, Human T-lymphotropic virus 1
ggcucugacgucuccc

SEQ ID NO: 4016945 - RNA, 22 nt, Human T-lymphotropic virus 1
gggccuuaacugggaccuuggc

SEQ ID NO: 4016946 - RNA, 16 nt, Human T-lymphotropic virus 1
gguccggaaggcccug

SEQ ID NO: 4016947 - RNA, 22 nt, Human T-lymphotropic virus 1
ggugccaaucauggaccugccc

SEQ ID NO: 4016948 - RNA, 23 nt, Human T-lymphotropic virus 1
ggugccaaucauggaccugcccc

SEQ ID NO: 4016949 - RNA, 23 nt, Human T-lymphotropic virus 1
guaagcgcuaguucugcccagug

SEQ ID NO: 4016950 - RNA, 19 nt, Human T-lymphotropic virus 1
guacuacaguccuccuccu

SEQ ID NO: 4016951 - RNA, 20 nt, Human T-lymphotropic virus 1
guccaccaauuccuccacca

SEQ ID NO: 4016952 - RNA, 12 nt, Human T-lymphotropic virus 1
guccugcagcuc

SEQ ID NO: 4016953 - RNA, 20 nt, Human T-lymphotropic virus 1
guccugcagcucucuccugc

SEQ ID NO: 4016954 - RNA, 16 nt, Human T-lymphotropic virus 1
gucuauuugcaccacg

SEQ ID NO: 4016955 - RNA, 22 nt, Human T-lymphotropic virus 1
gucuccaaaggaacuccuaccu

SEQ ID NO: 4016956 - RNA, 15 nt, Human T-lymphotropic virus 1
gucuccagccccuac

SEQ ID NO: 4016957 - RNA, 17 nt, Human T-lymphotropic virus 1
gugaaaaacauuuccgu

SEQ ID NO: 4016958 - RNA, 20 nt, Human T-lymphotropic virus 1
gugcagcugcggcaggcccu

SEQ ID NO: 4016959 - RNA, 19 nt, Human T-lymphotropic virus 1
gugccagccuauccacuug

SEQ ID NO: 4016960 - RNA, 19 nt, Human T-lymphotropic virus 1
guucauggacccucgaccu

SEQ ID NO: 4016961 - RNA, 20 nt, Human T-lymphotropic virus 1
guuccuaucuuacuccacca

SEQ ID NO: 4016962 - RNA, 23 nt, Human T-lymphotropic virus 1
guuccuaucuuacuccaccacag

SEQ ID NO: 4016963 - RNA, 18 nt, Human T-lymphotropic virus 1
guuccuuaaaaugcccau

SEQ ID NO: 4016964 - RNA, 23 nt, Human T-lymphotropic virus 1
guuuucagacggauccaccuccc

SEQ ID NO: 4016965 - RNA, 22 nt, Human T-lymphotropic virus 1
uaaaagcguggggacaguucag

SEQ ID NO: 4016966 - RNA, 15 nt, Human T-lymphotropic virus 1
uaacaucuccaccca

SEQ ID NO: 4016967 - RNA, 16 nt, Human T-lymphotropic virus 1
uaacaucuccacccaa

SEQ ID NO: 4016968 - RNA, 13 nt, Human T-lymphotropic virus 1
uacacaguuucac

SEQ ID NO: 4016969 - RNA, 20 nt, Human T-lymphotropic virus 1
uacaccaacauccccauuuc

SEQ ID NO: 4016970 - RNA, 23 nt, Human T-lymphotropic virus 1
uacaggagccgucuccagccccu

SEQ ID NO: 4016971 - RNA, 13 nt, Human T-lymphotropic virus 1
uacaggcgccagc

SEQ ID NO: 4016972 - RNA, 21 nt, Human T-lymphotropic virus 1
uacaguuccuuaucccucgac

SEQ ID NO: 4016973 - RNA, 19 nt, Human T-lymphotropic virus 1
uacaugccccccuacccca

SEQ ID NO: 4016974 - RNA, 19 nt, Human T-lymphotropic virus 1
uaccaaaaacaacugggcc

SEQ ID NO: 4016975 - RNA, 16 nt, Human T-lymphotropic virus 1
uaccgaacccagccaa

SEQ ID NO: 4016976 - RNA, 17 nt, Human T-lymphotropic virus 1
uaccugaacuucaagcc

SEQ ID NO: 4016977 - RNA, 16 nt, Human T-lymphotropic virus 1
uacgacaccuccccuc

SEQ ID NO: 4016978 - RNA, 17 nt, Human T-lymphotropic virus 1
uacucaagaaguuucac

SEQ ID NO: 4016979 - RNA, 12 nt, Human T-lymphotropic virus 1
uacucccccuuc

SEQ ID NO: 4016980 - RNA, 16 nt, Human T-lymphotropic virus 1
uacugauccccgagac

SEQ ID NO: 4016981 - RNA, 13 nt, Human T-lymphotropic virus 1
uacuggccaccug

SEQ ID NO: 4016982 - RNA, 15 nt, Human T-lymphotropic virus 1
uagacuaguccaaac

SEQ ID NO: 4016983 - RNA, 21 nt, Human T-lymphotropic virus 1
aucaaauccuccuucuccugc

SEQ ID NO: 4016984 - RNA, 17 nt, Human T-lymphotropic virus 1
aucaccuggccccuccu

SEQ ID NO: 4016985 - RNA, 20 nt, Human T-lymphotropic virus 1
aucaggcccuacagccaccc

SEQ ID NO: 4016986 - RNA, 22 nt, Human T-lymphotropic virus 1
aucauaaacaccgccccuugcc

SEQ ID NO: 4016987 - RNA, 15 nt, Human T-lymphotropic virus 1
aucauaagcucagac

SEQ ID NO: 4016988 - RNA, 18 nt, Human T-lymphotropic virus 1
aucauaagcucagaccuc

SEQ ID NO: 4016989 - RNA, 16 nt, Human T-lymphotropic virus 1
auccaccucccaggca

SEQ ID NO: 4016990 - RNA, 22 nt, Human T-lymphotropic virus 1
aucccaaagaaaaagaccacca

SEQ ID NO: 4016991 - RNA, 18 nt, Human T-lymphotropic virus 1
auccccgagaccaaauau

SEQ ID NO: 4016992 - RNA, 20 nt, Human T-lymphotropic virus 1
aucccguggaggcuccucaa

SEQ ID NO: 4016993 - RNA, 18 nt, Human T-lymphotropic virus 1
aucccucgacuccccucc

SEQ ID NO: 4016994 - RNA, 19 nt, Human T-lymphotropic virus 1
auccuccuucuccugcagc

SEQ ID NO: 4016995 - RNA, 22 nt, Human T-lymphotropic virus 1
auccucggugauuacagcccca

SEQ ID NO: 4016996 - RNA, 13 nt, Human T-lymphotropic virus 1
auccugcccagcc

SEQ ID NO: 4016997 - RNA, 21 nt, Human T-lymphotropic virus 1
auccuucucaaguucaaucau

SEQ ID NO: 4016998 - RNA, 18 nt, Human T-lymphotropic virus 1
aucgccuccagccucccc

SEQ ID NO: 4016999 - RNA, 13 nt, Human T-lymphotropic virus 1
aucuauucccuca

SEQ ID NO: 4017000 - RNA, 16 nt, Human T-lymphotropic virus 1
aucugguuccuuaaua

SEQ ID NO: 4017001 - RNA, 17 nt, Human T-lymphotropic virus 1
augacauucuccuggca

SEQ ID NO: 4017002 - RNA, 13 nt, Human T-lymphotropic virus 1
augaccccaucug

SEQ ID NO: 4017003 - RNA, 13 nt, Human T-lymphotropic virus 1
augcgcaaauacu

SEQ ID NO: 4017004 - RNA, 17 nt, Human T-lymphotropic virus 1
augcgguuuuuccuucu

SEQ ID NO: 4017005 - RNA, 22 nt, Human T-lymphotropic virus 1
augcucuauccauagcccuaug

SEQ ID NO: 4017006 - RNA, 13 nt, Human T-lymphotropic virus 1
auggaccugcccc

SEQ ID NO: 4017007 - RNA, 15 nt, Human T-lymphotropic virus 1
auuaaccucucccau

SEQ ID NO: 4017008 - RNA, 18 nt, Human T-lymphotropic virus 1
auuauauaaguacuuuac

SEQ ID NO: 4017009 - RNA, 13 nt, Human T-lymphotropic virus 1
auucggcaagccu

SEQ ID NO: 4017010 - RNA, 18 nt, Human T-lymphotropic virus 1
auucuuaaaacccuauua

SEQ ID NO: 4017011 - RNA, 23 nt, Human T-lymphotropic virus 1
auugacacccagaccagccaccc

SEQ ID NO: 4017012 - RNA, 20 nt, Human T-lymphotropic virus 1
caaaaauuuaggugcccaga

SEQ ID NO: 4017013 - RNA, 18 nt, Human T-lymphotropic virus 1
caaaacccgauggcagcu

SEQ ID NO: 4017014 - RNA, 14 nt, Human T-lymphotropic virus 1
caaaacuccugacu

SEQ ID NO: 4017015 - RNA, 16 nt, Human T-lymphotropic virus 1
caaaacuccugacucu

SEQ ID NO: 4017016 - RNA, 20 nt, Human T-lymphotropic virus 1
caaacaucugaccaccccag

SEQ ID NO: 4017017 - RNA, 17 nt, Human T-lymphotropic virus 1
caaacuggaaucacccu

SEQ ID NO: 4017018 - RNA, 22 nt, Human T-lymphotropic virus 1
caacauauuucuagacuccaag

SEQ ID NO: 4017019 - RNA, 12 nt, Human T-lymphotropic virus 1
caacauuccacc

SEQ ID NO: 4017020 - RNA, 17 nt, Human T-lymphotropic virus 1
caacugccccauuggcu

SEQ ID NO: 4017021 - RNA, 13 nt, Human T-lymphotropic virus 1
caagccccuccca

SEQ ID NO: 4017022 - RNA, 14 nt, Human T-lymphotropic virus 1
caagccccucccau

SEQ ID NO: 4017023 - RNA, 23 nt, Human T-lymphotropic virus 1
caagcuauagucuccucccccug

SEQ ID NO: 4017024 - RNA, 14 nt, Human T-lymphotropic virus 1
caagcucagaagcu

SEQ ID NO: 4017025 - RNA, 13 nt, Human T-lymphotropic virus 1
caaggacacaucc

SEQ ID NO: 4017026 - RNA, 22 nt, Human T-lymphotropic virus 1
caaggcgacauuacccauuuca

SEQ ID NO: 4017027 - RNA, 19 nt, Human T-lymphotropic virus 1
caaggcgacuggugcccca

SEQ ID NO: 4017028 - RNA, 18 nt, Human T-lymphotropic virus 1
caauauguguaccucccu

SEQ ID NO: 4017029 - RNA, 22 nt, Human T-lymphotropic virus 1
caauccuauggacuacucugcc

SEQ ID NO: 4017030 - RNA, 18 nt, Human T-lymphotropic virus 1
cacaauggcuucccuaau

SEQ ID NO: 4017031 - RNA, 15 nt, Human T-lymphotropic virus 1
cacacuagccagugc

SEQ ID NO: 4017032 - RNA, 13 nt, Human T-lymphotropic virus 1
cacagaacugccg

SEQ ID NO: 4017033 - RNA, 15 nt, Human T-lymphotropic virus 1
cacaggaggcucuuc

SEQ ID NO: 4017034 - RNA, 18 nt, Human T-lymphotropic virus 1
cacaguaugcugcccaga

SEQ ID NO: 4017035 - RNA, 18 nt, Human T-lymphotropic virus 1
cacaucgccuccagccuc

SEQ ID NO: 4017036 - RNA, 13 nt, Human T-lymphotropic virus 1
cacauucccucag

SEQ ID NO: 4017037 - RNA, 15 nt, Human T-lymphotropic virus 1
caccacccuuuucca

SEQ ID NO: 4017038 - RNA, 21 nt, Human T-lymphotropic virus 1
caccacuccccccgacuccag

SEQ ID NO: 4017039 - RNA, 13 nt, Human T-lymphotropic virus 1
caccccggccagc

SEQ ID NO: 4017040 - RNA, 14 nt, Human T-lymphotropic virus 1
caccccggccagcu

SEQ ID NO: 4017041 - RNA, 22 nt, Human T-lymphotropic virus 1
cacccgucacgcugacagccug

SEQ ID NO: 4017042 - RNA, 13 nt, Human T-lymphotropic virus 1
cacccuccuuccu

SEQ ID NO: 4017043 - RNA, 15 nt, Human T-lymphotropic virus 1
caccgccccuccucu

SEQ ID NO: 4017044 - RNA, 14 nt, Human T-lymphotropic virus 1
caccuggccccucc

SEQ ID NO: 4017045 - RNA, 18 nt, Human T-lymphotropic virus 1
caccuggccccuccugcc

SEQ ID NO: 4017046 - RNA, 19 nt, Human T-lymphotropic virus 1
caccuggccccuccugccc

SEQ ID NO: 4017047 - RNA, 14 nt, Human T-lymphotropic virus 1
caccugggacccca

SEQ ID NO: 4017048 - RNA, 15 nt, Human T-lymphotropic virus 1
cacggcgcuccugcu

SEQ ID NO: 4017049 - RNA, 18 nt, Human T-lymphotropic virus 1
cacguccuauacucuccc

SEQ ID NO: 4017050 - RNA, 19 nt, Human T-lymphotropic virus 1
cacucaacccucaccacuc

SEQ ID NO: 4017051 - RNA, 14 nt, Human T-lymphotropic virus 1
cacucauacaaccc

SEQ ID NO: 4017052 - RNA, 20 nt, Human T-lymphotropic virus 1
cacuccccccgacuccagcc

SEQ ID NO: 4017053 - RNA, 19 nt, Human T-lymphotropic virus 1
cagaacagacgaggccuug

SEQ ID NO: 4017054 - RNA, 15 nt, Human T-lymphotropic virus 1
cagaacgccuccagg

SEQ ID NO: 4017055 - RNA, 16 nt, Human T-lymphotropic virus 1
cagaacgccuccaggc

SEQ ID NO: 4017056 - RNA, 15 nt, Human T-lymphotropic virus 1
cagaagcuauuuccu

SEQ ID NO: 4017057 - RNA, 19 nt, Human T-lymphotropic virus 1
cagacaauggcccugccua

SEQ ID NO: 4017058 - RNA, 14 nt, Human T-lymphotropic virus 1
cagaccagccaccc

SEQ ID NO: 4017059 - RNA, 22 nt, Human T-lymphotropic virus 1
cagacgaggccuugaucuccug

SEQ ID NO: 4017060 - RNA, 21 nt, Human T-lymphotropic virus 1
cagauacccccauuacucucu

SEQ ID NO: 4017061 - RNA, 14 nt, Human T-lymphotropic virus 1
cagaucaggcccua

SEQ ID NO: 4017062 - RNA, 19 nt, Human T-lymphotropic virus 1
cagauugacacccagacca

SEQ ID NO: 4017063 - RNA, 13 nt, Human T-lymphotropic virus 1
cagcaaccuccuc

SEQ ID NO: 4017064 - RNA, 16 nt, Human T-lymphotropic virus 1
cagcaccucccaaccc

SEQ ID NO: 4017065 - RNA, 23 nt, Human T-lymphotropic virus 1
cagcagaucaggcccuacagcca

SEQ ID NO: 4017066 - RNA, 18 nt, Human T-lymphotropic virus 1
cagccaacugccucccac

SEQ ID NO: 4017067 - RNA, 12 nt, Human T-lymphotropic virus 1
cagccccagcug

SEQ ID NO: 4017068 - RNA, 17 nt, Human T-lymphotropic virus 1
cagccgaucccagagac

SEQ ID NO: 4017069 - RNA, 22 nt, Human T-lymphotropic virus 1
cagccuccaaggacuccaccuc

SEQ ID NO: 4017070 - RNA, 14 nt, Human T-lymphotropic virus 1
cagccuccccugcc

SEQ ID NO: 4017071 - RNA, 17 nt, Human T-lymphotropic virus 1
cagcuacgacaccuccc

SEQ ID NO: 4017072 - RNA, 13 nt, Human T-lymphotropic virus 1
cagcucagcacca

SEQ ID NO: 4017073 - RNA, 16 nt, Human T-lymphotropic virus 1
cagcuggcccauaucc

SEQ ID NO: 4017074 - RNA, 19 nt, Human T-lymphotropic virus 1
cagcuggcccauauccugc

SEQ ID NO: 4017075 - RNA, 21 nt, Human T-lymphotropic virus 1
cagcuggcccauauccugcag

SEQ ID NO: 4017076 - RNA, 17 nt, Human T-lymphotropic virus 1
caggagccgucuccagc

SEQ ID NO: 4017077 - RNA, 12 nt, Human T-lymphotropic virus 1
cccaccacccuu

SEQ ID NO: 4017078 - RNA, 21 nt, Human T-lymphotropic virus 1
cccacugcuuugacccccaga

SEQ ID NO: 4017079 - RNA, 20 nt, Human T-lymphotropic virus 1
cccagccaacugccucccac

SEQ ID NO: 4017080 - RNA, 20 nt, Human T-lymphotropic virus 1
cccagcugcuguacucucac

SEQ ID NO: 4017081 - RNA, 18 nt, Human T-lymphotropic virus 1
cccaucaccuggccccuc

SEQ ID NO: 4017082 - RNA, 13 nt, Human T-lymphotropic virus 1
cccaucuccaggc

SEQ ID NO: 4017083 - RNA, 22 nt, Human T-lymphotropic virus 1
cccauguuugucaagccguccu

SEQ ID NO: 4017084 - RNA, 22 nt, Human T-lymphotropic virus 1
cccauugcggacagacggcccu

SEQ ID NO: 4017085 - RNA, 16 nt, Human T-lymphotropic virus 1
cccccaacuccugcau

SEQ ID NO: 4017086 - RNA, 22 nt, Human T-lymphotropic virus 1
cccccggaggacagcucagcac

SEQ ID NO: 4017087 - RNA, 21 nt, Human T-lymphotropic virus 1
cccccugacuuguccagccug

SEQ ID NO: 4017088 - RNA, 14 nt, Human T-lymphotropic virus 1
ccccggacuccggc

SEQ ID NO: 4017089 - RNA, 13 nt, Human T-lymphotropic virus 1
ccccuccuucccc

SEQ ID NO: 4017090 - RNA, 17 nt, Human T-lymphotropic virus 1
ccccuggagggccccgu

SEQ ID NO: 4017091 - RNA, 23 nt, Human T-lymphotropic virus 1
ccccugugaucauaaacaccgcc

SEQ ID NO: 4017092 - RNA, 17 nt, Human T-lymphotropic virus 1
ccccuuccgccaccgca

SEQ ID NO: 4017093 - RNA, 22 nt, Human T-lymphotropic virus 1
ccccuucuucuaccccccuccu

SEQ ID NO: 4017094 - RNA, 14 nt, Human T-lymphotropic virus 1
cccgacuccagccg

SEQ ID NO: 4017095 - RNA, 23 nt, Human T-lymphotropic virus 1
cccgguaagcgcuaguucugccc

SEQ ID NO: 4017096 - RNA, 23 nt, Human T-lymphotropic virus 1
cccguccaccaauuccuccacca

SEQ ID NO: 4017097 - RNA, 18 nt, Human T-lymphotropic virus 1
cccuacaauccaaccagc

SEQ ID NO: 4017098 - RNA, 22 nt, Human T-lymphotropic virus 1
cccuacaauccaaccagcuccg

SEQ ID NO: 4017099 - RNA, 16 nt, Human T-lymphotropic virus 1
cccucaccacuccagg

SEQ ID NO: 4017100 - RNA, 17 nt, Human T-lymphotropic virus 1
cccucaccacuccaggc

SEQ ID NO: 4017101 - RNA, 13 nt, Human T-lymphotropic virus 1
cccucauccucgg

SEQ ID NO: 4017102 - RNA, 16 nt, Human T-lymphotropic virus 1
cccuccuuuacccauc

SEQ ID NO: 4017103 - RNA, 19 nt, Human T-lymphotropic virus 1
cccucgacuccccuccuuc

SEQ ID NO: 4017104 - RNA, 18 nt, Human T-lymphotropic virus 1
cccucuauaccauggaaa

SEQ ID NO: 4017105 - RNA, 23 nt, Human T-lymphotropic virus 1
cccugcccuaaagauggccagcc

SEQ ID NO: 4017106 - RNA, 21 nt, Human T-lymphotropic virus 1
cccuugcccuaggcaccuucc

SEQ ID NO: 4017107 - RNA, 11 nt, Human T-lymphotropic virus 1
ccgaaaacaaa

SEQ ID NO: 4017108 - RNA, 11 nt, Human T-lymphotropic virus 1
ccgaacccagc

SEQ ID NO: 4017109 - RNA, 20 nt, Human T-lymphotropic virus 1
ccgcaguagacuaguccaaa

SEQ ID NO: 4017110 - RNA, 14 nt, Human T-lymphotropic virus 1
ccgccauccacgcc

SEQ ID NO: 4017111 - RNA, 22 nt, Human T-lymphotropic virus 1
ccgcucuuuuuuucgcuuccuc

SEQ ID NO: 4017112 - RNA, 18 nt, Human T-lymphotropic virus 1
ccgggggcuuagagccuc

SEQ ID NO: 4017113 - RNA, 20 nt, Human T-lymphotropic virus 1
ccgucagcuacgacaccucc

SEQ ID NO: 4017114 - RNA, 16 nt, Human T-lymphotropic virus 1
ccguccaccaauuccu

SEQ ID NO: 4017115 - RNA, 14 nt, Human T-lymphotropic virus 1
ccgucuccagcccc

SEQ ID NO: 4017116 - RNA, 13 nt, Human T-lymphotropic virus 1
ccgugccuucucc

SEQ ID NO: 4017117 - RNA, 16 nt, Human T-lymphotropic virus 1
ccguggccuacucccu

SEQ ID NO: 4017118 - RNA, 13 nt, Human T-lymphotropic virus 1
ccguucagccucc

SEQ ID NO: 4017119 - RNA, 19 nt, Human T-lymphotropic virus 1
ccguucagccuccaaggac

SEQ ID NO: 4017120 - RNA, 16 nt, Human T-lymphotropic virus 1
ccguuccacucaaccc

SEQ ID NO: 4017121 - RNA, 22 nt, Human T-lymphotropic virus 1
ccguuccacucaacccucacca

SEQ ID NO: 4017122 - RNA, 19 nt, Human T-lymphotropic virus 1
ccuaaacaguuccagcccu

SEQ ID NO: 4017123 - RNA, 14 nt, Human T-lymphotropic virus 1
ccuaaucaccucac

SEQ ID NO: 4017124 - RNA, 20 nt, Human T-lymphotropic virus 1
ccuacaauccaaccagcucc

SEQ ID NO: 4017125 - RNA, 22 nt, Human T-lymphotropic virus 1
ccuaccuaaacaguuccagccc

SEQ ID NO: 4017126 - RNA, 18 nt, Human T-lymphotropic virus 1
ccuaccuuacgccagccc

SEQ ID NO: 4017127 - RNA, 21 nt, Human T-lymphotropic virus 1
ccuauuguuuuaacaucuugc

SEQ ID NO: 4017128 - RNA, 15 nt, Human T-lymphotropic virus 1
ccucaccacuccagg

SEQ ID NO: 4017129 - RNA, 23 nt, Human T-lymphotropic virus 1
ccucagcaauaaacaaacccauu

SEQ ID NO: 4017130 - RNA, 17 nt, Human T-lymphotropic virus 1
ccucaggaaagagccuc

SEQ ID NO: 4017131 - RNA, 20 nt, Human T-lymphotropic virus 1
ccucauacaguacucuuccu

SEQ ID NO: 4017132 - RNA, 13 nt, Human T-lymphotropic virus 1
ccucauccugccc

SEQ ID NO: 4017133 - RNA, 17 nt, Human T-lymphotropic virus 1
ccuccaauauccugcgc

SEQ ID NO: 4017134 - RNA, 14 nt, Human T-lymphotropic virus 1
ccuccaggccaugc

SEQ ID NO: 4017135 - RNA, 18 nt, Human T-lymphotropic virus 1
ccucccaugcggaccugc

SEQ ID NO: 4017136 - RNA, 16 nt, Human T-lymphotropic virus 1
ccuccccucgcgcguc

SEQ ID NO: 4017137 - RNA, 16 nt, Human T-lymphotropic virus 1
ccuccuccguucagcc

SEQ ID NO: 4017138 - RNA, 19 nt, Human T-lymphotropic virus 1
ccuccucuacucucccacu

SEQ ID NO: 4017139 - RNA, 19 nt, Human T-lymphotropic virus 1
ccucggugauuacagcccc

SEQ ID NO: 4017140 - RNA, 16 nt, Human T-lymphotropic virus 1
ccucuacucucccacu

SEQ ID NO: 4017141 - RNA, 13 nt, Human T-lymphotropic virus 1
ccucuccagcgcc

SEQ ID NO: 4017142 - RNA, 23 nt, Human T-lymphotropic virus 1
ccucucccaucaaauccuccuuc

SEQ ID NO: 4017143 - RNA, 14 nt, Human T-lymphotropic virus 1
ccucuucuccucag

SEQ ID NO: 4017144 - RNA, 17 nt, Human T-lymphotropic virus 1
ccugaucccaucuccag

SEQ ID NO: 4017145 - RNA, 18 nt, Human T-lymphotropic virus 1
ccugcaauccugcccagc

SEQ ID NO: 4017146 - RNA, 16 nt, Human T-lymphotropic virus 1
ccugcagcucucuccu

SEQ ID NO: 4017147 - RNA, 21 nt, Human T-lymphotropic virus 1
ccugccaauaauuaaccucuc

SEQ ID NO: 4017148 - RNA, 21 nt, Human T-lymphotropic virus 1
ccugcccuaaagauggccagc

SEQ ID NO: 4017149 - RNA, 15 nt, Human T-lymphotropic virus 1
ccugcucuuccugcu

SEQ ID NO: 4017150 - RNA, 17 nt, Human T-lymphotropic virus 1
ccugcucuuccugcuuu

SEQ ID NO: 4017151 - RNA, 22 nt, Human T-lymphotropic virus 1
ccugcuggcccuuucagcagau

SEQ ID NO: 4017152 - RNA, 16 nt, Human T-lymphotropic virus 1
ccuggccccuccugcc

SEQ ID NO: 4017153 - RNA, 21 nt, Human T-lymphotropic virus 1
ccugggggcagcuacuugccu

SEQ ID NO: 4017154 - RNA, 13 nt, Human T-lymphotropic virus 1
ccuguaaucuugc

SEQ ID NO: 4017155 - RNA, 18 nt, Human T-lymphotropic virus 1
ccugucauaacucccuca

SEQ ID NO: 4017156 - RNA, 22 nt, Human T-lymphotropic virus 1
ccuguccagagcaucagaucac

SEQ ID NO: 4017157 - RNA, 15 nt, Human T-lymphotropic virus 1
ccuguggugccuccu

SEQ ID NO: 4017158 - RNA, 13 nt, Human T-lymphotropic virus 1
ccuuaccugaggc

SEQ ID NO: 4017159 - RNA, 14 nt, Human T-lymphotropic virus 1
ccuucaaccaauuc

SEQ ID NO: 4017160 - RNA, 14 nt, Human T-lymphotropic virus 1
ccuucucagccccu

SEQ ID NO: 4017161 - RNA, 21 nt, Human T-lymphotropic virus 1
ccuucuccuccgcccgcuucc

SEQ ID NO: 4017162 - RNA, 21 nt, Human T-lymphotropic virus 1
ccuuguccuuuaacucuuccu

SEQ ID NO: 4017163 - RNA, 22 nt, Human T-lymphotropic virus 1
ccuuuucaggagccaucucagc

SEQ ID NO: 4017164 - RNA, 15 nt, Human T-lymphotropic virus 1
ccuuuuccagccugc

SEQ ID NO: 4017165 - RNA, 18 nt, Human T-lymphotropic virus 1
cgacuggugccccaucuc

SEQ ID NO: 4017166 - RNA, 16 nt, Human T-lymphotropic virus 1
cgagcaguaccggugg

SEQ ID NO: 4017167 - RNA, 19 nt, Human T-lymphotropic virus 1
cgcaaaaauaacccacaac

SEQ ID NO: 4017168 - RNA, 19 nt, Human T-lymphotropic virus 1
cgcauacggcucaauaaaa

SEQ ID NO: 4017169 - RNA, 12 nt, Human T-lymphotropic virus 1
cgccccuugccu

SEQ ID NO: 4017170 - RNA, 21 nt, Human T-lymphotropic virus 1
cgccucaggaaagagccuccu

SEQ ID NO: 4017171 - RNA, 15 nt, Human T-lymphotropic virus 1
cgccuccagccuccc

SEQ ID NO: 4017172 - RNA, 13 nt, Human T-lymphotropic virus 1
cgccuccaggccu

SEQ ID NO: 4017173 - RNA, 15 nt, Human T-lymphotropic virus 1
cgcgcuacuccuucu

SEQ ID NO: 4017174 - RNA, 18 nt, Human T-lymphotropic virus 1
cgcguuaucggcucagcu

SEQ ID NO: 4017175 - RNA, 23 nt, Human T-lymphotropic virus 1
cgcguucugccgccucccgccug

SEQ ID NO: 4017176 - RNA, 22 nt, Human T-lymphotropic virus 1
cgcuccaggauaugaccccauc

SEQ ID NO: 4017177 - RNA, 13 nt, Human T-lymphotropic virus 1
cggacccuugccc

SEQ ID NO: 4017178 - RNA, 15 nt, Human T-lymphotropic virus 1
cggaggacagcucag

SEQ ID NO: 4017179 - RNA, 16 nt, Human T-lymphotropic virus 1
uucagccuccaaggac

SEQ ID NO: 4017180 - RNA, 22 nt, Human T-lymphotropic virus 1
uucaggagccaucucagcuacc

SEQ ID NO: 4017181 - RNA, 17 nt, Human T-lymphotropic virus 1
uuccagccccccaccug

SEQ ID NO: 4017182 - RNA, 17 nt, Human T-lymphotropic virus 1
uuccuuuucaaauacuc

SEQ ID NO: 4017183 - RNA, 16 nt, Human T-lymphotropic virus 1
uucgccuucucagccc

SEQ ID NO: 4017184 - RNA, 18 nt, Human T-lymphotropic virus 1
uucgccuucucagccccu

SEQ ID NO: 4017185 - RNA, 19 nt, Human T-lymphotropic virus 1
uucuaccccccuccuuuac

SEQ ID NO: 4017186 - RNA, 16 nt, Human T-lymphotropic virus 1
uucuccucagcccguc

SEQ ID NO: 4017187 - RNA, 22 nt, Human T-lymphotropic virus 1
uugcggacagacggcccucaca

SEQ ID NO: 4017188 - RNA, 18 nt, Human T-lymphotropic virus 1
uuuaagcucaccucccuu

SEQ ID NO: 4017189 - RNA, 14 nt, Human T-lymphotropic virus 1
uuucauaauuugca

SEQ ID NO: 4017190 - RNA, 16 nt, Human T-lymphotropic virus 1
uuuccuccuccuccuu

SEQ ID NO: 4017191 - RNA, 15 nt, Human T-lymphotropic virus 1
aucugcuuuuccucc

SEQ ID NO: 4017192 - RNA, 17 nt, Human T-lymphotropic virus 1
aucugcuuuuccuccuc

SEQ ID NO: 4017193 - RNA, 18 nt, Human T-lymphotropic virus 1
aucugcuuuuccuccucu

SEQ ID NO: 4017194 - RNA, 16 nt, Human T-lymphotropic virus 1
augacaguccuuccga

SEQ ID NO: 4017195 - RNA, 15 nt, Human T-lymphotropic virus 1
augccaaggcguccu

SEQ ID NO: 4017196 - RNA, 20 nt, Human T-lymphotropic virus 1
auggaaaucaaaacuccuga

SEQ ID NO: 4017197 - RNA, 16 nt, Human T-lymphotropic virus 1
auuacagccccagcug

SEQ ID NO: 4017198 - RNA, 19 nt, Human T-lymphotropic virus 1
auuauuucaagcuuccugg

SEQ ID NO: 4017199 - RNA, 14 nt, Human T-lymphotropic virus 1
auucauucaaacau

SEQ ID NO: 4017200 - RNA, 16 nt, Human T-lymphotropic virus 1
auugccuaucuaggca

SEQ ID NO: 4017201 - RNA, 20 nt, Human T-lymphotropic virus 1
auugucacaaagaucauucc

SEQ ID NO: 4017202 - RNA, 13 nt, Human T-lymphotropic virus 1
auuuaaauccuuc

SEQ ID NO: 4017203 - RNA, 12 nt, Human T-lymphotropic virus 1
auuuccucccca

SEQ ID NO: 4017204 - RNA, 20 nt, Human T-lymphotropic virus 1
caaaucauaagcucagaccu

SEQ ID NO: 4017205 - RNA, 18 nt, Human T-lymphotropic virus 1
caaaucccccuaccuaaa

SEQ ID NO: 4017206 - RNA, 16 nt, Human T-lymphotropic virus 1
caacaaugccaaggcg

SEQ ID NO: 4017207 - RNA, 22 nt, Human T-lymphotropic virus 1
caaccacaucgccuccagccuc

SEQ ID NO: 4017208 - RNA, 20 nt, Human T-lymphotropic virus 1
caaccuccuccguucagccu

SEQ ID NO: 4017209 - RNA, 21 nt, Human T-lymphotropic virus 1
caacgucucuguuccaucccc

SEQ ID NO: 4017210 - RNA, 22 nt, Human T-lymphotropic virus 1
caacuacacuagcccacuuaca

SEQ ID NO: 4017211 - RNA, 13 nt, Human T-lymphotropic virus 1
caacuacucucag

SEQ ID NO: 4017212 - RNA, 14 nt, Human T-lymphotropic virus 1
caaggacuccaccu

SEQ ID NO: 4017213 - RNA, 19 nt, Human T-lymphotropic virus 1
caaggacuccaccucgccu

SEQ ID NO: 4017214 - RNA, 21 nt, Human T-lymphotropic virus 1
caaggcguccuguaccucccu

SEQ ID NO: 4017215 - RNA, 22 nt, Human T-lymphotropic virus 1
caaggcguccuguaccucccug

SEQ ID NO: 4017216 - RNA, 19 nt, Human T-lymphotropic virus 1
caauccaaccagcuccgga

SEQ ID NO: 4017217 - RNA, 15 nt, Human T-lymphotropic virus 1
caauccugcccagcc

SEQ ID NO: 4017218 - RNA, 13 nt, Human T-lymphotropic virus 1
caaugccaaggcg

SEQ ID NO: 4017219 - RNA, 14 nt, Human T-lymphotropic virus 1
caauuccuccacca

SEQ ID NO: 4017220 - RNA, 16 nt, Human T-lymphotropic virus 1
cacaaaaaucugcuca

SEQ ID NO: 4017221 - RNA, 22 nt, Human T-lymphotropic virus 1
cacaaauuucaaaccaaggccu

SEQ ID NO: 4017222 - RNA, 15 nt, Human T-lymphotropic virus 1
cacaguuuccuccuc

SEQ ID NO: 4017223 - RNA, 16 nt, Human T-lymphotropic virus 1
cacaguuuccuccucc

SEQ ID NO: 4017224 - RNA, 16 nt, Human T-lymphotropic virus 1
cacaucgccuccagcc

SEQ ID NO: 4017225 - RNA, 17 nt, Human T-lymphotropic virus 1
cacaucgccuccagccu

SEQ ID NO: 4017226 - RNA, 15 nt, Human T-lymphotropic virus 1
caccaauuccuccac

SEQ ID NO: 4017227 - RNA, 19 nt, Human T-lymphotropic virus 1
caccacuccccccgacucc

SEQ ID NO: 4017228 - RNA, 22 nt, Human T-lymphotropic virus 1
caccagcucaggcuaggcccug

SEQ ID NO: 4017229 - RNA, 20 nt, Human T-lymphotropic virus 1
cacccuugggcagcaccucc

SEQ ID NO: 4017230 - RNA, 14 nt, Human T-lymphotropic virus 1
caccgccccuccuc

SEQ ID NO: 4017231 - RNA, 14 nt, Human T-lymphotropic virus 1
caccgccccuugcc

SEQ ID NO: 4017232 - RNA, 17 nt, Human T-lymphotropic virus 1
caccucccaacccuguc

SEQ ID NO: 4017233 - RNA, 21 nt, Human T-lymphotropic virus 1
caccuuuucaggagccaucuc

SEQ ID NO: 4017234 - RNA, 23 nt, Human T-lymphotropic virus 1
cacgcccuacuggccaccugucc

SEQ ID NO: 4017235 - RNA, 21 nt, Human T-lymphotropic virus 1
cacgccugccgcaaaaauaac

SEQ ID NO: 4017236 - RNA, 18 nt, Human T-lymphotropic virus 1
cacgcuaggaucccgcuc

SEQ ID NO: 4017237 - RNA, 19 nt, Human T-lymphotropic virus 1
cacgcuaggaucccgcucc

SEQ ID NO: 4017238 - RNA, 16 nt, Human T-lymphotropic virus 1
cacgcuuugccugacc

SEQ ID NO: 4017239 - RNA, 17 nt, Human T-lymphotropic virus 1
cacggcgcuccugcucu

SEQ ID NO: 4017240 - RNA, 20 nt, Human T-lymphotropic virus 1
cacggcgcuccugcucuucc

SEQ ID NO: 4017241 - RNA, 20 nt, Human T-lymphotropic virus 1
cagaacgccuccaggccuug

SEQ ID NO: 4017242 - RNA, 15 nt, Human T-lymphotropic virus 1
cagaauaaggcucug

SEQ ID NO: 4017243 - RNA, 23 nt, Human T-lymphotropic virus 1
cagacgaggccuugaucuccugu

SEQ ID NO: 4017244 - RNA, 19 nt, Human T-lymphotropic virus 1
cagacggauccaccuccca

SEQ ID NO: 4017245 - RNA, 20 nt, Human T-lymphotropic virus 1
cagacggauccaccucccag

SEQ ID NO: 4017246 - RNA, 17 nt, Human T-lymphotropic virus 1
cagaggccacaauggcu

SEQ ID NO: 4017247 - RNA, 15 nt, Human T-lymphotropic virus 1
cagaucaccugggac

SEQ ID NO: 4017248 - RNA, 23 nt, Human T-lymphotropic virus 1
cagaucaggcccuacagccaccc

SEQ ID NO: 4017249 - RNA, 14 nt, Human T-lymphotropic virus 1
cagcaaaccccugg

SEQ ID NO: 4017250 - RNA, 12 nt, Human T-lymphotropic virus 1
cagcaaccuccu

SEQ ID NO: 4017251 - RNA, 22 nt, Human T-lymphotropic virus 1
cagcaaccuccuccguucagcc

SEQ ID NO: 4017252 - RNA, 13 nt, Human T-lymphotropic virus 1
cagcaccucccaa

SEQ ID NO: 4017253 - RNA, 15 nt, Human T-lymphotropic virus 1
cagcagaucaggccc

SEQ ID NO: 4017254 - RNA, 16 nt, Human T-lymphotropic virus 1
cagccccccaccugac

SEQ ID NO: 4017255 - RNA, 14 nt, Human T-lymphotropic virus 1
cagccccuacugga

SEQ ID NO: 4017256 - RNA, 21 nt, Human T-lymphotropic virus 1
cagccccuucacagucucuac

SEQ ID NO: 4017257 - RNA, 14 nt, Human T-lymphotropic virus 1
cagccggcucucca

SEQ ID NO: 4017258 - RNA, 18 nt, Human T-lymphotropic virus 1
cagccuauccacuuggca

SEQ ID NO: 4017259 - RNA, 22 nt, Human T-lymphotropic virus 1
cagccuggcaaaacggccuccu

SEQ ID NO: 4017260 - RNA, 16 nt, Human T-lymphotropic virus 1
cagcuacgacaccucc

SEQ ID NO: 4017261 - RNA, 13 nt, Human T-lymphotropic virus 1
cagcucucuccug

SEQ ID NO: 4017262 - RNA, 14 nt, Human T-lymphotropic virus 1
caggagccaucuca

SEQ ID NO: 4017263 - RNA, 21 nt, Human T-lymphotropic virus 1
caggagccgucuccagccccu

SEQ ID NO: 4017264 - RNA, 16 nt, Human T-lymphotropic virus 1
caguaugcugcccaga

SEQ ID NO: 4017265 - RNA, 12 nt, Human T-lymphotropic virus 1
caguuccagccc

SEQ ID NO: 4017266 - RNA, 16 nt, Human T-lymphotropic virus 1
cauaccaaucuaccug

SEQ ID NO: 4017267 - RNA, 23 nt, Human T-lymphotropic virus 1
cauccccuucuucuaccccccuc

SEQ ID NO: 4017268 - RNA, 20 nt, Human T-lymphotropic virus 1
cauccgccguggccuacucc

SEQ ID NO: 4017269 - RNA, 17 nt, Human T-lymphotropic virus 1
caucgccuccagccucc

SEQ ID NO: 4017270 - RNA, 18 nt, Human T-lymphotropic virus 1
caucgccuccagccuccc

SEQ ID NO: 4017271 - RNA, 11 nt, Human T-lymphotropic virus 1
caucuccaccc

SEQ ID NO: 4017272 - RNA, 14 nt, Human T-lymphotropic virus 1
caucuccaggcuca

SEQ ID NO: 4017273 - RNA, 11 nt, Human T-lymphotropic virus 1
caucucuccuu

SEQ ID NO: 4017274 - RNA, 23 nt, Human T-lymphotropic virus 1
caugcgcaaauacucccccuucc

SEQ ID NO: 4017275 - RNA, 20 nt, Human T-lymphotropic virus 1
caugcuuauuaucagcccac

SEQ ID NO: 4017276 - RNA, 14 nt, Human T-lymphotropic virus 1
cauggaacccaccc

SEQ ID NO: 4017277 - RNA, 14 nt, Human T-lymphotropic virus 1
cauggccucuccag

SEQ ID NO: 4017278 - RNA, 15 nt, Human T-lymphotropic virus 1
cauggccucuccagc

SEQ ID NO: 4017279 - RNA, 18 nt, Human T-lymphotropic virus 1
cauguaccucuaccagcu

SEQ ID NO: 4017280 - RNA, 22 nt, Human T-lymphotropic virus 1
cauguccccuacaauccaacca

SEQ ID NO: 4017281 - RNA, 13 nt, Human T-lymphotropic virus 1
cauucccucagca

SEQ ID NO: 4017282 - RNA, 21 nt, Human T-lymphotropic virus 1
cauugccuaucuaggcaagcc

SEQ ID NO: 4017283 - RNA, 20 nt, Human T-lymphotropic virus 1
cauuuaacuggacccacugc

SEQ ID NO: 4017284 - RNA, 12 nt, Human T-lymphotropic virus 1
ccaacccugucu

SEQ ID NO: 4017285 - RNA, 17 nt, Human T-lymphotropic virus 1
ccaacgucucuguucca

SEQ ID NO: 4017286 - RNA, 15 nt, Human T-lymphotropic virus 1
ccaacugccucccac

SEQ ID NO: 4017287 - RNA, 23 nt, Human T-lymphotropic virus 1
ccaagcagcaguggccacuuguc

SEQ ID NO: 4017288 - RNA, 16 nt, Human T-lymphotropic virus 1
ccaaggacuccaccuc

SEQ ID NO: 4017289 - RNA, 20 nt, Human T-lymphotropic virus 1
ccaaggcagguccucucagg

SEQ ID NO: 4017290 - RNA, 22 nt, Human T-lymphotropic virus 1
ccaauaauuaaccucucccauc

SEQ ID NO: 4017291 - RNA, 16 nt, Human T-lymphotropic virus 1
ccaaucauggaccugc

SEQ ID NO: 4017292 - RNA, 15 nt, Human T-lymphotropic virus 1
ccaccaauuccucca

SEQ ID NO: 4017293 - RNA, 19 nt, Human T-lymphotropic virus 1
ccaccaauuccuccaccag

SEQ ID NO: 4017294 - RNA, 20 nt, Human T-lymphotropic virus 1
ccaccacccuuuuccagccu

SEQ ID NO: 4017295 - RNA, 15 nt, Human T-lymphotropic virus 1
ccacccauuuccucc

SEQ ID NO: 4017296 - RNA, 16 nt, Human T-lymphotropic virus 1
ccacccuugggcagca

SEQ ID NO: 4017297 - RNA, 14 nt, Human T-lymphotropic virus 1
ccaccgggaaccac

SEQ ID NO: 4017298 - RNA, 15 nt, Human T-lymphotropic virus 1
ccaccucccaggcag

SEQ ID NO: 4017299 - RNA, 17 nt, Human T-lymphotropic virus 1
ccaccucccaggcagcc

SEQ ID NO: 4017300 - RNA, 18 nt, Human T-lymphotropic virus 1
ccaccuguccagagcauc

SEQ ID NO: 4017301 - RNA, 22 nt, Human T-lymphotropic virus 1
ccacgccgguugagucgcguuc

SEQ ID NO: 4017302 - RNA, 13 nt, Human T-lymphotropic virus 1
ccacucuaaaccc

SEQ ID NO: 4017303 - RNA, 15 nt, Human T-lymphotropic virus 1
ccacucuaaccuaga

SEQ ID NO: 4017304 - RNA, 17 nt, Human T-lymphotropic virus 1
ccagaacgccuccaggc

SEQ ID NO: 4017305 - RNA, 20 nt, Human T-lymphotropic virus 1
ccagaccccggacuccggcc

SEQ ID NO: 4017306 - RNA, 16 nt, Human T-lymphotropic virus 1
ccagcagguccuccgg

SEQ ID NO: 4017307 - RNA, 17 nt, Human T-lymphotropic virus 1
ccagcagguccuccggg

SEQ ID NO: 4017308 - RNA, 18 nt, Human T-lymphotropic virus 1
ccagccaacugccuccca

SEQ ID NO: 4017309 - RNA, 18 nt, Human T-lymphotropic virus 1
ccagccuccccugccaau

SEQ ID NO: 4017310 - RNA, 20 nt, Human T-lymphotropic virus 1
ccaggauaugaccccaucug

SEQ ID NO: 4017311 - RNA, 23 nt, Human T-lymphotropic virus 1
ccaggcagccuauauucucuggg

SEQ ID NO: 4017312 - RNA, 12 nt, Human T-lymphotropic virus 1
ccaguucugccc

SEQ ID NO: 4017313 - RNA, 16 nt, Human T-lymphotropic virus 1
ccauacuacccauguc

SEQ ID NO: 4017314 - RNA, 22 nt, Human T-lymphotropic virus 1
ccauugccuaucuaggcaagcc

SEQ ID NO: 4017315 - RNA, 22 nt, Human T-lymphotropic virus 1
ccauuggcuccugugaaagccc

SEQ ID NO: 4017316 - RNA, 14 nt, Human T-lymphotropic virus 1
cccaacuccugcau

SEQ ID NO: 4017317 - RNA, 19 nt, Human T-lymphotropic virus 1
cccagaacagacgaggccu

SEQ ID NO: 4017318 - RNA, 13 nt, Human T-lymphotropic virus 1
cccagaccagcca

SEQ ID NO: 4017319 - RNA, 16 nt, Human T-lymphotropic virus 1
cccagcaaaccccugg

SEQ ID NO: 4017320 - RNA, 12 nt, Human T-lymphotropic virus 1
cccauaccuagg

SEQ ID NO: 4017321 - RNA, 14 nt, Human T-lymphotropic virus 1
cccauauccugcag

SEQ ID NO: 4017322 - RNA, 19 nt, Human T-lymphotropic virus 1
cccaucaccuggccccucc

SEQ ID NO: 4017323 - RNA, 23 nt, Human T-lymphotropic virus 1
cccaugugauuuuuugccacccc

SEQ ID NO: 4017324 - RNA, 18 nt, Human T-lymphotropic virus 1
ccccaacauuccacccuc

SEQ ID NO: 4017325 - RNA, 19 nt, Human T-lymphotropic virus 1
ccccaacauuccacccucc

SEQ ID NO: 4017326 - RNA, 22 nt, Human T-lymphotropic virus 1
gacaaccccucaccucaaaaaa

SEQ ID NO: 4017327 - RNA, 12 nt, Human T-lymphotropic virus 1
gacccccccuug

SEQ ID NO: 4017328 - RNA, 16 nt, Human T-lymphotropic virus 1
gacccucgaccugcug

SEQ ID NO: 4017329 - RNA, 16 nt, Human T-lymphotropic virus 1
gacccuugcccuaggc

SEQ ID NO: 4017330 - RNA, 17 nt, Human T-lymphotropic virus 1
gacuccagccgauccca

SEQ ID NO: 4017331 - RNA, 19 nt, Human T-lymphotropic virus 1
gaggcuauuauucagccuc

SEQ ID NO: 4017332 - RNA, 12 nt, Human T-lymphotropic virus 1
gagucuccucau

SEQ ID NO: 4017333 - RNA, 22 nt, Human T-lymphotropic virus 1
gauagcaaaccgucaagcacag

SEQ ID NO: 4017334 - RNA, 13 nt, Human T-lymphotropic virus 1
gaucaaaaagcca

SEQ ID NO: 4017335 - RNA, 19 nt, Human T-lymphotropic virus 1
gaucacuuuaagcucaccu

SEQ ID NO: 4017336 - RNA, 23 nt, Human T-lymphotropic virus 1
gaucaggcccuacagccacccug

SEQ ID NO: 4017337 - RNA, 16 nt, Human T-lymphotropic virus 1
gauggccagccaucuu

SEQ ID NO: 4017338 - RNA, 13 nt, Human T-lymphotropic virus 1
gauugacacccag

SEQ ID NO: 4017339 - RNA, 14 nt, Human T-lymphotropic virus 1
gauuuuauucuucc

SEQ ID NO: 4017340 - RNA, 18 nt, Human T-lymphotropic virus 1
gcaaaacggccuccuucc

SEQ ID NO: 4017341 - RNA, 15 nt, Human T-lymphotropic virus 1
gcaagccccucccau

SEQ ID NO: 4017342 - RNA, 22 nt, Human T-lymphotropic virus 1
gcaaguccuuccuaaccaagac

SEQ ID NO: 4017343 - RNA, 13 nt, Human T-lymphotropic virus 1
gcaaucugcuuuu

SEQ ID NO: 4017344 - RNA, 16 nt, Human T-lymphotropic virus 1
gcaccagcucaggcua

SEQ ID NO: 4017345 - RNA, 15 nt, Human T-lymphotropic virus 1
gcacccgucacgcug

SEQ ID NO: 4017346 - RNA, 22 nt, Human T-lymphotropic virus 1
gcacguccuauacucucccaac

SEQ ID NO: 4017347 - RNA, 15 nt, Human T-lymphotropic virus 1
gcagcaaccuccucc

SEQ ID NO: 4017348 - RNA, 21 nt, Human T-lymphotropic virus 1
gcagccggccgcggcuuuccu

SEQ ID NO: 4017349 - RNA, 16 nt, Human T-lymphotropic virus 1
gcagcugcggcaggcc

SEQ ID NO: 4017350 - RNA, 21 nt, Human T-lymphotropic virus 1
gccaauacaggcgccagcugu

SEQ ID NO: 4017351 - RNA, 16 nt, Human T-lymphotropic virus 1
gccaccccggccagcu

SEQ ID NO: 4017352 - RNA, 19 nt, Human T-lymphotropic virus 1
gccaccgggaaccacccau

SEQ ID NO: 4017353 - RNA, 17 nt, Human T-lymphotropic virus 1
gccagcuguccuugggc

SEQ ID NO: 4017354 - RNA, 16 nt, Human T-lymphotropic virus 1
gccagugccccugggg

SEQ ID NO: 4017355 - RNA, 13 nt, Human T-lymphotropic virus 1
gccauacuaccca

SEQ ID NO: 4017356 - RNA, 16 nt, Human T-lymphotropic virus 1
gcccauauccugcagc

SEQ ID NO: 4017357 - RNA, 17 nt, Human T-lymphotropic virus 1
gcccccuuucaggcccu

SEQ ID NO: 4017358 - RNA, 15 nt, Human T-lymphotropic virus 1
gccccgccgauccca

SEQ ID NO: 4017359 - RNA, 23 nt, Human T-lymphotropic virus 1
gccccuauacaggagccgucucc

SEQ ID NO: 4017360 - RNA, 13 nt, Human T-lymphotropic virus 1
gccccuccugccc

SEQ ID NO: 4017361 - RNA, 16 nt, Human T-lymphotropic virus 1
gcccgccgccuuaccu

SEQ ID NO: 4017362 - RNA, 19 nt, Human T-lymphotropic virus 1
gcccuaaagauggccagcc

SEQ ID NO: 4017363 - RNA, 13 nt, Human T-lymphotropic virus 1
gcccucacacugc

SEQ ID NO: 4017364 - RNA, 12 nt, Human T-lymphotropic virus 1
gcccugcccuaa

SEQ ID NO: 4017365 - RNA, 19 nt, Human T-lymphotropic virus 1
gccuaccuagacucagccg

SEQ ID NO: 4017366 - RNA, 12 nt, Human T-lymphotropic virus 1
gccuccccugcc

SEQ ID NO: 4017367 - RNA, 16 nt, Human T-lymphotropic virus 1
gccucucacagugggc

SEQ ID NO: 4017368 - RNA, 22 nt, Human T-lymphotropic virus 1
gccuggcaaaacggccuccuuc

SEQ ID NO: 4017369 - RNA, 19 nt, Human T-lymphotropic virus 1
gcgagcugcaugcccaaga

SEQ ID NO: 4017370 - RNA, 23 nt, Human T-lymphotropic virus 1
gcggcaggcccugucacagaacu

SEQ ID NO: 4017371 - RNA, 13 nt, Human T-lymphotropic virus 1
gcuaccaugccac

SEQ ID NO: 4017372 - RNA, 15 nt, Human T-lymphotropic virus 1
gcuaguucugcccag

SEQ ID NO: 4017373 - RNA, 20 nt, Human T-lymphotropic virus 1
gcucaccucccuuccugugc

SEQ ID NO: 4017374 - RNA, 16 nt, Human T-lymphotropic virus 1
gcucaggcuaggcccu

SEQ ID NO: 4017375 - RNA, 18 nt, Human T-lymphotropic virus 1
gcucuccacgcuuugccu

SEQ ID NO: 4017376 - RNA, 17 nt, Human T-lymphotropic virus 1
gcucucuccugcagacc

SEQ ID NO: 4017377 - RNA, 21 nt, Human T-lymphotropic virus 1
gcucuuuuuuucgcuuccucu

SEQ ID NO: 4017378 - RNA, 18 nt, Human T-lymphotropic virus 1
cuacacaguuucacccau

SEQ ID NO: 4017379 - RNA, 13 nt, Human T-lymphotropic virus 1
cuacagccacccu

SEQ ID NO: 4017380 - RNA, 15 nt, Human T-lymphotropic virus 1
cuacagccacccugc

SEQ ID NO: 4017381 - RNA, 22 nt, Human T-lymphotropic virus 1
cuacaucgucacgcccuacugg

SEQ ID NO: 4017382 - RNA, 19 nt, Human T-lymphotropic virus 1
cuaccaccccucauuucua

SEQ ID NO: 4017383 - RNA, 19 nt, Human T-lymphotropic virus 1
cuaccugaacuucaagccc

SEQ ID NO: 4017384 - RNA, 23 nt, Human T-lymphotropic virus 1
cuaccugaacuucaagcccuacu

SEQ ID NO: 4017385 - RNA, 17 nt, Human T-lymphotropic virus 1
cuacgacaccuccccuc

SEQ ID NO: 4017386 - RNA, 15 nt, Human T-lymphotropic virus 1
cuagaacaccuccca

SEQ ID NO: 4017387 - RNA, 20 nt, Human T-lymphotropic virus 1
cuagaacaccucccaaggcc

SEQ ID NO: 4017388 - RNA, 23 nt, Human T-lymphotropic virus 1
cuagaccauauccucgagcccuc

SEQ ID NO: 4017389 - RNA, 20 nt, Human T-lymphotropic virus 1
cuagacucagccggcucucc

SEQ ID NO: 4017390 - RNA, 17 nt, Human T-lymphotropic virus 1
cuaguccaaacccugcc

SEQ ID NO: 4017391 - RNA, 15 nt, Human T-lymphotropic virus 1
cuaguucugcccagu

SEQ ID NO: 4017392 - RNA, 23 nt, Human T-lymphotropic virus 1
cuauggacuacucugccaaacca

SEQ ID NO: 4017393 - RNA, 16 nt, Human T-lymphotropic virus 1
cuauuauucagccucu

SEQ ID NO: 4017394 - RNA, 12 nt, Human T-lymphotropic virus 1
cucacagugggc

SEQ ID NO: 4017395 - RNA, 16 nt, Human T-lymphotropic virus 1
cucaccaauguucccu

SEQ ID NO: 4017396 - RNA, 15 nt, Human T-lymphotropic virus 1
cucaccucaaaaaac

SEQ ID NO: 4017397 - RNA, 21 nt, Human T-lymphotropic virus 1
cucacuggcaccaccacugug

SEQ ID NO: 4017398 - RNA, 17 nt, Human T-lymphotropic virus 1
cucagaagcuauuuccu

SEQ ID NO: 4017399 - RNA, 19 nt, Human T-lymphotropic virus 1
cucagaccuccgggaagcc

SEQ ID NO: 4017400 - RNA, 21 nt, Human T-lymphotropic virus 1
cucagccggcucuccacgcuu

SEQ ID NO: 4017401 - RNA, 20 nt, Human T-lymphotropic virus 1
cucaggaaagagccuccuac

SEQ ID NO: 4017402 - RNA, 19 nt, Human T-lymphotropic virus 1
cucaggcuaggcccugacg

SEQ ID NO: 4017403 - RNA, 22 nt, Human T-lymphotropic virus 1
cucauaccacucuaaacccugc

SEQ ID NO: 4017404 - RNA, 11 nt, Human T-lymphotropic virus 1
cucauuucuac

SEQ ID NO: 4017405 - RNA, 21 nt, Human T-lymphotropic virus 1
cuccaaaggaacuccuaccuu

SEQ ID NO: 4017406 - RNA, 14 nt, Human T-lymphotropic virus 1
cuccaaggacucca

SEQ ID NO: 4017407 - RNA, 21 nt, Human T-lymphotropic virus 1
cuccaccagcagguccuccgg

SEQ ID NO: 4017408 - RNA, 16 nt, Human T-lymphotropic virus 1
cuccagccccuacugg

SEQ ID NO: 4017409 - RNA, 15 nt, Human T-lymphotropic virus 1
cuccaggccuugcaa

SEQ ID NO: 4017410 - RNA, 16 nt, Human T-lymphotropic virus 1
cucccaccgccccucc

SEQ ID NO: 4017411 - RNA, 19 nt, Human T-lymphotropic virus 1
cucccaugcggaccugcaa

SEQ ID NO: 4017412 - RNA, 16 nt, Human T-lymphotropic virus 1
cuccccucaaaaacac

SEQ ID NO: 4017413 - RNA, 18 nt, Human T-lymphotropic virus 1
cuccccuccuuccccacc

SEQ ID NO: 4017414 - RNA, 21 nt, Human T-lymphotropic virus 1
cuccccuccuuccccacccag

SEQ ID NO: 4017415 - RNA, 21 nt, Human T-lymphotropic virus 1
cucccuaaccacaucuggcaa

SEQ ID NO: 4017416 - RNA, 22 nt, Human T-lymphotropic virus 1
cucccuucuagucgacgcucca

SEQ ID NO: 4017417 - RNA, 18 nt, Human T-lymphotropic virus 1
cucccuuggagccuaccu

SEQ ID NO: 4017418 - RNA, 17 nt, Human T-lymphotropic virus 1
cuccucauaccacucua

SEQ ID NO: 4017419 - RNA, 15 nt, Human T-lymphotropic virus 1
cuccucuuccuuccu

SEQ ID NO: 4017420 - RNA, 22 nt, Human T-lymphotropic virus 1
cuccugaacuacguccgccguc

SEQ ID NO: 4017421 - RNA, 19 nt, Human T-lymphotropic virus 1
cuccugcagcaaccuccuc

SEQ ID NO: 4017422 - RNA, 13 nt, Human T-lymphotropic virus 1
cuccugcucuucc

SEQ ID NO: 4017423 - RNA, 13 nt, Human T-lymphotropic virus 1
cuccuuccuccag

SEQ ID NO: 4017424 - RNA, 13 nt, Human T-lymphotropic virus 1
cuccuucuccugc

SEQ ID NO: 4017425 - RNA, 19 nt, Human T-lymphotropic virus 1
cucgacuccccuccuuccc

SEQ ID NO: 4017426 - RNA, 11 nt, Human T-lymphotropic virus 1
cucgcaucucu

SEQ ID NO: 4017427 - RNA, 17 nt, Human T-lymphotropic virus 1
cucuguuccauccccuu

SEQ ID NO: 4017428 - RNA, 19 nt, Human T-lymphotropic virus 1
cucuguuccauccccuucu

SEQ ID NO: 4017429 - RNA, 16 nt, Human T-lymphotropic virus 1
cucuucaagaagcugc

SEQ ID NO: 4017430 - RNA, 15 nt, Human T-lymphotropic virus 1
cucuucuccucagcc

SEQ ID NO: 4017431 - RNA, 16 nt, Human T-lymphotropic virus 1
cucuucuccucagccc

SEQ ID NO: 4017432 - RNA, 15 nt, Human T-lymphotropic virus 1
cucuuugcuccaggc

SEQ ID NO: 4017433 - RNA, 17 nt, Human T-lymphotropic virus 1
cucuuugcuccaggcca

SEQ ID NO: 4017434 - RNA, 17 nt, Human T-lymphotropic virus 1
cugaacuucaagcccua

SEQ ID NO: 4017435 - RNA, 15 nt, Human T-lymphotropic virus 1
cugacagccuggcaa

SEQ ID NO: 4017436 - RNA, 15 nt, Human T-lymphotropic virus 1
cugacccucacuggc

SEQ ID NO: 4017437 - RNA, 17 nt, Human T-lymphotropic virus 1
cugacuuguccagccug

SEQ ID NO: 4017438 - RNA, 14 nt, Human T-lymphotropic virus 1
cugcaauccugccc

SEQ ID NO: 4017439 - RNA, 19 nt, Human T-lymphotropic virus 1
cugccaacuacacuagccc

SEQ ID NO: 4017440 - RNA, 21 nt, Human T-lymphotropic virus 1
cugccaacuacacuagcccac

SEQ ID NO: 4017441 - RNA, 23 nt, Human T-lymphotropic virus 1
cugccaauaauuaaccucuccca

SEQ ID NO: 4017442 - RNA, 20 nt, Human T-lymphotropic virus 1
cugccccauuggcuccugug

SEQ ID NO: 4017443 - RNA, 21 nt, Human T-lymphotropic virus 1
cugccccauuggcuccuguga

SEQ ID NO: 4017444 - RNA, 21 nt, Human T-lymphotropic virus 1
cugccccccuuuuccuuguca

SEQ ID NO: 4017445 - RNA, 13 nt, Human T-lymphotropic virus 1
cugccgccucccg

SEQ ID NO: 4017446 - RNA, 14 nt, Human T-lymphotropic virus 1
cugcgcucuugcca

SEQ ID NO: 4017447 - RNA, 17 nt, Human T-lymphotropic virus 1
cugcuuuuccuccucuu

SEQ ID NO: 4017448 - RNA, 16 nt, Human T-lymphotropic virus 1
cuggcaagccccuccc

SEQ ID NO: 4017449 - RNA, 18 nt, Human T-lymphotropic virus 1
cuggcaagccccucccau

SEQ ID NO: 4017450 - RNA, 12 nt, Human T-lymphotropic virus 1
cuggcaccacca

SEQ ID NO: 4017451 - RNA, 15 nt, Human T-lymphotropic virus 1
cuggccaugggagcc

SEQ ID NO: 4017452 - RNA, 17 nt, Human T-lymphotropic virus 1
cuggcccauauccugca

SEQ ID NO: 4017453 - RNA, 21 nt, Human T-lymphotropic virus 1
cuggcuugucuccgcccuggc

SEQ ID NO: 4017454 - RNA, 14 nt, Human T-lymphotropic virus 1
cugggcgcuaccug

SEQ ID NO: 4017455 - RNA, 16 nt, Human T-lymphotropic virus 1
cuguaaaccaagcaca

SEQ ID NO: 4017456 - RNA, 15 nt, Human T-lymphotropic virus 1
cuguacacccucugg

SEQ ID NO: 4017457 - RNA, 17 nt, Human T-lymphotropic virus 1
cugucacagaacugccg

SEQ ID NO: 4017458 - RNA, 20 nt, Human T-lymphotropic virus 1
cugucauaacucccucaucc

SEQ ID NO: 4017459 - RNA, 21 nt, Human T-lymphotropic virus 1
cugucauaacucccucauccu

SEQ ID NO: 4017460 - RNA, 23 nt, Human T-lymphotropic virus 1
cuguccugcagcucucuccugca

SEQ ID NO: 4017461 - RNA, 14 nt, Human T-lymphotropic virus 1
cuguggugccuccu

SEQ ID NO: 4017462 - RNA, 20 nt, Human T-lymphotropic virus 1
cuguuucgccuucucagccc

SEQ ID NO: 4017463 - RNA, 21 nt, Human T-lymphotropic virus 1
cuuaagguccuuaccccgcca

SEQ ID NO: 4017464 - RNA, 14 nt, Human T-lymphotropic virus 1
cuucaagaagcugc

SEQ ID NO: 4017465 - RNA, 13 nt, Human T-lymphotropic virus 1
cuucaccacuccc

SEQ ID NO: 4017466 - RNA, 20 nt, Human T-lymphotropic virus 1
cuuccucuucuccucagccc

SEQ ID NO: 4017467 - RNA, 23 nt, Human T-lymphotropic virus 1
cuuccuuuucaaauacucagcaa

SEQ ID NO: 4017468 - RNA, 12 nt, Human T-lymphotropic virus 1
cuucucagcccc

SEQ ID NO: 4017469 - RNA, 14 nt, Human T-lymphotropic virus 1
cuucuccucagccc

SEQ ID NO: 4017470 - RNA, 14 nt, Human T-lymphotropic virus 1
cuucuccucuuccu

SEQ ID NO: 4017471 - RNA, 20 nt, Human T-lymphotropic virus 1
cuugcccuaggcaccuucca

SEQ ID NO: 4017472 - RNA, 16 nt, Human T-lymphotropic virus 1
cuuguccuuuaacucu

SEQ ID NO: 4017473 - RNA, 17 nt, Human T-lymphotropic virus 1
cuuucaggcccuccugc

SEQ ID NO: 4017474 - RNA, 18 nt, Human T-lymphotropic virus 1
cuuuucaaauacucagca

SEQ ID NO: 4017475 - RNA, 12 nt, Human T-lymphotropic virus 1
cuuuuccagccu

SEQ ID NO: 4017476 - RNA, 22 nt, Human T-lymphotropic virus 1
cuuuucuuaaaacaacugcccc

SEQ ID NO: 4017477 - RNA, 14 nt, Human T-lymphotropic virus 1
gaacaccucccaag

SEQ ID NO: 4017478 - RNA, 21 nt, Human T-lymphotropic virus 1
gaagccaccgggaaccaccca

SEQ ID NO: 4017479 - RNA, 17 nt, Human T-lymphotropic virus 1
gaagucagcggccuucu

SEQ ID NO: 4017480 - RNA, 23 nt, Human T-lymphotropic virus 1
ccccaugugauuuuuugccaccc

SEQ ID NO: 4017481 - RNA, 20 nt, Human T-lymphotropic virus 1
ccccauuggcuccugugaaa

SEQ ID NO: 4017482 - RNA, 15 nt, Human T-lymphotropic virus 1
cccccaacuccugca

SEQ ID NO: 4017483 - RNA, 18 nt, Human T-lymphotropic virus 1
ccccccuuuuccuuguca

SEQ ID NO: 4017484 - RNA, 13 nt, Human T-lymphotropic virus 1
ccccuacuggaaa

SEQ ID NO: 4017485 - RNA, 20 nt, Human T-lymphotropic virus 1
ccccugacuuguccagccug

SEQ ID NO: 4017486 - RNA, 21 nt, Human T-lymphotropic virus 1
ccccugacuuguccagccugc

SEQ ID NO: 4017487 - RNA, 15 nt, Human T-lymphotropic virus 1
ccccuguccugcagc

SEQ ID NO: 4017488 - RNA, 22 nt, Human T-lymphotropic virus 1
ccccuuucaggcccuccugccc

SEQ ID NO: 4017489 - RNA, 16 nt, Human T-lymphotropic virus 1
cccgaaaucagccagu

SEQ ID NO: 4017490 - RNA, 13 nt, Human T-lymphotropic virus 1
cccgacuccagcc

SEQ ID NO: 4017491 - RNA, 23 nt, Human T-lymphotropic virus 1
cccgccaaucacucauacaaccc

SEQ ID NO: 4017492 - RNA, 21 nt, Human T-lymphotropic virus 1
cccgcgagguggcgcuuuccc

SEQ ID NO: 4017493 - RNA, 21 nt, Human T-lymphotropic virus 1
cccggcacuagauacgccugg

SEQ ID NO: 4017494 - RNA, 22 nt, Human T-lymphotropic virus 1
cccgggggcuuagagccucuca

SEQ ID NO: 4017495 - RNA, 15 nt, Human T-lymphotropic virus 1
cccgucggaggcccc

SEQ ID NO: 4017496 - RNA, 16 nt, Human T-lymphotropic virus 1
cccuacagccacccug

SEQ ID NO: 4017497 - RNA, 21 nt, Human T-lymphotropic virus 1
cccuacuuugcuuucacuguc

SEQ ID NO: 4017498 - RNA, 19 nt, Human T-lymphotropic virus 1
cccucaccacuccaggccu

SEQ ID NO: 4017499 - RNA, 23 nt, Human T-lymphotropic virus 1
cccucccaugcggaccugcaacu

SEQ ID NO: 4017500 - RNA, 16 nt, Human T-lymphotropic virus 1
cccuccuuccuccagg

SEQ ID NO: 4017501 - RNA, 16 nt, Human T-lymphotropic virus 1
cccucgacuccccucc

SEQ ID NO: 4017502 - RNA, 20 nt, Human T-lymphotropic virus 1
cccugacuuguccagccugc

SEQ ID NO: 4017503 - RNA, 20 nt, Human T-lymphotropic virus 1
cccuguccugcagcucucuc

SEQ ID NO: 4017504 - RNA, 22 nt, Human T-lymphotropic virus 1
cccuucuagucgacgcuccagg

SEQ ID NO: 4017505 - RNA, 21 nt, Human T-lymphotropic virus 1
cccuugucgcgcuacuccuuc

SEQ ID NO: 4017506 - RNA, 23 nt, Human T-lymphotropic virus 1
ccgcaguagacuaguccaaaccc

SEQ ID NO: 4017507 - RNA, 20 nt, Human T-lymphotropic virus 1
ccgccuguggugccuccuga

SEQ ID NO: 4017508 - RNA, 14 nt, Human T-lymphotropic virus 1
ccgcggcuuuccuc

SEQ ID NO: 4017509 - RNA, 16 nt, Human T-lymphotropic virus 1
ccggaggacagcucag

SEQ ID NO: 4017510 - RNA, 16 nt, Human T-lymphotropic virus 1
ccggcgcugcucucau

SEQ ID NO: 4017511 - RNA, 14 nt, Human T-lymphotropic virus 1
ccggcuccaugucc

SEQ ID NO: 4017512 - RNA, 20 nt, Human T-lymphotropic virus 1
ccggcuccaugucccucgcc

SEQ ID NO: 4017513 - RNA, 15 nt, Human T-lymphotropic virus 1
ccggcucuccacgcu

SEQ ID NO: 4017514 - RNA, 18 nt, Human T-lymphotropic virus 1
ccgucacgcugacagccu

SEQ ID NO: 4017515 - RNA, 22 nt, Human T-lymphotropic virus 1
ccgucacgcugacagccuggca

SEQ ID NO: 4017516 - RNA, 17 nt, Human T-lymphotropic virus 1
ccguggaggcuccucaa

SEQ ID NO: 4017517 - RNA, 16 nt, Human T-lymphotropic virus 1
ccuaaccaagacccaa

SEQ ID NO: 4017518 - RNA, 19 nt, Human T-lymphotropic virus 1
ccuaaccacaucuggcaag

SEQ ID NO: 4017519 - RNA, 22 nt, Human T-lymphotropic virus 1
ccuaccccacacuagccagugc

SEQ ID NO: 4017520 - RNA, 20 nt, Human T-lymphotropic virus 1
ccuaccuuacgccagccccu

SEQ ID NO: 4017521 - RNA, 15 nt, Human T-lymphotropic virus 1
ccuacuggccaccug

SEQ ID NO: 4017522 - RNA, 23 nt, Human T-lymphotropic virus 1
ccuauacaggagccgucuccagc

SEQ ID NO: 4017523 - RNA, 13 nt, Human T-lymphotropic virus 1
ccuauacucuccc

SEQ ID NO: 4017524 - RNA, 18 nt, Human T-lymphotropic virus 1
ccuccagccuccccugcc

SEQ ID NO: 4017525 - RNA, 20 nt, Human T-lymphotropic virus 1
ccuccgcccgcuuccugcgc

SEQ ID NO: 4017526 - RNA, 15 nt, Human T-lymphotropic virus 1
ccuccuucuccugca

SEQ ID NO: 4017527 - RNA, 21 nt, Human T-lymphotropic virus 1
ccucucccaucaaauccuccu

SEQ ID NO: 4017528 - RNA, 23 nt, Human T-lymphotropic virus 1
ccucuggggaggcuccguugucu

SEQ ID NO: 4017529 - RNA, 13 nt, Human T-lymphotropic virus 1
ccucuucuccuca

SEQ ID NO: 4017530 - RNA, 22 nt, Human T-lymphotropic virus 1
ccugaacuacguccgccgucua

SEQ ID NO: 4017531 - RNA, 16 nt, Human T-lymphotropic virus 1
ccugacuuguccagcc

SEQ ID NO: 4017532 - RNA, 17 nt, Human T-lymphotropic virus 1
ccugacuuguccagccu

SEQ ID NO: 4017533 - RNA, 18 nt, Human T-lymphotropic virus 1
ccugaucccaucuccagg

SEQ ID NO: 4017534 - RNA, 22 nt, Human T-lymphotropic virus 1
ccugcaauccugcccagccagu

SEQ ID NO: 4017535 - RNA, 14 nt, Human T-lymphotropic virus 1
ccugcagcccauuc

SEQ ID NO: 4017536 - RNA, 21 nt, Human T-lymphotropic virus 1
ccugccgcaaaaauaacccac

SEQ ID NO: 4017537 - RNA, 22 nt, Human T-lymphotropic virus 1
ccugccuauauuucccaagacu

SEQ ID NO: 4017538 - RNA, 23 nt, Human T-lymphotropic virus 1
ccugggggcagcuacuugccuca

SEQ ID NO: 4017539 - RNA, 16 nt, Human T-lymphotropic virus 1
ccugucuuuuccagac

SEQ ID NO: 4017540 - RNA, 21 nt, Human T-lymphotropic virus 1
ccuuaauaccgaacccagcca

SEQ ID NO: 4017541 - RNA, 14 nt, Human T-lymphotropic virus 1
ccuuaugccagugu

SEQ ID NO: 4017542 - RNA, 13 nt, Human T-lymphotropic virus 1
ccuucucagcccc

SEQ ID NO: 4017543 - RNA, 14 nt, Human T-lymphotropic virus 1
ccuucuccuccgcc

SEQ ID NO: 4017544 - RNA, 23 nt, Human T-lymphotropic virus 1
ccuucuccuccgcccgcuuccug

SEQ ID NO: 4017545 - RNA, 12 nt, Human T-lymphotropic virus 1
ccuugccuguuu

SEQ ID NO: 4017546 - RNA, 15 nt, Human T-lymphotropic virus 1
ccuuggccucucaca

SEQ ID NO: 4017547 - RNA, 20 nt, Human T-lymphotropic virus 1
ccuugggcuagaacaccucc

SEQ ID NO: 4017548 - RNA, 23 nt, Human T-lymphotropic virus 1
ccuuuaacucuuccuccaaggau

SEQ ID NO: 4017549 - RNA, 13 nt, Human T-lymphotropic virus 1
ccuuuuccagccu

SEQ ID NO: 4017550 - RNA, 15 nt, Human T-lymphotropic virus 1
cgacaaccccucacc

SEQ ID NO: 4017551 - RNA, 15 nt, Human T-lymphotropic virus 1
cgacauuacccauuu

SEQ ID NO: 4017552 - RNA, 13 nt, Human T-lymphotropic virus 1
cgaccugcuggcc

SEQ ID NO: 4017553 - RNA, 22 nt, Human T-lymphotropic virus 1
cgcagccauaccaaucuaccug

SEQ ID NO: 4017554 - RNA, 13 nt, Human T-lymphotropic virus 1
cgcaucucuccuu

SEQ ID NO: 4017555 - RNA, 17 nt, Human T-lymphotropic virus 1
cgcaucucuccuucacg

SEQ ID NO: 4017556 - RNA, 15 nt, Human T-lymphotropic virus 1
cgccauacuacccau

SEQ ID NO: 4017557 - RNA, 20 nt, Human T-lymphotropic virus 1
cgccccuccucuacucuccc

SEQ ID NO: 4017558 - RNA, 23 nt, Human T-lymphotropic virus 1
cgcccuacuggccaccuguccag

SEQ ID NO: 4017559 - RNA, 17 nt, Human T-lymphotropic virus 1
cgccgugccuucuccuc

SEQ ID NO: 4017560 - RNA, 14 nt, Human T-lymphotropic virus 1
cgccguggccuacu

SEQ ID NO: 4017561 - RNA, 18 nt, Human T-lymphotropic virus 1
cgccuuaccugaggccgc

SEQ ID NO: 4017562 - RNA, 15 nt, Human T-lymphotropic virus 1
cgccuucucagcccc

SEQ ID NO: 4017563 - RNA, 17 nt, Human T-lymphotropic virus 1
cgcggcuuuccucuucu

SEQ ID NO: 4017564 - RNA, 21 nt, Human T-lymphotropic virus 1
cgcuaguucugcccaguggau

SEQ ID NO: 4017565 - RNA, 19 nt, Human T-lymphotropic virus 1
cgcucacggcgcuccugcu

SEQ ID NO: 4017566 - RNA, 18 nt, Human T-lymphotropic virus 1
cgcucuaauggcauucuu

SEQ ID NO: 4017567 - RNA, 11 nt, Human T-lymphotropic virus 1
cgcuuuccccc

SEQ ID NO: 4017568 - RNA, 22 nt, Human T-lymphotropic virus 1
cggaaggcccuggaggcaggcc

SEQ ID NO: 4017569 - RNA, 17 nt, Human T-lymphotropic virus 1
cggaggacagcucagca

SEQ ID NO: 4017570 - RNA, 21 nt, Human T-lymphotropic virus 1
cggaggcuauuauucagccuc

SEQ ID NO: 4017571 - RNA, 15 nt, Human T-lymphotropic virus 1
cggaguggcuggcag

SEQ ID NO: 4017572 - RNA, 16 nt, Human T-lymphotropic virus 1
cggauccaccucccag

SEQ ID NO: 4017573 - RNA, 18 nt, Human T-lymphotropic virus 1
cggauccaccucccaggc

SEQ ID NO: 4017574 - RNA, 18 nt, Human T-lymphotropic virus 1
cggcgcuccugcucuucc

SEQ ID NO: 4017575 - RNA, 21 nt, Human T-lymphotropic virus 1
cggcuccaugucccucgccuc

SEQ ID NO: 4017576 - RNA, 20 nt, Human T-lymphotropic virus 1
cggcucuccacgcuuugccu

SEQ ID NO: 4017577 - RNA, 20 nt, Human T-lymphotropic virus 1
cgggccacuaacucucuaac

SEQ ID NO: 4017578 - RNA, 22 nt, Human T-lymphotropic virus 1
cgucacgcccuacuggccaccu

SEQ ID NO: 4017579 - RNA, 21 nt, Human T-lymphotropic virus 1
cgucuccccccggaggacagc

SEQ ID NO: 4017580 - RNA, 14 nt, Human T-lymphotropic virus 1
cguggaggcuccuc

SEQ ID NO: 4017581 - RNA, 21 nt, Human T-lymphotropic virus 1
accacaucgccuccagccucc

SEQ ID NO: 4017582 - RNA, 13 nt, Human T-lymphotropic virus 1
accaugagcccca

SEQ ID NO: 4017583 - RNA, 18 nt, Human T-lymphotropic virus 1
acccagccaacugccucc

SEQ ID NO: 4017584 - RNA, 23 nt, Human T-lymphotropic virus 1
acccagucuacguguuuggagac

SEQ ID NO: 4017585 - RNA, 15 nt, Human T-lymphotropic virus 1
acccccaacuccugc

SEQ ID NO: 4017586 - RNA, 18 nt, Human T-lymphotropic virus 1
acccccauuacucucuua

SEQ ID NO: 4017587 - RNA, 15 nt, Human T-lymphotropic virus 1
accccgccaaucacu

SEQ ID NO: 4017588 - RNA, 21 nt, Human T-lymphotropic virus 1
accccucauuucuacucucac

SEQ ID NO: 4017589 - RNA, 13 nt, Human T-lymphotropic virus 1
acccuccuuccuc

SEQ ID NO: 4017590 - RNA, 14 nt, Human T-lymphotropic virus 1
acccuccuuccucc

SEQ ID NO: 4017591 - RNA, 20 nt, Human T-lymphotropic virus 1
acccuugggcagcaccuccc

SEQ ID NO: 4017592 - RNA, 15 nt, Human T-lymphotropic virus 1
accgccccuccucua

SEQ ID NO: 4017593 - RNA, 23 nt, Human T-lymphotropic virus 1
accggcuccaugucccucgccuc

SEQ ID NO: 4017594 - RNA, 18 nt, Human T-lymphotropic virus 1
accuaaacaguuccagcc

SEQ ID NO: 4017595 - RNA, 21 nt, Human T-lymphotropic virus 1
accugaucccaucuccaggcu

SEQ ID NO: 4017596 - RNA, 19 nt, Human T-lymphotropic virus 1
accugcaacuacucucaga

SEQ ID NO: 4017597 - RNA, 13 nt, Human T-lymphotropic virus 1
accugcuggcccu

SEQ ID NO: 4017598 - RNA, 15 nt, Human T-lymphotropic virus 1
accuggccccuccug

SEQ ID NO: 4017599 - RNA, 20 nt, Human T-lymphotropic virus 1
accuuggccucucacagugg

SEQ ID NO: 4017600 - RNA, 18 nt, Human T-lymphotropic virus 1
acgacaaccccucaccuc

SEQ ID NO: 4017601 - RNA, 17 nt, Human T-lymphotropic virus 1
acgacaccuccccucgc

SEQ ID NO: 4017602 - RNA, 18 nt, Human T-lymphotropic virus 1
acgcccuacuggccaccu

SEQ ID NO: 4017603 - RNA, 22 nt, Human T-lymphotropic virus 1
acgcguuaucggcucagcucua

SEQ ID NO: 4017604 - RNA, 18 nt, Human T-lymphotropic virus 1
acgcuuugccugacccug

SEQ ID NO: 4017605 - RNA, 14 nt, Human T-lymphotropic virus 1
acgucuccccccgg

SEQ ID NO: 4017606 - RNA, 21 nt, Human T-lymphotropic virus 1
acuaauucccaugucucaaua

SEQ ID NO: 4017607 - RNA, 17 nt, Human T-lymphotropic virus 1
acucagcaaucugcuuu

SEQ ID NO: 4017608 - RNA, 22 nt, Human T-lymphotropic virus 1
acuccagccgaucccagagaca

SEQ ID NO: 4017609 - RNA, 14 nt, Human T-lymphotropic virus 1
acuccccuccuucc

SEQ ID NO: 4017610 - RNA, 14 nt, Human T-lymphotropic virus 1
acucucccacucua

SEQ ID NO: 4017611 - RNA, 16 nt, Human T-lymphotropic virus 1
acugccucccaccgcc

SEQ ID NO: 4017612 - RNA, 14 nt, Human T-lymphotropic virus 1
acugucccacagca

SEQ ID NO: 4017613 - RNA, 18 nt, Human T-lymphotropic virus 1
acuuguccagccugccaa

SEQ ID NO: 4017614 - RNA, 19 nt, Human T-lymphotropic virus 1
agacccgucggaggccccg

SEQ ID NO: 4017615 - RNA, 14 nt, Human T-lymphotropic virus 1
agaccuacacaguu

SEQ ID NO: 4017616 - RNA, 17 nt, Human T-lymphotropic virus 1
agacgccuuuuuccaaa

SEQ ID NO: 4017617 - RNA, 22 nt, Human T-lymphotropic virus 1
agacuaguccaaacccugcccc

SEQ ID NO: 4017618 - RNA, 23 nt, Human T-lymphotropic virus 1
agagacacauucccucagcaaua

SEQ ID NO: 4017619 - RNA, 16 nt, Human T-lymphotropic virus 1
agaucaggcccuacag

SEQ ID NO: 4017620 - RNA, 22 nt, Human T-lymphotropic virus 1
agauucaagcuauagucuccuc

SEQ ID NO: 4017621 - RNA, 19 nt, Human T-lymphotropic virus 1
agcacaguuuccuccuccu

SEQ ID NO: 4017622 - RNA, 19 nt, Human T-lymphotropic virus 1
agcacuaauuauacuugca

SEQ ID NO: 4017623 - RNA, 13 nt, Human T-lymphotropic virus 1
agcagcaguggcc

SEQ ID NO: 4017624 - RNA, 14 nt, Human T-lymphotropic virus 1
agccaucuuuagua

SEQ ID NO: 4017625 - RNA, 13 nt, Human T-lymphotropic virus 1
agccccccaccug

SEQ ID NO: 4017626 - RNA, 15 nt, Human T-lymphotropic virus 1
agccccuugucucca

SEQ ID NO: 4017627 - RNA, 19 nt, Human T-lymphotropic virus 1
agccccuugucuccacuug

SEQ ID NO: 4017628 - RNA, 14 nt, Human T-lymphotropic virus 1
agccuccccugcca

SEQ ID NO: 4017629 - RNA, 15 nt, Human T-lymphotropic virus 1
agccuccccugccaa

SEQ ID NO: 4017630 - RNA, 20 nt, Human T-lymphotropic virus 1
agcuacgacaccuccccucg

SEQ ID NO: 4017631 - RNA, 15 nt, Human T-lymphotropic virus 1
agcuacuugccucag

SEQ ID NO: 4017632 - RNA, 13 nt, Human T-lymphotropic virus 1
agcugcaugccca

SEQ ID NO: 4017633 - RNA, 12 nt, Human T-lymphotropic virus 1
aggacagcucag

SEQ ID NO: 4017634 - RNA, 17 nt, Human T-lymphotropic virus 1
aggacagcucagcacca

SEQ ID NO: 4017635 - RNA, 18 nt, Human T-lymphotropic virus 1
aggagccgucuccagccc

SEQ ID NO: 4017636 - RNA, 17 nt, Human T-lymphotropic virus 1
aggcaccuuccaaggca

SEQ ID NO: 4017637 - RNA, 16 nt, Human T-lymphotropic virus 1
aggcagguccucucag

SEQ ID NO: 4017638 - RNA, 20 nt, Human T-lymphotropic virus 1
aggcccuggaggcaggccau

SEQ ID NO: 4017639 - RNA, 20 nt, Human T-lymphotropic virus 1
aggcgacauuacccauuuca

SEQ ID NO: 4017640 - RNA, 13 nt, Human T-lymphotropic virus 1
aggcuaggcccug

SEQ ID NO: 4017641 - RNA, 19 nt, Human T-lymphotropic virus 1
aggcuauuauucagccucu

SEQ ID NO: 4017642 - RNA, 19 nt, Human T-lymphotropic virus 1
agguaaguuuagagcucag

SEQ ID NO: 4017643 - RNA, 21 nt, Human T-lymphotropic virus 1
aguaaguuacuccagcuacca

SEQ ID NO: 4017644 - RNA, 12 nt, Human T-lymphotropic virus 1
aguacuacccca

SEQ ID NO: 4017645 - RNA, 15 nt, Human T-lymphotropic virus 1
aguacuuuacugaca

SEQ ID NO: 4017646 - RNA, 12 nt, Human T-lymphotropic virus 1
aguaugcugccc

SEQ ID NO: 4017647 - RNA, 23 nt, Human T-lymphotropic virus 1
aguauucccaguuaaaaaagcca

SEQ ID NO: 4017648 - RNA, 15 nt, Human T-lymphotropic virus 1
agucagcggccuucu

SEQ ID NO: 4017649 - RNA, 19 nt, Human T-lymphotropic virus 1
aguccaaacccugccccuc

SEQ ID NO: 4017650 - RNA, 19 nt, Human T-lymphotropic virus 1
aguccuuccgauagccuug

SEQ ID NO: 4017651 - RNA, 22 nt, Human T-lymphotropic virus 1
aguguuccuaucuuacuccacc

SEQ ID NO: 4017652 - RNA, 17 nt, Human T-lymphotropic virus 1
aguguuuacucuuuccc

SEQ ID NO: 4017653 - RNA, 12 nt, Human T-lymphotropic virus 1
aguucugccccc

SEQ ID NO: 4017654 - RNA, 18 nt, Human T-lymphotropic virus 1
aguuuccuccuccuccuu

SEQ ID NO: 4017655 - RNA, 21 nt, Human T-lymphotropic virus 1
auacaggagccgucuccagcc

SEQ ID NO: 4017656 - RNA, 16 nt, Human T-lymphotropic virus 1
auacaggcgccagcug

SEQ ID NO: 4017657 - RNA, 19 nt, Human T-lymphotropic virus 1
auacaguacucuuccuuuc

SEQ ID NO: 4017658 - RNA, 22 nt, Human T-lymphotropic virus 1
auacuacccauguccccuacaa

SEQ ID NO: 4017659 - RNA, 16 nt, Human T-lymphotropic virus 1
auagaaaaacuccucu

SEQ ID NO: 4017660 - RNA, 16 nt, Human T-lymphotropic virus 1
aucaccugggacccca

SEQ ID NO: 4017661 - RNA, 23 nt, Human T-lymphotropic virus 1
aucauuaccuucggacccuugcc

SEQ ID NO: 4017662 - RNA, 15 nt, Human T-lymphotropic virus 1
auccaaccagcuccg

SEQ ID NO: 4017663 - RNA, 22 nt, Human T-lymphotropic virus 1
aucccccgggggcuuagagccu

SEQ ID NO: 4017664 - RNA, 20 nt, Human T-lymphotropic virus 1
auccuauggacuacucugcc

SEQ ID NO: 4017665 - RNA, 15 nt, Human T-lymphotropic virus 1
auccugcgcucuugc

SEQ ID NO: 4017666 - RNA, 16 nt, Human T-lymphotropic virus 1
aucgccuccagccucc

SEQ ID NO: 4017667 - RNA, 18 nt, Human T-lymphotropic virus 1
aucgucacgcccuacugg

SEQ ID NO: 4017668 - RNA, 16 nt, Human T-lymphotropic virus 1
aucuccacccaaaccu

SEQ ID NO: 4017669 - RNA, 18 nt, Human T-lymphotropic virus 1
aucucucaucaucuuccc

SEQ ID NO: 4017670 - RNA, 11 nt, Human T-lymphotropic virus 1
aucucuccuuc

SEQ ID NO: 4017671 - RNA, 18 nt, Human T-lymphotropic virus 1
aucugaccaccccagugu

SEQ ID NO: 4017672 - RNA, 22 nt, Human T-lymphotropic virus 1
augacaaugaccaugagcccca

SEQ ID NO: 4017673 - RNA, 21 nt, Human T-lymphotropic virus 1
augacauucuccuggcaagcc

SEQ ID NO: 4017674 - RNA, 17 nt, Human T-lymphotropic virus 1
augcuguuucgccuucu

SEQ ID NO: 4017675 - RNA, 20 nt, Human T-lymphotropic virus 1
auggcagcuucaccacuccc

SEQ ID NO: 4017676 - RNA, 20 nt, Human T-lymphotropic virus 1
auguauuaaccaacugccac

SEQ ID NO: 4017677 - RNA, 15 nt, Human T-lymphotropic virus 1
augucaauuuuacuc

SEQ ID NO: 4017678 - RNA, 18 nt, Human T-lymphotropic virus 1
auuacagcaaguccuucc

SEQ ID NO: 4017679 - RNA, 12 nt, Human T-lymphotropic virus 1
auuauucagccu

SEQ ID NO: 4017680 - RNA, 13 nt, Human T-lymphotropic virus 1
auuauucagccuc

SEQ ID NO: 4017681 - RNA, 21 nt, Human T-lymphotropic virus 1
auucaagcuauagucuccucc

SEQ ID NO: 4017682 - RNA, 23 nt, Human T-lymphotropic virus 1
auucccaguuaaaaaagccaaug

SEQ ID NO: 4017683 - RNA, 21 nt, Human T-lymphotropic virus 1
auugcacaguaugcugcccag

SEQ ID NO: 4017684 - RNA, 23 nt, Human T-lymphotropic virus 1
auuuccucuuugcuccaggccau

SEQ ID NO: 4017685 - RNA, 17 nt, Human T-lymphotropic virus 1
caaaaacaacugggcca

SEQ ID NO: 4017686 - RNA, 19 nt, Human T-lymphotropic virus 1
caaacaucgaaacagcccu

SEQ ID NO: 4017687 - RNA, 18 nt, Human T-lymphotropic virus 1
caaauaauuucaccuaau

SEQ ID NO: 4017688 - RNA, 20 nt, Human T-lymphotropic virus 1
caaccacaucgccuccagcc

SEQ ID NO: 4017689 - RNA, 13 nt, Human T-lymphotropic virus 1
caacuacacuagc

SEQ ID NO: 4017690 - RNA, 21 nt, Human T-lymphotropic virus 1
caacugccccauuggcuccug

SEQ ID NO: 4017691 - RNA, 15 nt, Human T-lymphotropic virus 1
caagccguccucagg

SEQ ID NO: 4017692 - RNA, 17 nt, Human T-lymphotropic virus 1
caaggacuccaccucgc

SEQ ID NO: 4017693 - RNA, 14 nt, Human T-lymphotropic virus 1
caaggcagguccuc

SEQ ID NO: 4017694 - RNA, 17 nt, Human T-lymphotropic virus 1
caaggcagguccucuca

SEQ ID NO: 4017695 - RNA, 18 nt, Human T-lymphotropic virus 1
caauaaacaaacccauug

SEQ ID NO: 4017696 - RNA, 16 nt, Human T-lymphotropic virus 1
caauccugcccagcca

SEQ ID NO: 4017697 - RNA, 23 nt, Human T-lymphotropic virus 1
caauggcccugccuauauuuccc

SEQ ID NO: 4017698 - RNA, 14 nt, Human T-lymphotropic virus 1
cacaucgccuccag

SEQ ID NO: 4017699 - RNA, 19 nt, Human T-lymphotropic virus 1
caccccucauuucuacucu

SEQ ID NO: 4017700 - RNA, 14 nt, Human T-lymphotropic virus 1
cacccuccuuccuc

SEQ ID NO: 4017701 - RNA, 20 nt, Human T-lymphotropic virus 1
cacccuugucgcgcuacucc

SEQ ID NO: 4017702 - RNA, 13 nt, Human T-lymphotropic virus 1
caccgccccuccu

SEQ ID NO: 4017703 - RNA, 20 nt, Human T-lymphotropic virus 1
caccgccccuccucuacucu

SEQ ID NO: 4017704 - RNA, 14 nt, Human T-lymphotropic virus 1
caccucccaaggcc

SEQ ID NO: 4017705 - RNA, 14 nt, Human T-lymphotropic virus 1
caccuuccaaggca

SEQ ID NO: 4017706 - RNA, 16 nt, Human T-lymphotropic virus 1
cacgcauacggcucaa

SEQ ID NO: 4017707 - RNA, 22 nt, Human T-lymphotropic virus 1
cacgcccuacuggccaccuguc

SEQ ID NO: 4017708 - RNA, 15 nt, Human T-lymphotropic virus 1
cacgcugacagccug

SEQ ID NO: 4017709 - RNA, 13 nt, Human T-lymphotropic virus 1
cacuaacucucua

SEQ ID NO: 4017710 - RNA, 20 nt, Human T-lymphotropic virus 1
cacucaacccucaccacucc

SEQ ID NO: 4017711 - RNA, 22 nt, Human T-lymphotropic virus 1
cacuuacaaacuauagaccuua

SEQ ID NO: 4017712 - RNA, 17 nt, Human T-lymphotropic virus 1
cacuuuaagcucaccuc

SEQ ID NO: 4017713 - RNA, 14 nt, Human T-lymphotropic virus 1
cagaacgccuccag

SEQ ID NO: 4017714 - RNA, 17 nt, Human T-lymphotropic virus 1
cagaacgccuccaggcc

SEQ ID NO: 4017715 - RNA, 13 nt, Human T-lymphotropic virus 1
cagaccagccacc

SEQ ID NO: 4017716 - RNA, 13 nt, Human T-lymphotropic virus 1
cagaccuccggga

SEQ ID NO: 4017717 - RNA, 14 nt, Human T-lymphotropic virus 1
cagacggcccucac

SEQ ID NO: 4017718 - RNA, 22 nt, Human T-lymphotropic virus 1
cagacggcccucacacugcaag

SEQ ID NO: 4017719 - RNA, 19 nt, Human T-lymphotropic virus 1
cagagacacauucccucag

SEQ ID NO: 4017720 - RNA, 15 nt, Human T-lymphotropic virus 1
cagccacccaaagac

SEQ ID NO: 4017721 - RNA, 18 nt, Human T-lymphotropic virus 1
cagcccauucggcaagcc

SEQ ID NO: 4017722 - RNA, 16 nt, Human T-lymphotropic virus 1
cagccccuugucucca

SEQ ID NO: 4017723 - RNA, 13 nt, Human T-lymphotropic virus 1
cagccgaucccag

SEQ ID NO: 4017724 - RNA, 20 nt, Human T-lymphotropic virus 1
cagccucuuauucagacccu

SEQ ID NO: 4017725 - RNA, 21 nt, Human T-lymphotropic virus 1
cagccugcuagggcacccguc

SEQ ID NO: 4017726 - RNA, 12 nt, Human T-lymphotropic virus 1
cagcggccuucu

SEQ ID NO: 4017727 - RNA, 18 nt, Human T-lymphotropic virus 1
cagcuacgacaccucccc

SEQ ID NO: 4017728 - RNA, 16 nt, Human T-lymphotropic virus 1
cagcuacuugccucag

SEQ ID NO: 4017729 - RNA, 18 nt, Human T-lymphotropic virus 1
cagcuacuugccucagcu

SEQ ID NO: 4017730 - RNA, 21 nt, Human T-lymphotropic virus 1
cagcucagcaccagcucaggc

SEQ ID NO: 4017731 - RNA, 16 nt, Human T-lymphotropic virus 1
cagcucaggcuaggcc

SEQ ID NO: 4017732 - RNA, 17 nt, Human T-lymphotropic virus 1
cagcucggggccuuccu

SEQ ID NO: 4017733 - RNA, 17 nt, Human T-lymphotropic virus 1
cagcucuacaguuccuu

SEQ ID NO: 4017734 - RNA, 21 nt, Human T-lymphotropic virus 1
cagcuguguuauuacucgaca

SEQ ID NO: 4017735 - RNA, 16 nt, Human T-lymphotropic virus 1
cagcuucaccacuccc

SEQ ID NO: 4017736 - RNA, 21 nt, Human T-lymphotropic virus 1
caggcccccuuucaggcccuc

SEQ ID NO: 4017737 - RNA, 20 nt, Human T-lymphotropic virus 1
caggcccuacagccacccug

SEQ ID NO: 4017738 - RNA, 13 nt, Human T-lymphotropic virus 1
caguaugcugccc

SEQ ID NO: 4017739 - RNA, 21 nt, Human T-lymphotropic virus 1
caguucugcccccucauccuc

SEQ ID NO: 4017740 - RNA, 18 nt, Human T-lymphotropic virus 1
caguuggagucuccucau

SEQ ID NO: 4017741 - RNA, 13 nt, Human T-lymphotropic virus 1
cauaacucccuca

SEQ ID NO: 4017742 - RNA, 14 nt, Human T-lymphotropic virus 1
cauaagcucagacc

SEQ ID NO: 4017743 - RNA, 20 nt, Human T-lymphotropic virus 1
cauaccuagggugccaauca

SEQ ID NO: 4017744 - RNA, 14 nt, Human T-lymphotropic virus 1
cauacggcucaaua

SEQ ID NO: 4017745 - RNA, 17 nt, Human T-lymphotropic virus 1
caucaacccccaacucc

SEQ ID NO: 4017746 - RNA, 15 nt, Human T-lymphotropic virus 1
caucaccuggccccu

SEQ ID NO: 4017747 - RNA, 17 nt, Human T-lymphotropic virus 1
caucaccuggccccucc

SEQ ID NO: 4017748 - RNA, 19 nt, Human T-lymphotropic virus 1
caucauaacaucuccaccc

SEQ ID NO: 4017749 - RNA, 18 nt, Human T-lymphotropic virus 1
caucaucuucccccgggc

SEQ ID NO: 4017750 - RNA, 19 nt, Human T-lymphotropic virus 1
caucccuguaaaccaagca

SEQ ID NO: 4017751 - RNA, 22 nt, Human T-lymphotropic virus 1
cauccgccguggccuacucccu

SEQ ID NO: 4017752 - RNA, 23 nt, Human T-lymphotropic virus 1
cauccucggugauuacagcccca

SEQ ID NO: 4017753 - RNA, 22 nt, Human T-lymphotropic virus 1
caucgccuccagccuccccugc

SEQ ID NO: 4017754 - RNA, 20 nt, Human T-lymphotropic virus 1
caucguuagcgcuuccagcc

SEQ ID NO: 4017755 - RNA, 13 nt, Human T-lymphotropic virus 1
caugccccccuac

SEQ ID NO: 4017756 - RNA, 16 nt, Human T-lymphotropic virus 1
cauggaacccacccuu

SEQ ID NO: 4017757 - RNA, 19 nt, Human T-lymphotropic virus 1
cauggaugacauucuccug

SEQ ID NO: 4017758 - RNA, 16 nt, Human T-lymphotropic virus 1
cauggccucuccagcg

SEQ ID NO: 4017759 - RNA, 14 nt, Human T-lymphotropic virus 1
cauucccccuuccg

SEQ ID NO: 4017760 - RNA, 22 nt, Human T-lymphotropic virus 1
cauuuaacuggacccacugcuu

SEQ ID NO: 4017761 - RNA, 18 nt, Human T-lymphotropic virus 1
ccaaaucccccuaccuaa

SEQ ID NO: 4017762 - RNA, 22 nt, Human T-lymphotropic virus 1
ccaacauuccacccuccuuccu

SEQ ID NO: 4017763 - RNA, 11 nt, Human T-lymphotropic virus 1
ccaacugccac

SEQ ID NO: 4017764 - RNA, 14 nt, Human T-lymphotropic virus 1
ccaaggacuccacc

SEQ ID NO: 4017765 - RNA, 17 nt, Human T-lymphotropic virus 1
ccaauuccuccaccagc

SEQ ID NO: 4017766 - RNA, 16 nt, Human T-lymphotropic virus 1
ccacaucgccuccagc

SEQ ID NO: 4017767 - RNA, 15 nt, Human T-lymphotropic virus 1
ccaccaacaccaugg

SEQ ID NO: 4017768 - RNA, 21 nt, Human T-lymphotropic virus 1
ccacccuccuuccuccaggcc

SEQ ID NO: 4017769 - RNA, 13 nt, Human T-lymphotropic virus 1
ccaccucgccuuc

SEQ ID NO: 4017770 - RNA, 20 nt, Human T-lymphotropic virus 1
ccacguucgcagccauacca

SEQ ID NO: 4017771 - RNA, 14 nt, Human T-lymphotropic virus 1
ccacuugcgcucac

SEQ ID NO: 4017772 - RNA, 13 nt, Human T-lymphotropic virus 1
ccagaccagccac

SEQ ID NO: 4017773 - RNA, 14 nt, Human T-lymphotropic virus 1
ccagaccagccacc

SEQ ID NO: 4017774 - RNA, 18 nt, Human T-lymphotropic virus 1
ccagcuaccaugccaccu

SEQ ID NO: 4017775 - RNA, 20 nt, Human T-lymphotropic virus 1
ccagcugcuguacucucaca

SEQ ID NO: 4017776 - RNA, 16 nt, Human T-lymphotropic virus 1
ccaguucugcccccuc

SEQ ID NO: 4017777 - RNA, 18 nt, Human T-lymphotropic virus 1
ccauaccaaucuaccuga

SEQ ID NO: 4017778 - RNA, 21 nt, Human T-lymphotropic virus 1
ccauaccaaucuaccugaucc

SEQ ID NO: 4017779 - RNA, 17 nt, Human T-lymphotropic virus 1
ccauauccucgagcccu

SEQ ID NO: 4017780 - RNA, 15 nt, Human T-lymphotropic virus 1
ccaucaaauccuccu

SEQ ID NO: 4017781 - RNA, 19 nt, Human T-lymphotropic virus 1
ccaucguuagcgcuuccag

SEQ ID NO: 4017782 - RNA, 15 nt, Human T-lymphotropic virus 1
ccaucucugggggac

SEQ ID NO: 4017783 - RNA, 15 nt, Human T-lymphotropic virus 1
uacagccacccugcc

SEQ ID NO: 4017784 - RNA, 16 nt, Human T-lymphotropic virus 1
uacagccccagcugcu

SEQ ID NO: 4017785 - RNA, 13 nt, Human T-lymphotropic virus 1
uacaugccccccu

SEQ ID NO: 4017786 - RNA, 15 nt, Human T-lymphotropic virus 1
uaccacaggggcccu

SEQ ID NO: 4017787 - RNA, 19 nt, Human T-lymphotropic virus 1
uaccugaucccaucuccag

SEQ ID NO: 4017788 - RNA, 18 nt, Human T-lymphotropic virus 1
uaccuucggacccuugcc

SEQ ID NO: 4017789 - RNA, 12 nt, Human T-lymphotropic virus 1
uacgccagcccc

SEQ ID NO: 4017790 - RNA, 19 nt, Human T-lymphotropic virus 1
uacugacaaacccgaccua

SEQ ID NO: 4017791 - RNA, 21 nt, Human T-lymphotropic virus 1
uagaucucucaucaucuuccc

SEQ ID NO: 4017792 - RNA, 23 nt, Human T-lymphotropic virus 1
uagcgcuuccagccccccaccug

SEQ ID NO: 4017793 - RNA, 18 nt, Human T-lymphotropic virus 1
uaguccaaacccugcccc

SEQ ID NO: 4017794 - RNA, 13 nt, Human T-lymphotropic virus 1
uagucccacccug

SEQ ID NO: 4017795 - RNA, 20 nt, Human T-lymphotropic virus 1
uauggacaaucaaccaccua

SEQ ID NO: 4017796 - RNA, 15 nt, Human T-lymphotropic virus 1
uauuacucgacaaau

SEQ ID NO: 4017797 - RNA, 13 nt, Human T-lymphotropic virus 1
ucaaauccuccuu

SEQ ID NO: 4017798 - RNA, 14 nt, Human T-lymphotropic virus 1
ucaacccccaacuc

SEQ ID NO: 4017799 - RNA, 20 nt, Human T-lymphotropic virus 1
ucaacccccaacuccugcau

SEQ ID NO: 4017800 - RNA, 16 nt, Human T-lymphotropic virus 1
ucaagaagcugccggc

SEQ ID NO: 4017801 - RNA, 20 nt, Human T-lymphotropic virus 1
ucaagaaguuucacaccuca

SEQ ID NO: 4017802 - RNA, 14 nt, Human T-lymphotropic virus 1
ucaagccguccuca

SEQ ID NO: 4017803 - RNA, 17 nt, Human T-lymphotropic virus 1
ucacaaauuucaaacca

SEQ ID NO: 4017804 - RNA, 15 nt, Human T-lymphotropic virus 1
ucacagaacugccgc

SEQ ID NO: 4017805 - RNA, 13 nt, Human T-lymphotropic virus 1
ucaccacuccagg

SEQ ID NO: 4017806 - RNA, 15 nt, Human T-lymphotropic virus 1
ucaccacuccaggcc

SEQ ID NO: 4017807 - RNA, 21 nt, Human T-lymphotropic virus 1
ucacgcgcccgccgccuuacc

SEQ ID NO: 4017808 - RNA, 19 nt, Human T-lymphotropic virus 1
ucacuuaugaugcaguccc

SEQ ID NO: 4017809 - RNA, 14 nt, Human T-lymphotropic virus 1
ucagaccuccggga

SEQ ID NO: 4017810 - RNA, 17 nt, Human T-lymphotropic virus 1
ucagcccacuucccagg

SEQ ID NO: 4017811 - RNA, 15 nt, Human T-lymphotropic virus 1
ucagccuccaaggac

SEQ ID NO: 4017812 - RNA, 18 nt, Human T-lymphotropic virus 1
ucagcggccuucuccucc

SEQ ID NO: 4017813 - RNA, 19 nt, Human T-lymphotropic virus 1
ucagcggccuucuccuccg

SEQ ID NO: 4017814 - RNA, 16 nt, Human T-lymphotropic virus 1
ucagcuacgacaccuc

SEQ ID NO: 4017815 - RNA, 22 nt, Human T-lymphotropic virus 1
ucagcucuacaguuccuuaucc

SEQ ID NO: 4017816 - RNA, 15 nt, Human T-lymphotropic virus 1
ucaggcccccuuuca

SEQ ID NO: 4017817 - RNA, 23 nt, Human T-lymphotropic virus 1
ucaggcguugacgacaaccccuc

SEQ ID NO: 4017818 - RNA, 13 nt, Human T-lymphotropic virus 1
ucauaagcucaga

SEQ ID NO: 4017819 - RNA, 20 nt, Human T-lymphotropic virus 1
ucauccugccccccuuuucc

SEQ ID NO: 4017820 - RNA, 13 nt, Human T-lymphotropic virus 1
ucauggaccugcc

SEQ ID NO: 4017821 - RNA, 12 nt, Human T-lymphotropic virus 1
uccaaacccugc

SEQ ID NO: 4017822 - RNA, 16 nt, Human T-lymphotropic virus 1
uccaaggacuccaccu

SEQ ID NO: 4017823 - RNA, 15 nt, Human T-lymphotropic virus 1
uccaccaauuccucc

SEQ ID NO: 4017824 - RNA, 22 nt, Human T-lymphotropic virus 1
uccaccagcagguccuccgggc

SEQ ID NO: 4017825 - RNA, 11 nt, Human T-lymphotropic virus 1
uccacccuccu

SEQ ID NO: 4017826 - RNA, 22 nt, Human T-lymphotropic virus 1
uccacccuccuuccuccaggcc

SEQ ID NO: 4017827 - RNA, 12 nt, Human T-lymphotropic virus 1
uccaccucccag

SEQ ID NO: 4017828 - RNA, 13 nt, Human T-lymphotropic virus 1
uccaccucccagg

SEQ ID NO: 4017829 - RNA, 15 nt, Human T-lymphotropic virus 1
uccaccucccaggca

SEQ ID NO: 4017830 - RNA, 15 nt, Human T-lymphotropic virus 1
uccacgcuuugccug

SEQ ID NO: 4017831 - RNA, 23 nt, Human T-lymphotropic virus 1
uccacgcuuugccugacccugcu

SEQ ID NO: 4017832 - RNA, 16 nt, Human T-lymphotropic virus 1
uccacucaacccucac

SEQ ID NO: 4017833 - RNA, 12 nt, Human T-lymphotropic virus 1
uccagcccccca

SEQ ID NO: 4017834 - RNA, 14 nt, Human T-lymphotropic virus 1
uccagccugccaac

SEQ ID NO: 4017835 - RNA, 17 nt, Human T-lymphotropic virus 1
uccaguucugcccccuc

SEQ ID NO: 4017836 - RNA, 13 nt, Human T-lymphotropic virus 1
ucccucauccugc

SEQ ID NO: 4017837 - RNA, 17 nt, Human T-lymphotropic virus 1
uccgccguggccuacuc

SEQ ID NO: 4017838 - RNA, 22 nt, Human T-lymphotropic virus 1
uccgucagcuacgacaccuccc

SEQ ID NO: 4017839 - RNA, 15 nt, Human T-lymphotropic virus 1
uccguucagccucca

SEQ ID NO: 4017840 - RNA, 17 nt, Human T-lymphotropic virus 1
uccguuccacucaaccc

SEQ ID NO: 4017841 - RNA, 18 nt, Human T-lymphotropic virus 1
uccuaucuuacuccacca

SEQ ID NO: 4017842 - RNA, 19 nt, Human T-lymphotropic virus 1
uccuccgcccgcuuccugc

SEQ ID NO: 4017843 - RNA, 17 nt, Human T-lymphotropic virus 1
uccucuuugcuccaggc

SEQ ID NO: 4017844 - RNA, 23 nt, Human T-lymphotropic virus 1
uccugcagcucucuccugcagac

SEQ ID NO: 4017845 - RNA, 14 nt, Human T-lymphotropic virus 1
uccugcccagccag

SEQ ID NO: 4017846 - RNA, 16 nt, Human T-lymphotropic virus 1
uccuggcaagccccuc

SEQ ID NO: 4017847 - RNA, 15 nt, Human T-lymphotropic virus 1
uccuuccuccaggcc

SEQ ID NO: 4017848 - RNA, 13 nt, Human T-lymphotropic virus 1
uccuucucccuuc

SEQ ID NO: 4017849 - RNA, 20 nt, Human T-lymphotropic virus 1
uccuucuccugcagcaaccu

SEQ ID NO: 4017850 - RNA, 18 nt, Human T-lymphotropic virus 1
ucgacaaauacaccuugc

SEQ ID NO: 4017851 - RNA, 14 nt, Human T-lymphotropic virus 1
ucgccuccagccuc

SEQ ID NO: 4017852 - RNA, 24 nt, Human T-lymphotropic virus 1
ucuaaacccugcaauccugcccag

SEQ ID NO: 4017853 - RNA, 13 nt, Human T-lymphotropic virus 1
ucuacucucccac

SEQ ID NO: 4017854 - RNA, 15 nt, Human T-lymphotropic virus 1
ucuacucucccacuc

SEQ ID NO: 4017855 - RNA, 21 nt, Human T-lymphotropic virus 1
ucuaguaaguuacuccagcua

SEQ ID NO: 4017856 - RNA, 19 nt, Human T-lymphotropic virus 1
ucuagucgacgcuccagga

SEQ ID NO: 4017857 - RNA, 12 nt, Human T-lymphotropic virus 1
ucuccucagccc

SEQ ID NO: 4017858 - RNA, 12 nt, Human T-lymphotropic virus 1
ucuccuccgccc

SEQ ID NO: 4017859 - RNA, 14 nt, Human T-lymphotropic virus 1
ucucuacugugccu

SEQ ID NO: 4017860 - RNA, 17 nt, Human T-lymphotropic virus 1
ucucuacugugccuuac

SEQ ID NO: 4017861 - RNA, 15 nt, Human T-lymphotropic virus 1
ucugcccccucaucc

SEQ ID NO: 4017862 - RNA, 12 nt, Human T-lymphotropic virus 1
ucugccgccucc

SEQ ID NO: 4017863 - RNA, 18 nt, Human T-lymphotropic virus 1
ucugccgccucccgccug

SEQ ID NO: 4017864 - RNA, 15 nt, Human T-lymphotropic virus 1
ucuuugcuccaggcc

SEQ ID NO: 4017865 - RNA, 13 nt, Human T-lymphotropic virus 1
ucuuuuccagacc

SEQ ID NO: 4017866 - RNA, 23 nt, Human T-lymphotropic virus 1
ugcaaccacaucgccuccagccu

SEQ ID NO: 4017867 - RNA, 15 nt, Human T-lymphotropic virus 1
ugcagcuggcccaua

SEQ ID NO: 4017868 - RNA, 22 nt, Human T-lymphotropic virus 1
ugcauuuuuucuuuccuagcac

SEQ ID NO: 4017869 - RNA, 21 nt, Human T-lymphotropic virus 1
ugccaauaauuaaccucuccc

SEQ ID NO: 4017870 - RNA, 23 nt, Human T-lymphotropic virus 1
ugccaauaauuaaccucucccau

SEQ ID NO: 4017871 - RNA, 15 nt, Human T-lymphotropic virus 1
ugccaccuauucccu

SEQ ID NO: 4017872 - RNA, 19 nt, Human T-lymphotropic virus 1
ugccagccuauccacuugg

SEQ ID NO: 4017873 - RNA, 22 nt, Human T-lymphotropic virus 1
ugcccaagacccgucggaggcc

SEQ ID NO: 4017874 - RNA, 14 nt, Human T-lymphotropic virus 1
ugcccaccacccuu

SEQ ID NO: 4017875 - RNA, 15 nt, Human T-lymphotropic virus 1
ugccccaucucuggg

SEQ ID NO: 4017876 - RNA, 23 nt, Human T-lymphotropic virus 1
ugccccaugugauuuuuugccac

SEQ ID NO: 4017877 - RNA, 19 nt, Human T-lymphotropic virus 1
ugccccauuggcuccugug

SEQ ID NO: 4017878 - RNA, 16 nt, Human T-lymphotropic virus 1
ugcccccucauccucg

SEQ ID NO: 4017879 - RNA, 18 nt, Human T-lymphotropic virus 1
ugcccuaggcaccuucca

SEQ ID NO: 4017880 - RNA, 18 nt, Human T-lymphotropic virus 1
ugccucccaccgccccuc

SEQ ID NO: 4017881 - RNA, 16 nt, Human T-lymphotropic virus 1
ugcucuuccugcuuuc

SEQ ID NO: 4017882 - RNA, 14 nt, Human T-lymphotropic virus 1
ugcuguacucucac

SEQ ID NO: 4017883 - RNA, 17 nt, Human T-lymphotropic virus 1
ugcuuucacugucccac

SEQ ID NO: 4017884 - RNA, 18 nt, Human T-lymphotropic virus 1
uggacaaagauauuuccc

SEQ ID NO: 4017885 - RNA, 17 nt, Human T-lymphotropic virus 1
ugacauucuccuggcaa

SEQ ID NO: 4017886 - RNA, 16 nt, Human T-lymphotropic virus 1
ugaucccaucuccagg

SEQ ID NO: 4017887 - RNA, 20 nt, Human T-lymphotropic virus 1
ugcaaccacaucgccuccag

SEQ ID NO: 4017888 - RNA, 22 nt, Human T-lymphotropic virus 1
ugcaaccacaucgccuccagcc

SEQ ID NO: 4017889 - RNA, 20 nt, Human T-lymphotropic virus 1
ugcaaggggcaaccacaacu

SEQ ID NO: 4017890 - RNA, 14 nt, Human T-lymphotropic virus 1
ugcaauccugccca

SEQ ID NO: 4017891 - RNA, 18 nt, Human T-lymphotropic virus 1
ugcaauccugcccagcca

SEQ ID NO: 4017892 - RNA, 16 nt, Human T-lymphotropic virus 1
ugcacuauucuucagu

SEQ ID NO: 4017893 - RNA, 17 nt, Human T-lymphotropic virus 1
ugcagcaaccuccuccg

SEQ ID NO: 4017894 - RNA, 18 nt, Human T-lymphotropic virus 1
ugcagcucucuccugcag

SEQ ID NO: 4017895 - RNA, 17 nt, Human T-lymphotropic virus 1
ugcagcuggcccauauc

SEQ ID NO: 4017896 - RNA, 20 nt, Human T-lymphotropic virus 1
ugcaggaccaugcauccucc

SEQ ID NO: 4017897 - RNA, 21 nt, Human T-lymphotropic virus 1
ugcaggaccaugcauccuccg

SEQ ID NO: 4017898 - RNA, 17 nt, Human T-lymphotropic virus 1
ugccaacuacacuagcc

SEQ ID NO: 4017899 - RNA, 21 nt, Human T-lymphotropic virus 1
ugcccaccacccuuuuccagc

SEQ ID NO: 4017900 - RNA, 22 nt, Human T-lymphotropic virus 1
ugcccaccacccuuuuccagcc

SEQ ID NO: 4017901 - RNA, 14 nt, Human T-lymphotropic virus 1
ugccccccuuuucc

SEQ ID NO: 4017902 - RNA, 13 nt, Human T-lymphotropic virus 1
ugccccuccuagg

SEQ ID NO: 4017903 - RNA, 14 nt, Human T-lymphotropic virus 1
ugccccuccuaggg

SEQ ID NO: 4017904 - RNA, 20 nt, Human T-lymphotropic virus 1
ugcccuaggcaccuuccaag

SEQ ID NO: 4017905 - RNA, 23 nt, Human T-lymphotropic virus 1
ugcccuaggcaccuuccaaggca

SEQ ID NO: 4017906 - RNA, 23 nt, Human T-lymphotropic virus 1
ugccuuacaacaaugccaaggcg

SEQ ID NO: 4017907 - RNA, 15 nt, Human T-lymphotropic virus 1
ugcgccgugccuucu

SEQ ID NO: 4017908 - RNA, 16 nt, Human T-lymphotropic virus 1
ugcgccgugccuucuc

SEQ ID NO: 4017909 - RNA, 21 nt, Human T-lymphotropic virus 1
ugcgccgugccuucuccucuu

SEQ ID NO: 4017910 - RNA, 19 nt, Human T-lymphotropic virus 1
ugcucaaaauugcacagua

SEQ ID NO: 4017911 - RNA, 13 nt, Human T-lymphotropic virus 1
ugcuccaggccau

SEQ ID NO: 4017912 - RNA, 15 nt, Human T-lymphotropic virus 1
ugcucuauccauagc

SEQ ID NO: 4017913 - RNA, 17 nt, Human T-lymphotropic virus 1
uggacaaucaaccaccu

SEQ ID NO: 4017914 - RNA, 14 nt, Human T-lymphotropic virus 1
uggacccacugcuu

SEQ ID NO: 4017915 - RNA, 22 nt, Human T-lymphotropic virus 1
uggcacguccuauacucuccca

SEQ ID NO: 4017916 - RNA, 20 nt, Human T-lymphotropic virus 1
uggcccauauccugcagccc

SEQ ID NO: 4017917 - RNA, 16 nt, Human T-lymphotropic virus 1
uggccccuccugcccc

SEQ ID NO: 4017918 - RNA, 13 nt, Human T-lymphotropic virus 1
uggccucuccagc

SEQ ID NO: 4017919 - RNA, 14 nt, Human T-lymphotropic virus 1
uggccucuccagcg

SEQ ID NO: 4017920 - RNA, 23 nt, Human T-lymphotropic virus 1
uggcggaggcuauuauucagccu

SEQ ID NO: 4017921 - RNA, 14 nt, Human T-lymphotropic virus 1
ugggucuccaaagg

SEQ ID NO: 4017922 - RNA, 16 nt, Human T-lymphotropic virus 1
uguaccucccuugcua

SEQ ID NO: 4017923 - RNA, 21 nt, Human T-lymphotropic virus 1
uguaucgaucgugccagccua

SEQ ID NO: 4017924 - RNA, 23 nt, Human T-lymphotropic virus 1
uguauuaaccaacugccacaaaa

SEQ ID NO: 4017925 - RNA, 15 nt, Human T-lymphotropic virus 1
ugucaccuguuccca

SEQ ID NO: 4017926 - RNA, 21 nt, Human T-lymphotropic virus 1
uguccugcagcucucuccugc

SEQ ID NO: 4017927 - RNA, 18 nt, Human T-lymphotropic virus 1
ugucgcgcuacuccuucu

SEQ ID NO: 4017928 - RNA, 22 nt, Human T-lymphotropic virus 1
ugucugcauguaccucuaccag

SEQ ID NO: 4017929 - RNA, 20 nt, Human T-lymphotropic virus 1
uguucauggacccucgaccu

SEQ ID NO: 4017930 - RNA, 19 nt, Human T-lymphotropic virus 1
uguuucgccuucucagccc

SEQ ID NO: 4017931 - RNA, 15 nt, Human T-lymphotropic virus 1
uuacgccagccccuu

SEQ ID NO: 4017932 - RNA, 18 nt, Human T-lymphotropic virus 1
uuaucccucgacuccccu

SEQ ID NO: 4017933 - RNA, 15 nt, Human T-lymphotropic virus 1
uucaaauacucagca

SEQ ID NO: 4017934 - RNA, 23 nt, Human T-lymphotropic virus 1
uucacaaauuucaaaccaaggcc

SEQ ID NO: 4017935 - RNA, 15 nt, Human T-lymphotropic virus 1
uucacagucucuacu

SEQ ID NO: 4017936 - RNA, 19 nt, Human T-lymphotropic virus 1
uucaccuaaucaccucacu

SEQ ID NO: 4017937 - RNA, 15 nt, Human T-lymphotropic virus 1
uuccagccccccacc

SEQ ID NO: 4017938 - RNA, 21 nt, Human T-lymphotropic virus 1
uuccaguucugcccccucauc

SEQ ID NO: 4017939 - RNA, 24 nt, Human T-lymphotropic virus 1
uuccuagggcaaauaauuucaccu

SEQ ID NO: 4017940 - RNA, 19 nt, Human T-lymphotropic virus 1
uuccucuucuccucagccc

SEQ ID NO: 4017941 - RNA, 13 nt, Human T-lymphotropic virus 1
uucucagccccuu

SEQ ID NO: 4017942 - RNA, 23 nt, Human T-lymphotropic virus 1
uucuccuccgcccgcuuccugcg

SEQ ID NO: 4017943 - RNA, 22 nt, Human T-lymphotropic virus 1
uucuccugcagcaaccuccucc

SEQ ID NO: 4017944 - RNA, 13 nt, Human T-lymphotropic virus 1
uucuccuggcaag

SEQ ID NO: 4017945 - RNA, 15 nt, Human T-lymphotropic virus 1
uugcccuaggcaccu

SEQ ID NO: 4017946 - RNA, 13 nt, Human T-lymphotropic virus 1
uuggccucucaca

SEQ ID NO: 4017947 - RNA, 22 nt, Human T-lymphotropic virus 1
uuguccuuuaacucuuccucca

SEQ ID NO: 4017948 - RNA, 13 nt, Human T-lymphotropic virus 1
uuuagagcucagg

SEQ ID NO: 4017949 - RNA, 15 nt, Human T-lymphotropic virus 1
uuucacaaauuucaa

SEQ ID NO: 4017950 - RNA, 17 nt, Human T-lymphotropic virus 1
uuuccgggcccugcccu

SEQ ID NO: 4017951 - RNA, 18 nt, Human T-lymphotropic virus 1
uuuguccggcgcucccuu

SEQ ID NO: 4017952 - RNA, 12 nt, Human T-lymphotropic virus 1
uuuuccagccug

SEQ ID NO: 4017953 - RNA, 14 nt, Human T-lymphotropic virus 2
aaaacaaggcucug

SEQ ID NO: 4017954 - RNA, 19 nt, Human T-lymphotropic virus 2
aaaacccgauggcaaaucc

SEQ ID NO: 4017955 - RNA, 13 nt, Human T-lymphotropic virus 2
aaaccaaagccuu

SEQ ID NO: 4017956 - RNA, 22 nt, Human T-lymphotropic virus 2
aaagcugcaugcccaagaccag

SEQ ID NO: 4017957 - RNA, 22 nt, Human T-lymphotropic virus 2
aacaaauggaccaucauuggaa

SEQ ID NO: 4017958 - RNA, 14 nt, Human T-lymphotropic virus 2
aacaaggcucugac

SEQ ID NO: 4017959 - RNA, 23 nt, Human T-lymphotropic virus 2
aacaaucccaaguaaaggcucug

SEQ ID NO: 4017960 - RNA, 21 nt, Human T-lymphotropic virus 2
aacaccuucccccaccucccc

SEQ ID NO: 4017961 - RNA, 17 nt, Human T-lymphotropic virus 2
aacaggaacagcucucc

SEQ ID NO: 4017962 - RNA, 18 nt, Human T-lymphotropic virus 2
aacauacgccguggagcg

SEQ ID NO: 4017963 - RNA, 18 nt, Human T-lymphotropic virus 2
aaccacggcccugacguc

SEQ ID NO: 4017964 - RNA, 20 nt, Human T-lymphotropic virus 2
aacccaucaaaacccaggag

SEQ ID NO: 4017965 - RNA, 18 nt, Human T-lymphotropic virus 2
aaccccaugaggaaaaug

SEQ ID NO: 4017966 - RNA, 21 nt, Human T-lymphotropic virus 2
aacccgugagggcucccugua

SEQ ID NO: 4017967 - RNA, 23 nt, Human T-lymphotropic virus 2
aaccugagcgccuccaggccuua

SEQ ID NO: 4017968 - RNA, 14 nt, Human T-lymphotropic virus 2
aacuccccucaucc

SEQ ID NO: 4017969 - RNA, 17 nt, Human T-lymphotropic virus 2
aagaacuucuauacaaa

SEQ ID NO: 4017970 - RNA, 15 nt, Human T-lymphotropic virus 2
aagcagggcagccau

SEQ ID NO: 4017971 - RNA, 14 nt, Human T-lymphotropic virus 2
aagccaagucccuu

SEQ ID NO: 4017972 - RNA, 22 nt, Human T-lymphotropic virus 2
aaggcagcguacguucucuggg

SEQ ID NO: 4017973 - RNA, 14 nt, Human T-lymphotropic virus 2
aauacacagacucc

SEQ ID NO: 4017974 - RNA, 12 nt, Human T-lymphotropic virus 2
aaucccccuccc

SEQ ID NO: 4017975 - RNA, 18 nt, Human T-lymphotropic virus 2
aauccugucuccucucag

SEQ ID NO: 4017976 - RNA, 19 nt, Human T-lymphotropic virus 2
aauccugucuccucucagc

SEQ ID NO: 4017977 - RNA, 11 nt, Human T-lymphotropic virus 2
aauuuccaccu

SEQ ID NO: 4017978 - RNA, 22 nt, Human T-lymphotropic virus 2
acaaaagggggagcuccuugca

SEQ ID NO: 4017979 - RNA, 12 nt, Human T-lymphotropic virus 2
acaacaacucca

SEQ ID NO: 4017980 - RNA, 19 nt, Human T-lymphotropic virus 2
acaacaacuccaugcguua

SEQ ID NO: 4017981 - RNA, 14 nt, Human T-lymphotropic virus 2
acacagacucccuu

SEQ ID NO: 4017982 - RNA, 15 nt, Human T-lymphotropic virus 2
acacauauucuugcc

SEQ ID NO: 4017983 - RNA, 18 nt, Human T-lymphotropic virus 2
uggcauguacucuacacc

SEQ ID NO: 4017984 - RNA, 13 nt, Human T-lymphotropic virus 2
uggccccugcccc

SEQ ID NO: 4017985 - RNA, 12 nt, Human T-lymphotropic virus 2
uggcgccacacc

SEQ ID NO: 4017986 - RNA, 16 nt, Human T-lymphotropic virus 2
uggcuccacacccccc

SEQ ID NO: 4017987 - RNA, 20 nt, Human T-lymphotropic virus 2
ugggacaaacaccucagccu

SEQ ID NO: 4017988 - RNA, 14 nt, Human T-lymphotropic virus 2
uggugucccgucuc

SEQ ID NO: 4017989 - RNA, 20 nt, Human T-lymphotropic virus 2
uguccuaacccccuccacgu

SEQ ID NO: 4017990 - RNA, 18 nt, Human T-lymphotropic virus 2
ugucucccccaagguucc

SEQ ID NO: 4017991 - RNA, 19 nt, Human T-lymphotropic virus 2
uuacaacaacucucccagc

SEQ ID NO: 4017992 - RNA, 13 nt, Human T-lymphotropic virus 2
uuaggagccuucc

SEQ ID NO: 4017993 - RNA, 19 nt, Human T-lymphotropic virus 2
uuauacaauacuccuccuu

SEQ ID NO: 4017994 - RNA, 18 nt, Human T-lymphotropic virus 2
uuaucccucgccuccccu

SEQ ID NO: 4017995 - RNA, 15 nt, Human T-lymphotropic virus 2
uuauccuccccccuu

SEQ ID NO: 4017996 - RNA, 21 nt, Human T-lymphotropic virus 2
uucaacaggacaucacucccc

SEQ ID NO: 4017997 - RNA, 18 nt, Human T-lymphotropic virus 2
uucaccauuccccagcca

SEQ ID NO: 4017998 - RNA, 17 nt, Human T-lymphotropic virus 2
uuccaaaucccccuccc

SEQ ID NO: 4017999 - RNA, 20 nt, Human T-lymphotropic virus 2
uuccauaaccuuggcagcca

SEQ ID NO: 4018000 - RNA, 16 nt, Human T-lymphotropic virus 2
uucccccaccucccca

SEQ ID NO: 4018001 - RNA, 20 nt, Human T-lymphotropic virus 2
uuccgcccaucaaacccucc

SEQ ID NO: 4018002 - RNA, 13 nt, Human T-lymphotropic virus 2
uuccuccugccuc

SEQ ID NO: 4018003 - RNA, 22 nt, Human T-lymphotropic virus 2
uuccugaagccucuaccccucc

SEQ ID NO: 4018004 - RNA, 11 nt, Human T-lymphotropic virus 2
uuccuuacacc

SEQ ID NO: 4018005 - RNA, 17 nt, Human T-lymphotropic virus 2
uucgaaaccaaagccuu

SEQ ID NO: 4018006 - RNA, 22 nt, Human T-lymphotropic virus 2
uucgaaaccaaagccuuccauc

SEQ ID NO: 4018007 - RNA, 22 nt, Human T-lymphotropic virus 2
uucuuaggacaggucaucuccc

SEQ ID NO: 4018008 - RNA, 20 nt, Human T-lymphotropic virus 2
uuggcaggcgucccggggcc

SEQ ID NO: 4018009 - RNA, 22 nt, Human T-lymphotropic virus 2
uuggccccuguauccuccgcca

SEQ ID NO: 4018010 - RNA, 16 nt, Human T-lymphotropic virus 2
uugguaucuccuccua

SEQ ID NO: 4018011 - RNA, 15 nt, Human T-lymphotropic virus 2
uuugaauuccuccau

SEQ ID NO: 4018012 - RNA, 19 nt, Human T-lymphotropic virus 2
uuuuuccgauggcuccccu

SEQ ID NO: 4018013 - RNA, 15 nt, Human T-lymphotropic virus 2
cguggagcgcagcaa

SEQ ID NO: 4018014 - RNA, 20 nt, Human T-lymphotropic virus 2
cgugggaccgucucccggcc

SEQ ID NO: 4018015 - RNA, 19 nt, Human T-lymphotropic virus 2
cguucuuuccucuucgccg

SEQ ID NO: 4018016 - RNA, 15 nt, Human T-lymphotropic virus 2
cguugucagcucucc

SEQ ID NO: 4018017 - RNA, 20 nt, Human T-lymphotropic virus 2
cguugucagcucuccucucc

SEQ ID NO: 4018018 - RNA, 15 nt, Human T-lymphotropic virus 2
cuaacccccuccacg

SEQ ID NO: 4018019 - RNA, 12 nt, Human T-lymphotropic virus 2
cacuccacauua

SEQ ID NO: 4018020 - RNA, 16 nt, Human T-lymphotropic virus 2
cagaaaaaaauagacc

SEQ ID NO: 4018021 - RNA, 20 nt, Human T-lymphotropic virus 2
cagacacucgugcccgggcc

SEQ ID NO: 4018022 - RNA, 15 nt, Human T-lymphotropic virus 2
cagaccaccaacacc

SEQ ID NO: 4018023 - RNA, 14 nt, Human T-lymphotropic virus 2
cagacgaccccagc

SEQ ID NO: 4018024 - RNA, 15 nt, Human T-lymphotropic virus 2
cagacgaccccagcc

SEQ ID NO: 4018025 - RNA, 16 nt, Human T-lymphotropic virus 2
cagacgaccccagccc

SEQ ID NO: 4018026 - RNA, 22 nt, Human T-lymphotropic virus 2
cagacgaccccagcccccacca

SEQ ID NO: 4018027 - RNA, 22 nt, Human T-lymphotropic virus 2
cagauguaaauuucacccagga

SEQ ID NO: 4018028 - RNA, 22 nt, Human T-lymphotropic virus 2
cagcaagggcuagggcuuccug

SEQ ID NO: 4018029 - RNA, 23 nt, Human T-lymphotropic virus 2
cagcaagggcuagggcuuccuga

SEQ ID NO: 4018030 - RNA, 15 nt, Human T-lymphotropic virus 2
cagccacaccaaccu

SEQ ID NO: 4018031 - RNA, 16 nt, Human T-lymphotropic virus 2
cagccacccagggcga

SEQ ID NO: 4018032 - RNA, 15 nt, Human T-lymphotropic virus 2
cagccacgccccccu

SEQ ID NO: 4018033 - RNA, 18 nt, Human T-lymphotropic virus 2
cagccacgccccccuccu

SEQ ID NO: 4018034 - RNA, 14 nt, Human T-lymphotropic virus 2
cagccccaccaaug

SEQ ID NO: 4018035 - RNA, 21 nt, Human T-lymphotropic virus 2
cagcccccaccaauugcugcc

SEQ ID NO: 4018036 - RNA, 20 nt, Human T-lymphotropic virus 2
cagccccuguagcccaaccc

SEQ ID NO: 4018037 - RNA, 21 nt, Human T-lymphotropic virus 2
cagccguccucaaccccauga

SEQ ID NO: 4018038 - RNA, 14 nt, Human T-lymphotropic virus 2
cagccucucauccu

SEQ ID NO: 4018039 - RNA, 18 nt, Human T-lymphotropic virus 2
cagcuccucugcucuugg

SEQ ID NO: 4018040 - RNA, 22 nt, Human T-lymphotropic virus 2
cagcuuauacaauacuccuccu

SEQ ID NO: 4018041 - RNA, 20 nt, Human T-lymphotropic virus 2
caggagcaauguugcuuccu

SEQ ID NO: 4018042 - RNA, 13 nt, Human T-lymphotropic virus 2
caggagcccccuc

SEQ ID NO: 4018043 - RNA, 20 nt, Human T-lymphotropic virus 2
caggaguccuauacacucca

SEQ ID NO: 4018044 - RNA, 19 nt, Human T-lymphotropic virus 2
caggaguuuuguaccuccu

SEQ ID NO: 4018045 - RNA, 20 nt, Human T-lymphotropic virus 2
caggccaauuuucacccucu

SEQ ID NO: 4018046 - RNA, 21 nt, Human T-lymphotropic virus 2
caggccaauuuucacccucuc

SEQ ID NO: 4018047 - RNA, 16 nt, Human T-lymphotropic virus 2
caggcccgcccuagga

SEQ ID NO: 4018048 - RNA, 20 nt, Human T-lymphotropic virus 2
caggcuacaaccccauggca

SEQ ID NO: 4018049 - RNA, 23 nt, Human T-lymphotropic virus 2
caguaugcagcccaaaauagacg

SEQ ID NO: 4018050 - RNA, 18 nt, Human T-lymphotropic virus 2
cagucauaguccucccgg

SEQ ID NO: 4018051 - RNA, 16 nt, Human T-lymphotropic virus 2
caguucaaacuccucc

SEQ ID NO: 4018052 - RNA, 23 nt, Human T-lymphotropic virus 2
caguuccgacaccuaucugcccu

SEQ ID NO: 4018053 - RNA, 14 nt, Human T-lymphotropic virus 2
cauaaccuuggcag

SEQ ID NO: 4018054 - RNA, 19 nt, Human T-lymphotropic virus 2
cauaaccuuggcagccaac

SEQ ID NO: 4018055 - RNA, 21 nt, Human T-lymphotropic virus 2
cauauucugccaccccagaca

SEQ ID NO: 4018056 - RNA, 18 nt, Human T-lymphotropic virus 2
cauauucuugcccuuccg

SEQ ID NO: 4018057 - RNA, 16 nt, Human T-lymphotropic virus 2
caucagcuuauacaau

SEQ ID NO: 4018058 - RNA, 15 nt, Human T-lymphotropic virus 2
caucgaccauugucc

SEQ ID NO: 4018059 - RNA, 16 nt, Human T-lymphotropic virus 2
caucuacaccaccugg

SEQ ID NO: 4018060 - RNA, 15 nt, Human T-lymphotropic virus 2
caucucccaccuuac

SEQ ID NO: 4018061 - RNA, 18 nt, Human T-lymphotropic virus 2
caucuuucaacccaagca

SEQ ID NO: 4018062 - RNA, 15 nt, Human T-lymphotropic virus 2
caugcagacccuccg

SEQ ID NO: 4018063 - RNA, 22 nt, Human T-lymphotropic virus 2
cauggccuuccaauuucccagg

SEQ ID NO: 4018064 - RNA, 18 nt, Human T-lymphotropic virus 2
cauguauccguccuccag

SEQ ID NO: 4018065 - RNA, 18 nt, Human T-lymphotropic virus 2
cauguccuaacccccucc

SEQ ID NO: 4018066 - RNA, 17 nt, Human T-lymphotropic virus 2
cauugcuaccaaccucg

SEQ ID NO: 4018067 - RNA, 20 nt, Human T-lymphotropic virus 2
cauugcuaccaaccucgccu

SEQ ID NO: 4018068 - RNA, 16 nt, Human T-lymphotropic virus 2
ccaaagccuuccaucc

SEQ ID NO: 4018069 - RNA, 13 nt, Human T-lymphotropic virus 2
ccaacaucccugu

SEQ ID NO: 4018070 - RNA, 13 nt, Human T-lymphotropic virus 2
ccaacccuucccu

SEQ ID NO: 4018071 - RNA, 16 nt, Human T-lymphotropic virus 2
ccaacccuucuccagg

SEQ ID NO: 4018072 - RNA, 13 nt, Human T-lymphotropic virus 2
ccaacucaccugg

SEQ ID NO: 4018073 - RNA, 14 nt, Human T-lymphotropic virus 2
ccaacucaccuggg

SEQ ID NO: 4018074 - RNA, 17 nt, Human T-lymphotropic virus 2
ccaagguuccaccugcc

SEQ ID NO: 4018075 - RNA, 22 nt, Human T-lymphotropic virus 2
ccaauacccaaagcccccaggg

SEQ ID NO: 4018076 - RNA, 23 nt, Human T-lymphotropic virus 2
ccaauaccuuaucccucgccucc

SEQ ID NO: 4018077 - RNA, 13 nt, Human T-lymphotropic virus 2
ccacaccaaccuc

SEQ ID NO: 4018078 - RNA, 12 nt, Human T-lymphotropic virus 2
ccacaccaaggg

SEQ ID NO: 4018079 - RNA, 17 nt, Human T-lymphotropic virus 2
ccacaccccccacccuc

SEQ ID NO: 4018080 - RNA, 15 nt, Human T-lymphotropic virus 2
ccaccaacuucuccc

SEQ ID NO: 4018081 - RNA, 17 nt, Human T-lymphotropic virus 2
ccaccacaguccuccac

SEQ ID NO: 4018082 - RNA, 12 nt, Human T-lymphotropic virus 2
ccaccagcucag

SEQ ID NO: 4018083 - RNA, 21 nt, Human T-lymphotropic virus 2
ccaccauguccgcagccacac

SEQ ID NO: 4018084 - RNA, 17 nt, Human T-lymphotropic virus 2
ccaccuuacccaggcca

SEQ ID NO: 4018085 - RNA, 18 nt, Human T-lymphotropic virus 2
ccacgacuccucaggcca

SEQ ID NO: 4018086 - RNA, 18 nt, Human T-lymphotropic virus 2
ccacgcauggccuuccaa

SEQ ID NO: 4018087 - RNA, 12 nt, Human T-lymphotropic virus 2
ccacuuccccua

SEQ ID NO: 4018088 - RNA, 14 nt, Human T-lymphotropic virus 2
ccagaugucagacu

SEQ ID NO: 4018089 - RNA, 13 nt, Human T-lymphotropic virus 2
ccagccucucauc

SEQ ID NO: 4018090 - RNA, 21 nt, Human T-lymphotropic virus 2
ccagcuaacccuccaggcacu

SEQ ID NO: 4018091 - RNA, 20 nt, Human T-lymphotropic virus 2
ccagcugaccuuacagagca

SEQ ID NO: 4018092 - RNA, 23 nt, Human T-lymphotropic virus 2
ccaggcacugaccacgcauggcc

SEQ ID NO: 4018093 - RNA, 17 nt, Human T-lymphotropic virus 2
ccauaaccuucaccuuc

SEQ ID NO: 4018094 - RNA, 22 nt, Human T-lymphotropic virus 2
ccauacuucgccuucaccauuc

SEQ ID NO: 4018095 - RNA, 13 nt, Human T-lymphotropic virus 2
ccauccucuccaa

SEQ ID NO: 4018096 - RNA, 17 nt, Human T-lymphotropic virus 2
ccauccucuuuccuucc

SEQ ID NO: 4018097 - RNA, 17 nt, Human T-lymphotropic virus 2
ccaucuuaacucuagac

SEQ ID NO: 4018098 - RNA, 14 nt, Human T-lymphotropic virus 2
ccaugacuccgacc

SEQ ID NO: 4018099 - RNA, 20 nt, Human T-lymphotropic virus 2
ccaugucauauucugccacc

SEQ ID NO: 4018100 - RNA, 17 nt, Human T-lymphotropic virus 2
ccauuacuaccacccuc

SEQ ID NO: 4018101 - RNA, 14 nt, Human T-lymphotropic virus 2
ccauuccccagcca

SEQ ID NO: 4018102 - RNA, 15 nt, Human T-lymphotropic virus 2
ccauuccccagccau

SEQ ID NO: 4018103 - RNA, 17 nt, Human T-lymphotropic virus 2
ccauugcaaucccucca

SEQ ID NO: 4018104 - RNA, 20 nt, Human T-lymphotropic virus 2
ccauugcaaucccuccagga

SEQ ID NO: 4018105 - RNA, 14 nt, Human T-lymphotropic virus 2
cccaaagcccccag

SEQ ID NO: 4018106 - RNA, 19 nt, Human T-lymphotropic virus 2
cccaacaaaccuccucccg

SEQ ID NO: 4018107 - RNA, 20 nt, Human T-lymphotropic virus 2
cccaacaaaccuccucccga

SEQ ID NO: 4018108 - RNA, 18 nt, Human T-lymphotropic virus 2
cccaacccuucuccagga

SEQ ID NO: 4018109 - RNA, 22 nt, Human T-lymphotropic virus 2
cccaagagcuuguaucacccuc

SEQ ID NO: 4018110 - RNA, 18 nt, Human T-lymphotropic virus 2
cuccacggccucacccau

SEQ ID NO: 4018111 - RNA, 16 nt, Human T-lymphotropic virus 2
cuccacuaccacccau

SEQ ID NO: 4018112 - RNA, 23 nt, Human T-lymphotropic virus 2
cuccaggaaccacgacuccucag

SEQ ID NO: 4018113 - RNA, 23 nt, Human T-lymphotropic virus 2
cucccaagguaagucuccucuca

SEQ ID NO: 4018114 - RNA, 22 nt, Human T-lymphotropic virus 2
cuccccaagcaguaccagccau

SEQ ID NO: 4018115 - RNA, 17 nt, Human T-lymphotropic virus 2
cuccccccuuuuucccu

SEQ ID NO: 4018116 - RNA, 16 nt, Human T-lymphotropic virus 2
cuccccuaucacucca

SEQ ID NO: 4018117 - RNA, 15 nt, Human T-lymphotropic virus 2
cuccccuccuucccc

SEQ ID NO: 4018118 - RNA, 18 nt, Human T-lymphotropic virus 2
cuccccuccuuccccacc

SEQ ID NO: 4018119 - RNA, 16 nt, Human T-lymphotropic virus 2
cucccgaaccauccuc

SEQ ID NO: 4018120 - RNA, 13 nt, Human T-lymphotropic virus 2
cucccgcuccuca

SEQ ID NO: 4018121 - RNA, 20 nt, Human T-lymphotropic virus 2
cucccucaccgacccucugg

SEQ ID NO: 4018122 - RNA, 22 nt, Human T-lymphotropic virus 2
cucccuuaucuuagcuccccuu

SEQ ID NO: 4018123 - RNA, 19 nt, Human T-lymphotropic virus 2
cuccguccccaaaacaucu

SEQ ID NO: 4018124 - RNA, 20 nt, Human T-lymphotropic virus 2
cuccuccaucccaacccuuc

SEQ ID NO: 4018125 - RNA, 16 nt, Human T-lymphotropic virus 2
cucgcucccguaccuc

SEQ ID NO: 4018126 - RNA, 14 nt, Human T-lymphotropic virus 2
cucguucuuuccuc

SEQ ID NO: 4018127 - RNA, 13 nt, Human T-lymphotropic virus 2
cucuagacaaaua

SEQ ID NO: 4018128 - RNA, 15 nt, Human T-lymphotropic virus 2
cucuugcccaaccac

SEQ ID NO: 4018129 - RNA, 15 nt, Human T-lymphotropic virus 2
cugaaccucuccggg

SEQ ID NO: 4018130 - RNA, 16 nt, Human T-lymphotropic virus 2
cugacgccccaaggcc

SEQ ID NO: 4018131 - RNA, 17 nt, Human T-lymphotropic virus 2
cugacgucccucccccc

SEQ ID NO: 4018132 - RNA, 14 nt, Human T-lymphotropic virus 2
cugagcgccuccag

SEQ ID NO: 4018133 - RNA, 16 nt, Human T-lymphotropic virus 2
cugaggaacuccccuc

SEQ ID NO: 4018134 - RNA, 22 nt, Human T-lymphotropic virus 2
cugccaagccauggccuucccu

SEQ ID NO: 4018135 - RNA, 14 nt, Human T-lymphotropic virus 2
cugccaccccagac

SEQ ID NO: 4018136 - RNA, 13 nt, Human T-lymphotropic virus 2
cugcccgcuccuc

SEQ ID NO: 4018137 - RNA, 14 nt, Human T-lymphotropic virus 2
cugcccgcuccucc

SEQ ID NO: 4018138 - RNA, 21 nt, Human T-lymphotropic virus 2
cugcccuacuacuacuccucc

SEQ ID NO: 4018139 - RNA, 21 nt, Human T-lymphotropic virus 2
cugccguggccgccucaaccc

SEQ ID NO: 4018140 - RNA, 20 nt, Human T-lymphotropic virus 2
cugcuccuccgccaacaguc

SEQ ID NO: 4018141 - RNA, 16 nt, Human T-lymphotropic virus 2
cugcugaugccuuucu

SEQ ID NO: 4018142 - RNA, 13 nt, Human T-lymphotropic virus 2
cuggucacggaga

SEQ ID NO: 4018143 - RNA, 22 nt, Human T-lymphotropic virus 2
cugguggaguaacaggcucccu

SEQ ID NO: 4018144 - RNA, 15 nt, Human T-lymphotropic virus 2
cuguccagagcacca

SEQ ID NO: 4018145 - RNA, 17 nt, Human T-lymphotropic virus 2
cuguccuaaccuucccc

SEQ ID NO: 4018146 - RNA, 13 nt, Human T-lymphotropic virus 2
cuguccuuccaca

SEQ ID NO: 4018147 - RNA, 22 nt, Human T-lymphotropic virus 2
cuguccuucucgguuccucucc

SEQ ID NO: 4018148 - RNA, 19 nt, Human T-lymphotropic virus 2
cuguuggaucucccuucca

SEQ ID NO: 4018149 - RNA, 19 nt, Human T-lymphotropic virus 2
cuuacaagaucuccuccag

SEQ ID NO: 4018150 - RNA, 20 nt, Human T-lymphotropic virus 2
cuuacaccucccaacccuuc

SEQ ID NO: 4018151 - RNA, 19 nt, Human T-lymphotropic virus 2
cuuacccacuuccccuagc

SEQ ID NO: 4018152 - RNA, 18 nt, Human T-lymphotropic virus 2
cuuacccaggccauaguc

SEQ ID NO: 4018153 - RNA, 13 nt, Human T-lymphotropic virus 2
cuuaccccaaagc

SEQ ID NO: 4018154 - RNA, 16 nt, Human T-lymphotropic virus 2
cuuaucuuagcucccc

SEQ ID NO: 4018155 - RNA, 20 nt, Human T-lymphotropic virus 2
cuucaccauuccccagccau

SEQ ID NO: 4018156 - RNA, 12 nt, Human T-lymphotropic virus 2
cuuccaucccuc

SEQ ID NO: 4018157 - RNA, 20 nt, Human T-lymphotropic virus 2
cuuccccacccagagaaccu

SEQ ID NO: 4018158 - RNA, 19 nt, Human T-lymphotropic virus 2
cuuccccguuaaaaaacca

SEQ ID NO: 4018159 - RNA, 20 nt, Human T-lymphotropic virus 2
cuucgaaaaauucgaaacca

SEQ ID NO: 4018160 - RNA, 21 nt, Human T-lymphotropic virus 2
cuucucuaagugcggcuccuc

SEQ ID NO: 4018161 - RNA, 21 nt, Human T-lymphotropic virus 2
cuugacacggcccccugccuu

SEQ ID NO: 4018162 - RNA, 17 nt, Human T-lymphotropic virus 2
cuuggcuccacaccccc

SEQ ID NO: 4018163 - RNA, 12 nt, Human T-lymphotropic virus 2
cuuuccuccugc

SEQ ID NO: 4018164 - RNA, 17 nt, Human T-lymphotropic virus 2
gaaaaacaaggcucuga

SEQ ID NO: 4018165 - RNA, 16 nt, Human T-lymphotropic virus 2
gaaauggaugccugga

SEQ ID NO: 4018166 - RNA, 16 nt, Human T-lymphotropic virus 2
gaacacccauccuucg

SEQ ID NO: 4018167 - RNA, 16 nt, Human T-lymphotropic virus 2
gaaccacgacuccuca

SEQ ID NO: 4018168 - RNA, 15 nt, Human T-lymphotropic virus 2
gaacccacucagccu

SEQ ID NO: 4018169 - RNA, 10 nt, Human T-lymphotropic virus 2
gaaccccagu

SEQ ID NO: 4018170 - RNA, 14 nt, Human T-lymphotropic virus 2
gaacugaaaccacg

SEQ ID NO: 4018171 - RNA, 15 nt, Human T-lymphotropic virus 2
gaacugaaaccacgg

SEQ ID NO: 4018172 - RNA, 16 nt, Human T-lymphotropic virus 2
gaacugcuccucccaa

SEQ ID NO: 4018173 - RNA, 18 nt, Human T-lymphotropic virus 2
gacacccugauccuaggc

SEQ ID NO: 4018174 - RNA, 18 nt, Human T-lymphotropic virus 2
gaccaucuaccuccacca

SEQ ID NO: 4018175 - RNA, 16 nt, Human T-lymphotropic virus 2
gacgaccccagccccc

SEQ ID NO: 4018176 - RNA, 16 nt, Human T-lymphotropic virus 2
gacuacacccccccug

SEQ ID NO: 4018177 - RNA, 14 nt, Human T-lymphotropic virus 2
gacucgccucuccc

SEQ ID NO: 4018178 - RNA, 15 nt, Human T-lymphotropic virus 2
gacuuccugaggaac

SEQ ID NO: 4018179 - RNA, 14 nt, Human T-lymphotropic virus 2
gagccaccaaugcc

SEQ ID NO: 4018180 - RNA, 14 nt, Human T-lymphotropic virus 2
gagcucggcugccc

SEQ ID NO: 4018181 - RNA, 18 nt, Human T-lymphotropic virus 2
gagucucgcaccugcucg

SEQ ID NO: 4018182 - RNA, 21 nt, Human T-lymphotropic virus 2
gaugccuuucuucccucuccc

SEQ ID NO: 4018183 - RNA, 18 nt, Human T-lymphotropic virus 2
gauugguaucuccuccua

SEQ ID NO: 4018184 - RNA, 17 nt, Human T-lymphotropic virus 2
gcaccaacucaccuggg

SEQ ID NO: 4018185 - RNA, 19 nt, Human T-lymphotropic virus 2
gcacgagaagcccuccaga

SEQ ID NO: 4018186 - RNA, 15 nt, Human T-lymphotropic virus 2
gcagcaacagcaacc

SEQ ID NO: 4018187 - RNA, 13 nt, Human T-lymphotropic virus 2
gcagcaagggcua

SEQ ID NO: 4018188 - RNA, 14 nt, Human T-lymphotropic virus 2
gcaggcgucccggg

SEQ ID NO: 4018189 - RNA, 18 nt, Human T-lymphotropic virus 2
gccaacaaagaaugccaa

SEQ ID NO: 4018190 - RNA, 17 nt, Human T-lymphotropic virus 2
gccaagccauggccuuc

SEQ ID NO: 4018191 - RNA, 18 nt, Human T-lymphotropic virus 2
gccacgccccccuccugg

SEQ ID NO: 4018192 - RNA, 16 nt, Human T-lymphotropic virus 2
gccagccacccagggc

SEQ ID NO: 4018193 - RNA, 23 nt, Human T-lymphotropic virus 2
gccaucuuuaguaguucaguccu

SEQ ID NO: 4018194 - RNA, 18 nt, Human T-lymphotropic virus 2
gcccaucaaacccuccag

SEQ ID NO: 4018195 - RNA, 16 nt, Human T-lymphotropic virus 2
gcccauuucccaggau

SEQ ID NO: 4018196 - RNA, 14 nt, Human T-lymphotropic virus 2
gccccaaggccucc

SEQ ID NO: 4018197 - RNA, 20 nt, Human T-lymphotropic virus 2
gccccccgaucucacuagcc

SEQ ID NO: 4018198 - RNA, 21 nt, Human T-lymphotropic virus 2
gcccccuuggggagaugcucc

SEQ ID NO: 4018199 - RNA, 11 nt, Human T-lymphotropic virus 2
gcccuccuggc

SEQ ID NO: 4018200 - RNA, 14 nt, Human T-lymphotropic virus 2
gcccugcccgcucc

SEQ ID NO: 4018201 - RNA, 18 nt, Human T-lymphotropic virus 2
gcccugcccgcuccucca

SEQ ID NO: 4018202 - RNA, 19 nt, Human T-lymphotropic virus 2
gcccugcccgcuccuccau

SEQ ID NO: 4018203 - RNA, 18 nt, Human T-lymphotropic virus 2
gccgcccucuuggcaggc

SEQ ID NO: 4018204 - RNA, 20 nt, Human T-lymphotropic virus 2
gccguccucaaccccaugag

SEQ ID NO: 4018205 - RNA, 23 nt, Human T-lymphotropic virus 2
gccuacaucgacaugcccuccug

SEQ ID NO: 4018206 - RNA, 14 nt, Human T-lymphotropic virus 2
gccuaggcccuccg

SEQ ID NO: 4018207 - RNA, 17 nt, Human T-lymphotropic virus 2
gccugcaccaucuuaac

SEQ ID NO: 4018208 - RNA, 22 nt, Human T-lymphotropic virus 2
gccuuaccccaccuacagacca

SEQ ID NO: 4018209 - RNA, 17 nt, Human T-lymphotropic virus 2
gccuuucuucccucucc

SEQ ID NO: 4018210 - RNA, 21 nt, Human T-lymphotropic virus 2
gccuuuuuuccgauggcuccc

SEQ ID NO: 4018211 - RNA, 15 nt, Human T-lymphotropic virus 2
gcgaaagcacacccc

SEQ ID NO: 4018212 - RNA, 14 nt, Human T-lymphotropic virus 2
ucuucgccgucacu

SEQ ID NO: 4018213 - RNA, 20 nt, Human T-lymphotropic virus 2
ugaacauguccuaacccccu

SEQ ID NO: 4018214 - RNA, 15 nt, Human T-lymphotropic virus 2
ugacacggcccccug

SEQ ID NO: 4018215 - RNA, 21 nt, Human T-lymphotropic virus 2
ugaccgaucccgaccccagag

SEQ ID NO: 4018216 - RNA, 14 nt, Human T-lymphotropic virus 2
ugacgccccaaggc

SEQ ID NO: 4018217 - RNA, 14 nt, Human T-lymphotropic virus 2
ugagcgccuccagg

SEQ ID NO: 4018218 - RNA, 15 nt, Human T-lymphotropic virus 2
ugcaaucccuccagg

SEQ ID NO: 4018219 - RNA, 16 nt, Human T-lymphotropic virus 2
ugcaaucccuccagga

SEQ ID NO: 4018220 - RNA, 16 nt, Human T-lymphotropic virus 2
ugcagccuaggcccuc

SEQ ID NO: 4018221 - RNA, 21 nt, Human T-lymphotropic virus 2
ugccccuuagguagucgcucc

SEQ ID NO: 4018222 - RNA, 12 nt, Human T-lymphotropic virus 2
ugcccgcuccuc

SEQ ID NO: 4018223 - RNA, 13 nt, Human T-lymphotropic virus 2
ugcccgcuccucc

SEQ ID NO: 4018224 - RNA, 15 nt, Human T-lymphotropic virus 2
ugcccgcuccuccau

SEQ ID NO: 4018225 - RNA, 12 nt, Human T-lymphotropic virus 2
ugcccuccuggc

SEQ ID NO: 4018226 - RNA, 14 nt, Human T-lymphotropic virus 2
ugccugguguacag

SEQ ID NO: 4018227 - RNA, 22 nt, Human T-lymphotropic virus 2
ugcuccuccgccaacagucucc

SEQ ID NO: 4018228 - RNA, 13 nt, Human T-lymphotropic virus 2
ugcugccaagcca

SEQ ID NO: 4018229 - RNA, 18 nt, Human T-lymphotropic virus 2
ugcugccaauagccacuc

SEQ ID NO: 4018230 - RNA, 16 nt, Human T-lymphotropic virus 2
uggccccugcccccua

SEQ ID NO: 4018231 - RNA, 15 nt, Human T-lymphotropic virus 2
uggccugcaccaucu

SEQ ID NO: 4018232 - RNA, 22 nt, Human T-lymphotropic virus 2
uggcuccacaccccccacccuc

SEQ ID NO: 4018233 - RNA, 16 nt, Human T-lymphotropic virus 2
ugggaccgucucccgg

SEQ ID NO: 4018234 - RNA, 18 nt, Human T-lymphotropic virus 2
ugggaccgucucccggcc

SEQ ID NO: 4018235 - RNA, 17 nt, Human T-lymphotropic virus 2
uggguagacaccuucuc

SEQ ID NO: 4018236 - RNA, 18 nt, Human T-lymphotropic virus 2
uguaacuauggccccggg

SEQ ID NO: 4018237 - RNA, 15 nt, Human T-lymphotropic virus 2
ugucauauucugcca

SEQ ID NO: 4018238 - RNA, 22 nt, Human T-lymphotropic virus 2
uguccagagcaccaacucaccu

SEQ ID NO: 4018239 - RNA, 14 nt, Human T-lymphotropic virus 2
uguccuaaccuucc

SEQ ID NO: 4018240 - RNA, 21 nt, Human T-lymphotropic virus 2
uguccuaaccuuccccuagac

SEQ ID NO: 4018241 - RNA, 22 nt, Human T-lymphotropic virus 2
uguuuggccccuguauccuccg

SEQ ID NO: 4018242 - RNA, 14 nt, Human T-lymphotropic virus 2
uuagccagccccac

SEQ ID NO: 4018243 - RNA, 13 nt, Human T-lymphotropic virus 2
uuaguaguucagu

SEQ ID NO: 4018244 - RNA, 17 nt, Human T-lymphotropic virus 2
uuaucuuagcuccccuu

SEQ ID NO: 4018245 - RNA, 15 nt, Human T-lymphotropic virus 2
uuaugggacaaacac

SEQ ID NO: 4018246 - RNA, 20 nt, Human T-lymphotropic virus 2
cacauuggauaaaaaagcca

SEQ ID NO: 4018247 - RNA, 16 nt, Human T-lymphotropic virus 2
caccaacaucccuguc

SEQ ID NO: 4018248 - RNA, 18 nt, Human T-lymphotropic virus 2
caccaauuacuccugcau

SEQ ID NO: 4018249 - RNA, 22 nt, Human T-lymphotropic virus 2
cacccaggaagucagccaagug

SEQ ID NO: 4018250 - RNA, 20 nt, Human T-lymphotropic virus 2
cacccaguucaaacuccucc

SEQ ID NO: 4018251 - RNA, 19 nt, Human T-lymphotropic virus 2
caccccacaacaacuccau

SEQ ID NO: 4018252 - RNA, 22 nt, Human T-lymphotropic virus 2
cacccucaccccacaacaacuc

SEQ ID NO: 4018253 - RNA, 14 nt, Human T-lymphotropic virus 2
caccuacagaccau

SEQ ID NO: 4018254 - RNA, 17 nt, Human T-lymphotropic virus 2
caccucagaacccacuc

SEQ ID NO: 4018255 - RNA, 22 nt, Human T-lymphotropic virus 2
caccucagaacccacucagccu

SEQ ID NO: 4018256 - RNA, 11 nt, Human T-lymphotropic virus 2
caccucagccu

SEQ ID NO: 4018257 - RNA, 20 nt, Human T-lymphotropic virus 2
caccuccugaacugcuccuc

SEQ ID NO: 4018258 - RNA, 19 nt, Human T-lymphotropic virus 2
caccucuccuuccccaggg

SEQ ID NO: 4018259 - RNA, 20 nt, Human T-lymphotropic virus 2
caccuuggggauccauccuc

SEQ ID NO: 4018260 - RNA, 15 nt, Human T-lymphotropic virus 2
cacuaccacccauuc

SEQ ID NO: 4018261 - RNA, 21 nt, Human T-lymphotropic virus 2
cacucauguauccguccucca

SEQ ID NO: 4018262 - RNA, 11 nt, Human T-lymphotropic virus 2
cacuccagccc

SEQ ID NO: 4018263 - RNA, 14 nt, Human T-lymphotropic virus 2
cacuccccugcccu

SEQ ID NO: 4018264 - RNA, 17 nt, Human T-lymphotropic virus 2
cacuuauaccccauguc

SEQ ID NO: 4018265 - RNA, 20 nt, Human T-lymphotropic virus 2
cagacaauuaggagccuucc

SEQ ID NO: 4018266 - RNA, 20 nt, Human T-lymphotropic virus 2
cagacgaccccagcccccac

SEQ ID NO: 4018267 - RNA, 22 nt, Human T-lymphotropic virus 2
cagacuauccuucaacaggaca

SEQ ID NO: 4018268 - RNA, 15 nt, Human T-lymphotropic virus 2
cagacucgccucucc

SEQ ID NO: 4018269 - RNA, 19 nt, Human T-lymphotropic virus 2
cagagcaccaacucaccug

SEQ ID NO: 4018270 - RNA, 14 nt, Human T-lymphotropic virus 2
cagcaagggcuagg

SEQ ID NO: 4018271 - RNA, 16 nt, Human T-lymphotropic virus 2
cagccacaccaaccuc

SEQ ID NO: 4018272 - RNA, 13 nt, Human T-lymphotropic virus 2
cagccacccaggg

SEQ ID NO: 4018273 - RNA, 20 nt, Human T-lymphotropic virus 2
cagccacgccccccuccugg

SEQ ID NO: 4018274 - RNA, 13 nt, Human T-lymphotropic virus 2
cagccccacccuc

SEQ ID NO: 4018275 - RNA, 12 nt, Human T-lymphotropic virus 2
cagccuccacca

SEQ ID NO: 4018276 - RNA, 17 nt, Human T-lymphotropic virus 2
cagccuccaccaacuuc

SEQ ID NO: 4018277 - RNA, 13 nt, Human T-lymphotropic virus 2
cagcuaacccucc

SEQ ID NO: 4018278 - RNA, 17 nt, Human T-lymphotropic virus 2
cagcuaacccuccaggc

SEQ ID NO: 4018279 - RNA, 18 nt, Human T-lymphotropic virus 2
cagcuccccucccucgcc

SEQ ID NO: 4018280 - RNA, 19 nt, Human T-lymphotropic virus 2
cagcucugccaaucuuucc

SEQ ID NO: 4018281 - RNA, 18 nt, Human T-lymphotropic virus 2
caggaacagcucuccaga

SEQ ID NO: 4018282 - RNA, 20 nt, Human T-lymphotropic virus 2
caggaacggcccccucuuga

SEQ ID NO: 4018283 - RNA, 21 nt, Human T-lymphotropic virus 2
caggagguggcucgcucccuc

SEQ ID NO: 4018284 - RNA, 15 nt, Human T-lymphotropic virus 2
caggcaauaaccccg

SEQ ID NO: 4018285 - RNA, 18 nt, Human T-lymphotropic virus 2
caggcacuacugaggaaa

SEQ ID NO: 4018286 - RNA, 17 nt, Human T-lymphotropic virus 2
caggccauuucccuccu

SEQ ID NO: 4018287 - RNA, 15 nt, Human T-lymphotropic virus 2
caggcccgcccuagg

SEQ ID NO: 4018288 - RNA, 18 nt, Human T-lymphotropic virus 2
caggcuaauaaccccgcc

SEQ ID NO: 4018289 - RNA, 21 nt, Human T-lymphotropic virus 2
caggggcuucuauaccuccca

SEQ ID NO: 4018290 - RNA, 16 nt, Human T-lymphotropic virus 2
caggucgagcucggcu

SEQ ID NO: 4018291 - RNA, 17 nt, Human T-lymphotropic virus 2
caguucaaacuccucca

SEQ ID NO: 4018292 - RNA, 15 nt, Human T-lymphotropic virus 2
cauaacccugaagca

SEQ ID NO: 4018293 - RNA, 11 nt, Human T-lymphotropic virus 2
cauaggccucg

SEQ ID NO: 4018294 - RNA, 15 nt, Human T-lymphotropic virus 2
cauaguccucccgga

SEQ ID NO: 4018295 - RNA, 15 nt, Human T-lymphotropic virus 2
caucaaaacccagga

SEQ ID NO: 4018296 - RNA, 21 nt, Human T-lymphotropic virus 2
caucacuccccugcccucuca

SEQ ID NO: 4018297 - RNA, 16 nt, Human T-lymphotropic virus 2
caucccaacccuuccc

SEQ ID NO: 4018298 - RNA, 12 nt, Human T-lymphotropic virus 2
caucccccagga

SEQ ID NO: 4018299 - RNA, 16 nt, Human T-lymphotropic virus 2
caucccccaggagccc

SEQ ID NO: 4018300 - RNA, 16 nt, Human T-lymphotropic virus 2
caucccgaucaagaca

SEQ ID NO: 4018301 - RNA, 15 nt, Human T-lymphotropic virus 2
cauccucauucacca

SEQ ID NO: 4018302 - RNA, 15 nt, Human T-lymphotropic virus 2
caugacccuccuagu

SEQ ID NO: 4018303 - RNA, 16 nt, Human T-lymphotropic virus 2
caugaccuaagagcca

SEQ ID NO: 4018304 - RNA, 13 nt, Human T-lymphotropic virus 2
caugcccaagacc

SEQ ID NO: 4018305 - RNA, 22 nt, Human T-lymphotropic virus 2
cauguaacuauggccccgggac

SEQ ID NO: 4018306 - RNA, 19 nt, Human T-lymphotropic virus 2
cauguccuaacccccucca

SEQ ID NO: 4018307 - RNA, 20 nt, Human T-lymphotropic virus 2
cauuacuaccacccucaccu

SEQ ID NO: 4018308 - RNA, 15 nt, Human T-lymphotropic virus 2
cauuauccucccccc

SEQ ID NO: 4018309 - RNA, 22 nt, Human T-lymphotropic virus 2
cauuccccaacaaaccuccucc

SEQ ID NO: 4018310 - RNA, 23 nt, Human T-lymphotropic virus 2
cauuccccaacaaaccuccuccc

SEQ ID NO: 4018311 - RNA, 16 nt, Human T-lymphotropic virus 2
cauugcuaccaaccuc

SEQ ID NO: 4018312 - RNA, 13 nt, Human T-lymphotropic virus 2
ccaaacagacagg

SEQ ID NO: 4018313 - RNA, 16 nt, Human T-lymphotropic virus 2
ccaacauacgccgugg

SEQ ID NO: 4018314 - RNA, 17 nt, Human T-lymphotropic virus 2
ccaacccgucugcacgu

SEQ ID NO: 4018315 - RNA, 22 nt, Human T-lymphotropic virus 2
ccaacccgugagggcucccugu

SEQ ID NO: 4018316 - RNA, 17 nt, Human T-lymphotropic virus 2
ccaagcaguaccagcca

SEQ ID NO: 4018317 - RNA, 15 nt, Human T-lymphotropic virus 2
ccaagguuccaccug

SEQ ID NO: 4018318 - RNA, 20 nt, Human T-lymphotropic virus 2
ccaauuuucacccucucccc

SEQ ID NO: 4018319 - RNA, 23 nt, Human T-lymphotropic virus 2
ccaccaauugcugccaauagcca

SEQ ID NO: 4018320 - RNA, 23 nt, Human T-lymphotropic virus 2
ccaccuccccccccuuccccgga

SEQ ID NO: 4018321 - RNA, 15 nt, Human T-lymphotropic virus 2
ccacgacuccucagg

SEQ ID NO: 4018322 - RNA, 14 nt, Human T-lymphotropic virus 2
ccacgcaaugcuuc

SEQ ID NO: 4018323 - RNA, 14 nt, Human T-lymphotropic virus 2
ccacgcauggccuu

SEQ ID NO: 4018324 - RNA, 22 nt, Human T-lymphotropic virus 2
ccagacaauuaggagccuuccu

SEQ ID NO: 4018325 - RNA, 19 nt, Human T-lymphotropic virus 2
ccagacacucgugcccggg

SEQ ID NO: 4018326 - RNA, 20 nt, Human T-lymphotropic virus 2
ccagacaggcauaaccauuc

SEQ ID NO: 4018327 - RNA, 15 nt, Human T-lymphotropic virus 2
ccagccacccagggc

SEQ ID NO: 4018328 - RNA, 13 nt, Human T-lymphotropic virus 2
ccagcccccacca

SEQ ID NO: 4018329 - RNA, 16 nt, Human T-lymphotropic virus 2
ccagcuaacccuccag

SEQ ID NO: 4018330 - RNA, 17 nt, Human T-lymphotropic virus 2
ccagcuuuccccaccca

SEQ ID NO: 4018331 - RNA, 16 nt, Human T-lymphotropic virus 2
ccaggagcccccucag

SEQ ID NO: 4018332 - RNA, 14 nt, Human T-lymphotropic virus 2
ccauaaccuuggca

SEQ ID NO: 4018333 - RNA, 18 nt, Human T-lymphotropic virus 2
ccaucaaaacccaggagu

SEQ ID NO: 4018334 - RNA, 18 nt, Human T-lymphotropic virus 2
ccaucaaacccuccaggc

SEQ ID NO: 4018335 - RNA, 18 nt, Human T-lymphotropic virus 2
ccauccacaguccucuau

SEQ ID NO: 4018336 - RNA, 24 nt, Human T-lymphotropic virus 2
ccaucuuuaguaguucaguccucc

SEQ ID NO: 4018337 - RNA, 17 nt, Human T-lymphotropic virus 2
ccauguccgcagccaca

SEQ ID NO: 4018338 - RNA, 15 nt, Human T-lymphotropic virus 2
ccauuacuaccaccc

SEQ ID NO: 4018339 - RNA, 22 nt, Human T-lymphotropic virus 2
ccauuacuaccacccucaccuc

SEQ ID NO: 4018340 - RNA, 20 nt, Human T-lymphotropic virus 2
cccacaacucaaacccccuc

SEQ ID NO: 4018341 - RNA, 19 nt, Human T-lymphotropic virus 2
cccacucagccuccaccaa

SEQ ID NO: 4018342 - RNA, 13 nt, Human T-lymphotropic virus 2
cccagcccccacc

SEQ ID NO: 4018343 - RNA, 15 nt, Human T-lymphotropic virus 2
cccaggagcccccuc

SEQ ID NO: 4018344 - RNA, 20 nt, Human T-lymphotropic virus 2
cccauaaaauuugccuaguc

SEQ ID NO: 4018345 - RNA, 17 nt, Human T-lymphotropic virus 2
cccauugguccaugacu

SEQ ID NO: 4018346 - RNA, 20 nt, Human T-lymphotropic virus 2
cccauugguccaugacuccg

SEQ ID NO: 4018347 - RNA, 19 nt, Human T-lymphotropic virus 2
gacaucucgauacucccac

SEQ ID NO: 4018348 - RNA, 13 nt, Human T-lymphotropic virus 2
gaccccagccccc

SEQ ID NO: 4018349 - RNA, 15 nt, Human T-lymphotropic virus 2
gacgaccccagcccc

SEQ ID NO: 4018350 - RNA, 22 nt, Human T-lymphotropic virus 2
gacucaccuuggggauccaucc

SEQ ID NO: 4018351 - RNA, 15 nt, Human T-lymphotropic virus 2
gacuccucaggccaa

SEQ ID NO: 4018352 - RNA, 13 nt, Human T-lymphotropic virus 2
gagacucaccuug

SEQ ID NO: 4018353 - RNA, 18 nt, Human T-lymphotropic virus 2
gagccagccacccagggc

SEQ ID NO: 4018354 - RNA, 16 nt, Human T-lymphotropic virus 2
gagcgcagcaagggcu

SEQ ID NO: 4018355 - RNA, 19 nt, Human T-lymphotropic virus 2
gaggaaggggaaccccucc

SEQ ID NO: 4018356 - RNA, 15 nt, Human T-lymphotropic virus 2
gaggucagcuccucu

SEQ ID NO: 4018357 - RNA, 14 nt, Human T-lymphotropic virus 2
gauccuaggcgcca

SEQ ID NO: 4018358 - RNA, 18 nt, Human T-lymphotropic virus 2
gauguaaauuucacccag

SEQ ID NO: 4018359 - RNA, 21 nt, Human T-lymphotropic virus 2
gauguaaauuucacccaggaa

SEQ ID NO: 4018360 - RNA, 22 nt, Human T-lymphotropic virus 2
gaugucagacucgccucucccu

SEQ ID NO: 4018361 - RNA, 23 nt, Human T-lymphotropic virus 2
gauuccauaaccuuggcagccaa

SEQ ID NO: 4018362 - RNA, 21 nt, Human T-lymphotropic virus 2
gcaagcccuuugcgacuuccu

SEQ ID NO: 4018363 - RNA, 16 nt, Human T-lymphotropic virus 2
gcaagggcuagggcuu

SEQ ID NO: 4018364 - RNA, 21 nt, Human T-lymphotropic virus 2
gcaaucuccuaaaauagucua

SEQ ID NO: 4018365 - RNA, 22 nt, Human T-lymphotropic virus 2
gcagccguccucaaccccauga

SEQ ID NO: 4018366 - RNA, 17 nt, Human T-lymphotropic virus 2
gcagcuauccuacaggg

SEQ ID NO: 4018367 - RNA, 20 nt, Human T-lymphotropic virus 2
gcaggcccgcccuaggagca

SEQ ID NO: 4018368 - RNA, 13 nt, Human T-lymphotropic virus 2
gccaagauccuuc

SEQ ID NO: 4018369 - RNA, 19 nt, Human T-lymphotropic virus 2
gccaagauccuucucacug

SEQ ID NO: 4018370 - RNA, 16 nt, Human T-lymphotropic virus 2
gccaauuuucacccuc

SEQ ID NO: 4018371 - RNA, 23 nt, Human T-lymphotropic virus 2
gccaauuuucacccucucccccg

SEQ ID NO: 4018372 - RNA, 17 nt, Human T-lymphotropic virus 2
gccaccuccccccccuu

SEQ ID NO: 4018373 - RNA, 16 nt, Human T-lymphotropic virus 2
gccaccuguccagagc

SEQ ID NO: 4018374 - RNA, 22 nt, Human T-lymphotropic virus 2
gccaccuguccagagcaccaac

SEQ ID NO: 4018375 - RNA, 13 nt, Human T-lymphotropic virus 2
gccagccacccag

SEQ ID NO: 4018376 - RNA, 13 nt, Human T-lymphotropic virus 2
gccagcucugcca

SEQ ID NO: 4018377 - RNA, 23 nt, Human T-lymphotropic virus 2
gccaggcaauacccgugaccccu

SEQ ID NO: 4018378 - RNA, 23 nt, Human T-lymphotropic virus 2
gccauguaacuauggccccggga

SEQ ID NO: 4018379 - RNA, 15 nt, Human T-lymphotropic virus 2
gccauuacuaccacc

SEQ ID NO: 4018380 - RNA, 22 nt, Human T-lymphotropic virus 2
gccauuacuaccacccucaccu

SEQ ID NO: 4018381 - RNA, 14 nt, Human T-lymphotropic virus 2
gcccagcagagccg

SEQ ID NO: 4018382 - RNA, 21 nt, Human T-lymphotropic virus 2
gcccaucuuacguucccuagc

SEQ ID NO: 4018383 - RNA, 19 nt, Human T-lymphotropic virus 2
gcccccgauguccagcccu

SEQ ID NO: 4018384 - RNA, 17 nt, Human T-lymphotropic virus 2
gccccgucuccagucca

SEQ ID NO: 4018385 - RNA, 18 nt, Human T-lymphotropic virus 2
gccccuggauaugauccu

SEQ ID NO: 4018386 - RNA, 18 nt, Human T-lymphotropic virus 2
gccccuggcuuggcucca

SEQ ID NO: 4018387 - RNA, 21 nt, Human T-lymphotropic virus 2
gccccuggcuuggcuccacac

SEQ ID NO: 4018388 - RNA, 13 nt, Human T-lymphotropic virus 2
gcccugcuuucgu

SEQ ID NO: 4018389 - RNA, 17 nt, Human T-lymphotropic virus 2
gccucuuagacacccac

SEQ ID NO: 4018390 - RNA, 14 nt, Human T-lymphotropic virus 2
gccuggaaccaacc

SEQ ID NO: 4018391 - RNA, 20 nt, Human T-lymphotropic virus 2
gccuucaccauuccccagcc

SEQ ID NO: 4018392 - RNA, 19 nt, Human T-lymphotropic virus 2
gccuuccccgaaccuggcc

SEQ ID NO: 4018393 - RNA, 15 nt, Human T-lymphotropic virus 2
gcgcagcaagggcua

SEQ ID NO: 4018394 - RNA, 22 nt, Human T-lymphotropic virus 2
gcgcuccuuucugcgccgcucc

SEQ ID NO: 4018395 - RNA, 20 nt, Human T-lymphotropic virus 2
gcggacacacuaacagcccc

SEQ ID NO: 4018396 - RNA, 16 nt, Human T-lymphotropic virus 2
gcggcuccuccaugac

SEQ ID NO: 4018397 - RNA, 15 nt, Human T-lymphotropic virus 2
gcuacgacgcuuucu

SEQ ID NO: 4018398 - RNA, 18 nt, Human T-lymphotropic virus 2
gcuccacaccccccaccc

SEQ ID NO: 4018399 - RNA, 22 nt, Human T-lymphotropic virus 2
gcuccacaccccccacccuccg

SEQ ID NO: 4018400 - RNA, 11 nt, Human T-lymphotropic virus 2
gcucuccagaa

SEQ ID NO: 4018401 - RNA, 22 nt, Human T-lymphotropic virus 2
gcugccaagccauggccuuccc

SEQ ID NO: 4018402 - RNA, 23 nt, Human T-lymphotropic virus 2
gcuuaacuuucuccaggcugcuu

SEQ ID NO: 4018403 - RNA, 24 nt, Human T-lymphotropic virus 2
gcuuuccccaacuccaauacccaa

SEQ ID NO: 4018404 - RNA, 18 nt, Human T-lymphotropic virus 2
ggagccuuccucaccaag

SEQ ID NO: 4018405 - RNA, 15 nt, Human T-lymphotropic virus 2
ggaggucagcuccuc

SEQ ID NO: 4018406 - RNA, 19 nt, Human T-lymphotropic virus 2
ggcacgagaagcccuccag

SEQ ID NO: 4018407 - RNA, 20 nt, Human T-lymphotropic virus 2
ggcaggcccgcccuaggagc

SEQ ID NO: 4018408 - RNA, 20 nt, Human T-lymphotropic virus 2
ggcaggcgucccggggccaa

SEQ ID NO: 4018409 - RNA, 13 nt, Human T-lymphotropic virus 2
ggccagccuuccu

SEQ ID NO: 4018410 - RNA, 19 nt, Human T-lymphotropic virus 2
ggccgccucaaccccgccc

SEQ ID NO: 4018411 - RNA, 19 nt, Human T-lymphotropic virus 2
ggccgguaaagcuccacga

SEQ ID NO: 4018412 - RNA, 22 nt, Human T-lymphotropic virus 2
ggccuccccgaggguaccccca

SEQ ID NO: 4018413 - RNA, 18 nt, Human T-lymphotropic virus 2
ggccucggcaccuccuga

SEQ ID NO: 4018414 - RNA, 23 nt, Human T-lymphotropic virus 2
ggcgguacaacaguuugacccca

SEQ ID NO: 4018415 - RNA, 15 nt, Human T-lymphotropic virus 2
ggcuagggcuuccug

SEQ ID NO: 4018416 - RNA, 16 nt, Human T-lymphotropic virus 2
ggcuaucaacccacca

SEQ ID NO: 4018417 - RNA, 14 nt, Human T-lymphotropic virus 2
ggcucgcucccuca

SEQ ID NO: 4018418 - RNA, 22 nt, Human T-lymphotropic virus 2
gggagaucuaaucuccccccau

SEQ ID NO: 4018419 - RNA, 20 nt, Human T-lymphotropic virus 2
gggguuuaaaaacagcccca

SEQ ID NO: 4018420 - RNA, 22 nt, Human T-lymphotropic virus 2
ggguacccccaaagagcccauc

SEQ ID NO: 4018421 - RNA, 16 nt, Human T-lymphotropic virus 2
gguggcucgcucccuc

SEQ ID NO: 4018422 - RNA, 14 nt, Human T-lymphotropic virus 2
guaaaggcucugac

SEQ ID NO: 4018423 - RNA, 16 nt, Human T-lymphotropic virus 2
gucaucuuucaaccca

SEQ ID NO: 4018424 - RNA, 23 nt, Human T-lymphotropic virus 2
guccguggaagacucucuuacac

SEQ ID NO: 4018425 - RNA, 18 nt, Human T-lymphotropic virus 2
guccucaaccccaugagg

SEQ ID NO: 4018426 - RNA, 19 nt, Human T-lymphotropic virus 2
gucuccaaggcccuggagg

SEQ ID NO: 4018427 - RNA, 14 nt, Human T-lymphotropic virus 2
gucuccucucaggu

SEQ ID NO: 4018428 - RNA, 22 nt, Human T-lymphotropic virus 2
guuaugggacaaacaccucagc

SEQ ID NO: 4018429 - RNA, 14 nt, Human T-lymphotropic virus 2
guuccuacacacag

SEQ ID NO: 4018430 - RNA, 21 nt, Human T-lymphotropic virus 2
guugacaaagacaucucccac

SEQ ID NO: 4018431 - RNA, 19 nt, Human T-lymphotropic virus 2
guugagacgccuuccgugg

SEQ ID NO: 4018432 - RNA, 19 nt, Human T-lymphotropic virus 2
uaaaccugagcgccuccag

SEQ ID NO: 4018433 - RNA, 17 nt, Human T-lymphotropic virus 2
uaaacuccccggccuua

SEQ ID NO: 4018434 - RNA, 15 nt, Human T-lymphotropic virus 2
uaaaggaacacccau

SEQ ID NO: 4018435 - RNA, 19 nt, Human T-lymphotropic virus 2
uaagugcggcuccuccaug

SEQ ID NO: 4018436 - RNA, 15 nt, Human T-lymphotropic virus 2
uacaauacuccuccu

SEQ ID NO: 4018437 - RNA, 18 nt, Human T-lymphotropic virus 2
uacacccccaacaucucc

SEQ ID NO: 4018438 - RNA, 20 nt, Human T-lymphotropic virus 2
uacaccucccaacccuucuc

SEQ ID NO: 4018439 - RNA, 20 nt, Human T-lymphotropic virus 2
uacaucccccaggagccccc

SEQ ID NO: 4018440 - RNA, 16 nt, Human T-lymphotropic virus 2
uacaugccauucaaca

SEQ ID NO: 4018441 - RNA, 20 nt, Human T-lymphotropic virus 2
uaccagcuuuccccacccau

SEQ ID NO: 4018442 - RNA, 22 nt, Human T-lymphotropic virus 2
uacccaagcgcuacuugacaca

SEQ ID NO: 4018443 - RNA, 12 nt, Human T-lymphotropic virus 2
uaccccaaagca

SEQ ID NO: 4018444 - RNA, 17 nt, Human T-lymphotropic virus 2
uaccccaccuacagacc

SEQ ID NO: 4018445 - RNA, 23 nt, Human T-lymphotropic virus 2
uaccccucccaaaccaccuccca

SEQ ID NO: 4018446 - RNA, 17 nt, Human T-lymphotropic virus 2
uaccuacauucccucgc

SEQ ID NO: 4018447 - RNA, 14 nt, Human T-lymphotropic virus 2
gcgauuguguacag

SEQ ID NO: 4018448 - RNA, 17 nt, Human T-lymphotropic virus 2
gcgcagcaagggcuagg

SEQ ID NO: 4018449 - RNA, 19 nt, Human T-lymphotropic virus 2
gcgccgcucccgcuccuca

SEQ ID NO: 4018450 - RNA, 13 nt, Human T-lymphotropic virus 2
gcgccuccaggcc

SEQ ID NO: 4018451 - RNA, 16 nt, Human T-lymphotropic virus 2
gcgcucggcuagacuc

SEQ ID NO: 4018452 - RNA, 21 nt, Human T-lymphotropic virus 2
gcggacacacuaacagccccc

SEQ ID NO: 4018453 - RNA, 20 nt, Human T-lymphotropic virus 2
gcggccggggcagccuugcu

SEQ ID NO: 4018454 - RNA, 23 nt, Human T-lymphotropic virus 2
gcuagggcuuccugaaccucucc

SEQ ID NO: 4018455 - RNA, 19 nt, Human T-lymphotropic virus 2
gcuccccucaaaaggcagc

SEQ ID NO: 4018456 - RNA, 16 nt, Human T-lymphotropic virus 2
gcucccguaccuccuc

SEQ ID NO: 4018457 - RNA, 21 nt, Human T-lymphotropic virus 2
gcucccucaccgacccucugg

SEQ ID NO: 4018458 - RNA, 17 nt, Human T-lymphotropic virus 2
gcucccuguauccagac

SEQ ID NO: 4018459 - RNA, 18 nt, Human T-lymphotropic virus 2
gcuccucacgcuccugca

SEQ ID NO: 4018460 - RNA, 18 nt, Human T-lymphotropic virus 2
gcucggcuagacucugcc

SEQ ID NO: 4018461 - RNA, 19 nt, Human T-lymphotropic virus 2
gcucggcuagacucugccu

SEQ ID NO: 4018462 - RNA, 22 nt, Human T-lymphotropic virus 2
gcugaaaaacaaggcucugacg

SEQ ID NO: 4018463 - RNA, 16 nt, Human T-lymphotropic virus 2
gcugccaagccauggc

SEQ ID NO: 4018464 - RNA, 20 nt, Human T-lymphotropic virus 2
gcuuauacaauacuccuccu

SEQ ID NO: 4018465 - RNA, 18 nt, Human T-lymphotropic virus 2
gcuuccugaaccucuccg

SEQ ID NO: 4018466 - RNA, 21 nt, Human T-lymphotropic virus 2
gcuuccugaaccucuccggga

SEQ ID NO: 4018467 - RNA, 19 nt, Human T-lymphotropic virus 2
gcuucuauaccucccagac

SEQ ID NO: 4018468 - RNA, 22 nt, Human T-lymphotropic virus 2
ggaacugaaaccacggcccuga

SEQ ID NO: 4018469 - RNA, 19 nt, Human T-lymphotropic virus 2
ggacacacuaacagccccc

SEQ ID NO: 4018470 - RNA, 14 nt, Human T-lymphotropic virus 2
ggacgaccuaccca

SEQ ID NO: 4018471 - RNA, 14 nt, Human T-lymphotropic virus 2
ggaggccccccccc

SEQ ID NO: 4018472 - RNA, 12 nt, Human T-lymphotropic virus 2
ggcaccuccuga

SEQ ID NO: 4018473 - RNA, 16 nt, Human T-lymphotropic virus 2
ggcagcuauccuacag

SEQ ID NO: 4018474 - RNA, 20 nt, Human T-lymphotropic virus 2
ggcauccucauucaccacau

SEQ ID NO: 4018475 - RNA, 21 nt, Human T-lymphotropic virus 2
ggccccuggcuuggcuccaca

SEQ ID NO: 4018476 - RNA, 12 nt, Human T-lymphotropic virus 2
ggcuggcugcuu

SEQ ID NO: 4018477 - RNA, 18 nt, Human T-lymphotropic virus 2
ggcuucuauaccucccag

SEQ ID NO: 4018478 - RNA, 17 nt, Human T-lymphotropic virus 2
ggcuuuccccaacucca

SEQ ID NO: 4018479 - RNA, 19 nt, Human T-lymphotropic virus 2
gggcuuccugaaccucucc

SEQ ID NO: 4018480 - RNA, 23 nt, Human T-lymphotropic virus 2
gggcuuccugaaccucuccggga

SEQ ID NO: 4018481 - RNA, 21 nt, Human T-lymphotropic virus 2
ggggccucuugcccaaccaca

SEQ ID NO: 4018482 - RNA, 21 nt, Human T-lymphotropic virus 2
gggucucuaaaggaacaccca

SEQ ID NO: 4018483 - RNA, 15 nt, Human T-lymphotropic virus 2
gguaagucuccucuc

SEQ ID NO: 4018484 - RNA, 18 nt, Human T-lymphotropic virus 2
gguagucgcuccccgagg

SEQ ID NO: 4018485 - RNA, 17 nt, Human T-lymphotropic virus 2
gguccuuaccccuccca

SEQ ID NO: 4018486 - RNA, 21 nt, Human T-lymphotropic virus 2
gguggaguaacaggcucccua

SEQ ID NO: 4018487 - RNA, 16 nt, Human T-lymphotropic virus 2
guaccuaugcuccucc

SEQ ID NO: 4018488 - RNA, 17 nt, Human T-lymphotropic virus 2
guaguucaguccucccu

SEQ ID NO: 4018489 - RNA, 17 nt, Human T-lymphotropic virus 2
gucacggagacucaccu

SEQ ID NO: 4018490 - RNA, 21 nt, Human T-lymphotropic virus 2
gucacugaaaacgaaaccuca

SEQ ID NO: 4018491 - RNA, 21 nt, Human T-lymphotropic virus 2
guccagagcaccaacucaccu

SEQ ID NO: 4018492 - RNA, 15 nt, Human T-lymphotropic virus 2
gucccggggccaaca

SEQ ID NO: 4018493 - RNA, 16 nt, Human T-lymphotropic virus 2
gucccggggccaacau

SEQ ID NO: 4018494 - RNA, 13 nt, Human T-lymphotropic virus 2
guccucaacccca

SEQ ID NO: 4018495 - RNA, 14 nt, Human T-lymphotropic virus 2
gucucccccaaggu

SEQ ID NO: 4018496 - RNA, 13 nt, Human T-lymphotropic virus 2
gucuccucucagc

SEQ ID NO: 4018497 - RNA, 15 nt, Human T-lymphotropic virus 2
gucuccucucagccc

SEQ ID NO: 4018498 - RNA, 14 nt, Human T-lymphotropic virus 2
guggacacccaagg

SEQ ID NO: 4018499 - RNA, 22 nt, Human T-lymphotropic virus 2
guggacuacgugcugccaagcc

SEQ ID NO: 4018500 - RNA, 23 nt, Human T-lymphotropic virus 2
guugacaaagacaucucccaccu

SEQ ID NO: 4018501 - RNA, 22 nt, Human T-lymphotropic virus 2
guuuaaaaacagccccacccuc

SEQ ID NO: 4018502 - RNA, 21 nt, Human T-lymphotropic virus 2
uaaaccugagcgccuccaggc

SEQ ID NO: 4018503 - RNA, 23 nt, Human T-lymphotropic virus 2
uaaaugaccuggucuccaaggcc

SEQ ID NO: 4018504 - RNA, 23 nt, Human T-lymphotropic virus 2
uaacugcaacaacuccauuaucc

SEQ ID NO: 4018505 - RNA, 19 nt, Human T-lymphotropic virus 2
uaacugccguggccgccuc

SEQ ID NO: 4018506 - RNA, 17 nt, Human T-lymphotropic virus 2
uaagucuccucucaggu

SEQ ID NO: 4018507 - RNA, 16 nt, Human T-lymphotropic virus 2
uaaugggccagccuuc

SEQ ID NO: 4018508 - RNA, 17 nt, Human T-lymphotropic virus 2
uacaacaacucucccag

SEQ ID NO: 4018509 - RNA, 18 nt, Human T-lymphotropic virus 2
uacaacaacucucccagc

SEQ ID NO: 4018510 - RNA, 19 nt, Human T-lymphotropic virus 2
uacaacaacucucccagcu

SEQ ID NO: 4018511 - RNA, 22 nt, Human T-lymphotropic virus 2
uacaacaguuugaccccaccgc

SEQ ID NO: 4018512 - RNA, 16 nt, Human T-lymphotropic virus 2
uacaaccccaccagcu

SEQ ID NO: 4018513 - RNA, 17 nt, Human T-lymphotropic virus 2
uacacacagggacaguc

SEQ ID NO: 4018514 - RNA, 16 nt, Human T-lymphotropic virus 2
uacaccaucagcagcu

SEQ ID NO: 4018515 - RNA, 23 nt, Human T-lymphotropic virus 2
uacaccaucagcagcuuaacaca

SEQ ID NO: 4018516 - RNA, 17 nt, Human T-lymphotropic virus 2
uacacccccccugcccu

SEQ ID NO: 4018517 - RNA, 12 nt, Human T-lymphotropic virus 2
uacaccucccaa

SEQ ID NO: 4018518 - RNA, 23 nt, Human T-lymphotropic virus 2
uacaccucccaacccuucuccag

SEQ ID NO: 4018519 - RNA, 20 nt, Human T-lymphotropic virus 2
uacacgggccccgucuccag

SEQ ID NO: 4018520 - RNA, 23 nt, Human T-lymphotropic virus 2
uacacuccaacugcugaugccuu

SEQ ID NO: 4018521 - RNA, 21 nt, Human T-lymphotropic virus 2
uacauaugagaguaccccuac

SEQ ID NO: 4018522 - RNA, 21 nt, Human T-lymphotropic virus 2
uacaucccccaggagcccccu

SEQ ID NO: 4018523 - RNA, 15 nt, Human T-lymphotropic virus 2
uaccacccucaccuc

SEQ ID NO: 4018524 - RNA, 17 nt, Human T-lymphotropic virus 2
uacccacuuccccuagc

SEQ ID NO: 4018525 - RNA, 20 nt, Human T-lymphotropic virus 2
uaccgggacccaagagcuug

SEQ ID NO: 4018526 - RNA, 14 nt, Human T-lymphotropic virus 2
uaccuaugcuccuc

SEQ ID NO: 4018527 - RNA, 22 nt, Human T-lymphotropic virus 2
uaccucccagacgaccccagcc

SEQ ID NO: 4018528 - RNA, 15 nt, Human T-lymphotropic virus 2
uaccuuaucccucgc

SEQ ID NO: 4018529 - RNA, 20 nt, Human T-lymphotropic virus 2
uagacuguccuaaccuuccc

SEQ ID NO: 4018530 - RNA, 19 nt, Human T-lymphotropic virus 2
uaggacaggucaucucccc

SEQ ID NO: 4018531 - RNA, 17 nt, Human T-lymphotropic virus 2
uagggcuuccugaaccu

SEQ ID NO: 4018532 - RNA, 14 nt, Human T-lymphotropic virus 2
uauaccauacaacc

SEQ ID NO: 4018533 - RNA, 13 nt, Human T-lymphotropic virus 2
uauaccucccaga

SEQ ID NO: 4018534 - RNA, 16 nt, Human T-lymphotropic virus 2
uauacuuauucccaca

SEQ ID NO: 4018535 - RNA, 13 nt, Human T-lymphotropic virus 2
uauauucugcccu

SEQ ID NO: 4018536 - RNA, 20 nt, Human T-lymphotropic virus 2
uauccagcugaccuuacaga

SEQ ID NO: 4018537 - RNA, 14 nt, Human T-lymphotropic virus 2
ucaaaacauccucc

SEQ ID NO: 4018538 - RNA, 15 nt, Human T-lymphotropic virus 2
ucaaacccuccaggc

SEQ ID NO: 4018539 - RNA, 22 nt, Human T-lymphotropic virus 2
ucaagcaggaggucagcuccuc

SEQ ID NO: 4018540 - RNA, 13 nt, Human T-lymphotropic virus 2
ucacacauuuucc

SEQ ID NO: 4018541 - RNA, 19 nt, Human T-lymphotropic virus 2
ucacauugaaccauacuca

SEQ ID NO: 4018542 - RNA, 20 nt, Human T-lymphotropic virus 2
ucaccucuccuuccccaggg

SEQ ID NO: 4018543 - RNA, 21 nt, Human T-lymphotropic virus 2
ucacgauugguaucuccuccu

SEQ ID NO: 4018544 - RNA, 20 nt, Human T-lymphotropic virus 2
ucagacucgccucucccugg

SEQ ID NO: 4018545 - RNA, 13 nt, Human T-lymphotropic virus 2
ucagcuccccucc

SEQ ID NO: 4018546 - RNA, 16 nt, Human T-lymphotropic virus 2
ucagcuccccucccuc

SEQ ID NO: 4018547 - RNA, 18 nt, Human T-lymphotropic virus 2
ucaggcguggacacccaa

SEQ ID NO: 4018548 - RNA, 16 nt, Human T-lymphotropic virus 2
ucauaguccucccgga

SEQ ID NO: 4018549 - RNA, 19 nt, Human T-lymphotropic virus 2
ucauguauccguccuccag

SEQ ID NO: 4018550 - RNA, 16 nt, Human T-lymphotropic virus 2
uccaaacaccauaggc

SEQ ID NO: 4018551 - RNA, 17 nt, Human T-lymphotropic virus 2
uccaaacaccauaggcc

SEQ ID NO: 4018552 - RNA, 15 nt, Human T-lymphotropic virus 2
uccaaaccccccuac

SEQ ID NO: 4018553 - RNA, 15 nt, Human T-lymphotropic virus 2
uccacaccccccacc

SEQ ID NO: 4018554 - RNA, 20 nt, Human T-lymphotropic virus 2
uccacagcgguuacaaaacc

SEQ ID NO: 4018555 - RNA, 18 nt, Human T-lymphotropic virus 2
uccaccacaguccuccac

SEQ ID NO: 4018556 - RNA, 14 nt, Human T-lymphotropic virus 2
uccacccugccagg

SEQ ID NO: 4018557 - RNA, 15 nt, Human T-lymphotropic virus 2
uccacccugccaggc

SEQ ID NO: 4018558 - RNA, 14 nt, Human T-lymphotropic virus 2
uccacggccucacc

SEQ ID NO: 4018559 - RNA, 20 nt, Human T-lymphotropic virus 2
uccaguaaaagccuucuccu

SEQ ID NO: 4018560 - RNA, 16 nt, Human T-lymphotropic virus 2
ucccagcuaacccucc

SEQ ID NO: 4018561 - RNA, 17 nt, Human T-lymphotropic virus 2
ucccagcuaacccucca

SEQ ID NO: 4018562 - RNA, 21 nt, Human T-lymphotropic virus 2
ucccagcuaacccuccaggca

SEQ ID NO: 4018563 - RNA, 20 nt, Human T-lymphotropic virus 2
uccccaacaaaccuccuccc

SEQ ID NO: 4018564 - RNA, 12 nt, Human T-lymphotropic virus 2
uccccaacucca

SEQ ID NO: 4018565 - RNA, 17 nt, Human T-lymphotropic virus 2
ucccccaggagcccccu

SEQ ID NO: 4018566 - RNA, 14 nt, Human T-lymphotropic virus 2
uccccggccuuacc

SEQ ID NO: 4018567 - RNA, 20 nt, Human T-lymphotropic virus 2
uccccuagcgcccccgccgc

SEQ ID NO: 4018568 - RNA, 14 nt, Human T-lymphotropic virus 2
uccccugcccucuc

SEQ ID NO: 4018569 - RNA, 19 nt, Human T-lymphotropic virus 2
ucccgagccagccacccag

SEQ ID NO: 4018570 - RNA, 20 nt, Human T-lymphotropic virus 2
ucccgagccagccacccagg

SEQ ID NO: 4018571 - RNA, 19 nt, Human T-lymphotropic virus 2
ucccgcugcuccuccgcca

SEQ ID NO: 4018572 - RNA, 13 nt, Human T-lymphotropic virus 2
ucccggggaagac

SEQ ID NO: 4018573 - RNA, 17 nt, Human T-lymphotropic virus 2
ucccucgccuccccucc

SEQ ID NO: 4018574 - RNA, 13 nt, Human T-lymphotropic virus 2
ucccucucccggc

SEQ ID NO: 4018575 - RNA, 21 nt, Human T-lymphotropic virus 2
uccggcccuuaccccaaagca

SEQ ID NO: 4018576 - RNA, 17 nt, Human T-lymphotropic virus 2
uccuacacacagggaca

SEQ ID NO: 4018577 - RNA, 18 nt, Human T-lymphotropic virus 2
uccuaccacuccagcccc

SEQ ID NO: 4018578 - RNA, 19 nt, Human T-lymphotropic virus 2
uccuaccacuccagccccu

SEQ ID NO: 4018579 - RNA, 17 nt, Human T-lymphotropic virus 2
uccuauacacuccaacu

SEQ ID NO: 4018580 - RNA, 18 nt, Human T-lymphotropic virus 2
uccuauauggauaccccg

SEQ ID NO: 4018581 - RNA, 13 nt, Human T-lymphotropic virus 2
uccucacgcuccu

SEQ ID NO: 4018582 - RNA, 23 nt, Human T-lymphotropic virus 2
uccucaggccaauuuucacccuc

SEQ ID NO: 4018583 - RNA, 22 nt, Human T-lymphotropic virus 2
uccuccaguaccuaugcuccuc

SEQ ID NO: 4018584 - RNA, 21 nt, Human T-lymphotropic virus 2
uccuccaucccaacccuuccc

SEQ ID NO: 4018585 - RNA, 19 nt, Human T-lymphotropic virus 2
uccuccgccaaauccaggc

SEQ ID NO: 4018586 - RNA, 16 nt, Human T-lymphotropic virus 2
uccuccgccaccuccc

SEQ ID NO: 4018587 - RNA, 21 nt, Human T-lymphotropic virus 2
uccuccuaccacuccagcccc

SEQ ID NO: 4018588 - RNA, 20 nt, Human T-lymphotropic virus 2
uccugaacugcuccucccaa

SEQ ID NO: 4018589 - RNA, 19 nt, Human T-lymphotropic virus 2
uccuggccccugcccccua

SEQ ID NO: 4018590 - RNA, 14 nt, Human T-lymphotropic virus 2
uccuuuccuccugc

SEQ ID NO: 4018591 - RNA, 17 nt, Human T-lymphotropic virus 2
uccuuuccuccugccuc

SEQ ID NO: 4018592 - RNA, 13 nt, Human T-lymphotropic virus 2
ucgacuuccagca

SEQ ID NO: 4018593 - RNA, 12 nt, Human T-lymphotropic virus 2
ucgcaccugcuc

SEQ ID NO: 4018594 - RNA, 23 nt, Human T-lymphotropic virus 2
ucgcugguggaguaacaggcucc

SEQ ID NO: 4018595 - RNA, 14 nt, Human T-lymphotropic virus 2
ucuacaccaccugg

SEQ ID NO: 4018596 - RNA, 14 nt, Human T-lymphotropic virus 2
ucuacuccuccucg

SEQ ID NO: 4018597 - RNA, 21 nt, Human T-lymphotropic virus 2
ucucagcccauuucccaggau

SEQ ID NO: 4018598 - RNA, 16 nt, Human T-lymphotropic virus 2
ucuccaagcggccucg

SEQ ID NO: 4018599 - RNA, 16 nt, Human T-lymphotropic virus 2
ucuccaauaccuuauc

SEQ ID NO: 4018600 - RNA, 18 nt, Human T-lymphotropic virus 2
ucuccaauaccuuauccc

SEQ ID NO: 4018601 - RNA, 17 nt, Human T-lymphotropic virus 2
ucuccaguccauccugg

SEQ ID NO: 4018602 - RNA, 18 nt, Human T-lymphotropic virus 2
ucuccauagacggcuccc

SEQ ID NO: 4018603 - RNA, 14 nt, Human T-lymphotropic virus 2
ucuccccuaucacu

SEQ ID NO: 4018604 - RNA, 21 nt, Human T-lymphotropic virus 2
ucuccguuaugggacaaacac

SEQ ID NO: 4018605 - RNA, 16 nt, Human T-lymphotropic virus 2
ucucgguuccucucca

SEQ ID NO: 4018606 - RNA, 17 nt, Human T-lymphotropic virus 2
ucucgguuccucuccag

SEQ ID NO: 4018607 - RNA, 21 nt, Human T-lymphotropic virus 2
ucucuaaaggaacacccaucc

SEQ ID NO: 4018608 - RNA, 13 nt, Human T-lymphotropic virus 2
ucugcgccgcucc

SEQ ID NO: 4018609 - RNA, 22 nt, Human T-lymphotropic virus 2
ucugcgccgcucccgcuccuca

SEQ ID NO: 4018610 - RNA, 15 nt, Human T-lymphotropic virus 2
ucuuacaccucccaa

SEQ ID NO: 4018611 - RNA, 16 nt, Human T-lymphotropic virus 2
ucuucccggggaagac

SEQ ID NO: 4018612 - RNA, 23 nt, Human T-lymphotropic virus 2
uucaacaggacaucacuccccug

SEQ ID NO: 4018613 - RNA, 20 nt, Human T-lymphotropic virus 2
uucacccaggaagucagcca

SEQ ID NO: 4018614 - RNA, 14 nt, Human T-lymphotropic virus 2
uuccaccucaggca

SEQ ID NO: 4018615 - RNA, 23 nt, Human T-lymphotropic virus 2
uuccaguaaaagccuucuccucg

SEQ ID NO: 4018616 - RNA, 20 nt, Human T-lymphotropic virus 2
uuccccaacaaaccuccucc

SEQ ID NO: 4018617 - RNA, 22 nt, Human T-lymphotropic virus 2
uuccccaacaaaccuccucccg

SEQ ID NO: 4018618 - RNA, 12 nt, Human T-lymphotropic virus 2
uuccuccugccu

SEQ ID NO: 4018619 - RNA, 19 nt, Human T-lymphotropic virus 2
uucgaaaccaaagccuucc

SEQ ID NO: 4018620 - RNA, 14 nt, Human T-lymphotropic virus 2
uucuccaggaacca

SEQ ID NO: 4018621 - RNA, 17 nt, Human T-lymphotropic virus 2
uugaaccauacucagga

SEQ ID NO: 4018622 - RNA, 12 nt, Human T-lymphotropic virus 2
uuggacagagcc

SEQ ID NO: 4018623 - RNA, 12 nt, Human T-lymphotropic virus 2
uuggcagccccc

SEQ ID NO: 4018624 - RNA, 16 nt, Human T-lymphotropic virus 2
uuguaucacccucacc

SEQ ID NO: 4018625 - RNA, 17 nt, Human T-lymphotropic virus 2
uuucacccaggaaguca

SEQ ID NO: 4018626 - RNA, 12 nt, Human T-lymphotropic virus 2
uuucacccucuc

SEQ ID NO: 4018627 - RNA, 20 nt, Human T-lymphotropic virus 2
uuuccaaaucccccucccca

SEQ ID NO: 4018628 - RNA, 15 nt, Human T-lymphotropic virus 2
uuuucccucgcuccc

SEQ ID NO: 4018629 - RNA, 22 nt, Human T-lymphotropic virus 2
aaaccacuccacauuaacacag

SEQ ID NO: 4018630 - RNA, 12 nt, Human T-lymphotropic virus 2
aaacccuccagg

SEQ ID NO: 4018631 - RNA, 14 nt, Human T-lymphotropic virus 2
aaagcccccagggg

SEQ ID NO: 4018632 - RNA, 15 nt, Human T-lymphotropic virus 2
aaagccuucuccucg

SEQ ID NO: 4018633 - RNA, 18 nt, Human T-lymphotropic virus 2
aaaggcucugacgucucc

SEQ ID NO: 4018634 - RNA, 20 nt, Human T-lymphotropic virus 2
aaaggcucugacgucucccc

SEQ ID NO: 4018635 - RNA, 19 nt, Human T-lymphotropic virus 2
aacaccuacaaucccuaua

SEQ ID NO: 4018636 - RNA, 13 nt, Human T-lymphotropic virus 2
aaccaacacccag

SEQ ID NO: 4018637 - RNA, 19 nt, Human T-lymphotropic virus 2
aaccccaccagcucaggcc

SEQ ID NO: 4018638 - RNA, 18 nt, Human T-lymphotropic virus 2
aaccguaguaugccuaua

SEQ ID NO: 4018639 - RNA, 16 nt, Human T-lymphotropic virus 2
aacuccccucauccaa

SEQ ID NO: 4018640 - RNA, 13 nt, Human T-lymphotropic virus 2
aacugaaaccacg

SEQ ID NO: 4018641 - RNA, 15 nt, Human T-lymphotropic virus 2
aacugcaacaacucc

SEQ ID NO: 4018642 - RNA, 23 nt, Human T-lymphotropic virus 2
aacuucuauacaaaauguuccua

SEQ ID NO: 4018643 - RNA, 17 nt, Human T-lymphotropic virus 2
aagacuuauuccuuaua

SEQ ID NO: 4018644 - RNA, 18 nt, Human T-lymphotropic virus 2
aagcccgcggacacacua

SEQ ID NO: 4018645 - RNA, 20 nt, Human T-lymphotropic virus 2
aagcggccggggcagccuug

SEQ ID NO: 4018646 - RNA, 12 nt, Human T-lymphotropic virus 2
aagucuccucuc

SEQ ID NO: 4018647 - RNA, 14 nt, Human T-lymphotropic virus 2
aauagaccucaccc

SEQ ID NO: 4018648 - RNA, 19 nt, Human T-lymphotropic virus 2
aauagccacuccaaacacc

SEQ ID NO: 4018649 - RNA, 17 nt, Human T-lymphotropic virus 2
aaucagcuaaaugucau

SEQ ID NO: 4018650 - RNA, 13 nt, Human T-lymphotropic virus 2
aaucuuuccacca

SEQ ID NO: 4018651 - RNA, 13 nt, Human T-lymphotropic virus 2
aauguugcuuccu

SEQ ID NO: 4018652 - RNA, 13 nt, Human T-lymphotropic virus 2
acaacaacuccau

SEQ ID NO: 4018653 - RNA, 16 nt, Human T-lymphotropic virus 2
acaacaaugccagggg

SEQ ID NO: 4018654 - RNA, 22 nt, Human T-lymphotropic virus 2
acaacggaccaacgacuacacc

SEQ ID NO: 4018655 - RNA, 23 nt, Human T-lymphotropic virus 2
acaauccugucuccucucagccc

SEQ ID NO: 4018656 - RNA, 18 nt, Human T-lymphotropic virus 2
acaccaagggaagccaag

SEQ ID NO: 4018657 - RNA, 12 nt, Human T-lymphotropic virus 2
acaccucagccu

SEQ ID NO: 4018658 - RNA, 17 nt, Human T-lymphotropic virus 2
acaccuucccccaccuc

SEQ ID NO: 4018659 - RNA, 13 nt, Human T-lymphotropic virus 2
acacuaacagccc

SEQ ID NO: 4018660 - RNA, 17 nt, Human T-lymphotropic virus 2
acagccuuaccccaccu

SEQ ID NO: 4018661 - RNA, 23 nt, Human T-lymphotropic virus 2
acaggcucccuaucucuggcuuc

SEQ ID NO: 4018662 - RNA, 16 nt, Human T-lymphotropic virus 2
acaucacuccccugcc

SEQ ID NO: 4018663 - RNA, 15 nt, Human T-lymphotropic virus 2
acaucccccaggagc

SEQ ID NO: 4018664 - RNA, 22 nt, Human T-lymphotropic virus 2
acauucgccggggccucuugcc

SEQ ID NO: 4018665 - RNA, 22 nt, Human T-lymphotropic virus 2
accacaugggucgauuccauaa

SEQ ID NO: 4018666 - RNA, 12 nt, Human T-lymphotropic virus 2
accacuccagcc

SEQ ID NO: 4018667 - RNA, 14 nt, Human T-lymphotropic virus 2
accacuccugucuc

SEQ ID NO: 4018668 - RNA, 20 nt, Human T-lymphotropic virus 2
accagaugucagacucgccu

SEQ ID NO: 4018669 - RNA, 17 nt, Human T-lymphotropic virus 2
accagcucaggccuggu

SEQ ID NO: 4018670 - RNA, 14 nt, Human T-lymphotropic virus 2
accauuccccagcc

SEQ ID NO: 4018671 - RNA, 18 nt, Human T-lymphotropic virus 2
accauucucgcucuacuc

SEQ ID NO: 4018672 - RNA, 22 nt, Human T-lymphotropic virus 2
accauucucgcucuacuccucc

SEQ ID NO: 4018673 - RNA, 20 nt, Human T-lymphotropic virus 2
acccaggaagucagccaagu

SEQ ID NO: 4018674 - RNA, 13 nt, Human T-lymphotropic virus 2
acccauauaccau

SEQ ID NO: 4018675 - RNA, 15 nt, Human T-lymphotropic virus 2
accccacaacaacuc

SEQ ID NO: 4018676 - RNA, 12 nt, Human T-lymphotropic virus 2
accccaccuaca

SEQ ID NO: 4018677 - RNA, 19 nt, Human T-lymphotropic virus 2
accccgcccuaccucuccu

SEQ ID NO: 4018678 - RNA, 17 nt, Human T-lymphotropic virus 2
accccuacuauucccau

SEQ ID NO: 4018679 - RNA, 20 nt, Human T-lymphotropic virus 2
accccucccaaaccaccucc

SEQ ID NO: 4018680 - RNA, 16 nt, Human T-lymphotropic virus 2
accccucuugggcagc

SEQ ID NO: 4018681 - RNA, 24 nt, Human T-lymphotropic virus 2
acccgauggcaaauccaccacagu

SEQ ID NO: 4018682 - RNA, 19 nt, Human T-lymphotropic virus 2
accgcuugcagccuaggcc

SEQ ID NO: 4018683 - RNA, 14 nt, Human T-lymphotropic virus 2
accuaagagccacc

SEQ ID NO: 4018684 - RNA, 16 nt, Human T-lymphotropic virus 2
accucagaacccacuc

SEQ ID NO: 4018685 - RNA, 14 nt, Human T-lymphotropic virus 2
accucagccuaccc

SEQ ID NO: 4018686 - RNA, 9 nt, Human T-lymphotropic virus 2
accucccaa

SEQ ID NO: 4018687 - RNA, 16 nt, Human T-lymphotropic virus 2
accuccuauucuggga

SEQ ID NO: 4018688 - RNA, 21 nt, Human T-lymphotropic virus 2
accucuccuuccccagggccc

SEQ ID NO: 4018689 - RNA, 15 nt, Human T-lymphotropic virus 2
accuucccccaccuc

SEQ ID NO: 4018690 - RNA, 16 nt, Human T-lymphotropic virus 2
accuucccccaccucc

SEQ ID NO: 4018691 - RNA, 17 nt, Human T-lymphotropic virus 2
accuucccccaccuccc

SEQ ID NO: 4018692 - RNA, 21 nt, Human T-lymphotropic virus 2
accuuccccuagacaaugcca

SEQ ID NO: 4018693 - RNA, 18 nt, Human T-lymphotropic virus 2
accuugaacauguccuaa

SEQ ID NO: 4018694 - RNA, 16 nt, Human T-lymphotropic virus 2
accuuggcagccaacc

SEQ ID NO: 4018695 - RNA, 20 nt, Human T-lymphotropic virus 2
accuuuugcuguccuucucg

SEQ ID NO: 4018696 - RNA, 17 nt, Human T-lymphotropic virus 2
acgccccaaggccucca

SEQ ID NO: 4018697 - RNA, 20 nt, Human T-lymphotropic virus 2
acgcguugucagcucuccuc

SEQ ID NO: 4018698 - RNA, 16 nt, Human T-lymphotropic virus 2
acgcuucuuaggacag

SEQ ID NO: 4018699 - RNA, 16 nt, Human T-lymphotropic virus 2
acggcccccugccuuu

SEQ ID NO: 4018700 - RNA, 19 nt, Human T-lymphotropic virus 2
acggcccugacgucccucc

SEQ ID NO: 4018701 - RNA, 14 nt, Human T-lymphotropic virus 2
acggccucacccau

SEQ ID NO: 4018702 - RNA, 12 nt, Human T-lymphotropic virus 2
acuaacagcccc

SEQ ID NO: 4018703 - RNA, 11 nt, Human T-lymphotropic virus 2
acuaccacccu

SEQ ID NO: 4018704 - RNA, 14 nt, Human T-lymphotropic virus 2
acuacgugcugcca

SEQ ID NO: 4018705 - RNA, 17 nt, Human T-lymphotropic virus 2
acuacuccuccgccacc

SEQ ID NO: 4018706 - RNA, 15 nt, Human T-lymphotropic virus 2
acucaggaccaggca

SEQ ID NO: 4018707 - RNA, 19 nt, Human T-lymphotropic virus 2
acuccaaacaccauaggcc

SEQ ID NO: 4018708 - RNA, 22 nt, Human T-lymphotropic virus 2
acuccagccccuguagcccaac

SEQ ID NO: 4018709 - RNA, 17 nt, Human T-lymphotropic virus 2
acuccccggccuuacca

SEQ ID NO: 4018710 - RNA, 14 nt, Human T-lymphotropic virus 2
acuccuccuuccau

SEQ ID NO: 4018711 - RNA, 24 nt, Human T-lymphotropic virus 2
acucuacacccccaacaucuccau

SEQ ID NO: 4018712 - RNA, 13 nt, Human T-lymphotropic virus 2
acugcaacaacuc

SEQ ID NO: 4018713 - RNA, 16 nt, Human T-lymphotropic virus 2
acugccguggccgccu

SEQ ID NO: 4018714 - RNA, 18 nt, Human T-lymphotropic virus 2
agaaguuuuaagaucucc

SEQ ID NO: 4018715 - RNA, 13 nt, Human T-lymphotropic virus 2
agacaccuucucc

SEQ ID NO: 4018716 - RNA, 22 nt, Human T-lymphotropic virus 2
agacaucucgauacucccacuc

SEQ ID NO: 4018717 - RNA, 16 nt, Human T-lymphotropic virus 2
agacgaccccagcccc

SEQ ID NO: 4018718 - RNA, 17 nt, Human T-lymphotropic virus 2
agacgccuuccguggga

SEQ ID NO: 4018719 - RNA, 19 nt, Human T-lymphotropic virus 2
agacuguccuaaccuuccc

SEQ ID NO: 4018720 - RNA, 14 nt, Human T-lymphotropic virus 2
gucucccggccucg

SEQ ID NO: 4018721 - RNA, 13 nt, Human T-lymphotropic virus 2
gugcggcuccucc

SEQ ID NO: 4018722 - RNA, 15 nt, Human T-lymphotropic virus 2
guggagcgcagcaag

SEQ ID NO: 4018723 - RNA, 17 nt, Human T-lymphotropic virus 2
guggcaagguaggacac

SEQ ID NO: 4018724 - RNA, 17 nt, Human T-lymphotropic virus 2
guggccgccucaacccc

SEQ ID NO: 4018725 - RNA, 17 nt, Human T-lymphotropic virus 2
guggcuugucuccgccc

SEQ ID NO: 4018726 - RNA, 15 nt, Human T-lymphotropic virus 2
guucaucaccucaga

SEQ ID NO: 4018727 - RNA, 16 nt, Human T-lymphotropic virus 2
guuccaacccgugagg

SEQ ID NO: 4018728 - RNA, 20 nt, Human T-lymphotropic virus 2
guuuaaaaacagccccaccc

SEQ ID NO: 4018729 - RNA, 12 nt, Human T-lymphotropic virus 2
uaaaaacagccc

SEQ ID NO: 4018730 - RNA, 20 nt, Human T-lymphotropic virus 2
uaaaagcgcaaggacaguuc

SEQ ID NO: 4018731 - RNA, 13 nt, Human T-lymphotropic virus 2
uaaaggcucugac

SEQ ID NO: 4018732 - RNA, 21 nt, Human T-lymphotropic virus 2
uaacacacuaauuaccgaggc

SEQ ID NO: 4018733 - RNA, 13 nt, Human T-lymphotropic virus 2
uaacccuccaggc

SEQ ID NO: 4018734 - RNA, 13 nt, Human T-lymphotropic virus 2
uaacuuucuccag

SEQ ID NO: 4018735 - RNA, 22 nt, Human T-lymphotropic virus 2
uaagaucucccgcugcuccucc

SEQ ID NO: 4018736 - RNA, 16 nt, Human T-lymphotropic virus 2
uacaauccugucuccu

SEQ ID NO: 4018737 - RNA, 14 nt, Human T-lymphotropic virus 2
uacaaugccccuac

SEQ ID NO: 4018738 - RNA, 21 nt, Human T-lymphotropic virus 2
uacaugccauucaacaagcuc

SEQ ID NO: 4018739 - RNA, 15 nt, Human T-lymphotropic virus 2
uacccaaagccccca

SEQ ID NO: 4018740 - RNA, 12 nt, Human T-lymphotropic virus 2
uacccagccacg

SEQ ID NO: 4018741 - RNA, 23 nt, Human T-lymphotropic virus 2
uaccgacagccuuaccccaccua

SEQ ID NO: 4018742 - RNA, 14 nt, Human T-lymphotropic virus 2
uacuacuccuccgc

SEQ ID NO: 4018743 - RNA, 18 nt, Human T-lymphotropic virus 2
uacucaaauuuauccagc

SEQ ID NO: 4018744 - RNA, 15 nt, Human T-lymphotropic virus 2
uacucaggaccaggc

SEQ ID NO: 4018745 - RNA, 15 nt, Human T-lymphotropic virus 2
uacucuacaccccca

SEQ ID NO: 4018746 - RNA, 15 nt, Human T-lymphotropic virus 2
uagacaccuucuccg

SEQ ID NO: 4018747 - RNA, 22 nt, Human T-lymphotropic virus 2
uagacucugccuuaaacuucac

SEQ ID NO: 4018748 - RNA, 18 nt, Human T-lymphotropic virus 2
uagcagccguccucaacc

SEQ ID NO: 4018749 - RNA, 20 nt, Human T-lymphotropic virus 2
uagcagccguccucaacccc

SEQ ID NO: 4018750 - RNA, 18 nt, Human T-lymphotropic virus 2
uagccuuauccccaaggg

SEQ ID NO: 4018751 - RNA, 13 nt, Human T-lymphotropic virus 2
uaguccucccgga

SEQ ID NO: 4018752 - RNA, 22 nt, Human T-lymphotropic virus 2
uauaaacuccccggccuuacca

SEQ ID NO: 4018753 - RNA, 18 nt, Human T-lymphotropic virus 2
uauaccagcuuuccccac

SEQ ID NO: 4018754 - RNA, 13 nt, Human T-lymphotropic virus 2
uauacccuacaac

SEQ ID NO: 4018755 - RNA, 16 nt, Human T-lymphotropic virus 2
uauccguccuccagga

SEQ ID NO: 4018756 - RNA, 22 nt, Human T-lymphotropic virus 2
ucaaauuuauccagcugaccuu

SEQ ID NO: 4018757 - RNA, 14 nt, Human T-lymphotropic virus 2
ucaagucuccccua

SEQ ID NO: 4018758 - RNA, 15 nt, Human T-lymphotropic virus 2
ucacauuccucccau

SEQ ID NO: 4018759 - RNA, 22 nt, Human T-lymphotropic virus 2
ucacccaggaagucagccaagu

SEQ ID NO: 4018760 - RNA, 15 nt, Human T-lymphotropic virus 2
ucaccuacuggccug

SEQ ID NO: 4018761 - RNA, 23 nt, Human T-lymphotropic virus 2
ucaccucagaacccacucagccu

SEQ ID NO: 4018762 - RNA, 22 nt, Human T-lymphotropic virus 2
ucaccucuccuuccccagggcc

SEQ ID NO: 4018763 - RNA, 15 nt, Human T-lymphotropic virus 2
ucacuccccugcccu

SEQ ID NO: 4018764 - RNA, 17 nt, Human T-lymphotropic virus 2
ucaggcacuacugagga

SEQ ID NO: 4018765 - RNA, 14 nt, Human T-lymphotropic virus 2
ucaucaaaacaucc

SEQ ID NO: 4018766 - RNA, 12 nt, Human T-lymphotropic virus 2
ucaucuccccua

SEQ ID NO: 4018767 - RNA, 17 nt, Human T-lymphotropic virus 2
ucauguauccguccucc

SEQ ID NO: 4018768 - RNA, 20 nt, Human T-lymphotropic virus 2
uccaagugucggcauccuca

SEQ ID NO: 4018769 - RNA, 16 nt, Human T-lymphotropic virus 2
uccacaccccccaccc

SEQ ID NO: 4018770 - RNA, 19 nt, Human T-lymphotropic virus 2
uccaccauguccgcagcca

SEQ ID NO: 4018771 - RNA, 12 nt, Human T-lymphotropic virus 2
uccaccugccuu

SEQ ID NO: 4018772 - RNA, 21 nt, Human T-lymphotropic virus 2
uccagccucucauccuggcau

SEQ ID NO: 4018773 - RNA, 13 nt, Human T-lymphotropic virus 2
uccaugacccucc

SEQ ID NO: 4018774 - RNA, 16 nt, Human T-lymphotropic virus 2
uccaugacuccgaccu

SEQ ID NO: 4018775 - RNA, 18 nt, Human T-lymphotropic virus 2
ucccaaaccaccucccaa

SEQ ID NO: 4018776 - RNA, 13 nt, Human T-lymphotropic virus 2
ucccacucauccc

SEQ ID NO: 4018777 - RNA, 18 nt, Human T-lymphotropic virus 2
ucccagcuaacccuccag

SEQ ID NO: 4018778 - RNA, 23 nt, Human T-lymphotropic virus 2
uccccaaaacaucuacaccaccu

SEQ ID NO: 4018779 - RNA, 12 nt, Human T-lymphotropic virus 2
uccccagggccc

SEQ ID NO: 4018780 - RNA, 12 nt, Human T-lymphotropic virus 2
ucccccaccucc

SEQ ID NO: 4018781 - RNA, 16 nt, Human T-lymphotropic virus 2
ucccccaggagccccc

SEQ ID NO: 4018782 - RNA, 24 nt, Human T-lymphotropic virus 2
ucccccaggagcccccucagcuca

SEQ ID NO: 4018783 - RNA, 13 nt, Human T-lymphotropic virus 2
ucccccguuaucc

SEQ ID NO: 4018784 - RNA, 22 nt, Human T-lymphotropic virus 2
ucccccuaccauugacccaucc

SEQ ID NO: 4018785 - RNA, 23 nt, Human T-lymphotropic virus 2
ucccccuaccauugacccaucca

SEQ ID NO: 4018786 - RNA, 18 nt, Human T-lymphotropic virus 2
uccccuaucacuccaucu

SEQ ID NO: 4018787 - RNA, 16 nt, Human T-lymphotropic virus 2
ucccgaaccauccucu

SEQ ID NO: 4018788 - RNA, 17 nt, Human T-lymphotropic virus 2
ucccgagccagccaccc

SEQ ID NO: 4018789 - RNA, 15 nt, Human T-lymphotropic virus 2
ucccguaccuccucc

SEQ ID NO: 4018790 - RNA, 22 nt, Human T-lymphotropic virus 2
ucccucaccgacccucugguca

SEQ ID NO: 4018791 - RNA, 20 nt, Human T-lymphotropic virus 2
ucccuuaucuuagcuccccu

SEQ ID NO: 4018792 - RNA, 23 nt, Human T-lymphotropic virus 2
uccgcauacacgggccccgucuc

SEQ ID NO: 4018793 - RNA, 23 nt, Human T-lymphotropic virus 2
uccgccaaauccaggcccuucca

SEQ ID NO: 4018794 - RNA, 16 nt, Human T-lymphotropic virus 2
uccgccaacagucucc

SEQ ID NO: 4018795 - RNA, 23 nt, Human T-lymphotropic virus 2
uccgccaccuccccccccuuccc

SEQ ID NO: 4018796 - RNA, 20 nt, Human T-lymphotropic virus 2
uccgcccaucaaacccucca

SEQ ID NO: 4018797 - RNA, 22 nt, Human T-lymphotropic virus 2
uccgcccaucaaacccuccagg

SEQ ID NO: 4018798 - RNA, 21 nt, Human T-lymphotropic virus 2
uccuccaggaacggcccccuc

SEQ ID NO: 4018799 - RNA, 20 nt, Human T-lymphotropic virus 2
uccuccgccaaauccaggcc

SEQ ID NO: 4018800 - RNA, 13 nt, Human T-lymphotropic virus 2
uccuccuuccaua

SEQ ID NO: 4018801 - RNA, 12 nt, Human T-lymphotropic virus 2
uccucucagccc

SEQ ID NO: 4018802 - RNA, 15 nt, Human T-lymphotropic virus 2
uccugaaccucuccg

SEQ ID NO: 4018803 - RNA, 19 nt, Human T-lymphotropic virus 2
uccugaacugcuccuccca

SEQ ID NO: 4018804 - RNA, 12 nt, Human T-lymphotropic virus 2
uccuggccccug

SEQ ID NO: 4018805 - RNA, 12 nt, Human T-lymphotropic virus 2
uccugucuccuc

SEQ ID NO: 4018806 - RNA, 21 nt, Human T-lymphotropic virus 2
uccuguuggaucucccuucca

SEQ ID NO: 4018807 - RNA, 16 nt, Human T-lymphotropic virus 2
uccuuaccccucccac

SEQ ID NO: 4018808 - RNA, 18 nt, Human T-lymphotropic virus 2
uccuuccauaaccuucac

SEQ ID NO: 4018809 - RNA, 20 nt, Human T-lymphotropic virus 2
uccuucucacuggaaaaggg

SEQ ID NO: 4018810 - RNA, 14 nt, Human T-lymphotropic virus 2
ucgaaaccaaagcc

SEQ ID NO: 4018811 - RNA, 22 nt, Human T-lymphotropic virus 2
gaaaaauucgaaaccaaagccu

SEQ ID NO: 4018812 - RNA, 17 nt, Human T-lymphotropic virus 2
gaaaccaaagccuucca

SEQ ID NO: 4018813 - RNA, 21 nt, Human T-lymphotropic virus 2
gaacauguccuaacccccucc

SEQ ID NO: 4018814 - RNA, 19 nt, Human T-lymphotropic virus 2
gaacugcuccucccaaggu

SEQ ID NO: 4018815 - RNA, 21 nt, Human T-lymphotropic virus 2
gaagacucucuuacaccuccc

SEQ ID NO: 4018816 - RNA, 22 nt, Human T-lymphotropic virus 2
gaagacucucuuacaccuccca

SEQ ID NO: 4018817 - RNA, 23 nt, Human T-lymphotropic virus 2
gaagacucucuuacaccucccaa

SEQ ID NO: 4018818 - RNA, 20 nt, Human T-lymphotropic virus 2
gaagccucuaccccucccaa

SEQ ID NO: 4018819 - RNA, 20 nt, Human T-lymphotropic virus 2
gaagucagccaagugucccu

SEQ ID NO: 4018820 - RNA, 15 nt, Human T-lymphotropic virus 2
gaauacaccaacauc

SEQ ID NO: 4018821 - RNA, 17 nt, Human T-lymphotropic virus 2
gacaaacaccucagccu

SEQ ID NO: 4018822 - RNA, 19 nt, Human T-lymphotropic virus 2
gacaauggcgacuagccuc

SEQ ID NO: 4018823 - RNA, 16 nt, Human T-lymphotropic virus 2
gaccaucuaccuccac

SEQ ID NO: 4018824 - RNA, 17 nt, Human T-lymphotropic virus 2
gacccaaaaggucagac

SEQ ID NO: 4018825 - RNA, 14 nt, Human T-lymphotropic virus 2
gaccccagccccca

SEQ ID NO: 4018826 - RNA, 22 nt, Human T-lymphotropic virus 2
gaccuuacgguuauaccccaga

SEQ ID NO: 4018827 - RNA, 19 nt, Human T-lymphotropic virus 2
gacgauuacccccugccca

SEQ ID NO: 4018828 - RNA, 21 nt, Human T-lymphotropic virus 2
gacgcccuacaacaaugccag

SEQ ID NO: 4018829 - RNA, 20 nt, Human T-lymphotropic virus 2
gacgccuuuuuccaaauccc

SEQ ID NO: 4018830 - RNA, 15 nt, Human T-lymphotropic virus 2
gacuacgugcugcca

SEQ ID NO: 4018831 - RNA, 20 nt, Human T-lymphotropic virus 2
gacucucuuacaccucccaa

SEQ ID NO: 4018832 - RNA, 13 nt, Human T-lymphotropic virus 2
gagacgccuuccg

SEQ ID NO: 4018833 - RNA, 22 nt, Human T-lymphotropic virus 2
gagagucucgcaccugcucgcu

SEQ ID NO: 4018834 - RNA, 16 nt, Human T-lymphotropic virus 2
gagccagccacccagg

SEQ ID NO: 4018835 - RNA, 20 nt, Human T-lymphotropic virus 2
gagucgggacuguacccagc

SEQ ID NO: 4018836 - RNA, 18 nt, Human T-lymphotropic virus 2
gauaacugcaacaacucc

SEQ ID NO: 4018837 - RNA, 22 nt, Human T-lymphotropic virus 2
gauaugcauggacuguccuucc

SEQ ID NO: 4018838 - RNA, 20 nt, Human T-lymphotropic virus 2
gauccagccucucauccugg

SEQ ID NO: 4018839 - RNA, 21 nt, Human T-lymphotropic virus 2
gauccagccucucauccuggc

SEQ ID NO: 4018840 - RNA, 22 nt, Human T-lymphotropic virus 2
gaugccuuucuucccucucccg

SEQ ID NO: 4018841 - RNA, 19 nt, Human T-lymphotropic virus 2
gauguaaauuucacccagg

SEQ ID NO: 4018842 - RNA, 17 nt, Human T-lymphotropic virus 2
gcaagggcuagggcuuc

SEQ ID NO: 4018843 - RNA, 21 nt, Human T-lymphotropic virus 2
gcaauguugcuuccucaacau

SEQ ID NO: 4018844 - RNA, 19 nt, Human T-lymphotropic virus 2
gcacaguaugcagcccaaa

SEQ ID NO: 4018845 - RNA, 18 nt, Human T-lymphotropic virus 2
gcacgagaagcccuccag

SEQ ID NO: 4018846 - RNA, 15 nt, Human T-lymphotropic virus 2
gcagccacaccaacc

SEQ ID NO: 4018847 - RNA, 13 nt, Human T-lymphotropic virus 2
gcagccguccuca

SEQ ID NO: 4018848 - RNA, 20 nt, Human T-lymphotropic virus 2
gcaggcuaauaaccccgccc

SEQ ID NO: 4018849 - RNA, 23 nt, Human T-lymphotropic virus 2
gcagggccccuaagaaugcaggc

SEQ ID NO: 4018850 - RNA, 13 nt, Human T-lymphotropic virus 2
gcauggccuucca

SEQ ID NO: 4018851 - RNA, 17 nt, Human T-lymphotropic virus 2
gccaaaaaaucuuacaa

SEQ ID NO: 4018852 - RNA, 19 nt, Human T-lymphotropic virus 2
gccacaccaagggaagcca

SEQ ID NO: 4018853 - RNA, 17 nt, Human T-lymphotropic virus 2
gccacgccccccuccug

SEQ ID NO: 4018854 - RNA, 15 nt, Human T-lymphotropic virus 2
gccagccacccaggg

SEQ ID NO: 4018855 - RNA, 13 nt, Human T-lymphotropic virus 2
gccagccccacca

SEQ ID NO: 4018856 - RNA, 19 nt, Human T-lymphotropic virus 2
gcccagcaaggucuuagac

SEQ ID NO: 4018857 - RNA, 16 nt, Human T-lymphotropic virus 2
gcccaucaaacccucc

SEQ ID NO: 4018858 - RNA, 14 nt, Human T-lymphotropic virus 2
gcccccucagcuca

SEQ ID NO: 4018859 - RNA, 19 nt, Human T-lymphotropic virus 2
gccccuguauccuccgcca

SEQ ID NO: 4018860 - RNA, 15 nt, Human T-lymphotropic virus 2
gcccgcccuaggagc

SEQ ID NO: 4018861 - RNA, 11 nt, Human T-lymphotropic virus 2
gcccugcuuuc

SEQ ID NO: 4018862 - RNA, 13 nt, Human T-lymphotropic virus 2
gccgcccucuugg

SEQ ID NO: 4018863 - RNA, 15 nt, Human T-lymphotropic virus 2
gccguccucaacccc

SEQ ID NO: 4018864 - RNA, 17 nt, Human T-lymphotropic virus 2
gccguccucaaccccau

SEQ ID NO: 4018865 - RNA, 16 nt, Human T-lymphotropic virus 2
gccguucuucaggcca

SEQ ID NO: 4018866 - RNA, 19 nt, Human T-lymphotropic virus 2
gccuccccuccuuccccac

SEQ ID NO: 4018867 - RNA, 17 nt, Human T-lymphotropic virus 2
gccucccgagccagcca

SEQ ID NO: 4018868 - RNA, 19 nt, Human T-lymphotropic virus 2
gccuuaccccaccuacaga

SEQ ID NO: 4018869 - RNA, 17 nt, Human T-lymphotropic virus 2
gcgacuagccucccgag

SEQ ID NO: 4018870 - RNA, 23 nt, Human T-lymphotropic virus 2
gcgagucaucgacccaaaagguc

SEQ ID NO: 4018871 - RNA, 17 nt, Human T-lymphotropic virus 2
gcggcuccuccaugacc

SEQ ID NO: 4018872 - RNA, 21 nt, Human T-lymphotropic virus 2
gcguugucagcucuccucucc

SEQ ID NO: 4018873 - RNA, 18 nt, Human T-lymphotropic virus 2
gcuagccuuauccccaag

SEQ ID NO: 4018874 - RNA, 19 nt, Human T-lymphotropic virus 2
gcuagccuuauccccaagg

SEQ ID NO: 4018875 - RNA, 13 nt, Human T-lymphotropic virus 2
gcuauaggcaggc

SEQ ID NO: 4018876 - RNA, 13 nt, Human T-lymphotropic virus 2
gcuccacaccccc

SEQ ID NO: 4018877 - RNA, 13 nt, Human T-lymphotropic virus 2
gcucccgcuccuc

SEQ ID NO: 4018878 - RNA, 14 nt, Human T-lymphotropic virus 2
gcucuacuccuccu

SEQ ID NO: 4018879 - RNA, 16 nt, Human T-lymphotropic virus 2
gcucuuggcagccccc

SEQ ID NO: 4018880 - RNA, 17 nt, Human T-lymphotropic virus 2
gcugccaagccauggcc

SEQ ID NO: 4018881 - RNA, 21 nt, Human T-lymphotropic virus 2
gcuuccaguaaaagccuucuc

SEQ ID NO: 4018882 - RNA, 14 nt, Human T-lymphotropic virus 2
ggaacagcucucca

SEQ ID NO: 4018883 - RNA, 23 nt, Human T-lymphotropic virus 2
ggaggcccauguuccccccccuu

SEQ ID NO: 4018884 - RNA, 22 nt, Human T-lymphotropic virus 2
ggaugacaauggcgacuagccu

SEQ ID NO: 4018885 - RNA, 24 nt, Human T-lymphotropic virus 2
ggcaccuccugaacugcuccuccc

SEQ ID NO: 4018886 - RNA, 18 nt, Human T-lymphotropic virus 2
ggccaucaagcaggaggu

SEQ ID NO: 4018887 - RNA, 17 nt, Human T-lymphotropic virus 2
ggcccugacgucccucc

SEQ ID NO: 4018888 - RNA, 21 nt, Human T-lymphotropic virus 2
ggcccuugacaacggccuccc

SEQ ID NO: 4018889 - RNA, 16 nt, Human T-lymphotropic virus 2
ggcgacuagccucccg

SEQ ID NO: 4018890 - RNA, 20 nt, Human T-lymphotropic virus 2
ggcucugacgucucccccuu

SEQ ID NO: 4018891 - RNA, 17 nt, Human T-lymphotropic virus 2
ggcugcuuucuccaccc

SEQ ID NO: 4018892 - RNA, 23 nt, Human T-lymphotropic virus 2
ggcuuccaguaaaagccuucucc

SEQ ID NO: 4018893 - RNA, 18 nt, Human T-lymphotropic virus 2
ggcuuccugaaccucucc

SEQ ID NO: 4018894 - RNA, 22 nt, Human T-lymphotropic virus 2
ggcuuccugaaccucuccggga

SEQ ID NO: 4018895 - RNA, 16 nt, Human T-lymphotropic virus 2
gggauccauccucucc

SEQ ID NO: 4018896 - RNA, 14 nt, Human T-lymphotropic virus 2
gggcuaucaaccca

SEQ ID NO: 4018897 - RNA, 18 nt, Human T-lymphotropic virus 2
gggcuucuauaccuccca

SEQ ID NO: 4018898 - RNA, 16 nt, Human T-lymphotropic virus 2
ggggaaccccuccugu

SEQ ID NO: 4018899 - RNA, 22 nt, Human T-lymphotropic virus 2
ggucaccuacuggccugcacca

SEQ ID NO: 4018900 - RNA, 21 nt, Human T-lymphotropic virus 2
ggucucuaaaggaacacccau

SEQ ID NO: 4018901 - RNA, 22 nt, Human T-lymphotropic virus 2
ggucucuaaaggaacacccauc

SEQ ID NO: 4018902 - RNA, 17 nt, Human T-lymphotropic virus 2
gguucgucccccuacca

SEQ ID NO: 4018903 - RNA, 18 nt, Human T-lymphotropic virus 2
gguuuaaaaacagcccca

SEQ ID NO: 4018904 - RNA, 16 nt, Human T-lymphotropic virus 2
guaguucaguccuccc

SEQ ID NO: 4018905 - RNA, 18 nt, Human T-lymphotropic virus 2
guaucacccucaccccac

SEQ ID NO: 4018906 - RNA, 22 nt, Human T-lymphotropic virus 2
gucacugaaaacgaaaccucaa

SEQ ID NO: 4018907 - RNA, 20 nt, Human T-lymphotropic virus 2
gucagaccgucucacacaaa

SEQ ID NO: 4018908 - RNA, 17 nt, Human T-lymphotropic virus 2
guccaugacuccgaccu

SEQ ID NO: 4018909 - RNA, 22 nt, Human T-lymphotropic virus 2
aggcccccccccacacagcccu

SEQ ID NO: 4018910 - RNA, 14 nt, Human T-lymphotropic virus 2
aggcgucccggggc

SEQ ID NO: 4018911 - RNA, 20 nt, Human T-lymphotropic virus 2
aggcucugacgucucccccu

SEQ ID NO: 4018912 - RNA, 20 nt, Human T-lymphotropic virus 2
agggcaagaccaucuaccuc

SEQ ID NO: 4018913 - RNA, 18 nt, Human T-lymphotropic virus 2
aggucagaccgucucaca

SEQ ID NO: 4018914 - RNA, 18 nt, Human T-lymphotropic virus 2
agguggucuauguuccac

SEQ ID NO: 4018915 - RNA, 18 nt, Human T-lymphotropic virus 2
agucaaaauaaaagaugc

SEQ ID NO: 4018916 - RNA, 12 nt, Human T-lymphotropic virus 2
aguccauccugg

SEQ ID NO: 4018917 - RNA, 13 nt, Human T-lymphotropic virus 2
aguccucccuauu

SEQ ID NO: 4018918 - RNA, 15 nt, Human T-lymphotropic virus 2
agucuauaaaagcgc

SEQ ID NO: 4018919 - RNA, 22 nt, Human T-lymphotropic virus 2
aguuauccuaggagagauccag

SEQ ID NO: 4018920 - RNA, 15 nt, Human T-lymphotropic virus 2
aguucaguccucccu

SEQ ID NO: 4018921 - RNA, 23 nt, Human T-lymphotropic virus 2
auagaccucacccuuacccacuu

SEQ ID NO: 4018922 - RNA, 20 nt, Human T-lymphotropic virus 2
auagccacuccaaacaccau

SEQ ID NO: 4018923 - RNA, 12 nt, Human T-lymphotropic virus 2
auaguuccucua

SEQ ID NO: 4018924 - RNA, 14 nt, Human T-lymphotropic virus 2
aucaaaacauccuc

SEQ ID NO: 4018925 - RNA, 13 nt, Human T-lymphotropic virus 2
aucaagacaucuc

SEQ ID NO: 4018926 - RNA, 15 nt, Human T-lymphotropic virus 2
aucaaugcgaaagca

SEQ ID NO: 4018927 - RNA, 22 nt, Human T-lymphotropic virus 2
aucacauuacauaugagaguac

SEQ ID NO: 4018928 - RNA, 13 nt, Human T-lymphotropic virus 2
aucagcuccccuc

SEQ ID NO: 4018929 - RNA, 21 nt, Human T-lymphotropic virus 2
aucagcuccccucccucgccu

SEQ ID NO: 4018930 - RNA, 17 nt, Human T-lymphotropic virus 2
auccaccacaguccucc

SEQ ID NO: 4018931 - RNA, 19 nt, Human T-lymphotropic virus 2
auccacgggcuuuccccaa

SEQ ID NO: 4018932 - RNA, 11 nt, Human T-lymphotropic virus 2
auccagccucu

SEQ ID NO: 4018933 - RNA, 14 nt, Human T-lymphotropic virus 2
auccauccucucca

SEQ ID NO: 4018934 - RNA, 22 nt, Human T-lymphotropic virus 2
auccuacaggggcuggaggaac

SEQ ID NO: 4018935 - RNA, 15 nt, Human T-lymphotropic virus 2
auccucuuuccuucc

SEQ ID NO: 4018936 - RNA, 21 nt, Human T-lymphotropic virus 2
auccucuuuccuucccuugcc

SEQ ID NO: 4018937 - RNA, 23 nt, Human T-lymphotropic virus 2
aucucacuagccuaccgacagcc

SEQ ID NO: 4018938 - RNA, 21 nt, Human T-lymphotropic virus 2
aucucgauacucccacucauc

SEQ ID NO: 4018939 - RNA, 16 nt, Human T-lymphotropic virus 2
aucucuggcuuccagu

SEQ ID NO: 4018940 - RNA, 16 nt, Human T-lymphotropic virus 2
augccaagauccuucu

SEQ ID NO: 4018941 - RNA, 20 nt, Human T-lymphotropic virus 2
augccaagauccuucucacu

SEQ ID NO: 4018942 - RNA, 15 nt, Human T-lymphotropic virus 2
augccauuacuacca

SEQ ID NO: 4018943 - RNA, 15 nt, Human T-lymphotropic virus 2
augcccuccuggcca

SEQ ID NO: 4018944 - RNA, 17 nt, Human T-lymphotropic virus 2
augccuuucuucccucu

SEQ ID NO: 4018945 - RNA, 20 nt, Human T-lymphotropic virus 2
augccuuucuucccucuccc

SEQ ID NO: 4018946 - RNA, 15 nt, Human T-lymphotropic virus 2
auggcagggccccua

SEQ ID NO: 4018947 - RNA, 22 nt, Human T-lymphotropic virus 2
auguaaauuucacccaggaagu

SEQ ID NO: 4018948 - RNA, 21 nt, Human T-lymphotropic virus 2
auuacaauccugucuccucuc

SEQ ID NO: 4018949 - RNA, 15 nt, Human T-lymphotropic virus 2
auuacuaccacccuc

SEQ ID NO: 4018950 - RNA, 13 nt, Human T-lymphotropic virus 2
auuauccuccccc

SEQ ID NO: 4018951 - RNA, 20 nt, Human T-lymphotropic virus 2
auuccccaacaaaccuccuc

SEQ ID NO: 4018952 - RNA, 17 nt, Human T-lymphotropic virus 2
auuuuccacuagcccag

SEQ ID NO: 4018953 - RNA, 22 nt, Human T-lymphotropic virus 2
caaaacaucuacaccaccuggg

SEQ ID NO: 4018954 - RNA, 16 nt, Human T-lymphotropic virus 2
caaaccaccucccaaa

SEQ ID NO: 4018955 - RNA, 20 nt, Human T-lymphotropic virus 2
caaagccuuccaucccuccu

SEQ ID NO: 4018956 - RNA, 22 nt, Human T-lymphotropic virus 2
caacaccauggguaauguuuuc

SEQ ID NO: 4018957 - RNA, 22 nt, Human T-lymphotropic virus 2
caacaguuugaccccaccgcca

SEQ ID NO: 4018958 - RNA, 17 nt, Human T-lymphotropic virus 2
caacauaacugccgugg

SEQ ID NO: 4018959 - RNA, 16 nt, Human T-lymphotropic virus 2
caaccccaugaggaaa

SEQ ID NO: 4018960 - RNA, 16 nt, Human T-lymphotropic virus 2
caacccuucuccagga

SEQ ID NO: 4018961 - RNA, 14 nt, Human T-lymphotropic virus 2
caacucucccagcu

SEQ ID NO: 4018962 - RNA, 22 nt, Human T-lymphotropic virus 2
caagcaggaggucagcuccucu

SEQ ID NO: 4018963 - RNA, 21 nt, Human T-lymphotropic virus 2
caaggccuccacggccucacc

SEQ ID NO: 4018964 - RNA, 16 nt, Human T-lymphotropic virus 2
caagucuccccuagcg

SEQ ID NO: 4018965 - RNA, 19 nt, Human T-lymphotropic virus 2
caauaccuuaucccucgcc

SEQ ID NO: 4018966 - RNA, 11 nt, Human T-lymphotropic virus 2
caaugaggaau

SEQ ID NO: 4018967 - RNA, 16 nt, Human T-lymphotropic virus 2
cacaccaaccuccccg

SEQ ID NO: 4018968 - RNA, 18 nt, Human T-lymphotropic virus 2
cacauuaugggacaaauc

SEQ ID NO: 4018969 - RNA, 14 nt, Human T-lymphotropic virus 2
caccaacaucccug

SEQ ID NO: 4018970 - RNA, 20 nt, Human T-lymphotropic virus 2
caccaagggaagccaagucc

SEQ ID NO: 4018971 - RNA, 17 nt, Human T-lymphotropic virus 2
caccaauuacuccugca

SEQ ID NO: 4018972 - RNA, 15 nt, Human T-lymphotropic virus 2
caccaauugcugcca

SEQ ID NO: 4018973 - RNA, 17 nt, Human T-lymphotropic virus 2
caccauuccccagccau

SEQ ID NO: 4018974 - RNA, 20 nt, Human T-lymphotropic virus 2
cacccagagaaccucaagga

SEQ ID NO: 4018975 - RNA, 16 nt, Human T-lymphotropic virus 2
cacccaggaagucagc

SEQ ID NO: 4018976 - RNA, 21 nt, Human T-lymphotropic virus 2
cacccaguucaaacuccucca

SEQ ID NO: 4018977 - RNA, 22 nt, Human T-lymphotropic virus 2
cacccaguucaaacuccuccaa

SEQ ID NO: 4018978 - RNA, 14 nt, Human T-lymphotropic virus 2
caccccccacccuc

SEQ ID NO: 4018979 - RNA, 15 nt, Human T-lymphotropic virus 2
caccccccacccucc

SEQ ID NO: 4018980 - RNA, 12 nt, Human T-lymphotropic virus 2
cacccucucccc

SEQ ID NO: 4018981 - RNA, 14 nt, Human T-lymphotropic virus 2
caccuccccaagug

SEQ ID NO: 4018982 - RNA, 18 nt, Human T-lymphotropic virus 2
cacgagaagcccuccaga

SEQ ID NO: 4018983 - RNA, 17 nt, Human T-lymphotropic virus 2
cacgccgcaacagacca

SEQ ID NO: 4018984 - RNA, 21 nt, Human T-lymphotropic virus 2
cacgggccccgucuccagucc

SEQ ID NO: 4018985 - RNA, 22 nt, Human T-lymphotropic virus 2
cacgggcuuuccccaacuccaa

SEQ ID NO: 4018986 - RNA, 13 nt, Human T-lymphotropic virus 2
cacuagcccagca

SEQ ID NO: 4018987 - RNA, 16 nt, Human T-lymphotropic virus 2
cacuccaacugcugau

SEQ ID NO: 4018988 - RNA, 19 nt, Human T-lymphotropic virus 2
cacugaaaacgaaaccuca

SEQ ID NO: 4018989 - RNA, 23 nt, Human T-lymphotropic virus 2
cagacccuccggcuggcgguaca

SEQ ID NO: 4018990 - RNA, 23 nt, Human T-lymphotropic virus 2
cagccacaccaaccuccccgacc

SEQ ID NO: 4018991 - RNA, 22 nt, Human T-lymphotropic virus 2
cagccauguaacuauggccccg

SEQ ID NO: 4018992 - RNA, 14 nt, Human T-lymphotropic virus 2
cagccuugcucucc

SEQ ID NO: 4018993 - RNA, 14 nt, Human T-lymphotropic virus 2
cagcuaacccucca

SEQ ID NO: 4018994 - RNA, 21 nt, Human T-lymphotropic virus 2
cagcuccucugcucuuggcag

SEQ ID NO: 4018995 - RNA, 16 nt, Human T-lymphotropic virus 2
cagcucuccucuccaa

SEQ ID NO: 4018996 - RNA, 16 nt, Human T-lymphotropic virus 2
cagcuuuccccaccca

SEQ ID NO: 4018997 - RNA, 17 nt, Human T-lymphotropic virus 2
caggaacagcucuccag

SEQ ID NO: 4018998 - RNA, 22 nt, Human T-lymphotropic virus 2
caggaaccacgacuccucaggc

SEQ ID NO: 4018999 - RNA, 20 nt, Human T-lymphotropic virus 2
caggacaucacuccccugcc

SEQ ID NO: 4019000 - RNA, 20 nt, Human T-lymphotropic virus 2
caggagguggcucgcucccu

SEQ ID NO: 4019001 - RNA, 17 nt, Human T-lymphotropic virus 2
caggauuuggacagagc

SEQ ID NO: 4019002 - RNA, 16 nt, Human T-lymphotropic virus 2
caggcgucccggggcc

SEQ ID NO: 4019003 - RNA, 13 nt, Human T-lymphotropic virus 2
caggcuacaaccc

SEQ ID NO: 4019004 - RNA, 24 nt, Human T-lymphotropic virus 2
caggggcuucuauaccucccagac

SEQ ID NO: 4019005 - RNA, 22 nt, Human T-lymphotropic virus 2
caggucgagcucggcugccccu

SEQ ID NO: 4019006 - RNA, 21 nt, Human T-lymphotropic virus 2
cagguggucuauguuccaccc

SEQ ID NO: 4019007 - RNA, 17 nt, Human T-lymphotropic virus 2
caguaaaagccuucucc

SEQ ID NO: 4019008 - RNA, 17 nt, Human T-lymphotropic virus 2
cagucauaguccucccg

SEQ ID NO: 4019009 - RNA, 14 nt, Human T-lymphotropic virus 2
ccugagcgccucca

SEQ ID NO: 4019010 - RNA, 12 nt, Human T-lymphotropic virus 2
ccugcccgcucc

SEQ ID NO: 4019011 - RNA, 19 nt, Human T-lymphotropic virus 2
ccugccucuuagacaccca

SEQ ID NO: 4019012 - RNA, 16 nt, Human T-lymphotropic virus 2
ccuguauccuccgcca

SEQ ID NO: 4019013 - RNA, 21 nt, Human T-lymphotropic virus 2
ccugucaaaccaucaacucac

SEQ ID NO: 4019014 - RNA, 15 nt, Human T-lymphotropic virus 2
ccugucuccucucag

SEQ ID NO: 4019015 - RNA, 17 nt, Human T-lymphotropic virus 2
ccuguuggaucucccuu

SEQ ID NO: 4019016 - RNA, 19 nt, Human T-lymphotropic virus 2
ccuucaccauuccccagcc

SEQ ID NO: 4019017 - RNA, 13 nt, Human T-lymphotropic virus 2
ccuuccaauuucc

SEQ ID NO: 4019018 - RNA, 15 nt, Human T-lymphotropic virus 2
ccuuccaucccuccu

SEQ ID NO: 4019019 - RNA, 19 nt, Human T-lymphotropic virus 2
ccuuccccuagacaaugcc

SEQ ID NO: 4019020 - RNA, 18 nt, Human T-lymphotropic virus 2
ccuucgacuacacuucuc

SEQ ID NO: 4019021 - RNA, 18 nt, Human T-lymphotropic virus 2
ccuucucgguuccucucc

SEQ ID NO: 4019022 - RNA, 21 nt, Human T-lymphotropic virus 2
ccuugacaacggccuccccga

SEQ ID NO: 4019023 - RNA, 23 nt, Human T-lymphotropic virus 2
ccuugcccugcccgcuccuccau

SEQ ID NO: 4019024 - RNA, 22 nt, Human T-lymphotropic virus 2
cgaacaacaauuagcagccguc

SEQ ID NO: 4019025 - RNA, 24 nt, Human T-lymphotropic virus 2
cgacuuccugaggaacuccccuca

SEQ ID NO: 4019026 - RNA, 17 nt, Human T-lymphotropic virus 2
cgagaagcccuccagac

SEQ ID NO: 4019027 - RNA, 17 nt, Human T-lymphotropic virus 2
cgagguugacaaagaca

SEQ ID NO: 4019028 - RNA, 15 nt, Human T-lymphotropic virus 2
cgauuacccccugcc

SEQ ID NO: 4019029 - RNA, 18 nt, Human T-lymphotropic virus 2
cgauuccauaaccuuggc

SEQ ID NO: 4019030 - RNA, 22 nt, Human T-lymphotropic virus 2
cgcagccacaccaaccuccccg

SEQ ID NO: 4019031 - RNA, 15 nt, Human T-lymphotropic virus 2
cgccccccuccuggc

SEQ ID NO: 4019032 - RNA, 19 nt, Human T-lymphotropic virus 2
cgccgcccucuuggcaggc

SEQ ID NO: 4019033 - RNA, 11 nt, Human T-lymphotropic virus 2
cgccgucacug

SEQ ID NO: 4019034 - RNA, 17 nt, Human T-lymphotropic virus 2
cgcucacauuccuccca

SEQ ID NO: 4019035 - RNA, 12 nt, Human T-lymphotropic virus 2
cgcucccucacc

SEQ ID NO: 4019036 - RNA, 20 nt, Human T-lymphotropic virus 2
cgcucggcuagacucugccu

SEQ ID NO: 4019037 - RNA, 14 nt, Human T-lymphotropic virus 2
cggagacucaccuu

SEQ ID NO: 4019038 - RNA, 15 nt, Human T-lymphotropic virus 2
cggccuugccacccc

SEQ ID NO: 4019039 - RNA, 20 nt, Human T-lymphotropic virus 2
cgggcuuuccccaacuccaa

SEQ ID NO: 4019040 - RNA, 15 nt, Human T-lymphotropic virus 2
cgguuauaccccaga

SEQ ID NO: 4019041 - RNA, 14 nt, Human T-lymphotropic virus 2
cgguuccucuccag

SEQ ID NO: 4019042 - RNA, 21 nt, Human T-lymphotropic virus 2
cgucuccaguccauccuggaa

SEQ ID NO: 4019043 - RNA, 17 nt, Human T-lymphotropic virus 2
cgucucccggccucggc

SEQ ID NO: 4019044 - RNA, 22 nt, Human T-lymphotropic virus 2
cgugcuugacacggcccccugc

SEQ ID NO: 4019045 - RNA, 16 nt, Human T-lymphotropic virus 2
cuaaccuuccccuaga

SEQ ID NO: 4019046 - RNA, 18 nt, Human T-lymphotropic virus 2
cuaagugcggcuccucca

SEQ ID NO: 4019047 - RNA, 13 nt, Human T-lymphotropic virus 2
cuaaucucccccc

SEQ ID NO: 4019048 - RNA, 14 nt, Human T-lymphotropic virus 2
cuacuccuccgcca

SEQ ID NO: 4019049 - RNA, 19 nt, Human T-lymphotropic virus 2
cuagccuaccgacagccuu

SEQ ID NO: 4019050 - RNA, 16 nt, Human T-lymphotropic virus 2
cuagccuuauccccaa

SEQ ID NO: 4019051 - RNA, 18 nt, Human T-lymphotropic virus 2
cuaguagaugccccugga

SEQ ID NO: 4019052 - RNA, 12 nt, Human T-lymphotropic virus 2
cuauaauagacc

SEQ ID NO: 4019053 - RNA, 11 nt, Human T-lymphotropic virus 2
cuaucugcccu

SEQ ID NO: 4019054 - RNA, 17 nt, Human T-lymphotropic virus 2
cuauugcuauaggcagg

SEQ ID NO: 4019055 - RNA, 14 nt, Human T-lymphotropic virus 2
cucaaggacccuca

SEQ ID NO: 4019056 - RNA, 20 nt, Human T-lymphotropic virus 2
cucaccgacccucuggucac

SEQ ID NO: 4019057 - RNA, 22 nt, Human T-lymphotropic virus 2
cucaccuuggggauccauccuc

SEQ ID NO: 4019058 - RNA, 20 nt, Human T-lymphotropic virus 2
cucacgauugguaucuccuc

SEQ ID NO: 4019059 - RNA, 14 nt, Human T-lymphotropic virus 2
cucacgcuccugca

SEQ ID NO: 4019060 - RNA, 14 nt, Human T-lymphotropic virus 2
cucagccuccacca

SEQ ID NO: 4019061 - RNA, 19 nt, Human T-lymphotropic virus 2
cucagccuccaccaacuuc

SEQ ID NO: 4019062 - RNA, 23 nt, Human T-lymphotropic virus 2
cuccaauacccaaagcccccagg

SEQ ID NO: 4019063 - RNA, 15 nt, Human T-lymphotropic virus 2
cuccacaccccccac

SEQ ID NO: 4019064 - RNA, 21 nt, Human T-lymphotropic virus 2
cuccaccaacuucucccccau

SEQ ID NO: 4019065 - RNA, 15 nt, Human T-lymphotropic virus 2
cuccaguccauccug

SEQ ID NO: 4019066 - RNA, 20 nt, Human T-lymphotropic virus 2
cuccauagacggcucccccc

SEQ ID NO: 4019067 - RNA, 13 nt, Human T-lymphotropic virus 2
cuccauuccccaa

SEQ ID NO: 4019068 - RNA, 14 nt, Human T-lymphotropic virus 2
cucccaccuuaccc

SEQ ID NO: 4019069 - RNA, 15 nt, Human T-lymphotropic virus 2
ccccaacaaaccucc

SEQ ID NO: 4019070 - RNA, 18 nt, Human T-lymphotropic virus 2
ccccaacaucuccauucc

SEQ ID NO: 4019071 - RNA, 16 nt, Human T-lymphotropic virus 2
ccccaagguuccaccu

SEQ ID NO: 4019072 - RNA, 19 nt, Human T-lymphotropic virus 2
ccccaagguuccaccugcc

SEQ ID NO: 4019073 - RNA, 15 nt, Human T-lymphotropic virus 2
ccccacacagcccug

SEQ ID NO: 4019074 - RNA, 21 nt, Human T-lymphotropic virus 2
ccccaggucuaauauggaccu

SEQ ID NO: 4019075 - RNA, 13 nt, Human T-lymphotropic virus 2
ccccauggcaggg

SEQ ID NO: 4019076 - RNA, 20 nt, Human T-lymphotropic virus 2
ccccaugucauauucugcca

SEQ ID NO: 4019077 - RNA, 15 nt, Human T-lymphotropic virus 2
cccccaacaucucca

SEQ ID NO: 4019078 - RNA, 12 nt, Human T-lymphotropic virus 2
ccccccuucccc

SEQ ID NO: 4019079 - RNA, 20 nt, Human T-lymphotropic virus 2
cccccguuauccuuuccucc

SEQ ID NO: 4019080 - RNA, 13 nt, Human T-lymphotropic virus 2
cccccucagcuca

SEQ ID NO: 4019081 - RNA, 18 nt, Human T-lymphotropic virus 2
ccccgauguccagcccua

SEQ ID NO: 4019082 - RNA, 14 nt, Human T-lymphotropic virus 2
ccccgucuccaguc

SEQ ID NO: 4019083 - RNA, 19 nt, Human T-lymphotropic virus 2
cccgcugcuccuccgccaa

SEQ ID NO: 4019084 - RNA, 16 nt, Human T-lymphotropic virus 2
cccggguuuccgccug

SEQ ID NO: 4019085 - RNA, 12 nt, Human T-lymphotropic virus 2
cccgucuccagu

SEQ ID NO: 4019086 - RNA, 15 nt, Human T-lymphotropic virus 2
cccucaccgacccuc

SEQ ID NO: 4019087 - RNA, 15 nt, Human T-lymphotropic virus 2
cccuccccccuagga

SEQ ID NO: 4019088 - RNA, 16 nt, Human T-lymphotropic virus 2
cccucccucgccuucc

SEQ ID NO: 4019089 - RNA, 21 nt, Human T-lymphotropic virus 2
cccucgcucccguaccuccuc

SEQ ID NO: 4019090 - RNA, 17 nt, Human T-lymphotropic virus 2
cccucggggaucagcuc

SEQ ID NO: 4019091 - RNA, 19 nt, Human T-lymphotropic virus 2
cccucggggaucagcuccc

SEQ ID NO: 4019092 - RNA, 15 nt, Human T-lymphotropic virus 2
cccugacgucccucc

SEQ ID NO: 4019093 - RNA, 13 nt, Human T-lymphotropic virus 2
cccugauccuagg

SEQ ID NO: 4019094 - RNA, 15 nt, Human T-lymphotropic virus 2
cccuuccaccucagg

SEQ ID NO: 4019095 - RNA, 12 nt, Human T-lymphotropic virus 2
cccuucuccagg

SEQ ID NO: 4019096 - RNA, 21 nt, Human T-lymphotropic virus 2
cccuugcccugcccgcuccuc

SEQ ID NO: 4019097 - RNA, 23 nt, Human T-lymphotropic virus 2
ccgaaccauccucuuuccuuccc

SEQ ID NO: 4019098 - RNA, 23 nt, Human T-lymphotropic virus 2
ccgacgagagucucgcaccugcu

SEQ ID NO: 4019099 - RNA, 17 nt, Human T-lymphotropic virus 2
ccgauggcuccccucaa

SEQ ID NO: 4019100 - RNA, 14 nt, Human T-lymphotropic virus 2
ccgauguccagccc

SEQ ID NO: 4019101 - RNA, 17 nt, Human T-lymphotropic virus 2
ccgcccuaggagcauug

SEQ ID NO: 4019102 - RNA, 16 nt, Human T-lymphotropic virus 2
ccgccucaaccccgcc

SEQ ID NO: 4019103 - RNA, 22 nt, Human T-lymphotropic virus 2
ccgcggacacacuaacagcccc

SEQ ID NO: 4019104 - RNA, 17 nt, Human T-lymphotropic virus 2
ccgcucccgcuccucac

SEQ ID NO: 4019105 - RNA, 12 nt, Human T-lymphotropic virus 2
ccgcuccucacg

SEQ ID NO: 4019106 - RNA, 15 nt, Human T-lymphotropic virus 2
ccgcuccuccauccc

SEQ ID NO: 4019107 - RNA, 21 nt, Human T-lymphotropic virus 2
ccgggauuugaauuccuccau

SEQ ID NO: 4019108 - RNA, 13 nt, Human T-lymphotropic virus 2
ccguccucaaccc

SEQ ID NO: 4019109 - RNA, 13 nt, Human T-lymphotropic virus 2
ccgucuccagucc

SEQ ID NO: 4019110 - RNA, 18 nt, Human T-lymphotropic virus 2
ccgucuccaguccauccu

SEQ ID NO: 4019111 - RNA, 12 nt, Human T-lymphotropic virus 2
ccgucucccggc

SEQ ID NO: 4019112 - RNA, 19 nt, Human T-lymphotropic virus 2
ccguggagcgcagcaaggg

SEQ ID NO: 4019113 - RNA, 15 nt, Human T-lymphotropic virus 2
ccguggccgccucaa

SEQ ID NO: 4019114 - RNA, 14 nt, Human T-lymphotropic virus 2
ccuacacacaggga

SEQ ID NO: 4019115 - RNA, 18 nt, Human T-lymphotropic virus 2
ccuacuuuuauucagucu

SEQ ID NO: 4019116 - RNA, 12 nt, Human T-lymphotropic virus 2
ccuaucuuacau

SEQ ID NO: 4019117 - RNA, 16 nt, Human T-lymphotropic virus 2
ccucaacgccgcccuc

SEQ ID NO: 4019118 - RNA, 18 nt, Human T-lymphotropic virus 2
ccucaccgacccucuggu

SEQ ID NO: 4019119 - RNA, 16 nt, Human T-lymphotropic virus 2
ccuccaccaacuucuc

SEQ ID NO: 4019120 - RNA, 23 nt, Human T-lymphotropic virus 2
ccuccaccauguccgcagccaca

SEQ ID NO: 4019121 - RNA, 18 nt, Human T-lymphotropic virus 2
ccuccaggcggccuugcc

SEQ ID NO: 4019122 - RNA, 20 nt, Human T-lymphotropic virus 2
ccuccaguaccuaugcuccu

SEQ ID NO: 4019123 - RNA, 14 nt, Human T-lymphotropic virus 2
ccuccccuccuucc

SEQ ID NO: 4019124 - RNA, 15 nt, Human T-lymphotropic virus 2
ccucccucgccuucc

SEQ ID NO: 4019125 - RNA, 16 nt, Human T-lymphotropic virus 2
ccuccuaccacuccag

SEQ ID NO: 4019126 - RNA, 19 nt, Human T-lymphotropic virus 2
ccuccuaccacuccagccc

SEQ ID NO: 4019127 - RNA, 21 nt, Human T-lymphotropic virus 2
ccuccuagggaaaccacucca

SEQ ID NO: 4019128 - RNA, 18 nt, Human T-lymphotropic virus 2
ccuccuggccaccugucc

SEQ ID NO: 4019129 - RNA, 22 nt, Human T-lymphotropic virus 2
ccuccuguuggaucucccuucc

SEQ ID NO: 4019130 - RNA, 14 nt, Human T-lymphotropic virus 2
ccucgaacaccuuc

SEQ ID NO: 4019131 - RNA, 14 nt, Human T-lymphotropic virus 2
ccucgccuacaggc

SEQ ID NO: 4019132 - RNA, 13 nt, Human T-lymphotropic virus 2
ccucgccuccccu

SEQ ID NO: 4019133 - RNA, 13 nt, Human T-lymphotropic virus 2
ccucggcaccucc

SEQ ID NO: 4019134 - RNA, 17 nt, Human T-lymphotropic virus 2
ccucggcacuuccgccc

SEQ ID NO: 4019135 - RNA, 20 nt, Human T-lymphotropic virus 2
ccucucaggucgagcucggc

SEQ ID NO: 4019136 - RNA, 17 nt, Human T-lymphotropic virus 2
ccucuccuuccccaggg

SEQ ID NO: 4019137 - RNA, 18 nt, Human T-lymphotropic virus 2
ccucuccuuccccagggc

SEQ ID NO: 4019138 - RNA, 17 nt, Human T-lymphotropic virus 2
ccucugcucuuggcagc

SEQ ID NO: 4019139 - RNA, 15 nt, Human T-lymphotropic virus 2
ccucuggucacggag

SEQ ID NO: 4019140 - RNA, 14 nt, Human T-lymphotropic virus 2
ccugaaccucuccg

SEQ ID NO: 4019141 - RNA, 15 nt, Human T-lymphotropic virus 2
ccugacgucccuccc

SEQ ID NO: 4019142 - RNA, 16 nt, Human T-lymphotropic virus 2
ccugaggaacuccccu

SEQ ID NO: 4019143 - RNA, 16 nt, Human T-lymphotropic virus 2
ccugcccgcuccucca

SEQ ID NO: 4019144 - RNA, 23 nt, Human T-lymphotropic virus 2
ccuggcauguacucuacaccccc

SEQ ID NO: 4019145 - RNA, 22 nt, Human T-lymphotropic virus 2
ccuguccagagcaccaacucac

SEQ ID NO: 4019146 - RNA, 22 nt, Human T-lymphotropic virus 2
ccuuaaaugaccuggucuccaa

SEQ ID NO: 4019147 - RNA, 14 nt, Human T-lymphotropic virus 2
ccuuacccaggcca

SEQ ID NO: 4019148 - RNA, 14 nt, Human T-lymphotropic virus 2
ccuuaccccuccca

SEQ ID NO: 4019149 - RNA, 16 nt, Human T-lymphotropic virus 2
ccuuaccccucccacc

SEQ ID NO: 4019150 - RNA, 21 nt, Human T-lymphotropic virus 2
ccuuagguagucgcuccccga

SEQ ID NO: 4019151 - RNA, 15 nt, Human T-lymphotropic virus 2
ccuucccccaccucc

SEQ ID NO: 4019152 - RNA, 12 nt, Human T-lymphotropic virus 2
ccuucccuugcc

SEQ ID NO: 4019153 - RNA, 11 nt, Human T-lymphotropic virus 2
ccuuccucacc

SEQ ID NO: 4019154 - RNA, 16 nt, Human T-lymphotropic virus 2
ccuucuuuuccccuuc

SEQ ID NO: 4019155 - RNA, 17 nt, Human T-lymphotropic virus 2
ccuugacaacggccucc

SEQ ID NO: 4019156 - RNA, 14 nt, Human T-lymphotropic virus 2
ccuugccaccccua

SEQ ID NO: 4019157 - RNA, 21 nt, Human T-lymphotropic virus 2
ccuuuaugguucaucaccuca

SEQ ID NO: 4019158 - RNA, 14 nt, Human T-lymphotropic virus 2
ccuuucuucccucu

SEQ ID NO: 4019159 - RNA, 16 nt, Human T-lymphotropic virus 2
ccuuucuucccucucc

SEQ ID NO: 4019160 - RNA, 14 nt, Human T-lymphotropic virus 2
cgaacaccuucccc

SEQ ID NO: 4019161 - RNA, 17 nt, Human T-lymphotropic virus 2
cgaacaccuucccccac

SEQ ID NO: 4019162 - RNA, 23 nt, Human T-lymphotropic virus 2
cgaacaccuucccccaccucccc

SEQ ID NO: 4019163 - RNA, 19 nt, Human T-lymphotropic virus 2
cgacagccuuaccccaccu

SEQ ID NO: 4019164 - RNA, 13 nt, Human T-lymphotropic virus 2
cgcauggccuucc

SEQ ID NO: 4019165 - RNA, 18 nt, Human T-lymphotropic virus 2
cgccauuggggccuuccu

SEQ ID NO: 4019166 - RNA, 15 nt, Human T-lymphotropic virus 2
cgcccuacaacaaug

SEQ ID NO: 4019167 - RNA, 15 nt, Human T-lymphotropic virus 2
cgcccucuuggcagg

SEQ ID NO: 4019168 - RNA, 13 nt, Human T-lymphotropic virus 2
cgccggggccucu

SEQ ID NO: 4019169 - RNA, 21 nt, Human T-lymphotropic virus 2
cgccuacaucgacaugcccuc

SEQ ID NO: 4019170 - RNA, 21 nt, Human T-lymphotropic virus 2
cgcucccguaccuccuccggc

SEQ ID NO: 4019171 - RNA, 16 nt, Human T-lymphotropic virus 2
uacguggaacccacca

SEQ ID NO: 4019172 - RNA, 16 nt, Human T-lymphotropic virus 2
uacucaggaccaggca

SEQ ID NO: 4019173 - RNA, 16 nt, Human T-lymphotropic virus 2
uacucuggcuuccaua

SEQ ID NO: 4019174 - RNA, 14 nt, Human T-lymphotropic virus 2
uacuuauucccaca

SEQ ID NO: 4019175 - RNA, 16 nt, Human T-lymphotropic virus 2
uacuucgccuucacca

SEQ ID NO: 4019176 - RNA, 18 nt, Human T-lymphotropic virus 2
uacuuuuagccagcccca

SEQ ID NO: 4019177 - RNA, 19 nt, Human T-lymphotropic virus 2
uagacaaugccauucacaa

SEQ ID NO: 4019178 - RNA, 24 nt, Human T-lymphotropic virus 2
uagccacuccaaacaccauaggcc

SEQ ID NO: 4019179 - RNA, 11 nt, Human T-lymphotropic virus 2
uagccagcccc

SEQ ID NO: 4019180 - RNA, 13 nt, Human T-lymphotropic virus 2
uagccagccccac

SEQ ID NO: 4019181 - RNA, 19 nt, Human T-lymphotropic virus 2
uagccuaccgacagccuua

SEQ ID NO: 4019182 - RNA, 20 nt, Human T-lymphotropic virus 2
uaggccucgaacaccuuccc

SEQ ID NO: 4019183 - RNA, 16 nt, Human T-lymphotropic virus 2
uaucucuggcuuccag

SEQ ID NO: 4019184 - RNA, 18 nt, Human T-lymphotropic virus 2
ucaaaacauccuccgggu

SEQ ID NO: 4019185 - RNA, 14 nt, Human T-lymphotropic virus 2
ucaaaacccaggag

SEQ ID NO: 4019186 - RNA, 18 nt, Human T-lymphotropic virus 2
ucaaacgccaacaaagaa

SEQ ID NO: 4019187 - RNA, 14 nt, Human T-lymphotropic virus 2
ucaaacuccuccaa

SEQ ID NO: 4019188 - RNA, 22 nt, Human T-lymphotropic virus 2
ucaaacuccuccaaaccccccu

SEQ ID NO: 4019189 - RNA, 23 nt, Human T-lymphotropic virus 2
ucaacgccgcccucuuggcaggc

SEQ ID NO: 4019190 - RNA, 21 nt, Human T-lymphotropic virus 2
ucaagcaggaggucagcuccu

SEQ ID NO: 4019191 - RNA, 19 nt, Human T-lymphotropic virus 2
ucaaggacccucaaggucc

SEQ ID NO: 4019192 - RNA, 18 nt, Human T-lymphotropic virus 2
ucaccucagaacccacuc

SEQ ID NO: 4019193 - RNA, 18 nt, Human T-lymphotropic virus 2
ucaccucuccuuccccag

SEQ ID NO: 4019194 - RNA, 19 nt, Human T-lymphotropic virus 2
ucaccucuccuuccccagg

SEQ ID NO: 4019195 - RNA, 12 nt, Human T-lymphotropic virus 2
ucacuccccugc

SEQ ID NO: 4019196 - RNA, 13 nt, Human T-lymphotropic virus 2
ucacuccccugcc

SEQ ID NO: 4019197 - RNA, 13 nt, Human T-lymphotropic virus 2
ucagaacccacuc

SEQ ID NO: 4019198 - RNA, 15 nt, Human T-lymphotropic virus 2
ucagaccgucucaca

SEQ ID NO: 4019199 - RNA, 20 nt, Human T-lymphotropic virus 2
ucagccaagugucccuucga

SEQ ID NO: 4019200 - RNA, 17 nt, Human T-lymphotropic virus 2
ucagcccauuucccagg

SEQ ID NO: 4019201 - RNA, 15 nt, Human T-lymphotropic virus 2
ucaucccccugcggc

SEQ ID NO: 4019202 - RNA, 20 nt, Human T-lymphotropic virus 2
ucaugaccuaagagccacca

SEQ ID NO: 4019203 - RNA, 21 nt, Human T-lymphotropic virus 2
ucauucaugaccuaagagcca

SEQ ID NO: 4019204 - RNA, 13 nt, Human T-lymphotropic virus 2
uccacccugccag

SEQ ID NO: 4019205 - RNA, 21 nt, Human T-lymphotropic virus 2
uccacgggcuuuccccaacuc

SEQ ID NO: 4019206 - RNA, 20 nt, Human T-lymphotropic virus 2
uccagccucucauccuggca

SEQ ID NO: 4019207 - RNA, 21 nt, Human T-lymphotropic virus 2
uccaggaaccacgacuccuca

SEQ ID NO: 4019208 - RNA, 18 nt, Human T-lymphotropic virus 2
uccaguaccuaugcuccu

SEQ ID NO: 4019209 - RNA, 16 nt, Human T-lymphotropic virus 2
uccauaaccuucaccu

SEQ ID NO: 4019210 - RNA, 21 nt, Human T-lymphotropic virus 2
uccauaaccuucaccuucuau

SEQ ID NO: 4019211 - RNA, 13 nt, Human T-lymphotropic virus 2
ucccaacccuucu

SEQ ID NO: 4019212 - RNA, 16 nt, Human T-lymphotropic virus 2
ucccacucaucccccu

SEQ ID NO: 4019213 - RNA, 16 nt, Human T-lymphotropic virus 2
uccccagggccccccg

SEQ ID NO: 4019214 - RNA, 18 nt, Human T-lymphotropic virus 2
ucccccaggagcccccuc

SEQ ID NO: 4019215 - RNA, 20 nt, Human T-lymphotropic virus 2
uccccuccuuccccacccag

SEQ ID NO: 4019216 - RNA, 21 nt, Human T-lymphotropic virus 2
ucccggccucggcaccuccug

SEQ ID NO: 4019217 - RNA, 17 nt, Human T-lymphotropic virus 2
ucccuauauucugcccu

SEQ ID NO: 4019218 - RNA, 21 nt, Human T-lymphotropic virus 2
ucccuaucuuacaucccccag

SEQ ID NO: 4019219 - RNA, 13 nt, Human T-lymphotropic virus 2
ucccucgccuccc

SEQ ID NO: 4019220 - RNA, 22 nt, Human T-lymphotropic virus 2
ucccucgcucccguaccuccuc

SEQ ID NO: 4019221 - RNA, 19 nt, Human T-lymphotropic virus 2
uccgacaccuaucugcccu

SEQ ID NO: 4019222 - RNA, 17 nt, Human T-lymphotropic virus 2
uccgauggcuccccuca

SEQ ID NO: 4019223 - RNA, 21 nt, Human T-lymphotropic virus 2
uccgcagccacaccaaccucc

SEQ ID NO: 4019224 - RNA, 15 nt, Human T-lymphotropic virus 2
uccgccaccuccccc

SEQ ID NO: 4019225 - RNA, 21 nt, Human T-lymphotropic virus 2
uccgccaccuccccccccuuc

SEQ ID NO: 4019226 - RNA, 21 nt, Human T-lymphotropic virus 2
uccgcccaucaaacccuccag

SEQ ID NO: 4019227 - RNA, 16 nt, Human T-lymphotropic virus 2
uccuaccacuccagcc

SEQ ID NO: 4019228 - RNA, 17 nt, Human T-lymphotropic virus 2
uccuaucuacucucuca

SEQ ID NO: 4019229 - RNA, 17 nt, Human T-lymphotropic virus 2
uccucccgaaccauccu

SEQ ID NO: 4019230 - RNA, 17 nt, Human T-lymphotropic virus 2
uccucucagcccauuuc

SEQ ID NO: 4019231 - RNA, 13 nt, Human T-lymphotropic virus 2
uccugaaccucuc

SEQ ID NO: 4019232 - RNA, 15 nt, Human T-lymphotropic virus 2
uccugaacugcuccu

SEQ ID NO: 4019233 - RNA, 13 nt, Human T-lymphotropic virus 2
uccuggccaccug

SEQ ID NO: 4019234 - RNA, 20 nt, Human T-lymphotropic virus 2
ucgaaaccaaagccuuccau

SEQ ID NO: 4019235 - RNA, 21 nt, Human T-lymphotropic virus 2
ucgaacaccuucccccaccuc

SEQ ID NO: 4019236 - RNA, 18 nt, Human T-lymphotropic virus 2
ucgagcucggcugccccu

SEQ ID NO: 4019237 - RNA, 20 nt, Human T-lymphotropic virus 2
ucgcccccgauguccagccc

SEQ ID NO: 4019238 - RNA, 15 nt, Human T-lymphotropic virus 2
ucgccgucacugaaa

SEQ ID NO: 4019239 - RNA, 14 nt, Human T-lymphotropic virus 2
ucuauaccucccag

SEQ ID NO: 4019240 - RNA, 14 nt, Human T-lymphotropic virus 2
ucuauguuccaccc

SEQ ID NO: 4019241 - RNA, 18 nt, Human T-lymphotropic virus 2
ucucagcccauuucccag

SEQ ID NO: 4019242 - RNA, 14 nt, Human T-lymphotropic virus 2
ucuccaaggcccug

SEQ ID NO: 4019243 - RNA, 22 nt, Human T-lymphotropic virus 2
ucucccccaagguuccaccugc

SEQ ID NO: 4019244 - RNA, 12 nt, Human T-lymphotropic virus 2
ucucccuuccac

SEQ ID NO: 4019245 - RNA, 20 nt, Human T-lymphotropic virus 2
ucuccgggagaggucuauug

SEQ ID NO: 4019246 - RNA, 13 nt, Human T-lymphotropic virus 2
ucuccuuccccag

SEQ ID NO: 4019247 - RNA, 15 nt, Human T-lymphotropic virus 2
ucucuuacaccuccc

SEQ ID NO: 4019248 - RNA, 14 nt, Human T-lymphotropic virus 2
ucuuaacaacccca

SEQ ID NO: 4019249 - RNA, 19 nt, Human T-lymphotropic virus 2
ucuuagacacccacaacaa

SEQ ID NO: 4019250 - RNA, 13 nt, Human T-lymphotropic virus 2
ucuucccucuccc

SEQ ID NO: 4019251 - RNA, 13 nt, Human T-lymphotropic virus 2
ucuugcccuuccg

SEQ ID NO: 4019252 - RNA, 12 nt, Human T-lymphotropic virus 2
ucuuggcaggcg

SEQ ID NO: 4019253 - RNA, 15 nt, Human T-lymphotropic virus 2
ugaaccucuccggga

SEQ ID NO: 4019254 - RNA, 15 nt, Human T-lymphotropic virus 2
ugaagccucuacccc

SEQ ID NO: 4019255 - RNA, 11 nt, Human T-lymphotropic virus 2
ugaccccaccg

SEQ ID NO: 4019256 - RNA, 21 nt, Human T-lymphotropic virus 2
ugacccuugcucgcuacaaug

SEQ ID NO: 4019257 - RNA, 17 nt, Human T-lymphotropic virus 2
ugaccuaagagccacca

SEQ ID NO: 4019258 - RNA, 13 nt, Human T-lymphotropic virus 2
ugagcgccuccag

SEQ ID NO: 4019259 - RNA, 15 nt, Human T-lymphotropic virus 2
ugagcgccuccaggc

SEQ ID NO: 4019260 - RNA, 16 nt, Human T-lymphotropic virus 2
ugagcgccuccaggcc

SEQ ID NO: 4019261 - RNA, 23 nt, Human T-lymphotropic virus 2
ugcaacaacuccauuauccuccc

SEQ ID NO: 4019262 - RNA, 20 nt, Human T-lymphotropic virus 2
ugcacguggaaccucgaccu

SEQ ID NO: 4019263 - RNA, 12 nt, Human T-lymphotropic virus 2
ugcagacccucc

SEQ ID NO: 4019264 - RNA, 15 nt, Human T-lymphotropic virus 2
ugcaugcccaagacc

SEQ ID NO: 4019265 - RNA, 18 nt, Human T-lymphotropic virus 2
ugccaagcauggacaucc

SEQ ID NO: 4019266 - RNA, 17 nt, Human T-lymphotropic virus 2
ugccaagccauggccuu

SEQ ID NO: 4019267 - RNA, 20 nt, Human T-lymphotropic virus 2
ugccauuacuaccacccuca

SEQ ID NO: 4019268 - RNA, 15 nt, Human T-lymphotropic virus 2
ugcccaaccacauau

SEQ ID NO: 4019269 - RNA, 19 nt, Human T-lymphotropic virus 2
ugcccgcuccuccauccca

SEQ ID NO: 4019270 - RNA, 23 nt, Human T-lymphotropic virus 2
ugcccuccuggccaccuguccag

SEQ ID NO: 4019271 - RNA, 23 nt, Human T-lymphotropic virus 2
ugccuggaaccaacccucgggga

SEQ ID NO: 4019272 - RNA, 20 nt, Human T-lymphotropic virus 2
ugccuuucuucccucucccg

SEQ ID NO: 4019273 - RNA, 19 nt, Human T-lymphotropic virus 2
ggcucugacgucucccccu

SEQ ID NO: 4019274 - RNA, 18 nt, Human T-lymphotropic virus 2
ggcuuaacuuucuccagg

SEQ ID NO: 4019275 - RNA, 12 nt, Human T-lymphotropic virus 2
ggggccaacaua

SEQ ID NO: 4019276 - RNA, 19 nt, Human T-lymphotropic virus 2
gguaucuccuccuaccacu

SEQ ID NO: 4019277 - RNA, 18 nt, Human T-lymphotropic virus 2
gguccuuaccccucccac

SEQ ID NO: 4019278 - RNA, 22 nt, Human T-lymphotropic virus 2
ggucuaauauggaccuucaaug

SEQ ID NO: 4019279 - RNA, 15 nt, Human T-lymphotropic virus 2
ggucuuuagagacac

SEQ ID NO: 4019280 - RNA, 22 nt, Human T-lymphotropic virus 2
gguguacaggacuucuccccua

SEQ ID NO: 4019281 - RNA, 13 nt, Human T-lymphotropic virus 2
guaaaggcucuga

SEQ ID NO: 4019282 - RNA, 14 nt, Human T-lymphotropic virus 2
guaagucuccucuc

SEQ ID NO: 4019283 - RNA, 18 nt, Human T-lymphotropic virus 2
guacaggacuucuccccu

SEQ ID NO: 4019284 - RNA, 17 nt, Human T-lymphotropic virus 2
guacuacucgccuuccu

SEQ ID NO: 4019285 - RNA, 18 nt, Human T-lymphotropic virus 2
guagucgcuccccgaggg

SEQ ID NO: 4019286 - RNA, 16 nt, Human T-lymphotropic virus 2
guaucuccuccuacca

SEQ ID NO: 4019287 - RNA, 15 nt, Human T-lymphotropic virus 2
gucagcucuccucuc

SEQ ID NO: 4019288 - RNA, 14 nt, Human T-lymphotropic virus 2
gucccgucucaggu

SEQ ID NO: 4019289 - RNA, 16 nt, Human T-lymphotropic virus 2
gucccuccccccuagg

SEQ ID NO: 4019290 - RNA, 21 nt, Human T-lymphotropic virus 2
guccucaaccccaugaggaaa

SEQ ID NO: 4019291 - RNA, 16 nt, Human T-lymphotropic virus 2
guccuccacuaccacc

SEQ ID NO: 4019292 - RNA, 14 nt, Human T-lymphotropic virus 2
gucgcuccccgagg

SEQ ID NO: 4019293 - RNA, 22 nt, Human T-lymphotropic virus 2
gucggcauccucauucaccaca

SEQ ID NO: 4019294 - RNA, 21 nt, Human T-lymphotropic virus 2
gucuauugcuauaggcaggcc

SEQ ID NO: 4019295 - RNA, 20 nt, Human T-lymphotropic virus 2
gucugcacguggaaccucga

SEQ ID NO: 4019296 - RNA, 21 nt, Human T-lymphotropic virus 2
gucuucccggggaagacaaac

SEQ ID NO: 4019297 - RNA, 13 nt, Human T-lymphotropic virus 2
gugagggcucccu

SEQ ID NO: 4019298 - RNA, 12 nt, Human T-lymphotropic virus 2
guggcucgcucc

SEQ ID NO: 4019299 - RNA, 16 nt, Human T-lymphotropic virus 2
gugggaccgucucccg

SEQ ID NO: 4019300 - RNA, 19 nt, Human T-lymphotropic virus 2
guguacaggacuucucccc

SEQ ID NO: 4019301 - RNA, 14 nt, Human T-lymphotropic virus 2
guucaguccucccu

SEQ ID NO: 4019302 - RNA, 14 nt, Human T-lymphotropic virus 2
guucaucaccucag

SEQ ID NO: 4019303 - RNA, 13 nt, Human T-lymphotropic virus 2
guucuuuccucuu

SEQ ID NO: 4019304 - RNA, 22 nt, Human T-lymphotropic virus 2
uaaaccugagcgccuccaggcc

SEQ ID NO: 4019305 - RNA, 13 nt, Human T-lymphotropic virus 2
uaacagcccccuu

SEQ ID NO: 4019306 - RNA, 18 nt, Human T-lymphotropic virus 2
uaauaaccccgcccagca

SEQ ID NO: 4019307 - RNA, 16 nt, Human T-lymphotropic virus 2
uacaacaacucuccca

SEQ ID NO: 4019308 - RNA, 17 nt, Human T-lymphotropic virus 2
uacaagaucuccuccag

SEQ ID NO: 4019309 - RNA, 18 nt, Human T-lymphotropic virus 2
uacaagaucuccuccagu

SEQ ID NO: 4019310 - RNA, 17 nt, Human T-lymphotropic virus 2
uacaccaacaucccugu

SEQ ID NO: 4019311 - RNA, 16 nt, Human T-lymphotropic virus 2
uacacccccaacaucu

SEQ ID NO: 4019312 - RNA, 13 nt, Human T-lymphotropic virus 2
uaccacccucacc

SEQ ID NO: 4019313 - RNA, 16 nt, Human T-lymphotropic virus 2
uaccacuccagccccu

SEQ ID NO: 4019314 - RNA, 18 nt, Human T-lymphotropic virus 2
uaccacuccagccccugu

SEQ ID NO: 4019315 - RNA, 23 nt, Human T-lymphotropic virus 2
uaccauugacccauccacagucc

SEQ ID NO: 4019316 - RNA, 21 nt, Human T-lymphotropic virus 2
uaccccucccaccacuccugu

SEQ ID NO: 4019317 - RNA, 18 nt, Human T-lymphotropic virus 2
uaccgacagccuuacccc

SEQ ID NO: 4019318 - RNA, 11 nt, Human T-lymphotropic virus 2
uaccucccaga

SEQ ID NO: 4019319 - RNA, 13 nt, Human T-lymphotropic virus 2
uacuaccacccuc

SEQ ID NO: 4019320 - RNA, 15 nt, Human T-lymphotropic virus 2
uacuccuccuuccau

SEQ ID NO: 4019321 - RNA, 23 nt, Human T-lymphotropic virus 2
uacucucucaucagcuuauacaa

SEQ ID NO: 4019322 - RNA, 18 nt, Human T-lymphotropic virus 2
uacugaggaaaaaaacuc

SEQ ID NO: 4019323 - RNA, 23 nt, Human T-lymphotropic virus 2
uagaccucacccuuacccacuuc

SEQ ID NO: 4019324 - RNA, 13 nt, Human T-lymphotropic virus 2
uaggaacugaaac

SEQ ID NO: 4019325 - RNA, 14 nt, Human T-lymphotropic virus 2
uaggaacugaaacc

SEQ ID NO: 4019326 - RNA, 13 nt, Human T-lymphotropic virus 2
uaggcaggcccgc

SEQ ID NO: 4019327 - RNA, 13 nt, Human T-lymphotropic virus 2
uagggcuuccuga

SEQ ID NO: 4019328 - RNA, 18 nt, Human T-lymphotropic virus 2
uauacaauacuccuccuu

SEQ ID NO: 4019329 - RNA, 14 nt, Human T-lymphotropic virus 2
uaucaacccaccac

SEQ ID NO: 4019330 - RNA, 19 nt, Human T-lymphotropic virus 2
uaucagcgccguucuucag

SEQ ID NO: 4019331 - RNA, 23 nt, Human T-lymphotropic virus 2
uaugcauggacuguccuuccaca

SEQ ID NO: 4019332 - RNA, 17 nt, Human T-lymphotropic virus 2
uauggccagcucugcca

SEQ ID NO: 4019333 - RNA, 17 nt, Human T-lymphotropic virus 2
uauguuccacccgccua

SEQ ID NO: 4019334 - RNA, 16 nt, Human T-lymphotropic virus 2
uauucagucucacaca

SEQ ID NO: 4019335 - RNA, 16 nt, Human T-lymphotropic virus 2
ucaaacccccucagga

SEQ ID NO: 4019336 - RNA, 23 nt, Human T-lymphotropic virus 2
ucaaacuccuccaaaccccccua

SEQ ID NO: 4019337 - RNA, 14 nt, Human T-lymphotropic virus 2
ucacaaaacccauc

SEQ ID NO: 4019338 - RNA, 16 nt, Human T-lymphotropic virus 2
ucaccauuccccagcc

SEQ ID NO: 4019339 - RNA, 18 nt, Human T-lymphotropic virus 2
ucaccauuccccagccau

SEQ ID NO: 4019340 - RNA, 22 nt, Human T-lymphotropic virus 2
ucaccuuggggauccauccucu

SEQ ID NO: 4019341 - RNA, 17 nt, Human T-lymphotropic virus 2
ucacggagacucaccuu

SEQ ID NO: 4019342 - RNA, 14 nt, Human T-lymphotropic virus 2
ucacuccccugccc

SEQ ID NO: 4019343 - RNA, 17 nt, Human T-lymphotropic virus 2
ucagcucauaggcccug

SEQ ID NO: 4019344 - RNA, 21 nt, Human T-lymphotropic virus 2
ucaggccauuucccuccuagg

SEQ ID NO: 4019345 - RNA, 22 nt, Human T-lymphotropic virus 2
ucaggcguggacacccaaggac

SEQ ID NO: 4019346 - RNA, 11 nt, Human T-lymphotropic virus 2
ucagucucaca

SEQ ID NO: 4019347 - RNA, 22 nt, Human T-lymphotropic virus 2
ucauccaagugucggcauccuc

SEQ ID NO: 4019348 - RNA, 21 nt, Human T-lymphotropic virus 2
uccaagugucggcauccucau

SEQ ID NO: 4019349 - RNA, 19 nt, Human T-lymphotropic virus 2
uccacaccccccacccucc

SEQ ID NO: 4019350 - RNA, 14 nt, Human T-lymphotropic virus 2
uccacauuaacaca

SEQ ID NO: 4019351 - RNA, 19 nt, Human T-lymphotropic virus 2
uccacgacacccugauccu

SEQ ID NO: 4019352 - RNA, 17 nt, Human T-lymphotropic virus 2
uccacuaccacccauuc

SEQ ID NO: 4019353 - RNA, 14 nt, Human T-lymphotropic virus 2
uccacuagcccagc

SEQ ID NO: 4019354 - RNA, 15 nt, Human T-lymphotropic virus 2
uccaguaaaagccuu

SEQ ID NO: 4019355 - RNA, 14 nt, Human T-lymphotropic virus 2
ucccaacccuucuc

SEQ ID NO: 4019356 - RNA, 18 nt, Human T-lymphotropic virus 2
ucccacucaucccccugc

SEQ ID NO: 4019357 - RNA, 18 nt, Human T-lymphotropic virus 2
ucccagacgaccccagcc

SEQ ID NO: 4019358 - RNA, 17 nt, Human T-lymphotropic virus 2
ucccauaggaccuucuu

SEQ ID NO: 4019359 - RNA, 18 nt, Human T-lymphotropic virus 2
uccccaacaaaccuccuc

SEQ ID NO: 4019360 - RNA, 20 nt, Human T-lymphotropic virus 2
uccccaagcaguaccagcca

SEQ ID NO: 4019361 - RNA, 12 nt, Human T-lymphotropic virus 2
uccccagccaug

SEQ ID NO: 4019362 - RNA, 21 nt, Human T-lymphotropic virus 2
uccccagggccccccgaucuc

SEQ ID NO: 4019363 - RNA, 20 nt, Human T-lymphotropic virus 2
ucccccauugguccaugacu

SEQ ID NO: 4019364 - RNA, 21 nt, Human T-lymphotropic virus 2
uccccgaaccuggccuccguc

SEQ ID NO: 4019365 - RNA, 14 nt, Human T-lymphotropic virus 2
uccccggaggccca

SEQ ID NO: 4019366 - RNA, 17 nt, Human T-lymphotropic virus 2
uccccuagguucguccc

SEQ ID NO: 4019367 - RNA, 12 nt, Human T-lymphotropic virus 2
uccccucaucca

SEQ ID NO: 4019368 - RNA, 13 nt, Human T-lymphotropic virus 2
ucccgcugcuccu

SEQ ID NO: 4019369 - RNA, 18 nt, Human T-lymphotropic virus 2
ucccggccucggcaccuc

SEQ ID NO: 4019370 - RNA, 13 nt, Human T-lymphotropic virus 2
ucccggggccaac

SEQ ID NO: 4019371 - RNA, 19 nt, Human T-lymphotropic virus 2
ucccucaccgacccucugg

SEQ ID NO: 4019372 - RNA, 24 nt, Human T-lymphotropic virus 2
ucccucgccauuggggccuuccuc

SEQ ID NO: 4019373 - RNA, 15 nt, Human T-lymphotropic virus 2
ucccucgccuccccu

SEQ ID NO: 4019374 - RNA, 22 nt, Human T-lymphotropic virus 2
ucccucucccggcgcuuuugau

SEQ ID NO: 4019375 - RNA, 18 nt, Human T-lymphotropic virus 2
ucccuuaucuuagcuccc

SEQ ID NO: 4019376 - RNA, 17 nt, Human T-lymphotropic virus 2
acaccucagccuaccca

SEQ ID NO: 4019377 - RNA, 16 nt, Human T-lymphotropic virus 2
acaccuucccccaccu

SEQ ID NO: 4019378 - RNA, 14 nt, Human T-lymphotropic virus 2
acagcccugcuuuc

SEQ ID NO: 4019379 - RNA, 14 nt, Human T-lymphotropic virus 2
acagcucuccagaa

SEQ ID NO: 4019380 - RNA, 16 nt, Human T-lymphotropic virus 2
acaggacaucacuccc

SEQ ID NO: 4019381 - RNA, 20 nt, Human T-lymphotropic virus 2
acaggccaucaagcaggagg

SEQ ID NO: 4019382 - RNA, 20 nt, Human T-lymphotropic virus 2
acauacuuuuagccagcccc

SEQ ID NO: 4019383 - RNA, 21 nt, Human T-lymphotropic virus 2
acaucacuccccugcccucuc

SEQ ID NO: 4019384 - RNA, 14 nt, Human T-lymphotropic virus 2
acaucuacaccacc

SEQ ID NO: 4019385 - RNA, 16 nt, Human T-lymphotropic virus 2
acaucuccauucccca

SEQ ID NO: 4019386 - RNA, 13 nt, Human T-lymphotropic virus 2
acauuuuccacua

SEQ ID NO: 4019387 - RNA, 18 nt, Human T-lymphotropic virus 2
accacccucaccucuccu

SEQ ID NO: 4019388 - RNA, 19 nt, Human T-lymphotropic virus 2
accacgcauggccuuccaa

SEQ ID NO: 4019389 - RNA, 22 nt, Human T-lymphotropic virus 2
accacggcccugacgucccucc

SEQ ID NO: 4019390 - RNA, 19 nt, Human T-lymphotropic virus 2
accauacucaggaccaggc

SEQ ID NO: 4019391 - RNA, 20 nt, Human T-lymphotropic virus 2
accauguccgcagccacacc

SEQ ID NO: 4019392 - RNA, 14 nt, Human T-lymphotropic virus 2
acccacucagccuc

SEQ ID NO: 4019393 - RNA, 15 nt, Human T-lymphotropic virus 2
acccaguucaaacuc

SEQ ID NO: 4019394 - RNA, 23 nt, Human T-lymphotropic virus 2
acccauauaccauacaaccccac

SEQ ID NO: 4019395 - RNA, 17 nt, Human T-lymphotropic virus 2
acccaucaaaacccagg

SEQ ID NO: 4019396 - RNA, 18 nt, Human T-lymphotropic virus 2
accccagcccccaccaau

SEQ ID NO: 4019397 - RNA, 17 nt, Human T-lymphotropic virus 2
acccccaacaucuccau

SEQ ID NO: 4019398 - RNA, 16 nt, Human T-lymphotropic virus 2
accccccacccuccga

SEQ ID NO: 4019399 - RNA, 20 nt, Human T-lymphotropic virus 2
acccccuccacguccuggac

SEQ ID NO: 4019400 - RNA, 21 nt, Human T-lymphotropic virus 2
accccucccaaaccaccuccc

SEQ ID NO: 4019401 - RNA, 18 nt, Human T-lymphotropic virus 2
accccucccaccacuccu

SEQ ID NO: 4019402 - RNA, 16 nt, Human T-lymphotropic virus 2
acccgugaccccucuu

SEQ ID NO: 4019403 - RNA, 19 nt, Human T-lymphotropic virus 2
acccgugagggcucccugu

SEQ ID NO: 4019404 - RNA, 19 nt, Human T-lymphotropic virus 2
acccucaagguccuuaccc

SEQ ID NO: 4019405 - RNA, 15 nt, Human T-lymphotropic virus 2
acccucaccucuccu

SEQ ID NO: 4019406 - RNA, 17 nt, Human T-lymphotropic virus 2
acccuuacccacuuccc

SEQ ID NO: 4019407 - RNA, 19 nt, Human T-lymphotropic virus 2
accuaagagccaccaaugc

SEQ ID NO: 4019408 - RNA, 14 nt, Human T-lymphotropic virus 2
accuacaaucccua

SEQ ID NO: 4019409 - RNA, 17 nt, Human T-lymphotropic virus 2
accuacauucccucgcc

SEQ ID NO: 4019410 - RNA, 23 nt, Human T-lymphotropic virus 2
accuacccaccacaauguuccaa

SEQ ID NO: 4019411 - RNA, 17 nt, Human T-lymphotropic virus 2
accucaacgccgcccuc

SEQ ID NO: 4019412 - RNA, 20 nt, Human T-lymphotropic virus 2
accucgaccuuaauucccua

SEQ ID NO: 4019413 - RNA, 17 nt, Human T-lymphotropic virus 2
accuuaucccucgccuc

SEQ ID NO: 4019414 - RNA, 22 nt, Human T-lymphotropic virus 2
accuucccccaccuccccaagu

SEQ ID NO: 4019415 - RNA, 19 nt, Human T-lymphotropic virus 2
acgauuacccccugcccau

SEQ ID NO: 4019416 - RNA, 13 nt, Human T-lymphotropic virus 2
acgccccaaggcc

SEQ ID NO: 4019417 - RNA, 19 nt, Human T-lymphotropic virus 2
acgccgcaacagaccacca

SEQ ID NO: 4019418 - RNA, 13 nt, Human T-lymphotropic virus 2
acggagacucacc

SEQ ID NO: 4019419 - RNA, 12 nt, Human T-lymphotropic virus 2
acgucccucccc

SEQ ID NO: 4019420 - RNA, 17 nt, Human T-lymphotropic virus 2
acguggaacccaccacc

SEQ ID NO: 4019421 - RNA, 17 nt, Human T-lymphotropic virus 2
acuacacccccccugcc

SEQ ID NO: 4019422 - RNA, 13 nt, Human T-lymphotropic virus 2
acuacugaggaaa

SEQ ID NO: 4019423 - RNA, 22 nt, Human T-lymphotropic virus 2
acucagccuccaccaacuucuc

SEQ ID NO: 4019424 - RNA, 18 nt, Human T-lymphotropic virus 2
acuccaauacccaaagcc

SEQ ID NO: 4019425 - RNA, 22 nt, Human T-lymphotropic virus 2
acuccaauacccaaagccccca

SEQ ID NO: 4019426 - RNA, 22 nt, Human T-lymphotropic virus 2
acuccaucuuaacaaccccagg

SEQ ID NO: 4019427 - RNA, 11 nt, Human T-lymphotropic virus 2
acuccccggcc

SEQ ID NO: 4019428 - RNA, 13 nt, Human T-lymphotropic virus 2
acuccugucuccc

SEQ ID NO: 4019429 - RNA, 15 nt, Human T-lymphotropic virus 2
acucgccuuccuaca

SEQ ID NO: 4019430 - RNA, 19 nt, Human T-lymphotropic virus 2
acucgcuuuuagcuagccu

SEQ ID NO: 4019431 - RNA, 21 nt, Human T-lymphotropic virus 2
acucuacacccccaacaucuc

SEQ ID NO: 4019432 - RNA, 18 nt, Human T-lymphotropic virus 2
acucucuuacaccuccca

SEQ ID NO: 4019433 - RNA, 13 nt, Human T-lymphotropic virus 2
acucugccuuaaa

SEQ ID NO: 4019434 - RNA, 15 nt, Human T-lymphotropic virus 2
acugaaaccacggcc

SEQ ID NO: 4019435 - RNA, 21 nt, Human T-lymphotropic virus 2
acugaccacgcauggccuucc

SEQ ID NO: 4019436 - RNA, 23 nt, Human T-lymphotropic virus 2
acugaccacgcauggccuuccaa

SEQ ID NO: 4019437 - RNA, 16 nt, Human T-lymphotropic virus 2
acugcagggcaagacc

SEQ ID NO: 4019438 - RNA, 13 nt, Human T-lymphotropic virus 2
acugcuccuccca

SEQ ID NO: 4019439 - RNA, 14 nt, Human T-lymphotropic virus 2
acugcuccucccaa

SEQ ID NO: 4019440 - RNA, 22 nt, Human T-lymphotropic virus 2
acugcugaugccuuucuucccu

SEQ ID NO: 4019441 - RNA, 16 nt, Human T-lymphotropic virus 2
acuguacccagccacg

SEQ ID NO: 4019442 - RNA, 19 nt, Human T-lymphotropic virus 2
acuguccuaaccuuccccu

SEQ ID NO: 4019443 - RNA, 13 nt, Human T-lymphotropic virus 2
acuuccagcagcu

SEQ ID NO: 4019444 - RNA, 19 nt, Human T-lymphotropic virus 2
acuuccugaggaacucccc

SEQ ID NO: 4019445 - RNA, 22 nt, Human T-lymphotropic virus 2
acuucgccuucaccauucccca

SEQ ID NO: 4019446 - RNA, 21 nt, Human T-lymphotropic virus 2
acuucuccccuaucacuccau

SEQ ID NO: 4019447 - RNA, 14 nt, Human T-lymphotropic virus 2
agaagcccuccaga

SEQ ID NO: 4019448 - RNA, 16 nt, Human T-lymphotropic virus 2
agacaauuaggagccu

SEQ ID NO: 4019449 - RNA, 23 nt, Human T-lymphotropic virus 2
agacaauuaggagccuuccucac

SEQ ID NO: 4019450 - RNA, 16 nt, Human T-lymphotropic virus 2
agaccaucuaccucca

SEQ ID NO: 4019451 - RNA, 22 nt, Human T-lymphotropic virus 2
agacgccgccgugccguuccaa

SEQ ID NO: 4019452 - RNA, 15 nt, Human T-lymphotropic virus 2
agacuauccuucaac

SEQ ID NO: 4019453 - RNA, 14 nt, Human T-lymphotropic virus 2
agacucgccucucc

SEQ ID NO: 4019454 - RNA, 22 nt, Human T-lymphotropic virus 2
agcaagggcuagggcuuccuga

SEQ ID NO: 4019455 - RNA, 15 nt, Human T-lymphotropic virus 2
agcaccaacucaccu

SEQ ID NO: 4019456 - RNA, 17 nt, Human T-lymphotropic virus 2
agcagcuuaacacacua

SEQ ID NO: 4019457 - RNA, 13 nt, Human T-lymphotropic virus 2
agcauucuaccca

SEQ ID NO: 4019458 - RNA, 13 nt, Human T-lymphotropic virus 2
agccaccaaugcc

SEQ ID NO: 4019459 - RNA, 17 nt, Human T-lymphotropic virus 2
agccacgccccccuccu

SEQ ID NO: 4019460 - RNA, 17 nt, Human T-lymphotropic virus 2
agcccauuucccaggau

SEQ ID NO: 4019461 - RNA, 16 nt, Human T-lymphotropic virus 2
agccuaggcccuccga

SEQ ID NO: 4019462 - RNA, 20 nt, Human T-lymphotropic virus 2
agccucccgagccagccacc

SEQ ID NO: 4019463 - RNA, 15 nt, Human T-lymphotropic virus 2
agcgcagcaagggcu

SEQ ID NO: 4019464 - RNA, 22 nt, Human T-lymphotropic virus 2
agcgcccccgccgccccaguuc

SEQ ID NO: 4019465 - RNA, 14 nt, Human T-lymphotropic virus 2
agcgccuccaggcc

SEQ ID NO: 4019466 - RNA, 23 nt, Human T-lymphotropic virus 2
agcgcugaaaaacaaggcucuga

SEQ ID NO: 4019467 - RNA, 17 nt, Human T-lymphotropic virus 2
agcuaacccuccaggca

SEQ ID NO: 4019468 - RNA, 17 nt, Human T-lymphotropic virus 2
aggaacuccccucaucc

SEQ ID NO: 4019469 - RNA, 19 nt, Human T-lymphotropic virus 2
aggaaggggaaccccuccu

SEQ ID NO: 4019470 - RNA, 19 nt, Human T-lymphotropic virus 2
aggaguuuuguaccuccua

SEQ ID NO: 4019471 - RNA, 15 nt, Human T-lymphotropic virus 2
aggcaggcccgcccu

SEQ ID NO: 4019472 - RNA, 15 nt, Human T-lymphotropic virus 2
ucgaacaccuucccc

SEQ ID NO: 4019473 - RNA, 20 nt, Human T-lymphotropic virus 2
ucgagcucggcugccccuua

SEQ ID NO: 4019474 - RNA, 19 nt, Human T-lymphotropic virus 2
ucgcucccguaccuccucc

SEQ ID NO: 4019475 - RNA, 16 nt, Human T-lymphotropic virus 2
ucuacaacauaacugc

SEQ ID NO: 4019476 - RNA, 21 nt, Human T-lymphotropic virus 2
ucucacauuaugggacaaauc

SEQ ID NO: 4019477 - RNA, 13 nt, Human T-lymphotropic virus 2
ucuccacccugcc

SEQ ID NO: 4019478 - RNA, 22 nt, Human T-lymphotropic virus 2
ucuccaggaaccacgacuccuc

SEQ ID NO: 4019479 - RNA, 19 nt, Human T-lymphotropic virus 2
ucucccaccuuacccaggc

SEQ ID NO: 4019480 - RNA, 20 nt, Human T-lymphotropic virus 2
ucucccagcuaacccuccag

SEQ ID NO: 4019481 - RNA, 14 nt, Human T-lymphotropic virus 2
ucuccccccauccc

SEQ ID NO: 4019482 - RNA, 16 nt, Human T-lymphotropic virus 2
ucucccgcugcuccuc

SEQ ID NO: 4019483 - RNA, 21 nt, Human T-lymphotropic virus 2
ucucccgcugcuccuccgcca

SEQ ID NO: 4019484 - RNA, 22 nt, Human T-lymphotropic virus 2
ucucccggcgcuuuugauccuu

SEQ ID NO: 4019485 - RNA, 14 nt, Human T-lymphotropic virus 2
ucuccucucagccc

SEQ ID NO: 4019486 - RNA, 16 nt, Human T-lymphotropic virus 2
ucuccuuccccagggc

SEQ ID NO: 4019487 - RNA, 16 nt, Human T-lymphotropic virus 2
ucuccuuggccucauc

SEQ ID NO: 4019488 - RNA, 15 nt, Human T-lymphotropic virus 2
ucucgcaccugcucg

SEQ ID NO: 4019489 - RNA, 21 nt, Human T-lymphotropic virus 2
ucucuaagugcggcuccucca

SEQ ID NO: 4019490 - RNA, 12 nt, Human T-lymphotropic virus 2
ucuuuccaccac

SEQ ID NO: 4019491 - RNA, 14 nt, Human T-lymphotropic virus 2
ucuuuccuucccuu

SEQ ID NO: 4019492 - RNA, 21 nt, Human T-lymphotropic virus 2
ugaacauguccuaacccccuc

SEQ ID NO: 4019493 - RNA, 19 nt, Human T-lymphotropic virus 2
ugaagccucuaccccuccc

SEQ ID NO: 4019494 - RNA, 13 nt, Human T-lymphotropic virus 2
ugaauuccuccau

SEQ ID NO: 4019495 - RNA, 19 nt, Human T-lymphotropic virus 2
ugaauuccuccauucucac

SEQ ID NO: 4019496 - RNA, 16 nt, Human T-lymphotropic virus 2
ugacaaagacaucucc

SEQ ID NO: 4019497 - RNA, 17 nt, Human T-lymphotropic virus 2
ugacaacggccuccccg

SEQ ID NO: 4019498 - RNA, 14 nt, Human T-lymphotropic virus 2
ugacacggcccccu

SEQ ID NO: 4019499 - RNA, 20 nt, Human T-lymphotropic virus 2
ugaccacgcauggccuucca

SEQ ID NO: 4019500 - RNA, 16 nt, Human T-lymphotropic virus 2
ugacccauccacaguc

SEQ ID NO: 4019501 - RNA, 17 nt, Human T-lymphotropic virus 2
ugacccauccacagucc

SEQ ID NO: 4019502 - RNA, 18 nt, Human T-lymphotropic virus 2
ugacccauccacaguccu

SEQ ID NO: 4019503 - RNA, 13 nt, Human T-lymphotropic virus 2
ugaccccucuugg

SEQ ID NO: 4019504 - RNA, 15 nt, Human T-lymphotropic virus 2
ugaccuuacagagca

SEQ ID NO: 4019505 - RNA, 17 nt, Human T-lymphotropic virus 2
ugagacgccuuccgugg

SEQ ID NO: 4019506 - RNA, 15 nt, Human T-lymphotropic virus 2
ugagggcucccugua

SEQ ID NO: 4019507 - RNA, 14 nt, Human T-lymphotropic virus 2
ugcaaucccuccag

SEQ ID NO: 4019508 - RNA, 14 nt, Human T-lymphotropic virus 2
ugcagacccuccgg

SEQ ID NO: 4019509 - RNA, 21 nt, Human T-lymphotropic virus 2
ugccauuacuaccacccucac

SEQ ID NO: 4019510 - RNA, 22 nt, Human T-lymphotropic virus 2
ugccauucaacaagcucuacaa

SEQ ID NO: 4019511 - RNA, 22 nt, Human T-lymphotropic virus 2
ugcccacaacucaaacccccuc

SEQ ID NO: 4019512 - RNA, 23 nt, Human T-lymphotropic virus 2
ugccccuacuugggcugccaagc

SEQ ID NO: 4019513 - RNA, 19 nt, Human T-lymphotropic virus 2
ugcccuccuggccaccugu

SEQ ID NO: 4019514 - RNA, 18 nt, Human T-lymphotropic virus 2
ugccugguguacaggacu

SEQ ID NO: 4019515 - RNA, 20 nt, Human T-lymphotropic virus 2
ugcgccgcucccgcuccuca

SEQ ID NO: 4019516 - RNA, 15 nt, Human T-lymphotropic virus 2
ugcggcuccuccaug

SEQ ID NO: 4019517 - RNA, 18 nt, Human T-lymphotropic virus 2
ugcucuuggcagccccca

SEQ ID NO: 4019518 - RNA, 18 nt, Human T-lymphotropic virus 2
ugcugccaagccauggcc

SEQ ID NO: 4019519 - RNA, 18 nt, Human T-lymphotropic virus 2
ugcuuucuccacccugcc

SEQ ID NO: 4019520 - RNA, 19 nt, Human T-lymphotropic virus 2
ugcuuucuccacccugcca

SEQ ID NO: 4019521 - RNA, 16 nt, Human T-lymphotropic virus 2
uggacagagccuccua

SEQ ID NO: 4019522 - RNA, 16 nt, Human T-lymphotropic virus 2
uggacuguccuuccac

SEQ ID NO: 4019523 - RNA, 14 nt, Human T-lymphotropic virus 2
uggauaugauccuu

SEQ ID NO: 4019524 - RNA, 15 nt, Human T-lymphotropic virus 2
uggaucucccuucca

SEQ ID NO: 4019525 - RNA, 16 nt, Human T-lymphotropic virus 2
uggcagcccccaguuc

SEQ ID NO: 4019526 - RNA, 18 nt, Human T-lymphotropic virus 2
uggccccuguauccuccg

SEQ ID NO: 4019527 - RNA, 22 nt, Human T-lymphotropic virus 2
uggcccuugacaacggccuccc

SEQ ID NO: 4019528 - RNA, 22 nt, Human T-lymphotropic virus 2
ugggcaaaccaacacccaguuc

SEQ ID NO: 4019529 - RNA, 14 nt, Human T-lymphotropic virus 2
ugguguacaggacu

SEQ ID NO: 4019530 - RNA, 13 nt, Human T-lymphotropic virus 2
uguaucacccuca

SEQ ID NO: 4019531 - RNA, 21 nt, Human T-lymphotropic virus 2
ugucagacucgccucucccug

SEQ ID NO: 4019532 - RNA, 16 nt, Human T-lymphotropic virus 2
ugucagcucuccucuc

SEQ ID NO: 4019533 - RNA, 16 nt, Human T-lymphotropic virus 2
uuaaacuucacuuccg

SEQ ID NO: 4019534 - RNA, 13 nt, Human T-lymphotropic virus 2
uuacccacuuccc

SEQ ID NO: 4019535 - RNA, 14 nt, Human T-lymphotropic virus 2
uuacccccugccca

SEQ ID NO: 4019536 - RNA, 12 nt, Human T-lymphotropic virus 2
uuagacacccac

SEQ ID NO: 4019537 - RNA, 15 nt, Human T-lymphotropic virus 2
uuagccagccccacc

SEQ ID NO: 4019538 - RNA, 19 nt, Human T-lymphotropic virus 2
uuaucccucgccuccccuc

SEQ ID NO: 4019539 - RNA, 15 nt, Human T-lymphotropic virus 2
uucaaacuccuccaa

SEQ ID NO: 4019540 - RNA, 12 nt, Human T-lymphotropic virus 2
uucacccaggaa

SEQ ID NO: 4019541 - RNA, 15 nt, Human T-lymphotropic virus 2
uucccucgcucccgu

SEQ ID NO: 4019542 - RNA, 19 nt, Human T-lymphotropic virus 2
uuccuacaaugacccuugc

SEQ ID NO: 4019543 - RNA, 19 nt, Human T-lymphotropic virus 2
uuccugaggaacuccccuc

SEQ ID NO: 4019544 - RNA, 15 nt, Human T-lymphotropic virus 2
uucgaaaccaaagcc

SEQ ID NO: 4019545 - RNA, 16 nt, Human T-lymphotropic virus 2
uugccaccccuacugc

SEQ ID NO: 4019546 - RNA, 23 nt, Human T-lymphotropic virus 2
uuggcuccacaccccccacccuc

SEQ ID NO: 4019547 - RNA, 18 nt, Human T-lymphotropic virus 2
uuguaucacccucacccc

SEQ ID NO: 4019548 - RNA, 13 nt, Human T-lymphotropic virus 2
uuguguacaggcc

SEQ ID NO: 4019549 - RNA, 22 nt, Human T-lymphotropic virus 2
uuucccacaucgaccauugucc

SEQ ID NO: 4019550 - RNA, 13 nt, Human T-lymphotropic virus 2
uuuccuucccuug

SEQ ID NO: 4019551 - RNA, 13 nt, Human T-lymphotropic virus 2
uuucuccacccug

SEQ ID NO: 4019552 - RNA, 22 nt, Human T-lymphotropic virus 2
uuugcguggauagauccagccu

SEQ ID NO: 4019553 - RNA, 21 nt, Human T-lymphotropic virus 2
cccccagggggcuaucaaccc

SEQ ID NO: 4019554 - RNA, 12 nt, Human T-lymphotropic virus 2
cccccuccccaa

SEQ ID NO: 4019555 - RNA, 19 nt, Human T-lymphotropic virus 2
cccccuuuuucccucgcuc

SEQ ID NO: 4019556 - RNA, 17 nt, Human T-lymphotropic virus 2
ccccuagcgcccccgcc

SEQ ID NO: 4019557 - RNA, 17 nt, Human T-lymphotropic virus 2
ccccugacgccccaagg

SEQ ID NO: 4019558 - RNA, 21 nt, Human T-lymphotropic virus 2
cccgauguccagcccuaacuc

SEQ ID NO: 4019559 - RNA, 13 nt, Human T-lymphotropic virus 2
cccgcugcuccuc

SEQ ID NO: 4019560 - RNA, 21 nt, Human T-lymphotropic virus 2
cccgggccgguaaagcuccac

SEQ ID NO: 4019561 - RNA, 17 nt, Human T-lymphotropic virus 2
cccgugaccccucuugg

SEQ ID NO: 4019562 - RNA, 17 nt, Human T-lymphotropic virus 2
cccguuauccuuuccuc

SEQ ID NO: 4019563 - RNA, 16 nt, Human T-lymphotropic virus 2
cccuaucuuacauccc

SEQ ID NO: 4019564 - RNA, 22 nt, Human T-lymphotropic virus 2
cccucaagguccuuaccccucc

SEQ ID NO: 4019565 - RNA, 17 nt, Human T-lymphotropic virus 2
cccucaccucuccuucc

SEQ ID NO: 4019566 - RNA, 20 nt, Human T-lymphotropic virus 2
cccuccuaguagaugccccu

SEQ ID NO: 4019567 - RNA, 16 nt, Human T-lymphotropic virus 2
cccucgccuccccucc

SEQ ID NO: 4019568 - RNA, 19 nt, Human T-lymphotropic virus 2
cccucgccuccccuccuuc

SEQ ID NO: 4019569 - RNA, 20 nt, Human T-lymphotropic virus 2
cccucucacgaaacacauuc

SEQ ID NO: 4019570 - RNA, 10 nt, Human T-lymphotropic virus 2
cccucucccg

SEQ ID NO: 4019571 - RNA, 19 nt, Human T-lymphotropic virus 2
cccugcccgcuccuccauc

SEQ ID NO: 4019572 - RNA, 14 nt, Human T-lymphotropic virus 2
cccugcccucucac

SEQ ID NO: 4019573 - RNA, 20 nt, Human T-lymphotropic virus 2
cccuggcuuggcuccacacc

SEQ ID NO: 4019574 - RNA, 23 nt, Human T-lymphotropic virus 2
cccuugcucgcuacaaugccccu

SEQ ID NO: 4019575 - RNA, 17 nt, Human T-lymphotropic virus 2
cccuuuuucccucgcuc

SEQ ID NO: 4019576 - RNA, 19 nt, Human T-lymphotropic virus 2
ccgagccagccacccaggg

SEQ ID NO: 4019577 - RNA, 15 nt, Human T-lymphotropic virus 2
ccgaugcacacucac

SEQ ID NO: 4019578 - RNA, 21 nt, Human T-lymphotropic virus 2
ccgcagccacaccaaccuccc

SEQ ID NO: 4019579 - RNA, 23 nt, Human T-lymphotropic virus 2
ccgcagccacaccaaccuccccg

SEQ ID NO: 4019580 - RNA, 20 nt, Human T-lymphotropic virus 2
ccgcauacacgggccccguc

SEQ ID NO: 4019581 - RNA, 19 nt, Human T-lymphotropic virus 2
ccgcucacauuccucccau

SEQ ID NO: 4019582 - RNA, 13 nt, Human T-lymphotropic virus 2
ccguccuccagga

SEQ ID NO: 4019583 - RNA, 12 nt, Human T-lymphotropic virus 2
ccgucucaggug

SEQ ID NO: 4019584 - RNA, 21 nt, Human T-lymphotropic virus 2
ccuaaccuaauuacuuacucu

SEQ ID NO: 4019585 - RNA, 23 nt, Human T-lymphotropic virus 2
ccuaauuacuuacucuggcuucc

SEQ ID NO: 4019586 - RNA, 21 nt, Human T-lymphotropic virus 2
ccuacuacuacuccuccgcca

SEQ ID NO: 4019587 - RNA, 20 nt, Human T-lymphotropic virus 2
ccuacuuuuauucagucuca

SEQ ID NO: 4019588 - RNA, 21 nt, Human T-lymphotropic virus 2
ccuacuuuuauucagucucac

SEQ ID NO: 4019589 - RNA, 21 nt, Human T-lymphotropic virus 2
ccucagaacccacucagccuc

SEQ ID NO: 4019590 - RNA, 14 nt, Human T-lymphotropic virus 2
ccuccaccaugucc

SEQ ID NO: 4019591 - RNA, 17 nt, Human T-lymphotropic virus 2
ccucccagacgacccca

SEQ ID NO: 4019592 - RNA, 12 nt, Human T-lymphotropic virus 2
ccuccccaagca

SEQ ID NO: 4019593 - RNA, 16 nt, Human T-lymphotropic virus 2
ccuccccccccuuccc

SEQ ID NO: 4019594 - RNA, 19 nt, Human T-lymphotropic virus 2
ccuccccgacccaauuucc

SEQ ID NO: 4019595 - RNA, 18 nt, Human T-lymphotropic virus 2
ccuccgccaaauccaggc

SEQ ID NO: 4019596 - RNA, 17 nt, Human T-lymphotropic virus 2
ccuccuaccacuccagc

SEQ ID NO: 4019597 - RNA, 22 nt, Human T-lymphotropic virus 2
ccuccuaguagaugccccugga

SEQ ID NO: 4019598 - RNA, 15 nt, Human T-lymphotropic virus 2
ccuccuggccaccug

SEQ ID NO: 4019599 - RNA, 23 nt, Human T-lymphotropic virus 2
ccuccuguuggaucucccuucca

SEQ ID NO: 4019600 - RNA, 18 nt, Human T-lymphotropic virus 2
ccucuaacccccgcucac

SEQ ID NO: 4019601 - RNA, 15 nt, Human T-lymphotropic virus 2
ccucuaccccuccca

SEQ ID NO: 4019602 - RNA, 13 nt, Human T-lymphotropic virus 2
ccucucaggucga

SEQ ID NO: 4019603 - RNA, 17 nt, Human T-lymphotropic virus 2
ccugcccgcuccuccau

SEQ ID NO: 4019604 - RNA, 12 nt, Human T-lymphotropic virus 2
ccuggccaccug

SEQ ID NO: 4019605 - RNA, 14 nt, Human T-lymphotropic virus 2
ccuggccaccuguc

SEQ ID NO: 4019606 - RNA, 14 nt, Human T-lymphotropic virus 2
ccuguauccagacu

SEQ ID NO: 4019607 - RNA, 18 nt, Human T-lymphotropic virus 2
ccuuaaacuucacuuccg

SEQ ID NO: 4019608 - RNA, 21 nt, Human T-lymphotropic virus 2
ccuuacgguuauaccccagac

SEQ ID NO: 4019609 - RNA, 22 nt, Human T-lymphotropic virus 2
ccuucaacaggacaucacuccc

SEQ ID NO: 4019610 - RNA, 24 nt, Human T-lymphotropic virus 2
ccuucaaugaauacacagacuccc

SEQ ID NO: 4019611 - RNA, 13 nt, Human T-lymphotropic virus 2
ccuucaccauucc

SEQ ID NO: 4019612 - RNA, 17 nt, Human T-lymphotropic virus 2
ccuuccaauuucccagg

SEQ ID NO: 4019613 - RNA, 14 nt, Human T-lymphotropic virus 2
ccuuccaccucagg

SEQ ID NO: 4019614 - RNA, 16 nt, Human T-lymphotropic virus 2
ccuucccccaccuccc

SEQ ID NO: 4019615 - RNA, 19 nt, Human T-lymphotropic virus 2
ccuucccccaccuccccaa

SEQ ID NO: 4019616 - RNA, 16 nt, Human T-lymphotropic virus 2
ccuuccuacaaugacc

SEQ ID NO: 4019617 - RNA, 23 nt, Human T-lymphotropic virus 2
ccuuccuacaaugacccuugcuc

SEQ ID NO: 4019618 - RNA, 22 nt, Human T-lymphotropic virus 2
ccuucgcaaacaccuacaaucc

SEQ ID NO: 4019619 - RNA, 20 nt, Human T-lymphotropic virus 2
ccuucuuucaaucaaugcga

SEQ ID NO: 4019620 - RNA, 19 nt, Human T-lymphotropic virus 2
cgaacaccuucccccaccu

SEQ ID NO: 4019621 - RNA, 23 nt, Human T-lymphotropic virus 2
cgaaccuggccuccguccccaaa

SEQ ID NO: 4019622 - RNA, 16 nt, Human T-lymphotropic virus 2
cgacaccuaucugccc

SEQ ID NO: 4019623 - RNA, 16 nt, Human T-lymphotropic virus 2
cgaccuuaauucccua

SEQ ID NO: 4019624 - RNA, 13 nt, Human T-lymphotropic virus 2
cgacuacaccccc

SEQ ID NO: 4019625 - RNA, 19 nt, Human T-lymphotropic virus 2
cgacuagccucccgagcca

SEQ ID NO: 4019626 - RNA, 16 nt, Human T-lymphotropic virus 2
cgacuuccugaggaac

SEQ ID NO: 4019627 - RNA, 18 nt, Human T-lymphotropic virus 2
cgagaagcccuccagaca

SEQ ID NO: 4019628 - RNA, 14 nt, Human T-lymphotropic virus 2
cgaucccgacccca

SEQ ID NO: 4019629 - RNA, 13 nt, Human T-lymphotropic virus 2
cgcaaggacaguu

SEQ ID NO: 4019630 - RNA, 16 nt, Human T-lymphotropic virus 2
cgcauacacgggcccc

SEQ ID NO: 4019631 - RNA, 13 nt, Human T-lymphotropic virus 2
cgccacaccaagg

SEQ ID NO: 4019632 - RNA, 22 nt, Human T-lymphotropic virus 2
cgccaccuccccccccuucccc

SEQ ID NO: 4019633 - RNA, 17 nt, Human T-lymphotropic virus 2
cgccauuggggccuucc

SEQ ID NO: 4019634 - RNA, 21 nt, Human T-lymphotropic virus 2
cgccccaaggccuccacggcc

SEQ ID NO: 4019635 - RNA, 11 nt, Human T-lymphotropic virus 2
cgccgcccucu

SEQ ID NO: 4019636 - RNA, 13 nt, Human T-lymphotropic virus 2
cgccgcccucuug

SEQ ID NO: 4019637 - RNA, 14 nt, Human T-lymphotropic virus 2
cgccgcccucuugg

SEQ ID NO: 4019638 - RNA, 15 nt, Human T-lymphotropic virus 2
cgccgcccucuuggc

SEQ ID NO: 4019639 - RNA, 17 nt, Human T-lymphotropic virus 2
cgccgcucccgcuccuc

SEQ ID NO: 4019640 - RNA, 23 nt, Human T-lymphotropic virus 2
cgccuacaucgacaugcccuccu

SEQ ID NO: 4019641 - RNA, 18 nt, Human T-lymphotropic virus 2
cgcucccgcuccucacgc

SEQ ID NO: 4019642 - RNA, 22 nt, Human T-lymphotropic virus 2
cgcugguggaguaacaggcucc

SEQ ID NO: 4019643 - RNA, 19 nt, Human T-lymphotropic virus 2
cggcccuuaccccaaagca

SEQ ID NO: 4019644 - RNA, 17 nt, Human T-lymphotropic virus 2
cggccucggcaccuccu

SEQ ID NO: 4019645 - RNA, 14 nt, Human T-lymphotropic virus 2
cguccucaacccca

SEQ ID NO: 4019646 - RNA, 15 nt, Human T-lymphotropic virus 2
cgugagggcucccug

SEQ ID NO: 4019647 - RNA, 16 nt, Human T-lymphotropic virus 2
aaaacacaacaaaccc

SEQ ID NO: 4019648 - RNA, 17 nt, Human T-lymphotropic virus 2
aaaaucacacauaauua

SEQ ID NO: 4019649 - RNA, 15 nt, Human T-lymphotropic virus 2
aaagaaagaaaccag

SEQ ID NO: 4019650 - RNA, 12 nt, Human T-lymphotropic virus 2
aacaccuucccc

SEQ ID NO: 4019651 - RNA, 13 nt, Human T-lymphotropic virus 2
aacagcucuccag

SEQ ID NO: 4019652 - RNA, 15 nt, Human T-lymphotropic virus 2
aacaggcucccuauc

SEQ ID NO: 4019653 - RNA, 11 nt, Human T-lymphotropic virus 2
aacccccucca

SEQ ID NO: 4019654 - RNA, 20 nt, Human T-lymphotropic virus 2
aaccucgaccuuaauucccu

SEQ ID NO: 4019655 - RNA, 18 nt, Human T-lymphotropic virus 2
aacuccauuauccucccc

SEQ ID NO: 4019656 - RNA, 14 nt, Human T-lymphotropic virus 2
aacucucccagcua

SEQ ID NO: 4019657 - RNA, 18 nt, Human T-lymphotropic virus 2
aagagccaccaaugccau

SEQ ID NO: 4019658 - RNA, 21 nt, Human T-lymphotropic virus 2
aagcaagucacaaaacccauc

SEQ ID NO: 4019659 - RNA, 15 nt, Human T-lymphotropic virus 2
aagccauggccuucc

SEQ ID NO: 4019660 - RNA, 18 nt, Human T-lymphotropic virus 2
aagccauggccuucccuu

SEQ ID NO: 4019661 - RNA, 23 nt, Human T-lymphotropic virus 2
aagcgcaaggacaguucaggagg

SEQ ID NO: 4019662 - RNA, 13 nt, Human T-lymphotropic virus 2
aaggcccuggagg

SEQ ID NO: 4019663 - RNA, 15 nt, Human T-lymphotropic virus 2
aagguaagucuccuc

SEQ ID NO: 4019664 - RNA, 14 nt, Human T-lymphotropic virus 2
aagucuccucucag

SEQ ID NO: 4019665 - RNA, 20 nt, Human T-lymphotropic virus 2
aauacuccuccuuccauaac

SEQ ID NO: 4019666 - RNA, 20 nt, Human T-lymphotropic virus 2
aaugaccuggucuccaaggc

SEQ ID NO: 4019667 - RNA, 13 nt, Human T-lymphotropic virus 2
acaaaaccaaggu

SEQ ID NO: 4019668 - RNA, 15 nt, Human T-lymphotropic virus 2
acaaaaccaaggucc

SEQ ID NO: 4019669 - RNA, 13 nt, Human T-lymphotropic virus 2
acaaaccuccucc

SEQ ID NO: 4019670 - RNA, 20 nt, Human T-lymphotropic virus 2
acaaauggaccaucauugga

SEQ ID NO: 4019671 - RNA, 14 nt, Human T-lymphotropic virus 2
acaagcucuacaac

SEQ ID NO: 4019672 - RNA, 23 nt, Human T-lymphotropic virus 2
acaaucccaaguaaaggcucuga

SEQ ID NO: 4019673 - RNA, 23 nt, Human T-lymphotropic virus 2
acacauaauuacaauccugucuc

SEQ ID NO: 4019674 - RNA, 22 nt, Human T-lymphotropic virus 2
acacauuuuccacuagcccagc

SEQ ID NO: 4019675 - RNA, 19 nt, Human T-lymphotropic virus 2
acaccucagccuacccaag

SEQ ID NO: 4019676 - RNA, 14 nt, Human T-lymphotropic virus 2
acagagccuccuau

SEQ ID NO: 4019677 - RNA, 16 nt, Human T-lymphotropic virus 2
acaggucaucuccccu

SEQ ID NO: 4019678 - RNA, 22 nt, Human T-lymphotropic virus 2
acagucauaguccucccggagg

SEQ ID NO: 4019679 - RNA, 13 nt, Human T-lymphotropic virus 2
accaacacccagu

SEQ ID NO: 4019680 - RNA, 17 nt, Human T-lymphotropic virus 2
accaacaucccugucuc

SEQ ID NO: 4019681 - RNA, 13 nt, Human T-lymphotropic virus 2
accacccucaccu

SEQ ID NO: 4019682 - RNA, 14 nt, Human T-lymphotropic virus 2
accagcucaggccu

SEQ ID NO: 4019683 - RNA, 17 nt, Human T-lymphotropic virus 2
accaucuaccuccacca

SEQ ID NO: 4019684 - RNA, 13 nt, Human T-lymphotropic virus 2
acccacucagccu

SEQ ID NO: 4019685 - RNA, 15 nt, Human T-lymphotropic virus 2
acccacucagccucc

SEQ ID NO: 4019686 - RNA, 17 nt, Human T-lymphotropic virus 2
acccaguucaaacuccu

SEQ ID NO: 4019687 - RNA, 18 nt, Human T-lymphotropic virus 2
acccauuccugaagccuc

SEQ ID NO: 4019688 - RNA, 18 nt, Human T-lymphotropic virus 2
accccagacacucgugcc

SEQ ID NO: 4019689 - RNA, 21 nt, Human T-lymphotropic virus 2
accccaugaggaaaauguuuc

SEQ ID NO: 4019690 - RNA, 15 nt, Human T-lymphotropic virus 2
acccccugcccauaa

SEQ ID NO: 4019691 - RNA, 23 nt, Human T-lymphotropic virus 2
accccuccuguuggaucucccuu

SEQ ID NO: 4019692 - RNA, 13 nt, Human T-lymphotropic virus 2
acccgccuacauc

SEQ ID NO: 4019693 - RNA, 19 nt, Human T-lymphotropic virus 2
acccuccaggcacugacca

SEQ ID NO: 4019694 - RNA, 20 nt, Human T-lymphotropic virus 2
acccuccaggcggccuugcc

SEQ ID NO: 4019695 - RNA, 18 nt, Human T-lymphotropic virus 2
acccucggggaucagcuc

SEQ ID NO: 4019696 - RNA, 23 nt, Human T-lymphotropic virus 2
acccucggggaucagcuccccuc

SEQ ID NO: 4019697 - RNA, 15 nt, Human T-lymphotropic virus 2
acccuucccuuggac

SEQ ID NO: 4019698 - RNA, 15 nt, Human T-lymphotropic virus 2
acccuucuccaggaa

SEQ ID NO: 4019699 - RNA, 14 nt, Human T-lymphotropic virus 2
accuacauucccuc

SEQ ID NO: 4019700 - RNA, 16 nt, Human T-lymphotropic virus 2
accucaacgccgcccu

SEQ ID NO: 4019701 - RNA, 22 nt, Human T-lymphotropic virus 2
accucaacgccgcccucuuggc

SEQ ID NO: 4019702 - RNA, 11 nt, Human T-lymphotropic virus 2
accucagccua

SEQ ID NO: 4019703 - RNA, 19 nt, Human T-lymphotropic virus 2
accucuccuuggccucauc

SEQ ID NO: 4019704 - RNA, 15 nt, Human T-lymphotropic virus 2
accugggaccccauc

SEQ ID NO: 4019705 - RNA, 16 nt, Human T-lymphotropic virus 2
accuuaucccucgccu

SEQ ID NO: 4019706 - RNA, 19 nt, Human T-lymphotropic virus 2
accuucccccaccucccca

SEQ ID NO: 4019707 - RNA, 11 nt, Human T-lymphotropic virus 2
accuuggcagc

SEQ ID NO: 4019708 - RNA, 21 nt, Human T-lymphotropic virus 2
acgacacccugauccuaggcg

SEQ ID NO: 4019709 - RNA, 16 nt, Human T-lymphotropic virus 2
acgccgcccucuuggc

SEQ ID NO: 4019710 - RNA, 12 nt, Human T-lymphotropic virus 2
acggccuccccg

SEQ ID NO: 4019711 - RNA, 21 nt, Human T-lymphotropic virus 2
acuacacccccccugcccuaa

SEQ ID NO: 4019712 - RNA, 22 nt, Human T-lymphotropic virus 2
acuacugaggaaaaaaacuccu

SEQ ID NO: 4019713 - RNA, 13 nt, Human T-lymphotropic virus 2
acucaccugggac

SEQ ID NO: 4019714 - RNA, 13 nt, Human T-lymphotropic virus 2
acucaccuugggg

SEQ ID NO: 4019715 - RNA, 20 nt, Human T-lymphotropic virus 2
acucauguauccguccucca

SEQ ID NO: 4019716 - RNA, 11 nt, Human T-lymphotropic virus 2
acuccagcccc

SEQ ID NO: 4019717 - RNA, 20 nt, Human T-lymphotropic virus 2
acuccaugcguuacaugcca

SEQ ID NO: 4019718 - RNA, 17 nt, Human T-lymphotropic virus 2
acuccccugcccucuca

SEQ ID NO: 4019719 - RNA, 12 nt, Human T-lymphotropic virus 2
acucccuuaucu

SEQ ID NO: 4019720 - RNA, 21 nt, Human T-lymphotropic virus 2
acuccgaccuugaacaugucc

SEQ ID NO: 4019721 - RNA, 17 nt, Human T-lymphotropic virus 2
acuccuccgccaccucc

SEQ ID NO: 4019722 - RNA, 16 nt, Human T-lymphotropic virus 2
acugcaacaacuccau

SEQ ID NO: 4019723 - RNA, 13 nt, Human T-lymphotropic virus 2
acuguccuaaccu

SEQ ID NO: 4019724 - RNA, 13 nt, Human T-lymphotropic virus 2
acuucucccccau

SEQ ID NO: 4019725 - RNA, 20 nt, Human T-lymphotropic virus 2
acuugacacaggagccgacc

SEQ ID NO: 4019726 - RNA, 12 nt, Human T-lymphotropic virus 2
agacaaugccau

SEQ ID NO: 4019727 - RNA, 16 nt, Human T-lymphotropic virus 2
agaccaccaacaccau

SEQ ID NO: 4019728 - RNA, 21 nt, Human T-lymphotropic virus 2
agacucaccuuggggauccau

SEQ ID NO: 4019729 - RNA, 13 nt, Human T-lymphotropic virus 2
agacucugccuua

SEQ ID NO: 4019730 - RNA, 16 nt, Human T-lymphotropic virus 2
agauccagccucucau

SEQ ID NO: 4019731 - RNA, 21 nt, Human T-lymphotropic virus 2
agcaggaggucagcuccucug

SEQ ID NO: 4019732 - RNA, 15 nt, Human T-lymphotropic virus 2
agccacaccaaccuc

SEQ ID NO: 4019733 - RNA, 17 nt, Human T-lymphotropic virus 2
agccaccaaugccauua

SEQ ID NO: 4019734 - RNA, 15 nt, Human T-lymphotropic virus 2
agccccacccucuuc

SEQ ID NO: 4019735 - RNA, 21 nt, Human T-lymphotropic virus 2
agccuaccgacagccuuaccc

SEQ ID NO: 4019736 - RNA, 15 nt, Human T-lymphotropic virus 2
agccuuccaucccuc

SEQ ID NO: 4019737 - RNA, 20 nt, Human T-lymphotropic virus 2
agccuuccaucccuccuauc

SEQ ID NO: 4019738 - RNA, 14 nt, Human T-lymphotropic virus 2
agccuuccucacca

SEQ ID NO: 4019739 - RNA, 13 nt, Human T-lymphotropic virus 2
agcgccuccaggc

SEQ ID NO: 4019740 - RNA, 22 nt, Human T-lymphotropic virus 2
agcgccuuaacguggcccuuga

SEQ ID NO: 4019741 - RNA, 15 nt, Human T-lymphotropic virus 2
agcuaacccuccagg

SEQ ID NO: 4019742 - RNA, 12 nt, Human T-lymphotropic virus 2
agcucuccucuc

SEQ ID NO: 4019743 - RNA, 14 nt, Human T-lymphotropic virus 2
agcucuccucucca

SEQ ID NO: 4019744 - RNA, 20 nt, Human T-lymphotropic virus 2
agcucugccaaucuuuccac

SEQ ID NO: 4019745 - RNA, 19 nt, Human T-lymphotropic virus 2
agcugcaugcccaagacca

SEQ ID NO: 4019746 - RNA, 20 nt, Human T-lymphotropic virus 2
aggaaggggaaccccuccug

SEQ ID NO: 4019747 - RNA, 21 nt, Human T-lymphotropic virus 2
agguccuuaccccucccacca

SEQ ID NO: 4019748 - RNA, 21 nt, Human T-lymphotropic virus 2
agucgggacuguacccagcca

SEQ ID NO: 4019749 - RNA, 21 nt, Human T-lymphotropic virus 2
agucuccccuagcgcccccgc

SEQ ID NO: 4019750 - RNA, 22 nt, Human T-lymphotropic virus 2
agucucuuuuggcgccacacca

SEQ ID NO: 4019751 - RNA, 14 nt, Human T-lymphotropic virus 2
agugucccuucgac

SEQ ID NO: 4019752 - RNA, 19 nt, Human T-lymphotropic virus 2
auaacugcaacaacuccau

SEQ ID NO: 4019753 - RNA, 19 nt, Human T-lymphotropic virus 2
auacccaaagcccccaggg

SEQ ID NO: 4019754 - RNA, 13 nt, Human T-lymphotropic virus 2
auagaccucaccc

SEQ ID NO: 4019755 - RNA, 18 nt, Human T-lymphotropic virus 2
aucaaauaccuacauucc

SEQ ID NO: 4019756 - RNA, 14 nt, Human T-lymphotropic virus 2
aucaagcaggaggu

SEQ ID NO: 4019757 - RNA, 14 nt, Human T-lymphotropic virus 2
auccaggcccuucc

SEQ ID NO: 4019758 - RNA, 17 nt, Human T-lymphotropic virus 2
auccaggcccuuccaca

SEQ ID NO: 4019759 - RNA, 18 nt, Human T-lymphotropic virus 2
aucccaacccuucccuug

SEQ ID NO: 4019760 - RNA, 13 nt, Human T-lymphotropic virus 2
aucccucgccucc

SEQ ID NO: 4019761 - RNA, 14 nt, Human T-lymphotropic virus 2
auccguccuccagg

SEQ ID NO: 4019762 - RNA, 20 nt, Human T-lymphotropic virus 2
auccugucuccucucagccc

SEQ ID NO: 4019763 - RNA, 16 nt, Human T-lymphotropic virus 2
auccuucgcaaacacc

SEQ ID NO: 4019764 - RNA, 14 nt, Human T-lymphotropic virus 2
auccuucucacugg

SEQ ID NO: 4019765 - RNA, 22 nt, Human T-lymphotropic virus 2
auccuuuaugguucaucaccuc

SEQ ID NO: 4019766 - RNA, 15 nt, Human T-lymphotropic virus 2
aucgacaugcccucc

SEQ ID NO: 4019767 - RNA, 19 nt, Human T-lymphotropic virus 2
aucucccaccuuacccagg

SEQ ID NO: 4019768 - RNA, 12 nt, Human T-lymphotropic virus 2
aucucccuucca

SEQ ID NO: 4019769 - RNA, 22 nt, Human T-lymphotropic virus 2
augacauacuuuuagccagccc

SEQ ID NO: 4019770 - RNA, 19 nt, Human T-lymphotropic virus 2
augccaaaaaaucuuacaa

SEQ ID NO: 4019771 - RNA, 13 nt, Human T-lymphotropic virus 2
augccauucacaa

SEQ ID NO: 4019772 - RNA, 14 nt, Human T-lymphotropic virus 2
augcccuccuggcc

SEQ ID NO: 4019773 - RNA, 19 nt, Human T-lymphotropic virus 2
auggccacuuauaccccau

SEQ ID NO: 4019774 - RNA, 19 nt, Human T-lymphotropic virus 2
auguauccguccuccagga

SEQ ID NO: 4019775 - RNA, 20 nt, Human T-lymphotropic virus 2
augucagacucgccucuccc

SEQ ID NO: 4019776 - RNA, 20 nt, Human T-lymphotropic virus 2
auuacaauccugucuccucu

SEQ ID NO: 4019777 - RNA, 14 nt, Human T-lymphotropic virus 2
auuagaccuccuau

SEQ ID NO: 4019778 - RNA, 13 nt, Human T-lymphotropic virus 2
auucagucucaca

SEQ ID NO: 4019779 - RNA, 11 nt, Human T-lymphotropic virus 2
auuccucccau

SEQ ID NO: 4019780 - RNA, 16 nt, Human T-lymphotropic virus 2
auucgaaaccaaagcc

SEQ ID NO: 4019781 - RNA, 19 nt, Human T-lymphotropic virus 2
auugcaaucccuccaggaa

SEQ ID NO: 4019782 - RNA, 16 nt, Human T-lymphotropic virus 2
auugcuauaggcaggc

SEQ ID NO: 4019783 - RNA, 12 nt, Human T-lymphotropic virus 2
auugucuucccg

SEQ ID NO: 4019784 - RNA, 23 nt, Human T-lymphotropic virus 2
auuucacccaggaagucagccaa

SEQ ID NO: 4019785 - RNA, 20 nt, Human T-lymphotropic virus 2
auuuccggcccuuaccccaa

SEQ ID NO: 4019786 - RNA, 16 nt, Human T-lymphotropic virus 2
auuuucacccucuccc

SEQ ID NO: 4019787 - RNA, 14 nt, Human T-lymphotropic virus 2
caaacuccuccaaa

SEQ ID NO: 4019788 - RNA, 17 nt, Human T-lymphotropic virus 2
caaagacaucucccacc

SEQ ID NO: 4019789 - RNA, 19 nt, Human T-lymphotropic virus 2
caaaucccccuccccaagc

SEQ ID NO: 4019790 - RNA, 15 nt, Human T-lymphotropic virus 2
caacaaaccccaggc

SEQ ID NO: 4019791 - RNA, 13 nt, Human T-lymphotropic virus 2
caacaaaccuccu

SEQ ID NO: 4019792 - RNA, 14 nt, Human T-lymphotropic virus 2
caacaaaccuccuc

SEQ ID NO: 4019793 - RNA, 15 nt, Human T-lymphotropic virus 2
caacaaagaaugcca

SEQ ID NO: 4019794 - RNA, 14 nt, Human T-lymphotropic virus 2
caacaacucuccca

SEQ ID NO: 4019795 - RNA, 14 nt, Human T-lymphotropic virus 2
caacaaugccaggg

SEQ ID NO: 4019796 - RNA, 15 nt, Human T-lymphotropic virus 2
caacccuucccuugg

SEQ ID NO: 4019797 - RNA, 17 nt, Human T-lymphotropic virus 2
caacuccaugcguuaca

SEQ ID NO: 4019798 - RNA, 19 nt, Human T-lymphotropic virus 2
caacugcugaugccuuucu

SEQ ID NO: 4019799 - RNA, 22 nt, Human T-lymphotropic virus 2
caagacgccgccgugccguucc

SEQ ID NO: 4019800 - RNA, 22 nt, Human T-lymphotropic virus 2
caagagcuuguaucacccucac

SEQ ID NO: 4019801 - RNA, 18 nt, Human T-lymphotropic virus 2
caagcgcuacuugacaca

SEQ ID NO: 4019802 - RNA, 16 nt, Human T-lymphotropic virus 2
caagguaagucuccuc

SEQ ID NO: 4019803 - RNA, 23 nt, Human T-lymphotropic virus 2
caagguaagucuccucucagguc

SEQ ID NO: 4019804 - RNA, 17 nt, Human T-lymphotropic virus 2
caauacuccuccuucca

SEQ ID NO: 4019805 - RNA, 22 nt, Human T-lymphotropic virus 2
caauagccacuccaaacaccau

SEQ ID NO: 4019806 - RNA, 20 nt, Human T-lymphotropic virus 2
caaucccuauauucugcccu

SEQ ID NO: 4019807 - RNA, 19 nt, Human T-lymphotropic virus 2
caaugcgaaagcacacccc

SEQ ID NO: 4019808 - RNA, 21 nt, Human T-lymphotropic virus 2
caauggcgacuagccucccga

SEQ ID NO: 4019809 - RNA, 22 nt, Human T-lymphotropic virus 2
cacaccaagggaagccaagucc

SEQ ID NO: 4019810 - RNA, 18 nt, Human T-lymphotropic virus 2
cacaccccccacccuccg

SEQ ID NO: 4019811 - RNA, 16 nt, Human T-lymphotropic virus 2
cggcacuuccgcccau

SEQ ID NO: 4019812 - RNA, 18 nt, Human T-lymphotropic virus 2
cggccucggcaccuccug

SEQ ID NO: 4019813 - RNA, 18 nt, Human T-lymphotropic virus 2
cgggacuguacccagcca

SEQ ID NO: 4019814 - RNA, 21 nt, Human T-lymphotropic virus 2
cgggccgguaaagcuccacga

SEQ ID NO: 4019815 - RNA, 17 nt, Human T-lymphotropic virus 2
cggggaucagcuccccu

SEQ ID NO: 4019816 - RNA, 12 nt, Human T-lymphotropic virus 2
cguaccuccucc

SEQ ID NO: 4019817 - RNA, 15 nt, Human T-lymphotropic virus 2
cguaccuccuccggc

SEQ ID NO: 4019818 - RNA, 20 nt, Human T-lymphotropic virus 2
cguggauagauccagccucu

SEQ ID NO: 4019819 - RNA, 22 nt, Human T-lymphotropic virus 2
cuaacccccuccacguccugga

SEQ ID NO: 4019820 - RNA, 19 nt, Human T-lymphotropic virus 2
cuaagugcggcuccuccau

SEQ ID NO: 4019821 - RNA, 18 nt, Human T-lymphotropic virus 2
cuacaacauaacugccgu

SEQ ID NO: 4019822 - RNA, 21 nt, Human T-lymphotropic virus 2
cuacaaugacccuugcucgcu

SEQ ID NO: 4019823 - RNA, 15 nt, Human T-lymphotropic virus 2
cuacaccaccugggg

SEQ ID NO: 4019824 - RNA, 16 nt, Human T-lymphotropic virus 2
cuacaccaccugggga

SEQ ID NO: 4019825 - RNA, 13 nt, Human T-lymphotropic virus 2
cuaccacuccagc

SEQ ID NO: 4019826 - RNA, 15 nt, Human T-lymphotropic virus 2
cuacuccuccgccac

SEQ ID NO: 4019827 - RNA, 18 nt, Human T-lymphotropic virus 2
cuacucucucaucagcuu

SEQ ID NO: 4019828 - RNA, 14 nt, Human T-lymphotropic virus 2
cuagacucugccuu

SEQ ID NO: 4019829 - RNA, 13 nt, Human T-lymphotropic virus 2
cuauaccucccag

SEQ ID NO: 4019830 - RNA, 14 nt, Human T-lymphotropic virus 2
cuauguuccacccg

SEQ ID NO: 4019831 - RNA, 19 nt, Human T-lymphotropic virus 2
cucaacgccgcccucuugg

SEQ ID NO: 4019832 - RNA, 17 nt, Human T-lymphotropic virus 2
cucaaggacccucaagg

SEQ ID NO: 4019833 - RNA, 17 nt, Human T-lymphotropic virus 2
cucacacauuuuccacu

SEQ ID NO: 4019834 - RNA, 17 nt, Human T-lymphotropic virus 2
cucaccucuccuucccc

SEQ ID NO: 4019835 - RNA, 21 nt, Human T-lymphotropic virus 2
cucacgaaacacauuccgcac

SEQ ID NO: 4019836 - RNA, 21 nt, Human T-lymphotropic virus 2
cucacgauugguaucuccucc

SEQ ID NO: 4019837 - RNA, 13 nt, Human T-lymphotropic virus 2
cucagccuccacc

SEQ ID NO: 4019838 - RNA, 15 nt, Human T-lymphotropic virus 2
cuccacccugccagg

SEQ ID NO: 4019839 - RNA, 17 nt, Human T-lymphotropic virus 2
cuccacccugccaggca

SEQ ID NO: 4019840 - RNA, 15 nt, Human T-lymphotropic virus 2
cuccacuaccaccca

SEQ ID NO: 4019841 - RNA, 21 nt, Human T-lymphotropic virus 2
cuccaggcacugaccacgcau

SEQ ID NO: 4019842 - RNA, 17 nt, Human T-lymphotropic virus 2
cuccaggcggccuugcc

SEQ ID NO: 4019843 - RNA, 18 nt, Human T-lymphotropic virus 2
cucccaaaccaccuccca

SEQ ID NO: 4019844 - RNA, 18 nt, Human T-lymphotropic virus 2
cucccagacgaccccagc

SEQ ID NO: 4019845 - RNA, 21 nt, Human T-lymphotropic virus 2
cucccagacgaccccagcccc

SEQ ID NO: 4019846 - RNA, 16 nt, Human T-lymphotropic virus 2
cuccccucaaaaggca

SEQ ID NO: 4019847 - RNA, 17 nt, Human T-lymphotropic virus 2
cucccgagccagccacc

SEQ ID NO: 4019848 - RNA, 20 nt, Human T-lymphotropic virus 2
cucccggccucggcaccucc

SEQ ID NO: 4019849 - RNA, 14 nt, Human T-lymphotropic virus 2
cucccuuccaccuc

SEQ ID NO: 4019850 - RNA, 12 nt, Human T-lymphotropic virus 2
cuccgccaccuc

SEQ ID NO: 4019851 - RNA, 15 nt, Human T-lymphotropic virus 2
cuccuaccacuccag

SEQ ID NO: 4019852 - RNA, 21 nt, Human T-lymphotropic virus 2
cuccuagggaaaccacuccac

SEQ ID NO: 4019853 - RNA, 23 nt, Human T-lymphotropic virus 2
cuccuccaucccaacccuucccu

SEQ ID NO: 4019854 - RNA, 14 nt, Human T-lymphotropic virus 2
cuccuccgccaccu

SEQ ID NO: 4019855 - RNA, 15 nt, Human T-lymphotropic virus 2
cuccuccgccaccuc

SEQ ID NO: 4019856 - RNA, 12 nt, Human T-lymphotropic virus 2
cuccucucaggu

SEQ ID NO: 4019857 - RNA, 16 nt, Human T-lymphotropic virus 2
cuccucugcucuuggc

SEQ ID NO: 4019858 - RNA, 15 nt, Human T-lymphotropic virus 2
cuccugucuccccca

SEQ ID NO: 4019859 - RNA, 21 nt, Human T-lymphotropic virus 2
cuccuuccauaaccuucaccu

SEQ ID NO: 4019860 - RNA, 22 nt, Human T-lymphotropic virus 2
cuccuuccccagggccccccga

SEQ ID NO: 4019861 - RNA, 22 nt, Human T-lymphotropic virus 2
cucgaacaccuucccccaccuc

SEQ ID NO: 4019862 - RNA, 12 nt, Human T-lymphotropic virus 2
cucggcaccucc

SEQ ID NO: 4019863 - RNA, 19 nt, Human T-lymphotropic virus 2
cucggcugccccuuaggua

SEQ ID NO: 4019864 - RNA, 18 nt, Human T-lymphotropic virus 2
cucguaguuuccuuacac

SEQ ID NO: 4019865 - RNA, 22 nt, Human T-lymphotropic virus 2
cucgucauauuguuuggccccu

SEQ ID NO: 4019866 - RNA, 19 nt, Human T-lymphotropic virus 2
cucuaaaggaacacccauc

SEQ ID NO: 4019867 - RNA, 15 nt, Human T-lymphotropic virus 2
cucuacuccuccucg

SEQ ID NO: 4019868 - RNA, 20 nt, Human T-lymphotropic virus 2
cucucccagcuaacccucca

SEQ ID NO: 4019869 - RNA, 16 nt, Human T-lymphotropic virus 2
cucucuuacaccuccc

SEQ ID NO: 4019870 - RNA, 14 nt, Human T-lymphotropic virus 2
cucuuggcagcccc

SEQ ID NO: 4019871 - RNA, 20 nt, Human T-lymphotropic virus 2
cugaaaaacaaggcucugac

SEQ ID NO: 4019872 - RNA, 14 nt, Human T-lymphotropic virus 2
cugaaccucuccgg

SEQ ID NO: 4019873 - RNA, 22 nt, Human T-lymphotropic virus 2
cugaagccucuaccccucccaa

SEQ ID NO: 4019874 - RNA, 19 nt, Human T-lymphotropic virus 2
cugacgauuacccccugcc

SEQ ID NO: 4019875 - RNA, 20 nt, Human T-lymphotropic virus 2
cugagcgccuccaggccuua

SEQ ID NO: 4019876 - RNA, 15 nt, Human T-lymphotropic virus 2
cugaggaacuccccu

SEQ ID NO: 4019877 - RNA, 15 nt, Human T-lymphotropic virus 2
cugcacguggaaccu

SEQ ID NO: 4019878 - RNA, 22 nt, Human T-lymphotropic virus 2
cugcacguggaaccucgaccuu

SEQ ID NO: 4019879 - RNA, 13 nt, Human T-lymphotropic virus 2
cugccaccccaga

SEQ ID NO: 4019880 - RNA, 15 nt, Human T-lymphotropic virus 2
cugcccgcuccucca

SEQ ID NO: 4019881 - RNA, 18 nt, Human T-lymphotropic virus 2
cugccucuuagacaccca

SEQ ID NO: 4019882 - RNA, 12 nt, Human T-lymphotropic virus 2
cugcuccuccca

SEQ ID NO: 4019883 - RNA, 20 nt, Human T-lymphotropic virus 2
cugcuuucuccacccugcca

SEQ ID NO: 4019884 - RNA, 14 nt, Human T-lymphotropic virus 2
cuggccuccguccc

SEQ ID NO: 4019885 - RNA, 19 nt, Human T-lymphotropic virus 2
cuggcugcuuucuccaccc

SEQ ID NO: 4019886 - RNA, 15 nt, Human T-lymphotropic virus 2
cuggucuccaaggcc

SEQ ID NO: 4019887 - RNA, 20 nt, Human T-lymphotropic virus 2
cuggucuccaaggcccugga

SEQ ID NO: 4019888 - RNA, 20 nt, Human T-lymphotropic virus 2
cugguggaguaacaggcucc

SEQ ID NO: 4019889 - RNA, 12 nt, Human T-lymphotropic virus 2
cugucuccucuc

SEQ ID NO: 4019890 - RNA, 13 nt, Human T-lymphotropic virus 2
cugucuccucuca

SEQ ID NO: 4019891 - RNA, 14 nt, Human T-lymphotropic virus 2
cuuaccccaaagca

SEQ ID NO: 4019892 - RNA, 17 nt, Human T-lymphotropic virus 2
cuucaccauuccccagc

SEQ ID NO: 4019893 - RNA, 13 nt, Human T-lymphotropic virus 2
cuuccccacccag

SEQ ID NO: 4019894 - RNA, 22 nt, Human T-lymphotropic virus 2
cuuccgcccaucaaacccucca

SEQ ID NO: 4019895 - RNA, 23 nt, Human T-lymphotropic virus 2
cuuccuacuuuuauucagucuca

SEQ ID NO: 4019896 - RNA, 17 nt, Human T-lymphotropic virus 2
cuucgacuacacuucuc

SEQ ID NO: 4019897 - RNA, 18 nt, Human T-lymphotropic virus 2
cuucgccgucacugaaaa

SEQ ID NO: 4019898 - RNA, 20 nt, Human T-lymphotropic virus 2
cuucgccgucacugaaaacg

SEQ ID NO: 4019899 - RNA, 16 nt, Human T-lymphotropic virus 2
cuucuauaccucccag

SEQ ID NO: 4019900 - RNA, 17 nt, Human T-lymphotropic virus 2
cuucuauaccucccaga

SEQ ID NO: 4019901 - RNA, 19 nt, Human T-lymphotropic virus 2
cuugacacggcccccugcc

SEQ ID NO: 4019902 - RNA, 12 nt, Human T-lymphotropic virus 2
cuugcccuuccg

SEQ ID NO: 4019903 - RNA, 17 nt, Human T-lymphotropic virus 2
cuuuccaccacaacaug

SEQ ID NO: 4019904 - RNA, 17 nt, Human T-lymphotropic virus 2
cuuucuccacccugcca

SEQ ID NO: 4019905 - RNA, 17 nt, Human T-lymphotropic virus 2
cuuuuccccuucaggaa

SEQ ID NO: 4019906 - RNA, 16 nt, Human T-lymphotropic virus 2
gaacaggaacagcucu

SEQ ID NO: 4019907 - RNA, 16 nt, Human T-lymphotropic virus 2
gaacccacucagccuc

SEQ ID NO: 4019908 - RNA, 17 nt, Human T-lymphotropic virus 2
gaacccacucagccucc

SEQ ID NO: 4019909 - RNA, 21 nt, Human T-lymphotropic virus 2
gaacccacucagccuccacca

SEQ ID NO: 4019910 - RNA, 13 nt, Human T-lymphotropic virus 2
gaacugcuccucc

SEQ ID NO: 4019911 - RNA, 22 nt, Human T-lymphotropic virus 2
gacagccuuaccccaccuacag

SEQ ID NO: 4019912 - RNA, 22 nt, Human T-lymphotropic virus 2
ugccuuucuucccucucccggc

SEQ ID NO: 4019913 - RNA, 14 nt, Human T-lymphotropic virus 2
ugcggcuccuccau

SEQ ID NO: 4019914 - RNA, 22 nt, Human T-lymphotropic virus 2
ugcggcuccuccaugacccucc

SEQ ID NO: 4019915 - RNA, 16 nt, Human T-lymphotropic virus 2
ugcuuucuccacccug

SEQ ID NO: 4019916 - RNA, 19 nt, Human T-lymphotropic virus 2
uggaagacucucuuacacc

SEQ ID NO: 4019917 - RNA, 15 nt, Human T-lymphotropic virus 2
uggacuguccuucca

SEQ ID NO: 4019918 - RNA, 21 nt, Human T-lymphotropic virus 2
uggcaggcgucccggggccaa

SEQ ID NO: 4019919 - RNA, 21 nt, Human T-lymphotropic virus 2
uggcagggccccuaagaaugc

SEQ ID NO: 4019920 - RNA, 14 nt, Human T-lymphotropic virus 2
uggccaccugucca

SEQ ID NO: 4019921 - RNA, 20 nt, Human T-lymphotropic virus 2
uggccuuccaauuucccagg

SEQ ID NO: 4019922 - RNA, 16 nt, Human T-lymphotropic virus 2
uggcugcuuucuccac

SEQ ID NO: 4019923 - RNA, 15 nt, Human T-lymphotropic virus 2
uggcuggcugcuuuc

SEQ ID NO: 4019924 - RNA, 20 nt, Human T-lymphotropic virus 2
uggcuuaacuuucuccaggc

SEQ ID NO: 4019925 - RNA, 17 nt, Human T-lymphotropic virus 2
ugggaccgucucccggc

SEQ ID NO: 4019926 - RNA, 20 nt, Human T-lymphotropic virus 2
uguacaggacuucuccccua

SEQ ID NO: 4019927 - RNA, 16 nt, Human T-lymphotropic virus 2
uguauccguccuccag

SEQ ID NO: 4019928 - RNA, 17 nt, Human T-lymphotropic virus 2
uguauccguccuccagg

SEQ ID NO: 4019929 - RNA, 16 nt, Human T-lymphotropic virus 2
uguccgcagccacacc

SEQ ID NO: 4019930 - RNA, 23 nt, Human T-lymphotropic virus 2
uguccuaacccccuccacguccu

SEQ ID NO: 4019931 - RNA, 19 nt, Human T-lymphotropic virus 2
uguggacuacgugcugcca

SEQ ID NO: 4019932 - RNA, 15 nt, Human T-lymphotropic virus 2
uguuccccccccuua

SEQ ID NO: 4019933 - RNA, 20 nt, Human T-lymphotropic virus 2
uguuccuacacacagggaca

SEQ ID NO: 4019934 - RNA, 13 nt, Human T-lymphotropic virus 2
uuagccagcccca

SEQ ID NO: 4019935 - RNA, 22 nt, Human T-lymphotropic virus 2
uucaacaggacaucacuccccu

SEQ ID NO: 4019936 - RNA, 14 nt, Human T-lymphotropic virus 2
uucacccucucccc

SEQ ID NO: 4019937 - RNA, 15 nt, Human T-lymphotropic virus 2
uucaugcagacccuc

SEQ ID NO: 4019938 - RNA, 16 nt, Human T-lymphotropic virus 2
uucaugcagacccucc

SEQ ID NO: 4019939 - RNA, 17 nt, Human T-lymphotropic virus 2
uuccacuagcccagcag

SEQ ID NO: 4019940 - RNA, 17 nt, Human T-lymphotropic virus 2
uuccauaaccuucaccu

SEQ ID NO: 4019941 - RNA, 22 nt, Human T-lymphotropic virus 2
uuccugaggaacuccccucauc

SEQ ID NO: 4019942 - RNA, 13 nt, Human T-lymphotropic virus 2
uuccuucccuugc

SEQ ID NO: 4019943 - RNA, 21 nt, Human T-lymphotropic virus 2
uucucgcucuacuccuccucg

SEQ ID NO: 4019944 - RNA, 15 nt, Human T-lymphotropic virus 2
uugacaaagacaucu

SEQ ID NO: 4019945 - RNA, 17 nt, Human T-lymphotropic virus 2
uugacaacggccucccc

SEQ ID NO: 4019946 - RNA, 22 nt, Human T-lymphotropic virus 2
uuuuccaaaucccccuccccaa

SEQ ID NO: 4019947 - RNA, 14 nt, Human T-lymphotropic virus 2
aaaacgaaaccuca

SEQ ID NO: 4019948 - RNA, 13 nt, Human T-lymphotropic virus 2
aaaauagaccuca

SEQ ID NO: 4019949 - RNA, 15 nt, Human T-lymphotropic virus 2
aaaccaucaacucac

SEQ ID NO: 4019950 - RNA, 12 nt, Human T-lymphotropic virus 2
aaacccaggagu

SEQ ID NO: 4019951 - RNA, 19 nt, Human T-lymphotropic virus 2
aaaccugagcgccuccagg

SEQ ID NO: 4019952 - RNA, 18 nt, Human T-lymphotropic virus 2
aaauucgaaaccaaagcc

SEQ ID NO: 4019953 - RNA, 23 nt, Human T-lymphotropic virus 2
aaauucgaaaccaaagccuucca

SEQ ID NO: 4019954 - RNA, 20 nt, Human T-lymphotropic virus 2
aacacaacaaaccccaggcc

SEQ ID NO: 4019955 - RNA, 14 nt, Human T-lymphotropic virus 2
aacagcucuccaga

SEQ ID NO: 4019956 - RNA, 17 nt, Human T-lymphotropic virus 2
aacaucuccauucccca

SEQ ID NO: 4019957 - RNA, 21 nt, Human T-lymphotropic virus 2
aaccauccucuuuccuucccu

SEQ ID NO: 4019958 - RNA, 17 nt, Human T-lymphotropic virus 2
aacccaggaguccuaua

SEQ ID NO: 4019959 - RNA, 23 nt, Human T-lymphotropic virus 2
aaccccaugaggaaaauguuucc

SEQ ID NO: 4019960 - RNA, 13 nt, Human T-lymphotropic virus 2
aacccuucccuug

SEQ ID NO: 4019961 - RNA, 22 nt, Human T-lymphotropic virus 2
aaccucgaccuuaauucccuaa

SEQ ID NO: 4019962 - RNA, 19 nt, Human T-lymphotropic virus 2
aaccugagcgccuccaggc

SEQ ID NO: 4019963 - RNA, 22 nt, Human T-lymphotropic virus 2
aaccuuccccuagacaaugcca

SEQ ID NO: 4019964 - RNA, 16 nt, Human T-lymphotropic virus 2
aacucuagacaaauau

SEQ ID NO: 4019965 - RNA, 22 nt, Human T-lymphotropic virus 2
aacugccguggccgccucaacc

SEQ ID NO: 4019966 - RNA, 11 nt, Human T-lymphotropic virus 2
aagacaaacaa

SEQ ID NO: 4019967 - RNA, 18 nt, Human T-lymphotropic virus 2
aaggacaaaaccaagguc

SEQ ID NO: 4019968 - RNA, 20 nt, Human T-lymphotropic virus 2
aaggccuccacggccucacc

SEQ ID NO: 4019969 - RNA, 19 nt, Human T-lymphotropic virus 2
aagggcuagggcuuccuga

SEQ ID NO: 4019970 - RNA, 19 nt, Human T-lymphotropic virus 2
aagguaagucuccucucag

SEQ ID NO: 4019971 - RNA, 14 nt, Human T-lymphotropic virus 2
aaucccccucccca

SEQ ID NO: 4019972 - RNA, 16 nt, Human T-lymphotropic virus 2
aauccugucuccucuc

SEQ ID NO: 4019973 - RNA, 18 nt, Human T-lymphotropic virus 2
aauuacaacaacucuccc

SEQ ID NO: 4019974 - RNA, 17 nt, Human T-lymphotropic virus 2
aauucgaaaccaaagcc

SEQ ID NO: 4019975 - RNA, 17 nt, Human T-lymphotropic virus 2
aauuuucacccucuccc

SEQ ID NO: 4019976 - RNA, 19 nt, Human T-lymphotropic virus 2
acaaacaccucagccuacc

SEQ ID NO: 4019977 - RNA, 11 nt, Human T-lymphotropic virus 2
acaaagaaugc

SEQ ID NO: 4019978 - RNA, 21 nt, Human T-lymphotropic virus 2
acaacaugucaaagcaagccc

SEQ ID NO: 4019979 - RNA, 23 nt, Human T-lymphotropic virus 2
acaacucaaacccccucaggagg

SEQ ID NO: 4019980 - RNA, 21 nt, Human T-lymphotropic virus 2
acaacuccauuauccuccccc

SEQ ID NO: 4019981 - RNA, 13 nt, Human T-lymphotropic virus 2
acaauacuccucc

SEQ ID NO: 4019982 - RNA, 16 nt, Human T-lymphotropic virus 2
acacaacaaaccccag

SEQ ID NO: 4019983 - RNA, 20 nt, Human T-lymphotropic virus 2
acacauauucuugcccuucc

SEQ ID NO: 4019984 - RNA, 22 nt, Human T-lymphotropic virus 2
acacauauucuugcccuuccga

SEQ ID NO: 4019985 - RNA, 15 nt, Human T-lymphotropic virus 2
acaccaaccuccccg

SEQ ID NO: 4019986 - RNA, 18 nt, Human T-lymphotropic virus 2
acacccaguucaaacucc

SEQ ID NO: 4019987 - RNA, 16 nt, Human T-lymphotropic virus 2
acagacucccuuaucu

SEQ ID NO: 4019988 - RNA, 17 nt, Human T-lymphotropic virus 2
acagacuugccauaccu

SEQ ID NO: 4019989 - RNA, 21 nt, Human T-lymphotropic virus 2
acagagcaccaauuacuccug

SEQ ID NO: 4019990 - RNA, 13 nt, Human T-lymphotropic virus 2
acaggcuacaacc

SEQ ID NO: 4019991 - RNA, 22 nt, Human T-lymphotropic virus 2
acagggccuaggguacuacucg

SEQ ID NO: 4019992 - RNA, 17 nt, Human T-lymphotropic virus 2
acaguccuccacuacca

SEQ ID NO: 4019993 - RNA, 22 nt, Human T-lymphotropic virus 2
acaguccuccacuaccacccau

SEQ ID NO: 4019994 - RNA, 13 nt, Human T-lymphotropic virus 2
acaucacuccccu

SEQ ID NO: 4019995 - RNA, 20 nt, Human T-lymphotropic virus 2
acaucucgauacucccacuc

SEQ ID NO: 4019996 - RNA, 13 nt, Human T-lymphotropic virus 2
acauuccucccau

SEQ ID NO: 4019997 - RNA, 13 nt, Human T-lymphotropic virus 2
accaaccucgccu

SEQ ID NO: 4019998 - RNA, 20 nt, Human T-lymphotropic virus 2
accaagggaagccaaguccc

SEQ ID NO: 4019999 - RNA, 18 nt, Human T-lymphotropic virus 2
accacggcccugacgucc

SEQ ID NO: 4020000 - RNA, 20 nt, Human T-lymphotropic virus 2
accagccauacuucgccuuc

SEQ ID NO: 4020001 - RNA, 13 nt, Human T-lymphotropic virus 2
accaguauucccu

SEQ ID NO: 4020002 - RNA, 19 nt, Human T-lymphotropic virus 2
accaguuuauguccuuggg

SEQ ID NO: 4020003 - RNA, 14 nt, Human T-lymphotropic virus 2
accauccucuuucc

SEQ ID NO: 4020004 - RNA, 21 nt, Human T-lymphotropic virus 2
accauccucuuuccuucccuu

SEQ ID NO: 4020005 - RNA, 15 nt, Human T-lymphotropic virus 2
accaucuaccuccac

SEQ ID NO: 4020006 - RNA, 21 nt, Human T-lymphotropic virus 2
acccaagcaaaauuggccccu

SEQ ID NO: 4020007 - RNA, 18 nt, Human T-lymphotropic virus 2
acccaauuuccaccuuca

SEQ ID NO: 4020008 - RNA, 17 nt, Human T-lymphotropic virus 2
acccacucagccuccac

SEQ ID NO: 4020009 - RNA, 11 nt, Human T-lymphotropic virus 2
accccaaagca

SEQ ID NO: 4020010 - RNA, 13 nt, Human T-lymphotropic virus 2
accccagccccca

SEQ ID NO: 4020011 - RNA, 17 nt, Human T-lymphotropic virus 2
accccauggcagggccc

SEQ ID NO: 4020012 - RNA, 14 nt, Human T-lymphotropic virus 2
accccccacccucc

SEQ ID NO: 4020013 - RNA, 13 nt, Human T-lymphotropic virus 2
acccccugcccau

SEQ ID NO: 4020014 - RNA, 19 nt, Human T-lymphotropic virus 2
accccuacuauucccauaa

SEQ ID NO: 4020015 - RNA, 13 nt, Human T-lymphotropic virus 2
accccucccacca

SEQ ID NO: 4020016 - RNA, 21 nt, Human T-lymphotropic virus 2
accccuccuguuggaucuccc

SEQ ID NO: 4020017 - RNA, 22 nt, Human T-lymphotropic virus 2
acccggguuuccgccugcgcuc

SEQ ID NO: 4020018 - RNA, 19 nt, Human T-lymphotropic virus 2
acccuuacccacuuccccu

SEQ ID NO: 4020019 - RNA, 14 nt, Human T-lymphotropic virus 2
acccuucuccagga

SEQ ID NO: 4020020 - RNA, 20 nt, Human T-lymphotropic virus 2
accgaucccgaccccagagg

SEQ ID NO: 4020021 - RNA, 15 nt, Human T-lymphotropic virus 2
accucacccuuaccc

SEQ ID NO: 4020022 - RNA, 19 nt, Human T-lymphotropic virus 2
accucagaacccacucagc

SEQ ID NO: 4020023 - RNA, 13 nt, Human T-lymphotropic virus 2
accuccaccaugu

SEQ ID NO: 4020024 - RNA, 20 nt, Human T-lymphotropic virus 2
accucccagacgaccccagc

SEQ ID NO: 4020025 - RNA, 21 nt, Human T-lymphotropic virus 2
accucccagacgaccccagcc

SEQ ID NO: 4020026 - RNA, 18 nt, Human T-lymphotropic virus 2
accuccugaacugcuccu

SEQ ID NO: 4020027 - RNA, 19 nt, Human T-lymphotropic virus 2
accuccugaacugcuccuc

SEQ ID NO: 4020028 - RNA, 13 nt, Human T-lymphotropic virus 2
accucuccuuggc

SEQ ID NO: 4020029 - RNA, 14 nt, Human T-lymphotropic virus 2
accuggccuccguc

SEQ ID NO: 4020030 - RNA, 15 nt, Human T-lymphotropic virus 2
accuuaauucccuaa

SEQ ID NO: 4020031 - RNA, 19 nt, Human T-lymphotropic virus 2
acgaggauuagaccuccua

SEQ ID NO: 4020032 - RNA, 15 nt, Human T-lymphotropic virus 2
acgauuacccccugc

SEQ ID NO: 4020033 - RNA, 21 nt, Human T-lymphotropic virus 2
acgccaacaaagaaugccaaa

SEQ ID NO: 4020034 - RNA, 14 nt, Human T-lymphotropic virus 2
acgccccaaggccu

SEQ ID NO: 4020035 - RNA, 13 nt, Human T-lymphotropic virus 2
acgcccuacaaca

SEQ ID NO: 4020036 - RNA, 15 nt, Human T-lymphotropic virus 2
acgugcugccaagcc

SEQ ID NO: 4020037 - RNA, 16 nt, Human T-lymphotropic virus 2
acuaccacccucaccu

SEQ ID NO: 4020038 - RNA, 15 nt, Human T-lymphotropic virus 2
acuacucgccuuccu

SEQ ID NO: 4020039 - RNA, 15 nt, Human T-lymphotropic virus 2
acuagacuguccuaa

SEQ ID NO: 4020040 - RNA, 19 nt, Human T-lymphotropic virus 2
acuagccuaccgacagccu

SEQ ID NO: 4020041 - RNA, 23 nt, Human T-lymphotropic virus 2
acuagccucccgagccagccacc

SEQ ID NO: 4020042 - RNA, 12 nt, Human T-lymphotropic virus 2
acucaccuggga

SEQ ID NO: 4020043 - RNA, 13 nt, Human T-lymphotropic virus 2
acuccccucaucc

SEQ ID NO: 4020044 - RNA, 22 nt, Human T-lymphotropic virus 2
acuccuccgccaccuccccccc

SEQ ID NO: 4020045 - RNA, 20 nt, Human T-lymphotropic virus 2
acugaaaacgaaaccucaac

SEQ ID NO: 4020046 - RNA, 13 nt, Human T-lymphotropic virus 2
acuguccuuccac

SEQ ID NO: 4020047 - RNA, 22 nt, Human T-lymphotropic virus 2
acuuccccuagcgcugaaaaac

SEQ ID NO: 4020048 - RNA, 20 nt, Human T-lymphotropic virus 2
acuuccugaggaacuccccu

SEQ ID NO: 4020049 - RNA, 12 nt, Human T-lymphotropic virus 2
acuucuauacaa

SEQ ID NO: 4020050 - RNA, 11 nt, Human T-lymphotropic virus 2
agacacccggg

SEQ ID NO: 4020051 - RNA, 20 nt, Human T-lymphotropic virus 2
agacucucuuacaccuccca

SEQ ID NO: 4020052 - RNA, 18 nt, Human T-lymphotropic virus 2
agagauuauaaauauccu

SEQ ID NO: 4020053 - RNA, 18 nt, Human T-lymphotropic virus 2
agagcaccaacucaccug

SEQ ID NO: 4020054 - RNA, 22 nt, Human T-lymphotropic virus 2
agaggucuauugcuauaggcag

SEQ ID NO: 4020055 - RNA, 14 nt, Human T-lymphotropic virus 2
agaugccccuggau

SEQ ID NO: 4020056 - RNA, 17 nt, Human T-lymphotropic virus 2
agcaccaauuacuccug

SEQ ID NO: 4020057 - RNA, 19 nt, Human T-lymphotropic virus 2
agcagccguccucaacccc

SEQ ID NO: 4020058 - RNA, 15 nt, Human T-lymphotropic virus 2
agccacgccccccuc

SEQ ID NO: 4020059 - RNA, 16 nt, Human T-lymphotropic virus 2
agccacgccccccucc

SEQ ID NO: 4020060 - RNA, 18 nt, Human T-lymphotropic virus 2
agccacgccccccuccug

SEQ ID NO: 4020061 - RNA, 16 nt, Human T-lymphotropic virus 2
agccacuccaaacacc

SEQ ID NO: 4020062 - RNA, 19 nt, Human T-lymphotropic virus 2
agccccaccaaugaggaau

SEQ ID NO: 4020063 - RNA, 21 nt, Human T-lymphotropic virus 2
agcccccaccaauugcugcca

SEQ ID NO: 4020064 - RNA, 17 nt, Human T-lymphotropic virus 2
agccccuguagcccaac

SEQ ID NO: 4020065 - RNA, 20 nt, Human T-lymphotropic virus 2
agcccuuugcgacuuccuga

SEQ ID NO: 4020066 - RNA, 18 nt, Human T-lymphotropic virus 2
agccguccucaaccccau

SEQ ID NO: 4020067 - RNA, 16 nt, Human T-lymphotropic virus 2
agccucccgagccagc

SEQ ID NO: 4020068 - RNA, 16 nt, Human T-lymphotropic virus 2
agccucuaccccuccc

SEQ ID NO: 4020069 - RNA, 18 nt, Human T-lymphotropic virus 2
agcgcugaaaaacaaggc

SEQ ID NO: 4020070 - RNA, 18 nt, Human T-lymphotropic virus 2
agcuccucugcucuuggc

SEQ ID NO: 4020071 - RNA, 20 nt, Human T-lymphotropic virus 2
agcuuguaucacccucaccc

SEQ ID NO: 4020072 - RNA, 12 nt, Human T-lymphotropic virus 2
aggaacugaaac

SEQ ID NO: 4020073 - RNA, 14 nt, Human T-lymphotropic virus 2
aggacuucuccccu

SEQ ID NO: 4020074 - RNA, 17 nt, Human T-lymphotropic virus 2
aggagccuuccucacca

SEQ ID NO: 4020075 - RNA, 12 nt, Human T-lymphotropic virus 2
aggcccuuccac

SEQ ID NO: 4020076 - RNA, 15 nt, Human T-lymphotropic virus 2
agggaagccaagucc

SEQ ID NO: 4020077 - RNA, 18 nt, Human T-lymphotropic virus 2
agggcuagggcuuccuga

SEQ ID NO: 4020078 - RNA, 17 nt, Human T-lymphotropic virus 2
agguccuuaccccuccc

SEQ ID NO: 4020079 - RNA, 12 nt, Human T-lymphotropic virus 2
aguauucccuua

SEQ ID NO: 4020080 - RNA, 16 nt, Human T-lymphotropic virus 2
aguccauccuggaagu

SEQ ID NO: 4020081 - RNA, 20 nt, Human T-lymphotropic virus 2
agucuccgacgagagucucg

SEQ ID NO: 4020082 - RNA, 22 nt, Human T-lymphotropic virus 2
auacucccacucaucccccugc

SEQ ID NO: 4020083 - RNA, 15 nt, Human T-lymphotropic virus 2
aucaagucuccccua

SEQ ID NO: 4020084 - RNA, 14 nt, Human T-lymphotropic virus 2
aucagcuccccucc

SEQ ID NO: 4020085 - RNA, 16 nt, Human T-lymphotropic virus 2
aucagcuccccucccu

SEQ ID NO: 4020086 - RNA, 12 nt, Human T-lymphotropic virus 2
aucccucgccuc

SEQ ID NO: 4020087 - RNA, 15 nt, Human T-lymphotropic virus 2
aucccucgccucccc

SEQ ID NO: 4020088 - RNA, 18 nt, Human T-lymphotropic virus 2
aucccucgccuccccucc

SEQ ID NO: 4020089 - RNA, 19 nt, Human T-lymphotropic virus 2
aucccucgccuccccuccu

SEQ ID NO: 4020090 - RNA, 15 nt, Human T-lymphotropic virus 2
auccuaggagagauc

SEQ ID NO: 4020091 - RNA, 17 nt, Human T-lymphotropic virus 2
auccucauucaccacau

SEQ ID NO: 4020092 - RNA, 17 nt, Human T-lymphotropic virus 2
auccucuuuccuucccu

SEQ ID NO: 4020093 - RNA, 12 nt, Human T-lymphotropic virus 2
auccugucuccu

SEQ ID NO: 4020094 - RNA, 16 nt, Human T-lymphotropic virus 2
aucuuggacuguccca

SEQ ID NO: 4020095 - RNA, 15 nt, Human T-lymphotropic virus 2
aucuuuccaccacaa

SEQ ID NO: 4020096 - RNA, 20 nt, Human T-lymphotropic virus 2
augccauuacuaccacccuc

SEQ ID NO: 4020097 - RNA, 14 nt, Human T-lymphotropic virus 2
auggccuucccuua

SEQ ID NO: 4020098 - RNA, 14 nt, Human T-lymphotropic virus 2
augggacaaacacc

SEQ ID NO: 4020099 - RNA, 20 nt, Human T-lymphotropic virus 2
auucagucucacacauuuuc

SEQ ID NO: 4020100 - RNA, 17 nt, Human T-lymphotropic virus 2
auuccauaaccuuggca

SEQ ID NO: 4020101 - RNA, 14 nt, Human T-lymphotropic virus 2
auuccccagccaug

SEQ ID NO: 4020102 - RNA, 15 nt, Human T-lymphotropic virus 2
auucugccaccccag

SEQ ID NO: 4020103 - RNA, 14 nt, Human T-lymphotropic virus 2
auucugcccuucac

SEQ ID NO: 4020104 - RNA, 13 nt, Human T-lymphotropic virus 2
auuggggccuucc

SEQ ID NO: 4020105 - RNA, 20 nt, Human T-lymphotropic virus 2
auuggugucccgucucaggu

SEQ ID NO: 4020106 - RNA, 14 nt, Human T-lymphotropic virus 2
auuucacccaggaa

SEQ ID NO: 4020107 - RNA, 16 nt, Human T-lymphotropic virus 2
caaaacauccuccggg

SEQ ID NO: 4020108 - RNA, 13 nt, Human T-lymphotropic virus 2
caaaccaccuccc

SEQ ID NO: 4020109 - RNA, 14 nt, Human T-lymphotropic virus 2
caaaccaccuccca

SEQ ID NO: 4020110 - RNA, 12 nt, Human T-lymphotropic virus 2
caaacccuccag

SEQ ID NO: 4020111 - RNA, 15 nt, Human T-lymphotropic virus 2
caaaccuccucccga

SEQ ID NO: 4020112 - RNA, 17 nt, Human T-lymphotropic virus 2
caaagccuuccaucccu

SEQ ID NO: 4020113 - RNA, 15 nt, Human T-lymphotropic virus 2
caacaacucucccag

SEQ ID NO: 4020114 - RNA, 21 nt, Human T-lymphotropic virus 2
caacaggacaucacuccccug

SEQ ID NO: 4020115 - RNA, 15 nt, Human T-lymphotropic virus 2
caacaucccugucuc

SEQ ID NO: 4020116 - RNA, 17 nt, Human T-lymphotropic virus 2
caacccaccacuggcuu

SEQ ID NO: 4020117 - RNA, 22 nt, Human T-lymphotropic virus 2
caacgacuacacccccccugcc

SEQ ID NO: 4020118 - RNA, 21 nt, Human T-lymphotropic virus 2
caacgccgcccucuuggcagg

SEQ ID NO: 4020119 - RNA, 22 nt, Human T-lymphotropic virus 2
caagaccaucuaccuccaccau

SEQ ID NO: 4020120 - RNA, 17 nt, Human T-lymphotropic virus 2
caagcaguaccagccau

SEQ ID NO: 4020121 - RNA, 18 nt, Human T-lymphotropic virus 2
caagccauggccuucccu

SEQ ID NO: 4020122 - RNA, 15 nt, Human T-lymphotropic virus 2
caaggacaguucagg

SEQ ID NO: 4020123 - RNA, 12 nt, Human T-lymphotropic virus 2
caaggcucugac

SEQ ID NO: 4020124 - RNA, 20 nt, Human T-lymphotropic virus 2
caagguccuuaccccuccca

SEQ ID NO: 4020125 - RNA, 16 nt, Human T-lymphotropic virus 2
caagguuccaccugcc

SEQ ID NO: 4020126 - RNA, 15 nt, Human T-lymphotropic virus 2
caaguaaaggcucug

SEQ ID NO: 4020127 - RNA, 17 nt, Human T-lymphotropic virus 2
caauagccacuccaaac

SEQ ID NO: 4020128 - RNA, 19 nt, Human T-lymphotropic virus 2
caaucccuauauucugccc

SEQ ID NO: 4020129 - RNA, 14 nt, Human T-lymphotropic virus 2
caauccugucuccu

SEQ ID NO: 4020130 - RNA, 12 nt, Human T-lymphotropic virus 2
caauugcugcca

SEQ ID NO: 4020131 - RNA, 14 nt, Human T-lymphotropic virus 2
caauuucccaggaa

SEQ ID NO: 4020132 - RNA, 20 nt, Human T-lymphotropic virus 2
cacaacaaauggaccaucau

SEQ ID NO: 4020133 - RNA, 16 nt, Human T-lymphotropic virus 2
cacacaaacaauccca

SEQ ID NO: 4020134 - RNA, 20 nt, Human T-lymphotropic virus 2
cacaccccccacccuccgac

SEQ ID NO: 4020135 - RNA, 17 nt, Human T-lymphotropic virus 2
cacacuaacagcccccu

SEQ ID NO: 4020136 - RNA, 15 nt, Human T-lymphotropic virus 2
caccaaccuccccga

SEQ ID NO: 4020137 - RNA, 18 nt, Human T-lymphotropic virus 2
caccaaugauuuccggcc

SEQ ID NO: 4020138 - RNA, 19 nt, Human T-lymphotropic virus 2
caccacaauguuccaaccc

SEQ ID NO: 4020139 - RNA, 22 nt, Human T-lymphotropic virus 2
caccagaugucagacucgccuc

SEQ ID NO: 4020140 - RNA, 19 nt, Human T-lymphotropic virus 2
caccaucuuaacucuagac

SEQ ID NO: 4020141 - RNA, 20 nt, Human T-lymphotropic virus 2
cacccaggaagucagccaag

SEQ ID NO: 4020142 - RNA, 18 nt, Human T-lymphotropic virus 2
caccccacaacaacucca

SEQ ID NO: 4020143 - RNA, 14 nt, Human T-lymphotropic virus 2
cacccucucccccg

SEQ ID NO: 4020144 - RNA, 15 nt, Human T-lymphotropic virus 2
caccgacccucuggu

SEQ ID NO: 4020145 - RNA, 18 nt, Human T-lymphotropic virus 2
caccucagaacccacuca

SEQ ID NO: 4020146 - RNA, 13 nt, Human T-lymphotropic virus 2
caccuccccaagu

SEQ ID NO: 4020147 - RNA, 22 nt, Human T-lymphotropic virus 2
caccucuccuuccccagggccc

SEQ ID NO: 4020148 - RNA, 16 nt, Human T-lymphotropic virus 2
caccuucccccaccuc

SEQ ID NO: 4020149 - RNA, 14 nt, Human T-lymphotropic virus 2
cacggcccccugcc

SEQ ID NO: 4020150 - RNA, 16 nt, Human T-lymphotropic virus 2
cacuaccacccauucc

SEQ ID NO: 4020151 - RNA, 16 nt, Human T-lymphotropic virus 2
cacucagccuccacca

SEQ ID NO: 4020152 - RNA, 19 nt, Human T-lymphotropic virus 2
cacuccaacugcugaugcc

SEQ ID NO: 4020153 - RNA, 19 nt, Human T-lymphotropic virus 2
cacuccaucuuaacaaccc

SEQ ID NO: 4020154 - RNA, 23 nt, Human T-lymphotropic virus 2
cacuggcuuaacuuucuccaggc

SEQ ID NO: 4020155 - RNA, 13 nt, Human T-lymphotropic virus 2
cacuuauacccca

SEQ ID NO: 4020156 - RNA, 19 nt, Human T-lymphotropic virus 2
cacuucucuaagugcggcu

SEQ ID NO: 4020157 - RNA, 21 nt, Human T-lymphotropic virus 2
cagaacccacucagccuccac

SEQ ID NO: 4020158 - RNA, 21 nt, Human T-lymphotropic virus 2
cagacaauuaggagccuuccu

SEQ ID NO: 4020159 - RNA, 17 nt, Human T-lymphotropic virus 2
cagacucgccucucccu

SEQ ID NO: 4020160 - RNA, 18 nt, Human T-lymphotropic virus 2
cagacucgccucucccug

SEQ ID NO: 4020161 - RNA, 14 nt, Human T-lymphotropic virus 2
cagagcaccaacuc

SEQ ID NO: 4020162 - RNA, 19 nt, Human T-lymphotropic virus 2
cagaugucagacucgccuc

SEQ ID NO: 4020163 - RNA, 13 nt, Human T-lymphotropic virus 2
cagcaagggcuag

SEQ ID NO: 4020164 - RNA, 19 nt, Human T-lymphotropic virus 2
cagccacaccaaccucccc

SEQ ID NO: 4020165 - RNA, 21 nt, Human T-lymphotropic virus 2
cagccacgccccccuccuggc

SEQ ID NO: 4020166 - RNA, 22 nt, Human T-lymphotropic virus 2
cagccauacuucgccuucacca

SEQ ID NO: 4020167 - RNA, 17 nt, Human T-lymphotropic virus 2
cagcccauuucccagga

SEQ ID NO: 4020168 - RNA, 16 nt, Human T-lymphotropic virus 2
cagccccaccaaugag

SEQ ID NO: 4020169 - RNA, 17 nt, Human T-lymphotropic virus 2
cagccccacccucuucg

SEQ ID NO: 4020170 - RNA, 16 nt, Human T-lymphotropic virus 2
cagcccccaccaauug

SEQ ID NO: 4020171 - RNA, 11 nt, Human T-lymphotropic virus 2
cagcccccuug

SEQ ID NO: 4020172 - RNA, 15 nt, Human T-lymphotropic virus 2
cagccuaggcccucc

SEQ ID NO: 4020173 - RNA, 22 nt, Human T-lymphotropic virus 2
cagccuuaccccaccuacagac

SEQ ID NO: 4020174 - RNA, 17 nt, Human T-lymphotropic virus 2
cagccuugcucuccaua

SEQ ID NO: 4020175 - RNA, 20 nt, Human T-lymphotropic virus 2
cagcgccguucuucaggcca

SEQ ID NO: 4020176 - RNA, 16 nt, Human T-lymphotropic virus 2
cagcucauaggcccug

SEQ ID NO: 4020177 - RNA, 20 nt, Human T-lymphotropic virus 2
cagcucauaggcccuggcag

SEQ ID NO: 4020178 - RNA, 13 nt, Human T-lymphotropic virus 2
cagcucuccagaa

SEQ ID NO: 4020179 - RNA, 23 nt, Human T-lymphotropic virus 2
cagcucugccaaucuuuccacca

SEQ ID NO: 4020180 - RNA, 23 nt, Human T-lymphotropic virus 2
caggaaccacgacuccucaggcc

SEQ ID NO: 4020181 - RNA, 18 nt, Human T-lymphotropic virus 2
caggagcccccucagcuc

SEQ ID NO: 4020182 - RNA, 23 nt, Human T-lymphotropic virus 2
caggaggaaggggaaccccuccu

SEQ ID NO: 4020183 - RNA, 17 nt, Human T-lymphotropic virus 2
caggagguggcucgcuc

SEQ ID NO: 4020184 - RNA, 13 nt, Human T-lymphotropic virus 2
caggcauaaccau

SEQ ID NO: 4020185 - RNA, 16 nt, Human T-lymphotropic virus 2
caggcuacaaccccau

SEQ ID NO: 4020186 - RNA, 21 nt, Human T-lymphotropic virus 2
caggcuacaaccccauggcag

SEQ ID NO: 4020187 - RNA, 13 nt, Human T-lymphotropic virus 2
cagggcaagacca

SEQ ID NO: 4020188 - RNA, 21 nt, Human T-lymphotropic virus 2
cagggggcuaucaacccacca

SEQ ID NO: 4020189 - RNA, 13 nt, Human T-lymphotropic virus 2
caguaaaagccuu

SEQ ID NO: 4020190 - RNA, 13 nt, Human T-lymphotropic virus 2
caguaccagccau

SEQ ID NO: 4020191 - RNA, 13 nt, Human T-lymphotropic virus 2
caguccuccacua

SEQ ID NO: 4020192 - RNA, 15 nt, Human T-lymphotropic virus 2
cagucucacacauuu

SEQ ID NO: 4020193 - RNA, 13 nt, Human T-lymphotropic virus 2
cauaaaaucccaa

SEQ ID NO: 4020194 - RNA, 19 nt, Human T-lymphotropic virus 2
cauacuuuuagccagcccc

SEQ ID NO: 4020195 - RNA, 17 nt, Human T-lymphotropic virus 2
caucaccggcuggggac

SEQ ID NO: 4020196 - RNA, 17 nt, Human T-lymphotropic virus 2
caucccaacccuucccu

SEQ ID NO: 4020197 - RNA, 13 nt, Human T-lymphotropic virus 2
cauccucuccaag

SEQ ID NO: 4020198 - RNA, 21 nt, Human T-lymphotropic virus 2
caucucccaccuuacccaggc

SEQ ID NO: 4020199 - RNA, 19 nt, Human T-lymphotropic virus 2
caucuuaacaaccccaggu

SEQ ID NO: 4020200 - RNA, 14 nt, Human T-lymphotropic virus 2
caugccauucaaca

SEQ ID NO: 4020201 - RNA, 23 nt, Human T-lymphotropic virus 2
cauggccuuccaauuucccagga

SEQ ID NO: 4020202 - RNA, 15 nt, Human T-lymphotropic virus 2
cauggccuucccuua

SEQ ID NO: 4020203 - RNA, 18 nt, Human T-lymphotropic virus 2
cauguacucuacaccccc

SEQ ID NO: 4020204 - RNA, 16 nt, Human T-lymphotropic virus 2
cauuacuaccacccuc

SEQ ID NO: 4020205 - RNA, 21 nt, Human T-lymphotropic virus 2
cauuccccaacaaaccuccuc

SEQ ID NO: 4020206 - RNA, 16 nt, Human T-lymphotropic virus 2
cauugcaaucccucca

SEQ ID NO: 4020207 - RNA, 19 nt, Human T-lymphotropic virus 2
ccaacaaaccuccucccga

SEQ ID NO: 4020208 - RNA, 17 nt, Human T-lymphotropic virus 2
ccaacccuucuccagga

SEQ ID NO: 4020209 - RNA, 19 nt, Human T-lymphotropic virus 2
ccaaccgucugguccgugg

SEQ ID NO: 4020210 - RNA, 17 nt, Human T-lymphotropic virus 2
ccaaccucgccuacagg

SEQ ID NO: 4020211 - RNA, 22 nt, Human T-lymphotropic virus 2
ccaacuccaauacccaaagccc

SEQ ID NO: 4020212 - RNA, 20 nt, Human T-lymphotropic virus 2
ccaagcaaaauuggccccug

SEQ ID NO: 4020213 - RNA, 21 nt, Human T-lymphotropic virus 2
ccaagcaaaauuggccccugg

SEQ ID NO: 4020214 - RNA, 14 nt, Human T-lymphotropic virus 2
ccaagcggccucgg

SEQ ID NO: 4020215 - RNA, 18 nt, Human T-lymphotropic virus 2
ccaaguaaaggcucugac

SEQ ID NO: 4020216 - RNA, 23 nt, Human T-lymphotropic virus 2
ccaaugccauuacuaccacccuc

SEQ ID NO: 4020217 - RNA, 14 nt, Human T-lymphotropic virus 2
ccacaacaacucca

SEQ ID NO: 4020218 - RNA, 17 nt, Human T-lymphotropic virus 2
ccacaacaacuccaugc

SEQ ID NO: 4020219 - RNA, 19 nt, Human T-lymphotropic virus 2
ccaccaauugcugccaaua

SEQ ID NO: 4020220 - RNA, 18 nt, Human T-lymphotropic virus 2
ccaccauguccgcagcca

SEQ ID NO: 4020221 - RNA, 18 nt, Human T-lymphotropic virus 2
ccacccugccaggcaaua

SEQ ID NO: 4020222 - RNA, 14 nt, Human T-lymphotropic virus 2
ccaccucaggcacu

SEQ ID NO: 4020223 - RNA, 21 nt, Human T-lymphotropic virus 2
ccacgacuccucaggccaauu

SEQ ID NO: 4020224 - RNA, 13 nt, Human T-lymphotropic virus 2
ccacggccucacc

SEQ ID NO: 4020225 - RNA, 20 nt, Human T-lymphotropic virus 2
ccacgggcuuuccccaacuc

SEQ ID NO: 4020226 - RNA, 12 nt, Human T-lymphotropic virus 2
ccacuagcccag

SEQ ID NO: 4020227 - RNA, 18 nt, Human T-lymphotropic virus 2
ccacuuauaccccauguc

SEQ ID NO: 4020228 - RNA, 17 nt, Human T-lymphotropic virus 2
ccagacgaccccagccc

SEQ ID NO: 4020229 - RNA, 22 nt, Human T-lymphotropic virus 2
ccagcagagccgaugcacacuc

SEQ ID NO: 4020230 - RNA, 22 nt, Human T-lymphotropic virus 2
ccagccauacuucgccuucacc

SEQ ID NO: 4020231 - RNA, 22 nt, Human T-lymphotropic virus 2
ccagccccuguagcccaaccca

SEQ ID NO: 4020232 - RNA, 15 nt, Human T-lymphotropic virus 2
ccagccucucauccu

SEQ ID NO: 4020233 - RNA, 16 nt, Human T-lymphotropic virus 2
ccauaaccuuggcagc

SEQ ID NO: 4020234 - RNA, 18 nt, Human T-lymphotropic virus 2
ccauacuucgccuucacc

SEQ ID NO: 4020235 - RNA, 20 nt, Human T-lymphotropic virus 2
ccaucuuacguucccuagcg

SEQ ID NO: 4020236 - RNA, 19 nt, Human T-lymphotropic virus 2
ccaugucauauucugccac

SEQ ID NO: 4020237 - RNA, 18 nt, Human T-lymphotropic virus 2
ccauguccgcagccacac

SEQ ID NO: 4020238 - RNA, 19 nt, Human T-lymphotropic virus 2
ccauguuccccccccuuac

SEQ ID NO: 4020239 - RNA, 22 nt, Human T-lymphotropic virus 2
ccauucucgcucuacuccuccu

SEQ ID NO: 4020240 - RNA, 17 nt, Human T-lymphotropic virus 2
ccauugcuaccaaccuc

SEQ ID NO: 4020241 - RNA, 23 nt, Human T-lymphotropic virus 2
cccacaacucaaacccccucagg

SEQ ID NO: 4020242 - RNA, 21 nt, Human T-lymphotropic virus 2
cccagccauguaacuauggcc

SEQ ID NO: 4020243 - RNA, 21 nt, Human T-lymphotropic virus 2
cccaggauuuggacagagccu

SEQ ID NO: 4020244 - RNA, 17 nt, Human T-lymphotropic virus 2
cccaucaaaacccagga

SEQ ID NO: 4020245 - RNA, 15 nt, Human T-lymphotropic virus 2
cccauggcagggccc

SEQ ID NO: 4020246 - RNA, 17 nt, Human T-lymphotropic virus 2
ccccaagguuccaccug

SEQ ID NO: 4020247 - RNA, 14 nt, Human T-lymphotropic virus 2
ccccagcccccacc

SEQ ID NO: 4020248 - RNA, 23 nt, Human T-lymphotropic virus 2
ccccagggggcuaucaacccacc

SEQ ID NO: 4020249 - RNA, 21 nt, Human T-lymphotropic virus 2
ccccaguucaugcagacccuc

SEQ ID NO: 4020250 - RNA, 17 nt, Human T-lymphotropic virus 2
cccccaagguuccaccu

SEQ ID NO: 4020251 - RNA, 12 nt, Human T-lymphotropic virus 2
ccccccccuucc

SEQ ID NO: 4020252 - RNA, 18 nt, Human T-lymphotropic virus 2
cccccuccacguccugga

SEQ ID NO: 4020253 - RNA, 23 nt, Human T-lymphotropic virus 2
ccccgucuccaguccauccugga

SEQ ID NO: 4020254 - RNA, 21 nt, Human T-lymphotropic virus 2
ccccuggcuuggcuccacacc

SEQ ID NO: 4020255 - RNA, 17 nt, Human T-lymphotropic virus 2
cccgcccuaccucuccu

SEQ ID NO: 4020256 - RNA, 16 nt, Human T-lymphotropic virus 2
cccgcuccucacgcuc

SEQ ID NO: 4020257 - RNA, 13 nt, Human T-lymphotropic virus 2
cccgcuccuccau

SEQ ID NO: 4020258 - RNA, 18 nt, Human T-lymphotropic virus 2
cccgcugcuccuccgcca

SEQ ID NO: 4020259 - RNA, 13 nt, Human T-lymphotropic virus 2
cccguaccuccuc

SEQ ID NO: 4020260 - RNA, 18 nt, Human T-lymphotropic virus 2
cccuaccauugacccauc

SEQ ID NO: 4020261 - RNA, 14 nt, Human T-lymphotropic virus 2
cccuaccucuccuu

SEQ ID NO: 4020262 - RNA, 17 nt, Human T-lymphotropic virus 2
cccuaccucuccuuggc

SEQ ID NO: 4020263 - RNA, 19 nt, Human T-lymphotropic virus 2
cccucaccgacccucuggu

SEQ ID NO: 4020264 - RNA, 22 nt, Human T-lymphotropic virus 2
cccucaccucuccuuccccagg

SEQ ID NO: 4020265 - RNA, 22 nt, Human T-lymphotropic virus 2
cccucagcucauaggcccuggc

SEQ ID NO: 4020266 - RNA, 16 nt, Human T-lymphotropic virus 2
cccucccaccacuccu

SEQ ID NO: 4020267 - RNA, 23 nt, Human T-lymphotropic virus 2
cccuccuguuggaucucccuucc

SEQ ID NO: 4020268 - RNA, 14 nt, Human T-lymphotropic virus 2
cccucgccuccccu

SEQ ID NO: 4020269 - RNA, 14 nt, Human T-lymphotropic virus 2
cccucuuggcaggc

SEQ ID NO: 4020270 - RNA, 16 nt, Human T-lymphotropic virus 2
cccuguagcccaaccc

SEQ ID NO: 4020271 - RNA, 16 nt, Human T-lymphotropic virus 2
cccuuccaccucaggc

SEQ ID NO: 4020272 - RNA, 18 nt, Human T-lymphotropic virus 2
ccgaaccuggccuccguc

SEQ ID NO: 4020273 - RNA, 15 nt, Human T-lymphotropic virus 2
ccgaucucacuagcc

SEQ ID NO: 4020274 - RNA, 14 nt, Human T-lymphotropic virus 2
ccgauggcuccccu

SEQ ID NO: 4020275 - RNA, 17 nt, Human T-lymphotropic virus 2
ccgccaaauccaggccc

SEQ ID NO: 4020276 - RNA, 15 nt, Human T-lymphotropic virus 2
ccgccugcgcucggc

SEQ ID NO: 4020277 - RNA, 16 nt, Human T-lymphotropic virus 2
ccgccugcgcucggcu

SEQ ID NO: 4020278 - RNA, 23 nt, Human T-lymphotropic virus 2
ccgcuccuccaucccaacccuuc

SEQ ID NO: 4020279 - RNA, 15 nt, Human T-lymphotropic virus 2
ccgguaaagcuccac

SEQ ID NO: 4020280 - RNA, 19 nt, Human T-lymphotropic virus 2
ccgucucccggccucggca

SEQ ID NO: 4020281 - RNA, 22 nt, Human T-lymphotropic virus 2
ccguggagcgcagcaagggcua

SEQ ID NO: 4020282 - RNA, 15 nt, Human T-lymphotropic virus 2
ccuaacccccuccac

SEQ ID NO: 4020283 - RNA, 21 nt, Human T-lymphotropic virus 2
ccuaagagccaccaaugccau

SEQ ID NO: 4020284 - RNA, 19 nt, Human T-lymphotropic virus 2
ccuaccauugacccaucca

SEQ ID NO: 4020285 - RNA, 15 nt, Human T-lymphotropic virus 2
ccuagacaaugccau

SEQ ID NO: 4020286 - RNA, 13 nt, Human T-lymphotropic virus 2
ccuaucucuggcu

SEQ ID NO: 4020287 - RNA, 17 nt, Human T-lymphotropic virus 2
ccucaaauaguuccucu

SEQ ID NO: 4020288 - RNA, 14 nt, Human T-lymphotropic virus 2
ccucaacgccgccc

SEQ ID NO: 4020289 - RNA, 23 nt, Human T-lymphotropic virus 2
ccucaagguccuuaccccuccca

SEQ ID NO: 4020290 - RNA, 15 nt, Human T-lymphotropic virus 2
ccucagaacccacuc

SEQ ID NO: 4020291 - RNA, 13 nt, Human T-lymphotropic virus 2
ccuccaccauguc

SEQ ID NO: 4020292 - RNA, 15 nt, Human T-lymphotropic virus 2
ccuccaggccuuaaa

SEQ ID NO: 4020293 - RNA, 18 nt, Human T-lymphotropic virus 2
ccuccaucccaacccuuc

SEQ ID NO: 4020294 - RNA, 19 nt, Human T-lymphotropic virus 2
ccuccaucccaacccuucc

SEQ ID NO: 4020295 - RNA, 14 nt, Human T-lymphotropic virus 2
ccucccaacccuuc

SEQ ID NO: 4020296 - RNA, 17 nt, Human T-lymphotropic virus 2
ccucccaacccuucucc

SEQ ID NO: 4020297 - RNA, 14 nt, Human T-lymphotropic virus 2
ccucccgaaccauc

SEQ ID NO: 4020298 - RNA, 21 nt, Human T-lymphotropic virus 2
ccuccgauuucgacuuccagc

SEQ ID NO: 4020299 - RNA, 14 nt, Human T-lymphotropic virus 2
ccuccgccaccucc

SEQ ID NO: 4020300 - RNA, 13 nt, Human T-lymphotropic virus 2
ccuccuaccacuc

SEQ ID NO: 4020301 - RNA, 15 nt, Human T-lymphotropic virus 2
ccuccuaccacucca

SEQ ID NO: 4020302 - RNA, 17 nt, Human T-lymphotropic virus 2
ccuccugaacugcuccu

SEQ ID NO: 4020303 - RNA, 13 nt, Human T-lymphotropic virus 2
ccuccuggccccu

SEQ ID NO: 4020304 - RNA, 20 nt, Human T-lymphotropic virus 2
ccuccuuccccacccagaga

SEQ ID NO: 4020305 - RNA, 15 nt, Human T-lymphotropic virus 2
ccucgaacaccuucc

SEQ ID NO: 4020306 - RNA, 19 nt, Human T-lymphotropic virus 2
ccucgcucccguaccuccu

SEQ ID NO: 4020307 - RNA, 17 nt, Human T-lymphotropic virus 2
ccucggggaucagcucc

SEQ ID NO: 4020308 - RNA, 23 nt, Human T-lymphotropic virus 2
ccucuaacccccgcucacauucc

SEQ ID NO: 4020309 - RNA, 19 nt, Human T-lymphotropic virus 2
ccucucaggucgagcucgg

SEQ ID NO: 4020310 - RNA, 19 nt, Human T-lymphotropic virus 2
ccucuucgccgucacugaa

SEQ ID NO: 4020311 - RNA, 18 nt, Human T-lymphotropic virus 2
ccugaacugcuccuccca

SEQ ID NO: 4020312 - RNA, 23 nt, Human T-lymphotropic virus 2
ccugacgucccuccccccuagga

SEQ ID NO: 4020313 - RNA, 17 nt, Human T-lymphotropic virus 2
ccugagcgccuccaggc

SEQ ID NO: 4020314 - RNA, 13 nt, Human T-lymphotropic virus 2
ccuggccccugcc

SEQ ID NO: 4020315 - RNA, 14 nt, Human T-lymphotropic virus 2
ccuggggaaaaacc

SEQ ID NO: 4020316 - RNA, 15 nt, Human T-lymphotropic virus 2
ccuuacccacuuccc

SEQ ID NO: 4020317 - RNA, 15 nt, Human T-lymphotropic virus 2
ccuuaccccaaagca

SEQ ID NO: 4020318 - RNA, 19 nt, Human T-lymphotropic virus 2
ccuuaccccucccaccacu

SEQ ID NO: 4020319 - RNA, 20 nt, Human T-lymphotropic virus 2
ccuuaccccucccaccacuc

SEQ ID NO: 4020320 - RNA, 12 nt, Human T-lymphotropic virus 2
ccuuauccccaa

SEQ ID NO: 4020321 - RNA, 17 nt, Human T-lymphotropic virus 2
ccuucaaugacggcuca

SEQ ID NO: 4020322 - RNA, 19 nt, Human T-lymphotropic virus 2
ccuuccgugggaccgucuc

SEQ ID NO: 4020323 - RNA, 18 nt, Human T-lymphotropic virus 2
ccuuucuucccucucccg

SEQ ID NO: 4020324 - RNA, 19 nt, Human T-lymphotropic virus 2
ccuuugcgacuuccugagg

SEQ ID NO: 4020325 - RNA, 23 nt, Human T-lymphotropic virus 2
cgaaccauccucuuuccuucccu

SEQ ID NO: 4020326 - RNA, 12 nt, Human T-lymphotropic virus 2
cgacauaaccag

SEQ ID NO: 4020327 - RNA, 15 nt, Human T-lymphotropic virus 2
cgacuagccucccga

SEQ ID NO: 4020328 - RNA, 17 nt, Human T-lymphotropic virus 2
cgagcucggcugccccu

SEQ ID NO: 4020329 - RNA, 15 nt, Human T-lymphotropic virus 2
cgaucucacuagccu

SEQ ID NO: 4020330 - RNA, 21 nt, Human T-lymphotropic virus 2
cgcaucaagcauucuacccau

SEQ ID NO: 4020331 - RNA, 22 nt, Human T-lymphotropic virus 2
cgccagugggcaaaccaacacc

SEQ ID NO: 4020332 - RNA, 19 nt, Human T-lymphotropic virus 2
cgccauuggggccuuccuc

SEQ ID NO: 4020333 - RNA, 12 nt, Human T-lymphotropic virus 2
cgccccaaggcc

SEQ ID NO: 4020334 - RNA, 16 nt, Human T-lymphotropic virus 2
cgccccccuccuggcc

SEQ ID NO: 4020335 - RNA, 20 nt, Human T-lymphotropic virus 2
cgcccuaccucuccuuggcc

SEQ ID NO: 4020336 - RNA, 12 nt, Human T-lymphotropic virus 2
cgccgucacuga

SEQ ID NO: 4020337 - RNA, 21 nt, Human T-lymphotropic virus 2
cgccucaaccccgcccuaccu

SEQ ID NO: 4020338 - RNA, 18 nt, Human T-lymphotropic virus 2
cgccuuaacguggcccuu

SEQ ID NO: 4020339 - RNA, 18 nt, Human T-lymphotropic virus 2
cgcguugucagcucuccu

SEQ ID NO: 4020340 - RNA, 19 nt, Human T-lymphotropic virus 2
cgcguugucagcucuccuc

SEQ ID NO: 4020341 - RNA, 16 nt, Human T-lymphotropic virus 2
cgcugcuccuccgcca

SEQ ID NO: 4020342 - RNA, 13 nt, Human T-lymphotropic virus 2
cggcaccuccuga

SEQ ID NO: 4020343 - RNA, 14 nt, Human T-lymphotropic virus 2
cggcccccucuuga

SEQ ID NO: 4020344 - RNA, 21 nt, Human T-lymphotropic virus 2
cggcuccuccaugacccuccu

SEQ ID NO: 4020345 - RNA, 18 nt, Human T-lymphotropic virus 2
cggggaucagcuccccuc

SEQ ID NO: 4020346 - RNA, 19 nt, Human T-lymphotropic virus 2
cgucucccggccucggcac

SEQ ID NO: 4020347 - RNA, 18 nt, Human T-lymphotropic virus 2
cguggagcgcagcaaggg

SEQ ID NO: 4020348 - RNA, 20 nt, Human T-lymphotropic virus 2
cguggagcgcagcaagggcu

SEQ ID NO: 4020349 - RNA, 18 nt, Human T-lymphotropic virus 2
cguggauagauccagccu

SEQ ID NO: 4020350 - RNA, 21 nt, Human T-lymphotropic virus 2
cuaacccccgcucacauuccu

SEQ ID NO: 4020351 - RNA, 23 nt, Human T-lymphotropic virus 2
cuaacccccuccacguccuggac

SEQ ID NO: 4020352 - RNA, 15 nt, Human T-lymphotropic virus 2
cuaacccuccaggca

SEQ ID NO: 4020353 - RNA, 14 nt, Human T-lymphotropic virus 2
cuacaacaaugcca

SEQ ID NO: 4020354 - RNA, 19 nt, Human T-lymphotropic virus 2
cuacaacauaacugccgug

SEQ ID NO: 4020355 - RNA, 22 nt, Human T-lymphotropic virus 2
cuacaacauuauggccagcucu

SEQ ID NO: 4020356 - RNA, 15 nt, Human T-lymphotropic virus 2
cuacaaugccccuac

SEQ ID NO: 4020357 - RNA, 13 nt, Human T-lymphotropic virus 2
cuaccccucccaa

SEQ ID NO: 4020358 - RNA, 13 nt, Human T-lymphotropic virus 2
cuacgugcugcca

SEQ ID NO: 4020359 - RNA, 18 nt, Human T-lymphotropic virus 2
cuacgugcugccaagcca

SEQ ID NO: 4020360 - RNA, 15 nt, Human T-lymphotropic virus 2
cuacuccuccucguc

SEQ ID NO: 4020361 - RNA, 19 nt, Human T-lymphotropic virus 2
cuaggaacaggaacagcuc

SEQ ID NO: 4020362 - RNA, 18 nt, Human T-lymphotropic virus 2
cuagggcuuccugaaccu

SEQ ID NO: 4020363 - RNA, 14 nt, Human T-lymphotropic virus 2
cuauaccucccaga

SEQ ID NO: 4020364 - RNA, 17 nt, Human T-lymphotropic virus 2
cuaucuuacauccccca

SEQ ID NO: 4020365 - RNA, 23 nt, Human T-lymphotropic virus 2
cucaaaaggcagcguacguucuc

SEQ ID NO: 4020366 - RNA, 17 nt, Human T-lymphotropic virus 2
cucaaacccccucagga

SEQ ID NO: 4020367 - RNA, 19 nt, Human T-lymphotropic virus 2
cucaaccccgcccuaccuc

SEQ ID NO: 4020368 - RNA, 15 nt, Human T-lymphotropic virus 2
cucacacaaacaauc

SEQ ID NO: 4020369 - RNA, 13 nt, Human T-lymphotropic virus 2
cucacauuccucc

SEQ ID NO: 4020370 - RNA, 15 nt, Human T-lymphotropic virus 2
cucacauuccuccca

SEQ ID NO: 4020371 - RNA, 16 nt, Human T-lymphotropic virus 2
cucacauuccucccau

SEQ ID NO: 4020372 - RNA, 12 nt, Human T-lymphotropic virus 2
cucaccugggac

SEQ ID NO: 4020373 - RNA, 14 nt, Human T-lymphotropic virus 2
cucaccugggaccc

SEQ ID NO: 4020374 - RNA, 22 nt, Human T-lymphotropic virus 2
cucacgauugguaucuccuccu

SEQ ID NO: 4020375 - RNA, 15 nt, Human T-lymphotropic virus 2
cucacgcuccugcag

SEQ ID NO: 4020376 - RNA, 20 nt, Human T-lymphotropic virus 2
cucagaacccacucagccuc

SEQ ID NO: 4020377 - RNA, 16 nt, Human T-lymphotropic virus 2
cucauaggcccuggca

SEQ ID NO: 4020378 - RNA, 22 nt, Human T-lymphotropic virus 2
cucauguauccguccuccagga

SEQ ID NO: 4020379 - RNA, 11 nt, Human T-lymphotropic virus 2
gccccacccuc

SEQ ID NO: 4020380 - RNA, 12 nt, Human T-lymphotropic virus 2
gccccacccucu

SEQ ID NO: 4020381 - RNA, 23 nt, Human T-lymphotropic virus 2
gccccuaagaaugcaggcuaaua

SEQ ID NO: 4020382 - RNA, 12 nt, Human T-lymphotropic virus 2
gcccuccuggcc

SEQ ID NO: 4020383 - RNA, 17 nt, Human T-lymphotropic virus 2
gcccuuaccccaaagca

SEQ ID NO: 4020384 - RNA, 14 nt, Human T-lymphotropic virus 2
gccgucacugaaaa

SEQ ID NO: 4020385 - RNA, 19 nt, Human T-lymphotropic virus 2
gccucaaccccgcccuacc

SEQ ID NO: 4020386 - RNA, 22 nt, Human T-lymphotropic virus 2
gccuccaccaacuucuccccca

SEQ ID NO: 4020387 - RNA, 22 nt, Human T-lymphotropic virus 2
gccuccccuccuuccccaccca

SEQ ID NO: 4020388 - RNA, 21 nt, Human T-lymphotropic virus 2
gccucccgagccagccaccca

SEQ ID NO: 4020389 - RNA, 20 nt, Human T-lymphotropic virus 2
gccucgguugagacgccuuc

SEQ ID NO: 4020390 - RNA, 18 nt, Human T-lymphotropic virus 2
gccucucccuggucuccu

SEQ ID NO: 4020391 - RNA, 20 nt, Human T-lymphotropic virus 2
gccuuaccccaccuacagac

SEQ ID NO: 4020392 - RNA, 18 nt, Human T-lymphotropic virus 2
gccuucaccauuccccag

SEQ ID NO: 4020393 - RNA, 19 nt, Human T-lymphotropic virus 2
gccuucaccauuccccagc

SEQ ID NO: 4020394 - RNA, 21 nt, Human T-lymphotropic virus 2
gcgcccccgccgccccaguuc

SEQ ID NO: 4020395 - RNA, 20 nt, Human T-lymphotropic virus 2
gcuacuugacacaggagccg

SEQ ID NO: 4020396 - RNA, 21 nt, Human T-lymphotropic virus 2
gcuccccucccucgccuuccc

SEQ ID NO: 4020397 - RNA, 15 nt, Human T-lymphotropic virus 2
gcucccucaccgacc

SEQ ID NO: 4020398 - RNA, 19 nt, Human T-lymphotropic virus 2
gcuccucacgcuccugcag

SEQ ID NO: 4020399 - RNA, 20 nt, Human T-lymphotropic virus 2
gcugaaaaacaaggcucuga

SEQ ID NO: 4020400 - RNA, 20 nt, Human T-lymphotropic virus 2
gcugcuuucuccacccugcc

SEQ ID NO: 4020401 - RNA, 22 nt, Human T-lymphotropic virus 2
gcugcuuucuccacccugccag

SEQ ID NO: 4020402 - RNA, 19 nt, Human T-lymphotropic virus 2
gcuuaacuuucuccaggcu

SEQ ID NO: 4020403 - RNA, 16 nt, Human T-lymphotropic virus 2
gcuuggcuccacaccc

SEQ ID NO: 4020404 - RNA, 14 nt, Human T-lymphotropic virus 2
ggaacccaccacca

SEQ ID NO: 4020405 - RNA, 15 nt, Human T-lymphotropic virus 2
ggaagccaagucccu

SEQ ID NO: 4020406 - RNA, 19 nt, Human T-lymphotropic virus 2
ggaauuacaacaacucucc

SEQ ID NO: 4020407 - RNA, 16 nt, Human T-lymphotropic virus 2
ggacaguucaggaggu

SEQ ID NO: 4020408 - RNA, 22 nt, Human T-lymphotropic virus 2
ggacuuacaagaucuccuccag

SEQ ID NO: 4020409 - RNA, 19 nt, Human T-lymphotropic virus 2
ggaggaaggggaaccccuc

SEQ ID NO: 4020410 - RNA, 20 nt, Human T-lymphotropic virus 2
ggaggcccauguuccccccc

SEQ ID NO: 4020411 - RNA, 14 nt, Human T-lymphotropic virus 2
ggcaggcccgcccu

SEQ ID NO: 4020412 - RNA, 19 nt, Human T-lymphotropic virus 2
ggccagccuuccuaucaca

SEQ ID NO: 4020413 - RNA, 18 nt, Human T-lymphotropic virus 2
ggcccccccccacacagc

SEQ ID NO: 4020414 - RNA, 23 nt, Human T-lymphotropic virus 2
ggcccuccgauuucgacuuccag

SEQ ID NO: 4020415 - RNA, 22 nt, Human T-lymphotropic virus 2
ggccucacccauugcaaucaaa

SEQ ID NO: 4020416 - RNA, 21 nt, Human T-lymphotropic virus 2
ggccuccacggccucacccau

SEQ ID NO: 4020417 - RNA, 17 nt, Human T-lymphotropic virus 2
ggccucggcaccuccug

SEQ ID NO: 4020418 - RNA, 18 nt, Human T-lymphotropic virus 2
ggcggccuugccaccccu

SEQ ID NO: 4020419 - RNA, 16 nt, Human T-lymphotropic virus 2
ggcuagacucugccuu

SEQ ID NO: 4020420 - RNA, 17 nt, Human T-lymphotropic virus 2
ggcucccuaucucuggc

SEQ ID NO: 4020421 - RNA, 23 nt, Human T-lymphotropic virus 2
ggcucccuguauccagacugccu

SEQ ID NO: 4020422 - RNA, 16 nt, Human T-lymphotropic virus 2
ggcucugacgucuccc

SEQ ID NO: 4020423 - RNA, 15 nt, Human T-lymphotropic virus 2
uccgauggcuccccu

SEQ ID NO: 4020424 - RNA, 17 nt, Human T-lymphotropic virus 2
uccgcccaucaaacccu

SEQ ID NO: 4020425 - RNA, 23 nt, Human T-lymphotropic virus 2
uccgcccaucaaacccuccaggc

SEQ ID NO: 4020426 - RNA, 18 nt, Human T-lymphotropic virus 2
uccguccccaaaacaucu

SEQ ID NO: 4020427 - RNA, 12 nt, Human T-lymphotropic virus 2
uccuaaccuucc

SEQ ID NO: 4020428 - RNA, 18 nt, Human T-lymphotropic virus 2
uccuacaaugacccuugc

SEQ ID NO: 4020429 - RNA, 13 nt, Human T-lymphotropic virus 2
uccucauucacca

SEQ ID NO: 4020430 - RNA, 19 nt, Human T-lymphotropic virus 2
uccuccaugacccuccuag

SEQ ID NO: 4020431 - RNA, 22 nt, Human T-lymphotropic virus 2
uccuccccccuuuuucccucgc

SEQ ID NO: 4020432 - RNA, 14 nt, Human T-lymphotropic virus 2
uccuccgccaccuc

SEQ ID NO: 4020433 - RNA, 20 nt, Human T-lymphotropic virus 2
uccucuuuccuucccuugcc

SEQ ID NO: 4020434 - RNA, 15 nt, Human T-lymphotropic virus 2
uccugaagccucuac

SEQ ID NO: 4020435 - RNA, 18 nt, Human T-lymphotropic virus 2
uccugaggaacuccccuc

SEQ ID NO: 4020436 - RNA, 20 nt, Human T-lymphotropic virus 2
uccuucccuugcccugcccg

SEQ ID NO: 4020437 - RNA, 21 nt, Human T-lymphotropic virus 2
ucgauacucccacucaucccc

SEQ ID NO: 4020438 - RNA, 14 nt, Human T-lymphotropic virus 2
ucgccucucccugg

SEQ ID NO: 4020439 - RNA, 16 nt, Human T-lymphotropic virus 2
ucgccuucaccauucc

SEQ ID NO: 4020440 - RNA, 12 nt, Human T-lymphotropic virus 2
ucgguuccucuc

SEQ ID NO: 4020441 - RNA, 20 nt, Human T-lymphotropic virus 2
ucuauucgaugaauacacca

SEQ ID NO: 4020442 - RNA, 14 nt, Human T-lymphotropic virus 2
ucuccauuccccaa

SEQ ID NO: 4020443 - RNA, 20 nt, Human T-lymphotropic virus 2
ucuccauuccccaacaaacc

SEQ ID NO: 4020444 - RNA, 22 nt, Human T-lymphotropic virus 2
ucucccagcuaacccuccaggc

SEQ ID NO: 4020445 - RNA, 12 nt, Human T-lymphotropic virus 2
ucuccccuagcg

SEQ ID NO: 4020446 - RNA, 13 nt, Human T-lymphotropic virus 2
ucuccuccuacca

SEQ ID NO: 4020447 - RNA, 20 nt, Human T-lymphotropic virus 2
ucuccuuccccagggccccc

SEQ ID NO: 4020448 - RNA, 18 nt, Human T-lymphotropic virus 2
ucuccuuggccucaucuc

SEQ ID NO: 4020449 - RNA, 19 nt, Human T-lymphotropic virus 2
ucucgcucuacuccuccuc

SEQ ID NO: 4020450 - RNA, 19 nt, Human T-lymphotropic virus 2
ucucguucuuuccucuucg

SEQ ID NO: 4020451 - RNA, 18 nt, Human T-lymphotropic virus 2
ucugccuuaaacuucacu

SEQ ID NO: 4020452 - RNA, 19 nt, Human T-lymphotropic virus 2
ucugcucuuggcagccccc

SEQ ID NO: 4020453 - RNA, 14 nt, Human T-lymphotropic virus 2
ucuucgaacaacaa

SEQ ID NO: 4020454 - RNA, 16 nt, Human T-lymphotropic virus 2
ugaaccauacucagga

SEQ ID NO: 4020455 - RNA, 14 nt, Human T-lymphotropic virus 2
ugaaccucuccggg

SEQ ID NO: 4020456 - RNA, 19 nt, Human T-lymphotropic virus 2
ugaccccaccgccaaggac

SEQ ID NO: 4020457 - RNA, 17 nt, Human T-lymphotropic virus 2
ugaccuggucuccaagg

SEQ ID NO: 4020458 - RNA, 15 nt, Human T-lymphotropic virus 2
ugacgccccaaggcc

SEQ ID NO: 4020459 - RNA, 22 nt, Human T-lymphotropic virus 2
ugacgucccuccccccuaggaa

SEQ ID NO: 4020460 - RNA, 14 nt, Human T-lymphotropic virus 2
ugauccuuuucccg

SEQ ID NO: 4020461 - RNA, 13 nt, Human T-lymphotropic virus 2
ugcagccuaggcc

SEQ ID NO: 4020462 - RNA, 18 nt, Human T-lymphotropic virus 2
ugccaaaaaaucuuacaa

SEQ ID NO: 4020463 - RNA, 21 nt, Human T-lymphotropic virus 2
ugccaagcauggacauccgca

SEQ ID NO: 4020464 - RNA, 15 nt, Human T-lymphotropic virus 2
ugccaagccauggcc

SEQ ID NO: 4020465 - RNA, 18 nt, Human T-lymphotropic virus 2
ugccauuacuaccacccu

SEQ ID NO: 4020466 - RNA, 19 nt, Human T-lymphotropic virus 2
ugcccaagaccagacgcca

SEQ ID NO: 4020467 - RNA, 21 nt, Human T-lymphotropic virus 2
ugcccacaacucaaacccccu

SEQ ID NO: 4020468 - RNA, 21 nt, Human T-lymphotropic virus 2
ugccuuucuucccucucccgg

SEQ ID NO: 4020469 - RNA, 17 nt, Human T-lymphotropic virus 2
ugcuucccuaucuuaca

SEQ ID NO: 4020470 - RNA, 15 nt, Human T-lymphotropic virus 2
cccaagcaguaccag

SEQ ID NO: 4020471 - RNA, 23 nt, Human T-lymphotropic virus 2
cccaaugggcacgagaagcccuc

SEQ ID NO: 4020472 - RNA, 18 nt, Human T-lymphotropic virus 2
cccagcuaacccuccagg

SEQ ID NO: 4020473 - RNA, 19 nt, Human T-lymphotropic virus 2
cccagcuaacccuccaggc

SEQ ID NO: 4020474 - RNA, 20 nt, Human T-lymphotropic virus 2
cccagcuaacccuccaggca

SEQ ID NO: 4020475 - RNA, 21 nt, Human T-lymphotropic virus 2
ccccaggagcccccucagcuc

SEQ ID NO: 4020476 - RNA, 16 nt, Human T-lymphotropic virus 2
ccccauggcagggccc

SEQ ID NO: 4020477 - RNA, 15 nt, Human T-lymphotropic virus 2
cccccaccuccccaa

SEQ ID NO: 4020478 - RNA, 21 nt, Human T-lymphotropic virus 2
cuaacccccuccacguccugg

SEQ ID NO: 4020479 - RNA, 12 nt, Human T-lymphotropic virus 2
cuaacccuccag

SEQ ID NO: 4020480 - RNA, 13 nt, Human T-lymphotropic virus 2
cuaacccuccagg

SEQ ID NO: 4020481 - RNA, 14 nt, Human T-lymphotropic virus 2
cuaacccuccaggc

SEQ ID NO: 4020482 - RNA, 17 nt, Human T-lymphotropic virus 2
cuaacccuccaggcacu

SEQ ID NO: 4020483 - RNA, 19 nt, Human T-lymphotropic virus 2
cuaagagccaccaaugcca

SEQ ID NO: 4020484 - RNA, 21 nt, Human T-lymphotropic virus 2
cuacaucgacaugcccuccug

SEQ ID NO: 4020485 - RNA, 22 nt, Human T-lymphotropic virus 2
cuacaucgacaugcccuccugg

SEQ ID NO: 4020486 - RNA, 16 nt, Human T-lymphotropic virus 2
cuaccacccucaccuc

SEQ ID NO: 4020487 - RNA, 15 nt, Human T-lymphotropic virus 2
cuaccucuccuuggc

SEQ ID NO: 4020488 - RNA, 12 nt, Human T-lymphotropic virus 2
cuacuccuccuc

SEQ ID NO: 4020489 - RNA, 23 nt, Human T-lymphotropic virus 2
cuagucucuuuuggcgccacacc

SEQ ID NO: 4020490 - RNA, 18 nt, Human T-lymphotropic virus 2
cuauaccuauaccagcuu

SEQ ID NO: 4020491 - RNA, 21 nt, Human T-lymphotropic virus 2
cuaucacaagaauuccaggag

SEQ ID NO: 4020492 - RNA, 16 nt, Human T-lymphotropic virus 2
cuauguuccacccgcc

SEQ ID NO: 4020493 - RNA, 16 nt, Human T-lymphotropic virus 2
cucaaacccccucagg

SEQ ID NO: 4020494 - RNA, 16 nt, Human T-lymphotropic virus 2
cucaccgacccucugg

SEQ ID NO: 4020495 - RNA, 20 nt, Human T-lymphotropic virus 2
cucaccucuccuuccccagg

SEQ ID NO: 4020496 - RNA, 13 nt, Human T-lymphotropic virus 2
cucaccuugggga

SEQ ID NO: 4020497 - RNA, 23 nt, Human T-lymphotropic virus 2
cucacuggaaaagggacugccca

SEQ ID NO: 4020498 - RNA, 19 nt, Human T-lymphotropic virus 2
cucagcccauuucccagga

SEQ ID NO: 4020499 - RNA, 18 nt, Human T-lymphotropic virus 2
cuccacaccccccacccu

SEQ ID NO: 4020500 - RNA, 23 nt, Human T-lymphotropic virus 2
cuccaggcggccuugccaccccu

SEQ ID NO: 4020501 - RNA, 19 nt, Human T-lymphotropic virus 2
cuccauagacggcuccccc

SEQ ID NO: 4020502 - RNA, 17 nt, Human T-lymphotropic virus 2
cuccaugacccuccuag

SEQ ID NO: 4020503 - RNA, 21 nt, Human T-lymphotropic virus 2
cuccaugcguuacaugccauu

SEQ ID NO: 4020504 - RNA, 18 nt, Human T-lymphotropic virus 2
cuccauuauccucccccc

SEQ ID NO: 4020505 - RNA, 19 nt, Human T-lymphotropic virus 2
cucccagcuaacccuccag

SEQ ID NO: 4020506 - RNA, 23 nt, Human T-lymphotropic virus 2
cuccccaagcaguaccagccaua

SEQ ID NO: 4020507 - RNA, 15 nt, Human T-lymphotropic virus 2
cuccccccccuuccc

SEQ ID NO: 4020508 - RNA, 16 nt, Human T-lymphotropic virus 2
cuccccgacccaauuu

SEQ ID NO: 4020509 - RNA, 22 nt, Human T-lymphotropic virus 2
cuccccgacccaauuuccaccu

SEQ ID NO: 4020510 - RNA, 16 nt, Human T-lymphotropic virus 2
cucccgcugcuccucc

SEQ ID NO: 4020511 - RNA, 15 nt, Human T-lymphotropic virus 2
cucccguaccuccuc

SEQ ID NO: 4020512 - RNA, 16 nt, Human T-lymphotropic virus 2
cucccguaccuccucc

SEQ ID NO: 4020513 - RNA, 22 nt, Human T-lymphotropic virus 2
cucccucaccgacccucugguc

SEQ ID NO: 4020514 - RNA, 18 nt, Human T-lymphotropic virus 2
cucccuguauccagacug

SEQ ID NO: 4020515 - RNA, 21 nt, Human T-lymphotropic virus 2
cucccuuaucuuagcuccccu

SEQ ID NO: 4020516 - RNA, 23 nt, Human T-lymphotropic virus 2
cuccgccaaauccaggcccuucc

SEQ ID NO: 4020517 - RNA, 23 nt, Human T-lymphotropic virus 2
cuccgccaccuccccccccuucc

SEQ ID NO: 4020518 - RNA, 16 nt, Human T-lymphotropic virus 2
cuccucaggccaauuu

SEQ ID NO: 4020519 - RNA, 12 nt, Human T-lymphotropic virus 2
cuccuccaugac

SEQ ID NO: 4020520 - RNA, 17 nt, Human T-lymphotropic virus 2
cuccuccuaccacucca

SEQ ID NO: 4020521 - RNA, 18 nt, Human T-lymphotropic virus 2
cuccuccuaccacuccag

SEQ ID NO: 4020522 - RNA, 14 nt, Human T-lymphotropic virus 2
cuccucucagccca

SEQ ID NO: 4020523 - RNA, 13 nt, Human T-lymphotropic virus 2
cuccucucagguc

SEQ ID NO: 4020524 - RNA, 23 nt, Human T-lymphotropic virus 2
cuccucuccaauaccuuaucccu

SEQ ID NO: 4020525 - RNA, 19 nt, Human T-lymphotropic virus 2
cuccucugcucuuggcagc

SEQ ID NO: 4020526 - RNA, 18 nt, Human T-lymphotropic virus 2
cuccugaacugcuccucc

SEQ ID NO: 4020527 - RNA, 22 nt, Human T-lymphotropic virus 2
cuccuuccauaaccuucaccuu

SEQ ID NO: 4020528 - RNA, 14 nt, Human T-lymphotropic virus 2
cuccuuccccaggg

SEQ ID NO: 4020529 - RNA, 16 nt, Human T-lymphotropic virus 2
cucgaacaccuucccc

SEQ ID NO: 4020530 - RNA, 22 nt, Human T-lymphotropic virus 2
cucgagguugacaaagacaucu

SEQ ID NO: 4020531 - RNA, 12 nt, Human T-lymphotropic virus 2
cucgcaccugcu

SEQ ID NO: 4020532 - RNA, 17 nt, Human T-lymphotropic virus 2
cucgccucucccugguc

SEQ ID NO: 4020533 - RNA, 12 nt, Human T-lymphotropic virus 2
cucgcucccuca

SEQ ID NO: 4020534 - RNA, 18 nt, Human T-lymphotropic virus 2
cucgguuccucuccaggg

SEQ ID NO: 4020535 - RNA, 21 nt, Human T-lymphotropic virus 2
cucuaagugcggcuccuccau

SEQ ID NO: 4020536 - RNA, 18 nt, Human T-lymphotropic virus 2
cucucacgaaacacauuc

SEQ ID NO: 4020537 - RNA, 19 nt, Human T-lymphotropic virus 2
cucucacgaaacacauucc

SEQ ID NO: 4020538 - RNA, 15 nt, Human T-lymphotropic virus 2
cucuccaagcggccu

SEQ ID NO: 4020539 - RNA, 18 nt, Human T-lymphotropic virus 2
cucucccagcuaacccuc

SEQ ID NO: 4020540 - RNA, 17 nt, Human T-lymphotropic virus 2
cucugacgucucccccu

SEQ ID NO: 4020541 - RNA, 16 nt, Human T-lymphotropic virus 2
cucuuagacacccaca

SEQ ID NO: 4020542 - RNA, 18 nt, Human T-lymphotropic virus 2
cugaaccucuccgggaga

SEQ ID NO: 4020543 - RNA, 21 nt, Human T-lymphotropic virus 2
cugacgccccaaggccuccac

SEQ ID NO: 4020544 - RNA, 16 nt, Human T-lymphotropic virus 2
cugacgucucccccuu

SEQ ID NO: 4020545 - RNA, 15 nt, Human T-lymphotropic virus 2
cugagcgccuccagg

SEQ ID NO: 4020546 - RNA, 13 nt, Human T-lymphotropic virus 2
cugauccuaggcg

SEQ ID NO: 4020547 - RNA, 20 nt, Human T-lymphotropic virus 2
cugcaugguuugcguggaua

SEQ ID NO: 4020548 - RNA, 15 nt, Human T-lymphotropic virus 2
cugccaauagccacu

SEQ ID NO: 4020549 - RNA, 14 nt, Human T-lymphotropic virus 2
cugccuuaaacuuc

SEQ ID NO: 4020550 - RNA, 17 nt, Human T-lymphotropic virus 2
cugcuuucuccacccug

SEQ ID NO: 4020551 - RNA, 18 nt, Human T-lymphotropic virus 2
cuggaaccaacccucggg

SEQ ID NO: 4020552 - RNA, 20 nt, Human T-lymphotropic virus 2
cuggcauguacucuacaccc

SEQ ID NO: 4020553 - RNA, 16 nt, Human T-lymphotropic virus 2
cuggccaccuguccag

SEQ ID NO: 4020554 - RNA, 18 nt, Human T-lymphotropic virus 2
cuggcuuggcuccacacc

SEQ ID NO: 4020555 - RNA, 16 nt, Human T-lymphotropic virus 2
cuggucuccaaggccc

SEQ ID NO: 4020556 - RNA, 15 nt, Human T-lymphotropic virus 2
cuguacccagccacg

SEQ ID NO: 4020557 - RNA, 19 nt, Human T-lymphotropic virus 2
cuguauccuccgccaaauc

SEQ ID NO: 4020558 - RNA, 23 nt, Human T-lymphotropic virus 2
cuguccuaaccuuccccuagaca

SEQ ID NO: 4020559 - RNA, 12 nt, Human T-lymphotropic virus 2
cugucuccccca

SEQ ID NO: 4020560 - RNA, 15 nt, Human T-lymphotropic virus 2
cuuaacaaccccagg

SEQ ID NO: 4020561 - RNA, 16 nt, Human T-lymphotropic virus 2
cuuaacuuucuccagg

SEQ ID NO: 4020562 - RNA, 15 nt, Human T-lymphotropic virus 2
cuuaucaacccagaa

SEQ ID NO: 4020563 - RNA, 19 nt, Human T-lymphotropic virus 2
cuuaucccucgccuccccu

SEQ ID NO: 4020564 - RNA, 15 nt, Human T-lymphotropic virus 2
cuuauucccacauug

SEQ ID NO: 4020565 - RNA, 22 nt, Human T-lymphotropic virus 2
cuucaggccauuucccuccuag

SEQ ID NO: 4020566 - RNA, 17 nt, Human T-lymphotropic virus 2
cuuccaauuucccagga

SEQ ID NO: 4020567 - RNA, 15 nt, Human T-lymphotropic virus 2
cuucccccaccuccc

SEQ ID NO: 4020568 - RNA, 15 nt, Human T-lymphotropic virus 2
cuucgaacaacaauu

SEQ ID NO: 4020569 - RNA, 23 nt, Human T-lymphotropic virus 2
cuucgaacaacaauuagcagccg

SEQ ID NO: 4020570 - RNA, 22 nt, Human T-lymphotropic virus 2
cuucucuaagugcggcuccucc

SEQ ID NO: 4020571 - RNA, 12 nt, Human T-lymphotropic virus 2
cuucuuuucccc

SEQ ID NO: 4020572 - RNA, 17 nt, Human T-lymphotropic virus 2
cuuuccccacccaugac

SEQ ID NO: 4020573 - RNA, 12 nt, Human T-lymphotropic virus 2
cuuuccuucccu

SEQ ID NO: 4020574 - RNA, 23 nt, Human T-lymphotropic virus 2
caccucccaacccuucuccagga

SEQ ID NO: 4020575 - RNA, 22 nt, Human T-lymphotropic virus 2
caccuccccccccuuccccgga

SEQ ID NO: 4020576 - RNA, 11 nt, Human T-lymphotropic virus 2
caccugccuuc

SEQ ID NO: 4020577 - RNA, 22 nt, Human T-lymphotropic virus 2
caccuguccagagcaccaacuc

SEQ ID NO: 4020578 - RNA, 18 nt, Human T-lymphotropic virus 2
cacgauugguaucuccuc

SEQ ID NO: 4020579 - RNA, 16 nt, Human T-lymphotropic virus 2
cacgcaaugcuucccu

SEQ ID NO: 4020580 - RNA, 21 nt, Human T-lymphotropic virus 2
cacggcccugacgucccuccc

SEQ ID NO: 4020581 - RNA, 22 nt, Human T-lymphotropic virus 2
cacgucuggguagacaccuucu

SEQ ID NO: 4020582 - RNA, 23 nt, Human T-lymphotropic virus 2
cacucacgauugguaucuccucc

SEQ ID NO: 4020583 - RNA, 15 nt, Human T-lymphotropic virus 2
cacucagccuccacc

SEQ ID NO: 4020584 - RNA, 16 nt, Human T-lymphotropic virus 2
cacucaucccccugcg

SEQ ID NO: 4020585 - RNA, 13 nt, Human T-lymphotropic virus 2
guccgcagccaca

SEQ ID NO: 4020586 - RNA, 13 nt, Human T-lymphotropic virus 2
guccucccggagg

SEQ ID NO: 4020587 - RNA, 23 nt, Human T-lymphotropic virus 2
gucucccccaagguuccaccugc

SEQ ID NO: 4020588 - RNA, 13 nt, Human T-lymphotropic virus 2
agagcaccaacuc

SEQ ID NO: 4020589 - RNA, 15 nt, Human T-lymphotropic virus 2
agaugagucgccccc

SEQ ID NO: 4020590 - RNA, 22 nt, Human T-lymphotropic virus 2
agauguaaauuucacccaggaa

SEQ ID NO: 4020591 - RNA, 19 nt, Human T-lymphotropic virus 2
agccacaccaaccuccccg

SEQ ID NO: 4020592 - RNA, 15 nt, Human T-lymphotropic virus 2
agccagccacccagg

SEQ ID NO: 4020593 - RNA, 19 nt, Human T-lymphotropic virus 2
agcccaucuuacguucccu

SEQ ID NO: 4020594 - RNA, 14 nt, Human T-lymphotropic virus 2
agcccccucagcuc

SEQ ID NO: 4020595 - RNA, 13 nt, Human T-lymphotropic virus 2
agccuaggcccuc

SEQ ID NO: 4020596 - RNA, 14 nt, Human T-lymphotropic virus 2
agccuccaccaacu

SEQ ID NO: 4020597 - RNA, 20 nt, Human T-lymphotropic virus 2
agccuccaccaacuucuccc

SEQ ID NO: 4020598 - RNA, 20 nt, Human T-lymphotropic virus 2
agcggccucgguugagacgc

SEQ ID NO: 4020599 - RNA, 23 nt, Human T-lymphotropic virus 2
agcucaggccuggucgagagaac

SEQ ID NO: 4020600 - RNA, 13 nt, Human T-lymphotropic virus 2
agcucggcugccc

SEQ ID NO: 4020601 - RNA, 22 nt, Human T-lymphotropic virus 2
aggagguggcucgcucccucac

SEQ ID NO: 4020602 - RNA, 22 nt, Human T-lymphotropic virus 2
aggcaauaaccccgucuucccc

SEQ ID NO: 4020603 - RNA, 15 nt, Human T-lymphotropic virus 2
agggauauccaggaa

SEQ ID NO: 4020604 - RNA, 17 nt, Human T-lymphotropic virus 2
agggucuuuagagacac

SEQ ID NO: 4020605 - RNA, 21 nt, Human T-lymphotropic virus 2
aggucgagcucggcugccccu

SEQ ID NO: 4020606 - RNA, 17 nt, Human T-lymphotropic virus 2
agguggucuauguucca

SEQ ID NO: 4020607 - RNA, 13 nt, Human T-lymphotropic virus 2
aguaccagccaua

SEQ ID NO: 4020608 - RNA, 12 nt, Human T-lymphotropic virus 2
aguccuauacac

SEQ ID NO: 4020609 - RNA, 17 nt, Human T-lymphotropic virus 2
aguccuauacacuccaa

SEQ ID NO: 4020610 - RNA, 16 nt, Human T-lymphotropic virus 2
agucuccucucagguc

SEQ ID NO: 4020611 - RNA, 15 nt, Human T-lymphotropic virus 2
agugcggcuccucca

SEQ ID NO: 4020612 - RNA, 17 nt, Human T-lymphotropic virus 2
agugcggcuccuccaug

SEQ ID NO: 4020613 - RNA, 17 nt, Human T-lymphotropic virus 2
aguguggcuugucuccg

SEQ ID NO: 4020614 - RNA, 16 nt, Human T-lymphotropic virus 2
aguuauccuaggagag

SEQ ID NO: 4020615 - RNA, 12 nt, Human T-lymphotropic virus 2
aguucaggaggu

SEQ ID NO: 4020616 - RNA, 18 nt, Human T-lymphotropic virus 2
auaacugcaacaacucca

SEQ ID NO: 4020617 - RNA, 17 nt, Human T-lymphotropic virus 2
auacaauacuccuccuu

SEQ ID NO: 4020618 - RNA, 14 nt, Human T-lymphotropic virus 2
auaccccagacacu

SEQ ID NO: 4020619 - RNA, 17 nt, Human T-lymphotropic virus 2
auacuucgccuucacca

SEQ ID NO: 4020620 - RNA, 22 nt, Human T-lymphotropic virus 2
auacuuuuagccagccccacca

SEQ ID NO: 4020621 - RNA, 15 nt, Human T-lymphotropic virus 2
aucagcuccccuccc

SEQ ID NO: 4020622 - RNA, 23 nt, Human T-lymphotropic virus 2
aucagcuccccucccucgccuuc

SEQ ID NO: 4020623 - RNA, 10 nt, Human T-lymphotropic virus 2
auccagccuc

SEQ ID NO: 4020624 - RNA, 19 nt, Human T-lymphotropic virus 2
auccagcugaccuuacaga

SEQ ID NO: 4020625 - RNA, 14 nt, Human T-lymphotropic virus 2
aucccgaccccaga

SEQ ID NO: 4020626 - RNA, 13 nt, Human T-lymphotropic virus 2
auccuccccccuu

SEQ ID NO: 4020627 - RNA, 21 nt, Human T-lymphotropic virus 2
auccuccccccuuuuucccuc

SEQ ID NO: 4020628 - RNA, 19 nt, Human T-lymphotropic virus 2
auccucuuuccuucccuug

SEQ ID NO: 4020629 - RNA, 16 nt, Human T-lymphotropic virus 2
auccuuuccuccugcc

SEQ ID NO: 4020630 - RNA, 15 nt, Human T-lymphotropic virus 2
aucuccauuccccaa

SEQ ID NO: 4020631 - RNA, 20 nt, Human T-lymphotropic virus 2
augacaggcuacaaccccau

SEQ ID NO: 4020632 - RNA, 21 nt, Human T-lymphotropic virus 2
augaccuggucuccaaggccc

SEQ ID NO: 4020633 - RNA, 22 nt, Human T-lymphotropic virus 2
augccuggaaccaacccucggg

SEQ ID NO: 4020634 - RNA, 23 nt, Human T-lymphotropic virus 2
augccuuucuucccucucccggc

SEQ ID NO: 4020635 - RNA, 12 nt, Human T-lymphotropic virus 2
auggacacucac

SEQ ID NO: 4020636 - RNA, 18 nt, Human T-lymphotropic virus 2
auggcgacuagccucccg

SEQ ID NO: 4020637 - RNA, 20 nt, Human T-lymphotropic virus 2
augggacaaacaccucagcc

SEQ ID NO: 4020638 - RNA, 19 nt, Human T-lymphotropic virus 2
augguaaauggagguucau

SEQ ID NO: 4020639 - RNA, 18 nt, Human T-lymphotropic virus 2
auguaaauuucacccagg

SEQ ID NO: 4020640 - RNA, 20 nt, Human T-lymphotropic virus 2
auguaaauuucacccaggaa

SEQ ID NO: 4020641 - RNA, 16 nt, Human T-lymphotropic virus 2
augucaugaaccccag

SEQ ID NO: 4020642 - RNA, 19 nt, Human T-lymphotropic virus 2
auuacaaguuauccuagga

SEQ ID NO: 4020643 - RNA, 16 nt, Human T-lymphotropic virus 2
auuccccaacaaaccu

SEQ ID NO: 4020644 - RNA, 22 nt, Human T-lymphotropic virus 2
auucgaaaccaaagccuuccau

SEQ ID NO: 4020645 - RNA, 13 nt, Human T-lymphotropic virus 2
auucugccacccc

SEQ ID NO: 4020646 - RNA, 11 nt, Human T-lymphotropic virus 2
auuggccccug

SEQ ID NO: 4020647 - RNA, 17 nt, Human T-lymphotropic virus 2
auuuccggcccuuaccc

SEQ ID NO: 4020648 - RNA, 20 nt, Human T-lymphotropic virus 2
caaaagggggagcuccuugc

SEQ ID NO: 4020649 - RNA, 18 nt, Human T-lymphotropic virus 2
caaacaccauaggccucg

SEQ ID NO: 4020650 - RNA, 13 nt, Human T-lymphotropic virus 2
caaacccuccagg

SEQ ID NO: 4020651 - RNA, 14 nt, Human T-lymphotropic virus 2
caaacccuccaggc

SEQ ID NO: 4020652 - RNA, 14 nt, Human T-lymphotropic virus 2
caaaccuccucccg

SEQ ID NO: 4020653 - RNA, 15 nt, Human T-lymphotropic virus 2
caaagacaucuccca

SEQ ID NO: 4020654 - RNA, 14 nt, Human T-lymphotropic virus 2
caaagcccccaggg

SEQ ID NO: 4020655 - RNA, 18 nt, Human T-lymphotropic virus 2
caaauccaggcccuucca

SEQ ID NO: 4020656 - RNA, 16 nt, Human T-lymphotropic virus 2
caacaaaccccaggcc

SEQ ID NO: 4020657 - RNA, 16 nt, Human T-lymphotropic virus 2
caacaacucucccagc

SEQ ID NO: 4020658 - RNA, 20 nt, Human T-lymphotropic virus 2
caacagaccaccaacaccau

SEQ ID NO: 4020659 - RNA, 23 nt, Human T-lymphotropic virus 2
caacauacgccguggagcgcagc

SEQ ID NO: 4020660 - RNA, 19 nt, Human T-lymphotropic virus 2
caaccacggaggccccccc

SEQ ID NO: 4020661 - RNA, 11 nt, Human T-lymphotropic virus 2
caaccccacca

SEQ ID NO: 4020662 - RNA, 15 nt, Human T-lymphotropic virus 2
caacccuucuccagg

SEQ ID NO: 4020663 - RNA, 13 nt, Human T-lymphotropic virus 2
caacucaccuggg

SEQ ID NO: 4020664 - RNA, 14 nt, Human T-lymphotropic virus 2
caacuucuccccca

SEQ ID NO: 4020665 - RNA, 13 nt, Human T-lymphotropic virus 2
caagaccaucuac

SEQ ID NO: 4020666 - RNA, 23 nt, Human T-lymphotropic virus 2
caagagcuuguaucacccucacc

SEQ ID NO: 4020667 - RNA, 19 nt, Human T-lymphotropic virus 2
caagauccuucucacugga

SEQ ID NO: 4020668 - RNA, 15 nt, Human T-lymphotropic virus 2
caagaucuccuccag

SEQ ID NO: 4020669 - RNA, 14 nt, Human T-lymphotropic virus 2
caagcccgcggaca

SEQ ID NO: 4020670 - RNA, 18 nt, Human T-lymphotropic virus 2
caagggcuagggcuuccu

SEQ ID NO: 4020671 - RNA, 19 nt, Human T-lymphotropic virus 2
caagguccuuaccccuccc

SEQ ID NO: 4020672 - RNA, 20 nt, Human T-lymphotropic virus 2
caaggugauguaacccauua

SEQ ID NO: 4020673 - RNA, 16 nt, Human T-lymphotropic virus 2
caauagcaguguggcu

SEQ ID NO: 4020674 - RNA, 14 nt, Human T-lymphotropic virus 2
caaucccuccagga

SEQ ID NO: 4020675 - RNA, 22 nt, Human T-lymphotropic virus 2
caauccugucuccucucagccc

SEQ ID NO: 4020676 - RNA, 15 nt, Human T-lymphotropic virus 2
caauguugcuuccuc

SEQ ID NO: 4020677 - RNA, 16 nt, Human T-lymphotropic virus 2
cacaacaaaccccagg

SEQ ID NO: 4020678 - RNA, 17 nt, Human T-lymphotropic virus 2
cacaacaaaccccaggc

SEQ ID NO: 4020679 - RNA, 15 nt, Human T-lymphotropic virus 2
cacaauguuccaacc

SEQ ID NO: 4020680 - RNA, 16 nt, Human T-lymphotropic virus 2
cacaauguuccaaccc

SEQ ID NO: 4020681 - RNA, 23 nt, Human T-lymphotropic virus 2
cacaguccuccacuaccacccau

SEQ ID NO: 4020682 - RNA, 22 nt, Human T-lymphotropic virus 2
caccaacucaccugggacccca

SEQ ID NO: 4020683 - RNA, 16 nt, Human T-lymphotropic virus 2
caccauuccccagcca

SEQ ID NO: 4020684 - RNA, 14 nt, Human T-lymphotropic virus 2
cacccaugacaugg

SEQ ID NO: 4020685 - RNA, 13 nt, Human T-lymphotropic virus 2
cacccccccugcc

SEQ ID NO: 4020686 - RNA, 15 nt, Human T-lymphotropic virus 2
cacccucaccucucc

SEQ ID NO: 4020687 - RNA, 17 nt, Human T-lymphotropic virus 2
cacccucaccucuccuu

SEQ ID NO: 4020688 - RNA, 21 nt, Human T-lymphotropic virus 2
cacccucaccucuccuucccc

SEQ ID NO: 4020689 - RNA, 13 nt, Human T-lymphotropic virus 2
cacccugccaggc

SEQ ID NO: 4020690 - RNA, 17 nt, Human T-lymphotropic virus 2
cacccuuacccacuucc

SEQ ID NO: 4020691 - RNA, 14 nt, Human T-lymphotropic virus 2
caguccauccugga

SEQ ID NO: 4020692 - RNA, 18 nt, Human T-lymphotropic virus 2
caguuugaccccaccgcc

SEQ ID NO: 4020693 - RNA, 14 nt, Human T-lymphotropic virus 2
cauaaccuucaccu

SEQ ID NO: 4020694 - RNA, 14 nt, Human T-lymphotropic virus 2
cauacucaggacca

SEQ ID NO: 4020695 - RNA, 14 nt, Human T-lymphotropic virus 2
cauauucugccacc

SEQ ID NO: 4020696 - RNA, 14 nt, Human T-lymphotropic virus 2
caucaaacccucca

SEQ ID NO: 4020697 - RNA, 23 nt, Human T-lymphotropic virus 2
caucaagcaggaggucagcuccu

SEQ ID NO: 4020698 - RNA, 16 nt, Human T-lymphotropic virus 2
caucaccucagaaccc

SEQ ID NO: 4020699 - RNA, 23 nt, Human T-lymphotropic virus 2
caucccuccuaucuacucucuca

SEQ ID NO: 4020700 - RNA, 15 nt, Human T-lymphotropic virus 2
caucuaccuccacca

SEQ ID NO: 4020701 - RNA, 18 nt, Human T-lymphotropic virus 2
caucucgauacucccacu

SEQ ID NO: 4020702 - RNA, 20 nt, Human T-lymphotropic virus 2
caucucgauacucccacuca

SEQ ID NO: 4020703 - RNA, 22 nt, Human T-lymphotropic virus 2
caugaggaaaauguuucccaca

SEQ ID NO: 4020704 - RNA, 14 nt, Human T-lymphotropic virus 2
caugcccuccuggc

SEQ ID NO: 4020705 - RNA, 21 nt, Human T-lymphotropic virus 2
caugucaggcguggacaccca

SEQ ID NO: 4020706 - RNA, 13 nt, Human T-lymphotropic virus 2
cauuauccucccc

SEQ ID NO: 4020707 - RNA, 12 nt, Human T-lymphotropic virus 2
cauucccucgcc

SEQ ID NO: 4020708 - RNA, 19 nt, Human T-lymphotropic virus 2
cauuccugaagccucuacc

SEQ ID NO: 4020709 - RNA, 21 nt, Human T-lymphotropic virus 2
cauucgccggggccucuugcc

SEQ ID NO: 4020710 - RNA, 17 nt, Human T-lymphotropic virus 2
cauugcaaucccuccag

SEQ ID NO: 4020711 - RNA, 19 nt, Human T-lymphotropic virus 2
cauugcuaccaaccucgcc

SEQ ID NO: 4020712 - RNA, 15 nt, Human T-lymphotropic virus 2
ccaaagcccccaggg

SEQ ID NO: 4020713 - RNA, 17 nt, Human T-lymphotropic virus 2
ccaaaucccccucccca

SEQ ID NO: 4020714 - RNA, 19 nt, Human T-lymphotropic virus 2
ccaacccgucugcacgugg

SEQ ID NO: 4020715 - RNA, 23 nt, Human T-lymphotropic virus 2
ccaacccucggggaucagcuccc

SEQ ID NO: 4020716 - RNA, 14 nt, Human T-lymphotropic virus 2
ccaacccuucccuu

SEQ ID NO: 4020717 - RNA, 19 nt, Human T-lymphotropic virus 2
ccaauggacacucacugaa

SEQ ID NO: 4020718 - RNA, 20 nt, Human T-lymphotropic virus 2
ccacagcgguuacaaaaccg

SEQ ID NO: 4020719 - RNA, 12 nt, Human T-lymphotropic virus 2
ccaccaaugcca

SEQ ID NO: 4020720 - RNA, 18 nt, Human T-lymphotropic virus 2
ccaccaauugcugccaau

SEQ ID NO: 4020721 - RNA, 22 nt, Human T-lymphotropic virus 2
ccaccacuccugucucccccaa

SEQ ID NO: 4020722 - RNA, 20 nt, Human T-lymphotropic virus 2
ccaccucaggcacuacugag

SEQ ID NO: 4020723 - RNA, 16 nt, Human T-lymphotropic virus 2
ccaccuguccagagca

SEQ ID NO: 4020724 - RNA, 14 nt, Human T-lymphotropic virus 2
cucccauaggaccu

SEQ ID NO: 4020725 - RNA, 17 nt, Human T-lymphotropic virus 2
cucccauaggaccuucu

SEQ ID NO: 4020726 - RNA, 20 nt, Human T-lymphotropic virus 2
cuccccaaguggaccaauuu

SEQ ID NO: 4020727 - RNA, 16 nt, Human T-lymphotropic virus 2
cuccccccccuucccc

SEQ ID NO: 4020728 - RNA, 13 nt, Human T-lymphotropic virus 2
cuccccccuagga

SEQ ID NO: 4020729 - RNA, 17 nt, Human T-lymphotropic virus 2
cuccccucauccaagug

SEQ ID NO: 4020730 - RNA, 19 nt, Human T-lymphotropic virus 2
cucccgagccagccaccca

SEQ ID NO: 4020731 - RNA, 16 nt, Human T-lymphotropic virus 2
cucccucgccuucccc

SEQ ID NO: 4020732 - RNA, 20 nt, Human T-lymphotropic virus 2
cucccuuaucuuagcucccc

SEQ ID NO: 4020733 - RNA, 19 nt, Human T-lymphotropic virus 2
cuccguuaugggacaaaca

SEQ ID NO: 4020734 - RNA, 17 nt, Human T-lymphotropic virus 2
cuccuccaucccaaccc

SEQ ID NO: 4020735 - RNA, 17 nt, Human T-lymphotropic virus 2
cuccuccgccaccuccc

SEQ ID NO: 4020736 - RNA, 13 nt, Human T-lymphotropic virus 2
cuccuccuaccac

SEQ ID NO: 4020737 - RNA, 12 nt, Human T-lymphotropic virus 2
cuccucucagcc

SEQ ID NO: 4020738 - RNA, 20 nt, Human T-lymphotropic virus 2
cuccugaacugcuccuccca

SEQ ID NO: 4020739 - RNA, 15 nt, Human T-lymphotropic virus 2
cuccuggccaccugu

SEQ ID NO: 4020740 - RNA, 21 nt, Human T-lymphotropic virus 2
cuccuguuggaucucccuucc

SEQ ID NO: 4020741 - RNA, 19 nt, Human T-lymphotropic virus 2
cucgccuccccuccuuccc

SEQ ID NO: 4020742 - RNA, 13 nt, Human T-lymphotropic virus 2
cucgccucucccu

SEQ ID NO: 4020743 - RNA, 17 nt, Human T-lymphotropic virus 2
cucgcucuacuccuccu

SEQ ID NO: 4020744 - RNA, 19 nt, Human T-lymphotropic virus 2
cucuacacccccaacaucu

SEQ ID NO: 4020745 - RNA, 16 nt, Human T-lymphotropic virus 2
cucucagcccauuucc

SEQ ID NO: 4020746 - RNA, 13 nt, Human T-lymphotropic virus 2
cucucauccuggc

SEQ ID NO: 4020747 - RNA, 22 nt, Human T-lymphotropic virus 2
cucuccagggggaggcacacca

SEQ ID NO: 4020748 - RNA, 13 nt, Human T-lymphotropic virus 2
cucuccucuccaa

SEQ ID NO: 4020749 - RNA, 21 nt, Human T-lymphotropic virus 2
cucucuuacaccucccaaccc

SEQ ID NO: 4020750 - RNA, 21 nt, Human T-lymphotropic virus 2
cucugacgauuacccccugcc

SEQ ID NO: 4020751 - RNA, 18 nt, Human T-lymphotropic virus 2
cugaaaaacaaggcucug

SEQ ID NO: 4020752 - RNA, 14 nt, Human T-lymphotropic virus 2
cugaaaccacggcc

SEQ ID NO: 4020753 - RNA, 17 nt, Human T-lymphotropic virus 2
cugacgauuacccccug

SEQ ID NO: 4020754 - RNA, 17 nt, Human T-lymphotropic virus 2
cugacgccccaaggccu

SEQ ID NO: 4020755 - RNA, 19 nt, Human T-lymphotropic virus 2
cugacgccccaaggccucc

SEQ ID NO: 4020756 - RNA, 22 nt, Human T-lymphotropic virus 2
cugacgucccuccccccuagga

SEQ ID NO: 4020757 - RNA, 15 nt, Human T-lymphotropic virus 2
cugacgucucccccu

SEQ ID NO: 4020758 - RNA, 17 nt, Human T-lymphotropic virus 2
cugcacguggaaccucg

SEQ ID NO: 4020759 - RNA, 20 nt, Human T-lymphotropic virus 2
cugccaagccauggccuucc

SEQ ID NO: 4020760 - RNA, 19 nt, Human T-lymphotropic virus 2
cugccaauagccacuccaa

SEQ ID NO: 4020761 - RNA, 16 nt, Human T-lymphotropic virus 2
cugcccgcuccuccau

SEQ ID NO: 4020762 - RNA, 19 nt, Human T-lymphotropic virus 2
cugcccgcuccuccauccc

SEQ ID NO: 4020763 - RNA, 18 nt, Human T-lymphotropic virus 2
cuggucuccaaggcccug

SEQ ID NO: 4020764 - RNA, 16 nt, Human T-lymphotropic virus 2
cugucccaaugggcac

SEQ ID NO: 4020765 - RNA, 14 nt, Human T-lymphotropic virus 2
cuuaaacuucacuu

SEQ ID NO: 4020766 - RNA, 17 nt, Human T-lymphotropic virus 2
cuuaacuuucuccaggc

SEQ ID NO: 4020767 - RNA, 14 nt, Human T-lymphotropic virus 2
cuuacaccucccaa

SEQ ID NO: 4020768 - RNA, 14 nt, Human T-lymphotropic virus 2
cuuaccccucccac

SEQ ID NO: 4020769 - RNA, 20 nt, Human T-lymphotropic virus 2
cuuccauaaccuucaccuuc

SEQ ID NO: 4020770 - RNA, 17 nt, Human T-lymphotropic virus 2
cuuccaucccuccuauc

SEQ ID NO: 4020771 - RNA, 12 nt, Human T-lymphotropic virus 2
cuuccccuagcg

SEQ ID NO: 4020772 - RNA, 14 nt, Human T-lymphotropic virus 2
cuuccgugggaccg

SEQ ID NO: 4020773 - RNA, 16 nt, Human T-lymphotropic virus 2
cuuccugaaccucucc

SEQ ID NO: 4020774 - RNA, 20 nt, Human T-lymphotropic virus 2
cuuccugaaccucuccggga

SEQ ID NO: 4020775 - RNA, 18 nt, Human T-lymphotropic virus 2
cuucuauaccucccagac

SEQ ID NO: 4020776 - RNA, 20 nt, Human T-lymphotropic virus 2
cuuguaucacccucacccca

SEQ ID NO: 4020777 - RNA, 17 nt, Human T-lymphotropic virus 2
cuugucuccgcccuagc

SEQ ID NO: 4020778 - RNA, 20 nt, Human T-lymphotropic virus 2
cuuguuccccugacgcccca

SEQ ID NO: 4020779 - RNA, 15 nt, Human T-lymphotropic virus 2
cuuuccccaacucca

SEQ ID NO: 4020780 - RNA, 13 nt, Human T-lymphotropic virus 2
cuuuuccccuuca

SEQ ID NO: 4020781 - RNA, 16 nt, Human T-lymphotropic virus 2
cuuuugcuguccuucu

SEQ ID NO: 4020782 - RNA, 20 nt, Human T-lymphotropic virus 2
cuuuuuccaaaucccccucc

SEQ ID NO: 4020783 - RNA, 15 nt, Human T-lymphotropic virus 2
gaaaaaaauagaccu

SEQ ID NO: 4020784 - RNA, 13 nt, Human T-lymphotropic virus 2
gaaaaacaaggcu

SEQ ID NO: 4020785 - RNA, 20 nt, Human T-lymphotropic virus 2
gaaaccaaagccuuccaucc

SEQ ID NO: 4020786 - RNA, 13 nt, Human T-lymphotropic virus 2
gaaccccuccugu

SEQ ID NO: 4020787 - RNA, 13 nt, Human T-lymphotropic virus 2
gaagccaaguccc

SEQ ID NO: 4020788 - RNA, 18 nt, Human T-lymphotropic virus 2
gacaaacaccucagccua

SEQ ID NO: 4020789 - RNA, 15 nt, Human T-lymphotropic virus 2
gacaucucccaccuu

SEQ ID NO: 4020790 - RNA, 17 nt, Human T-lymphotropic virus 2
gaccagacuauccuuca

SEQ ID NO: 4020791 - RNA, 16 nt, Human T-lymphotropic virus 2
gaccuacccaccacaa

SEQ ID NO: 4020792 - RNA, 15 nt, Human T-lymphotropic virus 2
gaccuggucuccaag

SEQ ID NO: 4020793 - RNA, 13 nt, Human T-lymphotropic virus 2
gacggcucccccc

SEQ ID NO: 4020794 - RNA, 14 nt, Human T-lymphotropic virus 2
gacgucccuccccc

SEQ ID NO: 4020795 - RNA, 17 nt, Human T-lymphotropic virus 2
gacgucccuccccccua

SEQ ID NO: 4020796 - RNA, 19 nt, Human T-lymphotropic virus 2
gacuacacccccccugccc

SEQ ID NO: 4020797 - RNA, 19 nt, Human T-lymphotropic virus 2
gagcuuguaucacccucac

SEQ ID NO: 4020798 - RNA, 18 nt, Human T-lymphotropic virus 2
gaggaacuccccucaucc

SEQ ID NO: 4020799 - RNA, 23 nt, Human T-lymphotropic virus 2
gaggaauuacaacaacucuccca

SEQ ID NO: 4020800 - RNA, 14 nt, Human T-lymphotropic virus 2
gagguggcucgcuc

SEQ ID NO: 4020801 - RNA, 15 nt, Human T-lymphotropic virus 2
gauagauccagccuc

SEQ ID NO: 4020802 - RNA, 18 nt, Human T-lymphotropic virus 2
gaucucccuuccaccuca

SEQ ID NO: 4020803 - RNA, 19 nt, Human T-lymphotropic virus 2
gauggcaaauccaccacag

SEQ ID NO: 4020804 - RNA, 17 nt, Human T-lymphotropic virus 2
gaugucagacucgccuc

SEQ ID NO: 4020805 - RNA, 16 nt, Human T-lymphotropic virus 2
gauuacccccugccca

SEQ ID NO: 4020806 - RNA, 21 nt, Human T-lymphotropic virus 2
gauuuccggcccuuaccccaa

SEQ ID NO: 4020807 - RNA, 20 nt, Human T-lymphotropic virus 2
gcaaacaccuacaaucccua

SEQ ID NO: 4020808 - RNA, 14 nt, Human T-lymphotropic virus 2
gcaaaccaacaccc

SEQ ID NO: 4020809 - RNA, 14 nt, Human T-lymphotropic virus 2
gcaaucccuccagg

SEQ ID NO: 4020810 - RNA, 22 nt, Human T-lymphotropic virus 2
gcacugaccacgcauggccuuc

SEQ ID NO: 4020811 - RNA, 16 nt, Human T-lymphotropic virus 2
gcagcaaauccccuag

SEQ ID NO: 4020812 - RNA, 22 nt, Human T-lymphotropic virus 2
gcagcaagggcuagggcuuccu

SEQ ID NO: 4020813 - RNA, 19 nt, Human T-lymphotropic virus 2
gcagccacaccaaccuccc

SEQ ID NO: 4020814 - RNA, 18 nt, Human T-lymphotropic virus 2
gcaggcgucccggggcca

SEQ ID NO: 4020815 - RNA, 19 nt, Human T-lymphotropic virus 2
gcaggcgucccggggccaa

SEQ ID NO: 4020816 - RNA, 21 nt, Human T-lymphotropic virus 2
gcauacacgggccccgucucc

SEQ ID NO: 4020817 - RNA, 17 nt, Human T-lymphotropic virus 2
gccaauuuucacccucu

SEQ ID NO: 4020818 - RNA, 19 nt, Human T-lymphotropic virus 2
gccaauuuucacccucucc

SEQ ID NO: 4020819 - RNA, 15 nt, Human T-lymphotropic virus 2
gccacaccaaccucc

SEQ ID NO: 4020820 - RNA, 14 nt, Human T-lymphotropic virus 2
gccagccacccagg

SEQ ID NO: 4020821 - RNA, 24 nt, Human T-lymphotropic virus 2
gccaggggcuucuauaccucccag

SEQ ID NO: 4020822 - RNA, 24 nt, Human T-lymphotropic virus 2
gccaucuuuaguaguucaguccuc

SEQ ID NO: 4020823 - RNA, 21 nt, Human T-lymphotropic virus 2
gcccaucaaacccuccaggcg

SEQ ID NO: 4020824 - RNA, 16 nt, Human T-lymphotropic virus 2
gccccaaggccuccac

SEQ ID NO: 4020825 - RNA, 15 nt, Human T-lymphotropic virus 2
ccaccuuacccaggc

SEQ ID NO: 4020826 - RNA, 17 nt, Human T-lymphotropic virus 2
ccacgcauggccuucca

SEQ ID NO: 4020827 - RNA, 15 nt, Human T-lymphotropic virus 2
ccacggccucaccca

SEQ ID NO: 4020828 - RNA, 14 nt, Human T-lymphotropic virus 2
ccacgggcuuuccc

SEQ ID NO: 4020829 - RNA, 20 nt, Human T-lymphotropic virus 2
ccacuagcccagcagagccg

SEQ ID NO: 4020830 - RNA, 17 nt, Human T-lymphotropic virus 2
ccagaugagucgccccc

SEQ ID NO: 4020831 - RNA, 23 nt, Human T-lymphotropic virus 2
ccagccauacuucgccuucacca

SEQ ID NO: 4020832 - RNA, 14 nt, Human T-lymphotropic virus 2
ccagcucugccaau

SEQ ID NO: 4020833 - RNA, 19 nt, Human T-lymphotropic virus 2
ccagcuuuccccacccaug

SEQ ID NO: 4020834 - RNA, 19 nt, Human T-lymphotropic virus 2
ccaggcggccuugccaccc

SEQ ID NO: 4020835 - RNA, 22 nt, Human T-lymphotropic virus 2
ccaggggcuucuauaccuccca

SEQ ID NO: 4020836 - RNA, 13 nt, Human T-lymphotropic virus 2
ccaguccauccug

SEQ ID NO: 4020837 - RNA, 19 nt, Human T-lymphotropic virus 2
ccaguucaaacuccuccaa

SEQ ID NO: 4020838 - RNA, 16 nt, Human T-lymphotropic virus 2
ccaucaaaacccagga

SEQ ID NO: 4020839 - RNA, 17 nt, Human T-lymphotropic virus 2
ccaucccaacccuuccc

SEQ ID NO: 4020840 - RNA, 17 nt, Human T-lymphotropic virus 2
ccaucuaccuccaccau

SEQ ID NO: 4020841 - RNA, 20 nt, Human T-lymphotropic virus 2
ccaucuuaacaaccccaggu

SEQ ID NO: 4020842 - RNA, 16 nt, Human T-lymphotropic virus 2
ccaugacuccgaccuu

SEQ ID NO: 4020843 - RNA, 20 nt, Human T-lymphotropic virus 2
ccaugcguuacaugccauuc

SEQ ID NO: 4020844 - RNA, 22 nt, Human T-lymphotropic virus 2
ccaugucauauucugccacccc

SEQ ID NO: 4020845 - RNA, 13 nt, Human T-lymphotropic virus 2
ccauguccgcagc

SEQ ID NO: 4020846 - RNA, 22 nt, Human T-lymphotropic virus 2
ccauuccccaacaaaccuccuc

SEQ ID NO: 4020847 - RNA, 17 nt, Human T-lymphotropic virus 2
ccauuggggccuuccuc

SEQ ID NO: 4020848 - RNA, 16 nt, Human T-lymphotropic virus 2
cccaaggccuccacgg

SEQ ID NO: 4020849 - RNA, 13 nt, Human T-lymphotropic virus 2
cccacacagcccu

SEQ ID NO: 4020850 - RNA, 21 nt, Human T-lymphotropic virus 2
cccaccacaauguuccaaccc

SEQ ID NO: 4020851 - RNA, 18 nt, Human T-lymphotropic virus 2
cccacucagccuccacca

SEQ ID NO: 4020852 - RNA, 17 nt, Human T-lymphotropic virus 2
cccacuuccccuagcgc

SEQ ID NO: 4020853 - RNA, 17 nt, Human T-lymphotropic virus 2
cccagccacgccccccu

SEQ ID NO: 4020854 - RNA, 18 nt, Human T-lymphotropic virus 2
cccagccacgccccccuc

SEQ ID NO: 4020855 - RNA, 14 nt, Human T-lymphotropic virus 2
cccaggagcccccu

SEQ ID NO: 4020856 - RNA, 18 nt, Human T-lymphotropic virus 2
cccaucaaacccuccagg

SEQ ID NO: 4020857 - RNA, 16 nt, Human T-lymphotropic virus 2
cccauugguccaugac

SEQ ID NO: 4020858 - RNA, 21 nt, Human T-lymphotropic virus 2
ccccaaaacaucuacaccacc

SEQ ID NO: 4020859 - RNA, 18 nt, Human T-lymphotropic virus 2
ccccaaagagcccaucuu

SEQ ID NO: 4020860 - RNA, 21 nt, Human T-lymphotropic virus 2
ccccaaagcagggcagccauc

SEQ ID NO: 4020861 - RNA, 19 nt, Human T-lymphotropic virus 2
cccccugcggcagcaacag

SEQ ID NO: 4020862 - RNA, 21 nt, Human T-lymphotropic virus 2
ccccgcucacauuccucccau

SEQ ID NO: 4020863 - RNA, 17 nt, Human T-lymphotropic virus 2
ccccgucuccaguccau

SEQ ID NO: 4020864 - RNA, 15 nt, Human T-lymphotropic virus 2
ccccucccaccacuc

SEQ ID NO: 4020865 - RNA, 13 nt, Human T-lymphotropic virus 2
ccccuccccaagc

SEQ ID NO: 4020866 - RNA, 20 nt, Human T-lymphotropic virus 2
ccccuccuguuggaucuccc

SEQ ID NO: 4020867 - RNA, 19 nt, Human T-lymphotropic virus 2
ccccuguauccuccgccaa

SEQ ID NO: 4020868 - RNA, 23 nt, Human T-lymphotropic virus 2
ccccuuacguggaacccaccacc

SEQ ID NO: 4020869 - RNA, 21 nt, Human T-lymphotropic virus 2
ccccuuagguagucgcucccc

SEQ ID NO: 4020870 - RNA, 23 nt, Human T-lymphotropic virus 2
cccgagccagccacccagggcga

SEQ ID NO: 4020871 - RNA, 20 nt, Human T-lymphotropic virus 2
cccgauggcaaauccaccac

SEQ ID NO: 4020872 - RNA, 17 nt, Human T-lymphotropic virus 2
cccgcgggaugacaggc

SEQ ID NO: 4020873 - RNA, 12 nt, Human T-lymphotropic virus 2
cccgucucaggu

SEQ ID NO: 4020874 - RNA, 18 nt, Human T-lymphotropic virus 2
cccuagguucgucccccu

SEQ ID NO: 4020875 - RNA, 12 nt, Human T-lymphotropic virus 2
cccuaucacucc

SEQ ID NO: 4020876 - RNA, 17 nt, Human T-lymphotropic virus 2
cccuaucucuggcuucc

SEQ ID NO: 4020877 - RNA, 13 nt, Human T-lymphotropic virus 2
cccuccagacagg

SEQ ID NO: 4020878 - RNA, 21 nt, Human T-lymphotropic virus 2
cccuccaggcggccuugccac

SEQ ID NO: 4020879 - RNA, 23 nt, Human T-lymphotropic virus 2
cccuccuaguagaugccccugga

SEQ ID NO: 4020880 - RNA, 17 nt, Human T-lymphotropic virus 2
cccuccuggccccugcc

SEQ ID NO: 4020881 - RNA, 21 nt, Human T-lymphotropic virus 2
cccucggggaucagcuccccu

SEQ ID NO: 4020882 - RNA, 15 nt, Human T-lymphotropic virus 2
cccucguaguuuccu

SEQ ID NO: 4020883 - RNA, 17 nt, Human T-lymphotropic virus 2
cccucuuggcaggcguc

SEQ ID NO: 4020884 - RNA, 20 nt, Human T-lymphotropic virus 2
cccucuugggcagcuauccu

SEQ ID NO: 4020885 - RNA, 15 nt, Human T-lymphotropic virus 2
cccugcccgcuccuc

SEQ ID NO: 4020886 - RNA, 15 nt, Human T-lymphotropic virus 2
cccuuacccacuucc

SEQ ID NO: 4020887 - RNA, 20 nt, Human T-lymphotropic virus 2
cccuucccuuggacccauug

SEQ ID NO: 4020888 - RNA, 14 nt, Human T-lymphotropic virus 2
ccgaucccgacccc

SEQ ID NO: 4020889 - RNA, 23 nt, Human T-lymphotropic virus 2
ccgccaaauccaggcccuuccac

SEQ ID NO: 4020890 - RNA, 16 nt, Human T-lymphotropic virus 2
ccgccgugccguucca

SEQ ID NO: 4020891 - RNA, 15 nt, Human T-lymphotropic virus 2
ccgcucccgcuccuc

SEQ ID NO: 4020892 - RNA, 16 nt, Human T-lymphotropic virus 2
ccgcuccuccauccca

SEQ ID NO: 4020893 - RNA, 21 nt, Human T-lymphotropic virus 2
ccggccucggcaccuccugaa

SEQ ID NO: 4020894 - RNA, 16 nt, Human T-lymphotropic virus 2
ccuacaacaaugccag

SEQ ID NO: 4020895 - RNA, 19 nt, Human T-lymphotropic virus 2
ccuacacacagggacaguc

SEQ ID NO: 4020896 - RNA, 18 nt, Human T-lymphotropic virus 2
ccuaccacuccagccccu

SEQ ID NO: 4020897 - RNA, 15 nt, Human T-lymphotropic virus 2
ccuaccucuccuugg

SEQ ID NO: 4020898 - RNA, 20 nt, Human T-lymphotropic virus 2
ccuacuacuacuccuccgcc

SEQ ID NO: 4020899 - RNA, 20 nt, Human T-lymphotropic virus 2
ccuacuugggcugccaagca

SEQ ID NO: 4020900 - RNA, 19 nt, Human T-lymphotropic virus 2
ccuagcgcccccgccgccc

SEQ ID NO: 4020901 - RNA, 14 nt, Human T-lymphotropic virus 2
ccuaggagcauugu

SEQ ID NO: 4020902 - RNA, 17 nt, Human T-lymphotropic virus 2
ccuagguucgucccccu

SEQ ID NO: 4020903 - RNA, 16 nt, Human T-lymphotropic virus 2
ccuauacacuccaacu

SEQ ID NO: 4020904 - RNA, 20 nt, Human T-lymphotropic virus 2
ccuaucacaagaauuccagg

SEQ ID NO: 4020905 - RNA, 20 nt, Human T-lymphotropic virus 2
ccucaaccccgcccuaccuc

SEQ ID NO: 4020906 - RNA, 22 nt, Human T-lymphotropic virus 2
ccucaaccccgcccuaccucuc

SEQ ID NO: 4020907 - RNA, 19 nt, Human T-lymphotropic virus 2
ccucacccuuacccacuuc

SEQ ID NO: 4020908 - RNA, 15 nt, Human T-lymphotropic virus 2
ccucaccucuccuuc

SEQ ID NO: 4020909 - RNA, 21 nt, Human T-lymphotropic virus 2
ccuccacggccucacccauug

SEQ ID NO: 4020910 - RNA, 18 nt, Human T-lymphotropic virus 2
ccuccaugacccuccuag

SEQ ID NO: 4020911 - RNA, 20 nt, Human T-lymphotropic virus 2
ccucccaaaccaccucccaa

SEQ ID NO: 4020912 - RNA, 15 nt, Human T-lymphotropic virus 2
ccucccaccacuccu

SEQ ID NO: 4020913 - RNA, 23 nt, Human T-lymphotropic virus 2
ccuccccaaguggaccaauuucc

SEQ ID NO: 4020914 - RNA, 20 nt, Human T-lymphotropic virus 2
ccuccccgaggguaccccca

SEQ ID NO: 4020915 - RNA, 18 nt, Human T-lymphotropic virus 2
ccucccgagccagccacc

SEQ ID NO: 4020916 - RNA, 18 nt, Human T-lymphotropic virus 2
ccuccgccaacagucucc

SEQ ID NO: 4020917 - RNA, 23 nt, Human T-lymphotropic virus 2
ccuccggcgacaagacgccgccg

SEQ ID NO: 4020918 - RNA, 19 nt, Human T-lymphotropic virus 2
ccuccuagggaaaccacuc

SEQ ID NO: 4020919 - RNA, 18 nt, Human T-lymphotropic virus 2
ccuccugaacugcuccuc

SEQ ID NO: 4020920 - RNA, 21 nt, Human T-lymphotropic virus 2
ccuccugaacugcuccuccca

SEQ ID NO: 4020921 - RNA, 17 nt, Human T-lymphotropic virus 2
ccuccuggccccugccc

SEQ ID NO: 4020922 - RNA, 16 nt, Human T-lymphotropic virus 2
ccucgccuccccuccu

SEQ ID NO: 4020923 - RNA, 16 nt, Human T-lymphotropic virus 2
ccucuccuuccccagg

SEQ ID NO: 4020924 - RNA, 20 nt, Human T-lymphotropic virus 2
ccucugcucuuggcagcccc

SEQ ID NO: 4020925 - RNA, 14 nt, Human T-lymphotropic virus 2
ccucuucgccguca

SEQ ID NO: 4020926 - RNA, 15 nt, Human T-lymphotropic virus 2
ccucuuuccuucccu

SEQ ID NO: 4020927 - RNA, 14 nt, Japanese encephalitis virus
caggaggacugggu

SEQ ID NO: 4020928 - RNA, 19 nt, Japanese encephalitis virus
caucagcuacuaggcacag

SEQ ID NO: 4020929 - RNA, 19 nt, Japanese encephalitis virus
ccagcaaaagcugccaccg

SEQ ID NO: 4020930 - RNA, 13 nt, Japanese encephalitis virus
ccaggaggacugg

SEQ ID NO: 4020931 - RNA, 14 nt, Japanese encephalitis virus
ccaggaggacuggg

SEQ ID NO: 4020932 - RNA, 17 nt, Japanese encephalitis virus
cccucgaagcuguagag

SEQ ID NO: 4020933 - RNA, 13 nt, Japanese encephalitis virus
ccugcgcagcccc

SEQ ID NO: 4020934 - RNA, 14 nt, Japanese encephalitis virus
ccugcgcagcccca

SEQ ID NO: 4020935 - RNA, 16 nt, Japanese encephalitis virus
cgagguguaaggacua

SEQ ID NO: 4020936 - RNA, 13 nt, Japanese encephalitis virus
cgcagccccagga

SEQ ID NO: 4020937 - RNA, 21 nt, Japanese encephalitis virus
cgcagccccaggaggacuggg

SEQ ID NO: 4020938 - RNA, 14 nt, Japanese encephalitis virus
cggcccaagccccc

SEQ ID NO: 4020939 - RNA, 15 nt, Japanese encephalitis virus
cucagucccaggagg

SEQ ID NO: 4020940 - RNA, 13 nt, Japanese encephalitis virus
cugggaauagacu

SEQ ID NO: 4020941 - RNA, 18 nt, Japanese encephalitis virus
cugucugcgucucagucc

SEQ ID NO: 4020942 - RNA, 17 nt, Japanese encephalitis virus
gaccaacgucaggccac

SEQ ID NO: 4020943 - RNA, 13 nt, Japanese encephalitis virus
gaggacuggguua

SEQ ID NO: 4020944 - RNA, 20 nt, Japanese encephalitis virus
gaggagaccccgcauuugca

SEQ ID NO: 4020945 - RNA, 15 nt, Japanese encephalitis virus
gaggagguggaagga

SEQ ID NO: 4020946 - RNA, 12 nt, Japanese encephalitis virus
gagucaggccag

SEQ ID NO: 4020947 - RNA, 16 nt, Japanese encephalitis virus
gauuuaaaguagaaaa

SEQ ID NO: 4020948 - RNA, 18 nt, Japanese encephalitis virus
gccaccggauacugggua

SEQ ID NO: 4020949 - RNA, 20 nt, Japanese encephalitis virus
gccccaggaggacuggguua

SEQ ID NO: 4020950 - RNA, 18 nt, Japanese encephalitis virus
gccugcgcagccccagga

SEQ ID NO: 4020951 - RNA, 16 nt, Japanese encephalitis virus
ggagguggaaggacua

SEQ ID NO: 4020952 - RNA, 14 nt, Japanese encephalitis virus
ggaugcaauagacg

SEQ ID NO: 4020953 - RNA, 17 nt, Japanese encephalitis virus
guaaggacuagagguua

SEQ ID NO: 4020954 - RNA, 12 nt, Japanese encephalitis virus
gucaggccagca

SEQ ID NO: 4020955 - RNA, 14 nt, Japanese encephalitis virus
gucucggaaguagg

SEQ ID NO: 4020956 - RNA, 12 nt, Japanese encephalitis virus
guuaccaaagcc

SEQ ID NO: 4020957 - RNA, 20 nt, Japanese encephalitis virus
uaucucaacaucagcuacua

SEQ ID NO: 4020958 - RNA, 22 nt, Japanese encephalitis virus
ugaaagaccaacgucaggccac

SEQ ID NO: 4020959 - RNA, 15 nt, Japanese encephalitis virus
ugagcccccacggcc

SEQ ID NO: 4020960 - RNA, 22 nt, Japanese encephalitis virus
ugagcccccacggcccaagccu

SEQ ID NO: 4020961 - RNA, 19 nt, Japanese encephalitis virus
ugcauauggagucaggcca

SEQ ID NO: 4020962 - RNA, 18 nt, Japanese encephalitis virus
ugcaucaaacagcauauu

SEQ ID NO: 4020963 - RNA, 13 nt, Japanese encephalitis virus
uggagucaggcca

SEQ ID NO: 4020964 - RNA, 22 nt, Japanese encephalitis virus
uugaaagaccaacgucaggcca

SEQ ID NO: 4020965 - RNA, 11 nt, Japanese encephalitis virus
uugugccaccc

SEQ ID NO: 4020966 - RNA, 18 nt, Japanese encephalitis virus
uuuaaaguagaaaaguag

SEQ ID NO: 4020967 - RNA, 14 nt, Japanese encephalitis virus
augagaaaaugcau

SEQ ID NO: 4020968 - RNA, 17 nt, Japanese encephalitis virus
caacaauaugcggccca

SEQ ID NO: 4020969 - RNA, 20 nt, Japanese encephalitis virus
caauagacgagguguaagga

SEQ ID NO: 4020970 - RNA, 18 nt, Japanese encephalitis virus
caauaugcggcccaagcc

SEQ ID NO: 4020971 - RNA, 15 nt, Japanese encephalitis virus
cagucccaggaggac

SEQ ID NO: 4020972 - RNA, 19 nt, Japanese encephalitis virus
cagucccaggaggacuggg

SEQ ID NO: 4020973 - RNA, 15 nt, Japanese encephalitis virus
ccccaggaggacugg

SEQ ID NO: 4020974 - RNA, 16 nt, Japanese encephalitis virus
ccccgcauuugcauca

SEQ ID NO: 4020975 - RNA, 19 nt, Japanese encephalitis virus
cccucgaagcuguagagga

SEQ ID NO: 4020976 - RNA, 15 nt, Japanese encephalitis virus
ccugcgcagccccag

SEQ ID NO: 4020977 - RNA, 23 nt, Japanese encephalitis virus
cgagguguaaggacuagagguua

SEQ ID NO: 4020978 - RNA, 16 nt, Japanese encephalitis virus
cgcagccccaggagga

SEQ ID NO: 4020979 - RNA, 17 nt, Japanese encephalitis virus
cuagagguuagaggaga

SEQ ID NO: 4020980 - RNA, 21 nt, Japanese encephalitis virus
cuagagguuagaggagacccc

SEQ ID NO: 4020981 - RNA, 16 nt, Japanese encephalitis virus
cucagucccaggagga

SEQ ID NO: 4020982 - RNA, 14 nt, Japanese encephalitis virus
cucgucuaggaugc

SEQ ID NO: 4020983 - RNA, 22 nt, Japanese encephalitis virus
cugccaccggauacuggguaga

SEQ ID NO: 4020984 - RNA, 15 nt, Japanese encephalitis virus
cugcgcagccccagg

SEQ ID NO: 4020985 - RNA, 19 nt, Japanese encephalitis virus
cugggaauagacugggaga

SEQ ID NO: 4020986 - RNA, 18 nt, Japanese encephalitis virus
gacaccugggaauagacu

SEQ ID NO: 4020987 - RNA, 18 nt, Japanese encephalitis virus
gaccaacgucaggccaca

SEQ ID NO: 4020988 - RNA, 11 nt, Japanese encephalitis virus
gagaccccgca

SEQ ID NO: 4020989 - RNA, 19 nt, Japanese encephalitis virus
gagguuagaggagaccccg

SEQ ID NO: 4020990 - RNA, 24 nt, Japanese encephalitis virus
gaugcaauagacgagguguaagga

SEQ ID NO: 4020991 - RNA, 16 nt, Japanese encephalitis virus
gcaaaagcugccaccg

SEQ ID NO: 4020992 - RNA, 14 nt, Japanese encephalitis virus
gcagccccaggagg

SEQ ID NO: 4020993 - RNA, 15 nt, Japanese encephalitis virus
gcagccccaggagga

SEQ ID NO: 4020994 - RNA, 19 nt, Japanese encephalitis virus
gccagcaaaagcugccacc

SEQ ID NO: 4020995 - RNA, 20 nt, Japanese encephalitis virus
gccgaaguauguagcuggug

SEQ ID NO: 4020996 - RNA, 16 nt, Japanese encephalitis virus
gcgcagccccaggagg

SEQ ID NO: 4020997 - RNA, 20 nt, Japanese encephalitis virus
ggacuagagguuagaggaga

SEQ ID NO: 4020998 - RNA, 22 nt, Japanese encephalitis virus
ggacuagagguuagaggagacc

SEQ ID NO: 4020999 - RNA, 18 nt, Japanese encephalitis virus
ggggugcggccugcgcag

SEQ ID NO: 4021000 - RNA, 19 nt, Japanese encephalitis virus
ggugaggaagaacacagga

SEQ ID NO: 4021001 - RNA, 16 nt, Japanese encephalitis virus
gguggaaggacuagag

SEQ ID NO: 4021002 - RNA, 16 nt, Japanese encephalitis virus
gguguaaggacuagag

SEQ ID NO: 4021003 - RNA, 19 nt, Japanese encephalitis virus
guaaauaauguaaaugaga

SEQ ID NO: 4021004 - RNA, 15 nt, Japanese encephalitis virus
guagaaaaguagacu

SEQ ID NO: 4021005 - RNA, 17 nt, Japanese encephalitis virus
gucucagucccaggagg

SEQ ID NO: 4021006 - RNA, 19 nt, Japanese encephalitis virus
gucugcgucucagucccag

SEQ ID NO: 4021007 - RNA, 22 nt, Japanese encephalitis virus
gugccaccccgcuagggggugc

SEQ ID NO: 4021008 - RNA, 22 nt, Japanese encephalitis virus
guuagaggagaccccguggaaa

SEQ ID NO: 4021009 - RNA, 16 nt, Japanese encephalitis virus
uaaaugagaaaaugca

SEQ ID NO: 4021010 - RNA, 22 nt, Japanese encephalitis virus
uaccaaagccguugagccccca

SEQ ID NO: 4021011 - RNA, 20 nt, Japanese encephalitis virus
uaggaugcaauagacgaggu

SEQ ID NO: 4021012 - RNA, 21 nt, Japanese encephalitis virus
ucagaaccgucucggaaguag

SEQ ID NO: 4021013 - RNA, 15 nt, Japanese encephalitis virus
ucagucccaggagga

SEQ ID NO: 4021014 - RNA, 17 nt, Japanese encephalitis virus
ucccugcucacuggaag

SEQ ID NO: 4021015 - RNA, 21 nt, Japanese encephalitis virus
ucuaucucaacaucagcuacu

SEQ ID NO: 4021016 - RNA, 19 nt, Japanese encephalitis virus
ugcgcagccccaggaggac

SEQ ID NO: 4021017 - RNA, 23 nt, Japanese encephalitis virus
ugcggccugcgcagccccaggag

SEQ ID NO: 4021018 - RNA, 19 nt, Japanese encephalitis virus
ugcgucucagucccaggag

SEQ ID NO: 4021019 - RNA, 12 nt, Japanese encephalitis virus
uuugugccaccc

SEQ ID NO: 4021020 - RNA, 24 nt, Japanese encephalitis virus
aaaaguagacuauguaaauaaugu

SEQ ID NO: 4021021 - RNA, 18 nt, Japanese encephalitis virus
aaguugaaagaccaacgu

SEQ ID NO: 4021022 - RNA, 16 nt, Japanese encephalitis virus
aaugcaugcauaugga

SEQ ID NO: 4021023 - RNA, 22 nt, Japanese encephalitis virus
acaccugggaauagacugggag

SEQ ID NO: 4021024 - RNA, 20 nt, Japanese encephalitis virus
acuggguagacggugcuguc

SEQ ID NO: 4021025 - RNA, 17 nt, Japanese encephalitis virus
agagcgccgaaguaugu

SEQ ID NO: 4021026 - RNA, 13 nt, Japanese encephalitis virus
agagguuagagga

SEQ ID NO: 4021027 - RNA, 15 nt, Japanese encephalitis virus
agcuguagaggaggu

SEQ ID NO: 4021028 - RNA, 16 nt, Japanese encephalitis virus
aggaagaacacaggau

SEQ ID NO: 4021029 - RNA, 19 nt, Japanese encephalitis virus
aggacuggguuaccaaagc

SEQ ID NO: 4021030 - RNA, 14 nt, Japanese encephalitis virus
aggagaccccgcau

SEQ ID NO: 4021031 - RNA, 14 nt, Japanese encephalitis virus
aggagguggaagga

SEQ ID NO: 4021032 - RNA, 14 nt, Japanese encephalitis virus
agguguaaggacua

SEQ ID NO: 4021033 - RNA, 17 nt, Japanese encephalitis virus
auaauguaaaugagaaa

SEQ ID NO: 4021034 - RNA, 15 nt, Japanese encephalitis virus
auuugcaucaaacag

SEQ ID NO: 4021035 - RNA, 14 nt, Japanese encephalitis virus
caacgucaggccac

SEQ ID NO: 4021036 - RNA, 19 nt, Japanese encephalitis virus
cagaaagugagaaagcccu

SEQ ID NO: 4021037 - RNA, 18 nt, Japanese encephalitis virus
cagaaccgucucggaagu

SEQ ID NO: 4021038 - RNA, 21 nt, Japanese encephalitis virus
cagcauauugacaccugggaa

SEQ ID NO: 4021039 - RNA, 15 nt, Japanese encephalitis virus
caggaggacuggguu

SEQ ID NO: 4021040 - RNA, 13 nt, Japanese encephalitis virus
cagucccaggagg

SEQ ID NO: 4021041 - RNA, 22 nt, Japanese encephalitis virus
ccaagcccccucgaagcuguag

SEQ ID NO: 4021042 - RNA, 17 nt, Japanese encephalitis virus
ccacggcccaagccucg

SEQ ID NO: 4021043 - RNA, 22 nt, Japanese encephalitis virus
cgccgaaguauguagcuggugg

SEQ ID NO: 4021044 - RNA, 23 nt, Japanese encephalitis virus
cgucucagucccaggaggacugg

SEQ ID NO: 4021045 - RNA, 18 nt, Japanese encephalitis virus
cuagagguuagaggagac

SEQ ID NO: 4021046 - RNA, 14 nt, Japanese encephalitis virus
cucagucccaggag

SEQ ID NO: 4021047 - RNA, 20 nt, Japanese encephalitis virus
cugcgcagccccaggaggac

SEQ ID NO: 4021048 - RNA, 24 nt, Japanese encephalitis virus
cugcgcagccccaggaggacuggg

SEQ ID NO: 4021049 - RNA, 16 nt, Japanese encephalitis virus
cugggaauagacuggg

SEQ ID NO: 4021050 - RNA, 17 nt, Japanese encephalitis virus
gacugggagaucuucug

SEQ ID NO: 4021051 - RNA, 18 nt, Japanese encephalitis virus
gacuggguuaccaaagcc

SEQ ID NO: 4021052 - RNA, 19 nt, Japanese encephalitis virus
gccacaaauuugugccacc

SEQ ID NO: 4021053 - RNA, 13 nt, Japanese encephalitis virus
gcccaagcccccu

SEQ ID NO: 4021054 - RNA, 11 nt, Japanese encephalitis virus
gcggcccaagc

SEQ ID NO: 4021055 - RNA, 18 nt, Japanese encephalitis virus
gcgucucagucccaggag

SEQ ID NO: 4021056 - RNA, 19 nt, Japanese encephalitis virus
gcgucucagucccaggagg

SEQ ID NO: 4021057 - RNA, 17 nt, Japanese encephalitis virus
gcuacuaggcacagagc

SEQ ID NO: 4021058 - RNA, 13 nt, Japanese encephalitis virus
ggucccugcucac

SEQ ID NO: 4021059 - RNA, 14 nt, Japanese encephalitis virus
gucucagucccagg

SEQ ID NO: 4021060 - RNA, 20 nt, Japanese encephalitis virus
gucucggaaguaggucccug

SEQ ID NO: 4021061 - RNA, 23 nt, Japanese encephalitis virus
gugauuuaaaguagaaaaguaga

SEQ ID NO: 4021062 - RNA, 17 nt, Japanese encephalitis virus
gugcggccugcgcagcc

SEQ ID NO: 4021063 - RNA, 19 nt, Japanese encephalitis virus
guggaaggacuagagguua

SEQ ID NO: 4021064 - RNA, 14 nt, Japanese encephalitis virus
uaugcggcccaagc

SEQ ID NO: 4021065 - RNA, 21 nt, Japanese encephalitis virus
ucaggccacaaauuugugcca

SEQ ID NO: 4021066 - RNA, 23 nt, Japanese encephalitis virus
ucaggccacaaauuugugccacc

SEQ ID NO: 4021067 - RNA, 21 nt, Japanese encephalitis virus
ucaggccagcaaaagcugcca

SEQ ID NO: 4021068 - RNA, 23 nt, Japanese encephalitis virus
ucaggccagcaaaagcugccacc

SEQ ID NO: 4021069 - RNA, 14 nt, Japanese encephalitis virus
ucagucccaggagg

SEQ ID NO: 4021070 - RNA, 16 nt, Japanese encephalitis virus
ucucagucccaggagg

SEQ ID NO: 4021071 - RNA, 16 nt, Japanese encephalitis virus
ugcgcagccccaggag

SEQ ID NO: 4021072 - RNA, 18 nt, Japanese encephalitis virus
ugcgcagccccaggagga

SEQ ID NO: 4021073 - RNA, 22 nt, Japanese encephalitis virus
ugcgcagccccaggaggacugg

SEQ ID NO: 4021074 - RNA, 13 nt, Japanese encephalitis virus
ugcggcccaagcc

SEQ ID NO: 4021075 - RNA, 14 nt, Japanese encephalitis virus
ugcggcccaagccc

SEQ ID NO: 4021076 - RNA, 18 nt, Japanese encephalitis virus
ugcggcccaagcccccuc

SEQ ID NO: 4021077 - RNA, 21 nt, Japanese encephalitis virus
ugcggccugcgcagccccagg

SEQ ID NO: 4021078 - RNA, 17 nt, Japanese encephalitis virus
ugcgucucagucccagg

SEQ ID NO: 4021079 - RNA, 21 nt, Japanese encephalitis virus
ugcgucucagucccaggagga

SEQ ID NO: 4021080 - RNA, 21 nt, Japanese encephalitis virus
uugagcccccacggcccaagc

SEQ ID NO: 4021081 - RNA, 15 nt, Japanese encephalitis virus
uugcaucaaacagca

SEQ ID NO: 4021082 - RNA, 13 nt, Japanese encephalitis virus
agaaagugagaaa

SEQ ID NO: 4021083 - RNA, 22 nt, Japanese encephalitis virus
agaaagugagaaagcccucaga

SEQ ID NO: 4021084 - RNA, 19 nt, Japanese encephalitis virus
agaggagguggaaggacua

SEQ ID NO: 4021085 - RNA, 16 nt, Japanese encephalitis virus
agcaaaagcugccacc

SEQ ID NO: 4021086 - RNA, 13 nt, Japanese encephalitis virus
agccccaggagga

SEQ ID NO: 4021087 - RNA, 20 nt, Japanese encephalitis virus
agcugguggugaggaagaac

SEQ ID NO: 4021088 - RNA, 14 nt, Japanese encephalitis virus
aggaagaacacagg

SEQ ID NO: 4021089 - RNA, 13 nt, Japanese encephalitis virus
aggaggacugggu

SEQ ID NO: 4021090 - RNA, 19 nt, Japanese encephalitis virus
aggccacaaauuugugcca

SEQ ID NO: 4021091 - RNA, 17 nt, Japanese encephalitis virus
aggccagcaaaagcugc

SEQ ID NO: 4021092 - RNA, 19 nt, Japanese encephalitis virus
aggccagcaaaagcugcca

SEQ ID NO: 4021093 - RNA, 20 nt, Japanese encephalitis virus
aggccagcaaaagcugccac

SEQ ID NO: 4021094 - RNA, 18 nt, Japanese encephalitis virus
agguggaaggacuagagg

SEQ ID NO: 4021095 - RNA, 18 nt, Japanese encephalitis virus
agguguaaggacuagagg

SEQ ID NO: 4021096 - RNA, 20 nt, Japanese encephalitis virus
aucucaacaucagcuacuag

SEQ ID NO: 4021097 - RNA, 15 nt, Japanese encephalitis virus
aagcuguagaggagg

SEQ ID NO: 4021098 - RNA, 15 nt, Japanese encephalitis virus
aaggacuagagguua

SEQ ID NO: 4021099 - RNA, 23 nt, Japanese encephalitis virus
aaggacuagagguuagaggagac

SEQ ID NO: 4021100 - RNA, 19 nt, Japanese encephalitis virus
accugggaauagacuggga

SEQ ID NO: 4021101 - RNA, 11 nt, Japanese encephalitis virus
agccccaggag

SEQ ID NO: 4021102 - RNA, 19 nt, Japanese encephalitis virus
agccguugagcccccacgg

SEQ ID NO: 4021103 - RNA, 14 nt, Japanese encephalitis virus
agcuguagaggagg

SEQ ID NO: 4021104 - RNA, 22 nt, Japanese encephalitis virus
aggacuagagguuagaggagac

SEQ ID NO: 4021105 - RNA, 20 nt, Japanese encephalitis virus
aggagaccccgcauuugcau

SEQ ID NO: 4021106 - RNA, 21 nt, Japanese encephalitis virus
aggagguggaaggacuagagg

SEQ ID NO: 4021107 - RNA, 20 nt, Japanese encephalitis virus
aggccacaaauuugugccac

SEQ ID NO: 4021108 - RNA, 11 nt, Japanese encephalitis virus
agucccaggag

SEQ ID NO: 4021109 - RNA, 22 nt, Japanese encephalitis virus
aucuucugcucuaucucaacau

SEQ ID NO: 4021110 - RNA, 19 nt, Japanese encephalitis virus
auguagcugguggugagga

SEQ ID NO: 4021111 - RNA, 22 nt, Japanese encephalitis virus
auugacaccugggaauagacug

SEQ ID NO: 4021112 - RNA, 18 nt, Japanese encephalitis virus
caacaauaugcggcccaa

SEQ ID NO: 4021113 - RNA, 13 nt, Japanese encephalitis virus
caacgucaggcca

SEQ ID NO: 4021114 - RNA, 16 nt, Japanese encephalitis virus
caacgucaggccacaa

SEQ ID NO: 4021115 - RNA, 17 nt, Japanese encephalitis virus
caacgucaggccacaaa

SEQ ID NO: 4021116 - RNA, 18 nt, Japanese encephalitis virus
caccggauacuggguaga

SEQ ID NO: 4021117 - RNA, 22 nt, Japanese encephalitis virus
cagcauauugacaccugggaau

SEQ ID NO: 4021118 - RNA, 14 nt, Japanese encephalitis virus
cagccccaggagga

SEQ ID NO: 4021119 - RNA, 21 nt, Japanese encephalitis virus
cagccccaggaggacuggguu

SEQ ID NO: 4021120 - RNA, 12 nt, Japanese encephalitis virus
caggccagcaaa

SEQ ID NO: 4021121 - RNA, 21 nt, Japanese encephalitis virus
cagucccaggaggacuggguu

SEQ ID NO: 4021122 - RNA, 14 nt, Japanese encephalitis virus
ccaacgucaggcca

SEQ ID NO: 4021123 - RNA, 23 nt, Japanese encephalitis virus
ccacaaauuugugccaccccgcu

SEQ ID NO: 4021124 - RNA, 20 nt, Japanese encephalitis virus
cccaagccucgucuaggaug

SEQ ID NO: 4021125 - RNA, 19 nt, Japanese encephalitis virus
ccgucucggaaguaggucc

SEQ ID NO: 4021126 - RNA, 19 nt, Japanese encephalitis virus
ccugggaauagacugggag

SEQ ID NO: 4021127 - RNA, 20 nt, Japanese encephalitis virus
cgagguguaaggacuagagg

SEQ ID NO: 4021128 - RNA, 15 nt, Japanese encephalitis virus
cgcagccccaggagg

SEQ ID NO: 4021129 - RNA, 20 nt, Japanese encephalitis virus
cggccugcgcagccccagga

SEQ ID NO: 4021130 - RNA, 16 nt, Japanese encephalitis virus
cgucucagucccagga

SEQ ID NO: 4021131 - RNA, 17 nt, Japanese encephalitis virus
cuaggaugcaauagacg

SEQ ID NO: 4021132 - RNA, 12 nt, Japanese encephalitis virus
cucacuggaagu

SEQ ID NO: 4021133 - RNA, 13 nt, Japanese encephalitis virus
cucagucccagga

SEQ ID NO: 4021134 - RNA, 20 nt, Japanese encephalitis virus
cucagucccaggaggacugg

SEQ ID NO: 4021135 - RNA, 20 nt, Japanese encephalitis virus
cugcgucucagucccaggag

SEQ ID NO: 4021136 - RNA, 15 nt, Japanese encephalitis virus
gagaaaaugcaugca

SEQ ID NO: 4021137 - RNA, 20 nt, Japanese encephalitis virus
gagucaggccagcaaaagcu

SEQ ID NO: 4021138 - RNA, 13 nt, Japanese encephalitis virus
gcagccccaggag

SEQ ID NO: 4021139 - RNA, 18 nt, Japanese encephalitis virus
gcauauggagucaggcca

SEQ ID NO: 4021140 - RNA, 16 nt, Japanese encephalitis virus
gccccaggaggacugg

SEQ ID NO: 4021141 - RNA, 23 nt, Japanese encephalitis virus
gcccccacggcccaagccucguc

SEQ ID NO: 4021142 - RNA, 17 nt, Japanese encephalitis virus
gccugcgcagccccagg

SEQ ID NO: 4021143 - RNA, 14 nt, Japanese encephalitis virus
guagcuggugguga

SEQ ID NO: 4021144 - RNA, 12 nt, Japanese encephalitis virus
gucccaggagga

SEQ ID NO: 4021145 - RNA, 16 nt, Japanese encephalitis virus
gucccaggaggacugg

SEQ ID NO: 4021146 - RNA, 22 nt, Japanese encephalitis virus
guugagcccccacggcccaagc

SEQ ID NO: 4021147 - RNA, 23 nt, Japanese encephalitis virus
guugagcccccacggcccaagcc

SEQ ID NO: 4021148 - RNA, 23 nt, Japanese encephalitis virus
uacuggguagacggugcugucug

SEQ ID NO: 4021149 - RNA, 13 nt, Japanese encephalitis virus
uagagguuagagg

SEQ ID NO: 4021150 - RNA, 21 nt, Japanese encephalitis virus
uaucucaacaucagcuacuag

SEQ ID NO: 4021151 - RNA, 15 nt, Japanese encephalitis virus
ucucagucccaggag

SEQ ID NO: 4021152 - RNA, 22 nt, Japanese encephalitis virus
ugcgucucagucccaggaggac

SEQ ID NO: 4021153 - RNA, 14 nt, Japanese encephalitis virus
uggagucaggccag

SEQ ID NO: 4021154 - RNA, 20 nt, Japanese encephalitis virus
uguagcugguggugaggaag

SEQ ID NO: 4021155 - RNA, 18 nt, Japanese encephalitis virus
uuaaaguagaaaaguaga

SEQ ID NO: 4021156 - RNA, 22 nt, Japanese encephalitis virus
uuaccaaagccguugagccccc

SEQ ID NO: 4021157 - RNA, 22 nt, Japanese encephalitis virus
uugacaccugggaauagacugg

SEQ ID NO: 4021158 - RNA, 16 nt, Japanese encephalitis virus
uugagcccccacggcc

SEQ ID NO: 4021159 - RNA, 20 nt, Japanese encephalitis virus
aaguagaaaaguagacuaug

SEQ ID NO: 4021160 - RNA, 18 nt, Japanese encephalitis virus
accugggaauagacuggg

SEQ ID NO: 4021161 - RNA, 18 nt, Japanese encephalitis virus
acuagagguuagaggaga

SEQ ID NO: 4021162 - RNA, 19 nt, Japanese encephalitis virus
acugggagaucuucugcuc

SEQ ID NO: 4021163 - RNA, 22 nt, Japanese encephalitis virus
acugggagaucuucugcucuau

SEQ ID NO: 4021164 - RNA, 16 nt, Japanese encephalitis virus
agacgagguguaagga

SEQ ID NO: 4021165 - RNA, 16 nt, Japanese encephalitis virus
agagguuagaggagac

SEQ ID NO: 4021166 - RNA, 20 nt, Japanese encephalitis virus
agcaaaagcugccaccggau

SEQ ID NO: 4021167 - RNA, 12 nt, Japanese encephalitis virus
agccccaggagg

SEQ ID NO: 4021168 - RNA, 17 nt, Japanese encephalitis virus
agccccaggaggacugg

SEQ ID NO: 4021169 - RNA, 19 nt, Japanese encephalitis virus
agcugguggugaggaagaa

SEQ ID NO: 4021170 - RNA, 15 nt, Japanese encephalitis virus
aggagguggaaggac

SEQ ID NO: 4021171 - RNA, 13 nt, Japanese encephalitis virus
aggcacagagcgc

SEQ ID NO: 4021172 - RNA, 12 nt, Japanese encephalitis virus
agucaggccagc

SEQ ID NO: 4021173 - RNA, 19 nt, Japanese encephalitis virus
agucaggccagcaaaagcu

SEQ ID NO: 4021174 - RNA, 13 nt, Japanese encephalitis virus
agucccaggagga

SEQ ID NO: 4021175 - RNA, 17 nt, Japanese encephalitis virus
agucccaggaggacugg

SEQ ID NO: 4021176 - RNA, 19 nt, Japanese encephalitis virus
agucccaggaggacugggu

SEQ ID NO: 4021177 - RNA, 21 nt, Japanese encephalitis virus
aguugaaagaccaacgucagg

SEQ ID NO: 4021178 - RNA, 20 nt, Japanese encephalitis virus
caagccucgucuaggaugca

SEQ ID NO: 4021179 - RNA, 16 nt, Japanese encephalitis virus
caccggauacugggua

SEQ ID NO: 4021180 - RNA, 21 nt, Japanese encephalitis virus
caccugggaauagacugggag

SEQ ID NO: 4021181 - RNA, 13 nt, Japanese encephalitis virus
cacggcccaagcc

SEQ ID NO: 4021182 - RNA, 12 nt, Japanese encephalitis virus
cagccccaggag

SEQ ID NO: 4021183 - RNA, 13 nt, Japanese encephalitis virus
cagccccaggagg

SEQ ID NO: 4021184 - RNA, 19 nt, Japanese encephalitis virus
cagccccaggaggacuggg

SEQ ID NO: 4021185 - RNA, 16 nt, Marburg virus
agaucaacaugccucc

SEQ ID NO: 4021186 - RNA, 22 nt, Marburg virus
agcaagggcuuucaucaacaau

SEQ ID NO: 4021187 - RNA, 23 nt, Marburg virus
agcaagggcuuucaucaacaaug

SEQ ID NO: 4021188 - RNA, 19 nt, Marburg virus
agcacacccacucagaaug

SEQ ID NO: 4021189 - RNA, 22 nt, Marburg virus
agcaccccaacugaugccacca

SEQ ID NO: 4021190 - RNA, 18 nt, Marburg virus
agcauggccuaaaugggu

SEQ ID NO: 4021191 - RNA, 22 nt, Marburg virus
agcuaugauugucaauaagaca

SEQ ID NO: 4021192 - RNA, 19 nt, Marburg virus
agcuugcuuuacacaagau

SEQ ID NO: 4021193 - RNA, 21 nt, Marburg virus
agcuuuauauguaaugaacaa

SEQ ID NO: 4021194 - RNA, 21 nt, Marburg virus
aggaguguugggacaguguuu

SEQ ID NO: 4021195 - RNA, 13 nt, Marburg virus
aggauuauaucau

SEQ ID NO: 4021196 - RNA, 17 nt, Marburg virus
aggcaguucuaagagaa

SEQ ID NO: 4021197 - RNA, 19 nt, Marburg virus
aggcgucuagccaaucaaa

SEQ ID NO: 4021198 - RNA, 15 nt, Marburg virus
agggacaaauuauug

SEQ ID NO: 4021199 - RNA, 18 nt, Marburg virus
agggagaucaaauuauug

SEQ ID NO: 4021200 - RNA, 20 nt, Marburg virus
aguaagaaaaacuaaugaag

SEQ ID NO: 4021201 - RNA, 12 nt, Marburg virus
aguaaucaaauu

SEQ ID NO: 4021202 - RNA, 21 nt, Marburg virus
aguaauuuauuucugucuuaa

SEQ ID NO: 4021203 - RNA, 18 nt, Marburg virus
agucuucgggcuguuccu

SEQ ID NO: 4021204 - RNA, 15 nt, Marburg virus
agugcacaaaaugau

SEQ ID NO: 4021205 - RNA, 15 nt, Marburg virus
aguuaaauuucuaga

SEQ ID NO: 4021206 - RNA, 16 nt, Marburg virus
aguuccaguaaaaaca

SEQ ID NO: 4021207 - RNA, 17 nt, Marburg virus
auaaaaaucccaacaau

SEQ ID NO: 4021208 - RNA, 18 nt, Marburg virus
auaaacuuguagaauuac

SEQ ID NO: 4021209 - RNA, 15 nt, Marburg virus
auaagguuaaaaaac

SEQ ID NO: 4021210 - RNA, 13 nt, Marburg virus
auaaguuuaagau

SEQ ID NO: 4021211 - RNA, 18 nt, Marburg virus
auaauagugcauuuguau

SEQ ID NO: 4021212 - RNA, 20 nt, Marburg virus
auaaucugauugugagauua

SEQ ID NO: 4021213 - RNA, 15 nt, Marburg virus
auacaaagacacuaa

SEQ ID NO: 4021214 - RNA, 23 nt, Marburg virus
auacccucaccacugcccacagc

SEQ ID NO: 4021215 - RNA, 22 nt, Marburg virus
auacuuaucuacauuaauuccu

SEQ ID NO: 4021216 - RNA, 15 nt, Marburg virus
auaguaauguuuuau

SEQ ID NO: 4021217 - RNA, 13 nt, Marburg virus
auaguauaaagua

SEQ ID NO: 4021218 - RNA, 15 nt, Marburg virus
auauaucaugaaacu

SEQ ID NO: 4021219 - RNA, 19 nt, Marburg virus
auauaucaugaaacucagu

SEQ ID NO: 4021220 - RNA, 22 nt, Marburg virus
auaucgucucaaaccguacaca

SEQ ID NO: 4021221 - RNA, 14 nt, Marburg virus
auauuaaagguuuu

SEQ ID NO: 4021222 - RNA, 16 nt, Marburg virus
auauuucagaaagaaa

SEQ ID NO: 4021223 - RNA, 19 nt, Marburg virus
aucaaacugccaaauccuu

SEQ ID NO: 4021224 - RNA, 15 nt, Marburg virus
aucaagcauauuuca

SEQ ID NO: 4021225 - RNA, 17 nt, Marburg virus
aucacgcgcacaaauua

SEQ ID NO: 4021226 - RNA, 13 nt, Marburg virus
aucagcuaucaaa

SEQ ID NO: 4021227 - RNA, 22 nt, Marburg virus
aucagucuuaucuuaauccaag

SEQ ID NO: 4021228 - RNA, 20 nt, Marburg virus
aucaucuuauuaaauaguug

SEQ ID NO: 4021229 - RNA, 13 nt, Marburg virus
aucuacugaaauc

SEQ ID NO: 4021230 - RNA, 17 nt, Marburg virus
aucuaugcgaugaugag

SEQ ID NO: 4021231 - RNA, 17 nt, Marburg virus
aucuguuugagcaugaa

SEQ ID NO: 4021232 - RNA, 21 nt, Marburg virus
aucuuaaacuugaugaugcag

SEQ ID NO: 4021233 - RNA, 13 nt, Marburg virus
aucuuauuaaaua

SEQ ID NO: 4021234 - RNA, 12 nt, Marburg virus
augaucuucaag

SEQ ID NO: 4021235 - RNA, 18 nt, Marburg virus
augcaaaccauaaggaaa

SEQ ID NO: 4021236 - RNA, 18 nt, Marburg virus
augcaacaagucagugag

SEQ ID NO: 4021237 - RNA, 14 nt, Marburg virus
augcaauuaaucau

SEQ ID NO: 4021238 - RNA, 15 nt, Marburg virus
augcauuaauguuuu

SEQ ID NO: 4021239 - RNA, 22 nt, Marburg virus
augccaccacacucaacaccac

SEQ ID NO: 4021240 - RNA, 17 nt, Marburg virus
augccauugacuuucua

SEQ ID NO: 4021241 - RNA, 20 nt, Marburg virus
augcccccccacaacaccac

SEQ ID NO: 4021242 - RNA, 23 nt, Marburg virus
auggcaucuuuacaccaggaaaa

SEQ ID NO: 4021243 - RNA, 18 nt, Marburg virus
auggcccgaaaaaugcuc

SEQ ID NO: 4021244 - RNA, 18 nt, Marburg virus
augguuugauauucaauu

SEQ ID NO: 4021245 - RNA, 15 nt, Marburg virus
augugugcuugaaua

SEQ ID NO: 4021246 - RNA, 22 nt, Marburg virus
auguugaugaaauuaagggaau

SEQ ID NO: 4021247 - RNA, 20 nt, Marburg virus
auuaaaaaauuaaaaaacuu

SEQ ID NO: 4021248 - RNA, 16 nt, Marburg virus
auuaaaagaaaaagag

SEQ ID NO: 4021249 - RNA, 16 nt, Marburg virus
auuaacuuuuguugca

SEQ ID NO: 4021250 - RNA, 14 nt, Marburg virus
auuaaguguucuuu

SEQ ID NO: 4021251 - RNA, 15 nt, Marburg virus
auuaauccuugaagu

SEQ ID NO: 4021252 - RNA, 15 nt, Marburg virus
auuaauuccuugaau

SEQ ID NO: 4021253 - RNA, 15 nt, Marburg virus
auuacaugagauaac

SEQ ID NO: 4021254 - RNA, 15 nt, Marburg virus
auucgacagcauuaa

SEQ ID NO: 4021255 - RNA, 15 nt, Marburg virus
auugauauugaaccu

SEQ ID NO: 4021256 - RNA, 13 nt, Marburg virus
auugaucaaacac

SEQ ID NO: 4021257 - RNA, 21 nt, Marburg virus
auugauugagcuucucaaaug

SEQ ID NO: 4021258 - RNA, 22 nt, Marburg virus
auugggacaacgaguucuugaa

SEQ ID NO: 4021259 - RNA, 15 nt, Marburg virus
auuguuugggaccaa

SEQ ID NO: 4021260 - RNA, 12 nt, Marburg virus
auuuaagggaac

SEQ ID NO: 4021261 - RNA, 20 nt, Marburg virus
auuucaaaagcauauaugug

SEQ ID NO: 4021262 - RNA, 14 nt, Marburg virus
auuucagaaagaaa

SEQ ID NO: 4021263 - RNA, 21 nt, Marburg virus
auuugaccaaaguaauguuuu

SEQ ID NO: 4021264 - RNA, 11 nt, Marburg virus
auuugaugcau

SEQ ID NO: 4021265 - RNA, 22 nt, Marburg virus
auuuuuggaugcauuucaccag

SEQ ID NO: 4021266 - RNA, 15 nt, Marburg virus
caaaaccaacacaac

SEQ ID NO: 4021267 - RNA, 19 nt, Marburg virus
caaaagcuuccugaugaug

SEQ ID NO: 4021268 - RNA, 13 nt, Marburg virus
caaacacuuggaa

SEQ ID NO: 4021269 - RNA, 20 nt, Marburg virus
caaagagcacuaacaacacg

SEQ ID NO: 4021270 - RNA, 12 nt, Marburg virus
caaauauuggau

SEQ ID NO: 4021271 - RNA, 20 nt, Marburg virus
caacaccacagacccaaaca

SEQ ID NO: 4021272 - RNA, 14 nt, Marburg virus
caacggcacaaccg

SEQ ID NO: 4021273 - RNA, 17 nt, Marburg virus
caacuuaagaaugcauu

SEQ ID NO: 4021274 - RNA, 17 nt, Marburg virus
caagaugucgaaaguuc

SEQ ID NO: 4021275 - RNA, 15 nt, Marburg virus
caagcuucaaaacca

SEQ ID NO: 4021276 - RNA, 22 nt, Marburg virus
caaguccuuucaaaaauugcuu

SEQ ID NO: 4021277 - RNA, 14 nt, Marburg virus
caaucaaaucacuu

SEQ ID NO: 4021278 - RNA, 19 nt, Marburg virus
cacauagguucugauuuag

SEQ ID NO: 4021279 - RNA, 14 nt, Marburg virus
caccaggaaaauac

SEQ ID NO: 4021280 - RNA, 13 nt, Marburg virus
cagaaagaaacga

SEQ ID NO: 4021281 - RNA, 17 nt, Marburg virus
cagaaauguuagccaaa

SEQ ID NO: 4021282 - RNA, 19 nt, Marburg virus
cagaacauuugaugcuuuc

SEQ ID NO: 4021283 - RNA, 15 nt, Marburg virus
gcauuggaauagaag

SEQ ID NO: 4021284 - RNA, 22 nt, Marburg virus
gcauuuguauagauucaauuau

SEQ ID NO: 4021285 - RNA, 17 nt, Marburg virus
gcuccggaacucuccag

SEQ ID NO: 4021286 - RNA, 18 nt, Marburg virus
gcuggccauaucuggcau

SEQ ID NO: 4021287 - RNA, 18 nt, Marburg virus
gcuuaaauguaccaggau

SEQ ID NO: 4021288 - RNA, 22 nt, Marburg virus
gcuucaaaaccaggguuaagag

SEQ ID NO: 4021289 - RNA, 14 nt, Marburg virus
ggacaaauuaauug

SEQ ID NO: 4021290 - RNA, 15 nt, Marburg virus
ggacauguauaucau

SEQ ID NO: 4021291 - RNA, 14 nt, Marburg virus
ggagaaaaugagaa

SEQ ID NO: 4021292 - RNA, 22 nt, Marburg virus
ggauagcuucauuucauucaau

SEQ ID NO: 4021293 - RNA, 23 nt, Marburg virus
ggaucaagcauauuucauucaaa

SEQ ID NO: 4021294 - RNA, 16 nt, Marburg virus
gguuaccuacuuaucu

SEQ ID NO: 4021295 - RNA, 13 nt, Marburg virus
gguuuuuuauucu

SEQ ID NO: 4021296 - RNA, 21 nt, Marburg virus
guauaacaaagaauauaccua

SEQ ID NO: 4021297 - RNA, 12 nt, Marburg virus
guauagagggac

SEQ ID NO: 4021298 - RNA, 13 nt, Marburg virus
guauccucuggag

SEQ ID NO: 4021299 - RNA, 20 nt, Marburg virus
guaugaucgcauugccucca

SEQ ID NO: 4021300 - RNA, 21 nt, Marburg virus
guauucccuauaagugauuua

SEQ ID NO: 4021301 - RNA, 13 nt, Marburg virus
gucagugauuuuu

SEQ ID NO: 4021302 - RNA, 16 nt, Marburg virus
gugaauguaaauuaag

SEQ ID NO: 4021303 - RNA, 22 nt, Marburg virus
gugaguggcuuuuaucaucaaa

SEQ ID NO: 4021304 - RNA, 20 nt, Marburg virus
guguucuuacuaacuugggc

SEQ ID NO: 4021305 - RNA, 17 nt, Marburg virus
guguugaccuuggaaaa

SEQ ID NO: 4021306 - RNA, 18 nt, Marburg virus
guuacacaagagaaggaa

SEQ ID NO: 4021307 - RNA, 16 nt, Marburg virus
guuacagcuauaucua

SEQ ID NO: 4021308 - RNA, 20 nt, Marburg virus
guuagacgccaguuauccau

SEQ ID NO: 4021309 - RNA, 18 nt, Marburg virus
guucauaugcuuucagaa

SEQ ID NO: 4021310 - RNA, 21 nt, Marburg virus
guuucauaugcugccauauuu

SEQ ID NO: 4021311 - RNA, 21 nt, Marburg virus
uaaaaacccaaagucaacaau

SEQ ID NO: 4021312 - RNA, 11 nt, Marburg virus
uaaaagggaaa

SEQ ID NO: 4021313 - RNA, 15 nt, Marburg virus
uaaaauuaauucaca

SEQ ID NO: 4021314 - RNA, 17 nt, Marburg virus
uaaacuugcauauccuu

SEQ ID NO: 4021315 - RNA, 22 nt, Marburg virus
uaaagcuuuaggacaauugcua

SEQ ID NO: 4021316 - RNA, 17 nt, Marburg virus
uaaauauccaucaagca

SEQ ID NO: 4021317 - RNA, 14 nt, Marburg virus
uaaaucuugaccuu

SEQ ID NO: 4021318 - RNA, 12 nt, Marburg virus
uaacaugaagac

SEQ ID NO: 4021319 - RNA, 16 nt, Marburg virus
uaaccauuguaagaau

SEQ ID NO: 4021320 - RNA, 18 nt, Marburg virus
uaaccuuacauugcugcu

SEQ ID NO: 4021321 - RNA, 21 nt, Marburg virus
uaagaaaaacuaaugaagaac

SEQ ID NO: 4021322 - RNA, 16 nt, Marburg virus
uaagaauuaauuuacu

SEQ ID NO: 4021323 - RNA, 12 nt, Marburg virus
uaauaauuuuca

SEQ ID NO: 4021324 - RNA, 15 nt, Marburg virus
uaauaauuuucacaa

SEQ ID NO: 4021325 - RNA, 12 nt, Marburg virus
uaauagaaguag

SEQ ID NO: 4021326 - RNA, 20 nt, Marburg virus
uaaucauguugaugauuuua

SEQ ID NO: 4021327 - RNA, 22 nt, Marburg virus
uaauuguaggauuccacaucau

SEQ ID NO: 4021328 - RNA, 19 nt, Marburg virus
uacaaucacccaauuuacu

SEQ ID NO: 4021329 - RNA, 16 nt, Marburg virus
uacacguuauaucuuu

SEQ ID NO: 4021330 - RNA, 13 nt, Marburg virus
uacauuaauuccu

SEQ ID NO: 4021331 - RNA, 21 nt, Marburg virus
uacauuugccgcaauacugua

SEQ ID NO: 4021332 - RNA, 15 nt, Marburg virus
uaccacagcaaagag

SEQ ID NO: 4021333 - RNA, 21 nt, Marburg virus
uagauuaauccuugaaguaac

SEQ ID NO: 4021334 - RNA, 21 nt, Marburg virus
uagcaaagaaucauuaucauu

SEQ ID NO: 4021335 - RNA, 17 nt, Marburg virus
uauaaaguauaauucuu

SEQ ID NO: 4021336 - RNA, 19 nt, Marburg virus
uauauaaaagaaauaguaa

SEQ ID NO: 4021337 - RNA, 16 nt, Marburg virus
uaucauagucaagagu

SEQ ID NO: 4021338 - RNA, 13 nt, Marburg virus
uauccugaugcaa

SEQ ID NO: 4021339 - RNA, 16 nt, Marburg virus
uaucuuuaccaaauau

SEQ ID NO: 4021340 - RNA, 13 nt, Marburg virus
uaugaugaagaaa

SEQ ID NO: 4021341 - RNA, 16 nt, Marburg virus
uaugccaauuaagaaa

SEQ ID NO: 4021342 - RNA, 13 nt, Marburg virus
uauuacuaacaaa

SEQ ID NO: 4021343 - RNA, 20 nt, Marburg virus
ucaaacaccccaaauuuuca

SEQ ID NO: 4021344 - RNA, 14 nt, Marburg virus
ucaaaugaccaaau

SEQ ID NO: 4021345 - RNA, 22 nt, Marburg virus
ucaacaccacagacccaaacaa

SEQ ID NO: 4021346 - RNA, 12 nt, Marburg virus
ucaacuggaaga

SEQ ID NO: 4021347 - RNA, 16 nt, Marburg virus
ucaagacgcuuauuca

SEQ ID NO: 4021348 - RNA, 19 nt, Marburg virus
ucaauaagugaccccaaau

SEQ ID NO: 4021349 - RNA, 17 nt, Marburg virus
ucaauauccugaugcaa

SEQ ID NO: 4021350 - RNA, 14 nt, Marburg virus
ucaauaugaugcaa

SEQ ID NO: 4021351 - RNA, 11 nt, Marburg virus
ucaccuugaaa

SEQ ID NO: 4021352 - RNA, 12 nt, Marburg virus
ucaggcaauaaa

SEQ ID NO: 4021353 - RNA, 19 nt, Marburg virus
ucauaaucuguuugagcau

SEQ ID NO: 4021354 - RNA, 15 nt, Marburg virus
ucauauuugauucaa

SEQ ID NO: 4021355 - RNA, 18 nt, Marburg virus
ucaucaacaaugccaccc

SEQ ID NO: 4021356 - RNA, 21 nt, Marburg virus
uccaaacauggcagaauuauc

SEQ ID NO: 4021357 - RNA, 16 nt, Marburg virus
uccucucagaaucagu

SEQ ID NO: 4021358 - RNA, 15 nt, Marburg virus
ucgaagaacauuaag

SEQ ID NO: 4021359 - RNA, 18 nt, Marburg virus
ucgauauaauacauacua

SEQ ID NO: 4021360 - RNA, 23 nt, Marburg virus
ucguaguguucuuuuacuggaag

SEQ ID NO: 4021361 - RNA, 21 nt, Marburg virus
ucuacucugaacuaaggaaau

SEQ ID NO: 4021362 - RNA, 21 nt, Marburg virus
ucuauuuuugaugaucuucaa

SEQ ID NO: 4021363 - RNA, 13 nt, Marburg virus
ucuccagaagaca

SEQ ID NO: 4021364 - RNA, 15 nt, Marburg virus
ucugacacaauacau

SEQ ID NO: 4021365 - RNA, 14 nt, Marburg virus
ucugaggauuuaag

SEQ ID NO: 4021366 - RNA, 20 nt, Marburg virus
ucuuaaacuugaugaugcag

SEQ ID NO: 4021367 - RNA, 23 nt, Marburg virus
ucuuaagugaauccuuucuucaa

SEQ ID NO: 4021368 - RNA, 12 nt, Marburg virus
ucuuguuucaaa

SEQ ID NO: 4021369 - RNA, 16 nt, Marburg virus
ugaaaagacuuccaaa

SEQ ID NO: 4021370 - RNA, 20 nt, Marburg virus
ugaaaaggaagaauuauucu

SEQ ID NO: 4021371 - RNA, 18 nt, Marburg virus
ugaacuaccuccacagau

SEQ ID NO: 4021372 - RNA, 13 nt, Marburg virus
ugaacucagugag

SEQ ID NO: 4021373 - RNA, 13 nt, Marburg virus
ugaagaauuuauu

SEQ ID NO: 4021374 - RNA, 20 nt, Marburg virus
ugacuuauuagccagaaguu

SEQ ID NO: 4021375 - RNA, 15 nt, Marburg virus
ugagauuaaaaagac

SEQ ID NO: 4021376 - RNA, 16 nt, Marburg virus
ugaggaagaucaacau

SEQ ID NO: 4021377 - RNA, 20 nt, Marburg virus
ugaugcgagggcauuauuca

SEQ ID NO: 4021378 - RNA, 14 nt, Marburg virus
ugcauaucuuccaa

SEQ ID NO: 4021379 - RNA, 15 nt, Marburg virus
ugcauaucuuccaaa

SEQ ID NO: 4021380 - RNA, 17 nt, Marburg virus
ugcauaucuuccaaaau

SEQ ID NO: 4021381 - RNA, 15 nt, Marburg virus
ugccaugcuuucacu

SEQ ID NO: 4021382 - RNA, 13 nt, Marburg virus
ugcuugaauacgu

SEQ ID NO: 4021383 - RNA, 20 nt, Marburg virus
ugcuuugaaggaucaagaau

SEQ ID NO: 4021384 - RNA, 17 nt, Marburg virus
uggaagacgguuucaaa

SEQ ID NO: 4021385 - RNA, 15 nt, Marburg virus
uggaauagcagauuu

SEQ ID NO: 4021386 - RNA, 19 nt, Marburg virus
uggcucgacgucuuaaaag

SEQ ID NO: 4021387 - RNA, 21 nt, Marburg virus
ugggaaggacacuggaagcaa

SEQ ID NO: 4021388 - RNA, 14 nt, Marburg virus
ugguauauuuuuga

SEQ ID NO: 4021389 - RNA, 15 nt, Marburg virus
ugguuaaaaaugaaa

SEQ ID NO: 4021390 - RNA, 19 nt, Marburg virus
ugguuuauuuucaagcacc

SEQ ID NO: 4021391 - RNA, 17 nt, Marburg virus
uguaauaauuaacuguu

SEQ ID NO: 4021392 - RNA, 19 nt, Marburg virus
uguaauaugccaauuaaga

SEQ ID NO: 4021393 - RNA, 21 nt, Marburg virus
uguaauaugccaauuaagaaa

SEQ ID NO: 4021394 - RNA, 16 nt, Marburg virus
ugugucaaauucauuu

SEQ ID NO: 4021395 - RNA, 18 nt, Marburg virus
uguguuuucaaauuuaua

SEQ ID NO: 4021396 - RNA, 23 nt, Marburg virus
uguuauaugcaugucagugauuu

SEQ ID NO: 4021397 - RNA, 22 nt, Marburg virus
uguuccucccaacccaacaauu

SEQ ID NO: 4021398 - RNA, 15 nt, Marburg virus
uguugauuucaaugu

SEQ ID NO: 4021399 - RNA, 15 nt, Marburg virus
uguuuaggauuucac

SEQ ID NO: 4021400 - RNA, 16 nt, Marburg virus
uuaaaaaccaaaacaa

SEQ ID NO: 4021401 - RNA, 19 nt, Marburg virus
uuaaaaccuaaagucaugu

SEQ ID NO: 4021402 - RNA, 16 nt, Marburg virus
uuaaaacuauaauuca

SEQ ID NO: 4021403 - RNA, 13 nt, Marburg virus
uuaaaauuucagg

SEQ ID NO: 4021404 - RNA, 14 nt, Marburg virus
uuaaagguuuucuu

SEQ ID NO: 4021405 - RNA, 23 nt, Marburg virus
uuaaagguuuucuuuaauauuca

SEQ ID NO: 4021406 - RNA, 18 nt, Marburg virus
uuaagaaucaacuaacaa

SEQ ID NO: 4021407 - RNA, 22 nt, Marburg virus
uuaauauggccaguuccagcaa

SEQ ID NO: 4021408 - RNA, 20 nt, Marburg virus
uuaauugggaacaccaugca

SEQ ID NO: 4021409 - RNA, 13 nt, Marburg virus
aaaacuaugaaga

SEQ ID NO: 4021410 - RNA, 22 nt, Marburg virus
aaaauauuacuuugaucaauuu

SEQ ID NO: 4021411 - RNA, 23 nt, Marburg virus
aaaaugggaaggacacuggaagc

SEQ ID NO: 4021412 - RNA, 12 nt, Marburg virus
aaacaacagaug

SEQ ID NO: 4021413 - RNA, 17 nt, Marburg virus
aaagauguguugaccuu

SEQ ID NO: 4021414 - RNA, 13 nt, Marburg virus
aaagucauguuug

SEQ ID NO: 4021415 - RNA, 18 nt, Marburg virus
aaaucuuacauaggauua

SEQ ID NO: 4021416 - RNA, 23 nt, Marburg virus
aaaucuuaccacagcaaagagca

SEQ ID NO: 4021417 - RNA, 23 nt, Marburg virus
aaaugaggguuacauuuucuaga

SEQ ID NO: 4021418 - RNA, 20 nt, Marburg virus
aaauugaucaaacacuugga

SEQ ID NO: 4021419 - RNA, 14 nt, Marburg virus
aacaaagaauauac

SEQ ID NO: 4021420 - RNA, 14 nt, Marburg virus
aacaacacgaaagg

SEQ ID NO: 4021421 - RNA, 22 nt, Marburg virus
aacaacauagaaaacauauuua

SEQ ID NO: 4021422 - RNA, 13 nt, Marburg virus
aacaauacuguga

SEQ ID NO: 4021423 - RNA, 13 nt, Marburg virus
aacaccuccaaga

SEQ ID NO: 4021424 - RNA, 12 nt, Marburg virus
aacagaaauugu

SEQ ID NO: 4021425 - RNA, 16 nt, Marburg virus
aacauggcagaauuau

SEQ ID NO: 4021426 - RNA, 19 nt, Marburg virus
aacuccacgaagaaucaaa

SEQ ID NO: 4021427 - RNA, 14 nt, Marburg virus
aacuugaugaugca

SEQ ID NO: 4021428 - RNA, 19 nt, Marburg virus
aagaaucaaacaugugcuc

SEQ ID NO: 4021429 - RNA, 15 nt, Marburg virus
aagagaacuucauuu

SEQ ID NO: 4021430 - RNA, 15 nt, Marburg virus
aagauagacagaaca

SEQ ID NO: 4021431 - RNA, 23 nt, Marburg virus
aaggaugggucuguguuuauuca

SEQ ID NO: 4021432 - RNA, 17 nt, Marburg virus
aaggggaugucagaaau

SEQ ID NO: 4021433 - RNA, 20 nt, Marburg virus
aagguggggaggaacaugca

SEQ ID NO: 4021434 - RNA, 16 nt, Marburg virus
aaguauuuuuauaaaa

SEQ ID NO: 4021435 - RNA, 23 nt, Marburg virus
aauaacgauugauuaagaaaaac

SEQ ID NO: 4021436 - RNA, 13 nt, Marburg virus
aauaauagugcau

SEQ ID NO: 4021437 - RNA, 18 nt, Marburg virus
aauaaucaccaauucauu

SEQ ID NO: 4021438 - RNA, 17 nt, Marburg virus
aauaccacuauguuaua

SEQ ID NO: 4021439 - RNA, 18 nt, Marburg virus
aauacugugaauuauucu

SEQ ID NO: 4021440 - RNA, 15 nt, Marburg virus
aauagccuugucaug

SEQ ID NO: 4021441 - RNA, 13 nt, Marburg virus
aauaguugucaua

SEQ ID NO: 4021442 - RNA, 16 nt, Marburg virus
aauauaaaugaaaaca

SEQ ID NO: 4021443 - RNA, 16 nt, Marburg virus
aauaucccuugugaau

SEQ ID NO: 4021444 - RNA, 22 nt, Marburg virus
aauauuaaguguguauugauua

SEQ ID NO: 4021445 - RNA, 17 nt, Marburg virus
aauauuacuuugaucaa

SEQ ID NO: 4021446 - RNA, 21 nt, Marburg virus
aaucacagaggauugagucau

SEQ ID NO: 4021447 - RNA, 13 nt, Marburg virus
aaucaccaauuca

SEQ ID NO: 4021448 - RNA, 12 nt, Marburg virus
aaucauuaucau

SEQ ID NO: 4021449 - RNA, 13 nt, Marburg virus
aauccgaaauugc

SEQ ID NO: 4021450 - RNA, 19 nt, Marburg virus
aaucuugaccuuaauucca

SEQ ID NO: 4021451 - RNA, 20 nt, Marburg virus
aaucuugagggacaaauuau

SEQ ID NO: 4021452 - RNA, 21 nt, Marburg virus
aauuaaaaaauuaaaaaacuu

SEQ ID NO: 4021453 - RNA, 16 nt, Marburg virus
aauuacgacacacaga

SEQ ID NO: 4021454 - RNA, 14 nt, Marburg virus
aauuauacccacaa

SEQ ID NO: 4021455 - RNA, 18 nt, Marburg virus
aauuauccuaacaugaag

SEQ ID NO: 4021456 - RNA, 21 nt, Marburg virus
aauuauugccauguacuugga

SEQ ID NO: 4021457 - RNA, 13 nt, Marburg virus
aauucagcaagca

SEQ ID NO: 4021458 - RNA, 19 nt, Marburg virus
aauucgacagcauuaaaaa

SEQ ID NO: 4021459 - RNA, 22 nt, Marburg virus
aauugauaaaauauuacuuuga

SEQ ID NO: 4021460 - RNA, 18 nt, Marburg virus
aauugcuauaaugauaca

SEQ ID NO: 4021461 - RNA, 13 nt, Marburg virus
aauuucuugaaaa

SEQ ID NO: 4021462 - RNA, 21 nt, Marburg virus
acaaagaauugauaaaauauu

SEQ ID NO: 4021463 - RNA, 17 nt, Marburg virus
acaacuugccugcaaau

SEQ ID NO: 4021464 - RNA, 13 nt, Marburg virus
acaagauaaucuu

SEQ ID NO: 4021465 - RNA, 16 nt, Marburg virus
acaauaaguuuaacua

SEQ ID NO: 4021466 - RNA, 17 nt, Marburg virus
acaaucuaggugauugu

SEQ ID NO: 4021467 - RNA, 20 nt, Marburg virus
acacaacaucuuguauauuu

SEQ ID NO: 4021468 - RNA, 14 nt, Marburg virus
acacauacaugcaa

SEQ ID NO: 4021469 - RNA, 18 nt, Marburg virus
acagccacugaaaaugaa

SEQ ID NO: 4021470 - RNA, 16 nt, Marburg virus
acaugcaauacuugaa

SEQ ID NO: 4021471 - RNA, 17 nt, Marburg virus
acaugcuacaauauaag

SEQ ID NO: 4021472 - RNA, 19 nt, Marburg virus
accaagcaauugacuucuc

SEQ ID NO: 4021473 - RNA, 16 nt, Marburg virus
accaucuuaauagaag

SEQ ID NO: 4021474 - RNA, 18 nt, Marburg virus
acccauuguucuaccaac

SEQ ID NO: 4021475 - RNA, 19 nt, Marburg virus
accuugauaaucuaacaaa

SEQ ID NO: 4021476 - RNA, 22 nt, Marburg virus
accuugccuuccgauaugaauu

SEQ ID NO: 4021477 - RNA, 13 nt, Marburg virus
accuuggaaaauc

SEQ ID NO: 4021478 - RNA, 22 nt, Marburg virus
accuuucuguugauuucaaugu

SEQ ID NO: 4021479 - RNA, 18 nt, Marburg virus
acggguuaauaaaugcuc

SEQ ID NO: 4021480 - RNA, 15 nt, Marburg virus
acuaaucaauucacc

SEQ ID NO: 4021481 - RNA, 15 nt, Marburg virus
acuauggugaugcga

SEQ ID NO: 4021482 - RNA, 18 nt, Marburg virus
acucaucauauaugcaac

SEQ ID NO: 4021483 - RNA, 12 nt, Marburg virus
acugagagggaa

SEQ ID NO: 4021484 - RNA, 17 nt, Marburg virus
acuggccgaaaaugcuc

SEQ ID NO: 4021485 - RNA, 12 nt, Marburg virus
acuguggcugcg

SEQ ID NO: 4021486 - RNA, 18 nt, Marburg virus
acuugauagaaugucaag

SEQ ID NO: 4021487 - RNA, 19 nt, Marburg virus
acuugaugaugcagcucug

SEQ ID NO: 4021488 - RNA, 20 nt, Marburg virus
acuugcauauccuuuguuga

SEQ ID NO: 4021489 - RNA, 12 nt, Marburg virus
agaagaaaaaac

SEQ ID NO: 4021490 - RNA, 17 nt, Marburg virus
agaaugcauuagaauuu

SEQ ID NO: 4021491 - RNA, 23 nt, Marburg virus
agaauuauucauccaaguuguuu

SEQ ID NO: 4021492 - RNA, 20 nt, Marburg virus
agacgugccguucaaagagu

SEQ ID NO: 4021493 - RNA, 14 nt, Marburg virus
agacuuccaaacau

SEQ ID NO: 4021494 - RNA, 13 nt, Marburg virus
agaguccaugaaa

SEQ ID NO: 4021495 - RNA, 20 nt, Marburg virus
agauacgagguuauauaauu

SEQ ID NO: 4021496 - RNA, 16 nt, Marburg virus
agcauaaaaaucccaa

SEQ ID NO: 4021497 - RNA, 15 nt, Marburg virus
aggauaaaaggacaa

SEQ ID NO: 4021498 - RNA, 21 nt, Marburg virus
aggauuuuucuccuaaggaaa

SEQ ID NO: 4021499 - RNA, 19 nt, Marburg virus
agggaacagaaagaagcau

SEQ ID NO: 4021500 - RNA, 16 nt, Marburg virus
agggguuucauaugcu

SEQ ID NO: 4021501 - RNA, 15 nt, Marburg virus
aguaaaggacaauga

SEQ ID NO: 4021502 - RNA, 14 nt, Marburg virus
aguaagaaaaacua

SEQ ID NO: 4021503 - RNA, 16 nt, Marburg virus
aguauaaaguauaauu

SEQ ID NO: 4021504 - RNA, 17 nt, Marburg virus
aguauacucgcuucaau

SEQ ID NO: 4021505 - RNA, 18 nt, Marburg virus
aguauacuguaacauaua

SEQ ID NO: 4021506 - RNA, 20 nt, Marburg virus
agucccucgcccaugucaaa

SEQ ID NO: 4021507 - RNA, 16 nt, Marburg virus
agugauaagagucaaa

SEQ ID NO: 4021508 - RNA, 23 nt, Marburg virus
agugaucuuuccgaguugauaca

SEQ ID NO: 4021509 - RNA, 14 nt, Marburg virus
aguucuuuaaauuu

SEQ ID NO: 4021510 - RNA, 20 nt, Marburg virus
auaacauccgguucaggguc

SEQ ID NO: 4021511 - RNA, 17 nt, Marburg virus
auaacccaccggauugu

SEQ ID NO: 4021512 - RNA, 15 nt, Marburg virus
auaagcuaucaaaua

SEQ ID NO: 4021513 - RNA, 20 nt, Marburg virus
auaaguuuaagauaucuuaa

SEQ ID NO: 4021514 - RNA, 23 nt, Marburg virus
auaaucaccaauucauuguaaau

SEQ ID NO: 4021515 - RNA, 16 nt, Marburg virus
auaauccgaaaugcug

SEQ ID NO: 4021516 - RNA, 14 nt, Marburg virus
auaauuuucacaau

SEQ ID NO: 4021517 - RNA, 16 nt, Marburg virus
auaccuacccugauuu

SEQ ID NO: 4021518 - RNA, 23 nt, Marburg virus
auacgucgauauaauacauacua

SEQ ID NO: 4021519 - RNA, 13 nt, Marburg virus
auauaucaugaaa

SEQ ID NO: 4021520 - RNA, 17 nt, Marburg virus
auaucggacauucaaag

SEQ ID NO: 4021521 - RNA, 17 nt, Marburg virus
auaucuuccaaaauaua

SEQ ID NO: 4021522 - RNA, 15 nt, Marburg virus
auauuaaguguguau

SEQ ID NO: 4021523 - RNA, 19 nt, Marburg virus
auauuacuuugaucaauuu

SEQ ID NO: 4021524 - RNA, 18 nt, Marburg virus
auauucaaggucaaaacc

SEQ ID NO: 4021525 - RNA, 17 nt, Marburg virus
auauuucauucaaacac

SEQ ID NO: 4021526 - RNA, 14 nt, Marburg virus
aucagccuaaaauc

SEQ ID NO: 4021527 - RNA, 23 nt, Marburg virus
auccaagggauaaaaacucuccc

SEQ ID NO: 4021528 - RNA, 21 nt, Marburg virus
auccaucuuaagugaauccuu

SEQ ID NO: 4021529 - RNA, 13 nt, Marburg virus
auccuauuuuccu

SEQ ID NO: 4021530 - RNA, 21 nt, Marburg virus
auccuugaucaacaccaugac

SEQ ID NO: 4021531 - RNA, 20 nt, Marburg virus
aucgucucaaaccguacaca

SEQ ID NO: 4021532 - RNA, 22 nt, Marburg virus
aucguugagauuaaaaagacua

SEQ ID NO: 4021533 - RNA, 19 nt, Marburg virus
aucuaauucucauuguuaa

SEQ ID NO: 4021534 - RNA, 14 nt, Marburg virus
aucuagaacaaauu

SEQ ID NO: 4021535 - RNA, 17 nt, Marburg virus
aaaaaucccaacaaugg

SEQ ID NO: 4021536 - RNA, 19 nt, Marburg virus
aaaaaugaggguuacauuu

SEQ ID NO: 4021537 - RNA, 14 nt, Marburg virus
aaaacaccaccaau

SEQ ID NO: 4021538 - RNA, 12 nt, Marburg virus
aaaacacugccu

SEQ ID NO: 4021539 - RNA, 13 nt, Marburg virus
aaacacuuggaac

SEQ ID NO: 4021540 - RNA, 13 nt, Marburg virus
aaaccaagcaauu

SEQ ID NO: 4021541 - RNA, 18 nt, Marburg virus
aaaccauaaggaaaaaug

SEQ ID NO: 4021542 - RNA, 22 nt, Marburg virus
aaagagcacuaacaacacgaaa

SEQ ID NO: 4021543 - RNA, 18 nt, Marburg virus
aaaguugcugauuccccu

SEQ ID NO: 4021544 - RNA, 22 nt, Marburg virus
aaauauuggacaaguaacaaug

SEQ ID NO: 4021545 - RNA, 20 nt, Marburg virus
aaaucaacuugggagauuuu

SEQ ID NO: 4021546 - RNA, 18 nt, Marburg virus
aaauccuugcuguuggau

SEQ ID NO: 4021547 - RNA, 16 nt, Marburg virus
aaaugcuguaagcuua

SEQ ID NO: 4021548 - RNA, 21 nt, Marburg virus
aaauuaaaauccaguguuaug

SEQ ID NO: 4021549 - RNA, 18 nt, Marburg virus
aaauuaauucacacaagg

SEQ ID NO: 4021550 - RNA, 15 nt, Marburg virus
aacaagaagaagaaa

SEQ ID NO: 4021551 - RNA, 17 nt, Marburg virus
aacacgugggaaauaug

SEQ ID NO: 4021552 - RNA, 12 nt, Marburg virus
aaccaaaacaau

SEQ ID NO: 4021553 - RNA, 13 nt, Marburg virus
aaccaugaaaauc

SEQ ID NO: 4021554 - RNA, 14 nt, Marburg virus
aaccgauggaaaag

SEQ ID NO: 4021555 - RNA, 16 nt, Marburg virus
aaccguacacaaguag

SEQ ID NO: 4021556 - RNA, 19 nt, Marburg virus
aacgacuugucuuaauuca

SEQ ID NO: 4021557 - RNA, 15 nt, Marburg virus
aacuaaacuugcaua

SEQ ID NO: 4021558 - RNA, 19 nt, Marburg virus
aacuacagaagggacaaug

SEQ ID NO: 4021559 - RNA, 13 nt, Marburg virus
aacuaugaagaac

SEQ ID NO: 4021560 - RNA, 14 nt, Marburg virus
aacuccauuccccc

SEQ ID NO: 4021561 - RNA, 12 nt, Marburg virus
aacuguugcaua

SEQ ID NO: 4021562 - RNA, 21 nt, Marburg virus
aacuuguaccucuaaggaaaa

SEQ ID NO: 4021563 - RNA, 11 nt, Marburg virus
aagaaggaaac

SEQ ID NO: 4021564 - RNA, 20 nt, Marburg virus
aagacauguguaggaacaug

SEQ ID NO: 4021565 - RNA, 15 nt, Marburg virus
aagacuuccaaacau

SEQ ID NO: 4021566 - RNA, 14 nt, Marburg virus
aagaucaacaugcc

SEQ ID NO: 4021567 - RNA, 12 nt, Marburg virus
aagaugaacaaa

SEQ ID NO: 4021568 - RNA, 16 nt, Marburg virus
aagcaagggcuuucau

SEQ ID NO: 4021569 - RNA, 14 nt, Marburg virus
aagcaccugagaac

SEQ ID NO: 4021570 - RNA, 16 nt, Marburg virus
aagcacgccacagcaa

SEQ ID NO: 4021571 - RNA, 15 nt, Marburg virus
aagccgaaauuuauc

SEQ ID NO: 4021572 - RNA, 20 nt, Marburg virus
aagcugaucagcuugcaaga

SEQ ID NO: 4021573 - RNA, 15 nt, Marburg virus
aaguuuuguuacuga

SEQ ID NO: 4021574 - RNA, 22 nt, Marburg virus
aauacccucaccacugcccaca

SEQ ID NO: 4021575 - RNA, 14 nt, Marburg virus
aauaguaauguuuu

SEQ ID NO: 4021576 - RNA, 17 nt, Marburg virus
aauagugguaucaucuu

SEQ ID NO: 4021577 - RNA, 22 nt, Marburg virus
aauauaaaagaacgaucugcug

SEQ ID NO: 4021578 - RNA, 15 nt, Marburg virus
aauauccugaugcaa

SEQ ID NO: 4021579 - RNA, 12 nt, Marburg virus
aauaugaugcaa

SEQ ID NO: 4021580 - RNA, 19 nt, Marburg virus
aauaugccaauuaagaaaa

SEQ ID NO: 4021581 - RNA, 14 nt, Marburg virus
aaucauuaauuccu

SEQ ID NO: 4021582 - RNA, 15 nt, Marburg virus
aaucccucagagaag

SEQ ID NO: 4021583 - RNA, 17 nt, Marburg virus
aaucgaaggacuuuaua

SEQ ID NO: 4021584 - RNA, 13 nt, Marburg virus
aaucgauguuaug

SEQ ID NO: 4021585 - RNA, 19 nt, Marburg virus
aaucuaggugauugugaaa

SEQ ID NO: 4021586 - RNA, 18 nt, Marburg virus
aaucuugagggacaaauu

SEQ ID NO: 4021587 - RNA, 14 nt, Marburg virus
aaugaacaaaccag

SEQ ID NO: 4021588 - RNA, 20 nt, Marburg virus
aauguuacggaaaaaagcau

SEQ ID NO: 4021589 - RNA, 14 nt, Marburg virus
aauuaauucacaca

SEQ ID NO: 4021590 - RNA, 12 nt, Marburg virus
aauuacaugaga

SEQ ID NO: 4021591 - RNA, 21 nt, Marburg virus
aauuauccuuuauuaagaaaa

SEQ ID NO: 4021592 - RNA, 16 nt, Marburg virus
aauucaaguuuacuga

SEQ ID NO: 4021593 - RNA, 19 nt, Marburg virus
aauugcuauaaugauacaa

SEQ ID NO: 4021594 - RNA, 14 nt, Marburg virus
aauuucaacuggaa

SEQ ID NO: 4021595 - RNA, 22 nt, Marburg virus
aauuuugcgaggaauuauaaaa

SEQ ID NO: 4021596 - RNA, 12 nt, Marburg virus
acaaaacaccac

SEQ ID NO: 4021597 - RNA, 10 nt, Marburg virus
acaacaaugu

SEQ ID NO: 4021598 - RNA, 19 nt, Marburg virus
acaacauagaaaacauauu

SEQ ID NO: 4021599 - RNA, 23 nt, Marburg virus
acaacauauugugucaaauucau

SEQ ID NO: 4021600 - RNA, 14 nt, Marburg virus
acaauacugugaau

SEQ ID NO: 4021601 - RNA, 14 nt, Marburg virus
acaaucaaaucacu

SEQ ID NO: 4021602 - RNA, 11 nt, Marburg virus
acacuggaagc

SEQ ID NO: 4021603 - RNA, 16 nt, Marburg virus
acagccacugaaaaug

SEQ ID NO: 4021604 - RNA, 16 nt, Marburg virus
acaguuuuuuguauua

SEQ ID NO: 4021605 - RNA, 17 nt, Marburg virus
acaugaaaauuggauug

SEQ ID NO: 4021606 - RNA, 14 nt, Marburg virus
accaaauacuggga

SEQ ID NO: 4021607 - RNA, 18 nt, Marburg virus
accaacugaucgugaaga

SEQ ID NO: 4021608 - RNA, 19 nt, Marburg virus
accaacugaucgugaagaa

SEQ ID NO: 4021609 - RNA, 14 nt, Marburg virus
accaaucauauucc

SEQ ID NO: 4021610 - RNA, 20 nt, Marburg virus
accacuauguuauaugcaug

SEQ ID NO: 4021611 - RNA, 16 nt, Marburg virus
accacugcaccagcug

SEQ ID NO: 4021612 - RNA, 19 nt, Marburg virus
accauaaggaaaaaugagc

SEQ ID NO: 4021613 - RNA, 19 nt, Marburg virus
acuaaaaaucgaagaauau

SEQ ID NO: 4021614 - RNA, 12 nt, Marburg virus
acuaaacauuuc

SEQ ID NO: 4021615 - RNA, 17 nt, Marburg virus
acucuggagaaaaugag

SEQ ID NO: 4021616 - RNA, 19 nt, Marburg virus
acuuacuugggcuugaaga

SEQ ID NO: 4021617 - RNA, 23 nt, Marburg virus
acuuucccucuacucugaacuaa

SEQ ID NO: 4021618 - RNA, 14 nt, Marburg virus
agaaaaaccaauga

SEQ ID NO: 4021619 - RNA, 19 nt, Marburg virus
agaaagcagucccaccaau

SEQ ID NO: 4021620 - RNA, 19 nt, Marburg virus
agaaccacugcaccagcug

SEQ ID NO: 4021621 - RNA, 14 nt, Marburg virus
agaauuaccgugga

SEQ ID NO: 4021622 - RNA, 15 nt, Marburg virus
agacccaaacaauga

SEQ ID NO: 4021623 - RNA, 13 nt, Marburg virus
agacuugaacaca

SEQ ID NO: 4021624 - RNA, 21 nt, Marburg virus
agauauugggaaauuggauga

SEQ ID NO: 4021625 - RNA, 15 nt, Marburg virus
agaucaaacccacaa

SEQ ID NO: 4021626 - RNA, 14 nt, Marburg virus
agaucgauaucuuu

SEQ ID NO: 4021627 - RNA, 13 nt, Marburg virus
agauuauaugauu

SEQ ID NO: 4021628 - RNA, 17 nt, Marburg virus
agcaauuacaacacaua

SEQ ID NO: 4021629 - RNA, 17 nt, Marburg virus
agcacagccacugaaaa

SEQ ID NO: 4021630 - RNA, 13 nt, Marburg virus
agcacgccacagc

SEQ ID NO: 4021631 - RNA, 17 nt, Marburg virus
agcauggauauucauag

SEQ ID NO: 4021632 - RNA, 17 nt, Marburg virus
agcuguauacaaacaca

SEQ ID NO: 4021633 - RNA, 16 nt, Marburg virus
agcuucucggacaaua

SEQ ID NO: 4021634 - RNA, 21 nt, Marburg virus
agcuuguaguaaggggaccau

SEQ ID NO: 4021635 - RNA, 17 nt, Marburg virus
agcuuuuauucagaaua

SEQ ID NO: 4021636 - RNA, 22 nt, Marburg virus
aggaaaucuuaccacagcaaag

SEQ ID NO: 4021637 - RNA, 14 nt, Marburg virus
aggaagaauuauuc

SEQ ID NO: 4021638 - RNA, 15 nt, Marburg virus
aggacaaagaggguc

SEQ ID NO: 4021639 - RNA, 13 nt, Marburg virus
aggacacuggaag

SEQ ID NO: 4021640 - RNA, 22 nt, Marburg virus
aggacagguguaccucccaaga

SEQ ID NO: 4021641 - RNA, 15 nt, Marburg virus
aggauuuaagggaac

SEQ ID NO: 4021642 - RNA, 22 nt, Marburg virus
aggcagauaucggacauucaaa

SEQ ID NO: 4021643 - RNA, 13 nt, Marburg virus
agggcauuauuca

SEQ ID NO: 4021644 - RNA, 24 nt, Marburg virus
agguauaacacgugggaaauaugu

SEQ ID NO: 4021645 - RNA, 13 nt, Marburg virus
aguauaaaguaua

SEQ ID NO: 4021646 - RNA, 21 nt, Marburg virus
agucaaagguguuccagcaug

SEQ ID NO: 4021647 - RNA, 19 nt, Marburg virus
agucuuaucuuaauccaag

SEQ ID NO: 4021648 - RNA, 15 nt, Marburg virus
agugaauacauucuu

SEQ ID NO: 4021649 - RNA, 15 nt, Marburg virus
agugguaucaucuua

SEQ ID NO: 4021650 - RNA, 18 nt, Marburg virus
agugugcugaaaauguua

SEQ ID NO: 4021651 - RNA, 15 nt, Marburg virus
aguuccaaauacaaa

SEQ ID NO: 4021652 - RNA, 23 nt, Marburg virus
aguucucacaagauuaguuugua

SEQ ID NO: 4021653 - RNA, 19 nt, Marburg virus
auaaaaaucccaacaaugg

SEQ ID NO: 4021654 - RNA, 15 nt, Marburg virus
auaaaauaaacaaga

SEQ ID NO: 4021655 - RNA, 14 nt, Marburg virus
auaaaugcuccaau

SEQ ID NO: 4021656 - RNA, 15 nt, Marburg virus
auaaggaaaaaugag

SEQ ID NO: 4021657 - RNA, 22 nt, Marburg virus
auaagugauuuacuugauagaa

SEQ ID NO: 4021658 - RNA, 15 nt, Marburg virus
auaaguuuaagauau

SEQ ID NO: 4021659 - RNA, 22 nt, Marburg virus
auagauccuugaucaacaccau

SEQ ID NO: 4021660 - RNA, 17 nt, Marburg virus
auagauucaauuauccu

SEQ ID NO: 4021661 - RNA, 18 nt, Marburg virus
auauaaguggcuuaaauu

SEQ ID NO: 4021662 - RNA, 14 nt, Marburg virus
auaucauaaauaua

SEQ ID NO: 4021663 - RNA, 11 nt, Marburg virus
auauuaaauau

SEQ ID NO: 4021664 - RNA, 18 nt, Marburg virus
aucauauuuuaacuucca

SEQ ID NO: 4021665 - RNA, 16 nt, Marburg virus
aucccucuggaaaauc

SEQ ID NO: 4021666 - RNA, 19 nt, Marburg virus
aucccucuggaaaauccuu

SEQ ID NO: 4021667 - RNA, 16 nt, Marburg virus
auccuuucuucaauau

SEQ ID NO: 4021668 - RNA, 14 nt, Marburg virus
aucgaugagcucaa

SEQ ID NO: 4021669 - RNA, 17 nt, Marburg virus
aucggacauucaaagca

SEQ ID NO: 4021670 - RNA, 12 nt, Marburg virus
aucgugaagaaa

SEQ ID NO: 4021671 - RNA, 16 nt, Marburg virus
aucucagcuuguugaa

SEQ ID NO: 4021672 - RNA, 23 nt, Marburg virus
aucuugaccuuaauuccacagca

SEQ ID NO: 4021673 - RNA, 21 nt, Marburg virus
aucuugagggacaaauuauug

SEQ ID NO: 4021674 - RNA, 19 nt, Marburg virus
augacaagugacaaaauuu

SEQ ID NO: 4021675 - RNA, 15 nt, Marburg virus
augaucaguucaaag

SEQ ID NO: 4021676 - RNA, 17 nt, Marburg virus
augcagccgacaagaug

SEQ ID NO: 4021677 - RNA, 13 nt, Marburg virus
auguccaaacacu

SEQ ID NO: 4021678 - RNA, 17 nt, Marburg virus
auguuacggaaaaaagc

SEQ ID NO: 4021679 - RNA, 20 nt, Marburg virus
auguugaugauuuuaaauac

SEQ ID NO: 4021680 - RNA, 23 nt, Marburg virus
auguuguaaaugaccacggaaaa

SEQ ID NO: 4021681 - RNA, 12 nt, Marburg virus
auuaaaaacaag

SEQ ID NO: 4021682 - RNA, 16 nt, Marburg virus
auuaaauaguugucau

SEQ ID NO: 4021683 - RNA, 14 nt, Marburg virus
auuaagaaaaacua

SEQ ID NO: 4021684 - RNA, 19 nt, Marburg virus
auuaagaaaaacuaugaag

SEQ ID NO: 4021685 - RNA, 21 nt, Marburg virus
auuaaguguucuuuguuagaa

SEQ ID NO: 4021686 - RNA, 22 nt, Marburg virus
auuacuuguuacuauuguguga

SEQ ID NO: 4021687 - RNA, 13 nt, Marburg virus
auuauagaggaac

SEQ ID NO: 4021688 - RNA, 18 nt, Marburg virus
auuauccuaacaugaaga

SEQ ID NO: 4021689 - RNA, 19 nt, Marburg virus
auucaagacgcuuauucau

SEQ ID NO: 4021690 - RNA, 18 nt, Marburg virus
auucaagauuuaaaaugc

SEQ ID NO: 4021691 - RNA, 16 nt, Marburg virus
auucaccuacaaucuc

SEQ ID NO: 4021692 - RNA, 22 nt, Marburg virus
auuccccggugguuuauuuuca

SEQ ID NO: 4021693 - RNA, 21 nt, Marburg virus
auucuaagugaaggagagaau

SEQ ID NO: 4021694 - RNA, 21 nt, Marburg virus
auucucccaccucuuuaaaaa

SEQ ID NO: 4021695 - RNA, 13 nt, Marburg virus
auugauauugaac

SEQ ID NO: 4021696 - RNA, 14 nt, Marburg virus
auugaucaaacacu

SEQ ID NO: 4021697 - RNA, 14 nt, Marburg virus
auuguaagaauuaa

SEQ ID NO: 4021698 - RNA, 15 nt, Marburg virus
auuguggacauguau

SEQ ID NO: 4021699 - RNA, 23 nt, Marburg virus
auuuaaagagauuucuuguugca

SEQ ID NO: 4021700 - RNA, 17 nt, Marburg virus
auuuauaacuaaccauu

SEQ ID NO: 4021701 - RNA, 19 nt, Marburg virus
auuucaggcaauaaagcug

SEQ ID NO: 4021702 - RNA, 16 nt, Marburg virus
auuucauucaaacacc

SEQ ID NO: 4021703 - RNA, 14 nt, Marburg virus
auuucauucaaugu

SEQ ID NO: 4021704 - RNA, 22 nt, Marburg virus
auuucguaguuaaauuucuaga

SEQ ID NO: 4021705 - RNA, 13 nt, Marburg virus
auuucuuuaauaa

SEQ ID NO: 4021706 - RNA, 15 nt, Marburg virus
auuugucguaucuuu

SEQ ID NO: 4021707 - RNA, 22 nt, Marburg virus
caaaaaagucuucgggcuguuc

SEQ ID NO: 4021708 - RNA, 19 nt, Marburg virus
caaaacuauccaucauauu

SEQ ID NO: 4021709 - RNA, 21 nt, Marburg virus
caaagacgaucuuugaugaau

SEQ ID NO: 4021710 - RNA, 17 nt, Marburg virus
caaaguaaugaaaauag

SEQ ID NO: 4021711 - RNA, 24 nt, Marburg virus
caaauuauugccauguacuuggaa

SEQ ID NO: 4021712 - RNA, 23 nt, Marburg virus
caaccagggagaucaaauuauug

SEQ ID NO: 4021713 - RNA, 23 nt, Marburg virus
caacuacgaaccuccauacauuu

SEQ ID NO: 4021714 - RNA, 18 nt, Marburg virus
caagaacgccuaguggaa

SEQ ID NO: 4021715 - RNA, 16 nt, Marburg virus
caagaauacaacucca

SEQ ID NO: 4021716 - RNA, 22 nt, Marburg virus
caagggcuuucaucaacaaugc

SEQ ID NO: 4021717 - RNA, 20 nt, Marburg virus
caauaucccuugugaaucau

SEQ ID NO: 4021718 - RNA, 13 nt, Marburg virus
caauaugaugcaa

SEQ ID NO: 4021719 - RNA, 21 nt, Marburg virus
caauaugaugcaauuaaucau

SEQ ID NO: 4021720 - RNA, 18 nt, Marburg virus
caaucauacacauaauaa

SEQ ID NO: 4021721 - RNA, 17 nt, Marburg virus
caaucugggaucauauu

SEQ ID NO: 4021722 - RNA, 12 nt, Marburg virus
caaucuguaaaa

SEQ ID NO: 4021723 - RNA, 15 nt, Marburg virus
caauggaacacaaac

SEQ ID NO: 4021724 - RNA, 12 nt, Marburg virus
caauugauuuug

SEQ ID NO: 4021725 - RNA, 14 nt, Marburg virus
cacaaguagggaaa

SEQ ID NO: 4021726 - RNA, 17 nt, Marburg virus
cacaauucagcaagcau

SEQ ID NO: 4021727 - RNA, 14 nt, Marburg virus
cacagagcacagcc

SEQ ID NO: 4021728 - RNA, 13 nt, Marburg virus
cacugcccacagc

SEQ ID NO: 4021729 - RNA, 15 nt, Marburg virus
cagaguggcaacaaa

SEQ ID NO: 4021730 - RNA, 21 nt, Marburg virus
cagcaagaaggaaacaacaca

SEQ ID NO: 4021731 - RNA, 13 nt, Marburg virus
cagcauggcugcc

SEQ ID NO: 4021732 - RNA, 19 nt, Marburg virus
caggaaaucuuaccacagc

SEQ ID NO: 4021733 - RNA, 20 nt, Marburg virus
caggaaaucuuaccacagca

SEQ ID NO: 4021734 - RNA, 19 nt, Marburg virus
caggguccggagaacagga

SEQ ID NO: 4021735 - RNA, 23 nt, Marburg virus
caguaaaagaagguaugaugaag

SEQ ID NO: 4021736 - RNA, 23 nt, Marburg virus
cauacacccgaauuugccaccca

SEQ ID NO: 4021737 - RNA, 15 nt, Marburg virus
cauacuguggcugcg

SEQ ID NO: 4021738 - RNA, 15 nt, Marburg virus
caucuuauuaaauag

SEQ ID NO: 4021739 - RNA, 17 nt, Marburg virus
caugcccccccacaaca

SEQ ID NO: 4021740 - RNA, 20 nt, Marburg virus
caugcccccccacaacacca

SEQ ID NO: 4021741 - RNA, 15 nt, Marburg virus
caugguauaaaacca

SEQ ID NO: 4021742 - RNA, 21 nt, Marburg virus
cauguugaugauuuuaaauac

SEQ ID NO: 4021743 - RNA, 21 nt, Marburg virus
cauuauucagugcuacaaauu

SEQ ID NO: 4021744 - RNA, 11 nt, Marburg virus
cauucaacuua

SEQ ID NO: 4021745 - RNA, 16 nt, Marburg virus
ccaaaccgcaucaucu

SEQ ID NO: 4021746 - RNA, 17 nt, Marburg virus
ccaaaccgcaucaucua

SEQ ID NO: 4021747 - RNA, 19 nt, Marburg virus
ccaacaauggaccacugcu

SEQ ID NO: 4021748 - RNA, 11 nt, Marburg virus
ccaacaggaaa

SEQ ID NO: 4021749 - RNA, 23 nt, Marburg virus
ccaacccgaccacacaacaucuu

SEQ ID NO: 4021750 - RNA, 23 nt, Marburg virus
ccacaugucucuuuaucagucuu

SEQ ID NO: 4021751 - RNA, 15 nt, Marburg virus
ccaccucuuuaaaaa

SEQ ID NO: 4021752 - RNA, 12 nt, Marburg virus
ccauaaggaaaa

SEQ ID NO: 4021753 - RNA, 13 nt, Marburg virus
cccacaacaccac

SEQ ID NO: 4021754 - RNA, 16 nt, Marburg virus
cccagcacacccacuc

SEQ ID NO: 4021755 - RNA, 13 nt, Marburg virus
ccgucacaugaau

SEQ ID NO: 4021756 - RNA, 13 nt, Marburg virus
ccuaaggaaaauc

SEQ ID NO: 4021757 - RNA, 19 nt, Marburg virus
ccugcgauuuucaaagauc

SEQ ID NO: 4021758 - RNA, 18 nt, Marburg virus
cgaaauugcguaauugua

SEQ ID NO: 4021759 - RNA, 23 nt, Marburg virus
cguaguguucuuuuacuggaagg

SEQ ID NO: 4021760 - RNA, 21 nt, Marburg virus
cguaugcgaauccaacgcuca

SEQ ID NO: 4021761 - RNA, 13 nt, Marburg virus
cgucucuuucuaa

SEQ ID NO: 4021762 - RNA, 22 nt, Marburg virus
cuaaacgaaguaacaacaagag

SEQ ID NO: 4021763 - RNA, 22 nt, Marburg virus
cuaaugcuuaucauuaucacuu

SEQ ID NO: 4021764 - RNA, 14 nt, Marburg virus
cuacuaacaacacc

SEQ ID NO: 4021765 - RNA, 16 nt, Marburg virus
cuagaacaaauuuuaa

SEQ ID NO: 4021766 - RNA, 13 nt, Marburg virus
cuaucaaaucagc

SEQ ID NO: 4021767 - RNA, 21 nt, Marburg virus
cuaugaagaacauuaagaaga

SEQ ID NO: 4021768 - RNA, 13 nt, Marburg virus
cucauaacauccg

SEQ ID NO: 4021769 - RNA, 19 nt, Marburg virus
cugaacuaccuccacagau

SEQ ID NO: 4021770 - RNA, 20 nt, Marburg virus
cugcugguuuaauuaaaaac

SEQ ID NO: 4021771 - RNA, 22 nt, Marburg virus
cuguaaucaacacugcuguauc

SEQ ID NO: 4021772 - RNA, 16 nt, Marburg virus
cuguuuuaauuaagaa

SEQ ID NO: 4021773 - RNA, 17 nt, Marburg virus
cuguuuuaauuaagaaa

SEQ ID NO: 4021774 - RNA, 16 nt, Marburg virus
cuuauauugaugcauu

SEQ ID NO: 4021775 - RNA, 14 nt, Marburg virus
cuucauaaucuguu

SEQ ID NO: 4021776 - RNA, 20 nt, Marburg virus
cuugaagacauaguuaagac

SEQ ID NO: 4021777 - RNA, 14 nt, Marburg virus
cuuuacaccaggaa

SEQ ID NO: 4021778 - RNA, 13 nt, Marburg virus
cuuuuacuggaag

SEQ ID NO: 4021779 - RNA, 12 nt, Marburg virus
cuuuuuaagaau

SEQ ID NO: 4021780 - RNA, 16 nt, Marburg virus
gaaaaacuaugaagaa

SEQ ID NO: 4021781 - RNA, 22 nt, Marburg virus
gaaauacaaccuugccuuccga

SEQ ID NO: 4021782 - RNA, 15 nt, Marburg virus
gaaaucaacuuggga

SEQ ID NO: 4021783 - RNA, 21 nt, Marburg virus
gaaauuauccuaacaugaaga

SEQ ID NO: 4021784 - RNA, 18 nt, Marburg virus
gaacaaauugaccaaauc

SEQ ID NO: 4021785 - RNA, 23 nt, Marburg virus
gaaccaggaguguugggacagug

SEQ ID NO: 4021786 - RNA, 11 nt, Marburg virus
gaacuaaggaa

SEQ ID NO: 4021787 - RNA, 18 nt, Marburg virus
gaacuuuugcuauugaug

SEQ ID NO: 4021788 - RNA, 16 nt, Marburg virus
gaaggacacuggaagc

SEQ ID NO: 4021789 - RNA, 13 nt, Marburg virus
gaaguaacaacaa

SEQ ID NO: 4021790 - RNA, 16 nt, Marburg virus
gaaguauccucuggag

SEQ ID NO: 4021791 - RNA, 20 nt, Marburg virus
gaauacaacuccacgaagaa

SEQ ID NO: 4021792 - RNA, 22 nt, Marburg virus
gaauccuuucuucaauaugcag

SEQ ID NO: 4021793 - RNA, 21 nt, Marburg virus
gaaugucugccaugcuuucac

SEQ ID NO: 4021794 - RNA, 16 nt, Marburg virus
gaauuacagcaaucau

SEQ ID NO: 4021795 - RNA, 15 nt, Marburg virus
gaauugauaaaauau

SEQ ID NO: 4021796 - RNA, 15 nt, Marburg virus
gacaaguaacaaugg

SEQ ID NO: 4021797 - RNA, 17 nt, Marburg virus
gacccaaacaaugauga

SEQ ID NO: 4021798 - RNA, 23 nt, Marburg virus
gacuggccgaaaaugcucuccag

SEQ ID NO: 4021799 - RNA, 23 nt, Marburg virus
gacuuccaaacauggcagaauua

SEQ ID NO: 4021800 - RNA, 17 nt, Marburg virus
gaggcaguucuaagaga

SEQ ID NO: 4021801 - RNA, 17 nt, Marburg virus
gaucaaaugaccaaaua

SEQ ID NO: 4021802 - RNA, 22 nt, Marburg virus
gaugcaauuaaucauguugaug

SEQ ID NO: 4021803 - RNA, 19 nt, Marburg virus
gauguguugaccuuggaaa

SEQ ID NO: 4021804 - RNA, 20 nt, Marburg virus
gauuuagaucuauuguucau

SEQ ID NO: 4021805 - RNA, 13 nt, Marburg virus
gcaagaaggaaac

SEQ ID NO: 4021806 - RNA, 21 nt, Marburg virus
gcaagaaggaaacaacacaga

SEQ ID NO: 4021807 - RNA, 20 nt, Marburg virus
gcagauaucggacauucaaa

SEQ ID NO: 4021808 - RNA, 17 nt, Marburg virus
gcagucccaccaaucau

SEQ ID NO: 4021809 - RNA, 18 nt, Marburg virus
gcauuagaauuucuugaa

SEQ ID NO: 4021810 - RNA, 22 nt, Marburg virus
gcauuuaacuccauaucuuaga

SEQ ID NO: 4021811 - RNA, 13 nt, Marburg virus
gccaauuaagaaa

SEQ ID NO: 4021812 - RNA, 13 nt, Marburg virus
gccaucugauuua

SEQ ID NO: 4021813 - RNA, 17 nt, Marburg virus
gcccacagcccguccag

SEQ ID NO: 4021814 - RNA, 14 nt, Marburg virus
gcccuggaaucgaa

SEQ ID NO: 4021815 - RNA, 17 nt, Marburg virus
gcgucuagccaaucaaa

SEQ ID NO: 4021816 - RNA, 15 nt, Marburg virus
gcuaauuucuugagg

SEQ ID NO: 4021817 - RNA, 18 nt, Marburg virus
ggaaaauccuuauuauug

SEQ ID NO: 4021818 - RNA, 13 nt, Marburg virus
ggacaaauuauug

SEQ ID NO: 4021819 - RNA, 16 nt, Marburg virus
ggagauuuuuaagaag

SEQ ID NO: 4021820 - RNA, 21 nt, Marburg virus
ggauuuuucuccuaaggaaaa

SEQ ID NO: 4021821 - RNA, 23 nt, Marburg virus
gggaggauuuuucuccuaaggaa

SEQ ID NO: 4021822 - RNA, 11 nt, Marburg virus
gguaugacuga

SEQ ID NO: 4021823 - RNA, 19 nt, Marburg virus
gguaugacugagugaucag

SEQ ID NO: 4021824 - RNA, 16 nt, Marburg virus
gguuacauuuucuaga

SEQ ID NO: 4021825 - RNA, 20 nt, Marburg virus
guaagaaaaacuaaugaaga

SEQ ID NO: 4021826 - RNA, 18 nt, Marburg virus
guagauuauaugauuuuu

SEQ ID NO: 4021827 - RNA, 18 nt, Marburg virus
guccaaacacucgcagaa

SEQ ID NO: 4021828 - RNA, 13 nt, Marburg virus
gucuaaugucaaa

SEQ ID NO: 4021829 - RNA, 18 nt, Marburg virus
gucuuaagugugauuuuc

SEQ ID NO: 4021830 - RNA, 17 nt, Marburg virus
gugaucaguauauuuua

SEQ ID NO: 4021831 - RNA, 21 nt, Marburg virus
guguaacggaucccucuggaa

SEQ ID NO: 4021832 - RNA, 19 nt, Marburg virus
guuaacuggacaacagauc

SEQ ID NO: 4021833 - RNA, 15 nt, Marburg virus
guuagaauuauucau

SEQ ID NO: 4021834 - RNA, 17 nt, Marburg virus
guuauauaauuacucau

SEQ ID NO: 4021835 - RNA, 21 nt, Marburg virus
guuuaaccacauaauaauguu

SEQ ID NO: 4021836 - RNA, 18 nt, Marburg virus
guuuacguauuguugauu

SEQ ID NO: 4021837 - RNA, 20 nt, Marburg virus
guuucaccuuucuguugauu

SEQ ID NO: 4021838 - RNA, 15 nt, Marburg virus
guuuuaauuaagaaa

SEQ ID NO: 4021839 - RNA, 17 nt, Marburg virus
uaaaaaugaaacaacag

SEQ ID NO: 4021840 - RNA, 14 nt, Marburg virus
uaaaaugcaacaac

SEQ ID NO: 4021841 - RNA, 17 nt, Marburg virus
uaacagguaugacugag

SEQ ID NO: 4021842 - RNA, 20 nt, Marburg virus
uaagaaaaacuaugaagaac

SEQ ID NO: 4021843 - RNA, 14 nt, Marburg virus
uaauaauuuucaca

SEQ ID NO: 4021844 - RNA, 16 nt, Marburg virus
uaaucuaacaaaucgu

SEQ ID NO: 4021845 - RNA, 17 nt, Marburg virus
uaaugaaccaacaguca

SEQ ID NO: 4021846 - RNA, 16 nt, Marburg virus
uaauucucauuguuaa

SEQ ID NO: 4021847 - RNA, 21 nt, Marburg virus
uaauucucauuguuaacaguu

SEQ ID NO: 4021848 - RNA, 15 nt, Marburg virus
uaauugggaacacca

SEQ ID NO: 4021849 - RNA, 19 nt, Marburg virus
uaauuucaacuggaagaac

SEQ ID NO: 4021850 - RNA, 21 nt, Marburg virus
uacaacuucccuucauauuug

SEQ ID NO: 4021851 - RNA, 14 nt, Marburg virus
uacaagucaggaaa

SEQ ID NO: 4021852 - RNA, 16 nt, Marburg virus
uacccggcaacaacac

SEQ ID NO: 4021853 - RNA, 11 nt, Marburg virus
uagaauuauuc

SEQ ID NO: 4021854 - RNA, 22 nt, Marburg virus
uagacagcuugcuuuacacaag

SEQ ID NO: 4021855 - RNA, 16 nt, Marburg virus
uagagaucaugaccuu

SEQ ID NO: 4021856 - RNA, 17 nt, Marburg virus
uagauuaauccuugaag

SEQ ID NO: 4021857 - RNA, 21 nt, Marburg virus
uaguaauguuuuauaaacaau

SEQ ID NO: 4021858 - RNA, 13 nt, Marburg virus
uaguauaaaguau

SEQ ID NO: 4021859 - RNA, 14 nt, Marburg virus
uauaagcaucucuu

SEQ ID NO: 4021860 - RNA, 19 nt, Marburg virus
uauagauucaauuauccuu

SEQ ID NO: 4021861 - RNA, 23 nt, Marburg virus
uauauuuuauaaaccaagcaauu

SEQ ID NO: 4021862 - RNA, 22 nt, Marburg virus
uauccaucuuaagugaauccuu

SEQ ID NO: 4021863 - RNA, 20 nt, Marburg virus
uauucuuaagcuaucuuaaa

SEQ ID NO: 4021864 - RNA, 17 nt, Marburg virus
uauuugaauauucaaac

SEQ ID NO: 4021865 - RNA, 20 nt, Marburg virus
ucaaaaaagaugaacaaaaa

SEQ ID NO: 4021866 - RNA, 15 nt, Marburg virus
ucaaauaacaaucac

SEQ ID NO: 4021867 - RNA, 13 nt, Marburg virus
ucaaauugaucaa

SEQ ID NO: 4021868 - RNA, 11 nt, Marburg virus
ucaacaagcuu

SEQ ID NO: 4021869 - RNA, 14 nt, Marburg virus
ucaacuaacaacau

SEQ ID NO: 4021870 - RNA, 17 nt, Marburg virus
ucaacuggaagaaccac

SEQ ID NO: 4021871 - RNA, 14 nt, Marburg virus
ucaacuuaagaaug

SEQ ID NO: 4021872 - RNA, 20 nt, Marburg virus
ucaagcauauuucauucaaa

SEQ ID NO: 4021873 - RNA, 18 nt, Marburg virus
ucaaggucaaaacccuca

SEQ ID NO: 4021874 - RNA, 21 nt, Marburg virus
ucaaucugggaucauauuuua

SEQ ID NO: 4021875 - RNA, 23 nt, Marburg virus
ucaauguuagcaauaaauuuauu

SEQ ID NO: 4021876 - RNA, 12 nt, Marburg virus
ucaugaaacuca

SEQ ID NO: 4021877 - RNA, 23 nt, Marburg virus
ucaugaaacucaguugcccucca

SEQ ID NO: 4021878 - RNA, 17 nt, Marburg virus
ucauugugcccuucauu

SEQ ID NO: 4021879 - RNA, 19 nt, Marburg virus
uccaaggggaugucagaaa

SEQ ID NO: 4021880 - RNA, 13 nt, Marburg virus
uccacaacaaugu

SEQ ID NO: 4021881 - RNA, 18 nt, Marburg virus
uccagcaauuacaacaca

SEQ ID NO: 4021882 - RNA, 22 nt, Marburg virus
uccaugcccccccacaacacca

SEQ ID NO: 4021883 - RNA, 13 nt, Marburg virus
uccuaacaugaag

SEQ ID NO: 4021884 - RNA, 23 nt, Marburg virus
uccuaaggaaaauccuuauuauu

SEQ ID NO: 4021885 - RNA, 16 nt, Marburg virus
uccuugaucaacacca

SEQ ID NO: 4021886 - RNA, 13 nt, Marburg virus
ucgcccaugucaa

SEQ ID NO: 4021887 - RNA, 22 nt, Marburg virus
ucguaauuucaacuggaagaac

SEQ ID NO: 4021888 - RNA, 17 nt, Marburg virus
ucuaauuaacaacuugu

SEQ ID NO: 4021889 - RNA, 13 nt, Marburg virus
ucuccuaaggaaa

SEQ ID NO: 4021890 - RNA, 14 nt, Marburg virus
ucuccuaaggaaaa

SEQ ID NO: 4021891 - RNA, 19 nt, Marburg virus
ucuccuaaggaaaauccuu

SEQ ID NO: 4021892 - RNA, 15 nt, Marburg virus
ucucgaggcaaggac

SEQ ID NO: 4021893 - RNA, 12 nt, Marburg virus
ucugauuuagag

SEQ ID NO: 4021894 - RNA, 15 nt, Marburg virus
ucugcauaagaagca

SEQ ID NO: 4021895 - RNA, 14 nt, Marburg virus
ucuuaaaagggaaa

SEQ ID NO: 4021896 - RNA, 17 nt, Marburg virus
ucuuuaauauucagaaa

SEQ ID NO: 4021897 - RNA, 12 nt, Marburg virus
ucuuuucucaac

SEQ ID NO: 4021898 - RNA, 20 nt, Marburg virus
ugaaaauguuauugauugag

SEQ ID NO: 4021899 - RNA, 13 nt, Marburg virus
ugaaagaguuaaa

SEQ ID NO: 4021900 - RNA, 14 nt, Marburg virus
ugaacuaaggaaau

SEQ ID NO: 4021901 - RNA, 14 nt, Marburg virus
ugaagaacauuaag

SEQ ID NO: 4021902 - RNA, 14 nt, Marburg virus
ugaagaacauuaau

SEQ ID NO: 4021903 - RNA, 17 nt, Marburg virus
ugaauggcuucaacaac

SEQ ID NO: 4021904 - RNA, 22 nt, Marburg virus
ugagacaacauaagcuaucaaa

SEQ ID NO: 4021905 - RNA, 16 nt, Marburg virus
ugagccacuuucccuc

SEQ ID NO: 4021906 - RNA, 20 nt, Marburg virus
ugcacuauccuacuguuuug

SEQ ID NO: 4021907 - RNA, 22 nt, Marburg virus
ugcagaaagcagucccaccaau

SEQ ID NO: 4021908 - RNA, 22 nt, Marburg virus
ugcagcccuugucuaaugucaa

SEQ ID NO: 4021909 - RNA, 16 nt, Marburg virus
ugcuuacuuaaaugag

SEQ ID NO: 4021910 - RNA, 22 nt, Marburg virus
uggaugcaaaccauaaggaaaa

SEQ ID NO: 4021911 - RNA, 18 nt, Marburg virus
ugggaaggacacuggaag

SEQ ID NO: 4021912 - RNA, 19 nt, Marburg virus
ugggacaacgaguucuuga

SEQ ID NO: 4021913 - RNA, 22 nt, Marburg virus
uguaacguagagucgaagaaca

SEQ ID NO: 4021914 - RNA, 23 nt, Marburg virus
uguaagaaauuagggaaauacug

SEQ ID NO: 4021915 - RNA, 17 nt, Marburg virus
uguaccucuaaggaaaa

SEQ ID NO: 4021916 - RNA, 20 nt, Marburg virus
ugugaauguaaauuaagaaa

SEQ ID NO: 4021917 - RNA, 22 nt, Marburg virus
ugugugaguggcuuuuaucauc

SEQ ID NO: 4021918 - RNA, 19 nt, Marburg virus
uguugaauuaauuguuacu

SEQ ID NO: 4021919 - RNA, 14 nt, Marburg virus
uguuuacuagagca

SEQ ID NO: 4021920 - RNA, 19 nt, Marburg virus
uguuuauucaucugagcaa

SEQ ID NO: 4021921 - RNA, 13 nt, Marburg virus
uuaaaauauucuu

SEQ ID NO: 4021922 - RNA, 14 nt, Marburg virus
uuaaaauuaauuca

SEQ ID NO: 4021923 - RNA, 21 nt, Marburg virus
uuaaauuagcauggauauuca

SEQ ID NO: 4021924 - RNA, 19 nt, Marburg virus
uuaauauaauguaagaaau

SEQ ID NO: 4021925 - RNA, 14 nt, Marburg virus
uuaauuuacucuuu

SEQ ID NO: 4021926 - RNA, 23 nt, Marburg virus
uuacgacacacagagcacagcca

SEQ ID NO: 4021927 - RNA, 12 nt, Marburg virus
uuagaauuauuc

SEQ ID NO: 4021928 - RNA, 13 nt, Marburg virus
uuagaauuauuca

SEQ ID NO: 4021929 - RNA, 16 nt, Marburg virus
uuagaucuauuguuca

SEQ ID NO: 4021930 - RNA, 15 nt, Marburg virus
uuauauaauuacuca

SEQ ID NO: 4021931 - RNA, 14 nt, Marburg virus
uuaucuacauuaau

SEQ ID NO: 4021932 - RNA, 15 nt, Marburg virus
uuauggugugaagaa

SEQ ID NO: 4021933 - RNA, 18 nt, Marburg virus
uucacauguacuguugau

SEQ ID NO: 4021934 - RNA, 21 nt, Marburg virus
uucaccagauucuaagugaag

SEQ ID NO: 4021935 - RNA, 13 nt, Marburg virus
uucagaaagaaac

SEQ ID NO: 4021936 - RNA, 23 nt, Marburg virus
uuccuucugaaauaguaagaaaa

SEQ ID NO: 4021937 - RNA, 20 nt, Marburg virus
uucgauacacguuauaucuu

SEQ ID NO: 4021938 - RNA, 14 nt, Marburg virus
uucuugaacucagu

SEQ ID NO: 4021939 - RNA, 16 nt, Marburg virus
uucuuuaauauucaga

SEQ ID NO: 4021940 - RNA, 15 nt, Marburg virus
uugacaaucaaauca

SEQ ID NO: 4021941 - RNA, 15 nt, Marburg virus
uuggagcguucagga

SEQ ID NO: 4021942 - RNA, 18 nt, Marburg virus
uuguaccucuaaggaaaa

SEQ ID NO: 4021943 - RNA, 20 nt, Marburg virus
ucggaacaaauugaccaaau

SEQ ID NO: 4021944 - RNA, 20 nt, Marburg virus
ucuaaacgaaguaacaacaa

SEQ ID NO: 4021945 - RNA, 18 nt, Marburg virus
ucuacccggcaacaacac

SEQ ID NO: 4021946 - RNA, 19 nt, Marburg virus
ucuguaaaaaucuuaaaac

SEQ ID NO: 4021947 - RNA, 20 nt, Marburg virus
ucuucaagguucccuggcca

SEQ ID NO: 4021948 - RNA, 18 nt, Marburg virus
ugaaaacaauggcaagau

SEQ ID NO: 4021949 - RNA, 14 nt, Marburg virus
ugaaacaacagaug

SEQ ID NO: 4021950 - RNA, 15 nt, Marburg virus
ugaaauuaagggaau

SEQ ID NO: 4021951 - RNA, 15 nt, Marburg virus
ugaaggcauaucuua

SEQ ID NO: 4021952 - RNA, 16 nt, Marburg virus
ugaauccuuucuucaa

SEQ ID NO: 4021953 - RNA, 17 nt, Marburg virus
ugacuauccuaaaugca

SEQ ID NO: 4021954 - RNA, 13 nt, Marburg virus
ugaggaccucaua

SEQ ID NO: 4021955 - RNA, 16 nt, Marburg virus
ugauauucaauuguua

SEQ ID NO: 4021956 - RNA, 13 nt, Marburg virus
ugauauuucuugu

SEQ ID NO: 4021957 - RNA, 18 nt, Marburg virus
ugauauuucuuguuucaa

SEQ ID NO: 4021958 - RNA, 11 nt, Marburg virus
ugaugaugcag

SEQ ID NO: 4021959 - RNA, 20 nt, Marburg virus
ugauggcccgaaaaaugcuc

SEQ ID NO: 4021960 - RNA, 17 nt, Marburg virus
ugcaacaagucagugag

SEQ ID NO: 4021961 - RNA, 21 nt, Marburg virus
ugcaagcgaugugugcuugaa

SEQ ID NO: 4021962 - RNA, 23 nt, Marburg virus
ugcugaucacggugcaaaccagu

SEQ ID NO: 4021963 - RNA, 23 nt, Marburg virus
ugcuguaagcuuacaagcuucaa

SEQ ID NO: 4021964 - RNA, 14 nt, Marburg virus
ugcuuuaaaugguu

SEQ ID NO: 4021965 - RNA, 12 nt, Marburg virus
uggaaggaacaa

SEQ ID NO: 4021966 - RNA, 20 nt, Marburg virus
uggaugcauuucaccagauu

SEQ ID NO: 4021967 - RNA, 20 nt, Marburg virus
uggcuuagaugauaacagau

SEQ ID NO: 4021968 - RNA, 21 nt, Marburg virus
ugggucaccgucucuuucuaa

SEQ ID NO: 4021969 - RNA, 23 nt, Marburg virus
uggguuuauaucuagaacaaauu

SEQ ID NO: 4021970 - RNA, 21 nt, Marburg virus
uguaagcuuacaagcuucaaa

SEQ ID NO: 4021971 - RNA, 16 nt, Marburg virus
uguauagauucaauua

SEQ ID NO: 4021972 - RNA, 12 nt, Marburg virus
ugugaauuauuc

SEQ ID NO: 4021973 - RNA, 12 nt, Marburg virus
uguuagaauuau

SEQ ID NO: 4021974 - RNA, 22 nt, Marburg virus
uguuagcaauaaauuuauuaaa

SEQ ID NO: 4021975 - RNA, 22 nt, Marburg virus
uguuaugggugauaaucaaugu

SEQ ID NO: 4021976 - RNA, 22 nt, Marburg virus
uguugcauuggaauagaagacu

SEQ ID NO: 4021977 - RNA, 13 nt, Marburg virus
uuaaaaaccaaaa

SEQ ID NO: 4021978 - RNA, 19 nt, Marburg virus
uuaaaauuaauucacacaa

SEQ ID NO: 4021979 - RNA, 22 nt, Marburg virus
uuaaauuagcauggauauucau

SEQ ID NO: 4021980 - RNA, 17 nt, Marburg virus
uuaagaaucaacuaaca

SEQ ID NO: 4021981 - RNA, 14 nt, Marburg virus
uuaaucauguugau

SEQ ID NO: 4021982 - RNA, 14 nt, Marburg virus
uuaauucaaucuuu

SEQ ID NO: 4021983 - RNA, 19 nt, Marburg virus
uuacaccaggaaaauacug

SEQ ID NO: 4021984 - RNA, 12 nt, Marburg virus
uuaccacagcaa

SEQ ID NO: 4021985 - RNA, 14 nt, Marburg virus
uuauccuaacauga

SEQ ID NO: 4021986 - RNA, 20 nt, Marburg virus
uuauuaaauaguugucauau

SEQ ID NO: 4021987 - RNA, 16 nt, Marburg virus
uuauuugaauauucaa

SEQ ID NO: 4021988 - RNA, 12 nt, Marburg virus
uucaacuggaag

SEQ ID NO: 4021989 - RNA, 14 nt, Marburg virus
uucaccuacaaucu

SEQ ID NO: 4021990 - RNA, 21 nt, Marburg virus
uucacugaagggaacauagca

SEQ ID NO: 4021991 - RNA, 20 nt, Marburg virus
uucauaugcugccauauuua

SEQ ID NO: 4021992 - RNA, 13 nt, Marburg virus
uuccauucaauau

SEQ ID NO: 4021993 - RNA, 19 nt, Marburg virus
uucuaggaggguuaucauu

SEQ ID NO: 4021994 - RNA, 19 nt, Marburg virus
uucucacuuuuuaagaauc

SEQ ID NO: 4021995 - RNA, 14 nt, Marburg virus
uucuuauauugcuu

SEQ ID NO: 4021996 - RNA, 21 nt, Marburg virus
uugaauccggagaaauuguuc

SEQ ID NO: 4021997 - RNA, 16 nt, Marburg virus
uugaggaucuugcuug

SEQ ID NO: 4021998 - RNA, 18 nt, Marburg virus
uugagggacaaauuauug

SEQ ID NO: 4021999 - RNA, 18 nt, Marburg virus
uugauuaaagcuuuagga

SEQ ID NO: 4022000 - RNA, 12 nt, Marburg virus
uugauuaagaaa

SEQ ID NO: 4022001 - RNA, 14 nt, Marburg virus
uugccauguuuacu

SEQ ID NO: 4022002 - RNA, 11 nt, Marburg virus
uuguaccucua

SEQ ID NO: 4022003 - RNA, 20 nt, Marburg virus
uuguauagucauuauucaca

SEQ ID NO: 4022004 - RNA, 14 nt, Marburg virus
uugucaauaagaca

SEQ ID NO: 4022005 - RNA, 20 nt, Marburg virus
uugugagauuauaaacuugu

SEQ ID NO: 4022006 - RNA, 23 nt, Marburg virus
uuuaauuaaaaaccaaaacaauu

SEQ ID NO: 4022007 - RNA, 16 nt, Marburg virus
uuuacguauuguugau

SEQ ID NO: 4022008 - RNA, 13 nt, Marburg virus
uuucaacuggaag

SEQ ID NO: 4022009 - RNA, 22 nt, Marburg virus
uuucguggagcaugaaccucuu

SEQ ID NO: 4022010 - RNA, 19 nt, Marburg virus
uuugacgugcgcuggaauu

SEQ ID NO: 4022011 - RNA, 19 nt, Marburg virus
uuugaugaaucuucuaguu

SEQ ID NO: 4022012 - RNA, 13 nt, Marburg virus
uuugauucaagau

SEQ ID NO: 4022013 - RNA, 15 nt, Marburg virus
uuugauuuacuaaca

SEQ ID NO: 4022014 - RNA, 15 nt, Marburg virus
uuuguugcaauucaa

SEQ ID NO: 4022015 - RNA, 23 nt, Marburg virus
uuuugcaagcgaugugugcuuga

SEQ ID NO: 4022016 - RNA, 15 nt, Marburg virus
uuuuguguuuucaaa

SEQ ID NO: 4022017 - RNA, 20 nt, Marburg virus
uuuuugcaaacauauugaaa

SEQ ID NO: 4022018 - RNA, 14 nt, Marburg virus
ucuauuugaugcau

SEQ ID NO: 4022019 - RNA, 18 nt, Marburg virus
ucucaaaccguacacaag

SEQ ID NO: 4022020 - RNA, 15 nt, Marburg virus
ucuuaauagaaguag

SEQ ID NO: 4022021 - RNA, 14 nt, Marburg virus
ucuuauugcgagac

SEQ ID NO: 4022022 - RNA, 14 nt, Marburg virus
ucuucaagaauaca

SEQ ID NO: 4022023 - RNA, 14 nt, Marburg virus
ucuuuuacuggaag

SEQ ID NO: 4022024 - RNA, 20 nt, Marburg virus
ugaaaauagccuugucaugu

SEQ ID NO: 4022025 - RNA, 22 nt, Marburg virus
ugaaacuuuuuguguuuucaaa

SEQ ID NO: 4022026 - RNA, 20 nt, Marburg virus
ugaacuaaggaaauuucucu

SEQ ID NO: 4022027 - RNA, 19 nt, Marburg virus
ugaauggcuucaacaacag

SEQ ID NO: 4022028 - RNA, 14 nt, Marburg virus
ugaauuaauuguua

SEQ ID NO: 4022029 - RNA, 13 nt, Marburg virus
ugaggauuuaagg

SEQ ID NO: 4022030 - RNA, 18 nt, Marburg virus
ugaugcagaguuaagaau

SEQ ID NO: 4022031 - RNA, 23 nt, Marburg virus
ugauuuuuuauaaguuuaagaua

SEQ ID NO: 4022032 - RNA, 22 nt, Marburg virus
ugcaacaaccccguggaaggag

SEQ ID NO: 4022033 - RNA, 21 nt, Marburg virus
ugcaaucucuacuaacaacac

SEQ ID NO: 4022034 - RNA, 17 nt, Marburg virus
ugcccccccacaacacc

SEQ ID NO: 4022035 - RNA, 22 nt, Marburg virus
ugcuacaaauucuuuuuucaau

SEQ ID NO: 4022036 - RNA, 20 nt, Marburg virus
uggaaauuuaaaauuucagg

SEQ ID NO: 4022037 - RNA, 16 nt, Marburg virus
uggagaaaaugagaac

SEQ ID NO: 4022038 - RNA, 19 nt, Marburg virus
uggcuuaaauuagcaugga

SEQ ID NO: 4022039 - RNA, 13 nt, Marburg virus
ugggcuuucagga

SEQ ID NO: 4022040 - RNA, 22 nt, Marburg virus
ugguaccgugaccaaaacuuga

SEQ ID NO: 4022041 - RNA, 13 nt, Marburg virus
ugucaauaagaca

SEQ ID NO: 4022042 - RNA, 13 nt, Marburg virus
ugugauuuucacc

SEQ ID NO: 4022043 - RNA, 14 nt, Marburg virus
uguuagauuucagu

SEQ ID NO: 4022044 - RNA, 13 nt, Marburg virus
uguuaucaaacag

SEQ ID NO: 4022045 - RNA, 23 nt, Marburg virus
uguugauauagcuaauuucuuga

SEQ ID NO: 4022046 - RNA, 14 nt, Marburg virus
uguugcauaucuuc

SEQ ID NO: 4022047 - RNA, 22 nt, Marburg virus
uguuggaggcacaguacauuau

SEQ ID NO: 4022048 - RNA, 19 nt, Marburg virus
uguuuggaauagcagauuu

SEQ ID NO: 4022049 - RNA, 15 nt, Marburg virus
uguuuuaucaugauu

SEQ ID NO: 4022050 - RNA, 16 nt, Marburg virus
uuaaauuugaccaaag

SEQ ID NO: 4022051 - RNA, 16 nt, Marburg virus
uuaacuccauaucuua

SEQ ID NO: 4022052 - RNA, 13 nt, Marburg virus
uuaauuaagaaaa

SEQ ID NO: 4022053 - RNA, 18 nt, Marburg virus
uuacauaggauuauauca

SEQ ID NO: 4022054 - RNA, 11 nt, Marburg virus
uuacuggaagg

SEQ ID NO: 4022055 - RNA, 23 nt, Marburg virus
uuauacccacaagagauacuguu

SEQ ID NO: 4022056 - RNA, 15 nt, Marburg virus
uucaacagaaauugu

SEQ ID NO: 4022057 - RNA, 15 nt, Marburg virus
uucaacuaaacuugc

SEQ ID NO: 4022058 - RNA, 19 nt, Marburg virus
uucaaguuuacugaagacu

SEQ ID NO: 4022059 - RNA, 21 nt, Marburg virus
uucaauaugaugcaauuaauc

SEQ ID NO: 4022060 - RNA, 17 nt, Marburg virus
uucauugcuaaguaaac

SEQ ID NO: 4022061 - RNA, 19 nt, Marburg virus
uucggcugaggaagaucaa

SEQ ID NO: 4022062 - RNA, 13 nt, Marburg virus
uucuuguuucaaa

SEQ ID NO: 4022063 - RNA, 23 nt, Marburg virus
uugacuucucacuuuuuaagaau

SEQ ID NO: 4022064 - RNA, 13 nt, Marburg virus
uugagucauauua

SEQ ID NO: 4022065 - RNA, 14 nt, Marburg virus
uugaugacuggaaa

SEQ ID NO: 4022066 - RNA, 20 nt, Marburg virus
uugcaagcgaugugugcuug

SEQ ID NO: 4022067 - RNA, 22 nt, Marburg virus
uugcauuuaacuccauaucuua

SEQ ID NO: 4022068 - RNA, 23 nt, Marburg virus
uugccucuguuucuucuguuuuc

SEQ ID NO: 4022069 - RNA, 15 nt, Marburg virus
uuggacaaguaacaa

SEQ ID NO: 4022070 - RNA, 20 nt, Marburg virus
uuguuacugagagggaacag

SEQ ID NO: 4022071 - RNA, 13 nt, Marburg virus
uuuaauauucaga

SEQ ID NO: 4022072 - RNA, 18 nt, Marburg virus
uuuaguagcguuaccuuu

SEQ ID NO: 4022073 - RNA, 13 nt, Marburg virus
uuuauaaacaauu

SEQ ID NO: 4022074 - RNA, 15 nt, Marburg virus
uuucaccuugaaaga

SEQ ID NO: 4022075 - RNA, 17 nt, Marburg virus
uuucacuuuagaggcaa

SEQ ID NO: 4022076 - RNA, 13 nt, Marburg virus
uuucauucaaugu

SEQ ID NO: 4022077 - RNA, 12 nt, Marburg virus
uuuccuucucau

SEQ ID NO: 4022078 - RNA, 12 nt, Marburg virus
uuucuucaauau

SEQ ID NO: 4022079 - RNA, 17 nt, Marburg virus
uuucuucagaacuguuc

SEQ ID NO: 4022080 - RNA, 14 nt, Marburg virus
uuugauauucaauu

SEQ ID NO: 4022081 - RNA, 16 nt, Marburg virus
uuuuaaacuaccucuu

SEQ ID NO: 4022082 - RNA, 21 nt, Marburg virus
uuuucacauagguucugauuu

SEQ ID NO: 4022083 - RNA, 19 nt, Marburg virus
uuuucuuuaauauucagaa

SEQ ID NO: 4022084 - RNA, 13 nt, Marburg virus
cuccacaacaaug

SEQ ID NO: 4022085 - RNA, 23 nt, Marburg virus
cucccucaccacaaccaagcacg

SEQ ID NO: 4022086 - RNA, 13 nt, Marburg virus
cuccuaaggaaaa

SEQ ID NO: 4022087 - RNA, 16 nt, Marburg virus
cuccuaccaacauccg

SEQ ID NO: 4022088 - RNA, 15 nt, Marburg virus
cuccuccuccaaaag

SEQ ID NO: 4022089 - RNA, 12 nt, Marburg virus
cucuaaggaaaa

SEQ ID NO: 4022090 - RNA, 15 nt, Marburg virus
cucucagaaucaguu

SEQ ID NO: 4022091 - RNA, 17 nt, Marburg virus
cucucuacaaaagcauu

SEQ ID NO: 4022092 - RNA, 21 nt, Marburg virus
cucugaugacaagugacaaaa

SEQ ID NO: 4022093 - RNA, 14 nt, Marburg virus
cugaaaucaacuug

SEQ ID NO: 4022094 - RNA, 15 nt, Marburg virus
cugaacccaacaaaa

SEQ ID NO: 4022095 - RNA, 16 nt, Marburg virus
cugaucccacuuguaa

SEQ ID NO: 4022096 - RNA, 23 nt, Marburg virus
cuggaagaaccacugcaccagcu

SEQ ID NO: 4022097 - RNA, 20 nt, Marburg virus
cuggcgcccauccaaggaca

SEQ ID NO: 4022098 - RNA, 21 nt, Marburg virus
cuuaaaaccuaaagucauguu

SEQ ID NO: 4022099 - RNA, 15 nt, Marburg virus
cuucaagaauacaac

SEQ ID NO: 4022100 - RNA, 22 nt, Marburg virus
cuugaaggcauaucuuaauaag

SEQ ID NO: 4022101 - RNA, 13 nt, Marburg virus
cuuuauuaagaaa

SEQ ID NO: 4022102 - RNA, 22 nt, Marburg virus
cuuucacuuuagaggcaauaau

SEQ ID NO: 4022103 - RNA, 19 nt, Marburg virus
gaaaaacuaugaagaacau

SEQ ID NO: 4022104 - RNA, 22 nt, Marburg virus
gaaaacacugccuacucuggag

SEQ ID NO: 4022105 - RNA, 15 nt, Marburg virus
gaaaauguuauugau

SEQ ID NO: 4022106 - RNA, 12 nt, Marburg virus
gaagggacaaug

SEQ ID NO: 4022107 - RNA, 17 nt, Marburg virus
gaagguaugaugaagaa

SEQ ID NO: 4022108 - RNA, 23 nt, Marburg virus
gacaaguaacaauggaacacaaa

SEQ ID NO: 4022109 - RNA, 16 nt, Marburg virus
gacaagugacaaaauu

SEQ ID NO: 4022110 - RNA, 16 nt, Marburg virus
gaccugauuguugcau

SEQ ID NO: 4022111 - RNA, 12 nt, Marburg virus
gacgcuuauuca

SEQ ID NO: 4022112 - RNA, 16 nt, Marburg virus
gacgucuucauugaga

SEQ ID NO: 4022113 - RNA, 17 nt, Marburg virus
gagauuaaaaagacuac

SEQ ID NO: 4022114 - RNA, 23 nt, Marburg virus
gauaagagucaaaaacuuccaaa

SEQ ID NO: 4022115 - RNA, 13 nt, Marburg virus
gaucgcccuccau

SEQ ID NO: 4022116 - RNA, 12 nt, Marburg virus
gaucuacuuaua

SEQ ID NO: 4022117 - RNA, 16 nt, Marburg virus
gaugcauuaauguuuu

SEQ ID NO: 4022118 - RNA, 16 nt, Marburg virus
gaugcauuggacgaug

SEQ ID NO: 4022119 - RNA, 21 nt, Marburg virus
gaugggucuguguuuauucau

SEQ ID NO: 4022120 - RNA, 14 nt, Marburg virus
gauugauuaagaaa

SEQ ID NO: 4022121 - RNA, 22 nt, Marburg virus
gauuuucucgaggcaaggacag

SEQ ID NO: 4022122 - RNA, 15 nt, Marburg virus
gcaaacauauugaaa

SEQ ID NO: 4022123 - RNA, 18 nt, Marburg virus
gcaagaaggaaacaacac

SEQ ID NO: 4022124 - RNA, 21 nt, Marburg virus
gcaaucuguaaaaaucuuaaa

SEQ ID NO: 4022125 - RNA, 14 nt, Marburg virus
gcaauuacaugaga

SEQ ID NO: 4022126 - RNA, 12 nt, Marburg virus
gcacaaaaugau

SEQ ID NO: 4022127 - RNA, 12 nt, Marburg virus
gcacgccacagc

SEQ ID NO: 4022128 - RNA, 22 nt, Marburg virus
gcagacuuuuccuugaaucaaa

SEQ ID NO: 4022129 - RNA, 18 nt, Marburg virus
gcauauccuuuguugaua

SEQ ID NO: 4022130 - RNA, 13 nt, Marburg virus
gcaucccgcaguc

SEQ ID NO: 4022131 - RNA, 15 nt, Marburg virus
gcaugaauguugauc

SEQ ID NO: 4022132 - RNA, 22 nt, Marburg virus
gcauuaaaaacauuucuucaga

SEQ ID NO: 4022133 - RNA, 13 nt, Marburg virus
gcuucaauacaac

SEQ ID NO: 4022134 - RNA, 20 nt, Marburg virus
ggaaaggacauuuuccuuaa

SEQ ID NO: 4022135 - RNA, 21 nt, Marburg virus
ggaacauagcagcuaugauug

SEQ ID NO: 4022136 - RNA, 20 nt, Marburg virus
ggaguccaucugcauaagaa

SEQ ID NO: 4022137 - RNA, 17 nt, Marburg virus
ggauauuaaauauccau

SEQ ID NO: 4022138 - RNA, 15 nt, Marburg virus
ggaucagcuaucaaa

SEQ ID NO: 4022139 - RNA, 14 nt, Marburg virus
ggcugcguugcuca

SEQ ID NO: 4022140 - RNA, 13 nt, Marburg virus
ggucauuaagaag

SEQ ID NO: 4022141 - RNA, 13 nt, Marburg virus
gguugaugacugg

SEQ ID NO: 4022142 - RNA, 21 nt, Marburg virus
gguuuggaguuuccuuacucu

SEQ ID NO: 4022143 - RNA, 15 nt, Marburg virus
guauacucgcuucaa

SEQ ID NO: 4022144 - RNA, 17 nt, Marburg virus
guaucuuuaccaaauau

SEQ ID NO: 4022145 - RNA, 17 nt, Marburg virus
guauuacuuacuugggc

SEQ ID NO: 4022146 - RNA, 17 nt, Marburg virus
guuaaaaacuaaauuaa

SEQ ID NO: 4022147 - RNA, 16 nt, Marburg virus
guuacugaucuugaga

SEQ ID NO: 4022148 - RNA, 17 nt, Marburg virus
guucauaugcuuucaga

SEQ ID NO: 4022149 - RNA, 13 nt, Marburg virus
guugacaaucaaa

SEQ ID NO: 4022150 - RNA, 19 nt, Marburg virus
guugaucccggcggaucag

SEQ ID NO: 4022151 - RNA, 12 nt, Marburg virus
guugcccuccaa

SEQ ID NO: 4022152 - RNA, 17 nt, Marburg virus
uaaaaaucccaacaaug

SEQ ID NO: 4022153 - RNA, 12 nt, Marburg virus
uaaaccaagcaa

SEQ ID NO: 4022154 - RNA, 14 nt, Marburg virus
uaaauaguugucau

SEQ ID NO: 4022155 - RNA, 13 nt, Marburg virus
uaaauauaaaaga

SEQ ID NO: 4022156 - RNA, 21 nt, Marburg virus
uaacaacaagaguccaugaaa

SEQ ID NO: 4022157 - RNA, 17 nt, Marburg virus
uaacaauggaacacaaa

SEQ ID NO: 4022158 - RNA, 19 nt, Marburg virus
uaacuggacaacagaucau

SEQ ID NO: 4022159 - RNA, 15 nt, Marburg virus
uaacuuuucaauguu

SEQ ID NO: 4022160 - RNA, 19 nt, Marburg virus
uaagaaauuagggaaauac

SEQ ID NO: 4022161 - RNA, 21 nt, Marburg virus
uaagacuggccgaaaaugcuc

SEQ ID NO: 4022162 - RNA, 18 nt, Marburg virus
uaauaaucaccaauucau

SEQ ID NO: 4022163 - RNA, 13 nt, Marburg virus
uaauagugcauuu

SEQ ID NO: 4022164 - RNA, 15 nt, Marburg virus
uaaucaccaauucau

SEQ ID NO: 4022165 - RNA, 21 nt, Marburg virus
uaauuaacuguuggcuuagau

SEQ ID NO: 4022166 - RNA, 15 nt, Marburg virus
uacaugcaauacuug

SEQ ID NO: 4022167 - RNA, 19 nt, Marburg virus
uaccucuaaggaaaaucau

SEQ ID NO: 4022168 - RNA, 18 nt, Marburg virus
uacguuacguuuucucug

SEQ ID NO: 4022169 - RNA, 14 nt, Marburg virus
uacuauugugugag

SEQ ID NO: 4022170 - RNA, 16 nt, Marburg virus
uacuuaagucauucuu

SEQ ID NO: 4022171 - RNA, 17 nt, Marburg virus
uacuugggcuugaagac

SEQ ID NO: 4022172 - RNA, 13 nt, Marburg virus
uagaauuucuuga

SEQ ID NO: 4022173 - RNA, 18 nt, Marburg virus
uagaucacggaucaagca

SEQ ID NO: 4022174 - RNA, 22 nt, Marburg virus
uagcaacaugaugguuguuacu

SEQ ID NO: 4022175 - RNA, 19 nt, Marburg virus
uagcucaaguccuuucaaa

SEQ ID NO: 4022176 - RNA, 19 nt, Marburg virus
uagcugucuugauugcucu

SEQ ID NO: 4022177 - RNA, 15 nt, Marburg virus
uaguguucuuuuacu

SEQ ID NO: 4022178 - RNA, 15 nt, Marburg virus
uaguuaaauuucuag

SEQ ID NO: 4022179 - RNA, 22 nt, Marburg virus
uaguuaugaauguuuuaucaug

SEQ ID NO: 4022180 - RNA, 13 nt, Marburg virus
uauaaaauuaaaa

SEQ ID NO: 4022181 - RNA, 16 nt, Marburg virus
uauaaacuuguagaau

SEQ ID NO: 4022182 - RNA, 19 nt, Marburg virus
uauacucgcuucaauacaa

SEQ ID NO: 4022183 - RNA, 19 nt, Marburg virus
uaucagccuaaaaucugau

SEQ ID NO: 4022184 - RNA, 20 nt, Marburg virus
uaugaauguuuuaucaugau

SEQ ID NO: 4022185 - RNA, 16 nt, Marburg virus
uaugcaugucagugau

SEQ ID NO: 4022186 - RNA, 20 nt, Marburg virus
uauuaaagguuuucuuuaau

SEQ ID NO: 4022187 - RNA, 13 nt, Marburg virus
uauuaaauaucca

SEQ ID NO: 4022188 - RNA, 18 nt, Marburg virus
uauuagccccaaucuguu

SEQ ID NO: 4022189 - RNA, 16 nt, Marburg virus
uauucagugcuacaaa

SEQ ID NO: 4022190 - RNA, 20 nt, Marburg virus
uauuccuucugaaauaguaa

SEQ ID NO: 4022191 - RNA, 16 nt, Marburg virus
uauuucaacuuaagaa

SEQ ID NO: 4022192 - RNA, 16 nt, Marburg virus
uauuucggaacaaauu

SEQ ID NO: 4022193 - RNA, 17 nt, Marburg virus
ucaaaggcgacaagcac

SEQ ID NO: 4022194 - RNA, 22 nt, Marburg virus
ucaacaauacugugaauuauuc

SEQ ID NO: 4022195 - RNA, 16 nt, Marburg virus
ucaacaaugccaccca

SEQ ID NO: 4022196 - RNA, 20 nt, Marburg virus
ucaagaauuacagcaaucau

SEQ ID NO: 4022197 - RNA, 17 nt, Marburg virus
ucaagauuuaaaaugca

SEQ ID NO: 4022198 - RNA, 15 nt, Marburg virus
ucaaguaugcaaauu

SEQ ID NO: 4022199 - RNA, 21 nt, Marburg virus
ucaauacaacuucccuucaua

SEQ ID NO: 4022200 - RNA, 14 nt, Marburg virus
ucaauaugcagcau

SEQ ID NO: 4022201 - RNA, 14 nt, Marburg virus
ucacaguaaucaaa

SEQ ID NO: 4022202 - RNA, 20 nt, Marburg virus
ucauaguuuaaccacauaau

SEQ ID NO: 4022203 - RNA, 15 nt, Marburg virus
ucauaugcuuucaga

SEQ ID NO: 4022204 - RNA, 17 nt, Marburg virus
ucauaugcuuucagaau

SEQ ID NO: 4022205 - RNA, 16 nt, Marburg virus
ucaugggcccuucaua

SEQ ID NO: 4022206 - RNA, 19 nt, Marburg virus
ucauucaaacaccccaaau

SEQ ID NO: 4022207 - RNA, 17 nt, Marburg virus
uccagaguggcaacaaa

SEQ ID NO: 4022208 - RNA, 13 nt, Marburg virus
uccaugccccccc

SEQ ID NO: 4022209 - RNA, 14 nt, Marburg virus
ucccagagaagaca

SEQ ID NO: 4022210 - RNA, 20 nt, Marburg virus
ucccucagagaaguuacaca

SEQ ID NO: 4022211 - RNA, 20 nt, Marburg virus
uccucggaguaguuccucca

SEQ ID NO: 4022212 - RNA, 16 nt, Marburg virus
ucgggcuguuccuccc

SEQ ID NO: 4022213 - RNA, 15 nt, Marburg virus
ucuacuaacaacacc

SEQ ID NO: 4022214 - RNA, 19 nt, Marburg virus
acauuggggaaagaacuag

SEQ ID NO: 4022215 - RNA, 18 nt, Marburg virus
accaaauaugacaaaugg

SEQ ID NO: 4022216 - RNA, 17 nt, Marburg virus
accaaucauauuccccg

SEQ ID NO: 4022217 - RNA, 19 nt, Marburg virus
accacaacggcaccaaaua

SEQ ID NO: 4022218 - RNA, 19 nt, Marburg virus
accaccucguaauuucaac

SEQ ID NO: 4022219 - RNA, 17 nt, Marburg virus
accaggaucaagggaaa

SEQ ID NO: 4022220 - RNA, 16 nt, Marburg virus
accucuaaggaaaauc

SEQ ID NO: 4022221 - RNA, 20 nt, Marburg virus
accuugaaagaguuaaaugg

SEQ ID NO: 4022222 - RNA, 16 nt, Marburg virus
acgccacagcaagaag

SEQ ID NO: 4022223 - RNA, 17 nt, Marburg virus
acucugaacuaaggaaa

SEQ ID NO: 4022224 - RNA, 18 nt, Marburg virus
acucuggagaaaaugaga

SEQ ID NO: 4022225 - RNA, 18 nt, Marburg virus
acucuucauguuguaaau

SEQ ID NO: 4022226 - RNA, 18 nt, Marburg virus
acugcugguuuaauuaaa

SEQ ID NO: 4022227 - RNA, 22 nt, Marburg virus
acugcugguuuaauuaaaaacc

SEQ ID NO: 4022228 - RNA, 15 nt, Marburg virus
acuguuuuaauuaag

SEQ ID NO: 4022229 - RNA, 13 nt, Marburg virus
acuuaaaugagca

SEQ ID NO: 4022230 - RNA, 16 nt, Marburg virus
agaagaagaaaaaacu

SEQ ID NO: 4022231 - RNA, 16 nt, Marburg virus
agaagcauuauugcau

SEQ ID NO: 4022232 - RNA, 23 nt, Marburg virus
agaagccuugcuagcagauggac

SEQ ID NO: 4022233 - RNA, 20 nt, Marburg virus
agaauauggugauccccaga

SEQ ID NO: 4022234 - RNA, 14 nt, Marburg virus
agaaucaguuguuu

SEQ ID NO: 4022235 - RNA, 19 nt, Marburg virus
agacacuaaacauuucaaa

SEQ ID NO: 4022236 - RNA, 23 nt, Marburg virus
agacuuuuccuugaaucaaauau

SEQ ID NO: 4022237 - RNA, 22 nt, Marburg virus
agagucacaaccgaggaaagga

SEQ ID NO: 4022238 - RNA, 14 nt, Marburg virus
agaguuaaaaacua

SEQ ID NO: 4022239 - RNA, 22 nt, Marburg virus
aucuaggugauugugaaaagac

SEQ ID NO: 4022240 - RNA, 15 nt, Marburg virus
aucuugagaaauaca

SEQ ID NO: 4022241 - RNA, 11 nt, Marburg virus
augaacaaaaa

SEQ ID NO: 4022242 - RNA, 19 nt, Marburg virus
augaagaacauuaagaaaa

SEQ ID NO: 4022243 - RNA, 17 nt, Marburg virus
augauuuuaaauaccua

SEQ ID NO: 4022244 - RNA, 15 nt, Marburg virus
augcaaaacuaucca

SEQ ID NO: 4022245 - RNA, 23 nt, Marburg virus
augcaaaccauaaggaaaaauga

SEQ ID NO: 4022246 - RNA, 20 nt, Marburg virus
augggugauaaucaauguau

SEQ ID NO: 4022247 - RNA, 15 nt, Marburg virus
augucagaaauguua

SEQ ID NO: 4022248 - RNA, 18 nt, Marburg virus
augugaauguaaauuaag

SEQ ID NO: 4022249 - RNA, 20 nt, Marburg virus
augugcguagagguuaauuu

SEQ ID NO: 4022250 - RNA, 18 nt, Marburg virus
auuaaaaaauuaaaaaac

SEQ ID NO: 4022251 - RNA, 15 nt, Marburg virus
auuaagaaaaacuau

SEQ ID NO: 4022252 - RNA, 12 nt, Marburg virus
auuaaguucuuu

SEQ ID NO: 4022253 - RNA, 16 nt, Marburg virus
auuaauuccuugaaug

SEQ ID NO: 4022254 - RNA, 19 nt, Marburg virus
auuacacauuaaccaugaa

SEQ ID NO: 4022255 - RNA, 19 nt, Marburg virus
auuacuacggguuaugaug

SEQ ID NO: 4022256 - RNA, 17 nt, Marburg virus
auuauaaacuuguagaa

SEQ ID NO: 4022257 - RNA, 16 nt, Marburg virus
auucaauuguuaucau

SEQ ID NO: 4022258 - RNA, 16 nt, Marburg virus
auucagaaaagguuuu

SEQ ID NO: 4022259 - RNA, 22 nt, Marburg virus
auuccuugaauguccagcauca

SEQ ID NO: 4022260 - RNA, 21 nt, Marburg virus
auugacuccucaacaauacug

SEQ ID NO: 4022261 - RNA, 23 nt, Marburg virus
auugacuucucacuuuuuaagaa

SEQ ID NO: 4022262 - RNA, 21 nt, Marburg virus
auugugcuaaugcuuaucauu

SEQ ID NO: 4022263 - RNA, 23 nt, Marburg virus
auuuaacuccauaucuuagacaa

SEQ ID NO: 4022264 - RNA, 23 nt, Marburg virus
auuuaaguauuuuuauaaaagac

SEQ ID NO: 4022265 - RNA, 21 nt, Marburg virus
auuuacugguauaaaauagug

SEQ ID NO: 4022266 - RNA, 15 nt, Marburg virus
auuuauauuuacugg

SEQ ID NO: 4022267 - RNA, 14 nt, Marburg virus
auuucaacuggaag

SEQ ID NO: 4022268 - RNA, 16 nt, Marburg virus
auuuuccuuaauuaau

SEQ ID NO: 4022269 - RNA, 22 nt, Marburg virus
caaaauacccucaccacugccc

SEQ ID NO: 4022270 - RNA, 24 nt, Marburg virus
caaaauauaucuuuugcaagcgau

SEQ ID NO: 4022271 - RNA, 14 nt, Marburg virus
caaacccacaagca

SEQ ID NO: 4022272 - RNA, 16 nt, Marburg virus
caaagagcacuaacaa

SEQ ID NO: 4022273 - RNA, 23 nt, Marburg virus
caaagagcacuaacaacacgaaa

SEQ ID NO: 4022274 - RNA, 23 nt, Marburg virus
caaauguuacggaaaaaagcaua

SEQ ID NO: 4022275 - RNA, 20 nt, Marburg virus
caacugaugccaccacacuc

SEQ ID NO: 4022276 - RNA, 17 nt, Marburg virus
caacuguugcauaucuu

SEQ ID NO: 4022277 - RNA, 22 nt, Marburg virus
caagaaaccgauggaaaagcug

SEQ ID NO: 4022278 - RNA, 16 nt, Marburg virus
caagcacgccacagca

SEQ ID NO: 4022279 - RNA, 15 nt, Marburg virus
caaucucuacuaaca

SEQ ID NO: 4022280 - RNA, 19 nt, Marburg virus
caaucucuacuaacaacac

SEQ ID NO: 4022281 - RNA, 13 nt, Marburg virus
caauguauaacaa

SEQ ID NO: 4022282 - RNA, 14 nt, Marburg virus
caauuaaucauguu

SEQ ID NO: 4022283 - RNA, 20 nt, Marburg virus
caauuacgacacacagagca

SEQ ID NO: 4022284 - RNA, 19 nt, Marburg virus
cacaagagauacuguuuua

SEQ ID NO: 4022285 - RNA, 18 nt, Marburg virus
cacaauggauuugcauuu

SEQ ID NO: 4022286 - RNA, 16 nt, Marburg virus
cacagcaaagagcacu

SEQ ID NO: 4022287 - RNA, 23 nt, Marburg virus
cacccacucccucaccacaacca

SEQ ID NO: 4022288 - RNA, 16 nt, Marburg virus
caccuccaagaacaac

SEQ ID NO: 4022289 - RNA, 19 nt, Marburg virus
cacuauguuauaugcaugu

SEQ ID NO: 4022290 - RNA, 17 nt, Marburg virus
cacuccauuccauaucc

SEQ ID NO: 4022291 - RNA, 16 nt, Marburg virus
cagcaauuacaacaca

SEQ ID NO: 4022292 - RNA, 17 nt, Marburg virus
cagucccucccccaccc

SEQ ID NO: 4022293 - RNA, 19 nt, Marburg virus
cagugauaagagucaaaaa

SEQ ID NO: 4022294 - RNA, 13 nt, Marburg virus
cauauuuuaacuu

SEQ ID NO: 4022295 - RNA, 19 nt, Marburg virus
caugacuugauucagagag

SEQ ID NO: 4022296 - RNA, 18 nt, Marburg virus
cauuggacgaugauuuau

SEQ ID NO: 4022297 - RNA, 16 nt, Marburg virus
cauuguugcaucauuu

SEQ ID NO: 4022298 - RNA, 16 nt, Marburg virus
cauuuaucucaacuug

SEQ ID NO: 4022299 - RNA, 13 nt, Marburg virus
cauuugaugcuuu

SEQ ID NO: 4022300 - RNA, 14 nt, Marburg virus
ccagcauggcugcc

SEQ ID NO: 4022301 - RNA, 16 nt, Marburg virus
ccaugcuuucacuuua

SEQ ID NO: 4022302 - RNA, 16 nt, Marburg virus
cccccuccuccuccaa

SEQ ID NO: 4022303 - RNA, 20 nt, Marburg virus
cccucgaucugacacaauac

SEQ ID NO: 4022304 - RNA, 18 nt, Marburg virus
ccuaacaugaagaccaca

SEQ ID NO: 4022305 - RNA, 14 nt, Marburg virus
cggagaacaggaac

SEQ ID NO: 4022306 - RNA, 12 nt, Marburg virus
cgguacaggaau

SEQ ID NO: 4022307 - RNA, 15 nt, Marburg virus
cguugcucacaggca

SEQ ID NO: 4022308 - RNA, 21 nt, Marburg virus
cuaaaauaauaagugauuuaa

SEQ ID NO: 4022309 - RNA, 13 nt, Marburg virus
cuaaacauuucaa

SEQ ID NO: 4022310 - RNA, 14 nt, Marburg virus
cuaacaacacgaaa

SEQ ID NO: 4022311 - RNA, 15 nt, Marburg virus
cuaagugaaggagag

SEQ ID NO: 4022312 - RNA, 16 nt, Marburg virus
cuaauauuacuaacaa

SEQ ID NO: 4022313 - RNA, 13 nt, Marburg virus
cuaaugauuguaa

SEQ ID NO: 4022314 - RNA, 16 nt, Marburg virus
cuagaaugucaaugug

SEQ ID NO: 4022315 - RNA, 18 nt, Marburg virus
cuagaugaucaguucaaa

SEQ ID NO: 4022316 - RNA, 20 nt, Marburg virus
cuagcucaaguccuuucaaa

SEQ ID NO: 4022317 - RNA, 21 nt, Marburg virus
cucacaagauuaguuuguauu

SEQ ID NO: 4022318 - RNA, 19 nt, Marburg virus
cucaccacugcccacagcc

SEQ ID NO: 4022319 - RNA, 19 nt, Marburg virus
cucaccgucccuuuucauu

SEQ ID NO: 4022320 - RNA, 16 nt, Marburg virus
cugaaauaguaagaaa

SEQ ID NO: 4022321 - RNA, 20 nt, Marburg virus
cugauuguugcauuggaaua

SEQ ID NO: 4022322 - RNA, 22 nt, Marburg virus
cugcuuuaaaugguuaauuaag

SEQ ID NO: 4022323 - RNA, 12 nt, Marburg virus
cugguuuucuua

SEQ ID NO: 4022324 - RNA, 22 nt, Marburg virus
cugugacugaacccaacaaaac

SEQ ID NO: 4022325 - RNA, 23 nt, Marburg virus
cuuaauccaagggauaaaaacuc

SEQ ID NO: 4022326 - RNA, 20 nt, Marburg virus
cuuacuugggcuugaagaca

SEQ ID NO: 4022327 - RNA, 18 nt, Marburg virus
cuuagaugauaacagaua

SEQ ID NO: 4022328 - RNA, 18 nt, Marburg virus
cuuaguuggaauuaacuu

SEQ ID NO: 4022329 - RNA, 22 nt, Marburg virus
cuuauugcgagacuugaacaca

SEQ ID NO: 4022330 - RNA, 13 nt, Marburg virus
cuucaauaugcag

SEQ ID NO: 4022331 - RNA, 20 nt, Marburg virus
cuucagcacccucucuguau

SEQ ID NO: 4022332 - RNA, 15 nt, Marburg virus
cuucauaaucuguuu

SEQ ID NO: 4022333 - RNA, 12 nt, Marburg virus
cuucauuucauu

SEQ ID NO: 4022334 - RNA, 20 nt, Marburg virus
cuugaacucagugaggagac

SEQ ID NO: 4022335 - RNA, 13 nt, Marburg virus
cuugauuaaaaac

SEQ ID NO: 4022336 - RNA, 14 nt, Marburg virus
cuuucacuuuagag

SEQ ID NO: 4022337 - RNA, 15 nt, Marburg virus
cuuucuuuuugcaaa

SEQ ID NO: 4022338 - RNA, 16 nt, Marburg virus
cuuugauuuacuaaca

SEQ ID NO: 4022339 - RNA, 17 nt, Marburg virus
cuuuguuagaauuauuc

SEQ ID NO: 4022340 - RNA, 24 nt, Marburg virus
cuuuguugauacccuugagagaca

SEQ ID NO: 4022341 - RNA, 12 nt, Marburg virus
cuuuuucacaua

SEQ ID NO: 4022342 - RNA, 19 nt, Marburg virus
gaaaaggaagaauuauucu

SEQ ID NO: 4022343 - RNA, 23 nt, Marburg virus
gaaaauaaucuauuuaaaaauga

SEQ ID NO: 4022344 - RNA, 15 nt, Marburg virus
gaaaauccuuauuau

SEQ ID NO: 4022345 - RNA, 14 nt, Marburg virus
gaaaggccccacca

SEQ ID NO: 4022346 - RNA, 12 nt, Marburg virus
gaacucagugag

SEQ ID NO: 4022347 - RNA, 17 nt, Marburg virus
gaaucaaacaugugcuc

SEQ ID NO: 4022348 - RNA, 19 nt, Marburg virus
gaaucuauuugaccucaga

SEQ ID NO: 4022349 - RNA, 13 nt, Marburg virus
gacagaacacaaa

SEQ ID NO: 4022350 - RNA, 17 nt, Marburg virus
gacauguauaucaugug

SEQ ID NO: 4022351 - RNA, 18 nt, Marburg virus
gaccaaauaauagugcau

SEQ ID NO: 4022352 - RNA, 13 nt, Marburg virus
gagcaauuuaagg

SEQ ID NO: 4022353 - RNA, 16 nt, Marburg virus
gagcacuaacaacacg

SEQ ID NO: 4022354 - RNA, 14 nt, Marburg virus
gaggagacguucuc

SEQ ID NO: 4022355 - RNA, 18 nt, Marburg virus
gaggauaaaaggacaaag

SEQ ID NO: 4022356 - RNA, 16 nt, Marburg virus
gauccuauuacuuguu

SEQ ID NO: 4022357 - RNA, 15 nt, Marburg virus
gauccuccuaccaac

SEQ ID NO: 4022358 - RNA, 15 nt, Marburg virus
gaugcaauuaaucau

SEQ ID NO: 4022359 - RNA, 20 nt, Marburg virus
gaugcgagggcauuauucag

SEQ ID NO: 4022360 - RNA, 19 nt, Marburg virus
gauuaguuuguauugauuu

SEQ ID NO: 4022361 - RNA, 23 nt, Marburg virus
gcaaagagcacuaacaacacgaa

SEQ ID NO: 4022362 - RNA, 15 nt, Marburg virus
gcaauuaaucauguu

SEQ ID NO: 4022363 - RNA, 16 nt, Marburg virus
gcacaaaaugauuuuc

SEQ ID NO: 4022364 - RNA, 20 nt, Marburg virus
gcauccaacucaauauccug

SEQ ID NO: 4022365 - RNA, 22 nt, Marburg virus
aaaaacccaaagucaacaauua

SEQ ID NO: 4022366 - RNA, 13 nt, Marburg virus
aaaaacuaaauua

SEQ ID NO: 4022367 - RNA, 18 nt, Marburg virus
aaaaagaugaacaaaaag

SEQ ID NO: 4022368 - RNA, 22 nt, Marburg virus
aaaacauauuuauccuugugua

SEQ ID NO: 4022369 - RNA, 15 nt, Marburg virus
aaaacaugcuacaau

SEQ ID NO: 4022370 - RNA, 20 nt, Marburg virus
aaaacccagcaguauugaaa

SEQ ID NO: 4022371 - RNA, 18 nt, Marburg virus
uuacaacacauacaugca

SEQ ID NO: 4022372 - RNA, 12 nt, Marburg virus
uuacacauuaac

SEQ ID NO: 4022373 - RNA, 20 nt, Marburg virus
uuagaaaaauucacauguac

SEQ ID NO: 4022374 - RNA, 19 nt, Marburg virus
uuauaggaacagauuuaga

SEQ ID NO: 4022375 - RNA, 14 nt, Marburg virus
uuaucauucucaag

SEQ ID NO: 4022376 - RNA, 12 nt, Marburg virus
uuauuaagaaaa

SEQ ID NO: 4022377 - RNA, 20 nt, Marburg virus
uucaaacaccccaaauuuuc

SEQ ID NO: 4022378 - RNA, 13 nt, Marburg virus
uucaacuggaaga

SEQ ID NO: 4022379 - RNA, 18 nt, Marburg virus
uucaagacgcuuauucau

SEQ ID NO: 4022380 - RNA, 18 nt, Marburg virus
uucaaguuuacugaagac

SEQ ID NO: 4022381 - RNA, 19 nt, Marburg virus
uucaauguuaguuacucaa

SEQ ID NO: 4022382 - RNA, 13 nt, Marburg virus
uucaauuauccuu

SEQ ID NO: 4022383 - RNA, 15 nt, Marburg virus
uucauaaucuguuug

SEQ ID NO: 4022384 - RNA, 14 nt, Marburg virus
uucccauagaucaa

SEQ ID NO: 4022385 - RNA, 17 nt, Marburg virus
uuccuauaaucugauug

SEQ ID NO: 4022386 - RNA, 22 nt, Marburg virus
uuccuccagugauaagagucaa

SEQ ID NO: 4022387 - RNA, 22 nt, Marburg virus
uuccuguaugaucgcauugccu

SEQ ID NO: 4022388 - RNA, 19 nt, Marburg virus
uucugaaauaguaagaaaa

SEQ ID NO: 4022389 - RNA, 23 nt, Marburg virus
uucuuaagcuaucuuaaacuuga

SEQ ID NO: 4022390 - RNA, 20 nt, Marburg virus
uugaaaaggaagaauuauuc

SEQ ID NO: 4022391 - RNA, 15 nt, Marburg virus
uugagagaggaacaa

SEQ ID NO: 4022392 - RNA, 21 nt, Marburg virus
uugauacaaagacacuaaaca

SEQ ID NO: 4022393 - RNA, 21 nt, Marburg virus
uugauccaguuccaaauacaa

SEQ ID NO: 4022394 - RNA, 13 nt, Marburg virus
uugcuuuacacaa

SEQ ID NO: 4022395 - RNA, 22 nt, Marburg virus
uuguaagaauuaauuuacucuu

SEQ ID NO: 4022396 - RNA, 14 nt, Marburg virus
uuguauauuucaga

SEQ ID NO: 4022397 - RNA, 20 nt, Marburg virus
uuguccaggaauauuucgga

SEQ ID NO: 4022398 - RNA, 14 nt, Marburg virus
uugugaaucaucaa

SEQ ID NO: 4022399 - RNA, 14 nt, Marburg virus
uuguugauacccuu

SEQ ID NO: 4022400 - RNA, 16 nt, Marburg virus
uuuauaacuaaccauu

SEQ ID NO: 4022401 - RNA, 20 nt, Marburg virus
uuuauacugcugguuuaauu

SEQ ID NO: 4022402 - RNA, 19 nt, Marburg virus
uuuauauguaaugaacaau

SEQ ID NO: 4022403 - RNA, 14 nt, Marburg virus
uuuuggaugcaaac

SEQ ID NO: 4022404 - RNA, 18 nt, Marburg virus
uuuuuccacuaaucaauu

SEQ ID NO: 4022405 - RNA, 16 nt, Marburg virus
uuuuuguguuuucaaa

SEQ ID NO: 4022406 - RNA, 19 nt, Marburg virus
aaaaccaggguuaagagua

SEQ ID NO: 4022407 - RNA, 14 nt, Marburg virus
aaaacuaaugaaga

SEQ ID NO: 4022408 - RNA, 14 nt, Marburg virus
aaaacuaugaagaa

SEQ ID NO: 4022409 - RNA, 14 nt, Marburg virus
aaaaggaagaauua

SEQ ID NO: 4022410 - RNA, 13 nt, Marburg virus
aaaaguuagaaua

SEQ ID NO: 4022411 - RNA, 14 nt, Marburg virus
aaaauccaguguua

SEQ ID NO: 4022412 - RNA, 14 nt, Marburg virus
aaaauuaaaaaacu

SEQ ID NO: 4022413 - RNA, 22 nt, Marburg virus
aaacaauuuggucugcagguug

SEQ ID NO: 4022414 - RNA, 15 nt, Marburg virus
aaacagacauauaca

SEQ ID NO: 4022415 - RNA, 15 nt, Marburg virus
aaacuuguagaauua

SEQ ID NO: 4022416 - RNA, 22 nt, Marburg virus
aaauacugggauggcauuguug

SEQ ID NO: 4022417 - RNA, 20 nt, Marburg virus
aaauagccuugucauguuag

SEQ ID NO: 4022418 - RNA, 21 nt, Marburg virus
aaaugcuccccaauacagaca

SEQ ID NO: 4022419 - RNA, 20 nt, Marburg virus
aacaacaagaguccaugaaa

SEQ ID NO: 4022420 - RNA, 22 nt, Marburg virus
aacauauugugucaaauucauu

SEQ ID NO: 4022421 - RNA, 13 nt, Marburg virus
aaccaagcaauug

SEQ ID NO: 4022422 - RNA, 14 nt, Marburg virus
aaccuagaugauca

SEQ ID NO: 4022423 - RNA, 18 nt, Marburg virus
aacgccuaguggaaaacg

SEQ ID NO: 4022424 - RNA, 12 nt, Marburg virus
aacuaaggaaau

SEQ ID NO: 4022425 - RNA, 21 nt, Marburg virus
aacuaauauuacuaacaaaag

SEQ ID NO: 4022426 - RNA, 18 nt, Marburg virus
aacuaccuccacagauca

SEQ ID NO: 4022427 - RNA, 23 nt, Marburg virus
aacuauaauucaggggaaauuga

SEQ ID NO: 4022428 - RNA, 23 nt, Marburg virus
aacuuguaccucuaaggaaaauc

SEQ ID NO: 4022429 - RNA, 19 nt, Marburg virus
aagaauuuggagcguucag

SEQ ID NO: 4022430 - RNA, 22 nt, Marburg virus
aagacuuguccaggaauauuuc

SEQ ID NO: 4022431 - RNA, 15 nt, Marburg virus
aaggaaacaacacag

SEQ ID NO: 4022432 - RNA, 17 nt, Marburg virus
aaggaauucgacagcau

SEQ ID NO: 4022433 - RNA, 15 nt, Marburg virus
aauaacgauugauua

SEQ ID NO: 4022434 - RNA, 21 nt, Marburg virus
aauaacgauugauuaagaaaa

SEQ ID NO: 4022435 - RNA, 20 nt, Marburg virus
aauaagugaccccaaauuca

SEQ ID NO: 4022436 - RNA, 17 nt, Marburg virus
aauagauccuugaucaa

SEQ ID NO: 4022437 - RNA, 17 nt, Marburg virus
aauagugcauuuguaua

SEQ ID NO: 4022438 - RNA, 14 nt, Marburg virus
aauauccugaugca

SEQ ID NO: 4022439 - RNA, 22 nt, Marburg virus
aauaugcagcauccaacucaau

SEQ ID NO: 4022440 - RNA, 23 nt, Marburg virus
aauauggccaguuccagcaauua

SEQ ID NO: 4022441 - RNA, 13 nt, Marburg virus
aauauucagaaaa

SEQ ID NO: 4022442 - RNA, 23 nt, Marburg virus
aaucagcaggguauaacuccaaa

SEQ ID NO: 4022443 - RNA, 22 nt, Marburg virus
aaucauacacauaauaaccauu

SEQ ID NO: 4022444 - RNA, 20 nt, Marburg virus
aaucaucaaccagugugcaa

SEQ ID NO: 4022445 - RNA, 21 nt, Marburg virus
aaucaucauccacgugcaaga

SEQ ID NO: 4022446 - RNA, 23 nt, Marburg virus
aaucaugaagaacauuaagaaaa

SEQ ID NO: 4022447 - RNA, 19 nt, Marburg virus
aaucuuuuggaugcaaacc

SEQ ID NO: 4022448 - RNA, 20 nt, Marburg virus
aaugaaaauagccuugucau

SEQ ID NO: 4022449 - RNA, 21 nt, Marburg virus
aauguugaucaaaugaccaaa

SEQ ID NO: 4022450 - RNA, 16 nt, Marburg virus
aauuacagcaaucauu

SEQ ID NO: 4022451 - RNA, 21 nt, Marburg virus
aauuauccuaacaugaagacc

SEQ ID NO: 4022452 - RNA, 18 nt, Marburg virus
aauuauccuguauaacaa

SEQ ID NO: 4022453 - RNA, 19 nt, Marburg virus
aauucaagacgcuuauuca

SEQ ID NO: 4022454 - RNA, 22 nt, Marburg virus
aauucacauguacuguugauau

SEQ ID NO: 4022455 - RNA, 15 nt, Marburg virus
aauugaccaaaucaa

SEQ ID NO: 4022456 - RNA, 13 nt, Marburg virus
aauuuucaaucau

SEQ ID NO: 4022457 - RNA, 14 nt, Marburg virus
acaacaucuuguau

SEQ ID NO: 4022458 - RNA, 20 nt, Marburg virus
acaaugcagcccuugucuaa

SEQ ID NO: 4022459 - RNA, 14 nt, Marburg virus
acaccaggaaaaua

SEQ ID NO: 4022460 - RNA, 21 nt, Marburg virus
acagaagggacaauguugaug

SEQ ID NO: 4022461 - RNA, 17 nt, Marburg virus
acagacccaaacaauga

SEQ ID NO: 4022462 - RNA, 15 nt, Marburg virus
acauaccaaauacug

SEQ ID NO: 4022463 - RNA, 20 nt, Marburg virus
acaugaagaccacaugucuc

SEQ ID NO: 4022464 - RNA, 22 nt, Marburg virus
acauucuuauauugcuugauua

SEQ ID NO: 4022465 - RNA, 21 nt, Marburg virus
cagaauguugcgugaaggaaa

SEQ ID NO: 4022466 - RNA, 14 nt, Marburg virus
cagcaaagagcacu

SEQ ID NO: 4022467 - RNA, 21 nt, Marburg virus
cagcaaagagcacuaacaaca

SEQ ID NO: 4022468 - RNA, 14 nt, Marburg virus
cagcuguauacaaa

SEQ ID NO: 4022469 - RNA, 21 nt, Marburg virus
caggaaaucuuaccacagcaa

SEQ ID NO: 4022470 - RNA, 17 nt, Marburg virus
caguagugcagaaagca

SEQ ID NO: 4022471 - RNA, 13 nt, Marburg virus
caucuuaauagaa

SEQ ID NO: 4022472 - RNA, 19 nt, Marburg virus
caugaagaacauuaagaaa

SEQ ID NO: 4022473 - RNA, 13 nt, Marburg virus
cauuauucacaua

SEQ ID NO: 4022474 - RNA, 19 nt, Marburg virus
cauuguucuaccaacaguc

SEQ ID NO: 4022475 - RNA, 20 nt, Marburg virus
cauuguucuaccaacaguca

SEQ ID NO: 4022476 - RNA, 11 nt, Marburg virus
cauuuucuaga

SEQ ID NO: 4022477 - RNA, 16 nt, Marburg virus
cauuuuuggaugcauu

SEQ ID NO: 4022478 - RNA, 14 nt, Marburg virus
ccaagcaauugacu

SEQ ID NO: 4022479 - RNA, 20 nt, Marburg virus
ccaauuacgacacacagagc

SEQ ID NO: 4022480 - RNA, 23 nt, Marburg virus
ccagagaucaaacccacaagcac

SEQ ID NO: 4022481 - RNA, 22 nt, Marburg virus
ccaucugauuuaacuuaauaaa

SEQ ID NO: 4022482 - RNA, 14 nt, Marburg virus
ccauguacuuggaa

SEQ ID NO: 4022483 - RNA, 17 nt, Marburg virus
cccaacaauggaccacu

SEQ ID NO: 4022484 - RNA, 14 nt, Marburg virus
cccacaacaccacu

SEQ ID NO: 4022485 - RNA, 15 nt, Marburg virus
ccgaggaaaggacau

SEQ ID NO: 4022486 - RNA, 19 nt, Marburg virus
ccuuagaaaaauucacaug

SEQ ID NO: 4022487 - RNA, 19 nt, Marburg virus
cgaaaggccccaccacaac

SEQ ID NO: 4022488 - RNA, 18 nt, Marburg virus
cguaguuaaauuucuaga

SEQ ID NO: 4022489 - RNA, 17 nt, Marburg virus
cuaagugaaggagagaa

SEQ ID NO: 4022490 - RNA, 15 nt, Marburg virus
cuaauauuacuaaca

SEQ ID NO: 4022491 - RNA, 13 nt, Marburg virus
cuacaaaacacca

SEQ ID NO: 4022492 - RNA, 18 nt, Marburg virus
cuacuuaucuacuuugau

SEQ ID NO: 4022493 - RNA, 22 nt, Marburg virus
cuaggaggguuaucauuuuuga

SEQ ID NO: 4022494 - RNA, 15 nt, Marburg virus
cucaacaccacagac

SEQ ID NO: 4022495 - RNA, 18 nt, Marburg virus
cucaccacugcccacagc

SEQ ID NO: 4022496 - RNA, 22 nt, Marburg virus
uugugugucagcuguauacaaa

SEQ ID NO: 4022497 - RNA, 13 nt, Marburg virus
uuuaacuuccauu

SEQ ID NO: 4022498 - RNA, 13 nt, Marburg virus
uuuacugaagacu

SEQ ID NO: 4022499 - RNA, 13 nt, Marburg virus
uuuauaggaacag

SEQ ID NO: 4022500 - RNA, 19 nt, Marburg virus
uuuauaucuagaacaaauu

SEQ ID NO: 4022501 - RNA, 19 nt, Marburg virus
uuucacauagguucugauu

SEQ ID NO: 4022502 - RNA, 13 nt, Marburg virus
uuugaaggaucaa

SEQ ID NO: 4022503 - RNA, 17 nt, Marburg virus
uuuguauagauucaauu

SEQ ID NO: 4022504 - RNA, 20 nt, Marburg virus
uuuuauauauuauagaggaa

SEQ ID NO: 4022505 - RNA, 14 nt, Marburg virus
uuuucauucaaucu

SEQ ID NO: 4022506 - RNA, 21 nt, Marburg virus
aaaaagaguugaauauaggaa

SEQ ID NO: 4022507 - RNA, 10 nt, Marburg virus
aaaacaugcu

SEQ ID NO: 4022508 - RNA, 18 nt, Marburg virus
aaaacuaaauuaaaauua

SEQ ID NO: 4022509 - RNA, 12 nt, Marburg virus
aaaagaaauagu

SEQ ID NO: 4022510 - RNA, 16 nt, Marburg virus
aaaauagccuugucau

SEQ ID NO: 4022511 - RNA, 15 nt, Marburg virus
aaaaucccaacaaug

SEQ ID NO: 4022512 - RNA, 21 nt, Marburg virus
aaaauucacauguacuguuga

SEQ ID NO: 4022513 - RNA, 15 nt, Marburg virus
aaaccauaaggaaaa

SEQ ID NO: 4022514 - RNA, 23 nt, Marburg virus
aaacuauaauucaggggaaauug

SEQ ID NO: 4022515 - RNA, 16 nt, Marburg virus
aaagaacccaguguug

SEQ ID NO: 4022516 - RNA, 19 nt, Marburg virus
aaagcauucccuagcaaca

SEQ ID NO: 4022517 - RNA, 14 nt, Marburg virus
aaagguuuucuuua

SEQ ID NO: 4022518 - RNA, 15 nt, Marburg virus
aaauauaaaagaacg

SEQ ID NO: 4022519 - RNA, 16 nt, Marburg virus
aaaucuuaccacagca

SEQ ID NO: 4022520 - RNA, 20 nt, Marburg virus
aaaugggaaggacacuggaa

SEQ ID NO: 4022521 - RNA, 13 nt, Marburg virus
aaauguccaaaca

SEQ ID NO: 4022522 - RNA, 20 nt, Marburg virus
aaauuaauugggaacaccau

SEQ ID NO: 4022523 - RNA, 19 nt, Marburg virus
aaauuagcauggauauuca

SEQ ID NO: 4022524 - RNA, 14 nt, Marburg virus
aacaacacagacca

SEQ ID NO: 4022525 - RNA, 16 nt, Marburg virus
aacaagaaauuauccu

SEQ ID NO: 4022526 - RNA, 19 nt, Marburg virus
aacaauggcaagaugugga

SEQ ID NO: 4022527 - RNA, 17 nt, Marburg virus
aacaccuccaagaacaa

SEQ ID NO: 4022528 - RNA, 13 nt, Marburg virus
aacagaagauaac

SEQ ID NO: 4022529 - RNA, 17 nt, Marburg virus
aacagaucauuaucacu

SEQ ID NO: 4022530 - RNA, 12 nt, Marburg virus
aacaugaaaauu

SEQ ID NO: 4022531 - RNA, 15 nt, Marburg virus
aacauggcagaauua

SEQ ID NO: 4022532 - RNA, 14 nt, Marburg virus
aacauuucuucaga

SEQ ID NO: 4022533 - RNA, 23 nt, Marburg virus
aaccgaggaaaggacauuuuccu

SEQ ID NO: 4022534 - RNA, 17 nt, Marburg virus
aacggcaccaaauauga

SEQ ID NO: 4022535 - RNA, 22 nt, Marburg virus
aacuaaugaagaacauuaauug

SEQ ID NO: 4022536 - RNA, 22 nt, Marburg virus
aacuguuggcuuagaugauaac

SEQ ID NO: 4022537 - RNA, 15 nt, Marburg virus
aacuugaugaugcag

SEQ ID NO: 4022538 - RNA, 16 nt, Marburg virus
aacuuuauuaaaacua

SEQ ID NO: 4022539 - RNA, 16 nt, Marburg virus
aagauaaacaggagca

SEQ ID NO: 4022540 - RNA, 17 nt, Marburg virus
aagcgaugggcuuucag

SEQ ID NO: 4022541 - RNA, 19 nt, Marburg virus
aagggauaaaaacucuccc

SEQ ID NO: 4022542 - RNA, 23 nt, Marburg virus
aaguaacuggaaguuuauaggaa

SEQ ID NO: 4022543 - RNA, 14 nt, Marburg virus
aaguaaugaaaaua

SEQ ID NO: 4022544 - RNA, 12 nt, Marburg virus
aaguaauguuuu

SEQ ID NO: 4022545 - RNA, 22 nt, Marburg virus
aaguuaacuggacaacagauca

SEQ ID NO: 4022546 - RNA, 19 nt, Marburg virus
aaguugacaaucaaaucac

SEQ ID NO: 4022547 - RNA, 21 nt, Marburg virus
aauaaaugcuccaauugauuu

SEQ ID NO: 4022548 - RNA, 19 nt, Marburg virus
aauaacguuccuuagacaa

SEQ ID NO: 4022549 - RNA, 12 nt, Marburg virus
aauaagauguuc

SEQ ID NO: 4022550 - RNA, 18 nt, Marburg virus
aauacaacuccacgaaga

SEQ ID NO: 4022551 - RNA, 19 nt, Marburg virus
aauacagacaagacuuuua

SEQ ID NO: 4022552 - RNA, 24 nt, Marburg virus
aauacugggauggcauuguugcau

SEQ ID NO: 4022553 - RNA, 19 nt, Marburg virus
aauaguugucauauaacag

SEQ ID NO: 4022554 - RNA, 21 nt, Marburg virus
aauauaccuacccugauuuau

SEQ ID NO: 4022555 - RNA, 15 nt, Marburg virus
aauaugaugcaauua

SEQ ID NO: 4022556 - RNA, 15 nt, Marburg virus
aaucaaacugccaaa

SEQ ID NO: 4022557 - RNA, 23 nt, Marburg virus
aaucaaauuuauuugaauauuca

SEQ ID NO: 4022558 - RNA, 22 nt, Marburg virus
aaucaacuaacaacauagaaaa

SEQ ID NO: 4022559 - RNA, 14 nt, Marburg virus
aaucaccaauucau

SEQ ID NO: 4022560 - RNA, 17 nt, Marburg virus
aaucacgcgcacaaauu

SEQ ID NO: 4022561 - RNA, 17 nt, Marburg virus
aaucaucaaccagugug

SEQ ID NO: 4022562 - RNA, 16 nt, Marburg virus
aauccggagaaauugu

SEQ ID NO: 4022563 - RNA, 21 nt, Marburg virus
aaucuuuuggaugcaaaccau

SEQ ID NO: 4022564 - RNA, 18 nt, Marburg virus
aaugaaacaacagaugca

SEQ ID NO: 4022565 - RNA, 18 nt, Marburg virus
aauuaacuuuuguugcaa

SEQ ID NO: 4022566 - RNA, 22 nt, Marburg virus
aauuaacuuuuguugcaauuca

SEQ ID NO: 4022567 - RNA, 14 nt, Marburg virus
aauuaaucauguug

SEQ ID NO: 4022568 - RNA, 16 nt, Marburg virus
aauuagggaaauacug

SEQ ID NO: 4022569 - RNA, 14 nt, Marburg virus
acaaguaacaaugg

SEQ ID NO: 4022570 - RNA, 22 nt, Marburg virus
acaauggauuugcauuuaacuc

SEQ ID NO: 4022571 - RNA, 22 nt, Marburg virus
acacagagcacagccacugaaa

SEQ ID NO: 4022572 - RNA, 23 nt, Marburg virus
acacuagaucacggaucaagcau

SEQ ID NO: 4022573 - RNA, 15 nt, Marburg virus
acacuggaagcaauu

SEQ ID NO: 4022574 - RNA, 16 nt, Marburg virus
acacuggaagcaauuu

SEQ ID NO: 4022575 - RNA, 18 nt, Marburg virus
acagaaggggaggaagcc

SEQ ID NO: 4022576 - RNA, 23 nt, Marburg virus
acagaggauugagucauauuaug

SEQ ID NO: 4022577 - RNA, 15 nt, Marburg virus
acagcaagaaggaaa

SEQ ID NO: 4022578 - RNA, 17 nt, Marburg virus
acagcuugcuuuacaca

SEQ ID NO: 4022579 - RNA, 15 nt, Marburg virus
acauguuuaagauuc

SEQ ID NO: 4022580 - RNA, 14 nt, Marburg virus
accgucacaugaau

SEQ ID NO: 4022581 - RNA, 20 nt, Marburg virus
accucaacgguguucaacug

SEQ ID NO: 4022582 - RNA, 15 nt, Marburg virus
acgacacacagagca

SEQ ID NO: 4022583 - RNA, 14 nt, Marburg virus
acuaacuucaauaa

SEQ ID NO: 4022584 - RNA, 23 nt, Marburg virus
acuacguuacguuuucucugaug

SEQ ID NO: 4022585 - RNA, 15 nt, Marburg virus
acuagaccaucuuaa

SEQ ID NO: 4022586 - RNA, 20 nt, Marburg virus
acuagauuauauaaaagaaa

SEQ ID NO: 4022587 - RNA, 16 nt, Marburg virus
acugaaaaugaacaaa

SEQ ID NO: 4022588 - RNA, 22 nt, Marburg virus
acugaaaaugaacaaaccagug

SEQ ID NO: 4022589 - RNA, 23 nt, Marburg virus
acuuaagucauucuuuuuaaaau

SEQ ID NO: 4022590 - RNA, 14 nt, Marburg virus
agaaucaaacaugu

SEQ ID NO: 4022591 - RNA, 15 nt, Marburg virus
agacaagacuuuuag

SEQ ID NO: 4022592 - RNA, 21 nt, Marburg virus
agacagggcuacugcugugaa

SEQ ID NO: 4022593 - RNA, 22 nt, Marburg virus
agacaugccauugacuuucuac

SEQ ID NO: 4022594 - RNA, 21 nt, Marburg virus
agacauguguaggaacaugaa

SEQ ID NO: 4022595 - RNA, 18 nt, Marburg virus
agauaaccccaguguuaa

SEQ ID NO: 4022596 - RNA, 18 nt, Marburg virus
agaucaaacccacaagca

SEQ ID NO: 4022597 - RNA, 15 nt, Marburg virus
agaugauaacagaua

SEQ ID NO: 4022598 - RNA, 16 nt, Marburg virus
agcaaacgaaagaugu

SEQ ID NO: 4022599 - RNA, 14 nt, Marburg virus
agcacgccacagca

SEQ ID NO: 4022600 - RNA, 22 nt, Marburg virus
agcagauggacuagcaaaagca

SEQ ID NO: 4022601 - RNA, 20 nt, Marburg virus
agccgacaagaugucgaaag

SEQ ID NO: 4022602 - RNA, 18 nt, Marburg virus
agcguaugcgaauccaac

SEQ ID NO: 4022603 - RNA, 15 nt, Marburg virus
aggaucaagaauuac

SEQ ID NO: 4022604 - RNA, 14 nt, Marburg virus
aggaucaagggaaa

SEQ ID NO: 4022605 - RNA, 23 nt, Marburg virus
aggauuauaucauucucuucgau

SEQ ID NO: 4022606 - RNA, 22 nt, Marburg virus
aggauuuuucuccuaaggaaaa

SEQ ID NO: 4022607 - RNA, 14 nt, Marburg virus
aggcauaucuuaau

SEQ ID NO: 4022608 - RNA, 15 nt, Marburg virus
agggaacaauuuaau

SEQ ID NO: 4022609 - RNA, 16 nt, Marburg virus
aggugaguuauacaac

SEQ ID NO: 4022610 - RNA, 23 nt, Marburg virus
agguuuuuuauucucuucuuucu

SEQ ID NO: 4022611 - RNA, 20 nt, Marburg virus
aguaaacucaacugaugaug

SEQ ID NO: 4022612 - RNA, 18 nt, Marburg virus
agucucaauuggaaauuu

SEQ ID NO: 4022613 - RNA, 19 nt, Marburg virus
agugaauccuuucuucaau

SEQ ID NO: 4022614 - RNA, 13 nt, Marburg virus
aguuaauuauccu

SEQ ID NO: 4022615 - RNA, 16 nt, Marburg virus
aguuacucaaauauua

SEQ ID NO: 4022616 - RNA, 14 nt, Marburg virus
auaaagcugagugu

SEQ ID NO: 4022617 - RNA, 12 nt, Marburg virus
auaagagucaaa

SEQ ID NO: 4022618 - RNA, 17 nt, Marburg virus
auaaguggcuuaaauua

SEQ ID NO: 4022619 - RNA, 13 nt, Marburg virus
auaaucugauugu

SEQ ID NO: 4022620 - RNA, 17 nt, Marburg virus
auacaaagacgaucuuu

SEQ ID NO: 4022621 - RNA, 18 nt, Marburg virus
auacacccgaauuugcca

SEQ ID NO: 4022622 - RNA, 13 nt, Marburg virus
auaccaaauacug

SEQ ID NO: 4022623 - RNA, 21 nt, Marburg virus
auacuguuuuaauuaagaaaa

SEQ ID NO: 4022624 - RNA, 19 nt, Marburg virus
auaguagcaaagaaucauu

SEQ ID NO: 4022625 - RNA, 17 nt, Marburg virus
aucaacaaugccaccca

SEQ ID NO: 4022626 - RNA, 18 nt, Marburg virus
aucaagggaaauaauaac

SEQ ID NO: 4022627 - RNA, 22 nt, Marburg virus
aucacccuuguagaguuaaaaa

SEQ ID NO: 4022628 - RNA, 19 nt, Marburg virus
aucagauauugggaaauug

SEQ ID NO: 4022629 - RNA, 15 nt, Marburg virus
aucagcuaucaaauc

SEQ ID NO: 4022630 - RNA, 17 nt, Marburg virus
aucuacauuaauuccuu

SEQ ID NO: 4022631 - RNA, 20 nt, Marburg virus
aucuauuguucauaugcuuu

SEQ ID NO: 4022632 - RNA, 20 nt, Marburg virus
aucuauuugaccucagacau

SEQ ID NO: 4022633 - RNA, 20 nt, Marburg virus
aucugagcaaggugagacac

SEQ ID NO: 4022634 - RNA, 15 nt, Marburg virus
aucuugaccuuaauu

SEQ ID NO: 4022635 - RNA, 23 nt, Marburg virus
aucuuuacaccaggaaaauacug

SEQ ID NO: 4022636 - RNA, 20 nt, Marburg virus
aucuuuccgaguugauacaa

SEQ ID NO: 4022637 - RNA, 21 nt, Marburg virus
augaacaauaucccuugugaa

SEQ ID NO: 4022638 - RNA, 15 nt, Marburg virus
augaauguugaucaa

SEQ ID NO: 4022639 - RNA, 11 nt, Marburg virus
augacuggaaa

SEQ ID NO: 4022640 - RNA, 13 nt, Marburg virus
augacuugauuca

SEQ ID NO: 4022641 - RNA, 14 nt, Marburg virus
augaucaguucaaa

SEQ ID NO: 4022642 - RNA, 21 nt, Marburg virus
augccaccacacucaacacca

SEQ ID NO: 4022643 - RNA, 18 nt, Marburg virus
augcuccggaacucucca

SEQ ID NO: 4022644 - RNA, 18 nt, Marburg virus
auggacuagcaaaagcau

SEQ ID NO: 4022645 - RNA, 15 nt, Marburg virus
auguaaugaacaaua

SEQ ID NO: 4022646 - RNA, 18 nt, Marburg virus
augucgaaaguucuugaa

SEQ ID NO: 4022647 - RNA, 13 nt, Marburg virus
auguuauaugcau

SEQ ID NO: 4022648 - RNA, 22 nt, Marburg virus
auguucacucuucauguuguaa

SEQ ID NO: 4022649 - RNA, 20 nt, Marburg virus
auuaacgacuugucuuaauu

SEQ ID NO: 4022650 - RNA, 16 nt, Marburg virus
auuaaguucuuuaaau

SEQ ID NO: 4022651 - RNA, 12 nt, Marburg virus
auuauaugauuu

SEQ ID NO: 4022652 - RNA, 13 nt, Marburg virus
auucaaagcacuc

SEQ ID NO: 4022653 - RNA, 21 nt, Marburg virus
auucaauuguuaucauaguca

SEQ ID NO: 4022654 - RNA, 14 nt, Marburg virus
auugauuaagaaaa

SEQ ID NO: 4022655 - RNA, 23 nt, Marburg virus
auugauuaagaaaaaccaaugau

SEQ ID NO: 4022656 - RNA, 19 nt, Marburg virus
auugccauguacuuggaag

SEQ ID NO: 4022657 - RNA, 21 nt, Marburg virus
auuuaucugaguccuuagaaa

SEQ ID NO: 4022658 - RNA, 22 nt, Marburg virus
auuuauucgauuggaugcacuu

SEQ ID NO: 4022659 - RNA, 20 nt, Marburg virus
auuucguggagcaugaaccu

SEQ ID NO: 4022660 - RNA, 21 nt, Marburg virus
auuuuaacuuccauucaauau

SEQ ID NO: 4022661 - RNA, 22 nt, Marburg virus
caaaagcauucccuagcaacau

SEQ ID NO: 4022662 - RNA, 20 nt, Marburg virus
caaacaguucgugaaaauau

SEQ ID NO: 4022663 - RNA, 20 nt, Marburg virus
caaagugcuuggaccugauu

SEQ ID NO: 4022664 - RNA, 15 nt, Marburg virus
caaauuuauuugaau

SEQ ID NO: 4022665 - RNA, 13 nt, Marburg virus
caacaccacagac

SEQ ID NO: 4022666 - RNA, 18 nt, Marburg virus
caacaccuccaagaacaa

SEQ ID NO: 4022667 - RNA, 20 nt, Marburg virus
caacacgaaaggccccacca

SEQ ID NO: 4022668 - RNA, 18 nt, Marburg virus
caacccgaccacacaaca

SEQ ID NO: 4022669 - RNA, 19 nt, Marburg virus
caagaagaagaaaaaacua

SEQ ID NO: 4022670 - RNA, 12 nt, Marburg virus
caagaaggaaac

SEQ ID NO: 4022671 - RNA, 19 nt, Marburg virus
caagauguaaucucuuuug

SEQ ID NO: 4022672 - RNA, 16 nt, Marburg virus
caauauccugaugcaa

SEQ ID NO: 4022673 - RNA, 15 nt, Marburg virus
caauaugaugcaauu

SEQ ID NO: 4022674 - RNA, 16 nt, Marburg virus
caauggaacacaaacg

SEQ ID NO: 4022675 - RNA, 23 nt, Marburg virus
cacaagguggggaggaacaugca

SEQ ID NO: 4022676 - RNA, 14 nt, Marburg virus
cacagcaagaagga

SEQ ID NO: 4022677 - RNA, 23 nt, Marburg virus
cacagcaagaaggaaacaacaca

SEQ ID NO: 4022678 - RNA, 16 nt, Marburg virus
caccaaucaucaucca

SEQ ID NO: 4022679 - RNA, 13 nt, Marburg virus
caccacaauucag

SEQ ID NO: 4022680 - RNA, 17 nt, Marburg virus
caccucguaauuucaac

SEQ ID NO: 4022681 - RNA, 13 nt, Marburg virus
cagaaagaagcau

SEQ ID NO: 4022682 - RNA, 19 nt, Marburg virus
cagagaaguuacacaagag

SEQ ID NO: 4022683 - RNA, 23 nt, Marburg virus
cagagaucaaacccacaagcacc

SEQ ID NO: 4022684 - RNA, 22 nt, Marburg virus
cagauggacuagcaaaagcauu

SEQ ID NO: 4022685 - RNA, 18 nt, Marburg virus
cagcaggguauaacucca

SEQ ID NO: 4022686 - RNA, 12 nt, Marburg virus
cagcauugacuc

SEQ ID NO: 4022687 - RNA, 17 nt, Marburg virus
caggaguguugggacag

SEQ ID NO: 4022688 - RNA, 23 nt, Marburg virus
cagucccucgcccaugucaaaaa

SEQ ID NO: 4022689 - RNA, 22 nt, Marburg virus
cagugauaagagucaaaaacuu

SEQ ID NO: 4022690 - RNA, 18 nt, Marburg virus
caguucuaagagaacaca

SEQ ID NO: 4022691 - RNA, 15 nt, Marburg virus
cauagaaaacauauu

SEQ ID NO: 4022692 - RNA, 21 nt, Marburg virus
cauaguuuaaccacauaauaa

SEQ ID NO: 4022693 - RNA, 15 nt, Marburg virus
cauauucaaggucaa

SEQ ID NO: 4022694 - RNA, 21 nt, Marburg virus
cauauugugucaaauucauuu

SEQ ID NO: 4022695 - RNA, 19 nt, Marburg virus
caucucuuuuacauacauu

SEQ ID NO: 4022696 - RNA, 15 nt, Marburg virus
caugcgcaaucugua

SEQ ID NO: 4022697 - RNA, 18 nt, Marburg virus
cauugagagguauaacac

SEQ ID NO: 4022698 - RNA, 16 nt, Marburg virus
cauugccuccacaaca

SEQ ID NO: 4022699 - RNA, 14 nt, Marburg virus
ccaacccaacaauu

SEQ ID NO: 4022700 - RNA, 17 nt, Marburg virus
ccaagcacgccacagca

SEQ ID NO: 4022701 - RNA, 17 nt, Marburg virus
ccaagccaaaucuuuca

SEQ ID NO: 4022702 - RNA, 18 nt, Marburg virus
ccaauauauaaaauuaaa

SEQ ID NO: 4022703 - RNA, 21 nt, Marburg virus
ccaaugauggauauuaaauau

SEQ ID NO: 4022704 - RNA, 21 nt, Marburg virus
ccaauuacgacacacagagca

SEQ ID NO: 4022705 - RNA, 14 nt, Marburg virus
ccacaaccaagcac

SEQ ID NO: 4022706 - RNA, 16 nt, Marburg virus
ccacacucaacaccac

SEQ ID NO: 4022707 - RNA, 17 nt, Marburg virus
ccacagcaagaaggaaa

SEQ ID NO: 4022708 - RNA, 19 nt, Marburg virus
ccacugaaaaugaacaaac

SEQ ID NO: 4022709 - RNA, 13 nt, Marburg virus
ccagagaagacaa

SEQ ID NO: 4022710 - RNA, 22 nt, Marburg virus
ccagagaucaaacccacaagca

SEQ ID NO: 4022711 - RNA, 15 nt, Marburg virus
ccaguuauccaucuu

SEQ ID NO: 4022712 - RNA, 14 nt, Marburg virus
ccauccaaggacaa

SEQ ID NO: 4022713 - RNA, 16 nt, Marburg virus
cccccucgaaaacaac

SEQ ID NO: 4022714 - RNA, 12 nt, Marburg virus
cccuccaaaccu

SEQ ID NO: 4022715 - RNA, 13 nt, Marburg virus
ccggaacucucca

SEQ ID NO: 4022716 - RNA, 18 nt, Marburg virus
ccuccaaaagacaugugu

SEQ ID NO: 4022717 - RNA, 22 nt, Marburg virus
ccucguaauuucaacuggaaga

SEQ ID NO: 4022718 - RNA, 16 nt, Marburg virus
cgacacacagagcaca

SEQ ID NO: 4022719 - RNA, 16 nt, Marburg virus
cgcaaccaccaaaccg

SEQ ID NO: 4022720 - RNA, 22 nt, Marburg virus
cuaaagucauguuugaaacuuu

SEQ ID NO: 4022721 - RNA, 19 nt, Marburg virus
cuaauauuacuaacaaaag

SEQ ID NO: 4022722 - RNA, 21 nt, Marburg virus
cuaaucuacugaaaucaacuu

SEQ ID NO: 4022723 - RNA, 14 nt, Marburg virus
cuacaaaacaccac

SEQ ID NO: 4022724 - RNA, 15 nt, Marburg virus
cuagagcaauuuaag

SEQ ID NO: 4022725 - RNA, 13 nt, Marburg virus
cuauuugaugcau

SEQ ID NO: 4022726 - RNA, 23 nt, Marburg virus
cucaaauauuauugcucauaauu

SEQ ID NO: 4022727 - RNA, 18 nt, Marburg virus
cucaauuggaaauuuaaa

SEQ ID NO: 4022728 - RNA, 10 nt, Marburg virus
cucacaggca

SEQ ID NO: 4022729 - RNA, 20 nt, Marburg virus
cucuaaugauuguaauaauu

SEQ ID NO: 4022730 - RNA, 22 nt, Marburg virus
cucuacucugaacuaaggaaau

SEQ ID NO: 4022731 - RNA, 23 nt, Marburg virus
cucugaugacaagugacaaaauu

SEQ ID NO: 4022732 - RNA, 12 nt, Marburg virus
cugauaauuuaa

SEQ ID NO: 4022733 - RNA, 12 nt, Marburg virus
cugaugccacca

SEQ ID NO: 4022734 - RNA, 16 nt, Marburg virus
cugaugccaccacacu

SEQ ID NO: 4022735 - RNA, 21 nt, Marburg virus
cugcaaucucuacuaacaaca

SEQ ID NO: 4022736 - RNA, 14 nt, Marburg virus
cugcauaagaagca

SEQ ID NO: 4022737 - RNA, 17 nt, Marburg virus
cuguuacucgugcauuu

SEQ ID NO: 4022738 - RNA, 21 nt, Marburg virus
cuuaaauuauacccacaagag

SEQ ID NO: 4022739 - RNA, 15 nt, Marburg virus
cuuauauugaugcau

SEQ ID NO: 4022740 - RNA, 13 nt, Marburg virus
cuucagaacuguu

SEQ ID NO: 4022741 - RNA, 18 nt, Marburg virus
cuucucacuuuuuaagaa

SEQ ID NO: 4022742 - RNA, 20 nt, Marburg virus
cuugggagauuuuuaagaag

SEQ ID NO: 4022743 - RNA, 16 nt, Marburg virus
cuuguaguaaggggac

SEQ ID NO: 4022744 - RNA, 17 nt, Marburg virus
cuuguuguggugagaca

SEQ ID NO: 4022745 - RNA, 15 nt, Marburg virus
cuuucaucaacaaug

SEQ ID NO: 4022746 - RNA, 18 nt, Marburg virus
gaaaaacuaaugaagaac

SEQ ID NO: 4022747 - RNA, 20 nt, Marburg virus
gaaaaacuaaugaagaacau

SEQ ID NO: 4022748 - RNA, 17 nt, Marburg virus
gaaaaacuaugaagaac

SEQ ID NO: 4022749 - RNA, 17 nt, Marburg virus
gaaaaaggauguucuua

SEQ ID NO: 4022750 - RNA, 18 nt, Marburg virus
gaaaagguuuuuuauucu

SEQ ID NO: 4022751 - RNA, 12 nt, Marburg virus
gaaaauaaucua

SEQ ID NO: 4022752 - RNA, 15 nt, Marburg virus
gaaaaucuaauucuc

SEQ ID NO: 4022753 - RNA, 19 nt, Marburg virus
gaagguaugaugaagaaaa

SEQ ID NO: 4022754 - RNA, 20 nt, Marburg virus
gaauacauucuuauauugcu

SEQ ID NO: 4022755 - RNA, 22 nt, Marburg virus
gaauacauucuuauauugcuug

SEQ ID NO: 4022756 - RNA, 19 nt, Marburg virus
gaauauuucggaacaaauu

SEQ ID NO: 4022757 - RNA, 13 nt, Marburg virus
gaauuugccaccc

SEQ ID NO: 4022758 - RNA, 21 nt, Marburg virus
gacaagaugucgaaaguucuu

SEQ ID NO: 4022759 - RNA, 21 nt, Marburg virus
gacaaugauuauuguuugaaa

SEQ ID NO: 4022760 - RNA, 18 nt, Marburg virus
gacccaaacaaugaugau

SEQ ID NO: 4022761 - RNA, 19 nt, Marburg virus
gacuucuacuaauaaauau

SEQ ID NO: 4022762 - RNA, 21 nt, Marburg virus
gaggauaaaaggacaaagagg

SEQ ID NO: 4022763 - RNA, 17 nt, Marburg virus
gauuaguuuguauugau

SEQ ID NO: 4022764 - RNA, 16 nt, Marburg virus
gauuccacaucauauu

SEQ ID NO: 4022765 - RNA, 17 nt, Marburg virus
gauuucagucaaagaga

SEQ ID NO: 4022766 - RNA, 20 nt, Marburg virus
gcaaagagcacuaacaacac

SEQ ID NO: 4022767 - RNA, 23 nt, Marburg virus
gcaagggcuuucaucaacaaugc

SEQ ID NO: 4022768 - RNA, 22 nt, Marburg virus
gcaauaccucaacgguguucaa

SEQ ID NO: 4022769 - RNA, 14 nt, Marburg virus
gcauuggaauagaa

SEQ ID NO: 4022770 - RNA, 16 nt, Marburg virus
gccaguuccagcaauu

SEQ ID NO: 4022771 - RNA, 13 nt, Marburg virus
gccuacucuggag

SEQ ID NO: 4022772 - RNA, 23 nt, Marburg virus
gccuacucuggagaaaaugagaa

SEQ ID NO: 4022773 - RNA, 17 nt, Marburg virus
gccucauacgaucauuu

SEQ ID NO: 4022774 - RNA, 14 nt, Marburg virus
gcgcacaaauuaac

SEQ ID NO: 4022775 - RNA, 23 nt, Marburg virus
gcuacugagcccuucuucuaauc

SEQ ID NO: 4022776 - RNA, 17 nt, Marburg virus
gcucgacgucuuaaaag

SEQ ID NO: 4022777 - RNA, 14 nt, Marburg virus
gcugugaaccagga

SEQ ID NO: 4022778 - RNA, 15 nt, Marburg virus
gcuuacuuaaaugag

SEQ ID NO: 4022779 - RNA, 20 nt, Marburg virus
ggaacaugaaaauuggauug

SEQ ID NO: 4022780 - RNA, 15 nt, Marburg virus
ggacaaugauuauug

SEQ ID NO: 4022781 - RNA, 14 nt, Marburg virus
ggaccugauuguug

SEQ ID NO: 4022782 - RNA, 14 nt, Marburg virus
ggaucccucuggaa

SEQ ID NO: 4022783 - RNA, 17 nt, Marburg virus
ggaugcuucggugcucu

SEQ ID NO: 4022784 - RNA, 20 nt, Marburg virus
ggaugcuucggugcucuuca

SEQ ID NO: 4022785 - RNA, 14 nt, Marburg virus
ggcagcagggcuca

SEQ ID NO: 4022786 - RNA, 22 nt, Marburg virus
ggccaagcagacuuuuccuuga

SEQ ID NO: 4022787 - RNA, 24 nt, Marburg virus
ggugacuuaaaccuagaugaucag

SEQ ID NO: 4022788 - RNA, 21 nt, Marburg virus
guaagaaaaacuaaugaagaa

SEQ ID NO: 4022789 - RNA, 15 nt, Marburg virus
guaagagugauuaag

SEQ ID NO: 4022790 - RNA, 14 nt, Marburg virus
guaccucuaaggaa

SEQ ID NO: 4022791 - RNA, 22 nt, Marburg virus
guaguguucuuuuacuggaagg

SEQ ID NO: 4022792 - RNA, 17 nt, Marburg virus
guauagucauuauucac

SEQ ID NO: 4022793 - RNA, 20 nt, Marburg virus
guaugcaaauugggacaacg

SEQ ID NO: 4022794 - RNA, 17 nt, Marburg virus
gucaugggcccuucaua

SEQ ID NO: 4022795 - RNA, 19 nt, Marburg virus
gucguaucuuuaccaaaua

SEQ ID NO: 4022796 - RNA, 20 nt, Marburg virus
gucuauuucaacuuaagaau

SEQ ID NO: 4022797 - RNA, 18 nt, Marburg virus
gucucaaaccguacacaa

SEQ ID NO: 4022798 - RNA, 23 nt, Marburg virus
gugagacaacauaagcuaucaaa

SEQ ID NO: 4022799 - RNA, 20 nt, Marburg virus
gugagacaguccucucagaa

SEQ ID NO: 4022800 - RNA, 23 nt, Marburg virus
gugugaaaaauuucuuuaauaag

SEQ ID NO: 4022801 - RNA, 13 nt, Marburg virus
guuaccuacuuau

SEQ ID NO: 4022802 - RNA, 17 nt, Marburg virus
guuagauuucagucaaa

SEQ ID NO: 4022803 - RNA, 22 nt, Marburg virus
guuaucguugagauuaaaaaga

SEQ ID NO: 4022804 - RNA, 16 nt, Marburg virus
guucacucuucauguu

SEQ ID NO: 4022805 - RNA, 15 nt, Marburg virus
guugagauuaaaaag

SEQ ID NO: 4022806 - RNA, 18 nt, Marburg virus
guuuauaggaacagauuu

SEQ ID NO: 4022807 - RNA, 17 nt, Marburg virus
guuuauaucuagaacaa

SEQ ID NO: 4022808 - RNA, 17 nt, Marburg virus
uaaaaaucgaagaauau

SEQ ID NO: 4022809 - RNA, 19 nt, Marburg virus
uaaaagaacgaucugcugu

SEQ ID NO: 4022810 - RNA, 23 nt, Marburg virus
uaaaagaagguaugaugaagaaa

SEQ ID NO: 4022811 - RNA, 15 nt, Marburg virus
uaaaaucugauccgu

SEQ ID NO: 4022812 - RNA, 13 nt, Marburg virus
uaaauuaagaaaa

SEQ ID NO: 4022813 - RNA, 20 nt, Marburg virus
uaaauuugaccaaaguaaug

SEQ ID NO: 4022814 - RNA, 18 nt, Marburg virus
uaagagaacacagucaaa

SEQ ID NO: 4022815 - RNA, 12 nt, Marburg virus
uaagcuaucaaa

SEQ ID NO: 4022816 - RNA, 21 nt, Marburg virus
uaaggaaaauccuuauuauug

SEQ ID NO: 4022817 - RNA, 12 nt, Marburg virus
uaauaaaugcuc

SEQ ID NO: 4022818 - RNA, 14 nt, Marburg virus
uaauauuacuaaca

SEQ ID NO: 4022819 - RNA, 13 nt, Marburg virus
uaaucauguugau

SEQ ID NO: 4022820 - RNA, 20 nt, Marburg virus
uacacaaguagggaaaucac

SEQ ID NO: 4022821 - RNA, 20 nt, Marburg virus
uacagcaaucauuaauuccu

SEQ ID NO: 4022822 - RNA, 19 nt, Marburg virus
uacuauugugugagacaac

SEQ ID NO: 4022823 - RNA, 23 nt, Marburg virus
uacucuaaugauuguaauaauua

SEQ ID NO: 4022824 - RNA, 10 nt, Marburg virus
uacuggaagg

SEQ ID NO: 4022825 - RNA, 15 nt, Marburg virus
uacugugacugaacc

SEQ ID NO: 4022826 - RNA, 16 nt, Marburg virus
uagacagaacacaaag

SEQ ID NO: 4022827 - RNA, 20 nt, Marburg virus
uagagaucaugaccuugaua

SEQ ID NO: 4022828 - RNA, 16 nt, Marburg virus
uagagucgaagaacau

SEQ ID NO: 4022829 - RNA, 20 nt, Marburg virus
uagcuucauuucauucaaug

SEQ ID NO: 4022830 - RNA, 13 nt, Marburg virus
uaggaacaugaaa

SEQ ID NO: 4022831 - RNA, 20 nt, Marburg virus
uaguagcguuaccuuucaau

SEQ ID NO: 4022832 - RNA, 12 nt, Marburg virus
uaguauacugua

SEQ ID NO: 4022833 - RNA, 13 nt, Marburg virus
uagucauuauuca

SEQ ID NO: 4022834 - RNA, 17 nt, Marburg virus
uaguuacucaaauauua

SEQ ID NO: 4022835 - RNA, 13 nt, Marburg virus
uauaaaaaucuug

SEQ ID NO: 4022836 - RNA, 15 nt, Marburg virus
uauagauucaauuau

SEQ ID NO: 4022837 - RNA, 19 nt, Marburg virus
uauaggaacagauuuagag

SEQ ID NO: 4022838 - RNA, 20 nt, Marburg virus
uauaucuugauugcuaaaaa

SEQ ID NO: 4022839 - RNA, 16 nt, Marburg virus
uaucauucucaaggau

SEQ ID NO: 4022840 - RNA, 14 nt, Marburg virus
uauccuaaaugcaa

SEQ ID NO: 4022841 - RNA, 16 nt, Marburg virus
uaucggacauucaaag

SEQ ID NO: 4022842 - RNA, 22 nt, Marburg virus
uauuauagaggaacuaauauua

SEQ ID NO: 4022843 - RNA, 14 nt, Marburg virus
uauucuauaucuug

SEQ ID NO: 4022844 - RNA, 14 nt, Marburg virus
uauucucucuacaa

SEQ ID NO: 4022845 - RNA, 14 nt, Marburg virus
uauugaaauaaagu

SEQ ID NO: 4022846 - RNA, 19 nt, Marburg virus
uauuuacuaaaucuuacau

SEQ ID NO: 4022847 - RNA, 12 nt, Marburg virus
uauuucaacuua

SEQ ID NO: 4022848 - RNA, 21 nt, Marburg virus
uauuuucaagcaccugagaac

SEQ ID NO: 4022849 - RNA, 16 nt, Marburg virus
ucaaacccacaagcac

SEQ ID NO: 4022850 - RNA, 20 nt, Marburg virus
ucaaacccacaagcacccca

SEQ ID NO: 4022851 - RNA, 20 nt, Marburg virus
ucaaagagagugccagagca

SEQ ID NO: 4022852 - RNA, 19 nt, Marburg virus
ucaaaggcgacaagcacug

SEQ ID NO: 4022853 - RNA, 14 nt, Marburg virus
ucaacaacagacaa

SEQ ID NO: 4022854 - RNA, 21 nt, Marburg virus
ucaauaugaugcaauuaauca

SEQ ID NO: 4022855 - RNA, 17 nt, Marburg virus
ucacaaaauagaauaau

SEQ ID NO: 4022856 - RNA, 22 nt, Marburg virus
ucacaccagugguaacuuuuca

SEQ ID NO: 4022857 - RNA, 23 nt, Marburg virus
ucacaggcagcuauacaaucacc

SEQ ID NO: 4022858 - RNA, 14 nt, Marburg virus
ucacuaagcaaggg

SEQ ID NO: 4022859 - RNA, 13 nt, Marburg virus
ucagaucacagua

SEQ ID NO: 4022860 - RNA, 22 nt, Marburg virus
ucaguucaaagggaaugucugc

SEQ ID NO: 4022861 - RNA, 21 nt, Marburg virus
ucauacgaucauuuuauucuu

SEQ ID NO: 4022862 - RNA, 18 nt, Marburg virus
ucauauuugauucaagau

SEQ ID NO: 4022863 - RNA, 21 nt, Marburg virus
ucauuaauuccuggauuuaga

SEQ ID NO: 4022864 - RNA, 21 nt, Marburg virus
ucauucaaacaccccaaauuu

SEQ ID NO: 4022865 - RNA, 19 nt, Marburg virus
ucauugcuaaguaaacuca

SEQ ID NO: 4022866 - RNA, 14 nt, Marburg virus
uccacgugcaagau

SEQ ID NO: 4022867 - RNA, 15 nt, Marburg virus
uccagaagacagaag

SEQ ID NO: 4022868 - RNA, 18 nt, Marburg virus
uccaucugcauaagaagc

SEQ ID NO: 4022869 - RNA, 21 nt, Marburg virus
uccaugcccccccacaacacc

SEQ ID NO: 4022870 - RNA, 19 nt, Marburg virus
uccauucaauaugaugcaa

SEQ ID NO: 4022871 - RNA, 11 nt, Marburg virus
ucccaacaaug

SEQ ID NO: 4022872 - RNA, 13 nt, Marburg virus
uccccaauacaga

SEQ ID NO: 4022873 - RNA, 16 nt, Marburg virus
uccucaacaauacugu

SEQ ID NO: 4022874 - RNA, 16 nt, Marburg virus
uccuccaaaagacaug

SEQ ID NO: 4022875 - RNA, 16 nt, Marburg virus
ucgcuaguuaugaaug

SEQ ID NO: 4022876 - RNA, 13 nt, Measles virus
uuaguacaaccua

SEQ ID NO: 4022877 - RNA, 20 nt, Measles virus
uucagaucggucaaugcagu

SEQ ID NO: 4022878 - RNA, 18 nt, Measles virus
uucuauucccagcuuugu

SEQ ID NO: 4022879 - RNA, 22 nt, Measles virus
uucuauucccagcuuugucugg

SEQ ID NO: 4022880 - RNA, 11 nt, Measles virus
uugccacagcu

SEQ ID NO: 4022881 - RNA, 20 nt, Measles virus
uuggagucaucggaccagau

SEQ ID NO: 4022882 - RNA, 18 nt, Measles virus
uuggccaccccugacccu

SEQ ID NO: 4022883 - RNA, 17 nt, Measles virus
uugucacaacugagcau

SEQ ID NO: 4022884 - RNA, 17 nt, Measles virus
aaaaugagggcaugcca

SEQ ID NO: 4022885 - RNA, 19 nt, Measles virus
aaaugauuauaaacaaugu

SEQ ID NO: 4022886 - RNA, 20 nt, Measles virus
aaccacugcuuuacugaaau

SEQ ID NO: 4022887 - RNA, 13 nt, Measles virus
aaccccacaaccg

SEQ ID NO: 4022888 - RNA, 14 nt, Measles virus
aacccuccucacac

SEQ ID NO: 4022889 - RNA, 13 nt, Measles virus
aacuuugaaaaua

SEQ ID NO: 4022890 - RNA, 20 nt, Measles virus
aagaagcagaucaacaggca

SEQ ID NO: 4022891 - RNA, 22 nt, Measles virus
aagacaucaguaucccacagcc

SEQ ID NO: 4022892 - RNA, 21 nt, Measles virus
aagauaguagcuauccuggag

SEQ ID NO: 4022893 - RNA, 15 nt, Measles virus
aagaucauuggugau

SEQ ID NO: 4022894 - RNA, 12 nt, Measles virus
aagcacacccac

SEQ ID NO: 4022895 - RNA, 15 nt, Measles virus
aaggacaccucucaa

SEQ ID NO: 4022896 - RNA, 17 nt, Measles virus
aaggacaccucucaagc

SEQ ID NO: 4022897 - RNA, 13 nt, Measles virus
aaggccccucccc

SEQ ID NO: 4022898 - RNA, 20 nt, Measles virus
aagggaaccgggucacggag

SEQ ID NO: 4022899 - RNA, 18 nt, Measles virus
aagggaccaaaagaucaa

SEQ ID NO: 4022900 - RNA, 20 nt, Measles virus
aaggucgcucugauccucua

SEQ ID NO: 4022901 - RNA, 17 nt, Measles virus
aaggugucagcuuccag

SEQ ID NO: 4022902 - RNA, 18 nt, Measles virus
aaguuucuauucccagcu

SEQ ID NO: 4022903 - RNA, 21 nt, Measles virus
aauacgaaguuucuauuccca

SEQ ID NO: 4022904 - RNA, 16 nt, Measles virus
aaucagccuaaaguca

SEQ ID NO: 4022905 - RNA, 22 nt, Measles virus
aaucaguuccuagcugucucaa

SEQ ID NO: 4022906 - RNA, 21 nt, Measles virus
aauccagccggcuagaggagg

SEQ ID NO: 4022907 - RNA, 14 nt, Measles virus
aaucugaaaacagc

SEQ ID NO: 4022908 - RNA, 14 nt, Measles virus
aauucgcagcccuc

SEQ ID NO: 4022909 - RNA, 12 nt, Measles virus
aauucuaccugg

SEQ ID NO: 4022910 - RNA, 22 nt, Measles virus
acaacccaggacaggaccgagc

SEQ ID NO: 4022911 - RNA, 19 nt, Measles virus
acacaaggccaccaccagc

SEQ ID NO: 4022912 - RNA, 20 nt, Measles virus
acacaccuguauucuucacu

SEQ ID NO: 4022913 - RNA, 13 nt, Measles virus
acacaugagcagu

SEQ ID NO: 4022914 - RNA, 20 nt, Measles virus
acaccucagagauucacuga

SEQ ID NO: 4022915 - RNA, 21 nt, Measles virus
acacugugucagaacaucaag

SEQ ID NO: 4022916 - RNA, 17 nt, Measles virus
acaguagaacucagagg

SEQ ID NO: 4022917 - RNA, 22 nt, Measles virus
accaacccccgaccagacccag

SEQ ID NO: 4022918 - RNA, 19 nt, Measles virus
accagaucuuauacccuga

SEQ ID NO: 4022919 - RNA, 14 nt, Measles virus
accaucagggccag

SEQ ID NO: 4022920 - RNA, 22 nt, Measles virus
acccagccaccgacaauccaag

SEQ ID NO: 4022921 - RNA, 18 nt, Measles virus
accccccgaaaaccagag

SEQ ID NO: 4022922 - RNA, 13 nt, Measles virus
acccuggaaggac

SEQ ID NO: 4022923 - RNA, 15 nt, Measles virus
accgcauccagcauc

SEQ ID NO: 4022924 - RNA, 16 nt, Measles virus
accgcauccccacagc

SEQ ID NO: 4022925 - RNA, 13 nt, Measles virus
accggggaucugc

SEQ ID NO: 4022926 - RNA, 14 nt, Measles virus
acgacuucagagau

SEQ ID NO: 4022927 - RNA, 20 nt, Measles virus
acgaggauaaucagaagaua

SEQ ID NO: 4022928 - RNA, 21 nt, Measles virus
acucaacccgaaccagcaccc

SEQ ID NO: 4022929 - RNA, 13 nt, Measles virus
acucacucuggga

SEQ ID NO: 4022930 - RNA, 20 nt, Measles virus
acuccacacucuggcugucu

SEQ ID NO: 4022931 - RNA, 15 nt, Measles virus
acuccacggaccaag

SEQ ID NO: 4022932 - RNA, 17 nt, Measles virus
acuccggaacccuaauc

SEQ ID NO: 4022933 - RNA, 18 nt, Measles virus
acuccggaacccuaaucc

SEQ ID NO: 4022934 - RNA, 16 nt, Measles virus
acucgaucgagcauca

SEQ ID NO: 4022935 - RNA, 16 nt, Measles virus
acucucaauguuccuc

SEQ ID NO: 4022936 - RNA, 12 nt, Measles virus
acucuccaaaca

SEQ ID NO: 4022937 - RNA, 19 nt, Measles virus
acugagaugaggucaguga

SEQ ID NO: 4022938 - RNA, 21 nt, Measles virus
acuggaaaucauuugcuggag

SEQ ID NO: 4022939 - RNA, 13 nt, Measles virus
acuugggaaggau

SEQ ID NO: 4022940 - RNA, 23 nt, Measles virus
agaaaucuccaggcaucaagcac

SEQ ID NO: 4022941 - RNA, 14 nt, Measles virus
agaacaucaagcac

SEQ ID NO: 4022942 - RNA, 12 nt, Measles virus
agaacucaugaa

SEQ ID NO: 4022943 - RNA, 11 nt, Measles virus
agaagaaugcu

SEQ ID NO: 4022944 - RNA, 23 nt, Measles virus
agacaucagaauuaagaaaaacg

SEQ ID NO: 4022945 - RNA, 12 nt, Measles virus
agacccagcacc

SEQ ID NO: 4022946 - RNA, 17 nt, Measles virus
agaccgaauaaaugccu

SEQ ID NO: 4022947 - RNA, 19 nt, Measles virus
agaccgcagugcccagcaa

SEQ ID NO: 4022948 - RNA, 17 nt, Measles virus
agacggggggccccccc

SEQ ID NO: 4022949 - RNA, 20 nt, Measles virus
agagaucucacuugguguau

SEQ ID NO: 4022950 - RNA, 16 nt, Measles virus
agagucauagauccug

SEQ ID NO: 4022951 - RNA, 18 nt, Measles virus
agaguugucacaacugag

SEQ ID NO: 4022952 - RNA, 17 nt, Measles virus
agauccgugagcuccua

SEQ ID NO: 4022953 - RNA, 20 nt, Measles virus
agaugauauuggcuguucag

SEQ ID NO: 4022954 - RNA, 19 nt, Measles virus
agauucaagguuaguccca

SEQ ID NO: 4022955 - RNA, 21 nt, Measles virus
agauuucccacaagucuccuc

SEQ ID NO: 4022956 - RNA, 19 nt, Measles virus
agcaaguguggacaccagg

SEQ ID NO: 4022957 - RNA, 18 nt, Measles virus
agcacccucucaggagga

SEQ ID NO: 4022958 - RNA, 18 nt, Measles virus
agcaccgccuaaaaaacg

SEQ ID NO: 4022959 - RNA, 16 nt, Measles virus
agcaucaggucaagga

SEQ ID NO: 4022960 - RNA, 19 nt, Measles virus
agccaccgacaauccaaga

SEQ ID NO: 4022961 - RNA, 15 nt, Measles virus
agccauggcagcaug

SEQ ID NO: 4022962 - RNA, 19 nt, Measles virus
agccgacaacuccagggaa

SEQ ID NO: 4022963 - RNA, 20 nt, Measles virus
agccgucggguuuguuccug

SEQ ID NO: 4022964 - RNA, 16 nt, Measles virus
agcguuaccugaugac

SEQ ID NO: 4022965 - RNA, 12 nt, Measles virus
agcugcucagau

SEQ ID NO: 4022966 - RNA, 21 nt, Measles virus
agcuguucuccgauguccaag

SEQ ID NO: 4022967 - RNA, 15 nt, Measles virus
aggaacccccagcaa

SEQ ID NO: 4022968 - RNA, 17 nt, Measles virus
aggaccagaacaacauc

SEQ ID NO: 4022969 - RNA, 14 nt, Measles virus
aggcauuauuugca

SEQ ID NO: 4022970 - RNA, 23 nt, Measles virus
aggccacaacccgcgcaccccag

SEQ ID NO: 4022971 - RNA, 13 nt, Measles virus
aggccgagcacug

SEQ ID NO: 4022972 - RNA, 13 nt, Measles virus
aggccuaaagccu

SEQ ID NO: 4022973 - RNA, 19 nt, Measles virus
aggcuccgaauugagggag

SEQ ID NO: 4022974 - RNA, 17 nt, Measles virus
agggacaucaaaauccu

SEQ ID NO: 4022975 - RNA, 20 nt, Measles virus
agggcucaaauugcucagau

SEQ ID NO: 4022976 - RNA, 17 nt, Measles virus
aggggugguagggauag

SEQ ID NO: 4022977 - RNA, 16 nt, Measles virus
aggugauaggaaggau

SEQ ID NO: 4022978 - RNA, 16 nt, Measles virus
agguuaaugacagaga

SEQ ID NO: 4022979 - RNA, 15 nt, Measles virus
aguaagaauccaggc

SEQ ID NO: 4022980 - RNA, 15 nt, Measles virus
aguagcuauccugga

SEQ ID NO: 4022981 - RNA, 16 nt, Measles virus
agucaauuaagaagca

SEQ ID NO: 4022982 - RNA, 16 nt, Measles virus
agucagauacaugugg

SEQ ID NO: 4022983 - RNA, 21 nt, Measles virus
agucccucacgcuuacagccu

SEQ ID NO: 4022984 - RNA, 18 nt, Measles virus
agugaaccgaucacauga

SEQ ID NO: 4022985 - RNA, 14 nt, Measles virus
agugaucugacaau

SEQ ID NO: 4022986 - RNA, 12 nt, Measles virus
aguuaggcauua

SEQ ID NO: 4022987 - RNA, 15 nt, Measles virus
aguuauuaacagaga

SEQ ID NO: 4022988 - RNA, 22 nt, Measles virus
aguucaaccugucuuacagccu

SEQ ID NO: 4022989 - RNA, 19 nt, Measles virus
aguuccagaggacagcugc

SEQ ID NO: 4022990 - RNA, 22 nt, Measles virus
auaacaguagaacucagaggug

SEQ ID NO: 4022991 - RNA, 12 nt, Measles virus
auaacuggaaau

SEQ ID NO: 4022992 - RNA, 21 nt, Measles virus
auacccgaaaacgaccccccu

SEQ ID NO: 4022993 - RNA, 17 nt, Measles virus
auaggaagugcaagcua

SEQ ID NO: 4022994 - RNA, 12 nt, Measles virus
auauuaaagaaa

SEQ ID NO: 4022995 - RNA, 16 nt, Measles virus
auauuaaagaaaacuu

SEQ ID NO: 4022996 - RNA, 17 nt, Measles virus
aucaguaucccacagcc

SEQ ID NO: 4022997 - RNA, 20 nt, Measles virus
aucauaggcagagauucagg

SEQ ID NO: 4022998 - RNA, 20 nt, Measles virus
aucaugauugccauuccugg

SEQ ID NO: 4022999 - RNA, 12 nt, Measles virus
auccagcaucaa

SEQ ID NO: 4023000 - RNA, 22 nt, Measles virus
aucccaaucugcguccuccucg

SEQ ID NO: 4023001 - RNA, 16 nt, Measles virus
aucggcucacuggccg

SEQ ID NO: 4023002 - RNA, 18 nt, Measles virus
aucuuacagggacaucaa

SEQ ID NO: 4023003 - RNA, 16 nt, Measles virus
augacagccagaaggc

SEQ ID NO: 4023004 - RNA, 22 nt, Measles virus
augcacaacucggguucaagaa

SEQ ID NO: 4023005 - RNA, 17 nt, Measles virus
augccucuuagccugga

SEQ ID NO: 4023006 - RNA, 13 nt, Measles virus
augucgcuguccc

SEQ ID NO: 4023007 - RNA, 22 nt, Measles virus
auuacaaguggaaugcuucaca

SEQ ID NO: 4023008 - RNA, 22 nt, Measles virus
auuagacuccaucgugcagcca

SEQ ID NO: 4023009 - RNA, 20 nt, Measles virus
auuauuaacuugggaguuua

SEQ ID NO: 4023010 - RNA, 17 nt, Measles virus
auuugcaauauauuaaa

SEQ ID NO: 4023011 - RNA, 14 nt, Measles virus
caaaaaacucuggu

SEQ ID NO: 4023012 - RNA, 20 nt, Measles virus
caaaaaggaaaggccacaac

SEQ ID NO: 4023013 - RNA, 22 nt, Measles virus
caaaaaggaaaggccacaaccc

SEQ ID NO: 4023014 - RNA, 19 nt, Measles virus
caaaacuuagggccaagga

SEQ ID NO: 4023015 - RNA, 19 nt, Measles virus
caaacccgccggccccccc

SEQ ID NO: 4023016 - RNA, 16 nt, Measles virus
caaaccgcaaaagaca

SEQ ID NO: 4023017 - RNA, 16 nt, Measles virus
caaacucaguuccaau

SEQ ID NO: 4023018 - RNA, 13 nt, Measles virus
caaaggagccaac

SEQ ID NO: 4023019 - RNA, 18 nt, Measles virus
caaagggaaacugcucag

SEQ ID NO: 4023020 - RNA, 18 nt, Measles virus
caaauuggauuaugauca

SEQ ID NO: 4023021 - RNA, 10 nt, Measles virus
caacaaugug

SEQ ID NO: 4023022 - RNA, 15 nt, Measles virus
caacacggacagaug

SEQ ID NO: 4023023 - RNA, 19 nt, Measles virus
caacauguauauuaccuga

SEQ ID NO: 4023024 - RNA, 21 nt, Measles virus
caaccagaucuuauacccuga

SEQ ID NO: 4023025 - RNA, 19 nt, Measles virus
caacccgaaccagcaccca

SEQ ID NO: 4023026 - RNA, 22 nt, Measles virus
caacccgaaccagcacccaaga

SEQ ID NO: 4023027 - RNA, 20 nt, Measles virus
caaccgcauccccacagcuc

SEQ ID NO: 4023028 - RNA, 18 nt, Measles virus
caaccucuucacuguucc

SEQ ID NO: 4023029 - RNA, 18 nt, Measles virus
caacugaaggcggugcac

SEQ ID NO: 4023030 - RNA, 17 nt, Measles virus
caacuuaccugccaacc

SEQ ID NO: 4023031 - RNA, 17 nt, Measles virus
caagcgagaggccagcc

SEQ ID NO: 4023032 - RNA, 14 nt, Measles virus
caaggccaccacca

SEQ ID NO: 4023033 - RNA, 19 nt, Measles virus
caaggcgauuggcccuggg

SEQ ID NO: 4023034 - RNA, 17 nt, Measles virus
caaguggaaugcuucac

SEQ ID NO: 4023035 - RNA, 15 nt, Measles virus
caaguguuacacaac

SEQ ID NO: 4023036 - RNA, 19 nt, Measles virus
caauauauuaaagaaaacu

SEQ ID NO: 4023037 - RNA, 14 nt, Measles virus
caaugaagaccuua

SEQ ID NO: 4023038 - RNA, 14 nt, Measles virus
caaugccgcacuga

SEQ ID NO: 4023039 - RNA, 19 nt, Measles virus
caauguaccuaaaggacaa

SEQ ID NO: 4023040 - RNA, 12 nt, Measles virus
caauucucaaac

SEQ ID NO: 4023041 - RNA, 16 nt, Measles virus
cacaaugacagagauc

SEQ ID NO: 4023042 - RNA, 17 nt, Measles virus
cacaaugucaccacaac

SEQ ID NO: 4023043 - RNA, 15 nt, Measles virus
cacagagguguuauc

SEQ ID NO: 4023044 - RNA, 15 nt, Measles virus
cacagccgccagcca

SEQ ID NO: 4023045 - RNA, 16 nt, Measles virus
cacagguaggcacacc

SEQ ID NO: 4023046 - RNA, 18 nt, Measles virus
cacauuagaagcacaggc

SEQ ID NO: 4023047 - RNA, 16 nt, Measles virus
caccagaugcugauga

SEQ ID NO: 4023048 - RNA, 14 nt, Measles virus
caccgcauccagca

SEQ ID NO: 4023049 - RNA, 13 nt, Measles virus
caccucucaagca

SEQ ID NO: 4023050 - RNA, 14 nt, Measles virus
caccugcaaggaag

SEQ ID NO: 4023051 - RNA, 15 nt, Measles virus
caccugcaaggaaga

SEQ ID NO: 4023052 - RNA, 19 nt, Measles virus
cacggaccaagcgagaggc

SEQ ID NO: 4023053 - RNA, 14 nt, Measles virus
cacgucgacacaga

SEQ ID NO: 4023054 - RNA, 16 nt, Measles virus
cacgucgacacagagu

SEQ ID NO: 4023055 - RNA, 23 nt, Measles virus
cacucccacgacuggagccgaug

SEQ ID NO: 4023056 - RNA, 23 nt, Measles virus
cacugcccgguggucgaggugaa

SEQ ID NO: 4023057 - RNA, 18 nt, Measles virus
cacuugcugcucuccaaa

SEQ ID NO: 4023058 - RNA, 17 nt, Measles virus
cagaagacuccacggac

SEQ ID NO: 4023059 - RNA, 21 nt, Measles virus
cagaaggaggggagauccacg

SEQ ID NO: 4023060 - RNA, 22 nt, Measles virus
cagaaggaggggagauccacga

SEQ ID NO: 4023061 - RNA, 18 nt, Measles virus
cagaggucaauucucaaa

SEQ ID NO: 4023062 - RNA, 19 nt, Measles virus
cagauccucuccccccggc

SEQ ID NO: 4023063 - RNA, 17 nt, Measles virus
cagcagggcucaaugaa

SEQ ID NO: 4023064 - RNA, 18 nt, Measles virus
cagccaaccaaccaucca

SEQ ID NO: 4023065 - RNA, 17 nt, Measles virus
cagccagcagccgacag

SEQ ID NO: 4023066 - RNA, 22 nt, Measles virus
cagccccgacacaaggccacca

SEQ ID NO: 4023067 - RNA, 16 nt, Measles virus
cagccggcuagaggag

SEQ ID NO: 4023068 - RNA, 21 nt, Measles virus
cagcugcacagucacucggga

SEQ ID NO: 4023069 - RNA, 12 nt, Measles virus
cagcugcucaga

SEQ ID NO: 4023070 - RNA, 16 nt, Measles virus
cagcuuacgggacccc

SEQ ID NO: 4023071 - RNA, 14 nt, Measles virus
cagcuuugucuggu

SEQ ID NO: 4023072 - RNA, 14 nt, Measles virus
caggccgagcacug

SEQ ID NO: 4023073 - RNA, 17 nt, Measles virus
caggcuggugccccagg

SEQ ID NO: 4023074 - RNA, 22 nt, Measles virus
cagggcaaccaaucaguuccua

SEQ ID NO: 4023075 - RNA, 11 nt, Measles virus
cagggcccacu

SEQ ID NO: 4023076 - RNA, 17 nt, Measles virus
caguaacggcugcugaa

SEQ ID NO: 4023077 - RNA, 16 nt, Measles virus
caguagaacucagagg

SEQ ID NO: 4023078 - RNA, 16 nt, Measles virus
caguagggccagcacu

SEQ ID NO: 4023079 - RNA, 22 nt, Measles virus
caguaucccacagccucuccaa

SEQ ID NO: 4023080 - RNA, 22 nt, Measles virus
caguccacacaaguaccaggaa

SEQ ID NO: 4023081 - RNA, 13 nt, Measles virus
cagugauggcagg

SEQ ID NO: 4023082 - RNA, 19 nt, Measles virus
cauaagagccucagcacca

SEQ ID NO: 4023083 - RNA, 20 nt, Measles virus
cauaagagccucagcaccaa

SEQ ID NO: 4023084 - RNA, 16 nt, Measles virus
cauaugacaaacuauu

SEQ ID NO: 4023085 - RNA, 22 nt, Measles virus
caucagggccaggugcaccugc

SEQ ID NO: 4023086 - RNA, 17 nt, Measles virus
caucaguaucccacagc

SEQ ID NO: 4023087 - RNA, 13 nt, Measles virus
caucgacaaugca

SEQ ID NO: 4023088 - RNA, 15 nt, Measles virus
caucgacaaugcaga

SEQ ID NO: 4023089 - RNA, 16 nt, Measles virus
caugacccugaguuca

SEQ ID NO: 4023090 - RNA, 12 nt, Measles virus
caugccagaggg

SEQ ID NO: 4023091 - RNA, 13 nt, Measles virus
caugccucucagc

SEQ ID NO: 4023092 - RNA, 15 nt, Measles virus
cauguuucugcuggg

SEQ ID NO: 4023093 - RNA, 15 nt, Measles virus
cauuauaaaaaacuu

SEQ ID NO: 4023094 - RNA, 22 nt, Measles virus
ccaaccucuucacuguuccaau

SEQ ID NO: 4023095 - RNA, 21 nt, Measles virus
ccaauauaacucuccucaaua

SEQ ID NO: 4023096 - RNA, 22 nt, Measles virus
ccaaugguuugagcccuuucug

SEQ ID NO: 4023097 - RNA, 19 nt, Measles virus
ccacaacccgcgcacccca

SEQ ID NO: 4023098 - RNA, 18 nt, Measles virus
ccacaaccgaaccgcaca

SEQ ID NO: 4023099 - RNA, 21 nt, Measles virus
ccacaaccgaaccgcacaagc

SEQ ID NO: 4023100 - RNA, 22 nt, Measles virus
ccaccaaccgcauccccacagc

SEQ ID NO: 4023101 - RNA, 14 nt, Measles virus
ccaccaccagccau

SEQ ID NO: 4023102 - RNA, 17 nt, Measles virus
ccaccgcauccagcauc

SEQ ID NO: 4023103 - RNA, 17 nt, Measles virus
ccacuaacccuccucac

SEQ ID NO: 4023104 - RNA, 15 nt, Measles virus
ccagacuugaagcag

SEQ ID NO: 4023105 - RNA, 20 nt, Measles virus
ccagagggagcccccaacca

SEQ ID NO: 4023106 - RNA, 14 nt, Measles virus
ccagaguccagacc

SEQ ID NO: 4023107 - RNA, 15 nt, Measles virus
ccagaguccagacca

SEQ ID NO: 4023108 - RNA, 16 nt, Measles virus
ccagccaaccaaccau

SEQ ID NO: 4023109 - RNA, 23 nt, Measles virus
ccagccaaccaaccauccacucc

SEQ ID NO: 4023110 - RNA, 20 nt, Measles virus
ccaggcaguuuugcagccau

SEQ ID NO: 4023111 - RNA, 19 nt, Measles virus
ccaggggccgacagccagc

SEQ ID NO: 4023112 - RNA, 13 nt, Measles virus
ccagguccacaca

SEQ ID NO: 4023113 - RNA, 23 nt, Measles virus
ccaguccaugcugaacucucaag

SEQ ID NO: 4023114 - RNA, 17 nt, Measles virus
ccaucaguuccucaaga

SEQ ID NO: 4023115 - RNA, 17 nt, Measles virus
ccaugcugaacucucaa

SEQ ID NO: 4023116 - RNA, 18 nt, Measles virus
cccaaaaaaaggccccca

SEQ ID NO: 4023117 - RNA, 22 nt, Measles virus
cccaaguauguugcaacccaag

SEQ ID NO: 4023118 - RNA, 14 nt, Measles virus
cccaccccacacac

SEQ ID NO: 4023119 - RNA, 17 nt, Measles virus
cccacuaacccuccuca

SEQ ID NO: 4023120 - RNA, 15 nt, Measles virus
cccagcacccagcca

SEQ ID NO: 4023121 - RNA, 19 nt, Measles virus
cccagcuuacgggacccca

SEQ ID NO: 4023122 - RNA, 18 nt, Measles virus
cccaggggccgacagcca

SEQ ID NO: 4023123 - RNA, 13 nt, Measles virus
cccaguagggcca

SEQ ID NO: 4023124 - RNA, 17 nt, Measles virus
cccaguagggccagcac

SEQ ID NO: 4023125 - RNA, 19 nt, Measles virus
ccccacuaacccuccucac

SEQ ID NO: 4023126 - RNA, 17 nt, Measles virus
ccccaggggccgacagc

SEQ ID NO: 4023127 - RNA, 23 nt, Measles virus
ccccaggggccgacagccagcau

SEQ ID NO: 4023128 - RNA, 14 nt, Measles virus
ccccaguagggcca

SEQ ID NO: 4023129 - RNA, 21 nt, Measles virus
ccccccaaaaaaaggccccca

SEQ ID NO: 4023130 - RNA, 19 nt, Measles virus
ccccucauaaugacagcca

SEQ ID NO: 4023131 - RNA, 14 nt, Measles virus
cccgaaccagcacc

SEQ ID NO: 4023132 - RNA, 20 nt, Measles virus
cccgauccggcgggcagcca

SEQ ID NO: 4023133 - RNA, 22 nt, Measles virus
cccgaugaguccucugcuccaa

SEQ ID NO: 4023134 - RNA, 23 nt, Measles virus
cccgaugaguccucugcuccaag

SEQ ID NO: 4023135 - RNA, 15 nt, Measles virus
cccggugcccacagg

SEQ ID NO: 4023136 - RNA, 17 nt, Measles virus
cccggugcccacaggua

SEQ ID NO: 4023137 - RNA, 20 nt, Measles virus
cccucaagaaaucuccaggc

SEQ ID NO: 4023138 - RNA, 15 nt, Measles virus
cccugggggaccccc

SEQ ID NO: 4023139 - RNA, 15 nt, Measles virus
ccgaaaaccagaggg

SEQ ID NO: 4023140 - RNA, 15 nt, Measles virus
ccgaccagacccagc

SEQ ID NO: 4023141 - RNA, 19 nt, Measles virus
ccgaccagacccagcaccc

SEQ ID NO: 4023142 - RNA, 13 nt, Measles virus
ccgacgcuguccg

SEQ ID NO: 4023143 - RNA, 12 nt, Measles virus
ccgagcacuggc

SEQ ID NO: 4023144 - RNA, 22 nt, Measles virus
ccgagcccaucggcucacuggc

SEQ ID NO: 4023145 - RNA, 16 nt, Measles virus
ccgaggaccagaacaa

SEQ ID NO: 4023146 - RNA, 20 nt, Measles virus
ccgaguguuugaaguagggg

SEQ ID NO: 4023147 - RNA, 13 nt, Measles virus
ccuaaagccugau

SEQ ID NO: 4023148 - RNA, 22 nt, Measles virus
ccucacgcuuacagccuggagg

SEQ ID NO: 4023149 - RNA, 19 nt, Measles virus
ccucauaaugacagccaga

SEQ ID NO: 4023150 - RNA, 11 nt, Measles virus
ccuccagaaga

SEQ ID NO: 4023151 - RNA, 17 nt, Measles virus
ccucgugggacccccga

SEQ ID NO: 4023152 - RNA, 21 nt, Measles virus
ccucugcuccaagaaugccuc

SEQ ID NO: 4023153 - RNA, 20 nt, Measles virus
ccugucauuauuuggcccca

SEQ ID NO: 4023154 - RNA, 16 nt, Measles virus
cgaaccgcacaagcga

SEQ ID NO: 4023155 - RNA, 23 nt, Measles virus
cgaaggucgcuccgaacacagac

SEQ ID NO: 4023156 - RNA, 22 nt, Measles virus
cgacagcaaguguggacaccag

SEQ ID NO: 4023157 - RNA, 14 nt, Measles virus
cgacagccagcauc

SEQ ID NO: 4023158 - RNA, 23 nt, Measles virus
cgaccacggcaaccgaaccagag

SEQ ID NO: 4023159 - RNA, 20 nt, Measles virus
cgaccagacccagcacccag

SEQ ID NO: 4023160 - RNA, 13 nt, Measles virus
cgaccccccucau

SEQ ID NO: 4023161 - RNA, 18 nt, Measles virus
cgacuccuuagacagauc

SEQ ID NO: 4023162 - RNA, 20 nt, Measles virus
cgaggacugccaugccccaa

SEQ ID NO: 4023163 - RNA, 22 nt, Measles virus
cgaugaaucugaaaacagcgau

SEQ ID NO: 4023164 - RNA, 17 nt, Measles virus
cgcaagaaccccacaac

SEQ ID NO: 4023165 - RNA, 16 nt, Measles virus
cgcgcaccccagcccc

SEQ ID NO: 4023166 - RNA, 19 nt, Measles virus
cggagauauccauccaggc

SEQ ID NO: 4023167 - RNA, 22 nt, Measles virus
cggcccccccggugcccacagg

SEQ ID NO: 4023168 - RNA, 16 nt, Measles virus
cggcuaucgugacagg

SEQ ID NO: 4023169 - RNA, 15 nt, Measles virus
cggucuccuccucuu

SEQ ID NO: 4023170 - RNA, 13 nt, Measles virus
cggugcccacagg

SEQ ID NO: 4023171 - RNA, 18 nt, Measles virus
cgguguaccugcacagaa

SEQ ID NO: 4023172 - RNA, 21 nt, Measles virus
cguugauaacuggaaaucauu

SEQ ID NO: 4023173 - RNA, 20 nt, Measles virus
cuaaguuccacaaugacaga

SEQ ID NO: 4023174 - RNA, 13 nt, Measles virus
cuacccuccauca

SEQ ID NO: 4023175 - RNA, 19 nt, Measles virus
cuagugugaaauagacauc

SEQ ID NO: 4023176 - RNA, 23 nt, Measles virus
cuaucacaauucccuaucagggg

SEQ ID NO: 4023177 - RNA, 21 nt, Measles virus
cucaacucuacuggaggccag

SEQ ID NO: 4023178 - RNA, 23 nt, Measles virus
cucaagaaaucuccaggcaucaa

SEQ ID NO: 4023179 - RNA, 16 nt, Measles virus
cucaagcuucagguga

SEQ ID NO: 4023180 - RNA, 15 nt, Measles virus
cucaaugaaaaacug

SEQ ID NO: 4023181 - RNA, 13 nt, Measles virus
cucagaaucuggu

SEQ ID NO: 4023182 - RNA, 17 nt, Measles virus
cuccaaacacccaccgg

SEQ ID NO: 4023183 - RNA, 15 nt, Measles virus
cuccaauccagaggc

SEQ ID NO: 4023184 - RNA, 17 nt, Measles virus
cuccaggcaucaagcac

SEQ ID NO: 4023185 - RNA, 17 nt, Measles virus
cuccucgugggaccccc

SEQ ID NO: 4023186 - RNA, 17 nt, Measles virus
cucgacagaacccagac

SEQ ID NO: 4023187 - RNA, 14 nt, Measles virus
cucguuccagccau

SEQ ID NO: 4023188 - RNA, 12 nt, Measles virus
cucuccccccgg

SEQ ID NO: 4023189 - RNA, 21 nt, Measles virus
cucuucacuguuccaaucaag

SEQ ID NO: 4023190 - RNA, 18 nt, Measles virus
cucuucgucaucaagcaa

SEQ ID NO: 4023191 - RNA, 13 nt, Measles virus
cugaagaacucau

SEQ ID NO: 4023192 - RNA, 14 nt, Measles virus
cugcagaaggaggg

SEQ ID NO: 4023193 - RNA, 19 nt, Measles virus
cugccauauucauggcagu

SEQ ID NO: 4023194 - RNA, 15 nt, Measles virus
cuggcugucucagga

SEQ ID NO: 4023195 - RNA, 23 nt, Measles virus
cuggucaggaucuccaauauguu

SEQ ID NO: 4023196 - RNA, 14 nt, Measles virus
cugucuuacagccu

SEQ ID NO: 4023197 - RNA, 15 nt, Measles virus
cuguuaacucuccaa

SEQ ID NO: 4023198 - RNA, 22 nt, Measles virus
cuuaggaguuauccggcccacu

SEQ ID NO: 4023199 - RNA, 15 nt, Measles virus
cuuauguuuugcugg

SEQ ID NO: 4023200 - RNA, 22 nt, Measles virus
cuuccaggguugaacaugcugu

SEQ ID NO: 4023201 - RNA, 22 nt, Measles virus
cuugaccaaaacggguuuucug

SEQ ID NO: 4023202 - RNA, 19 nt, Measles virus
cuugucuguuaaucugagu

SEQ ID NO: 4023203 - RNA, 15 nt, Measles virus
cuuuacugaaauaca

SEQ ID NO: 4023204 - RNA, 16 nt, Measles virus
gaaaauacgaaguuuc

SEQ ID NO: 4023205 - RNA, 16 nt, Measles virus
gaaaggucaugccaua

SEQ ID NO: 4023206 - RNA, 12 nt, Measles virus
gaaagucacagg

SEQ ID NO: 4023207 - RNA, 20 nt, Measles virus
gaaccaauuagagaugcacu

SEQ ID NO: 4023208 - RNA, 15 nt, Measles virus
gaaccgaucacauga

SEQ ID NO: 4023209 - RNA, 15 nt, Measles virus
gaagaagggggagac

SEQ ID NO: 4023210 - RNA, 16 nt, Measles virus
gaaugcuuuauguaca

SEQ ID NO: 4023211 - RNA, 21 nt, Measles virus
gacacaaggccaccaccagcc

SEQ ID NO: 4023212 - RNA, 18 nt, Measles virus
gacaccgggaaucccaga

SEQ ID NO: 4023213 - RNA, 19 nt, Measles virus
gacagcaaguguggacacc

SEQ ID NO: 4023214 - RNA, 11 nt, Measles virus
gacagccagaa

SEQ ID NO: 4023215 - RNA, 17 nt, Measles virus
gacaggaccgagccacc

SEQ ID NO: 4023216 - RNA, 15 nt, Measles virus
gacauacaucugaca

SEQ ID NO: 4023217 - RNA, 15 nt, Measles virus
gacaugcuuccagca

SEQ ID NO: 4023218 - RNA, 15 nt, Measles virus
gaccuuguugcuaua

SEQ ID NO: 4023219 - RNA, 17 nt, Measles virus
gacuccuuagacagauc

SEQ ID NO: 4023220 - RNA, 22 nt, Measles virus
gagcccaucggcucacuggccg

SEQ ID NO: 4023221 - RNA, 11 nt, Measles virus
gagcucagccg

SEQ ID NO: 4023222 - RNA, 20 nt, Measles virus
gaggcaaucagacaagcagg

SEQ ID NO: 4023223 - RNA, 20 nt, Measles virus
gaggggagguuaaugacaga

SEQ ID NO: 4023224 - RNA, 20 nt, Measles virus
gagugggcaccauugaagga

SEQ ID NO: 4023225 - RNA, 14 nt, Measles virus
gauaacaggauucc

SEQ ID NO: 4023226 - RNA, 18 nt, Measles virus
gauccauaagagccucag

SEQ ID NO: 4023227 - RNA, 21 nt, Measles virus
gaucccugggggacccccaaa

SEQ ID NO: 4023228 - RNA, 15 nt, Measles virus
gauggcagaagagca

SEQ ID NO: 4023229 - RNA, 17 nt, Measles virus
gauguaacuaacucgau

SEQ ID NO: 4023230 - RNA, 16 nt, Measles virus
gcaaccaccgcaucca

SEQ ID NO: 4023231 - RNA, 16 nt, Measles virus
gcacacccaccccaca

SEQ ID NO: 4023232 - RNA, 20 nt, Measles virus
gcaccaaucuagauguaacu

SEQ ID NO: 4023233 - RNA, 22 nt, Measles virus
gcacccaagagcgaucccuggg

SEQ ID NO: 4023234 - RNA, 21 nt, Measles virus
gcacuugcugcucuccaaagg

SEQ ID NO: 4023235 - RNA, 18 nt, Measles virus
gcagaucaacaggcaaaa

SEQ ID NO: 4023236 - RNA, 15 nt, Measles virus
gcagccaaaaugccu

SEQ ID NO: 4023237 - RNA, 21 nt, Measles virus
gcagccaucaguuccucaaga

SEQ ID NO: 4023238 - RNA, 17 nt, Measles virus
gcaggcuggugccccag

SEQ ID NO: 4023239 - RNA, 19 nt, Measles virus
gcaguucgggucucagcaa

SEQ ID NO: 4023240 - RNA, 13 nt, Measles virus
gcauccccacagc

SEQ ID NO: 4023241 - RNA, 21 nt, Measles virus
gcaucgcgaggaagcacaccc

SEQ ID NO: 4023242 - RNA, 15 nt, Measles virus
gcaugcugcagacac

SEQ ID NO: 4023243 - RNA, 11 nt, Measles virus
gccaaccccau

SEQ ID NO: 4023244 - RNA, 21 nt, Measles virus
gccacaacccgcgcaccccag

SEQ ID NO: 4023245 - RNA, 18 nt, Measles virus
gccaccaccagccauccc

SEQ ID NO: 4023246 - RNA, 16 nt, Measles virus
gccaccagcucccaga

SEQ ID NO: 4023247 - RNA, 15 nt, Measles virus
gccaucaccccgcaa

SEQ ID NO: 4023248 - RNA, 17 nt, Measles virus
gcccccaggggccgaca

SEQ ID NO: 4023249 - RNA, 19 nt, Measles virus
gcccccccggugcccacag

SEQ ID NO: 4023250 - RNA, 15 nt, Measles virus
gccuaaucugagcag

SEQ ID NO: 4023251 - RNA, 22 nt, Measles virus
gccuccggggguccaccaaguc

SEQ ID NO: 4023252 - RNA, 15 nt, Measles virus
gccucuuagccugga

SEQ ID NO: 4023253 - RNA, 18 nt, Measles virus
gccuucuacaaagacaac

SEQ ID NO: 4023254 - RNA, 11 nt, Measles virus
gcgaaccugau

SEQ ID NO: 4023255 - RNA, 21 nt, Measles virus
gcgaugacgacgcugaaacuu

SEQ ID NO: 4023256 - RNA, 16 nt, Measles virus
gcgauuggcccuggga

SEQ ID NO: 4023257 - RNA, 13 nt, Measles virus
gcgcuuggaggag

SEQ ID NO: 4023258 - RNA, 17 nt, Measles virus
gcggagauauccaucca

SEQ ID NO: 4023259 - RNA, 22 nt, Measles virus
gcguccuccucgugggaccccc

SEQ ID NO: 4023260 - RNA, 13 nt, Measles virus
gcguugccacagc

SEQ ID NO: 4023261 - RNA, 22 nt, Measles virus
gcguugccacagcugcucagau

SEQ ID NO: 4023262 - RNA, 12 nt, Measles virus
gcucucaagagu

SEQ ID NO: 4023263 - RNA, 22 nt, Measles virus
gcucucaaggccgagcccaucg

SEQ ID NO: 4023264 - RNA, 13 nt, Measles virus
gcugacaaucaag

SEQ ID NO: 4023265 - RNA, 17 nt, Measles virus
gcugacucuaucauggu

SEQ ID NO: 4023266 - RNA, 21 nt, Measles virus
gcuggggguuguugaggacag

SEQ ID NO: 4023267 - RNA, 19 nt, Measles virus
ggaagcacacccaccccac

SEQ ID NO: 4023268 - RNA, 12 nt, Measles virus
ggacaaggcacu

SEQ ID NO: 4023269 - RNA, 17 nt, Measles virus
ggagauauccauccagg

SEQ ID NO: 4023270 - RNA, 18 nt, Measles virus
ggauaccgagauucaagg

SEQ ID NO: 4023271 - RNA, 23 nt, Measles virus
ggcaccgcgcccccaccccccga

SEQ ID NO: 4023272 - RNA, 20 nt, Measles virus
ggcagaagagcaggcacgcc

SEQ ID NO: 4023273 - RNA, 16 nt, Measles virus
ggcaggcuggugcccc

SEQ ID NO: 4023274 - RNA, 19 nt, Measles virus
ggcaggcuggugccccagg

SEQ ID NO: 4023275 - RNA, 18 nt, Measles virus
ggcauccgacuccuuaga

SEQ ID NO: 4023276 - RNA, 19 nt, Measles virus
ggcaugggagucagcugca

SEQ ID NO: 4023277 - RNA, 23 nt, Measles virus
ggccacaacccgcgcaccccagc

SEQ ID NO: 4023278 - RNA, 17 nt, Measles virus
ggccaccaccagccauc

SEQ ID NO: 4023279 - RNA, 17 nt, Measles virus
ggcucaaauugcucaga

SEQ ID NO: 4023280 - RNA, 15 nt, Measles virus
ggcuccgaauugagg

SEQ ID NO: 4023281 - RNA, 15 nt, Measles virus
ggcuggugccccagg

SEQ ID NO: 4023282 - RNA, 12 nt, Measles virus
gggccagcacuu

SEQ ID NO: 4023283 - RNA, 15 nt, Measles virus
gggucucagcaaacc

SEQ ID NO: 4023284 - RNA, 14 nt, Measles virus
gggugcaagaucau

SEQ ID NO: 4023285 - RNA, 16 nt, Measles virus
ggguugaacaugcugu

SEQ ID NO: 4023286 - RNA, 14 nt, Measles virus
ggucaaugcagugg

SEQ ID NO: 4023287 - RNA, 23 nt, Measles virus
ggucaugccauauuuuguggaau

SEQ ID NO: 4023288 - RNA, 14 nt, Measles virus
gguccacacagccg

SEQ ID NO: 4023289 - RNA, 13 nt, Measles virus
gguguaucaaccc

SEQ ID NO: 4023290 - RNA, 21 nt, Measles virus
gguuacucuggaggagcagau

SEQ ID NO: 4023291 - RNA, 21 nt, Measles virus
gguuggacguagggacaaauc

SEQ ID NO: 4023292 - RNA, 20 nt, Measles virus
gguuuaucgagcacuagcau

SEQ ID NO: 4023293 - RNA, 21 nt, Measles virus
guauuacaccguucccagaag

SEQ ID NO: 4023294 - RNA, 24 nt, Measles virus
guauuacaccguucccagaagaau

SEQ ID NO: 4023295 - RNA, 13 nt, Measles virus
gucaauucucaaa

SEQ ID NO: 4023296 - RNA, 18 nt, Measles virus
gucacuaugacaucccag

SEQ ID NO: 4023297 - RNA, 18 nt, Measles virus
guccagaccacccugggc

SEQ ID NO: 4023298 - RNA, 12 nt, Measles virus
guccucugcucc

SEQ ID NO: 4023299 - RNA, 18 nt, Measles virus
guccucugcuccaagaau

SEQ ID NO: 4023300 - RNA, 23 nt, Measles virus
gucggcaugggacaucaaagggu

SEQ ID NO: 4023301 - RNA, 22 nt, Measles virus
gugauugccuccuaaguuccac

SEQ ID NO: 4023302 - RNA, 18 nt, Measles virus
gugucaucuauagucacu

SEQ ID NO: 4023303 - RNA, 12 nt, Measles virus
guuaauugaagc

SEQ ID NO: 4023304 - RNA, 13 nt, Measles virus
guucaagaagacc

SEQ ID NO: 4023305 - RNA, 13 nt, Measles virus
guuccucaagaau

SEQ ID NO: 4023306 - RNA, 14 nt, Measles virus
uaaagaaaacuuug

SEQ ID NO: 4023307 - RNA, 14 nt, Measles virus
uaaaucacaaaccc

SEQ ID NO: 4023308 - RNA, 17 nt, Measles virus
uaacaaaaagggagaac

SEQ ID NO: 4023309 - RNA, 16 nt, Measles virus
uaauccgcuccauuau

SEQ ID NO: 4023310 - RNA, 13 nt, Measles virus
uaaugacagagac

SEQ ID NO: 4023311 - RNA, 14 nt, Measles virus
uacaaaaccaacca

SEQ ID NO: 4023312 - RNA, 17 nt, Measles virus
uacaacaacaccccacu

SEQ ID NO: 4023313 - RNA, 22 nt, Measles virus
uaccaccuacagugauggcagg

SEQ ID NO: 4023314 - RNA, 20 nt, Measles virus
uacgauccucccaagggaac

SEQ ID NO: 4023315 - RNA, 22 nt, Measles virus
uagaagacaaagagucaacaag

SEQ ID NO: 4023316 - RNA, 16 nt, Measles virus
uagggugcaagaucau

SEQ ID NO: 4023317 - RNA, 16 nt, Measles virus
uaguagcuauccugga

SEQ ID NO: 4023318 - RNA, 15 nt, Measles virus
uauauuaaagaaaac

SEQ ID NO: 4023319 - RNA, 14 nt, Measles virus
uaucacaagggaac

SEQ ID NO: 4023320 - RNA, 20 nt, Measles virus
uauccaaauuguaaucagga

SEQ ID NO: 4023321 - RNA, 15 nt, Measles virus
uaucgcugacaauca

SEQ ID NO: 4023322 - RNA, 22 nt, Measles virus
uaucucgaauuuugaugaguca

SEQ ID NO: 4023323 - RNA, 17 nt, Measles virus
uauguuuugcuggcugu

SEQ ID NO: 4023324 - RNA, 15 nt, Measles virus
uauucccagcuuugu

SEQ ID NO: 4023325 - RNA, 17 nt, Measles virus
uauucccagcuuugucu

SEQ ID NO: 4023326 - RNA, 19 nt, Measles virus
uauuuaacauagaagacaa

SEQ ID NO: 4023327 - RNA, 14 nt, Measles virus
ucaaauuguagcca

SEQ ID NO: 4023328 - RNA, 20 nt, Measles virus
ucaaauuguagccaugcugg

SEQ ID NO: 4023329 - RNA, 22 nt, Measles virus
ucaagacugagaugaggucagu

SEQ ID NO: 4023330 - RNA, 10 nt, Measles virus
ucaaggaaac

SEQ ID NO: 4023331 - RNA, 16 nt, Measles virus
ucaaggacgugcugac

SEQ ID NO: 4023332 - RNA, 13 nt, Measles virus
ucaaggagaaaau

SEQ ID NO: 4023333 - RNA, 14 nt, Measles virus
ucaaggccgagccc

SEQ ID NO: 4023334 - RNA, 16 nt, Measles virus
ucaagguuagucccaa

SEQ ID NO: 4023335 - RNA, 16 nt, Measles virus
ucacagggaagauucu

SEQ ID NO: 4023336 - RNA, 15 nt, Measles virus
ucacgcuuacagccu

SEQ ID NO: 4023337 - RNA, 20 nt, Measles virus
ucacuaugacaucccaggga

SEQ ID NO: 4023338 - RNA, 14 nt, Measles virus
ucacucgggaagau

SEQ ID NO: 4023339 - RNA, 17 nt, Measles virus
ucacuguuccaaucaag

SEQ ID NO: 4023340 - RNA, 20 nt, Measles virus
ucagcaacugcaugguggcu

SEQ ID NO: 4023341 - RNA, 20 nt, Measles virus
ucagcauauccacccuggaa

SEQ ID NO: 4023342 - RNA, 13 nt, Measles virus
ucaggagucccca

SEQ ID NO: 4023343 - RNA, 20 nt, Measles virus
ucauaaugacagccagaagg

SEQ ID NO: 4023344 - RNA, 14 nt, Measles virus
ucaugccagagggg

SEQ ID NO: 4023345 - RNA, 17 nt, Measles virus
uccacacucuggcuguc

SEQ ID NO: 4023346 - RNA, 22 nt, Measles virus
uccagcaggcguguaaggguaa

SEQ ID NO: 4023347 - RNA, 16 nt, Measles virus
uccagggaaugacuaa

SEQ ID NO: 4023348 - RNA, 16 nt, Measles virus
uccaguguccaucaug

SEQ ID NO: 4023349 - RNA, 21 nt, Measles virus
uccauaagagccucagcacca

SEQ ID NO: 4023350 - RNA, 19 nt, Measles virus
ucccagacucggccaucac

SEQ ID NO: 4023351 - RNA, 16 nt, Measles virus
uccccacccccaaagg

SEQ ID NO: 4023352 - RNA, 22 nt, Measles virus
ucccucacgcuuacagccugga

SEQ ID NO: 4023353 - RNA, 20 nt, Measles virus
uccgauguccaagacaucaa

SEQ ID NO: 4023354 - RNA, 22 nt, Measles virus
uccggaacccuaauccugcccu

SEQ ID NO: 4023355 - RNA, 15 nt, Measles virus
uccgggcucucaagg

SEQ ID NO: 4023356 - RNA, 13 nt, Measles virus
ucgaucgcuccga

SEQ ID NO: 4023357 - RNA, 18 nt, Measles virus
ucgcagcccucugucaca

SEQ ID NO: 4023358 - RNA, 16 nt, Measles virus
ucgcucugauccucua

SEQ ID NO: 4023359 - RNA, 19 nt, Measles virus
ucggaaccaucagggccag

SEQ ID NO: 4023360 - RNA, 11 nt, Measles virus
ucguuccagcc

SEQ ID NO: 4023361 - RNA, 13 nt, Measles virus
ucuauucccagcu

SEQ ID NO: 4023362 - RNA, 21 nt, Measles virus
ucucaaagggaaacugcucag

SEQ ID NO: 4023363 - RNA, 21 nt, Measles virus
ucuccaagucccccggucucc

SEQ ID NO: 4023364 - RNA, 17 nt, Measles virus
ucuucacauuagaagca

SEQ ID NO: 4023365 - RNA, 18 nt, Measles virus
ugaaagaaaaggagauca

SEQ ID NO: 4023366 - RNA, 17 nt, Measles virus
ugaagugggccugagga

SEQ ID NO: 4023367 - RNA, 14 nt, Measles virus
ugacaaucaagcaa

SEQ ID NO: 4023368 - RNA, 15 nt, Measles virus
ugacaccacucuuca

SEQ ID NO: 4023369 - RNA, 14 nt, Measles virus
ugacaucccaggga

SEQ ID NO: 4023370 - RNA, 22 nt, Measles virus
ugacccucccccugcaugcugc

SEQ ID NO: 4023371 - RNA, 16 nt, Measles virus
ugaugucaaacucagu

SEQ ID NO: 4023372 - RNA, 18 nt, Measles virus
ugcauccgggcucucaag

SEQ ID NO: 4023373 - RNA, 23 nt, Measles virus
ugcccaaguauguugcaacccaa

SEQ ID NO: 4023374 - RNA, 15 nt, Measles virus
ugccucucagcaauu

SEQ ID NO: 4023375 - RNA, 16 nt, Measles virus
ugccucuuagccugga

SEQ ID NO: 4023376 - RNA, 14 nt, Measles virus
ugcuccaagaaugc

SEQ ID NO: 4023377 - RNA, 16 nt, Measles virus
ugcucuccaaagggaa

SEQ ID NO: 4023378 - RNA, 22 nt, Measles virus
uggacacccgaaucugguacca

SEQ ID NO: 4023379 - RNA, 14 nt, Measles virus
uggaggccagggca

SEQ ID NO: 4023380 - RNA, 22 nt, Measles virus
uggcugucucaggaguccccaa

SEQ ID NO: 4023381 - RNA, 14 nt, Measles virus
uguaaucaacacau

SEQ ID NO: 4023382 - RNA, 22 nt, Measles virus
ugucaggaaauacaugaaucag

SEQ ID NO: 4023383 - RNA, 22 nt, Measles virus
ugucucaaagggaaacugcuca

SEQ ID NO: 4023384 - RNA, 18 nt, Measles virus
ugugcagccaaaaugccu

SEQ ID NO: 4023385 - RNA, 17 nt, Measles virus
uguggacaccaggcggc

SEQ ID NO: 4023386 - RNA, 14 nt, Measles virus
uuaaagaaaacuuu

SEQ ID NO: 4023387 - RNA, 20 nt, Measles virus
uuaacucuccaaacacccac

SEQ ID NO: 4023388 - RNA, 18 nt, Measles virus
uuacauccugauugcagu

SEQ ID NO: 4023389 - RNA, 13 nt, Measles virus
uugaacaugcugu

SEQ ID NO: 4023390 - RNA, 16 nt, Measles virus
uuuaaucggccagaag

SEQ ID NO: 4023391 - RNA, 23 nt, Measles virus
uuuacagucaagacugagaugag

SEQ ID NO: 4023392 - RNA, 18 nt, Measles virus
gcagaugucgaacucaau

SEQ ID NO: 4023393 - RNA, 22 nt, Measles virus
gcauggucagaaauaucagaca

SEQ ID NO: 4023394 - RNA, 14 nt, Measles virus
gccaaaaugccuug

SEQ ID NO: 4023395 - RNA, 20 nt, Measles virus
gccaaccaaccauccacucc

SEQ ID NO: 4023396 - RNA, 16 nt, Measles virus
gccaaggaugagcacg

SEQ ID NO: 4023397 - RNA, 17 nt, Measles virus
gccacagcugcucagau

SEQ ID NO: 4023398 - RNA, 14 nt, Measles virus
gccaccaccagcca

SEQ ID NO: 4023399 - RNA, 21 nt, Measles virus
gccacucaacccgaaccagca

SEQ ID NO: 4023400 - RNA, 16 nt, Measles virus
gccagagagaaucaaa

SEQ ID NO: 4023401 - RNA, 12 nt, Measles virus
gccagccagcag

SEQ ID NO: 4023402 - RNA, 11 nt, Measles virus
gccauggcagc

SEQ ID NO: 4023403 - RNA, 12 nt, Measles virus
gccauggcagca

SEQ ID NO: 4023404 - RNA, 23 nt, Measles virus
gcccacagguaggcacaccaacc

SEQ ID NO: 4023405 - RNA, 18 nt, Measles virus
gcccacuacaaucagagg

SEQ ID NO: 4023406 - RNA, 12 nt, Measles virus
gcccccaccccc

SEQ ID NO: 4023407 - RNA, 17 nt, Measles virus
gcccccaccccccgaaa

SEQ ID NO: 4023408 - RNA, 22 nt, Measles virus
gccccgacacaaggccaccacc

SEQ ID NO: 4023409 - RNA, 17 nt, Measles virus
gccgacagccagcaucg

SEQ ID NO: 4023410 - RNA, 14 nt, Measles virus
gccggcccccccgg

SEQ ID NO: 4023411 - RNA, 13 nt, Measles virus
gcgagaggccagc

SEQ ID NO: 4023412 - RNA, 15 nt, Measles virus
gcgagaggccagcca

SEQ ID NO: 4023413 - RNA, 21 nt, Measles virus
gcgagcauucgggucccugcc

SEQ ID NO: 4023414 - RNA, 13 nt, Measles virus
gcgaucccugggg

SEQ ID NO: 4023415 - RNA, 17 nt, Measles virus
gcgguguaccugcacag

SEQ ID NO: 4023416 - RNA, 17 nt, Measles virus
gcucaaauugcucagau

SEQ ID NO: 4023417 - RNA, 20 nt, Measles virus
gcugaaaaucuaaucucaaa

SEQ ID NO: 4023418 - RNA, 16 nt, Measles virus
gcugacaaucaagcaa

SEQ ID NO: 4023419 - RNA, 18 nt, Measles virus
gcuggugccccaggucag

SEQ ID NO: 4023420 - RNA, 17 nt, Measles virus
gcuucaaguaggagaca

SEQ ID NO: 4023421 - RNA, 18 nt, Measles virus
ggaaacuacuaaucaggc

SEQ ID NO: 4023422 - RNA, 15 nt, Measles virus
ggaacccccagcaac

SEQ ID NO: 4023423 - RNA, 19 nt, Measles virus
ggaacccuaauccugcccu

SEQ ID NO: 4023424 - RNA, 17 nt, Measles virus
ggaaccuaauagccaau

SEQ ID NO: 4023425 - RNA, 14 nt, Measles virus
ggaagagucagaua

SEQ ID NO: 4023426 - RNA, 16 nt, Measles virus
ggaagccauggcagca

SEQ ID NO: 4023427 - RNA, 18 nt, Measles virus
ggacagcgauccccuagg

SEQ ID NO: 4023428 - RNA, 13 nt, Measles virus
ggaccgagccacc

SEQ ID NO: 4023429 - RNA, 15 nt, Measles virus
ggagccgauggcaga

SEQ ID NO: 4023430 - RNA, 20 nt, Measles virus
ggaguacgacuucagagauc

SEQ ID NO: 4023431 - RNA, 14 nt, Measles virus
ggcacgccauguca

SEQ ID NO: 4023432 - RNA, 16 nt, Measles virus
ggcagaagagcaggca

SEQ ID NO: 4023433 - RNA, 15 nt, Measles virus
ggcauugcacuucac

SEQ ID NO: 4023434 - RNA, 13 nt, Measles virus
ggccaccaccagc

SEQ ID NO: 4023435 - RNA, 13 nt, Measles virus
ggccagccagcag

SEQ ID NO: 4023436 - RNA, 18 nt, Measles virus
ggccgacagccagcaucg

SEQ ID NO: 4023437 - RNA, 15 nt, Measles virus
ggccgucgaggaagc

SEQ ID NO: 4023438 - RNA, 18 nt, Measles virus
ggccuaggcuccgaauug

SEQ ID NO: 4023439 - RNA, 19 nt, Measles virus
ggccugaggacaccucaga

SEQ ID NO: 4023440 - RNA, 21 nt, Measles virus
ggcguugccacagcugcucag

SEQ ID NO: 4023441 - RNA, 21 nt, Measles virus
gggaaaggaacccccagcaac

SEQ ID NO: 4023442 - RNA, 16 nt, Measles virus
gggaccaaaagaucaa

SEQ ID NO: 4023443 - RNA, 21 nt, Measles virus
gggagauccacgagcuccuga

SEQ ID NO: 4023444 - RNA, 17 nt, Measles virus
gggaggacaucaaggag

SEQ ID NO: 4023445 - RNA, 18 nt, Measles virus
gggaguacgacuucagag

SEQ ID NO: 4023446 - RNA, 17 nt, Measles virus
gggcucaaauugcucag

SEQ ID NO: 4023447 - RNA, 17 nt, Measles virus
gguucagggcuucugau

SEQ ID NO: 4023448 - RNA, 20 nt, Measles virus
cguacagcagggcucaauga

SEQ ID NO: 4023449 - RNA, 13 nt, Measles virus
cuaacccuccuca

SEQ ID NO: 4023450 - RNA, 18 nt, Measles virus
cuaaguuccacaaugaca

SEQ ID NO: 4023451 - RNA, 17 nt, Measles virus
cuaaucugagcaguaaa

SEQ ID NO: 4023452 - RNA, 16 nt, Measles virus
cuacaccgcagagauc

SEQ ID NO: 4023453 - RNA, 21 nt, Measles virus
cuagauuacauuuucauaacu

SEQ ID NO: 4023454 - RNA, 16 nt, Measles virus
cuagguaguuaggcau

SEQ ID NO: 4023455 - RNA, 19 nt, Measles virus
cuaucaggggucagggaaa

SEQ ID NO: 4023456 - RNA, 16 nt, Measles virus
cuauucccagcuuugu

SEQ ID NO: 4023457 - RNA, 21 nt, Measles virus
cucaaagggaaacugcucagg

SEQ ID NO: 4023458 - RNA, 22 nt, Measles virus
cucaaagggaaacugcucaggg

SEQ ID NO: 4023459 - RNA, 17 nt, Measles virus
cucaacccgaaccagca

SEQ ID NO: 4023460 - RNA, 22 nt, Measles virus
cucaaggugaacgucucugcca

SEQ ID NO: 4023461 - RNA, 18 nt, Measles virus
cucaaucccgaccugaaa

SEQ ID NO: 4023462 - RNA, 16 nt, Measles virus
cucacgcuuacagccu

SEQ ID NO: 4023463 - RNA, 18 nt, Measles virus
cuccaucgugcagccauc

SEQ ID NO: 4023464 - RNA, 14 nt, Measles virus
cuccgaacacagac

SEQ ID NO: 4023465 - RNA, 16 nt, Measles virus
cuccggcuucccucug

SEQ ID NO: 4023466 - RNA, 18 nt, Measles virus
cuccggcuucccucuggc

SEQ ID NO: 4023467 - RNA, 17 nt, Measles virus
cuccuaaaaaagggaaa

SEQ ID NO: 4023468 - RNA, 13 nt, Measles virus
cucucaucucaca

SEQ ID NO: 4023469 - RNA, 18 nt, Measles virus
cugaaaaucuaaucucaa

SEQ ID NO: 4023470 - RNA, 21 nt, Measles virus
cugaaaaugucaggaaauaca

SEQ ID NO: 4023471 - RNA, 23 nt, Measles virus
cugaaagaaaaggagaucaagga

SEQ ID NO: 4023472 - RNA, 14 nt, Measles virus
cugagucugacagu

SEQ ID NO: 4023473 - RNA, 14 nt, Measles virus
cugcaacugaggga

SEQ ID NO: 4023474 - RNA, 18 nt, Measles virus
cugcacagucacucggga

SEQ ID NO: 4023475 - RNA, 19 nt, Measles virus
cugcacagucacucgggaa

SEQ ID NO: 4023476 - RNA, 12 nt, Measles virus
cugcaugcugca

SEQ ID NO: 4023477 - RNA, 19 nt, Measles virus
cugcccuagguaguuaggc

SEQ ID NO: 4023478 - RNA, 18 nt, Measles virus
cugcucagggcccacuac

SEQ ID NO: 4023479 - RNA, 18 nt, Measles virus
cuggagccgauggcagaa

SEQ ID NO: 4023480 - RNA, 12 nt, Measles virus
cuggaggccagg

SEQ ID NO: 4023481 - RNA, 15 nt, Measles virus
cuggaggccagggca

SEQ ID NO: 4023482 - RNA, 19 nt, Measles virus
cuggccgaaguucucaaga

SEQ ID NO: 4023483 - RNA, 12 nt, Measles virus
cugggggacccc

SEQ ID NO: 4023484 - RNA, 15 nt, Measles virus
cuuaccugccaaccc

SEQ ID NO: 4023485 - RNA, 20 nt, Measles virus
gaaacugcagaaggagggga

SEQ ID NO: 4023486 - RNA, 15 nt, Measles virus
gaaacugcucagggc

SEQ ID NO: 4023487 - RNA, 17 nt, Measles virus
gaaauucaucucugaca

SEQ ID NO: 4023488 - RNA, 15 nt, Measles virus
gaacagccccgacac

SEQ ID NO: 4023489 - RNA, 11 nt, Measles virus
gaaccagcacc

SEQ ID NO: 4023490 - RNA, 20 nt, Measles virus
gaacccuaauccugcccuag

SEQ ID NO: 4023491 - RNA, 15 nt, Measles virus
gaaccgggucacgga

SEQ ID NO: 4023492 - RNA, 19 nt, Measles virus
gaagacuccacggaccaag

SEQ ID NO: 4023493 - RNA, 22 nt, Measles virus
gaagcagaucaacaggcaaaau

SEQ ID NO: 4023494 - RNA, 17 nt, Measles virus
gacaacacggacagaug

SEQ ID NO: 4023495 - RNA, 21 nt, Measles virus
gacaccacucuucaagaucau

SEQ ID NO: 4023496 - RNA, 21 nt, Measles virus
gacaccucagagauucacuga

SEQ ID NO: 4023497 - RNA, 18 nt, Measles virus
gacagauccucucccccc

SEQ ID NO: 4023498 - RNA, 19 nt, Measles virus
gacagguggugcaacccaa

SEQ ID NO: 4023499 - RNA, 17 nt, Measles virus
gaccaagcgagaggcca

SEQ ID NO: 4023500 - RNA, 20 nt, Measles virus
gaccacccugggccaccagc

SEQ ID NO: 4023501 - RNA, 15 nt, Measles virus
gacccagcacccagc

SEQ ID NO: 4023502 - RNA, 19 nt, Measles virus
gacucggccaucaccccgc

SEQ ID NO: 4023503 - RNA, 20 nt, Measles virus
gacugccaugccccaacaua

SEQ ID NO: 4023504 - RNA, 20 nt, Measles virus
gagacaugcuuccagcaggc

SEQ ID NO: 4023505 - RNA, 17 nt, Measles virus
gagacgaugaaucugaa

SEQ ID NO: 4023506 - RNA, 10 nt, Measles virus
gagaucccag

SEQ ID NO: 4023507 - RNA, 19 nt, Measles virus
gagucagauacauguggaa

SEQ ID NO: 4023508 - RNA, 20 nt, Measles virus
gaguugucacaacugagcau

SEQ ID NO: 4023509 - RNA, 13 nt, Measles virus
gauaacuggaaau

SEQ ID NO: 4023510 - RNA, 17 nt, Measles virus
gaucaauacugugcaga

SEQ ID NO: 4023511 - RNA, 21 nt, Measles virus
gaucacacacgguucagggau

SEQ ID NO: 4023512 - RNA, 18 nt, Measles virus
gaucccugggggaccccc

SEQ ID NO: 4023513 - RNA, 22 nt, Measles virus
gaucugacaauguaccuaaagg

SEQ ID NO: 4023514 - RNA, 13 nt, Measles virus
gauggccaaggau

SEQ ID NO: 4023515 - RNA, 22 nt, Measles virus
gauuaugaucaauacugugcag

SEQ ID NO: 4023516 - RNA, 23 nt, Measles virus
gcaaaccaugccucucagcaauu

SEQ ID NO: 4023517 - RNA, 18 nt, Measles virus
gcaaccgaaccagagucc

SEQ ID NO: 4023518 - RNA, 17 nt, Measles virus
gcaacuggaaggccccu

SEQ ID NO: 4023519 - RNA, 17 nt, Measles virus
gcacuccacacucuggc

SEQ ID NO: 4023520 - RNA, 21 nt, Measles virus
gcagcccucugucacagggaa

SEQ ID NO: 4023521 - RNA, 22 nt, Measles virus
gcaggcaguucgggucucagca

SEQ ID NO: 4023522 - RNA, 18 nt, Measles virus
gcaguaacggcugcugaa

SEQ ID NO: 4023523 - RNA, 18 nt, Measles virus
gcauaguuuacauccuga

SEQ ID NO: 4023524 - RNA, 17 nt, Measles virus
gcauccccacagcuccc

SEQ ID NO: 4023525 - RNA, 22 nt, Measles virus
gcaucuuagagagcagaggaau

SEQ ID NO: 4023526 - RNA, 17 nt, Measles virus
gcauuggugaacucaac

SEQ ID NO: 4023527 - RNA, 14 nt, Measles virus
gccaaccccaugcc

SEQ ID NO: 4023528 - RNA, 18 nt, Measles virus
gccagcacuuccgagaca

SEQ ID NO: 4023529 - RNA, 12 nt, Measles virus
gccaggugcacc

SEQ ID NO: 4023530 - RNA, 16 nt, Measles virus
gccaucaguuccucaa

SEQ ID NO: 4023531 - RNA, 18 nt, Measles virus
gccauggcagcaugguca

SEQ ID NO: 4023532 - RNA, 18 nt, Measles virus
gcccagcaauacccgaaa

SEQ ID NO: 4023533 - RNA, 12 nt, Measles virus
gccccccccaaa

SEQ ID NO: 4023534 - RNA, 18 nt, Measles virus
gcccccccggugcccaca

SEQ ID NO: 4023535 - RNA, 18 nt, Measles virus
gccccgacacaaggccac

SEQ ID NO: 4023536 - RNA, 20 nt, Measles virus
gcccuagguaguuaggcauu

SEQ ID NO: 4023537 - RNA, 22 nt, Measles virus
gccgaaguucucaagaagcccg

SEQ ID NO: 4023538 - RNA, 12 nt, Measles virus
gccgacagccag

SEQ ID NO: 4023539 - RNA, 12 nt, Measles virus
gccgauggcaga

SEQ ID NO: 4023540 - RNA, 18 nt, Measles virus
gccgucgaggaagccaug

SEQ ID NO: 4023541 - RNA, 23 nt, Measles virus
gccgucgaggaagccauggcagc

SEQ ID NO: 4023542 - RNA, 22 nt, Measles virus
gccgucggguuuguuccugaca

SEQ ID NO: 4023543 - RNA, 22 nt, Measles virus
gccuucuacaaagacaacccac

SEQ ID NO: 4023544 - RNA, 13 nt, Measles virus
gccuuggccaaaa

SEQ ID NO: 4023545 - RNA, 19 nt, Measles virus
gcgaauggagacaugcuuc

SEQ ID NO: 4023546 - RNA, 17 nt, Measles virus
gcgauccuggguccccc

SEQ ID NO: 4023547 - RNA, 19 nt, Measles virus
gcuccgaacacagaccacc

SEQ ID NO: 4023548 - RNA, 23 nt, Measles virus
gcuccgaacacagaccaccaacc

SEQ ID NO: 4023549 - RNA, 14 nt, Measles virus
gcugaugaagauaa

SEQ ID NO: 4023550 - RNA, 18 nt, Measles virus
gcugcugaagaacucaug

SEQ ID NO: 4023551 - RNA, 19 nt, Measles virus
gcuguucaggguguccaag

SEQ ID NO: 4023552 - RNA, 16 nt, Measles virus
gcuuacagccuggagg

SEQ ID NO: 4023553 - RNA, 23 nt, Measles virus
gcuuuaccucucaucucacagag

SEQ ID NO: 4023554 - RNA, 16 nt, Measles virus
gcuuuauguacauguu

SEQ ID NO: 4023555 - RNA, 12 nt, Measles virus
gcuuugucuggu

SEQ ID NO: 4023556 - RNA, 18 nt, Measles virus
ggaauccccucaagaaau

SEQ ID NO: 4023557 - RNA, 22 nt, Measles virus
ggacaaugggauggccaaggau

SEQ ID NO: 4023558 - RNA, 14 nt, Measles virus
ggacagcugcugaa

SEQ ID NO: 4023559 - RNA, 15 nt, Measles virus
ggacuugggaaggau

SEQ ID NO: 4023560 - RNA, 21 nt, Measles virus
ggagauccacgagcuccugaa

SEQ ID NO: 4023561 - RNA, 12 nt, Measles virus
ggagcaaaguga

SEQ ID NO: 4023562 - RNA, 14 nt, Measles virus
ggagccgauggcag

SEQ ID NO: 4023563 - RNA, 20 nt, Measles virus
cagaccacccugggccacca

SEQ ID NO: 4023564 - RNA, 14 nt, Measles virus
cagagauucacuga

SEQ ID NO: 4023565 - RNA, 16 nt, Measles virus
cagagggagcccccaa

SEQ ID NO: 4023566 - RNA, 17 nt, Measles virus
cagaguccagaccaccc

SEQ ID NO: 4023567 - RNA, 19 nt, Measles virus
cagauacuauacagaaauc

SEQ ID NO: 4023568 - RNA, 21 nt, Measles virus
cagauagggcugccagugaac

SEQ ID NO: 4023569 - RNA, 19 nt, Measles virus
cagcaacuggaaggccccu

SEQ ID NO: 4023570 - RNA, 16 nt, Measles virus
cagcacccagccaccg

SEQ ID NO: 4023571 - RNA, 20 nt, Measles virus
cagccccgacacaaggccac

SEQ ID NO: 4023572 - RNA, 21 nt, Measles virus
cagccccgacacaaggccacc

SEQ ID NO: 4023573 - RNA, 19 nt, Measles virus
cagcccucugucacaggga

SEQ ID NO: 4023574 - RNA, 16 nt, Measles virus
cagccgacaacuccag

SEQ ID NO: 4023575 - RNA, 17 nt, Measles virus
cagccgccagccaacca

SEQ ID NO: 4023576 - RNA, 16 nt, Measles virus
cagccuuggccaaaau

SEQ ID NO: 4023577 - RNA, 15 nt, Measles virus
caggaccgagccacc

SEQ ID NO: 4023578 - RNA, 20 nt, Measles virus
caggcaguucgggucucagc

SEQ ID NO: 4023579 - RNA, 20 nt, Measles virus
caggcauacccacuagugug

SEQ ID NO: 4023580 - RNA, 19 nt, Measles virus
cagggccaggugcaccugc

SEQ ID NO: 4023581 - RNA, 23 nt, Measles virus
cagggcuucugauguugaaacug

SEQ ID NO: 4023582 - RNA, 16 nt, Measles virus
caggggucagggaaag

SEQ ID NO: 4023583 - RNA, 19 nt, Measles virus
caguaacggcugcugaaaa

SEQ ID NO: 4023584 - RNA, 20 nt, Measles virus
caguaaugauuucagcaacu

SEQ ID NO: 4023585 - RNA, 20 nt, Measles virus
caguaucccacagccucucc

SEQ ID NO: 4023586 - RNA, 13 nt, Measles virus
caguggaggugau

SEQ ID NO: 4023587 - RNA, 15 nt, Measles virus
cauaaaauuaaugcc

SEQ ID NO: 4023588 - RNA, 15 nt, Measles virus
cauaaugacagccag

SEQ ID NO: 4023589 - RNA, 18 nt, Measles virus
cauaaugacagccagaag

SEQ ID NO: 4023590 - RNA, 19 nt, Measles virus
cauaaugacagccagaagg

SEQ ID NO: 4023591 - RNA, 15 nt, Measles virus
cauacaucugacagg

SEQ ID NO: 4023592 - RNA, 13 nt, Measles virus
caucaggucaagg

SEQ ID NO: 4023593 - RNA, 14 nt, Measles virus
cauccagcaucaag

SEQ ID NO: 4023594 - RNA, 13 nt, Measles virus
cauccgcggucag

SEQ ID NO: 4023595 - RNA, 15 nt, Measles virus
caucucacagaggug

SEQ ID NO: 4023596 - RNA, 11 nt, Measles virus
caugcuuccag

SEQ ID NO: 4023597 - RNA, 13 nt, Measles virus
cauguggaaacug

SEQ ID NO: 4023598 - RNA, 13 nt, Measles virus
cauuauuugcaau

SEQ ID NO: 4023599 - RNA, 18 nt, Measles virus
cauuguuauaaaaaacuu

SEQ ID NO: 4023600 - RNA, 19 nt, Measles virus
ccaaaauacacgaggauaa

SEQ ID NO: 4023601 - RNA, 16 nt, Measles virus
ccaaaggagacaccgg

SEQ ID NO: 4023602 - RNA, 22 nt, Measles virus
ccaaccgacaugcgauccuggg

SEQ ID NO: 4023603 - RNA, 15 nt, Measles virus
ccaagcgagaggcca

SEQ ID NO: 4023604 - RNA, 17 nt, Measles virus
ccaagcgagaggccagc

SEQ ID NO: 4023605 - RNA, 20 nt, Measles virus
ccaagcgagaggccagccag

SEQ ID NO: 4023606 - RNA, 22 nt, Measles virus
ccaagcgagaggccagccagca

SEQ ID NO: 4023607 - RNA, 23 nt, Measles virus
ccaagcgagaggccagccagcag

SEQ ID NO: 4023608 - RNA, 22 nt, Measles virus
ccaagucccccggucuccuccu

SEQ ID NO: 4023609 - RNA, 22 nt, Measles virus
ccaaucaguuccuagcugucuc

SEQ ID NO: 4023610 - RNA, 24 nt, Measles virus
ccaaucaguuccuagcugucucaa

SEQ ID NO: 4023611 - RNA, 15 nt, Measles virus
ccaauccagaggcaa

SEQ ID NO: 4023612 - RNA, 15 nt, Measles virus
ccaaugccugaggga

SEQ ID NO: 4023613 - RNA, 15 nt, Measles virus
ccacagcucccggga

SEQ ID NO: 4023614 - RNA, 15 nt, Measles virus
ccacagcugcucaga

SEQ ID NO: 4023615 - RNA, 12 nt, Measles virus
ccacccuggaag

SEQ ID NO: 4023616 - RNA, 14 nt, Measles virus
ccacccuggaagga

SEQ ID NO: 4023617 - RNA, 15 nt, Measles virus
ccacccugggccacc

SEQ ID NO: 4023618 - RNA, 18 nt, Measles virus
ccacccugggccaccagc

SEQ ID NO: 4023619 - RNA, 14 nt, Measles virus
ccaccggcuagagg

SEQ ID NO: 4023620 - RNA, 23 nt, Measles virus
ccacucaacccgaaccagcaccc

SEQ ID NO: 4023621 - RNA, 20 nt, Measles virus
ccacugauggauaucaauga

SEQ ID NO: 4023622 - RNA, 16 nt, Measles virus
ccagaaggcccggaca

SEQ ID NO: 4023623 - RNA, 14 nt, Measles virus
ccagagagaaucaa

SEQ ID NO: 4023624 - RNA, 15 nt, Measles virus
ccagcacccaagagc

SEQ ID NO: 4023625 - RNA, 14 nt, Measles virus
ccagcacccagcca

SEQ ID NO: 4023626 - RNA, 13 nt, Measles virus
ccagccagcagcc

SEQ ID NO: 4023627 - RNA, 16 nt, Measles virus
ccagcuuacgggaccc

SEQ ID NO: 4023628 - RNA, 23 nt, Measles virus
ccaggcaguuuugcagccaucag

SEQ ID NO: 4023629 - RNA, 22 nt, Measles virus
ccauccaagucgggagcaggag

SEQ ID NO: 4023630 - RNA, 22 nt, Measles virus
ccauuccuggacuugggaagga

SEQ ID NO: 4023631 - RNA, 16 nt, Measles virus
cccacagccucuccaa

SEQ ID NO: 4023632 - RNA, 17 nt, Measles virus
cccacuacaaucagagg

SEQ ID NO: 4023633 - RNA, 20 nt, Measles virus
cccacucucauauuccauau

SEQ ID NO: 4023634 - RNA, 21 nt, Measles virus
cccagaccccggcccgcggca

SEQ ID NO: 4023635 - RNA, 17 nt, Measles virus
cccagacucggccauca

SEQ ID NO: 4023636 - RNA, 15 nt, Measles virus
cccagcaauacccga

SEQ ID NO: 4023637 - RNA, 18 nt, Measles virus
cccagcacccagccaccg

SEQ ID NO: 4023638 - RNA, 15 nt, Measles virus
cccagccaccgacaa

SEQ ID NO: 4023639 - RNA, 12 nt, Measles virus
cccagcuuuguc

SEQ ID NO: 4023640 - RNA, 19 nt, Measles virus
ccccaaaaaaaggccccca

SEQ ID NO: 4023641 - RNA, 13 nt, Measles virus
ccccacagcuccc

SEQ ID NO: 4023642 - RNA, 20 nt, Measles virus
ccccagcuuacgggacccca

SEQ ID NO: 4023643 - RNA, 21 nt, Measles virus
ccccaggggccgacagccagc

SEQ ID NO: 4023644 - RNA, 13 nt, Measles virus
cccccucccccaa

SEQ ID NO: 4023645 - RNA, 16 nt, Measles virus
ccccuagggccuccaa

SEQ ID NO: 4023646 - RNA, 19 nt, Measles virus
cccgaaaacgaccccccuc

SEQ ID NO: 4023647 - RNA, 20 nt, Measles virus
cccgaccagacccagcaccc

SEQ ID NO: 4023648 - RNA, 11 nt, Measles virus
cccgccagaga

SEQ ID NO: 4023649 - RNA, 13 nt, Measles virus
cccgcgcacccca

SEQ ID NO: 4023650 - RNA, 20 nt, Measles virus
cccuaggcguugccacagcu

SEQ ID NO: 4023651 - RNA, 12 nt, Measles virus
ccgaccagaccc

SEQ ID NO: 4023652 - RNA, 19 nt, Measles virus
ccgaggaacuccucaaaga

SEQ ID NO: 4023653 - RNA, 15 nt, Measles virus
ccgcuggacaccccg

SEQ ID NO: 4023654 - RNA, 22 nt, Measles virus
ccggcccccccggugcccacag

SEQ ID NO: 4023655 - RNA, 19 nt, Measles virus
ccgggaaucccagaaucaa

SEQ ID NO: 4023656 - RNA, 16 nt, Measles virus
ccucaagaaaucucca

SEQ ID NO: 4023657 - RNA, 23 nt, Measles virus
ccucccccaacgcaagaacccca

SEQ ID NO: 4023658 - RNA, 15 nt, Measles virus
ccucucaggaggaga

SEQ ID NO: 4023659 - RNA, 13 nt, Measles virus
ccucugucacagg

SEQ ID NO: 4023660 - RNA, 14 nt, Measles virus
ccugaggacaccuc

SEQ ID NO: 4023661 - RNA, 19 nt, Measles virus
ccugaggacaccucagaga

SEQ ID NO: 4023662 - RNA, 13 nt, Measles virus
ccugccaacccca

SEQ ID NO: 4023663 - RNA, 20 nt, Measles virus
ccugggccaccagcucccag

SEQ ID NO: 4023664 - RNA, 23 nt, Measles virus
ccuuagacagauccucucccccc

SEQ ID NO: 4023665 - RNA, 21 nt, Measles virus
cgaacucaaucccgaccugaa

SEQ ID NO: 4023666 - RNA, 22 nt, Measles virus
cgacuggagccgauggcagaag

SEQ ID NO: 4023667 - RNA, 18 nt, Measles virus
cgagcaucaggucaagga

SEQ ID NO: 4023668 - RNA, 19 nt, Measles virus
cgaggaagccauggcagca

SEQ ID NO: 4023669 - RNA, 21 nt, Measles virus
cgaggaagccauggcagcaug

SEQ ID NO: 4023670 - RNA, 14 nt, Measles virus
cgaucgagcaucag

SEQ ID NO: 4023671 - RNA, 14 nt, Measles virus
gggaaacugcucag

SEQ ID NO: 4023672 - RNA, 23 nt, Measles virus
gggaagaucaucgacaaugcaga

SEQ ID NO: 4023673 - RNA, 15 nt, Measles virus
gggaaucccagaauc

SEQ ID NO: 4023674 - RNA, 16 nt, Measles virus
gggagaaguugaguca

SEQ ID NO: 4023675 - RNA, 17 nt, Measles virus
gggcaccauugaaggau

SEQ ID NO: 4023676 - RNA, 20 nt, Measles virus
ggguuacaguguuaucaugu

SEQ ID NO: 4023677 - RNA, 21 nt, Measles virus
ggguuguugaggacagcgauc

SEQ ID NO: 4023678 - RNA, 19 nt, Measles virus
ggucaggaucuccaauaug

SEQ ID NO: 4023679 - RNA, 14 nt, Measles virus
ggucagggaucugg

SEQ ID NO: 4023680 - RNA, 15 nt, Measles virus
ggugaacucaacucu

SEQ ID NO: 4023681 - RNA, 15 nt, Measles virus
ggugccccaggucag

SEQ ID NO: 4023682 - RNA, 16 nt, Measles virus
gguuacucuggaggag

SEQ ID NO: 4023683 - RNA, 22 nt, Measles virus
guacagcagggcucaaugaaaa

SEQ ID NO: 4023684 - RNA, 22 nt, Measles virus
guaguuaggcauuauuugcaau

SEQ ID NO: 4023685 - RNA, 14 nt, Measles virus
gugaugucauagag

SEQ ID NO: 4023686 - RNA, 11 nt, Measles virus
gugcccacagg

SEQ ID NO: 4023687 - RNA, 21 nt, Measles virus
gugggacccccgaggaccaac

SEQ ID NO: 4023688 - RNA, 12 nt, Measles virus
gugugaaauaga

SEQ ID NO: 4023689 - RNA, 22 nt, Measles virus
guucaaccugucuuacagccug

SEQ ID NO: 4023690 - RNA, 20 nt, Measles virus
guuccuagcugucucaaagg

SEQ ID NO: 4023691 - RNA, 19 nt, Measles virus
guugaacuccggaacccua

SEQ ID NO: 4023692 - RNA, 21 nt, Measles virus
uaaagaaaacuuugaaaauac

SEQ ID NO: 4023693 - RNA, 22 nt, Measles virus
uaaccacugcuuuacugaaaua

SEQ ID NO: 4023694 - RNA, 14 nt, Measles virus
uaacggcugcugaa

SEQ ID NO: 4023695 - RNA, 18 nt, Measles virus
uaaucaagacccugacaa

SEQ ID NO: 4023696 - RNA, 16 nt, Measles virus
uaaugacagccagaag

SEQ ID NO: 4023697 - RNA, 15 nt, Measles virus
uacaaagacaaccca

SEQ ID NO: 4023698 - RNA, 19 nt, Measles virus
uacaaccuaaauccauuau

SEQ ID NO: 4023699 - RNA, 16 nt, Measles virus
uacagucaagacugag

SEQ ID NO: 4023700 - RNA, 12 nt, Measles virus
uacgaaguuucu

SEQ ID NO: 4023701 - RNA, 19 nt, Measles virus
uagagaugcacuuaaugca

SEQ ID NO: 4023702 - RNA, 12 nt, Measles virus
uagccaugcugg

SEQ ID NO: 4023703 - RNA, 19 nt, Measles virus
uagcugucucaaagggaaa

SEQ ID NO: 4023704 - RNA, 22 nt, Measles virus
uaggauaguuauuaacagagaa

SEQ ID NO: 4023705 - RNA, 20 nt, Measles virus
uagggaguacgacuucagag

SEQ ID NO: 4023706 - RNA, 17 nt, Measles virus
uagguaguuaggcauua

SEQ ID NO: 4023707 - RNA, 15 nt, Measles virus
uauaacucuccucaa

SEQ ID NO: 4023708 - RNA, 24 nt, Measles virus
uauacaaaaccaaccacaacaaug

SEQ ID NO: 4023709 - RNA, 18 nt, Measles virus
uauauuaaagaaaacuuu

SEQ ID NO: 4023710 - RNA, 19 nt, Measles virus
uaucccgccaaugaagaac

SEQ ID NO: 4023711 - RNA, 18 nt, Measles virus
uauguuuugcuggcuguu

SEQ ID NO: 4023712 - RNA, 21 nt, Measles virus
ucaaaacagccuuggccaaaa

SEQ ID NO: 4023713 - RNA, 17 nt, Measles virus
ucaacccgccagagaga

SEQ ID NO: 4023714 - RNA, 22 nt, Measles virus
ucaagaagcccguugccagccg

SEQ ID NO: 4023715 - RNA, 16 nt, Measles virus
ucaagacucauccagu

SEQ ID NO: 4023716 - RNA, 23 nt, Measles virus
ucaagcaaaaugggcugucccga

SEQ ID NO: 4023717 - RNA, 17 nt, Measles virus
ucaaggacgugcugaca

SEQ ID NO: 4023718 - RNA, 16 nt, Measles virus
ucaauuaagaagcaga

SEQ ID NO: 4023719 - RNA, 19 nt, Measles virus
ucacaugaugucacccaga

SEQ ID NO: 4023720 - RNA, 18 nt, Measles virus
ucagacaagcagggcagg

SEQ ID NO: 4023721 - RNA, 20 nt, Measles virus
ucagagauucacugaccuag

SEQ ID NO: 4023722 - RNA, 15 nt, Measles virus
ucagaguugucacaa

SEQ ID NO: 4023723 - RNA, 22 nt, Measles virus
ucagauacuauacagaaauccu

SEQ ID NO: 4023724 - RNA, 22 nt, Measles virus
ucagcauauccacccuggaagg

SEQ ID NO: 4023725 - RNA, 11 nt, Measles virus
ucagcuuccag

SEQ ID NO: 4023726 - RNA, 22 nt, Measles virus
ucagcuuccagcucgucaagcu

SEQ ID NO: 4023727 - RNA, 22 nt, Measles virus
ucaggauuuauuuaacauagaa

SEQ ID NO: 4023728 - RNA, 15 nt, Measles virus
ucaggggucagggaa

SEQ ID NO: 4023729 - RNA, 20 nt, Measles virus
ucaguaaggagucucaacau

SEQ ID NO: 4023730 - RNA, 15 nt, Measles virus
ucaucgacaaugcag

SEQ ID NO: 4023731 - RNA, 21 nt, Measles virus
ucaugauugccauuccuggac

SEQ ID NO: 4023732 - RNA, 15 nt, Measles virus
ucaugggucucaagg

SEQ ID NO: 4023733 - RNA, 19 nt, Measles virus
ucauuauuuggccccagcu

SEQ ID NO: 4023734 - RNA, 12 nt, Measles virus
uccaaagggaau

SEQ ID NO: 4023735 - RNA, 11 nt, Measles virus
uccaaauugua

SEQ ID NO: 4023736 - RNA, 19 nt, Measles virus
uccaagacuacaucaauaa

SEQ ID NO: 4023737 - RNA, 15 nt, Measles virus
uccaagcuagaauca

SEQ ID NO: 4023738 - RNA, 14 nt, Measles virus
uccacaaugucacc

SEQ ID NO: 4023739 - RNA, 14 nt, Measles virus
uccaccacauccga

SEQ ID NO: 4023740 - RNA, 21 nt, Measles virus
uccacucccacgacuggagcc

SEQ ID NO: 4023741 - RNA, 11 nt, Measles virus
uccagaagacu

SEQ ID NO: 4023742 - RNA, 20 nt, Measles virus
uccaugcugaacucucaagc

SEQ ID NO: 4023743 - RNA, 14 nt, Measles virus
uccccacagcuccc

SEQ ID NO: 4023744 - RNA, 19 nt, Measles virus
ucccccggucuccuccucu

SEQ ID NO: 4023745 - RNA, 17 nt, Measles virus
ucccgaccugaaaccca

SEQ ID NO: 4023746 - RNA, 17 nt, Measles virus
uccggaacccuaauccu

SEQ ID NO: 4023747 - RNA, 13 nt, Measles virus
uccuagcugucuc

SEQ ID NO: 4023748 - RNA, 19 nt, Measles virus
uccuccucgugggaccccc

SEQ ID NO: 4023749 - RNA, 19 nt, Measles virus
uccucgugggacccccgag

SEQ ID NO: 4023750 - RNA, 17 nt, Measles virus
uccugaaacuccaaucc

SEQ ID NO: 4023751 - RNA, 23 nt, Measles virus
ucgugggacccccgaggaccaac

SEQ ID NO: 4023752 - RNA, 17 nt, Measles virus
ucuacuggaggccaggg

SEQ ID NO: 4023753 - RNA, 14 nt, Measles virus
ucuauucccagcuu

SEQ ID NO: 4023754 - RNA, 13 nt, Measles virus
ucucaagcaucau

SEQ ID NO: 4023755 - RNA, 17 nt, Measles virus
ucugaaaacagcgaugu

SEQ ID NO: 4023756 - RNA, 20 nt, Measles virus
ucugacaaaauuaaauuccu

SEQ ID NO: 4023757 - RNA, 12 nt, Measles virus
ucugacaaugua

SEQ ID NO: 4023758 - RNA, 15 nt, Measles virus
ucuggugccgucacu

SEQ ID NO: 4023759 - RNA, 22 nt, Measles virus
ucuugugauuuaaucggccaga

SEQ ID NO: 4023760 - RNA, 16 nt, Measles virus
ugaaacacagauuucc

SEQ ID NO: 4023761 - RNA, 22 nt, Measles virus
ugaacuccggaacccuaauccu

SEQ ID NO: 4023762 - RNA, 16 nt, Measles virus
ugacaggggagauuuu

SEQ ID NO: 4023763 - RNA, 15 nt, Measles virus
ugacaucccagggaa

SEQ ID NO: 4023764 - RNA, 23 nt, Measles virus
ugacccucccccugcaugcugca

SEQ ID NO: 4023765 - RNA, 23 nt, Measles virus
ugagaugaggucagugauuaaau

SEQ ID NO: 4023766 - RNA, 17 nt, Measles virus
ugagggaggacaucaag

SEQ ID NO: 4023767 - RNA, 12 nt, Measles virus
ugaugacauaca

SEQ ID NO: 4023768 - RNA, 17 nt, Measles virus
ugcaacccaaugugcuc

SEQ ID NO: 4023769 - RNA, 22 nt, Measles virus
ugcaaggaagaggaggcaggca

SEQ ID NO: 4023770 - RNA, 16 nt, Measles virus
ugcagaacuucuagga

SEQ ID NO: 4023771 - RNA, 15 nt, Measles virus
ugcaucaauccucug

SEQ ID NO: 4023772 - RNA, 16 nt, Measles virus
ugccaaccccaugcca

SEQ ID NO: 4023773 - RNA, 15 nt, Measles virus
ugccacagcugcuca

SEQ ID NO: 4023774 - RNA, 21 nt, Measles virus
ugcccaauauaacucuccuca

SEQ ID NO: 4023775 - RNA, 13 nt, Measles virus
ugccucucagcaa

SEQ ID NO: 4023776 - RNA, 12 nt, Measles virus
ugcgauccuggg

SEQ ID NO: 4023777 - RNA, 20 nt, Measles virus
ugcggagauauccauccagg

SEQ ID NO: 4023778 - RNA, 21 nt, Measles virus
ugcuccaagaaugccuccggg

SEQ ID NO: 4023779 - RNA, 17 nt, Measles virus
ugcucuccaaagggaau

SEQ ID NO: 4023780 - RNA, 14 nt, Measles virus
ugcugaacucucaa

SEQ ID NO: 4023781 - RNA, 16 nt, Measles virus
ugcugcagacacaauc

SEQ ID NO: 4023782 - RNA, 21 nt, Measles virus
ugcugcucuccaaagggaaug

SEQ ID NO: 4023783 - RNA, 19 nt, Measles virus
uggagacaugcuuccagca

SEQ ID NO: 4023784 - RNA, 17 nt, Measles virus
uggaggaugccaaggaa

SEQ ID NO: 4023785 - RNA, 18 nt, Measles virus
uggcaaguauuuuaagga

SEQ ID NO: 4023786 - RNA, 18 nt, Measles virus
uggccgucgaggaagcca

SEQ ID NO: 4023787 - RNA, 13 nt, Measles virus
uggcugcugaaga

SEQ ID NO: 4023788 - RNA, 23 nt, Measles virus
ugggcaugggagucagcugcaca

SEQ ID NO: 4023789 - RNA, 16 nt, Measles virus
uguaccuaaaggacaa

SEQ ID NO: 4023790 - RNA, 21 nt, Measles virus
uuaagucgagguuacaaugug

SEQ ID NO: 4023791 - RNA, 16 nt, Measles virus
aaacuuugaaaauacg

SEQ ID NO: 4023792 - RNA, 18 nt, Measles virus
aaacuuugaaaauacgaa

SEQ ID NO: 4023793 - RNA, 15 nt, Measles virus
aaagaaaacuuugaa

SEQ ID NO: 4023794 - RNA, 13 nt, Measles virus
aaagaucucaaag

SEQ ID NO: 4023795 - RNA, 18 nt, Measles virus
aaaggaacccccagcaac

SEQ ID NO: 4023796 - RNA, 19 nt, Measles virus
aaaggugucagcuuccagc

SEQ ID NO: 4023797 - RNA, 14 nt, Measles virus
aaauacgaaguuuc

SEQ ID NO: 4023798 - RNA, 17 nt, Measles virus
aaauacgaaguuucuau

SEQ ID NO: 4023799 - RNA, 20 nt, Measles virus
aaaugauuauaaacaaugug

SEQ ID NO: 4023800 - RNA, 20 nt, Measles virus
aaaugccuucuacaaagaca

SEQ ID NO: 4023801 - RNA, 14 nt, Measles virus
aaauucgcagcccu

SEQ ID NO: 4023802 - RNA, 20 nt, Measles virus
aacagccuuggccaaaauac

SEQ ID NO: 4023803 - RNA, 22 nt, Measles virus
aaccagagggagcccccaacca

SEQ ID NO: 4023804 - RNA, 18 nt, Measles virus
aacccgcgcaccccagcc

SEQ ID NO: 4023805 - RNA, 17 nt, Measles virus
aacccuaauccugcccu

SEQ ID NO: 4023806 - RNA, 18 nt, Measles virus
aacccuaauccugcccua

SEQ ID NO: 4023807 - RNA, 20 nt, Measles virus
aaccgcacaagcgaccgagg

SEQ ID NO: 4023808 - RNA, 18 nt, Measles virus
aaccgcauccccacagcu

SEQ ID NO: 4023809 - RNA, 19 nt, Measles virus
aaccucuucacuguuccaa

SEQ ID NO: 4023810 - RNA, 24 nt, Measles virus
aagaaaacuuugaaaauacgaagu

SEQ ID NO: 4023811 - RNA, 16 nt, Measles virus
aagcaucaugauugcc

SEQ ID NO: 4023812 - RNA, 18 nt, Measles virus
aagcuaggugucuggaaa

SEQ ID NO: 4023813 - RNA, 19 nt, Measles virus
aagcuaggugucuggaaau

SEQ ID NO: 4023814 - RNA, 15 nt, Measles virus
aaggaaaggccacaa

SEQ ID NO: 4023815 - RNA, 15 nt, Measles virus
aaggaagauccguga

SEQ ID NO: 4023816 - RNA, 21 nt, Measles virus
aaggcccccaggggccgacag

SEQ ID NO: 4023817 - RNA, 13 nt, Measles virus
aagggagaaguug

SEQ ID NO: 4023818 - RNA, 17 nt, Measles virus
aauauauuaaagaaaac

SEQ ID NO: 4023819 - RNA, 17 nt, Measles virus
aaucccgaccugaaacc

SEQ ID NO: 4023820 - RNA, 22 nt, Measles virus
aauucgcuguacuccaaaguca

SEQ ID NO: 4023821 - RNA, 17 nt, Measles virus
acaaggaagauccguga

SEQ ID NO: 4023822 - RNA, 19 nt, Measles virus
acaaugucaccacaacgag

SEQ ID NO: 4023823 - RNA, 23 nt, Measles virus
acacaaggccaccaccagccauc

SEQ ID NO: 4023824 - RNA, 14 nt, Measles virus
acagaacagccccg

SEQ ID NO: 4023825 - RNA, 14 nt, Measles virus
acagagaucuacga

SEQ ID NO: 4023826 - RNA, 15 nt, Measles virus
acagcagggcucaau

SEQ ID NO: 4023827 - RNA, 14 nt, Measles virus
acaguagaacucag

SEQ ID NO: 4023828 - RNA, 15 nt, Measles virus
acauccuaagggaag

SEQ ID NO: 4023829 - RNA, 13 nt, Measles virus
acaugcuuccagc

SEQ ID NO: 4023830 - RNA, 16 nt, Measles virus
acaugcuuccagcagg

SEQ ID NO: 4023831 - RNA, 13 nt, Measles virus
accacugcuuuac

SEQ ID NO: 4023832 - RNA, 12 nt, Measles virus
accagacccagc

SEQ ID NO: 4023833 - RNA, 24 nt, Measles virus
accaguccaugcugaacucucaag

SEQ ID NO: 4023834 - RNA, 17 nt, Measles virus
acccacauccuaaggga

SEQ ID NO: 4023835 - RNA, 19 nt, Measles virus
acccgaaccagcacccaag

SEQ ID NO: 4023836 - RNA, 21 nt, Measles virus
acccgaaccagcacccaagag

SEQ ID NO: 4023837 - RNA, 15 nt, Measles virus
acccgccggcccccc

SEQ ID NO: 4023838 - RNA, 20 nt, Measles virus
acccugacaagauccuaaca

SEQ ID NO: 4023839 - RNA, 17 nt, Measles virus
accgaaccagaguccag

SEQ ID NO: 4023840 - RNA, 14 nt, Measles virus
accgcauccccaca

SEQ ID NO: 4023841 - RNA, 15 nt, Measles virus
accgcgcccccaccc

SEQ ID NO: 4023842 - RNA, 15 nt, Measles virus
accucgguccuccca

SEQ ID NO: 4023843 - RNA, 16 nt, Measles virus
accugcaacugaggga

SEQ ID NO: 4023844 - RNA, 20 nt, Measles virus
acgaucuugccaaguuccac

SEQ ID NO: 4023845 - RNA, 15 nt, Measles virus
acgcaagaaccccac

SEQ ID NO: 4023846 - RNA, 14 nt, Measles virus
acguacagcagggc

SEQ ID NO: 4023847 - RNA, 15 nt, Measles virus
acuaacccuccucac

SEQ ID NO: 4023848 - RNA, 21 nt, Measles virus
acuaacucgaucgagcaucag

SEQ ID NO: 4023849 - RNA, 20 nt, Measles virus
acucaacccgaaccagcacc

SEQ ID NO: 4023850 - RNA, 23 nt, Measles virus
acucaauuccccacccccaaagg

SEQ ID NO: 4023851 - RNA, 16 nt, Measles virus
acucccacgacuggag

SEQ ID NO: 4023852 - RNA, 22 nt, Measles virus
acuccuuagacagauccucucc

SEQ ID NO: 4023853 - RNA, 12 nt, Measles virus
acucuggaggag

SEQ ID NO: 4023854 - RNA, 21 nt, Measles virus
acugcagaugucgaacucaau

SEQ ID NO: 4023855 - RNA, 16 nt, Measles virus
acuuagggccaaggaa

SEQ ID NO: 4023856 - RNA, 16 nt, Measles virus
agaaaacuuugaaaau

SEQ ID NO: 4023857 - RNA, 21 nt, Measles virus
agaaucaaauuggauuaugau

SEQ ID NO: 4023858 - RNA, 22 nt, Measles virus
agaaucccgagugggcaccauu

SEQ ID NO: 4023859 - RNA, 12 nt, Measles virus
agacccugacaa

SEQ ID NO: 4023860 - RNA, 16 nt, Measles virus
agagcaagccuggaaa

SEQ ID NO: 4023861 - RNA, 17 nt, Measles virus
agagcaagccuggaaac

SEQ ID NO: 4023862 - RNA, 13 nt, Measles virus
agaggaggaucgg

SEQ ID NO: 4023863 - RNA, 16 nt, Measles virus
agaggaggcaggcagu

SEQ ID NO: 4023864 - RNA, 14 nt, Measles virus
agauaacagccggc

SEQ ID NO: 4023865 - RNA, 18 nt, Measles virus
agaucaacaggcaaaaua

SEQ ID NO: 4023866 - RNA, 20 nt, Measles virus
agaucucaaagaaagucaca

SEQ ID NO: 4023867 - RNA, 20 nt, Measles virus
agaugcacuuaaugcaauga

SEQ ID NO: 4023868 - RNA, 20 nt, Measles virus
agaugcugacucuaucaugg

SEQ ID NO: 4023869 - RNA, 13 nt, Measles virus
agauuucccacaa

SEQ ID NO: 4023870 - RNA, 23 nt, Measles virus
agauuuucucauuuuucagaagu

SEQ ID NO: 4023871 - RNA, 15 nt, Measles virus
agcaaagugauugcc

SEQ ID NO: 4023872 - RNA, 14 nt, Measles virus
agcacccucucagg

SEQ ID NO: 4023873 - RNA, 16 nt, Measles virus
agcagggcucaaugaa

SEQ ID NO: 4023874 - RNA, 16 nt, Measles virus
agcaguaaagggucag

SEQ ID NO: 4023875 - RNA, 14 nt, Measles virus
agcccaccugaaau

SEQ ID NO: 4023876 - RNA, 11 nt, Measles virus
agcccccucca

SEQ ID NO: 4023877 - RNA, 23 nt, Measles virus
agcccguugccagccgacaacuc

SEQ ID NO: 4023878 - RNA, 14 nt, Measles virus
agcccucugucaca

SEQ ID NO: 4023879 - RNA, 15 nt, Measles virus
agccuaaucugagca

SEQ ID NO: 4023880 - RNA, 13 nt, Measles virus
agccucagcacca

SEQ ID NO: 4023881 - RNA, 14 nt, Measles virus
agccugaaagaaaa

SEQ ID NO: 4023882 - RNA, 15 nt, Measles virus
caggcaucaagcacu

SEQ ID NO: 4023883 - RNA, 15 nt, Measles virus
cagguaggcacacca

SEQ ID NO: 4023884 - RNA, 15 nt, Measles virus
caguaucccacagcc

SEQ ID NO: 4023885 - RNA, 18 nt, Measles virus
caguaucccacagccucu

SEQ ID NO: 4023886 - RNA, 14 nt, Measles virus
cagucaguaaugau

SEQ ID NO: 4023887 - RNA, 13 nt, Measles virus
cauacuugccaua

SEQ ID NO: 4023888 - RNA, 15 nt, Measles virus
cauaucacucacucu

SEQ ID NO: 4023889 - RNA, 18 nt, Measles virus
cauaucacucacucuggg

SEQ ID NO: 4023890 - RNA, 21 nt, Measles virus
caucgcgaggaagcacaccca

SEQ ID NO: 4023891 - RNA, 21 nt, Measles virus
caucuuagagagcagaggaau

SEQ ID NO: 4023892 - RNA, 22 nt, Measles virus
caugaugucacccagacaucag

SEQ ID NO: 4023893 - RNA, 22 nt, Measles virus
caugccaagugaucgcugaaaa

SEQ ID NO: 4023894 - RNA, 17 nt, Measles virus
caugcuuccagcaggcg

SEQ ID NO: 4023895 - RNA, 21 nt, Measles virus
cauggcagcauggucagaaau

SEQ ID NO: 4023896 - RNA, 16 nt, Measles virus
cauuagaagcacaggc

SEQ ID NO: 4023897 - RNA, 16 nt, Measles virus
cauucgggucccugcc

SEQ ID NO: 4023898 - RNA, 20 nt, Measles virus
cauugcacuucaccagucca

SEQ ID NO: 4023899 - RNA, 22 nt, Measles virus
cauuguuauaaaaaacuuagga

SEQ ID NO: 4023900 - RNA, 18 nt, Measles virus
ccaagcgagaggccagcc

SEQ ID NO: 4023901 - RNA, 19 nt, Measles virus
ccaagcgagaggccagcca

SEQ ID NO: 4023902 - RNA, 15 nt, Measles virus
ccaaggaacacacac

SEQ ID NO: 4023903 - RNA, 19 nt, Measles virus
ccaauauaacucuccucaa

SEQ ID NO: 4023904 - RNA, 23 nt, Measles virus
ccaaucugcguccuccucguggg

SEQ ID NO: 4023905 - RNA, 18 nt, Measles virus
ccacacagccgccagcca

SEQ ID NO: 4023906 - RNA, 13 nt, Measles virus
ccacagcugcuca

SEQ ID NO: 4023907 - RNA, 18 nt, Measles virus
ccacagguaggcacacca

SEQ ID NO: 4023908 - RNA, 15 nt, Measles virus
ccaccagcucccaga

SEQ ID NO: 4023909 - RNA, 17 nt, Measles virus
ccaccagcucccagacu

SEQ ID NO: 4023910 - RNA, 13 nt, Measles virus
ccaccgacaaucc

SEQ ID NO: 4023911 - RNA, 20 nt, Measles virus
ccaccuacagugauggcagg

SEQ ID NO: 4023912 - RNA, 14 nt, Measles virus
ccagaaucaagacu

SEQ ID NO: 4023913 - RNA, 15 nt, Measles virus
ccagcacccagccac

SEQ ID NO: 4023914 - RNA, 15 nt, Measles virus
ccagcagccgacagc

SEQ ID NO: 4023915 - RNA, 18 nt, Measles virus
ccagcaggcguguaaggg

SEQ ID NO: 4023916 - RNA, 15 nt, Measles virus
ccagccagcagccga

SEQ ID NO: 4023917 - RNA, 19 nt, Measles virus
ccaggacaggaccgagcca

SEQ ID NO: 4023918 - RNA, 21 nt, Measles virus
ccaggcaguuuugcagccauc

SEQ ID NO: 4023919 - RNA, 15 nt, Measles virus
ccaggcaucaagcac

SEQ ID NO: 4023920 - RNA, 17 nt, Measles virus
ccaggcaucaagcacug

SEQ ID NO: 4023921 - RNA, 19 nt, Measles virus
ccaggcggcccaagcacag

SEQ ID NO: 4023922 - RNA, 22 nt, Measles virus
ccagucaguaaugauuucagca

SEQ ID NO: 4023923 - RNA, 17 nt, Measles virus
ccaguuccagaggacag

SEQ ID NO: 4023924 - RNA, 20 nt, Measles virus
ccauaucugcggagauaucc

SEQ ID NO: 4023925 - RNA, 14 nt, Measles virus
ccaucaccccgcaa

SEQ ID NO: 4023926 - RNA, 15 nt, Measles virus
ccaucaguuccucaa

SEQ ID NO: 4023927 - RNA, 13 nt, Measles virus
ccaucgacaaucu

SEQ ID NO: 4023928 - RNA, 22 nt, Measles virus
cccaaaaaaaggcccccagggg

SEQ ID NO: 4023929 - RNA, 21 nt, Measles virus
cccaaccgcaggcauccgacu

SEQ ID NO: 4023930 - RNA, 17 nt, Measles virus
cccaacgaccccacugc

SEQ ID NO: 4023931 - RNA, 18 nt, Measles virus
cccaacgcaagaacccca

SEQ ID NO: 4023932 - RNA, 22 nt, Measles virus
cccaagcacagaacagccccga

SEQ ID NO: 4023933 - RNA, 22 nt, Measles virus
cccagaaucaagacucauccag

SEQ ID NO: 4023934 - RNA, 15 nt, Measles virus
cccaguagggccagc

SEQ ID NO: 4023935 - RNA, 16 nt, Measles virus
cccaguagggccagca

SEQ ID NO: 4023936 - RNA, 18 nt, Measles virus
cccauuaaaaagggcaca

SEQ ID NO: 4023937 - RNA, 21 nt, Measles virus
cccauuaaaaagggcacagac

SEQ ID NO: 4023938 - RNA, 18 nt, Measles virus
ccccaguagggccagcac

SEQ ID NO: 4023939 - RNA, 16 nt, Measles virus
ccccgaaaaccagagg

SEQ ID NO: 4023940 - RNA, 21 nt, Measles virus
ccccgauccggcgggcagcca

SEQ ID NO: 4023941 - RNA, 16 nt, Measles virus
cccgaaccagcaccca

SEQ ID NO: 4023942 - RNA, 21 nt, Measles virus
cccggacaaaaaagcccccuc

SEQ ID NO: 4023943 - RNA, 23 nt, Measles virus
cccgggaaaggaacccccagcaa

SEQ ID NO: 4023944 - RNA, 18 nt, Measles virus
cccuaggcguugccacag

SEQ ID NO: 4023945 - RNA, 16 nt, Measles virus
ccgaacacagaccacc

SEQ ID NO: 4023946 - RNA, 16 nt, Measles virus
ccgaggaacuccucaa

SEQ ID NO: 4023947 - RNA, 15 nt, Measles virus
ccgcagugcccagca

SEQ ID NO: 4023948 - RNA, 16 nt, Measles virus
ccgcccccgaacccca

SEQ ID NO: 4023949 - RNA, 15 nt, Measles virus
ccggcgggcagccac

SEQ ID NO: 4023950 - RNA, 14 nt, Measles virus
ccgguguuccauau

SEQ ID NO: 4023951 - RNA, 21 nt, Measles virus
ccguuauggacucgcuaucug

SEQ ID NO: 4023952 - RNA, 19 nt, Measles virus
ccuaucaggggucagggaa

SEQ ID NO: 4023953 - RNA, 18 nt, Measles virus
ccucacgcuuacagccug

SEQ ID NO: 4023954 - RNA, 18 nt, Measles virus
ccucucaucucacagagg

SEQ ID NO: 4023955 - RNA, 16 nt, Measles virus
ccucugucacagggaa

SEQ ID NO: 4023956 - RNA, 17 nt, Measles virus
ccucugucacagggaag

SEQ ID NO: 4023957 - RNA, 20 nt, Measles virus
ccugaaacccaucauaggca

SEQ ID NO: 4023958 - RNA, 14 nt, Measles virus
ccugcacucgggaa

SEQ ID NO: 4023959 - RNA, 17 nt, Measles virus
ccugcggggaauguccc

SEQ ID NO: 4023960 - RNA, 13 nt, Measles virus
cgaaccagcaccc

SEQ ID NO: 4023961 - RNA, 18 nt, Measles virus
cgaaguuucuauucccag

SEQ ID NO: 4023962 - RNA, 21 nt, Measles virus
cgaauaaaugccuucuacaaa

SEQ ID NO: 4023963 - RNA, 17 nt, Measles virus
cgaauuuugaugaguca

SEQ ID NO: 4023964 - RNA, 24 nt, Measles virus
cgacagcaaguguggacaccaggc

SEQ ID NO: 4023965 - RNA, 11 nt, Measles virus
cgacagccagc

SEQ ID NO: 4023966 - RNA, 16 nt, Measles virus
cgaccagacccagcac

SEQ ID NO: 4023967 - RNA, 22 nt, Measles virus
cgagauucaagguuagucccaa

SEQ ID NO: 4023968 - RNA, 15 nt, Measles virus
cgaggaacuccucaa

SEQ ID NO: 4023969 - RNA, 23 nt, Measles virus
cgaggaacuccucaaagaggcca

SEQ ID NO: 4023970 - RNA, 12 nt, Measles virus
cgaggaagccau

SEQ ID NO: 4023971 - RNA, 21 nt, Measles virus
cgcauccccacagcucccggg

SEQ ID NO: 4023972 - RNA, 16 nt, Measles virus
cgcccccaccccccga

SEQ ID NO: 4023973 - RNA, 21 nt, Measles virus
cgcuggacaccccgcagaggu

SEQ ID NO: 4023974 - RNA, 13 nt, Measles virus
cggauucuccaac

SEQ ID NO: 4023975 - RNA, 15 nt, Measles virus
cggcuucccucuggc

SEQ ID NO: 4023976 - RNA, 19 nt, Measles virus
cgggaaaggaacccccagc

SEQ ID NO: 4023977 - RNA, 13 nt, Measles virus
cguacagcagggc

SEQ ID NO: 4023978 - RNA, 19 nt, Measles virus
cguugccacagcugcucag

SEQ ID NO: 4023979 - RNA, 23 nt, Measles virus
cuaaguuggaggaugccaaggaa

SEQ ID NO: 4023980 - RNA, 22 nt, Measles virus
cuacaccgcagagauccauaag

SEQ ID NO: 4023981 - RNA, 21 nt, Measles virus
cuaccuccaugacccugaguu

SEQ ID NO: 4023982 - RNA, 14 nt, Measles virus
cuacuggaggccag

SEQ ID NO: 4023983 - RNA, 16 nt, Measles virus
cuacuggaggccaggg

SEQ ID NO: 4023984 - RNA, 16 nt, Measles virus
cuaggcguugccacag

SEQ ID NO: 4023985 - RNA, 17 nt, Measles virus
cuagguaguuaggcauu

SEQ ID NO: 4023986 - RNA, 17 nt, Measles virus
cuaucccgccaaugaag

SEQ ID NO: 4023987 - RNA, 23 nt, Measles virus
cucaaagggaaacugcucagggc

SEQ ID NO: 4023988 - RNA, 16 nt, Measles virus
cucaaauugcucagau

SEQ ID NO: 4023989 - RNA, 18 nt, Measles virus
cucaacuuaccugccaac

SEQ ID NO: 4023990 - RNA, 13 nt, Measles virus
cucacucugggau

SEQ ID NO: 4023991 - RNA, 17 nt, Measles virus
cucaguuccaaucuggu

SEQ ID NO: 4023992 - RNA, 16 nt, Measles virus
cuccaauccagaggca

SEQ ID NO: 4023993 - RNA, 16 nt, Measles virus
cuccaucgugcagcca

SEQ ID NO: 4023994 - RNA, 19 nt, Measles virus
cuccaucgugcagccaucu

SEQ ID NO: 4023995 - RNA, 20 nt, Measles virus
cuccggaacccuaauccugc

SEQ ID NO: 4023996 - RNA, 18 nt, Measles virus
cuccggggguccaccaag

SEQ ID NO: 4023997 - RNA, 14 nt, Measles virus
cuccuuagacagau

SEQ ID NO: 4023998 - RNA, 12 nt, Measles virus
cucguuccagcc

SEQ ID NO: 4023999 - RNA, 15 nt, Measles virus
cucguuccagccauc

SEQ ID NO: 4024000 - RNA, 14 nt, Measles virus
cucugcuccaagaa

SEQ ID NO: 4024001 - RNA, 22 nt, Measles virus
cucugggauggugggcauggga

SEQ ID NO: 4024002 - RNA, 14 nt, Measles virus
cucugucacaggga

SEQ ID NO: 4024003 - RNA, 15 nt, Measles virus
cucugucacagggaa

SEQ ID NO: 4024004 - RNA, 20 nt, Measles virus
cugaugacucuccuugauga

SEQ ID NO: 4024005 - RNA, 19 nt, Measles virus
cuggaaggccccucccccc

SEQ ID NO: 4024006 - RNA, 20 nt, Measles virus
cuggagccacuuucacuugc

SEQ ID NO: 4024007 - RNA, 13 nt, Measles virus
cugggccaccagc

SEQ ID NO: 4024008 - RNA, 18 nt, Measles virus
agcgagaggccagccagc

SEQ ID NO: 4024009 - RNA, 18 nt, Measles virus
agcuaggugucuggaaau

SEQ ID NO: 4024010 - RNA, 14 nt, Measles virus
agcuauccuggagu

SEQ ID NO: 4024011 - RNA, 13 nt, Measles virus
aggaacccccagc

SEQ ID NO: 4024012 - RNA, 13 nt, Measles virus
aggacagcugcug

SEQ ID NO: 4024013 - RNA, 13 nt, Measles virus
aggaccaaccccg

SEQ ID NO: 4024014 - RNA, 20 nt, Measles virus
aggagacuacugagaacagu

SEQ ID NO: 4024015 - RNA, 17 nt, Measles virus
aggcacaccaacccccg

SEQ ID NO: 4024016 - RNA, 18 nt, Measles virus
aggcauuauuugcaauau

SEQ ID NO: 4024017 - RNA, 20 nt, Measles virus
aggcccggacaaaaaagccc

SEQ ID NO: 4024018 - RNA, 16 nt, Measles virus
aggcguugccacagcu

SEQ ID NO: 4024019 - RNA, 16 nt, Measles virus
agggaaacugcucagg

SEQ ID NO: 4024020 - RNA, 23 nt, Measles virus
agguaguuaggcauuauuugcaa

SEQ ID NO: 4024021 - RNA, 17 nt, Measles virus
aggugacccaaccgcag

SEQ ID NO: 4024022 - RNA, 13 nt, Measles virus
agucagugauaag

SEQ ID NO: 4024023 - RNA, 18 nt, Measles virus
agucccaaccucuucacu

SEQ ID NO: 4024024 - RNA, 19 nt, Measles virus
agucccccggucuccuccu

SEQ ID NO: 4024025 - RNA, 22 nt, Measles virus
agucgagguuacaaugugucau

SEQ ID NO: 4024026 - RNA, 17 nt, Measles virus
agucgggagcaggaggu

SEQ ID NO: 4024027 - RNA, 21 nt, Measles virus
agugcguugauaacuggaaau

SEQ ID NO: 4024028 - RNA, 19 nt, Measles virus
aguggacacccgaaucugg

SEQ ID NO: 4024029 - RNA, 13 nt, Measles virus
aguuaggcauuau

SEQ ID NO: 4024030 - RNA, 15 nt, Measles virus
aguuccuagcugucu

SEQ ID NO: 4024031 - RNA, 16 nt, Measles virus
aguuucuauucccagc

SEQ ID NO: 4024032 - RNA, 20 nt, Measles virus
aguuucuauucccagcuuug

SEQ ID NO: 4024033 - RNA, 18 nt, Measles virus
auaaaugccuucuacaaa

SEQ ID NO: 4024034 - RNA, 18 nt, Measles virus
auaacugaugacauacau

SEQ ID NO: 4024035 - RNA, 21 nt, Measles virus
auacaggagacuacugagaac

SEQ ID NO: 4024036 - RNA, 20 nt, Measles virus
auacgaaguuucuauuccca

SEQ ID NO: 4024037 - RNA, 12 nt, Measles virus
auagacaucaga

SEQ ID NO: 4024038 - RNA, 13 nt, Measles virus
auauuaaagaaaa

SEQ ID NO: 4024039 - RNA, 15 nt, Measles virus
aucacaagggaaccu

SEQ ID NO: 4024040 - RNA, 23 nt, Measles virus
aucacaagggaaccuaauagcca

SEQ ID NO: 4024041 - RNA, 20 nt, Measles virus
aucagaagauaaucuccaag

SEQ ID NO: 4024042 - RNA, 19 nt, Measles virus
aucagaggucaauucucaa

SEQ ID NO: 4024043 - RNA, 17 nt, Measles virus
aucaguaaggagucuca

SEQ ID NO: 4024044 - RNA, 15 nt, Measles virus
aucaguaucccacag

SEQ ID NO: 4024045 - RNA, 14 nt, Measles virus
auccacccuggaag

SEQ ID NO: 4024046 - RNA, 17 nt, Measles virus
auccacccuggaaggac

SEQ ID NO: 4024047 - RNA, 19 nt, Measles virus
auccagccggcuagaggag

SEQ ID NO: 4024048 - RNA, 17 nt, Measles virus
aucccugggggaccccc

SEQ ID NO: 4024049 - RNA, 23 nt, Measles virus
aucgcugaaaaucuaaucucaaa

SEQ ID NO: 4024050 - RNA, 13 nt, Measles virus
aucucaaagaaag

SEQ ID NO: 4024051 - RNA, 16 nt, Measles virus
aucugagagcaagccu

SEQ ID NO: 4024052 - RNA, 22 nt, Measles virus
augacaaguugcgaauggagac

SEQ ID NO: 4024053 - RNA, 15 nt, Measles virus
augcaaugacccaga

SEQ ID NO: 4024054 - RNA, 12 nt, Measles virus
augccucucagc

SEQ ID NO: 4024055 - RNA, 19 nt, Measles virus
augccucuuagccuggaca

SEQ ID NO: 4024056 - RNA, 23 nt, Measles virus
auggacucgcuaucugucaacca

SEQ ID NO: 4024057 - RNA, 18 nt, Measles virus
auggagacaugcuuccag

SEQ ID NO: 4024058 - RNA, 21 nt, Measles virus
auggcaggcuggugccccagg

SEQ ID NO: 4024059 - RNA, 21 nt, Measles virus
augucaaaaacggacuggaau

SEQ ID NO: 4024060 - RNA, 18 nt, Measles virus
auguggaaguugggaaug

SEQ ID NO: 4024061 - RNA, 13 nt, Measles virus
auguuuacagccc

SEQ ID NO: 4024062 - RNA, 21 nt, Measles virus
auuaaagaaaacuuugaaaau

SEQ ID NO: 4024063 - RNA, 21 nt, Measles virus
auuaagaagcagaucaacagg

SEQ ID NO: 4024064 - RNA, 23 nt, Measles virus
auuagaagcacaggcaaaaugag

SEQ ID NO: 4024065 - RNA, 20 nt, Measles virus
auucgcagcccucugucaca

SEQ ID NO: 4024066 - RNA, 19 nt, Measles virus
auuugcaauauauuaaaga

SEQ ID NO: 4024067 - RNA, 13 nt, Measles virus
auuuuaaggacaa

SEQ ID NO: 4024068 - RNA, 14 nt, Measles virus
auuuugagcaacca

SEQ ID NO: 4024069 - RNA, 20 nt, Measles virus
caaaacagccuuggccaaaa

SEQ ID NO: 4024070 - RNA, 14 nt, Measles virus
caaaauugcuucag

SEQ ID NO: 4024071 - RNA, 18 nt, Measles virus
caaacaugucgcuguccc

SEQ ID NO: 4024072 - RNA, 19 nt, Measles virus
caaaccgcaaaagacauca

SEQ ID NO: 4024073 - RNA, 18 nt, Measles virus
caaccauccacucccacg

SEQ ID NO: 4024074 - RNA, 21 nt, Measles virus
caacccgaaccagcacccaag

SEQ ID NO: 4024075 - RNA, 23 nt, Measles virus
caaccgacaugcgauccuggguc

SEQ ID NO: 4024076 - RNA, 18 nt, Measles virus
caaccgcauccccacagc

SEQ ID NO: 4024077 - RNA, 18 nt, Measles virus
caaccugucuuacagccu

SEQ ID NO: 4024078 - RNA, 20 nt, Measles virus
caaccugucuuacagccuga

SEQ ID NO: 4024079 - RNA, 16 nt, Measles virus
caacuccagggaauga

SEQ ID NO: 4024080 - RNA, 17 nt, Measles virus
caagaaaucuccaggca

SEQ ID NO: 4024081 - RNA, 16 nt, Measles virus
caagacggggggcccc

SEQ ID NO: 4024082 - RNA, 16 nt, Measles virus
caagauccuaacauac

SEQ ID NO: 4024083 - RNA, 19 nt, Measles virus
caagcaaaaugggcugucc

SEQ ID NO: 4024084 - RNA, 17 nt, Measles virus
caagcgaccgaggugac

SEQ ID NO: 4024085 - RNA, 14 nt, Measles virus
caagcgagaggcca

SEQ ID NO: 4024086 - RNA, 19 nt, Measles virus
caagcgagaggccagccag

SEQ ID NO: 4024087 - RNA, 17 nt, Measles virus
caaggacgugcugacac

SEQ ID NO: 4024088 - RNA, 20 nt, Measles virus
caaggccaccaccagccauc

SEQ ID NO: 4024089 - RNA, 18 nt, Measles virus
caaguauuuuaaggacaa

SEQ ID NO: 4024090 - RNA, 23 nt, Measles virus
caagucccccggucuccuccucu

SEQ ID NO: 4024091 - RNA, 15 nt, Measles virus
caaucaaggaagcag

SEQ ID NO: 4024092 - RNA, 17 nt, Measles virus
caaucagacaagcaggg

SEQ ID NO: 4024093 - RNA, 19 nt, Measles virus
caaucagacaagcagggca

SEQ ID NO: 4024094 - RNA, 23 nt, Measles virus
caaucaguuccuagcugucucaa

SEQ ID NO: 4024095 - RNA, 13 nt, Measles virus
caaugaagaccuu

SEQ ID NO: 4024096 - RNA, 21 nt, Measles virus
cacaacccgcgcaccccagcc

SEQ ID NO: 4024097 - RNA, 18 nt, Measles virus
cacaaggccaccaccagc

SEQ ID NO: 4024098 - RNA, 20 nt, Measles virus
cacagacgcgagauuggccu

SEQ ID NO: 4024099 - RNA, 21 nt, Measles virus
caccaaccgcauccccacagc

SEQ ID NO: 4024100 - RNA, 14 nt, Measles virus
caccacucuucaag

SEQ ID NO: 4024101 - RNA, 23 nt, Measles virus
caccaggcggcccaagcacagaa

SEQ ID NO: 4024102 - RNA, 21 nt, Measles virus
cacccaagagcgaucccuggg

SEQ ID NO: 4024103 - RNA, 16 nt, Measles virus
caccccccgaaaacca

SEQ ID NO: 4024104 - RNA, 19 nt, Measles virus
caccccccgaaaaccagag

SEQ ID NO: 4024105 - RNA, 13 nt, Measles virus
caccucagagauu

SEQ ID NO: 4024106 - RNA, 14 nt, Measles virus
cacgcuuacagccu

SEQ ID NO: 4024107 - RNA, 15 nt, Measles virus
cacuaacccuccuca

SEQ ID NO: 4024108 - RNA, 23 nt, Measles virus
cacucaacccgaaccagcaccca

SEQ ID NO: 4024109 - RNA, 17 nt, Measles virus
cacucaauuccccaccc

SEQ ID NO: 4024110 - RNA, 18 nt, Measles virus
cacuggccgucgaggaag

SEQ ID NO: 4024111 - RNA, 13 nt, Measles virus
cacuuaaugcaau

SEQ ID NO: 4024112 - RNA, 19 nt, Measles virus
cacuuaaugcaaugaccca

SEQ ID NO: 4024113 - RNA, 14 nt, Measles virus
cagaacaacauccg

SEQ ID NO: 4024114 - RNA, 21 nt, Measles virus
cagaacaacauccgccuaccc

SEQ ID NO: 4024115 - RNA, 12 nt, Measles virus
cagaacccagac

SEQ ID NO: 4024116 - RNA, 23 nt, Measles virus
cagaagauaaucuccaagcuaga

SEQ ID NO: 4024117 - RNA, 15 nt, Measles virus
cagaaucaagacuca

SEQ ID NO: 4024118 - RNA, 22 nt, Measles virus
cagaccacccugggccaccagc

SEQ ID NO: 4024119 - RNA, 13 nt, Measles virus
cagacccagcacc

SEQ ID NO: 4024120 - RNA, 14 nt, Measles virus
cagacccagcaccc

SEQ ID NO: 4024121 - RNA, 18 nt, Measles virus
cagacucggccaucaccc

SEQ ID NO: 4024122 - RNA, 17 nt, Measles virus
cagaggucaauucucaa

SEQ ID NO: 4024123 - RNA, 11 nt, Measles virus
cagauccucuc

SEQ ID NO: 4024124 - RNA, 22 nt, Measles virus
cagaugucgaacucaaucccga

SEQ ID NO: 4024125 - RNA, 18 nt, Measles virus
cagauguggcugcugaag

SEQ ID NO: 4024126 - RNA, 18 nt, Measles virus
cagcaaguguggacacca

SEQ ID NO: 4024127 - RNA, 23 nt, Measles virus
cagcaauuggaucaacugaaggc

SEQ ID NO: 4024128 - RNA, 18 nt, Measles virus
cagccaucaguuccucaa

SEQ ID NO: 4024129 - RNA, 22 nt, Measles virus
cagcuuccagcucgucaagcua

SEQ ID NO: 4024130 - RNA, 17 nt, Measles virus
caggaccgagccaccug

SEQ ID NO: 4024131 - RNA, 19 nt, Measles virus
caggaccgagccaccugca

SEQ ID NO: 4024132 - RNA, 23 nt, Measles virus
caggcaguuuugcagccaucagu

SEQ ID NO: 4024133 - RNA, 12 nt, Measles virus
uaacaggauucc

SEQ ID NO: 4024134 - RNA, 13 nt, Measles virus
uaaggagucucaa

SEQ ID NO: 4024135 - RNA, 14 nt, Measles virus
uaaucaacacauug

SEQ ID NO: 4024136 - RNA, 24 nt, Measles virus
uacaaugugucaucuauagucacu

SEQ ID NO: 4024137 - RNA, 14 nt, Measles virus
uacccgaugagucc

SEQ ID NO: 4024138 - RNA, 17 nt, Measles virus
uaccugcaacugaggga

SEQ ID NO: 4024139 - RNA, 18 nt, Measles virus
uagcugucucaaagggaa

SEQ ID NO: 4024140 - RNA, 15 nt, Measles virus
uaggcauuauuugca

SEQ ID NO: 4024141 - RNA, 21 nt, Measles virus
uagggaguacgacuucagaga

SEQ ID NO: 4024142 - RNA, 15 nt, Measles virus
uauaggcucucaaga

SEQ ID NO: 4024143 - RNA, 23 nt, Measles virus
uaucaacggaugauccagugaua

SEQ ID NO: 4024144 - RNA, 16 nt, Measles virus
uaucaaugaagaccuu

SEQ ID NO: 4024145 - RNA, 13 nt, Measles virus
uauccauccaggc

SEQ ID NO: 4024146 - RNA, 22 nt, Measles virus
uaucgcugacaaucaagcaaaa

SEQ ID NO: 4024147 - RNA, 14 nt, Measles virus
uauuaacagagaac

SEQ ID NO: 4024148 - RNA, 14 nt, Measles virus
uauucccagcuuug

SEQ ID NO: 4024149 - RNA, 15 nt, Measles virus
ucaaagaggccacug

SEQ ID NO: 4024150 - RNA, 19 nt, Measles virus
ucaaagggaaacugcucag

SEQ ID NO: 4024151 - RNA, 19 nt, Measles virus
ucaaccugucuuacagccu

SEQ ID NO: 4024152 - RNA, 18 nt, Measles virus
ucaagaaaucuccaggca

SEQ ID NO: 4024153 - RNA, 22 nt, Measles virus
ucaagcaaccaccgcauccagc

SEQ ID NO: 4024154 - RNA, 14 nt, Measles virus
ucacacacgguuca

SEQ ID NO: 4024155 - RNA, 22 nt, Measles virus
ucacugaccuagugaaauucau

SEQ ID NO: 4024156 - RNA, 22 nt, Measles virus
ucacuggccgucgaggaagcca

SEQ ID NO: 4024157 - RNA, 19 nt, Measles virus
ucagacaacccaggacagg

SEQ ID NO: 4024158 - RNA, 19 nt, Measles virus
ucagacaagcagggcagga

SEQ ID NO: 4024159 - RNA, 18 nt, Measles virus
ucagaucggucaaugcag

SEQ ID NO: 4024160 - RNA, 17 nt, Measles virus
ucagcugcacagucacu

SEQ ID NO: 4024161 - RNA, 22 nt, Measles virus
ucaggcaauugaggcaaucaga

SEQ ID NO: 4024162 - RNA, 21 nt, Measles virus
ucagggcccacuacaaucaga

SEQ ID NO: 4024163 - RNA, 15 nt, Measles virus
ucaguaucccacagc

SEQ ID NO: 4024164 - RNA, 16 nt, Measles virus
ucauaaugacagccag

SEQ ID NO: 4024165 - RNA, 11 nt, Measles virus
ucaucaagcaa

SEQ ID NO: 4024166 - RNA, 20 nt, Measles virus
uccaagacggggggcccccc

SEQ ID NO: 4024167 - RNA, 16 nt, Measles virus
uccagaccacccuggg

SEQ ID NO: 4024168 - RNA, 15 nt, Measles virus
uccagaggacagcug

SEQ ID NO: 4024169 - RNA, 20 nt, Measles virus
uccaggcaguuuugcagcca

SEQ ID NO: 4024170 - RNA, 23 nt, Measles virus
uccaggcaguuuugcagccauca

SEQ ID NO: 4024171 - RNA, 21 nt, Measles virus
ucccgggaaaggaacccccag

SEQ ID NO: 4024172 - RNA, 14 nt, Measles virus
uccgauacaaccua

SEQ ID NO: 4024173 - RNA, 21 nt, Measles virus
uccggaacccuaauccugccc

SEQ ID NO: 4024174 - RNA, 16 nt, Measles virus
uccggguuugggggcu

SEQ ID NO: 4024175 - RNA, 16 nt, Measles virus
uccuaaaaaagggaaa

SEQ ID NO: 4024176 - RNA, 20 nt, Measles virus
ucggcaugggacaucaaagg

SEQ ID NO: 4024177 - RNA, 13 nt, Measles virus
ucuacaacaacac

SEQ ID NO: 4024178 - RNA, 17 nt, Measles virus
ucuauucccagcuuugu

SEQ ID NO: 4024179 - RNA, 13 nt, Measles virus
ucucaaagggaaa

SEQ ID NO: 4024180 - RNA, 17 nt, Measles virus
ucuccgauguccaagac

SEQ ID NO: 4024181 - RNA, 15 nt, Measles virus
ucugcguccuccucg

SEQ ID NO: 4024182 - RNA, 17 nt, Measles virus
ucuggagaaagcgauga

SEQ ID NO: 4024183 - RNA, 16 nt, Measles virus
ucuggcugucucagga

SEQ ID NO: 4024184 - RNA, 12 nt, Measles virus
ucugucaaccag

SEQ ID NO: 4024185 - RNA, 19 nt, Measles virus
ucuucacugguaguucagu

SEQ ID NO: 4024186 - RNA, 19 nt, Measles virus
ucuucucgaagggaccaaa

SEQ ID NO: 4024187 - RNA, 22 nt, Measles virus
ugaaauucaucucugacaaaau

SEQ ID NO: 4024188 - RNA, 15 nt, Measles virus
ugaacucaacucuac

SEQ ID NO: 4024189 - RNA, 21 nt, Measles virus
ugaagcaguaacggcugcuga

SEQ ID NO: 4024190 - RNA, 23 nt, Measles virus
ugacuaucccgccaaugaagaac

SEQ ID NO: 4024191 - RNA, 18 nt, Measles virus
ugagcuuaaaaucaaaau

SEQ ID NO: 4024192 - RNA, 24 nt, Measles virus
ugagcuugaucggguugcuagcca

SEQ ID NO: 4024193 - RNA, 16 nt, Measles virus
ugaggacaccucagag

SEQ ID NO: 4024194 - RNA, 17 nt, Measles virus
ugaggacaccucagaga

SEQ ID NO: 4024195 - RNA, 14 nt, Measles virus
ugauuauaaacaau

SEQ ID NO: 4024196 - RNA, 19 nt, Measles virus
ugauuauaaacaaugugga

SEQ ID NO: 4024197 - RNA, 16 nt, Measles virus
ugcaagaucauccaca

SEQ ID NO: 4024198 - RNA, 15 nt, Measles virus
ugcacuuaaugcaau

SEQ ID NO: 4024199 - RNA, 17 nt, Measles virus
ugcguccuccucguggg

SEQ ID NO: 4024200 - RNA, 20 nt, Measles virus
ugcugcagacacaauccgga

SEQ ID NO: 4024201 - RNA, 18 nt, Measles virus
ugcugccgaucacugccc

SEQ ID NO: 4024202 - RNA, 19 nt, Measles virus
ugcugcucuccaaagggaa

SEQ ID NO: 4024203 - RNA, 21 nt, Measles virus
uggcaguacuguuaacucucc

SEQ ID NO: 4024204 - RNA, 15 nt, Measles virus
ugggaaggaucccaa

SEQ ID NO: 4024205 - RNA, 16 nt, Measles virus
ugguaauucuaccugg

SEQ ID NO: 4024206 - RNA, 14 nt, Measles virus
ugguggacauauca

SEQ ID NO: 4024207 - RNA, 20 nt, Measles virus
uguaucaacccgccagagag

SEQ ID NO: 4024208 - RNA, 15 nt, Measles virus
ugucacagggaagau

SEQ ID NO: 4024209 - RNA, 19 nt, Measles virus
ugugucagaacaucaagca

SEQ ID NO: 4024210 - RNA, 18 nt, Measles virus
uguuaucgcugacaauca

SEQ ID NO: 4024211 - RNA, 19 nt, Measles virus
uuacaccguucccagaaga

SEQ ID NO: 4024212 - RNA, 14 nt, Measles virus
uuauaaacaaugug

SEQ ID NO: 4024213 - RNA, 15 nt, Measles virus
uuaucacaagggaac

SEQ ID NO: 4024214 - RNA, 19 nt, Measles virus
uuaugccucuuagccugga

SEQ ID NO: 4024215 - RNA, 14 nt, Measles virus
uucaagaagaccuu

SEQ ID NO: 4024216 - RNA, 18 nt, Measles virus
uucagaguguagcuucaa

SEQ ID NO: 4024217 - RNA, 19 nt, Measles virus
uucuauucccagcuuuguc

SEQ ID NO: 4024218 - RNA, 11 nt, Measles virus
uugcuggcugu

SEQ ID NO: 4024219 - RNA, 18 nt, Measles virus
uuggacguagggacaaau

SEQ ID NO: 4024220 - RNA, 16 nt, Measles virus
uuguagccaugcugga

SEQ ID NO: 4024221 - RNA, 19 nt, Measles virus
gguugcuagccauugcagg

SEQ ID NO: 4024222 - RNA, 22 nt, Measles virus
guacgacuucagagaucucacu

SEQ ID NO: 4024223 - RNA, 13 nt, Measles virus
guagaacucagag

SEQ ID NO: 4024224 - RNA, 15 nt, Measles virus
guagggccagcacuu

SEQ ID NO: 4024225 - RNA, 16 nt, Measles virus
gucaacaaggaagauc

SEQ ID NO: 4024226 - RNA, 16 nt, Measles virus
gucagggaucuggaga

SEQ ID NO: 4024227 - RNA, 15 nt, Measles virus
gucuuuugggaaccg

SEQ ID NO: 4024228 - RNA, 16 nt, Measles virus
gugaaauagacaucag

SEQ ID NO: 4024229 - RNA, 16 nt, Measles virus
gugucagcuuccagcu

SEQ ID NO: 4024230 - RNA, 22 nt, Measles virus
guguucuacaacaacaccccac

SEQ ID NO: 4024231 - RNA, 18 nt, Measles virus
guuacaguguuaucaugu

SEQ ID NO: 4024232 - RNA, 15 nt, Measles virus
guuccagaggacagc

SEQ ID NO: 4024233 - RNA, 18 nt, Measles virus
guugaaacugcagaagga

SEQ ID NO: 4024234 - RNA, 14 nt, Measles virus
guuucuauucccag

SEQ ID NO: 4024235 - RNA, 18 nt, Measles virus
guuucuauucccagcuuu

SEQ ID NO: 4024236 - RNA, 14 nt, Measles virus
uaaacaauguggaa

SEQ ID NO: 4024237 - RNA, 15 nt, Measles virus
uaaagggggucccaa

SEQ ID NO: 4024238 - RNA, 17 nt, Measles virus
uaacauacauugcugcc

SEQ ID NO: 4024239 - RNA, 20 nt, Measles virus
uaacucuccucaauaacugc

SEQ ID NO: 4024240 - RNA, 14 nt, Measles virus
uaaugacagccaga

SEQ ID NO: 4024241 - RNA, 23 nt, Measles virus
uaaugacagccagaaggcccgga

SEQ ID NO: 4024242 - RNA, 13 nt, Measles virus
uacaaaaugaggg

SEQ ID NO: 4024243 - RNA, 22 nt, Measles virus
uacaaagacaacccacauccua

SEQ ID NO: 4024244 - RNA, 22 nt, Measles virus
uacaccguucccagaagaaugc

SEQ ID NO: 4024245 - RNA, 13 nt, Measles virus
uacauugcugccg

SEQ ID NO: 4024246 - RNA, 19 nt, Measles virus
uacgauccucccaagggaa

SEQ ID NO: 4024247 - RNA, 18 nt, Measles virus
uacugggcaucuuagaga

SEQ ID NO: 4024248 - RNA, 15 nt, Measles virus
uagacagauccucuc

SEQ ID NO: 4024249 - RNA, 20 nt, Measles virus
uagaccgcagugcccagcaa

SEQ ID NO: 4024250 - RNA, 20 nt, Measles virus
uagacuccaucgugcagcca

SEQ ID NO: 4024251 - RNA, 13 nt, Measles virus
uagcuauccugga

SEQ ID NO: 4024252 - RNA, 13 nt, Measles virus
uagggauccccgc

SEQ ID NO: 4024253 - RNA, 22 nt, Measles virus
uagggcucaaauugcucagaua

SEQ ID NO: 4024254 - RNA, 16 nt, Measles virus
uaguaagaauccaggc

SEQ ID NO: 4024255 - RNA, 12 nt, Measles virus
uaguuaggcauu

SEQ ID NO: 4024256 - RNA, 21 nt, Measles virus
uaguuauuaacagagaacauc

SEQ ID NO: 4024257 - RNA, 15 nt, Measles virus
ucaaacucaguucca

SEQ ID NO: 4024258 - RNA, 20 nt, Measles virus
ucaagcuucaggugaagggu

SEQ ID NO: 4024259 - RNA, 15 nt, Measles virus
ucaagguuaguccca

SEQ ID NO: 4024260 - RNA, 15 nt, Measles virus
ucacaugaugucacc

SEQ ID NO: 4024261 - RNA, 15 nt, Measles virus
ucagaacaucaagca

SEQ ID NO: 4024262 - RNA, 21 nt, Measles virus
ucagaagauaaucuccaagcu

SEQ ID NO: 4024263 - RNA, 16 nt, Measles virus
ucagauacauguggaa

SEQ ID NO: 4024264 - RNA, 13 nt, Measles virus
ucagggccaggug

SEQ ID NO: 4024265 - RNA, 22 nt, Measles virus
ucagggcccacuacaaucagag

SEQ ID NO: 4024266 - RNA, 14 nt, Measles virus
ucauccacaauguc

SEQ ID NO: 4024267 - RNA, 22 nt, Measles virus
uccaaagggaaugggauucagu

SEQ ID NO: 4024268 - RNA, 19 nt, Measles virus
uccacacagccgccagcca

SEQ ID NO: 4024269 - RNA, 23 nt, Measles virus
uccacacucuggcugucucagga

SEQ ID NO: 4024270 - RNA, 22 nt, Measles virus
uccagaccacccugggccacca

SEQ ID NO: 4024271 - RNA, 20 nt, Measles virus
uccagccggcuagaggagga

SEQ ID NO: 4024272 - RNA, 23 nt, Measles virus
ucccgggaaaggaacccccagca

SEQ ID NO: 4024273 - RNA, 15 nt, Measles virus
uccuaaaaaagggaa

SEQ ID NO: 4024274 - RNA, 18 nt, Measles virus
uccuccucuucucgaagg

SEQ ID NO: 4024275 - RNA, 15 nt, Measles virus
ucgaagggaccaaaa

SEQ ID NO: 4024276 - RNA, 13 nt, Measles virus
ucgacaaugcaga

SEQ ID NO: 4024277 - RNA, 15 nt, Measles virus
ucuauucccagcuuu

SEQ ID NO: 4024278 - RNA, 21 nt, Measles virus
ucucaaacaugucgcuguccc

SEQ ID NO: 4024279 - RNA, 21 nt, Measles virus
ucugagcuugaucggguugcu

SEQ ID NO: 4024280 - RNA, 23 nt, Measles virus
ucuuacagggacaucaaaauccu

SEQ ID NO: 4024281 - RNA, 13 nt, Measles virus
ucuucaagaucau

SEQ ID NO: 4024282 - RNA, 12 nt, Measles virus
ucuucaaugcaa

SEQ ID NO: 4024283 - RNA, 13 nt, Measles virus
ucuucccugcacu

SEQ ID NO: 4024284 - RNA, 18 nt, Measles virus
ugaaaauacgaaguuucu

SEQ ID NO: 4024285 - RNA, 20 nt, Measles virus
ugaaaauacgaaguuucuau

SEQ ID NO: 4024286 - RNA, 15 nt, Measles virus
ugaagugggccugag

SEQ ID NO: 4024287 - RNA, 23 nt, Measles virus
ugaagugggccugaggacaccuc

SEQ ID NO: 4024288 - RNA, 17 nt, Measles virus
ugagcaagacucuccau

SEQ ID NO: 4024289 - RNA, 20 nt, Measles virus
aaguugggaaugucaucaag

SEQ ID NO: 4024290 - RNA, 21 nt, Measles virus
aauaaaugccuucuacaaaga

SEQ ID NO: 4024291 - RNA, 12 nt, Measles virus
aauacaggagac

SEQ ID NO: 4024292 - RNA, 13 nt, Measles virus
aauacaugauguu

SEQ ID NO: 4024293 - RNA, 13 nt, Measles virus
aauacgaaguuuc

SEQ ID NO: 4024294 - RNA, 21 nt, Measles virus
aaucgcagauagggcugccag

SEQ ID NO: 4024295 - RNA, 16 nt, Measles virus
aaucugguggacauau

SEQ ID NO: 4024296 - RNA, 13 nt, Measles virus
aaugacagccaga

SEQ ID NO: 4024297 - RNA, 21 nt, Measles virus
aaugcccaauauaacucuccu

SEQ ID NO: 4024298 - RNA, 13 nt, Measles virus
acaacccacaucc

SEQ ID NO: 4024299 - RNA, 15 nt, Measles virus
acaaccuaaauccau

SEQ ID NO: 4024300 - RNA, 21 nt, Measles virus
acaccaggcggcccaagcaca

SEQ ID NO: 4024301 - RNA, 19 nt, Measles virus
acaccccacuaacccuccu

SEQ ID NO: 4024302 - RNA, 18 nt, Measles virus
acacucaauuccccaccc

SEQ ID NO: 4024303 - RNA, 21 nt, Measles virus
acagccagaaggcccggacaa

SEQ ID NO: 4024304 - RNA, 14 nt, Measles virus
acagcugcucagau

SEQ ID NO: 4024305 - RNA, 13 nt, Measles virus
acagugauggcag

SEQ ID NO: 4024306 - RNA, 19 nt, Measles virus
acaucaguaucccacagcc

SEQ ID NO: 4024307 - RNA, 17 nt, Measles virus
acaugcuuccagcaggc

SEQ ID NO: 4024308 - RNA, 17 nt, Measles virus
acaugggacaaaaaacu

SEQ ID NO: 4024309 - RNA, 22 nt, Measles virus
accacccugggccaccagcucc

SEQ ID NO: 4024310 - RNA, 16 nt, Measles virus
accagacccagcaccc

SEQ ID NO: 4024311 - RNA, 23 nt, Measles virus
accccgcaaaaaggaaaggccac

SEQ ID NO: 4024312 - RNA, 19 nt, Measles virus
acccucucaggaggagacg

SEQ ID NO: 4024313 - RNA, 13 nt, Measles virus
acccugacaagau

SEQ ID NO: 4024314 - RNA, 17 nt, Measles virus
accgcauccagcaucaa

SEQ ID NO: 4024315 - RNA, 17 nt, Measles virus
accgcauccccacagcu

SEQ ID NO: 4024316 - RNA, 20 nt, Measles virus
accgcauccccacagcuccc

SEQ ID NO: 4024317 - RNA, 13 nt, Measles virus
accgcuggacacc

SEQ ID NO: 4024318 - RNA, 18 nt, Measles virus
accuacgauacuuccagg

SEQ ID NO: 4024319 - RNA, 16 nt, Measles virus
accuccaugacccuga

SEQ ID NO: 4024320 - RNA, 19 nt, Measles virus
accugcaaggaagaggagg

SEQ ID NO: 4024321 - RNA, 18 nt, Measles virus
accugucuuacagccuga

SEQ ID NO: 4024322 - RNA, 20 nt, Measles virus
acgagcuccugaaacuccaa

SEQ ID NO: 4024323 - RNA, 16 nt, Measles virus
acgguucagggaugga

SEQ ID NO: 4024324 - RNA, 14 nt, Measles virus
acuaacccuccuca

SEQ ID NO: 4024325 - RNA, 18 nt, Measles virus
acuaugacaucccaggga

SEQ ID NO: 4024326 - RNA, 17 nt, Measles virus
acucaacucuacuggag

SEQ ID NO: 4024327 - RNA, 16 nt, Measles virus
acucagaggugcuuuc

SEQ ID NO: 4024328 - RNA, 19 nt, Measles virus
acuccaucgugcagccauc

SEQ ID NO: 4024329 - RNA, 14 nt, Measles virus
acugaaauacauga

SEQ ID NO: 4024330 - RNA, 13 nt, Measles virus
acugcagaaggag

SEQ ID NO: 4024331 - RNA, 22 nt, Measles virus
acuggagccgauggcagaagag

SEQ ID NO: 4024332 - RNA, 15 nt, Measles virus
acuuagggccaagga

SEQ ID NO: 4024333 - RNA, 14 nt, Measles virus
acuuaucaugaguu

SEQ ID NO: 4024334 - RNA, 22 nt, Measles virus
acuuugaaaauacgaaguuucu

SEQ ID NO: 4024335 - RNA, 21 nt, Measles virus
agacuccaucgugcagccauc

SEQ ID NO: 4024336 - RNA, 18 nt, Measles virus
agaggggagguuaaugac

SEQ ID NO: 4024337 - RNA, 20 nt, Measles virus
agagguguuaucgcugacaa

SEQ ID NO: 4024338 - RNA, 14 nt, Measles virus
agaucucaaagaaa

SEQ ID NO: 4024339 - RNA, 19 nt, Measles virus
agaugucgaacucaauccc

SEQ ID NO: 4024340 - RNA, 15 nt, Measles virus
agauguuuuccuuaa

SEQ ID NO: 4024341 - RNA, 19 nt, Measles virus
agauguuuuccuuaaugau

SEQ ID NO: 4024342 - RNA, 22 nt, Measles virus
agcaagacucuccaugcacaac

SEQ ID NO: 4024343 - RNA, 14 nt, Measles virus
agccgacaacucca

SEQ ID NO: 4024344 - RNA, 16 nt, Measles virus
agccgacaacuccagg

SEQ ID NO: 4024345 - RNA, 17 nt, Measles virus
agccgcucauuuucuua

SEQ ID NO: 4024346 - RNA, 16 nt, Measles virus
agccucagcaccaauc

SEQ ID NO: 4024347 - RNA, 22 nt, Measles virus
agccugaaagaaaaggagauca

SEQ ID NO: 4024348 - RNA, 12 nt, Measles virus
agcgagaggcca

SEQ ID NO: 4024349 - RNA, 13 nt, Measles virus
agcugucucaaag

SEQ ID NO: 4024350 - RNA, 21 nt, Measles virus
agcugucucaaagggaaacug

SEQ ID NO: 4024351 - RNA, 19 nt, Measles virus
agcuugggaaaacucucaa

SEQ ID NO: 4024352 - RNA, 16 nt, Measles virus
aggacaccucagagau

SEQ ID NO: 4024353 - RNA, 18 nt, Measles virus
aggacaccucucaagcau

SEQ ID NO: 4024354 - RNA, 17 nt, Measles virus
aggacaggaccgagcca

SEQ ID NO: 4024355 - RNA, 13 nt, Measles virus
aggacaucaagga

SEQ ID NO: 4024356 - RNA, 11 nt, Measles virus
aggcaggcagu

SEQ ID NO: 4024357 - RNA, 17 nt, Measles virus
aggcauuauuugcaaua

SEQ ID NO: 4024358 - RNA, 12 nt, Measles virus
aggcccccaggg

SEQ ID NO: 4024359 - RNA, 22 nt, Measles virus
aggcguugccacagcugcucag

SEQ ID NO: 4024360 - RNA, 19 nt, Measles virus
agggcucaaauugcucaga

SEQ ID NO: 4024361 - RNA, 18 nt, Measles virus
agggucagaguugucaca

SEQ ID NO: 4024362 - RNA, 18 nt, Measles virus
agggucgaucgcuccgau

SEQ ID NO: 4024363 - RNA, 17 nt, Measles virus
agguccacacagccgcc

SEQ ID NO: 4024364 - RNA, 18 nt, Measles virus
aguaggagacacaagaga

SEQ ID NO: 4024365 - RNA, 20 nt, Measles virus
agugcguugauaacuggaaa

SEQ ID NO: 4024366 - RNA, 23 nt, Measles virus
agugguauaccacugugcccaag

SEQ ID NO: 4024367 - RNA, 20 nt, Measles virus
aguucucaagaagcccguug

SEQ ID NO: 4024368 - RNA, 14 nt, Measles virus
aguuguccuggcag

SEQ ID NO: 4024369 - RNA, 18 nt, Measles virus
aguuucuauucccagcuu

SEQ ID NO: 4024370 - RNA, 21 nt, Measles virus
auagaagacaaagagucaaca

SEQ ID NO: 4024371 - RNA, 16 nt, Measles virus
auagaccuuauguuuu

SEQ ID NO: 4024372 - RNA, 17 nt, Measles virus
auaggaaggaugaaugc

SEQ ID NO: 4024373 - RNA, 18 nt, Measles virus
auaggaaggaugaaugcu

SEQ ID NO: 4024374 - RNA, 22 nt, Measles virus
auaucacucacucugggauggu

SEQ ID NO: 4024375 - RNA, 16 nt, Measles virus
aucaguaucccacagc

SEQ ID NO: 4024376 - RNA, 22 nt, Measles virus
aucaguuccuagcugucucaaa

SEQ ID NO: 4024377 - RNA, 15 nt, Measles virus
auccaacuuaucaaa

SEQ ID NO: 4024378 - RNA, 23 nt, Measles virus
auccaggcaguuuugcagccauc

SEQ ID NO: 4024379 - RNA, 23 nt, Measles virus
auccagugauagauaggcuuuac

SEQ ID NO: 4024380 - RNA, 22 nt, Measles virus
aucccagaauaaugaagaaggg

SEQ ID NO: 4024381 - RNA, 13 nt, Measles virus
auccuaagggaag

SEQ ID NO: 4024382 - RNA, 20 nt, Measles virus
aucgagcaucaggucaagga

SEQ ID NO: 4024383 - RNA, 20 nt, Measles virus
aucuuauacccugaaguuca

SEQ ID NO: 4024384 - RNA, 12 nt, Measles virus
augacagccaga

SEQ ID NO: 4024385 - RNA, 19 nt, Measles virus
augacucguuccagccauc

SEQ ID NO: 4024386 - RNA, 15 nt, Measles virus
augcgcuuggaggag

SEQ ID NO: 4024387 - RNA, 19 nt, Measles virus
augggagucagcugcacag

SEQ ID NO: 4024388 - RNA, 16 nt, Measles virus
augucaucaaguccaa

SEQ ID NO: 4024389 - RNA, 19 nt, Measles virus
auguguauuggcugacuau

SEQ ID NO: 4024390 - RNA, 17 nt, Measles virus
auguugcugcagggggc

SEQ ID NO: 4024391 - RNA, 17 nt, Measles virus
auuaagaagcagaucaa

SEQ ID NO: 4024392 - RNA, 13 nt, Measles virus
auuaaugcccaau

SEQ ID NO: 4024393 - RNA, 16 nt, Measles virus
auuauguuuacagccc

SEQ ID NO: 4024394 - RNA, 19 nt, Measles virus
auucagaucggucaaugca

SEQ ID NO: 4024395 - RNA, 23 nt, Measles virus
auuggcaaguauuuuaaggacaa

SEQ ID NO: 4024396 - RNA, 21 nt, Measles virus
auuucagcaacugcauggugg

SEQ ID NO: 4024397 - RNA, 20 nt, Measles virus
auuugcaauauauuaaagaa

SEQ ID NO: 4024398 - RNA, 11 nt, Measles virus
caaaaaagccc

SEQ ID NO: 4024399 - RNA, 22 nt, Measles virus
caaaaaagcccccuccagaaga

SEQ ID NO: 4024400 - RNA, 21 nt, Measles virus
caaaacggguuuucugaugaa

SEQ ID NO: 4024401 - RNA, 16 nt, Measles virus
caaagaaagucacagg

SEQ ID NO: 4024402 - RNA, 11 nt, Measles virus
caaaggagaca

SEQ ID NO: 4024403 - RNA, 18 nt, Measles virus
caacccgaaccagcaccc

SEQ ID NO: 4024404 - RNA, 23 nt, Measles virus
caacccgaaccagcacccaagag

SEQ ID NO: 4024405 - RNA, 23 nt, Measles virus
caaccuacgauacuuccaggguu

SEQ ID NO: 4024406 - RNA, 18 nt, Measles virus
caacgagaccgaauaaau

SEQ ID NO: 4024407 - RNA, 17 nt, Measles virus
caacgaucuugccaagu

SEQ ID NO: 4024408 - RNA, 19 nt, Measles virus
caacucuugaaacacagau

SEQ ID NO: 4024409 - RNA, 22 nt, Measles virus
caacuggaaggccccucccccc

SEQ ID NO: 4024410 - RNA, 13 nt, Measles virus
caagaagaccuua

SEQ ID NO: 4024411 - RNA, 19 nt, Measles virus
caagacaucaaaacagccu

SEQ ID NO: 4024412 - RNA, 17 nt, Measles virus
caagcagggcaggagau

SEQ ID NO: 4024413 - RNA, 15 nt, Measles virus
caagcgagaggccag

SEQ ID NO: 4024414 - RNA, 15 nt, Measles virus
caaggccaccaccag

SEQ ID NO: 4024415 - RNA, 13 nt, Measles virus
caaguaggagaca

SEQ ID NO: 4024416 - RNA, 13 nt, Measles virus
caagucuccucuu

SEQ ID NO: 4024417 - RNA, 18 nt, Measles virus
caauauauuaaagaaaac

SEQ ID NO: 4024418 - RNA, 21 nt, Measles virus
cgcagaauacaggagacuacu

SEQ ID NO: 4024419 - RNA, 21 nt, Measles virus
cgcagcccucugucacaggga

SEQ ID NO: 4024420 - RNA, 17 nt, Measles virus
cgcagugcccagcaaua

SEQ ID NO: 4024421 - RNA, 13 nt, Measles virus
cgcgcaccccagc

SEQ ID NO: 4024422 - RNA, 16 nt, Measles virus
cgcggcaccgcgcccc

SEQ ID NO: 4024423 - RNA, 21 nt, Measles virus
cgcuccgaacacagaccacca

SEQ ID NO: 4024424 - RNA, 17 nt, Measles virus
cgcugacaaucaagcaa

SEQ ID NO: 4024425 - RNA, 19 nt, Measles virus
cggaagcguuaccugauga

SEQ ID NO: 4024426 - RNA, 12 nt, Measles virus
cggaccaagcga

SEQ ID NO: 4024427 - RNA, 15 nt, Measles virus
cggaccaagcgagag

SEQ ID NO: 4024428 - RNA, 21 nt, Measles virus
cggaccaagcgagaggccagc

SEQ ID NO: 4024429 - RNA, 17 nt, Measles virus
cggcaccgcgcccccac

SEQ ID NO: 4024430 - RNA, 23 nt, Measles virus
cggucagggaucuggagaaagcg

SEQ ID NO: 4024431 - RNA, 20 nt, Measles virus
caauauauuaaagaaaacuu

SEQ ID NO: 4024432 - RNA, 11 nt, Measles virus
caaucaaggaa

SEQ ID NO: 4024433 - RNA, 15 nt, Measles virus
caaucugagagcaag

SEQ ID NO: 4024434 - RNA, 22 nt, Measles virus
caaucugcguccuccucguggg

SEQ ID NO: 4024435 - RNA, 19 nt, Measles virus
cacaauccggaaugcucaa

SEQ ID NO: 4024436 - RNA, 19 nt, Measles virus
cacagauuucccacaaguc

SEQ ID NO: 4024437 - RNA, 17 nt, Measles virus
cacagccucuccaaguc

SEQ ID NO: 4024438 - RNA, 23 nt, Measles virus
caccaaccgcauccccacagcuc

SEQ ID NO: 4024439 - RNA, 19 nt, Measles virus
caccaggcggcccaagcac

SEQ ID NO: 4024440 - RNA, 21 nt, Measles virus
caccaggcggcccaagcacag

SEQ ID NO: 4024441 - RNA, 13 nt, Measles virus
cacccccaaagga

SEQ ID NO: 4024442 - RNA, 18 nt, Measles virus
caccgacaauccaagacg

SEQ ID NO: 4024443 - RNA, 19 nt, Measles virus
caccugcaaggaagaggag

SEQ ID NO: 4024444 - RNA, 17 nt, Measles virus
cacgcuuacagccugga

SEQ ID NO: 4024445 - RNA, 15 nt, Measles virus
cacgucgacacagag

SEQ ID NO: 4024446 - RNA, 17 nt, Measles virus
cacgucgacacagaguc

SEQ ID NO: 4024447 - RNA, 23 nt, Measles virus
cacugugucagaacaucaagcac

SEQ ID NO: 4024448 - RNA, 20 nt, Measles virus
cagaagagcaggcacgccau

SEQ ID NO: 4024449 - RNA, 23 nt, Measles virus
cagaaucugguggacauaucacu

SEQ ID NO: 4024450 - RNA, 17 nt, Measles virus
cagacaacccaggacag

SEQ ID NO: 4024451 - RNA, 14 nt, Measles virus
cagaccacccuggg

SEQ ID NO: 4024452 - RNA, 17 nt, Measles virus
aaaaaacggauucucca

SEQ ID NO: 4024453 - RNA, 18 nt, Measles virus
aaaacuuagggccaagga

SEQ ID NO: 4024454 - RNA, 10 nt, Measles virus
aaaccagagg

SEQ ID NO: 4024455 - RNA, 13 nt, Measles virus
aaacuuugaaaau

SEQ ID NO: 4024456 - RNA, 14 nt, Measles virus
aaagaucucaaaga

SEQ ID NO: 4024457 - RNA, 11 nt, Measles virus
aaaggccccca

SEQ ID NO: 4024458 - RNA, 18 nt, Measles virus
aaauacgaaguuucuauu

SEQ ID NO: 4024459 - RNA, 19 nt, Measles virus
aaaugacuuacaaaaugag

SEQ ID NO: 4024460 - RNA, 22 nt, Measles virus
aacaaaacuuagggccaaggaa

SEQ ID NO: 4024461 - RNA, 18 nt, Measles virus
aacaaguugguaugucaa

SEQ ID NO: 4024462 - RNA, 20 nt, Measles virus
aacaaguugguaugucaaga

SEQ ID NO: 4024463 - RNA, 18 nt, Measles virus
aaccaaccacaacaaugu

SEQ ID NO: 4024464 - RNA, 16 nt, Measles virus
aaccagaguccagacc

SEQ ID NO: 4024465 - RNA, 20 nt, Measles virus
aaccaugccucucagcaauu

SEQ ID NO: 4024466 - RNA, 14 nt, Measles virus
aacccuaauccugc

SEQ ID NO: 4024467 - RNA, 18 nt, Measles virus
aaccgaucacaugauguc

SEQ ID NO: 4024468 - RNA, 22 nt, Measles virus
aacucaguuccaaucugguaau

SEQ ID NO: 4024469 - RNA, 14 nt, Measles virus
aacugaugacauac

SEQ ID NO: 4024470 - RNA, 16 nt, Measles virus
aacuuugaaaauacga

SEQ ID NO: 4024471 - RNA, 15 nt, Measles virus
aagaaccuagccuua

SEQ ID NO: 4024472 - RNA, 14 nt, Measles virus
aagcacacccaccc

SEQ ID NO: 4024473 - RNA, 20 nt, Measles virus
aagcaguaacggcugcugaa

SEQ ID NO: 4024474 - RNA, 19 nt, Measles virus
aagcgagaggccagccagc

SEQ ID NO: 4024475 - RNA, 22 nt, Measles virus
aagcgaugacgacgcugaaacu

SEQ ID NO: 4024476 - RNA, 15 nt, Measles virus
aaggucaugccauau

SEQ ID NO: 4024477 - RNA, 13 nt, Measles virus
aaucggccagaag

SEQ ID NO: 4024478 - RNA, 18 nt, Measles virus
aaugagcaagacucucca

SEQ ID NO: 4024479 - RNA, 16 nt, Measles virus
aaugaugaccaaggac

SEQ ID NO: 4024480 - RNA, 19 nt, Measles virus
aaugcccaauauaacucuc

SEQ ID NO: 4024481 - RNA, 17 nt, Measles virus
aaugccgcacugauaca

SEQ ID NO: 4024482 - RNA, 12 nt, Measles virus
aaugccuccggg

SEQ ID NO: 4024483 - RNA, 19 nt, Measles virus
aaugucaggaaauacauga

SEQ ID NO: 4024484 - RNA, 23 nt, Measles virus
acaaguugguaugucaagaccag

SEQ ID NO: 4024485 - RNA, 13 nt, Measles virus
acaaugggauggc

SEQ ID NO: 4024486 - RNA, 14 nt, Measles virus
acacaaggccacca

SEQ ID NO: 4024487 - RNA, 16 nt, Measles virus
acacacgguucaggga

SEQ ID NO: 4024488 - RNA, 18 nt, Measles virus
acacagauuucccacaag

SEQ ID NO: 4024489 - RNA, 22 nt, Measles virus
acagcaaguguggacaccaggc

SEQ ID NO: 4024490 - RNA, 23 nt, Measles virus
acagccuuggccaaaauacacga

SEQ ID NO: 4024491 - RNA, 21 nt, Measles virus
acauacaucugacaggggaga

SEQ ID NO: 4024492 - RNA, 13 nt, Measles virus
acaucaaaacagc

SEQ ID NO: 4024493 - RNA, 18 nt, Measles virus
acauccugauugcagugu

SEQ ID NO: 4024494 - RNA, 12 nt, Measles virus
acaucuuaugau

SEQ ID NO: 4024495 - RNA, 14 nt, Measles virus
acaugcuuccagca

SEQ ID NO: 4024496 - RNA, 16 nt, Measles virus
accaaccauccacucc

SEQ ID NO: 4024497 - RNA, 19 nt, Measles virus
accaccgcauccagcauca

SEQ ID NO: 4024498 - RNA, 15 nt, Measles virus
accagaacaacaucc

SEQ ID NO: 4024499 - RNA, 14 nt, Measles virus
accagacccagcac

SEQ ID NO: 4024500 - RNA, 17 nt, Measles virus
accagagggagccccca

SEQ ID NO: 4024501 - RNA, 13 nt, Measles virus
accaguuccagag

SEQ ID NO: 4024502 - RNA, 16 nt, Measles virus
accaguuccagaggac

SEQ ID NO: 4024503 - RNA, 14 nt, Measles virus
acccaccccacaca

SEQ ID NO: 4024504 - RNA, 23 nt, Measles virus
acccacugauggauaucaaugaa

SEQ ID NO: 4024505 - RNA, 19 nt, Measles virus
acccgaugaguccucugcu

SEQ ID NO: 4024506 - RNA, 19 nt, Measles virus
acccgcgcaccccagcccc

SEQ ID NO: 4024507 - RNA, 15 nt, Measles virus
acccuaauccugccc

SEQ ID NO: 4024508 - RNA, 16 nt, Measles virus
acccuggaaggacacc

SEQ ID NO: 4024509 - RNA, 20 nt, Measles virus
acccugggccaccagcuccc

SEQ ID NO: 4024510 - RNA, 12 nt, Measles virus
accgaaccagag

SEQ ID NO: 4024511 - RNA, 23 nt, Measles virus
accgguucauuuuaucacaaggg

SEQ ID NO: 4024512 - RNA, 16 nt, Measles virus
acgcuuacagccugga

SEQ ID NO: 4024513 - RNA, 17 nt, Measles virus
acuggagccgauggcag

SEQ ID NO: 4024514 - RNA, 20 nt, Measles virus
acuggaggccagggcaacca

SEQ ID NO: 4024515 - RNA, 16 nt, Measles virus
acuggguuacaguguu

SEQ ID NO: 4024516 - RNA, 12 nt, Measles virus
cagcuuccagcu

SEQ ID NO: 4024517 - RNA, 15 nt, Measles virus
caggaaauacaugaa

SEQ ID NO: 4024518 - RNA, 18 nt, Measles virus
caggaccgagccaccugc

SEQ ID NO: 4024519 - RNA, 22 nt, Measles virus
caggaguccccaaagaucucaa

SEQ ID NO: 4024520 - RNA, 13 nt, Measles virus
caggaucuccaau

SEQ ID NO: 4024521 - RNA, 15 nt, Measles virus
caggcauccgacucc

SEQ ID NO: 4024522 - RNA, 18 nt, Measles virus
caggcuggugccccaggu

SEQ ID NO: 4024523 - RNA, 16 nt, Measles virus
caggguguccaagacu

SEQ ID NO: 4024524 - RNA, 17 nt, Measles virus
caggugcggcccuaggc

SEQ ID NO: 4024525 - RNA, 21 nt, Measles virus
caguacuguuaacucuccaaa

SEQ ID NO: 4024526 - RNA, 12 nt, Measles virus
caguagggccag

SEQ ID NO: 4024527 - RNA, 18 nt, Measles virus
caguucgggucucagcaa

SEQ ID NO: 4024528 - RNA, 18 nt, Measles virus
cauaagagccucagcacc

SEQ ID NO: 4024529 - RNA, 16 nt, Measles virus
cauaaugacagccaga

SEQ ID NO: 4024530 - RNA, 12 nt, Measles virus
caucaagcaccg

SEQ ID NO: 4024531 - RNA, 13 nt, Measles virus
caucaauccucug

SEQ ID NO: 4024532 - RNA, 15 nt, Measles virus
caucaauccucugca

SEQ ID NO: 4024533 - RNA, 17 nt, Measles virus
caucauaggcagagauu

SEQ ID NO: 4024534 - RNA, 17 nt, Measles virus
cauccacucccacgacu

SEQ ID NO: 4024535 - RNA, 15 nt, Measles virus
cauccugauugcagu

SEQ ID NO: 4024536 - RNA, 16 nt, Measles virus
caugaugucacccaga

SEQ ID NO: 4024537 - RNA, 22 nt, Measles virus
caugauguucuugaccaaaacg

SEQ ID NO: 4024538 - RNA, 13 nt, Measles virus
caugccagagggg

SEQ ID NO: 4024539 - RNA, 15 nt, Measles virus
caugccucucagcaa

SEQ ID NO: 4024540 - RNA, 23 nt, Measles virus
caugcugugguuuauuauguuua

SEQ ID NO: 4024541 - RNA, 13 nt, Measles virus
caugcuuccagca

SEQ ID NO: 4024542 - RNA, 13 nt, Measles virus
caugucaaaaacg

SEQ ID NO: 4024543 - RNA, 14 nt, Measles virus
cauguuucugagcu

SEQ ID NO: 4024544 - RNA, 14 nt, Measles virus
cauuggugaugaag

SEQ ID NO: 4024545 - RNA, 17 nt, Measles virus
ccaaacccgccggcccc

SEQ ID NO: 4024546 - RNA, 22 nt, Measles virus
ccaaccccgaaggucgcuccga

SEQ ID NO: 4024547 - RNA, 13 nt, Measles virus
ccaaccucuucac

SEQ ID NO: 4024548 - RNA, 21 nt, Measles virus
ccaagcgagaggccagccagc

SEQ ID NO: 4024549 - RNA, 12 nt, Measles virus
ccaauauguuuu

SEQ ID NO: 4024550 - RNA, 20 nt, Measles virus
ccaaucugcguccuccucgu

SEQ ID NO: 4024551 - RNA, 14 nt, Measles virus
ccacaacccgcgca

SEQ ID NO: 4024552 - RNA, 21 nt, Measles virus
ccacaacccgcgcaccccagc

SEQ ID NO: 4024553 - RNA, 21 nt, Measles virus
ccacauccuaagggaaguagg

SEQ ID NO: 4024554 - RNA, 12 nt, Measles virus
ccaccagcuccc

SEQ ID NO: 4024555 - RNA, 15 nt, Measles virus
ccaccgcauccagca

SEQ ID NO: 4024556 - RNA, 19 nt, Measles virus
ccagaagacuccacggacc

SEQ ID NO: 4024557 - RNA, 13 nt, Measles virus
ccagaaggcccgg

SEQ ID NO: 4024558 - RNA, 13 nt, Measles virus
ccagacccagcac

SEQ ID NO: 4024559 - RNA, 17 nt, Measles virus
ccagaguccagaccacc

SEQ ID NO: 4024560 - RNA, 16 nt, Measles virus
ccagcacccagccacc

SEQ ID NO: 4024561 - RNA, 21 nt, Measles virus
ccagcacuuccgagacaccca

SEQ ID NO: 4024562 - RNA, 16 nt, Measles virus
ccagcagccgacagca

SEQ ID NO: 4024563 - RNA, 20 nt, Measles virus
ccagcucccagacucggcca

SEQ ID NO: 4024564 - RNA, 19 nt, Measles virus
ccaggcaucaagcacuggg

SEQ ID NO: 4024565 - RNA, 20 nt, Measles virus
ccaggcggcccaagcacaga

SEQ ID NO: 4024566 - RNA, 22 nt, Measles virus
ccaggcggcccaagcacagaac

SEQ ID NO: 4024567 - RNA, 16 nt, Measles virus
ccagggaauguacggg

SEQ ID NO: 4024568 - RNA, 14 nt, Measles virus
ccaggucagaguca

SEQ ID NO: 4024569 - RNA, 15 nt, Measles virus
ccaucgugcagccau

SEQ ID NO: 4024570 - RNA, 15 nt, Measles virus
ccaugccucucagca

SEQ ID NO: 4024571 - RNA, 21 nt, Measles virus
ccaugcugaacucucaagcca

SEQ ID NO: 4024572 - RNA, 20 nt, Measles virus
ccauuauaaaaaacuuagga

SEQ ID NO: 4024573 - RNA, 14 nt, Measles virus
cccaagcacagaac

SEQ ID NO: 4024574 - RNA, 20 nt, Measles virus
cccaaguauguugcaaccca

SEQ ID NO: 4024575 - RNA, 20 nt, Measles virus
cccaauauaacucuccucaa

SEQ ID NO: 4024576 - RNA, 19 nt, Measles virus
cccacuacaaucagagguc

SEQ ID NO: 4024577 - RNA, 23 nt, Measles virus
cccagaauaaugaagaaggggga

SEQ ID NO: 4024578 - RNA, 21 nt, Measles virus
cccaggggccgacagccagca

SEQ ID NO: 4024579 - RNA, 22 nt, Measles virus
ccccgacacaaggccaccacca

SEQ ID NO: 4024580 - RNA, 20 nt, Measles virus
ccccgaccagacccagcacc

SEQ ID NO: 4024581 - RNA, 13 nt, Measles virus
cccgaaccagcac

SEQ ID NO: 4024582 - RNA, 16 nt, Measles virus
cccgacacaaggccac

SEQ ID NO: 4024583 - RNA, 19 nt, Measles virus
cccgauaguuaccaauaag

SEQ ID NO: 4024584 - RNA, 22 nt, Measles virus
cccgauccggcgggcagccacu

SEQ ID NO: 4024585 - RNA, 20 nt, Measles virus
cccgcgcaccccagccccga

SEQ ID NO: 4024586 - RNA, 14 nt, Measles virus
cccguugccagccg

SEQ ID NO: 4024587 - RNA, 19 nt, Measles virus
cccuaggcguugccacagc

SEQ ID NO: 4024588 - RNA, 20 nt, Measles virus
ccgaaccccaguagggccag

SEQ ID NO: 4024589 - RNA, 12 nt, Measles virus
ccgacagccagc

SEQ ID NO: 4024590 - RNA, 17 nt, Measles virus
ccgagaucccagaauaa

SEQ ID NO: 4024591 - RNA, 14 nt, Measles virus
ccgagcacuggccg

SEQ ID NO: 4024592 - RNA, 22 nt, Measles virus
ccgaggugacccaaccgcaggc

SEQ ID NO: 4024593 - RNA, 21 nt, Measles virus
ccgauccggcgggcagccacu

SEQ ID NO: 4024594 - RNA, 17 nt, Measles virus
ccgcauccccacagcuc

SEQ ID NO: 4024595 - RNA, 14 nt, Measles virus
ccguucccagaaga

SEQ ID NO: 4024596 - RNA, 23 nt, Measles virus
ccuagguaguuaggcauuauuug

SEQ ID NO: 4024597 - RNA, 13 nt, Measles virus
ccucaagaaaucu

SEQ ID NO: 4024598 - RNA, 20 nt, Measles virus
ccucauaaugacagccagaa

SEQ ID NO: 4024599 - RNA, 18 nt, Measles virus
ccucccccugcaugcugc

SEQ ID NO: 4024600 - RNA, 20 nt, Measles virus
ccucggaaccaucagggcca

SEQ ID NO: 4024601 - RNA, 23 nt, Measles virus
ccugaaacuccaauccagaggca

SEQ ID NO: 4024602 - RNA, 22 nt, Measles virus
ccugaucuuacagggacaucaa

SEQ ID NO: 4024603 - RNA, 16 nt, Measles virus
ccugucuuacagccug

SEQ ID NO: 4024604 - RNA, 20 nt, Measles virus
ccuuaaccacugcuuuacug

SEQ ID NO: 4024605 - RNA, 15 nt, Measles virus
ccuucuacaaagaca

SEQ ID NO: 4024606 - RNA, 15 nt, Measles virus
cgaaaaccagaggga

SEQ ID NO: 4024607 - RNA, 13 nt, Measles virus
cgaauaaaugccu

SEQ ID NO: 4024608 - RNA, 14 nt, Measles virus
cgacaacacggaca

SEQ ID NO: 4024609 - RNA, 19 nt, Measles virus
cgaccagacccagcaccca

SEQ ID NO: 4024610 - RNA, 12 nt, Measles virus
cgaccccacugc

SEQ ID NO: 4024611 - RNA, 22 nt, Measles virus
cgaccccccucauaaugacagc

SEQ ID NO: 4024612 - RNA, 16 nt, Measles virus
cgagaggccagccagc

SEQ ID NO: 4024613 - RNA, 16 nt, Measles virus
cgagcauucggguccc

SEQ ID NO: 4024614 - RNA, 19 nt, Measles virus
cgagcuccugaaacuccaa

SEQ ID NO: 4024615 - RNA, 18 nt, Measles virus
cgaggaagccauggcagc

SEQ ID NO: 4024616 - RNA, 20 nt, Measles virus
cgaggaagccauggcagcau

SEQ ID NO: 4024617 - RNA, 16 nt, Measles virus
cgauccucccaaggga

SEQ ID NO: 4024618 - RNA, 20 nt, Measles virus
cgcggcaccgcgcccccacc

SEQ ID NO: 4024619 - RNA, 17 nt, Measles virus
cgcuggacaccccgcag

SEQ ID NO: 4024620 - RNA, 19 nt, Measles virus
cggaaccaucagggccagg

SEQ ID NO: 4024621 - RNA, 20 nt, Measles virus
cggaccaguuccagaggaca

SEQ ID NO: 4024622 - RNA, 21 nt, Measles virus
cggaugauccagugauagaua

SEQ ID NO: 4024623 - RNA, 11 nt, Measles virus
cggccagaagc

SEQ ID NO: 4024624 - RNA, 12 nt, Measles virus
cggcccccccgg

SEQ ID NO: 4024625 - RNA, 17 nt, Measles virus
cgggaacuucaggagaa

SEQ ID NO: 4024626 - RNA, 14 nt, Measles virus
cuaacccuccucac

SEQ ID NO: 4024627 - RNA, 13 nt, Measles virus
cuaauccugcccu

SEQ ID NO: 4024628 - RNA, 18 nt, Measles virus
cuacacugugucagaaca

SEQ ID NO: 4024629 - RNA, 18 nt, Measles virus
cuagcugucucaaaggga

SEQ ID NO: 4024630 - RNA, 17 nt, Measles virus
cuaucaggggucaggga

SEQ ID NO: 4024631 - RNA, 13 nt, Measles virus
cucaaagaggcca

SEQ ID NO: 4024632 - RNA, 19 nt, Measles virus
cucaaauugcucagauacu

SEQ ID NO: 4024633 - RNA, 15 nt, Measles virus
cucagaaucuggugg

SEQ ID NO: 4024634 - RNA, 18 nt, Measles virus
cucagauaacagccggca

SEQ ID NO: 4024635 - RNA, 14 nt, Measles virus
cuccaaacacccac

SEQ ID NO: 4024636 - RNA, 19 nt, Measles virus
cuccaagaaugccuccggg

SEQ ID NO: 4024637 - RNA, 17 nt, Measles virus
cuccacacucuggcugu

SEQ ID NO: 4024638 - RNA, 21 nt, Measles virus
cuccacggaccaagcgagagg

SEQ ID NO: 4024639 - RNA, 19 nt, Measles virus
cucccccugcaugcugcag

SEQ ID NO: 4024640 - RNA, 20 nt, Measles virus
cuccucgugggacccccgag

SEQ ID NO: 4024641 - RNA, 21 nt, Measles virus
cucgaucgagcaucaggucaa

SEQ ID NO: 4024642 - RNA, 10 nt, Measles virus
cucuccucaa

SEQ ID NO: 4024643 - RNA, 15 nt, Measles virus
cucugauccucuaca

SEQ ID NO: 4024644 - RNA, 14 nt, Measles virus
cucuggcugucuca

SEQ ID NO: 4024645 - RNA, 17 nt, Measles virus
acugguaguucaguuga

SEQ ID NO: 4024646 - RNA, 15 nt, Measles virus
acuguuaacucucca

SEQ ID NO: 4024647 - RNA, 13 nt, Measles virus
agaagacaaagag

SEQ ID NO: 4024648 - RNA, 12 nt, Measles virus
agaauaaugaag

SEQ ID NO: 4024649 - RNA, 16 nt, Measles virus
agacuauuaugaugau

SEQ ID NO: 4024650 - RNA, 13 nt, Measles virus
agagagcagagga

SEQ ID NO: 4024651 - RNA, 18 nt, Measles virus
agaucauccacaauguca

SEQ ID NO: 4024652 - RNA, 13 nt, Measles virus
agauccacagcaa

SEQ ID NO: 4024653 - RNA, 17 nt, Measles virus
agauccacgagcuccug

SEQ ID NO: 4024654 - RNA, 16 nt, Measles virus
agauccauaagagccu

SEQ ID NO: 4024655 - RNA, 21 nt, Measles virus
agaucgcagaauacaggagac

SEQ ID NO: 4024656 - RNA, 18 nt, Measles virus
agaucucaaagaaaguca

SEQ ID NO: 4024657 - RNA, 20 nt, Measles virus
agauguggcugcugaagaac

SEQ ID NO: 4024658 - RNA, 17 nt, Measles virus
agauuacauuuucauaa

SEQ ID NO: 4024659 - RNA, 13 nt, Measles virus
agauuuggcuguu

SEQ ID NO: 4024660 - RNA, 18 nt, Measles virus
agcaaaaugggcuguccc

SEQ ID NO: 4024661 - RNA, 21 nt, Measles virus
agcaacuggaaggccccuccc

SEQ ID NO: 4024662 - RNA, 18 nt, Measles virus
agcaaguguggacaccag

SEQ ID NO: 4024663 - RNA, 13 nt, Measles virus
agcagaugcaaga

SEQ ID NO: 4024664 - RNA, 13 nt, Measles virus
agccaugcuggag

SEQ ID NO: 4024665 - RNA, 17 nt, Measles virus
agccccgacacaaggcc

SEQ ID NO: 4024666 - RNA, 17 nt, Measles virus
agccuaaucugagcagu

SEQ ID NO: 4024667 - RNA, 13 nt, Measles virus
agcgagaggccag

SEQ ID NO: 4024668 - RNA, 21 nt, Measles virus
agcgagaggccagccagcagc

SEQ ID NO: 4024669 - RNA, 15 nt, Measles virus
agcuuccagcucguc

SEQ ID NO: 4024670 - RNA, 20 nt, Measles virus
aggaaccagguccacacagc

SEQ ID NO: 4024671 - RNA, 13 nt, Measles virus
aggaacuccucaa

SEQ ID NO: 4024672 - RNA, 15 nt, Measles virus
aggagaaagaagagu

SEQ ID NO: 4024673 - RNA, 19 nt, Measles virus
aggagacuacugagaacag

SEQ ID NO: 4024674 - RNA, 12 nt, Measles virus
aggaugccaagg

SEQ ID NO: 4024675 - RNA, 13 nt, Measles virus
aggaugccaagga

SEQ ID NO: 4024676 - RNA, 14 nt, Measles virus
aggaugccaaggaa

SEQ ID NO: 4024677 - RNA, 23 nt, Measles virus
aggcggcccaagcacagaacagc

SEQ ID NO: 4024678 - RNA, 15 nt, Measles virus
agggaaacugcucag

SEQ ID NO: 4024679 - RNA, 17 nt, Measles virus
aggugcaccugcgggga

SEQ ID NO: 4024680 - RNA, 14 nt, Measles virus
aggugucuggaaau

SEQ ID NO: 4024681 - RNA, 19 nt, Measles virus
agguguuaucgcugacaau

SEQ ID NO: 4024682 - RNA, 22 nt, Measles virus
agguguugguagauccacagca

SEQ ID NO: 4024683 - RNA, 23 nt, Measles virus
agguuuuccaaugccugagggac

SEQ ID NO: 4024684 - RNA, 16 nt, Measles virus
aguacuguuaacucuc

SEQ ID NO: 4024685 - RNA, 13 nt, Measles virus
aguaucccacagc

SEQ ID NO: 4024686 - RNA, 22 nt, Measles virus
agucagauacauguggaaacug

SEQ ID NO: 4024687 - RNA, 17 nt, Measles virus
agucaucggaccagaua

SEQ ID NO: 4024688 - RNA, 20 nt, Measles virus
aguggagccuaccuccauga

SEQ ID NO: 4024689 - RNA, 12 nt, Measles virus
aguuaugacucg

SEQ ID NO: 4024690 - RNA, 18 nt, Measles virus
aguuccagaggacagcug

SEQ ID NO: 4024691 - RNA, 17 nt, Measles virus
aguuucuauucccagcu

SEQ ID NO: 4024692 - RNA, 12 nt, Measles virus
auaauaaugaag

SEQ ID NO: 4024693 - RNA, 12 nt, Measles virus
auaccuaccugc

SEQ ID NO: 4024694 - RNA, 20 nt, Measles virus
auagaagacaaagagucaac

SEQ ID NO: 4024695 - RNA, 15 nt, Measles virus
auagcacccucucag

SEQ ID NO: 4024696 - RNA, 17 nt, Measles virus
auaguaagaauccaggc

SEQ ID NO: 4024697 - RNA, 16 nt, Measles virus
auaucagcauauccac

SEQ ID NO: 4024698 - RNA, 17 nt, Measles virus
aucaauccaccacaucc

SEQ ID NO: 4024699 - RNA, 16 nt, Measles virus
aucaggggucagggaa

SEQ ID NO: 4024700 - RNA, 17 nt, Measles virus
aucauguuuaugaucac

SEQ ID NO: 4024701 - RNA, 20 nt, Measles virus
auccacgagcuccugaaacu

SEQ ID NO: 4024702 - RNA, 20 nt, Measles virus
auccacucccacgacuggag

SEQ ID NO: 4024703 - RNA, 17 nt, Measles virus
aucccaaucugcguccu

SEQ ID NO: 4024704 - RNA, 13 nt, Measles virus
aucccacagccuc

SEQ ID NO: 4024705 - RNA, 14 nt, Measles virus
auccccacagcucc

SEQ ID NO: 4024706 - RNA, 15 nt, Measles virus
auccgacgcuguccg

SEQ ID NO: 4024707 - RNA, 21 nt, Measles virus
auccgugagcuccuaaaaaag

SEQ ID NO: 4024708 - RNA, 16 nt, Measles virus
auccucccaagggaac

SEQ ID NO: 4024709 - RNA, 15 nt, Measles virus
aucggucaaugcagu

SEQ ID NO: 4024710 - RNA, 14 nt, Measles virus
aucuaaucucaaac

SEQ ID NO: 4024711 - RNA, 19 nt, Measles virus
augaagguacuuaucauga

SEQ ID NO: 4024712 - RNA, 17 nt, Measles virus
augagacucugaugaaa

SEQ ID NO: 4024713 - RNA, 18 nt, Measles virus
augcauccgggcucucaa

SEQ ID NO: 4024714 - RNA, 14 nt, Measles virus
augcauuggugaac

SEQ ID NO: 4024715 - RNA, 16 nt, Measles virus
augccucucagcaauu

SEQ ID NO: 4024716 - RNA, 16 nt, Measles virus
augccucuuagccugg

SEQ ID NO: 4024717 - RNA, 20 nt, Measles virus
augccucuuagccuggacag

SEQ ID NO: 4024718 - RNA, 19 nt, Measles virus
augccuucuacaaagacaa

SEQ ID NO: 4024719 - RNA, 19 nt, Measles virus
augcucaagcuucagguga

SEQ ID NO: 4024720 - RNA, 16 nt, Measles virus
auuauugcaaaaugaa

SEQ ID NO: 4024721 - RNA, 12 nt, Measles virus
auuauuugcaau

SEQ ID NO: 4024722 - RNA, 18 nt, Measles virus
auugcuaaguuggaggau

SEQ ID NO: 4024723 - RNA, 15 nt, Measles virus
auuguagccaugcug

SEQ ID NO: 4024724 - RNA, 13 nt, Measles virus
auuuaacauagaa

SEQ ID NO: 4024725 - RNA, 18 nt, Measles virus
auuuaacauagaagacaa

SEQ ID NO: 4024726 - RNA, 17 nt, Measles virus
caaaaaaaggcccccag

SEQ ID NO: 4024727 - RNA, 22 nt, Measles virus
caaaacggguuuucugaugaag

SEQ ID NO: 4024728 - RNA, 20 nt, Measles virus
caaaauugcuucaggauucg

SEQ ID NO: 4024729 - RNA, 23 nt, Measles virus
caaaguuaugacucguuccagcc

SEQ ID NO: 4024730 - RNA, 19 nt, Measles virus
caaaguucuguagaccgca

SEQ ID NO: 4024731 - RNA, 13 nt, Measles virus
caacaccccacua

SEQ ID NO: 4024732 - RNA, 21 nt, Measles virus
caacauccgccuacccuccau

SEQ ID NO: 4024733 - RNA, 18 nt, Measles virus
caacccgcgcaccccagc

SEQ ID NO: 4024734 - RNA, 17 nt, Measles virus
caaccgcauccccacag

SEQ ID NO: 4024735 - RNA, 23 nt, Measles virus
caacucggguucaagaagaccuu

SEQ ID NO: 4024736 - RNA, 20 nt, Measles virus
caacucuacuggaggccagg

SEQ ID NO: 4024737 - RNA, 21 nt, Measles virus
caagcacagaacagccccgac

SEQ ID NO: 4024738 - RNA, 23 nt, Measles virus
caagucuccucuucgucaucaag

SEQ ID NO: 4024739 - RNA, 22 nt, Measles virus
caauauauuaaagaaaacuuug

SEQ ID NO: 4024740 - RNA, 18 nt, Measles virus
caaucagacaagcagggc

SEQ ID NO: 4024741 - RNA, 19 nt, Measles virus
caauccagaggcaacaacu

SEQ ID NO: 4024742 - RNA, 18 nt, Measles virus
caaucugcguccuccucg

SEQ ID NO: 4024743 - RNA, 19 nt, Measles virus
cacaaggccaccaccagcc

SEQ ID NO: 4024744 - RNA, 13 nt, Measles virus
cacagaccaccaa

SEQ ID NO: 4024745 - RNA, 17 nt, Measles virus
cacagccgccagccaac

SEQ ID NO: 4024746 - RNA, 13 nt, Measles virus
cacagcugcucag

SEQ ID NO: 4024747 - RNA, 20 nt, Measles virus
cacagucacucgggaagaug

SEQ ID NO: 4024748 - RNA, 12 nt, Measles virus
cacaugagcagu

SEQ ID NO: 4024749 - RNA, 14 nt, Measles virus
caccaccagccauc

SEQ ID NO: 4024750 - RNA, 15 nt, Measles virus
caccagcucccagac

SEQ ID NO: 4024751 - RNA, 14 nt, Measles virus
caccaggcggccca

SEQ ID NO: 4024752 - RNA, 15 nt, Measles virus
cacccagccaccgac

SEQ ID NO: 4024753 - RNA, 23 nt, Measles virus
caccccgcaaaaaggaaaggcca

SEQ ID NO: 4024754 - RNA, 22 nt, Measles virus
caccggcccugcaucacgcagu

SEQ ID NO: 4024755 - RNA, 16 nt, Measles virus
cacgccaugucaaaaa

SEQ ID NO: 4024756 - RNA, 23 nt, Measles virus
cacucaauuccccacccccaaag

SEQ ID NO: 4024757 - RNA, 22 nt, Measles virus
cacuggccgaaguucucaagaa

SEQ ID NO: 4024758 - RNA, 14 nt, Measles virus
cagaacccagaccc

SEQ ID NO: 4024759 - RNA, 18 nt, Measles virus
cagaacccagaccccggc

SEQ ID NO: 4024760 - RNA, 15 nt, Measles virus
cagacccagcaccca

SEQ ID NO: 4024761 - RNA, 12 nt, Measles virus
cagaccccggcc

SEQ ID NO: 4024762 - RNA, 16 nt, Measles virus
cagagaucucacuugg

SEQ ID NO: 4024763 - RNA, 21 nt, Measles virus
cagagggagcccccaaccaaa

SEQ ID NO: 4024764 - RNA, 14 nt, Measles virus
cagaguccagacca

SEQ ID NO: 4024765 - RNA, 21 nt, Measles virus
cagaguccagaccacccuggg

SEQ ID NO: 4024766 - RNA, 16 nt, Measles virus
cagaguugucacaacu

SEQ ID NO: 4024767 - RNA, 20 nt, Measles virus
cagauccucuccccccggca

SEQ ID NO: 4024768 - RNA, 21 nt, Measles virus
cagcaacuggaaggccccucc

SEQ ID NO: 4024769 - RNA, 17 nt, Measles virus
cagcaucaagcccaccu

SEQ ID NO: 4024770 - RNA, 20 nt, Measles virus
cagccaucuacaccgcagag

SEQ ID NO: 4024771 - RNA, 17 nt, Measles virus
cagccccgacacaaggc

SEQ ID NO: 4024772 - RNA, 23 nt, Measles virus
cagccccgauccggcgggcagcc

SEQ ID NO: 4024773 - RNA, 14 nt, Measles virus
cagccgacagcaag

SEQ ID NO: 4024774 - RNA, 12 nt, Measles virus
cagccugaaaga

SEQ ID NO: 4024775 - RNA, 16 nt, Measles virus
aaaauacgaaguuucu

SEQ ID NO: 4024776 - RNA, 13 nt, Measles virus
aaaauaucagcau

SEQ ID NO: 4024777 - RNA, 16 nt, Measles virus
aaaccaugccucucag

SEQ ID NO: 4024778 - RNA, 14 nt, Measles virus
aaacucaguuccaa

SEQ ID NO: 4024779 - RNA, 17 nt, Measles virus
aaacuuagggugcaaga

SEQ ID NO: 4024780 - RNA, 21 nt, Measles virus
aaaggugucagcuuccagcuc

SEQ ID NO: 4024781 - RNA, 15 nt, Measles virus
aaagucauuguguau

SEQ ID NO: 4024782 - RNA, 15 nt, Measles virus
aacauaccuaccugc

SEQ ID NO: 4024783 - RNA, 14 nt, Measles virus
aacccagaccccgg

SEQ ID NO: 4024784 - RNA, 17 nt, Measles virus
aaccgcauccccacagc

SEQ ID NO: 4024785 - RNA, 21 nt, Measles virus
aacggugugaccauccaaguc

SEQ ID NO: 4024786 - RNA, 19 nt, Measles virus
aagaaaacuuugaaaauac

SEQ ID NO: 4024787 - RNA, 15 nt, Measles virus
aagacccugacaaga

SEQ ID NO: 4024788 - RNA, 14 nt, Measles virus
aagacucauccagu

SEQ ID NO: 4024789 - RNA, 15 nt, Measles virus
aagcagggcaggaga

SEQ ID NO: 4024790 - RNA, 16 nt, Measles virus
aagccauggcagcaug

SEQ ID NO: 4024791 - RNA, 22 nt, Measles virus
aagcgguuaagggaauccaaga

SEQ ID NO: 4024792 - RNA, 15 nt, Measles virus
aaggacgugcugaca

SEQ ID NO: 4024793 - RNA, 23 nt, Measles virus
aaggcacuccacacucuggcugu

SEQ ID NO: 4024794 - RNA, 22 nt, Measles virus
aagucccccggucuccuccucu

SEQ ID NO: 4024795 - RNA, 16 nt, Measles virus
aaguucucaagaagcc

SEQ ID NO: 4024796 - RNA, 17 nt, Measles virus
uuaauauguugcugcag

SEQ ID NO: 4024797 - RNA, 14 nt, Measles virus
cuggggaaugcaau

SEQ ID NO: 4024798 - RNA, 17 nt, Measles virus
cuggugccgucacuucu

SEQ ID NO: 4024799 - RNA, 23 nt, Measles virus
cuuaccugccaaccccaugccag

SEQ ID NO: 4024800 - RNA, 17 nt, Measles virus
cuuagagagcagaggaa

SEQ ID NO: 4024801 - RNA, 15 nt, Measles virus
cuuagggccaaggaa

SEQ ID NO: 4024802 - RNA, 14 nt, Measles virus
cuuaucaaauugua

SEQ ID NO: 4024803 - RNA, 21 nt, Measles virus
cuuaucucgaauuuugaugag

SEQ ID NO: 4024804 - RNA, 12 nt, Measles virus
cuucaaugcaaa

SEQ ID NO: 4024805 - RNA, 16 nt, Measles virus
cuuccagcucgucaag

SEQ ID NO: 4024806 - RNA, 17 nt, Measles virus
cuugccaaguuccacca

SEQ ID NO: 4024807 - RNA, 19 nt, Measles virus
cuugggaaaacucucaaug

SEQ ID NO: 4024808 - RNA, 15 nt, Measles virus
cuuucaugccagagg

SEQ ID NO: 4024809 - RNA, 20 nt, Measles virus
gaaaauacgaaguuucuauu

SEQ ID NO: 4024810 - RNA, 15 nt, Measles virus
gaaauacaugaauca

SEQ ID NO: 4024811 - RNA, 15 nt, Measles virus
gaaauagacaucaga

SEQ ID NO: 4024812 - RNA, 10 nt, Measles virus
gaaccagagu

SEQ ID NO: 4024813 - RNA, 12 nt, Measles virus
gaaccagcaccc

SEQ ID NO: 4024814 - RNA, 14 nt, Measles virus
gaaccagcacccaa

SEQ ID NO: 4024815 - RNA, 17 nt, Measles virus
gaacuccggaacccuaa

SEQ ID NO: 4024816 - RNA, 19 nt, Measles virus
gaacuccucaaagaggcca

SEQ ID NO: 4024817 - RNA, 13 nt, Measles virus
gaagccauggcag

SEQ ID NO: 4024818 - RNA, 14 nt, Measles virus
gaauacaggagacu

SEQ ID NO: 4024819 - RNA, 16 nt, Measles virus
gaaugucaucaagucc

SEQ ID NO: 4024820 - RNA, 17 nt, Measles virus
gacaccaggcggcccaa

SEQ ID NO: 4024821 - RNA, 19 nt, Measles virus
gacaccucagagauucacu

SEQ ID NO: 4024822 - RNA, 14 nt, Measles virus
gacacuaacucacg

SEQ ID NO: 4024823 - RNA, 20 nt, Measles virus
gacaguugagcuuaaaauca

SEQ ID NO: 4024824 - RNA, 22 nt, Measles virus
gaccaagcgagaggccagccag

SEQ ID NO: 4024825 - RNA, 15 nt, Measles virus
gaccacccugggcca

SEQ ID NO: 4024826 - RNA, 18 nt, Measles virus
gaccacccugggccacca

SEQ ID NO: 4024827 - RNA, 14 nt, Measles virus
gaccccggcccgcg

SEQ ID NO: 4024828 - RNA, 17 nt, Measles virus
gaccgcagugcccagca

SEQ ID NO: 4024829 - RNA, 20 nt, Measles virus
gaccggggaucugcucccau

SEQ ID NO: 4024830 - RNA, 15 nt, Measles virus
gaccuuauguuuugc

SEQ ID NO: 4024831 - RNA, 16 nt, Measles virus
gacuccuuagacagau

SEQ ID NO: 4024832 - RNA, 20 nt, Measles virus
gacuccuuagacagauccuc

SEQ ID NO: 4024833 - RNA, 16 nt, Measles virus
gacuuacaaaaugagg

SEQ ID NO: 4024834 - RNA, 12 nt, Measles virus
gacuucagagau

SEQ ID NO: 4024835 - RNA, 18 nt, Measles virus
gagaucuacgauuucgac

SEQ ID NO: 4024836 - RNA, 18 nt, Measles virus
gagcccuuucuguuuugg

SEQ ID NO: 4024837 - RNA, 14 nt, Measles virus
gagccgauggcaga

SEQ ID NO: 4024838 - RNA, 20 nt, Measles virus
gaggacagcugcugaaggaa

SEQ ID NO: 4024839 - RNA, 21 nt, Measles virus
gaggugaacggugugaccauc

SEQ ID NO: 4024840 - RNA, 21 nt, Measles virus
gagguguuaucgcugacaauc

SEQ ID NO: 4024841 - RNA, 14 nt, Measles virus
gagucaacaaggaa

SEQ ID NO: 4024842 - RNA, 23 nt, Measles virus
gaguccucugcuccaagaaugcc

SEQ ID NO: 4024843 - RNA, 19 nt, Measles virus
gauaucaaaggagccaacg

SEQ ID NO: 4024844 - RNA, 16 nt, Measles virus
gauccucuccccccgg

SEQ ID NO: 4024845 - RNA, 14 nt, Measles virus
gaucggucaaugca

SEQ ID NO: 4024846 - RNA, 23 nt, Measles virus
gaucugacaauguaccuaaagga

SEQ ID NO: 4024847 - RNA, 20 nt, Measles virus
gauggcagaagagcaggcac

SEQ ID NO: 4024848 - RNA, 18 nt, Measles virus
gcaaccaccgcauccagc

SEQ ID NO: 4024849 - RNA, 18 nt, Measles virus
gcaaguguggacaccagg

SEQ ID NO: 4024850 - RNA, 16 nt, Measles virus
gcaauauauuaaagaa

SEQ ID NO: 4024851 - RNA, 15 nt, Measles virus
gcaaugacccagaau

SEQ ID NO: 4024852 - RNA, 11 nt, Measles virus
gcacacccacc

SEQ ID NO: 4024853 - RNA, 18 nt, Measles virus
gcacuuaaugcaaugacc

SEQ ID NO: 4024854 - RNA, 15 nt, Measles virus
gcagugcccagcaau

SEQ ID NO: 4024855 - RNA, 16 nt, Measles virus
gcagugcccagcaaua

SEQ ID NO: 4024856 - RNA, 20 nt, Measles virus
gcauccccacagcucccggg

SEQ ID NO: 4024857 - RNA, 16 nt, Measles virus
gccacagcugcucaga

SEQ ID NO: 4024858 - RNA, 15 nt, Measles virus
gccaccaccagccau

SEQ ID NO: 4024859 - RNA, 13 nt, Measles virus
gccaccagcuccc

SEQ ID NO: 4024860 - RNA, 18 nt, Measles virus
gccagccgacaacuccag

SEQ ID NO: 4024861 - RNA, 19 nt, Measles virus
gccauaggaggagacacac

SEQ ID NO: 4024862 - RNA, 17 nt, Measles virus
gcccaccugaaauuguc

SEQ ID NO: 4024863 - RNA, 20 nt, Measles virus
gccccgacacaaggccacca

SEQ ID NO: 4024864 - RNA, 21 nt, Measles virus
gccccgacacaaggccaccac

SEQ ID NO: 4024865 - RNA, 13 nt, Measles virus
gccgacagccagc

SEQ ID NO: 4024866 - RNA, 14 nt, Measles virus
gccgacagccagca

SEQ ID NO: 4024867 - RNA, 14 nt, Measles virus
gccgccagccaacc

SEQ ID NO: 4024868 - RNA, 20 nt, Measles virus
gccuacccuccaucauuguu

SEQ ID NO: 4024869 - RNA, 18 nt, Measles virus
gccugaaagaaaaggaga

SEQ ID NO: 4024870 - RNA, 19 nt, Measles virus
gcgaccgaggugacccaac

SEQ ID NO: 4024871 - RNA, 14 nt, Measles virus
gcggcccaagcaca

SEQ ID NO: 4024872 - RNA, 15 nt, Measles virus
gcuaaguuggaggau

SEQ ID NO: 4024873 - RNA, 18 nt, Measles virus
gcuagccauugcaggcau

SEQ ID NO: 4024874 - RNA, 13 nt, Measles virus
gcuauccuggagu

SEQ ID NO: 4024875 - RNA, 13 nt, Measles virus
gcucaagcuucag

SEQ ID NO: 4024876 - RNA, 21 nt, Measles virus
gcucccagacucggccaucac

SEQ ID NO: 4024877 - RNA, 13 nt, Measles virus
gcugcagacacaa

SEQ ID NO: 4024878 - RNA, 13 nt, Measles virus
gcugucccgacaa

SEQ ID NO: 4024879 - RNA, 24 nt, Measles virus
gcuuuaccucucaucucacagagg

SEQ ID NO: 4024880 - RNA, 17 nt, Measles virus
ggaagaggaggcaggca

SEQ ID NO: 4024881 - RNA, 16 nt, Measles virus
ggacagcugcugaagg

SEQ ID NO: 4024882 - RNA, 17 nt, Measles virus
ggacagcugcugaagga

SEQ ID NO: 4024883 - RNA, 18 nt, Measles virus
ggaccagauauugaggag

SEQ ID NO: 4024884 - RNA, 19 nt, Measles virus
ggaccgagccaccugcaag

SEQ ID NO: 4024885 - RNA, 14 nt, Measles virus
ggacguagggacaa

SEQ ID NO: 4024886 - RNA, 13 nt, Measles virus
ggagaucaaggaa

SEQ ID NO: 4024887 - RNA, 22 nt, Measles virus
ggagaugauauuggcuguucag

SEQ ID NO: 4024888 - RNA, 19 nt, Measles virus
ggagccaacgaucuugcca

SEQ ID NO: 4024889 - RNA, 18 nt, Measles virus
ggagucaucggaccagau

SEQ ID NO: 4024890 - RNA, 14 nt, Measles virus
ggaucaacugaagg

SEQ ID NO: 4024891 - RNA, 20 nt, Measles virus
ggaucuccaauauguuuugg

SEQ ID NO: 4024892 - RNA, 22 nt, Measles virus
ggccacaacccgcgcaccccag

SEQ ID NO: 4024893 - RNA, 18 nt, Measles virus
ggcggcccaagcacagaa

SEQ ID NO: 4024894 - RNA, 14 nt, Measles virus
ggcugcugaagaac

SEQ ID NO: 4024895 - RNA, 19 nt, Measles virus
gggcucaaauugcucagau

SEQ ID NO: 4024896 - RNA, 18 nt, Measles virus
ggucaauucucaaacaug

SEQ ID NO: 4024897 - RNA, 18 nt, Measles virus
ggucagggaucuggagaa

SEQ ID NO: 4024898 - RNA, 17 nt, Measles virus
gguguaccugcacagaa

SEQ ID NO: 4024899 - RNA, 16 nt, Measles virus
gguucagggcuucuga

SEQ ID NO: 4024900 - RNA, 15 nt, Measles virus
guaccugcacagaau

SEQ ID NO: 4024901 - RNA, 14 nt, Measles virus
guacgggggaacuu

SEQ ID NO: 4024902 - RNA, 21 nt, Measles virus
guaggauaguuauuaacagag

SEQ ID NO: 4024903 - RNA, 18 nt, Measles virus
gucaaaaacggacuggaa

SEQ ID NO: 4024904 - RNA, 22 nt, Measles virus
gucaauucucaaacaugucgcu

SEQ ID NO: 4024905 - RNA, 23 nt, Measles virus
gucagaaauaucagacaacccag

SEQ ID NO: 4024906 - RNA, 23 nt, Measles virus
guccaagacaucaaaacagccuu

SEQ ID NO: 4024907 - RNA, 22 nt, Measles virus
gucccaaccucuucacuguucc

SEQ ID NO: 4024908 - RNA, 21 nt, Measles virus
gucccucacgcuuacagccug

SEQ ID NO: 4024909 - RNA, 18 nt, Measles virus
gugaaauagacaucagaa

SEQ ID NO: 4024910 - RNA, 16 nt, Measles virus
gugaacucaacucuac

SEQ ID NO: 4024911 - RNA, 18 nt, Measles virus
gugcuugcggacucagaa

SEQ ID NO: 4024912 - RNA, 13 nt, Measles virus
guggaaugcuuca

SEQ ID NO: 4024913 - RNA, 20 nt, Measles virus
guggcugcugaagaacucau

SEQ ID NO: 4024914 - RNA, 16 nt, Measles virus
guuaucgcugacaauc

SEQ ID NO: 4024915 - RNA, 24 nt, Measles virus
guucagaguguagcuucaaguagg

SEQ ID NO: 4024916 - RNA, 17 nt, Measles virus
guuccagaggacagcug

SEQ ID NO: 4024917 - RNA, 18 nt, Measles virus
guuccuagcugucucaaa

SEQ ID NO: 4024918 - RNA, 18 nt, Measles virus
guugagcuuaaaaucaaa

SEQ ID NO: 4024919 - RNA, 23 nt, Measles virus
guugaggacagcgauccccuagg

SEQ ID NO: 4024920 - RNA, 18 nt, Measles virus
guugggaaugucaucaag

SEQ ID NO: 4024921 - RNA, 11 nt, Measles virus
guuucuauucc

SEQ ID NO: 4024922 - RNA, 23 nt, Measles virus
guuugaaguagggguuaucagaa

SEQ ID NO: 4024923 - RNA, 20 nt, Measles virus
cucuucucgaagggaccaaa

SEQ ID NO: 4024924 - RNA, 15 nt, Measles virus
cugaaaaugucagga

SEQ ID NO: 4024925 - RNA, 16 nt, Measles virus
cugaaaaugucaggaa

SEQ ID NO: 4024926 - RNA, 16 nt, Measles virus
cugaggacaccucaga

SEQ ID NO: 4024927 - RNA, 18 nt, Measles virus
cugaucuuacagggacau

SEQ ID NO: 4024928 - RNA, 16 nt, Measles virus
cugcaaggaagaggag

SEQ ID NO: 4024929 - RNA, 12 nt, Measles virus
cugcacucggga

SEQ ID NO: 4024930 - RNA, 23 nt, Measles virus
cugcguccuccucgugggacccc

SEQ ID NO: 4024931 - RNA, 16 nt, Measles virus
cugcucagggcccacu

SEQ ID NO: 4024932 - RNA, 23 nt, Measles virus
cugcuggggguuguugaggacag

SEQ ID NO: 4024933 - RNA, 21 nt, Measles virus
cuggaaggacaccucucaagc

SEQ ID NO: 4024934 - RNA, 19 nt, Measles virus
cugggccaccagcucccag

SEQ ID NO: 4024935 - RNA, 19 nt, Measles virus
cugguaauucuaccugguc

SEQ ID NO: 4024936 - RNA, 19 nt, Measles virus
cugucucaaagggaaacug

SEQ ID NO: 4024937 - RNA, 15 nt, Measles virus
cugugugcagccaaa

SEQ ID NO: 4024938 - RNA, 22 nt, Measles virus
cuuacagggacaucaaaauccu

SEQ ID NO: 4024939 - RNA, 21 nt, Measles virus
cuuagguguaaucaacacauu

SEQ ID NO: 4024940 - RNA, 11 nt, Measles virus
cuucagagauc

SEQ ID NO: 4024941 - RNA, 14 nt, Measles virus
cuucuaggaagagu

SEQ ID NO: 4024942 - RNA, 17 nt, Measles virus
cuugaucggguugcuag

SEQ ID NO: 4024943 - RNA, 16 nt, Measles virus
cuuggaggagauauca

SEQ ID NO: 4024944 - RNA, 18 nt, Measles virus
gaaagguccuaacaacag

SEQ ID NO: 4024945 - RNA, 16 nt, Measles virus
gaagcccaguccacac

SEQ ID NO: 4024946 - RNA, 12 nt, Measles virus
gaaucccagaau

SEQ ID NO: 4024947 - RNA, 18 nt, Measles virus
gacaaaaaacucuggugc

SEQ ID NO: 4024948 - RNA, 22 nt, Measles virus
gacaaaaaagcccccuccagaa

SEQ ID NO: 4024949 - RNA, 20 nt, Measles virus
gacaaaauuaaauuccuuaa

SEQ ID NO: 4024950 - RNA, 19 nt, Measles virus
gacaaacuauuuugagcaa

SEQ ID NO: 4024951 - RNA, 19 nt, Measles virus
gacaacacggacagaugac

SEQ ID NO: 4024952 - RNA, 20 nt, Measles virus
gacacaauccggaaugcuca

SEQ ID NO: 4024953 - RNA, 21 nt, Measles virus
gacaccgggaaucccagaauc

SEQ ID NO: 4024954 - RNA, 16 nt, Measles virus
gacagguggugcaacc

SEQ ID NO: 4024955 - RNA, 15 nt, Measles virus
gacagugaucugaca

SEQ ID NO: 4024956 - RNA, 17 nt, Measles virus
gacauacaucugacagg

SEQ ID NO: 4024957 - RNA, 16 nt, Measles virus
gacaucaaaauccuau

SEQ ID NO: 4024958 - RNA, 14 nt, Measles virus
gacaucccagggaa

SEQ ID NO: 4024959 - RNA, 20 nt, Measles virus
gaccaaaacggguuuucuga

SEQ ID NO: 4024960 - RNA, 14 nt, Measles virus
gacccagcacccag

SEQ ID NO: 4024961 - RNA, 16 nt, Measles virus
gacccagcacccagcc

SEQ ID NO: 4024962 - RNA, 22 nt, Measles virus
gacccccgaggaccaaccccga

SEQ ID NO: 4024963 - RNA, 18 nt, Measles virus
gacccuacacugugucag

SEQ ID NO: 4024964 - RNA, 18 nt, Measles virus
gaccgaauaaaugccuuc

SEQ ID NO: 4024965 - RNA, 22 nt, Measles virus
gacuaucccgccaaugaagaac

SEQ ID NO: 4024966 - RNA, 14 nt, Measles virus
gacucguuccagcc

SEQ ID NO: 4024967 - RNA, 20 nt, Measles virus
gacugagaugaggucaguga

SEQ ID NO: 4024968 - RNA, 16 nt, Measles virus
gacugugugcagccaa

SEQ ID NO: 4024969 - RNA, 15 nt, Measles virus
gagaggccagccagc

SEQ ID NO: 4024970 - RNA, 17 nt, Measles virus
gagauauccauccaggc

SEQ ID NO: 4024971 - RNA, 23 nt, Measles virus
gagauccauaagagccucagcac

SEQ ID NO: 4024972 - RNA, 21 nt, Measles virus
gagaugauauuggcuguucag

SEQ ID NO: 4024973 - RNA, 23 nt, Measles virus
gagcacgauuugacuaaggcacu

SEQ ID NO: 4024974 - RNA, 18 nt, Measles virus
gagcaucaggucaaggac

SEQ ID NO: 4024975 - RNA, 14 nt, Measles virus
gagccucagcacca

SEQ ID NO: 4024976 - RNA, 15 nt, Measles virus
gagcuccugaaacuc

SEQ ID NO: 4024977 - RNA, 22 nt, Measles virus
gaggaacuccucaaagaggcca

SEQ ID NO: 4024978 - RNA, 15 nt, Measles virus
gaggccagccagcag

SEQ ID NO: 4024979 - RNA, 17 nt, Measles virus
gaggggacugugugcag

SEQ ID NO: 4024980 - RNA, 21 nt, Measles virus
gaggggagguuaaugacagag

SEQ ID NO: 4024981 - RNA, 16 nt, Measles virus
gaggugcuuuccuuaa

SEQ ID NO: 4024982 - RNA, 18 nt, Measles virus
gaguccucugcuccaaga

SEQ ID NO: 4024983 - RNA, 16 nt, Measles virus
gauaaucagaagauaa

SEQ ID NO: 4024984 - RNA, 23 nt, Measles virus
gaucuggagaaagcgaugacgac

SEQ ID NO: 4024985 - RNA, 19 nt, Measles virus
gaugcugacucuaucaugg

SEQ ID NO: 4024986 - RNA, 12 nt, Measles virus
gaugucacccag

SEQ ID NO: 4024987 - RNA, 17 nt, Measles virus
gaugucacccagacauc

SEQ ID NO: 4024988 - RNA, 20 nt, Measles virus
gauuauaaacaauguggaag

SEQ ID NO: 4024989 - RNA, 17 nt, Measles virus
gcaaccgaaccagaguc

SEQ ID NO: 4024990 - RNA, 13 nt, Measles virus
gcaacugagggau

SEQ ID NO: 4024991 - RNA, 15 nt, Measles virus
gcaagaucauccaca

SEQ ID NO: 4024992 - RNA, 15 nt, Measles virus
gcaagccuggaaacu

SEQ ID NO: 4024993 - RNA, 17 nt, Measles virus
gcaauauauuaaagaaa

SEQ ID NO: 4024994 - RNA, 16 nt, Measles virus
gcacaccaacccccga

SEQ ID NO: 4024995 - RNA, 23 nt, Measles virus
gcacagaacagccccgacacaag

SEQ ID NO: 4024996 - RNA, 21 nt, Measles virus
ugagcuccuaaaaaagggaaa

SEQ ID NO: 4024997 - RNA, 15 nt, Measles virus
ugaggcaaucagaca

SEQ ID NO: 4024998 - RNA, 15 nt, Measles virus
ugaguccucugcucc

SEQ ID NO: 4024999 - RNA, 18 nt, Measles virus
ugaugaagguacuuauca

SEQ ID NO: 4025000 - RNA, 23 nt, Measles virus
ugcagauguggcugcugaagaac

SEQ ID NO: 4025001 - RNA, 21 nt, Measles virus
ugccagccgacaacuccaggg

SEQ ID NO: 4025002 - RNA, 22 nt, Measles virus
ugccagccgacaacuccaggga

SEQ ID NO: 4025003 - RNA, 20 nt, Measles virus
ugccauauuuuguggaauca

SEQ ID NO: 4025004 - RNA, 22 nt, Measles virus
ugcccaauauaacucuccucaa

SEQ ID NO: 4025005 - RNA, 22 nt, Measles virus
ugcccacagguaggcacaccaa

SEQ ID NO: 4025006 - RNA, 23 nt, Measles virus
ugcuggggguuguugaggacagc

SEQ ID NO: 4025007 - RNA, 14 nt, Measles virus
ugcuucaggauucg

SEQ ID NO: 4025008 - RNA, 11 nt, Measles virus
uggcugcugaa

SEQ ID NO: 4025009 - RNA, 15 nt, Measles virus
uggcugcugaagaac

SEQ ID NO: 4025010 - RNA, 21 nt, Measles virus
ugggaaagccuaaucugagca

SEQ ID NO: 4025011 - RNA, 17 nt, Measles virus
ugggauggugggcaugg

SEQ ID NO: 4025012 - RNA, 21 nt, Measles virus
ugggcaugggagucagcugca

SEQ ID NO: 4025013 - RNA, 16 nt, Measles virus
ugguaguucaguugag

SEQ ID NO: 4025014 - RNA, 17 nt, Measles virus
uguaaggucgcucugau

SEQ ID NO: 4025015 - RNA, 14 nt, Measles virus
uguagccaugcugg

SEQ ID NO: 4025016 - RNA, 15 nt, Measles virus
ugucagcuuccagcu

SEQ ID NO: 4025017 - RNA, 20 nt, Measles virus
uguucuacaacaacacccca

SEQ ID NO: 4025018 - RNA, 15 nt, Measles virus
uuaaagaaaacuuug

SEQ ID NO: 4025019 - RNA, 18 nt, Measles virus
uuaaagaaaacuuugaaa

SEQ ID NO: 4025020 - RNA, 23 nt, Measles virus
uuaaucaagacccugacaagauc

SEQ ID NO: 4025021 - RNA, 16 nt, Measles virus
uuaaucggccagaagc

SEQ ID NO: 4025022 - RNA, 17 nt, Measles virus
uuacugaaauacaugau

SEQ ID NO: 4025023 - RNA, 24 nt, Measles virus
uuagacguacagcagggcucaaug

SEQ ID NO: 4025024 - RNA, 17 nt, Measles virus
uuaggcauuauuugcaa

SEQ ID NO: 4025025 - RNA, 23 nt, Measles virus
uuaugacucguuccagccaucaa

SEQ ID NO: 4025026 - RNA, 13 nt, Measles virus
uuaugaucacagc

SEQ ID NO: 4025027 - RNA, 19 nt, Measles virus
uuauuugcaauauauuaaa

SEQ ID NO: 4025028 - RNA, 23 nt, Measles virus
uuccuagcugucucaaagggaaa

SEQ ID NO: 4025029 - RNA, 15 nt, Measles virus
uugcaauauauuaaa

SEQ ID NO: 4025030 - RNA, 17 nt, Measles virus
uugccacagcugcucag

SEQ ID NO: 4025031 - RNA, 15 nt, Measles virus
uuggccaccccugac

SEQ ID NO: 4025032 - RNA, 17 nt, Measles virus
uugguagauccacagca

SEQ ID NO: 4025033 - RNA, 20 nt, Measles virus
ggaggcuuguagauguuuuc

SEQ ID NO: 4025034 - RNA, 15 nt, Measles virus
ggauaacaggauucc

SEQ ID NO: 4025035 - RNA, 13 nt, Measles virus
ggcaccauugaag

SEQ ID NO: 4025036 - RNA, 22 nt, Measles virus
ggcaguucgggucucagcaaac

SEQ ID NO: 4025037 - RNA, 18 nt, Measles virus
ggcaguuuugcagccauc

SEQ ID NO: 4025038 - RNA, 18 nt, Measles virus
ggccgaaguucucaagaa

SEQ ID NO: 4025039 - RNA, 13 nt, Measles virus
ggccgagcccauc

SEQ ID NO: 4025040 - RNA, 21 nt, Measles virus
ggccgagcccaucggcucacu

SEQ ID NO: 4025041 - RNA, 18 nt, Measles virus
gggaaaaaggugagcuca

SEQ ID NO: 4025042 - RNA, 15 nt, Molluscum contagiosum virus
ugccugugggauggc

SEQ ID NO: 4025043 - RNA, 24 nt, Molluscum contagiosum virus
ugccuuggcgcccgugccgccggc

SEQ ID NO: 4025044 - RNA, 19 nt, Molluscum contagiosum virus
ugcgaagacgagcgcgugc

SEQ ID NO: 4025045 - RNA, 13 nt, Molluscum contagiosum virus
ugcgaaggucauc

SEQ ID NO: 4025046 - RNA, 21 nt, Molluscum contagiosum virus
ugcgaaguuggucaacaacac

SEQ ID NO: 4025047 - RNA, 14 nt, Molluscum contagiosum virus
ugcgacagcugcug

SEQ ID NO: 4025048 - RNA, 14 nt, Molluscum contagiosum virus
ugcgaccggcaaca

SEQ ID NO: 4025049 - RNA, 17 nt, Molluscum contagiosum virus
ugcgagaacucgcgugc

SEQ ID NO: 4025050 - RNA, 16 nt, Molluscum contagiosum virus
ugcgagccagccaggc

SEQ ID NO: 4025051 - RNA, 18 nt, Molluscum contagiosum virus
ugcgagccagccaggcgc

SEQ ID NO: 4025052 - RNA, 17 nt, Molluscum contagiosum virus
ugcgagcggcgcgcgcu

SEQ ID NO: 4025053 - RNA, 16 nt, Molluscum contagiosum virus
ugcgaggccugcgugg

SEQ ID NO: 4025054 - RNA, 22 nt, Molluscum contagiosum virus
ugcgagggagccucgcuggugu

SEQ ID NO: 4025055 - RNA, 19 nt, Molluscum contagiosum virus
ugcgagucucuguaacaag

SEQ ID NO: 4025056 - RNA, 19 nt, Molluscum contagiosum virus
ugcgcaacgcgggccaggc

SEQ ID NO: 4025057 - RNA, 18 nt, Molluscum contagiosum virus
ugcgcaagcucagccucu

SEQ ID NO: 4025058 - RNA, 14 nt, Molluscum contagiosum virus
ugcgcacgugcgcg

SEQ ID NO: 4025059 - RNA, 16 nt, Molluscum contagiosum virus
ugcgcagcguccggca

SEQ ID NO: 4025060 - RNA, 18 nt, Molluscum contagiosum virus
ugcgcaucccugcgcacc

SEQ ID NO: 4025061 - RNA, 23 nt, Molluscum contagiosum virus
ugcgcaucccugcgcaccugcac

SEQ ID NO: 4025062 - RNA, 15 nt, Molluscum contagiosum virus
ugcgcauggccacgc

SEQ ID NO: 4025063 - RNA, 13 nt, Molluscum contagiosum virus
ugcgcccacgagu

SEQ ID NO: 4025064 - RNA, 13 nt, Molluscum contagiosum virus
ugcgccucggacu

SEQ ID NO: 4025065 - RNA, 16 nt, Molluscum contagiosum virus
ugcgcgacaugcugcc

SEQ ID NO: 4025066 - RNA, 12 nt, Molluscum contagiosum virus
ugcgcgagcagc

SEQ ID NO: 4025067 - RNA, 20 nt, Molluscum contagiosum virus
ugcgcgagcgcgcgcugcgc

SEQ ID NO: 4025068 - RNA, 13 nt, Molluscum contagiosum virus
ugcgcgcgcgcgu

SEQ ID NO: 4025069 - RNA, 18 nt, Molluscum contagiosum virus
ugcgcgcgcucauggcgc

SEQ ID NO: 4025070 - RNA, 19 nt, Molluscum contagiosum virus
ugcgcgcugcgggcgccgg

SEQ ID NO: 4025071 - RNA, 18 nt, Molluscum contagiosum virus
ugcgcgggaugcuggacg

SEQ ID NO: 4025072 - RNA, 13 nt, Molluscum contagiosum virus
ugcgcggggcagg

SEQ ID NO: 4025073 - RNA, 15 nt, Molluscum contagiosum virus
ugcgcguccgcaaag

SEQ ID NO: 4025074 - RNA, 17 nt, Molluscum contagiosum virus
ugcgcgugcugggcccc

SEQ ID NO: 4025075 - RNA, 20 nt, Molluscum contagiosum virus
ugcgcgugugcagcagguag

SEQ ID NO: 4025076 - RNA, 17 nt, Molluscum contagiosum virus
ugcgcguucgcaaagac

SEQ ID NO: 4025077 - RNA, 21 nt, Molluscum contagiosum virus
ugcgcuacguuccgcgcgggg

SEQ ID NO: 4025078 - RNA, 15 nt, Molluscum contagiosum virus
ugcgcuccaugcugc

SEQ ID NO: 4025079 - RNA, 17 nt, Molluscum contagiosum virus
ugcgcugucucuccgag

SEQ ID NO: 4025080 - RNA, 17 nt, Molluscum contagiosum virus
ugcgcuucggcucccag

SEQ ID NO: 4025081 - RNA, 18 nt, Molluscum contagiosum virus
ugcgcuuuuuuuguccug

SEQ ID NO: 4025082 - RNA, 20 nt, Molluscum contagiosum virus
ugcggagacuguuaggcauc

SEQ ID NO: 4025083 - RNA, 15 nt, Molluscum contagiosum virus
ugcggccaccagcgc

SEQ ID NO: 4025084 - RNA, 17 nt, Molluscum contagiosum virus
ugcggcgcgggcaagca

SEQ ID NO: 4025085 - RNA, 22 nt, Molluscum contagiosum virus
ugcggcgcgugccgcugcgcgg

SEQ ID NO: 4025086 - RNA, 18 nt, Molluscum contagiosum virus
ugcggcuccaacagcagc

SEQ ID NO: 4025087 - RNA, 22 nt, Molluscum contagiosum virus
ugcguacacauggccgcgcgcu

SEQ ID NO: 4025088 - RNA, 15 nt, Molluscum contagiosum virus
ugcgucccagcagcu

SEQ ID NO: 4025089 - RNA, 19 nt, Molluscum contagiosum virus
ugcgucccagcagcugcuc

SEQ ID NO: 4025090 - RNA, 16 nt, Molluscum contagiosum virus
ugcguuuccagggcag

SEQ ID NO: 4025091 - RNA, 16 nt, Molluscum contagiosum virus
ugcuacgcgagcacug

SEQ ID NO: 4025092 - RNA, 14 nt, Molluscum contagiosum virus
ugcuauuaccugac

SEQ ID NO: 4025093 - RNA, 15 nt, Molluscum contagiosum virus
ugcuccacgcgcagc

SEQ ID NO: 4025094 - RNA, 17 nt, Molluscum contagiosum virus
ugcucccgaggcgcgcu

SEQ ID NO: 4025095 - RNA, 17 nt, Molluscum contagiosum virus
ugcucccucgcgcgcag

SEQ ID NO: 4025096 - RNA, 15 nt, Molluscum contagiosum virus
ugcuccgaggaggca

SEQ ID NO: 4025097 - RNA, 19 nt, Molluscum contagiosum virus
ugcucgcuugccgcuugag

SEQ ID NO: 4025098 - RNA, 21 nt, Molluscum contagiosum virus
ugcucgguagcguggagcugg

SEQ ID NO: 4025099 - RNA, 16 nt, Molluscum contagiosum virus
ugcucuaccuggugcu

SEQ ID NO: 4025100 - RNA, 18 nt, Molluscum contagiosum virus
ugcucuaccuggugcugg

SEQ ID NO: 4025101 - RNA, 19 nt, Molluscum contagiosum virus
ugcucuacgcaacacggcg

SEQ ID NO: 4025102 - RNA, 16 nt, Molluscum contagiosum virus
ugcugaagaaggagcc

SEQ ID NO: 4025103 - RNA, 11 nt, Molluscum contagiosum virus
ugcugcagcuc

SEQ ID NO: 4025104 - RNA, 13 nt, Molluscum contagiosum virus
ugcugcaggcgua

SEQ ID NO: 4025105 - RNA, 18 nt, Molluscum contagiosum virus
ugcugccgcgcggcacgc

SEQ ID NO: 4025106 - RNA, 19 nt, Molluscum contagiosum virus
ugcugcgccacgugcgcau

SEQ ID NO: 4025107 - RNA, 19 nt, Molluscum contagiosum virus
ugcugcgcgcgccaugguu

SEQ ID NO: 4025108 - RNA, 22 nt, Molluscum contagiosum virus
ugcugcgcuucgccgcgcgcgc

SEQ ID NO: 4025109 - RNA, 15 nt, Molluscum contagiosum virus
ugcuggacacucgcg

SEQ ID NO: 4025110 - RNA, 16 nt, Molluscum contagiosum virus
ugcuggacgcgcacgc

SEQ ID NO: 4025111 - RNA, 23 nt, Molluscum contagiosum virus
ugcuggacgcgcacgcgggacgc

SEQ ID NO: 4025112 - RNA, 14 nt, Molluscum contagiosum virus
ugcuggagggcacg

SEQ ID NO: 4025113 - RNA, 19 nt, Molluscum contagiosum virus
ugcuggccaucgagcuucc

SEQ ID NO: 4025114 - RNA, 13 nt, Molluscum contagiosum virus
ugcuggcgggcgc

SEQ ID NO: 4025115 - RNA, 12 nt, Molluscum contagiosum virus
ugcugggcgugg

SEQ ID NO: 4025116 - RNA, 20 nt, Molluscum contagiosum virus
ugcuggucaagaaggcgcug

SEQ ID NO: 4025117 - RNA, 15 nt, Molluscum contagiosum virus
ugcugguggugcugg

SEQ ID NO: 4025118 - RNA, 19 nt, Molluscum contagiosum virus
ugcugguggugcuggagcg

SEQ ID NO: 4025119 - RNA, 24 nt, Molluscum contagiosum virus
ugcuucggcggcugugcccgcggc

SEQ ID NO: 4025120 - RNA, 13 nt, Molluscum contagiosum virus
ugcuugcgcacga

SEQ ID NO: 4025121 - RNA, 23 nt, Molluscum contagiosum virus
ugcuuugcgcgcguaugcgaaca

SEQ ID NO: 4025122 - RNA, 13 nt, Molluscum contagiosum virus
uggaaaggaggcu

SEQ ID NO: 4025123 - RNA, 11 nt, Molluscum contagiosum virus
uggaagaacag

SEQ ID NO: 4025124 - RNA, 16 nt, Molluscum contagiosum virus
uggaauugugcugcug

SEQ ID NO: 4025125 - RNA, 20 nt, Molluscum contagiosum virus
uggacacgcugcgcgugcug

SEQ ID NO: 4025126 - RNA, 21 nt, Molluscum contagiosum virus
uggaccacaagcaguaccugc

SEQ ID NO: 4025127 - RNA, 15 nt, Molluscum contagiosum virus
uggaccugcgccagc

SEQ ID NO: 4025128 - RNA, 17 nt, Molluscum contagiosum virus
uggacgcgcaagugugc

SEQ ID NO: 4025129 - RNA, 13 nt, Molluscum contagiosum virus
uggacgcuccgag

SEQ ID NO: 4025130 - RNA, 14 nt, Molluscum contagiosum virus
uggacgcuccgagc

SEQ ID NO: 4025131 - RNA, 17 nt, Molluscum contagiosum virus
uggacguguccgacgcg

SEQ ID NO: 4025132 - RNA, 10 nt, Molluscum contagiosum virus
uggacugugc

SEQ ID NO: 4025133 - RNA, 23 nt, Molluscum contagiosum virus
uggagaaagaagugugccugcug

SEQ ID NO: 4025134 - RNA, 23 nt, Molluscum contagiosum virus
uggagacggaggugguggccaag

SEQ ID NO: 4025135 - RNA, 14 nt, Molluscum contagiosum virus
uggagacggcagug

SEQ ID NO: 4025136 - RNA, 16 nt, Molluscum contagiosum virus
uggagacggcaguguc

SEQ ID NO: 4025137 - RNA, 17 nt, Molluscum contagiosum virus
uggagcacuuccgcgcg

SEQ ID NO: 4025138 - RNA, 19 nt, Molluscum contagiosum virus
uggagcacuuccgcgcgcu

SEQ ID NO: 4025139 - RNA, 22 nt, Molluscum contagiosum virus
uggagcagacguacgagcaggc

SEQ ID NO: 4025140 - RNA, 16 nt, Molluscum contagiosum virus
uggagcgcgcggacgc

SEQ ID NO: 4025141 - RNA, 16 nt, Molluscum contagiosum virus
uggagcuagcgcgcgc

SEQ ID NO: 4025142 - RNA, 18 nt, Molluscum contagiosum virus
uggagcugccgcugcgcg

SEQ ID NO: 4025143 - RNA, 19 nt, Molluscum contagiosum virus
uggagggcuccucuucaga

SEQ ID NO: 4025144 - RNA, 14 nt, Molluscum contagiosum virus
uggaguacuucaag

SEQ ID NO: 4025145 - RNA, 13 nt, Molluscum contagiosum virus
uggaugcugcucg

SEQ ID NO: 4025146 - RNA, 13 nt, Molluscum contagiosum virus
uggcaaacaggca

SEQ ID NO: 4025147 - RNA, 14 nt, Molluscum contagiosum virus
uggcaaaggcaggg

SEQ ID NO: 4025148 - RNA, 19 nt, Molluscum contagiosum virus
uggcaauccugguacgcgc

SEQ ID NO: 4025149 - RNA, 23 nt, Molluscum contagiosum virus
uggcacccuucugaggggcagug

SEQ ID NO: 4025150 - RNA, 15 nt, Molluscum contagiosum virus
uggcaccgcgcgcgc

SEQ ID NO: 4025151 - RNA, 15 nt, Molluscum contagiosum virus
uggcaccggaagcaa

SEQ ID NO: 4025152 - RNA, 14 nt, Molluscum contagiosum virus
uggcacgcgagcaa

SEQ ID NO: 4025153 - RNA, 16 nt, Molluscum contagiosum virus
uggcauccggcacgca

SEQ ID NO: 4025154 - RNA, 15 nt, Molluscum contagiosum virus
uggcauucucggaca

SEQ ID NO: 4025155 - RNA, 22 nt, Molluscum contagiosum virus
uggccaaggucucgagcuccag

SEQ ID NO: 4025156 - RNA, 13 nt, Molluscum contagiosum virus
uggcccccgccuu

SEQ ID NO: 4025157 - RNA, 13 nt, Molluscum contagiosum virus
cgcgcgcggcacg

SEQ ID NO: 4025158 - RNA, 12 nt, Molluscum contagiosum virus
cgcgcgcgugcc

SEQ ID NO: 4025159 - RNA, 20 nt, Molluscum contagiosum virus
cgcgcgcguuugucgcgggc

SEQ ID NO: 4025160 - RNA, 20 nt, Molluscum contagiosum virus
cgcgcgcuaccugcgcaagc

SEQ ID NO: 4025161 - RNA, 16 nt, Molluscum contagiosum virus
cgcgcgcuacgcgccg

SEQ ID NO: 4025162 - RNA, 20 nt, Molluscum contagiosum virus
cgcgcgcuaggggugccgcu

SEQ ID NO: 4025163 - RNA, 16 nt, Molluscum contagiosum virus
cgcgcgcucagcgccg

SEQ ID NO: 4025164 - RNA, 13 nt, Molluscum contagiosum virus
cgcgcgcucgcgc

SEQ ID NO: 4025165 - RNA, 14 nt, Molluscum contagiosum virus
cgcgcgcugcgcgc

SEQ ID NO: 4025166 - RNA, 20 nt, Molluscum contagiosum virus
cgcgcggaagcccgccucgu

SEQ ID NO: 4025167 - RNA, 17 nt, Molluscum contagiosum virus
cgcgcggcaagccuggc

SEQ ID NO: 4025168 - RNA, 12 nt, Molluscum contagiosum virus
cgcgcggcagca

SEQ ID NO: 4025169 - RNA, 14 nt, Molluscum contagiosum virus
cgcgcggcagcagc

SEQ ID NO: 4025170 - RNA, 15 nt, Molluscum contagiosum virus
cgcgcggcgcucugc

SEQ ID NO: 4025171 - RNA, 18 nt, Molluscum contagiosum virus
cgcgcggcuaagcucugc

SEQ ID NO: 4025172 - RNA, 16 nt, Molluscum contagiosum virus
cgcgcggugcugcgcc

SEQ ID NO: 4025173 - RNA, 16 nt, Molluscum contagiosum virus
cgcgcgucugcgagug

SEQ ID NO: 4025174 - RNA, 14 nt, Molluscum contagiosum virus
cgcgcgugccgggc

SEQ ID NO: 4025175 - RNA, 16 nt, Molluscum contagiosum virus
cgcgcgugugcauggc

SEQ ID NO: 4025176 - RNA, 22 nt, Molluscum contagiosum virus
cgcgcguguuugugcugucccu

SEQ ID NO: 4025177 - RNA, 18 nt, Molluscum contagiosum virus
cgcgcguugcugcccgug

SEQ ID NO: 4025178 - RNA, 21 nt, Molluscum contagiosum virus
cgcgcuauucaaagcugugcg

SEQ ID NO: 4025179 - RNA, 17 nt, Molluscum contagiosum virus
cgcgcuauucucguggc

SEQ ID NO: 4025180 - RNA, 14 nt, Molluscum contagiosum virus
cgcgcucacugcag

SEQ ID NO: 4025181 - RNA, 14 nt, Molluscum contagiosum virus
cgcgcuccgagucg

SEQ ID NO: 4025182 - RNA, 15 nt, Molluscum contagiosum virus
cgcgcucgcgcuucc

SEQ ID NO: 4025183 - RNA, 23 nt, Molluscum contagiosum virus
cgcgcucgcgggagcgggagggc

SEQ ID NO: 4025184 - RNA, 15 nt, Molluscum contagiosum virus
cgcgcucgcgugccg

SEQ ID NO: 4025185 - RNA, 20 nt, Molluscum contagiosum virus
cgcgcucgcucgcgcuccgc

SEQ ID NO: 4025186 - RNA, 18 nt, Molluscum contagiosum virus
cgcgcucgggaagcacgu

SEQ ID NO: 4025187 - RNA, 21 nt, Molluscum contagiosum virus
cgcgcugagcgcggagcuggc

SEQ ID NO: 4025188 - RNA, 14 nt, Molluscum contagiosum virus
cgcgcugccagcgg

SEQ ID NO: 4025189 - RNA, 13 nt, Molluscum contagiosum virus
cgcgcugcgcaag

SEQ ID NO: 4025190 - RNA, 12 nt, Molluscum contagiosum virus
cgcgcugcgccg

SEQ ID NO: 4025191 - RNA, 14 nt, Molluscum contagiosum virus
cgcgcugcgcgccg

SEQ ID NO: 4025192 - RNA, 15 nt, Molluscum contagiosum virus
cgcgcugcgggcgcc

SEQ ID NO: 4025193 - RNA, 12 nt, Molluscum contagiosum virus
cgcgcugcucug

SEQ ID NO: 4025194 - RNA, 21 nt, Molluscum contagiosum virus
cgcgcuggacuugcgcgagcg

SEQ ID NO: 4025195 - RNA, 18 nt, Molluscum contagiosum virus
cgcgcuggcgcgcgcgcu

SEQ ID NO: 4025196 - RNA, 17 nt, Molluscum contagiosum virus
cgcgcuucugccccguc

SEQ ID NO: 4025197 - RNA, 11 nt, Molluscum contagiosum virus
cgcgcuuuguc

SEQ ID NO: 4025198 - RNA, 16 nt, Molluscum contagiosum virus
cgcggaagaauuccuu

SEQ ID NO: 4025199 - RNA, 15 nt, Molluscum contagiosum virus
cgcggacgcgcccug

SEQ ID NO: 4025200 - RNA, 13 nt, Molluscum contagiosum virus
cgcggacgcgggc

SEQ ID NO: 4025201 - RNA, 15 nt, Molluscum contagiosum virus
cgcggagaccaccgc

SEQ ID NO: 4025202 - RNA, 22 nt, Molluscum contagiosum virus
cgcggagcgcuagcagggcggc

SEQ ID NO: 4025203 - RNA, 12 nt, Molluscum contagiosum virus
cgcggagcugug

SEQ ID NO: 4025204 - RNA, 20 nt, Molluscum contagiosum virus
cgcggauauggcgcgccgag

SEQ ID NO: 4025205 - RNA, 17 nt, Molluscum contagiosum virus
cgcggaugccacgcagc

SEQ ID NO: 4025206 - RNA, 19 nt, Molluscum contagiosum virus
cgcggaugccacgcagcug

SEQ ID NO: 4025207 - RNA, 20 nt, Molluscum contagiosum virus
cgcggaugccacgcagcugg

SEQ ID NO: 4025208 - RNA, 15 nt, Molluscum contagiosum virus
cgcggcaacagcacg

SEQ ID NO: 4025209 - RNA, 16 nt, Molluscum contagiosum virus
cgcggccaugcuccug

SEQ ID NO: 4025210 - RNA, 14 nt, Molluscum contagiosum virus
cgcggccgcggagg

SEQ ID NO: 4025211 - RNA, 15 nt, Molluscum contagiosum virus
cgcggccgcggaggg

SEQ ID NO: 4025212 - RNA, 13 nt, Molluscum contagiosum virus
cgcggccugggcc

SEQ ID NO: 4025213 - RNA, 20 nt, Molluscum contagiosum virus
cgcggcgagugcggccacca

SEQ ID NO: 4025214 - RNA, 14 nt, Molluscum contagiosum virus
cgcggcgcgccggc

SEQ ID NO: 4025215 - RNA, 12 nt, Molluscum contagiosum virus
cgcggcgcggcg

SEQ ID NO: 4025216 - RNA, 12 nt, Molluscum contagiosum virus
cgcggcgcucug

SEQ ID NO: 4025217 - RNA, 22 nt, Molluscum contagiosum virus
cgcggcgcucugccaccgcggc

SEQ ID NO: 4025218 - RNA, 22 nt, Molluscum contagiosum virus
cgcggcgguugcccgccugccg

SEQ ID NO: 4025219 - RNA, 17 nt, Molluscum contagiosum virus
cgcggcgugugcgggcu

SEQ ID NO: 4025220 - RNA, 12 nt, Molluscum contagiosum virus
cgcggcguuccc

SEQ ID NO: 4025221 - RNA, 18 nt, Molluscum contagiosum virus
cgcggcuaccacgggccc

SEQ ID NO: 4025222 - RNA, 23 nt, Molluscum contagiosum virus
cgcggcuaccacgggcccgcgcg

SEQ ID NO: 4025223 - RNA, 17 nt, Molluscum contagiosum virus
cgcggcuuacacacgca

SEQ ID NO: 4025224 - RNA, 12 nt, Molluscum contagiosum virus
cgcgggccaggc

SEQ ID NO: 4025225 - RNA, 13 nt, Molluscum contagiosum virus
cgcgggccgccgc

SEQ ID NO: 4025226 - RNA, 17 nt, Molluscum contagiosum virus
cgcgggccuguccgcgg

SEQ ID NO: 4025227 - RNA, 21 nt, Molluscum contagiosum virus
cgcgggccuguccgcgggcgc

SEQ ID NO: 4025228 - RNA, 12 nt, Molluscum contagiosum virus
cgcgggcgcacg

SEQ ID NO: 4025229 - RNA, 12 nt, Molluscum contagiosum virus
cgcgggcgcaga

SEQ ID NO: 4025230 - RNA, 22 nt, Molluscum contagiosum virus
cgcgggcgccggcguccgcggc

SEQ ID NO: 4025231 - RNA, 20 nt, Molluscum contagiosum virus
cgcgggcgcgcgccagcagc

SEQ ID NO: 4025232 - RNA, 14 nt, Molluscum contagiosum virus
cgcgggcgcgcgcg

SEQ ID NO: 4025233 - RNA, 18 nt, Molluscum contagiosum virus
cgcgggcgcgcggcaagc

SEQ ID NO: 4025234 - RNA, 16 nt, Molluscum contagiosum virus
cgcgggcggcggcccg

SEQ ID NO: 4025235 - RNA, 19 nt, Molluscum contagiosum virus
cgcgggcguguccgcgggc

SEQ ID NO: 4025236 - RNA, 17 nt, Molluscum contagiosum virus
cgcgguccagccgcacc

SEQ ID NO: 4025237 - RNA, 13 nt, Molluscum contagiosum virus
cgcggucgggccc

SEQ ID NO: 4025238 - RNA, 14 nt, Molluscum contagiosum virus
cgcggucgggcccc

SEQ ID NO: 4025239 - RNA, 14 nt, Molluscum contagiosum virus
cgcggugcagcugc

SEQ ID NO: 4025240 - RNA, 17 nt, Molluscum contagiosum virus
cgcggugcgcgcgugcg

SEQ ID NO: 4025241 - RNA, 17 nt, Molluscum contagiosum virus
cgcgguugagcgccgug

SEQ ID NO: 4025242 - RNA, 16 nt, Molluscum contagiosum virus
cgcguaaagagcgucc

SEQ ID NO: 4025243 - RNA, 20 nt, Molluscum contagiosum virus
cgcguacauaaaauggacca

SEQ ID NO: 4025244 - RNA, 13 nt, Molluscum contagiosum virus
cgcguagcagcgc

SEQ ID NO: 4025245 - RNA, 17 nt, Molluscum contagiosum virus
cgcguaguacgcuacgc

SEQ ID NO: 4025246 - RNA, 20 nt, Molluscum contagiosum virus
cgcgucaucgcugcacgcga

SEQ ID NO: 4025247 - RNA, 12 nt, Molluscum contagiosum virus
cgcguccacgca

SEQ ID NO: 4025248 - RNA, 14 nt, Molluscum contagiosum virus
cugcuuccuccucc

SEQ ID NO: 4025249 - RNA, 19 nt, Molluscum contagiosum virus
cuggacgggcacgagcacg

SEQ ID NO: 4025250 - RNA, 18 nt, Molluscum contagiosum virus
cuggacggugcuggugcu

SEQ ID NO: 4025251 - RNA, 14 nt, Molluscum contagiosum virus
cuggagcaagcgcg

SEQ ID NO: 4025252 - RNA, 14 nt, Molluscum contagiosum virus
cuggagcugccgcu

SEQ ID NO: 4025253 - RNA, 19 nt, Molluscum contagiosum virus
cuggagcugccgcugcgcg

SEQ ID NO: 4025254 - RNA, 14 nt, Molluscum contagiosum virus
cuggaggugaguca

SEQ ID NO: 4025255 - RNA, 20 nt, Molluscum contagiosum virus
cuggaguuuaaugacgcgca

SEQ ID NO: 4025256 - RNA, 13 nt, Molluscum contagiosum virus
cuggaugcugcuc

SEQ ID NO: 4025257 - RNA, 17 nt, Molluscum contagiosum virus
cuggcaccgcgcgcgcu

SEQ ID NO: 4025258 - RNA, 20 nt, Molluscum contagiosum virus
cuggcccugcuugacgcgag

SEQ ID NO: 4025259 - RNA, 13 nt, Molluscum contagiosum virus
cuggccucugcca

SEQ ID NO: 4025260 - RNA, 14 nt, Molluscum contagiosum virus
cuggccucugccug

SEQ ID NO: 4025261 - RNA, 21 nt, Molluscum contagiosum virus
cuggcgaaaccugggcgccgc

SEQ ID NO: 4025262 - RNA, 20 nt, Molluscum contagiosum virus
cuggcgauguccaugucgcg

SEQ ID NO: 4025263 - RNA, 17 nt, Molluscum contagiosum virus
cuggcgcgguccagccg

SEQ ID NO: 4025264 - RNA, 23 nt, Molluscum contagiosum virus
cuggcgcuaccuaccggcagcau

SEQ ID NO: 4025265 - RNA, 18 nt, Molluscum contagiosum virus
cuggcucgcgccugcgcu

SEQ ID NO: 4025266 - RNA, 16 nt, Molluscum contagiosum virus
cuggcucguacugcug

SEQ ID NO: 4025267 - RNA, 18 nt, Molluscum contagiosum virus
cuggcucguacugcugca

SEQ ID NO: 4025268 - RNA, 15 nt, Molluscum contagiosum virus
cuggcuucuccaccu

SEQ ID NO: 4025269 - RNA, 18 nt, Molluscum contagiosum virus
cugggcacaagcuuucuc

SEQ ID NO: 4025270 - RNA, 23 nt, Molluscum contagiosum virus
cugggcgguugccugcacaagca

SEQ ID NO: 4025271 - RNA, 20 nt, Molluscum contagiosum virus
cuggucgagcaccugucgcg

SEQ ID NO: 4025272 - RNA, 17 nt, Molluscum contagiosum virus
cuggugcgcccgcggca

SEQ ID NO: 4025273 - RNA, 16 nt, Molluscum contagiosum virus
cugguggagcacuucc

SEQ ID NO: 4025274 - RNA, 13 nt, Molluscum contagiosum virus
cugguggccgcac

SEQ ID NO: 4025275 - RNA, 22 nt, Molluscum contagiosum virus
cuggugucgagcucgcgcgcca

SEQ ID NO: 4025276 - RNA, 13 nt, Molluscum contagiosum virus
cugguucaugcug

SEQ ID NO: 4025277 - RNA, 15 nt, Molluscum contagiosum virus
cugguucugcucgca

SEQ ID NO: 4025278 - RNA, 20 nt, Molluscum contagiosum virus
cugguuugcgcucucagagc

SEQ ID NO: 4025279 - RNA, 20 nt, Molluscum contagiosum virus
cuguaaauggaccacaagca

SEQ ID NO: 4025280 - RNA, 14 nt, Molluscum contagiosum virus
cuguaccuggugcg

SEQ ID NO: 4025281 - RNA, 16 nt, Molluscum contagiosum virus
cuguacgugcugcccg

SEQ ID NO: 4025282 - RNA, 21 nt, Molluscum contagiosum virus
cugucaucaccccgcugggcc

SEQ ID NO: 4025283 - RNA, 14 nt, Molluscum contagiosum virus
cugucccucugugc

SEQ ID NO: 4025284 - RNA, 12 nt, Molluscum contagiosum virus
cuguccgaggac

SEQ ID NO: 4025285 - RNA, 23 nt, Molluscum contagiosum virus
cugucuuuuccucacgucgcugg

SEQ ID NO: 4025286 - RNA, 14 nt, Molluscum contagiosum virus
cugugagcgcgccg

SEQ ID NO: 4025287 - RNA, 23 nt, Molluscum contagiosum virus
cugugcauugcgucuuacugcug

SEQ ID NO: 4025288 - RNA, 17 nt, Molluscum contagiosum virus
cugugcccuggaagcuu

SEQ ID NO: 4025289 - RNA, 13 nt, Molluscum contagiosum virus
cugugccgcagca

SEQ ID NO: 4025290 - RNA, 21 nt, Molluscum contagiosum virus
cugugccuaggaggagaacuc

SEQ ID NO: 4025291 - RNA, 14 nt, Molluscum contagiosum virus
cugugccugcaaga

SEQ ID NO: 4025292 - RNA, 21 nt, Molluscum contagiosum virus
cugugcgcgacgccugcuagc

SEQ ID NO: 4025293 - RNA, 20 nt, Molluscum contagiosum virus
cugugucgcgcgagcaaaga

SEQ ID NO: 4025294 - RNA, 15 nt, Molluscum contagiosum virus
cuguuacggacggcg

SEQ ID NO: 4025295 - RNA, 14 nt, Molluscum contagiosum virus
cuguucugcuugga

SEQ ID NO: 4025296 - RNA, 23 nt, Molluscum contagiosum virus
cuguugccuggagggcagugcca

SEQ ID NO: 4025297 - RNA, 18 nt, Molluscum contagiosum virus
cuuacgcuacagcagccg

SEQ ID NO: 4025298 - RNA, 14 nt, Molluscum contagiosum virus
cuuacugcugcaau

SEQ ID NO: 4025299 - RNA, 23 nt, Molluscum contagiosum virus
cuuagcuucagaacggaggacag

SEQ ID NO: 4025300 - RNA, 20 nt, Molluscum contagiosum virus
cuucaagaacgacacggagc

SEQ ID NO: 4025301 - RNA, 17 nt, Molluscum contagiosum virus
cuucaccugcauugagc

SEQ ID NO: 4025302 - RNA, 19 nt, Molluscum contagiosum virus
cuucacggagaucaggcag

SEQ ID NO: 4025303 - RNA, 24 nt, Molluscum contagiosum virus
cuucacggcguucaccuuggcgcu

SEQ ID NO: 4025304 - RNA, 21 nt, Molluscum contagiosum virus
cuuccacgaaaucgccgcgcg

SEQ ID NO: 4025305 - RNA, 20 nt, Molluscum contagiosum virus
cuuccccgcacaagggcagc

SEQ ID NO: 4025306 - RNA, 22 nt, Molluscum contagiosum virus
cuucccgacgucuuccccaaga

SEQ ID NO: 4025307 - RNA, 23 nt, Molluscum contagiosum virus
cuuccgcgagcacguggacagca

SEQ ID NO: 4025308 - RNA, 20 nt, Molluscum contagiosum virus
cuuccgcggcgugcagggcg

SEQ ID NO: 4025309 - RNA, 15 nt, Molluscum contagiosum virus
cuuccggcagcugga

SEQ ID NO: 4025310 - RNA, 20 nt, Molluscum contagiosum virus
cuuccggcagcuggagcugc

SEQ ID NO: 4025311 - RNA, 16 nt, Molluscum contagiosum virus
cuuccugcuggcgcgc

SEQ ID NO: 4025312 - RNA, 15 nt, Molluscum contagiosum virus
cuuccuuugcucuac

SEQ ID NO: 4025313 - RNA, 22 nt, Molluscum contagiosum virus
cuucgacagcgugcgcgggcac

SEQ ID NO: 4025314 - RNA, 21 nt, Molluscum contagiosum virus
cuucgacguugacgagcgcgu

SEQ ID NO: 4025315 - RNA, 16 nt, Molluscum contagiosum virus
cuucgacuucuccgcg

SEQ ID NO: 4025316 - RNA, 21 nt, Molluscum contagiosum virus
cuucgaggugcgcgagucgcg

SEQ ID NO: 4025317 - RNA, 23 nt, Molluscum contagiosum virus
cuucgcagaggacagcuccuucu

SEQ ID NO: 4025318 - RNA, 17 nt, Molluscum contagiosum virus
cuucgcgcccgacgagc

SEQ ID NO: 4025319 - RNA, 17 nt, Molluscum contagiosum virus
cuucggcggcugugccc

SEQ ID NO: 4025320 - RNA, 17 nt, Molluscum contagiosum virus
cuucggggacacaagga

SEQ ID NO: 4025321 - RNA, 16 nt, Molluscum contagiosum virus
cuucgugcugaagacg

SEQ ID NO: 4025322 - RNA, 20 nt, Molluscum contagiosum virus
cuucucgcagcguuccagga

SEQ ID NO: 4025323 - RNA, 17 nt, Molluscum contagiosum virus
cuucucgccgcaccaca

SEQ ID NO: 4025324 - RNA, 16 nt, Molluscum contagiosum virus
cuucugcugcacacac

SEQ ID NO: 4025325 - RNA, 14 nt, Molluscum contagiosum virus
cuucuugcgcggcg

SEQ ID NO: 4025326 - RNA, 21 nt, Molluscum contagiosum virus
cuugaauugagugcgggucac

SEQ ID NO: 4025327 - RNA, 14 nt, Molluscum contagiosum virus
cuugacaggcgcgc

SEQ ID NO: 4025328 - RNA, 17 nt, Molluscum contagiosum virus
cuugauaaaagcacagu

SEQ ID NO: 4025329 - RNA, 23 nt, Molluscum contagiosum virus
cuugcagacaaggagaugggcac

SEQ ID NO: 4025330 - RNA, 18 nt, Molluscum contagiosum virus
cuugcgcacggaccucaa

SEQ ID NO: 4025331 - RNA, 19 nt, Molluscum contagiosum virus
cuugcgcguucgcaaagac

SEQ ID NO: 4025332 - RNA, 13 nt, Molluscum contagiosum virus
cuugcggcacgca

SEQ ID NO: 4025333 - RNA, 21 nt, Molluscum contagiosum virus
cuugcuagcaacuugcucuac

SEQ ID NO: 4025334 - RNA, 24 nt, Molluscum contagiosum virus
cuugcucgaaguagccuccguagc

SEQ ID NO: 4025335 - RNA, 23 nt, Molluscum contagiosum virus
cuugcucuucgaccucugcuuca

SEQ ID NO: 4025336 - RNA, 11 nt, Molluscum contagiosum virus
cuugcuuccag

SEQ ID NO: 4025337 - RNA, 21 nt, Molluscum contagiosum virus
cuuggcaauggcgcgcagcuc

SEQ ID NO: 4025338 - RNA, 14 nt, Molluscum contagiosum virus
cuuggcgggcaccg

SEQ ID NO: 4025339 - RNA, 19 nt, Molluscum contagiosum virus
cuuggcguucgcagugccc

SEQ ID NO: 4025340 - RNA, 18 nt, Molluscum contagiosum virus
cuugggagcaaggccugg

SEQ ID NO: 4025341 - RNA, 16 nt, Molluscum contagiosum virus
cuuggggaagacgucg

SEQ ID NO: 4025342 - RNA, 18 nt, Molluscum contagiosum virus
cuuggugcucauccuccc

SEQ ID NO: 4025343 - RNA, 20 nt, Molluscum contagiosum virus
cuugguguucugcgcgccgc

SEQ ID NO: 4025344 - RNA, 13 nt, Molluscum contagiosum virus
cuuguccgcggac

SEQ ID NO: 4025345 - RNA, 16 nt, Molluscum contagiosum virus
cuuguccgcggacgcg

SEQ ID NO: 4025346 - RNA, 22 nt, Molluscum contagiosum virus
cuuguccgcggacgcgggccug

SEQ ID NO: 4025347 - RNA, 14 nt, Molluscum contagiosum virus
cuugucgagacagg

SEQ ID NO: 4025348 - RNA, 21 nt, Molluscum contagiosum virus
cuuuaacgcgugcggugacuu

SEQ ID NO: 4025349 - RNA, 12 nt, Molluscum contagiosum virus
cuuucccccaca

SEQ ID NO: 4025350 - RNA, 17 nt, Molluscum contagiosum virus
cuuucguggucaucaag

SEQ ID NO: 4025351 - RNA, 19 nt, Molluscum contagiosum virus
ccgccgggaauaccggaga

SEQ ID NO: 4025352 - RNA, 16 nt, Molluscum contagiosum virus
ccgccggucuccacgu

SEQ ID NO: 4025353 - RNA, 24 nt, Molluscum contagiosum virus
ccgccgucgcccggcaggcucccg

SEQ ID NO: 4025354 - RNA, 22 nt, Molluscum contagiosum virus
ccgccuacggggcugcuccggc

SEQ ID NO: 4025355 - RNA, 17 nt, Molluscum contagiosum virus
ccgccucgagcacgccu

SEQ ID NO: 4025356 - RNA, 12 nt, Molluscum contagiosum virus
ccgccugcaugu

SEQ ID NO: 4025357 - RNA, 12 nt, Molluscum contagiosum virus
ccgcgaagagca

SEQ ID NO: 4025358 - RNA, 15 nt, Molluscum contagiosum virus
ccgcgaagagcacga

SEQ ID NO: 4025359 - RNA, 17 nt, Molluscum contagiosum virus
ccgcgaaguccugggcg

SEQ ID NO: 4025360 - RNA, 19 nt, Molluscum contagiosum virus
ccgcgagcacuggcuggcg

SEQ ID NO: 4025361 - RNA, 19 nt, Molluscum contagiosum virus
ccgcgagcgcaugcgcgcc

SEQ ID NO: 4025362 - RNA, 22 nt, Molluscum contagiosum virus
ccgcgaggacccgcgcuuuguc

SEQ ID NO: 4025363 - RNA, 16 nt, Molluscum contagiosum virus
ccgcgcaaaagcacag

SEQ ID NO: 4025364 - RNA, 12 nt, Molluscum contagiosum virus
ccgcgcaccgcg

SEQ ID NO: 4025365 - RNA, 21 nt, Molluscum contagiosum virus
ccgcgcagcucguugcgcagc

SEQ ID NO: 4025366 - RNA, 15 nt, Molluscum contagiosum virus
ccgcgccagcgacag

SEQ ID NO: 4025367 - RNA, 21 nt, Molluscum contagiosum virus
ccgcgcccaagaagaagcagc

SEQ ID NO: 4025368 - RNA, 14 nt, Molluscum contagiosum virus
ccgcgccgaaacac

SEQ ID NO: 4025369 - RNA, 15 nt, Molluscum contagiosum virus
ccgcgcgaacaaaaa

SEQ ID NO: 4025370 - RNA, 16 nt, Molluscum contagiosum virus
ccgcgcgagcgcgccc

SEQ ID NO: 4025371 - RNA, 17 nt, Molluscum contagiosum virus
ccgcgcgagcgcgcccc

SEQ ID NO: 4025372 - RNA, 18 nt, Molluscum contagiosum virus
ccgcgcgcccgcugcgcg

SEQ ID NO: 4025373 - RNA, 15 nt, Molluscum contagiosum virus
cacggccggcgccgc

SEQ ID NO: 4025374 - RNA, 17 nt, Molluscum contagiosum virus
cacggccuucgcgcugc

SEQ ID NO: 4025375 - RNA, 18 nt, Molluscum contagiosum virus
cacggccuucgcguuccg

SEQ ID NO: 4025376 - RNA, 20 nt, Molluscum contagiosum virus
cacggccuucuccucgcucu

SEQ ID NO: 4025377 - RNA, 23 nt, Molluscum contagiosum virus
cacggcgacaacgacagagcccg

SEQ ID NO: 4025378 - RNA, 13 nt, Molluscum contagiosum virus
cacggcgagcugc

SEQ ID NO: 4025379 - RNA, 17 nt, Molluscum contagiosum virus
cacggcgagcugccaug

SEQ ID NO: 4025380 - RNA, 16 nt, Molluscum contagiosum virus
cacggcgcucgccucu

SEQ ID NO: 4025381 - RNA, 23 nt, Molluscum contagiosum virus
cacggcuguaaugugcuggucaa

SEQ ID NO: 4025382 - RNA, 16 nt, Molluscum contagiosum virus
cacgggggcugccggc

SEQ ID NO: 4025383 - RNA, 15 nt, Molluscum contagiosum virus
cacgguccugggcga

SEQ ID NO: 4025384 - RNA, 23 nt, Molluscum contagiosum virus
cacggugugcuacugcacugcag

SEQ ID NO: 4025385 - RNA, 21 nt, Molluscum contagiosum virus
cacgguucgcggcgcgcggcg

SEQ ID NO: 4025386 - RNA, 16 nt, Molluscum contagiosum virus
cacgugcagcggcgcc

SEQ ID NO: 4025387 - RNA, 16 nt, Molluscum contagiosum virus
cacgugccaagaccug

SEQ ID NO: 4025388 - RNA, 18 nt, Molluscum contagiosum virus
cacgugcgcuggcccacg

SEQ ID NO: 4025389 - RNA, 20 nt, Molluscum contagiosum virus
cacgugcucaagugcgucga

SEQ ID NO: 4025390 - RNA, 19 nt, Molluscum contagiosum virus
cacgugcugcugcggcugc

SEQ ID NO: 4025391 - RNA, 22 nt, Molluscum contagiosum virus
cacguggccaaggucucgagcu

SEQ ID NO: 4025392 - RNA, 19 nt, Molluscum contagiosum virus
cacguuccagagcacugcg

SEQ ID NO: 4025393 - RNA, 18 nt, Molluscum contagiosum virus
cacguugccgcgcgcugc

SEQ ID NO: 4025394 - RNA, 16 nt, Molluscum contagiosum virus
cacuacaagcagccgc

SEQ ID NO: 4025395 - RNA, 16 nt, Molluscum contagiosum virus
cacuccgucgcgcucg

SEQ ID NO: 4025396 - RNA, 14 nt, Molluscum contagiosum virus
cacuccucggcgcu

SEQ ID NO: 4025397 - RNA, 12 nt, Molluscum contagiosum virus
cacucgagaaga

SEQ ID NO: 4025398 - RNA, 15 nt, Molluscum contagiosum virus
cacucgagaagaggg

SEQ ID NO: 4025399 - RNA, 16 nt, Molluscum contagiosum virus
cacucgauggacgcca

SEQ ID NO: 4025400 - RNA, 21 nt, Molluscum contagiosum virus
cacucgcgcguccgcaaagac

SEQ ID NO: 4025401 - RNA, 16 nt, Molluscum contagiosum virus
cacucguggcaacaac

SEQ ID NO: 4025402 - RNA, 16 nt, Molluscum contagiosum virus
cacucuuucacgcugc

SEQ ID NO: 4025403 - RNA, 21 nt, Molluscum contagiosum virus
cacucuuucacgcugcacgag

SEQ ID NO: 4025404 - RNA, 12 nt, Molluscum contagiosum virus
cacugcagcagc

SEQ ID NO: 4025405 - RNA, 19 nt, Molluscum contagiosum virus
cacugcgcgcgcggcgcag

SEQ ID NO: 4025406 - RNA, 20 nt, Molluscum contagiosum virus
cacugcggcaacgagcacgu

SEQ ID NO: 4025407 - RNA, 17 nt, Molluscum contagiosum virus
cacugcuacgagccgcu

SEQ ID NO: 4025408 - RNA, 15 nt, Molluscum contagiosum virus
cacugcucgcgcacg

SEQ ID NO: 4025409 - RNA, 14 nt, Molluscum contagiosum virus
cacugucgcgcagc

SEQ ID NO: 4025410 - RNA, 14 nt, Molluscum contagiosum virus
cacuuccgcgcgcu

SEQ ID NO: 4025411 - RNA, 19 nt, Molluscum contagiosum virus
cacuuccgugagcaguccc

SEQ ID NO: 4025412 - RNA, 22 nt, Molluscum contagiosum virus
cacuuccugcuagaaugcgugu

SEQ ID NO: 4025413 - RNA, 14 nt, Molluscum contagiosum virus
cacuugcacgcgca

SEQ ID NO: 4025414 - RNA, 21 nt, Molluscum contagiosum virus
cacuugcgcguucgcaaagac

SEQ ID NO: 4025415 - RNA, 14 nt, Molluscum contagiosum virus
cagaacugccuggu

SEQ ID NO: 4025416 - RNA, 17 nt, Molluscum contagiosum virus
cagaagacggaguccuc

SEQ ID NO: 4025417 - RNA, 22 nt, Molluscum contagiosum virus
cagaaggcguaugcgccaagcc

SEQ ID NO: 4025418 - RNA, 17 nt, Molluscum contagiosum virus
cagacaaagacaguccg

SEQ ID NO: 4025419 - RNA, 15 nt, Molluscum contagiosum virus
cagaccaagaagccc

SEQ ID NO: 4025420 - RNA, 19 nt, Molluscum contagiosum virus
cagaccccugaaaggcauc

SEQ ID NO: 4025421 - RNA, 21 nt, Molluscum contagiosum virus
cagacccgaaagcugcccugc

SEQ ID NO: 4025422 - RNA, 21 nt, Molluscum contagiosum virus
cagacgcagcgcgagcugugc

SEQ ID NO: 4025423 - RNA, 14 nt, Molluscum contagiosum virus
cagacgccgagcgg

SEQ ID NO: 4025424 - RNA, 22 nt, Molluscum contagiosum virus
cagagacacacgcuugcgcaug

SEQ ID NO: 4025425 - RNA, 12 nt, Molluscum contagiosum virus
cagagcacgaga

SEQ ID NO: 4025426 - RNA, 18 nt, Molluscum contagiosum virus
cagagccgcgugcgccgc

SEQ ID NO: 4025427 - RNA, 15 nt, Molluscum contagiosum virus
cagagcugcccgcca

SEQ ID NO: 4025428 - RNA, 16 nt, Molluscum contagiosum virus
cagagucgccgcugcg

SEQ ID NO: 4025429 - RNA, 23 nt, Molluscum contagiosum virus
cagauccgggcgcugcaccgcuu

SEQ ID NO: 4025430 - RNA, 21 nt, Molluscum contagiosum virus
cagauguucucgccaguggcc

SEQ ID NO: 4025431 - RNA, 12 nt, Molluscum contagiosum virus
cagcaagcgcac

SEQ ID NO: 4025432 - RNA, 13 nt, Molluscum contagiosum virus
cagcaagcucgau

SEQ ID NO: 4025433 - RNA, 19 nt, Molluscum contagiosum virus
cagcacaaacucgcagaac

SEQ ID NO: 4025434 - RNA, 23 nt, Molluscum contagiosum virus
cagcacaaagagcacggacagca

SEQ ID NO: 4025435 - RNA, 23 nt, Molluscum contagiosum virus
cagcacaugcaggccgagaugag

SEQ ID NO: 4025436 - RNA, 22 nt, Molluscum contagiosum virus
cagcaccaaggacguguacgug

SEQ ID NO: 4025437 - RNA, 14 nt, Molluscum contagiosum virus
cagcacgcgcgggc

SEQ ID NO: 4025438 - RNA, 23 nt, Molluscum contagiosum virus
cagcacgcgcucguccgccgcgu

SEQ ID NO: 4025439 - RNA, 19 nt, Molluscum contagiosum virus
cagcacggggucguagucc

SEQ ID NO: 4025440 - RNA, 14 nt, Molluscum contagiosum virus
cagcacuucgcaga

SEQ ID NO: 4025441 - RNA, 16 nt, Molluscum contagiosum virus
cagcagagcugcccgc

SEQ ID NO: 4025442 - RNA, 18 nt, Molluscum contagiosum virus
cagcagaggaguagcgug

SEQ ID NO: 4025443 - RNA, 16 nt, Molluscum contagiosum virus
cagcagccccgacgcc

SEQ ID NO: 4025444 - RNA, 18 nt, Molluscum contagiosum virus
cagcagccgcagcccacg

SEQ ID NO: 4025445 - RNA, 13 nt, Molluscum contagiosum virus
cagcagcgccagc

SEQ ID NO: 4025446 - RNA, 12 nt, Molluscum contagiosum virus
cagcagcgugca

SEQ ID NO: 4025447 - RNA, 12 nt, Molluscum contagiosum virus
cagcagcugcuc

SEQ ID NO: 4025448 - RNA, 16 nt, Molluscum contagiosum virus
cagcagcuggccggcu

SEQ ID NO: 4025449 - RNA, 14 nt, Molluscum contagiosum virus
cagcagcuggcgcg

SEQ ID NO: 4025450 - RNA, 15 nt, Molluscum contagiosum virus
cagcaggugcacgug

SEQ ID NO: 4025451 - RNA, 12 nt, Molluscum contagiosum virus
cagcaguccgcc

SEQ ID NO: 4025452 - RNA, 16 nt, Molluscum contagiosum virus
cagcagugccagcagc

SEQ ID NO: 4025453 - RNA, 20 nt, Molluscum contagiosum virus
cagcaugaacucgcugcugc

SEQ ID NO: 4025454 - RNA, 17 nt, Molluscum contagiosum virus
cagccacgaagagucgc

SEQ ID NO: 4025455 - RNA, 18 nt, Molluscum contagiosum virus
cagccacgacucgcgucu

SEQ ID NO: 4025456 - RNA, 21 nt, Molluscum contagiosum virus
cagccaugaggacagcuugcu

SEQ ID NO: 4025457 - RNA, 23 nt, Molluscum contagiosum virus
cagccauggccuguaguagcagc

SEQ ID NO: 4025458 - RNA, 14 nt, Molluscum contagiosum virus
cagccgcgcggcag

SEQ ID NO: 4025459 - RNA, 16 nt, Molluscum contagiosum virus
cagccgcugcgccgcc

SEQ ID NO: 4025460 - RNA, 13 nt, Molluscum contagiosum virus
cagccgcugcugc

SEQ ID NO: 4025461 - RNA, 14 nt, Molluscum contagiosum virus
cagccgcugcugcu

SEQ ID NO: 4025462 - RNA, 20 nt, Molluscum contagiosum virus
cagccuagaaacgacgggcg

SEQ ID NO: 4025463 - RNA, 15 nt, Molluscum contagiosum virus
cagccucaaccugaa

SEQ ID NO: 4025464 - RNA, 19 nt, Molluscum contagiosum virus
cagccugacggcagcaagc

SEQ ID NO: 4025465 - RNA, 24 nt, Molluscum contagiosum virus
cagccugcuggcaccgcgcgcgcu

SEQ ID NO: 4025466 - RNA, 21 nt, Molluscum contagiosum virus
cagccuguuuuuaucgagccg

SEQ ID NO: 4025467 - RNA, 20 nt, Molluscum contagiosum virus
cagcgacagacaccggccuu

SEQ ID NO: 4025468 - RNA, 18 nt, Molluscum contagiosum virus
cagcgacuacgcgcugcu

SEQ ID NO: 4025469 - RNA, 17 nt, Molluscum contagiosum virus
cagcgagcucaaggaca

SEQ ID NO: 4025470 - RNA, 19 nt, Molluscum contagiosum virus
cagcgauugcccgcgcgcg

SEQ ID NO: 4025471 - RNA, 14 nt, Molluscum contagiosum virus
cagcgcagcagcgc

SEQ ID NO: 4025472 - RNA, 21 nt, Molluscum contagiosum virus
cagcgcccgcguacacgugca

SEQ ID NO: 4025473 - RNA, 15 nt, Molluscum contagiosum virus
cagcgccgccaccuc

SEQ ID NO: 4025474 - RNA, 19 nt, Molluscum contagiosum virus
cagcgcgcccaccagcagc

SEQ ID NO: 4025475 - RNA, 13 nt, Molluscum contagiosum virus
cccgggcggcgcg

SEQ ID NO: 4025476 - RNA, 16 nt, Molluscum contagiosum virus
cccgggcggcgcgccg

SEQ ID NO: 4025477 - RNA, 15 nt, Molluscum contagiosum virus
cccgggggcgcuucc

SEQ ID NO: 4025478 - RNA, 20 nt, Molluscum contagiosum virus
cccggguuugugcccgagcu

SEQ ID NO: 4025479 - RNA, 20 nt, Molluscum contagiosum virus
cccguaaagaagcggugcag

SEQ ID NO: 4025480 - RNA, 21 nt, Molluscum contagiosum virus
cccguaggcgggccugcgccc

SEQ ID NO: 4025481 - RNA, 19 nt, Molluscum contagiosum virus
cccgugcuggagggcacgc

SEQ ID NO: 4025482 - RNA, 15 nt, Molluscum contagiosum virus
cccgugucgggcugc

SEQ ID NO: 4025483 - RNA, 13 nt, Molluscum contagiosum virus
cccguuccugggc

SEQ ID NO: 4025484 - RNA, 17 nt, Molluscum contagiosum virus
cccuacgcgcgcgugcu

SEQ ID NO: 4025485 - RNA, 23 nt, Molluscum contagiosum virus
cccucccugguaguccugcuagc

SEQ ID NO: 4025486 - RNA, 22 nt, Molluscum contagiosum virus
cccucgagcaaugcgagcaagg

SEQ ID NO: 4025487 - RNA, 16 nt, Molluscum contagiosum virus
cccucgcaagcugagc

SEQ ID NO: 4025488 - RNA, 17 nt, Molluscum contagiosum virus
cccucguccggcgcucg

SEQ ID NO: 4025489 - RNA, 14 nt, Molluscum contagiosum virus
cccucgucgcgcuu

SEQ ID NO: 4025490 - RNA, 14 nt, Molluscum contagiosum virus
cccucgugcugggc

SEQ ID NO: 4025491 - RNA, 18 nt, Molluscum contagiosum virus
cccucgugguugcgcagc

SEQ ID NO: 4025492 - RNA, 20 nt, Molluscum contagiosum virus
cccugcuaguccgcguacag

SEQ ID NO: 4025493 - RNA, 13 nt, Molluscum contagiosum virus
cccuggacgacgu

SEQ ID NO: 4025494 - RNA, 18 nt, Molluscum contagiosum virus
cccuggcagccgagccgg

SEQ ID NO: 4025495 - RNA, 21 nt, Molluscum contagiosum virus
cccugucgcgcacgagcgcgg

SEQ ID NO: 4025496 - RNA, 15 nt, Molluscum contagiosum virus
ccgaacugcucugcg

SEQ ID NO: 4025497 - RNA, 14 nt, Molluscum contagiosum virus
ccgacacgcgcccg

SEQ ID NO: 4025498 - RNA, 20 nt, Molluscum contagiosum virus
ccgaccgugcccuggaccuc

SEQ ID NO: 4025499 - RNA, 18 nt, Molluscum contagiosum virus
ccgacgccuuccugcugg

SEQ ID NO: 4025500 - RNA, 14 nt, Molluscum contagiosum virus
ccgacggcacgggc

SEQ ID NO: 4025501 - RNA, 18 nt, Molluscum contagiosum virus
ccgacgggccgccgcccg

SEQ ID NO: 4025502 - RNA, 17 nt, Molluscum contagiosum virus
ccgacugcccgcgcccu

SEQ ID NO: 4025503 - RNA, 17 nt, Molluscum contagiosum virus
ccgagaaaaagcugucg

SEQ ID NO: 4025504 - RNA, 17 nt, Molluscum contagiosum virus
ccgagagcaugcugucu

SEQ ID NO: 4025505 - RNA, 18 nt, Molluscum contagiosum virus
ccgagaucacggcgugcg

SEQ ID NO: 4025506 - RNA, 21 nt, Molluscum contagiosum virus
ccgagcagaaggaagggcccg

SEQ ID NO: 4025507 - RNA, 15 nt, Molluscum contagiosum virus
ccgagcagcggggac

SEQ ID NO: 4025508 - RNA, 13 nt, Molluscum contagiosum virus
ccgagcccgagcc

SEQ ID NO: 4025509 - RNA, 14 nt, Molluscum contagiosum virus
ccgagcccgcggcg

SEQ ID NO: 4025510 - RNA, 19 nt, Molluscum contagiosum virus
ccgagcccggccagacuac

SEQ ID NO: 4025511 - RNA, 19 nt, Molluscum contagiosum virus
ccgagccgggggaacacgc

SEQ ID NO: 4025512 - RNA, 16 nt, Molluscum contagiosum virus
ccgagcgccgccagcu

SEQ ID NO: 4025513 - RNA, 13 nt, Molluscum contagiosum virus
ccgagcgcgcgcg

SEQ ID NO: 4025514 - RNA, 22 nt, Molluscum contagiosum virus
ccgagcgcuacgacgacaugca

SEQ ID NO: 4025515 - RNA, 18 nt, Molluscum contagiosum virus
ccgagcggcaagccgugc

SEQ ID NO: 4025516 - RNA, 22 nt, Molluscum contagiosum virus
ccgagcuucuaaaucgcgcgcg

SEQ ID NO: 4025517 - RNA, 18 nt, Molluscum contagiosum virus
ccgaggcagguuccggug

SEQ ID NO: 4025518 - RNA, 20 nt, Molluscum contagiosum virus
ccgaggcguccagcggcugc

SEQ ID NO: 4025519 - RNA, 15 nt, Molluscum contagiosum virus
ccgagggcgugcgcu

SEQ ID NO: 4025520 - RNA, 21 nt, Molluscum contagiosum virus
ccgaguacuacuacacugucg

SEQ ID NO: 4025521 - RNA, 22 nt, Molluscum contagiosum virus
ccgagucgagcacgcgcgagcg

SEQ ID NO: 4025522 - RNA, 15 nt, Molluscum contagiosum virus
ccgagucgcgccucg

SEQ ID NO: 4025523 - RNA, 22 nt, Molluscum contagiosum virus
ccgagucguacacgcagagcca

SEQ ID NO: 4025524 - RNA, 12 nt, Molluscum contagiosum virus
ccgagugcuggc

SEQ ID NO: 4025525 - RNA, 14 nt, Molluscum contagiosum virus
ccgcaagcacggaa

SEQ ID NO: 4025526 - RNA, 19 nt, Molluscum contagiosum virus
ccgcaagugcacgcggcgc

SEQ ID NO: 4025527 - RNA, 22 nt, Molluscum contagiosum virus
ccgcaagugcacgcggcgcgug

SEQ ID NO: 4025528 - RNA, 19 nt, Molluscum contagiosum virus
ccgcacaagggcagcucaa

SEQ ID NO: 4025529 - RNA, 11 nt, Molluscum contagiosum virus
ccgcaccgagc

SEQ ID NO: 4025530 - RNA, 16 nt, Molluscum contagiosum virus
ccgcacgugcugcgcu

SEQ ID NO: 4025531 - RNA, 14 nt, Molluscum contagiosum virus
ccgcacguggaguc

SEQ ID NO: 4025532 - RNA, 18 nt, Molluscum contagiosum virus
ccgcacguggagucacga

SEQ ID NO: 4025533 - RNA, 21 nt, Molluscum contagiosum virus
ccgcagaacacgggggcugcc

SEQ ID NO: 4025534 - RNA, 13 nt, Molluscum contagiosum virus
ccgcagcccgagc

SEQ ID NO: 4025535 - RNA, 16 nt, Molluscum contagiosum virus
ccgcagcggcgccacc

SEQ ID NO: 4025536 - RNA, 22 nt, Molluscum contagiosum virus
ccgcaggaaaggcaccccgcag

SEQ ID NO: 4025537 - RNA, 18 nt, Molluscum contagiosum virus
ccgcaggaaaggcacccg

SEQ ID NO: 4025538 - RNA, 21 nt, Molluscum contagiosum virus
ccgcaggaaagguacccgcag

SEQ ID NO: 4025539 - RNA, 19 nt, Molluscum contagiosum virus
ccgcaggcccggcggcccg

SEQ ID NO: 4025540 - RNA, 20 nt, Molluscum contagiosum virus
ccgcaguaccaguaccugcu

SEQ ID NO: 4025541 - RNA, 18 nt, Molluscum contagiosum virus
ccgcaugggcccuggcgg

SEQ ID NO: 4025542 - RNA, 21 nt, Molluscum contagiosum virus
ccgccccuaaauaugaaccac

SEQ ID NO: 4025543 - RNA, 13 nt, Molluscum contagiosum virus
ccgcccgcgcuuc

SEQ ID NO: 4025544 - RNA, 18 nt, Molluscum contagiosum virus
ccgcccgcggacucgugc

SEQ ID NO: 4025545 - RNA, 18 nt, Molluscum contagiosum virus
ccgccgacaacgcacccg

SEQ ID NO: 4025546 - RNA, 21 nt, Molluscum contagiosum virus
ccgccgagauggagcucacgc

SEQ ID NO: 4025547 - RNA, 16 nt, Molluscum contagiosum virus
ccgccgcugccgcgcg

SEQ ID NO: 4025548 - RNA, 22 nt, Molluscum contagiosum virus
ccgccggcgccgcuaccagcuc

SEQ ID NO: 4025549 - RNA, 21 nt, Molluscum contagiosum virus
ggcugccgcugccugugccca

SEQ ID NO: 4025550 - RNA, 22 nt, Molluscum contagiosum virus
ggcugccgcugccugugcccag

SEQ ID NO: 4025551 - RNA, 17 nt, Molluscum contagiosum virus
ggcugcucccucucgag

SEQ ID NO: 4025552 - RNA, 17 nt, Molluscum contagiosum virus
ggcugcucucggcagcg

SEQ ID NO: 4025553 - RNA, 17 nt, Molluscum contagiosum virus
ggcuggaccugcgccag

SEQ ID NO: 4025554 - RNA, 18 nt, Molluscum contagiosum virus
ggcugucgcccggcagcg

SEQ ID NO: 4025555 - RNA, 15 nt, Molluscum contagiosum virus
ggcuguggacaugau

SEQ ID NO: 4025556 - RNA, 13 nt, Molluscum contagiosum virus
ggcuguguuccag

SEQ ID NO: 4025557 - RNA, 17 nt, Molluscum contagiosum virus
ggcuuccgacaacucgc

SEQ ID NO: 4025558 - RNA, 12 nt, Molluscum contagiosum virus
ggcuuggacagc

SEQ ID NO: 4025559 - RNA, 20 nt, Molluscum contagiosum virus
ggcuuggacuccgaggcagg

SEQ ID NO: 4025560 - RNA, 16 nt, Molluscum contagiosum virus
ggcuuguagucgcccc

SEQ ID NO: 4025561 - RNA, 20 nt, Molluscum contagiosum virus
gggaaaacgcgcggcagcag

SEQ ID NO: 4025562 - RNA, 19 nt, Molluscum contagiosum virus
gggaacgaggaaaggcacc

SEQ ID NO: 4025563 - RNA, 23 nt, Molluscum contagiosum virus
gggaacgaggaaaggcaccccga

SEQ ID NO: 4025564 - RNA, 21 nt, Molluscum contagiosum virus
gggaagcccucaggggcucuc

SEQ ID NO: 4025565 - RNA, 16 nt, Molluscum contagiosum virus
gggaccucuuucucgc

SEQ ID NO: 4025566 - RNA, 15 nt, Molluscum contagiosum virus
gggcaaugggcacgc

SEQ ID NO: 4025567 - RNA, 20 nt, Molluscum contagiosum virus
gggcacccagcccugguuug

SEQ ID NO: 4025568 - RNA, 13 nt, Molluscum contagiosum virus
gggcacgagcacg

SEQ ID NO: 4025569 - RNA, 13 nt, Molluscum contagiosum virus
gggcacgcgcgca

SEQ ID NO: 4025570 - RNA, 15 nt, Molluscum contagiosum virus
gggcacugcgcacgg

SEQ ID NO: 4025571 - RNA, 13 nt, Molluscum contagiosum virus
gggcacuucucgc

SEQ ID NO: 4025572 - RNA, 17 nt, Molluscum contagiosum virus
gggcacuucucgcgcga

SEQ ID NO: 4025573 - RNA, 17 nt, Molluscum contagiosum virus
gggcaucaugagccagu

SEQ ID NO: 4025574 - RNA, 16 nt, Molluscum contagiosum virus
gggcaugcacagcugc

SEQ ID NO: 4025575 - RNA, 14 nt, Molluscum contagiosum virus
gggcccgccuccgg

SEQ ID NO: 4025576 - RNA, 16 nt, Molluscum contagiosum virus
gggcccgcgaaggaga

SEQ ID NO: 4025577 - RNA, 19 nt, Molluscum contagiosum virus
gggcccgugcucaggccag

SEQ ID NO: 4025578 - RNA, 16 nt, Molluscum contagiosum virus
gggccgcgagcgcggg

SEQ ID NO: 4025579 - RNA, 13 nt, Molluscum contagiosum virus
gggcgcgugcugg

SEQ ID NO: 4025580 - RNA, 13 nt, Molluscum contagiosum virus
gggcgcuccgagc

SEQ ID NO: 4025581 - RNA, 13 nt, Molluscum contagiosum virus
gggcgcugcaccg

SEQ ID NO: 4025582 - RNA, 12 nt, Molluscum contagiosum virus
gggcgcugcucg

SEQ ID NO: 4025583 - RNA, 21 nt, Molluscum contagiosum virus
gggcggcgucgcgcgcgaccu

SEQ ID NO: 4025584 - RNA, 18 nt, Molluscum contagiosum virus
gggcgucgugcaccugga

SEQ ID NO: 4025585 - RNA, 23 nt, Molluscum contagiosum virus
gggcguguccgcgggcgcgcgcc

SEQ ID NO: 4025586 - RNA, 17 nt, Molluscum contagiosum virus
gggcuccuucuucagca

SEQ ID NO: 4025587 - RNA, 17 nt, Molluscum contagiosum virus
gggcuucgccgccggag

SEQ ID NO: 4025588 - RNA, 21 nt, Molluscum contagiosum virus
ggggacucucccgucgccgga

SEQ ID NO: 4025589 - RNA, 11 nt, Molluscum contagiosum virus
ggggcuggaca

SEQ ID NO: 4025590 - RNA, 15 nt, Molluscum contagiosum virus
ggggcuggcagaaga

SEQ ID NO: 4025591 - RNA, 22 nt, Molluscum contagiosum virus
ggggcugucgcuggaggauucu

SEQ ID NO: 4025592 - RNA, 22 nt, Molluscum contagiosum virus
ggguaaugcagauuggaggagg

SEQ ID NO: 4025593 - RNA, 14 nt, Molluscum contagiosum virus
ggguacacgugcuu

SEQ ID NO: 4025594 - RNA, 13 nt, Molluscum contagiosum virus
ggguaccgugcgc

SEQ ID NO: 4025595 - RNA, 12 nt, Molluscum contagiosum virus
gggucacgcaga

SEQ ID NO: 4025596 - RNA, 17 nt, Molluscum contagiosum virus
uccacgcgugcugcgcg

SEQ ID NO: 4025597 - RNA, 17 nt, Molluscum contagiosum virus
uccacgugguccaccag

SEQ ID NO: 4025598 - RNA, 17 nt, Molluscum contagiosum virus
uccacuuucucuauuca

SEQ ID NO: 4025599 - RNA, 16 nt, Molluscum contagiosum virus
uccagcccugugcccg

SEQ ID NO: 4025600 - RNA, 20 nt, Molluscum contagiosum virus
uccagccgucgccgcgcccg

SEQ ID NO: 4025601 - RNA, 21 nt, Molluscum contagiosum virus
uccagcgcgcccucgcgcgcg

SEQ ID NO: 4025602 - RNA, 14 nt, Molluscum contagiosum virus
uccagcgcgcucga

SEQ ID NO: 4025603 - RNA, 19 nt, Molluscum contagiosum virus
uccagcgcgcucgaggcgc

SEQ ID NO: 4025604 - RNA, 16 nt, Molluscum contagiosum virus
uccaggaucacgaugu

SEQ ID NO: 4025605 - RNA, 18 nt, Molluscum contagiosum virus
uccaggcgccgcaccuca

SEQ ID NO: 4025606 - RNA, 14 nt, Molluscum contagiosum virus
uccaguaccagcuc

SEQ ID NO: 4025607 - RNA, 14 nt, Molluscum contagiosum virus
uccccagcgccgcc

SEQ ID NO: 4025608 - RNA, 19 nt, Molluscum contagiosum virus
uccccgcgcaagagccgcc

SEQ ID NO: 4025609 - RNA, 22 nt, Molluscum contagiosum virus
uccccgguucaaauccugguuc

SEQ ID NO: 4025610 - RNA, 17 nt, Molluscum contagiosum virus
ucccgcuggcggcacgu

SEQ ID NO: 4025611 - RNA, 12 nt, Molluscum contagiosum virus
ucccggcugccg

SEQ ID NO: 4025612 - RNA, 14 nt, Molluscum contagiosum virus
ucccgucgagcacg

SEQ ID NO: 4025613 - RNA, 11 nt, Molluscum contagiosum virus
ucccucugugc

SEQ ID NO: 4025614 - RNA, 19 nt, Molluscum contagiosum virus
uccgaccucuuuccgcgcu

SEQ ID NO: 4025615 - RNA, 16 nt, Molluscum contagiosum virus
uccgagcgcgcgcgcu

SEQ ID NO: 4025616 - RNA, 16 nt, Molluscum contagiosum virus
uccgagcggcugcucg

SEQ ID NO: 4025617 - RNA, 16 nt, Molluscum contagiosum virus
uccgcacacgcgcgcg

SEQ ID NO: 4025618 - RNA, 20 nt, Molluscum contagiosum virus
uccgcacacgcgcgcgugcu

SEQ ID NO: 4025619 - RNA, 16 nt, Molluscum contagiosum virus
uccgcacgaggagccc

SEQ ID NO: 4025620 - RNA, 19 nt, Molluscum contagiosum virus
uccgcccccagguggagcu

SEQ ID NO: 4025621 - RNA, 15 nt, Molluscum contagiosum virus
uccgcccgcgcuucu

SEQ ID NO: 4025622 - RNA, 18 nt, Molluscum contagiosum virus
uccgcgaaguccugggcg

SEQ ID NO: 4025623 - RNA, 21 nt, Molluscum contagiosum virus
uccgcgacuaccugcugcuga

SEQ ID NO: 4025624 - RNA, 19 nt, Molluscum contagiosum virus
uccgcgagcuaaucagcgc

SEQ ID NO: 4025625 - RNA, 22 nt, Molluscum contagiosum virus
uccgcgggcgcgcgccagcagc

SEQ ID NO: 4025626 - RNA, 20 nt, Molluscum contagiosum virus
uccgcucgugccacugccgc

SEQ ID NO: 4025627 - RNA, 16 nt, Molluscum contagiosum virus
uccgcuguacgugcug

SEQ ID NO: 4025628 - RNA, 12 nt, Molluscum contagiosum virus
uccggcagcugg

SEQ ID NO: 4025629 - RNA, 14 nt, Molluscum contagiosum virus
uccggccuguaaau

SEQ ID NO: 4025630 - RNA, 23 nt, Molluscum contagiosum virus
uccggcgcggccuggccacgccg

SEQ ID NO: 4025631 - RNA, 13 nt, Molluscum contagiosum virus
uccggcgcucgcc

SEQ ID NO: 4025632 - RNA, 20 nt, Molluscum contagiosum virus
uccggcgugagcucgucgcg

SEQ ID NO: 4025633 - RNA, 21 nt, Molluscum contagiosum virus
uccggcuuagcuggcgcccgu

SEQ ID NO: 4025634 - RNA, 21 nt, Molluscum contagiosum virus
uccggcuuuauuuccggcucc

SEQ ID NO: 4025635 - RNA, 18 nt, Molluscum contagiosum virus
uccggucgcccuccgccg

SEQ ID NO: 4025636 - RNA, 18 nt, Molluscum contagiosum virus
uccgugccauuucguuga

SEQ ID NO: 4025637 - RNA, 23 nt, Molluscum contagiosum virus
uccuagagcagaaggugcgcagc

SEQ ID NO: 4025638 - RNA, 16 nt, Molluscum contagiosum virus
uccucaaggcgcacga

SEQ ID NO: 4025639 - RNA, 15 nt, Molluscum contagiosum virus
uccucaccuuccugg

SEQ ID NO: 4025640 - RNA, 18 nt, Molluscum contagiosum virus
uccucgacaaugagcacu

SEQ ID NO: 4025641 - RNA, 16 nt, Molluscum contagiosum virus
uccugaacaagcugca

SEQ ID NO: 4025642 - RNA, 18 nt, Molluscum contagiosum virus
uccugcauuucaugcgcg

SEQ ID NO: 4025643 - RNA, 17 nt, Molluscum contagiosum virus
uccugcgcccauuccug

SEQ ID NO: 4025644 - RNA, 13 nt, Molluscum contagiosum virus
uccugcggcgcug

SEQ ID NO: 4025645 - RNA, 11 nt, Molluscum contagiosum virus
uccugcugccg

SEQ ID NO: 4025646 - RNA, 12 nt, Molluscum contagiosum virus
uccugcugguuc

SEQ ID NO: 4025647 - RNA, 19 nt, Molluscum contagiosum virus
uccuggcacuggcgcgcac

SEQ ID NO: 4025648 - RNA, 12 nt, Molluscum contagiosum virus
uccuggccaagg

SEQ ID NO: 4025649 - RNA, 22 nt, Molluscum contagiosum virus
uccuggcucgcgagugugcaug

SEQ ID NO: 4025650 - RNA, 20 nt, Molluscum contagiosum virus
uccuguagcaaggggucugc

SEQ ID NO: 4025651 - RNA, 19 nt, Molluscum contagiosum virus
uccuuccggagacaccagc

SEQ ID NO: 4025652 - RNA, 15 nt, Molluscum contagiosum virus
uccuucuucagcagg

SEQ ID NO: 4025653 - RNA, 16 nt, Molluscum contagiosum virus
uccuugcgcuuguccu

SEQ ID NO: 4025654 - RNA, 20 nt, Molluscum contagiosum virus
uccuugcuccucgcacgggc

SEQ ID NO: 4025655 - RNA, 22 nt, Molluscum contagiosum virus
ucgaaaaggcugauccugcgcg

SEQ ID NO: 4025656 - RNA, 14 nt, Molluscum contagiosum virus
ucgaagcagugcuc

SEQ ID NO: 4025657 - RNA, 16 nt, Molluscum contagiosum virus
ucgacagagaaguccc

SEQ ID NO: 4025658 - RNA, 17 nt, Molluscum contagiosum virus
ucgacagcauccuggag

SEQ ID NO: 4025659 - RNA, 13 nt, Molluscum contagiosum virus
ucgacagcgugcg

SEQ ID NO: 4025660 - RNA, 13 nt, Molluscum contagiosum virus
ucgaccugcacga

SEQ ID NO: 4025661 - RNA, 15 nt, Molluscum contagiosum virus
ucgacgccaacuucg

SEQ ID NO: 4025662 - RNA, 19 nt, Molluscum contagiosum virus
ucgacgcggugcgcgcgug

SEQ ID NO: 4025663 - RNA, 20 nt, Molluscum contagiosum virus
ucgacgcggugcgcgcgugc

SEQ ID NO: 4025664 - RNA, 23 nt, Molluscum contagiosum virus
ucgacgcgugcauggcacgcgag

SEQ ID NO: 4025665 - RNA, 17 nt, Molluscum contagiosum virus
ucgacgugaucgcgcag

SEQ ID NO: 4025666 - RNA, 12 nt, Molluscum contagiosum virus
ucgacguggacc

SEQ ID NO: 4025667 - RNA, 23 nt, Molluscum contagiosum virus
ucgacugcguugucuccuccuga

SEQ ID NO: 4025668 - RNA, 20 nt, Molluscum contagiosum virus
ucgagaagacggggcgcacg

SEQ ID NO: 4025669 - RNA, 18 nt, Molluscum contagiosum virus
ucgagaccacgcgcgcug

SEQ ID NO: 4025670 - RNA, 19 nt, Molluscum contagiosum virus
ucgagaccacgcgcgcugc

SEQ ID NO: 4025671 - RNA, 13 nt, Molluscum contagiosum virus
ucgagaccucgcg

SEQ ID NO: 4025672 - RNA, 20 nt, Molluscum contagiosum virus
ucgagaugcucuacgugcug

SEQ ID NO: 4025673 - RNA, 20 nt, Molluscum contagiosum virus
ucgagcagauucacgagcuc

SEQ ID NO: 4025674 - RNA, 19 nt, Molluscum contagiosum virus
ucgagcgagcuacgcgcuc

SEQ ID NO: 4025675 - RNA, 22 nt, Molluscum contagiosum virus
ucgagcgcgccgcgcgcucgcg

SEQ ID NO: 4025676 - RNA, 14 nt, Molluscum contagiosum virus
ucgagcgcgcgccu

SEQ ID NO: 4025677 - RNA, 17 nt, Molluscum contagiosum virus
ucgaggcacucgucgcg

SEQ ID NO: 4025678 - RNA, 14 nt, Molluscum contagiosum virus
ucgaggugugccug

SEQ ID NO: 4025679 - RNA, 19 nt, Molluscum contagiosum virus
ucgagugcucccgaggcgc

SEQ ID NO: 4025680 - RNA, 15 nt, Molluscum contagiosum virus
ucgaguucgcucgcu

SEQ ID NO: 4025681 - RNA, 23 nt, Molluscum contagiosum virus
ucgaugacagcaucgggcugucg

SEQ ID NO: 4025682 - RNA, 17 nt, Molluscum contagiosum virus
ucgauggacgccagcuu

SEQ ID NO: 4025683 - RNA, 20 nt, Molluscum contagiosum virus
ucgauggcgccguuggccac

SEQ ID NO: 4025684 - RNA, 18 nt, Molluscum contagiosum virus
ucgcaagucucccucgcg

SEQ ID NO: 4025685 - RNA, 20 nt, Molluscum contagiosum virus
ucgcaaucugacggugcaac

SEQ ID NO: 4025686 - RNA, 19 nt, Molluscum contagiosum virus
ucgcacgcuagcgagcgcc

SEQ ID NO: 4025687 - RNA, 20 nt, Molluscum contagiosum virus
ucgcagcguuccaggaacgc

SEQ ID NO: 4025688 - RNA, 23 nt, Molluscum contagiosum virus
ucgccagaagucagaguccgacc

SEQ ID NO: 4025689 - RNA, 19 nt, Molluscum contagiosum virus
ucgccgaacggcagacccc

SEQ ID NO: 4025690 - RNA, 14 nt, Molluscum contagiosum virus
ucgccgcgggcugg

SEQ ID NO: 4025691 - RNA, 15 nt, Molluscum contagiosum virus
uguuuguugucccac

SEQ ID NO: 4025692 - RNA, 18 nt, Molluscum contagiosum virus
uuaaacaacacgcgcgag

SEQ ID NO: 4025693 - RNA, 16 nt, Molluscum contagiosum virus
uuaccaagucgcgcuc

SEQ ID NO: 4025694 - RNA, 19 nt, Molluscum contagiosum virus
uuagcacacgcgcgcgcag

SEQ ID NO: 4025695 - RNA, 16 nt, Molluscum contagiosum virus
uuaggcaucucgugca

SEQ ID NO: 4025696 - RNA, 20 nt, Molluscum contagiosum virus
uucaccuucggaacugcgga

SEQ ID NO: 4025697 - RNA, 21 nt, Molluscum contagiosum virus
uucagagugacgcugcaagac

SEQ ID NO: 4025698 - RNA, 16 nt, Molluscum contagiosum virus
uucaggaacaaggcca

SEQ ID NO: 4025699 - RNA, 23 nt, Molluscum contagiosum virus
uuccacgaccgcaagugcacgcg

SEQ ID NO: 4025700 - RNA, 20 nt, Molluscum contagiosum virus
uuccacuacaagcagccgca

SEQ ID NO: 4025701 - RNA, 19 nt, Molluscum contagiosum virus
uuccccuccuagcccagca

SEQ ID NO: 4025702 - RNA, 16 nt, Molluscum contagiosum virus
uucccgcggcgugccc

SEQ ID NO: 4025703 - RNA, 13 nt, Molluscum contagiosum virus
uucccgugcaagg

SEQ ID NO: 4025704 - RNA, 14 nt, Molluscum contagiosum virus
uucccguuccuggg

SEQ ID NO: 4025705 - RNA, 18 nt, Molluscum contagiosum virus
uuccgacccggcucgcuc

SEQ ID NO: 4025706 - RNA, 22 nt, Molluscum contagiosum virus
uuccggagacaccagcuccgcc

SEQ ID NO: 4025707 - RNA, 16 nt, Molluscum contagiosum virus
uuccggccuguaaaug

SEQ ID NO: 4025708 - RNA, 17 nt, Molluscum contagiosum virus
acugcccggcggcaagc

SEQ ID NO: 4025709 - RNA, 20 nt, Molluscum contagiosum virus
acugcgcgcacugcucgcgc

SEQ ID NO: 4025710 - RNA, 16 nt, Molluscum contagiosum virus
acugcgcgcgcggcgc

SEQ ID NO: 4025711 - RNA, 16 nt, Molluscum contagiosum virus
acugcggacucgcgag

SEQ ID NO: 4025712 - RNA, 22 nt, Molluscum contagiosum virus
acugcggugacgguccugcgcg

SEQ ID NO: 4025713 - RNA, 19 nt, Molluscum contagiosum virus
acugcuagugcuggccgcc

SEQ ID NO: 4025714 - RNA, 14 nt, Molluscum contagiosum virus
acugcucgcgcacg

SEQ ID NO: 4025715 - RNA, 19 nt, Molluscum contagiosum virus
acugcugcaaucugcgcuc

SEQ ID NO: 4025716 - RNA, 12 nt, Molluscum contagiosum virus
acugcugggcgu

SEQ ID NO: 4025717 - RNA, 20 nt, Molluscum contagiosum virus
acuggacugagccgcaagca

SEQ ID NO: 4025718 - RNA, 19 nt, Molluscum contagiosum virus
acugggaggacacgcgcac

SEQ ID NO: 4025719 - RNA, 18 nt, Molluscum contagiosum virus
acugucgcgcagcugcgc

SEQ ID NO: 4025720 - RNA, 17 nt, Molluscum contagiosum virus
acuguguucccggcugc

SEQ ID NO: 4025721 - RNA, 18 nt, Molluscum contagiosum virus
acuguugcuuccggggcg

SEQ ID NO: 4025722 - RNA, 15 nt, Molluscum contagiosum virus
acuguugguuaauuu

SEQ ID NO: 4025723 - RNA, 21 nt, Molluscum contagiosum virus
acuuaacggccaauaaaugau

SEQ ID NO: 4025724 - RNA, 22 nt, Molluscum contagiosum virus
acuuaucccagaaaacgcacug

SEQ ID NO: 4025725 - RNA, 22 nt, Molluscum contagiosum virus
acuucacggcguucaccuuggc

SEQ ID NO: 4025726 - RNA, 23 nt, Molluscum contagiosum virus
acuuccguugcgagaacgggcgc

SEQ ID NO: 4025727 - RNA, 20 nt, Molluscum contagiosum virus
acuucgcagacgacucgcug

SEQ ID NO: 4025728 - RNA, 15 nt, Molluscum contagiosum virus
acuugcgcguccaca

SEQ ID NO: 4025729 - RNA, 20 nt, Molluscum contagiosum virus
acuugcgcguucgcaaagac

SEQ ID NO: 4025730 - RNA, 13 nt, Molluscum contagiosum virus
acuugcugcggag

SEQ ID NO: 4025731 - RNA, 16 nt, Molluscum contagiosum virus
acuugcugguugccgc

SEQ ID NO: 4025732 - RNA, 16 nt, Molluscum contagiosum virus
acuugugcgcccccgc

SEQ ID NO: 4025733 - RNA, 17 nt, Molluscum contagiosum virus
acuuugagcgagugccg

SEQ ID NO: 4025734 - RNA, 15 nt, Molluscum contagiosum virus
acuuugucgcacgag

SEQ ID NO: 4025735 - RNA, 16 nt, Molluscum contagiosum virus
acuuuuccugcgucgc

SEQ ID NO: 4025736 - RNA, 20 nt, Molluscum contagiosum virus
agaaaggcacccaccaggaa

SEQ ID NO: 4025737 - RNA, 14 nt, Molluscum contagiosum virus
agaacugccugguc

SEQ ID NO: 4025738 - RNA, 13 nt, Molluscum contagiosum virus
agaagaacagcac

SEQ ID NO: 4025739 - RNA, 14 nt, Molluscum contagiosum virus
agaagaacagcacg

SEQ ID NO: 4025740 - RNA, 23 nt, Molluscum contagiosum virus
agaagacggcgcgcgcgcuagcc

SEQ ID NO: 4025741 - RNA, 15 nt, Molluscum contagiosum virus
agaagaggccagcac

SEQ ID NO: 4025742 - RNA, 12 nt, Molluscum contagiosum virus
agaagaggccgg

SEQ ID NO: 4025743 - RNA, 18 nt, Molluscum contagiosum virus
agaagagggucgugcagg

SEQ ID NO: 4025744 - RNA, 18 nt, Molluscum contagiosum virus
agaagcccgggucggcaa

SEQ ID NO: 4025745 - RNA, 18 nt, Molluscum contagiosum virus
agaaguucugcacagcac

SEQ ID NO: 4025746 - RNA, 18 nt, Molluscum contagiosum virus
agaaugacuuagccacug

SEQ ID NO: 4025747 - RNA, 23 nt, Molluscum contagiosum virus
agacauauguucuucgacaacau

SEQ ID NO: 4025748 - RNA, 14 nt, Molluscum contagiosum virus
agaccaccagcacc

SEQ ID NO: 4025749 - RNA, 15 nt, Molluscum contagiosum virus
agaccuuccuccagg

SEQ ID NO: 4025750 - RNA, 16 nt, Molluscum contagiosum virus
agacgacucgcugcca

SEQ ID NO: 4025751 - RNA, 20 nt, Molluscum contagiosum virus
agacgcagcgcgagcugugc

SEQ ID NO: 4025752 - RNA, 12 nt, Molluscum contagiosum virus
agacgcugcugc

SEQ ID NO: 4025753 - RNA, 14 nt, Molluscum contagiosum virus
agacgcugcugcac

SEQ ID NO: 4025754 - RNA, 13 nt, Molluscum contagiosum virus
agacguagagcag

SEQ ID NO: 4025755 - RNA, 18 nt, Molluscum contagiosum virus
agacgucccgcagugugc

SEQ ID NO: 4025756 - RNA, 18 nt, Molluscum contagiosum virus
agacuauaugcgaagcgu

SEQ ID NO: 4025757 - RNA, 18 nt, Molluscum contagiosum virus
agacugagugcugagcca

SEQ ID NO: 4025758 - RNA, 22 nt, Molluscum contagiosum virus
agacuggagcacggacugggag

SEQ ID NO: 4025759 - RNA, 20 nt, Molluscum contagiosum virus
agacuugccgucucgcgcuc

SEQ ID NO: 4025760 - RNA, 13 nt, Molluscum contagiosum virus
agagaaaggcacc

SEQ ID NO: 4025761 - RNA, 21 nt, Molluscum contagiosum virus
agagaacaacgaaaacugaaa

SEQ ID NO: 4025762 - RNA, 13 nt, Molluscum contagiosum virus
agagaaccugugc

SEQ ID NO: 4025763 - RNA, 21 nt, Molluscum contagiosum virus
agagacgcugccggcaacgcu

SEQ ID NO: 4025764 - RNA, 12 nt, Molluscum contagiosum virus
agagcagugccg

SEQ ID NO: 4025765 - RNA, 18 nt, Molluscum contagiosum virus
agagcccgccgggcaccg

SEQ ID NO: 4025766 - RNA, 11 nt, Molluscum contagiosum virus
agagccgccgg

SEQ ID NO: 4025767 - RNA, 14 nt, Molluscum contagiosum virus
agagccgccggggc

SEQ ID NO: 4025768 - RNA, 14 nt, Molluscum contagiosum virus
agagccgcuccugg

SEQ ID NO: 4025769 - RNA, 16 nt, Molluscum contagiosum virus
agagccugcugcucuu

SEQ ID NO: 4025770 - RNA, 19 nt, Molluscum contagiosum virus
agagcguccagccgcagcc

SEQ ID NO: 4025771 - RNA, 15 nt, Molluscum contagiosum virus
agaggacagcuccuu

SEQ ID NO: 4025772 - RNA, 14 nt, Molluscum contagiosum virus
agaggccagcacaa

SEQ ID NO: 4025773 - RNA, 18 nt, Molluscum contagiosum virus
agagggucgugcaggucg

SEQ ID NO: 4025774 - RNA, 18 nt, Molluscum contagiosum virus
agaggugcgugccccucg

SEQ ID NO: 4025775 - RNA, 12 nt, Molluscum contagiosum virus
agaucacggcgu

SEQ ID NO: 4025776 - RNA, 18 nt, Molluscum contagiosum virus
agaucaggcagcugcugc

SEQ ID NO: 4025777 - RNA, 20 nt, Molluscum contagiosum virus
agaucaggcagcugcugcgc

SEQ ID NO: 4025778 - RNA, 15 nt, Molluscum contagiosum virus
agaucgacugcgccu

SEQ ID NO: 4025779 - RNA, 13 nt, Molluscum contagiosum virus
agauggcugcucu

SEQ ID NO: 4025780 - RNA, 23 nt, Molluscum contagiosum virus
agauuggaggaggaagcaggucu

SEQ ID NO: 4025781 - RNA, 14 nt, Molluscum contagiosum virus
agcaagcgcccgcg

SEQ ID NO: 4025782 - RNA, 24 nt, Molluscum contagiosum virus
agcacacgguagagcugcgagaac

SEQ ID NO: 4025783 - RNA, 14 nt, Molluscum contagiosum virus
agcaccaagaagcg

SEQ ID NO: 4025784 - RNA, 16 nt, Molluscum contagiosum virus
agcaccgccugcugca

SEQ ID NO: 4025785 - RNA, 22 nt, Molluscum contagiosum virus
agcaccgcgccccacugugcca

SEQ ID NO: 4025786 - RNA, 20 nt, Molluscum contagiosum virus
agcacggcuuccggcaccac

SEQ ID NO: 4025787 - RNA, 19 nt, Molluscum contagiosum virus
agcacguuaaucacgauga

SEQ ID NO: 4025788 - RNA, 17 nt, Molluscum contagiosum virus
agcacugcgcgcgcggc

SEQ ID NO: 4025789 - RNA, 17 nt, Molluscum contagiosum virus
agcagccccgacgccag

SEQ ID NO: 4025790 - RNA, 14 nt, Molluscum contagiosum virus
agcagcccgcaggc

SEQ ID NO: 4025791 - RNA, 15 nt, Molluscum contagiosum virus
agcagccgcagccca

SEQ ID NO: 4025792 - RNA, 13 nt, Molluscum contagiosum virus
agcagcgccugca

SEQ ID NO: 4025793 - RNA, 19 nt, Molluscum contagiosum virus
agcagcuccagcauggcgc

SEQ ID NO: 4025794 - RNA, 17 nt, Molluscum contagiosum virus
caaacugugcuccugag

SEQ ID NO: 4025795 - RNA, 15 nt, Molluscum contagiosum virus
caaagacgggcccgc

SEQ ID NO: 4025796 - RNA, 18 nt, Molluscum contagiosum virus
caaagaucgcgguggcag

SEQ ID NO: 4025797 - RNA, 15 nt, Molluscum contagiosum virus
caaagccggccccgc

SEQ ID NO: 4025798 - RNA, 12 nt, Molluscum contagiosum virus
caaagcgcggcc

SEQ ID NO: 4025799 - RNA, 13 nt, Molluscum contagiosum virus
caaagcgcggccg

SEQ ID NO: 4025800 - RNA, 15 nt, Molluscum contagiosum virus
caaaggcaggggccg

SEQ ID NO: 4025801 - RNA, 14 nt, Molluscum contagiosum virus
caaagucgcgcgcg

SEQ ID NO: 4025802 - RNA, 17 nt, Molluscum contagiosum virus
caaagucgcgcgcggcc

SEQ ID NO: 4025803 - RNA, 18 nt, Molluscum contagiosum virus
caaaugcgucccagcagc

SEQ ID NO: 4025804 - RNA, 13 nt, Molluscum contagiosum virus
caaauggagauga

SEQ ID NO: 4025805 - RNA, 13 nt, Molluscum contagiosum virus
caacaagcugcug

SEQ ID NO: 4025806 - RNA, 22 nt, Molluscum contagiosum virus
caacacgaucaaggugcagaac

SEQ ID NO: 4025807 - RNA, 15 nt, Molluscum contagiosum virus
caacacgcuguugcu

SEQ ID NO: 4025808 - RNA, 15 nt, Molluscum contagiosum virus
caacagcgcaagcug

SEQ ID NO: 4025809 - RNA, 18 nt, Molluscum contagiosum virus
caacaggagcauuccuug

SEQ ID NO: 4025810 - RNA, 19 nt, Molluscum contagiosum virus
caacccgcggcgcgccgca

SEQ ID NO: 4025811 - RNA, 15 nt, Molluscum contagiosum virus
caaccgccugcucuc

SEQ ID NO: 4025812 - RNA, 23 nt, Molluscum contagiosum virus
caaccgccugcucucgcgcgcca

SEQ ID NO: 4025813 - RNA, 22 nt, Molluscum contagiosum virus
caaccgcugcuauuaccugaga

SEQ ID NO: 4025814 - RNA, 23 nt, Molluscum contagiosum virus
caaccuguuaaauggacgugcuc

SEQ ID NO: 4025815 - RNA, 14 nt, Molluscum contagiosum virus
caacgaggucuucc

SEQ ID NO: 4025816 - RNA, 14 nt, Molluscum contagiosum virus
caacgaguacgagc

SEQ ID NO: 4025817 - RNA, 13 nt, Molluscum contagiosum virus
caacgcgcgcgcg

SEQ ID NO: 4025818 - RNA, 19 nt, Molluscum contagiosum virus
caacgcgcgcgugcugucc

SEQ ID NO: 4025819 - RNA, 13 nt, Molluscum contagiosum virus
caacgcggacgcg

SEQ ID NO: 4025820 - RNA, 15 nt, Molluscum contagiosum virus
caacgcgggccaggc

SEQ ID NO: 4025821 - RNA, 19 nt, Molluscum contagiosum virus
caacgggcucgugcuggag

SEQ ID NO: 4025822 - RNA, 17 nt, Molluscum contagiosum virus
caacguaguacugcagc

SEQ ID NO: 4025823 - RNA, 18 nt, Molluscum contagiosum virus
caacguaguacugcagca

SEQ ID NO: 4025824 - RNA, 22 nt, Molluscum contagiosum virus
caacguaguacugcagcagcuc

SEQ ID NO: 4025825 - RNA, 20 nt, Molluscum contagiosum virus
caacgucgcacuggccugca

SEQ ID NO: 4025826 - RNA, 18 nt, Molluscum contagiosum virus
caacguggcgcugaccuc

SEQ ID NO: 4025827 - RNA, 21 nt, Molluscum contagiosum virus
caacucgcgcugcagcaccug

SEQ ID NO: 4025828 - RNA, 18 nt, Molluscum contagiosum virus
caacucugcucgugcccg

SEQ ID NO: 4025829 - RNA, 15 nt, Molluscum contagiosum virus
caagaagacggcgcg

SEQ ID NO: 4025830 - RNA, 21 nt, Molluscum contagiosum virus
caagaccgugacggccgugua

SEQ ID NO: 4025831 - RNA, 12 nt, Molluscum contagiosum virus
caagagccaugu

SEQ ID NO: 4025832 - RNA, 15 nt, Molluscum contagiosum virus
caagagcuggucgcc

SEQ ID NO: 4025833 - RNA, 15 nt, Molluscum contagiosum virus
caagaggggagccag

SEQ ID NO: 4025834 - RNA, 17 nt, Molluscum contagiosum virus
gacuggcacgcgccgcg

SEQ ID NO: 4025835 - RNA, 16 nt, Molluscum contagiosum virus
gacuggcuucggggac

SEQ ID NO: 4025836 - RNA, 17 nt, Molluscum contagiosum virus
gacugucgacagagaag

SEQ ID NO: 4025837 - RNA, 20 nt, Molluscum contagiosum virus
gacuguguucccggcugccg

SEQ ID NO: 4025838 - RNA, 14 nt, Molluscum contagiosum virus
gacuuagccacugu

SEQ ID NO: 4025839 - RNA, 19 nt, Molluscum contagiosum virus
gacuucuugcgcggcggcc

SEQ ID NO: 4025840 - RNA, 17 nt, Molluscum contagiosum virus
gacuuguguugagccuu

SEQ ID NO: 4025841 - RNA, 18 nt, Molluscum contagiosum virus
gacuuuguccugagccuu

SEQ ID NO: 4025842 - RNA, 16 nt, Molluscum contagiosum virus
gagaaagacgucccgc

SEQ ID NO: 4025843 - RNA, 14 nt, Molluscum contagiosum virus
gagaaaggcaccca

SEQ ID NO: 4025844 - RNA, 21 nt, Molluscum contagiosum virus
gagaaaggcacccaccaggaa

SEQ ID NO: 4025845 - RNA, 19 nt, Molluscum contagiosum virus
gagaaaugcgcacacuugc

SEQ ID NO: 4025846 - RNA, 18 nt, Molluscum contagiosum virus
gagaaccgccgucaacau

SEQ ID NO: 4025847 - RNA, 17 nt, Molluscum contagiosum virus
gagaagaacagcacgaa

SEQ ID NO: 4025848 - RNA, 17 nt, Molluscum contagiosum virus
gagaagaccuguucuuu

SEQ ID NO: 4025849 - RNA, 17 nt, Molluscum contagiosum virus
gagaagaugcugcgcgu

SEQ ID NO: 4025850 - RNA, 18 nt, Molluscum contagiosum virus
gagaauaaaugagcagca

SEQ ID NO: 4025851 - RNA, 12 nt, Molluscum contagiosum virus
gagaccagccgc

SEQ ID NO: 4025852 - RNA, 20 nt, Molluscum contagiosum virus
gagaccuggucacacuggug

SEQ ID NO: 4025853 - RNA, 14 nt, Molluscum contagiosum virus
gagacgcggccgcg

SEQ ID NO: 4025854 - RNA, 16 nt, Molluscum contagiosum virus
gagacgugcggcacgc

SEQ ID NO: 4025855 - RNA, 17 nt, Molluscum contagiosum virus
gagacgugcggcacgcu

SEQ ID NO: 4025856 - RNA, 18 nt, Molluscum contagiosum virus
gagacgugcggcacgcug

SEQ ID NO: 4025857 - RNA, 14 nt, Molluscum contagiosum virus
gagacguugccgga

SEQ ID NO: 4025858 - RNA, 12 nt, Molluscum contagiosum virus
gagacucuggaa

SEQ ID NO: 4025859 - RNA, 21 nt, Molluscum contagiosum virus
gagacugcuacgucgcggcgc

SEQ ID NO: 4025860 - RNA, 13 nt, Molluscum contagiosum virus
gagagacaacaaa

SEQ ID NO: 4025861 - RNA, 19 nt, Molluscum contagiosum virus
gagagccgcuccuggucuu

SEQ ID NO: 4025862 - RNA, 12 nt, Molluscum contagiosum virus
gagagccuucgu

SEQ ID NO: 4025863 - RNA, 13 nt, Molluscum contagiosum virus
gagagcgcgcgca

SEQ ID NO: 4025864 - RNA, 15 nt, Molluscum contagiosum virus
gagagcgugagcagg

SEQ ID NO: 4025865 - RNA, 20 nt, Molluscum contagiosum virus
gagaucacggcgugcgcgag

SEQ ID NO: 4025866 - RNA, 20 nt, Molluscum contagiosum virus
gagaucuuugaccgcuucga

SEQ ID NO: 4025867 - RNA, 21 nt, Molluscum contagiosum virus
gagcaagcgagagaggaguga

SEQ ID NO: 4025868 - RNA, 14 nt, Molluscum contagiosum virus
gagcaaggccuggc

SEQ ID NO: 4025869 - RNA, 14 nt, Molluscum contagiosum virus
gagcaagucugcgc

SEQ ID NO: 4025870 - RNA, 17 nt, Molluscum contagiosum virus
gagcaauggcggccugc

SEQ ID NO: 4025871 - RNA, 17 nt, Molluscum contagiosum virus
gagcacaacgaacaugu

SEQ ID NO: 4025872 - RNA, 17 nt, Molluscum contagiosum virus
gagcacauacacgcgca

SEQ ID NO: 4025873 - RNA, 21 nt, Molluscum contagiosum virus
gagcaccgaacaaaugcagag

SEQ ID NO: 4025874 - RNA, 16 nt, Molluscum contagiosum virus
gagcacugcgcgcgcg

SEQ ID NO: 4025875 - RNA, 18 nt, Molluscum contagiosum virus
gagcacuguacgcacgca

SEQ ID NO: 4025876 - RNA, 16 nt, Molluscum contagiosum virus
gagcacuuccgcgcgc

SEQ ID NO: 4025877 - RNA, 14 nt, Molluscum contagiosum virus
gagcacuugccgcg

SEQ ID NO: 4025878 - RNA, 18 nt, Molluscum contagiosum virus
gagcaggacgugcacgug

SEQ ID NO: 4025879 - RNA, 20 nt, Molluscum contagiosum virus
gagcagguucucgcacagua

SEQ ID NO: 4025880 - RNA, 12 nt, Molluscum contagiosum virus
gagcagugccgc

SEQ ID NO: 4025881 - RNA, 18 nt, Molluscum contagiosum virus
gagcagugccgccgcgca

SEQ ID NO: 4025882 - RNA, 13 nt, Molluscum contagiosum virus
gagccauguuucc

SEQ ID NO: 4025883 - RNA, 12 nt, Molluscum contagiosum virus
gagccccgcgga

SEQ ID NO: 4025884 - RNA, 14 nt, Molluscum contagiosum virus
gagcccgccgggca

SEQ ID NO: 4025885 - RNA, 12 nt, Molluscum contagiosum virus
gagccgccgggg

SEQ ID NO: 4025886 - RNA, 13 nt, Molluscum contagiosum virus
gagccggcugccc

SEQ ID NO: 4025887 - RNA, 15 nt, Molluscum contagiosum virus
gagccgggacgcgga

SEQ ID NO: 4025888 - RNA, 22 nt, Molluscum contagiosum virus
gagccucccccgcgcacugcca

SEQ ID NO: 4025889 - RNA, 13 nt, Molluscum contagiosum virus
gagccucuggaag

SEQ ID NO: 4025890 - RNA, 17 nt, Molluscum contagiosum virus
gagccuuuuggcggcgc

SEQ ID NO: 4025891 - RNA, 21 nt, Molluscum contagiosum virus
gagcgagugcgcgugcgccug

SEQ ID NO: 4025892 - RNA, 20 nt, Molluscum contagiosum virus
gagcgcaguuguuugucgcg

SEQ ID NO: 4025893 - RNA, 20 nt, Molluscum contagiosum virus
gagcgcccgugcuugcgcac

SEQ ID NO: 4025894 - RNA, 12 nt, Molluscum contagiosum virus
gagcgcgcgugc

SEQ ID NO: 4025895 - RNA, 21 nt, Molluscum contagiosum virus
gagcgcggcuuacacacgcac

SEQ ID NO: 4025896 - RNA, 16 nt, Molluscum contagiosum virus
gagcgcguccaugagc

SEQ ID NO: 4025897 - RNA, 23 nt, Molluscum contagiosum virus
gagcgcgucugcucucggcggcc

SEQ ID NO: 4025898 - RNA, 12 nt, Molluscum contagiosum virus
gagcggcacggg

SEQ ID NO: 4025899 - RNA, 14 nt, Molluscum contagiosum virus
gagcggccuccgga

SEQ ID NO: 4025900 - RNA, 22 nt, Molluscum contagiosum virus
gagcggccuccggagaagcuuu

SEQ ID NO: 4025901 - RNA, 21 nt, Molluscum contagiosum virus
gagcggcgccgacaacgugcu

SEQ ID NO: 4025902 - RNA, 23 nt, Molluscum contagiosum virus
gagcggcgcgcgcugagcgcgga

SEQ ID NO: 4025903 - RNA, 18 nt, Molluscum contagiosum virus
gagcgggguacaggcgcg

SEQ ID NO: 4025904 - RNA, 20 nt, Molluscum contagiosum virus
gagcguacucgggccgcgag

SEQ ID NO: 4025905 - RNA, 22 nt, Molluscum contagiosum virus
gagcucaaucucgcccagcacc

SEQ ID NO: 4025906 - RNA, 17 nt, Molluscum contagiosum virus
gagcucgguagccaggc

SEQ ID NO: 4025907 - RNA, 19 nt, Molluscum contagiosum virus
gagcucugucccgcaagcc

SEQ ID NO: 4025908 - RNA, 16 nt, Molluscum contagiosum virus
gagcugcgugugccgg

SEQ ID NO: 4025909 - RNA, 12 nt, Molluscum contagiosum virus
gagcuggccacu

SEQ ID NO: 4025910 - RNA, 13 nt, Molluscum contagiosum virus
gagcuggcugggc

SEQ ID NO: 4025911 - RNA, 21 nt, Molluscum contagiosum virus
gagcuugcgcgcggugcgggc

SEQ ID NO: 4025912 - RNA, 14 nt, Molluscum contagiosum virus
gagcuuugugcgac

SEQ ID NO: 4025913 - RNA, 17 nt, Molluscum contagiosum virus
gaggaacuagugcugcu

SEQ ID NO: 4025914 - RNA, 23 nt, Molluscum contagiosum virus
gaggaacucgaggcucuguucug

SEQ ID NO: 4025915 - RNA, 15 nt, Molluscum contagiosum virus
gaggacacgcgcacg

SEQ ID NO: 4025916 - RNA, 22 nt, Molluscum contagiosum virus
gaggacgcgggcguguccgcgg

SEQ ID NO: 4025917 - RNA, 15 nt, Molluscum contagiosum virus
gaggacggcgugcgc

SEQ ID NO: 4025918 - RNA, 13 nt, Molluscum contagiosum virus
gaggaggcaagcg

SEQ ID NO: 4025919 - RNA, 17 nt, Molluscum contagiosum virus
gaggcacgggcucgauc

SEQ ID NO: 4025920 - RNA, 16 nt, Molluscum contagiosum virus
gaggcacucgucgcgc

SEQ ID NO: 4025921 - RNA, 16 nt, Molluscum contagiosum virus
gaggcagccgcggcgc

SEQ ID NO: 4025922 - RNA, 20 nt, Molluscum contagiosum virus
gaggcagugcuugagcaucu

SEQ ID NO: 4025923 - RNA, 17 nt, Molluscum contagiosum virus
gaggcaugucgcggugc

SEQ ID NO: 4025924 - RNA, 13 nt, Molluscum contagiosum virus
gaggccagcacaa

SEQ ID NO: 4025925 - RNA, 16 nt, Molluscum contagiosum virus
gaggccagcacaagcc

SEQ ID NO: 4025926 - RNA, 14 nt, Molluscum contagiosum virus
gaggcccaggccau

SEQ ID NO: 4025927 - RNA, 19 nt, Molluscum contagiosum virus
gaggccggccgugcagagc

SEQ ID NO: 4025928 - RNA, 22 nt, Molluscum contagiosum virus
gaggccugcugaagaaggagcc

SEQ ID NO: 4025929 - RNA, 17 nt, Molluscum contagiosum virus
gaggcgcguccgcggcc

SEQ ID NO: 4025930 - RNA, 20 nt, Molluscum contagiosum virus
gaggcgcuagugcagaugag

SEQ ID NO: 4025931 - RNA, 17 nt, Molluscum contagiosum virus
gaggcgcuugggcacug

SEQ ID NO: 4025932 - RNA, 12 nt, Molluscum contagiosum virus
gaggcggcacug

SEQ ID NO: 4025933 - RNA, 16 nt, Molluscum contagiosum virus
gaggcggcacugcuag

SEQ ID NO: 4025934 - RNA, 20 nt, Molluscum contagiosum virus
gaggcuccugccgucgcccg

SEQ ID NO: 4025935 - RNA, 14 nt, Molluscum contagiosum virus
gagggacacgcacu

SEQ ID NO: 4025936 - RNA, 16 nt, Molluscum contagiosum virus
gccggaacucgcgcgc

SEQ ID NO: 4025937 - RNA, 20 nt, Molluscum contagiosum virus
gccggaccagauccgggcgc

SEQ ID NO: 4025938 - RNA, 20 nt, Molluscum contagiosum virus
gccggcacccgugcgcgcgc

SEQ ID NO: 4025939 - RNA, 18 nt, Molluscum contagiosum virus
gccggcaucuucggcgug

SEQ ID NO: 4025940 - RNA, 13 nt, Molluscum contagiosum virus
gccggccgccggc

SEQ ID NO: 4025941 - RNA, 15 nt, Molluscum contagiosum virus
gccggccgccggcgc

SEQ ID NO: 4025942 - RNA, 16 nt, Molluscum contagiosum virus
gccggcgcgugagcgc

SEQ ID NO: 4025943 - RNA, 21 nt, Molluscum contagiosum virus
gccggcgcuucuacugcgcac

SEQ ID NO: 4025944 - RNA, 21 nt, Molluscum contagiosum virus
gccggcucagcguggagcacc

SEQ ID NO: 4025945 - RNA, 22 nt, Molluscum contagiosum virus
gccggcuguaaauggacccgcu

SEQ ID NO: 4025946 - RNA, 19 nt, Molluscum contagiosum virus
gccgggaauaccggagaca

SEQ ID NO: 4025947 - RNA, 15 nt, Molluscum contagiosum virus
gccgggcaccggcgc

SEQ ID NO: 4025948 - RNA, 18 nt, Molluscum contagiosum virus
gccgggcuugcucccucg

SEQ ID NO: 4025949 - RNA, 24 nt, Molluscum contagiosum virus
gccgggcuugcucccucgcgcgca

SEQ ID NO: 4025950 - RNA, 13 nt, Molluscum contagiosum virus
gccgggggaacac

SEQ ID NO: 4025951 - RNA, 16 nt, Molluscum contagiosum virus
gccgguacugcggaca

SEQ ID NO: 4025952 - RNA, 18 nt, Molluscum contagiosum virus
gccggucuccacguggcc

SEQ ID NO: 4025953 - RNA, 17 nt, Molluscum contagiosum virus
ggcauccggccgaggca

SEQ ID NO: 4025954 - RNA, 21 nt, Molluscum contagiosum virus
ggccaaagucuuccuggggcu

SEQ ID NO: 4025955 - RNA, 17 nt, Molluscum contagiosum virus
ggccacgaacacggcgc

SEQ ID NO: 4025956 - RNA, 20 nt, Molluscum contagiosum virus
ggccacgcacucgcuggccu

SEQ ID NO: 4025957 - RNA, 17 nt, Molluscum contagiosum virus
ggccagcagcuccuggu

SEQ ID NO: 4025958 - RNA, 14 nt, Molluscum contagiosum virus
ggccagccucaucg

SEQ ID NO: 4025959 - RNA, 17 nt, Molluscum contagiosum virus
ggccagcuucaucaagc

SEQ ID NO: 4025960 - RNA, 16 nt, Molluscum contagiosum virus
ggccaggcacuggccc

SEQ ID NO: 4025961 - RNA, 17 nt, Molluscum contagiosum virus
ggccaggcacuggcccu

SEQ ID NO: 4025962 - RNA, 12 nt, Molluscum contagiosum virus
ggccaggccgcg

SEQ ID NO: 4025963 - RNA, 19 nt, Molluscum contagiosum virus
ggccaggccuugcucccaa

SEQ ID NO: 4025964 - RNA, 21 nt, Molluscum contagiosum virus
ggccaggcgcggucgcccgcc

SEQ ID NO: 4025965 - RNA, 18 nt, Molluscum contagiosum virus
ggccauggagcgcccgcu

SEQ ID NO: 4025966 - RNA, 14 nt, Molluscum contagiosum virus
ggcccaggccaugg

SEQ ID NO: 4025967 - RNA, 17 nt, Molluscum contagiosum virus
ggcccaggccauggagc

SEQ ID NO: 4025968 - RNA, 15 nt, Molluscum contagiosum virus
ggcccgcgcucgccg

SEQ ID NO: 4025969 - RNA, 16 nt, Molluscum contagiosum virus
ggcccgcggcgcgccg

SEQ ID NO: 4025970 - RNA, 21 nt, Molluscum contagiosum virus
ggcccgcguggcaagggcucc

SEQ ID NO: 4025971 - RNA, 22 nt, Molluscum contagiosum virus
ggcccuaaauaaugaaccugca

SEQ ID NO: 4025972 - RNA, 23 nt, Molluscum contagiosum virus
ggcccuaaauaaugaaccugcac

SEQ ID NO: 4025973 - RNA, 15 nt, Molluscum contagiosum virus
ggccgaacugcucug

SEQ ID NO: 4025974 - RNA, 13 nt, Molluscum contagiosum virus
ggccgcacgcgua

SEQ ID NO: 4025975 - RNA, 13 nt, Molluscum contagiosum virus
ggccgccgugugc

SEQ ID NO: 4025976 - RNA, 18 nt, Molluscum contagiosum virus
ggccgcgcccacgggcuu

SEQ ID NO: 4025977 - RNA, 18 nt, Molluscum contagiosum virus
ggccgcggcgcggcggaa

SEQ ID NO: 4025978 - RNA, 12 nt, Molluscum contagiosum virus
ggccgcuccaga

SEQ ID NO: 4025979 - RNA, 17 nt, Molluscum contagiosum virus
ggccgcuccagagccgc

SEQ ID NO: 4025980 - RNA, 18 nt, Molluscum contagiosum virus
ggccgucgggcgccaaca

SEQ ID NO: 4025981 - RNA, 21 nt, Molluscum contagiosum virus
ggccguucgcgcgccaguacg

SEQ ID NO: 4025982 - RNA, 15 nt, Molluscum contagiosum virus
ggccuacgugcugcg

SEQ ID NO: 4025983 - RNA, 14 nt, Molluscum contagiosum virus
ggccuccggagaag

SEQ ID NO: 4025984 - RNA, 14 nt, Molluscum contagiosum virus
ggccucgccuccgg

SEQ ID NO: 4025985 - RNA, 20 nt, Molluscum contagiosum virus
ggccucguccuggaggggug

SEQ ID NO: 4025986 - RNA, 17 nt, Molluscum contagiosum virus
ggccucugccugcaagg

SEQ ID NO: 4025987 - RNA, 16 nt, Molluscum contagiosum virus
ggccugcguggacagc

SEQ ID NO: 4025988 - RNA, 13 nt, Molluscum contagiosum virus
ggccuguccgcgg

SEQ ID NO: 4025989 - RNA, 20 nt, Molluscum contagiosum virus
ggccuguucggcaugcagcg

SEQ ID NO: 4025990 - RNA, 15 nt, Molluscum contagiosum virus
ggcgacgacagcgac

SEQ ID NO: 4025991 - RNA, 23 nt, Molluscum contagiosum virus
ggcgacgcguacguguccaugca

SEQ ID NO: 4025992 - RNA, 24 nt, Molluscum contagiosum virus
ggcgacgcguacguguccaugcac

SEQ ID NO: 4025993 - RNA, 20 nt, Molluscum contagiosum virus
ggcgacgucaaccgggcucu

SEQ ID NO: 4025994 - RNA, 14 nt, Molluscum contagiosum virus
ggcgacuuguagug

SEQ ID NO: 4025995 - RNA, 14 nt, Molluscum contagiosum virus
ggcgagcgcugccg

SEQ ID NO: 4025996 - RNA, 19 nt, Molluscum contagiosum virus
ggcgaguccccgagcagcg

SEQ ID NO: 4025997 - RNA, 13 nt, Molluscum contagiosum virus
ggcgagucgcggg

SEQ ID NO: 4025998 - RNA, 14 nt, Molluscum contagiosum virus
ggcgaucugcucgc

SEQ ID NO: 4025999 - RNA, 20 nt, Molluscum contagiosum virus
ggcgcaacgcuggccgccau

SEQ ID NO: 4026000 - RNA, 14 nt, Molluscum contagiosum virus
ggcgcacgcgagca

SEQ ID NO: 4026001 - RNA, 20 nt, Molluscum contagiosum virus
ggcgcacggccugcggcagg

SEQ ID NO: 4026002 - RNA, 22 nt, Molluscum contagiosum virus
ggaaucguuccuucugcuagga

SEQ ID NO: 4026003 - RNA, 23 nt, Molluscum contagiosum virus
ggaauuugcggcgcgggcaagca

SEQ ID NO: 4026004 - RNA, 16 nt, Molluscum contagiosum virus
ggacaaagucgcgcgc

SEQ ID NO: 4026005 - RNA, 19 nt, Molluscum contagiosum virus
ggacagagcccgcggcgca

SEQ ID NO: 4026006 - RNA, 12 nt, Molluscum contagiosum virus
ggacagugccuc

SEQ ID NO: 4026007 - RNA, 18 nt, Molluscum contagiosum virus
ggacagugccuccgcgga

SEQ ID NO: 4026008 - RNA, 16 nt, Molluscum contagiosum virus
ggaccuaaagcugcug

SEQ ID NO: 4026009 - RNA, 20 nt, Molluscum contagiosum virus
ggaccugcgccagcgccugu

SEQ ID NO: 4026010 - RNA, 21 nt, Molluscum contagiosum virus
ggaccuuggcgcgccgcugcc

SEQ ID NO: 4026011 - RNA, 23 nt, Molluscum contagiosum virus
ggaccuuggcgcgccgcugcccg

SEQ ID NO: 4026012 - RNA, 22 nt, Molluscum contagiosum virus
ggacgaagcugugcaagagcuc

SEQ ID NO: 4026013 - RNA, 19 nt, Molluscum contagiosum virus
ggacgagagggcgcgcguc

SEQ ID NO: 4026014 - RNA, 14 nt, Molluscum contagiosum virus
ggacgagcagagcc

SEQ ID NO: 4026015 - RNA, 14 nt, Molluscum contagiosum virus
ggacgagcugcuuc

SEQ ID NO: 4026016 - RNA, 18 nt, Molluscum contagiosum virus
ggacgccagcuugagcac

SEQ ID NO: 4026017 - RNA, 20 nt, Molluscum contagiosum virus
ggacgcccuccucgaccugc

SEQ ID NO: 4026018 - RNA, 19 nt, Molluscum contagiosum virus
ggacgcgggcguguccgcg

SEQ ID NO: 4026019 - RNA, 19 nt, Molluscum contagiosum virus
ggacgcguucuccaggaac

SEQ ID NO: 4026020 - RNA, 13 nt, Molluscum contagiosum virus
ggacggagagcgc

SEQ ID NO: 4026021 - RNA, 14 nt, Molluscum contagiosum virus
ggacggagagcgcg

SEQ ID NO: 4026022 - RNA, 16 nt, Molluscum contagiosum virus
ggacuccgaggcaggu

SEQ ID NO: 4026023 - RNA, 14 nt, Molluscum contagiosum virus
ggacuuccgcgcgc

SEQ ID NO: 4026024 - RNA, 13 nt, Molluscum contagiosum virus
ggacuucucuguc

SEQ ID NO: 4026025 - RNA, 17 nt, Molluscum contagiosum virus
ggacuuuucgcgcgugc

SEQ ID NO: 4026026 - RNA, 20 nt, Molluscum contagiosum virus
ggagaaagaagugugccugc

SEQ ID NO: 4026027 - RNA, 15 nt, Molluscum contagiosum virus
ggagaacaugcucgc

SEQ ID NO: 4026028 - RNA, 14 nt, Molluscum contagiosum virus
ggagaacggacaaa

SEQ ID NO: 4026029 - RNA, 23 nt, Molluscum contagiosum virus
ggagacaccagcuccgccgggaa

SEQ ID NO: 4026030 - RNA, 23 nt, Molluscum contagiosum virus
ggagacggccguuuuugggacag

SEQ ID NO: 4026031 - RNA, 17 nt, Molluscum contagiosum virus
ggagacuugagcccaga

SEQ ID NO: 4026032 - RNA, 21 nt, Molluscum contagiosum virus
ggagcaagucugcgcaggaca

SEQ ID NO: 4026033 - RNA, 19 nt, Molluscum contagiosum virus
ggagcaccgcguggcgcgc

SEQ ID NO: 4026034 - RNA, 17 nt, Molluscum contagiosum virus
ggagcagccccguaggc

SEQ ID NO: 4026035 - RNA, 22 nt, Molluscum contagiosum virus
ggagcccacguugccgcgcgcu

SEQ ID NO: 4026036 - RNA, 22 nt, Molluscum contagiosum virus
ggagcccgaccccaagaagaac

SEQ ID NO: 4026037 - RNA, 20 nt, Molluscum contagiosum virus
ggagcccuugaucgacaugg

SEQ ID NO: 4026038 - RNA, 22 nt, Molluscum contagiosum virus
ggagccgcggcaguccgagcug

SEQ ID NO: 4026039 - RNA, 17 nt, Molluscum contagiosum virus
ggagccucccccgcgca

SEQ ID NO: 4026040 - RNA, 21 nt, Molluscum contagiosum virus
ggagccucccccgcgcacugc

SEQ ID NO: 4026041 - RNA, 23 nt, Molluscum contagiosum virus
ggagcgagugcgcgugcgccugc

SEQ ID NO: 4026042 - RNA, 21 nt, Molluscum contagiosum virus
ggagcgcaaaugccgagcgca

SEQ ID NO: 4026043 - RNA, 14 nt, Molluscum contagiosum virus
ggagcgcgcgcagg

SEQ ID NO: 4026044 - RNA, 19 nt, Molluscum contagiosum virus
ggagcgcuucuagcucgcg

SEQ ID NO: 4026045 - RNA, 14 nt, Molluscum contagiosum virus
ggagcggaccccgg

SEQ ID NO: 4026046 - RNA, 14 nt, Molluscum contagiosum virus
ggagcggcauucga

SEQ ID NO: 4026047 - RNA, 17 nt, Molluscum contagiosum virus
ggagcuagcgcgcgccg

SEQ ID NO: 4026048 - RNA, 20 nt, Molluscum contagiosum virus
ggaggcagcgcuuguuucgc

SEQ ID NO: 4026049 - RNA, 13 nt, Molluscum contagiosum virus
ggaggcgcuagug

SEQ ID NO: 4026050 - RNA, 20 nt, Molluscum contagiosum virus
ggaggcgcuagugcagauga

SEQ ID NO: 4026051 - RNA, 14 nt, Molluscum contagiosum virus
ggagggagagcugc

SEQ ID NO: 4026052 - RNA, 21 nt, Molluscum contagiosum virus
ggaggugcgcgacuccaucug

SEQ ID NO: 4026053 - RNA, 13 nt, Molluscum contagiosum virus
ggagguuggaagc

SEQ ID NO: 4026054 - RNA, 23 nt, Molluscum contagiosum virus
ggaguacagccgcgcggcagaca

SEQ ID NO: 4026055 - RNA, 16 nt, Molluscum contagiosum virus
ggagucacgaccgacc

SEQ ID NO: 4026056 - RNA, 12 nt, Molluscum contagiosum virus
gccggugcugcg

SEQ ID NO: 4026057 - RNA, 14 nt, Molluscum contagiosum virus
gccgguggcgcgcg

SEQ ID NO: 4026058 - RNA, 16 nt, Molluscum contagiosum virus
gccguccaugugcccg

SEQ ID NO: 4026059 - RNA, 18 nt, Molluscum contagiosum virus
gccguccaugugcccgcg

SEQ ID NO: 4026060 - RNA, 14 nt, Molluscum contagiosum virus
gccguccgccucga

SEQ ID NO: 4026061 - RNA, 19 nt, Molluscum contagiosum virus
gccgucgcccggcaggcuc

SEQ ID NO: 4026062 - RNA, 18 nt, Molluscum contagiosum virus
gccgugaccuucgugcuu

SEQ ID NO: 4026063 - RNA, 16 nt, Molluscum contagiosum virus
gccgugagcacgagau

SEQ ID NO: 4026064 - RNA, 15 nt, Molluscum contagiosum virus
gccgugcccgccgac

SEQ ID NO: 4026065 - RNA, 13 nt, Molluscum contagiosum virus
gccgugccuggca

SEQ ID NO: 4026066 - RNA, 17 nt, Molluscum contagiosum virus
gccgugcgcgcacacga

SEQ ID NO: 4026067 - RNA, 22 nt, Molluscum contagiosum virus
gccgugcugucucucgcccgac

SEQ ID NO: 4026068 - RNA, 14 nt, Molluscum contagiosum virus
gccguggcgugcuu

SEQ ID NO: 4026069 - RNA, 14 nt, Molluscum contagiosum virus
gccgugggcgccgc

SEQ ID NO: 4026070 - RNA, 16 nt, Molluscum contagiosum virus
gccuacgaggugcgcg

SEQ ID NO: 4026071 - RNA, 19 nt, Molluscum contagiosum virus
gccucagccgagcgccgcc

SEQ ID NO: 4026072 - RNA, 13 nt, Molluscum contagiosum virus
gccuccaagaaga

SEQ ID NO: 4026073 - RNA, 20 nt, Molluscum contagiosum virus
gccuccaagaagaggccagc

SEQ ID NO: 4026074 - RNA, 20 nt, Molluscum contagiosum virus
gccuccgaacaaugaggaga

SEQ ID NO: 4026075 - RNA, 14 nt, Molluscum contagiosum virus
gccuccgacuaccu

SEQ ID NO: 4026076 - RNA, 21 nt, Molluscum contagiosum virus
gccucgcauucuucuccgaug

SEQ ID NO: 4026077 - RNA, 15 nt, Molluscum contagiosum virus
gccucgcgagggcuc

SEQ ID NO: 4026078 - RNA, 20 nt, Molluscum contagiosum virus
gccucgcgcgcacugcggga

SEQ ID NO: 4026079 - RNA, 23 nt, Molluscum contagiosum virus
gccucgcggacgagaaugacuua

SEQ ID NO: 4026080 - RNA, 14 nt, Molluscum contagiosum virus
gccucgucguccac

SEQ ID NO: 4026081 - RNA, 18 nt, Molluscum contagiosum virus
gccugcaaggaggucaag

SEQ ID NO: 4026082 - RNA, 17 nt, Molluscum contagiosum virus
gccugcacuacugcucc

SEQ ID NO: 4026083 - RNA, 17 nt, Molluscum contagiosum virus
gccugccagcagagcug

SEQ ID NO: 4026084 - RNA, 16 nt, Molluscum contagiosum virus
gccugccagcgccagc

SEQ ID NO: 4026085 - RNA, 20 nt, Molluscum contagiosum virus
gccugcgcccgcaaaccuug

SEQ ID NO: 4026086 - RNA, 20 nt, Molluscum contagiosum virus
gccugcgcgagcaagcgccc

SEQ ID NO: 4026087 - RNA, 16 nt, Molluscum contagiosum virus
gccugcgggcggcaca

SEQ ID NO: 4026088 - RNA, 13 nt, Molluscum contagiosum virus
gccugcugcucuu

SEQ ID NO: 4026089 - RNA, 17 nt, Molluscum contagiosum virus
gccuggcguccgcacgc

SEQ ID NO: 4026090 - RNA, 15 nt, Molluscum contagiosum virus
gccugguacaaguca

SEQ ID NO: 4026091 - RNA, 15 nt, Molluscum contagiosum virus
gccuguaccugcucg

SEQ ID NO: 4026092 - RNA, 20 nt, Molluscum contagiosum virus
gccuguccgcgggcgcacgc

SEQ ID NO: 4026093 - RNA, 13 nt, Molluscum contagiosum virus
gccugugcccugg

SEQ ID NO: 4026094 - RNA, 17 nt, Molluscum contagiosum virus
gccugugcccuggaagc

SEQ ID NO: 4026095 - RNA, 20 nt, Molluscum contagiosum virus
gccuguuuuuaucgagccgc

SEQ ID NO: 4026096 - RNA, 18 nt, Molluscum contagiosum virus
gccuuccgcgcgggcaug

SEQ ID NO: 4026097 - RNA, 13 nt, Molluscum contagiosum virus
gccuuccugcugg

SEQ ID NO: 4026098 - RNA, 14 nt, Molluscum contagiosum virus
gccuuccugcuggc

SEQ ID NO: 4026099 - RNA, 15 nt, Molluscum contagiosum virus
gccuuccugcuggcg

SEQ ID NO: 4026100 - RNA, 21 nt, Molluscum contagiosum virus
gccuucguggagcccgugcug

SEQ ID NO: 4026101 - RNA, 18 nt, Molluscum contagiosum virus
gccuucuccucgcucugc

SEQ ID NO: 4026102 - RNA, 17 nt, Molluscum contagiosum virus
gccuucuucgugcugug

SEQ ID NO: 4026103 - RNA, 23 nt, Molluscum contagiosum virus
gccuucuucgugcugugccuagg

SEQ ID NO: 4026104 - RNA, 18 nt, Molluscum contagiosum virus
gcgaacacggauacgcgc

SEQ ID NO: 4026105 - RNA, 18 nt, Molluscum contagiosum virus
gcgaacaucucggcuccg

SEQ ID NO: 4026106 - RNA, 23 nt, Molluscum contagiosum virus
gcgaaccauuuuuugccccgcgc

SEQ ID NO: 4026107 - RNA, 18 nt, Molluscum contagiosum virus
gcgaaccgcggcagccuu

SEQ ID NO: 4026108 - RNA, 13 nt, Molluscum contagiosum virus
gcgaacgccggcg

SEQ ID NO: 4026109 - RNA, 13 nt, Molluscum contagiosum virus
gcgaaggagagag

SEQ ID NO: 4026110 - RNA, 11 nt, Molluscum contagiosum virus
gcgacacuugc

SEQ ID NO: 4026111 - RNA, 13 nt, Molluscum contagiosum virus
gcgacagcugcug

SEQ ID NO: 4026112 - RNA, 18 nt, Molluscum contagiosum virus
gcgacaugccucgcggcc

SEQ ID NO: 4026113 - RNA, 20 nt, Molluscum contagiosum virus
gcgaccuacgaggugcugcg

SEQ ID NO: 4026114 - RNA, 16 nt, Molluscum contagiosum virus
gcgaccugcugcgaga

SEQ ID NO: 4026115 - RNA, 15 nt, Molluscum contagiosum virus
gcgacgacagcgacg

SEQ ID NO: 4026116 - RNA, 23 nt, Molluscum contagiosum virus
gcgacgacgacuucggcgcaacg

SEQ ID NO: 4026117 - RNA, 21 nt, Molluscum contagiosum virus
gcgacgccauuuucgugcgcg

SEQ ID NO: 4026118 - RNA, 19 nt, Molluscum contagiosum virus
gcgacgccguccgcgcagc

SEQ ID NO: 4026119 - RNA, 21 nt, Molluscum contagiosum virus
gcgacggaaccguggugcgcg

SEQ ID NO: 4026120 - RNA, 19 nt, Molluscum contagiosum virus
gcgacgggaaccgugcugg

SEQ ID NO: 4026121 - RNA, 21 nt, Molluscum contagiosum virus
gcgacuccuuugcgagcacug

SEQ ID NO: 4026122 - RNA, 20 nt, Molluscum contagiosum virus
gcgagaccgcuagagugcgc

SEQ ID NO: 4026123 - RNA, 22 nt, Molluscum contagiosum virus
gcgagaccgcuagagugcgcgg

SEQ ID NO: 4026124 - RNA, 16 nt, Molluscum contagiosum virus
gcgagacgcugcugca

SEQ ID NO: 4026125 - RNA, 15 nt, Molluscum contagiosum virus
gcgagacgggcacgc

SEQ ID NO: 4026126 - RNA, 17 nt, Molluscum contagiosum virus
gcgagaucaacgcgcgc

SEQ ID NO: 4026127 - RNA, 19 nt, Molluscum contagiosum virus
gcgagaugcgcggacagag

SEQ ID NO: 4026128 - RNA, 23 nt, Molluscum contagiosum virus
gcgagauugagagcgcuggcuuc

SEQ ID NO: 4026129 - RNA, 15 nt, Molluscum contagiosum virus
gcgagcacagcgcgc

SEQ ID NO: 4026130 - RNA, 20 nt, Molluscum contagiosum virus
gcgagcacccccgcugcacg

SEQ ID NO: 4026131 - RNA, 15 nt, Molluscum contagiosum virus
gcgagcagcugcugc

SEQ ID NO: 4026132 - RNA, 14 nt, Molluscum contagiosum virus
gcgagcaggcgcag

SEQ ID NO: 4026133 - RNA, 19 nt, Molluscum contagiosum virus
gcgagcaggcgcaggccgc

SEQ ID NO: 4026134 - RNA, 15 nt, Molluscum contagiosum virus
gcgagcaugccgccg

SEQ ID NO: 4026135 - RNA, 14 nt, Molluscum contagiosum virus
gcgagccagccagg

SEQ ID NO: 4026136 - RNA, 21 nt, Molluscum contagiosum virus
gcgagcgcaugcgcgccgcgc

SEQ ID NO: 4026137 - RNA, 14 nt, Molluscum contagiosum virus
gcgcgagcugugca

SEQ ID NO: 4026138 - RNA, 12 nt, Molluscum contagiosum virus
gcgcgagcuugc

SEQ ID NO: 4026139 - RNA, 16 nt, Molluscum contagiosum virus
gcgcgagugcaaggag

SEQ ID NO: 4026140 - RNA, 12 nt, Molluscum contagiosum virus
gcgcgagugugc

SEQ ID NO: 4026141 - RNA, 21 nt, Molluscum contagiosum virus
gcgcgagugugugcaucccuc

SEQ ID NO: 4026142 - RNA, 13 nt, Molluscum contagiosum virus
gcgcgcaagcgcu

SEQ ID NO: 4026143 - RNA, 21 nt, Molluscum contagiosum virus
gcgcgcacgaacgcaacucgc

SEQ ID NO: 4026144 - RNA, 13 nt, Molluscum contagiosum virus
gcgcgcacgcgca

SEQ ID NO: 4026145 - RNA, 14 nt, Molluscum contagiosum virus
gcgcgcacgcgcac

SEQ ID NO: 4026146 - RNA, 17 nt, Molluscum contagiosum virus
gcgcgcacugcgggacc

SEQ ID NO: 4026147 - RNA, 18 nt, Molluscum contagiosum virus
gcgcgcacugcucgcgca

SEQ ID NO: 4026148 - RNA, 14 nt, Molluscum contagiosum virus
gcgcgcaguugugc

SEQ ID NO: 4026149 - RNA, 18 nt, Molluscum contagiosum virus
gcgcgcauacgcgccgcg

SEQ ID NO: 4026150 - RNA, 16 nt, Molluscum contagiosum virus
gcgcgcaucgcgggca

SEQ ID NO: 4026151 - RNA, 21 nt, Molluscum contagiosum virus
gcgcgccaacgacuagcgugc

SEQ ID NO: 4026152 - RNA, 13 nt, Molluscum contagiosum virus
gcgcgccagcacg

SEQ ID NO: 4026153 - RNA, 17 nt, Molluscum contagiosum virus
gcgcgccaguacgcaug

SEQ ID NO: 4026154 - RNA, 23 nt, Molluscum contagiosum virus
gcgcgcccaccagcagccaggcu

SEQ ID NO: 4026155 - RNA, 14 nt, Molluscum contagiosum virus
gcgcgcccaggcgc

SEQ ID NO: 4026156 - RNA, 20 nt, Molluscum contagiosum virus
gcgcgcccccgugcuguguu

SEQ ID NO: 4026157 - RNA, 17 nt, Molluscum contagiosum virus
gcgcgcccgcugcgcgc

SEQ ID NO: 4026158 - RNA, 20 nt, Molluscum contagiosum virus
gcgcgccgaguacugcugcg

SEQ ID NO: 4026159 - RNA, 14 nt, Molluscum contagiosum virus
gcgcgccgcaaagc

SEQ ID NO: 4026160 - RNA, 19 nt, Molluscum contagiosum virus
gcgcgccgcagaacacggg

SEQ ID NO: 4026161 - RNA, 15 nt, Molluscum contagiosum virus
gcgcgccgcgggccg

SEQ ID NO: 4026162 - RNA, 16 nt, Molluscum contagiosum virus
cagccgucgccgcgcc

SEQ ID NO: 4026163 - RNA, 16 nt, Molluscum contagiosum virus
cagccucgagcgccgu

SEQ ID NO: 4026164 - RNA, 13 nt, Molluscum contagiosum virus
cagccucuacucc

SEQ ID NO: 4026165 - RNA, 19 nt, Molluscum contagiosum virus
cagccugcuggcaccgcgc

SEQ ID NO: 4026166 - RNA, 23 nt, Molluscum contagiosum virus
cagccuguguugcgcgcgccugc

SEQ ID NO: 4026167 - RNA, 13 nt, Molluscum contagiosum virus
cagcgacgcgacg

SEQ ID NO: 4026168 - RNA, 22 nt, Molluscum contagiosum virus
cagcgcgacuagccugugcccu

SEQ ID NO: 4026169 - RNA, 16 nt, Molluscum contagiosum virus
cagcgcgccaccacca

SEQ ID NO: 4026170 - RNA, 20 nt, Molluscum contagiosum virus
cagcgcgcccaccagcagcc

SEQ ID NO: 4026171 - RNA, 21 nt, Molluscum contagiosum virus
cagcgcgcccaccagcagcca

SEQ ID NO: 4026172 - RNA, 12 nt, Molluscum contagiosum virus
cagcgcgcgcac

SEQ ID NO: 4026173 - RNA, 13 nt, Molluscum contagiosum virus
cagcgcgcggaag

SEQ ID NO: 4026174 - RNA, 17 nt, Molluscum contagiosum virus
cagcgcgcggagaucgc

SEQ ID NO: 4026175 - RNA, 20 nt, Molluscum contagiosum virus
cagcgcgcucgaggcgccgu

SEQ ID NO: 4026176 - RNA, 20 nt, Molluscum contagiosum virus
cagcgcuagccccagcacca

SEQ ID NO: 4026177 - RNA, 16 nt, Molluscum contagiosum virus
cagcggauagcuuuuc

SEQ ID NO: 4026178 - RNA, 13 nt, Molluscum contagiosum virus
cagcggcgccgca

SEQ ID NO: 4026179 - RNA, 17 nt, Molluscum contagiosum virus
cagcggcgccgcagcuu

SEQ ID NO: 4026180 - RNA, 18 nt, Molluscum contagiosum virus
cagcggcgccgcagcuuu

SEQ ID NO: 4026181 - RNA, 18 nt, Molluscum contagiosum virus
cagcgggaaacugcugcc

SEQ ID NO: 4026182 - RNA, 18 nt, Molluscum contagiosum virus
cagcggggacucucccgu

SEQ ID NO: 4026183 - RNA, 18 nt, Molluscum contagiosum virus
cagcgucgcgcgccgugc

SEQ ID NO: 4026184 - RNA, 13 nt, Molluscum contagiosum virus
cagcgucgcggag

SEQ ID NO: 4026185 - RNA, 17 nt, Molluscum contagiosum virus
cagcgucgcggagcgcg

SEQ ID NO: 4026186 - RNA, 19 nt, Molluscum contagiosum virus
cagcgugccgcggcacugg

SEQ ID NO: 4026187 - RNA, 18 nt, Molluscum contagiosum virus
cagcgugcgcgggcacgc

SEQ ID NO: 4026188 - RNA, 23 nt, Molluscum contagiosum virus
cagcgugcgcgggcacgccgcag

SEQ ID NO: 4026189 - RNA, 18 nt, Molluscum contagiosum virus
cagcguuacguacagcgg

SEQ ID NO: 4026190 - RNA, 19 nt, Molluscum contagiosum virus
cagcuaccgcgcgcgcaag

SEQ ID NO: 4026191 - RNA, 13 nt, Molluscum contagiosum virus
cagcuaugcgccc

SEQ ID NO: 4026192 - RNA, 20 nt, Molluscum contagiosum virus
cagcucaagacgcugcuggc

SEQ ID NO: 4026193 - RNA, 14 nt, Molluscum contagiosum virus
cagcucaagcugcu

SEQ ID NO: 4026194 - RNA, 17 nt, Molluscum contagiosum virus
cagcucgccgcgcgccg

SEQ ID NO: 4026195 - RNA, 18 nt, Molluscum contagiosum virus
cagcucgccgcgcgccgc

SEQ ID NO: 4026196 - RNA, 20 nt, Molluscum contagiosum virus
cagcucgccgcgcgccgcug

SEQ ID NO: 4026197 - RNA, 23 nt, Molluscum contagiosum virus
cagcucgccgcgcgccgcugcuc

SEQ ID NO: 4026198 - RNA, 23 nt, Molluscum contagiosum virus
cagcucgcgccgccgcgccgcug

SEQ ID NO: 4026199 - RNA, 16 nt, Molluscum contagiosum virus
cagcucggaggcgcag

SEQ ID NO: 4026200 - RNA, 20 nt, Molluscum contagiosum virus
cagcucggaggcgcagacgu

SEQ ID NO: 4026201 - RNA, 15 nt, Molluscum contagiosum virus
cagcucugcagcgcc

SEQ ID NO: 4026202 - RNA, 16 nt, Molluscum contagiosum virus
cagcucugggcgcgcu

SEQ ID NO: 4026203 - RNA, 14 nt, Molluscum contagiosum virus
cagcugcaggaccu

SEQ ID NO: 4026204 - RNA, 18 nt, Molluscum contagiosum virus
cagcugcaggaccugcug

SEQ ID NO: 4026205 - RNA, 14 nt, Molluscum contagiosum virus
cagcugcugcucgc

SEQ ID NO: 4026206 - RNA, 20 nt, Molluscum contagiosum virus
cagcuggacggugcuggugc

SEQ ID NO: 4026207 - RNA, 15 nt, Molluscum contagiosum virus
cagcuggcgcccgcg

SEQ ID NO: 4026208 - RNA, 15 nt, Molluscum contagiosum virus
cagcuguuucugccg

SEQ ID NO: 4026209 - RNA, 19 nt, Molluscum contagiosum virus
cagcuguuucugccgcgcc

SEQ ID NO: 4026210 - RNA, 15 nt, Molluscum contagiosum virus
cagcuucugcucgcg

SEQ ID NO: 4026211 - RNA, 13 nt, Molluscum contagiosum virus
cagcuugcugcug

SEQ ID NO: 4026212 - RNA, 14 nt, Molluscum contagiosum virus
caggaaaggcaccc

SEQ ID NO: 4026213 - RNA, 19 nt, Molluscum contagiosum virus
caggaaaggcaccccgcag

SEQ ID NO: 4026214 - RNA, 18 nt, Molluscum contagiosum virus
caggaaaggcacccgcag

SEQ ID NO: 4026215 - RNA, 14 nt, Molluscum contagiosum virus
caggaaagguaccc

SEQ ID NO: 4026216 - RNA, 19 nt, Molluscum contagiosum virus
caggaaagguaccccgcag

SEQ ID NO: 4026217 - RNA, 23 nt, Molluscum contagiosum virus
caggaaagguacccgcaggaaag

SEQ ID NO: 4026218 - RNA, 23 nt, Molluscum contagiosum virus
caggaaaggucgggcccgagcag

SEQ ID NO: 4026219 - RNA, 14 nt, Molluscum contagiosum virus
caggaacgccgcca

SEQ ID NO: 4026220 - RNA, 15 nt, Molluscum contagiosum virus
caggagaacuacaaa

SEQ ID NO: 4026221 - RNA, 18 nt, Molluscum contagiosum virus
caggaucggagcgcagcu

SEQ ID NO: 4026222 - RNA, 21 nt, Molluscum contagiosum virus
caggcacgacgccgacaccgg

SEQ ID NO: 4026223 - RNA, 15 nt, Molluscum contagiosum virus
caggcagcugcugcg

SEQ ID NO: 4026224 - RNA, 21 nt, Molluscum contagiosum virus
caggcagugccgccgcgcgcg

SEQ ID NO: 4026225 - RNA, 22 nt, Molluscum contagiosum virus
caggccgcuagcaggcgucgcg

SEQ ID NO: 4026226 - RNA, 23 nt, Molluscum contagiosum virus
caggccggucgcggaagacgugc

SEQ ID NO: 4026227 - RNA, 15 nt, Molluscum contagiosum virus
caggccuccuucccu

SEQ ID NO: 4026228 - RNA, 17 nt, Molluscum contagiosum virus
caggcgauaggacauga

SEQ ID NO: 4026229 - RNA, 14 nt, Molluscum contagiosum virus
caggcgcagcgcgg

SEQ ID NO: 4026230 - RNA, 14 nt, Molluscum contagiosum virus
caggcgcaggccgc

SEQ ID NO: 4026231 - RNA, 21 nt, Molluscum contagiosum virus
caggcgccaucgcgcgugacu

SEQ ID NO: 4026232 - RNA, 17 nt, Molluscum contagiosum virus
caggcgccgcaccucac

SEQ ID NO: 4026233 - RNA, 20 nt, Molluscum contagiosum virus
caggcgcgaacucgcggcag

SEQ ID NO: 4026234 - RNA, 16 nt, Molluscum contagiosum virus
caggcgcgccauggcg

SEQ ID NO: 4026235 - RNA, 22 nt, Molluscum contagiosum virus
caggcgcggcagccgcagaugc

SEQ ID NO: 4026236 - RNA, 20 nt, Molluscum contagiosum virus
caggcgcggucgcccgccga

SEQ ID NO: 4026237 - RNA, 22 nt, Molluscum contagiosum virus
caggcgcgugcccugcacgcgc

SEQ ID NO: 4026238 - RNA, 20 nt, Molluscum contagiosum virus
caggcggccgcguugcagca

SEQ ID NO: 4026239 - RNA, 12 nt, Molluscum contagiosum virus
caggcucccgcu

SEQ ID NO: 4026240 - RNA, 19 nt, Molluscum contagiosum virus
caggcucuaagcgcacgcg

SEQ ID NO: 4026241 - RNA, 15 nt, Molluscum contagiosum virus
cagggcgugcuugcc

SEQ ID NO: 4026242 - RNA, 20 nt, Molluscum contagiosum virus
cagguagugguccaccagcu

SEQ ID NO: 4026243 - RNA, 17 nt, Molluscum contagiosum virus
caggucaucgacgagca

SEQ ID NO: 4026244 - RNA, 20 nt, Molluscum contagiosum virus
caggucaucgacgagcacga

SEQ ID NO: 4026245 - RNA, 18 nt, Molluscum contagiosum virus
caggucaucgggcugcag

SEQ ID NO: 4026246 - RNA, 20 nt, Molluscum contagiosum virus
caggucaucgggcugcagcc

SEQ ID NO: 4026247 - RNA, 22 nt, Molluscum contagiosum virus
caggucggccagcagcuccugg

SEQ ID NO: 4026248 - RNA, 23 nt, Molluscum contagiosum virus
caggucggccagcagcuccuggu

SEQ ID NO: 4026249 - RNA, 15 nt, Molluscum contagiosum virus
caguaccagauuagc

SEQ ID NO: 4026250 - RNA, 21 nt, Molluscum contagiosum virus
caguagcgaaugcagugcccg

SEQ ID NO: 4026251 - RNA, 11 nt, Molluscum contagiosum virus
cagucccagca

SEQ ID NO: 4026252 - RNA, 16 nt, Molluscum contagiosum virus
cagucggugccagauu

SEQ ID NO: 4026253 - RNA, 14 nt, Molluscum contagiosum virus
cagucgucgccgau

SEQ ID NO: 4026254 - RNA, 22 nt, Molluscum contagiosum virus
cagugcaguggcuacuggagga

SEQ ID NO: 4026255 - RNA, 14 nt, Molluscum contagiosum virus
cagugccagcagcc

SEQ ID NO: 4026256 - RNA, 22 nt, Molluscum contagiosum virus
cagugccgacgugugccgcucg

SEQ ID NO: 4026257 - RNA, 15 nt, Molluscum contagiosum virus
aaaacggccgucucc

SEQ ID NO: 4026258 - RNA, 17 nt, Molluscum contagiosum virus
aaaagcacaguccaacc

SEQ ID NO: 4026259 - RNA, 23 nt, Molluscum contagiosum virus
aaaaggccggguuuuuucccaug

SEQ ID NO: 4026260 - RNA, 15 nt, Molluscum contagiosum virus
aaacacgagacugag

SEQ ID NO: 4026261 - RNA, 20 nt, Molluscum contagiosum virus
aaacacggccuccagcagcg

SEQ ID NO: 4026262 - RNA, 19 nt, Molluscum contagiosum virus
aaacauguagcgcgcgccg

SEQ ID NO: 4026263 - RNA, 22 nt, Molluscum contagiosum virus
aaagacggggccgcgaaagagg

SEQ ID NO: 4026264 - RNA, 19 nt, Molluscum contagiosum virus
aaaggcaaagccugcugcg

SEQ ID NO: 4026265 - RNA, 13 nt, Molluscum contagiosum virus
aaaggcacacccc

SEQ ID NO: 4026266 - RNA, 20 nt, Molluscum contagiosum virus
aaaggcaccccgaaggaaag

SEQ ID NO: 4026267 - RNA, 14 nt, Molluscum contagiosum virus
aaaggcaccugcgg

SEQ ID NO: 4026268 - RNA, 20 nt, Molluscum contagiosum virus
aaaggcgggcccgcgaacga

SEQ ID NO: 4026269 - RNA, 22 nt, Molluscum contagiosum virus
aaagggcugcuugcgaccccag

SEQ ID NO: 4026270 - RNA, 18 nt, Molluscum contagiosum virus
aaaggugcgauggacgac

SEQ ID NO: 4026271 - RNA, 16 nt, Molluscum contagiosum virus
aacaagagcuuacuag

SEQ ID NO: 4026272 - RNA, 18 nt, Molluscum contagiosum virus
aacaagaucaccccgcag

SEQ ID NO: 4026273 - RNA, 13 nt, Molluscum contagiosum virus
aacacgagacuga

SEQ ID NO: 4026274 - RNA, 18 nt, Molluscum contagiosum virus
aacagcaccguugccgcg

SEQ ID NO: 4026275 - RNA, 13 nt, Molluscum contagiosum virus
aacagcagcuggc

SEQ ID NO: 4026276 - RNA, 13 nt, Molluscum contagiosum virus
agaguugcgcgag

SEQ ID NO: 4026277 - RNA, 19 nt, Molluscum contagiosum virus
agaucaaccgcaaggaaaa

SEQ ID NO: 4026278 - RNA, 14 nt, Molluscum contagiosum virus
agaucaacgcgcgc

SEQ ID NO: 4026279 - RNA, 16 nt, Molluscum contagiosum virus
agaucaggcagcugcu

SEQ ID NO: 4026280 - RNA, 19 nt, Molluscum contagiosum virus
agauccguaguagccgcaa

SEQ ID NO: 4026281 - RNA, 13 nt, Molluscum contagiosum virus
agauggacacagc

SEQ ID NO: 4026282 - RNA, 23 nt, Molluscum contagiosum virus
agcaaccucgggaagcccucagg

SEQ ID NO: 4026283 - RNA, 22 nt, Molluscum contagiosum virus
agcaacgcgacgauggccacgc

SEQ ID NO: 4026284 - RNA, 19 nt, Molluscum contagiosum virus
agcaacugcacagggauuc

SEQ ID NO: 4026285 - RNA, 9 nt, Molluscum contagiosum virus
agcaaggag

SEQ ID NO: 4026286 - RNA, 13 nt, Molluscum contagiosum virus
agcaaggggucug

SEQ ID NO: 4026287 - RNA, 18 nt, Molluscum contagiosum virus
agcaagucugcgcaggac

SEQ ID NO: 4026288 - RNA, 16 nt, Molluscum contagiosum virus
agcaccaagaagcggc

SEQ ID NO: 4026289 - RNA, 15 nt, Molluscum contagiosum virus
agcaccgcaugggcc

SEQ ID NO: 4026290 - RNA, 22 nt, Molluscum contagiosum virus
agcaccucaacuguugccugga

SEQ ID NO: 4026291 - RNA, 19 nt, Molluscum contagiosum virus
agcacgaugcccagcagcg

SEQ ID NO: 4026292 - RNA, 13 nt, Molluscum contagiosum virus
agcacgcaacugc

SEQ ID NO: 4026293 - RNA, 21 nt, Molluscum contagiosum virus
agcacgccagguguuccugcc

SEQ ID NO: 4026294 - RNA, 14 nt, Molluscum contagiosum virus
agcacgccuccaag

SEQ ID NO: 4026295 - RNA, 17 nt, Molluscum contagiosum virus
agcacgccuccaagaag

SEQ ID NO: 4026296 - RNA, 13 nt, Molluscum contagiosum virus
agcacgccuggcg

SEQ ID NO: 4026297 - RNA, 15 nt, Molluscum contagiosum virus
agcacgcgugugcga

SEQ ID NO: 4026298 - RNA, 16 nt, Molluscum contagiosum virus
agcacguccucgguca

SEQ ID NO: 4026299 - RNA, 21 nt, Molluscum contagiosum virus
agcacguuguucuugcgcgug

SEQ ID NO: 4026300 - RNA, 14 nt, Molluscum contagiosum virus
agcagaccaagaag

SEQ ID NO: 4026301 - RNA, 13 nt, Molluscum contagiosum virus
agcagagccggga

SEQ ID NO: 4026302 - RNA, 22 nt, Molluscum contagiosum virus
agcagcaaacugugcuccugag

SEQ ID NO: 4026303 - RNA, 14 nt, Molluscum contagiosum virus
agcagcgcuagccc

SEQ ID NO: 4026304 - RNA, 15 nt, Molluscum contagiosum virus
agcagcggcgcgugc

SEQ ID NO: 4026305 - RNA, 19 nt, Molluscum contagiosum virus
agcagcggucucggcagca

SEQ ID NO: 4026306 - RNA, 21 nt, Molluscum contagiosum virus
agcagcgugcauagugggcuu

SEQ ID NO: 4026307 - RNA, 20 nt, Molluscum contagiosum virus
agcagcugcugcgcacgugc

SEQ ID NO: 4026308 - RNA, 16 nt, Molluscum contagiosum virus
agcagcuggccggcuc

SEQ ID NO: 4026309 - RNA, 15 nt, Molluscum contagiosum virus
agcaggaucggagcg

SEQ ID NO: 4026310 - RNA, 15 nt, Molluscum contagiosum virus
agcaggugcacgugc

SEQ ID NO: 4026311 - RNA, 17 nt, Molluscum contagiosum virus
agcaguaccugcuaacu

SEQ ID NO: 4026312 - RNA, 16 nt, Molluscum contagiosum virus
agcagugccagcagcc

SEQ ID NO: 4026313 - RNA, 15 nt, Molluscum contagiosum virus
agcagugccgcucgc

SEQ ID NO: 4026314 - RNA, 20 nt, Molluscum contagiosum virus
agcauguccgacuccaagga

SEQ ID NO: 4026315 - RNA, 21 nt, Molluscum contagiosum virus
agcauucccggcgcgcgcggc

SEQ ID NO: 4026316 - RNA, 15 nt, Molluscum contagiosum virus
agccagacgcagagc

SEQ ID NO: 4026317 - RNA, 15 nt, Molluscum contagiosum virus
agccagccaggcgcc

SEQ ID NO: 4026318 - RNA, 18 nt, Molluscum contagiosum virus
agccagcucgcagccucc

SEQ ID NO: 4026319 - RNA, 13 nt, Molluscum contagiosum virus
agcccacgugcca

SEQ ID NO: 4026320 - RNA, 18 nt, Molluscum contagiosum virus
agccccagaaggucgugc

SEQ ID NO: 4026321 - RNA, 12 nt, Molluscum contagiosum virus
agcccccucaga

SEQ ID NO: 4026322 - RNA, 14 nt, Molluscum contagiosum virus
agccccgcgccggc

SEQ ID NO: 4026323 - RNA, 13 nt, Molluscum contagiosum virus
agccccucgagca

SEQ ID NO: 4026324 - RNA, 18 nt, Molluscum contagiosum virus
agcccgaguucgcggcgc

SEQ ID NO: 4026325 - RNA, 21 nt, Molluscum contagiosum virus
agcccgcaggccgggcaccca

SEQ ID NO: 4026326 - RNA, 14 nt, Molluscum contagiosum virus
agcccgcgcgcgag

SEQ ID NO: 4026327 - RNA, 17 nt, Molluscum contagiosum virus
agcccgcggcgcgcagc

SEQ ID NO: 4026328 - RNA, 23 nt, Molluscum contagiosum virus
agcccgggcccgugcccgagccc

SEQ ID NO: 4026329 - RNA, 14 nt, Molluscum contagiosum virus
agcccgugcuggag

SEQ ID NO: 4026330 - RNA, 15 nt, Molluscum contagiosum virus
agccgcaggccaggu

SEQ ID NO: 4026331 - RNA, 22 nt, Molluscum contagiosum virus
agccgccgcuacuacggagcga

SEQ ID NO: 4026332 - RNA, 21 nt, Molluscum contagiosum virus
agccgcgugcgccgccgcagg

SEQ ID NO: 4026333 - RNA, 23 nt, Molluscum contagiosum virus
agccgcucguccagcugcgcgag

SEQ ID NO: 4026334 - RNA, 18 nt, Molluscum contagiosum virus
agccgcugcgccgccagc

SEQ ID NO: 4026335 - RNA, 19 nt, Molluscum contagiosum virus
agccucccccgcgcacugc

SEQ ID NO: 4026336 - RNA, 17 nt, Molluscum contagiosum virus
agccugaggccgcggag

SEQ ID NO: 4026337 - RNA, 21 nt, Molluscum contagiosum virus
agccugugcccuggaagcuuc

SEQ ID NO: 4026338 - RNA, 21 nt, Molluscum contagiosum virus
agccuucuucgugcugugccu

SEQ ID NO: 4026339 - RNA, 14 nt, Molluscum contagiosum virus
agcgaguugagcag

SEQ ID NO: 4026340 - RNA, 17 nt, Molluscum contagiosum virus
agcgcaugcgcgccgcg

SEQ ID NO: 4026341 - RNA, 23 nt, Molluscum contagiosum virus
agcgccacuagcaaggcgccgcg

SEQ ID NO: 4026342 - RNA, 22 nt, Molluscum contagiosum virus
agcgccgccucgcgcgcacugc

SEQ ID NO: 4026343 - RNA, 15 nt, Molluscum contagiosum virus
agcgccgcucgcacg

SEQ ID NO: 4026344 - RNA, 19 nt, Molluscum contagiosum virus
agcgccgcucgcacggcga

SEQ ID NO: 4026345 - RNA, 18 nt, Molluscum contagiosum virus
agcgcgcccaccagcagc

SEQ ID NO: 4026346 - RNA, 23 nt, Molluscum contagiosum virus
agcgcgcccaccagcagccaggc

SEQ ID NO: 4026347 - RNA, 14 nt, Molluscum contagiosum virus
agcgcgccucucga

SEQ ID NO: 4026348 - RNA, 18 nt, Molluscum contagiosum virus
agcgcgccucucgaggcc

SEQ ID NO: 4026349 - RNA, 21 nt, Molluscum contagiosum virus
agcgcgcgccgucggccucgg

SEQ ID NO: 4026350 - RNA, 13 nt, Molluscum contagiosum virus
agcgcgcugcgcc

SEQ ID NO: 4026351 - RNA, 15 nt, Molluscum contagiosum virus
agcgcgcuggacuug

SEQ ID NO: 4026352 - RNA, 18 nt, Molluscum contagiosum virus
agcgcggccgcgcucguc

SEQ ID NO: 4026353 - RNA, 14 nt, Molluscum contagiosum virus
agcgcggccguggc

SEQ ID NO: 4026354 - RNA, 17 nt, Molluscum contagiosum virus
agcgcggggguguugcu

SEQ ID NO: 4026355 - RNA, 19 nt, Molluscum contagiosum virus
agcgcgugacgcucacggc

SEQ ID NO: 4026356 - RNA, 18 nt, Molluscum contagiosum virus
agcgcgugcgcaggagca

SEQ ID NO: 4026357 - RNA, 15 nt, Molluscum contagiosum virus
agcgcgugcucuuuc

SEQ ID NO: 4026358 - RNA, 17 nt, Molluscum contagiosum virus
agcgcguucgcgcgugc

SEQ ID NO: 4026359 - RNA, 12 nt, Molluscum contagiosum virus
agcgcuaccuga

SEQ ID NO: 4026360 - RNA, 20 nt, Molluscum contagiosum virus
agcgcuacgacgacaugcac

SEQ ID NO: 4026361 - RNA, 22 nt, Molluscum contagiosum virus
agcgcuggagcuggcugggcac

SEQ ID NO: 4026362 - RNA, 14 nt, Molluscum contagiosum virus
agcgcuggcuucuu

SEQ ID NO: 4026363 - RNA, 21 nt, Molluscum contagiosum virus
agcgcuucuuccggcagcugg

SEQ ID NO: 4026364 - RNA, 19 nt, Molluscum contagiosum virus
agcggcauucgaaccugga

SEQ ID NO: 4026365 - RNA, 13 nt, Molluscum contagiosum virus
agcggccuguucu

SEQ ID NO: 4026366 - RNA, 20 nt, Molluscum contagiosum virus
agcggcgacuugcugcggag

SEQ ID NO: 4026367 - RNA, 12 nt, Molluscum contagiosum virus
agcggcgccgac

SEQ ID NO: 4026368 - RNA, 14 nt, Molluscum contagiosum virus
agcggcggacagca

SEQ ID NO: 4026369 - RNA, 19 nt, Molluscum contagiosum virus
agcgggcaaugggcacgcu

SEQ ID NO: 4026370 - RNA, 15 nt, Molluscum contagiosum virus
agcggucucggcagc

SEQ ID NO: 4026371 - RNA, 21 nt, Molluscum contagiosum virus
agcggugcagcuacugcgugc

SEQ ID NO: 4026372 - RNA, 13 nt, Molluscum contagiosum virus
agcgguugaccag

SEQ ID NO: 4026373 - RNA, 13 nt, Molluscum contagiosum virus
agcgucaguguug

SEQ ID NO: 4026374 - RNA, 14 nt, Molluscum contagiosum virus
agcguccagccgca

SEQ ID NO: 4026375 - RNA, 16 nt, Molluscum contagiosum virus
agcguccgcauccuca

SEQ ID NO: 4026376 - RNA, 16 nt, Molluscum contagiosum virus
agcgucgcgcgccgug

SEQ ID NO: 4026377 - RNA, 23 nt, Molluscum contagiosum virus
agcgucgcgcgccgugccuggca

SEQ ID NO: 4026378 - RNA, 21 nt, Molluscum contagiosum virus
agcgugacaaucucugcgccg

SEQ ID NO: 4026379 - RNA, 11 nt, Molluscum contagiosum virus
agcguggagcu

SEQ ID NO: 4026380 - RNA, 21 nt, Molluscum contagiosum virus
aacagcauuagcgccaaggcg

SEQ ID NO: 4026381 - RNA, 11 nt, Molluscum contagiosum virus
aacagcuucac

SEQ ID NO: 4026382 - RNA, 15 nt, Molluscum contagiosum virus
aacaggcacuucgca

SEQ ID NO: 4026383 - RNA, 19 nt, Molluscum contagiosum virus
aacaggggccguucgcgcg

SEQ ID NO: 4026384 - RNA, 18 nt, Molluscum contagiosum virus
aacaucuaugcacggcac

SEQ ID NO: 4026385 - RNA, 15 nt, Molluscum contagiosum virus
aacaugaaggaaagu

SEQ ID NO: 4026386 - RNA, 15 nt, Molluscum contagiosum virus
aacauggugcuggcc

SEQ ID NO: 4026387 - RNA, 14 nt, Molluscum contagiosum virus
aacaugugccugcu

SEQ ID NO: 4026388 - RNA, 20 nt, Molluscum contagiosum virus
aaccacagcucuccgagaca

SEQ ID NO: 4026389 - RNA, 21 nt, Molluscum contagiosum virus
aacccgcauugggccuugauu

SEQ ID NO: 4026390 - RNA, 15 nt, Molluscum contagiosum virus
aaccgcgugcgcagu

SEQ ID NO: 4026391 - RNA, 14 nt, Molluscum contagiosum virus
aaccugggcgccgc

SEQ ID NO: 4026392 - RNA, 13 nt, Molluscum contagiosum virus
aacgacgggcgcg

SEQ ID NO: 4026393 - RNA, 12 nt, Molluscum contagiosum virus
aacgagcucucc

SEQ ID NO: 4026394 - RNA, 17 nt, Molluscum contagiosum virus
aacgaggaaaggcaccc

SEQ ID NO: 4026395 - RNA, 22 nt, Molluscum contagiosum virus
aacgcaaggugugcgcgcugca

SEQ ID NO: 4026396 - RNA, 19 nt, Molluscum contagiosum virus
aacgcacaaaacacaaaaa

SEQ ID NO: 4026397 - RNA, 21 nt, Molluscum contagiosum virus
aacgcgacgauggccacgcag

SEQ ID NO: 4026398 - RNA, 16 nt, Molluscum contagiosum virus
aacgcgcgcgccucgc

SEQ ID NO: 4026399 - RNA, 22 nt, Molluscum contagiosum virus
aacgcgcgcucgucaaugcgca

SEQ ID NO: 4026400 - RNA, 17 nt, Molluscum contagiosum virus
aacgcggcgugugcggg

SEQ ID NO: 4026401 - RNA, 14 nt, Molluscum contagiosum virus
aacgcgggccaggc

SEQ ID NO: 4026402 - RNA, 12 nt, Molluscum contagiosum virus
aacgugcugcuc

SEQ ID NO: 4026403 - RNA, 16 nt, Molluscum contagiosum virus
aacugcagcagcuggc

SEQ ID NO: 4026404 - RNA, 17 nt, Molluscum contagiosum virus
aacugcccggcggcaag

SEQ ID NO: 4026405 - RNA, 12 nt, Molluscum contagiosum virus
aacugcugggcg

SEQ ID NO: 4026406 - RNA, 12 nt, Molluscum contagiosum virus
aacuucgcgcug

SEQ ID NO: 4026407 - RNA, 22 nt, Molluscum contagiosum virus
aacuugcucuacuggcggcgcc

SEQ ID NO: 4026408 - RNA, 13 nt, Molluscum contagiosum virus
aacuuuuccugcg

SEQ ID NO: 4026409 - RNA, 18 nt, Molluscum contagiosum virus
aagaacaugugcuccgcc

SEQ ID NO: 4026410 - RNA, 16 nt, Molluscum contagiosum virus
aagaagugugccugcu

SEQ ID NO: 4026411 - RNA, 15 nt, Molluscum contagiosum virus
aagaccauggggcua

SEQ ID NO: 4026412 - RNA, 22 nt, Molluscum contagiosum virus
aagacgcuggugaucacgcacg

SEQ ID NO: 4026413 - RNA, 22 nt, Molluscum contagiosum virus
aagacguggacgaggccaaccu

SEQ ID NO: 4026414 - RNA, 13 nt, Molluscum contagiosum virus
aagacuggcucag

SEQ ID NO: 4026415 - RNA, 16 nt, Molluscum contagiosum virus
aagagcguccagccgc

SEQ ID NO: 4026416 - RNA, 22 nt, Molluscum contagiosum virus
aagauauacaccaggcgcgugc

SEQ ID NO: 4026417 - RNA, 21 nt, Molluscum contagiosum virus
aagcacgcaacgucgcacugg

SEQ ID NO: 4026418 - RNA, 11 nt, Molluscum contagiosum virus
aagcacugccu

SEQ ID NO: 4026419 - RNA, 16 nt, Molluscum contagiosum virus
aagcagcaaacugugc

SEQ ID NO: 4026420 - RNA, 16 nt, Molluscum contagiosum virus
aagcgcccgugaugca

SEQ ID NO: 4026421 - RNA, 18 nt, Molluscum contagiosum virus
aagcgcccucguguacga

SEQ ID NO: 4026422 - RNA, 14 nt, Molluscum contagiosum virus
aagcgcgcucgggc

SEQ ID NO: 4026423 - RNA, 13 nt, Molluscum contagiosum virus
aagcgcggccgcg

SEQ ID NO: 4026424 - RNA, 17 nt, Molluscum contagiosum virus
aagcgucgugcuccacg

SEQ ID NO: 4026425 - RNA, 11 nt, Molluscum contagiosum virus
aagcucagccu

SEQ ID NO: 4026426 - RNA, 13 nt, Molluscum contagiosum virus
aagcuccugcugg

SEQ ID NO: 4026427 - RNA, 22 nt, Molluscum contagiosum virus
aagcuggcgggugccgugcccc

SEQ ID NO: 4026428 - RNA, 15 nt, Molluscum contagiosum virus
aaggacuaccagcuc

SEQ ID NO: 4026429 - RNA, 19 nt, Molluscum contagiosum virus
aaggaucucugcccucaga

SEQ ID NO: 4026430 - RNA, 23 nt, Molluscum contagiosum virus
aaggaugccugccagcagagcug

SEQ ID NO: 4026431 - RNA, 16 nt, Molluscum contagiosum virus
aaggcauaccugugcc

SEQ ID NO: 4026432 - RNA, 13 nt, Molluscum contagiosum virus
acccuggcugcug

SEQ ID NO: 4026433 - RNA, 21 nt, Molluscum contagiosum virus
acccuuaacucguagcuagcg

SEQ ID NO: 4026434 - RNA, 12 nt, Molluscum contagiosum virus
acccuuggcagc

SEQ ID NO: 4026435 - RNA, 22 nt, Molluscum contagiosum virus
accgagcaagcuggaggcugcc

SEQ ID NO: 4026436 - RNA, 20 nt, Molluscum contagiosum virus
accgcagacaaagacagucc

SEQ ID NO: 4026437 - RNA, 18 nt, Molluscum contagiosum virus
accgcaugggcccuggcg

SEQ ID NO: 4026438 - RNA, 20 nt, Molluscum contagiosum virus
accgcccuuguggacgcgcg

SEQ ID NO: 4026439 - RNA, 14 nt, Molluscum contagiosum virus
accgccgcggccgc

SEQ ID NO: 4026440 - RNA, 14 nt, Molluscum contagiosum virus
accgccugcgggag

SEQ ID NO: 4026441 - RNA, 17 nt, Molluscum contagiosum virus
accgcgacaugccucgc

SEQ ID NO: 4026442 - RNA, 19 nt, Molluscum contagiosum virus
accgcgcgcacgcggcgcu

SEQ ID NO: 4026443 - RNA, 14 nt, Molluscum contagiosum virus
accgcggcagccuu

SEQ ID NO: 4026444 - RNA, 14 nt, Molluscum contagiosum virus
accgcggcgcggag

SEQ ID NO: 4026445 - RNA, 12 nt, Molluscum contagiosum virus
accgcgggcacg

SEQ ID NO: 4026446 - RNA, 16 nt, Molluscum contagiosum virus
accgcgggcacgggca

SEQ ID NO: 4026447 - RNA, 14 nt, Molluscum contagiosum virus
accgcgggcgcaga

SEQ ID NO: 4026448 - RNA, 13 nt, Molluscum contagiosum virus
accgcgucaagau

SEQ ID NO: 4026449 - RNA, 20 nt, Molluscum contagiosum virus
accgcgucaagaucaaccgc

SEQ ID NO: 4026450 - RNA, 23 nt, Molluscum contagiosum virus
accgcguccgcuaccgcagccac

SEQ ID NO: 4026451 - RNA, 17 nt, Molluscum contagiosum virus
accgcguggacaacagc

SEQ ID NO: 4026452 - RNA, 21 nt, Molluscum contagiosum virus
accgcguugccgcccgccgag

SEQ ID NO: 4026453 - RNA, 19 nt, Molluscum contagiosum virus
accgcugcuucguaaagcu

SEQ ID NO: 4026454 - RNA, 22 nt, Molluscum contagiosum virus
accgcuggggcgugacucggcc

SEQ ID NO: 4026455 - RNA, 17 nt, Molluscum contagiosum virus
accggagacaccagcuc

SEQ ID NO: 4026456 - RNA, 22 nt, Molluscum contagiosum virus
accggcagcgcgauugcuggag

SEQ ID NO: 4026457 - RNA, 18 nt, Molluscum contagiosum virus
accgggagcauagcaaga

SEQ ID NO: 4026458 - RNA, 21 nt, Molluscum contagiosum virus
accgggguccgcuccuucuca

SEQ ID NO: 4026459 - RNA, 13 nt, Molluscum contagiosum virus
accgucaccgcag

SEQ ID NO: 4026460 - RNA, 18 nt, Molluscum contagiosum virus
accuacgaggugcugcgc

SEQ ID NO: 4026461 - RNA, 21 nt, Molluscum contagiosum virus
accucacucacaugugcugcc

SEQ ID NO: 4026462 - RNA, 21 nt, Molluscum contagiosum virus
accuccuucgcguaccaagcc

SEQ ID NO: 4026463 - RNA, 17 nt, Molluscum contagiosum virus
accucgcgcgccgccgc

SEQ ID NO: 4026464 - RNA, 21 nt, Molluscum contagiosum virus
accugauuuucccgggcggcg

SEQ ID NO: 4026465 - RNA, 19 nt, Molluscum contagiosum virus
accugcacgacccucuucg

SEQ ID NO: 4026466 - RNA, 16 nt, Molluscum contagiosum virus
accugcgacagcugcu

SEQ ID NO: 4026467 - RNA, 13 nt, Molluscum contagiosum virus
accugcugccgag

SEQ ID NO: 4026468 - RNA, 15 nt, Molluscum contagiosum virus
accugggcaggccgc

SEQ ID NO: 4026469 - RNA, 17 nt, Molluscum contagiosum virus
accugucggagcaggac

SEQ ID NO: 4026470 - RNA, 14 nt, Molluscum contagiosum virus
accuuccugggcgg

SEQ ID NO: 4026471 - RNA, 19 nt, Molluscum contagiosum virus
acgaacauguccaaggagc

SEQ ID NO: 4026472 - RNA, 17 nt, Molluscum contagiosum virus
acgaacgacagcgccgc

SEQ ID NO: 4026473 - RNA, 21 nt, Molluscum contagiosum virus
acgaacggacgccuuuugugc

SEQ ID NO: 4026474 - RNA, 17 nt, Molluscum contagiosum virus
acgaagacgaagcgcuc

SEQ ID NO: 4026475 - RNA, 20 nt, Molluscum contagiosum virus
acgacacgagggccuuggcg

SEQ ID NO: 4026476 - RNA, 13 nt, Molluscum contagiosum virus
acgacacuggcgc

SEQ ID NO: 4026477 - RNA, 20 nt, Molluscum contagiosum virus
acgacagcgccgccaccucg

SEQ ID NO: 4026478 - RNA, 22 nt, Molluscum contagiosum virus
acgaccgacccaucggagaagu

SEQ ID NO: 4026479 - RNA, 13 nt, Molluscum contagiosum virus
acgacggcacgcu

SEQ ID NO: 4026480 - RNA, 15 nt, Molluscum contagiosum virus
acgacggucacgcaa

SEQ ID NO: 4026481 - RNA, 15 nt, Molluscum contagiosum virus
acgacgugcugcugc

SEQ ID NO: 4026482 - RNA, 15 nt, Molluscum contagiosum virus
acgacuuccgcggcg

SEQ ID NO: 4026483 - RNA, 16 nt, Molluscum contagiosum virus
acgacuuccgcggcgu

SEQ ID NO: 4026484 - RNA, 18 nt, Molluscum contagiosum virus
acgagcacugccugccgc

SEQ ID NO: 4026485 - RNA, 15 nt, Molluscum contagiosum virus
acgagcagcugcugc

SEQ ID NO: 4026486 - RNA, 14 nt, Molluscum contagiosum virus
acgagcgcaucagc

SEQ ID NO: 4026487 - RNA, 15 nt, Molluscum contagiosum virus
cgcgcgaucgcggcc

SEQ ID NO: 4026488 - RNA, 14 nt, Molluscum contagiosum virus
cgcgcgcaccugca

SEQ ID NO: 4026489 - RNA, 18 nt, Molluscum contagiosum virus
cgcgcgcacgcgaacgcc

SEQ ID NO: 4026490 - RNA, 15 nt, Molluscum contagiosum virus
cgcgcgcagcaccgc

SEQ ID NO: 4026491 - RNA, 14 nt, Molluscum contagiosum virus
cgcgcgcaggcucg

SEQ ID NO: 4026492 - RNA, 16 nt, Molluscum contagiosum virus
cgcgcgccagcagcgc

SEQ ID NO: 4026493 - RNA, 13 nt, Molluscum contagiosum virus
cgcgcgccagcua

SEQ ID NO: 4026494 - RNA, 19 nt, Molluscum contagiosum virus
cgcgcgccgcagaacacgg

SEQ ID NO: 4026495 - RNA, 12 nt, Molluscum contagiosum virus
cgcgcgccgcgg

SEQ ID NO: 4026496 - RNA, 20 nt, Molluscum contagiosum virus
cgcgcgccgguagggugccg

SEQ ID NO: 4026497 - RNA, 17 nt, Molluscum contagiosum virus
cgcgcgccgugccuggc

SEQ ID NO: 4026498 - RNA, 13 nt, Molluscum contagiosum virus
cgcgcgccugcug

SEQ ID NO: 4026499 - RNA, 22 nt, Molluscum contagiosum virus
cgcgcgcgauguacaagcccgu

SEQ ID NO: 4026500 - RNA, 14 nt, Molluscum contagiosum virus
cgcgcgcgucgucg

SEQ ID NO: 4026501 - RNA, 14 nt, Molluscum contagiosum virus
cgcgcgcucacccu

SEQ ID NO: 4026502 - RNA, 17 nt, Molluscum contagiosum virus
cgcgcgcugcgcgccgc

SEQ ID NO: 4026503 - RNA, 18 nt, Molluscum contagiosum virus
cgcgcgcugcgcgcggac

SEQ ID NO: 4026504 - RNA, 14 nt, Molluscum contagiosum virus
cgcgcgcugcucug

SEQ ID NO: 4026505 - RNA, 18 nt, Molluscum contagiosum virus
cgcgcggcaagccuggcu

SEQ ID NO: 4026506 - RNA, 13 nt, Molluscum contagiosum virus
cgcgcggcagacg

SEQ ID NO: 4026507 - RNA, 13 nt, Molluscum contagiosum virus
cgcgcggcagcag

SEQ ID NO: 4026508 - RNA, 21 nt, Molluscum contagiosum virus
cgcgcggcuuggcgcccuucc

SEQ ID NO: 4026509 - RNA, 20 nt, Molluscum contagiosum virus
cgcgcggggcacugcgcacg

SEQ ID NO: 4026510 - RNA, 18 nt, Molluscum contagiosum virus
cgcgcggugcugcgccag

SEQ ID NO: 4026511 - RNA, 13 nt, Molluscum contagiosum virus
cgcgcgucacgga

SEQ ID NO: 4026512 - RNA, 18 nt, Molluscum contagiosum virus
cgcgcgucgagggcgccg

SEQ ID NO: 4026513 - RNA, 15 nt, Molluscum contagiosum virus
cgcgcgugagcacgg

SEQ ID NO: 4026514 - RNA, 13 nt, Molluscum contagiosum virus
cgcgcgugcaguu

SEQ ID NO: 4026515 - RNA, 16 nt, Molluscum contagiosum virus
cgcgcguugccugaga

SEQ ID NO: 4026516 - RNA, 23 nt, Molluscum contagiosum virus
cgcgcguugccugagaagcugua

SEQ ID NO: 4026517 - RNA, 14 nt, Molluscum contagiosum virus
cgcgcuacgcgccg

SEQ ID NO: 4026518 - RNA, 16 nt, Molluscum contagiosum virus
cgcgcuacgcgccgag

SEQ ID NO: 4026519 - RNA, 22 nt, Molluscum contagiosum virus
cgcgcuacugcgcgcacugcuc

SEQ ID NO: 4026520 - RNA, 17 nt, Molluscum contagiosum virus
cgcgcucacccugcacg

SEQ ID NO: 4026521 - RNA, 16 nt, Molluscum contagiosum virus
cgcgcucacugcagca

SEQ ID NO: 4026522 - RNA, 13 nt, Molluscum contagiosum virus
cgcgcucgcgcag

SEQ ID NO: 4026523 - RNA, 17 nt, Molluscum contagiosum virus
cgcgcucgcgugccgcg

SEQ ID NO: 4026524 - RNA, 20 nt, Molluscum contagiosum virus
cgcgcucgcgugccgcggac

SEQ ID NO: 4026525 - RNA, 15 nt, Molluscum contagiosum virus
cgcgcucgucaaugc

SEQ ID NO: 4026526 - RNA, 21 nt, Molluscum contagiosum virus
cgcgcucgucaaugcgcacgu

SEQ ID NO: 4026527 - RNA, 18 nt, Molluscum contagiosum virus
cgcgcucguccgccgcgu

SEQ ID NO: 4026528 - RNA, 19 nt, Molluscum contagiosum virus
cgaagcaugucaggccggu

SEQ ID NO: 4026529 - RNA, 20 nt, Molluscum contagiosum virus
cgaaggucaucaccagccug

SEQ ID NO: 4026530 - RNA, 23 nt, Molluscum contagiosum virus
cgaagguuuugugccgagcggca

SEQ ID NO: 4026531 - RNA, 13 nt, Molluscum contagiosum virus
cgacagcgacgag

SEQ ID NO: 4026532 - RNA, 14 nt, Molluscum contagiosum virus
cgacagcgccgcca

SEQ ID NO: 4026533 - RNA, 16 nt, Molluscum contagiosum virus
cgacagcgcgcgcacg

SEQ ID NO: 4026534 - RNA, 13 nt, Molluscum contagiosum virus
cgaccacgugcca

SEQ ID NO: 4026535 - RNA, 15 nt, Molluscum contagiosum virus
cgacccguaccccga

SEQ ID NO: 4026536 - RNA, 22 nt, Molluscum contagiosum virus
cgaccgcuuucgcaaacaagca

SEQ ID NO: 4026537 - RNA, 17 nt, Molluscum contagiosum virus
cgaccuacuccuggcca

SEQ ID NO: 4026538 - RNA, 19 nt, Molluscum contagiosum virus
cgaccucuuuccgcgcuuu

SEQ ID NO: 4026539 - RNA, 14 nt, Molluscum contagiosum virus
cgaccugcacgacc

SEQ ID NO: 4026540 - RNA, 12 nt, Molluscum contagiosum virus
cgaccugcugcg

SEQ ID NO: 4026541 - RNA, 17 nt, Molluscum contagiosum virus
cgacgacagcgacgaga

SEQ ID NO: 4026542 - RNA, 14 nt, Molluscum contagiosum virus
cgacgagcacgagc

SEQ ID NO: 4026543 - RNA, 14 nt, Molluscum contagiosum virus
cgacgaggugcgcg

SEQ ID NO: 4026544 - RNA, 16 nt, Molluscum contagiosum virus
cgacgagugcgccgcg

SEQ ID NO: 4026545 - RNA, 18 nt, Molluscum contagiosum virus
cgacgccccggcgcgaaa

SEQ ID NO: 4026546 - RNA, 19 nt, Molluscum contagiosum virus
cgacgcgagaaagaccuug

SEQ ID NO: 4026547 - RNA, 19 nt, Molluscum contagiosum virus
cgacgcguucuagcagcgu

SEQ ID NO: 4026548 - RNA, 17 nt, Molluscum contagiosum virus
cgacggcacgggcacgc

SEQ ID NO: 4026549 - RNA, 23 nt, Molluscum contagiosum virus
cgacggcgccucgagcgcgcugg

SEQ ID NO: 4026550 - RNA, 15 nt, Molluscum contagiosum virus
cgacgggcgcgcuuc

SEQ ID NO: 4026551 - RNA, 18 nt, Molluscum contagiosum virus
cgacgggcgcgcuucuca

SEQ ID NO: 4026552 - RNA, 20 nt, Molluscum contagiosum virus
cgacggugugccgcuggugg

SEQ ID NO: 4026553 - RNA, 16 nt, Molluscum contagiosum virus
cgacgguuuccgcgcc

SEQ ID NO: 4026554 - RNA, 17 nt, Molluscum contagiosum virus
cgacgugaucgcgcagg

SEQ ID NO: 4026555 - RNA, 15 nt, Molluscum contagiosum virus
cgacgugcgcgcugc

SEQ ID NO: 4026556 - RNA, 13 nt, Molluscum contagiosum virus
cgacgugcgcgug

SEQ ID NO: 4026557 - RNA, 14 nt, Molluscum contagiosum virus
cgacguggagccug

SEQ ID NO: 4026558 - RNA, 17 nt, Molluscum contagiosum virus
cgacucggugcucaugc

SEQ ID NO: 4026559 - RNA, 13 nt, Molluscum contagiosum virus
cgacugccagcca

SEQ ID NO: 4026560 - RNA, 20 nt, Molluscum contagiosum virus
cgacugcgccuucugccugc

SEQ ID NO: 4026561 - RNA, 18 nt, Molluscum contagiosum virus
cgacuugcugcggagcgc

SEQ ID NO: 4026562 - RNA, 20 nt, Molluscum contagiosum virus
cgacuugcugcggagcgccu

SEQ ID NO: 4026563 - RNA, 13 nt, Molluscum contagiosum virus
cgacuuuucgcgc

SEQ ID NO: 4026564 - RNA, 15 nt, Molluscum contagiosum virus
cgagaaaugcgcaca

SEQ ID NO: 4026565 - RNA, 15 nt, Molluscum contagiosum virus
cgagaacuggcgcag

SEQ ID NO: 4026566 - RNA, 15 nt, Molluscum contagiosum virus
cgagaagacggggcg

SEQ ID NO: 4026567 - RNA, 16 nt, Molluscum contagiosum virus
cgagaccagccgcgag

SEQ ID NO: 4026568 - RNA, 19 nt, Molluscum contagiosum virus
cgagaccuacgucaagcag

SEQ ID NO: 4026569 - RNA, 17 nt, Molluscum contagiosum virus
cgagaccuuccuccagg

SEQ ID NO: 4026570 - RNA, 13 nt, Molluscum contagiosum virus
cgagacgcugcug

SEQ ID NO: 4026571 - RNA, 21 nt, Molluscum contagiosum virus
cgagagaggagugaagggugu

SEQ ID NO: 4026572 - RNA, 13 nt, Molluscum contagiosum virus
cgagagcgcgcgc

SEQ ID NO: 4026573 - RNA, 21 nt, Molluscum contagiosum virus
cgagagcggagaaaaggaagc

SEQ ID NO: 4026574 - RNA, 12 nt, Molluscum contagiosum virus
cgagagcggcgu

SEQ ID NO: 4026575 - RNA, 15 nt, Molluscum contagiosum virus
cgagagcuacagcau

SEQ ID NO: 4026576 - RNA, 15 nt, Molluscum contagiosum virus
cgagauggagcucac

SEQ ID NO: 4026577 - RNA, 18 nt, Molluscum contagiosum virus
cgagauucguggcgagca

SEQ ID NO: 4026578 - RNA, 21 nt, Molluscum contagiosum virus
cgagauucguggcgagcaucu

SEQ ID NO: 4026579 - RNA, 14 nt, Molluscum contagiosum virus
cgagcaaggcgcgc

SEQ ID NO: 4026580 - RNA, 20 nt, Molluscum contagiosum virus
cgagcaccugucgcgcgagc

SEQ ID NO: 4026581 - RNA, 22 nt, Molluscum contagiosum virus
cgagcacggccgccaccgcgcg

SEQ ID NO: 4026582 - RNA, 19 nt, Molluscum contagiosum virus
cgagcacguggacagcauc

SEQ ID NO: 4026583 - RNA, 16 nt, Molluscum contagiosum virus
cgagcacguuccaaaa

SEQ ID NO: 4026584 - RNA, 13 nt, Molluscum contagiosum virus
cgagcagcugcug

SEQ ID NO: 4026585 - RNA, 19 nt, Molluscum contagiosum virus
cgagcagcugcugcgcacg

SEQ ID NO: 4026586 - RNA, 17 nt, Molluscum contagiosum virus
cgagcagcugcuucucu

SEQ ID NO: 4026587 - RNA, 16 nt, Molluscum contagiosum virus
cgagcaggcgcagcgc

SEQ ID NO: 4026588 - RNA, 15 nt, Molluscum contagiosum virus
cgagcaguccgccuc

SEQ ID NO: 4026589 - RNA, 22 nt, Molluscum contagiosum virus
cgagcaguccgccucgagcacg

SEQ ID NO: 4026590 - RNA, 13 nt, Molluscum contagiosum virus
cgagcauuccgag

SEQ ID NO: 4026591 - RNA, 23 nt, Molluscum contagiosum virus
cgagccaaggaugccugccagca

SEQ ID NO: 4026592 - RNA, 12 nt, Molluscum contagiosum virus
cgagccagccag

SEQ ID NO: 4026593 - RNA, 14 nt, Molluscum contagiosum virus
cgagcccgcggcgc

SEQ ID NO: 4026594 - RNA, 21 nt, Molluscum contagiosum virus
cgagcccuucuuuccggcgcg

SEQ ID NO: 4026595 - RNA, 17 nt, Molluscum contagiosum virus
cgagccgcgcgagcgcg

SEQ ID NO: 4026596 - RNA, 19 nt, Molluscum contagiosum virus
cgagcgacuacaccuggcg

SEQ ID NO: 4026597 - RNA, 13 nt, Molluscum contagiosum virus
cgagcgagcacgc

SEQ ID NO: 4026598 - RNA, 19 nt, Molluscum contagiosum virus
cgagcgcacgccgcucucg

SEQ ID NO: 4026599 - RNA, 13 nt, Molluscum contagiosum virus
cgagcgcaucagc

SEQ ID NO: 4026600 - RNA, 23 nt, Molluscum contagiosum virus
cgagcgcauucgcgcgcccccgc

SEQ ID NO: 4026601 - RNA, 13 nt, Molluscum contagiosum virus
cgagcgccacuag

SEQ ID NO: 4026602 - RNA, 17 nt, Molluscum contagiosum virus
cgagcgccgcgugcgcg

SEQ ID NO: 4026603 - RNA, 21 nt, Molluscum contagiosum virus
cgagcgcgagauucuggcgcg

SEQ ID NO: 4026604 - RNA, 17 nt, Molluscum contagiosum virus
cgagcgcgcgugcucgc

SEQ ID NO: 4026605 - RNA, 14 nt, Molluscum contagiosum virus
cgagcgcgggcgcg

SEQ ID NO: 4026606 - RNA, 14 nt, Molluscum contagiosum virus
cgagcggcgcgcgc

SEQ ID NO: 4026607 - RNA, 20 nt, Molluscum contagiosum virus
cgagcgggcaaugggcacgc

SEQ ID NO: 4026608 - RNA, 15 nt, Molluscum contagiosum virus
cgagcguugucuuga

SEQ ID NO: 4026609 - RNA, 17 nt, Molluscum contagiosum virus
cgagcucgcgcgccagc

SEQ ID NO: 4026610 - RNA, 22 nt, Molluscum contagiosum virus
cgagcucuuccccgcgggccgc

SEQ ID NO: 4026611 - RNA, 15 nt, Molluscum contagiosum virus
cgagcugcgggcgcg

SEQ ID NO: 4026612 - RNA, 16 nt, Molluscum contagiosum virus
cgagcugcugcgcgcc

SEQ ID NO: 4026613 - RNA, 23 nt, Molluscum contagiosum virus
cgaggaccggcgcaacgagcagc

SEQ ID NO: 4026614 - RNA, 20 nt, Molluscum contagiosum virus
caccagacaaagucgacgac

SEQ ID NO: 4026615 - RNA, 14 nt, Molluscum contagiosum virus
caccagcaccagca

SEQ ID NO: 4026616 - RNA, 14 nt, Molluscum contagiosum virus
caccagcugccgcu

SEQ ID NO: 4026617 - RNA, 22 nt, Molluscum contagiosum virus
caccagcuggacggugcuggug

SEQ ID NO: 4026618 - RNA, 11 nt, Molluscum contagiosum virus
caccaggaacg

SEQ ID NO: 4026619 - RNA, 14 nt, Molluscum contagiosum virus
caccccgcagcuca

SEQ ID NO: 4026620 - RNA, 16 nt, Molluscum contagiosum virus
caccccgcugggccgc

SEQ ID NO: 4026621 - RNA, 19 nt, Molluscum contagiosum virus
cacccgagggcgugcgcuu

SEQ ID NO: 4026622 - RNA, 15 nt, Molluscum contagiosum virus
cacccgcaacaagga

SEQ ID NO: 4026623 - RNA, 18 nt, Molluscum contagiosum virus
cacccgcaacaaggaaag

SEQ ID NO: 4026624 - RNA, 13 nt, Molluscum contagiosum virus
cacccgcaggaaa

SEQ ID NO: 4026625 - RNA, 19 nt, Molluscum contagiosum virus
caccgaggagccgcgcuuc

SEQ ID NO: 4026626 - RNA, 18 nt, Molluscum contagiosum virus
caccgcaugggcccuggc

SEQ ID NO: 4026627 - RNA, 17 nt, Molluscum contagiosum virus
caccgccgagauggagc

SEQ ID NO: 4026628 - RNA, 18 nt, Molluscum contagiosum virus
caccgcgacaugccucgc

SEQ ID NO: 4026629 - RNA, 23 nt, Molluscum contagiosum virus
caccgcgccgaaacacggccucc

SEQ ID NO: 4026630 - RNA, 18 nt, Molluscum contagiosum virus
caccgcggcgcggagcgc

SEQ ID NO: 4026631 - RNA, 21 nt, Molluscum contagiosum virus
caccgggauggucucgcugcu

SEQ ID NO: 4026632 - RNA, 20 nt, Molluscum contagiosum virus
caccgggguccgcuccuucu

SEQ ID NO: 4026633 - RNA, 22 nt, Molluscum contagiosum virus
caccguaccgcgcccgccagca

SEQ ID NO: 4026634 - RNA, 17 nt, Molluscum contagiosum virus
caccguugacgagcugg

SEQ ID NO: 4026635 - RNA, 17 nt, Molluscum contagiosum virus
caccguugccgcggcag

SEQ ID NO: 4026636 - RNA, 12 nt, Molluscum contagiosum virus
caccuccagguc

SEQ ID NO: 4026637 - RNA, 15 nt, Molluscum contagiosum virus
caccucgagcucguu

SEQ ID NO: 4026638 - RNA, 13 nt, Molluscum contagiosum virus
caccugcggcugc

SEQ ID NO: 4026639 - RNA, 18 nt, Molluscum contagiosum virus
caccuggcgagcgcucug

SEQ ID NO: 4026640 - RNA, 23 nt, Molluscum contagiosum virus
caccuuggcgcugcacaguucac

SEQ ID NO: 4026641 - RNA, 18 nt, Molluscum contagiosum virus
caccuuucauucgcuggu

SEQ ID NO: 4026642 - RNA, 17 nt, Molluscum contagiosum virus
cacgaagacuacggcac

SEQ ID NO: 4026643 - RNA, 20 nt, Molluscum contagiosum virus
cacgaagcggcggacagcaa

SEQ ID NO: 4026644 - RNA, 14 nt, Molluscum contagiosum virus
cacgaaucgcucgc

SEQ ID NO: 4026645 - RNA, 22 nt, Molluscum contagiosum virus
cacgacgcuuucguccgccgcu

SEQ ID NO: 4026646 - RNA, 21 nt, Molluscum contagiosum virus
cacgacggacuucuugcgcgg

SEQ ID NO: 4026647 - RNA, 21 nt, Molluscum contagiosum virus
cacgacguacgagugcuggag

SEQ ID NO: 4026648 - RNA, 13 nt, Molluscum contagiosum virus
cacgagacugagu

SEQ ID NO: 4026649 - RNA, 21 nt, Molluscum contagiosum virus
cacgagaugggcccgcgcgcg

SEQ ID NO: 4026650 - RNA, 14 nt, Molluscum contagiosum virus
cacgagcacugccu

SEQ ID NO: 4026651 - RNA, 18 nt, Molluscum contagiosum virus
cacgagcaguccgccucg

SEQ ID NO: 4026652 - RNA, 14 nt, Molluscum contagiosum virus
cacgagcgcggcaa

SEQ ID NO: 4026653 - RNA, 20 nt, Molluscum contagiosum virus
cacgagcugacgcagacgca

SEQ ID NO: 4026654 - RNA, 20 nt, Molluscum contagiosum virus
cacgaggcagccgcggcgcc

SEQ ID NO: 4026655 - RNA, 19 nt, Molluscum contagiosum virus
cacgaugugcgcgcgacgu

SEQ ID NO: 4026656 - RNA, 20 nt, Molluscum contagiosum virus
cacgcaacgucgcacuggcc

SEQ ID NO: 4026657 - RNA, 18 nt, Molluscum contagiosum virus
cacgcaagcccgcgcgcg

SEQ ID NO: 4026658 - RNA, 13 nt, Molluscum contagiosum virus
cacgcacgcgcgg

SEQ ID NO: 4026659 - RNA, 13 nt, Molluscum contagiosum virus
cacgcacgcgcuc

SEQ ID NO: 4026660 - RNA, 12 nt, Molluscum contagiosum virus
cacgcagagcca

SEQ ID NO: 4026661 - RNA, 18 nt, Molluscum contagiosum virus
cacgcaggacuggcaccu

SEQ ID NO: 4026662 - RNA, 19 nt, Molluscum contagiosum virus
cacgccaagcgcuugcucu

SEQ ID NO: 4026663 - RNA, 17 nt, Molluscum contagiosum virus
cacgcccgcaaugcagu

SEQ ID NO: 4026664 - RNA, 14 nt, Molluscum contagiosum virus
cacgcccgcgcugc

SEQ ID NO: 4026665 - RNA, 13 nt, Molluscum contagiosum virus
cacgcccgcgucc

SEQ ID NO: 4026666 - RNA, 22 nt, Molluscum contagiosum virus
cacgccgaccauuuccugcgag

SEQ ID NO: 4026667 - RNA, 22 nt, Molluscum contagiosum virus
cacgccgacuuccgacgggccg

SEQ ID NO: 4026668 - RNA, 12 nt, Molluscum contagiosum virus
cacgccgcagcg

SEQ ID NO: 4026669 - RNA, 13 nt, Molluscum contagiosum virus
cacgccgcucggc

SEQ ID NO: 4026670 - RNA, 22 nt, Molluscum contagiosum virus
cacgccuucguggagcccgugc

SEQ ID NO: 4026671 - RNA, 15 nt, Molluscum contagiosum virus
cacgcgagcaauggc

SEQ ID NO: 4026672 - RNA, 18 nt, Molluscum contagiosum virus
cacgcgagcacgccugca

SEQ ID NO: 4026673 - RNA, 14 nt, Molluscum contagiosum virus
cacgcgcaaggucu

SEQ ID NO: 4026674 - RNA, 18 nt, Molluscum contagiosum virus
cacgcgcacgcucucgcu

SEQ ID NO: 4026675 - RNA, 13 nt, Molluscum contagiosum virus
cacgcgcccgaag

SEQ ID NO: 4026676 - RNA, 15 nt, Molluscum contagiosum virus
cacgcgcgagcggag

SEQ ID NO: 4026677 - RNA, 20 nt, Molluscum contagiosum virus
cacgcgcgagcggagcgggc

SEQ ID NO: 4026678 - RNA, 13 nt, Molluscum contagiosum virus
cacgcgcgcgcag

SEQ ID NO: 4026679 - RNA, 14 nt, Molluscum contagiosum virus
cacgcgcgggcgca

SEQ ID NO: 4026680 - RNA, 11 nt, Molluscum contagiosum virus
cacgcgcuucg

SEQ ID NO: 4026681 - RNA, 21 nt, Molluscum contagiosum virus
cacgcgggacgcgugccuggc

SEQ ID NO: 4026682 - RNA, 21 nt, Molluscum contagiosum virus
cacgcgggcccaccgcgccag

SEQ ID NO: 4026683 - RNA, 14 nt, Molluscum contagiosum virus
cacgcgucgcgcag

SEQ ID NO: 4026684 - RNA, 16 nt, Molluscum contagiosum virus
cacgcgucgcgcgccg

SEQ ID NO: 4026685 - RNA, 15 nt, Molluscum contagiosum virus
cacgcgugcugcgcg

SEQ ID NO: 4026686 - RNA, 16 nt, Molluscum contagiosum virus
cacgcuacgcagcgcg

SEQ ID NO: 4026687 - RNA, 15 nt, Molluscum contagiosum virus
cacgcucgaggagga

SEQ ID NO: 4026688 - RNA, 23 nt, Molluscum contagiosum virus
cacgcucgcgacgugcgcgcugc

SEQ ID NO: 4026689 - RNA, 15 nt, Molluscum contagiosum virus
cacgcucucgcuggc

SEQ ID NO: 4026690 - RNA, 22 nt, Molluscum contagiosum virus
cacgcugcgcgugcugggcccc

SEQ ID NO: 4026691 - RNA, 14 nt, Molluscum contagiosum virus
cacgcugcgcucgg

SEQ ID NO: 4026692 - RNA, 22 nt, Molluscum contagiosum virus
cacgcugcugcgugcgcgcgau

SEQ ID NO: 4026693 - RNA, 14 nt, Molluscum contagiosum virus
cacggacaugguca

SEQ ID NO: 4026694 - RNA, 17 nt, Molluscum contagiosum virus
cacggacgagcccuucg

SEQ ID NO: 4026695 - RNA, 19 nt, Molluscum contagiosum virus
cacggacucgagccccaga

SEQ ID NO: 4026696 - RNA, 19 nt, Molluscum contagiosum virus
cacggacucgccgcgcgcc

SEQ ID NO: 4026697 - RNA, 15 nt, Molluscum contagiosum virus
cacggauacgcgcac

SEQ ID NO: 4026698 - RNA, 22 nt, Molluscum contagiosum virus
cacggccgacggcacgggcacg

SEQ ID NO: 4026699 - RNA, 20 nt, Molluscum contagiosum virus
ccgcgguguccuugcgccgc

SEQ ID NO: 4026700 - RNA, 14 nt, Molluscum contagiosum virus
ccgcguacacgugc

SEQ ID NO: 4026701 - RNA, 20 nt, Molluscum contagiosum virus
ccgcguacgcacgugccgug

SEQ ID NO: 4026702 - RNA, 21 nt, Molluscum contagiosum virus
ccgcguagcuagcucugcgcg

SEQ ID NO: 4026703 - RNA, 22 nt, Molluscum contagiosum virus
ccgcgucgcgcacgcgcgcuua

SEQ ID NO: 4026704 - RNA, 17 nt, Molluscum contagiosum virus
ccgcgugcaugcccagc

SEQ ID NO: 4026705 - RNA, 15 nt, Molluscum contagiosum virus
ccgcgugcgccgccg

SEQ ID NO: 4026706 - RNA, 18 nt, Molluscum contagiosum virus
ccgcgugcgugcacagcg

SEQ ID NO: 4026707 - RNA, 14 nt, Molluscum contagiosum virus
ccgcgugcucugcu

SEQ ID NO: 4026708 - RNA, 17 nt, Molluscum contagiosum virus
ccgcgugcucugcuccg

SEQ ID NO: 4026709 - RNA, 17 nt, Molluscum contagiosum virus
ccgcuccggucaccgcg

SEQ ID NO: 4026710 - RNA, 16 nt, Molluscum contagiosum virus
ccgcuccuggucuucc

SEQ ID NO: 4026711 - RNA, 18 nt, Molluscum contagiosum virus
ccgcucggcacugcuggc

SEQ ID NO: 4026712 - RNA, 22 nt, Molluscum contagiosum virus
ccgcucguccagcugcgcgagc

SEQ ID NO: 4026713 - RNA, 18 nt, Molluscum contagiosum virus
ccgcugagcgcagcacac

SEQ ID NO: 4026714 - RNA, 16 nt, Molluscum contagiosum virus
ccgcugcccgcgcacg

SEQ ID NO: 4026715 - RNA, 15 nt, Molluscum contagiosum virus
ccgcugccgcgcgcg

SEQ ID NO: 4026716 - RNA, 18 nt, Molluscum contagiosum virus
ccgcugccgucgcgcgcu

SEQ ID NO: 4026717 - RNA, 18 nt, Molluscum contagiosum virus
ccgcugcgcaucugcgag

SEQ ID NO: 4026718 - RNA, 16 nt, Molluscum contagiosum virus
ccgcugcgccggcugc

SEQ ID NO: 4026719 - RNA, 23 nt, Molluscum contagiosum virus
ccgcugcgcgcucuggagccucc

SEQ ID NO: 4026720 - RNA, 13 nt, Molluscum contagiosum virus
ccgcugcgcggag

SEQ ID NO: 4026721 - RNA, 15 nt, Molluscum contagiosum virus
ccgcugcgcggagcu

SEQ ID NO: 4026722 - RNA, 16 nt, Molluscum contagiosum virus
ccgcugcuccugcucu

SEQ ID NO: 4026723 - RNA, 12 nt, Molluscum contagiosum virus
ccgcugcuggaa

SEQ ID NO: 4026724 - RNA, 13 nt, Molluscum contagiosum virus
ccgcugcuggaac

SEQ ID NO: 4026725 - RNA, 16 nt, Molluscum contagiosum virus
ccgcuggacgccucgg

SEQ ID NO: 4026726 - RNA, 18 nt, Molluscum contagiosum virus
ccgcuggacgccucggga

SEQ ID NO: 4026727 - RNA, 23 nt, Molluscum contagiosum virus
ccgcuggggcggagagcuccggc

SEQ ID NO: 4026728 - RNA, 13 nt, Molluscum contagiosum virus
ccgcuuccuggca

SEQ ID NO: 4026729 - RNA, 12 nt, Molluscum contagiosum virus
ccggacagagcc

SEQ ID NO: 4026730 - RNA, 23 nt, Molluscum contagiosum virus
ccggaccagauccgggcgcugca

SEQ ID NO: 4026731 - RNA, 22 nt, Molluscum contagiosum virus
ccggacgauaaauggaccucaa

SEQ ID NO: 4026732 - RNA, 15 nt, Molluscum contagiosum virus
ccggacgcgcgaacu

SEQ ID NO: 4026733 - RNA, 16 nt, Molluscum contagiosum virus
ccggagacaccagcuc

SEQ ID NO: 4026734 - RNA, 19 nt, Molluscum contagiosum virus
ccggagacaccagcuccgc

SEQ ID NO: 4026735 - RNA, 17 nt, Molluscum contagiosum virus
ccggaggaaggacagug

SEQ ID NO: 4026736 - RNA, 21 nt, Molluscum contagiosum virus
ccggcacgugccccgcgcgug

SEQ ID NO: 4026737 - RNA, 19 nt, Molluscum contagiosum virus
ccggcaguagcagcgccgg

SEQ ID NO: 4026738 - RNA, 15 nt, Molluscum contagiosum virus
ccggccccgcgaacg

SEQ ID NO: 4026739 - RNA, 14 nt, Molluscum contagiosum virus
ccggccgaggcacg

SEQ ID NO: 4026740 - RNA, 17 nt, Molluscum contagiosum virus
ccggccuuguucgcgcu

SEQ ID NO: 4026741 - RNA, 16 nt, Molluscum contagiosum virus
ccggcgagaugcgagc

SEQ ID NO: 4026742 - RNA, 20 nt, Molluscum contagiosum virus
ccggcgcaacgagcagcccg

SEQ ID NO: 4026743 - RNA, 14 nt, Molluscum contagiosum virus
ccggcgcccgccac

SEQ ID NO: 4026744 - RNA, 20 nt, Molluscum contagiosum virus
ccggcgcgagaugcucgccg

SEQ ID NO: 4026745 - RNA, 22 nt, Molluscum contagiosum virus
ccggcgcgcgcgcgcaggcucg

SEQ ID NO: 4026746 - RNA, 15 nt, Molluscum contagiosum virus
ccggcgcggcgagcc

SEQ ID NO: 4026747 - RNA, 14 nt, Molluscum contagiosum virus
ccggcgcgugagcg

SEQ ID NO: 4026748 - RNA, 21 nt, Molluscum contagiosum virus
ccggcgcuugccccucguccg

SEQ ID NO: 4026749 - RNA, 14 nt, Molluscum contagiosum virus
ccggcggccucccu

SEQ ID NO: 4026750 - RNA, 15 nt, Molluscum contagiosum virus
ccggcggcgcaagca

SEQ ID NO: 4026751 - RNA, 15 nt, Molluscum contagiosum virus
ccggcgugagcucgu

SEQ ID NO: 4026752 - RNA, 16 nt, Molluscum contagiosum virus
ccggcgugagcucguc

SEQ ID NO: 4026753 - RNA, 22 nt, Molluscum contagiosum virus
ccggcguucacggacucgagcc

SEQ ID NO: 4026754 - RNA, 18 nt, Molluscum contagiosum virus
ccggcguuggcuuucugu

SEQ ID NO: 4026755 - RNA, 17 nt, Molluscum contagiosum virus
ccgggaaaaucaggucc

SEQ ID NO: 4026756 - RNA, 15 nt, Molluscum contagiosum virus
ccgggcccgggcccg

SEQ ID NO: 4026757 - RNA, 14 nt, Molluscum contagiosum virus
ccgggccugcggcg

SEQ ID NO: 4026758 - RNA, 18 nt, Molluscum contagiosum virus
ccgggcgccgcggcugcc

SEQ ID NO: 4026759 - RNA, 16 nt, Molluscum contagiosum virus
ccgggcucgggcucga

SEQ ID NO: 4026760 - RNA, 15 nt, Molluscum contagiosum virus
ccgggcuugcucccu

SEQ ID NO: 4026761 - RNA, 14 nt, Molluscum contagiosum virus
ccggugccagcucu

SEQ ID NO: 4026762 - RNA, 23 nt, Molluscum contagiosum virus
ccggugcugcggcgcgugccgcu

SEQ ID NO: 4026763 - RNA, 17 nt, Molluscum contagiosum virus
ccgguggaagagcccgc

SEQ ID NO: 4026764 - RNA, 13 nt, Molluscum contagiosum virus
ccggugucagccc

SEQ ID NO: 4026765 - RNA, 15 nt, Molluscum contagiosum virus
ccggugucagccccg

SEQ ID NO: 4026766 - RNA, 15 nt, Molluscum contagiosum virus
ccguacucgcguccg

SEQ ID NO: 4026767 - RNA, 17 nt, Molluscum contagiosum virus
ccguaggcgggccugcg

SEQ ID NO: 4026768 - RNA, 21 nt, Molluscum contagiosum virus
ccguaggcgggccugcgcccg

SEQ ID NO: 4026769 - RNA, 19 nt, Molluscum contagiosum virus
ccguccgccucgagcacgc

SEQ ID NO: 4026770 - RNA, 13 nt, Molluscum contagiosum virus
ccguccucgcucg

SEQ ID NO: 4026771 - RNA, 19 nt, Molluscum contagiosum virus
ccguccucgcucgugcucu

SEQ ID NO: 4026772 - RNA, 19 nt, Molluscum contagiosum virus
ccguccuugcucuggcucu

SEQ ID NO: 4026773 - RNA, 12 nt, Molluscum contagiosum virus
ccgucgcgagcu

SEQ ID NO: 4026774 - RNA, 14 nt, Molluscum contagiosum virus
ccgucgucgccgcc

SEQ ID NO: 4026775 - RNA, 13 nt, Molluscum contagiosum virus
ccgucugcugcuc

SEQ ID NO: 4026776 - RNA, 22 nt, Molluscum contagiosum virus
ccgugacagagugccuggcgcg

SEQ ID NO: 4026777 - RNA, 12 nt, Molluscum contagiosum virus
ccgugagcgcgc

SEQ ID NO: 4026778 - RNA, 18 nt, Molluscum contagiosum virus
ccgugcaguugagagcag

SEQ ID NO: 4026779 - RNA, 15 nt, Molluscum contagiosum virus
ccgugcccgagcccg

SEQ ID NO: 4026780 - RNA, 17 nt, Molluscum contagiosum virus
ccgugccgccggcgccg

SEQ ID NO: 4026781 - RNA, 15 nt, Molluscum contagiosum virus
ccgugcuugcgcacg

SEQ ID NO: 4026782 - RNA, 16 nt, Molluscum contagiosum virus
ccguggugcgcgaccu

SEQ ID NO: 4026783 - RNA, 20 nt, Molluscum contagiosum virus
ccguguaagcccgcuaugaa

SEQ ID NO: 4026784 - RNA, 14 nt, Molluscum contagiosum virus
ccguguaccgccgc

SEQ ID NO: 4026785 - RNA, 18 nt, Molluscum contagiosum virus
ccguguaccgccgcggcc

SEQ ID NO: 4026786 - RNA, 22 nt, Molluscum contagiosum virus
ccguguauccaagaggccguca

SEQ ID NO: 4026787 - RNA, 18 nt, Molluscum contagiosum virus
ccguguccgguacugcug

SEQ ID NO: 4026788 - RNA, 22 nt, Molluscum contagiosum virus
ccguuccacuacaagcagccgc

SEQ ID NO: 4026789 - RNA, 16 nt, Molluscum contagiosum virus
ccuacagcgcgcugca

SEQ ID NO: 4026790 - RNA, 16 nt, Molluscum contagiosum virus
cacggccgcgcgcgac

SEQ ID NO: 4026791 - RNA, 15 nt, Molluscum contagiosum virus
cacggccuucgcgcu

SEQ ID NO: 4026792 - RNA, 22 nt, Molluscum contagiosum virus
cacggccuucgcgcugcccgcg

SEQ ID NO: 4026793 - RNA, 17 nt, Molluscum contagiosum virus
cacggcggacgcgccua

SEQ ID NO: 4026794 - RNA, 12 nt, Molluscum contagiosum virus
cacggcucugcg

SEQ ID NO: 4026795 - RNA, 22 nt, Molluscum contagiosum virus
cacgggcaugcacagcugcucg

SEQ ID NO: 4026796 - RNA, 17 nt, Molluscum contagiosum virus
cacgggcgggacagaca

SEQ ID NO: 4026797 - RNA, 15 nt, Molluscum contagiosum virus
cacgguagagcugcg

SEQ ID NO: 4026798 - RNA, 17 nt, Molluscum contagiosum virus
cacgguccugggcgacg

SEQ ID NO: 4026799 - RNA, 22 nt, Molluscum contagiosum virus
cacguacuugcugguugccgcu

SEQ ID NO: 4026800 - RNA, 19 nt, Molluscum contagiosum virus
cacguaggggacgcgcggu

SEQ ID NO: 4026801 - RNA, 18 nt, Molluscum contagiosum virus
cacguccucaagcgcccu

SEQ ID NO: 4026802 - RNA, 21 nt, Molluscum contagiosum virus
cacgucgacaaguccaccuuc

SEQ ID NO: 4026803 - RNA, 16 nt, Molluscum contagiosum virus
cacgugcacgcgcacg

SEQ ID NO: 4026804 - RNA, 20 nt, Molluscum contagiosum virus
cacgugccagagucgccgcu

SEQ ID NO: 4026805 - RNA, 21 nt, Molluscum contagiosum virus
cacgugccccgcgcgugcagu

SEQ ID NO: 4026806 - RNA, 14 nt, Molluscum contagiosum virus
cacgugcucgcggu

SEQ ID NO: 4026807 - RNA, 14 nt, Molluscum contagiosum virus
cacgugcugcagcu

SEQ ID NO: 4026808 - RNA, 12 nt, Molluscum contagiosum virus
cacgugcugcug

SEQ ID NO: 4026809 - RNA, 17 nt, Molluscum contagiosum virus
cacgugcugcugcggcu

SEQ ID NO: 4026810 - RNA, 17 nt, Molluscum contagiosum virus
cacguggagucacgacc

SEQ ID NO: 4026811 - RNA, 21 nt, Molluscum contagiosum virus
cacguggagucacgaccgacc

SEQ ID NO: 4026812 - RNA, 14 nt, Molluscum contagiosum virus
cacgugguccacca

SEQ ID NO: 4026813 - RNA, 16 nt, Molluscum contagiosum virus
cacguugccgcgcgcu

SEQ ID NO: 4026814 - RNA, 12 nt, Molluscum contagiosum virus
cacuagcgcagg

SEQ ID NO: 4026815 - RNA, 17 nt, Molluscum contagiosum virus
cacucacaugugcugcc

SEQ ID NO: 4026816 - RNA, 19 nt, Molluscum contagiosum virus
cacucgauggacgccagcu

SEQ ID NO: 4026817 - RNA, 20 nt, Molluscum contagiosum virus
cacucgcgaacuacgagcgc

SEQ ID NO: 4026818 - RNA, 22 nt, Molluscum contagiosum virus
cacucgcgaacuacgagcgcac

SEQ ID NO: 4026819 - RNA, 19 nt, Molluscum contagiosum virus
cacucgcucucucagggug

SEQ ID NO: 4026820 - RNA, 20 nt, Molluscum contagiosum virus
cacucguggcaacaacauga

SEQ ID NO: 4026821 - RNA, 14 nt, Molluscum contagiosum virus
cacucucgcgcgug

SEQ ID NO: 4026822 - RNA, 13 nt, Molluscum contagiosum virus
cacugcagcagcc

SEQ ID NO: 4026823 - RNA, 18 nt, Molluscum contagiosum virus
cacugccacggcugcaag

SEQ ID NO: 4026824 - RNA, 13 nt, Molluscum contagiosum virus
cacugccugccgc

SEQ ID NO: 4026825 - RNA, 17 nt, Molluscum contagiosum virus
cacugccugccgccucg

SEQ ID NO: 4026826 - RNA, 18 nt, Molluscum contagiosum virus
cacugcggcaacgagcac

SEQ ID NO: 4026827 - RNA, 15 nt, Molluscum contagiosum virus
cacugugccagcagc

SEQ ID NO: 4026828 - RNA, 16 nt, Molluscum contagiosum virus
cacugugccagcagca

SEQ ID NO: 4026829 - RNA, 12 nt, Molluscum contagiosum virus
cacugugcuggc

SEQ ID NO: 4026830 - RNA, 13 nt, Molluscum contagiosum virus
cacugugcuggcg

SEQ ID NO: 4026831 - RNA, 18 nt, Molluscum contagiosum virus
cacuuccgugagcagucc

SEQ ID NO: 4026832 - RNA, 16 nt, Molluscum contagiosum virus
cacuugccgggcgacg

SEQ ID NO: 4026833 - RNA, 19 nt, Molluscum contagiosum virus
cacuugccgggcgacggcg

SEQ ID NO: 4026834 - RNA, 16 nt, Molluscum contagiosum virus
cagaaaacgcacuguc

SEQ ID NO: 4026835 - RNA, 14 nt, Molluscum contagiosum virus
cagaacguggucaa

SEQ ID NO: 4026836 - RNA, 15 nt, Molluscum contagiosum virus
cagaaucgcuuugcc

SEQ ID NO: 4026837 - RNA, 15 nt, Molluscum contagiosum virus
cagacaacaccagcg

SEQ ID NO: 4026838 - RNA, 19 nt, Molluscum contagiosum virus
cagacaacaccagcgugcc

SEQ ID NO: 4026839 - RNA, 22 nt, Molluscum contagiosum virus
cagacaugucguaccugguggc

SEQ ID NO: 4026840 - RNA, 12 nt, Molluscum contagiosum virus
cagaccaagaag

SEQ ID NO: 4026841 - RNA, 18 nt, Molluscum contagiosum virus
cagacccgaaagcugccc

SEQ ID NO: 4026842 - RNA, 16 nt, Molluscum contagiosum virus
cagacgcagagccaug

SEQ ID NO: 4026843 - RNA, 13 nt, Molluscum contagiosum virus
cagacgcgcgucc

SEQ ID NO: 4026844 - RNA, 23 nt, Molluscum contagiosum virus
cagacgcgcguccgcaggcguca

SEQ ID NO: 4026845 - RNA, 21 nt, Molluscum contagiosum virus
cagagaaaggcacccaccagg

SEQ ID NO: 4026846 - RNA, 21 nt, Molluscum contagiosum virus
cagagaaaucccaagagccau

SEQ ID NO: 4026847 - RNA, 22 nt, Molluscum contagiosum virus
cagagaccgucaaccugcugcc

SEQ ID NO: 4026848 - RNA, 16 nt, Molluscum contagiosum virus
cagagauccgcccgcg

SEQ ID NO: 4026849 - RNA, 14 nt, Molluscum contagiosum virus
cagagcaaggcgag

SEQ ID NO: 4026850 - RNA, 20 nt, Molluscum contagiosum virus
cagagcauuagcagcgagga

SEQ ID NO: 4026851 - RNA, 18 nt, Molluscum contagiosum virus
cagagcccgggagagugg

SEQ ID NO: 4026852 - RNA, 13 nt, Molluscum contagiosum virus
cagagccugcugc

SEQ ID NO: 4026853 - RNA, 16 nt, Molluscum contagiosum virus
cagagccugcugcucu

SEQ ID NO: 4026854 - RNA, 22 nt, Molluscum contagiosum virus
cagauaguuuggacgagcugcu

SEQ ID NO: 4026855 - RNA, 23 nt, Molluscum contagiosum virus
cagauaguuuggacgagcugcuu

SEQ ID NO: 4026856 - RNA, 14 nt, Molluscum contagiosum virus
cagaucgcgagagg

SEQ ID NO: 4026857 - RNA, 20 nt, Molluscum contagiosum virus
cagaucgcgagaggagacgg

SEQ ID NO: 4026858 - RNA, 19 nt, Molluscum contagiosum virus
cagcaaacugugcuccuga

SEQ ID NO: 4026859 - RNA, 23 nt, Molluscum contagiosum virus
cagcaaacugugcuccugaggaa

SEQ ID NO: 4026860 - RNA, 17 nt, Molluscum contagiosum virus
cagcaacugcacaggga

SEQ ID NO: 4026861 - RNA, 17 nt, Molluscum contagiosum virus
cagcacaggccccagca

SEQ ID NO: 4026862 - RNA, 19 nt, Molluscum contagiosum virus
cagcacaugcaggccgaga

SEQ ID NO: 4026863 - RNA, 13 nt, Molluscum contagiosum virus
cagcaccagguag

SEQ ID NO: 4026864 - RNA, 16 nt, Molluscum contagiosum virus
cagcaccgcgccgcga

SEQ ID NO: 4026865 - RNA, 16 nt, Molluscum contagiosum virus
cagcacgggcggaagc

SEQ ID NO: 4026866 - RNA, 12 nt, Molluscum contagiosum virus
cagcacugcgcc

SEQ ID NO: 4026867 - RNA, 12 nt, Molluscum contagiosum virus
cagcagccaggc

SEQ ID NO: 4026868 - RNA, 17 nt, Molluscum contagiosum virus
cagcagccaggcuaggc

SEQ ID NO: 4026869 - RNA, 19 nt, Molluscum contagiosum virus
cagcagccccgacgccagc

SEQ ID NO: 4026870 - RNA, 14 nt, Molluscum contagiosum virus
cagcagccgcagcc

SEQ ID NO: 4026871 - RNA, 23 nt, Molluscum contagiosum virus
cagcagccgcagcccacgugcca

SEQ ID NO: 4026872 - RNA, 22 nt, Molluscum contagiosum virus
cagcagccucguucacggcuag

SEQ ID NO: 4026873 - RNA, 14 nt, Molluscum contagiosum virus
cagcagcgagacca

SEQ ID NO: 4026874 - RNA, 14 nt, Molluscum contagiosum virus
cagcagcgccagcu

SEQ ID NO: 4026875 - RNA, 15 nt, Molluscum contagiosum virus
cagcagcgccagcuu

SEQ ID NO: 4026876 - RNA, 21 nt, Molluscum contagiosum virus
cagcagcgcgacuagccugug

SEQ ID NO: 4026877 - RNA, 17 nt, Molluscum contagiosum virus
cagcagcggcgcgugcu

SEQ ID NO: 4026878 - RNA, 16 nt, Molluscum contagiosum virus
cagcagcuccugguag

SEQ ID NO: 4026879 - RNA, 21 nt, Molluscum contagiosum virus
cagcaggagcacgccuggcgg

SEQ ID NO: 4026880 - RNA, 20 nt, Molluscum contagiosum virus
cagcaggugcacgugcugca

SEQ ID NO: 4026881 - RNA, 20 nt, Molluscum contagiosum virus
cagcagucaguuccgcggcg

SEQ ID NO: 4026882 - RNA, 15 nt, Molluscum contagiosum virus
cagcaguccgccguc

SEQ ID NO: 4026883 - RNA, 22 nt, Molluscum contagiosum virus
cagcauccuggaguuuaaugac

SEQ ID NO: 4026884 - RNA, 16 nt, Molluscum contagiosum virus
cagcaucgggcugucg

SEQ ID NO: 4026885 - RNA, 14 nt, Molluscum contagiosum virus
cagcaugcgugcaa

SEQ ID NO: 4026886 - RNA, 22 nt, Molluscum contagiosum virus
cagccacggccgcgcugguggc

SEQ ID NO: 4026887 - RNA, 15 nt, Molluscum contagiosum virus
cagccaggcgccggc

SEQ ID NO: 4026888 - RNA, 18 nt, Molluscum contagiosum virus
cagccaugaggacagcuu

SEQ ID NO: 4026889 - RNA, 13 nt, Molluscum contagiosum virus
cagccaugugucu

SEQ ID NO: 4026890 - RNA, 12 nt, Molluscum contagiosum virus
cagcccacgcug

SEQ ID NO: 4026891 - RNA, 14 nt, Molluscum contagiosum virus
cagcccccucuugg

SEQ ID NO: 4026892 - RNA, 21 nt, Molluscum contagiosum virus
cagcccgacuucucgcgcgac

SEQ ID NO: 4026893 - RNA, 14 nt, Molluscum contagiosum virus
cagcccugugcccg

SEQ ID NO: 4026894 - RNA, 12 nt, Molluscum contagiosum virus
agcguggagcug

SEQ ID NO: 4026895 - RNA, 20 nt, Molluscum contagiosum virus
agcgugguguucgccggcau

SEQ ID NO: 4026896 - RNA, 19 nt, Molluscum contagiosum virus
agcgugucagcagcgcgag

SEQ ID NO: 4026897 - RNA, 16 nt, Molluscum contagiosum virus
agcguuucugccggag

SEQ ID NO: 4026898 - RNA, 15 nt, Molluscum contagiosum virus
agcuaaaagagcugc

SEQ ID NO: 4026899 - RNA, 15 nt, Molluscum contagiosum virus
agcuagacuggagca

SEQ ID NO: 4026900 - RNA, 12 nt, Molluscum contagiosum virus
agcuagcucugc

SEQ ID NO: 4026901 - RNA, 13 nt, Molluscum contagiosum virus
agcucagcaggcu

SEQ ID NO: 4026902 - RNA, 12 nt, Molluscum contagiosum virus
agcucagccucu

SEQ ID NO: 4026903 - RNA, 22 nt, Molluscum contagiosum virus
agcuccagcauagaacacagcu

SEQ ID NO: 4026904 - RNA, 21 nt, Molluscum contagiosum virus
agcuccgcgacgaacucgaca

SEQ ID NO: 4026905 - RNA, 14 nt, Molluscum contagiosum virus
agcuccggcugcuc

SEQ ID NO: 4026906 - RNA, 17 nt, Molluscum contagiosum virus
agcucgccaaagcgcgc

SEQ ID NO: 4026907 - RNA, 22 nt, Molluscum contagiosum virus
agcucgccaaagcgcgccuucc

SEQ ID NO: 4026908 - RNA, 18 nt, Molluscum contagiosum virus
agcucgccaugugcgaag

SEQ ID NO: 4026909 - RNA, 22 nt, Molluscum contagiosum virus
agcucgugccugucggcacauc

SEQ ID NO: 4026910 - RNA, 20 nt, Molluscum contagiosum virus
agcucugcgcaaccuggauu

SEQ ID NO: 4026911 - RNA, 14 nt, Molluscum contagiosum virus
agcucuucgacagc

SEQ ID NO: 4026912 - RNA, 16 nt, Molluscum contagiosum virus
agcucuucguggccaa

SEQ ID NO: 4026913 - RNA, 16 nt, Molluscum contagiosum virus
agcugcaaacauugcc

SEQ ID NO: 4026914 - RNA, 16 nt, Molluscum contagiosum virus
agcugcaccggcgcga

SEQ ID NO: 4026915 - RNA, 14 nt, Molluscum contagiosum virus
agcugcacgugcag

SEQ ID NO: 4026916 - RNA, 15 nt, Molluscum contagiosum virus
agcugcagagcgugc

SEQ ID NO: 4026917 - RNA, 20 nt, Molluscum contagiosum virus
agcugcagagcgugcugguc

SEQ ID NO: 4026918 - RNA, 18 nt, Molluscum contagiosum virus
agcugcaggaccugcugg

SEQ ID NO: 4026919 - RNA, 14 nt, Molluscum contagiosum virus
agcugcgccugcag

SEQ ID NO: 4026920 - RNA, 23 nt, Molluscum contagiosum virus
agcugcucaucggcgagcucuuu

SEQ ID NO: 4026921 - RNA, 14 nt, Molluscum contagiosum virus
agcugcugcgcgag

SEQ ID NO: 4026922 - RNA, 13 nt, Molluscum contagiosum virus
agcugcugcgcua

SEQ ID NO: 4026923 - RNA, 22 nt, Molluscum contagiosum virus
agcugggcucggaguccgcgcc

SEQ ID NO: 4026924 - RNA, 17 nt, Molluscum contagiosum virus
agcugguagagaacgac

SEQ ID NO: 4026925 - RNA, 21 nt, Molluscum contagiosum virus
agcuguagcaggaucggagcg

SEQ ID NO: 4026926 - RNA, 17 nt, Molluscum contagiosum virus
agcugucgcgcagcagc

SEQ ID NO: 4026927 - RNA, 15 nt, Molluscum contagiosum virus
agcugugcaagagcu

SEQ ID NO: 4026928 - RNA, 13 nt, Molluscum contagiosum virus
agcugugccgcag

SEQ ID NO: 4026929 - RNA, 18 nt, Molluscum contagiosum virus
agcuucaucaagcacggc

SEQ ID NO: 4026930 - RNA, 15 nt, Molluscum contagiosum virus
agcuucgcgagcccg

SEQ ID NO: 4026931 - RNA, 12 nt, Molluscum contagiosum virus
agcuuucagagu

SEQ ID NO: 4026932 - RNA, 23 nt, Molluscum contagiosum virus
agcuuugugcgaccugcugcgag

SEQ ID NO: 4026933 - RNA, 13 nt, Molluscum contagiosum virus
aggaaacgcagca

SEQ ID NO: 4026934 - RNA, 15 nt, Molluscum contagiosum virus
aggaaaggcacccac

SEQ ID NO: 4026935 - RNA, 22 nt, Molluscum contagiosum virus
aggaaaggccccccgcaacaag

SEQ ID NO: 4026936 - RNA, 13 nt, Molluscum contagiosum virus
aggaacaaggcca

SEQ ID NO: 4026937 - RNA, 20 nt, Molluscum contagiosum virus
aggaacucuacgacaugcuc

SEQ ID NO: 4026938 - RNA, 22 nt, Molluscum contagiosum virus
aggaacugcccgcgucgcgcac

SEQ ID NO: 4026939 - RNA, 16 nt, Molluscum contagiosum virus
aggacacgcgcacgcg

SEQ ID NO: 4026940 - RNA, 21 nt, Molluscum contagiosum virus
aggacgacgacacagcccugg

SEQ ID NO: 4026941 - RNA, 14 nt, Molluscum contagiosum virus
aggacuaccagcuc

SEQ ID NO: 4026942 - RNA, 19 nt, Molluscum contagiosum virus
aggagagagagacaugcac

SEQ ID NO: 4026943 - RNA, 17 nt, Molluscum contagiosum virus
aggagagcggcgccccu

SEQ ID NO: 4026944 - RNA, 21 nt, Molluscum contagiosum virus
aggagauggaacugcagcagc

SEQ ID NO: 4026945 - RNA, 12 nt, Molluscum contagiosum virus
aggagcccuugc

SEQ ID NO: 4026946 - RNA, 19 nt, Molluscum contagiosum virus
aggagcuccgugcugcggc

SEQ ID NO: 4026947 - RNA, 23 nt, Molluscum contagiosum virus
aggaguccgugacagagugccug

SEQ ID NO: 4026948 - RNA, 14 nt, Molluscum contagiosum virus
aggauacgcccgcg

SEQ ID NO: 4026949 - RNA, 21 nt, Molluscum contagiosum virus
aggaucggagcgcagcugccg

SEQ ID NO: 4026950 - RNA, 18 nt, Molluscum contagiosum virus
aggcaaagccugcugcgc

SEQ ID NO: 4026951 - RNA, 14 nt, Molluscum contagiosum virus
aggcaaagcggggc

SEQ ID NO: 4026952 - RNA, 22 nt, Molluscum contagiosum virus
aggcacccaccaggaacaggga

SEQ ID NO: 4026953 - RNA, 19 nt, Molluscum contagiosum virus
aggcaccccgaaaggcacc

SEQ ID NO: 4026954 - RNA, 12 nt, Molluscum contagiosum virus
aggcaccugcag

SEQ ID NO: 4026955 - RNA, 22 nt, Molluscum contagiosum virus
aggcaccugcaggaaaggcacc

SEQ ID NO: 4026956 - RNA, 15 nt, Molluscum contagiosum virus
aggcacgaggcagcc

SEQ ID NO: 4026957 - RNA, 20 nt, Molluscum contagiosum virus
aggcagccgcggcgcccggu

SEQ ID NO: 4026958 - RNA, 13 nt, Molluscum contagiosum virus
aggcaggagccuc

SEQ ID NO: 4026959 - RNA, 21 nt, Molluscum contagiosum virus
aggcaggccccgcaccagugc

SEQ ID NO: 4026960 - RNA, 15 nt, Molluscum contagiosum virus
aggcagugcuugagc

SEQ ID NO: 4026961 - RNA, 14 nt, Molluscum contagiosum virus
aggccagcacaagc

SEQ ID NO: 4026962 - RNA, 13 nt, Molluscum contagiosum virus
aggccauggagcg

SEQ ID NO: 4026963 - RNA, 19 nt, Molluscum contagiosum virus
aggccgagaugagcggcgc

SEQ ID NO: 4026964 - RNA, 17 nt, Molluscum contagiosum virus
aggccgcgcccaagaag

SEQ ID NO: 4026965 - RNA, 17 nt, Molluscum contagiosum virus
aggccuacgugcugcgc

SEQ ID NO: 4026966 - RNA, 16 nt, Molluscum contagiosum virus
aggccuccuucccuga

SEQ ID NO: 4026967 - RNA, 22 nt, Molluscum contagiosum virus
aggccuggccuucuaccacagg

SEQ ID NO: 4026968 - RNA, 17 nt, Molluscum contagiosum virus
aggccuucgcgcccgac

SEQ ID NO: 4026969 - RNA, 15 nt, Molluscum contagiosum virus
aggcgcagcgcggcc

SEQ ID NO: 4026970 - RNA, 24 nt, Molluscum contagiosum virus
aggcgcgccauggcgagcuagugc

SEQ ID NO: 4026971 - RNA, 20 nt, Molluscum contagiosum virus
aggcgcgcucuacgagacuc

SEQ ID NO: 4026972 - RNA, 18 nt, Molluscum contagiosum virus
aggcgcggcagccgcaga

SEQ ID NO: 4026973 - RNA, 22 nt, Molluscum contagiosum virus
aggcgcggucgcccgccgagcu

SEQ ID NO: 4026974 - RNA, 18 nt, Molluscum contagiosum virus
aggcgcuugggcacugcu

SEQ ID NO: 4026975 - RNA, 13 nt, Molluscum contagiosum virus
aggcggccguguc

SEQ ID NO: 4026976 - RNA, 16 nt, Molluscum contagiosum virus
aggcguccugcgggag

SEQ ID NO: 4026977 - RNA, 14 nt, Molluscum contagiosum virus
aggcucgagcgcgc

SEQ ID NO: 4026978 - RNA, 21 nt, Molluscum contagiosum virus
aggcucgagcgcgcgccugcu

SEQ ID NO: 4026979 - RNA, 19 nt, Molluscum contagiosum virus
aggcuucgaggugcgcgag

SEQ ID NO: 4026980 - RNA, 13 nt, Molluscum contagiosum virus
agggcagccucaa

SEQ ID NO: 4026981 - RNA, 15 nt, Molluscum contagiosum virus
agggcgcgcgucgag

SEQ ID NO: 4026982 - RNA, 23 nt, Molluscum contagiosum virus
agggcguccguaagucgaagagg

SEQ ID NO: 4026983 - RNA, 16 nt, Molluscum contagiosum virus
aggggcaagcucgcgc

SEQ ID NO: 4026984 - RNA, 14 nt, Molluscum contagiosum virus
agggguccgcgucu

SEQ ID NO: 4026985 - RNA, 15 nt, Molluscum contagiosum virus
agggucacgcgcaca

SEQ ID NO: 4026986 - RNA, 16 nt, Molluscum contagiosum virus
agggugccgaggcgcu

SEQ ID NO: 4026987 - RNA, 13 nt, Molluscum contagiosum virus
aggguggcuugcu

SEQ ID NO: 4026988 - RNA, 13 nt, Molluscum contagiosum virus
aggguguggccua

SEQ ID NO: 4026989 - RNA, 20 nt, Molluscum contagiosum virus
agguagugguccaccagcug

SEQ ID NO: 4026990 - RNA, 16 nt, Molluscum contagiosum virus
aggucacgacgagcga

SEQ ID NO: 4026991 - RNA, 16 nt, Molluscum contagiosum virus
aggucaucaccagccu

SEQ ID NO: 4026992 - RNA, 22 nt, Molluscum contagiosum virus
aggucaucaccagccugcucac

SEQ ID NO: 4026993 - RNA, 18 nt, Molluscum contagiosum virus
aggucgagcgcgccgcgc

SEQ ID NO: 4026994 - RNA, 16 nt, Molluscum contagiosum virus
aggucuuccacaugcc

SEQ ID NO: 4026995 - RNA, 15 nt, Molluscum contagiosum virus
aggugcugcgccacg

SEQ ID NO: 4026996 - RNA, 13 nt, Molluscum contagiosum virus
aggugcugggcga

SEQ ID NO: 4026997 - RNA, 16 nt, Molluscum contagiosum virus
agguggcacccuggcu

SEQ ID NO: 4026998 - RNA, 16 nt, Molluscum contagiosum virus
gaugcucaagcacugc

SEQ ID NO: 4026999 - RNA, 21 nt, Molluscum contagiosum virus
gaugcuggacgggcacgagca

SEQ ID NO: 4027000 - RNA, 17 nt, Molluscum contagiosum virus
gauggaaggcgaccagc

SEQ ID NO: 4027001 - RNA, 16 nt, Molluscum contagiosum virus
gauggacgccagcuug

SEQ ID NO: 4027002 - RNA, 22 nt, Molluscum contagiosum virus
gauggaggcccaggccauggag

SEQ ID NO: 4027003 - RNA, 23 nt, Molluscum contagiosum virus
gauggcaagucucgcuuccggga

SEQ ID NO: 4027004 - RNA, 14 nt, Molluscum contagiosum virus
gauggcgcagcucc

SEQ ID NO: 4027005 - RNA, 23 nt, Molluscum contagiosum virus
gauggcgccugcuucgcgccgcc

SEQ ID NO: 4027006 - RNA, 16 nt, Molluscum contagiosum virus
gaugggcuccagguuc

SEQ ID NO: 4027007 - RNA, 19 nt, Molluscum contagiosum virus
gauggucacgcgcaaggcc

SEQ ID NO: 4027008 - RNA, 17 nt, Molluscum contagiosum virus
gauggucucgcugcugg

SEQ ID NO: 4027009 - RNA, 15 nt, Molluscum contagiosum virus
gaugugacaacaugu

SEQ ID NO: 4027010 - RNA, 18 nt, Molluscum contagiosum virus
gauuacaucgaaaccauc

SEQ ID NO: 4027011 - RNA, 19 nt, Molluscum contagiosum virus
gcaaacauguagcgcgcgc

SEQ ID NO: 4027012 - RNA, 15 nt, Molluscum contagiosum virus
gcaaacgcacgcgcg

SEQ ID NO: 4027013 - RNA, 18 nt, Molluscum contagiosum virus
gcaaagacggacccgcga

SEQ ID NO: 4027014 - RNA, 19 nt, Molluscum contagiosum virus
gcaaaugccgagcgcacgc

SEQ ID NO: 4027015 - RNA, 20 nt, Molluscum contagiosum virus
gcaaauuccguccccucucc

SEQ ID NO: 4027016 - RNA, 14 nt, Molluscum contagiosum virus
gcaaccagcuggcg

SEQ ID NO: 4027017 - RNA, 11 nt, Molluscum contagiosum virus
gcaaccccgcg

SEQ ID NO: 4027018 - RNA, 16 nt, Molluscum contagiosum virus
gcaaccccgcgcugcg

SEQ ID NO: 4027019 - RNA, 21 nt, Molluscum contagiosum virus
gcaaccucacucacaugugcu

SEQ ID NO: 4027020 - RNA, 22 nt, Molluscum contagiosum virus
gcaacgcaaacgcacgcgcgcg

SEQ ID NO: 4027021 - RNA, 15 nt, Molluscum contagiosum virus
gcaacgucgcacugg

SEQ ID NO: 4027022 - RNA, 22 nt, Molluscum contagiosum virus
gcaacguugcgcguucagcgca

SEQ ID NO: 4027023 - RNA, 14 nt, Molluscum contagiosum virus
gcaacucgcgcugc

SEQ ID NO: 4027024 - RNA, 21 nt, Molluscum contagiosum virus
gcaagaccaucaucgcgcugc

SEQ ID NO: 4027025 - RNA, 20 nt, Molluscum contagiosum virus
gcaagagccgccggggccca

SEQ ID NO: 4027026 - RNA, 19 nt, Molluscum contagiosum virus
gcaagauucuucgcgaagg

SEQ ID NO: 4027027 - RNA, 13 nt, Molluscum contagiosum virus
gcaagcauggucu

SEQ ID NO: 4027028 - RNA, 14 nt, Molluscum contagiosum virus
gcaagcgcccgcga

SEQ ID NO: 4027029 - RNA, 14 nt, Molluscum contagiosum virus
gcaagcgcgcucgg

SEQ ID NO: 4027030 - RNA, 22 nt, Molluscum contagiosum virus
gcaagcgcuacuugcuggcgcg

SEQ ID NO: 4027031 - RNA, 14 nt, Molluscum contagiosum virus
gcaagcguacgcgu

SEQ ID NO: 4027032 - RNA, 16 nt, Molluscum contagiosum virus
gcaagcuucgggccgc

SEQ ID NO: 4027033 - RNA, 24 nt, Molluscum contagiosum virus
gcaagcuucgggccgcugccgucg

SEQ ID NO: 4027034 - RNA, 14 nt, Molluscum contagiosum virus
gcaaggaagcaaca

SEQ ID NO: 4027035 - RNA, 16 nt, Molluscum contagiosum virus
gcaagugcacaccaga

SEQ ID NO: 4027036 - RNA, 16 nt, Molluscum contagiosum virus
cuaccgcgcgcgcaag

SEQ ID NO: 4027037 - RNA, 14 nt, Molluscum contagiosum virus
cuaccgcgcgggag

SEQ ID NO: 4027038 - RNA, 16 nt, Molluscum contagiosum virus
cuaccugaagcuggac

SEQ ID NO: 4027039 - RNA, 17 nt, Molluscum contagiosum virus
cuacgagacucuggaag

SEQ ID NO: 4027040 - RNA, 12 nt, Molluscum contagiosum virus
cuacgaggugcu

SEQ ID NO: 4027041 - RNA, 19 nt, Molluscum contagiosum virus
cuacgaggugcugcgccac

SEQ ID NO: 4027042 - RNA, 16 nt, Molluscum contagiosum virus
cuacgaguucugcauc

SEQ ID NO: 4027043 - RNA, 21 nt, Molluscum contagiosum virus
cuacggcgugcugugccugcg

SEQ ID NO: 4027044 - RNA, 15 nt, Molluscum contagiosum virus
cuacgucaagcaggc

SEQ ID NO: 4027045 - RNA, 12 nt, Molluscum contagiosum virus
cuacgucuccuc

SEQ ID NO: 4027046 - RNA, 15 nt, Molluscum contagiosum virus
cuacguuccgcgcgg

SEQ ID NO: 4027047 - RNA, 13 nt, Molluscum contagiosum virus
cuacuccuggcca

SEQ ID NO: 4027048 - RNA, 23 nt, Molluscum contagiosum virus
cuacuggccgcgauucugcucuu

SEQ ID NO: 4027049 - RNA, 19 nt, Molluscum contagiosum virus
cuacuucgaggccggcaag

SEQ ID NO: 4027050 - RNA, 13 nt, Molluscum contagiosum virus
cuagcacgggcgg

SEQ ID NO: 4027051 - RNA, 14 nt, Molluscum contagiosum virus
cuagccgccgcugc

SEQ ID NO: 4027052 - RNA, 16 nt, Molluscum contagiosum virus
cuagccgugcgcgcac

SEQ ID NO: 4027053 - RNA, 15 nt, Molluscum contagiosum virus
cuagcgcuggcugca

SEQ ID NO: 4027054 - RNA, 22 nt, Molluscum contagiosum virus
cuagcugugcgcuacguggcgc

SEQ ID NO: 4027055 - RNA, 22 nt, Molluscum contagiosum virus
cuaggacuagcauuccuucaca

SEQ ID NO: 4027056 - RNA, 12 nt, Molluscum contagiosum virus
cuaggcgcggcg

SEQ ID NO: 4027057 - RNA, 22 nt, Molluscum contagiosum virus
cuaugagcggcacgggaaggcu

SEQ ID NO: 4027058 - RNA, 15 nt, Molluscum contagiosum virus
cuaugcccagccuga

SEQ ID NO: 4027059 - RNA, 19 nt, Molluscum contagiosum virus
cuauguucuucgcagagga

SEQ ID NO: 4027060 - RNA, 18 nt, Molluscum contagiosum virus
cucaacgcgauggcgcag

SEQ ID NO: 4027061 - RNA, 19 nt, Molluscum contagiosum virus
cucaacgugggcaccugca

SEQ ID NO: 4027062 - RNA, 16 nt, Molluscum contagiosum virus
cucaagcaccugcgcu

SEQ ID NO: 4027063 - RNA, 15 nt, Molluscum contagiosum virus
cucaagcacugccuc

SEQ ID NO: 4027064 - RNA, 16 nt, Molluscum contagiosum virus
cucaagcacugccuca

SEQ ID NO: 4027065 - RNA, 14 nt, Molluscum contagiosum virus
cucaagcuggcaac

SEQ ID NO: 4027066 - RNA, 16 nt, Molluscum contagiosum virus
cucacaccuagagcac

SEQ ID NO: 4027067 - RNA, 16 nt, Molluscum contagiosum virus
cucacaugugcugccg

SEQ ID NO: 4027068 - RNA, 13 nt, Molluscum contagiosum virus
cucaccgcgcaca

SEQ ID NO: 4027069 - RNA, 17 nt, Molluscum contagiosum virus
cucacgcccucucgagg

SEQ ID NO: 4027070 - RNA, 16 nt, Molluscum contagiosum virus
cucacgcgcuaccgca

SEQ ID NO: 4027071 - RNA, 12 nt, Molluscum contagiosum virus
cucacgcuguuu

SEQ ID NO: 4027072 - RNA, 20 nt, Molluscum contagiosum virus
cucacggcgagcgcgcccuu

SEQ ID NO: 4027073 - RNA, 19 nt, Molluscum contagiosum virus
cucagccucuacuccacua

SEQ ID NO: 4027074 - RNA, 17 nt, Molluscum contagiosum virus
cagcaggaugcuggugu

SEQ ID NO: 4027075 - RNA, 22 nt, Molluscum contagiosum virus
cagcaggcacgacgccgacacc

SEQ ID NO: 4027076 - RNA, 23 nt, Molluscum contagiosum virus
cagcaggcacuccagcgcgcccu

SEQ ID NO: 4027077 - RNA, 22 nt, Molluscum contagiosum virus
cagcaggugcacgugcugcagc

SEQ ID NO: 4027078 - RNA, 21 nt, Molluscum contagiosum virus
cagcagguucgugcgcaugaa

SEQ ID NO: 4027079 - RNA, 17 nt, Molluscum contagiosum virus
cagcagugccagcagcc

SEQ ID NO: 4027080 - RNA, 16 nt, Molluscum contagiosum virus
cagcauguugcucuac

SEQ ID NO: 4027081 - RNA, 20 nt, Molluscum contagiosum virus
cagcauuagcgccaaggcgc

SEQ ID NO: 4027082 - RNA, 17 nt, Molluscum contagiosum virus
cagcauucccggcgcgc

SEQ ID NO: 4027083 - RNA, 18 nt, Molluscum contagiosum virus
cagccaucgugcgcgacu

SEQ ID NO: 4027084 - RNA, 14 nt, Molluscum contagiosum virus
cagccaugaggaca

SEQ ID NO: 4027085 - RNA, 20 nt, Molluscum contagiosum virus
cagccccgcgccagcagucc

SEQ ID NO: 4027086 - RNA, 13 nt, Molluscum contagiosum virus
cagccccugcugc

SEQ ID NO: 4027087 - RNA, 14 nt, Molluscum contagiosum virus
cagcccgcggugcg

SEQ ID NO: 4027088 - RNA, 18 nt, Molluscum contagiosum virus
cagccgagcgccgccagc

SEQ ID NO: 4027089 - RNA, 15 nt, Molluscum contagiosum virus
cagccgcacggcgcc

SEQ ID NO: 4027090 - RNA, 20 nt, Molluscum contagiosum virus
cagccgcacggcgcccagga

SEQ ID NO: 4027091 - RNA, 20 nt, Molluscum contagiosum virus
cagccgcaguaccaguaccu

SEQ ID NO: 4027092 - RNA, 14 nt, Molluscum contagiosum virus
cagccgcgagcgcg

SEQ ID NO: 4027093 - RNA, 13 nt, Molluscum contagiosum virus
cagccgcugcgcc

SEQ ID NO: 4027094 - RNA, 21 nt, Molluscum contagiosum virus
cagccgcugcgccgccagcgu

SEQ ID NO: 4027095 - RNA, 20 nt, Molluscum contagiosum virus
cagccgucgccgcgcccgcg

SEQ ID NO: 4027096 - RNA, 20 nt, Molluscum contagiosum virus
cagccgugagcucccgcgcc

SEQ ID NO: 4027097 - RNA, 15 nt, Molluscum contagiosum virus
cagccguggagucca

SEQ ID NO: 4027098 - RNA, 17 nt, Molluscum contagiosum virus
cagccugacggcagcaa

SEQ ID NO: 4027099 - RNA, 19 nt, Molluscum contagiosum virus
cagccugcucacgcccgag

SEQ ID NO: 4027100 - RNA, 16 nt, Molluscum contagiosum virus
cagccugcuggcaccg

SEQ ID NO: 4027101 - RNA, 18 nt, Molluscum contagiosum virus
cagccugcuggcaccgcg

SEQ ID NO: 4027102 - RNA, 20 nt, Molluscum contagiosum virus
cagcgacgagcagcugcuuc

SEQ ID NO: 4027103 - RNA, 16 nt, Molluscum contagiosum virus
cagcgccagccugcug

SEQ ID NO: 4027104 - RNA, 15 nt, Molluscum contagiosum virus
cagcgccugcuugcg

SEQ ID NO: 4027105 - RNA, 16 nt, Molluscum contagiosum virus
cagcgcgaaccauuuu

SEQ ID NO: 4027106 - RNA, 14 nt, Molluscum contagiosum virus
cagcgcgcagaagc

SEQ ID NO: 4027107 - RNA, 21 nt, Molluscum contagiosum virus
cagcgcgcggagaucgccgcg

SEQ ID NO: 4027108 - RNA, 12 nt, Molluscum contagiosum virus
cagcgcgcggcg

SEQ ID NO: 4027109 - RNA, 22 nt, Molluscum contagiosum virus
cagcgcuugcgcgccaacuccu

SEQ ID NO: 4027110 - RNA, 21 nt, Molluscum contagiosum virus
cagcggacguggucgcgcgcg

SEQ ID NO: 4027111 - RNA, 23 nt, Molluscum contagiosum virus
cagcggacguggucgcgcgcgcu

SEQ ID NO: 4027112 - RNA, 15 nt, Molluscum contagiosum virus
cagcggaugcagaac

SEQ ID NO: 4027113 - RNA, 19 nt, Molluscum contagiosum virus
cagcggcaaaggcccgcga

SEQ ID NO: 4027114 - RNA, 18 nt, Molluscum contagiosum virus
cagcggcugcccgcggag

SEQ ID NO: 4027115 - RNA, 20 nt, Molluscum contagiosum virus
cagcgguggucuccgcgggc

SEQ ID NO: 4027116 - RNA, 24 nt, Molluscum contagiosum virus
cagcguagcggacgaagcugugca

SEQ ID NO: 4027117 - RNA, 16 nt, Molluscum contagiosum virus
cagcgugguguucgcc

SEQ ID NO: 4027118 - RNA, 23 nt, Molluscum contagiosum virus
cagcguguugcuguuccacauca

SEQ ID NO: 4027119 - RNA, 14 nt, Molluscum contagiosum virus
cagcguuccaggaa

SEQ ID NO: 4027120 - RNA, 16 nt, Molluscum contagiosum virus
cagcuacugcgugcga

SEQ ID NO: 4027121 - RNA, 19 nt, Molluscum contagiosum virus
cagcuaggauccugcucaa

SEQ ID NO: 4027122 - RNA, 18 nt, Molluscum contagiosum virus
cagcucaagacgcugcug

SEQ ID NO: 4027123 - RNA, 15 nt, Molluscum contagiosum virus
cagcucaagcugcuc

SEQ ID NO: 4027124 - RNA, 21 nt, Molluscum contagiosum virus
cagcucacgagauggcugcuc

SEQ ID NO: 4027125 - RNA, 20 nt, Molluscum contagiosum virus
cagcucauagcccaugcgca

SEQ ID NO: 4027126 - RNA, 17 nt, Molluscum contagiosum virus
cagcuccagcauggcgc

SEQ ID NO: 4027127 - RNA, 14 nt, Molluscum contagiosum virus
cagcuccgccggga

SEQ ID NO: 4027128 - RNA, 19 nt, Molluscum contagiosum virus
cagcuccuagcgcgcgugu

SEQ ID NO: 4027129 - RNA, 18 nt, Molluscum contagiosum virus
cagcucgcgccgccgcgc

SEQ ID NO: 4027130 - RNA, 20 nt, Molluscum contagiosum virus
cagcucggcgagagcgcgca

SEQ ID NO: 4027131 - RNA, 21 nt, Molluscum contagiosum virus
cagcucggcgagagcgcgcag

SEQ ID NO: 4027132 - RNA, 22 nt, Molluscum contagiosum virus
cagcucggguuccagcuccggc

SEQ ID NO: 4027133 - RNA, 23 nt, Molluscum contagiosum virus
cagcugcaggaccugcugguggu

SEQ ID NO: 4027134 - RNA, 16 nt, Molluscum contagiosum virus
cagcuggcgcgcgccg

SEQ ID NO: 4027135 - RNA, 13 nt, Molluscum contagiosum virus
cagcuguuucugc

SEQ ID NO: 4027136 - RNA, 23 nt, Molluscum contagiosum virus
cagcuugguaaugagcagcacgc

SEQ ID NO: 4027137 - RNA, 18 nt, Molluscum contagiosum virus
caggaaaggcacccgcaa

SEQ ID NO: 4027138 - RNA, 13 nt, Molluscum contagiosum virus
caggaacagggaa

SEQ ID NO: 4027139 - RNA, 15 nt, Molluscum contagiosum virus
caggaacaucugcaa

SEQ ID NO: 4027140 - RNA, 17 nt, Molluscum contagiosum virus
caggaagcuggcgcggu

SEQ ID NO: 4027141 - RNA, 17 nt, Molluscum contagiosum virus
caggaccgucaccgcag

SEQ ID NO: 4027142 - RNA, 14 nt, Molluscum contagiosum virus
caggaccugcuggu

SEQ ID NO: 4027143 - RNA, 18 nt, Molluscum contagiosum virus
caggaccuuaacgccguc

SEQ ID NO: 4027144 - RNA, 14 nt, Molluscum contagiosum virus
caggacuggcaccu

SEQ ID NO: 4027145 - RNA, 18 nt, Molluscum contagiosum virus
caggaguccgugacagag

SEQ ID NO: 4027146 - RNA, 15 nt, Molluscum contagiosum virus
caggaugcugguguc

SEQ ID NO: 4027147 - RNA, 19 nt, Molluscum contagiosum virus
caggcaagaggggagccag

SEQ ID NO: 4027148 - RNA, 19 nt, Molluscum contagiosum virus
caggcacuccagcgcgccc

SEQ ID NO: 4027149 - RNA, 17 nt, Molluscum contagiosum virus
caggcacuggcccugcu

SEQ ID NO: 4027150 - RNA, 17 nt, Molluscum contagiosum virus
caggcauggcauggcgc

SEQ ID NO: 4027151 - RNA, 13 nt, Molluscum contagiosum virus
caggccgcggcag

SEQ ID NO: 4027152 - RNA, 14 nt, Molluscum contagiosum virus
caggccgcggcagc

SEQ ID NO: 4027153 - RNA, 19 nt, Molluscum contagiosum virus
caggcgauaggacaugacu

SEQ ID NO: 4027154 - RNA, 17 nt, Molluscum contagiosum virus
caggcgcgcaagugcgu

SEQ ID NO: 4027155 - RNA, 22 nt, Molluscum contagiosum virus
caggcggucuuccagcacugcg

SEQ ID NO: 4027156 - RNA, 19 nt, Molluscum contagiosum virus
caggcggugggcgccgcgg

SEQ ID NO: 4027157 - RNA, 22 nt, Molluscum contagiosum virus
caggcggugggcgccgcggccu

SEQ ID NO: 4027158 - RNA, 20 nt, Molluscum contagiosum virus
caggcucuaagcgcacgcgc

SEQ ID NO: 4027159 - RNA, 15 nt, Molluscum contagiosum virus
cagggaaagagcacg

SEQ ID NO: 4027160 - RNA, 20 nt, Molluscum contagiosum virus
cagggaaaugcgggaggcuc

SEQ ID NO: 4027161 - RNA, 18 nt, Molluscum contagiosum virus
cagggagcugcggacgcg

SEQ ID NO: 4027162 - RNA, 22 nt, Molluscum contagiosum virus
cagggcacgaucgcgagacccc

SEQ ID NO: 4027163 - RNA, 20 nt, Molluscum contagiosum virus
cagguagcgcgccgcaaagc

SEQ ID NO: 4027164 - RNA, 23 nt, Molluscum contagiosum virus
caggucaacuccgagcgcgcgcg

SEQ ID NO: 4027165 - RNA, 16 nt, Molluscum contagiosum virus
caggucuucaacgagg

SEQ ID NO: 4027166 - RNA, 17 nt, Molluscum contagiosum virus
cagguggccgcgcgcgc

SEQ ID NO: 4027167 - RNA, 17 nt, Molluscum contagiosum virus
caguaaauagccaugcu

SEQ ID NO: 4027168 - RNA, 20 nt, Molluscum contagiosum virus
caguaccgugucaaacugcu

SEQ ID NO: 4027169 - RNA, 12 nt, Molluscum contagiosum virus
cagucagcggcg

SEQ ID NO: 4027170 - RNA, 13 nt, Molluscum contagiosum virus
cagucccagcacc

SEQ ID NO: 4027171 - RNA, 15 nt, Molluscum contagiosum virus
caguccgagcuguuc

SEQ ID NO: 4027172 - RNA, 18 nt, Molluscum contagiosum virus
cagucgcaguacccgagc

SEQ ID NO: 4027173 - RNA, 17 nt, Molluscum contagiosum virus
cagucucgcgcuuccag

SEQ ID NO: 4027174 - RNA, 14 nt, Molluscum contagiosum virus
cagugccgcucgcu

SEQ ID NO: 4027175 - RNA, 16 nt, Molluscum contagiosum virus
cagugccgcucgcugu

SEQ ID NO: 4027176 - RNA, 21 nt, Molluscum contagiosum virus
cccgcgaaggagagagagaca

SEQ ID NO: 4027177 - RNA, 21 nt, Molluscum contagiosum virus
cccgcgcaagagccgccgggg

SEQ ID NO: 4027178 - RNA, 14 nt, Molluscum contagiosum virus
cccgcgcacgagcu

SEQ ID NO: 4027179 - RNA, 19 nt, Molluscum contagiosum virus
cccgcgcgcgagcuggagc

SEQ ID NO: 4027180 - RNA, 15 nt, Molluscum contagiosum virus
cccgcgcgcgugccg

SEQ ID NO: 4027181 - RNA, 18 nt, Molluscum contagiosum virus
cccgcgcggcucgcgcac

SEQ ID NO: 4027182 - RNA, 16 nt, Molluscum contagiosum virus
cccgcgcucgccgcac

SEQ ID NO: 4027183 - RNA, 17 nt, Molluscum contagiosum virus
cccgcggaagugcgagc

SEQ ID NO: 4027184 - RNA, 18 nt, Molluscum contagiosum virus
cccgcggaagugcgagcc

SEQ ID NO: 4027185 - RNA, 20 nt, Molluscum contagiosum virus
cccgcggagaccaccgcugg

SEQ ID NO: 4027186 - RNA, 13 nt, Molluscum contagiosum virus
cccgcggcgcacg

SEQ ID NO: 4027187 - RNA, 21 nt, Molluscum contagiosum virus
cccgcggcgcgcagcucgccg

SEQ ID NO: 4027188 - RNA, 17 nt, Molluscum contagiosum virus
cccgcggcgugcccguc

SEQ ID NO: 4027189 - RNA, 20 nt, Molluscum contagiosum virus
cccgcggcuaccacgggccc

SEQ ID NO: 4027190 - RNA, 23 nt, Molluscum contagiosum virus
cccgcguccgugcgcagggcaau

SEQ ID NO: 4027191 - RNA, 16 nt, Molluscum contagiosum virus
cccgcgucgcgcgccg

SEQ ID NO: 4027192 - RNA, 17 nt, Molluscum contagiosum virus
cccggcacgugccccgc

SEQ ID NO: 4027193 - RNA, 22 nt, Molluscum contagiosum virus
cccggcgaacaccccgagcugg

SEQ ID NO: 4027194 - RNA, 21 nt, Molluscum contagiosum virus
cccgugccgccggcgccgcua

SEQ ID NO: 4027195 - RNA, 22 nt, Molluscum contagiosum virus
cccguggccgagccgcuggccg

SEQ ID NO: 4027196 - RNA, 14 nt, Molluscum contagiosum virus
cccguggcgcgccg

SEQ ID NO: 4027197 - RNA, 20 nt, Molluscum contagiosum virus
cccguggcgcgccggcgcgg

SEQ ID NO: 4027198 - RNA, 12 nt, Molluscum contagiosum virus
cccguguacaac

SEQ ID NO: 4027199 - RNA, 16 nt, Molluscum contagiosum virus
cccgugugcgggcacg

SEQ ID NO: 4027200 - RNA, 17 nt, Molluscum contagiosum virus
cccguguucgcggagcu

SEQ ID NO: 4027201 - RNA, 12 nt, Molluscum contagiosum virus
cccguugcugcg

SEQ ID NO: 4027202 - RNA, 15 nt, Molluscum contagiosum virus
cccuaagggcccgcu

SEQ ID NO: 4027203 - RNA, 20 nt, Molluscum contagiosum virus
cccucacaccuagagcacga

SEQ ID NO: 4027204 - RNA, 15 nt, Molluscum contagiosum virus
cccucaggggcucuc

SEQ ID NO: 4027205 - RNA, 18 nt, Molluscum contagiosum virus
cccuccagguccuccagc

SEQ ID NO: 4027206 - RNA, 22 nt, Molluscum contagiosum virus
cccucuaaauggccgcgccgcg

SEQ ID NO: 4027207 - RNA, 22 nt, Molluscum contagiosum virus
cccugauguuccgcgugagagc

SEQ ID NO: 4027208 - RNA, 20 nt, Molluscum contagiosum virus
cccugcuugcccgcgccgca

SEQ ID NO: 4027209 - RNA, 22 nt, Molluscum contagiosum virus
cccuggagcgcagucccagcac

SEQ ID NO: 4027210 - RNA, 16 nt, Molluscum contagiosum virus
cccuggcugcugcgcg

SEQ ID NO: 4027211 - RNA, 20 nt, Molluscum contagiosum virus
cccuuccgaguucuggccgc

SEQ ID NO: 4027212 - RNA, 20 nt, Molluscum contagiosum virus
cccuucuuuccggcgcggcc

SEQ ID NO: 4027213 - RNA, 16 nt, Molluscum contagiosum virus
ccgaagaagaaaagac

SEQ ID NO: 4027214 - RNA, 17 nt, Molluscum contagiosum virus
ccgaagcaaaagcgcuc

SEQ ID NO: 4027215 - RNA, 16 nt, Molluscum contagiosum virus
ccgaagucuaggcagc

SEQ ID NO: 4027216 - RNA, 17 nt, Molluscum contagiosum virus
ccgacacguugcacugc

SEQ ID NO: 4027217 - RNA, 22 nt, Molluscum contagiosum virus
ccgacaucgugccgaagagcgu

SEQ ID NO: 4027218 - RNA, 18 nt, Molluscum contagiosum virus
ccgacgccagcgcgccca

SEQ ID NO: 4027219 - RNA, 16 nt, Molluscum contagiosum virus
ccgacgccgccaaugc

SEQ ID NO: 4027220 - RNA, 16 nt, Molluscum contagiosum virus
ccgacugccgccgccg

SEQ ID NO: 4027221 - RNA, 21 nt, Molluscum contagiosum virus
ccgagcaacucgcgagagaca

SEQ ID NO: 4027222 - RNA, 14 nt, Molluscum contagiosum virus
ccgagcaagcgggc

SEQ ID NO: 4027223 - RNA, 15 nt, Molluscum contagiosum virus
ccgagcccgcccccg

SEQ ID NO: 4027224 - RNA, 18 nt, Molluscum contagiosum virus
ccgagcccgggcccgugc

SEQ ID NO: 4027225 - RNA, 13 nt, Molluscum contagiosum virus
ccgagcggggacg

SEQ ID NO: 4027226 - RNA, 20 nt, Molluscum contagiosum virus
ccgagcgugaccagugcgug

SEQ ID NO: 4027227 - RNA, 13 nt, Molluscum contagiosum virus
ccgagcuguucaa

SEQ ID NO: 4027228 - RNA, 21 nt, Molluscum contagiosum virus
ccgaggacgagccccgcgccg

SEQ ID NO: 4027229 - RNA, 20 nt, Molluscum contagiosum virus
ccgaggacuuccgcgcgcuc

SEQ ID NO: 4027230 - RNA, 18 nt, Molluscum contagiosum virus
ccgaggagagcggcgccc

SEQ ID NO: 4027231 - RNA, 12 nt, Molluscum contagiosum virus
ccgaggaggcgc

SEQ ID NO: 4027232 - RNA, 22 nt, Molluscum contagiosum virus
ccgagguggcacccuggcugcu

SEQ ID NO: 4027233 - RNA, 23 nt, Molluscum contagiosum virus
ccgagguggcacccuggcugcug

SEQ ID NO: 4027234 - RNA, 18 nt, Molluscum contagiosum virus
ccgaguauucgcccauca

SEQ ID NO: 4027235 - RNA, 12 nt, Molluscum contagiosum virus
ccgauguccugc

SEQ ID NO: 4027236 - RNA, 14 nt, Molluscum contagiosum virus
ccgauguccugcgg

SEQ ID NO: 4027237 - RNA, 19 nt, Molluscum contagiosum virus
ccgaugugagcaagcugca

SEQ ID NO: 4027238 - RNA, 14 nt, Molluscum contagiosum virus
ccgcaaccagcugc

SEQ ID NO: 4027239 - RNA, 13 nt, Molluscum contagiosum virus
ccgcaacgagguc

SEQ ID NO: 4027240 - RNA, 18 nt, Molluscum contagiosum virus
ccgcaagaagcgaaacac

SEQ ID NO: 4027241 - RNA, 21 nt, Molluscum contagiosum virus
ccgcaaggaaaacugcauccu

SEQ ID NO: 4027242 - RNA, 19 nt, Molluscum contagiosum virus
ccgcaauuacgugcgcgag

SEQ ID NO: 4027243 - RNA, 17 nt, Molluscum contagiosum virus
ccgcaccagugccgacg

SEQ ID NO: 4027244 - RNA, 17 nt, Molluscum contagiosum virus
ccgcacggcgcccagga

SEQ ID NO: 4027245 - RNA, 15 nt, Molluscum contagiosum virus
ccgcagcaagcagcc

SEQ ID NO: 4027246 - RNA, 17 nt, Molluscum contagiosum virus
ccgcagcaagcagccgc

SEQ ID NO: 4027247 - RNA, 23 nt, Molluscum contagiosum virus
ccgcagcacgcgugugcgagcac

SEQ ID NO: 4027248 - RNA, 13 nt, Molluscum contagiosum virus
ccgcagccacggc

SEQ ID NO: 4027249 - RNA, 16 nt, Molluscum contagiosum virus
ccgcagcccacgugcc

SEQ ID NO: 4027250 - RNA, 16 nt, Molluscum contagiosum virus
ccgcagcccgagcgcg

SEQ ID NO: 4027251 - RNA, 22 nt, Molluscum contagiosum virus
ccgcagcccgagcgcgcgugcg

SEQ ID NO: 4027252 - RNA, 18 nt, Molluscum contagiosum virus
ccgcagccggagcuugcg

SEQ ID NO: 4027253 - RNA, 17 nt, Molluscum contagiosum virus
ccgcaggaaaggcaccc

SEQ ID NO: 4027254 - RNA, 16 nt, Molluscum contagiosum virus
ccgcaggcgcgcgcca

SEQ ID NO: 4027255 - RNA, 20 nt, Molluscum contagiosum virus
ccgcaggcgucaugcgcgcg

SEQ ID NO: 4027256 - RNA, 15 nt, Molluscum contagiosum virus
ccgcaguaccaguac

SEQ ID NO: 4027257 - RNA, 24 nt, Molluscum contagiosum virus
ccgcaguaccaguaccugcugccg

SEQ ID NO: 4027258 - RNA, 18 nt, Molluscum contagiosum virus
ccgcaguaccggccaagg

SEQ ID NO: 4027259 - RNA, 17 nt, Molluscum contagiosum virus
ccgcauguccacggaca

SEQ ID NO: 4027260 - RNA, 21 nt, Molluscum contagiosum virus
ccgccaacgcggacgcgcagc

SEQ ID NO: 4027261 - RNA, 12 nt, Molluscum contagiosum virus
ccgccagcacca

SEQ ID NO: 4027262 - RNA, 13 nt, Molluscum contagiosum virus
ccgcccgcgcccg

SEQ ID NO: 4027263 - RNA, 22 nt, Molluscum contagiosum virus
ccgccgacgccuuccugcuggc

SEQ ID NO: 4027264 - RNA, 22 nt, Molluscum contagiosum virus
ccgccgcgaggacccgcgcuuu

SEQ ID NO: 4027265 - RNA, 14 nt, Molluscum contagiosum virus
ccgccgcgcgcgau

SEQ ID NO: 4027266 - RNA, 16 nt, Molluscum contagiosum virus
ccgccgcgugcccguc

SEQ ID NO: 4027267 - RNA, 17 nt, Molluscum contagiosum virus
ccgccgggccugcggcg

SEQ ID NO: 4027268 - RNA, 19 nt, Molluscum contagiosum virus
ccgccguacccggggagaa

SEQ ID NO: 4027269 - RNA, 14 nt, Molluscum contagiosum virus
ccgccuguaccugc

SEQ ID NO: 4027270 - RNA, 23 nt, Molluscum contagiosum virus
ccgcgaacgagaaaugcgcacac

SEQ ID NO: 4027271 - RNA, 17 nt, Molluscum contagiosum virus
ccgcgacgaacucgaca

SEQ ID NO: 4027272 - RNA, 17 nt, Molluscum contagiosum virus
ccgcgagcacuggcugg

SEQ ID NO: 4027273 - RNA, 18 nt, Molluscum contagiosum virus
ccgcgcaaaagcacagca

SEQ ID NO: 4027274 - RNA, 23 nt, Molluscum contagiosum virus
ccgcgccccacugugccagcagc

SEQ ID NO: 4027275 - RNA, 15 nt, Molluscum contagiosum virus
ccgcgcccgccagca

SEQ ID NO: 4027276 - RNA, 15 nt, Molluscum contagiosum virus
ccgcgcccucgcucg

SEQ ID NO: 4027277 - RNA, 21 nt, Molluscum contagiosum virus
ccgcgccgaaacacggccucc

SEQ ID NO: 4027278 - RNA, 16 nt, Molluscum contagiosum virus
cucagccgagcgccgc

SEQ ID NO: 4027279 - RNA, 22 nt, Molluscum contagiosum virus
cucaguugcgacggaaccgugg

SEQ ID NO: 4027280 - RNA, 18 nt, Molluscum contagiosum virus
cucauccaccugcgcaac

SEQ ID NO: 4027281 - RNA, 22 nt, Molluscum contagiosum virus
cucauccacgcggaggacggcg

SEQ ID NO: 4027282 - RNA, 17 nt, Molluscum contagiosum virus
cucauccucccugcggg

SEQ ID NO: 4027283 - RNA, 17 nt, Molluscum contagiosum virus
cucaucggcgagcucuu

SEQ ID NO: 4027284 - RNA, 19 nt, Molluscum contagiosum virus
cucauuguucggaggcugc

SEQ ID NO: 4027285 - RNA, 16 nt, Molluscum contagiosum virus
cuccaagaagaggccg

SEQ ID NO: 4027286 - RNA, 16 nt, Molluscum contagiosum virus
cuccacaugccuucag

SEQ ID NO: 4027287 - RNA, 13 nt, Molluscum contagiosum virus
cuccacgcccgag

SEQ ID NO: 4027288 - RNA, 20 nt, Molluscum contagiosum virus
cuccacgcccgagggcgggc

SEQ ID NO: 4027289 - RNA, 13 nt, Molluscum contagiosum virus
cuccagcgccagc

SEQ ID NO: 4027290 - RNA, 20 nt, Molluscum contagiosum virus
cuccagcgcgcccucgcgcg

SEQ ID NO: 4027291 - RNA, 19 nt, Molluscum contagiosum virus
cuccaggggaaugaucgac

SEQ ID NO: 4027292 - RNA, 12 nt, Molluscum contagiosum virus
cucccgcggccg

SEQ ID NO: 4027293 - RNA, 17 nt, Molluscum contagiosum virus
cucccugguaguccugc

SEQ ID NO: 4027294 - RNA, 19 nt, Molluscum contagiosum virus
cuccgaccgugcccuggac

SEQ ID NO: 4027295 - RNA, 17 nt, Molluscum contagiosum virus
cuccgacgugcugcgca

SEQ ID NO: 4027296 - RNA, 19 nt, Molluscum contagiosum virus
cuccgacuaccuaggcacu

SEQ ID NO: 4027297 - RNA, 17 nt, Molluscum contagiosum virus
cuccgacuccgagcgcg

SEQ ID NO: 4027298 - RNA, 15 nt, Molluscum contagiosum virus
cuccgaguccagcuu

SEQ ID NO: 4027299 - RNA, 15 nt, Molluscum contagiosum virus
cuccgcacagaggga

SEQ ID NO: 4027300 - RNA, 12 nt, Molluscum contagiosum virus
cuccgcacgugg

SEQ ID NO: 4027301 - RNA, 12 nt, Molluscum contagiosum virus
cuccgcgcggcg

SEQ ID NO: 4027302 - RNA, 22 nt, Molluscum contagiosum virus
cuccggcgucgaaacacugcgg

SEQ ID NO: 4027303 - RNA, 14 nt, Molluscum contagiosum virus
cuccgggcgcacaa

SEQ ID NO: 4027304 - RNA, 18 nt, Molluscum contagiosum virus
cuccuccacguccaggcc

SEQ ID NO: 4027305 - RNA, 15 nt, Molluscum contagiosum virus
cuccucucgcgaucu

SEQ ID NO: 4027306 - RNA, 13 nt, Molluscum contagiosum virus
cuccugagaagca

SEQ ID NO: 4027307 - RNA, 18 nt, Molluscum contagiosum virus
cuccugaggaagcaagac

SEQ ID NO: 4027308 - RNA, 18 nt, Molluscum contagiosum virus
cuccuuugcgagcacugu

SEQ ID NO: 4027309 - RNA, 22 nt, Molluscum contagiosum virus
cucgaacucgugcgccgcgccg

SEQ ID NO: 4027310 - RNA, 17 nt, Molluscum contagiosum virus
cucgacaaggaggcuuu

SEQ ID NO: 4027311 - RNA, 14 nt, Molluscum contagiosum virus
cucgacgcgcugcu

SEQ ID NO: 4027312 - RNA, 22 nt, Molluscum contagiosum virus
cucgagcaggucaucgggcugc

SEQ ID NO: 4027313 - RNA, 18 nt, Molluscum contagiosum virus
cucgagccccagaagguc

SEQ ID NO: 4027314 - RNA, 20 nt, Molluscum contagiosum virus
cucgaggaccucgcgcgccg

SEQ ID NO: 4027315 - RNA, 22 nt, Molluscum contagiosum virus
cucgaggcgcuugggcacugcu

SEQ ID NO: 4027316 - RNA, 12 nt, Molluscum contagiosum virus
cucgagggcgcc

SEQ ID NO: 4027317 - RNA, 12 nt, Molluscum contagiosum virus
cucgcagccucc

SEQ ID NO: 4027318 - RNA, 22 nt, Molluscum contagiosum virus
cucgcaggcggugggcgccgcg

SEQ ID NO: 4027319 - RNA, 19 nt, Molluscum contagiosum virus
cucgccaaagcgcgccuuc

SEQ ID NO: 4027320 - RNA, 21 nt, Molluscum contagiosum virus
cucgccgcgcgccgcugcucg

SEQ ID NO: 4027321 - RNA, 12 nt, Molluscum contagiosum virus
cucgccggcgag

SEQ ID NO: 4027322 - RNA, 13 nt, Molluscum contagiosum virus
cucgccggcgaga

SEQ ID NO: 4027323 - RNA, 23 nt, Molluscum contagiosum virus
cucgccggcgagaugcgagcgcg

SEQ ID NO: 4027324 - RNA, 17 nt, Molluscum contagiosum virus
cucgccuccgggcgcac

SEQ ID NO: 4027325 - RNA, 22 nt, Molluscum contagiosum virus
cucgccugcgaaaaagcccgcg

SEQ ID NO: 4027326 - RNA, 22 nt, Molluscum contagiosum virus
cucgcgagaaguucugcacagc

SEQ ID NO: 4027327 - RNA, 14 nt, Molluscum contagiosum virus
cucgcgagcgccac

SEQ ID NO: 4027328 - RNA, 19 nt, Molluscum contagiosum virus
cucgcgagcgccacuagca

SEQ ID NO: 4027329 - RNA, 16 nt, Molluscum contagiosum virus
cucgcgagggcucguc

SEQ ID NO: 4027330 - RNA, 19 nt, Molluscum contagiosum virus
cucgcgcaaguccagcgcg

SEQ ID NO: 4027331 - RNA, 12 nt, Molluscum contagiosum virus
cucgcgcacgcg

SEQ ID NO: 4027332 - RNA, 21 nt, Molluscum contagiosum virus
cucgcgcgacacgagcgaguu

SEQ ID NO: 4027333 - RNA, 17 nt, Molluscum contagiosum virus
cucgcgcgacuggcacg

SEQ ID NO: 4027334 - RNA, 14 nt, Molluscum contagiosum virus
cucgcgcgcacgcg

SEQ ID NO: 4027335 - RNA, 17 nt, Molluscum contagiosum virus
cucgcgcguccgcaaag

SEQ ID NO: 4027336 - RNA, 15 nt, Molluscum contagiosum virus
cucgcgcuuccccgc

SEQ ID NO: 4027337 - RNA, 17 nt, Molluscum contagiosum virus
cucgcgggcguggggag

SEQ ID NO: 4027338 - RNA, 21 nt, Molluscum contagiosum virus
cucgcgggcguggggagcugg

SEQ ID NO: 4027339 - RNA, 17 nt, Molluscum contagiosum virus
cucgcggggcaagcgcg

SEQ ID NO: 4027340 - RNA, 16 nt, Molluscum contagiosum virus
cucgcggugacaggca

SEQ ID NO: 4027341 - RNA, 23 nt, Molluscum contagiosum virus
cucgcguuagcgcuggcccgugc

SEQ ID NO: 4027342 - RNA, 19 nt, Molluscum contagiosum virus
cucgcucauccacgcggag

SEQ ID NO: 4027343 - RNA, 13 nt, Molluscum contagiosum virus
cucgcugccuggu

SEQ ID NO: 4027344 - RNA, 18 nt, Molluscum contagiosum virus
cucgcugcuccccgccag

SEQ ID NO: 4027345 - RNA, 13 nt, Molluscum contagiosum virus
cucgcugcugcuc

SEQ ID NO: 4027346 - RNA, 14 nt, Molluscum contagiosum virus
cucgcugcugcucu

SEQ ID NO: 4027347 - RNA, 16 nt, Molluscum contagiosum virus
cucgcugcugcucuuc

SEQ ID NO: 4027348 - RNA, 12 nt, Molluscum contagiosum virus
cucgcugcuggg

SEQ ID NO: 4027349 - RNA, 19 nt, Molluscum contagiosum virus
cucgcuggugugcacugau

SEQ ID NO: 4027350 - RNA, 14 nt, Molluscum contagiosum virus
cucgcuugcccgga

SEQ ID NO: 4027351 - RNA, 16 nt, Molluscum contagiosum virus
cucggaagagcguccg

SEQ ID NO: 4027352 - RNA, 19 nt, Molluscum contagiosum virus
cucggacagugccuccgcg

SEQ ID NO: 4027353 - RNA, 20 nt, Molluscum contagiosum virus
cucggaggggcuccgggccc

SEQ ID NO: 4027354 - RNA, 14 nt, Molluscum contagiosum virus
cucggcaacgccag

SEQ ID NO: 4027355 - RNA, 20 nt, Molluscum contagiosum virus
cucggcaugugcgcaccgcg

SEQ ID NO: 4027356 - RNA, 16 nt, Molluscum contagiosum virus
cucggcgcgcgccgcg

SEQ ID NO: 4027357 - RNA, 17 nt, Molluscum contagiosum virus
cucggcguggugcuggc

SEQ ID NO: 4027358 - RNA, 23 nt, Molluscum contagiosum virus
cucggcguuggccacgaacacgg

SEQ ID NO: 4027359 - RNA, 15 nt, Molluscum contagiosum virus
cucggcuucugcugc

SEQ ID NO: 4027360 - RNA, 16 nt, Molluscum contagiosum virus
cucggcuucugcugca

SEQ ID NO: 4027361 - RNA, 16 nt, Molluscum contagiosum virus
cucgggccggcgcgcc

SEQ ID NO: 4027362 - RNA, 20 nt, Molluscum contagiosum virus
cucguaaaagacgcgcucgc

SEQ ID NO: 4027363 - RNA, 14 nt, Molluscum contagiosum virus
cucguacugcugca

SEQ ID NO: 4027364 - RNA, 19 nt, Molluscum contagiosum virus
cucgucgcugcggacaaga

SEQ ID NO: 4027365 - RNA, 16 nt, Molluscum contagiosum virus
cucgucuugcgcgcca

SEQ ID NO: 4027366 - RNA, 15 nt, Molluscum contagiosum virus
cucgugccgccugcg

SEQ ID NO: 4027367 - RNA, 19 nt, Molluscum contagiosum virus
cucgugccuuuugcgcgcu

SEQ ID NO: 4027368 - RNA, 18 nt, Molluscum contagiosum virus
cucgugcuggagcagggc

SEQ ID NO: 4027369 - RNA, 16 nt, Molluscum contagiosum virus
cucgugcugggccugc

SEQ ID NO: 4027370 - RNA, 23 nt, Molluscum contagiosum virus
cucguggaucgcgcgcaccugca

SEQ ID NO: 4027371 - RNA, 19 nt, Molluscum contagiosum virus
cucguggcguugcugcugc

SEQ ID NO: 4027372 - RNA, 15 nt, Molluscum contagiosum virus
cucguggucgccgcg

SEQ ID NO: 4027373 - RNA, 18 nt, Molluscum contagiosum virus
cucguguacgagaaguuc

SEQ ID NO: 4027374 - RNA, 23 nt, Molluscum contagiosum virus
cucguucgcgggaccgcccuugu

SEQ ID NO: 4027375 - RNA, 16 nt, Molluscum contagiosum virus
cucguucgcgggcccg

SEQ ID NO: 4027376 - RNA, 14 nt, Molluscum contagiosum virus
cucuacuuccacga

SEQ ID NO: 4027377 - RNA, 18 nt, Molluscum contagiosum virus
cucuaggagcuccgugcu

SEQ ID NO: 4027378 - RNA, 17 nt, Molluscum contagiosum virus
cucuccgagacacgcga

SEQ ID NO: 4027379 - RNA, 15 nt, Molluscum contagiosum virus
cucucgagcacuucc

SEQ ID NO: 4027380 - RNA, 13 nt, Molluscum contagiosum virus
cucucgaggcgga

SEQ ID NO: 4027381 - RNA, 23 nt, Molluscum contagiosum virus
cuucguggcgcugggcgcgccgc

SEQ ID NO: 4027382 - RNA, 15 nt, Molluscum contagiosum virus
cuucuaccacagguu

SEQ ID NO: 4027383 - RNA, 15 nt, Molluscum contagiosum virus
cuucucgaacuccag

SEQ ID NO: 4027384 - RNA, 18 nt, Molluscum contagiosum virus
cuucucgagugcacguaa

SEQ ID NO: 4027385 - RNA, 19 nt, Molluscum contagiosum virus
cuucucugcgaucgcgggc

SEQ ID NO: 4027386 - RNA, 20 nt, Molluscum contagiosum virus
cuucuucgcaagugcacacc

SEQ ID NO: 4027387 - RNA, 18 nt, Molluscum contagiosum virus
cuucuucgugcugugccu

SEQ ID NO: 4027388 - RNA, 20 nt, Molluscum contagiosum virus
cuucuuuacgggcgccagcu

SEQ ID NO: 4027389 - RNA, 23 nt, Molluscum contagiosum virus
cuugaaggacgcguucuccagga

SEQ ID NO: 4027390 - RNA, 16 nt, Molluscum contagiosum virus
cuugagcaccaagaag

SEQ ID NO: 4027391 - RNA, 21 nt, Molluscum contagiosum virus
cuugauuucgcgcagcaggca

SEQ ID NO: 4027392 - RNA, 18 nt, Molluscum contagiosum virus
cuugcacgggcaugcaca

SEQ ID NO: 4027393 - RNA, 14 nt, Molluscum contagiosum virus
cuugcauguucucu

SEQ ID NO: 4027394 - RNA, 19 nt, Molluscum contagiosum virus
cuugcgcgcggugcgggcg

SEQ ID NO: 4027395 - RNA, 19 nt, Molluscum contagiosum virus
cuugcgcggaagaagcugc

SEQ ID NO: 4027396 - RNA, 18 nt, Molluscum contagiosum virus
cuugcgcguccgcaaagc

SEQ ID NO: 4027397 - RNA, 13 nt, Molluscum contagiosum virus
cuugcggcacaca

SEQ ID NO: 4027398 - RNA, 15 nt, Molluscum contagiosum virus
cuuggaagagucgcg

SEQ ID NO: 4027399 - RNA, 21 nt, Molluscum contagiosum virus
cuuggacagcaagcagcgcgc

SEQ ID NO: 4027400 - RNA, 20 nt, Molluscum contagiosum virus
cuuggcaauggcgcgcagcu

SEQ ID NO: 4027401 - RNA, 16 nt, Molluscum contagiosum virus
cuuggccccucccggu

SEQ ID NO: 4027402 - RNA, 19 nt, Molluscum contagiosum virus
cuuggcgcccuuccuggag

SEQ ID NO: 4027403 - RNA, 16 nt, Molluscum contagiosum virus
cuuggcgggcagcggc

SEQ ID NO: 4027404 - RNA, 13 nt, Molluscum contagiosum virus
cuugugacccgca

SEQ ID NO: 4027405 - RNA, 13 nt, Molluscum contagiosum virus
cuuguugugcuuu

SEQ ID NO: 4027406 - RNA, 13 nt, Molluscum contagiosum virus
cuuguugugggcu

SEQ ID NO: 4027407 - RNA, 21 nt, Molluscum contagiosum virus
cuuguuuuuguacccuugcuc

SEQ ID NO: 4027408 - RNA, 18 nt, Molluscum contagiosum virus
cuuucacgcugcacgagc

SEQ ID NO: 4027409 - RNA, 17 nt, Molluscum contagiosum virus
cuuucccgggcacugua

SEQ ID NO: 4027410 - RNA, 17 nt, Molluscum contagiosum virus
cuuuccggccuguaaau

SEQ ID NO: 4027411 - RNA, 19 nt, Molluscum contagiosum virus
cuuucucacgcccgcgcug

SEQ ID NO: 4027412 - RNA, 16 nt, Molluscum contagiosum virus
cuuugcgaacgcgcaa

SEQ ID NO: 4027413 - RNA, 13 nt, Molluscum contagiosum virus
cuuugcggacgcg

SEQ ID NO: 4027414 - RNA, 19 nt, Molluscum contagiosum virus
cuuugugcgaccugcugcg

SEQ ID NO: 4027415 - RNA, 20 nt, Molluscum contagiosum virus
cuuugugcgaccugcugcga

SEQ ID NO: 4027416 - RNA, 21 nt, Molluscum contagiosum virus
cuuuguggucaagacuggccu

SEQ ID NO: 4027417 - RNA, 15 nt, Molluscum contagiosum virus
cuuuugccgcggcgc

SEQ ID NO: 4027418 - RNA, 12 nt, Molluscum contagiosum virus
cuuuuugcugau

SEQ ID NO: 4027419 - RNA, 15 nt, Molluscum contagiosum virus
cuuuuuuuguccugu

SEQ ID NO: 4027420 - RNA, 17 nt, Molluscum contagiosum virus
gaaaacgcgcggcagca

SEQ ID NO: 4027421 - RNA, 17 nt, Molluscum contagiosum virus
gaaaacguagacagugc

SEQ ID NO: 4027422 - RNA, 23 nt, Molluscum contagiosum virus
gaaacgcacagccccugcugcuc

SEQ ID NO: 4027423 - RNA, 13 nt, Molluscum contagiosum virus
gaaacuggacuga

SEQ ID NO: 4027424 - RNA, 18 nt, Molluscum contagiosum virus
gaaagagcacgcgcucgc

SEQ ID NO: 4027425 - RNA, 17 nt, Molluscum contagiosum virus
gaaagcagcaaacugug

SEQ ID NO: 4027426 - RNA, 16 nt, Molluscum contagiosum virus
gaaagcgccgcgcgcg

SEQ ID NO: 4027427 - RNA, 21 nt, Molluscum contagiosum virus
gaaagguaccccgcaggaaag

SEQ ID NO: 4027428 - RNA, 16 nt, Molluscum contagiosum virus
gaaaucgcaaagcacg

SEQ ID NO: 4027429 - RNA, 17 nt, Molluscum contagiosum virus
gaacaccacacgcgcgg

SEQ ID NO: 4027430 - RNA, 16 nt, Molluscum contagiosum virus
gaacacggacacuugg

SEQ ID NO: 4027431 - RNA, 18 nt, Molluscum contagiosum virus
gaacacgggggcugccgg

SEQ ID NO: 4027432 - RNA, 20 nt, Molluscum contagiosum virus
gaacaguacuuugucgcacg

SEQ ID NO: 4027433 - RNA, 18 nt, Molluscum contagiosum virus
gaacagucgcgcgccugc

SEQ ID NO: 4027434 - RNA, 15 nt, Molluscum contagiosum virus
gaacauaugucuccc

SEQ ID NO: 4027435 - RNA, 16 nt, Molluscum contagiosum virus
gaaccauuuuuugccc

SEQ ID NO: 4027436 - RNA, 22 nt, Molluscum contagiosum virus
gaaccccucgugcugggccugc

SEQ ID NO: 4027437 - RNA, 19 nt, Molluscum contagiosum virus
gaacccgcauugggccuug

SEQ ID NO: 4027438 - RNA, 22 nt, Molluscum contagiosum virus
gaacgacaccgcgacccagaag

SEQ ID NO: 4027439 - RNA, 16 nt, Molluscum contagiosum virus
gaacgagccugccgcg

SEQ ID NO: 4027440 - RNA, 17 nt, Molluscum contagiosum virus
gaacgaggcugcugccg

SEQ ID NO: 4027441 - RNA, 16 nt, Molluscum contagiosum virus
gaacgcgcaagugugc

SEQ ID NO: 4027442 - RNA, 18 nt, Molluscum contagiosum virus
gaacgcgcaagugugcgc

SEQ ID NO: 4027443 - RNA, 22 nt, Molluscum contagiosum virus
gaacgcgugaugucugucccgc

SEQ ID NO: 4027444 - RNA, 17 nt, Molluscum contagiosum virus
gaacguggucaagaucc

SEQ ID NO: 4027445 - RNA, 18 nt, Molluscum contagiosum virus
gaacguuauccccuccaa

SEQ ID NO: 4027446 - RNA, 16 nt, Molluscum contagiosum virus
gaacucgagcacguag

SEQ ID NO: 4027447 - RNA, 14 nt, Molluscum contagiosum virus
gaacucgaggcucu

SEQ ID NO: 4027448 - RNA, 14 nt, Molluscum contagiosum virus
gaacucgcugcugc

SEQ ID NO: 4027449 - RNA, 19 nt, Molluscum contagiosum virus
gaacucggcuucugcugca

SEQ ID NO: 4027450 - RNA, 15 nt, Molluscum contagiosum virus
gaacucuacgccgcg

SEQ ID NO: 4027451 - RNA, 20 nt, Molluscum contagiosum virus
gaacugacugcugcccccgc

SEQ ID NO: 4027452 - RNA, 16 nt, Molluscum contagiosum virus
gaacugcagcagcugg

SEQ ID NO: 4027453 - RNA, 19 nt, Molluscum contagiosum virus
gaacuggacgccguugcgc

SEQ ID NO: 4027454 - RNA, 17 nt, Molluscum contagiosum virus
gaacuggcgcagcagga

SEQ ID NO: 4027455 - RNA, 17 nt, Molluscum contagiosum virus
gaacuucuacgccaaga

SEQ ID NO: 4027456 - RNA, 18 nt, Molluscum contagiosum virus
gaagaaacagccaugugu

SEQ ID NO: 4027457 - RNA, 17 nt, Molluscum contagiosum virus
gaagaagcagcagacca

SEQ ID NO: 4027458 - RNA, 14 nt, Molluscum contagiosum virus
gaagaaggagccca

SEQ ID NO: 4027459 - RNA, 14 nt, Molluscum contagiosum virus
gaagaaggagcccu

SEQ ID NO: 4027460 - RNA, 12 nt, Molluscum contagiosum virus
gaagacgugcuu

SEQ ID NO: 4027461 - RNA, 21 nt, Molluscum contagiosum virus
gaagacguuuacguccacgcg

SEQ ID NO: 4027462 - RNA, 19 nt, Molluscum contagiosum virus
gaagaggccggcacaagcc

SEQ ID NO: 4027463 - RNA, 18 nt, Molluscum contagiosum virus
gaagaguggcucacagcc

SEQ ID NO: 4027464 - RNA, 17 nt, Molluscum contagiosum virus
gaagaucaagcacgcua

SEQ ID NO: 4027465 - RNA, 17 nt, Molluscum contagiosum virus
gaagaugcugcgcgugg

SEQ ID NO: 4027466 - RNA, 18 nt, Molluscum contagiosum virus
gaagcagugcucgggaga

SEQ ID NO: 4027467 - RNA, 13 nt, Molluscum contagiosum virus
gaagcccucaggg

SEQ ID NO: 4027468 - RNA, 12 nt, Molluscum contagiosum virus
gaagcgcgcccc

SEQ ID NO: 4027469 - RNA, 22 nt, Molluscum contagiosum virus
gaagcgcucgcucgcgcgcagc

SEQ ID NO: 4027470 - RNA, 13 nt, Molluscum contagiosum virus
gaagcggaacucu

SEQ ID NO: 4027471 - RNA, 11 nt, Molluscum contagiosum virus
gaagcuuucag

SEQ ID NO: 4027472 - RNA, 19 nt, Molluscum contagiosum virus
gaaggacgcguucuccagg

SEQ ID NO: 4027473 - RNA, 12 nt, Molluscum contagiosum virus
gaaggagcccuu

SEQ ID NO: 4027474 - RNA, 18 nt, Molluscum contagiosum virus
gaaggcauaccugugcca

SEQ ID NO: 4027475 - RNA, 11 nt, Molluscum contagiosum virus
gaaggcggcga

SEQ ID NO: 4027476 - RNA, 14 nt, Molluscum contagiosum virus
gaagggcccgcggc

SEQ ID NO: 4027477 - RNA, 18 nt, Molluscum contagiosum virus
gaagguacuucccgagga

SEQ ID NO: 4027478 - RNA, 21 nt, Molluscum contagiosum virus
gaaguccaucggugggcucgc

SEQ ID NO: 4027479 - RNA, 15 nt, Molluscum contagiosum virus
gaaguccucucuccc

SEQ ID NO: 4027480 - RNA, 22 nt, Molluscum contagiosum virus
gaaguccucucuccccuucaga

SEQ ID NO: 4027481 - RNA, 17 nt, Molluscum contagiosum virus
gaagucgcuagaggaga

SEQ ID NO: 4027482 - RNA, 18 nt, Molluscum contagiosum virus
gaagucguuaggcggcuc

SEQ ID NO: 4027483 - RNA, 18 nt, Molluscum contagiosum virus
gaagugacuagcgcuggc

SEQ ID NO: 4027484 - RNA, 21 nt, Molluscum contagiosum virus
gcacaacgggcucgugcugga

SEQ ID NO: 4027485 - RNA, 23 nt, Molluscum contagiosum virus
gcacaacuugggcccgccuccgg

SEQ ID NO: 4027486 - RNA, 21 nt, Molluscum contagiosum virus
gcacaagccguccgccucgag

SEQ ID NO: 4027487 - RNA, 22 nt, Molluscum contagiosum virus
gcacaccccuguaacaaggaaa

SEQ ID NO: 4027488 - RNA, 18 nt, Molluscum contagiosum virus
gcacaccucgagcccgag

SEQ ID NO: 4027489 - RNA, 17 nt, Molluscum contagiosum virus
gcacacgagugcccgcg

SEQ ID NO: 4027490 - RNA, 18 nt, Molluscum contagiosum virus
gcacacgcgcgcgugcug

SEQ ID NO: 4027491 - RNA, 18 nt, Molluscum contagiosum virus
gcacaguccaacccgcgg

SEQ ID NO: 4027492 - RNA, 17 nt, Molluscum contagiosum virus
gcacaguucacggcgcu

SEQ ID NO: 4027493 - RNA, 19 nt, Molluscum contagiosum virus
gcacaguucacggcgcucg

SEQ ID NO: 4027494 - RNA, 16 nt, Molluscum contagiosum virus
gcacaugcagcugcag

SEQ ID NO: 4027495 - RNA, 18 nt, Molluscum contagiosum virus
gcacaugugcgugcaccu

SEQ ID NO: 4027496 - RNA, 15 nt, Molluscum contagiosum virus
gcaccacgugcuccg

SEQ ID NO: 4027497 - RNA, 23 nt, Molluscum contagiosum virus
gcaccagcaccggcguguggcuc

SEQ ID NO: 4027498 - RNA, 15 nt, Molluscum contagiosum virus
gcaccagguagagca

SEQ ID NO: 4027499 - RNA, 21 nt, Molluscum contagiosum virus
gcaccccgaaaggcacccgca

SEQ ID NO: 4027500 - RNA, 14 nt, Molluscum contagiosum virus
gcaccccgcaggaa

SEQ ID NO: 4027501 - RNA, 13 nt, Molluscum contagiosum virus
gcacccgcaggaa

SEQ ID NO: 4027502 - RNA, 21 nt, Molluscum contagiosum virus
gcacccuccgcacagagggac

SEQ ID NO: 4027503 - RNA, 16 nt, Molluscum contagiosum virus
gcaccgagcaagcugg

SEQ ID NO: 4027504 - RNA, 14 nt, Molluscum contagiosum virus
gcaccgagugcugg

SEQ ID NO: 4027505 - RNA, 19 nt, Molluscum contagiosum virus
gcaccgccugcugcagcuc

SEQ ID NO: 4027506 - RNA, 15 nt, Molluscum contagiosum virus
gcaccgccuggugcu

SEQ ID NO: 4027507 - RNA, 18 nt, Molluscum contagiosum virus
gcaccgccuggugcugcg

SEQ ID NO: 4027508 - RNA, 19 nt, Molluscum contagiosum virus
gcaccgccuggugcugcgc

SEQ ID NO: 4027509 - RNA, 22 nt, Molluscum contagiosum virus
gcaccgccuggugcugcgcgac

SEQ ID NO: 4027510 - RNA, 22 nt, Molluscum contagiosum virus
gcaccgcgccccacugugccag

SEQ ID NO: 4027511 - RNA, 14 nt, Molluscum contagiosum virus
gcaccgcgcgcgcu

SEQ ID NO: 4027512 - RNA, 14 nt, Molluscum contagiosum virus
gcaccgcggcgacg

SEQ ID NO: 4027513 - RNA, 21 nt, Molluscum contagiosum virus
gcaccgcggcgacgucaaccg

SEQ ID NO: 4027514 - RNA, 14 nt, Molluscum contagiosum virus
gcaccgcguggcgc

SEQ ID NO: 4027515 - RNA, 21 nt, Molluscum contagiosum virus
gcaccgcguugccgcccgccg

SEQ ID NO: 4027516 - RNA, 18 nt, Molluscum contagiosum virus
gcaccggcgcucacugcg

SEQ ID NO: 4027517 - RNA, 13 nt, Molluscum contagiosum virus
gcaccgggcgccg

SEQ ID NO: 4027518 - RNA, 21 nt, Molluscum contagiosum virus
gcaccguaccgcgcccgccag

SEQ ID NO: 4027519 - RNA, 23 nt, Molluscum contagiosum virus
gcaccucccugugaacgcaccgc

SEQ ID NO: 4027520 - RNA, 12 nt, Molluscum contagiosum virus
gcaccugcagga

SEQ ID NO: 4027521 - RNA, 18 nt, Molluscum contagiosum virus
gcaccugcaucgcgccgc

SEQ ID NO: 4027522 - RNA, 16 nt, Molluscum contagiosum virus
gcaccuggaacgcgac

SEQ ID NO: 4027523 - RNA, 18 nt, Molluscum contagiosum virus
gcacgaccacgcuggcac

SEQ ID NO: 4027524 - RNA, 15 nt, Molluscum contagiosum virus
gcacgacccucuucg

SEQ ID NO: 4027525 - RNA, 15 nt, Molluscum contagiosum virus
gcacgacccucuucu

SEQ ID NO: 4027526 - RNA, 16 nt, Molluscum contagiosum virus
gcacgagccggcgccg

SEQ ID NO: 4027527 - RNA, 19 nt, Molluscum contagiosum virus
gcacgagcgcgggcgcccg

SEQ ID NO: 4027528 - RNA, 15 nt, Molluscum contagiosum virus
gcacgagcugcugcg

SEQ ID NO: 4027529 - RNA, 16 nt, Molluscum contagiosum virus
gcacgagcugcugcgc

SEQ ID NO: 4027530 - RNA, 12 nt, Molluscum contagiosum virus
gcacgaggagcc

SEQ ID NO: 4027531 - RNA, 16 nt, Molluscum contagiosum virus
gcacgaugcccagcag

SEQ ID NO: 4027532 - RNA, 14 nt, Molluscum contagiosum virus
gcacgauguacucc

SEQ ID NO: 4027533 - RNA, 15 nt, Molluscum contagiosum virus
gcacgcaacugcccg

SEQ ID NO: 4027534 - RNA, 12 nt, Molluscum contagiosum virus
gcacgcacacga

SEQ ID NO: 4027535 - RNA, 21 nt, Molluscum contagiosum virus
gcacgccgcucggcacugcug

SEQ ID NO: 4027536 - RNA, 17 nt, Molluscum contagiosum virus
gcacgccuccaagaaga

SEQ ID NO: 4027537 - RNA, 18 nt, Molluscum contagiosum virus
gcacgcgaacgccuacgc

SEQ ID NO: 4027538 - RNA, 16 nt, Molluscum contagiosum virus
gcacgcgcacacgcug

SEQ ID NO: 4027539 - RNA, 17 nt, Molluscum contagiosum virus
gcacgcgcacacgcuga

SEQ ID NO: 4027540 - RNA, 15 nt, Molluscum contagiosum virus
gcacgcgcacgcgcc

SEQ ID NO: 4027541 - RNA, 15 nt, Molluscum contagiosum virus
gcacgcgccgcgcgg

SEQ ID NO: 4027542 - RNA, 18 nt, Molluscum contagiosum virus
gcacgcgcgacaucuucc

SEQ ID NO: 4027543 - RNA, 12 nt, Molluscum contagiosum virus
gcacgcgcucgc

SEQ ID NO: 4027544 - RNA, 22 nt, Molluscum contagiosum virus
gcacgcguaaacgcggugagug

SEQ ID NO: 4027545 - RNA, 21 nt, Molluscum contagiosum virus
gcacgcuagcgagcgcccgug

SEQ ID NO: 4027546 - RNA, 17 nt, Molluscum contagiosum virus
gcacgcuguccaggcgc

SEQ ID NO: 4027547 - RNA, 17 nt, Molluscum contagiosum virus
gcacgcuuguccgcgga

SEQ ID NO: 4027548 - RNA, 20 nt, Molluscum contagiosum virus
gcacgcuugugcgcacgcug

SEQ ID NO: 4027549 - RNA, 23 nt, Molluscum contagiosum virus
gcacggacaugagcuugcgcacg

SEQ ID NO: 4027550 - RNA, 23 nt, Molluscum contagiosum virus
gcacggcaagacgacacgagggc

SEQ ID NO: 4027551 - RNA, 18 nt, Molluscum contagiosum virus
gcacggcccgggugcgcg

SEQ ID NO: 4027552 - RNA, 16 nt, Molluscum contagiosum virus
gcacggccggcgccgc

SEQ ID NO: 4027553 - RNA, 18 nt, Molluscum contagiosum virus
gcacggccggcgccgcgc

SEQ ID NO: 4027554 - RNA, 16 nt, Molluscum contagiosum virus
gcacggcgacucuggc

SEQ ID NO: 4027555 - RNA, 13 nt, Molluscum contagiosum virus
gcacggcuaccac

SEQ ID NO: 4027556 - RNA, 13 nt, Molluscum contagiosum virus
gcacgggcacgcc

SEQ ID NO: 4027557 - RNA, 19 nt, Molluscum contagiosum virus
gcacgggccggggccucgc

SEQ ID NO: 4027558 - RNA, 14 nt, Molluscum contagiosum virus
gcacgggcucgagc

SEQ ID NO: 4027559 - RNA, 22 nt, Molluscum contagiosum virus
gcacguccucggucaccacucc

SEQ ID NO: 4027560 - RNA, 23 nt, Molluscum contagiosum virus
gcacgucgaagaccaccagcacc

SEQ ID NO: 4027561 - RNA, 20 nt, Molluscum contagiosum virus
gcacgucuucgccgugugcg

SEQ ID NO: 4027562 - RNA, 19 nt, Molluscum contagiosum virus
gcacguggaaucacggcca

SEQ ID NO: 4027563 - RNA, 14 nt, Molluscum contagiosum virus
gcacguggcgcugc

SEQ ID NO: 4027564 - RNA, 22 nt, Molluscum contagiosum virus
gcacgugugcaggaacugcccg

SEQ ID NO: 4027565 - RNA, 14 nt, Molluscum contagiosum virus
gcacguuccaaaag

SEQ ID NO: 4027566 - RNA, 17 nt, Molluscum contagiosum virus
gcacguuugcgucugcg

SEQ ID NO: 4027567 - RNA, 20 nt, Molluscum contagiosum virus
gcacuccagcgcgcccucgc

SEQ ID NO: 4027568 - RNA, 14 nt, Molluscum contagiosum virus
gcacugcgccaagg

SEQ ID NO: 4027569 - RNA, 13 nt, Molluscum contagiosum virus
gcacugcgcgcgc

SEQ ID NO: 4027570 - RNA, 12 nt, Molluscum contagiosum virus
gcacugcuacga

SEQ ID NO: 4027571 - RNA, 23 nt, Molluscum contagiosum virus
gcacugcuacgagccgcuguccg

SEQ ID NO: 4027572 - RNA, 14 nt, Molluscum contagiosum virus
gcacuuccgcgcgc

SEQ ID NO: 4027573 - RNA, 23 nt, Molluscum contagiosum virus
gcacuugcaggccuccuucccug

SEQ ID NO: 4027574 - RNA, 22 nt, Molluscum contagiosum virus
gcagaaacagccgugcuccgag

SEQ ID NO: 4027575 - RNA, 14 nt, Molluscum contagiosum virus
gcagacaacaccag

SEQ ID NO: 4027576 - RNA, 13 nt, Molluscum contagiosum virus
gcagacacagacg

SEQ ID NO: 4027577 - RNA, 14 nt, Molluscum contagiosum virus
gcagaccccuugcu

SEQ ID NO: 4027578 - RNA, 14 nt, Molluscum contagiosum virus
gcagacggcaaguu

SEQ ID NO: 4027579 - RNA, 16 nt, Molluscum contagiosum virus
gcagagccgcgaaagc

SEQ ID NO: 4027580 - RNA, 15 nt, Molluscum contagiosum virus
gcagagccgggacgc

SEQ ID NO: 4027581 - RNA, 21 nt, Molluscum contagiosum virus
gcagagcuccccgcgcgcagc

SEQ ID NO: 4027582 - RNA, 15 nt, Molluscum contagiosum virus
gcagaggauacccgu

SEQ ID NO: 4027583 - RNA, 17 nt, Molluscum contagiosum virus
gcagaggcgcguccgcg

SEQ ID NO: 4027584 - RNA, 24 nt, Molluscum contagiosum virus
gcagcaccgcacgccagcagcaga

SEQ ID NO: 4027585 - RNA, 14 nt, Molluscum contagiosum virus
gcagcagcgugcau

SEQ ID NO: 4027586 - RNA, 15 nt, Molluscum contagiosum virus
gcagcagcuccucca

SEQ ID NO: 4027587 - RNA, 21 nt, Molluscum contagiosum virus
gggcgcgcggcaagccuggcu

SEQ ID NO: 4027588 - RNA, 21 nt, Molluscum contagiosum virus
gggcgcgguagcucgugccug

SEQ ID NO: 4027589 - RNA, 15 nt, Molluscum contagiosum virus
gggcggaagcuccug

SEQ ID NO: 4027590 - RNA, 16 nt, Molluscum contagiosum virus
gggcggccgcagcaag

SEQ ID NO: 4027591 - RNA, 12 nt, Molluscum contagiosum virus
gggcgugcucac

SEQ ID NO: 4027592 - RNA, 17 nt, Molluscum contagiosum virus
gggcucagcaaggaggg

SEQ ID NO: 4027593 - RNA, 22 nt, Molluscum contagiosum virus
gggcucugucguugucgccgug

SEQ ID NO: 4027594 - RNA, 21 nt, Molluscum contagiosum virus
gggcugccggcgcgugagcgc

SEQ ID NO: 4027595 - RNA, 14 nt, Molluscum contagiosum virus
ggggaaccgcugcu

SEQ ID NO: 4027596 - RNA, 14 nt, Molluscum contagiosum virus
ggggagggcggcaa

SEQ ID NO: 4027597 - RNA, 19 nt, Molluscum contagiosum virus
ggggcugucagaggauucu

SEQ ID NO: 4027598 - RNA, 16 nt, Molluscum contagiosum virus
gggguguuuccuugcc

SEQ ID NO: 4027599 - RNA, 21 nt, Molluscum contagiosum virus
gggucgugcaggucgaggagg

SEQ ID NO: 4027600 - RNA, 18 nt, Molluscum contagiosum virus
ggguggcuugcugcagua

SEQ ID NO: 4027601 - RNA, 13 nt, Molluscum contagiosum virus
gguaacgcgcgcg

SEQ ID NO: 4027602 - RNA, 13 nt, Molluscum contagiosum virus
gguacagaugagu

SEQ ID NO: 4027603 - RNA, 21 nt, Molluscum contagiosum virus
gguacccgcaaccccgcgcgu

SEQ ID NO: 4027604 - RNA, 13 nt, Molluscum contagiosum virus
gguacccgcagga

SEQ ID NO: 4027605 - RNA, 21 nt, Molluscum contagiosum virus
gguacccgcaggaaaggcacc

SEQ ID NO: 4027606 - RNA, 12 nt, Molluscum contagiosum virus
gguagcggaggc

SEQ ID NO: 4027607 - RNA, 16 nt, Molluscum contagiosum virus
gguaugcgaggccugc

SEQ ID NO: 4027608 - RNA, 21 nt, Molluscum contagiosum virus
ggucaacggcacagucuggga

SEQ ID NO: 4027609 - RNA, 16 nt, Molluscum contagiosum virus
ggucaacuccgagcgc

SEQ ID NO: 4027610 - RNA, 20 nt, Molluscum contagiosum virus
ggucaacuccgagcgcgcgc

SEQ ID NO: 4027611 - RNA, 19 nt, Molluscum contagiosum virus
ggucaccacuccgucgcgc

SEQ ID NO: 4027612 - RNA, 17 nt, Molluscum contagiosum virus
ggucacgcaagcuuugu

SEQ ID NO: 4027613 - RNA, 21 nt, Molluscum contagiosum virus
ggucacgcgcaaggccgcgcc

SEQ ID NO: 4027614 - RNA, 23 nt, Molluscum contagiosum virus
ggucacgcgcaaggccgcgccca

SEQ ID NO: 4027615 - RNA, 18 nt, Molluscum contagiosum virus
ggucaucgggcugcagcc

SEQ ID NO: 4027616 - RNA, 15 nt, Molluscum contagiosum virus
gguccaccagcugcc

SEQ ID NO: 4027617 - RNA, 19 nt, Molluscum contagiosum virus
gguccgcguuggcagcggc

SEQ ID NO: 4027618 - RNA, 22 nt, Molluscum contagiosum virus
gguccgcuccuucucagggcuu

SEQ ID NO: 4027619 - RNA, 17 nt, Molluscum contagiosum virus
gguccgggugcgagucu

SEQ ID NO: 4027620 - RNA, 19 nt, Molluscum contagiosum virus
gguccugcgcgguggcuua

SEQ ID NO: 4027621 - RNA, 20 nt, Molluscum contagiosum virus
ggucgacgacgcgcgcacgu

SEQ ID NO: 4027622 - RNA, 15 nt, Molluscum contagiosum virus
ggucgacgagugcgc

SEQ ID NO: 4027623 - RNA, 19 nt, Molluscum contagiosum virus
ggucgacgggaacgagguc

SEQ ID NO: 4027624 - RNA, 16 nt, Molluscum contagiosum virus
ggucgagcgcgccgcg

SEQ ID NO: 4027625 - RNA, 21 nt, Molluscum contagiosum virus
ggucgagcgcgccgcgcgcuc

SEQ ID NO: 4027626 - RNA, 16 nt, Molluscum contagiosum virus
ggucgccuacgaggug

SEQ ID NO: 4027627 - RNA, 18 nt, Molluscum contagiosum virus
ggucgcgcgcgcucugcc

SEQ ID NO: 4027628 - RNA, 14 nt, Molluscum contagiosum virus
ggucgugcgagacu

SEQ ID NO: 4027629 - RNA, 14 nt, Molluscum contagiosum virus
ggucucggcagcag

SEQ ID NO: 4027630 - RNA, 18 nt, Molluscum contagiosum virus
ggucuucccgcuggcggc

SEQ ID NO: 4027631 - RNA, 22 nt, Molluscum contagiosum virus
ggucuugccgaagccgcaggcc

SEQ ID NO: 4027632 - RNA, 17 nt, Molluscum contagiosum virus
ggugcagccgcugcugc

SEQ ID NO: 4027633 - RNA, 12 nt, Molluscum contagiosum virus
ggugccgcgcgc

SEQ ID NO: 4027634 - RNA, 19 nt, Molluscum contagiosum virus
ggugccggccgccggcgcc

SEQ ID NO: 4027635 - RNA, 18 nt, Molluscum contagiosum virus
ggugccuggcguccgcac

SEQ ID NO: 4027636 - RNA, 20 nt, Molluscum contagiosum virus
ggugccuggcguccgcacgc

SEQ ID NO: 4027637 - RNA, 21 nt, Molluscum contagiosum virus
ggugcucguggaaaagcaggg

SEQ ID NO: 4027638 - RNA, 13 nt, Molluscum contagiosum virus
gguggcaggcgcg

SEQ ID NO: 4027639 - RNA, 17 nt, Molluscum contagiosum virus
gguggcaggcgcgcgcg

SEQ ID NO: 4027640 - RNA, 19 nt, Molluscum contagiosum virus
gguggcgcgcgagcugcug

SEQ ID NO: 4027641 - RNA, 18 nt, Molluscum contagiosum virus
gguguacgaaaguacuuu

SEQ ID NO: 4027642 - RNA, 18 nt, Molluscum contagiosum virus
ggugugcacaugcccgug

SEQ ID NO: 4027643 - RNA, 12 nt, Molluscum contagiosum virus
gguugccaggca

SEQ ID NO: 4027644 - RNA, 20 nt, Molluscum contagiosum virus
gguugcccgccugccgcgag

SEQ ID NO: 4027645 - RNA, 17 nt, Molluscum contagiosum virus
guaagucgaagaggguc

SEQ ID NO: 4027646 - RNA, 20 nt, Molluscum contagiosum virus
guaauccaugucgagcccug

SEQ ID NO: 4027647 - RNA, 20 nt, Molluscum contagiosum virus
guacacguagaggaaguaga

SEQ ID NO: 4027648 - RNA, 16 nt, Molluscum contagiosum virus
guacaggcgcggcagc

SEQ ID NO: 4027649 - RNA, 18 nt, Molluscum contagiosum virus
guacagugcgcgcacaaa

SEQ ID NO: 4027650 - RNA, 18 nt, Molluscum contagiosum virus
guacaucgacuacgcgcu

SEQ ID NO: 4027651 - RNA, 14 nt, Molluscum contagiosum virus
guacccgcaggaaa

SEQ ID NO: 4027652 - RNA, 14 nt, Molluscum contagiosum virus
guaccgugcgcgug

SEQ ID NO: 4027653 - RNA, 22 nt, Molluscum contagiosum virus
guaccugggcaggccgcccacg

SEQ ID NO: 4027654 - RNA, 12 nt, Molluscum contagiosum virus
guaccuggugcg

SEQ ID NO: 4027655 - RNA, 15 nt, Molluscum contagiosum virus
guacgacgugcugcu

SEQ ID NO: 4027656 - RNA, 18 nt, Molluscum contagiosum virus
guacgagcagcugcugcg

SEQ ID NO: 4027657 - RNA, 23 nt, Molluscum contagiosum virus
guacgcaugcgcgguccuguccg

SEQ ID NO: 4027658 - RNA, 21 nt, Molluscum contagiosum virus
guacgcgccggggcgcgcgcu

SEQ ID NO: 4027659 - RNA, 13 nt, Molluscum contagiosum virus
guacgcgugcagg

SEQ ID NO: 4027660 - RNA, 13 nt, Molluscum contagiosum virus
guacgugcugccc

SEQ ID NO: 4027661 - RNA, 18 nt, Molluscum contagiosum virus
guacuaucagagacaggg

SEQ ID NO: 4027662 - RNA, 19 nt, Molluscum contagiosum virus
guacucaacgcgauggcgc

SEQ ID NO: 4027663 - RNA, 18 nt, Molluscum contagiosum virus
guacucgcugcuccccgc

SEQ ID NO: 4027664 - RNA, 17 nt, Molluscum contagiosum virus
guacuucuacgagcagc

SEQ ID NO: 4027665 - RNA, 16 nt, Molluscum contagiosum virus
guacuuucacgacugu

SEQ ID NO: 4027666 - RNA, 14 nt, Molluscum contagiosum virus
guagcagcgccugc

SEQ ID NO: 4027667 - RNA, 14 nt, Molluscum contagiosum virus
guagccgcgacgca

SEQ ID NO: 4027668 - RNA, 18 nt, Molluscum contagiosum virus
guagccgcgacgcaagcg

SEQ ID NO: 4027669 - RNA, 23 nt, Molluscum contagiosum virus
guagcgagcaggcgcaggccgcg

SEQ ID NO: 4027670 - RNA, 14 nt, Molluscum contagiosum virus
guagcgugcgccug

SEQ ID NO: 4027671 - RNA, 14 nt, Molluscum contagiosum virus
guagcuagcucugc

SEQ ID NO: 4027672 - RNA, 14 nt, Molluscum contagiosum virus
guagcuggcaguca

SEQ ID NO: 4027673 - RNA, 16 nt, Molluscum contagiosum virus
guagguacccgcaacc

SEQ ID NO: 4027674 - RNA, 23 nt, Molluscum contagiosum virus
guaguccaggugguagcggaggc

SEQ ID NO: 4027675 - RNA, 18 nt, Molluscum contagiosum virus
guauacucgacgcgcgcg

SEQ ID NO: 4027676 - RNA, 19 nt, Molluscum contagiosum virus
guaugaaucuacggcuguu

SEQ ID NO: 4027677 - RNA, 11 nt, Molluscum contagiosum virus
guauuuccagc

SEQ ID NO: 4027678 - RNA, 21 nt, Molluscum contagiosum virus
gucaagacucgcccgcgcgcg

SEQ ID NO: 4027679 - RNA, 23 nt, Molluscum contagiosum virus
gucaagaugcugguucugcgcug

SEQ ID NO: 4027680 - RNA, 15 nt, Molluscum contagiosum virus
gucaagcaggcaugc

SEQ ID NO: 4027681 - RNA, 22 nt, Molluscum contagiosum virus
gucaccaccgcuucgugucugu

SEQ ID NO: 4027682 - RNA, 12 nt, Molluscum contagiosum virus
gucaccgcgucc

SEQ ID NO: 4027683 - RNA, 17 nt, Molluscum contagiosum virus
gucacgcgucgcgcgcc

SEQ ID NO: 4027684 - RNA, 22 nt, Molluscum contagiosum virus
gucacgcugaucuucuaccugg

SEQ ID NO: 4027685 - RNA, 20 nt, Molluscum contagiosum virus
gucacggccuucgcgcugcc

SEQ ID NO: 4027686 - RNA, 19 nt, Molluscum contagiosum virus
gucacugcuagugcuggcc

SEQ ID NO: 4027687 - RNA, 22 nt, Molluscum contagiosum virus
gucacugcuagugcuggccgcc

SEQ ID NO: 4027688 - RNA, 20 nt, Molluscum contagiosum virus
gucagcggcggccccugccu

SEQ ID NO: 4027689 - RNA, 13 nt, Molluscum contagiosum virus
uacaugcgugcua

SEQ ID NO: 4027690 - RNA, 21 nt, Molluscum contagiosum virus
uacaugcucaagcaccugcgc

SEQ ID NO: 4027691 - RNA, 20 nt, Molluscum contagiosum virus
uaccacgagcacugccugcc

SEQ ID NO: 4027692 - RNA, 14 nt, Molluscum contagiosum virus
uaccgcgcgcacgc

SEQ ID NO: 4027693 - RNA, 17 nt, Molluscum contagiosum virus
uaccgggucgcggggcc

SEQ ID NO: 4027694 - RNA, 14 nt, Molluscum contagiosum virus
uaccugaagcugga

SEQ ID NO: 4027695 - RNA, 21 nt, Molluscum contagiosum virus
uacgagcacauacacgcgcau

SEQ ID NO: 4027696 - RNA, 16 nt, Molluscum contagiosum virus
uacgagcagcugcugc

SEQ ID NO: 4027697 - RNA, 23 nt, Molluscum contagiosum virus
uacgagcccaucaaggcgcgcau

SEQ ID NO: 4027698 - RNA, 23 nt, Molluscum contagiosum virus
uacgccaagaggacgagcugcua

SEQ ID NO: 4027699 - RNA, 14 nt, Molluscum contagiosum virus
uacgccagcgacgc

SEQ ID NO: 4027700 - RNA, 12 nt, Molluscum contagiosum virus
uacgcgagcacu

SEQ ID NO: 4027701 - RNA, 15 nt, Molluscum contagiosum virus
uacgcgccggggcgc

SEQ ID NO: 4027702 - RNA, 19 nt, Molluscum contagiosum virus
uacgcgcgcguaacagcgc

SEQ ID NO: 4027703 - RNA, 20 nt, Molluscum contagiosum virus
uacgcgcugcggcgcucgca

SEQ ID NO: 4027704 - RNA, 15 nt, Molluscum contagiosum virus
uacgcuacagcagcc

SEQ ID NO: 4027705 - RNA, 21 nt, Molluscum contagiosum virus
uacgucgcgcgcucgcucgcg

SEQ ID NO: 4027706 - RNA, 14 nt, Molluscum contagiosum virus
uacgucuccucgcg

SEQ ID NO: 4027707 - RNA, 14 nt, Molluscum contagiosum virus
uacucaugcugcuc

SEQ ID NO: 4027708 - RNA, 12 nt, Molluscum contagiosum virus
uacuccugcugg

SEQ ID NO: 4027709 - RNA, 19 nt, Molluscum contagiosum virus
uacugcugcaggcaaagcg

SEQ ID NO: 4027710 - RNA, 15 nt, Molluscum contagiosum virus
uacuuccugcagcug

SEQ ID NO: 4027711 - RNA, 21 nt, Molluscum contagiosum virus
uacuucggacgcgaacugccc

SEQ ID NO: 4027712 - RNA, 14 nt, Molluscum contagiosum virus
uacuucgucaagca

SEQ ID NO: 4027713 - RNA, 21 nt, Molluscum contagiosum virus
uagaccuuuacgucgcgcgcu

SEQ ID NO: 4027714 - RNA, 18 nt, Molluscum contagiosum virus
uagacuggcuucggggac

SEQ ID NO: 4027715 - RNA, 23 nt, Molluscum contagiosum virus
uagagcacgaagcuacgcuccgu

SEQ ID NO: 4027716 - RNA, 21 nt, Molluscum contagiosum virus
uagagcuggcaccgggcgccg

SEQ ID NO: 4027717 - RNA, 18 nt, Molluscum contagiosum virus
uagcaagcacgccaggug

SEQ ID NO: 4027718 - RNA, 18 nt, Molluscum contagiosum virus
uagcaccgcaugggcccu

SEQ ID NO: 4027719 - RNA, 13 nt, Molluscum contagiosum virus
uagcagagcacga

SEQ ID NO: 4027720 - RNA, 16 nt, Molluscum contagiosum virus
uagcagcgccugcacg

SEQ ID NO: 4027721 - RNA, 17 nt, Molluscum contagiosum virus
uagcagcgugcgcacca

SEQ ID NO: 4027722 - RNA, 13 nt, Molluscum contagiosum virus
uagccuacguggc

SEQ ID NO: 4027723 - RNA, 16 nt, Molluscum contagiosum virus
uagcgcccguggcgcc

SEQ ID NO: 4027724 - RNA, 19 nt, Molluscum contagiosum virus
uagcggacgaagcugugca

SEQ ID NO: 4027725 - RNA, 15 nt, Molluscum contagiosum virus
uagcgguguugcugu

SEQ ID NO: 4027726 - RNA, 15 nt, Molluscum contagiosum virus
uagcuggcgcccgua

SEQ ID NO: 4027727 - RNA, 21 nt, Molluscum contagiosum virus
uagggcaucgagaacgccgcg

SEQ ID NO: 4027728 - RNA, 22 nt, Molluscum contagiosum virus
uaggucggaagaaggcgccuac

SEQ ID NO: 4027729 - RNA, 18 nt, Molluscum contagiosum virus
uaguagcagcuucuugga

SEQ ID NO: 4027730 - RNA, 11 nt, Molluscum contagiosum virus
uaguccugcua

SEQ ID NO: 4027731 - RNA, 17 nt, Molluscum contagiosum virus
uagugaaccgcauuugu

SEQ ID NO: 4027732 - RNA, 19 nt, Molluscum contagiosum virus
uagugccgagcucgccucc

SEQ ID NO: 4027733 - RNA, 14 nt, Molluscum contagiosum virus
uaguggcgcucgcg

SEQ ID NO: 4027734 - RNA, 17 nt, Molluscum contagiosum virus
uaguugcagcccaccag

SEQ ID NO: 4027735 - RNA, 18 nt, Molluscum contagiosum virus
uaguugcgagccagccag

SEQ ID NO: 4027736 - RNA, 22 nt, Molluscum contagiosum virus
uaucccagaaaacgcacugucg

SEQ ID NO: 4027737 - RNA, 13 nt, Molluscum contagiosum virus
uaugcccagccug

SEQ ID NO: 4027738 - RNA, 13 nt, Molluscum contagiosum virus
uaugucuccccuu

SEQ ID NO: 4027739 - RNA, 20 nt, Molluscum contagiosum virus
uauuggacguccacaaagcc

SEQ ID NO: 4027740 - RNA, 19 nt, Molluscum contagiosum virus
ucaacagugcgugccaggc

SEQ ID NO: 4027741 - RNA, 14 nt, Molluscum contagiosum virus
ucaacgcgcgcgug

SEQ ID NO: 4027742 - RNA, 17 nt, Molluscum contagiosum virus
ucaacgcgcgcgugcug

SEQ ID NO: 4027743 - RNA, 16 nt, Molluscum contagiosum virus
ucaagaacaccaagag

SEQ ID NO: 4027744 - RNA, 17 nt, Molluscum contagiosum virus
ucaagaagcccaaggag

SEQ ID NO: 4027745 - RNA, 15 nt, Molluscum contagiosum virus
ucaagaaggcgcugg

SEQ ID NO: 4027746 - RNA, 16 nt, Molluscum contagiosum virus
ucaagacucgcccgcg

SEQ ID NO: 4027747 - RNA, 15 nt, Molluscum contagiosum virus
ucaagaggugcgugc

SEQ ID NO: 4027748 - RNA, 15 nt, Molluscum contagiosum virus
ucaagcaggcaugca

SEQ ID NO: 4027749 - RNA, 17 nt, Molluscum contagiosum virus
ucaagcaggcaugcaag

SEQ ID NO: 4027750 - RNA, 21 nt, Molluscum contagiosum virus
ucaagcagguggccgcgcgcg

SEQ ID NO: 4027751 - RNA, 21 nt, Molluscum contagiosum virus
ucaaggacaucuacagccgcc

SEQ ID NO: 4027752 - RNA, 17 nt, Molluscum contagiosum virus
ucaaggcgcgcaucgcg

SEQ ID NO: 4027753 - RNA, 23 nt, Molluscum contagiosum virus
ucaauggcgcgcgagcacagcgc

SEQ ID NO: 4027754 - RNA, 17 nt, Molluscum contagiosum virus
ucacaaagggguccgcg

SEQ ID NO: 4027755 - RNA, 21 nt, Molluscum contagiosum virus
ucacaagcaccgccugcugca

SEQ ID NO: 4027756 - RNA, 15 nt, Molluscum contagiosum virus
ucacaugugcugccg

SEQ ID NO: 4027757 - RNA, 16 nt, Molluscum contagiosum virus
ucacaugugcugccgg

SEQ ID NO: 4027758 - RNA, 23 nt, Molluscum contagiosum virus
ucaccagcuacgagccgcugcuc

SEQ ID NO: 4027759 - RNA, 23 nt, Molluscum contagiosum virus
ucaccaucaacaucuacaaggag

SEQ ID NO: 4027760 - RNA, 18 nt, Molluscum contagiosum virus
ucacgaugugcgcgcgac

SEQ ID NO: 4027761 - RNA, 21 nt, Molluscum contagiosum virus
ucacgcccuucaacgcgcgug

SEQ ID NO: 4027762 - RNA, 20 nt, Molluscum contagiosum virus
ucacgccgguggcgcgcgag

SEQ ID NO: 4027763 - RNA, 23 nt, Molluscum contagiosum virus
ucacgcgcgauggcgccugcuuc

SEQ ID NO: 4027764 - RNA, 15 nt, Molluscum contagiosum virus
ucacgcucgcgacgu

SEQ ID NO: 4027765 - RNA, 18 nt, Molluscum contagiosum virus
ucacggacucgagcccca

SEQ ID NO: 4027766 - RNA, 15 nt, Molluscum contagiosum virus
ucacggcgcucgccu

SEQ ID NO: 4027767 - RNA, 20 nt, Molluscum contagiosum virus
ucacgucaauggcgcgcgag

SEQ ID NO: 4027768 - RNA, 12 nt, Molluscum contagiosum virus
ucacuuucgcgc

SEQ ID NO: 4027769 - RNA, 16 nt, Molluscum contagiosum virus
ucacuuucgcgcgcac

SEQ ID NO: 4027770 - RNA, 12 nt, Molluscum contagiosum virus
ucagaggauucu

SEQ ID NO: 4027771 - RNA, 16 nt, Molluscum contagiosum virus
ucagaggauucuugca

SEQ ID NO: 4027772 - RNA, 15 nt, Molluscum contagiosum virus
ucagccccgcgccag

SEQ ID NO: 4027773 - RNA, 18 nt, Molluscum contagiosum virus
ucagccccgggcccgcau

SEQ ID NO: 4027774 - RNA, 17 nt, Molluscum contagiosum virus
ucagcgcgcgcagcacc

SEQ ID NO: 4027775 - RNA, 19 nt, Molluscum contagiosum virus
ucagcggcacugcgcgcau

SEQ ID NO: 4027776 - RNA, 19 nt, Molluscum contagiosum virus
ucagcggcggccccugccu

SEQ ID NO: 4027777 - RNA, 13 nt, Molluscum contagiosum virus
ucagcggcggucu

SEQ ID NO: 4027778 - RNA, 22 nt, Molluscum contagiosum virus
ucagcuccgacgugaccucgcu

SEQ ID NO: 4027779 - RNA, 14 nt, Molluscum contagiosum virus
ucaggccggucgcg

SEQ ID NO: 4027780 - RNA, 22 nt, Molluscum contagiosum virus
ucagugggcguuacagcaccuu

SEQ ID NO: 4027781 - RNA, 15 nt, Molluscum contagiosum virus
ucauccucuaccgcc

SEQ ID NO: 4027782 - RNA, 23 nt, Molluscum contagiosum virus
ucaucgugcccgguacgcucgcg

SEQ ID NO: 4027783 - RNA, 13 nt, Molluscum contagiosum virus
ucauggcgccgcu

SEQ ID NO: 4027784 - RNA, 17 nt, Molluscum contagiosum virus
uccaaaagacagaggcc

SEQ ID NO: 4027785 - RNA, 16 nt, Molluscum contagiosum virus
uccaagaagaggccag

SEQ ID NO: 4027786 - RNA, 20 nt, Molluscum contagiosum virus
uccaaggaggucccuagccu

SEQ ID NO: 4027787 - RNA, 20 nt, Molluscum contagiosum virus
uccaccggcagcgcauccga

SEQ ID NO: 4027788 - RNA, 18 nt, Molluscum contagiosum virus
uccacgcgugcgcgccag

SEQ ID NO: 4027789 - RNA, 13 nt, Molluscum contagiosum virus
uccacgcgugcug

SEQ ID NO: 4027790 - RNA, 13 nt, Molluscum contagiosum virus
uccacggacaugg

SEQ ID NO: 4027791 - RNA, 14 nt, Molluscum contagiosum virus
uccacggcgcgcac

SEQ ID NO: 4027792 - RNA, 14 nt, Molluscum contagiosum virus
agacaacaccagcg

SEQ ID NO: 4027793 - RNA, 13 nt, Molluscum contagiosum virus
agacacgagcgcg

SEQ ID NO: 4027794 - RNA, 15 nt, Molluscum contagiosum virus
agacacgcuggucag

SEQ ID NO: 4027795 - RNA, 14 nt, Molluscum contagiosum virus
agacaggccggggc

SEQ ID NO: 4027796 - RNA, 22 nt, Molluscum contagiosum virus
agacaucaucgcggagcugcgc

SEQ ID NO: 4027797 - RNA, 20 nt, Molluscum contagiosum virus
agacauuucuccuccggggc

SEQ ID NO: 4027798 - RNA, 12 nt, Molluscum contagiosum virus
agaccacgcgcg

SEQ ID NO: 4027799 - RNA, 13 nt, Molluscum contagiosum virus
agaccacgcgcgc

SEQ ID NO: 4027800 - RNA, 16 nt, Molluscum contagiosum virus
agaccucgcgcuuccg

SEQ ID NO: 4027801 - RNA, 13 nt, Molluscum contagiosum virus
agacgagggaugc

SEQ ID NO: 4027802 - RNA, 14 nt, Molluscum contagiosum virus
agacgcagcgcgag

SEQ ID NO: 4027803 - RNA, 19 nt, Molluscum contagiosum virus
agacgcguaccagcgccug

SEQ ID NO: 4027804 - RNA, 22 nt, Molluscum contagiosum virus
agacggaguccucgacaaugag

SEQ ID NO: 4027805 - RNA, 16 nt, Molluscum contagiosum virus
agacgugcugcgcgcc

SEQ ID NO: 4027806 - RNA, 17 nt, Molluscum contagiosum virus
agacguggugcucgugg

SEQ ID NO: 4027807 - RNA, 16 nt, Molluscum contagiosum virus
agacugacgccgaugu

SEQ ID NO: 4027808 - RNA, 14 nt, Molluscum contagiosum virus
agacugagucucca

SEQ ID NO: 4027809 - RNA, 21 nt, Molluscum contagiosum virus
agacugcuacgucgcggcgca

SEQ ID NO: 4027810 - RNA, 21 nt, Molluscum contagiosum virus
agacuucuccgaccgugcccu

SEQ ID NO: 4027811 - RNA, 20 nt, Molluscum contagiosum virus
agacuucuugcacgcucggc

SEQ ID NO: 4027812 - RNA, 14 nt, Molluscum contagiosum virus
agacuugugcccau

SEQ ID NO: 4027813 - RNA, 17 nt, Molluscum contagiosum virus
agagaaaggcacccacc

SEQ ID NO: 4027814 - RNA, 21 nt, Molluscum contagiosum virus
agagaccgucaaccugcugcc

SEQ ID NO: 4027815 - RNA, 17 nt, Molluscum contagiosum virus
agagcacgcgcucgcgc

SEQ ID NO: 4027816 - RNA, 14 nt, Molluscum contagiosum virus
agagcacugcgcgu

SEQ ID NO: 4027817 - RNA, 15 nt, Molluscum contagiosum virus
agagcccgccgggca

SEQ ID NO: 4027818 - RNA, 19 nt, Molluscum contagiosum virus
agagcccggacacguagcc

SEQ ID NO: 4027819 - RNA, 15 nt, Molluscum contagiosum virus
agagccgcgugcgcc

SEQ ID NO: 4027820 - RNA, 15 nt, Molluscum contagiosum virus
agagcgcgcggcgcc

SEQ ID NO: 4027821 - RNA, 17 nt, Molluscum contagiosum virus
agagcguccagccgcag

SEQ ID NO: 4027822 - RNA, 12 nt, Molluscum contagiosum virus
agagcugcugcg

SEQ ID NO: 4027823 - RNA, 13 nt, Molluscum contagiosum virus
agaggaaaggcgc

SEQ ID NO: 4027824 - RNA, 19 nt, Molluscum contagiosum virus
agaggccagcacaagccgu

SEQ ID NO: 4027825 - RNA, 19 nt, Molluscum contagiosum virus
agaggccggcacaagccgu

SEQ ID NO: 4027826 - RNA, 23 nt, Molluscum contagiosum virus
agaucaaccgcaaggaaaacugc

SEQ ID NO: 4027827 - RNA, 19 nt, Molluscum contagiosum virus
agauggucacgcgcaaggc

SEQ ID NO: 4027828 - RNA, 22 nt, Molluscum contagiosum virus
agauucggaggcggagcugccc

SEQ ID NO: 4027829 - RNA, 15 nt, Molluscum contagiosum virus
agcaagcucaagaag

SEQ ID NO: 4027830 - RNA, 23 nt, Molluscum contagiosum virus
agcaagcugcaagccagcccgcu

SEQ ID NO: 4027831 - RNA, 15 nt, Molluscum contagiosum virus
agcaaugcgcaaggc

SEQ ID NO: 4027832 - RNA, 17 nt, Molluscum contagiosum virus
agcaaugcgcaaggccg

SEQ ID NO: 4027833 - RNA, 13 nt, Molluscum contagiosum virus
agcacagcaggag

SEQ ID NO: 4027834 - RNA, 15 nt, Molluscum contagiosum virus
agcaccgcacgccag

SEQ ID NO: 4027835 - RNA, 17 nt, Molluscum contagiosum virus
agcaccgcaugggcccu

SEQ ID NO: 4027836 - RNA, 18 nt, Molluscum contagiosum virus
agcacggccgccaccgcg

SEQ ID NO: 4027837 - RNA, 19 nt, Molluscum contagiosum virus
agcacggccgccaccgcgc

SEQ ID NO: 4027838 - RNA, 20 nt, Molluscum contagiosum virus
agcacggcuugccgcucggc

SEQ ID NO: 4027839 - RNA, 21 nt, Molluscum contagiosum virus
agcacggcuugccgcucggca

SEQ ID NO: 4027840 - RNA, 17 nt, Molluscum contagiosum virus
agcacugccugccgccu

SEQ ID NO: 4027841 - RNA, 19 nt, Molluscum contagiosum virus
agcagacguacgagcaggc

SEQ ID NO: 4027842 - RNA, 22 nt, Molluscum contagiosum virus
agcagcaccgcacgccagcagc

SEQ ID NO: 4027843 - RNA, 17 nt, Molluscum contagiosum virus
agcagcgcgacuagccu

SEQ ID NO: 4027844 - RNA, 23 nt, Molluscum contagiosum virus
agcagcgcgacuagccugugccc

SEQ ID NO: 4027845 - RNA, 20 nt, Molluscum contagiosum virus
agcagcgcgagcuugccccu

SEQ ID NO: 4027846 - RNA, 14 nt, Molluscum contagiosum virus
agcagcgcgcgcag

SEQ ID NO: 4027847 - RNA, 18 nt, Molluscum contagiosum virus
agcagcggggacucuccc

SEQ ID NO: 4027848 - RNA, 14 nt, Molluscum contagiosum virus
agcagcuccagcau

SEQ ID NO: 4027849 - RNA, 19 nt, Molluscum contagiosum virus
agcaggacgacgacacagc

SEQ ID NO: 4027850 - RNA, 15 nt, Molluscum contagiosum virus
agcaggcacuccagc

SEQ ID NO: 4027851 - RNA, 22 nt, Molluscum contagiosum virus
agcaggcuguguuccagcucgg

SEQ ID NO: 4027852 - RNA, 13 nt, Molluscum contagiosum virus
agcaguaguugcu

SEQ ID NO: 4027853 - RNA, 17 nt, Molluscum contagiosum virus
agcauuagcgccaaggc

SEQ ID NO: 4027854 - RNA, 20 nt, Molluscum contagiosum virus
agcccauuaucgucacggcc

SEQ ID NO: 4027855 - RNA, 18 nt, Molluscum contagiosum virus
agccccgcggacggacga

SEQ ID NO: 4027856 - RNA, 17 nt, Molluscum contagiosum virus
agcccgcggcgcacggu

SEQ ID NO: 4027857 - RNA, 20 nt, Molluscum contagiosum virus
agcccggaagcuugcucagc

SEQ ID NO: 4027858 - RNA, 14 nt, Molluscum contagiosum virus
agccgagcgccgcc

SEQ ID NO: 4027859 - RNA, 14 nt, Molluscum contagiosum virus
agccgcagccgcgc

SEQ ID NO: 4027860 - RNA, 13 nt, Molluscum contagiosum virus
agccgccuggccg

SEQ ID NO: 4027861 - RNA, 20 nt, Molluscum contagiosum virus
agccgccuggccgaacugcu

SEQ ID NO: 4027862 - RNA, 16 nt, Molluscum contagiosum virus
agccgcucguccagcu

SEQ ID NO: 4027863 - RNA, 19 nt, Molluscum contagiosum virus
agccguucucguggcaagc

SEQ ID NO: 4027864 - RNA, 14 nt, Molluscum contagiosum virus
agccugcugcucuu

SEQ ID NO: 4027865 - RNA, 17 nt, Molluscum contagiosum virus
agcgacgagcagcugcu

SEQ ID NO: 4027866 - RNA, 22 nt, Molluscum contagiosum virus
agcgacgagcagcugcuucucu

SEQ ID NO: 4027867 - RNA, 15 nt, Molluscum contagiosum virus
agcgagcgcccgugc

SEQ ID NO: 4027868 - RNA, 13 nt, Molluscum contagiosum virus
agcgagcgcgggc

SEQ ID NO: 4027869 - RNA, 15 nt, Molluscum contagiosum virus
agcgagugcgcgugc

SEQ ID NO: 4027870 - RNA, 16 nt, Molluscum contagiosum virus
agcgaguucgcacgcu

SEQ ID NO: 4027871 - RNA, 17 nt, Molluscum contagiosum virus
agcgauguuuugaugag

SEQ ID NO: 4027872 - RNA, 21 nt, Molluscum contagiosum virus
agcgcaggcaguugccgcagc

SEQ ID NO: 4027873 - RNA, 17 nt, Molluscum contagiosum virus
agcgccacgagcagugc

SEQ ID NO: 4027874 - RNA, 22 nt, Molluscum contagiosum virus
agcgcccgugcuugcgcacgga

SEQ ID NO: 4027875 - RNA, 15 nt, Molluscum contagiosum virus
agcgccgccaugcug

SEQ ID NO: 4027876 - RNA, 15 nt, Molluscum contagiosum virus
agcgccgcgcgcggc

SEQ ID NO: 4027877 - RNA, 13 nt, Molluscum contagiosum virus
agcgcgagcuugc

SEQ ID NO: 4027878 - RNA, 20 nt, Molluscum contagiosum virus
agcgcgcccaccagcagcca

SEQ ID NO: 4027879 - RNA, 12 nt, Molluscum contagiosum virus
agcgcgccgcgc

SEQ ID NO: 4027880 - RNA, 16 nt, Molluscum contagiosum virus
agcgcgcgacugucuu

SEQ ID NO: 4027881 - RNA, 15 nt, Molluscum contagiosum virus
agcgcgcgccuugca

SEQ ID NO: 4027882 - RNA, 19 nt, Molluscum contagiosum virus
agcgcggaggcgcuaccuc

SEQ ID NO: 4027883 - RNA, 20 nt, Molluscum contagiosum virus
agcgcggggguguugcugau

SEQ ID NO: 4027884 - RNA, 15 nt, Molluscum contagiosum virus
agcgcgugcccgcag

SEQ ID NO: 4027885 - RNA, 23 nt, Molluscum contagiosum virus
agcgcgugccgcucggaggcuug

SEQ ID NO: 4027886 - RNA, 11 nt, Molluscum contagiosum virus
agcgcgugucu

SEQ ID NO: 4027887 - RNA, 22 nt, Molluscum contagiosum virus
agcgcugccugugcuacgcgag

SEQ ID NO: 4027888 - RNA, 16 nt, Molluscum contagiosum virus
agcgcuggagcuggcu

SEQ ID NO: 4027889 - RNA, 23 nt, Molluscum contagiosum virus
agcgcuucuagcucgcgcgcggc

SEQ ID NO: 4027890 - RNA, 23 nt, Molluscum contagiosum virus
agcgcuugcucuucgaccucugc

SEQ ID NO: 4027891 - RNA, 17 nt, Molluscum contagiosum virus
agcggacguggucgcgc

SEQ ID NO: 4027892 - RNA, 15 nt, Molluscum contagiosum virus
agcggagaaaaggaa

SEQ ID NO: 4027893 - RNA, 21 nt, Molluscum contagiosum virus
agcggagaaaaggaagcuugc

SEQ ID NO: 4027894 - RNA, 19 nt, Molluscum contagiosum virus
agcggauaugcgccugugc

SEQ ID NO: 4027895 - RNA, 19 nt, Molluscum contagiosum virus
caaggcaugcgcgcagugc

SEQ ID NO: 4027896 - RNA, 19 nt, Molluscum contagiosum virus
caaggccgcgcccaagaag

SEQ ID NO: 4027897 - RNA, 20 nt, Molluscum contagiosum virus
caaggccgcgggcgcggagu

SEQ ID NO: 4027898 - RNA, 16 nt, Molluscum contagiosum virus
caaggccguccccgga

SEQ ID NO: 4027899 - RNA, 22 nt, Molluscum contagiosum virus
caaggcgcgcaucgcgggcacg

SEQ ID NO: 4027900 - RNA, 19 nt, Molluscum contagiosum virus
caagggacugcgcccgugc

SEQ ID NO: 4027901 - RNA, 20 nt, Molluscum contagiosum virus
caagggcggucccgcgaacg

SEQ ID NO: 4027902 - RNA, 20 nt, Molluscum contagiosum virus
caaguacaugcacgucgaca

SEQ ID NO: 4027903 - RNA, 15 nt, Molluscum contagiosum virus
caaguccagcgcgcu

SEQ ID NO: 4027904 - RNA, 19 nt, Molluscum contagiosum virus
caagucguuugcucggggc

SEQ ID NO: 4027905 - RNA, 15 nt, Molluscum contagiosum virus
caagucucccucgcg

SEQ ID NO: 4027906 - RNA, 19 nt, Molluscum contagiosum virus
caagugggcgucgaccugg

SEQ ID NO: 4027907 - RNA, 21 nt, Molluscum contagiosum virus
caaucccacguacgagcagcu

SEQ ID NO: 4027908 - RNA, 15 nt, Molluscum contagiosum virus
caaugaggagaggaa

SEQ ID NO: 4027909 - RNA, 15 nt, Molluscum contagiosum virus
caaugcgcaaggccg

SEQ ID NO: 4027910 - RNA, 17 nt, Molluscum contagiosum virus
caaugcgcacgugcucg

SEQ ID NO: 4027911 - RNA, 22 nt, Molluscum contagiosum virus
cacaaacucgcagaacugcugc

SEQ ID NO: 4027912 - RNA, 18 nt, Molluscum contagiosum virus
cacaaagagacgcggccg

SEQ ID NO: 4027913 - RNA, 19 nt, Molluscum contagiosum virus
cacaaagagcacggacagc

SEQ ID NO: 4027914 - RNA, 19 nt, Molluscum contagiosum virus
cacaaagccaaccccgagc

SEQ ID NO: 4027915 - RNA, 20 nt, Molluscum contagiosum virus
cacaaagggguccgcgucug

SEQ ID NO: 4027916 - RNA, 22 nt, Molluscum contagiosum virus
cacaacuugggcccgccuccgg

SEQ ID NO: 4027917 - RNA, 20 nt, Molluscum contagiosum virus
cacaagauggcgcagcacuu

SEQ ID NO: 4027918 - RNA, 17 nt, Molluscum contagiosum virus
cacaagccguccgccuc

SEQ ID NO: 4027919 - RNA, 22 nt, Molluscum contagiosum virus
cacaagccguccgccucgagca

SEQ ID NO: 4027920 - RNA, 18 nt, Molluscum contagiosum virus
cacaagccguugucuugg

SEQ ID NO: 4027921 - RNA, 14 nt, Molluscum contagiosum virus
cacacaccgcgagc

SEQ ID NO: 4027922 - RNA, 14 nt, Molluscum contagiosum virus
cacacacggaagcu

SEQ ID NO: 4027923 - RNA, 15 nt, Molluscum contagiosum virus
cacaccgcguggaca

SEQ ID NO: 4027924 - RNA, 15 nt, Molluscum contagiosum virus
cacacgcaccgccug

SEQ ID NO: 4027925 - RNA, 16 nt, Molluscum contagiosum virus
cacacucacgcgucca

SEQ ID NO: 4027926 - RNA, 22 nt, Molluscum contagiosum virus
cacacucgcgcguccacaaggg

SEQ ID NO: 4027927 - RNA, 16 nt, Molluscum contagiosum virus
cacacucgcgcguccg

SEQ ID NO: 4027928 - RNA, 14 nt, Molluscum contagiosum virus
cacacuugcgcguu

SEQ ID NO: 4027929 - RNA, 12 nt, Molluscum contagiosum virus
cacagcacaggc

SEQ ID NO: 4027930 - RNA, 19 nt, Molluscum contagiosum virus
cacaguccaacccgcggcg

SEQ ID NO: 4027931 - RNA, 23 nt, Molluscum contagiosum virus
cacagucuccacgcgugcgcgcc

SEQ ID NO: 4027932 - RNA, 16 nt, Molluscum contagiosum virus
cacaguucacggcgcu

SEQ ID NO: 4027933 - RNA, 13 nt, Molluscum contagiosum virus
cacauccgcuacc

SEQ ID NO: 4027934 - RNA, 16 nt, Molluscum contagiosum virus
cacaucggcacugcuc

SEQ ID NO: 4027935 - RNA, 18 nt, Molluscum contagiosum virus
cacauuccucggcgcaca

SEQ ID NO: 4027936 - RNA, 17 nt, Molluscum contagiosum virus
cacauugcgaggcaccg

SEQ ID NO: 4027937 - RNA, 13 nt, Molluscum contagiosum virus
cacauugcugcug

SEQ ID NO: 4027938 - RNA, 15 nt, Molluscum contagiosum virus
cacauugcugcugca

SEQ ID NO: 4027939 - RNA, 18 nt, Molluscum contagiosum virus
caccacggccgacggcac

SEQ ID NO: 4027940 - RNA, 12 nt, Molluscum contagiosum virus
caccagcaccag

SEQ ID NO: 4027941 - RNA, 13 nt, Molluscum contagiosum virus
caccagcagccag

SEQ ID NO: 4027942 - RNA, 14 nt, Molluscum contagiosum virus
caccagcgcggccg

SEQ ID NO: 4027943 - RNA, 14 nt, Molluscum contagiosum virus
caccauccugcgcu

SEQ ID NO: 4027944 - RNA, 16 nt, Molluscum contagiosum virus
cacccaccaggaacga

SEQ ID NO: 4027945 - RNA, 23 nt, Molluscum contagiosum virus
caccccgaaaggcacccgcagga

SEQ ID NO: 4027946 - RNA, 12 nt, Molluscum contagiosum virus
caccgaggagcc

SEQ ID NO: 4027947 - RNA, 16 nt, Molluscum contagiosum virus
caccgcaucccccgcg

SEQ ID NO: 4027948 - RNA, 21 nt, Molluscum contagiosum virus
caccgcaugggcccuggcggc

SEQ ID NO: 4027949 - RNA, 21 nt, Molluscum contagiosum virus
caccgccuguaccugcucggg

SEQ ID NO: 4027950 - RNA, 19 nt, Molluscum contagiosum virus
caccgcgggcgugcccggc

SEQ ID NO: 4027951 - RNA, 22 nt, Molluscum contagiosum virus
caccgcguccgcuaccgcagcc

SEQ ID NO: 4027952 - RNA, 20 nt, Molluscum contagiosum virus
caccguggaggagccgcccg

SEQ ID NO: 4027953 - RNA, 19 nt, Molluscum contagiosum virus
caccguugccgcggcagug

SEQ ID NO: 4027954 - RNA, 21 nt, Molluscum contagiosum virus
caccuaaauggacgcgccgcg

SEQ ID NO: 4027955 - RNA, 15 nt, Molluscum contagiosum virus
caccucaccgcgcac

SEQ ID NO: 4027956 - RNA, 16 nt, Molluscum contagiosum virus
caccugcacgacguac

SEQ ID NO: 4027957 - RNA, 15 nt, Molluscum contagiosum virus
caccugcacgagccg

SEQ ID NO: 4027958 - RNA, 16 nt, Molluscum contagiosum virus
caccugcacgagccgg

SEQ ID NO: 4027959 - RNA, 14 nt, Molluscum contagiosum virus
caccugcaggaaag

SEQ ID NO: 4027960 - RNA, 13 nt, Molluscum contagiosum virus
caccugcgacgcc

SEQ ID NO: 4027961 - RNA, 22 nt, Molluscum contagiosum virus
caccuggcgagcgcucugcauu

SEQ ID NO: 4027962 - RNA, 18 nt, Molluscum contagiosum virus
caccuucggaacugcgga

SEQ ID NO: 4027963 - RNA, 16 nt, Molluscum contagiosum virus
caccuuuuccacgcgg

SEQ ID NO: 4027964 - RNA, 19 nt, Molluscum contagiosum virus
cacgaacgacagcgccgcc

SEQ ID NO: 4027965 - RNA, 22 nt, Molluscum contagiosum virus
cacgaagagucgcgccuggagc

SEQ ID NO: 4027966 - RNA, 15 nt, Molluscum contagiosum virus
cacgaccacgcuggc

SEQ ID NO: 4027967 - RNA, 13 nt, Molluscum contagiosum virus
cacgacccucuuc

SEQ ID NO: 4027968 - RNA, 13 nt, Molluscum contagiosum virus
cacgaccgcgcac

SEQ ID NO: 4027969 - RNA, 23 nt, Molluscum contagiosum virus
cacgacggaacguuggcccgcaa

SEQ ID NO: 4027970 - RNA, 15 nt, Molluscum contagiosum virus
cacgacucgcgucug

SEQ ID NO: 4027971 - RNA, 21 nt, Molluscum contagiosum virus
cacgacucgcgucugcaaggc

SEQ ID NO: 4027972 - RNA, 12 nt, Molluscum contagiosum virus
cacgacucucaa

SEQ ID NO: 4027973 - RNA, 21 nt, Molluscum contagiosum virus
cacgagacugagugcugagcc

SEQ ID NO: 4027974 - RNA, 15 nt, Molluscum contagiosum virus
cacgagcacugccug

SEQ ID NO: 4027975 - RNA, 13 nt, Molluscum contagiosum virus
cacgagcgcggca

SEQ ID NO: 4027976 - RNA, 19 nt, Molluscum contagiosum virus
cacgagcugacgcagacgc

SEQ ID NO: 4027977 - RNA, 14 nt, Molluscum contagiosum virus
cacgagcugcugcg

SEQ ID NO: 4027978 - RNA, 13 nt, Molluscum contagiosum virus
cacgagcugcugu

SEQ ID NO: 4027979 - RNA, 13 nt, Molluscum contagiosum virus
cacgaggagcccc

SEQ ID NO: 4027980 - RNA, 15 nt, Molluscum contagiosum virus
cacgagggccuuggc

SEQ ID NO: 4027981 - RNA, 14 nt, Molluscum contagiosum virus
cacgcaaacaaaac

SEQ ID NO: 4027982 - RNA, 15 nt, Molluscum contagiosum virus
cacgcacucgcuggc

SEQ ID NO: 4027983 - RNA, 20 nt, Molluscum contagiosum virus
cacgcaggacuggcaccugc

SEQ ID NO: 4027984 - RNA, 17 nt, Molluscum contagiosum virus
cacgccaagcgcuugcu

SEQ ID NO: 4027985 - RNA, 23 nt, Molluscum contagiosum virus
cacgccagcagcagaggaguagc

SEQ ID NO: 4027986 - RNA, 15 nt, Molluscum contagiosum virus
cacgccagguguucc

SEQ ID NO: 4027987 - RNA, 19 nt, Molluscum contagiosum virus
cacgcccgaggaccggcgc

SEQ ID NO: 4027988 - RNA, 21 nt, Molluscum contagiosum virus
cacgccgcagcgcuggagcug

SEQ ID NO: 4027989 - RNA, 13 nt, Molluscum contagiosum virus
cacgccgcccgag

SEQ ID NO: 4027990 - RNA, 22 nt, Molluscum contagiosum virus
cacgccgcucggcacugcuggc

SEQ ID NO: 4027991 - RNA, 20 nt, Molluscum contagiosum virus
cacgccgguggcgcgcgagc

SEQ ID NO: 4027992 - RNA, 14 nt, Molluscum contagiosum virus
cacgccuccaagaa

SEQ ID NO: 4027993 - RNA, 20 nt, Molluscum contagiosum virus
cacgcgaauguccggcgcug

SEQ ID NO: 4027994 - RNA, 21 nt, Molluscum contagiosum virus
cacgcgaauguccggcgcugg

SEQ ID NO: 4027995 - RNA, 18 nt, Molluscum contagiosum virus
cacgcgcaaggccgcgcc

SEQ ID NO: 4027996 - RNA, 16 nt, Molluscum contagiosum virus
cacgcgcaaggucuuc

SEQ ID NO: 4027997 - RNA, 13 nt, Molluscum contagiosum virus
cacgcgcacgggc

SEQ ID NO: 4027998 - RNA, 20 nt, Molluscum contagiosum virus
gcgucgagggcgccgggcgc

SEQ ID NO: 4027999 - RNA, 22 nt, Molluscum contagiosum virus
gcgucgcacaguucacggcgcu

SEQ ID NO: 4028000 - RNA, 16 nt, Molluscum contagiosum virus
gcgucgcgcacgcgcg

SEQ ID NO: 4028001 - RNA, 17 nt, Molluscum contagiosum virus
gcgucgcgcaggcgccc

SEQ ID NO: 4028002 - RNA, 23 nt, Molluscum contagiosum virus
gcgucggucaccaccaccuccag

SEQ ID NO: 4028003 - RNA, 20 nt, Molluscum contagiosum virus
gcgucgugcaccuggagcag

SEQ ID NO: 4028004 - RNA, 18 nt, Molluscum contagiosum virus
gcgucgugcuccacgcgc

SEQ ID NO: 4028005 - RNA, 14 nt, Molluscum contagiosum virus
gcgucucccgcggc

SEQ ID NO: 4028006 - RNA, 17 nt, Molluscum contagiosum virus
gcgucucugcgcagagc

SEQ ID NO: 4028007 - RNA, 21 nt, Molluscum contagiosum virus
gcgugacaaucucugcgccgc

SEQ ID NO: 4028008 - RNA, 22 nt, Molluscum contagiosum virus
gcgugacccucuucgacuuacg

SEQ ID NO: 4028009 - RNA, 20 nt, Molluscum contagiosum virus
gcgugcauagugggcuugcg

SEQ ID NO: 4028010 - RNA, 15 nt, Molluscum contagiosum virus
gcgugcaugcccagc

SEQ ID NO: 4028011 - RNA, 15 nt, Molluscum contagiosum virus
gcgugccgcggacgc

SEQ ID NO: 4028012 - RNA, 21 nt, Molluscum contagiosum virus
gcgugccgcggcacugggugc

SEQ ID NO: 4028013 - RNA, 14 nt, Molluscum contagiosum virus
gcgugcgagcagag

SEQ ID NO: 4028014 - RNA, 13 nt, Molluscum contagiosum virus
gcgugcgccucgc

SEQ ID NO: 4028015 - RNA, 17 nt, Molluscum contagiosum virus
gcucuucgagacgcugc

SEQ ID NO: 4028016 - RNA, 13 nt, Molluscum contagiosum virus
gcugacgcgcagu

SEQ ID NO: 4028017 - RNA, 17 nt, Molluscum contagiosum virus
gcugaguuacguggccg

SEQ ID NO: 4028018 - RNA, 22 nt, Molluscum contagiosum virus
gcugaugcuagcgugugccgcc

SEQ ID NO: 4028019 - RNA, 19 nt, Molluscum contagiosum virus
gcugcaaagcgcggccgcg

SEQ ID NO: 4028020 - RNA, 19 nt, Molluscum contagiosum virus
gcugcaaggcgcgcgcugg

SEQ ID NO: 4028021 - RNA, 17 nt, Molluscum contagiosum virus
gcugcaaucugcgcucc

SEQ ID NO: 4028022 - RNA, 23 nt, Molluscum contagiosum virus
gcugcacaguucacggcgcucgc

SEQ ID NO: 4028023 - RNA, 18 nt, Molluscum contagiosum virus
gcugcacaugugcgugca

SEQ ID NO: 4028024 - RNA, 17 nt, Molluscum contagiosum virus
gcugcagaacugccugg

SEQ ID NO: 4028025 - RNA, 14 nt, Molluscum contagiosum virus
gcugcagagcgugc

SEQ ID NO: 4028026 - RNA, 19 nt, Molluscum contagiosum virus
gcugccaauaccaggccac

SEQ ID NO: 4028027 - RNA, 15 nt, Molluscum contagiosum virus
gcugccagcucgaca

SEQ ID NO: 4028028 - RNA, 17 nt, Molluscum contagiosum virus
gcugcccgcgcagcgcc

SEQ ID NO: 4028029 - RNA, 14 nt, Molluscum contagiosum virus
gcugcccgcgcgcg

SEQ ID NO: 4028030 - RNA, 16 nt, Molluscum contagiosum virus
gcugcccuuuagcgug

SEQ ID NO: 4028031 - RNA, 21 nt, Molluscum contagiosum virus
gcugcccuuuagcguggcgcg

SEQ ID NO: 4028032 - RNA, 22 nt, Molluscum contagiosum virus
gcugccgcgcguuuucccgagg

SEQ ID NO: 4028033 - RNA, 14 nt, Molluscum contagiosum virus
gcugccgcugcgcg

SEQ ID NO: 4028034 - RNA, 18 nt, Molluscum contagiosum virus
gcugccgcuucgugcgcg

SEQ ID NO: 4028035 - RNA, 22 nt, Molluscum contagiosum virus
gcugccggcaacgcugccgcug

SEQ ID NO: 4028036 - RNA, 22 nt, Molluscum contagiosum virus
gcugccgguggaagagcccgca

SEQ ID NO: 4028037 - RNA, 16 nt, Molluscum contagiosum virus
gcugccgucgcgcgcu

SEQ ID NO: 4028038 - RNA, 13 nt, Molluscum contagiosum virus
gcugcgagagcau

SEQ ID NO: 4028039 - RNA, 14 nt, Molluscum contagiosum virus
gcugcgcacgggcg

SEQ ID NO: 4028040 - RNA, 16 nt, Molluscum contagiosum virus
gcugcgccacugccac

SEQ ID NO: 4028041 - RNA, 14 nt, Molluscum contagiosum virus
gcugcgccugcagg

SEQ ID NO: 4028042 - RNA, 16 nt, Molluscum contagiosum virus
gcugcgcgccgccgac

SEQ ID NO: 4028043 - RNA, 18 nt, Molluscum contagiosum virus
gcugcgcgcgcucgcgca

SEQ ID NO: 4028044 - RNA, 16 nt, Molluscum contagiosum virus
gcugcgcgcucuggag

SEQ ID NO: 4028045 - RNA, 17 nt, Molluscum contagiosum virus
gcugcgcgcucuggagc

SEQ ID NO: 4028046 - RNA, 16 nt, Molluscum contagiosum virus
gcugcgcggcgccgca

SEQ ID NO: 4028047 - RNA, 22 nt, Molluscum contagiosum virus
gcugcgcuacauguaugccagc

SEQ ID NO: 4028048 - RNA, 19 nt, Molluscum contagiosum virus
gcugcgcuccaugcugccg

SEQ ID NO: 4028049 - RNA, 19 nt, Molluscum contagiosum virus
gcugcgcucggcgcgcgcc

SEQ ID NO: 4028050 - RNA, 20 nt, Molluscum contagiosum virus
gcugcgcuucuauugccgcg

SEQ ID NO: 4028051 - RNA, 14 nt, Molluscum contagiosum virus
gcugcggcugcugc

SEQ ID NO: 4028052 - RNA, 18 nt, Molluscum contagiosum virus
gcugcggcugcuggagcu

SEQ ID NO: 4028053 - RNA, 20 nt, Molluscum contagiosum virus
gcugcgucacaagcaccgcc

SEQ ID NO: 4028054 - RNA, 12 nt, Molluscum contagiosum virus
gcugcgugcgcg

SEQ ID NO: 4028055 - RNA, 13 nt, Molluscum contagiosum virus
gcugcgugugccg

SEQ ID NO: 4028056 - RNA, 14 nt, Molluscum contagiosum virus
gcugcgugugccgg

SEQ ID NO: 4028057 - RNA, 19 nt, Molluscum contagiosum virus
gcugcuagagaaccugugc

SEQ ID NO: 4028058 - RNA, 20 nt, Molluscum contagiosum virus
gcugcuagagaaccugugcg

SEQ ID NO: 4028059 - RNA, 20 nt, Molluscum contagiosum virus
gcugcuccgugcccacgagc

SEQ ID NO: 4028060 - RNA, 20 nt, Molluscum contagiosum virus
gcugcucgcgcgcgcacgcc

SEQ ID NO: 4028061 - RNA, 14 nt, Molluscum contagiosum virus
gcugcugcgcacgu

SEQ ID NO: 4028062 - RNA, 15 nt, Molluscum contagiosum virus
gcugcugcgcgcgcu

SEQ ID NO: 4028063 - RNA, 14 nt, Molluscum contagiosum virus
gcugcugcggcucc

SEQ ID NO: 4028064 - RNA, 17 nt, Molluscum contagiosum virus
gcugcuucgcgaccacg

SEQ ID NO: 4028065 - RNA, 17 nt, Molluscum contagiosum virus
gcuggaccccgagcugc

SEQ ID NO: 4028066 - RNA, 20 nt, Molluscum contagiosum virus
gcuggaccugcgccagcgcc

SEQ ID NO: 4028067 - RNA, 22 nt, Molluscum contagiosum virus
gcuggacgggcacgagcacguc

SEQ ID NO: 4028068 - RNA, 13 nt, Molluscum contagiosum virus
gcuggacggugcu

SEQ ID NO: 4028069 - RNA, 14 nt, Molluscum contagiosum virus
gcuggacggugcug

SEQ ID NO: 4028070 - RNA, 21 nt, Molluscum contagiosum virus
gcuggacuuccugcugcgcag

SEQ ID NO: 4028071 - RNA, 23 nt, Molluscum contagiosum virus
gcuggacuuccugcugcgcagca

SEQ ID NO: 4028072 - RNA, 17 nt, Molluscum contagiosum virus
gcuggagcgagugcgcg

SEQ ID NO: 4028073 - RNA, 14 nt, Molluscum contagiosum virus
gcuggagcuggcug

SEQ ID NO: 4028074 - RNA, 16 nt, Molluscum contagiosum virus
gcuggagggcacgcug

SEQ ID NO: 4028075 - RNA, 18 nt, Molluscum contagiosum virus
gcuggagggcacgcugca

SEQ ID NO: 4028076 - RNA, 12 nt, Molluscum contagiosum virus
gcuggccaacac

SEQ ID NO: 4028077 - RNA, 23 nt, Molluscum contagiosum virus
gcuggcgaaaccugggcgccgcg

SEQ ID NO: 4028078 - RNA, 18 nt, Molluscum contagiosum virus
gcuggcgcgcgccgagcc

SEQ ID NO: 4028079 - RNA, 22 nt, Molluscum contagiosum virus
gcuggcgcuaccuaccggcagc

SEQ ID NO: 4028080 - RNA, 16 nt, Molluscum contagiosum virus
gcuggcggggcuggca

SEQ ID NO: 4028081 - RNA, 21 nt, Molluscum contagiosum virus
gcuggcgugcgcagugcugcg

SEQ ID NO: 4028082 - RNA, 20 nt, Molluscum contagiosum virus
gcuggcguugccgagcgagc

SEQ ID NO: 4028083 - RNA, 19 nt, Molluscum contagiosum virus
gcugggaaagggcugcuug

SEQ ID NO: 4028084 - RNA, 19 nt, Molluscum contagiosum virus
gcugggccccuacgugguc

SEQ ID NO: 4028085 - RNA, 19 nt, Molluscum contagiosum virus
gcugggcgguugccugcac

SEQ ID NO: 4028086 - RNA, 14 nt, Molluscum contagiosum virus
gcugggcguggcgc

SEQ ID NO: 4028087 - RNA, 17 nt, Molluscum contagiosum virus
gcugggcguggcgcacc

SEQ ID NO: 4028088 - RNA, 17 nt, Molluscum contagiosum virus
gcuggugcucgccugca

SEQ ID NO: 4028089 - RNA, 15 nt, Molluscum contagiosum virus
gcugguggugcugga

SEQ ID NO: 4028090 - RNA, 15 nt, Molluscum contagiosum virus
gcuggugugcacuga

SEQ ID NO: 4028091 - RNA, 18 nt, Molluscum contagiosum virus
gcugguuaccaagggcau

SEQ ID NO: 4028092 - RNA, 15 nt, Molluscum contagiosum virus
gcugguucugcgcug

SEQ ID NO: 4028093 - RNA, 21 nt, Molluscum contagiosum virus
gcugucaacagugcgugccag

SEQ ID NO: 4028094 - RNA, 20 nt, Molluscum contagiosum virus
gcugucccaagacucugccg

SEQ ID NO: 4028095 - RNA, 12 nt, Molluscum contagiosum virus
gcugucucuguc

SEQ ID NO: 4028096 - RNA, 18 nt, Molluscum contagiosum virus
gcugugagcgcgccgcuc

SEQ ID NO: 4028097 - RNA, 22 nt, Molluscum contagiosum virus
gcugugccuaggaggagaacuc

SEQ ID NO: 4028098 - RNA, 18 nt, Molluscum contagiosum virus
gcuucaaguuccuggagc

SEQ ID NO: 4028099 - RNA, 16 nt, Molluscum contagiosum virus
gcuucacgugcuugcc

SEQ ID NO: 4028100 - RNA, 18 nt, Molluscum contagiosum virus
gcuucacgugcuugcccg

SEQ ID NO: 4028101 - RNA, 23 nt, Molluscum contagiosum virus
gcuucaggcaagaggggagccag

SEQ ID NO: 4028102 - RNA, 22 nt, Molluscum contagiosum virus
gcuuccccgcacaagggcagcu

SEQ ID NO: 4028103 - RNA, 23 nt, Molluscum contagiosum virus
gcuucccgaguacuacuacacug

SEQ ID NO: 4028104 - RNA, 13 nt, Molluscum contagiosum virus
gcuuccggcacca

SEQ ID NO: 4028105 - RNA, 23 nt, Molluscum contagiosum virus
gcuuccucuacaccagcuggacg

SEQ ID NO: 4028106 - RNA, 18 nt, Molluscum contagiosum virus
gcuucggcggcugugccc

SEQ ID NO: 4028107 - RNA, 14 nt, Molluscum contagiosum virus
gcuucggcucccag

SEQ ID NO: 4028108 - RNA, 16 nt, Molluscum contagiosum virus
gcuucgucuucaccug

SEQ ID NO: 4028109 - RNA, 20 nt, Molluscum contagiosum virus
gcuucuccaccuucaggacg

SEQ ID NO: 4028110 - RNA, 16 nt, Molluscum contagiosum virus
gcuucuuugcgcgcau

SEQ ID NO: 4028111 - RNA, 13 nt, Molluscum contagiosum virus
gcuugcagacaag

SEQ ID NO: 4028112 - RNA, 18 nt, Molluscum contagiosum virus
gcuugcauguucucuuug

SEQ ID NO: 4028113 - RNA, 19 nt, Molluscum contagiosum virus
gcuugccgugccuagcguu

SEQ ID NO: 4028114 - RNA, 14 nt, Molluscum contagiosum virus
gcuugcggcacgca

SEQ ID NO: 4028115 - RNA, 22 nt, Molluscum contagiosum virus
gcuugcucuucgaccucugcuu

SEQ ID NO: 4028116 - RNA, 20 nt, Molluscum contagiosum virus
gcuuggacuccgaggcaggu

SEQ ID NO: 4028117 - RNA, 17 nt, Molluscum contagiosum virus
ggcacccucagaccaga

SEQ ID NO: 4028118 - RNA, 11 nt, Molluscum contagiosum virus
ggcacccuggc

SEQ ID NO: 4028119 - RNA, 17 nt, Molluscum contagiosum virus
ggcacccuggcugcugc

SEQ ID NO: 4028120 - RNA, 23 nt, Molluscum contagiosum virus
ggcaccgccguguugcguagagc

SEQ ID NO: 4028121 - RNA, 12 nt, Molluscum contagiosum virus
ggcaccgcgcgc

SEQ ID NO: 4028122 - RNA, 12 nt, Molluscum contagiosum virus
ggcacgagcacg

SEQ ID NO: 4028123 - RNA, 23 nt, Molluscum contagiosum virus
ggcacgaucgcgagacccccguu

SEQ ID NO: 4028124 - RNA, 17 nt, Molluscum contagiosum virus
ggcacgcgagcgcgagu

SEQ ID NO: 4028125 - RNA, 23 nt, Molluscum contagiosum virus
ggcacgcugcguuuccagggcag

SEQ ID NO: 4028126 - RNA, 19 nt, Molluscum contagiosum virus
ggcacggcacccgccagcu

SEQ ID NO: 4028127 - RNA, 21 nt, Molluscum contagiosum virus
ggcacggcacccgccagcuuu

SEQ ID NO: 4028128 - RNA, 20 nt, Molluscum contagiosum virus
ggcacgggaaggcucucaac

SEQ ID NO: 4028129 - RNA, 13 nt, Molluscum contagiosum virus
ggcacgugccccg

SEQ ID NO: 4028130 - RNA, 14 nt, Molluscum contagiosum virus
ggcacgugcugcug

SEQ ID NO: 4028131 - RNA, 16 nt, Molluscum contagiosum virus
ggcacugcuacgagcc

SEQ ID NO: 4028132 - RNA, 19 nt, Molluscum contagiosum virus
ggcacugcuggcgcgcgcg

SEQ ID NO: 4028133 - RNA, 24 nt, Molluscum contagiosum virus
ggcagaaacucuccgacgugcugc

SEQ ID NO: 4028134 - RNA, 14 nt, Molluscum contagiosum virus
ggcagaagcucauu

SEQ ID NO: 4028135 - RNA, 20 nt, Molluscum contagiosum virus
ggcagaccccuugcuacagg

SEQ ID NO: 4028136 - RNA, 14 nt, Molluscum contagiosum virus
ggcagacgccagcg

SEQ ID NO: 4028137 - RNA, 16 nt, Molluscum contagiosum virus
ggcagcagcgugcaua

SEQ ID NO: 4028138 - RNA, 19 nt, Molluscum contagiosum virus
ggcagcccgucggccacag

SEQ ID NO: 4028139 - RNA, 13 nt, Molluscum contagiosum virus
ggcagccgcugga

SEQ ID NO: 4028140 - RNA, 16 nt, Molluscum contagiosum virus
ggcagcgccagcgaga

SEQ ID NO: 4028141 - RNA, 23 nt, Molluscum contagiosum virus
ggcagcgccgcgcgcgcgcguga

SEQ ID NO: 4028142 - RNA, 17 nt, Molluscum contagiosum virus
ggcagcuggagcugccg

SEQ ID NO: 4028143 - RNA, 18 nt, Molluscum contagiosum virus
ggcagcuggagcugccgc

SEQ ID NO: 4028144 - RNA, 19 nt, Molluscum contagiosum virus
ggcagcuucugcucgcgca

SEQ ID NO: 4028145 - RNA, 12 nt, Molluscum contagiosum virus
ggcaggcgcugc

SEQ ID NO: 4028146 - RNA, 21 nt, Molluscum contagiosum virus
ggcaucgucucgcucuuccgc

SEQ ID NO: 4028147 - RNA, 17 nt, Molluscum contagiosum virus
ggcaucgugcucuucgc

SEQ ID NO: 4028148 - RNA, 21 nt, Molluscum contagiosum virus
ggcaucuucggcguguucaug

SEQ ID NO: 4028149 - RNA, 18 nt, Molluscum contagiosum virus
ggcaugcaaggcggacgc

SEQ ID NO: 4028150 - RNA, 15 nt, Molluscum contagiosum virus
ggcaugcgcgcagug

SEQ ID NO: 4028151 - RNA, 15 nt, Molluscum contagiosum virus
ggcauggagggcgag

SEQ ID NO: 4028152 - RNA, 14 nt, Molluscum contagiosum virus
ggcaugggcaagga

SEQ ID NO: 4028153 - RNA, 15 nt, Molluscum contagiosum virus
ggccaaccuccugca

SEQ ID NO: 4028154 - RNA, 23 nt, Molluscum contagiosum virus
ggccaaggucucgagcuccaggg

SEQ ID NO: 4028155 - RNA, 16 nt, Molluscum contagiosum virus
ggccacgcacucgcug

SEQ ID NO: 4028156 - RNA, 22 nt, Molluscum contagiosum virus
ggccaucgagcuucccgagguc

SEQ ID NO: 4028157 - RNA, 21 nt, Molluscum contagiosum virus
ggccaugaucauggcgccgcu

SEQ ID NO: 4028158 - RNA, 16 nt, Molluscum contagiosum virus
ggcccgccuccgggca

SEQ ID NO: 4028159 - RNA, 16 nt, Molluscum contagiosum virus
ggcccgcgcgugaagg

SEQ ID NO: 4028160 - RNA, 17 nt, Molluscum contagiosum virus
ggcccgcgcgugaagga

SEQ ID NO: 4028161 - RNA, 13 nt, Molluscum contagiosum virus
ggcccgugcccga

SEQ ID NO: 4028162 - RNA, 17 nt, Molluscum contagiosum virus
ggccgccauccgcgagc

SEQ ID NO: 4028163 - RNA, 17 nt, Molluscum contagiosum virus
ggccgccgcccgcgaau

SEQ ID NO: 4028164 - RNA, 13 nt, Molluscum contagiosum virus
ggccgcgagcgcg

SEQ ID NO: 4028165 - RNA, 13 nt, Molluscum contagiosum virus
ggccgcgcucguc

SEQ ID NO: 4028166 - RNA, 17 nt, Molluscum contagiosum virus
ggccggcgggcgcgugc

SEQ ID NO: 4028167 - RNA, 13 nt, Molluscum contagiosum virus
ggccggucgcgga

SEQ ID NO: 4028168 - RNA, 13 nt, Molluscum contagiosum virus
ggccguccccgga

SEQ ID NO: 4028169 - RNA, 14 nt, Molluscum contagiosum virus
ggccgugcccgccg

SEQ ID NO: 4028170 - RNA, 22 nt, Molluscum contagiosum virus
ggccgugcucacggacucgccg

SEQ ID NO: 4028171 - RNA, 17 nt, Molluscum contagiosum virus
ggccucgccuccgggcg

SEQ ID NO: 4028172 - RNA, 14 nt, Molluscum contagiosum virus
ggccugcggcggcg

SEQ ID NO: 4028173 - RNA, 20 nt, Molluscum contagiosum virus
ggccugcguggacagcaucc

SEQ ID NO: 4028174 - RNA, 15 nt, Molluscum contagiosum virus
ggccugcugaagaag

SEQ ID NO: 4028175 - RNA, 15 nt, Molluscum contagiosum virus
ggccuguaccugcga

SEQ ID NO: 4028176 - RNA, 14 nt, Molluscum contagiosum virus
ggccuguccgcgga

SEQ ID NO: 4028177 - RNA, 18 nt, Molluscum contagiosum virus
ggcgaacaccccgagcug

SEQ ID NO: 4028178 - RNA, 15 nt, Molluscum contagiosum virus
ggcgacacggagacg

SEQ ID NO: 4028179 - RNA, 17 nt, Molluscum contagiosum virus
ggcgacgagggcgccaa

SEQ ID NO: 4028180 - RNA, 14 nt, Molluscum contagiosum virus
ggcgagauugagcu

SEQ ID NO: 4028181 - RNA, 17 nt, Molluscum contagiosum virus
ggcgagcuagugcacac

SEQ ID NO: 4028182 - RNA, 18 nt, Molluscum contagiosum virus
ggcgagucgcgggcgcgc

SEQ ID NO: 4028183 - RNA, 19 nt, Molluscum contagiosum virus
ggcgcaaccgcgugcgugc

SEQ ID NO: 4028184 - RNA, 18 nt, Molluscum contagiosum virus
ggcgcaacgcuggccgcc

SEQ ID NO: 4028185 - RNA, 17 nt, Molluscum contagiosum virus
ggcgcacaaucucgccg

SEQ ID NO: 4028186 - RNA, 19 nt, Molluscum contagiosum virus
ggcgcaccugcuagagcau

SEQ ID NO: 4028187 - RNA, 22 nt, Molluscum contagiosum virus
ggcgcacggucuucucggugga

SEQ ID NO: 4028188 - RNA, 20 nt, Molluscum contagiosum virus
ggcgcagcuccuagcgcgcg

SEQ ID NO: 4028189 - RNA, 17 nt, Molluscum contagiosum virus
ggcgcaucagagaagug

SEQ ID NO: 4028190 - RNA, 19 nt, Molluscum contagiosum virus
ggcgcaucagagaagugcu

SEQ ID NO: 4028191 - RNA, 18 nt, Molluscum contagiosum virus
ggcgcauccucuccauca

SEQ ID NO: 4028192 - RNA, 21 nt, Molluscum contagiosum virus
ggcgccaccggcagugcuugc

SEQ ID NO: 4028193 - RNA, 21 nt, Molluscum contagiosum virus
ggcgccagaacauugccacgc

SEQ ID NO: 4028194 - RNA, 14 nt, Molluscum contagiosum virus
ggcgcccgugccgc

SEQ ID NO: 4028195 - RNA, 16 nt, Molluscum contagiosum virus
ggcgcccgugccgccg

SEQ ID NO: 4028196 - RNA, 21 nt, Molluscum contagiosum virus
ggcgcccgugccgccggcgcc

SEQ ID NO: 4028197 - RNA, 22 nt, Molluscum contagiosum virus
ggcgccgcgcugaugcuagcgu

SEQ ID NO: 4028198 - RNA, 23 nt, Molluscum contagiosum virus
ggcgccgcgcugaugcuagcgug

SEQ ID NO: 4028199 - RNA, 19 nt, Molluscum contagiosum virus
ggcgccgcugcuggaacag

SEQ ID NO: 4028200 - RNA, 16 nt, Molluscum contagiosum virus
ggcgccuguuuccgcu

SEQ ID NO: 4028201 - RNA, 16 nt, Molluscum contagiosum virus
ggcgcgaaaagucggg

SEQ ID NO: 4028202 - RNA, 22 nt, Molluscum contagiosum virus
ggcgcgagcgacggcaggcccu

SEQ ID NO: 4028203 - RNA, 15 nt, Molluscum contagiosum virus
ggcgcgcccagcgcc

SEQ ID NO: 4028204 - RNA, 22 nt, Molluscum contagiosum virus
ggcgcgccgucucgcggggcaa

SEQ ID NO: 4028205 - RNA, 13 nt, Molluscum contagiosum virus
ggcgcgcgagcac

SEQ ID NO: 4028206 - RNA, 17 nt, Molluscum contagiosum virus
ggcgcgcgagcugcugc

SEQ ID NO: 4028207 - RNA, 14 nt, Molluscum contagiosum virus
ggcgcgcgccagca

SEQ ID NO: 4028208 - RNA, 15 nt, Molluscum contagiosum virus
ggcgcgcgccagcag

SEQ ID NO: 4028209 - RNA, 16 nt, Molluscum contagiosum virus
ggcgcgcgcugcgcac

SEQ ID NO: 4028210 - RNA, 14 nt, Molluscum contagiosum virus
ggcgcgcggagagc

SEQ ID NO: 4028211 - RNA, 14 nt, Molluscum contagiosum virus
ggcgcgcguacgcg

SEQ ID NO: 4028212 - RNA, 20 nt, Molluscum contagiosum virus
ggcgcgcugugagcgcgccg

SEQ ID NO: 4028213 - RNA, 23 nt, Molluscum contagiosum virus
ggcgcggccucuuuuugcgccgc

SEQ ID NO: 4028214 - RNA, 21 nt, Molluscum contagiosum virus
ggcgcgugagcgccuaccgca

SEQ ID NO: 4028215 - RNA, 20 nt, Molluscum contagiosum virus
ggcgcgugccgcugcgcgga

SEQ ID NO: 4028216 - RNA, 21 nt, Molluscum contagiosum virus
ggcgcguugcucccgucgagc

SEQ ID NO: 4028217 - RNA, 13 nt, Molluscum contagiosum virus
ggcgcucacugcg

SEQ ID NO: 4028218 - RNA, 14 nt, Molluscum contagiosum virus
ggcggaagcuccug

SEQ ID NO: 4028219 - RNA, 23 nt, Molluscum contagiosum virus
ggcggagacgucuucgcgagcgu

SEQ ID NO: 4028220 - RNA, 20 nt, Molluscum contagiosum virus
ggugcaaccgcugcucgaca

SEQ ID NO: 4028221 - RNA, 15 nt, Molluscum contagiosum virus
ggugcacgugcugca

SEQ ID NO: 4028222 - RNA, 21 nt, Molluscum contagiosum virus
ggugcagccgcugcugcugca

SEQ ID NO: 4028223 - RNA, 17 nt, Molluscum contagiosum virus
ggugcauacgcagaggc

SEQ ID NO: 4028224 - RNA, 20 nt, Molluscum contagiosum virus
ggugcccgccaagagcuggu

SEQ ID NO: 4028225 - RNA, 19 nt, Molluscum contagiosum virus
ggugccguccccgcgcuca

SEQ ID NO: 4028226 - RNA, 15 nt, Molluscum contagiosum virus
ggugcgcccgcggca

SEQ ID NO: 4028227 - RNA, 19 nt, Molluscum contagiosum virus
ggugcgccugcacuacugc

SEQ ID NO: 4028228 - RNA, 22 nt, Molluscum contagiosum virus
ggugcugcgcgacaugcugccc

SEQ ID NO: 4028229 - RNA, 17 nt, Molluscum contagiosum virus
ggugcuggugcugguca

SEQ ID NO: 4028230 - RNA, 18 nt, Molluscum contagiosum virus
ggugcuguccuucugguu

SEQ ID NO: 4028231 - RNA, 21 nt, Molluscum contagiosum virus
gguggugggcgggugucuggg

SEQ ID NO: 4028232 - RNA, 19 nt, Molluscum contagiosum virus
ggugguuggcgugcucgcu

SEQ ID NO: 4028233 - RNA, 17 nt, Molluscum contagiosum virus
gguucccggugcugcug

SEQ ID NO: 4028234 - RNA, 18 nt, Molluscum contagiosum virus
gguuccggugucagcccc

SEQ ID NO: 4028235 - RNA, 14 nt, Molluscum contagiosum virus
gguuccgugcgcuc

SEQ ID NO: 4028236 - RNA, 19 nt, Molluscum contagiosum virus
gguugcgcacguuggccac

SEQ ID NO: 4028237 - RNA, 18 nt, Molluscum contagiosum virus
gguugcgcggggcaggca

SEQ ID NO: 4028238 - RNA, 19 nt, Molluscum contagiosum virus
guaaccaugaagaugucgc

SEQ ID NO: 4028239 - RNA, 22 nt, Molluscum contagiosum virus
guacaauacccgcuuccgcggc

SEQ ID NO: 4028240 - RNA, 16 nt, Molluscum contagiosum virus
guacacgcagagccag

SEQ ID NO: 4028241 - RNA, 17 nt, Molluscum contagiosum virus
guacagcuccccgcgca

SEQ ID NO: 4028242 - RNA, 15 nt, Molluscum contagiosum virus
guacauccgcgagca

SEQ ID NO: 4028243 - RNA, 21 nt, Molluscum contagiosum virus
guacaugcccggccucgccuc

SEQ ID NO: 4028244 - RNA, 19 nt, Molluscum contagiosum virus
guaccaccguggaggagcc

SEQ ID NO: 4028245 - RNA, 17 nt, Molluscum contagiosum virus
guacccgcaaccccgcg

SEQ ID NO: 4028246 - RNA, 12 nt, Molluscum contagiosum virus
guacccuggcag

SEQ ID NO: 4028247 - RNA, 19 nt, Molluscum contagiosum virus
guaccugcaggcucuaagc

SEQ ID NO: 4028248 - RNA, 22 nt, Molluscum contagiosum virus
guaccugcgacagcugcugcuc

SEQ ID NO: 4028249 - RNA, 16 nt, Molluscum contagiosum virus
guacgacgguuuccgc

SEQ ID NO: 4028250 - RNA, 22 nt, Molluscum contagiosum virus
guacgagcagcugcugcgcacg

SEQ ID NO: 4028251 - RNA, 16 nt, Molluscum contagiosum virus
guacgagcaggcgcag

SEQ ID NO: 4028252 - RNA, 23 nt, Molluscum contagiosum virus
guacgcaacuugugcgcccccgc

SEQ ID NO: 4028253 - RNA, 21 nt, Molluscum contagiosum virus
guacgcgugcgcuggcgcgcg

SEQ ID NO: 4028254 - RNA, 22 nt, Molluscum contagiosum virus
guacgcucuccaugcgcgcgcg

SEQ ID NO: 4028255 - RNA, 22 nt, Molluscum contagiosum virus
guacggcccgaaggccaccucg

SEQ ID NO: 4028256 - RNA, 15 nt, Molluscum contagiosum virus
guacggcgguucgca

SEQ ID NO: 4028257 - RNA, 18 nt, Molluscum contagiosum virus
guacggugccguccccgc

SEQ ID NO: 4028258 - RNA, 16 nt, Molluscum contagiosum virus
guacguacagugcgcg

SEQ ID NO: 4028259 - RNA, 18 nt, Molluscum contagiosum virus
guacgucuuucccagaag

SEQ ID NO: 4028260 - RNA, 15 nt, Molluscum contagiosum virus
guacuacuuccgcaa

SEQ ID NO: 4028261 - RNA, 14 nt, Molluscum contagiosum virus
guacuucuacggga

SEQ ID NO: 4028262 - RNA, 16 nt, Molluscum contagiosum virus
guagagcaacaugcug

SEQ ID NO: 4028263 - RNA, 17 nt, Molluscum contagiosum virus
guagagcagcgcuagcc

SEQ ID NO: 4028264 - RNA, 17 nt, Molluscum contagiosum virus
guagccgcgacgcaagc

SEQ ID NO: 4028265 - RNA, 12 nt, Molluscum contagiosum virus
guagcgcgccgc

SEQ ID NO: 4028266 - RNA, 20 nt, Molluscum contagiosum virus
guagggggguggggagacuu

SEQ ID NO: 4028267 - RNA, 13 nt, Molluscum contagiosum virus
guagguacccgca

SEQ ID NO: 4028268 - RNA, 19 nt, Molluscum contagiosum virus
guagguacccgcaaccccg

SEQ ID NO: 4028269 - RNA, 20 nt, Molluscum contagiosum virus
guagugguccaccagcugcc

SEQ ID NO: 4028270 - RNA, 20 nt, Molluscum contagiosum virus
guauauacuccccgcgcgcg

SEQ ID NO: 4028271 - RNA, 20 nt, Molluscum contagiosum virus
guauccaagaggccgucaca

SEQ ID NO: 4028272 - RNA, 24 nt, Molluscum contagiosum virus
guaugcguaguaguagcgcucgcc

SEQ ID NO: 4028273 - RNA, 22 nt, Molluscum contagiosum virus
gucaagaacaauuacuccagcg

SEQ ID NO: 4028274 - RNA, 13 nt, Molluscum contagiosum virus
gucaccgcuccgc

SEQ ID NO: 4028275 - RNA, 21 nt, Molluscum contagiosum virus
gucagccgcacggcgcccagg

SEQ ID NO: 4028276 - RNA, 12 nt, Molluscum contagiosum virus
gucaggcaaaag

SEQ ID NO: 4028277 - RNA, 16 nt, Molluscum contagiosum virus
gucaucgggcugcagc

SEQ ID NO: 4028278 - RNA, 16 nt, Molluscum contagiosum virus
gucaugcgacugccag

SEQ ID NO: 4028279 - RNA, 17 nt, Molluscum contagiosum virus
guccaccagcacgaagc

SEQ ID NO: 4028280 - RNA, 16 nt, Molluscum contagiosum virus
guccacgacgagccug

SEQ ID NO: 4028281 - RNA, 14 nt, Molluscum contagiosum virus
guccacgcgcccga

SEQ ID NO: 4028282 - RNA, 20 nt, Molluscum contagiosum virus
guccacggcgcgcaccuaca

SEQ ID NO: 4028283 - RNA, 17 nt, Molluscum contagiosum virus
guccacgugguccacca

SEQ ID NO: 4028284 - RNA, 19 nt, Molluscum contagiosum virus
guccagcgcguccaugcug

SEQ ID NO: 4028285 - RNA, 13 nt, Molluscum contagiosum virus
guccaugcccacg

SEQ ID NO: 4028286 - RNA, 23 nt, Molluscum contagiosum virus
guccaugucgcgcaucaccgagc

SEQ ID NO: 4028287 - RNA, 15 nt, Molluscum contagiosum virus
guccccggcgccggc

SEQ ID NO: 4028288 - RNA, 19 nt, Molluscum contagiosum virus
guccgacaccagcggcagg

SEQ ID NO: 4028289 - RNA, 17 nt, Molluscum contagiosum virus
guccgagccggacgcgc

SEQ ID NO: 4028290 - RNA, 18 nt, Molluscum contagiosum virus
guccgcagcggcgccacc

SEQ ID NO: 4028291 - RNA, 21 nt, Molluscum contagiosum virus
guccgcaggcgucaugcgcgc

SEQ ID NO: 4028292 - RNA, 17 nt, Molluscum contagiosum virus
guccgcauccucaaccg

SEQ ID NO: 4028293 - RNA, 21 nt, Molluscum contagiosum virus
guccgcccccagguggagcug

SEQ ID NO: 4028294 - RNA, 22 nt, Molluscum contagiosum virus
guccgccucgagcacgccucca

SEQ ID NO: 4028295 - RNA, 23 nt, Molluscum contagiosum virus
guccgcggacgcgggccuguccg

SEQ ID NO: 4028296 - RNA, 15 nt, Molluscum contagiosum virus
guccgcggggcuccu

SEQ ID NO: 4028297 - RNA, 16 nt, Molluscum contagiosum virus
guccggggaggagcuc

SEQ ID NO: 4028298 - RNA, 16 nt, Molluscum contagiosum virus
guccucgacaaugagc

SEQ ID NO: 4028299 - RNA, 20 nt, Molluscum contagiosum virus
guccugcgcgguggcuuacg

SEQ ID NO: 4028300 - RNA, 20 nt, Molluscum contagiosum virus
guccuguguuuucagggcuc

SEQ ID NO: 4028301 - RNA, 16 nt, Molluscum contagiosum virus
gucgagcgcgccgcgc

SEQ ID NO: 4028302 - RNA, 19 nt, Molluscum contagiosum virus
gucgaggccuucgcgcccg

SEQ ID NO: 4028303 - RNA, 17 nt, Molluscum contagiosum virus
gucgcaguacccgagcu

SEQ ID NO: 4028304 - RNA, 22 nt, Molluscum contagiosum virus
gucgcaguacccgagcugugcc

SEQ ID NO: 4028305 - RNA, 22 nt, Molluscum contagiosum virus
gucgcauccgaccucuuuccgc

SEQ ID NO: 4028306 - RNA, 17 nt, Molluscum contagiosum virus
gucgccgcgggcuggga

SEQ ID NO: 4028307 - RNA, 22 nt, Molluscum contagiosum virus
gucgcgcgcuaccugcgcaagc

SEQ ID NO: 4028308 - RNA, 20 nt, Molluscum contagiosum virus
gucgcguuccaggugcuggg

SEQ ID NO: 4028309 - RNA, 16 nt, Molluscum contagiosum virus
gucggccagcagcucc

SEQ ID NO: 4028310 - RNA, 23 nt, Molluscum contagiosum virus
gucggcccgaguauacucgacgc

SEQ ID NO: 4028311 - RNA, 18 nt, Molluscum contagiosum virus
gucgggccccugcgcgag

SEQ ID NO: 4028312 - RNA, 22 nt, Molluscum contagiosum virus
aggcgcgcaagugcgugucccu

SEQ ID NO: 4028313 - RNA, 18 nt, Molluscum contagiosum virus
aggcgcugucgcgcaggc

SEQ ID NO: 4028314 - RNA, 15 nt, Molluscum contagiosum virus
aggcgggccugcgcc

SEQ ID NO: 4028315 - RNA, 19 nt, Molluscum contagiosum virus
aggcguccagcggcugccc

SEQ ID NO: 4028316 - RNA, 23 nt, Molluscum contagiosum virus
aggcucuguucugcuuggacgac

SEQ ID NO: 4028317 - RNA, 16 nt, Molluscum contagiosum virus
aggcugcugccgcgcg

SEQ ID NO: 4028318 - RNA, 20 nt, Molluscum contagiosum virus
agggaggcucgagcgcgcgc

SEQ ID NO: 4028319 - RNA, 23 nt, Molluscum contagiosum virus
agggcagaacaguaacugcugca

SEQ ID NO: 4028320 - RNA, 14 nt, Molluscum contagiosum virus
agggcagcucaagc

SEQ ID NO: 4028321 - RNA, 19 nt, Molluscum contagiosum virus
agggcagcucaagcugcuc

SEQ ID NO: 4028322 - RNA, 18 nt, Molluscum contagiosum virus
agggcgggcacgugcugc

SEQ ID NO: 4028323 - RNA, 19 nt, Molluscum contagiosum virus
agguaguuugcggagcaga

SEQ ID NO: 4028324 - RNA, 17 nt, Molluscum contagiosum virus
aggucgagcgcgccgcg

SEQ ID NO: 4028325 - RNA, 20 nt, Molluscum contagiosum virus
aggucggccagcagcuccug

SEQ ID NO: 4028326 - RNA, 21 nt, Molluscum contagiosum virus
aggucuuccauugcauggaca

SEQ ID NO: 4028327 - RNA, 14 nt, Molluscum contagiosum virus
aggugcacgcgcug

SEQ ID NO: 4028328 - RNA, 14 nt, Molluscum contagiosum virus
agguugcgcagagc

SEQ ID NO: 4028329 - RNA, 22 nt, Molluscum contagiosum virus
aguaccagccgcugcgccgcca

SEQ ID NO: 4028330 - RNA, 13 nt, Molluscum contagiosum virus
aguaccagcucgc

SEQ ID NO: 4028331 - RNA, 14 nt, Molluscum contagiosum virus
aguaccgcgcgcac

SEQ ID NO: 4028332 - RNA, 15 nt, Molluscum contagiosum virus
aguaccggccaaggc

SEQ ID NO: 4028333 - RNA, 21 nt, Molluscum contagiosum virus
aguacgcucuccaugcgcgcg

SEQ ID NO: 4028334 - RNA, 23 nt, Molluscum contagiosum virus
aguacuucuacgggaagcugcac

SEQ ID NO: 4028335 - RNA, 19 nt, Molluscum contagiosum virus
aguagcgcucgcccagcuc

SEQ ID NO: 4028336 - RNA, 15 nt, Molluscum contagiosum virus
agucacgaccgaccc

SEQ ID NO: 4028337 - RNA, 18 nt, Molluscum contagiosum virus
agucacuucucggaagcg

SEQ ID NO: 4028338 - RNA, 21 nt, Molluscum contagiosum virus
aguccagcgcgcucgaggcgc

SEQ ID NO: 4028339 - RNA, 13 nt, Molluscum contagiosum virus
aguccagcuucuc

SEQ ID NO: 4028340 - RNA, 20 nt, Molluscum contagiosum virus
aguccgucacggacagcagc

SEQ ID NO: 4028341 - RNA, 22 nt, Molluscum contagiosum virus
agucgcaguacccgagcugugc

SEQ ID NO: 4028342 - RNA, 15 nt, Molluscum contagiosum virus
agucgcuagaggaga

SEQ ID NO: 4028343 - RNA, 18 nt, Molluscum contagiosum virus
agucguuugcucggggcu

SEQ ID NO: 4028344 - RNA, 22 nt, Molluscum contagiosum virus
agucguuugcucggggcugucg

SEQ ID NO: 4028345 - RNA, 16 nt, Molluscum contagiosum virus
agucuuccuggggcug

SEQ ID NO: 4028346 - RNA, 21 nt, Molluscum contagiosum virus
agugccgggcgccggcucugc

SEQ ID NO: 4028347 - RNA, 17 nt, Molluscum contagiosum virus
agugcgagccgugaccu

SEQ ID NO: 4028348 - RNA, 19 nt, Molluscum contagiosum virus
agugcgcgugucuggagcc

SEQ ID NO: 4028349 - RNA, 21 nt, Molluscum contagiosum virus
agugcgucgacguggagccug

SEQ ID NO: 4028350 - RNA, 15 nt, Molluscum contagiosum virus
agugcgugccaggcg

SEQ ID NO: 4028351 - RNA, 22 nt, Molluscum contagiosum virus
agugcguuugccagaagcccug

SEQ ID NO: 4028352 - RNA, 20 nt, Molluscum contagiosum virus
agugcucccgaggcgcgcuc

SEQ ID NO: 4028353 - RNA, 14 nt, Molluscum contagiosum virus
agugcugcugggcg

SEQ ID NO: 4028354 - RNA, 14 nt, Molluscum contagiosum virus
aguggcaagggccu

SEQ ID NO: 4028355 - RNA, 15 nt, Molluscum contagiosum virus
aguuccgaucgcgag

SEQ ID NO: 4028356 - RNA, 20 nt, Molluscum contagiosum virus
aguucgagcugcugcgcgag

SEQ ID NO: 4028357 - RNA, 19 nt, Molluscum contagiosum virus
aguucucgcguucgcguuc

SEQ ID NO: 4028358 - RNA, 13 nt, Molluscum contagiosum virus
aguucuuggugga

SEQ ID NO: 4028359 - RNA, 16 nt, Molluscum contagiosum virus
aguugcgagccagcca

SEQ ID NO: 4028360 - RNA, 21 nt, Molluscum contagiosum virus
auaccaagucuucggaguggg

SEQ ID NO: 4028361 - RNA, 10 nt, Molluscum contagiosum virus
auacgcgcuc

SEQ ID NO: 4028362 - RNA, 16 nt, Molluscum contagiosum virus
auaucugucgccgcgg

SEQ ID NO: 4028363 - RNA, 18 nt, Molluscum contagiosum virus
auauggccgugcgcgacg

SEQ ID NO: 4028364 - RNA, 22 nt, Molluscum contagiosum virus
aucaaggauuuaaauggcgcgc

SEQ ID NO: 4028365 - RNA, 23 nt, Molluscum contagiosum virus
aucaccagcuacgagccgcugcu

SEQ ID NO: 4028366 - RNA, 18 nt, Molluscum contagiosum virus
aucaggcagcugcugcgc

SEQ ID NO: 4028367 - RNA, 15 nt, Molluscum contagiosum virus
auccaaacccccgag

SEQ ID NO: 4028368 - RNA, 17 nt, Molluscum contagiosum virus
auccacgcgugcugcgc

SEQ ID NO: 4028369 - RNA, 16 nt, Molluscum contagiosum virus
aucccaagagccaugu

SEQ ID NO: 4028370 - RNA, 14 nt, Molluscum contagiosum virus
aucccccgccagga

SEQ ID NO: 4028371 - RNA, 14 nt, Molluscum contagiosum virus
auccugaaguccau

SEQ ID NO: 4028372 - RNA, 15 nt, Molluscum contagiosum virus
auccugguuccucuc

SEQ ID NO: 4028373 - RNA, 17 nt, Molluscum contagiosum virus
auccugguuccucuccu

SEQ ID NO: 4028374 - RNA, 20 nt, Molluscum contagiosum virus
auccuguucgcgcugcucgc

SEQ ID NO: 4028375 - RNA, 18 nt, Molluscum contagiosum virus
aucgagcuucccgagguc

SEQ ID NO: 4028376 - RNA, 23 nt, Molluscum contagiosum virus
aucgccuuugugacaaggaugga

SEQ ID NO: 4028377 - RNA, 15 nt, Molluscum contagiosum virus
aucgcgcgcaccugc

SEQ ID NO: 4028378 - RNA, 13 nt, Molluscum contagiosum virus
aucgcgcgcgggc

SEQ ID NO: 4028379 - RNA, 18 nt, Molluscum contagiosum virus
aucgcgcucaggaccagu

SEQ ID NO: 4028380 - RNA, 17 nt, Molluscum contagiosum virus
aucgcgugcuugcugcg

SEQ ID NO: 4028381 - RNA, 19 nt, Molluscum contagiosum virus
aucgcgugcuugcugcgcu

SEQ ID NO: 4028382 - RNA, 18 nt, Molluscum contagiosum virus
aucguuccuggccaagga

SEQ ID NO: 4028383 - RNA, 18 nt, Molluscum contagiosum virus
aucucuggauugucuuuu

SEQ ID NO: 4028384 - RNA, 23 nt, Molluscum contagiosum virus
aucugacggugcaaccgcugcuc

SEQ ID NO: 4028385 - RNA, 19 nt, Molluscum contagiosum virus
aucugcgccuccgguacgu

SEQ ID NO: 4028386 - RNA, 16 nt, Molluscum contagiosum virus
aucugcgcgugcuguc

SEQ ID NO: 4028387 - RNA, 17 nt, Molluscum contagiosum virus
aucugcgcuccacgccc

SEQ ID NO: 4028388 - RNA, 11 nt, Molluscum contagiosum virus
aucuuacaggc

SEQ ID NO: 4028389 - RNA, 14 nt, Molluscum contagiosum virus
aucuucgugcugaa

SEQ ID NO: 4028390 - RNA, 18 nt, Molluscum contagiosum virus
aucuugguggugaccgag

SEQ ID NO: 4028391 - RNA, 19 nt, Molluscum contagiosum virus
augaaaagcauccaggccu

SEQ ID NO: 4028392 - RNA, 14 nt, Molluscum contagiosum virus
augaacagcuucac

SEQ ID NO: 4028393 - RNA, 18 nt, Molluscum contagiosum virus
augaagaugucgccgcgu

SEQ ID NO: 4028394 - RNA, 17 nt, Molluscum contagiosum virus
augaagcucucgcgcgc

SEQ ID NO: 4028395 - RNA, 16 nt, Molluscum contagiosum virus
augacggcgggaaggg

SEQ ID NO: 4028396 - RNA, 12 nt, Molluscum contagiosum virus
augagcagcacc

SEQ ID NO: 4028397 - RNA, 17 nt, Molluscum contagiosum virus
augaggacagcuugcug

SEQ ID NO: 4028398 - RNA, 14 nt, Molluscum contagiosum virus
augaggcugcucuc

SEQ ID NO: 4028399 - RNA, 21 nt, Molluscum contagiosum virus
augaguaccuguaugaucugc

SEQ ID NO: 4028400 - RNA, 14 nt, Molluscum contagiosum virus
augauugucaagca

SEQ ID NO: 4028401 - RNA, 12 nt, Molluscum contagiosum virus
augcacacacuc

SEQ ID NO: 4028402 - RNA, 18 nt, Molluscum contagiosum virus
augcagauuggaggagga

SEQ ID NO: 4028403 - RNA, 13 nt, Molluscum contagiosum virus
augccacgcagcu

SEQ ID NO: 4028404 - RNA, 20 nt, Molluscum contagiosum virus
augcgaggccugcguggaca

SEQ ID NO: 4028405 - RNA, 14 nt, Molluscum contagiosum virus
augcgccugcacuu

SEQ ID NO: 4028406 - RNA, 18 nt, Molluscum contagiosum virus
augcgcgggaugcuggac

SEQ ID NO: 4028407 - RNA, 19 nt, Molluscum contagiosum virus
augcggauccuccggauga

SEQ ID NO: 4028408 - RNA, 18 nt, Molluscum contagiosum virus
augcgucccagcagcugc

SEQ ID NO: 4028409 - RNA, 18 nt, Molluscum contagiosum virus
augcgucuuccugcugcc

SEQ ID NO: 4028410 - RNA, 18 nt, Molluscum contagiosum virus
augcucacguacgacugc

SEQ ID NO: 4028411 - RNA, 21 nt, Molluscum contagiosum virus
augcucgcuugccggcggcgc

SEQ ID NO: 4028412 - RNA, 12 nt, Molluscum contagiosum virus
augcugcgcacg

SEQ ID NO: 4028413 - RNA, 20 nt, Molluscum contagiosum virus
augcuuuuguuacucucaga

SEQ ID NO: 4028414 - RNA, 14 nt, Molluscum contagiosum virus
caagguggggcgca

SEQ ID NO: 4028415 - RNA, 16 nt, Molluscum contagiosum virus
caagucaccgcuccgc

SEQ ID NO: 4028416 - RNA, 21 nt, Molluscum contagiosum virus
caagucggggcccucggcgcg

SEQ ID NO: 4028417 - RNA, 17 nt, Molluscum contagiosum virus
caagucuucggaguggg

SEQ ID NO: 4028418 - RNA, 20 nt, Molluscum contagiosum virus
caagugcgcgugucuggagc

SEQ ID NO: 4028419 - RNA, 22 nt, Molluscum contagiosum virus
caagugcgucgacguggagccu

SEQ ID NO: 4028420 - RNA, 18 nt, Molluscum contagiosum virus
caaguucgcugcuggcag

SEQ ID NO: 4028421 - RNA, 18 nt, Molluscum contagiosum virus
caauacucuguagcaucu

SEQ ID NO: 4028422 - RNA, 14 nt, Molluscum contagiosum virus
caauacugcgggcu

SEQ ID NO: 4028423 - RNA, 12 nt, Molluscum contagiosum virus
caaucuguccag

SEQ ID NO: 4028424 - RNA, 14 nt, Molluscum contagiosum virus
caaugaggagagga

SEQ ID NO: 4028425 - RNA, 16 nt, Molluscum contagiosum virus
caaugaggagaggaac

SEQ ID NO: 4028426 - RNA, 18 nt, Molluscum contagiosum virus
caaugcgcacgugcucgc

SEQ ID NO: 4028427 - RNA, 19 nt, Molluscum contagiosum virus
caaugcgcacgugcucgcg

SEQ ID NO: 4028428 - RNA, 16 nt, Molluscum contagiosum virus
cacaaagacgggcccg

SEQ ID NO: 4028429 - RNA, 22 nt, Molluscum contagiosum virus
cacaaagagcacggacagcacc

SEQ ID NO: 4028430 - RNA, 16 nt, Molluscum contagiosum virus
cacaaagcccuccuga

SEQ ID NO: 4028431 - RNA, 14 nt, Molluscum contagiosum virus
cacaaaucguccga

SEQ ID NO: 4028432 - RNA, 20 nt, Molluscum contagiosum virus
cacaacuugggcccgccucc

SEQ ID NO: 4028433 - RNA, 16 nt, Molluscum contagiosum virus
cacaagauggcgcagc

SEQ ID NO: 4028434 - RNA, 20 nt, Molluscum contagiosum virus
cacaagcaguaccugcuaac

SEQ ID NO: 4028435 - RNA, 16 nt, Molluscum contagiosum virus
cacaagggcagcucaa

SEQ ID NO: 4028436 - RNA, 23 nt, Molluscum contagiosum virus
cacaagggcagcucaagcugcuc

SEQ ID NO: 4028437 - RNA, 20 nt, Molluscum contagiosum virus
cacaagucucgcgcgggcag

SEQ ID NO: 4028438 - RNA, 13 nt, Molluscum contagiosum virus
cacacacacacuc

SEQ ID NO: 4028439 - RNA, 10 nt, Molluscum contagiosum virus
cacacacacu

SEQ ID NO: 4028440 - RNA, 15 nt, Molluscum contagiosum virus
cacacucacgcgucc

SEQ ID NO: 4028441 - RNA, 22 nt, Molluscum contagiosum virus
cacacucacgcguccacaaaga

SEQ ID NO: 4028442 - RNA, 12 nt, Molluscum contagiosum virus
cacacucgcucu

SEQ ID NO: 4028443 - RNA, 17 nt, Molluscum contagiosum virus
cacacuugcacgcgcac

SEQ ID NO: 4028444 - RNA, 19 nt, Molluscum contagiosum virus
cacacuugcacgcgcacgc

SEQ ID NO: 4028445 - RNA, 16 nt, Molluscum contagiosum virus
cacacuugcgcguccg

SEQ ID NO: 4028446 - RNA, 21 nt, Molluscum contagiosum virus
cacacuugcgcguucgcaaag

SEQ ID NO: 4028447 - RNA, 13 nt, Molluscum contagiosum virus
cacagcaaaagcu

SEQ ID NO: 4028448 - RNA, 20 nt, Molluscum contagiosum virus
cacagccccugcugcucgcg

SEQ ID NO: 4028449 - RNA, 21 nt, Molluscum contagiosum virus
cacaguccaacccgcggcgcg

SEQ ID NO: 4028450 - RNA, 15 nt, Molluscum contagiosum virus
cacaucggcacugcu

SEQ ID NO: 4028451 - RNA, 18 nt, Molluscum contagiosum virus
cacaucucucagggcagc

SEQ ID NO: 4028452 - RNA, 18 nt, Molluscum contagiosum virus
cacauugcugcugcaggc

SEQ ID NO: 4028453 - RNA, 20 nt, Molluscum contagiosum virus
caccaagaagcggcccugca

SEQ ID NO: 4028454 - RNA, 15 nt, Molluscum contagiosum virus
caccaccagcacgcu

SEQ ID NO: 4028455 - RNA, 15 nt, Molluscum contagiosum virus
caccagcaccagcac

SEQ ID NO: 4028456 - RNA, 17 nt, Molluscum contagiosum virus
caccagcaccagcacaa

SEQ ID NO: 4028457 - RNA, 14 nt, Molluscum contagiosum virus
caccagcagccagg

SEQ ID NO: 4028458 - RNA, 15 nt, Molluscum contagiosum virus
caccagcagccaggc

SEQ ID NO: 4028459 - RNA, 17 nt, Molluscum contagiosum virus
caccagcuccgccggga

SEQ ID NO: 4028460 - RNA, 14 nt, Molluscum contagiosum virus
caccaugcgcacag

SEQ ID NO: 4028461 - RNA, 15 nt, Molluscum contagiosum virus
cacccaccaggaaca

SEQ ID NO: 4028462 - RNA, 22 nt, Molluscum contagiosum virus
caccccgaaaggcacccgcagg

SEQ ID NO: 4028463 - RNA, 13 nt, Molluscum contagiosum virus
cacccgcgcggcu

SEQ ID NO: 4028464 - RNA, 13 nt, Molluscum contagiosum virus
cacccgcgcucga

SEQ ID NO: 4028465 - RNA, 14 nt, Molluscum contagiosum virus
cacccgugcccgcu

SEQ ID NO: 4028466 - RNA, 13 nt, Molluscum contagiosum virus
caccgagcccgcc

SEQ ID NO: 4028467 - RNA, 19 nt, Molluscum contagiosum virus
caccgagcgcuacgacgac

SEQ ID NO: 4028468 - RNA, 15 nt, Molluscum contagiosum virus
caccgcaugggcccu

SEQ ID NO: 4028469 - RNA, 16 nt, Molluscum contagiosum virus
caccgccugcugcagc

SEQ ID NO: 4028470 - RNA, 22 nt, Molluscum contagiosum virus
caccgcgacaugccucgcggcc

SEQ ID NO: 4028471 - RNA, 22 nt, Molluscum contagiosum virus
caccgcggcgcggagcgcuucu

SEQ ID NO: 4028472 - RNA, 12 nt, Molluscum contagiosum virus
caccgcuccgca

SEQ ID NO: 4028473 - RNA, 16 nt, Molluscum contagiosum virus
caccgcuccgcagccg

SEQ ID NO: 4028474 - RNA, 19 nt, Molluscum contagiosum virus
caccggccuuuugucguuc

SEQ ID NO: 4028475 - RNA, 21 nt, Molluscum contagiosum virus
caccggcggguccgcaggcuc

SEQ ID NO: 4028476 - RNA, 23 nt, Molluscum contagiosum virus
caccgggauggucucgcugcugg

SEQ ID NO: 4028477 - RNA, 13 nt, Molluscum contagiosum virus
caccgggcgccgc

SEQ ID NO: 4028478 - RNA, 14 nt, Molluscum contagiosum virus
caccgggcgccgcg

SEQ ID NO: 4028479 - RNA, 20 nt, Molluscum contagiosum virus
caccucaagaagacgcagag

SEQ ID NO: 4028480 - RNA, 19 nt, Molluscum contagiosum virus
caccucaccgcgcacaucu

SEQ ID NO: 4028481 - RNA, 22 nt, Molluscum contagiosum virus
caccucugcgcggcccgcgggc

SEQ ID NO: 4028482 - RNA, 22 nt, Molluscum contagiosum virus
caccugcacgagccggcgccgu

SEQ ID NO: 4028483 - RNA, 18 nt, Molluscum contagiosum virus
caccugcaucgcgccgcc

SEQ ID NO: 4028484 - RNA, 18 nt, Molluscum contagiosum virus
caccugcgcuuccucuac

SEQ ID NO: 4028485 - RNA, 21 nt, Molluscum contagiosum virus
caccuggcgagcgcucugcau

SEQ ID NO: 4028486 - RNA, 20 nt, Molluscum contagiosum virus
caccuuggcgcugcacaguu

SEQ ID NO: 4028487 - RNA, 21 nt, Molluscum contagiosum virus
caccuuucauucgcuggugcg

SEQ ID NO: 4028488 - RNA, 22 nt, Molluscum contagiosum virus
cacgaaggacgcgcuugcgcgg

SEQ ID NO: 4028489 - RNA, 17 nt, Molluscum contagiosum virus
cacgaccgcgcacgcag

SEQ ID NO: 4028490 - RNA, 22 nt, Molluscum contagiosum virus
cacgacggaacguuggcccgca

SEQ ID NO: 4028491 - RNA, 16 nt, Molluscum contagiosum virus
cacgacguacgagugc

SEQ ID NO: 4028492 - RNA, 17 nt, Molluscum contagiosum virus
cacgagauggcugcucu

SEQ ID NO: 4028493 - RNA, 16 nt, Molluscum contagiosum virus
cacgagcacugccugc

SEQ ID NO: 4028494 - RNA, 20 nt, Molluscum contagiosum virus
cacgagcacugccugccgcc

SEQ ID NO: 4028495 - RNA, 21 nt, Molluscum contagiosum virus
cacgagcgaaaacgcgugucu

SEQ ID NO: 4028496 - RNA, 23 nt, Molluscum contagiosum virus
cacgagcgaguugagcaggucgg

SEQ ID NO: 4028497 - RNA, 11 nt, Molluscum contagiosum virus
cacgagcugcu

SEQ ID NO: 4028498 - RNA, 14 nt, Molluscum contagiosum virus
cacgagcugcugcc

SEQ ID NO: 4028499 - RNA, 20 nt, Molluscum contagiosum virus
cacgaggacugggaacccgu

SEQ ID NO: 4028500 - RNA, 20 nt, Molluscum contagiosum virus
cacgagggccuuggcggcgc

SEQ ID NO: 4028501 - RNA, 21 nt, Molluscum contagiosum virus
cacgaggggcaagcucgcgcu

SEQ ID NO: 4028502 - RNA, 17 nt, Molluscum contagiosum virus
cacgagugcuugcgcgg

SEQ ID NO: 4028503 - RNA, 14 nt, Molluscum contagiosum virus
cacgaugcgcucgu

SEQ ID NO: 4028504 - RNA, 20 nt, Molluscum contagiosum virus
cacgcaaaugcgcgcgaacg

SEQ ID NO: 4028505 - RNA, 21 nt, Molluscum contagiosum virus
cacgcaagcuuugugcucgcu

SEQ ID NO: 4028506 - RNA, 20 nt, Molluscum contagiosum virus
cacgcaaggcaugcgcgcag

SEQ ID NO: 4028507 - RNA, 23 nt, Molluscum contagiosum virus
cacgcaaggcaugcgcgcagugc

SEQ ID NO: 4028508 - RNA, 16 nt, Molluscum contagiosum virus
cacgcaaucgcgcgcg

SEQ ID NO: 4028509 - RNA, 19 nt, Molluscum contagiosum virus
cacgcaccgcgacaugccu

SEQ ID NO: 4028510 - RNA, 15 nt, Molluscum contagiosum virus
cacgcacgaccucac

SEQ ID NO: 4028511 - RNA, 17 nt, Molluscum contagiosum virus
cacgcacuugcgcgccu

SEQ ID NO: 4028512 - RNA, 19 nt, Molluscum contagiosum virus
cacgcagcuggcgggcgug

SEQ ID NO: 4028513 - RNA, 20 nt, Molluscum contagiosum virus
cacgccgcagcgcuggagcu

SEQ ID NO: 4028514 - RNA, 19 nt, Molluscum contagiosum virus
cacgccgcucggcacugcu

SEQ ID NO: 4028515 - RNA, 23 nt, Molluscum contagiosum virus
cacgccuuggcaauggcgcgcag

SEQ ID NO: 4028516 - RNA, 22 nt, Molluscum contagiosum virus
ccgguacguacagugcgcgcac

SEQ ID NO: 4028517 - RNA, 12 nt, Molluscum contagiosum virus
ccggugccuggc

SEQ ID NO: 4028518 - RNA, 17 nt, Molluscum contagiosum virus
ccggugcgugcccagca

SEQ ID NO: 4028519 - RNA, 20 nt, Molluscum contagiosum virus
ccggugcgugcccagcaggu

SEQ ID NO: 4028520 - RNA, 13 nt, Molluscum contagiosum virus
ccggugcucgccc

SEQ ID NO: 4028521 - RNA, 17 nt, Molluscum contagiosum virus
ccgguggcgcgcgagcu

SEQ ID NO: 4028522 - RNA, 16 nt, Molluscum contagiosum virus
ccguaagucgaagagg

SEQ ID NO: 4028523 - RNA, 22 nt, Molluscum contagiosum virus
ccguaccccgagggcgcgaccg

SEQ ID NO: 4028524 - RNA, 21 nt, Molluscum contagiosum virus
ccguacgcaacuugugcgccc

SEQ ID NO: 4028525 - RNA, 21 nt, Molluscum contagiosum virus
ccguagugcucaucgugcccg

SEQ ID NO: 4028526 - RNA, 15 nt, Molluscum contagiosum virus
ccgucagccucugug

SEQ ID NO: 4028527 - RNA, 22 nt, Molluscum contagiosum virus
ccgucagggaugccagugcagu

SEQ ID NO: 4028528 - RNA, 15 nt, Molluscum contagiosum virus
ccgucgccgcgcccg

SEQ ID NO: 4028529 - RNA, 13 nt, Molluscum contagiosum virus
ccgucgcgcucga

SEQ ID NO: 4028530 - RNA, 16 nt, Molluscum contagiosum virus
ccgucggggcagggaa

SEQ ID NO: 4028531 - RNA, 12 nt, Molluscum contagiosum virus
ccgucucgcgcu

SEQ ID NO: 4028532 - RNA, 18 nt, Molluscum contagiosum virus
ccgucuugcgcacacacu

SEQ ID NO: 4028533 - RNA, 12 nt, Molluscum contagiosum virus
ccgugcaccucc

SEQ ID NO: 4028534 - RNA, 18 nt, Molluscum contagiosum virus
ccgugccgccggcgccgc

SEQ ID NO: 4028535 - RNA, 23 nt, Molluscum contagiosum virus
ccgugcugcggcaaccgcgcccg

SEQ ID NO: 4028536 - RNA, 13 nt, Molluscum contagiosum virus
ccguggcgcgccg

SEQ ID NO: 4028537 - RNA, 16 nt, Molluscum contagiosum virus
gcggcaaccgcgcccg

SEQ ID NO: 4028538 - RNA, 16 nt, Molluscum contagiosum virus
gcggcaagccgugcuu

SEQ ID NO: 4028539 - RNA, 14 nt, Molluscum contagiosum virus
gcggcaagccuggc

SEQ ID NO: 4028540 - RNA, 20 nt, Molluscum contagiosum virus
gcggcaaucuucgugcgcuc

SEQ ID NO: 4028541 - RNA, 19 nt, Molluscum contagiosum virus
gcggcacgggcucgagcuc

SEQ ID NO: 4028542 - RNA, 15 nt, Molluscum contagiosum virus
gcggcacgucguccg

SEQ ID NO: 4028543 - RNA, 23 nt, Molluscum contagiosum virus
gcggcacguuugcgucugcgagg

SEQ ID NO: 4028544 - RNA, 16 nt, Molluscum contagiosum virus
gcggcagcuaccgcgc

SEQ ID NO: 4028545 - RNA, 16 nt, Molluscum contagiosum virus
gcggcaggcgcugcgc

SEQ ID NO: 4028546 - RNA, 17 nt, Molluscum contagiosum virus
gcggcagugcuggugaa

SEQ ID NO: 4028547 - RNA, 12 nt, Molluscum contagiosum virus
gcggcauccuga

SEQ ID NO: 4028548 - RNA, 18 nt, Molluscum contagiosum virus
gcggccacgcucgcgcgc

SEQ ID NO: 4028549 - RNA, 19 nt, Molluscum contagiosum virus
gcggccacgcucgcgcgca

SEQ ID NO: 4028550 - RNA, 14 nt, Molluscum contagiosum virus
gcggccacucuccc

SEQ ID NO: 4028551 - RNA, 15 nt, Molluscum contagiosum virus
gcggccacucucccg

SEQ ID NO: 4028552 - RNA, 14 nt, Molluscum contagiosum virus
gcggcccgcggcgc

SEQ ID NO: 4028553 - RNA, 13 nt, Molluscum contagiosum virus
gcggcccgcgggc

SEQ ID NO: 4028554 - RNA, 17 nt, Molluscum contagiosum virus
gcggccgagucacgccc

SEQ ID NO: 4028555 - RNA, 23 nt, Molluscum contagiosum virus
gcggccuguucuuccaguggcgc

SEQ ID NO: 4028556 - RNA, 19 nt, Molluscum contagiosum virus
gcggcgacuugcugcggag

SEQ ID NO: 4028557 - RNA, 13 nt, Molluscum contagiosum virus
gcggcgccuugcu

SEQ ID NO: 4028558 - RNA, 14 nt, Molluscum contagiosum virus
gcggcgcgcagcuc

SEQ ID NO: 4028559 - RNA, 14 nt, Molluscum contagiosum virus
gcggcgcgcccagc

SEQ ID NO: 4028560 - RNA, 19 nt, Molluscum contagiosum virus
gcggcgcgccgcccgggaa

SEQ ID NO: 4028561 - RNA, 17 nt, Molluscum contagiosum virus
gcggcgcgcgcugagcg

SEQ ID NO: 4028562 - RNA, 18 nt, Molluscum contagiosum virus
gcggcgcguacucgcgcc

SEQ ID NO: 4028563 - RNA, 14 nt, Molluscum contagiosum virus
gcggcgcgugccgc

SEQ ID NO: 4028564 - RNA, 19 nt, Molluscum contagiosum virus
gcggcgcgugccgcugcgc

SEQ ID NO: 4028565 - RNA, 19 nt, Molluscum contagiosum virus
gcggcgcguuuucgcggcc

SEQ ID NO: 4028566 - RNA, 17 nt, Molluscum contagiosum virus
gcggcgcucguggcgcg

SEQ ID NO: 4028567 - RNA, 23 nt, Molluscum contagiosum virus
gcggcgcucugccaccgcggcgc

SEQ ID NO: 4028568 - RNA, 19 nt, Molluscum contagiosum virus
gcggcgcuugauguccgcg

SEQ ID NO: 4028569 - RNA, 22 nt, Molluscum contagiosum virus
gcggcgcuuucgcccgccgcgc

SEQ ID NO: 4028570 - RNA, 14 nt, Molluscum contagiosum virus
gcggcggagacuga

SEQ ID NO: 4028571 - RNA, 15 nt, Molluscum contagiosum virus
gcggcgggugccgcc

SEQ ID NO: 4028572 - RNA, 12 nt, Molluscum contagiosum virus
gcggcgugcagg

SEQ ID NO: 4028573 - RNA, 16 nt, Molluscum contagiosum virus
gcggcuaagcucugcg

SEQ ID NO: 4028574 - RNA, 15 nt, Molluscum contagiosum virus
gcggcugcccgcgga

SEQ ID NO: 4028575 - RNA, 13 nt, Molluscum contagiosum virus
gcggcugugcccg

SEQ ID NO: 4028576 - RNA, 19 nt, Molluscum contagiosum virus
gcgggacgcgugccuggcu

SEQ ID NO: 4028577 - RNA, 22 nt, Molluscum contagiosum virus
gcgggcacggcuaccacgagca

SEQ ID NO: 4028578 - RNA, 16 nt, Molluscum contagiosum virus
gcgggcacgggcaccg

SEQ ID NO: 4028579 - RNA, 20 nt, Molluscum contagiosum virus
gcgggcacgugcugcugcgg

SEQ ID NO: 4028580 - RNA, 17 nt, Molluscum contagiosum virus
gcgggccaggcacuggc

SEQ ID NO: 4028581 - RNA, 20 nt, Molluscum contagiosum virus
gcgggccaguacuacucggc

SEQ ID NO: 4028582 - RNA, 20 nt, Molluscum contagiosum virus
gcgggcccgccuuuguggac

SEQ ID NO: 4028583 - RNA, 18 nt, Molluscum contagiosum virus
gcgggcccgcgaacgaga

SEQ ID NO: 4028584 - RNA, 19 nt, Molluscum contagiosum virus
gcgggcccgugcucaggcc

SEQ ID NO: 4028585 - RNA, 20 nt, Molluscum contagiosum virus
gcgggccuguccgcgggcgc

SEQ ID NO: 4028586 - RNA, 18 nt, Molluscum contagiosum virus
gcgggcgaaagcgccgcg

SEQ ID NO: 4028587 - RNA, 19 nt, Molluscum contagiosum virus
gcgggcgaaagcgccgcgc

SEQ ID NO: 4028588 - RNA, 14 nt, Molluscum contagiosum virus
gcgggcgcgcgcca

SEQ ID NO: 4028589 - RNA, 16 nt, Molluscum contagiosum virus
gcgggcggcgucgcgc

SEQ ID NO: 4028590 - RNA, 23 nt, Molluscum contagiosum virus
gcggggacucucccgucgccgga

SEQ ID NO: 4028591 - RNA, 21 nt, Molluscum contagiosum virus
gcggggcucguccucgggcgc

SEQ ID NO: 4028592 - RNA, 23 nt, Molluscum contagiosum virus
gcgggugccgccgugggcgccgc

SEQ ID NO: 4028593 - RNA, 17 nt, Molluscum contagiosum virus
gcggucaggccgggcgc

SEQ ID NO: 4028594 - RNA, 19 nt, Molluscum contagiosum virus
gcggucaggccgggcgcgg

SEQ ID NO: 4028595 - RNA, 22 nt, Molluscum contagiosum virus
gcggucuuccagcacugcgcca

SEQ ID NO: 4028596 - RNA, 24 nt, Molluscum contagiosum virus
gcggucuuggcaugcgugcuucac

SEQ ID NO: 4028597 - RNA, 16 nt, Molluscum contagiosum virus
gcggugacuugccgug

SEQ ID NO: 4028598 - RNA, 12 nt, Molluscum contagiosum virus
gcgguggugaaa

SEQ ID NO: 4028599 - RNA, 11 nt, Molluscum contagiosum virus
gcgguggugca

SEQ ID NO: 4028600 - RNA, 21 nt, Molluscum contagiosum virus
gcgguguccuugcgccgccaa

SEQ ID NO: 4028601 - RNA, 20 nt, Molluscum contagiosum virus
gcguaagagcgugaacauac

SEQ ID NO: 4028602 - RNA, 16 nt, Molluscum contagiosum virus
gcguacagcgcgcgug

SEQ ID NO: 4028603 - RNA, 20 nt, Molluscum contagiosum virus
gcguacgcgugcgcuggcgc

SEQ ID NO: 4028604 - RNA, 21 nt, Molluscum contagiosum virus
gcguacucaacgcgauggcgc

SEQ ID NO: 4028605 - RNA, 15 nt, Molluscum contagiosum virus
gcguagcaugcucgu

SEQ ID NO: 4028606 - RNA, 22 nt, Molluscum contagiosum virus
gcguagcggacgaagcugugca

SEQ ID NO: 4028607 - RNA, 15 nt, Molluscum contagiosum virus
gcguaucggagucag

SEQ ID NO: 4028608 - RNA, 18 nt, Molluscum contagiosum virus
gcguaucggagucaggca

SEQ ID NO: 4028609 - RNA, 18 nt, Molluscum contagiosum virus
gcgucacaagcaccgccu

SEQ ID NO: 4028610 - RNA, 17 nt, Molluscum contagiosum virus
gcgucaucgcugcacgc

SEQ ID NO: 4028611 - RNA, 17 nt, Molluscum contagiosum virus
gcguccacgaugcgcuc

SEQ ID NO: 4028612 - RNA, 13 nt, Molluscum contagiosum virus
gcguccgcgcagc

SEQ ID NO: 4028613 - RNA, 13 nt, Molluscum contagiosum virus
gcguccggugcuc

SEQ ID NO: 4028614 - RNA, 20 nt, Molluscum contagiosum virus
gcguccguaagucgaagagg

SEQ ID NO: 4028615 - RNA, 22 nt, Molluscum contagiosum virus
gcguccguaagucgaagagggu

SEQ ID NO: 4028616 - RNA, 17 nt, Molluscum contagiosum virus
gcguccguucacgggca

SEQ ID NO: 4028617 - RNA, 23 nt, Molluscum contagiosum virus
gcguccuucuuugcgugcgccuc

SEQ ID NO: 4028618 - RNA, 14 nt, Molluscum contagiosum virus
acggacgcccuccu

SEQ ID NO: 4028619 - RNA, 12 nt, Molluscum contagiosum virus
acggacgcggcc

SEQ ID NO: 4028620 - RNA, 14 nt, Molluscum contagiosum virus
acggacggcgcacg

SEQ ID NO: 4028621 - RNA, 22 nt, Molluscum contagiosum virus
acggagaucaggcagcugcugc

SEQ ID NO: 4028622 - RNA, 15 nt, Molluscum contagiosum virus
acggagauggacaca

SEQ ID NO: 4028623 - RNA, 23 nt, Molluscum contagiosum virus
acggagcgcgucuauccugucag

SEQ ID NO: 4028624 - RNA, 20 nt, Molluscum contagiosum virus
acggaggucuacaacgagcu

SEQ ID NO: 4028625 - RNA, 12 nt, Molluscum contagiosum virus
acggccgcgcgc

SEQ ID NO: 4028626 - RNA, 16 nt, Molluscum contagiosum virus
acggccggcgccgcgc

SEQ ID NO: 4028627 - RNA, 13 nt, Molluscum contagiosum virus
acggccuucgcgc

SEQ ID NO: 4028628 - RNA, 18 nt, Molluscum contagiosum virus
acggccuucgcgcugccc

SEQ ID NO: 4028629 - RNA, 20 nt, Molluscum contagiosum virus
acggcgacgacagcgacgag

SEQ ID NO: 4028630 - RNA, 16 nt, Molluscum contagiosum virus
acggcgacgagggcgc

SEQ ID NO: 4028631 - RNA, 14 nt, Molluscum contagiosum virus
acggcgcccaggaa

SEQ ID NO: 4028632 - RNA, 22 nt, Molluscum contagiosum virus
acggcgcgcgcgcuagccgccg

SEQ ID NO: 4028633 - RNA, 20 nt, Molluscum contagiosum virus
acggcgcggaucugcgcaca

SEQ ID NO: 4028634 - RNA, 14 nt, Molluscum contagiosum virus
acggcgcugcgcgu

SEQ ID NO: 4028635 - RNA, 16 nt, Molluscum contagiosum virus
acggcgugcuggccag

SEQ ID NO: 4028636 - RNA, 17 nt, Molluscum contagiosum virus
acggcgugcugugccug

SEQ ID NO: 4028637 - RNA, 17 nt, Molluscum contagiosum virus
acggcugcucgcugccu

SEQ ID NO: 4028638 - RNA, 14 nt, Molluscum contagiosum virus
acgggcacgcgcgc

SEQ ID NO: 4028639 - RNA, 19 nt, Molluscum contagiosum virus
acgggcacgcgcgcgccuu

SEQ ID NO: 4028640 - RNA, 17 nt, Molluscum contagiosum virus
acgggcgugcgcagcag

SEQ ID NO: 4028641 - RNA, 20 nt, Molluscum contagiosum virus
acgggcgugcgcagcagcuc

SEQ ID NO: 4028642 - RNA, 14 nt, Molluscum contagiosum virus
acgguccugggcga

SEQ ID NO: 4028643 - RNA, 19 nt, Molluscum contagiosum virus
acggugcaaccgcugcucg

SEQ ID NO: 4028644 - RNA, 13 nt, Molluscum contagiosum virus
acguaaagacggc

SEQ ID NO: 4028645 - RNA, 16 nt, Molluscum contagiosum virus
acguacgagcaggcgc

SEQ ID NO: 4028646 - RNA, 18 nt, Molluscum contagiosum virus
acguccccgaacugcugg

SEQ ID NO: 4028647 - RNA, 14 nt, Molluscum contagiosum virus
acguccuagagcag

SEQ ID NO: 4028648 - RNA, 18 nt, Molluscum contagiosum virus
acguccuugucgaacgac

SEQ ID NO: 4028649 - RNA, 15 nt, Molluscum contagiosum virus
acgucgcgcgcucgc

SEQ ID NO: 4028650 - RNA, 14 nt, Molluscum contagiosum virus
acgucguagcgcuc

SEQ ID NO: 4028651 - RNA, 16 nt, Molluscum contagiosum virus
acgucuccucgcgcac

SEQ ID NO: 4028652 - RNA, 20 nt, Molluscum contagiosum virus
acgucuuccccaagaccugc

SEQ ID NO: 4028653 - RNA, 14 nt, Molluscum contagiosum virus
acgucuucuaccgc

SEQ ID NO: 4028654 - RNA, 16 nt, Molluscum contagiosum virus
acgugaccucgcugcu

SEQ ID NO: 4028655 - RNA, 16 nt, Molluscum contagiosum virus
acgugacgcgccucga

SEQ ID NO: 4028656 - RNA, 17 nt, Molluscum contagiosum virus
acgugcacguggcgcac

SEQ ID NO: 4028657 - RNA, 23 nt, Molluscum contagiosum virus
acgugcagcggcgccacgagcgc

SEQ ID NO: 4028658 - RNA, 20 nt, Molluscum contagiosum virus
acgugccaagaccugggcgu

SEQ ID NO: 4028659 - RNA, 14 nt, Molluscum contagiosum virus
acgugcgcaucccu

SEQ ID NO: 4028660 - RNA, 16 nt, Molluscum contagiosum virus
acgugcuccgaggagg

SEQ ID NO: 4028661 - RNA, 13 nt, Molluscum contagiosum virus
acgugcugcugca

SEQ ID NO: 4028662 - RNA, 18 nt, Molluscum contagiosum virus
acgugcugcugcagaacu

SEQ ID NO: 4028663 - RNA, 15 nt, Molluscum contagiosum virus
acgugcugcugcggc

SEQ ID NO: 4028664 - RNA, 19 nt, Molluscum contagiosum virus
acgugcuucacgaccuggu

SEQ ID NO: 4028665 - RNA, 18 nt, Molluscum contagiosum virus
acgugcuuccccgccauc

SEQ ID NO: 4028666 - RNA, 17 nt, Molluscum contagiosum virus
acgugcuugcgcgcgag

SEQ ID NO: 4028667 - RNA, 23 nt, Molluscum contagiosum virus
acguguacaugaugcccugguga

SEQ ID NO: 4028668 - RNA, 21 nt, Molluscum contagiosum virus
acguugcgcguucagcgcacg

SEQ ID NO: 4028669 - RNA, 16 nt, Molluscum contagiosum virus
acuaagcuaaaagagc

SEQ ID NO: 4028670 - RNA, 19 nt, Molluscum contagiosum virus
acuaccgcaaccagcugcu

SEQ ID NO: 4028671 - RNA, 18 nt, Molluscum contagiosum virus
acuaccuggcggcgcugg

SEQ ID NO: 4028672 - RNA, 20 nt, Molluscum contagiosum virus
acuaccuggcggcgcuggag

SEQ ID NO: 4028673 - RNA, 15 nt, Molluscum contagiosum virus
acuacgcacuggcga

SEQ ID NO: 4028674 - RNA, 14 nt, Molluscum contagiosum virus
acuacgcgcugcgg

SEQ ID NO: 4028675 - RNA, 14 nt, Molluscum contagiosum virus
acuagcacgggcgg

SEQ ID NO: 4028676 - RNA, 21 nt, Molluscum contagiosum virus
acuaugcgucuuccugcugcc

SEQ ID NO: 4028677 - RNA, 20 nt, Molluscum contagiosum virus
acuauguucuucgcagagga

SEQ ID NO: 4028678 - RNA, 12 nt, Molluscum contagiosum virus
acucagcgggca

SEQ ID NO: 4028679 - RNA, 13 nt, Molluscum contagiosum virus
acuccacgcccgg

SEQ ID NO: 4028680 - RNA, 17 nt, Molluscum contagiosum virus
acuccagcgcgcccucg

SEQ ID NO: 4028681 - RNA, 20 nt, Molluscum contagiosum virus
acuccuuugcgagcacugua

SEQ ID NO: 4028682 - RNA, 18 nt, Molluscum contagiosum virus
acucgcgcgcgccgggcc

SEQ ID NO: 4028683 - RNA, 20 nt, Molluscum contagiosum virus
acucgcgcgcgccgggccgc

SEQ ID NO: 4028684 - RNA, 22 nt, Molluscum contagiosum virus
acucgcuacugcaacguggcgc

SEQ ID NO: 4028685 - RNA, 20 nt, Molluscum contagiosum virus
acucgcuggccucugccugc

SEQ ID NO: 4028686 - RNA, 15 nt, Molluscum contagiosum virus
acucggugcucaugc

SEQ ID NO: 4028687 - RNA, 19 nt, Molluscum contagiosum virus
acucggugcucaugcgcgg

SEQ ID NO: 4028688 - RNA, 15 nt, Molluscum contagiosum virus
acucugugaccugcg

SEQ ID NO: 4028689 - RNA, 20 nt, Molluscum contagiosum virus
acucuucccguuccugggca

SEQ ID NO: 4028690 - RNA, 15 nt, Molluscum contagiosum virus
acugaaaagcuaucc

SEQ ID NO: 4028691 - RNA, 14 nt, Molluscum contagiosum virus
acugacugcugccc

SEQ ID NO: 4028692 - RNA, 23 nt, Molluscum contagiosum virus
acugacugcugcccccgccgcgg

SEQ ID NO: 4028693 - RNA, 13 nt, Molluscum contagiosum virus
acugcaacgugag

SEQ ID NO: 4028694 - RNA, 16 nt, Molluscum contagiosum virus
acugcagcagcuccuc

SEQ ID NO: 4028695 - RNA, 20 nt, Molluscum contagiosum virus
acugccaaagcuaugcgcag

SEQ ID NO: 4028696 - RNA, 21 nt, Molluscum contagiosum virus
acugccacgcggagcucgcca

SEQ ID NO: 4028697 - RNA, 11 nt, Molluscum contagiosum virus
acugccgccgc

SEQ ID NO: 4028698 - RNA, 18 nt, Molluscum contagiosum virus
acugccugccgccucgga

SEQ ID NO: 4028699 - RNA, 18 nt, Molluscum contagiosum virus
acugcgacauccacauga

SEQ ID NO: 4028700 - RNA, 15 nt, Molluscum contagiosum virus
acugcgcgcacugcu

SEQ ID NO: 4028701 - RNA, 21 nt, Molluscum contagiosum virus
acugcuacgucgcggcgcacg

SEQ ID NO: 4028702 - RNA, 18 nt, Molluscum contagiosum virus
acugcuagcgacgcggac

SEQ ID NO: 4028703 - RNA, 22 nt, Molluscum contagiosum virus
acugcugcaggcaaagcggggc

SEQ ID NO: 4028704 - RNA, 16 nt, Molluscum contagiosum virus
acuggaagaacaggcc

SEQ ID NO: 4028705 - RNA, 13 nt, Molluscum contagiosum virus
acuggcaccugcg

SEQ ID NO: 4028706 - RNA, 20 nt, Molluscum contagiosum virus
acuggcaccugcggcugcgg

SEQ ID NO: 4028707 - RNA, 16 nt, Molluscum contagiosum virus
acuggcacgcgccgcg

SEQ ID NO: 4028708 - RNA, 18 nt, Molluscum contagiosum virus
acuggcgcccggcgccga

SEQ ID NO: 4028709 - RNA, 16 nt, Molluscum contagiosum virus
acugucgcgcagcugc

SEQ ID NO: 4028710 - RNA, 23 nt, Molluscum contagiosum virus
acugucuuuuccucacgucgcug

SEQ ID NO: 4028711 - RNA, 21 nt, Molluscum contagiosum virus
acuuauuuuuguguuuugugc

SEQ ID NO: 4028712 - RNA, 17 nt, Molluscum contagiosum virus
acuucauccucuaccgc

SEQ ID NO: 4028713 - RNA, 13 nt, Molluscum contagiosum virus
acuucccgaggac

SEQ ID NO: 4028714 - RNA, 14 nt, Molluscum contagiosum virus
acuuccgcaacgag

SEQ ID NO: 4028715 - RNA, 17 nt, Molluscum contagiosum virus
acuuccuugcgcaggac

SEQ ID NO: 4028716 - RNA, 20 nt, Molluscum contagiosum virus
acuucgacgcggugcgcgcg

SEQ ID NO: 4028717 - RNA, 15 nt, Molluscum contagiosum virus
acuugcacgcgcacg

SEQ ID NO: 4028718 - RNA, 19 nt, Molluscum contagiosum virus
acuugcgcguccgcaaagc

SEQ ID NO: 4028719 - RNA, 20 nt, Molluscum contagiosum virus
acuugucaggccggccgugg

SEQ ID NO: 4028720 - RNA, 23 nt, Molluscum contagiosum virus
acuuuggcuacgacggcgacgag

SEQ ID NO: 4028721 - RNA, 18 nt, Molluscum contagiosum virus
cgaagagggucgugcagg

SEQ ID NO: 4028722 - RNA, 21 nt, Molluscum contagiosum virus
cgaagaguggcucacagccgu

SEQ ID NO: 4028723 - RNA, 14 nt, Molluscum contagiosum virus
cgaagcaggcgcca

SEQ ID NO: 4028724 - RNA, 16 nt, Molluscum contagiosum virus
cgaagcccagcuucag

SEQ ID NO: 4028725 - RNA, 16 nt, Molluscum contagiosum virus
cgaagcugcgcuugcg

SEQ ID NO: 4028726 - RNA, 14 nt, Molluscum contagiosum virus
cgaaguccugggcg

SEQ ID NO: 4028727 - RNA, 18 nt, Molluscum contagiosum virus
cgaaguuccugcauuuca

SEQ ID NO: 4028728 - RNA, 20 nt, Molluscum contagiosum virus
cgaaguuggucaacaacacg

SEQ ID NO: 4028729 - RNA, 23 nt, Molluscum contagiosum virus
cgacaacacgcuguugcugcugc

SEQ ID NO: 4028730 - RNA, 12 nt, Molluscum contagiosum virus
cgacaaggaaag

SEQ ID NO: 4028731 - RNA, 17 nt, Molluscum contagiosum virus
cgacacgcgcccgccgc

SEQ ID NO: 4028732 - RNA, 17 nt, Molluscum contagiosum virus
cgacacugugcuggcgc

SEQ ID NO: 4028733 - RNA, 22 nt, Molluscum contagiosum virus
cgacaugcacacgcaccgccug

SEQ ID NO: 4028734 - RNA, 18 nt, Molluscum contagiosum virus
cgacaugccucgcggccc

SEQ ID NO: 4028735 - RNA, 16 nt, Molluscum contagiosum virus
cgacauguacauagcc

SEQ ID NO: 4028736 - RNA, 21 nt, Molluscum contagiosum virus
cgaccugcacgacccucuucg

SEQ ID NO: 4028737 - RNA, 15 nt, Molluscum contagiosum virus
cgaccuggaagccgc

SEQ ID NO: 4028738 - RNA, 23 nt, Molluscum contagiosum virus
cgaccuggaagccgccagccacg

SEQ ID NO: 4028739 - RNA, 15 nt, Molluscum contagiosum virus
cgacgagugcgccgc

SEQ ID NO: 4028740 - RNA, 15 nt, Molluscum contagiosum virus
cgacgccagcgcgcc

SEQ ID NO: 4028741 - RNA, 23 nt, Molluscum contagiosum virus
cgacgccagcgcgcccaccagca

SEQ ID NO: 4028742 - RNA, 15 nt, Molluscum contagiosum virus
cgacgccaucaggaa

SEQ ID NO: 4028743 - RNA, 20 nt, Molluscum contagiosum virus
cgacgccuuguucaccaucc

SEQ ID NO: 4028744 - RNA, 22 nt, Molluscum contagiosum virus
cgacgcgaucuuccgcgacgag

SEQ ID NO: 4028745 - RNA, 22 nt, Molluscum contagiosum virus
cgacgcgcgcggcaagcagcgu

SEQ ID NO: 4028746 - RNA, 18 nt, Molluscum contagiosum virus
cgacgcgcggcagacgcc

SEQ ID NO: 4028747 - RNA, 21 nt, Molluscum contagiosum virus
cgacgcgcguggagcgcgcgg

SEQ ID NO: 4028748 - RNA, 17 nt, Molluscum contagiosum virus
cgacgcggaggucgagc

SEQ ID NO: 4028749 - RNA, 17 nt, Molluscum contagiosum virus
cgacgcgugcauggcac

SEQ ID NO: 4028750 - RNA, 18 nt, Molluscum contagiosum virus
cgacggcgugcuggccag

SEQ ID NO: 4028751 - RNA, 19 nt, Molluscum contagiosum virus
cgacggucacgcaagcuuu

SEQ ID NO: 4028752 - RNA, 21 nt, Molluscum contagiosum virus
cgacgucaaccgggcucucgc

SEQ ID NO: 4028753 - RNA, 17 nt, Molluscum contagiosum virus
cgacguccuagagcaga

SEQ ID NO: 4028754 - RNA, 18 nt, Molluscum contagiosum virus
cgacgugccugccaucua

SEQ ID NO: 4028755 - RNA, 23 nt, Molluscum contagiosum virus
cgacguuuucuuugcgcucauca

SEQ ID NO: 4028756 - RNA, 18 nt, Molluscum contagiosum virus
cgacuagcgugcgcagca

SEQ ID NO: 4028757 - RNA, 20 nt, Molluscum contagiosum virus
cgacuagcgugcgcagcauu

SEQ ID NO: 4028758 - RNA, 19 nt, Molluscum contagiosum virus
cgacucgagcgagcuacgc

SEQ ID NO: 4028759 - RNA, 22 nt, Molluscum contagiosum virus
cgacucggacacguugcagcag

SEQ ID NO: 4028760 - RNA, 19 nt, Molluscum contagiosum virus
cgacucggaugcgcugccg

SEQ ID NO: 4028761 - RNA, 19 nt, Molluscum contagiosum virus
cgacucggugcucaugcgc

SEQ ID NO: 4028762 - RNA, 15 nt, Molluscum contagiosum virus
cgacucucaacgagc

SEQ ID NO: 4028763 - RNA, 16 nt, Molluscum contagiosum virus
cgacucucaacgagcg

SEQ ID NO: 4028764 - RNA, 16 nt, Molluscum contagiosum virus
cgacuucggcgcaacg

SEQ ID NO: 4028765 - RNA, 19 nt, Molluscum contagiosum virus
cgagaaaaagcugucgcgc

SEQ ID NO: 4028766 - RNA, 23 nt, Molluscum contagiosum virus
cgagaaaaagcugucgcgcagca

SEQ ID NO: 4028767 - RNA, 18 nt, Molluscum contagiosum virus
cgagaaagucaugcucgc

SEQ ID NO: 4028768 - RNA, 18 nt, Molluscum contagiosum virus
cgagaccacgcgcgcugc

SEQ ID NO: 4028769 - RNA, 16 nt, Molluscum contagiosum virus
cgagacggaaauguug

SEQ ID NO: 4028770 - RNA, 15 nt, Molluscum contagiosum virus
cgagacucuggaagc

SEQ ID NO: 4028771 - RNA, 23 nt, Molluscum contagiosum virus
cgagacugagugcugagccacaa

SEQ ID NO: 4028772 - RNA, 22 nt, Molluscum contagiosum virus
cgagacugcuacgucgcggcgc

SEQ ID NO: 4028773 - RNA, 23 nt, Molluscum contagiosum virus
cgagacuugugcccauguccuuu

SEQ ID NO: 4028774 - RNA, 14 nt, Molluscum contagiosum virus
cgagagaauggagc

SEQ ID NO: 4028775 - RNA, 16 nt, Molluscum contagiosum virus
cgagcaacaggggccg

SEQ ID NO: 4028776 - RNA, 15 nt, Molluscum contagiosum virus
cgagcaaugcgagca

SEQ ID NO: 4028777 - RNA, 20 nt, Molluscum contagiosum virus
cgagcaauugcugggcacaa

SEQ ID NO: 4028778 - RNA, 16 nt, Molluscum contagiosum virus
cgagcacagcgcgcgg

SEQ ID NO: 4028779 - RNA, 20 nt, Molluscum contagiosum virus
cgagcacccccgcugcacgc

SEQ ID NO: 4028780 - RNA, 21 nt, Molluscum contagiosum virus
cgagcacgccaaccaccacgu

SEQ ID NO: 4028781 - RNA, 14 nt, Molluscum contagiosum virus
cgagcacugcgcgc

SEQ ID NO: 4028782 - RNA, 23 nt, Molluscum contagiosum virus
cgagcagcccgugcgccugccgc

SEQ ID NO: 4028783 - RNA, 14 nt, Molluscum contagiosum virus
cgagcaggcgcagc

SEQ ID NO: 4028784 - RNA, 20 nt, Molluscum contagiosum virus
cgagcaguccgccucgagca

SEQ ID NO: 4028785 - RNA, 13 nt, Molluscum contagiosum virus
cgagccagccagg

SEQ ID NO: 4028786 - RNA, 14 nt, Molluscum contagiosum virus
cgagccagccaggc

SEQ ID NO: 4028787 - RNA, 20 nt, Molluscum contagiosum virus
cgagccagccaggcgccggc

SEQ ID NO: 4028788 - RNA, 22 nt, Molluscum contagiosum virus
cgagcccgggcccgugcccgag

SEQ ID NO: 4028789 - RNA, 17 nt, Molluscum contagiosum virus
cgagccggacgcgcgaa

SEQ ID NO: 4028790 - RNA, 15 nt, Molluscum contagiosum virus
cgagcgaaccgcggc

SEQ ID NO: 4028791 - RNA, 18 nt, Molluscum contagiosum virus
cgagcgaaccgcggcagc

SEQ ID NO: 4028792 - RNA, 16 nt, Molluscum contagiosum virus
cgagcgcaugcgcgcc

SEQ ID NO: 4028793 - RNA, 22 nt, Molluscum contagiosum virus
cgagcgccacuagcaaggcgcc

SEQ ID NO: 4028794 - RNA, 15 nt, Molluscum contagiosum virus
cgagcgccgcgugcg

SEQ ID NO: 4028795 - RNA, 19 nt, Molluscum contagiosum virus
cgagcgccgcucgcacggc

SEQ ID NO: 4028796 - RNA, 14 nt, Molluscum contagiosum virus
cgagcgccugcgag

SEQ ID NO: 4028797 - RNA, 16 nt, Molluscum contagiosum virus
cgagcgcgccgcgcgc

SEQ ID NO: 4028798 - RNA, 20 nt, Molluscum contagiosum virus
cgagcgcggcaacagcacga

SEQ ID NO: 4028799 - RNA, 16 nt, Molluscum contagiosum virus
cgagcgcgucugcucu

SEQ ID NO: 4028800 - RNA, 13 nt, Molluscum contagiosum virus
cgagcgcgugcuc

SEQ ID NO: 4028801 - RNA, 16 nt, Molluscum contagiosum virus
cgagcgcgugucuacc

SEQ ID NO: 4028802 - RNA, 17 nt, Molluscum contagiosum virus
cgagcggagcgggcacg

SEQ ID NO: 4028803 - RNA, 23 nt, Molluscum contagiosum virus
cgagcgggcaaugggcacgcucu

SEQ ID NO: 4028804 - RNA, 22 nt, Molluscum contagiosum virus
cgagcgugaccagugcgugcuc

SEQ ID NO: 4028805 - RNA, 14 nt, Molluscum contagiosum virus
cgagcuacugcgcg

SEQ ID NO: 4028806 - RNA, 15 nt, Molluscum contagiosum virus
cgagcuacugcgcgc

SEQ ID NO: 4028807 - RNA, 13 nt, Molluscum contagiosum virus
cgagcuagugcac

SEQ ID NO: 4028808 - RNA, 22 nt, Molluscum contagiosum virus
cgagcucgccuccuugcccgag

SEQ ID NO: 4028809 - RNA, 21 nt, Molluscum contagiosum virus
cgagcucgcgcgccagcacgc

SEQ ID NO: 4028810 - RNA, 21 nt, Molluscum contagiosum virus
cgagcucuccgaagagcagaa

SEQ ID NO: 4028811 - RNA, 12 nt, Molluscum contagiosum virus
cgagcugccaug

SEQ ID NO: 4028812 - RNA, 14 nt, Molluscum contagiosum virus
cgagcugcggcgcg

SEQ ID NO: 4028813 - RNA, 20 nt, Molluscum contagiosum virus
cgagcugcgugugccggugc

SEQ ID NO: 4028814 - RNA, 20 nt, Molluscum contagiosum virus
cgagcugcuaacaacaugag

SEQ ID NO: 4028815 - RNA, 16 nt, Molluscum contagiosum virus
cgagcugcuagcggca

SEQ ID NO: 4028816 - RNA, 14 nt, Molluscum contagiosum virus
cgagcugcugcgcg

SEQ ID NO: 4028817 - RNA, 14 nt, Molluscum contagiosum virus
cgagcugugcauug

SEQ ID NO: 4028818 - RNA, 17 nt, Molluscum contagiosum virus
cgagcuucgucuucacc

SEQ ID NO: 4028819 - RNA, 22 nt, Molluscum contagiosum virus
cgagcuucgucuucaccugcau

SEQ ID NO: 4028820 - RNA, 14 nt, Molluscum contagiosum virus
cgaggaaacgcagc

SEQ ID NO: 4028821 - RNA, 21 nt, Molluscum contagiosum virus
cgaggaacucuacgacaugcu

SEQ ID NO: 4028822 - RNA, 13 nt, Molluscum contagiosum virus
cgaggagaaagua

SEQ ID NO: 4028823 - RNA, 14 nt, Molluscum contagiosum virus
cgaggagcacggca

SEQ ID NO: 4028824 - RNA, 15 nt, Molluscum contagiosum virus
cgaggagggcguccg

SEQ ID NO: 4028825 - RNA, 16 nt, Molluscum contagiosum virus
cgaggccgcgcucuuc

SEQ ID NO: 4028826 - RNA, 14 nt, Molluscum contagiosum virus
cgaggccggcaagc

SEQ ID NO: 4028827 - RNA, 13 nt, Molluscum contagiosum virus
cgaggccuacagc

SEQ ID NO: 4028828 - RNA, 20 nt, Molluscum contagiosum virus
cgaggccuacagcgcgcugc

SEQ ID NO: 4028829 - RNA, 16 nt, Molluscum contagiosum virus
cgaggccuacgugcug

SEQ ID NO: 4028830 - RNA, 22 nt, Molluscum contagiosum virus
cgaggccuacgugcugcgcacg

SEQ ID NO: 4028831 - RNA, 17 nt, Molluscum contagiosum virus
cgaggccuucgcgcccg

SEQ ID NO: 4028832 - RNA, 19 nt, Molluscum contagiosum virus
cgaggcguccagcggcugc

SEQ ID NO: 4028833 - RNA, 20 nt, Molluscum contagiosum virus
cgagggagccucgcuggugu

SEQ ID NO: 4028834 - RNA, 20 nt, Molluscum contagiosum virus
cgagggccuuggcggcgcgg

SEQ ID NO: 4028835 - RNA, 17 nt, Molluscum contagiosum virus
cgagggcgccgggcgca

SEQ ID NO: 4028836 - RNA, 23 nt, Molluscum contagiosum virus
cgagggcgggcacgugcugcugc

SEQ ID NO: 4028837 - RNA, 23 nt, Molluscum contagiosum virus
cgagguggcacccuggcugcugc

SEQ ID NO: 4028838 - RNA, 21 nt, Molluscum contagiosum virus
cgaguacgcucuccaugcgcg

SEQ ID NO: 4028839 - RNA, 22 nt, Molluscum contagiosum virus
cgaguacgcucuccaugcgcgc

SEQ ID NO: 4028840 - RNA, 14 nt, Molluscum contagiosum virus
cgaguacugcugcg

SEQ ID NO: 4028841 - RNA, 16 nt, Molluscum contagiosum virus
cgaguacugcugcggc

SEQ ID NO: 4028842 - RNA, 15 nt, Molluscum contagiosum virus
cgaguccagcuucuc

SEQ ID NO: 4028843 - RNA, 15 nt, Molluscum contagiosum virus
cgagucgcgggcgcg

SEQ ID NO: 4028844 - RNA, 17 nt, Molluscum contagiosum virus
cgagucucuguaacaag

SEQ ID NO: 4028845 - RNA, 17 nt, Molluscum contagiosum virus
cgagugcgccgcgcccg

SEQ ID NO: 4028846 - RNA, 14 nt, Molluscum contagiosum virus
cgagugcuggagca

SEQ ID NO: 4028847 - RNA, 12 nt, Molluscum contagiosum virus
cgagugugcaug

SEQ ID NO: 4028848 - RNA, 16 nt, Molluscum contagiosum virus
cgagugugcgcgcccc

SEQ ID NO: 4028849 - RNA, 18 nt, Molluscum contagiosum virus
cgagugugugcaucccuc

SEQ ID NO: 4028850 - RNA, 17 nt, Molluscum contagiosum virus
cgauacccuuggcagca

SEQ ID NO: 4028851 - RNA, 15 nt, Molluscum contagiosum virus
cgauccuguccaucu

SEQ ID NO: 4028852 - RNA, 13 nt, Molluscum contagiosum virus
cgaucgcagcagu

SEQ ID NO: 4028853 - RNA, 16 nt, Molluscum contagiosum virus
cgaucgcgcucaggac

SEQ ID NO: 4028854 - RNA, 20 nt, Molluscum contagiosum virus
cgaucgcgucacguccucaa

SEQ ID NO: 4028855 - RNA, 17 nt, Molluscum contagiosum virus
cgaugccaacagacuug

SEQ ID NO: 4028856 - RNA, 20 nt, Molluscum contagiosum virus
cgauggcguggcggauguca

SEQ ID NO: 4028857 - RNA, 13 nt, Molluscum contagiosum virus
cgaugggaggcgg

SEQ ID NO: 4028858 - RNA, 18 nt, Molluscum contagiosum virus
cgaugguggcgcugcugc

SEQ ID NO: 4028859 - RNA, 21 nt, Molluscum contagiosum virus
cgauuaucguggacgagcaga

SEQ ID NO: 4028860 - RNA, 13 nt, Molluscum contagiosum virus
cgauugccccugg

SEQ ID NO: 4028861 - RNA, 20 nt, Molluscum contagiosum virus
cgauugcguguuggcuucug

SEQ ID NO: 4028862 - RNA, 22 nt, Molluscum contagiosum virus
cgcaaaaaacgaaaagccagac

SEQ ID NO: 4028863 - RNA, 12 nt, Molluscum contagiosum virus
cgcaaacacugu

SEQ ID NO: 4028864 - RNA, 15 nt, Molluscum contagiosum virus
cgcaaagccggcccc

SEQ ID NO: 4028865 - RNA, 14 nt, Molluscum contagiosum virus
cgcaacaaggaaag

SEQ ID NO: 4028866 - RNA, 13 nt, Molluscum contagiosum virus
cgcaacacggcgg

SEQ ID NO: 4028867 - RNA, 18 nt, Molluscum contagiosum virus
cgcaaccgcgugcgugca

SEQ ID NO: 4028868 - RNA, 22 nt, Molluscum contagiosum virus
cgcaaccucuuccggaggcagc

SEQ ID NO: 4028869 - RNA, 12 nt, Molluscum contagiosum virus
cgcaacgagguc

SEQ ID NO: 4028870 - RNA, 23 nt, Molluscum contagiosum virus
cgcaacgucgcacuggccugcaa

SEQ ID NO: 4028871 - RNA, 18 nt, Molluscum contagiosum virus
cgcaacuagggagcggca

SEQ ID NO: 4028872 - RNA, 22 nt, Molluscum contagiosum virus
cgcaagaacaaccagacgugcu

SEQ ID NO: 4028873 - RNA, 12 nt, Molluscum contagiosum virus
cgcaagcagcuc

SEQ ID NO: 4028874 - RNA, 19 nt, Molluscum contagiosum virus
cgcaagcccgcgcgcgagc

SEQ ID NO: 4028875 - RNA, 19 nt, Molluscum contagiosum virus
cgcaaggacaccgcgggcg

SEQ ID NO: 4028876 - RNA, 20 nt, Molluscum contagiosum virus
cgcaaggcaugcgcgcagug

SEQ ID NO: 4028877 - RNA, 23 nt, Molluscum contagiosum virus
cgcaaggugugcgcgcugcacgc

SEQ ID NO: 4028878 - RNA, 18 nt, Molluscum contagiosum virus
cgcaagucucccucgcgc

SEQ ID NO: 4028879 - RNA, 20 nt, Molluscum contagiosum virus
cgcaaugcagugcaccagca

SEQ ID NO: 4028880 - RNA, 14 nt, Molluscum contagiosum virus
cgcacaaacgcgcg

SEQ ID NO: 4028881 - RNA, 15 nt, Molluscum contagiosum virus
cgcacaagggcagcu

SEQ ID NO: 4028882 - RNA, 23 nt, Molluscum contagiosum virus
cgcacacgaaucgcucgcggugc

SEQ ID NO: 4028883 - RNA, 20 nt, Molluscum contagiosum virus
cgcacacgagugcccgcgcg

SEQ ID NO: 4028884 - RNA, 18 nt, Molluscum contagiosum virus
cgcacacucgcgcguccg

SEQ ID NO: 4028885 - RNA, 16 nt, Molluscum contagiosum virus
cgcacacuugcgcguu

SEQ ID NO: 4028886 - RNA, 16 nt, Molluscum contagiosum virus
cgcacagucuugcgca

SEQ ID NO: 4028887 - RNA, 10 nt, Molluscum contagiosum virus
cgcaccagug

SEQ ID NO: 4028888 - RNA, 14 nt, Molluscum contagiosum virus
cgcacccgccacga

SEQ ID NO: 4028889 - RNA, 21 nt, Molluscum contagiosum virus
cgcaccgccuggugcugcgcg

SEQ ID NO: 4028890 - RNA, 14 nt, Molluscum contagiosum virus
cgcaccucaccgcg

SEQ ID NO: 4028891 - RNA, 23 nt, Molluscum contagiosum virus
cgcaccuuuggugcagaucucgc

SEQ ID NO: 4028892 - RNA, 15 nt, Molluscum contagiosum virus
cgcacgaccacgcug

SEQ ID NO: 4028893 - RNA, 17 nt, Molluscum contagiosum virus
cgcacgaccacgugcag

SEQ ID NO: 4028894 - RNA, 15 nt, Molluscum contagiosum virus
cgcacgagcugcugc

SEQ ID NO: 4028895 - RNA, 20 nt, Molluscum contagiosum virus
cgcacgauguacuccaccau

SEQ ID NO: 4028896 - RNA, 17 nt, Molluscum contagiosum virus
cgccguuggccaccugg

SEQ ID NO: 4028897 - RNA, 20 nt, Molluscum contagiosum virus
cgccguuucgcaagucuccc

SEQ ID NO: 4028898 - RNA, 15 nt, Molluscum contagiosum virus
cgccucgagcacgcc

SEQ ID NO: 4028899 - RNA, 23 nt, Molluscum contagiosum virus
cgccucgggaaaacgcgcggcag

SEQ ID NO: 4028900 - RNA, 17 nt, Molluscum contagiosum virus
cgccugcacgcgcacuu

SEQ ID NO: 4028901 - RNA, 14 nt, Molluscum contagiosum virus
cgccugcacuacug

SEQ ID NO: 4028902 - RNA, 15 nt, Molluscum contagiosum virus
cgccugccgcgagca

SEQ ID NO: 4028903 - RNA, 20 nt, Molluscum contagiosum virus
cgccuggccgaacugcucug

SEQ ID NO: 4028904 - RNA, 18 nt, Molluscum contagiosum virus
cgccuguaccugcucggg

SEQ ID NO: 4028905 - RNA, 15 nt, Molluscum contagiosum virus
cgccuuccugcuggc

SEQ ID NO: 4028906 - RNA, 22 nt, Molluscum contagiosum virus
cgccuucguggagcccgugcug

SEQ ID NO: 4028907 - RNA, 18 nt, Molluscum contagiosum virus
cgccuucugcaagcugcc

SEQ ID NO: 4028908 - RNA, 18 nt, Molluscum contagiosum virus
cgcgaaacuggacugagc

SEQ ID NO: 4028909 - RNA, 15 nt, Molluscum contagiosum virus
cgcgaaagaacacgg

SEQ ID NO: 4028910 - RNA, 22 nt, Molluscum contagiosum virus
cgcgaacgagaaaugcgcacac

SEQ ID NO: 4028911 - RNA, 16 nt, Molluscum contagiosum virus
cgcgaacgcguccacg

SEQ ID NO: 4028912 - RNA, 20 nt, Molluscum contagiosum virus
cgcgaacgcguccacggcgc

SEQ ID NO: 4028913 - RNA, 19 nt, Molluscum contagiosum virus
cgcgaacucgcggcagugc

SEQ ID NO: 4028914 - RNA, 22 nt, Molluscum contagiosum virus
cgcgaaguuccugcauuucaug

SEQ ID NO: 4028915 - RNA, 20 nt, Molluscum contagiosum virus
cgcgaauuggccgcggagga

SEQ ID NO: 4028916 - RNA, 16 nt, Molluscum contagiosum virus
cgcgacaggggccaca

SEQ ID NO: 4028917 - RNA, 15 nt, Molluscum contagiosum virus
cgcgaccgcaccgag

SEQ ID NO: 4028918 - RNA, 20 nt, Molluscum contagiosum virus
cgcgacgccguccgcgcagc

SEQ ID NO: 4028919 - RNA, 15 nt, Molluscum contagiosum virus
cgcgacgggaaccgu

SEQ ID NO: 4028920 - RNA, 18 nt, Molluscum contagiosum virus
cgcgacuggcacgcgccg

SEQ ID NO: 4028921 - RNA, 17 nt, Molluscum contagiosum virus
cgcgagcaagcgcccgc

SEQ ID NO: 4028922 - RNA, 14 nt, Molluscum contagiosum virus
cgcgagcgcaugcg

SEQ ID NO: 4028923 - RNA, 22 nt, Molluscum contagiosum virus
cgcgagcgcgcccccgagcugc

SEQ ID NO: 4028924 - RNA, 16 nt, Molluscum contagiosum virus
cgcgagcgcgcgcugc

SEQ ID NO: 4028925 - RNA, 13 nt, Molluscum contagiosum virus
cgcgagcgcgggc

SEQ ID NO: 4028926 - RNA, 17 nt, Molluscum contagiosum virus
cgcgagcucgcgucauc

SEQ ID NO: 4028927 - RNA, 14 nt, Molluscum contagiosum virus
cgcgagcugcugcg

SEQ ID NO: 4028928 - RNA, 14 nt, Molluscum contagiosum virus
cgcgagugugcaug

SEQ ID NO: 4028929 - RNA, 14 nt, Molluscum contagiosum virus
cgcgagugugcgug

SEQ ID NO: 4028930 - RNA, 15 nt, Molluscum contagiosum virus
cgcgauggcgccugc

SEQ ID NO: 4028931 - RNA, 15 nt, Molluscum contagiosum virus
cgcgauucugcucuu

SEQ ID NO: 4028932 - RNA, 16 nt, Molluscum contagiosum virus
cgcgcaaccagcuggc

SEQ ID NO: 4028933 - RNA, 15 nt, Molluscum contagiosum virus
cgcgcaagcgcugcu

SEQ ID NO: 4028934 - RNA, 20 nt, Molluscum contagiosum virus
cgcgcaagucaccgcuccgc

SEQ ID NO: 4028935 - RNA, 22 nt, Molluscum contagiosum virus
cgcgcaagugugcgcaucccuc

SEQ ID NO: 4028936 - RNA, 15 nt, Molluscum contagiosum virus
cgcgcaauagcgccc

SEQ ID NO: 4028937 - RNA, 20 nt, Molluscum contagiosum virus
cgcgcacaucggcacugcuc

SEQ ID NO: 4028938 - RNA, 17 nt, Molluscum contagiosum virus
cgcgcaccugcacgagc

SEQ ID NO: 4028939 - RNA, 13 nt, Molluscum contagiosum virus
cgcgcacgcgcgc

SEQ ID NO: 4028940 - RNA, 16 nt, Molluscum contagiosum virus
cgcgcacugcucgcgc

SEQ ID NO: 4028941 - RNA, 20 nt, Molluscum contagiosum virus
cgcgcagaagccaacacgca

SEQ ID NO: 4028942 - RNA, 11 nt, Molluscum contagiosum virus
cgcgcagcagc

SEQ ID NO: 4028943 - RNA, 19 nt, Molluscum contagiosum virus
cgcgcauacgcgccgcgcg

SEQ ID NO: 4028944 - RNA, 16 nt, Molluscum contagiosum virus
cgcgcaugacagccau

SEQ ID NO: 4028945 - RNA, 16 nt, Molluscum contagiosum virus
cgcgcaugaggcggcg

SEQ ID NO: 4028946 - RNA, 15 nt, Molluscum contagiosum virus
cgcgcaugcucgcgc

SEQ ID NO: 4028947 - RNA, 15 nt, Molluscum contagiosum virus
cgcgccagcaguccg

SEQ ID NO: 4028948 - RNA, 22 nt, Molluscum contagiosum virus
cgcgccauggcgagcuagugca

SEQ ID NO: 4028949 - RNA, 18 nt, Molluscum contagiosum virus
cgcgcccaagaagaagca

SEQ ID NO: 4028950 - RNA, 12 nt, Molluscum contagiosum virus
cgcgcccacggg

SEQ ID NO: 4028951 - RNA, 22 nt, Molluscum contagiosum virus
cgcgcccgcgucgcgcgccgcg

SEQ ID NO: 4028952 - RNA, 15 nt, Molluscum contagiosum virus
cgcgcccgcugcgcg

SEQ ID NO: 4028953 - RNA, 20 nt, Molluscum contagiosum virus
cgcgcccugcgcgcgagagc

SEQ ID NO: 4028954 - RNA, 19 nt, Molluscum contagiosum virus
cgcgccgaggacgcgcccg

SEQ ID NO: 4028955 - RNA, 16 nt, Molluscum contagiosum virus
cgcgccgcgccgcacg

SEQ ID NO: 4028956 - RNA, 16 nt, Molluscum contagiosum virus
cgcgccgcgcugcugg

SEQ ID NO: 4028957 - RNA, 14 nt, Molluscum contagiosum virus
cgcgccggccagcg

SEQ ID NO: 4028958 - RNA, 21 nt, Molluscum contagiosum virus
cgcgccggccagcgagucucg

SEQ ID NO: 4028959 - RNA, 20 nt, Molluscum contagiosum virus
cgcgccggggcgcgcgcugc

SEQ ID NO: 4028960 - RNA, 20 nt, Molluscum contagiosum virus
cgcgccucucgaggccggca

SEQ ID NO: 4028961 - RNA, 14 nt, Molluscum contagiosum virus
cgcgccugcgcgag

SEQ ID NO: 4028962 - RNA, 15 nt, Molluscum contagiosum virus
cgcgccugcgcgagc

SEQ ID NO: 4028963 - RNA, 16 nt, Molluscum contagiosum virus
cgcgccugcgcgagca

SEQ ID NO: 4028964 - RNA, 14 nt, Molluscum contagiosum virus
cgcgccugcuggcg

SEQ ID NO: 4028965 - RNA, 18 nt, Molluscum contagiosum virus
cgcgccugcuggcgggga

SEQ ID NO: 4028966 - RNA, 18 nt, Molluscum contagiosum virus
cgcgccuugagcgcgccg

SEQ ID NO: 4028967 - RNA, 21 nt, Molluscum contagiosum virus
cgcgccuugcagcgcagcagc

SEQ ID NO: 4028968 - RNA, 13 nt, Molluscum contagiosum virus
cgcgcgaacgugc

SEQ ID NO: 4028969 - RNA, 15 nt, Molluscum contagiosum virus
cgcgcgaacucucau

SEQ ID NO: 4028970 - RNA, 20 nt, Molluscum contagiosum virus
cgcgcgaacucucaucgagc

SEQ ID NO: 4028971 - RNA, 22 nt, Molluscum contagiosum virus
cgcgcgacgugugcucugugcg

SEQ ID NO: 4028972 - RNA, 22 nt, Molluscum contagiosum virus
cgcgcgagaagucgggcuggcg

SEQ ID NO: 4028973 - RNA, 19 nt, Molluscum contagiosum virus
cgcgcgagcggagcgggca

SEQ ID NO: 4028974 - RNA, 15 nt, Molluscum contagiosum virus
cgcgcgagcugcugc

SEQ ID NO: 4028975 - RNA, 14 nt, Molluscum contagiosum virus
cgcgcgagugugcg

SEQ ID NO: 4028976 - RNA, 16 nt, Molluscum contagiosum virus
cgcgcgcaagcgccgc

SEQ ID NO: 4028977 - RNA, 17 nt, Molluscum contagiosum virus
cgcgcgcaagcgccgcu

SEQ ID NO: 4028978 - RNA, 21 nt, Molluscum contagiosum virus
cgcgcgcaagucgcgcgcugc

SEQ ID NO: 4028979 - RNA, 16 nt, Molluscum contagiosum virus
cgcgcgcacgcgcacg

SEQ ID NO: 4028980 - RNA, 14 nt, Molluscum contagiosum virus
cgcgcgcacugcgg

SEQ ID NO: 4028981 - RNA, 11 nt, Molluscum contagiosum virus
cgcgcgcagca

SEQ ID NO: 4028982 - RNA, 16 nt, Molluscum contagiosum virus
cgcgcgcagcaggugc

SEQ ID NO: 4028983 - RNA, 22 nt, Molluscum contagiosum virus
cgcgcgcagcaggugcacgugc

SEQ ID NO: 4028984 - RNA, 17 nt, Molluscum contagiosum virus
cgcgcgcaggaaagguc

SEQ ID NO: 4028985 - RNA, 17 nt, Molluscum contagiosum virus
cgcgcgcaugcucgcgc

SEQ ID NO: 4028986 - RNA, 12 nt, Molluscum contagiosum virus
cgcgcgccagca

SEQ ID NO: 4028987 - RNA, 22 nt, Molluscum contagiosum virus
cgcgcgccagcaagcucgaugc

SEQ ID NO: 4028988 - RNA, 20 nt, Molluscum contagiosum virus
cgcgcgccagcacgcgcucg

SEQ ID NO: 4028989 - RNA, 21 nt, Molluscum contagiosum virus
cgcgcgccagcuaugcgcccg

SEQ ID NO: 4028990 - RNA, 21 nt, Molluscum contagiosum virus
cgcgcgcccgcugcgcgcucu

SEQ ID NO: 4028991 - RNA, 14 nt, Molluscum contagiosum virus
cgcgcgccgcgggc

SEQ ID NO: 4028992 - RNA, 19 nt, Molluscum contagiosum virus
cgcgcgccgcugucacgcg

SEQ ID NO: 4028993 - RNA, 13 nt, Molluscum contagiosum virus
cgcgcgccgggcc

SEQ ID NO: 4028994 - RNA, 15 nt, Molluscum contagiosum virus
cgcgcgccgucggcc

SEQ ID NO: 4028995 - RNA, 14 nt, Molluscum contagiosum virus
cgcgcgccugcgcg

SEQ ID NO: 4028996 - RNA, 13 nt, Molluscum contagiosum virus
cgcgcgcgccagc

SEQ ID NO: 4028997 - RNA, 14 nt, Molluscum contagiosum virus
cgcgcgcgccgcag

SEQ ID NO: 4028998 - RNA, 13 nt, Molluscum contagiosum virus
cgcgcgcgcgccg

SEQ ID NO: 4028999 - RNA, 16 nt, Molluscum contagiosum virus
cguucacuugcgcgcg

SEQ ID NO: 4029000 - RNA, 20 nt, Molluscum contagiosum virus
cguucacuugcgcgcgugcc

SEQ ID NO: 4029001 - RNA, 19 nt, Molluscum contagiosum virus
cguuccaaaagacagaggc

SEQ ID NO: 4029002 - RNA, 21 nt, Molluscum contagiosum virus
cguucgcaacaaaagagcgcg

SEQ ID NO: 4029003 - RNA, 12 nt, Molluscum contagiosum virus
cguucgcggagc

SEQ ID NO: 4029004 - RNA, 17 nt, Molluscum contagiosum virus
cguugcagcagcacagg

SEQ ID NO: 4029005 - RNA, 16 nt, Molluscum contagiosum virus
cuaaaagagcugcugc

SEQ ID NO: 4029006 - RNA, 18 nt, Molluscum contagiosum virus
cuaagcgcaagccagagc

SEQ ID NO: 4029007 - RNA, 15 nt, Molluscum contagiosum virus
cuacaaaacugaaaa

SEQ ID NO: 4029008 - RNA, 21 nt, Molluscum contagiosum virus
cuacacauuccucggcgcaca

SEQ ID NO: 4029009 - RNA, 13 nt, Molluscum contagiosum virus
cuacaccagcugg

SEQ ID NO: 4029010 - RNA, 18 nt, Molluscum contagiosum virus
cuacacgcacgaccucac

SEQ ID NO: 4029011 - RNA, 19 nt, Molluscum contagiosum virus
cuacacgccgcuggagcac

SEQ ID NO: 4029012 - RNA, 16 nt, Molluscum contagiosum virus
cuacacugucgcgcag

SEQ ID NO: 4029013 - RNA, 20 nt, Molluscum contagiosum virus
cuacaguuccgaucgcgaga

SEQ ID NO: 4029014 - RNA, 15 nt, Molluscum contagiosum virus
cuacaucgacaagca

SEQ ID NO: 4029015 - RNA, 18 nt, Molluscum contagiosum virus
cuaccaacucugugaccu

SEQ ID NO: 4029016 - RNA, 18 nt, Molluscum contagiosum virus
cuaccaagaacagagaaa

SEQ ID NO: 4029017 - RNA, 18 nt, Molluscum contagiosum virus
cuaccacgagcacugccu

SEQ ID NO: 4029018 - RNA, 19 nt, Molluscum contagiosum virus
cuaccacgagcacugccug

SEQ ID NO: 4029019 - RNA, 14 nt, Molluscum contagiosum virus
cuaccgcgcgcgca

SEQ ID NO: 4029020 - RNA, 14 nt, Molluscum contagiosum virus
cuaccugaagcugg

SEQ ID NO: 4029021 - RNA, 15 nt, Molluscum contagiosum virus
cuaccugaagcugga

SEQ ID NO: 4029022 - RNA, 14 nt, Molluscum contagiosum virus
cuaccuggugcugg

SEQ ID NO: 4029023 - RNA, 16 nt, Molluscum contagiosum virus
cuacgagcagcgcuug

SEQ ID NO: 4029024 - RNA, 15 nt, Molluscum contagiosum virus
cuacgaggugcugcg

SEQ ID NO: 4029025 - RNA, 22 nt, Molluscum contagiosum virus
cuacgcaacacggcggugcccg

SEQ ID NO: 4029026 - RNA, 15 nt, Molluscum contagiosum virus
cuacgcagcgcgcgg

SEQ ID NO: 4029027 - RNA, 22 nt, Molluscum contagiosum virus
cuacgcgagcacugcgcgcgcg

SEQ ID NO: 4029028 - RNA, 20 nt, Molluscum contagiosum virus
cuacgcgcgcguaacagcgc

SEQ ID NO: 4029029 - RNA, 22 nt, Molluscum contagiosum virus
cuacgcuccguaaccaugaaga

SEQ ID NO: 4029030 - RNA, 14 nt, Molluscum contagiosum virus
cuacuacacugucg

SEQ ID NO: 4029031 - RNA, 18 nt, Molluscum contagiosum virus
cuacugcaacguggcgcc

SEQ ID NO: 4029032 - RNA, 18 nt, Molluscum contagiosum virus
cuacugggaggacacgcg

SEQ ID NO: 4029033 - RNA, 21 nt, Molluscum contagiosum virus
cuagaaugcguguggugacuc

SEQ ID NO: 4029034 - RNA, 21 nt, Molluscum contagiosum virus
cuagcacguuaaucacgauga

SEQ ID NO: 4029035 - RNA, 22 nt, Molluscum contagiosum virus
cuagcagacaacugcgucucaa

SEQ ID NO: 4029036 - RNA, 21 nt, Molluscum contagiosum virus
cuagcagcgugcgcaccagcu

SEQ ID NO: 4029037 - RNA, 21 nt, Molluscum contagiosum virus
cuagcauuccuucacacagac

SEQ ID NO: 4029038 - RNA, 18 nt, Molluscum contagiosum virus
cuagcccagcacgcgcgg

SEQ ID NO: 4029039 - RNA, 18 nt, Molluscum contagiosum virus
cuagccgugcgcgcacac

SEQ ID NO: 4029040 - RNA, 15 nt, Molluscum contagiosum virus
cuagcgcugcucuac

SEQ ID NO: 4029041 - RNA, 17 nt, Molluscum contagiosum virus
cuagcucgcgcgcggca

SEQ ID NO: 4029042 - RNA, 13 nt, Molluscum contagiosum virus
cuagucagcggcg

SEQ ID NO: 4029043 - RNA, 19 nt, Molluscum contagiosum virus
cuagugccgagcucgccuc

SEQ ID NO: 4029044 - RNA, 20 nt, Molluscum contagiosum virus
cuaucagagacaggggggag

SEQ ID NO: 4029045 - RNA, 14 nt, Molluscum contagiosum virus
cuaugcccagccug

SEQ ID NO: 4029046 - RNA, 22 nt, Molluscum contagiosum virus
cucaacauccaaaccaacguga

SEQ ID NO: 4029047 - RNA, 16 nt, Molluscum contagiosum virus
cucaacucguaggaca

SEQ ID NO: 4029048 - RNA, 17 nt, Molluscum contagiosum virus
cucaacuguugccugga

SEQ ID NO: 4029049 - RNA, 19 nt, Molluscum contagiosum virus
cucaacuguugccuggagg

SEQ ID NO: 4029050 - RNA, 20 nt, Molluscum contagiosum virus
cucaagagccgcuucgggcu

SEQ ID NO: 4029051 - RNA, 17 nt, Molluscum contagiosum virus
cucaagaucguuuugca

SEQ ID NO: 4029052 - RNA, 22 nt, Molluscum contagiosum virus
cucaaggacuaccagcucuucg

SEQ ID NO: 4029053 - RNA, 17 nt, Molluscum contagiosum virus
cucaaucucgcccagca

SEQ ID NO: 4029054 - RNA, 18 nt, Molluscum contagiosum virus
cucacaccuagagcacga

SEQ ID NO: 4029055 - RNA, 13 nt, Molluscum contagiosum virus
cucacagccgugg

SEQ ID NO: 4029056 - RNA, 15 nt, Molluscum contagiosum virus
cucacaucugucccu

SEQ ID NO: 4029057 - RNA, 18 nt, Molluscum contagiosum virus
cucacggcggcgcucaac

SEQ ID NO: 4029058 - RNA, 21 nt, Molluscum contagiosum virus
cucacgugcugaucacgcucg

SEQ ID NO: 4029059 - RNA, 17 nt, Molluscum contagiosum virus
cucacucacaugugcug

SEQ ID NO: 4029060 - RNA, 15 nt, Molluscum contagiosum virus
cucagaaauacaccg

SEQ ID NO: 4029061 - RNA, 13 nt, Molluscum contagiosum virus
cucagaccagagu

SEQ ID NO: 4029062 - RNA, 14 nt, Molluscum contagiosum virus
cucagcaaggaggg

SEQ ID NO: 4029063 - RNA, 21 nt, Molluscum contagiosum virus
cucagcaggcuguguuccagc

SEQ ID NO: 4029064 - RNA, 21 nt, Molluscum contagiosum virus
cucaggacaaagucgcgcgcg

SEQ ID NO: 4029065 - RNA, 21 nt, Molluscum contagiosum virus
cucauggcgcgcaaccagcug

SEQ ID NO: 4029066 - RNA, 18 nt, Molluscum contagiosum virus
cuccaagaagaggccggc

SEQ ID NO: 4029067 - RNA, 14 nt, Molluscum contagiosum virus
cuccaaggucgagc

SEQ ID NO: 4029068 - RNA, 20 nt, Molluscum contagiosum virus
cuccacgucgaucagcuccg

SEQ ID NO: 4029069 - RNA, 15 nt, Molluscum contagiosum virus
cuccagaaucgcuuu

SEQ ID NO: 4029070 - RNA, 10 nt, Molluscum contagiosum virus
cuccagagcc

SEQ ID NO: 4029071 - RNA, 16 nt, Molluscum contagiosum virus
cuccaggaacgcgccg

SEQ ID NO: 4029072 - RNA, 18 nt, Molluscum contagiosum virus
cuccaggaacgcgccgcg

SEQ ID NO: 4029073 - RNA, 17 nt, Molluscum contagiosum virus
cuccagguccuccagcg

SEQ ID NO: 4029074 - RNA, 21 nt, Molluscum contagiosum virus
cucccgcacgcaccgcgacau

SEQ ID NO: 4029075 - RNA, 12 nt, Molluscum contagiosum virus
cucccgcccagc

SEQ ID NO: 4029076 - RNA, 16 nt, Molluscum contagiosum virus
cucccgcccagcgugg

SEQ ID NO: 4029077 - RNA, 21 nt, Molluscum contagiosum virus
cucccgcggccgccacuguug

SEQ ID NO: 4029078 - RNA, 20 nt, Molluscum contagiosum virus
cucccggcggcaagcgagau

SEQ ID NO: 4029079 - RNA, 19 nt, Molluscum contagiosum virus
cucccggcuuccgacaacu

SEQ ID NO: 4029080 - RNA, 15 nt, Molluscum contagiosum virus
cucccgggcucuguc

SEQ ID NO: 4029081 - RNA, 12 nt, Molluscum contagiosum virus
cucccgucgagc

SEQ ID NO: 4029082 - RNA, 16 nt, Molluscum contagiosum virus
cucccgucgagcacga

SEQ ID NO: 4029083 - RNA, 14 nt, Molluscum contagiosum virus
cucccguggcgcgc

SEQ ID NO: 4029084 - RNA, 18 nt, Molluscum contagiosum virus
cuccgacuaccuaggcac

SEQ ID NO: 4029085 - RNA, 20 nt, Molluscum contagiosum virus
cuccggaggccgcucccgcg

SEQ ID NO: 4029086 - RNA, 13 nt, Molluscum contagiosum virus
cuccggcugcucc

SEQ ID NO: 4029087 - RNA, 19 nt, Molluscum contagiosum virus
cuccggcuuagcuggcgcc

SEQ ID NO: 4029088 - RNA, 21 nt, Molluscum contagiosum virus
cuccguacagcuccccgcgca

SEQ ID NO: 4029089 - RNA, 17 nt, Molluscum contagiosum virus
cuccguggugcgcgucu

SEQ ID NO: 4029090 - RNA, 19 nt, Molluscum contagiosum virus
cuccuacacauuccucggc

SEQ ID NO: 4029091 - RNA, 14 nt, Molluscum contagiosum virus
cuccuccaaucugc

SEQ ID NO: 4029092 - RNA, 15 nt, Molluscum contagiosum virus
cuccuccggggcgca

SEQ ID NO: 4029093 - RNA, 16 nt, Molluscum contagiosum virus
cuccucgcacgggcgc

SEQ ID NO: 4029094 - RNA, 15 nt, Molluscum contagiosum virus
cuccucgcucugcuc

SEQ ID NO: 4029095 - RNA, 11 nt, Molluscum contagiosum virus
cuccugaugcc

SEQ ID NO: 4029096 - RNA, 15 nt, Molluscum contagiosum virus
cuccugccgucgccc

SEQ ID NO: 4029097 - RNA, 14 nt, Molluscum contagiosum virus
cuccuuagacaaaa

SEQ ID NO: 4029098 - RNA, 22 nt, Molluscum contagiosum virus
cucgaacgcgcgugcgcgugcc

SEQ ID NO: 4029099 - RNA, 19 nt, Molluscum contagiosum virus
cucgaacuccaggcgcacc

SEQ ID NO: 4029100 - RNA, 16 nt, Molluscum contagiosum virus
cucgacgggcgcagcc

SEQ ID NO: 4029101 - RNA, 15 nt, Molluscum contagiosum virus
cucgacugcguuguc

SEQ ID NO: 4029102 - RNA, 13 nt, Molluscum contagiosum virus
cugcgcgagccgc

SEQ ID NO: 4029103 - RNA, 19 nt, Molluscum contagiosum virus
cugcgcgaguaccugggca

SEQ ID NO: 4029104 - RNA, 16 nt, Molluscum contagiosum virus
cugcgcgcacugcucg

SEQ ID NO: 4029105 - RNA, 20 nt, Molluscum contagiosum virus
cugcgcgcgcggcgcagugc

SEQ ID NO: 4029106 - RNA, 17 nt, Molluscum contagiosum virus
cugcgcgcgcuacugcg

SEQ ID NO: 4029107 - RNA, 18 nt, Molluscum contagiosum virus
cugcgcgcgcucgcgcag

SEQ ID NO: 4029108 - RNA, 13 nt, Molluscum contagiosum virus
cugcgcgcggacu

SEQ ID NO: 4029109 - RNA, 11 nt, Molluscum contagiosum virus
cugcgcggagc

SEQ ID NO: 4029110 - RNA, 15 nt, Molluscum contagiosum virus
cugcgcggcggcagc

SEQ ID NO: 4029111 - RNA, 14 nt, Molluscum contagiosum virus
cugcgcggcgugcg

SEQ ID NO: 4029112 - RNA, 17 nt, Molluscum contagiosum virus
cugcgcgucugugcgcg

SEQ ID NO: 4029113 - RNA, 17 nt, Molluscum contagiosum virus
cugcgcgugcugggccc

SEQ ID NO: 4029114 - RNA, 16 nt, Molluscum contagiosum virus
cugcgcucggcgcgcg

SEQ ID NO: 4029115 - RNA, 14 nt, Molluscum contagiosum virus
cugcgcuucgagcu

SEQ ID NO: 4029116 - RNA, 22 nt, Molluscum contagiosum virus
cugcgcuuugcccccgaggugg

SEQ ID NO: 4029117 - RNA, 18 nt, Molluscum contagiosum virus
cugcggcaaccgcgcccg

SEQ ID NO: 4029118 - RNA, 17 nt, Molluscum contagiosum virus
cugcggcgcgugcugag

SEQ ID NO: 4029119 - RNA, 22 nt, Molluscum contagiosum virus
cugcggcugcuggagcuagcgc

SEQ ID NO: 4029120 - RNA, 14 nt, Molluscum contagiosum virus
cugcggugucaacu

SEQ ID NO: 4029121 - RNA, 16 nt, Molluscum contagiosum virus
cugcgguucacgcccg

SEQ ID NO: 4029122 - RNA, 21 nt, Molluscum contagiosum virus
cugcgugugccggugcugcgg

SEQ ID NO: 4029123 - RNA, 12 nt, Molluscum contagiosum virus
cugcguucgagc

SEQ ID NO: 4029124 - RNA, 14 nt, Molluscum contagiosum virus
cugcguuuccaggg

SEQ ID NO: 4029125 - RNA, 16 nt, Molluscum contagiosum virus
cugcguuuccagggca

SEQ ID NO: 4029126 - RNA, 22 nt, Molluscum contagiosum virus
cugcucaugcgcaagcagcucg

SEQ ID NO: 4029127 - RNA, 18 nt, Molluscum contagiosum virus
cugcucauggucgucucc

SEQ ID NO: 4029128 - RNA, 16 nt, Molluscum contagiosum virus
cugcuccccgccagca

SEQ ID NO: 4029129 - RNA, 18 nt, Molluscum contagiosum virus
cugcuccccgccagcacc

SEQ ID NO: 4029130 - RNA, 14 nt, Molluscum contagiosum virus
cugcucgacgggcg

SEQ ID NO: 4029131 - RNA, 20 nt, Molluscum contagiosum virus
cugcucgacgggcgcagcca

SEQ ID NO: 4029132 - RNA, 18 nt, Molluscum contagiosum virus
cugcucgcgcaucugccg

SEQ ID NO: 4029133 - RNA, 21 nt, Molluscum contagiosum virus
cugcucucggcagcgucgcgg

SEQ ID NO: 4029134 - RNA, 15 nt, Molluscum contagiosum virus
cugcugaagaaggag

SEQ ID NO: 4029135 - RNA, 20 nt, Molluscum contagiosum virus
cugcugcaaagcgcggccgc

SEQ ID NO: 4029136 - RNA, 17 nt, Molluscum contagiosum virus
cugcugcagaacugccu

SEQ ID NO: 4029137 - RNA, 13 nt, Molluscum contagiosum virus
cugcugcgcgccg

SEQ ID NO: 4029138 - RNA, 23 nt, Molluscum contagiosum virus
cugcugcgcuccaugcugccgga

SEQ ID NO: 4029139 - RNA, 16 nt, Molluscum contagiosum virus
cugcugcucgaagccu

SEQ ID NO: 4029140 - RNA, 13 nt, Molluscum contagiosum virus
cugcugcugcaaa

SEQ ID NO: 4029141 - RNA, 14 nt, Molluscum contagiosum virus
cugcuggagcuagc

SEQ ID NO: 4029142 - RNA, 18 nt, Molluscum contagiosum virus
cugcuggcaccgcgcgcg

SEQ ID NO: 4029143 - RNA, 14 nt, Molluscum contagiosum virus
cugcuggcccugcu

SEQ ID NO: 4029144 - RNA, 15 nt, Molluscum contagiosum virus
cugcuggcggggaaa

SEQ ID NO: 4029145 - RNA, 20 nt, Molluscum contagiosum virus
cugcugguggugcuggagcg

SEQ ID NO: 4029146 - RNA, 15 nt, Molluscum contagiosum virus
cugcugguucugcuc

SEQ ID NO: 4029147 - RNA, 16 nt, Molluscum contagiosum virus
cuggaaggagcugggc

SEQ ID NO: 4029148 - RNA, 17 nt, Molluscum contagiosum virus
cuggacggugcuggugc

SEQ ID NO: 4029149 - RNA, 21 nt, Molluscum contagiosum virus
cuggacugagccgcaagcaca

SEQ ID NO: 4029150 - RNA, 17 nt, Molluscum contagiosum virus
cuggacuuccugcugcg

SEQ ID NO: 4029151 - RNA, 22 nt, Molluscum contagiosum virus
cuggagaccugucgugcaaugg

SEQ ID NO: 4029152 - RNA, 16 nt, Molluscum contagiosum virus
cuggaggcaaucuguc

SEQ ID NO: 4029153 - RNA, 17 nt, Molluscum contagiosum virus
cuggagggucacgcgca

SEQ ID NO: 4029154 - RNA, 20 nt, Molluscum contagiosum virus
cuggcaaugagggcgaggcc

SEQ ID NO: 4029155 - RNA, 23 nt, Molluscum contagiosum virus
cuggcaccgggcgccgcggcugc

SEQ ID NO: 4029156 - RNA, 17 nt, Molluscum contagiosum virus
cuggcaccugcggcugc

SEQ ID NO: 4029157 - RNA, 18 nt, Molluscum contagiosum virus
cuggcagugccgggcgcc

SEQ ID NO: 4029158 - RNA, 14 nt, Molluscum contagiosum virus
cuggccaacacuac

SEQ ID NO: 4029159 - RNA, 21 nt, Molluscum contagiosum virus
cuggccaaggacgacaacacu

SEQ ID NO: 4029160 - RNA, 16 nt, Molluscum contagiosum virus
cuggcccugcuugacg

SEQ ID NO: 4029161 - RNA, 14 nt, Molluscum contagiosum virus
cuggccgagcguga

SEQ ID NO: 4029162 - RNA, 22 nt, Molluscum contagiosum virus
cuggccgaugccuaugccgagg

SEQ ID NO: 4029163 - RNA, 21 nt, Molluscum contagiosum virus
cuggccgcauuuucucuggag

SEQ ID NO: 4029164 - RNA, 19 nt, Molluscum contagiosum virus
cuggccgcgauucugcucu

SEQ ID NO: 4029165 - RNA, 14 nt, Molluscum contagiosum virus
cuggccggcucgcu

SEQ ID NO: 4029166 - RNA, 18 nt, Molluscum contagiosum virus
cuggccgugcccgccgac

SEQ ID NO: 4029167 - RNA, 17 nt, Molluscum contagiosum virus
cuggcgagcgcucugca

SEQ ID NO: 4029168 - RNA, 18 nt, Molluscum contagiosum virus
cuggcgagcgcucugcau

SEQ ID NO: 4029169 - RNA, 17 nt, Molluscum contagiosum virus
cuggcgcucgcgcgcac

SEQ ID NO: 4029170 - RNA, 14 nt, Molluscum contagiosum virus
cuggcggagacacu

SEQ ID NO: 4029171 - RNA, 14 nt, Molluscum contagiosum virus
cuggcggcgcacgc

SEQ ID NO: 4029172 - RNA, 14 nt, Molluscum contagiosum virus
cuggcgggcgcggu

SEQ ID NO: 4029173 - RNA, 20 nt, Molluscum contagiosum virus
cuggcggggcuggcagaaga

SEQ ID NO: 4029174 - RNA, 13 nt, Molluscum contagiosum virus
cuggcggugcucu

SEQ ID NO: 4029175 - RNA, 16 nt, Molluscum contagiosum virus
cuggcguggcaaaggc

SEQ ID NO: 4029176 - RNA, 16 nt, Molluscum contagiosum virus
cuggcguugcgcggcg

SEQ ID NO: 4029177 - RNA, 11 nt, Molluscum contagiosum virus
cuggcuccugu

SEQ ID NO: 4029178 - RNA, 19 nt, Molluscum contagiosum virus
cuggcucgcgccugcgcuu

SEQ ID NO: 4029179 - RNA, 22 nt, Molluscum contagiosum virus
cuggcugcugcgcgaccgcacc

SEQ ID NO: 4029180 - RNA, 17 nt, Molluscum contagiosum virus
cugggaggacacgcgca

SEQ ID NO: 4029181 - RNA, 20 nt, Molluscum contagiosum virus
cugggaggacacgcgcacgc

SEQ ID NO: 4029182 - RNA, 17 nt, Molluscum contagiosum virus
cugggauaacaggcgug

SEQ ID NO: 4029183 - RNA, 15 nt, Molluscum contagiosum virus
cugggcacaagcuuu

SEQ ID NO: 4029184 - RNA, 21 nt, Molluscum contagiosum virus
cugggcgcgugcgagcggcgc

SEQ ID NO: 4029185 - RNA, 17 nt, Molluscum contagiosum virus
cugggcgucgugcaccu

SEQ ID NO: 4029186 - RNA, 21 nt, Molluscum contagiosum virus
cugguacgcgcgcgcgcucac

SEQ ID NO: 4029187 - RNA, 17 nt, Molluscum contagiosum virus
cuguaaauggacccgcu

SEQ ID NO: 4029188 - RNA, 23 nt, Molluscum contagiosum virus
cuguaggggagggcggcaagcuu

SEQ ID NO: 4029189 - RNA, 15 nt, Molluscum contagiosum virus
cugucaagacgggca

SEQ ID NO: 4029190 - RNA, 23 nt, Molluscum contagiosum virus
cuguccaaggugaacgaccucaa

SEQ ID NO: 4029191 - RNA, 16 nt, Molluscum contagiosum virus
cugucccuugauccag

SEQ ID NO: 4029192 - RNA, 22 nt, Molluscum contagiosum virus
cuguccgcggaugcaggcacug

SEQ ID NO: 4029193 - RNA, 18 nt, Molluscum contagiosum virus
cuguccgcgggcgcacgc

SEQ ID NO: 4029194 - RNA, 21 nt, Molluscum contagiosum virus
cuguccgcgggcgcgggccug

SEQ ID NO: 4029195 - RNA, 21 nt, Molluscum contagiosum virus
cugucgccgcgggcugggaaa

SEQ ID NO: 4029196 - RNA, 15 nt, Molluscum contagiosum virus
cugucgugcaauggc

SEQ ID NO: 4029197 - RNA, 19 nt, Molluscum contagiosum virus
cugugcccuggaagcuucc

SEQ ID NO: 4029198 - RNA, 13 nt, Molluscum contagiosum virus
cugugccugcaag

SEQ ID NO: 4029199 - RNA, 21 nt, Molluscum contagiosum virus
cugugcgcgaggagacguaga

SEQ ID NO: 4029200 - RNA, 14 nt, Molluscum contagiosum virus
cugugcggcacgcc

SEQ ID NO: 4029201 - RNA, 14 nt, Molluscum contagiosum virus
cugugcucgcgccu

SEQ ID NO: 4029202 - RNA, 18 nt, Molluscum contagiosum virus
cuguucggcaugcagcgc

SEQ ID NO: 4029203 - RNA, 14 nt, Molluscum contagiosum virus
cuguugcugcugcc

SEQ ID NO: 4029204 - RNA, 20 nt, Molluscum contagiosum virus
cuuacugcagcagcuccagc

SEQ ID NO: 4029205 - RNA, 12 nt, Molluscum contagiosum virus
gaaguggccguc

SEQ ID NO: 4029206 - RNA, 18 nt, Molluscum contagiosum virus
gaaguggccgucgcgagc

SEQ ID NO: 4029207 - RNA, 14 nt, Molluscum contagiosum virus
gaaucacggccagu

SEQ ID NO: 4029208 - RNA, 17 nt, Molluscum contagiosum virus
gacaacucgcgggcaug

SEQ ID NO: 4029209 - RNA, 21 nt, Molluscum contagiosum virus
gacaacugcgucucaagacaa

SEQ ID NO: 4029210 - RNA, 15 nt, Molluscum contagiosum virus
gacaagacaacacuc

SEQ ID NO: 4029211 - RNA, 22 nt, Molluscum contagiosum virus
gacaagcgcgucugcaucgugg

SEQ ID NO: 4029212 - RNA, 16 nt, Molluscum contagiosum virus
gacaaggaaaggcacc

SEQ ID NO: 4029213 - RNA, 22 nt, Molluscum contagiosum virus
gacaaucucugcgccgcgcgcg

SEQ ID NO: 4029214 - RNA, 15 nt, Molluscum contagiosum virus
gacaccagcggcagg

SEQ ID NO: 4029215 - RNA, 12 nt, Molluscum contagiosum virus
gacaccgcgggc

SEQ ID NO: 4029216 - RNA, 19 nt, Molluscum contagiosum virus
gacacgagcaccgaacaaa

SEQ ID NO: 4029217 - RNA, 14 nt, Molluscum contagiosum virus
gacacgagggccuu

SEQ ID NO: 4029218 - RNA, 22 nt, Molluscum contagiosum virus
gacacgagggccuuggcggcgc

SEQ ID NO: 4029219 - RNA, 23 nt, Molluscum contagiosum virus
gacacgaggucacucgcuacugc

SEQ ID NO: 4029220 - RNA, 16 nt, Molluscum contagiosum virus
gacacgcgugcaugcg

SEQ ID NO: 4029221 - RNA, 19 nt, Molluscum contagiosum virus
gacacgcugcgcgugcugg

SEQ ID NO: 4029222 - RNA, 23 nt, Molluscum contagiosum virus
gacacgcugcgcgugcugggccc

SEQ ID NO: 4029223 - RNA, 15 nt, Molluscum contagiosum virus
gacacguacacgcug

SEQ ID NO: 4029224 - RNA, 14 nt, Molluscum contagiosum virus
gacacguugcacug

SEQ ID NO: 4029225 - RNA, 12 nt, Molluscum contagiosum virus
gacacugugcug

SEQ ID NO: 4029226 - RNA, 23 nt, Molluscum contagiosum virus
gacagcaaacagccuguguugcg

SEQ ID NO: 4029227 - RNA, 15 nt, Molluscum contagiosum virus
gacagcauccuggag

SEQ ID NO: 4029228 - RNA, 14 nt, Molluscum contagiosum virus
gacaucaucgcgga

SEQ ID NO: 4029229 - RNA, 12 nt, Molluscum contagiosum virus
gacaugccucgc

SEQ ID NO: 4029230 - RNA, 13 nt, Molluscum contagiosum virus
gacaugcgcacgc

SEQ ID NO: 4029231 - RNA, 22 nt, Molluscum contagiosum virus
gacaugcugugcggcacgccug

SEQ ID NO: 4029232 - RNA, 13 nt, Molluscum contagiosum virus
gacauggagcgca

SEQ ID NO: 4029233 - RNA, 13 nt, Molluscum contagiosum virus
gaccaccagcacc

SEQ ID NO: 4029234 - RNA, 23 nt, Molluscum contagiosum virus
gaccagauccgggcgcugcaccg

SEQ ID NO: 4029235 - RNA, 14 nt, Molluscum contagiosum virus
gaccagcugguccu

SEQ ID NO: 4029236 - RNA, 15 nt, Molluscum contagiosum virus
gaccccgagcugcgg

SEQ ID NO: 4029237 - RNA, 21 nt, Molluscum contagiosum virus
gacccgccggugcuugggcuc

SEQ ID NO: 4029238 - RNA, 16 nt, Molluscum contagiosum virus
gacccucuucgacuua

SEQ ID NO: 4029239 - RNA, 17 nt, Molluscum contagiosum virus
gaccgcagacaaagaca

SEQ ID NO: 4029240 - RNA, 20 nt, Molluscum contagiosum virus
gaccucccgcccagcguggc

SEQ ID NO: 4029241 - RNA, 16 nt, Molluscum contagiosum virus
gaccucccggcggcaa

SEQ ID NO: 4029242 - RNA, 22 nt, Molluscum contagiosum virus
gaccucgcgcuuccggcggcuc

SEQ ID NO: 4029243 - RNA, 14 nt, Molluscum contagiosum virus
gaccugcacgaccc

SEQ ID NO: 4029244 - RNA, 15 nt, Molluscum contagiosum virus
gaccugcacgacccu

SEQ ID NO: 4029245 - RNA, 17 nt, Molluscum contagiosum virus
gaccugcugcgagagca

SEQ ID NO: 4029246 - RNA, 22 nt, Molluscum contagiosum virus
gaccugucgugcaauggcaggu

SEQ ID NO: 4029247 - RNA, 18 nt, Molluscum contagiosum virus
gaccuuccuccagggcac

SEQ ID NO: 4029248 - RNA, 21 nt, Molluscum contagiosum virus
gaccuuggcgcgccgcugccc

SEQ ID NO: 4029249 - RNA, 13 nt, Molluscum contagiosum virus
gacgaagcugugc

SEQ ID NO: 4029250 - RNA, 16 nt, Molluscum contagiosum virus
gacgacgccgagcccg

SEQ ID NO: 4029251 - RNA, 14 nt, Molluscum contagiosum virus
gacgacggcugcuc

SEQ ID NO: 4029252 - RNA, 18 nt, Molluscum contagiosum virus
gacgacuucggcgcaacg

SEQ ID NO: 4029253 - RNA, 20 nt, Molluscum contagiosum virus
gacgagaccacgguccuggg

SEQ ID NO: 4029254 - RNA, 15 nt, Molluscum contagiosum virus
gacgagagggcgcgc

SEQ ID NO: 4029255 - RNA, 18 nt, Molluscum contagiosum virus
gacgagauggucacgcgc

SEQ ID NO: 4029256 - RNA, 18 nt, Molluscum contagiosum virus
gacgagcagagccgggac

SEQ ID NO: 4029257 - RNA, 20 nt, Molluscum contagiosum virus
gacgagcagagccgggacgc

SEQ ID NO: 4029258 - RNA, 14 nt, Molluscum contagiosum virus
gacgagcugcuucg

SEQ ID NO: 4029259 - RNA, 16 nt, Molluscum contagiosum virus
gacgagugcgccgcgc

SEQ ID NO: 4029260 - RNA, 15 nt, Molluscum contagiosum virus
gacgcacuagacugu

SEQ ID NO: 4029261 - RNA, 19 nt, Molluscum contagiosum virus
gacgcaggaugcuggggcu

SEQ ID NO: 4029262 - RNA, 20 nt, Molluscum contagiosum virus
gacgcauagucaucaaagca

SEQ ID NO: 4029263 - RNA, 16 nt, Molluscum contagiosum virus
gacgcccuccucgacc

SEQ ID NO: 4029264 - RNA, 20 nt, Molluscum contagiosum virus
gacgccgacaacagugaaga

SEQ ID NO: 4029265 - RNA, 19 nt, Molluscum contagiosum virus
gacgccgauguccugcgga

SEQ ID NO: 4029266 - RNA, 16 nt, Molluscum contagiosum virus
gacgccggcgcccgcg

SEQ ID NO: 4029267 - RNA, 23 nt, Molluscum contagiosum virus
gacgccgucgaugaaggcgcggc

SEQ ID NO: 4029268 - RNA, 15 nt, Molluscum contagiosum virus
gacgcgaacugcccg

SEQ ID NO: 4029269 - RNA, 19 nt, Molluscum contagiosum virus
gacgcgacgccguccgcgc

SEQ ID NO: 4029270 - RNA, 15 nt, Molluscum contagiosum virus
gacgcgcgagugugc

SEQ ID NO: 4029271 - RNA, 20 nt, Molluscum contagiosum virus
gacgcgcguggagcgcgcgg

SEQ ID NO: 4029272 - RNA, 24 nt, Molluscum contagiosum virus
gacgcgcguggagcgcgcggacgc

SEQ ID NO: 4029273 - RNA, 22 nt, Molluscum contagiosum virus
gacgcggaugccacgcagcugg

SEQ ID NO: 4029274 - RNA, 23 nt, Molluscum contagiosum virus
gacgcggccgcggagggaggcuc

SEQ ID NO: 4029275 - RNA, 18 nt, Molluscum contagiosum virus
gacgcgggccuguccgcg

SEQ ID NO: 4029276 - RNA, 13 nt, Molluscum contagiosum virus
gacgcggugcgcg

SEQ ID NO: 4029277 - RNA, 19 nt, Molluscum contagiosum virus
gacgcguacauccgcgagc

SEQ ID NO: 4029278 - RNA, 18 nt, Molluscum contagiosum virus
gacgcgugcauggcacgc

SEQ ID NO: 4029279 - RNA, 23 nt, Molluscum contagiosum virus
gacgcgugcauggcacgcgagca

SEQ ID NO: 4029280 - RNA, 18 nt, Molluscum contagiosum virus
gacgcguucuccaggaac

SEQ ID NO: 4029281 - RNA, 18 nt, Molluscum contagiosum virus
gacgcuuucguccgccgc

SEQ ID NO: 4029282 - RNA, 17 nt, Molluscum contagiosum virus
gacggaaccguggugcg

SEQ ID NO: 4029283 - RNA, 17 nt, Molluscum contagiosum virus
gacggaauuugcggcgc

SEQ ID NO: 4029284 - RNA, 18 nt, Molluscum contagiosum virus
gacggacgaagagacgcc

SEQ ID NO: 4029285 - RNA, 21 nt, Molluscum contagiosum virus
gacggacuucuugcgcggcgg

SEQ ID NO: 4029286 - RNA, 16 nt, Molluscum contagiosum virus
gacggaggucugcuuu

SEQ ID NO: 4029287 - RNA, 16 nt, Molluscum contagiosum virus
gacggcaguguccugg

SEQ ID NO: 4029288 - RNA, 22 nt, Molluscum contagiosum virus
gacggcccccuuacgcuacagc

SEQ ID NO: 4029289 - RNA, 15 nt, Molluscum contagiosum virus
gacggcgacgacagc

SEQ ID NO: 4029290 - RNA, 14 nt, Molluscum contagiosum virus
gacggcgugcgccg

SEQ ID NO: 4029291 - RNA, 23 nt, Molluscum contagiosum virus
gacggcugguguuaccgggucgc

SEQ ID NO: 4029292 - RNA, 19 nt, Molluscum contagiosum virus
gacggcuucauccgcgcgc

SEQ ID NO: 4029293 - RNA, 15 nt, Molluscum contagiosum virus
gacgggaacgagguc

SEQ ID NO: 4029294 - RNA, 22 nt, Molluscum contagiosum virus
gacgggagagguugcgcggggc

SEQ ID NO: 4029295 - RNA, 15 nt, Molluscum contagiosum virus
gacgggcacgagcac

SEQ ID NO: 4029296 - RNA, 22 nt, Molluscum contagiosum virus
gacgggccccuguuggccccgc

SEQ ID NO: 4029297 - RNA, 19 nt, Molluscum contagiosum virus
gacggucguccuggagccu

SEQ ID NO: 4029298 - RNA, 12 nt, Molluscum contagiosum virus
gacggugcugcg

SEQ ID NO: 4029299 - RNA, 15 nt, Molluscum contagiosum virus
gacggugcugcgcac

SEQ ID NO: 4029300 - RNA, 16 nt, Molluscum contagiosum virus
gacguacgagcaggcg

SEQ ID NO: 4029301 - RNA, 17 nt, Molluscum contagiosum virus
gacguacgagugcugga

SEQ ID NO: 4029302 - RNA, 12 nt, Molluscum contagiosum virus
gacguagagcag

SEQ ID NO: 4029303 - RNA, 22 nt, Molluscum contagiosum virus
gacgucgcggccacgcacucgc

SEQ ID NO: 4029304 - RNA, 18 nt, Molluscum contagiosum virus
gacgugcccuacgcgcgc

SEQ ID NO: 4029305 - RNA, 14 nt, Molluscum contagiosum virus
gacgugcgcgcugc

SEQ ID NO: 4029306 - RNA, 14 nt, Molluscum contagiosum virus
gacgugcggcacgc

SEQ ID NO: 4029307 - RNA, 12 nt, Molluscum contagiosum virus
gagguggccaag

SEQ ID NO: 4029308 - RNA, 16 nt, Molluscum contagiosum virus
gaguacgacgcggagg

SEQ ID NO: 4029309 - RNA, 21 nt, Molluscum contagiosum virus
gaguacgacgguuuccgcgcc

SEQ ID NO: 4029310 - RNA, 22 nt, Molluscum contagiosum virus
gagucacgaccgacccaucgga

SEQ ID NO: 4029311 - RNA, 16 nt, Molluscum contagiosum virus
gagucgagcacgcgcg

SEQ ID NO: 4029312 - RNA, 14 nt, Molluscum contagiosum virus
gagucgcgccucga

SEQ ID NO: 4029313 - RNA, 12 nt, Molluscum contagiosum virus
gagugacgccuc

SEQ ID NO: 4029314 - RNA, 13 nt, Molluscum contagiosum virus
gaguguuccccaa

SEQ ID NO: 4029315 - RNA, 16 nt, Molluscum contagiosum virus
gaguugcgcgagaacu

SEQ ID NO: 4029316 - RNA, 22 nt, Molluscum contagiosum virus
gaguuugcaaguucgcugcugg

SEQ ID NO: 4029317 - RNA, 14 nt, Molluscum contagiosum virus
gauaaaagcacagu

SEQ ID NO: 4029318 - RNA, 20 nt, Molluscum contagiosum virus
gauacccuuggcagcaacug

SEQ ID NO: 4029319 - RNA, 23 nt, Molluscum contagiosum virus
gauagcuuuucaguuuuguccuc

SEQ ID NO: 4029320 - RNA, 14 nt, Molluscum contagiosum virus
gauaggacaugacu

SEQ ID NO: 4029321 - RNA, 16 nt, Molluscum contagiosum virus
gaucacaaguccgcgg

SEQ ID NO: 4029322 - RNA, 16 nt, Molluscum contagiosum virus
gaucacgaugugcgcg

SEQ ID NO: 4029323 - RNA, 15 nt, Molluscum contagiosum virus
gaucacggcgugcgc

SEQ ID NO: 4029324 - RNA, 19 nt, Molluscum contagiosum virus
gaucauggcgccgcugcgg

SEQ ID NO: 4029325 - RNA, 13 nt, Molluscum contagiosum virus
gauccgggcgcug

SEQ ID NO: 4029326 - RNA, 22 nt, Molluscum contagiosum virus
gauccuccggaugaacagcuuc

SEQ ID NO: 4029327 - RNA, 14 nt, Molluscum contagiosum virus
gaucgacgaggacc

SEQ ID NO: 4029328 - RNA, 14 nt, Molluscum contagiosum virus
gaucgcgagaacgc

SEQ ID NO: 4029329 - RNA, 19 nt, Molluscum contagiosum virus
gaucguuccuggccaagga

SEQ ID NO: 4029330 - RNA, 22 nt, Molluscum contagiosum virus
gaucuccacgucgaucagcucc

SEQ ID NO: 4029331 - RNA, 21 nt, Molluscum contagiosum virus
gaucucgcgcacgaccacgug

SEQ ID NO: 4029332 - RNA, 16 nt, Molluscum contagiosum virus
gaugaacgcgcugcgc

SEQ ID NO: 4029333 - RNA, 16 nt, Molluscum contagiosum virus
gaugaaguuggucacc

SEQ ID NO: 4029334 - RNA, 17 nt, Molluscum contagiosum virus
gaugacgggcacgcuca

SEQ ID NO: 4029335 - RNA, 18 nt, Molluscum contagiosum virus
gaugaguaccgcgggcgc

SEQ ID NO: 4029336 - RNA, 15 nt, Molluscum contagiosum virus
gaugcaggcacugcc

SEQ ID NO: 4029337 - RNA, 17 nt, Molluscum contagiosum virus
gaugcucaagcacugcc

SEQ ID NO: 4029338 - RNA, 21 nt, Molluscum contagiosum virus
gaugcugaacgaucucugacc

SEQ ID NO: 4029339 - RNA, 13 nt, Molluscum contagiosum virus
gaugcuggggcuc

SEQ ID NO: 4029340 - RNA, 14 nt, Molluscum contagiosum virus
gauggacgccagcu

SEQ ID NO: 4029341 - RNA, 13 nt, Molluscum contagiosum virus
gauggcguggcgg

SEQ ID NO: 4029342 - RNA, 14 nt, Molluscum contagiosum virus
gauggcucgcgggc

SEQ ID NO: 4029343 - RNA, 19 nt, Molluscum contagiosum virus
gaugguggcgcugcugccc

SEQ ID NO: 4029344 - RNA, 18 nt, Molluscum contagiosum virus
gauguacgcgugcaggaa

SEQ ID NO: 4029345 - RNA, 20 nt, Molluscum contagiosum virus
gaugucgucgaagcccagcu

SEQ ID NO: 4029346 - RNA, 17 nt, Molluscum contagiosum virus
gauuccgucccccgcgg

SEQ ID NO: 4029347 - RNA, 22 nt, Molluscum contagiosum virus
gauucggaggcggagcugcccg

SEQ ID NO: 4029348 - RNA, 23 nt, Molluscum contagiosum virus
gauucgugcucguguugugccug

SEQ ID NO: 4029349 - RNA, 15 nt, Molluscum contagiosum virus
gauugcccgcgcgcg

SEQ ID NO: 4029350 - RNA, 15 nt, Molluscum contagiosum virus
gauuguagagacgcu

SEQ ID NO: 4029351 - RNA, 11 nt, Molluscum contagiosum virus
gcaaacgcuga

SEQ ID NO: 4029352 - RNA, 16 nt, Molluscum contagiosum virus
gcaaacgcugacggcg

SEQ ID NO: 4029353 - RNA, 18 nt, Molluscum contagiosum virus
gcaaacgcugacggcgcu

SEQ ID NO: 4029354 - RNA, 17 nt, Molluscum contagiosum virus
gcaaagcggggcgcgcg

SEQ ID NO: 4029355 - RNA, 19 nt, Molluscum contagiosum virus
gcaaaggcccgcgagcacg

SEQ ID NO: 4029356 - RNA, 20 nt, Molluscum contagiosum virus
gcaaaugcgucccagcagcu

SEQ ID NO: 4029357 - RNA, 16 nt, Molluscum contagiosum virus
gcaacaaaagagcgcg

SEQ ID NO: 4029358 - RNA, 16 nt, Molluscum contagiosum virus
gcaacaaggaaaggca

SEQ ID NO: 4029359 - RNA, 22 nt, Molluscum contagiosum virus
gcaacaaggaaaggcaccugca

SEQ ID NO: 4029360 - RNA, 20 nt, Molluscum contagiosum virus
gcaaccagcuggcgcccgcg

SEQ ID NO: 4029361 - RNA, 19 nt, Molluscum contagiosum virus
gcaacgcacaaaacacaaa

SEQ ID NO: 4029362 - RNA, 12 nt, Molluscum contagiosum virus
gcaacguggcgc

SEQ ID NO: 4029363 - RNA, 15 nt, Molluscum contagiosum virus
gcaacguggcgccgc

SEQ ID NO: 4029364 - RNA, 16 nt, Molluscum contagiosum virus
gcaacucgcgcugcag

SEQ ID NO: 4029365 - RNA, 18 nt, Molluscum contagiosum virus
gcaagacccagcaaggcc

SEQ ID NO: 4029366 - RNA, 14 nt, Molluscum contagiosum virus
gcaagcccagcagc

SEQ ID NO: 4029367 - RNA, 13 nt, Molluscum contagiosum virus
gcaagcgcaagcc

SEQ ID NO: 4029368 - RNA, 13 nt, Molluscum contagiosum virus
acaaagucgcgcg

SEQ ID NO: 4029369 - RNA, 20 nt, Molluscum contagiosum virus
ucgccuccuugcccgaggag

SEQ ID NO: 4029370 - RNA, 21 nt, Molluscum contagiosum virus
ucgccuucuugcuggcgcucg

SEQ ID NO: 4029371 - RNA, 14 nt, Molluscum contagiosum virus
ucgcgaacgcgucc

SEQ ID NO: 4029372 - RNA, 13 nt, Molluscum contagiosum virus
ucgcgaccuggcg

SEQ ID NO: 4029373 - RNA, 18 nt, Molluscum contagiosum virus
ucgcgacgacgagcacua

SEQ ID NO: 4029374 - RNA, 17 nt, Molluscum contagiosum virus
ucgcgcacagaaagcca

SEQ ID NO: 4029375 - RNA, 14 nt, Molluscum contagiosum virus
ucgcgcacgcgcac

SEQ ID NO: 4029376 - RNA, 13 nt, Molluscum contagiosum virus
ucgcgccugcgcu

SEQ ID NO: 4029377 - RNA, 17 nt, Molluscum contagiosum virus
ucgcgcgcaccugcacg

SEQ ID NO: 4029378 - RNA, 12 nt, Molluscum contagiosum virus
ucgcgcgccagc

SEQ ID NO: 4029379 - RNA, 14 nt, Molluscum contagiosum virus
ucgcgcgccgcaaa

SEQ ID NO: 4029380 - RNA, 12 nt, Molluscum contagiosum virus
ucgcgcgccgcg

SEQ ID NO: 4029381 - RNA, 22 nt, Molluscum contagiosum virus
ucgcgcgccgcgcuggcgcgcg

SEQ ID NO: 4029382 - RNA, 15 nt, Molluscum contagiosum virus
ucgcgcgccugcgcg

SEQ ID NO: 4029383 - RNA, 11 nt, Molluscum contagiosum virus
ucgcgcgcgac

SEQ ID NO: 4029384 - RNA, 17 nt, Molluscum contagiosum virus
ucgcgcgcgcucugccg

SEQ ID NO: 4029385 - RNA, 21 nt, Molluscum contagiosum virus
ucgcgcgcguaaagagcgucc

SEQ ID NO: 4029386 - RNA, 16 nt, Molluscum contagiosum virus
ucgcgcgugcgcagca

SEQ ID NO: 4029387 - RNA, 17 nt, Molluscum contagiosum virus
ucgcgcucuacgccagc

SEQ ID NO: 4029388 - RNA, 13 nt, Molluscum contagiosum virus
ucgcgcugcagca

SEQ ID NO: 4029389 - RNA, 15 nt, Molluscum contagiosum virus
ucgcgcuuccgcgag

SEQ ID NO: 4029390 - RNA, 18 nt, Molluscum contagiosum virus
ucgcgcuuuuuucuucgc

SEQ ID NO: 4029391 - RNA, 15 nt, Molluscum contagiosum virus
ucgcggagcgcacga

SEQ ID NO: 4029392 - RNA, 15 nt, Molluscum contagiosum virus
ucgcggagcugcgcg

SEQ ID NO: 4029393 - RNA, 12 nt, Molluscum contagiosum virus
ucgcggagcugu

SEQ ID NO: 4029394 - RNA, 19 nt, Molluscum contagiosum virus
ucgcgggaccgcccuugug

SEQ ID NO: 4029395 - RNA, 19 nt, Molluscum contagiosum virus
ucgcgggcccgccuuugug

SEQ ID NO: 4029396 - RNA, 22 nt, Molluscum contagiosum virus
ucgcggucgacgagugcgccgc

SEQ ID NO: 4029397 - RNA, 19 nt, Molluscum contagiosum virus
ucgcgguggcaggcgcgcg

SEQ ID NO: 4029398 - RNA, 17 nt, Molluscum contagiosum virus
ucgcucagccccagcag

SEQ ID NO: 4029399 - RNA, 16 nt, Molluscum contagiosum virus
ucgcucgcucagcccc

SEQ ID NO: 4029400 - RNA, 21 nt, Molluscum contagiosum virus
ucgcugcugggcaucgugcuc

SEQ ID NO: 4029401 - RNA, 16 nt, Molluscum contagiosum virus
ucgcuggccucugccu

SEQ ID NO: 4029402 - RNA, 23 nt, Molluscum contagiosum virus
ucgcuguccuuccgacccggcuc

SEQ ID NO: 4029403 - RNA, 20 nt, Molluscum contagiosum virus
ucgcuugccggcggcgcaag

SEQ ID NO: 4029404 - RNA, 20 nt, Molluscum contagiosum virus
ucggacgcagacgcgcgucc

SEQ ID NO: 4029405 - RNA, 13 nt, Molluscum contagiosum virus
ucggagaagaaca

SEQ ID NO: 4029406 - RNA, 14 nt, Molluscum contagiosum virus
ucggagcgcagcug

SEQ ID NO: 4029407 - RNA, 18 nt, Molluscum contagiosum virus
ucggagcgcagcugccgg

SEQ ID NO: 4029408 - RNA, 16 nt, Molluscum contagiosum virus
ucggaggcggagcugc

SEQ ID NO: 4029409 - RNA, 14 nt, Molluscum contagiosum virus
ucggcagcgucgcg

SEQ ID NO: 4029410 - RNA, 14 nt, Molluscum contagiosum virus
ucggcuucugcugc

SEQ ID NO: 4029411 - RNA, 20 nt, Molluscum contagiosum virus
ucgggcgccaacacgagcgc

SEQ ID NO: 4029412 - RNA, 20 nt, Molluscum contagiosum virus
ucguaaaagacgcgcucgcg

SEQ ID NO: 4029413 - RNA, 14 nt, Molluscum contagiosum virus
ucguacucaacaag

SEQ ID NO: 4029414 - RNA, 15 nt, Molluscum contagiosum virus
ucguaguccagcgcg

SEQ ID NO: 4029415 - RNA, 13 nt, Molluscum contagiosum virus
ucgucaacaacac

SEQ ID NO: 4029416 - RNA, 17 nt, Molluscum contagiosum virus
ucgucacggccuucgcg

SEQ ID NO: 4029417 - RNA, 15 nt, Molluscum contagiosum virus
ucgucccgcgcuccg

SEQ ID NO: 4029418 - RNA, 15 nt, Molluscum contagiosum virus
ucguccuggagccua

SEQ ID NO: 4029419 - RNA, 16 nt, Molluscum contagiosum virus
ucgucgaagcccagcu

SEQ ID NO: 4029420 - RNA, 20 nt, Molluscum contagiosum virus
ucgucuuugcgaacgcgcaa

SEQ ID NO: 4029421 - RNA, 17 nt, Molluscum contagiosum virus
ucgugcaccacgugcuc

SEQ ID NO: 4029422 - RNA, 21 nt, Molluscum contagiosum virus
ucgugcaccagcgcgcagaag

SEQ ID NO: 4029423 - RNA, 17 nt, Molluscum contagiosum virus
ucgugcccgcacacgca

SEQ ID NO: 4029424 - RNA, 17 nt, Molluscum contagiosum virus
ucgugcuccacgcgcag

SEQ ID NO: 4029425 - RNA, 21 nt, Molluscum contagiosum virus
ucgugcucguguguccgcacg

SEQ ID NO: 4029426 - RNA, 20 nt, Molluscum contagiosum virus
ucgugcucguguugugccug

SEQ ID NO: 4029427 - RNA, 13 nt, Molluscum contagiosum virus
ucgugcuggagca

SEQ ID NO: 4029428 - RNA, 21 nt, Molluscum contagiosum virus
ucguggaggaaacacccgcgc

SEQ ID NO: 4029429 - RNA, 20 nt, Molluscum contagiosum virus
ucgugggauaggcacacacg

SEQ ID NO: 4029430 - RNA, 22 nt, Molluscum contagiosum virus
ucgugguggaggacgacaauac

SEQ ID NO: 4029431 - RNA, 15 nt, Molluscum contagiosum virus
ucgugguugcgcacg

SEQ ID NO: 4029432 - RNA, 21 nt, Molluscum contagiosum virus
ucguuccacgauggaacggcg

SEQ ID NO: 4029433 - RNA, 16 nt, Molluscum contagiosum virus
ucuacgagacucugga

SEQ ID NO: 4029434 - RNA, 15 nt, Molluscum contagiosum virus
ucuacgccagcgacg

SEQ ID NO: 4029435 - RNA, 21 nt, Molluscum contagiosum virus
ucuacgccgcgcaccuggagu

SEQ ID NO: 4029436 - RNA, 17 nt, Molluscum contagiosum virus
ucuacgggaagcugcac

SEQ ID NO: 4029437 - RNA, 19 nt, Molluscum contagiosum virus
ucuacguguccgcauccgc

SEQ ID NO: 4029438 - RNA, 18 nt, Molluscum contagiosum virus
ucuccaggaacgcgccgc

SEQ ID NO: 4029439 - RNA, 16 nt, Molluscum contagiosum virus
ucucccucgcgcgcau

SEQ ID NO: 4029440 - RNA, 19 nt, Molluscum contagiosum virus
ucuccgcucucgagcucac

SEQ ID NO: 4029441 - RNA, 22 nt, Molluscum contagiosum virus
ucucgauggcgccguuggccac

SEQ ID NO: 4029442 - RNA, 14 nt, Molluscum contagiosum virus
ucucgcacgcggag

SEQ ID NO: 4029443 - RNA, 13 nt, Molluscum contagiosum virus
ucucgcccagcac

SEQ ID NO: 4029444 - RNA, 12 nt, Molluscum contagiosum virus
ucucgcgcacga

SEQ ID NO: 4029445 - RNA, 13 nt, Molluscum contagiosum virus
ucucgcgcucgcc

SEQ ID NO: 4029446 - RNA, 18 nt, Molluscum contagiosum virus
ucucgcggugacaggcag

SEQ ID NO: 4029447 - RNA, 14 nt, Molluscum contagiosum virus
ucucggcggccgga

SEQ ID NO: 4029448 - RNA, 17 nt, Molluscum contagiosum virus
ucugccaccaugcgcac

SEQ ID NO: 4029449 - RNA, 20 nt, Molluscum contagiosum virus
ucugccaccgcggcgcggag

SEQ ID NO: 4029450 - RNA, 23 nt, Molluscum contagiosum virus
ucugcgagcgccugcgagcagcc

SEQ ID NO: 4029451 - RNA, 15 nt, Molluscum contagiosum virus
ucugcgagcgcgaau

SEQ ID NO: 4029452 - RNA, 15 nt, Molluscum contagiosum virus
ucugcgcccgcggag

SEQ ID NO: 4029453 - RNA, 14 nt, Molluscum contagiosum virus
ucugcgcgagcagc

SEQ ID NO: 4029454 - RNA, 22 nt, Molluscum contagiosum virus
ucugcgcgcaagucaccgcucc

SEQ ID NO: 4029455 - RNA, 19 nt, Molluscum contagiosum virus
ucugcgcuccacgcccgag

SEQ ID NO: 4029456 - RNA, 20 nt, Molluscum contagiosum virus
ucugcugcacacaccgcgag

SEQ ID NO: 4029457 - RNA, 16 nt, Molluscum contagiosum virus
ucugggcgcgugcgag

SEQ ID NO: 4029458 - RNA, 19 nt, Molluscum contagiosum virus
ucugguuccugcgcuccga

SEQ ID NO: 4029459 - RNA, 15 nt, Molluscum contagiosum virus
ucuucaccugcauug

SEQ ID NO: 4029460 - RNA, 13 nt, Molluscum contagiosum virus
ucuucagaggaca

SEQ ID NO: 4029461 - RNA, 20 nt, Molluscum contagiosum virus
ucuuccagaagguacugaac

SEQ ID NO: 4029462 - RNA, 20 nt, Molluscum contagiosum virus
ucuucgagacgcugcgcgac

SEQ ID NO: 4029463 - RNA, 22 nt, Molluscum contagiosum virus
ucuucgcgcugguuugcgcgag

SEQ ID NO: 4029464 - RNA, 14 nt, Molluscum contagiosum virus
ucuugcgugccuuc

SEQ ID NO: 4029465 - RNA, 16 nt, Molluscum contagiosum virus
ucuuggcaugcgugcu

SEQ ID NO: 4029466 - RNA, 15 nt, Molluscum contagiosum virus
ucuugguugccaggc

SEQ ID NO: 4029467 - RNA, 18 nt, Molluscum contagiosum virus
ucuuguugcuggggccug

SEQ ID NO: 4029468 - RNA, 18 nt, Molluscum contagiosum virus
ucuuguugucugcggacg

SEQ ID NO: 4029469 - RNA, 18 nt, Molluscum contagiosum virus
ucuuuccccuccuagccc

SEQ ID NO: 4029470 - RNA, 18 nt, Molluscum contagiosum virus
ucuuugcggacgcgcgag

SEQ ID NO: 4029471 - RNA, 15 nt, Molluscum contagiosum virus
accgcgcgguccgcc

SEQ ID NO: 4029472 - RNA, 19 nt, Molluscum contagiosum virus
accgcguccgcuaccgcag

SEQ ID NO: 4029473 - RNA, 16 nt, Molluscum contagiosum virus
accgcgugcgugcaca

SEQ ID NO: 4029474 - RNA, 22 nt, Molluscum contagiosum virus
accgcguggacaacagcacgac

SEQ ID NO: 4029475 - RNA, 15 nt, Molluscum contagiosum virus
accgcguugccgccc

SEQ ID NO: 4029476 - RNA, 22 nt, Molluscum contagiosum virus
accgcuucuuuacgggcgccag

SEQ ID NO: 4029477 - RNA, 16 nt, Molluscum contagiosum virus
accggagacaccagcu

SEQ ID NO: 4029478 - RNA, 11 nt, Molluscum contagiosum virus
accggagaggg

SEQ ID NO: 4029479 - RNA, 20 nt, Molluscum contagiosum virus
accggccaaggcaaaguucu

SEQ ID NO: 4029480 - RNA, 16 nt, Molluscum contagiosum virus
accgucgcguggugcu

SEQ ID NO: 4029481 - RNA, 18 nt, Molluscum contagiosum virus
accguggaggagccgccc

SEQ ID NO: 4029482 - RNA, 12 nt, Molluscum contagiosum virus
accuacaugagu

SEQ ID NO: 4029483 - RNA, 12 nt, Molluscum contagiosum virus
accuaggcacuc

SEQ ID NO: 4029484 - RNA, 16 nt, Molluscum contagiosum virus
accuccugcuuugcac

SEQ ID NO: 4029485 - RNA, 15 nt, Molluscum contagiosum virus
accucgcgcgccgcc

SEQ ID NO: 4029486 - RNA, 14 nt, Molluscum contagiosum virus
accucgcugcugag

SEQ ID NO: 4029487 - RNA, 14 nt, Molluscum contagiosum virus
accucuacacgcac

SEQ ID NO: 4029488 - RNA, 17 nt, Molluscum contagiosum virus
accugcaggaaaggcac

SEQ ID NO: 4029489 - RNA, 19 nt, Molluscum contagiosum virus
accugcauugagcucgcgc

SEQ ID NO: 4029490 - RNA, 21 nt, Molluscum contagiosum virus
accugcugcgagagcaugccu

SEQ ID NO: 4029491 - RNA, 15 nt, Molluscum contagiosum virus
accuggcggcgcugg

SEQ ID NO: 4029492 - RNA, 14 nt, Molluscum contagiosum virus
accugucgcgcgag

SEQ ID NO: 4029493 - RNA, 15 nt, Molluscum contagiosum virus
accugucgugcaaug

SEQ ID NO: 4029494 - RNA, 23 nt, Molluscum contagiosum virus
accuguucuuucagcgcgcgcag

SEQ ID NO: 4029495 - RNA, 18 nt, Molluscum contagiosum virus
accuucaggacgcaggac

SEQ ID NO: 4029496 - RNA, 21 nt, Molluscum contagiosum virus
accuuccuccagggcacgauc

SEQ ID NO: 4029497 - RNA, 17 nt, Molluscum contagiosum virus
accuucggaacugcgga

SEQ ID NO: 4029498 - RNA, 18 nt, Molluscum contagiosum virus
accuuggugcucauccuc

SEQ ID NO: 4029499 - RNA, 15 nt, Molluscum contagiosum virus
acgaaccgugcgagc

SEQ ID NO: 4029500 - RNA, 15 nt, Molluscum contagiosum virus
acgaacgacagcgcc

SEQ ID NO: 4029501 - RNA, 14 nt, Molluscum contagiosum virus
acgaacgcugcagc

SEQ ID NO: 4029502 - RNA, 13 nt, Molluscum contagiosum virus
acgaacuggcaau

SEQ ID NO: 4029503 - RNA, 14 nt, Molluscum contagiosum virus
acgaagcugugcaa

SEQ ID NO: 4029504 - RNA, 23 nt, Molluscum contagiosum virus
acgaaucgcucgcggugcagcug

SEQ ID NO: 4029505 - RNA, 15 nt, Molluscum contagiosum virus
acgacagaccccuga

SEQ ID NO: 4029506 - RNA, 15 nt, Molluscum contagiosum virus
acgacaugcucgcgc

SEQ ID NO: 4029507 - RNA, 16 nt, Molluscum contagiosum virus
acgacaugcugugcgg

SEQ ID NO: 4029508 - RNA, 18 nt, Molluscum contagiosum virus
acgaccgcgcacgcagca

SEQ ID NO: 4029509 - RNA, 14 nt, Molluscum contagiosum virus
acgacgccgagccc

SEQ ID NO: 4029510 - RNA, 18 nt, Molluscum contagiosum virus
acgacgggcgcgcuucuc

SEQ ID NO: 4029511 - RNA, 20 nt, Molluscum contagiosum virus
acgacguacgagugcuggag

SEQ ID NO: 4029512 - RNA, 15 nt, Molluscum contagiosum virus
acgacuagcgugcgc

SEQ ID NO: 4029513 - RNA, 15 nt, Molluscum contagiosum virus
acgacucgcugccag

SEQ ID NO: 4029514 - RNA, 20 nt, Molluscum contagiosum virus
acgagauggucacgcgcaag

SEQ ID NO: 4029515 - RNA, 16 nt, Molluscum contagiosum virus
acgagcacugccugcc

SEQ ID NO: 4029516 - RNA, 23 nt, Molluscum contagiosum virus
acgagcacugccugccgccucgg

SEQ ID NO: 4029517 - RNA, 17 nt, Molluscum contagiosum virus
acgagcagcccgugcgc

SEQ ID NO: 4029518 - RNA, 16 nt, Molluscum contagiosum virus
acgagcaggcgcagcg

SEQ ID NO: 4029519 - RNA, 15 nt, Molluscum contagiosum virus
acgagcagugccgcc

SEQ ID NO: 4029520 - RNA, 19 nt, Molluscum contagiosum virus
acgagccgcugcuccugcu

SEQ ID NO: 4029521 - RNA, 21 nt, Molluscum contagiosum virus
acgagccgcugcuccugcucu

SEQ ID NO: 4029522 - RNA, 22 nt, Molluscum contagiosum virus
acgagccgcugcuccugcucug

SEQ ID NO: 4029523 - RNA, 17 nt, Molluscum contagiosum virus
acgaggagcacggcauc

SEQ ID NO: 4029524 - RNA, 20 nt, Molluscum contagiosum virus
acgaggccuacgugcugcgc

SEQ ID NO: 4029525 - RNA, 20 nt, Molluscum contagiosum virus
acgaggucgcguccacgcag

SEQ ID NO: 4029526 - RNA, 23 nt, Molluscum contagiosum virus
acgaggucgcguccacgcaggac

SEQ ID NO: 4029527 - RNA, 20 nt, Molluscum contagiosum virus
acgaggucuuccauugcaug

SEQ ID NO: 4029528 - RNA, 13 nt, Molluscum contagiosum virus
acgaggugcugcg

SEQ ID NO: 4029529 - RNA, 15 nt, Molluscum contagiosum virus
acgagugcgccgcgc

SEQ ID NO: 4029530 - RNA, 18 nt, Molluscum contagiosum virus
acgauaaauggaccucaa

SEQ ID NO: 4029531 - RNA, 15 nt, Molluscum contagiosum virus
acgaugcgcucgugg

SEQ ID NO: 4029532 - RNA, 22 nt, Molluscum contagiosum virus
acgaugucggaacccagaaaga

SEQ ID NO: 4029533 - RNA, 22 nt, Molluscum contagiosum virus
acgauuccgcuguacgugcugc

SEQ ID NO: 4029534 - RNA, 23 nt, Molluscum contagiosum virus
acgcaaagucaucugccucgugg

SEQ ID NO: 4029535 - RNA, 18 nt, Molluscum contagiosum virus
acgcaagcugaggcgugc

SEQ ID NO: 4029536 - RNA, 23 nt, Molluscum contagiosum virus
acgcacacgacgacggcugcucg

SEQ ID NO: 4029537 - RNA, 22 nt, Molluscum contagiosum virus
acgcacacgagugcccgcgcgc

SEQ ID NO: 4029538 - RNA, 23 nt, Molluscum contagiosum virus
acgcaccgccuggugcugcgcga

SEQ ID NO: 4029539 - RNA, 14 nt, Molluscum contagiosum virus
acgcacgaccucac

SEQ ID NO: 4029540 - RNA, 12 nt, Molluscum contagiosum virus
acgcacgcgcgc

SEQ ID NO: 4029541 - RNA, 19 nt, Molluscum contagiosum virus
acgcacgcuugccuuggcg

SEQ ID NO: 4029542 - RNA, 14 nt, Molluscum contagiosum virus
acgcacucgcuggc

SEQ ID NO: 4029543 - RNA, 14 nt, Molluscum contagiosum virus
acgcagcaggcacg

SEQ ID NO: 4029544 - RNA, 18 nt, Molluscum contagiosum virus
acgcagcgcgagcugugc

SEQ ID NO: 4029545 - RNA, 15 nt, Molluscum contagiosum virus
acgcagucgccuucc

SEQ ID NO: 4029546 - RNA, 23 nt, Molluscum contagiosum virus
acgccaaccaccacguggaccug

SEQ ID NO: 4029547 - RNA, 14 nt, Molluscum contagiosum virus
acgccaagcgucgc

SEQ ID NO: 4029548 - RNA, 19 nt, Molluscum contagiosum virus
acgcccuccucgaccugca

SEQ ID NO: 4029549 - RNA, 22 nt, Molluscum contagiosum virus
acgcccuccucgaccugcacga

SEQ ID NO: 4029550 - RNA, 16 nt, Molluscum contagiosum virus
acgcccucgccugcga

SEQ ID NO: 4029551 - RNA, 16 nt, Molluscum contagiosum virus
acgccgaagagccgcg

SEQ ID NO: 4029552 - RNA, 20 nt, Molluscum contagiosum virus
acgccgaccauuuccugcga

SEQ ID NO: 4029553 - RNA, 14 nt, Molluscum contagiosum virus
acgccgagcgggca

SEQ ID NO: 4029554 - RNA, 18 nt, Molluscum contagiosum virus
acgccggggggcgccaag

SEQ ID NO: 4029555 - RNA, 20 nt, Molluscum contagiosum virus
acgccgugacggcccaccuu

SEQ ID NO: 4029556 - RNA, 15 nt, Molluscum contagiosum virus
acgccgugcgcgugc

SEQ ID NO: 4029557 - RNA, 23 nt, Molluscum contagiosum virus
acgccgugcgcgugcggcggcgc

SEQ ID NO: 4029558 - RNA, 17 nt, Molluscum contagiosum virus
acgccugcuagcggccu

SEQ ID NO: 4029559 - RNA, 17 nt, Molluscum contagiosum virus
acgccuggcggcagcac

SEQ ID NO: 4029560 - RNA, 15 nt, Molluscum contagiosum virus
acgccuuccugcugg

SEQ ID NO: 4029561 - RNA, 15 nt, Molluscum contagiosum virus
acgccuucuuccugc

SEQ ID NO: 4029562 - RNA, 19 nt, Molluscum contagiosum virus
acgccuucuuccugcgcgu

SEQ ID NO: 4029563 - RNA, 16 nt, Molluscum contagiosum virus
acgcgaaacuggacug

SEQ ID NO: 4029564 - RNA, 12 nt, Molluscum contagiosum virus
acgcgagacugu

SEQ ID NO: 4029565 - RNA, 12 nt, Molluscum contagiosum virus
acgcgagcacug

SEQ ID NO: 4029566 - RNA, 23 nt, Molluscum contagiosum virus
acgcgagcggcuuuucgccggag

SEQ ID NO: 4029567 - RNA, 15 nt, Molluscum contagiosum virus
acgcgauggcgcagc

SEQ ID NO: 4029568 - RNA, 15 nt, Molluscum contagiosum virus
acgcgcacgcgcgag

SEQ ID NO: 4029569 - RNA, 14 nt, Molluscum contagiosum virus
acgcgcagcucgac

SEQ ID NO: 4029570 - RNA, 21 nt, Molluscum contagiosum virus
acgcgcccacgugccaagacc

SEQ ID NO: 4029571 - RNA, 18 nt, Molluscum contagiosum virus
acgcgccggggcgcgcgc

SEQ ID NO: 4029572 - RNA, 13 nt, Molluscum contagiosum virus
acgcgcgcgcagg

SEQ ID NO: 4029573 - RNA, 18 nt, Molluscum contagiosum virus
acgcgcggcagacgccag

SEQ ID NO: 4029574 - RNA, 13 nt, Molluscum contagiosum virus
acgcgggccaggc

SEQ ID NO: 4029575 - RNA, 14 nt, Molluscum contagiosum virus
acgcgggccaggca

SEQ ID NO: 4029576 - RNA, 23 nt, Molluscum contagiosum virus
acgcgggccaggcacuggcccug

SEQ ID NO: 4029577 - RNA, 15 nt, Molluscum contagiosum virus
acgcguccacggcgc

SEQ ID NO: 4029578 - RNA, 20 nt, Molluscum contagiosum virus
acgcgugcauggcacgcgag

SEQ ID NO: 4029579 - RNA, 22 nt, Molluscum contagiosum virus
acgcgugccuggcuugcgcgcg

SEQ ID NO: 4029580 - RNA, 15 nt, Molluscum contagiosum virus
acgcgugcgcgccag

SEQ ID NO: 4029581 - RNA, 19 nt, Molluscum contagiosum virus
acgcgugcugcgcggcgcc

SEQ ID NO: 4029582 - RNA, 14 nt, Molluscum contagiosum virus
acgcuacagcagcc

SEQ ID NO: 4029583 - RNA, 16 nt, Molluscum contagiosum virus
acgcuacgcagcgcgc

SEQ ID NO: 4029584 - RNA, 22 nt, Molluscum contagiosum virus
acgcucaacgugggcaccugca

SEQ ID NO: 4029585 - RNA, 23 nt, Molluscum contagiosum virus
acgcucuacggcgccuucgucgc

SEQ ID NO: 4029586 - RNA, 22 nt, Molluscum contagiosum virus
acgcugccggcaacgcugccgc

SEQ ID NO: 4029587 - RNA, 12 nt, Molluscum contagiosum virus
acgcugcgcacg

SEQ ID NO: 4029588 - RNA, 15 nt, Molluscum contagiosum virus
acgcugcgcgacgag

SEQ ID NO: 4029589 - RNA, 19 nt, Molluscum contagiosum virus
acgcugcgcgugcugggcc

SEQ ID NO: 4029590 - RNA, 19 nt, Molluscum contagiosum virus
acgcugcugcacagcuucc

SEQ ID NO: 4029591 - RNA, 21 nt, Molluscum contagiosum virus
acgcuggcucgcgccugcgcu

SEQ ID NO: 4029592 - RNA, 16 nt, Molluscum contagiosum virus
acgcuguccaggcgcu

SEQ ID NO: 4029593 - RNA, 15 nt, Molluscum contagiosum virus
acgcuugccuuggcg

SEQ ID NO: 4029594 - RNA, 16 nt, Molluscum contagiosum virus
acgcuuggcgggcagc

SEQ ID NO: 4029595 - RNA, 19 nt, Molluscum contagiosum virus
acggacgcccuccucgacc

SEQ ID NO: 4029596 - RNA, 16 nt, Molluscum contagiosum virus
acggagaccuggucac

SEQ ID NO: 4029597 - RNA, 16 nt, Molluscum contagiosum virus
acggagagcgcgcggc

SEQ ID NO: 4029598 - RNA, 18 nt, Molluscum contagiosum virus
acggagcuacaaaacuga

SEQ ID NO: 4029599 - RNA, 13 nt, Molluscum contagiosum virus
acggaggucugcu

SEQ ID NO: 4029600 - RNA, 13 nt, Molluscum contagiosum virus
acggcacagucug

SEQ ID NO: 4029601 - RNA, 13 nt, Molluscum contagiosum virus
acggcacggaccc

SEQ ID NO: 4029602 - RNA, 22 nt, Molluscum contagiosum virus
acggcacgugcguacgcggcgc

SEQ ID NO: 4029603 - RNA, 20 nt, Molluscum contagiosum virus
acggcacuaaggccgucagc

SEQ ID NO: 4029604 - RNA, 22 nt, Molluscum contagiosum virus
acggcccgaaggccaccucgca

SEQ ID NO: 4029605 - RNA, 14 nt, Molluscum contagiosum virus
acggcgagcgccgc

SEQ ID NO: 4029606 - RNA, 18 nt, Molluscum contagiosum virus
acggcgaguucugccggc

SEQ ID NO: 4029607 - RNA, 18 nt, Molluscum contagiosum virus
acggcgauucgugcucgu

SEQ ID NO: 4029608 - RNA, 13 nt, Molluscum contagiosum virus
acggcgcgcgcgc

SEQ ID NO: 4029609 - RNA, 19 nt, Molluscum contagiosum virus
acggcgcggaucugcgcac

SEQ ID NO: 4029610 - RNA, 17 nt, Molluscum contagiosum virus
acggcggcacccgccgc

SEQ ID NO: 4029611 - RNA, 15 nt, Molluscum contagiosum virus
acggcggcgcucaac

SEQ ID NO: 4029612 - RNA, 17 nt, Molluscum contagiosum virus
acggcgugacggugcug

SEQ ID NO: 4029613 - RNA, 22 nt, Molluscum contagiosum virus
acggcgugacggugcugcgcac

SEQ ID NO: 4029614 - RNA, 15 nt, Molluscum contagiosum virus
acggcgugcgccgcu

SEQ ID NO: 4029615 - RNA, 14 nt, Molluscum contagiosum virus
acggcgugcgcgag

SEQ ID NO: 4029616 - RNA, 22 nt, Molluscum contagiosum virus
acggcugcaagcacaacgggcu

SEQ ID NO: 4029617 - RNA, 14 nt, Molluscum contagiosum virus
acgggaaccgugcu

SEQ ID NO: 4029618 - RNA, 15 nt, Molluscum contagiosum virus
acgggaagcuuucag

SEQ ID NO: 4029619 - RNA, 23 nt, Molluscum contagiosum virus
acgggcacgccgugggcagcuuc

SEQ ID NO: 4029620 - RNA, 22 nt, Molluscum contagiosum virus
acgggcccgcguggcaagggcu

SEQ ID NO: 4029621 - RNA, 18 nt, Molluscum contagiosum virus
acgggcucgaucugcgcc

SEQ ID NO: 4029622 - RNA, 16 nt, Molluscum contagiosum virus
acgggcucgugcugga

SEQ ID NO: 4029623 - RNA, 16 nt, Molluscum contagiosum virus
acgguagcuagcucug

SEQ ID NO: 4029624 - RNA, 15 nt, Molluscum contagiosum virus
acggucacgcaagcu

SEQ ID NO: 4029625 - RNA, 13 nt, Molluscum contagiosum virus
acgguccugggcg

SEQ ID NO: 4029626 - RNA, 19 nt, Molluscum contagiosum virus
acggucguccuggagccua

SEQ ID NO: 4029627 - RNA, 16 nt, Molluscum contagiosum virus
acggucuuccaggucu

SEQ ID NO: 4029628 - RNA, 15 nt, Molluscum contagiosum virus
acggugcagccgcug

SEQ ID NO: 4029629 - RNA, 15 nt, Molluscum contagiosum virus
acggugcugcgcacg

SEQ ID NO: 4029630 - RNA, 14 nt, Molluscum contagiosum virus
acguagagcagcgc

SEQ ID NO: 4029631 - RNA, 15 nt, Molluscum contagiosum virus
acguagagcagcgcu

SEQ ID NO: 4029632 - RNA, 15 nt, Molluscum contagiosum virus
acguaguacugcagc

SEQ ID NO: 4029633 - RNA, 19 nt, Molluscum contagiosum virus
acguccaggccgcggcagc

SEQ ID NO: 4029634 - RNA, 19 nt, Molluscum contagiosum virus
acguccccgaacugcuggg

SEQ ID NO: 4029635 - RNA, 21 nt, Molluscum contagiosum virus
acguccccgaacugcugggcg

SEQ ID NO: 4029636 - RNA, 15 nt, Molluscum contagiosum virus
acgugaucgcgcagg

SEQ ID NO: 4029637 - RNA, 15 nt, Molluscum contagiosum virus
acgugcccuacgcgc

SEQ ID NO: 4029638 - RNA, 17 nt, Molluscum contagiosum virus
acgugcgcgagcucgag

SEQ ID NO: 4029639 - RNA, 17 nt, Molluscum contagiosum virus
acgugcgcgcugcgcgc

SEQ ID NO: 4029640 - RNA, 21 nt, Molluscum contagiosum virus
acgugcgucuuuuugcggcgc

SEQ ID NO: 4029641 - RNA, 15 nt, Molluscum contagiosum virus
acgugcgugcccaag

SEQ ID NO: 4029642 - RNA, 21 nt, Molluscum contagiosum virus
acgugcuacuacuguaaggcg

SEQ ID NO: 4029643 - RNA, 17 nt, Molluscum contagiosum virus
acgugcugcagcguaug

SEQ ID NO: 4029644 - RNA, 14 nt, Molluscum contagiosum virus
acgugcugcgcacg

SEQ ID NO: 4029645 - RNA, 13 nt, Molluscum contagiosum virus
acgugcugcugcg

SEQ ID NO: 4029646 - RNA, 21 nt, Molluscum contagiosum virus
acgugcugcuggcccugcuag

SEQ ID NO: 4029647 - RNA, 14 nt, Molluscum contagiosum virus
acgugcuugcgcgc

SEQ ID NO: 4029648 - RNA, 15 nt, Molluscum contagiosum virus
acguggacguggaua

SEQ ID NO: 4029649 - RNA, 23 nt, Molluscum contagiosum virus
acguggucgcgcgcgcucugccg

SEQ ID NO: 4029650 - RNA, 21 nt, Molluscum contagiosum virus
acguucgagaccagccgcgag

SEQ ID NO: 4029651 - RNA, 17 nt, Molluscum contagiosum virus
acguuuucaagcgcgag

SEQ ID NO: 4029652 - RNA, 17 nt, Molluscum contagiosum virus
acuaagccgcgugcugg

SEQ ID NO: 4029653 - RNA, 19 nt, Molluscum contagiosum virus
acuaagccgcgugcuggcg

SEQ ID NO: 4029654 - RNA, 18 nt, Molluscum contagiosum virus
acuacaaggugcuguccu

SEQ ID NO: 4029655 - RNA, 14 nt, Molluscum contagiosum virus
acucaacaagcugc

SEQ ID NO: 4029656 - RNA, 18 nt, Molluscum contagiosum virus
acuccaaggagggcaaga

SEQ ID NO: 4029657 - RNA, 14 nt, Molluscum contagiosum virus
acuccgagcgcgac

SEQ ID NO: 4029658 - RNA, 13 nt, Molluscum contagiosum virus
acuccugcuggcg

SEQ ID NO: 4029659 - RNA, 24 nt, Molluscum contagiosum virus
acuccuuccggagacaccagcucc

SEQ ID NO: 4029660 - RNA, 19 nt, Molluscum contagiosum virus
acuccuuucgacgcugccu

SEQ ID NO: 4029661 - RNA, 23 nt, Molluscum contagiosum virus
acucgagccccagaaggucgugc

SEQ ID NO: 4029662 - RNA, 24 nt, Molluscum contagiosum virus
acucgcagcucacgagauggcugc

SEQ ID NO: 4029663 - RNA, 22 nt, Molluscum contagiosum virus
acucgcgcgcgccgggccgcgg

SEQ ID NO: 4029664 - RNA, 20 nt, Molluscum contagiosum virus
acucgcgcguccacaagggc

SEQ ID NO: 4029665 - RNA, 17 nt, Molluscum contagiosum virus
acucgcgcguccgcaaa

SEQ ID NO: 4029666 - RNA, 14 nt, Molluscum contagiosum virus
acucgcggcaagua

SEQ ID NO: 4029667 - RNA, 20 nt, Molluscum contagiosum virus
acucgcguccgcaucggcgc

SEQ ID NO: 4029668 - RNA, 19 nt, Molluscum contagiosum virus
acucgcguccgcgcagcuc

SEQ ID NO: 4029669 - RNA, 14 nt, Molluscum contagiosum virus
acucgcugcugcuc

SEQ ID NO: 4029670 - RNA, 13 nt, Molluscum contagiosum virus
acucggacacugg

SEQ ID NO: 4029671 - RNA, 17 nt, Molluscum contagiosum virus
acucucccgggcucugu

SEQ ID NO: 4029672 - RNA, 21 nt, Molluscum contagiosum virus
acugaaaacuuaucccagaaa

SEQ ID NO: 4029673 - RNA, 13 nt, Molluscum contagiosum virus
acugcaagaucua

SEQ ID NO: 4029674 - RNA, 12 nt, Molluscum contagiosum virus
acugcagcagcu

SEQ ID NO: 4029675 - RNA, 22 nt, Molluscum contagiosum virus
acugcaggccccuacacgcaac

SEQ ID NO: 4029676 - RNA, 14 nt, Molluscum contagiosum virus
acugccacgcggag

SEQ ID NO: 4029677 - RNA, 21 nt, Molluscum contagiosum virus
acugcccgcgcccugcacgac

SEQ ID NO: 4029678 - RNA, 18 nt, Molluscum contagiosum virus
ugaacagcuucacgauga

SEQ ID NO: 4029679 - RNA, 17 nt, Molluscum contagiosum virus
ugaacucgcugcugcuc

SEQ ID NO: 4029680 - RNA, 18 nt, Molluscum contagiosum virus
ugaagaaggagcccuugc

SEQ ID NO: 4029681 - RNA, 13 nt, Molluscum contagiosum virus
ugaagcucucgcg

SEQ ID NO: 4029682 - RNA, 15 nt, Molluscum contagiosum virus
ugaaggcgcggcuac

SEQ ID NO: 4029683 - RNA, 20 nt, Molluscum contagiosum virus
ugacacaccgcguggacaac

SEQ ID NO: 4029684 - RNA, 16 nt, Molluscum contagiosum virus
ugacagacuaggcaau

SEQ ID NO: 4029685 - RNA, 15 nt, Molluscum contagiosum virus
ugaccagcuccacgu

SEQ ID NO: 4029686 - RNA, 18 nt, Molluscum contagiosum virus
ugaccggagcggcggacg

SEQ ID NO: 4029687 - RNA, 17 nt, Molluscum contagiosum virus
ugaccucgcugcugagc

SEQ ID NO: 4029688 - RNA, 12 nt, Molluscum contagiosum virus
ugacgcgcacgc

SEQ ID NO: 4029689 - RNA, 13 nt, Molluscum contagiosum virus
ugacggagccgcg

SEQ ID NO: 4029690 - RNA, 15 nt, Molluscum contagiosum virus
ugacggcagcaagcg

SEQ ID NO: 4029691 - RNA, 21 nt, Molluscum contagiosum virus
ugacggccggcgggcgcgugc

SEQ ID NO: 4029692 - RNA, 17 nt, Molluscum contagiosum virus
ugacgucuuccagacgc

SEQ ID NO: 4029693 - RNA, 21 nt, Molluscum contagiosum virus
ugagaauaaaauagcagagca

SEQ ID NO: 4029694 - RNA, 17 nt, Molluscum contagiosum virus
ugagcagcaaaacugaa

SEQ ID NO: 4029695 - RNA, 20 nt, Molluscum contagiosum virus
ugagcaggucggccagcagc

SEQ ID NO: 4029696 - RNA, 19 nt, Molluscum contagiosum virus
ugaggggcaguguuccugg

SEQ ID NO: 4029697 - RNA, 19 nt, Molluscum contagiosum virus
ugagguacuccacgcccgg

SEQ ID NO: 4029698 - RNA, 22 nt, Molluscum contagiosum virus
ugaguaccgcgggcgcagacgc

SEQ ID NO: 4029699 - RNA, 15 nt, Molluscum contagiosum virus
ugagugcugagccac

SEQ ID NO: 4029700 - RNA, 19 nt, Molluscum contagiosum virus
ugcaacaggagcauuccuu

SEQ ID NO: 4029701 - RNA, 14 nt, Molluscum contagiosum virus
ugcacaccggcgcg

SEQ ID NO: 4029702 - RNA, 14 nt, Molluscum contagiosum virus
ugcacagcguagcg

SEQ ID NO: 4029703 - RNA, 20 nt, Molluscum contagiosum virus
ugcaccagcaccggcgugug

SEQ ID NO: 4029704 - RNA, 13 nt, Molluscum contagiosum virus
ugcacccuccgca

SEQ ID NO: 4029705 - RNA, 19 nt, Molluscum contagiosum virus
ugcaccgagugcuggccga

SEQ ID NO: 4029706 - RNA, 18 nt, Molluscum contagiosum virus
ugcacgagccggcgccgu

SEQ ID NO: 4029707 - RNA, 15 nt, Molluscum contagiosum virus
ugcacgcacgcgcgg

SEQ ID NO: 4029708 - RNA, 19 nt, Molluscum contagiosum virus
ugcacgcacgcgcgggcau

SEQ ID NO: 4029709 - RNA, 13 nt, Molluscum contagiosum virus
ugcacgcgcacgc

SEQ ID NO: 4029710 - RNA, 14 nt, Molluscum contagiosum virus
ugcacgcgggcgcc

SEQ ID NO: 4029711 - RNA, 19 nt, Molluscum contagiosum virus
ugcacgggcaugcacagcu

SEQ ID NO: 4029712 - RNA, 13 nt, Molluscum contagiosum virus
ugcacgugcagcg

SEQ ID NO: 4029713 - RNA, 14 nt, Molluscum contagiosum virus
ugcacgugcagcgg

SEQ ID NO: 4029714 - RNA, 15 nt, Molluscum contagiosum virus
ugcacuuccaguaug

SEQ ID NO: 4029715 - RNA, 17 nt, Molluscum contagiosum virus
ugcagaaacagccgugc

SEQ ID NO: 4029716 - RNA, 14 nt, Molluscum contagiosum virus
ugcagaaccugcgg

SEQ ID NO: 4029717 - RNA, 14 nt, Molluscum contagiosum virus
ugcagagcgugcug

SEQ ID NO: 4029718 - RNA, 15 nt, Molluscum contagiosum virus
ugcagagcgugcugg

SEQ ID NO: 4029719 - RNA, 13 nt, Molluscum contagiosum virus
ugcagcagcacag

SEQ ID NO: 4029720 - RNA, 21 nt, Molluscum contagiosum virus
ugcagcagccccgacgccagc

SEQ ID NO: 4029721 - RNA, 23 nt, Molluscum contagiosum virus
ugcagcccgacgcgggcgcgcac

SEQ ID NO: 4029722 - RNA, 14 nt, Molluscum contagiosum virus
ugcagcgcagcagc

SEQ ID NO: 4029723 - RNA, 14 nt, Molluscum contagiosum virus
ugcagcgccgcgcg

SEQ ID NO: 4029724 - RNA, 16 nt, Molluscum contagiosum virus
ugcagcggcgccacga

SEQ ID NO: 4029725 - RNA, 18 nt, Molluscum contagiosum virus
ugcagcugccgcagagcc

SEQ ID NO: 4029726 - RNA, 18 nt, Molluscum contagiosum virus
ugcaguugagagcagcgg

SEQ ID NO: 4029727 - RNA, 13 nt, Molluscum contagiosum virus
ugcaucgugggca

SEQ ID NO: 4029728 - RNA, 16 nt, Molluscum contagiosum virus
ugcauggacauccuca

SEQ ID NO: 4029729 - RNA, 16 nt, Molluscum contagiosum virus
ugcauggcggcggcca

SEQ ID NO: 4029730 - RNA, 20 nt, Molluscum contagiosum virus
ugcauguuuguucgcgcgcc

SEQ ID NO: 4029731 - RNA, 20 nt, Molluscum contagiosum virus
ugccaccaugcgcacagcac

SEQ ID NO: 4029732 - RNA, 17 nt, Molluscum contagiosum virus
ugccacgcagcuggcgg

SEQ ID NO: 4029733 - RNA, 21 nt, Molluscum contagiosum virus
ugccacguacuugcugguugc

SEQ ID NO: 4029734 - RNA, 16 nt, Molluscum contagiosum virus
ugccagcggcgccgca

SEQ ID NO: 4029735 - RNA, 19 nt, Molluscum contagiosum virus
ugccagcgggaaacugcug

SEQ ID NO: 4029736 - RNA, 21 nt, Molluscum contagiosum virus
ugccagcgggaaacugcugcc

SEQ ID NO: 4029737 - RNA, 23 nt, Molluscum contagiosum virus
ugccagcgggaaacugcugcccg

SEQ ID NO: 4029738 - RNA, 14 nt, Molluscum contagiosum virus
ugccaggcaacgca

SEQ ID NO: 4029739 - RNA, 14 nt, Molluscum contagiosum virus
ugccauggcagcuc

SEQ ID NO: 4029740 - RNA, 18 nt, Molluscum contagiosum virus
ugcccaagugcgcguguc

SEQ ID NO: 4029741 - RNA, 23 nt, Molluscum contagiosum virus
ugccccaugcccgaccacgugcc

SEQ ID NO: 4029742 - RNA, 14 nt, Molluscum contagiosum virus
ugcccgaggagagc

SEQ ID NO: 4029743 - RNA, 22 nt, Molluscum contagiosum virus
ugcccgccugccgcgagcacug

SEQ ID NO: 4029744 - RNA, 15 nt, Molluscum contagiosum virus
ugcccgcgcccugca

SEQ ID NO: 4029745 - RNA, 16 nt, Molluscum contagiosum virus
ugcccgcgcccugcac

SEQ ID NO: 4029746 - RNA, 15 nt, Molluscum contagiosum virus
ugcccgcgcgcgacu

SEQ ID NO: 4029747 - RNA, 22 nt, Molluscum contagiosum virus
ugcccgcuccgcucgcgcgugc

SEQ ID NO: 4029748 - RNA, 15 nt, Molluscum contagiosum virus
ugcccggacagagcc

SEQ ID NO: 4029749 - RNA, 20 nt, Molluscum contagiosum virus
ugcccggccucgccuccggg

SEQ ID NO: 4029750 - RNA, 20 nt, Molluscum contagiosum virus
ugcccggcggcaagcccgga

SEQ ID NO: 4029751 - RNA, 18 nt, Molluscum contagiosum virus
ugcccgguacgcucgcgc

SEQ ID NO: 4029752 - RNA, 14 nt, Molluscum contagiosum virus
ugccgagcgcacgc

SEQ ID NO: 4029753 - RNA, 16 nt, Molluscum contagiosum virus
ugccgcaguacgugac

SEQ ID NO: 4029754 - RNA, 23 nt, Molluscum contagiosum virus
ugccgccaggaaaacggaaacag

SEQ ID NO: 4029755 - RNA, 16 nt, Molluscum contagiosum virus
ugccgcgcgcgccgca

SEQ ID NO: 4029756 - RNA, 20 nt, Molluscum contagiosum virus
ugccgcggacgccggcgccc

SEQ ID NO: 4029757 - RNA, 14 nt, Molluscum contagiosum virus
ugccgcggcacugg

SEQ ID NO: 4029758 - RNA, 21 nt, Molluscum contagiosum virus
ugccgcucgcaagaguucaaa

SEQ ID NO: 4029759 - RNA, 22 nt, Molluscum contagiosum virus
ugccgcucggaggcuugccccg

SEQ ID NO: 4029760 - RNA, 19 nt, Molluscum contagiosum virus
ugccggcgcaaucucgcgg

SEQ ID NO: 4029761 - RNA, 15 nt, Molluscum contagiosum virus
ugccggcucagcgug

SEQ ID NO: 4029762 - RNA, 17 nt, Molluscum contagiosum virus
ugccggcucagcgugga

SEQ ID NO: 4029763 - RNA, 23 nt, Molluscum contagiosum virus
ugccggggaugaacgcgcugcgc

SEQ ID NO: 4029764 - RNA, 16 nt, Molluscum contagiosum virus
ugccgguggaagagcc

SEQ ID NO: 4029765 - RNA, 13 nt, Molluscum contagiosum virus
ugccuacucgcga

SEQ ID NO: 4029766 - RNA, 11 nt, Molluscum contagiosum virus
ugccugcgcuu

SEQ ID NO: 4029767 - RNA, 16 nt, Molluscum contagiosum virus
ugccugcugcgcuucu

SEQ ID NO: 4029768 - RNA, 18 nt, Molluscum contagiosum virus
ugccuggagggcagugcc

SEQ ID NO: 4029769 - RNA, 16 nt, Molluscum contagiosum virus
ugccuggcagugccgg

SEQ ID NO: 4029770 - RNA, 14 nt, Molluscum contagiosum virus
ugccuguggcgcac

SEQ ID NO: 4029771 - RNA, 17 nt, Molluscum contagiosum virus
aucaccccgcugggccg

SEQ ID NO: 4029772 - RNA, 17 nt, Molluscum contagiosum virus
aucacggccgggauuug

SEQ ID NO: 4029773 - RNA, 13 nt, Molluscum contagiosum virus
aucagagaagugc

SEQ ID NO: 4029774 - RNA, 20 nt, Molluscum contagiosum virus
aucagguccacguggugguu

SEQ ID NO: 4029775 - RNA, 14 nt, Molluscum contagiosum virus
aucaugagccaguc

SEQ ID NO: 4029776 - RNA, 21 nt, Molluscum contagiosum virus
aucccagaaaacgcacugucg

SEQ ID NO: 4029777 - RNA, 21 nt, Molluscum contagiosum virus
auccgcgcgcucucacgcuuc

SEQ ID NO: 4029778 - RNA, 17 nt, Molluscum contagiosum virus
auccucccugcgggcgc

SEQ ID NO: 4029779 - RNA, 14 nt, Molluscum contagiosum virus
auccugguuccucu

SEQ ID NO: 4029780 - RNA, 14 nt, Molluscum contagiosum virus
aucgacaagaucaa

SEQ ID NO: 4029781 - RNA, 16 nt, Molluscum contagiosum virus
aucgagaugcgccgca

SEQ ID NO: 4029782 - RNA, 18 nt, Molluscum contagiosum virus
aucgagaugcucaagcac

SEQ ID NO: 4029783 - RNA, 18 nt, Molluscum contagiosum virus
aucgcagcagugccagca

SEQ ID NO: 4029784 - RNA, 14 nt, Molluscum contagiosum virus
aucgccagcaucaa

SEQ ID NO: 4029785 - RNA, 22 nt, Molluscum contagiosum virus
aucgcgucacguccucaagcgc

SEQ ID NO: 4029786 - RNA, 21 nt, Molluscum contagiosum virus
aucucgcccagcaccuggaac

SEQ ID NO: 4029787 - RNA, 19 nt, Molluscum contagiosum virus
aucucgccggcuguaaaug

SEQ ID NO: 4029788 - RNA, 23 nt, Molluscum contagiosum virus
aucugacggucguccuggagccu

SEQ ID NO: 4029789 - RNA, 19 nt, Molluscum contagiosum virus
aucugcgacacgcuggcga

SEQ ID NO: 4029790 - RNA, 19 nt, Molluscum contagiosum virus
aucugcgugacccucuucg

SEQ ID NO: 4029791 - RNA, 14 nt, Molluscum contagiosum virus
augaaggcgcggcu

SEQ ID NO: 4029792 - RNA, 20 nt, Molluscum contagiosum virus
augacuaugcgucuuccugc

SEQ ID NO: 4029793 - RNA, 17 nt, Molluscum contagiosum virus
augcaugcggagcuggc

SEQ ID NO: 4029794 - RNA, 20 nt, Molluscum contagiosum virus
augccagacccgaaagcugc

SEQ ID NO: 4029795 - RNA, 17 nt, Molluscum contagiosum virus
augccgccgcguacgcg

SEQ ID NO: 4029796 - RNA, 16 nt, Molluscum contagiosum virus
augcgacugccagcca

SEQ ID NO: 4029797 - RNA, 16 nt, Molluscum contagiosum virus
augcgcaagcagcucg

SEQ ID NO: 4029798 - RNA, 19 nt, Molluscum contagiosum virus
augcgcgggaugcuggacg

SEQ ID NO: 4029799 - RNA, 17 nt, Molluscum contagiosum virus
augcgcgguccuguccg

SEQ ID NO: 4029800 - RNA, 15 nt, Molluscum contagiosum virus
augcgcgugcggcgc

SEQ ID NO: 4029801 - RNA, 13 nt, Molluscum contagiosum virus
augcggcaggcgc

SEQ ID NO: 4029802 - RNA, 20 nt, Molluscum contagiosum virus
augcggcguacgcgcaggga

SEQ ID NO: 4029803 - RNA, 20 nt, Molluscum contagiosum virus
augcguaguaguagcgcucg

SEQ ID NO: 4029804 - RNA, 19 nt, Molluscum contagiosum virus
augcgucuuccugcugccg

SEQ ID NO: 4029805 - RNA, 19 nt, Molluscum contagiosum virus
augcucaagcaccugcgcu

SEQ ID NO: 4029806 - RNA, 17 nt, Molluscum contagiosum virus
augcugcgcgagcgcgc

SEQ ID NO: 4029807 - RNA, 22 nt, Molluscum contagiosum virus
augcugcgcgagcgcgcgcugc

SEQ ID NO: 4029808 - RNA, 16 nt, Molluscum contagiosum virus
augcuggacgggcacg

SEQ ID NO: 4029809 - RNA, 21 nt, Molluscum contagiosum virus
augcugguucugcgcugccag

SEQ ID NO: 4029810 - RNA, 22 nt, Molluscum contagiosum virus
augcuucccccuugcgucuccg

SEQ ID NO: 4029811 - RNA, 22 nt, Molluscum contagiosum virus
auggacauccucaccuuccugg

SEQ ID NO: 4029812 - RNA, 12 nt, Molluscum contagiosum virus
auggacgucgcg

SEQ ID NO: 4029813 - RNA, 15 nt, Molluscum contagiosum virus
auggaugcuggaugg

SEQ ID NO: 4029814 - RNA, 19 nt, Molluscum contagiosum virus
augggcacaagucucgcgc

SEQ ID NO: 4029815 - RNA, 20 nt, Molluscum contagiosum virus
augggcgugcucacgcugcc

SEQ ID NO: 4029816 - RNA, 16 nt, Molluscum contagiosum virus
auggucuuacgcgcuc

SEQ ID NO: 4029817 - RNA, 17 nt, Molluscum contagiosum virus
augguggcgcugcugcc

SEQ ID NO: 4029818 - RNA, 17 nt, Molluscum contagiosum virus
augguguacgaaaguac

SEQ ID NO: 4029819 - RNA, 19 nt, Molluscum contagiosum virus
augguugugcuuguucucu

SEQ ID NO: 4029820 - RNA, 15 nt, Molluscum contagiosum virus
auguacgucgucauc

SEQ ID NO: 4029821 - RNA, 19 nt, Molluscum contagiosum virus
augucacgcucacgcaguc

SEQ ID NO: 4029822 - RNA, 16 nt, Molluscum contagiosum virus
augugcgagaacuggc

SEQ ID NO: 4029823 - RNA, 20 nt, Molluscum contagiosum virus
auguucucuuuguuccugcg

SEQ ID NO: 4029824 - RNA, 23 nt, Molluscum contagiosum virus
auguucuucgcagaggacagcuc

SEQ ID NO: 4029825 - RNA, 16 nt, Molluscum contagiosum virus
auguugcucuaccugg

SEQ ID NO: 4029826 - RNA, 20 nt, Molluscum contagiosum virus
auucggcguacgugcgccag

SEQ ID NO: 4029827 - RNA, 22 nt, Molluscum contagiosum virus
auucucguggcguugcugcugc

SEQ ID NO: 4029828 - RNA, 23 nt, Molluscum contagiosum virus
auucuuguacgggcgugcgcagc

SEQ ID NO: 4029829 - RNA, 19 nt, Molluscum contagiosum virus
auugggugguggccacagc

SEQ ID NO: 4029830 - RNA, 16 nt, Molluscum contagiosum virus
auuguagagacgcugc

SEQ ID NO: 4029831 - RNA, 13 nt, Molluscum contagiosum virus
auuucacaagugg

SEQ ID NO: 4029832 - RNA, 16 nt, Molluscum contagiosum virus
caaaaacugaaaagcg

SEQ ID NO: 4029833 - RNA, 19 nt, Molluscum contagiosum virus
caaaacugaaaaaggauca

SEQ ID NO: 4029834 - RNA, 14 nt, Molluscum contagiosum virus
caaaagcacagcag

SEQ ID NO: 4029835 - RNA, 21 nt, Molluscum contagiosum virus
cagcgcgcgcagcaccgcggc

SEQ ID NO: 4029836 - RNA, 22 nt, Molluscum contagiosum virus
cagcgcgcgcagcaccgcggcg

SEQ ID NO: 4029837 - RNA, 17 nt, Molluscum contagiosum virus
cagcgcgcucgaggcgc

SEQ ID NO: 4029838 - RNA, 16 nt, Molluscum contagiosum virus
cagcgcguccaugcug

SEQ ID NO: 4029839 - RNA, 18 nt, Molluscum contagiosum virus
cagcgcgugcgcaggagc

SEQ ID NO: 4029840 - RNA, 20 nt, Molluscum contagiosum virus
cagcgcuuguuucgcaugca

SEQ ID NO: 4029841 - RNA, 19 nt, Molluscum contagiosum virus
cagcggaagaaacagccau

SEQ ID NO: 4029842 - RNA, 21 nt, Molluscum contagiosum virus
cagcggaagaaacagccaugu

SEQ ID NO: 4029843 - RNA, 16 nt, Molluscum contagiosum virus
cagcggcacugcgcgc

SEQ ID NO: 4029844 - RNA, 14 nt, Molluscum contagiosum virus
cagcggcaggcggc

SEQ ID NO: 4029845 - RNA, 13 nt, Molluscum contagiosum virus
cagcggcgcgugc

SEQ ID NO: 4029846 - RNA, 16 nt, Molluscum contagiosum virus
cagcggcgcgugcucc

SEQ ID NO: 4029847 - RNA, 22 nt, Molluscum contagiosum virus
cagcggcuuguagucgcccccg

SEQ ID NO: 4029848 - RNA, 16 nt, Molluscum contagiosum virus
cagcgggcgcugcucg

SEQ ID NO: 4029849 - RNA, 22 nt, Molluscum contagiosum virus
cagcgguggucuccgcgggcag

SEQ ID NO: 4029850 - RNA, 22 nt, Molluscum contagiosum virus
cagcguagcggacgaagcugug

SEQ ID NO: 4029851 - RNA, 21 nt, Molluscum contagiosum virus
cagcgugacaaucucugcgcc

SEQ ID NO: 4029852 - RNA, 14 nt, Molluscum contagiosum virus
cagcgugccgcggc

SEQ ID NO: 4029853 - RNA, 16 nt, Molluscum contagiosum virus
cagcgugccgcggcac

SEQ ID NO: 4029854 - RNA, 14 nt, Molluscum contagiosum virus
cagcuaagccggag

SEQ ID NO: 4029855 - RNA, 19 nt, Molluscum contagiosum virus
cagcuacgagccgcugcuc

SEQ ID NO: 4029856 - RNA, 19 nt, Molluscum contagiosum virus
cagcuacgaucgcgcucag

SEQ ID NO: 4029857 - RNA, 13 nt, Molluscum contagiosum virus
cagcucaagcugc

SEQ ID NO: 4029858 - RNA, 16 nt, Molluscum contagiosum virus
cagcucaagcugcuca

SEQ ID NO: 4029859 - RNA, 16 nt, Molluscum contagiosum virus
cagcucagcaggcugu

SEQ ID NO: 4029860 - RNA, 16 nt, Molluscum contagiosum virus
cagcucauagcccaug

SEQ ID NO: 4029861 - RNA, 20 nt, Molluscum contagiosum virus
cagcuccagcauggcgccac

SEQ ID NO: 4029862 - RNA, 12 nt, Molluscum contagiosum virus
cagcuccuccac

SEQ ID NO: 4029863 - RNA, 13 nt, Molluscum contagiosum virus
cagcuccugguag

SEQ ID NO: 4029864 - RNA, 13 nt, Molluscum contagiosum virus
cagcucgccgcgc

SEQ ID NO: 4029865 - RNA, 19 nt, Molluscum contagiosum virus
cagcucgccgcgcgccgcu

SEQ ID NO: 4029866 - RNA, 12 nt, Molluscum contagiosum virus
cagcucgcgcag

SEQ ID NO: 4029867 - RNA, 17 nt, Molluscum contagiosum virus
cagcucggggcugucag

SEQ ID NO: 4029868 - RNA, 17 nt, Molluscum contagiosum virus
cagcucguugcgcagcc

SEQ ID NO: 4029869 - RNA, 15 nt, Molluscum contagiosum virus
cagcugcgcgagccg

SEQ ID NO: 4029870 - RNA, 16 nt, Molluscum contagiosum virus
cagcugcgcgagccgc

SEQ ID NO: 4029871 - RNA, 18 nt, Molluscum contagiosum virus
cagcugcgcgagccgcug

SEQ ID NO: 4029872 - RNA, 14 nt, Molluscum contagiosum virus
cagcugcugcgcuu

SEQ ID NO: 4029873 - RNA, 21 nt, Molluscum contagiosum virus
cagcugcugcgcuucgccgcg

SEQ ID NO: 4029874 - RNA, 22 nt, Molluscum contagiosum virus
cagcugcugcgcuucgccgcgc

SEQ ID NO: 4029875 - RNA, 20 nt, Molluscum contagiosum virus
cagcugcuucucuucaugaa

SEQ ID NO: 4029876 - RNA, 15 nt, Molluscum contagiosum virus
cagcuggagcugccg

SEQ ID NO: 4029877 - RNA, 21 nt, Molluscum contagiosum virus
cagcuggcgcgcgccgagccc

SEQ ID NO: 4029878 - RNA, 12 nt, Molluscum contagiosum virus
cagcuucugcuc

SEQ ID NO: 4029879 - RNA, 17 nt, Molluscum contagiosum virus
cagcuucuuggagcccu

SEQ ID NO: 4029880 - RNA, 14 nt, Molluscum contagiosum virus
caggaacaaggcca

SEQ ID NO: 4029881 - RNA, 21 nt, Molluscum contagiosum virus
caggaacgaggaaaggcacac

SEQ ID NO: 4029882 - RNA, 18 nt, Molluscum contagiosum virus
caggaacgcaccacggcc

SEQ ID NO: 4029883 - RNA, 16 nt, Molluscum contagiosum virus
caggaacgcgccgcgg

SEQ ID NO: 4029884 - RNA, 14 nt, Molluscum contagiosum virus
caggaacgcgcgcu

SEQ ID NO: 4029885 - RNA, 16 nt, Molluscum contagiosum virus
caggaccugcuggugg

SEQ ID NO: 4029886 - RNA, 13 nt, Molluscum contagiosum virus
caggaccuggcug

SEQ ID NO: 4029887 - RNA, 23 nt, Molluscum contagiosum virus
caggagccucuguccugcgugcu

SEQ ID NO: 4029888 - RNA, 17 nt, Molluscum contagiosum virus
caggaggaccgcgagcg

SEQ ID NO: 4029889 - RNA, 22 nt, Molluscum contagiosum virus
caggcaguugccgcagcgggcu

SEQ ID NO: 4029890 - RNA, 18 nt, Molluscum contagiosum virus
caggcauggcauggcgcg

SEQ ID NO: 4029891 - RNA, 16 nt, Molluscum contagiosum virus
caggccaggugcagcg

SEQ ID NO: 4029892 - RNA, 21 nt, Molluscum contagiosum virus
caggccauggagcgcccgcug

SEQ ID NO: 4029893 - RNA, 21 nt, Molluscum contagiosum virus
aggcacccgcaacaaggaaag

SEQ ID NO: 4029894 - RNA, 19 nt, Molluscum contagiosum virus
aggcaccugcggcucgcac

SEQ ID NO: 4029895 - RNA, 15 nt, Molluscum contagiosum virus
aggcagccgcggcgc

SEQ ID NO: 4029896 - RNA, 14 nt, Molluscum contagiosum virus
aggcaggggccgcc

SEQ ID NO: 4029897 - RNA, 16 nt, Molluscum contagiosum virus
aggcauaccugugcca

SEQ ID NO: 4029898 - RNA, 18 nt, Molluscum contagiosum virus
aggccaacgccagcugua

SEQ ID NO: 4029899 - RNA, 18 nt, Molluscum contagiosum virus
aggcccacuuccgugagc

SEQ ID NO: 4029900 - RNA, 18 nt, Molluscum contagiosum virus
aggccggagacguaccca

SEQ ID NO: 4029901 - RNA, 18 nt, Molluscum contagiosum virus
aggccggcacgagcaguc

SEQ ID NO: 4029902 - RNA, 22 nt, Molluscum contagiosum virus
aggccgucagcgucgacggcgc

SEQ ID NO: 4029903 - RNA, 21 nt, Molluscum contagiosum virus
aggccguccccggaaagcagc

SEQ ID NO: 4029904 - RNA, 13 nt, Molluscum contagiosum virus
aggccugcugaag

SEQ ID NO: 4029905 - RNA, 20 nt, Molluscum contagiosum virus
aggccugcugaagaaggagc

SEQ ID NO: 4029906 - RNA, 22 nt, Molluscum contagiosum virus
aggccuucgcgcccgacgagcu

SEQ ID NO: 4029907 - RNA, 23 nt, Molluscum contagiosum virus
aggcgcacccucacaccuagagc

SEQ ID NO: 4029908 - RNA, 13 nt, Molluscum contagiosum virus
aggcgcaggccgc

SEQ ID NO: 4029909 - RNA, 16 nt, Molluscum contagiosum virus
aggcgccgaagagugc

SEQ ID NO: 4029910 - RNA, 19 nt, Molluscum contagiosum virus
aggcgccgucgacgcugac

SEQ ID NO: 4029911 - RNA, 17 nt, Molluscum contagiosum virus
aggcgcgccauggcgag

SEQ ID NO: 4029912 - RNA, 14 nt, Molluscum contagiosum virus
aggcgcgugcccug

SEQ ID NO: 4029913 - RNA, 13 nt, Molluscum contagiosum virus
aggcgcuggugga

SEQ ID NO: 4029914 - RNA, 17 nt, Molluscum contagiosum virus
aggcgcugucgcgcagg

SEQ ID NO: 4029915 - RNA, 19 nt, Molluscum contagiosum virus
aggcgcugucgcgcaggcu

SEQ ID NO: 4029916 - RNA, 16 nt, Molluscum contagiosum virus
aggcgucaugcgcgcg

SEQ ID NO: 4029917 - RNA, 16 nt, Molluscum contagiosum virus
aggcugcucccucucg

SEQ ID NO: 4029918 - RNA, 21 nt, Molluscum contagiosum virus
aggcuuucuuccucgacgagg

SEQ ID NO: 4029919 - RNA, 16 nt, Molluscum contagiosum virus
agggagccucgcuggu

SEQ ID NO: 4029920 - RNA, 18 nt, Molluscum contagiosum virus
agggaugcgcacacuugc

SEQ ID NO: 4029921 - RNA, 15 nt, Molluscum contagiosum virus
agggcacgcugcaca

SEQ ID NO: 4029922 - RNA, 21 nt, Molluscum contagiosum virus
agggcgaguccccgagcagcg

SEQ ID NO: 4029923 - RNA, 16 nt, Molluscum contagiosum virus
agggcggagccccgag

SEQ ID NO: 4029924 - RNA, 18 nt, Molluscum contagiosum virus
agggcggcgccugcgccu

SEQ ID NO: 4029925 - RNA, 19 nt, Molluscum contagiosum virus
agggcgugcuugccuggaa

SEQ ID NO: 4029926 - RNA, 17 nt, Molluscum contagiosum virus
agggcuacgaguucugc

SEQ ID NO: 4029927 - RNA, 19 nt, Molluscum contagiosum virus
agggcuccuucuucagcag

SEQ ID NO: 4029928 - RNA, 22 nt, Molluscum contagiosum virus
agggcuccuucuucagcaggcc

SEQ ID NO: 4029929 - RNA, 16 nt, Molluscum contagiosum virus
agggcucgccaugcug

SEQ ID NO: 4029930 - RNA, 12 nt, Molluscum contagiosum virus
aggggagccagc

SEQ ID NO: 4029931 - RNA, 20 nt, Molluscum contagiosum virus
aggggccguucgcgcgccag

SEQ ID NO: 4029932 - RNA, 23 nt, Molluscum contagiosum virus
aggggugccgcugcgcuggaugc

SEQ ID NO: 4029933 - RNA, 15 nt, Molluscum contagiosum virus
aggucacgacgagcg

SEQ ID NO: 4029934 - RNA, 13 nt, Molluscum contagiosum virus
aggucgagcgcgc

SEQ ID NO: 4029935 - RNA, 13 nt, Molluscum contagiosum virus
aggucgaggaggg

SEQ ID NO: 4029936 - RNA, 16 nt, Molluscum contagiosum virus
aggucuacgaggagca

SEQ ID NO: 4029937 - RNA, 13 nt, Molluscum contagiosum virus
aggucuuggggaa

SEQ ID NO: 4029938 - RNA, 16 nt, Molluscum contagiosum virus
aggugcacgugcugca

SEQ ID NO: 4029939 - RNA, 18 nt, Molluscum contagiosum virus
agguguuccugccgggag

SEQ ID NO: 4029940 - RNA, 18 nt, Molluscum contagiosum virus
agguugcgcggggcaggc

SEQ ID NO: 4029941 - RNA, 14 nt, Molluscum contagiosum virus
aguaccugcugccg

SEQ ID NO: 4029942 - RNA, 13 nt, Molluscum contagiosum virus
aguagcgagcagg

SEQ ID NO: 4029943 - RNA, 17 nt, Molluscum contagiosum virus
aguaucggcaacauuua

SEQ ID NO: 4029944 - RNA, 19 nt, Molluscum contagiosum virus
agucacacuacgcuggcuc

SEQ ID NO: 4029945 - RNA, 21 nt, Molluscum contagiosum virus
agucacgaccgacccaucgga

SEQ ID NO: 4029946 - RNA, 16 nt, Molluscum contagiosum virus
agucagcggcggcccc

SEQ ID NO: 4029947 - RNA, 20 nt, Molluscum contagiosum virus
agucaggcaaaagccgccgc

SEQ ID NO: 4029948 - RNA, 23 nt, Molluscum contagiosum virus
agucauucucuucgaaggcagcg

SEQ ID NO: 4029949 - RNA, 23 nt, Molluscum contagiosum virus
aguccacggguaccgugcgcgug

SEQ ID NO: 4029950 - RNA, 23 nt, Molluscum contagiosum virus
aguccaucggugggcucgcgcuu

SEQ ID NO: 4029951 - RNA, 23 nt, Molluscum contagiosum virus
aguccccgguucaaauccugguu

SEQ ID NO: 4029952 - RNA, 21 nt, Molluscum contagiosum virus
aguccucgacaaugagcacuu

SEQ ID NO: 4029953 - RNA, 17 nt, Molluscum contagiosum virus
agucgagcacgcgcgag

SEQ ID NO: 4029954 - RNA, 23 nt, Molluscum contagiosum virus
agucgcccguguucgcggagcug

SEQ ID NO: 4029955 - RNA, 20 nt, Molluscum contagiosum virus
agucgcccugcccgcgcgag

SEQ ID NO: 4029956 - RNA, 16 nt, Molluscum contagiosum virus
agucgcuagaggagau

SEQ ID NO: 4029957 - RNA, 17 nt, Molluscum contagiosum virus
agucggcguggccaggc

SEQ ID NO: 4029958 - RNA, 19 nt, Molluscum contagiosum virus
agucguacacgcagagcca

SEQ ID NO: 4029959 - RNA, 21 nt, Molluscum contagiosum virus
agucuuccuggggcuggacag

SEQ ID NO: 4029960 - RNA, 19 nt, Molluscum contagiosum virus
agugacuagcgcuggcugc

SEQ ID NO: 4029961 - RNA, 12 nt, Molluscum contagiosum virus
agugcaccagca

SEQ ID NO: 4029962 - RNA, 13 nt, Molluscum contagiosum virus
agugcaccagcac

SEQ ID NO: 4029963 - RNA, 23 nt, Molluscum contagiosum virus
agugcauccgcaacguggcgcug

SEQ ID NO: 4029964 - RNA, 18 nt, Molluscum contagiosum virus
gcucgcacccgcgccgcg

SEQ ID NO: 4029965 - RNA, 19 nt, Molluscum contagiosum virus
gcucgcacccgcgccgcgg

SEQ ID NO: 4029966 - RNA, 20 nt, Molluscum contagiosum virus
gcucgccuccuugcccgagg

SEQ ID NO: 4029967 - RNA, 15 nt, Molluscum contagiosum virus
gcucgcgcacgcgca

SEQ ID NO: 4029968 - RNA, 22 nt, Molluscum contagiosum virus
gcucgcgccugaaccugggcgc

SEQ ID NO: 4029969 - RNA, 15 nt, Molluscum contagiosum virus
gcucgcgcgccagca

SEQ ID NO: 4029970 - RNA, 16 nt, Molluscum contagiosum virus
gcucgcgcgccagcac

SEQ ID NO: 4029971 - RNA, 17 nt, Molluscum contagiosum virus
gcucgcggugcagcugc

SEQ ID NO: 4029972 - RNA, 14 nt, Molluscum contagiosum virus
gcucgcggugccgg

SEQ ID NO: 4029973 - RNA, 20 nt, Molluscum contagiosum virus
gcucgcgugccgcggacgcc

SEQ ID NO: 4029974 - RNA, 18 nt, Molluscum contagiosum virus
gcucgcgugcgugcugcg

SEQ ID NO: 4029975 - RNA, 16 nt, Molluscum contagiosum virus
gcucgcucgcgcgcag

SEQ ID NO: 4029976 - RNA, 13 nt, Molluscum contagiosum virus
gcucgcugccugg

SEQ ID NO: 4029977 - RNA, 16 nt, Molluscum contagiosum virus
gcucgcuugcccggag

SEQ ID NO: 4029978 - RNA, 14 nt, Molluscum contagiosum virus
gcucggaguccgcg

SEQ ID NO: 4029979 - RNA, 14 nt, Molluscum contagiosum virus
gcucggcccgcgga

SEQ ID NO: 4029980 - RNA, 13 nt, Molluscum contagiosum virus
gcucggcgagagc

SEQ ID NO: 4029981 - RNA, 16 nt, Molluscum contagiosum virus
gcucggcgagagcgcg

SEQ ID NO: 4029982 - RNA, 19 nt, Molluscum contagiosum virus
gcucggcguggugcuggcc

SEQ ID NO: 4029983 - RNA, 22 nt, Molluscum contagiosum virus
gcucgggcuagcaagcacgcca

SEQ ID NO: 4029984 - RNA, 19 nt, Molluscum contagiosum virus
gcucgguagccaggcgccg

SEQ ID NO: 4029985 - RNA, 20 nt, Molluscum contagiosum virus
gcucgguuggcggcgccgcg

SEQ ID NO: 4029986 - RNA, 22 nt, Molluscum contagiosum virus
gcucgucaaugcgcacgugcuc

SEQ ID NO: 4029987 - RNA, 15 nt, Molluscum contagiosum virus
gcucguccagcugcg

SEQ ID NO: 4029988 - RNA, 20 nt, Molluscum contagiosum virus
gcucgugcucucugcgcagg

SEQ ID NO: 4029989 - RNA, 14 nt, Molluscum contagiosum virus
gcucgugcucuugg

SEQ ID NO: 4029990 - RNA, 15 nt, Molluscum contagiosum virus
gcucgugcuggagca

SEQ ID NO: 4029991 - RNA, 15 nt, Molluscum contagiosum virus
gcucguugcgcagcc

SEQ ID NO: 4029992 - RNA, 18 nt, Molluscum contagiosum virus
gcucuaagcgcacgcgcg

SEQ ID NO: 4029993 - RNA, 13 nt, Molluscum contagiosum virus
gcucuccaugcgc

SEQ ID NO: 4029994 - RNA, 23 nt, Molluscum contagiosum virus
gcucucggccauggaggcgcuag

SEQ ID NO: 4029995 - RNA, 21 nt, Molluscum contagiosum virus
gcucugacaacacgagccucg

SEQ ID NO: 4029996 - RNA, 17 nt, Molluscum contagiosum virus
gcucugauuacauccug

SEQ ID NO: 4029997 - RNA, 15 nt, Molluscum contagiosum virus
gcucugcagcgccgc

SEQ ID NO: 4029998 - RNA, 22 nt, Molluscum contagiosum virus
gcucuggagccucccccgcgca

SEQ ID NO: 4029999 - RNA, 15 nt, Molluscum contagiosum virus
gcggcacgcgagcgc

SEQ ID NO: 4030000 - RNA, 14 nt, Molluscum contagiosum virus
gcggcacugcgcgc

SEQ ID NO: 4030001 - RNA, 15 nt, Molluscum contagiosum virus
gcggcagcagccucg

SEQ ID NO: 4030002 - RNA, 13 nt, Molluscum contagiosum virus
gcggcagcgccag

SEQ ID NO: 4030003 - RNA, 23 nt, Molluscum contagiosum virus
gcggcagcucugcagcgccgcgc

SEQ ID NO: 4030004 - RNA, 13 nt, Molluscum contagiosum virus
gcggcaggcgcug

SEQ ID NO: 4030005 - RNA, 19 nt, Molluscum contagiosum virus
gcggccaaccgccugcucu

SEQ ID NO: 4030006 - RNA, 22 nt, Molluscum contagiosum virus
gcggccacgcacucgcuggccu

SEQ ID NO: 4030007 - RNA, 12 nt, Molluscum contagiosum virus
gcggccgccauc

SEQ ID NO: 4030008 - RNA, 15 nt, Molluscum contagiosum virus
gcggccgcgagacgc

SEQ ID NO: 4030009 - RNA, 15 nt, Molluscum contagiosum virus
gcggccguggcacug

SEQ ID NO: 4030010 - RNA, 14 nt, Molluscum contagiosum virus
gcggccguggcugc

SEQ ID NO: 4030011 - RNA, 19 nt, Molluscum contagiosum virus
gcggccucccucgucgcgc

SEQ ID NO: 4030012 - RNA, 21 nt, Molluscum contagiosum virus
gcggcgagcgcauucgcgcgc

SEQ ID NO: 4030013 - RNA, 15 nt, Molluscum contagiosum virus
gcggcgcacgcggcu

SEQ ID NO: 4030014 - RNA, 22 nt, Molluscum contagiosum virus
gcggcgccgacaacgugcugcu

SEQ ID NO: 4030015 - RNA, 15 nt, Molluscum contagiosum virus
gcggcgccguggcgc

SEQ ID NO: 4030016 - RNA, 20 nt, Molluscum contagiosum virus
gcggcgccugcgccuggcau

SEQ ID NO: 4030017 - RNA, 16 nt, Molluscum contagiosum virus
gcggcgcgaagcaggc

SEQ ID NO: 4030018 - RNA, 18 nt, Molluscum contagiosum virus
gcggcgcgacggcgacgc

SEQ ID NO: 4030019 - RNA, 18 nt, Molluscum contagiosum virus
gcggcgcuacuggccgcg

SEQ ID NO: 4030020 - RNA, 20 nt, Molluscum contagiosum virus
gcggcgcuugauguccgcga

SEQ ID NO: 4030021 - RNA, 22 nt, Molluscum contagiosum virus
gcggcggccacgcucgcgcgca

SEQ ID NO: 4030022 - RNA, 14 nt, Molluscum contagiosum virus
gcggcgggguccuc

SEQ ID NO: 4030023 - RNA, 14 nt, Molluscum contagiosum virus
gcggcgucgcgcgc

SEQ ID NO: 4030024 - RNA, 13 nt, Molluscum contagiosum virus
gcggcgugcaggg

SEQ ID NO: 4030025 - RNA, 12 nt, Molluscum contagiosum virus
gcggcgugcccg

SEQ ID NO: 4030026 - RNA, 21 nt, Molluscum contagiosum virus
gcggcguguuccggcagcgcc

SEQ ID NO: 4030027 - RNA, 22 nt, Molluscum contagiosum virus
gcggcuagcaccgcaugggccc

SEQ ID NO: 4030028 - RNA, 18 nt, Molluscum contagiosum virus
gcggcuccaacagcagcu

SEQ ID NO: 4030029 - RNA, 14 nt, Molluscum contagiosum virus
gcggcuccgcgcgc

SEQ ID NO: 4030030 - RNA, 15 nt, Molluscum contagiosum virus
gcggcucucgcggcc

SEQ ID NO: 4030031 - RNA, 19 nt, Molluscum contagiosum virus
gcggcuggaccugcgccag

SEQ ID NO: 4030032 - RNA, 21 nt, Molluscum contagiosum virus
gcgggaagaaggugcucagca

SEQ ID NO: 4030033 - RNA, 20 nt, Molluscum contagiosum virus
gcgggaccgcccuuguggac

SEQ ID NO: 4030034 - RNA, 22 nt, Molluscum contagiosum virus
gcgggaccugguucaugcuggc

SEQ ID NO: 4030035 - RNA, 18 nt, Molluscum contagiosum virus
gcgggacgcgugccuggc

SEQ ID NO: 4030036 - RNA, 18 nt, Molluscum contagiosum virus
gcgggagggcgcaacucc

SEQ ID NO: 4030037 - RNA, 16 nt, Molluscum contagiosum virus
gcgggcaagcagggcc

SEQ ID NO: 4030038 - RNA, 18 nt, Molluscum contagiosum virus
gcgggcacggcuaccacg

SEQ ID NO: 4030039 - RNA, 19 nt, Molluscum contagiosum virus
gcgggcacgugcugcugcg

SEQ ID NO: 4030040 - RNA, 22 nt, Molluscum contagiosum virus
gcgggcacgugcugcugcggcu

SEQ ID NO: 4030041 - RNA, 21 nt, Molluscum contagiosum virus
gcgggcauguccuuggcggug

SEQ ID NO: 4030042 - RNA, 19 nt, Molluscum contagiosum virus
gcgggccaggcacuggccc

SEQ ID NO: 4030043 - RNA, 22 nt, Molluscum contagiosum virus
gcgggccaguacuacucggcgc

SEQ ID NO: 4030044 - RNA, 18 nt, Molluscum contagiosum virus
gcgggccaugucugugcg

SEQ ID NO: 4030045 - RNA, 22 nt, Molluscum contagiosum virus
gcgggcccgugcucaggccagc

SEQ ID NO: 4030046 - RNA, 15 nt, Molluscum contagiosum virus
gcgggccgcgcgcac

SEQ ID NO: 4030047 - RNA, 18 nt, Molluscum contagiosum virus
gcgggccuguccgcgggc

SEQ ID NO: 4030048 - RNA, 14 nt, Molluscum contagiosum virus
gcgggcgcaggccc

SEQ ID NO: 4030049 - RNA, 15 nt, Molluscum contagiosum virus
gcgggcgcgcgcgga

SEQ ID NO: 4030050 - RNA, 17 nt, Molluscum contagiosum virus
gcgggcguguccgcggg

SEQ ID NO: 4030051 - RNA, 19 nt, Molluscum contagiosum virus
gcgggcucuuccaccggca

SEQ ID NO: 4030052 - RNA, 13 nt, Molluscum contagiosum virus
gcgggcugggaaa

SEQ ID NO: 4030053 - RNA, 18 nt, Molluscum contagiosum virus
gcgggugccgccgugggc

SEQ ID NO: 4030054 - RNA, 19 nt, Molluscum contagiosum virus
gcggucgacgagugcgccg

SEQ ID NO: 4030055 - RNA, 20 nt, Molluscum contagiosum virus
gcggucgcgagccacgcgca

SEQ ID NO: 4030056 - RNA, 13 nt, Molluscum contagiosum virus
gcggugcagcgcc

SEQ ID NO: 4030057 - RNA, 14 nt, Molluscum contagiosum virus
gcggugcagcgccc

SEQ ID NO: 4030058 - RNA, 21 nt, Molluscum contagiosum virus
gcgguggucuccgcgggcagc

SEQ ID NO: 4030059 - RNA, 21 nt, Molluscum contagiosum virus
gcgguuguagcgguugaccag

SEQ ID NO: 4030060 - RNA, 14 nt, Molluscum contagiosum virus
gcguaacagcgcgc

SEQ ID NO: 4030061 - RNA, 20 nt, Molluscum contagiosum virus
gcguaaugcuggcgcguccg

SEQ ID NO: 4030062 - RNA, 13 nt, Molluscum contagiosum virus
gcguacagcgcgc

SEQ ID NO: 4030063 - RNA, 20 nt, Molluscum contagiosum virus
gcguacagcgcgcgugccgc

SEQ ID NO: 4030064 - RNA, 21 nt, Molluscum contagiosum virus
gcguacaucccgcacgugggc

SEQ ID NO: 4030065 - RNA, 18 nt, Molluscum contagiosum virus
gcguacgcgccggggcgc

SEQ ID NO: 4030066 - RNA, 18 nt, Molluscum contagiosum virus
gcguacgcgucgcggagg

SEQ ID NO: 4030067 - RNA, 21 nt, Molluscum contagiosum virus
gcguagagcaauacguggcgc

SEQ ID NO: 4030068 - RNA, 21 nt, Molluscum contagiosum virus
gcguagcggacgaagcugugc

SEQ ID NO: 4030069 - RNA, 21 nt, Molluscum contagiosum virus
gcguccagccgcagccgcgcu

SEQ ID NO: 4030070 - RNA, 12 nt, Molluscum contagiosum virus
gcguccaugagc

SEQ ID NO: 4030071 - RNA, 13 nt, Molluscum contagiosum virus
gcguccgcaggcg

SEQ ID NO: 4030072 - RNA, 14 nt, Molluscum contagiosum virus
gcguccggcgcucg

SEQ ID NO: 4030073 - RNA, 20 nt, Molluscum contagiosum virus
gcguccggcgcuugccccuc

SEQ ID NO: 4030074 - RNA, 16 nt, Molluscum contagiosum virus
gcgucgagggcgccgg

SEQ ID NO: 4030075 - RNA, 14 nt, Molluscum contagiosum virus
gcgucgccugagcu

SEQ ID NO: 4030076 - RNA, 16 nt, Molluscum contagiosum virus
gcgucgcgcaggcgcc

SEQ ID NO: 4030077 - RNA, 19 nt, Molluscum contagiosum virus
gcgucgcgcgccgcgcugg

SEQ ID NO: 4030078 - RNA, 20 nt, Molluscum contagiosum virus
gcgucgcggagcgcgcacgg

SEQ ID NO: 4030079 - RNA, 19 nt, Molluscum contagiosum virus
gcgucgugcuccacgcgca

SEQ ID NO: 4030080 - RNA, 14 nt, Molluscum contagiosum virus
gcgucuccgcgcgg

SEQ ID NO: 4030081 - RNA, 22 nt, Molluscum contagiosum virus
gcgucucucugucucccgccgc

SEQ ID NO: 4030082 - RNA, 16 nt, Molluscum contagiosum virus
gcgucuuacugcugca

SEQ ID NO: 4030083 - RNA, 21 nt, Molluscum contagiosum virus
gcgucuuccugcugccgggag

SEQ ID NO: 4030084 - RNA, 15 nt, Molluscum contagiosum virus
gcgugacccucuucg

SEQ ID NO: 4030085 - RNA, 14 nt, Molluscum contagiosum virus
gcgugacggugcug

SEQ ID NO: 4030086 - RNA, 20 nt, Molluscum contagiosum virus
gcgugacucggccgcggggc

SEQ ID NO: 4030087 - RNA, 21 nt, Molluscum contagiosum virus
gcgugcacccuccgcacagag

SEQ ID NO: 4030088 - RNA, 15 nt, Molluscum contagiosum virus
gcgugcaguuucucc

SEQ ID NO: 4030089 - RNA, 14 nt, Molluscum contagiosum virus
gcgugccgcccgag

SEQ ID NO: 4030090 - RNA, 15 nt, Molluscum contagiosum virus
gcgugccgcugcgcg

SEQ ID NO: 4030091 - RNA, 15 nt, Molluscum contagiosum virus
gcgugccuguggcgc

SEQ ID NO: 4030092 - RNA, 16 nt, Molluscum contagiosum virus
gcgugcgccgugcguc

SEQ ID NO: 4030093 - RNA, 15 nt, Molluscum contagiosum virus
gcgugcgcgggcacg

SEQ ID NO: 4030094 - RNA, 17 nt, Molluscum contagiosum virus
gcgugcguacgugcacg

SEQ ID NO: 4030095 - RNA, 15 nt, Molluscum contagiosum virus
gcgugcucacgcccu

SEQ ID NO: 4030096 - RNA, 17 nt, Molluscum contagiosum virus
gcgugcucacgcugccc

SEQ ID NO: 4030097 - RNA, 17 nt, Molluscum contagiosum virus
gcgugcucgguagcgug

SEQ ID NO: 4030098 - RNA, 14 nt, Molluscum contagiosum virus
gcgugcugcagccc

SEQ ID NO: 4030099 - RNA, 16 nt, Molluscum contagiosum virus
gcgugcuucacgugcu

SEQ ID NO: 4030100 - RNA, 22 nt, Molluscum contagiosum virus
gcguggacagcaucccugccac

SEQ ID NO: 4030101 - RNA, 17 nt, Molluscum contagiosum virus
gcgugggugaggagcuc

SEQ ID NO: 4030102 - RNA, 17 nt, Molluscum contagiosum virus
gcgugguguucgccggc

SEQ ID NO: 4030103 - RNA, 18 nt, Molluscum contagiosum virus
gcuggcgcacuggggcga

SEQ ID NO: 4030104 - RNA, 16 nt, Molluscum contagiosum virus
gcuggcgcgcgcgcaa

SEQ ID NO: 4030105 - RNA, 16 nt, Molluscum contagiosum virus
gcuggcgcucggcgug

SEQ ID NO: 4030106 - RNA, 21 nt, Molluscum contagiosum virus
gcuggcgcucggcguggugcu

SEQ ID NO: 4030107 - RNA, 22 nt, Molluscum contagiosum virus
gcuggcgcucggcguggugcug

SEQ ID NO: 4030108 - RNA, 12 nt, Molluscum contagiosum virus
gcuggcggggac

SEQ ID NO: 4030109 - RNA, 22 nt, Molluscum contagiosum virus
gcuggcuucuuguugucugcgg

SEQ ID NO: 4030110 - RNA, 20 nt, Molluscum contagiosum virus
gcugggauaacaggcgugcg

SEQ ID NO: 4030111 - RNA, 18 nt, Molluscum contagiosum virus
gcuggggcucgcgcaaua

SEQ ID NO: 4030112 - RNA, 16 nt, Molluscum contagiosum virus
gcugucagaggauucu

SEQ ID NO: 4030113 - RNA, 17 nt, Molluscum contagiosum virus
gcugugccgcagcaacc

SEQ ID NO: 4030114 - RNA, 14 nt, Molluscum contagiosum virus
gcuguucgcggcgc

SEQ ID NO: 4030115 - RNA, 16 nt, Molluscum contagiosum virus
gcuguugcugcugccg

SEQ ID NO: 4030116 - RNA, 15 nt, Molluscum contagiosum virus
gcuuacacacgcacc

SEQ ID NO: 4030117 - RNA, 22 nt, Molluscum contagiosum virus
gcuuagcacacgcgcgcgcagg

SEQ ID NO: 4030118 - RNA, 17 nt, Molluscum contagiosum virus
gcuuccgucugcugcuc

SEQ ID NO: 4030119 - RNA, 17 nt, Molluscum contagiosum virus
gcuucgccgcgcgcgcc

SEQ ID NO: 4030120 - RNA, 19 nt, Molluscum contagiosum virus
gcuucgccgcgcgcgccag

SEQ ID NO: 4030121 - RNA, 20 nt, Molluscum contagiosum virus
gcuucggaacgcucuucgca

SEQ ID NO: 4030122 - RNA, 19 nt, Molluscum contagiosum virus
gcuucggcggcugugcccg

SEQ ID NO: 4030123 - RNA, 19 nt, Molluscum contagiosum virus
gcuucuggcaaacgcacug

SEQ ID NO: 4030124 - RNA, 20 nt, Molluscum contagiosum virus
gcuucuggcaaacgcacugu

SEQ ID NO: 4030125 - RNA, 17 nt, Molluscum contagiosum virus
gcuucuuccggcagcug

SEQ ID NO: 4030126 - RNA, 17 nt, Molluscum contagiosum virus
gcuugcagacaaggaga

SEQ ID NO: 4030127 - RNA, 14 nt, Molluscum contagiosum virus
gcuugccccucgug

SEQ ID NO: 4030128 - RNA, 19 nt, Molluscum contagiosum virus
gcuugcccgaccuuggugc

SEQ ID NO: 4030129 - RNA, 13 nt, Molluscum contagiosum virus
gcuugccgcuuga

SEQ ID NO: 4030130 - RNA, 17 nt, Molluscum contagiosum virus
gcuugcucagcagcuuc

SEQ ID NO: 4030131 - RNA, 15 nt, Molluscum contagiosum virus
gcuugcugcaguaug

SEQ ID NO: 4030132 - RNA, 15 nt, Molluscum contagiosum virus
gcuuggcgggcagcg

SEQ ID NO: 4030133 - RNA, 17 nt, Molluscum contagiosum virus
gcuuguugucgagcaga

SEQ ID NO: 4030134 - RNA, 18 nt, Molluscum contagiosum virus
ggaaaacuguaggggagg

SEQ ID NO: 4030135 - RNA, 15 nt, Molluscum contagiosum virus
ggaaagauagggcau

SEQ ID NO: 4030136 - RNA, 15 nt, Molluscum contagiosum virus
ggaaaggcacccacc

SEQ ID NO: 4030137 - RNA, 14 nt, Molluscum contagiosum virus
ggaacagggaaaaa

SEQ ID NO: 4030138 - RNA, 18 nt, Molluscum contagiosum virus
ggaacaggugcgcaagca

SEQ ID NO: 4030139 - RNA, 21 nt, Molluscum contagiosum virus
ggaacggcucaccgcgcagaa

SEQ ID NO: 4030140 - RNA, 14 nt, Molluscum contagiosum virus
ggaacucgcgcgcg

SEQ ID NO: 4030141 - RNA, 21 nt, Molluscum contagiosum virus
ggaacucuacgacaugcucgc

SEQ ID NO: 4030142 - RNA, 15 nt, Molluscum contagiosum virus
ggaagacgucgggaa

SEQ ID NO: 4030143 - RNA, 14 nt, Molluscum contagiosum virus
ggaagacgugcugc

SEQ ID NO: 4030144 - RNA, 18 nt, Molluscum contagiosum virus
ggaagcaacgacaaggaa

SEQ ID NO: 4030145 - RNA, 19 nt, Molluscum contagiosum virus
cucgaagccuucgcagaga

SEQ ID NO: 4030146 - RNA, 15 nt, Molluscum contagiosum virus
cucgacaaugagcac

SEQ ID NO: 4030147 - RNA, 18 nt, Molluscum contagiosum virus
cucgacauuucgcgccug

SEQ ID NO: 4030148 - RNA, 20 nt, Molluscum contagiosum virus
cucgaccaaaugcgcgugcg

SEQ ID NO: 4030149 - RNA, 20 nt, Molluscum contagiosum virus
cucgacgcguucuagcagcg

SEQ ID NO: 4030150 - RNA, 20 nt, Molluscum contagiosum virus
cucgacugcguugucuccuc

SEQ ID NO: 4030151 - RNA, 16 nt, Molluscum contagiosum virus
cucgagaagagggucg

SEQ ID NO: 4030152 - RNA, 18 nt, Molluscum contagiosum virus
cucgagagggagcagccu

SEQ ID NO: 4030153 - RNA, 13 nt, Molluscum contagiosum virus
cucgagcacgccu

SEQ ID NO: 4030154 - RNA, 11 nt, Molluscum contagiosum virus
cucgagcacgu

SEQ ID NO: 4030155 - RNA, 19 nt, Molluscum contagiosum virus
cucgagcgagcuacgcgcu

SEQ ID NO: 4030156 - RNA, 18 nt, Molluscum contagiosum virus
cucgagcgcgcgccugcu

SEQ ID NO: 4030157 - RNA, 14 nt, Molluscum contagiosum virus
cucgagcuccaggg

SEQ ID NO: 4030158 - RNA, 23 nt, Molluscum contagiosum virus
cucgagcuuccucaaggcgcacg

SEQ ID NO: 4030159 - RNA, 21 nt, Molluscum contagiosum virus
cucgaggccggcacgagcagu

SEQ ID NO: 4030160 - RNA, 19 nt, Molluscum contagiosum virus
cucgaggcgcuugggcacu

SEQ ID NO: 4030161 - RNA, 22 nt, Molluscum contagiosum virus
cucgaggucgugcaggccgugc

SEQ ID NO: 4030162 - RNA, 23 nt, Molluscum contagiosum virus
cucgaggucgugcaggccgugcu

SEQ ID NO: 4030163 - RNA, 22 nt, Molluscum contagiosum virus
cucgcagcguuccaggaacgcc

SEQ ID NO: 4030164 - RNA, 23 nt, Molluscum contagiosum virus
cucgcaggcgaggucacacucga

SEQ ID NO: 4030165 - RNA, 13 nt, Molluscum contagiosum virus
cucgcccagcucg

SEQ ID NO: 4030166 - RNA, 20 nt, Molluscum contagiosum virus
cucgcccgcgcgcgcgcgaa

SEQ ID NO: 4030167 - RNA, 14 nt, Molluscum contagiosum virus
cucgcgagaaguuc

SEQ ID NO: 4030168 - RNA, 14 nt, Molluscum contagiosum virus
cucgcgagcacuuu

SEQ ID NO: 4030169 - RNA, 22 nt, Molluscum contagiosum virus
cucgcgagcguuucugccggag

SEQ ID NO: 4030170 - RNA, 17 nt, Molluscum contagiosum virus
cucgcgcaucugccgcg

SEQ ID NO: 4030171 - RNA, 21 nt, Molluscum contagiosum virus
cucgcgcgcagcacaccgucg

SEQ ID NO: 4030172 - RNA, 15 nt, Molluscum contagiosum virus
cucgcgcgcagcucg

SEQ ID NO: 4030173 - RNA, 15 nt, Molluscum contagiosum virus
cucgcgcgcagggcg

SEQ ID NO: 4030174 - RNA, 13 nt, Molluscum contagiosum virus
cucgcgcgccacc

SEQ ID NO: 4030175 - RNA, 13 nt, Molluscum contagiosum virus
cucgcgcgccagc

SEQ ID NO: 4030176 - RNA, 14 nt, Molluscum contagiosum virus
cucgcgcgccagca

SEQ ID NO: 4030177 - RNA, 16 nt, Molluscum contagiosum virus
cucgcgcgcgagcacg

SEQ ID NO: 4030178 - RNA, 16 nt, Molluscum contagiosum virus
cucgcgcgcgcacgcc

SEQ ID NO: 4030179 - RNA, 13 nt, Molluscum contagiosum virus
cucgcggcagugc

SEQ ID NO: 4030180 - RNA, 22 nt, Molluscum contagiosum virus
cucgcggucgggccccugcgcg

SEQ ID NO: 4030181 - RNA, 16 nt, Molluscum contagiosum virus
cucgcggugcagcugc

SEQ ID NO: 4030182 - RNA, 14 nt, Molluscum contagiosum virus
cucgcguccgcauc

SEQ ID NO: 4030183 - RNA, 18 nt, Molluscum contagiosum virus
cucgcgucugcaaggccu

SEQ ID NO: 4030184 - RNA, 24 nt, Molluscum contagiosum virus
cucgcucaucaccgacacgcgccc

SEQ ID NO: 4030185 - RNA, 19 nt, Molluscum contagiosum virus
cucgcucggaaagagcgcg

SEQ ID NO: 4030186 - RNA, 23 nt, Molluscum contagiosum virus
cucgcucggaaagagcgcgcgaa

SEQ ID NO: 4030187 - RNA, 22 nt, Molluscum contagiosum virus
cucgcugccagagauccgcccg

SEQ ID NO: 4030188 - RNA, 12 nt, Molluscum contagiosum virus
cucgcugcugcc

SEQ ID NO: 4030189 - RNA, 21 nt, Molluscum contagiosum virus
cucgcugcugcucuuccagga

SEQ ID NO: 4030190 - RNA, 15 nt, Molluscum contagiosum virus
cucgcuggcuccgcu

SEQ ID NO: 4030191 - RNA, 11 nt, Molluscum contagiosum virus
cucggacagug

SEQ ID NO: 4030192 - RNA, 20 nt, Molluscum contagiosum virus
cucggcacugcuggcgcgcg

SEQ ID NO: 4030193 - RNA, 17 nt, Molluscum contagiosum virus
cucggcguccgcagcgg

SEQ ID NO: 4030194 - RNA, 17 nt, Molluscum contagiosum virus
cucgggccggcgcgccg

SEQ ID NO: 4030195 - RNA, 23 nt, Molluscum contagiosum virus
cucgguagcguggagcuggucca

SEQ ID NO: 4030196 - RNA, 23 nt, Molluscum contagiosum virus
cucgguuggcggcgccgcgaucu

SEQ ID NO: 4030197 - RNA, 16 nt, Molluscum contagiosum virus
cucguccggcgcucgc

SEQ ID NO: 4030198 - RNA, 14 nt, Molluscum contagiosum virus
cucgucgcugcgga

SEQ ID NO: 4030199 - RNA, 22 nt, Molluscum contagiosum virus
cucgugcaugacggcgcgagcc

SEQ ID NO: 4030200 - RNA, 20 nt, Molluscum contagiosum virus
cucgugccgccugcgcgcac

SEQ ID NO: 4030201 - RNA, 14 nt, Molluscum contagiosum virus
cucguggacagccu

SEQ ID NO: 4030202 - RNA, 20 nt, Molluscum contagiosum virus
cucguggacagccugcaccg

SEQ ID NO: 4030203 - RNA, 21 nt, Molluscum contagiosum virus
cucguggacagccugcaccga

SEQ ID NO: 4030204 - RNA, 20 nt, Molluscum contagiosum virus
cucguggcguugcugcugcg

SEQ ID NO: 4030205 - RNA, 18 nt, Molluscum contagiosum virus
cucgugggauaggcacac

SEQ ID NO: 4030206 - RNA, 14 nt, Molluscum contagiosum virus
cucuaccuggugcu

SEQ ID NO: 4030207 - RNA, 21 nt, Molluscum contagiosum virus
cucuacgccgcgcaccuggag

SEQ ID NO: 4030208 - RNA, 12 nt, Molluscum contagiosum virus
cucuaggagcuc

SEQ ID NO: 4030209 - RNA, 12 nt, Molluscum contagiosum virus
cucucagcggca

SEQ ID NO: 4030210 - RNA, 15 nt, Molluscum contagiosum virus
cucuccgaagaagaa

SEQ ID NO: 4030211 - RNA, 12 nt, Molluscum contagiosum virus
cucucgagcacu

SEQ ID NO: 4030212 - RNA, 20 nt, Molluscum contagiosum virus
cucucggagaaguggccggc

SEQ ID NO: 4030213 - RNA, 22 nt, Molluscum contagiosum virus
cucucgggcucgcgggacgacg

SEQ ID NO: 4030214 - RNA, 13 nt, Molluscum contagiosum virus
cucucguggggag

SEQ ID NO: 4030215 - RNA, 20 nt, Molluscum contagiosum virus
cucugacccgcgccuacucc

SEQ ID NO: 4030216 - RNA, 13 nt, Molluscum contagiosum virus
cucugccugcaag

SEQ ID NO: 4030217 - RNA, 14 nt, Molluscum contagiosum virus
cucugcgagcgccu

SEQ ID NO: 4030218 - RNA, 14 nt, Molluscum contagiosum virus
cucugcgcagagcg

SEQ ID NO: 4030219 - RNA, 18 nt, Molluscum contagiosum virus
cucugcgcagguagcggc

SEQ ID NO: 4030220 - RNA, 21 nt, Molluscum contagiosum virus
cucugcgcgagcagcugcugc

SEQ ID NO: 4030221 - RNA, 21 nt, Molluscum contagiosum virus
cucugcgcgcaagucaccgcu

SEQ ID NO: 4030222 - RNA, 24 nt, Molluscum contagiosum virus
cucugcguaagcgccugcacacgc

SEQ ID NO: 4030223 - RNA, 16 nt, Molluscum contagiosum virus
cucuggaaggagcugg

SEQ ID NO: 4030224 - RNA, 12 nt, Molluscum contagiosum virus
cucuggcuccag

SEQ ID NO: 4030225 - RNA, 16 nt, Molluscum contagiosum virus
cucuggcuccagggga

SEQ ID NO: 4030226 - RNA, 15 nt, Molluscum contagiosum virus
cucugucgacagucu

SEQ ID NO: 4030227 - RNA, 23 nt, Molluscum contagiosum virus
cucuguugcguuggcgccagccu

SEQ ID NO: 4030228 - RNA, 15 nt, Molluscum contagiosum virus
cucuucgcaggcgug

SEQ ID NO: 4030229 - RNA, 18 nt, Molluscum contagiosum virus
cucuucggggacggcgug

SEQ ID NO: 4030230 - RNA, 14 nt, Molluscum contagiosum virus
cugaaccugggcgc

SEQ ID NO: 4030231 - RNA, 15 nt, Molluscum contagiosum virus
gcccgagcgcgcgug

SEQ ID NO: 4030232 - RNA, 17 nt, Molluscum contagiosum virus
gcccgagcgucaguguu

SEQ ID NO: 4030233 - RNA, 23 nt, Molluscum contagiosum virus
gcccgaggacgagccccgcgccg

SEQ ID NO: 4030234 - RNA, 22 nt, Molluscum contagiosum virus
gcccgagggcgggcacgugcug

SEQ ID NO: 4030235 - RNA, 17 nt, Molluscum contagiosum virus
gcccgaguucgcggcgc

SEQ ID NO: 4030236 - RNA, 16 nt, Molluscum contagiosum virus
gcccgccgcccaaggg

SEQ ID NO: 4030237 - RNA, 17 nt, Molluscum contagiosum virus
gcccgccucgucgucca

SEQ ID NO: 4030238 - RNA, 17 nt, Molluscum contagiosum virus
gcccgccugccgcgagc

SEQ ID NO: 4030239 - RNA, 20 nt, Molluscum contagiosum virus
gcccgcgcacgagcugcugc

SEQ ID NO: 4030240 - RNA, 23 nt, Molluscum contagiosum virus
gcccgcgcacgagcugcugcccg

SEQ ID NO: 4030241 - RNA, 12 nt, Molluscum contagiosum virus
gcccgcgccgca

SEQ ID NO: 4030242 - RNA, 17 nt, Molluscum contagiosum virus
gcccgcgcgcgacuacg

SEQ ID NO: 4030243 - RNA, 21 nt, Molluscum contagiosum virus
gcccgcgcucuuacugcagca

SEQ ID NO: 4030244 - RNA, 15 nt, Molluscum contagiosum virus
gcccgcggcgcacgg

SEQ ID NO: 4030245 - RNA, 15 nt, Molluscum contagiosum virus
gcccgcggcgcgcag

SEQ ID NO: 4030246 - RNA, 16 nt, Molluscum contagiosum virus
gcccgcgucgcgcgcc

SEQ ID NO: 4030247 - RNA, 14 nt, Molluscum contagiosum virus
gcccgcgugcaccc

SEQ ID NO: 4030248 - RNA, 18 nt, Molluscum contagiosum virus
gcccgcugcgcgcucugg

SEQ ID NO: 4030249 - RNA, 23 nt, Molluscum contagiosum virus
gcccgcuggcggcgcacgcgagc

SEQ ID NO: 4030250 - RNA, 22 nt, Molluscum contagiosum virus
gcccggaagcuugcucagcagc

SEQ ID NO: 4030251 - RNA, 22 nt, Molluscum contagiosum virus
gcccggcaggcucccgcugucg

SEQ ID NO: 4030252 - RNA, 18 nt, Molluscum contagiosum virus
gcccgguacgcucgcgcu

SEQ ID NO: 4030253 - RNA, 20 nt, Molluscum contagiosum virus
gcccgugccgccggcgccgc

SEQ ID NO: 4030254 - RNA, 15 nt, Molluscum contagiosum virus
gcccgugcgccugcc

SEQ ID NO: 4030255 - RNA, 19 nt, Molluscum contagiosum virus
gcccgugcuggagggcacg

SEQ ID NO: 4030256 - RNA, 15 nt, Molluscum contagiosum virus
gcccguggugggccg

SEQ ID NO: 4030257 - RNA, 16 nt, Molluscum contagiosum virus
gcccuacgcgcgcgug

SEQ ID NO: 4030258 - RNA, 15 nt, Molluscum contagiosum virus
gcccuccucgaccug

SEQ ID NO: 4030259 - RNA, 16 nt, Molluscum contagiosum virus
gcccugcuagugcgcg

SEQ ID NO: 4030260 - RNA, 15 nt, Molluscum contagiosum virus
gcccuuccuggaggg

SEQ ID NO: 4030261 - RNA, 14 nt, Molluscum contagiosum virus
gcccuucuugacgc

SEQ ID NO: 4030262 - RNA, 22 nt, Molluscum contagiosum virus
gcccuucuugacgcgagacugu

SEQ ID NO: 4030263 - RNA, 15 nt, Molluscum contagiosum virus
gccgacagcgcgcgc

SEQ ID NO: 4030264 - RNA, 16 nt, Molluscum contagiosum virus
gccgacgugugccgcu

SEQ ID NO: 4030265 - RNA, 16 nt, Molluscum contagiosum virus
gccgagccgcuggccg

SEQ ID NO: 4030266 - RNA, 17 nt, Molluscum contagiosum virus
gccgagccgcuggccga

SEQ ID NO: 4030267 - RNA, 14 nt, Molluscum contagiosum virus
gccgagccggggga

SEQ ID NO: 4030268 - RNA, 15 nt, Molluscum contagiosum virus
gccgagcgcacgccg

SEQ ID NO: 4030269 - RNA, 21 nt, Molluscum contagiosum virus
gccgagcgugaccagugcgug

SEQ ID NO: 4030270 - RNA, 19 nt, Molluscum contagiosum virus
gccgagcucuuccccgcgg

SEQ ID NO: 4030271 - RNA, 13 nt, Molluscum contagiosum virus
gccgaggcgcugc

SEQ ID NO: 4030272 - RNA, 19 nt, Molluscum contagiosum virus
gccgaguaccgcgcgcacg

SEQ ID NO: 4030273 - RNA, 20 nt, Molluscum contagiosum virus
gccgaugcagugcggaugug

SEQ ID NO: 4030274 - RNA, 13 nt, Molluscum contagiosum virus
gccgcaaacacug

SEQ ID NO: 4030275 - RNA, 14 nt, Molluscum contagiosum virus
gccgcaagcacacg

SEQ ID NO: 4030276 - RNA, 16 nt, Molluscum contagiosum virus
gccgcacgcugcugcg

SEQ ID NO: 4030277 - RNA, 21 nt, Molluscum contagiosum virus
gccgcacgcugcugcgugcgc

SEQ ID NO: 4030278 - RNA, 13 nt, Molluscum contagiosum virus
gccgcacgugcug

SEQ ID NO: 4030279 - RNA, 19 nt, Molluscum contagiosum virus
gccgcagaacacgggggcu

SEQ ID NO: 4030280 - RNA, 23 nt, Molluscum contagiosum virus
gccgcagagccgcgaaagcgucg

SEQ ID NO: 4030281 - RNA, 19 nt, Molluscum contagiosum virus
gccgcagcccgagcgcgcg

SEQ ID NO: 4030282 - RNA, 11 nt, Molluscum contagiosum virus
gccgcaggaac

SEQ ID NO: 4030283 - RNA, 16 nt, Molluscum contagiosum virus
gccgcaggccaggugc

SEQ ID NO: 4030284 - RNA, 16 nt, Molluscum contagiosum virus
gccgcaggcgcgcgcc

SEQ ID NO: 4030285 - RNA, 22 nt, Molluscum contagiosum virus
gccgcaugcaccuacgcgccga

SEQ ID NO: 4030286 - RNA, 14 nt, Molluscum contagiosum virus
gccgccagccacga

SEQ ID NO: 4030287 - RNA, 16 nt, Molluscum contagiosum virus
gccgccaugcugcgcg

SEQ ID NO: 4030288 - RNA, 17 nt, Molluscum contagiosum virus
gccgccaugcugcgcga

SEQ ID NO: 4030289 - RNA, 17 nt, Molluscum contagiosum virus
gccgccgcaggcccggc

SEQ ID NO: 4030290 - RNA, 21 nt, Molluscum contagiosum virus
gccgccgcguacgcgccgggg

SEQ ID NO: 4030291 - RNA, 22 nt, Molluscum contagiosum virus
gccgccggugcgugcccagcag

SEQ ID NO: 4030292 - RNA, 16 nt, Molluscum contagiosum virus
gccgccucgcgcgcac

SEQ ID NO: 4030293 - RNA, 23 nt, Molluscum contagiosum virus
gccgccugcgcgcacccgagggc

SEQ ID NO: 4030294 - RNA, 23 nt, Molluscum contagiosum virus
gccgcgaaagaggaaagcgcaca

SEQ ID NO: 4030295 - RNA, 14 nt, Molluscum contagiosum virus
gccgcgcaccugga

SEQ ID NO: 4030296 - RNA, 17 nt, Molluscum contagiosum virus
gccgcgccgcugcgccg

SEQ ID NO: 4030297 - RNA, 20 nt, Molluscum contagiosum virus
gccgcgccuugagcgcgccg

SEQ ID NO: 4030298 - RNA, 13 nt, Molluscum contagiosum virus
gccgcgcgcgcac

SEQ ID NO: 4030299 - RNA, 20 nt, Molluscum contagiosum virus
gccgcgcugcuccgugccca

SEQ ID NO: 4030300 - RNA, 23 nt, Molluscum contagiosum virus
gccgcgcuucacggagaucaggc

SEQ ID NO: 4030301 - RNA, 22 nt, Molluscum contagiosum virus
gccgcggaacugacugcugccc

SEQ ID NO: 4030302 - RNA, 14 nt, Molluscum contagiosum virus
gccgcggcagcucu

SEQ ID NO: 4030303 - RNA, 14 nt, Molluscum contagiosum virus
gccgcggcgggggc

SEQ ID NO: 4030304 - RNA, 12 nt, Molluscum contagiosum virus
gccgcgggcaca

SEQ ID NO: 4030305 - RNA, 23 nt, Molluscum contagiosum virus
gccgcggugccgggcgucuccgc

SEQ ID NO: 4030306 - RNA, 16 nt, Molluscum contagiosum virus
gccgcgugcgccgccg

SEQ ID NO: 4030307 - RNA, 15 nt, Molluscum contagiosum virus
gccgcgugcucgugu

SEQ ID NO: 4030308 - RNA, 12 nt, Molluscum contagiosum virus
gccgcgugcugg

SEQ ID NO: 4030309 - RNA, 15 nt, Molluscum contagiosum virus
gccgcguugcagcag

SEQ ID NO: 4030310 - RNA, 12 nt, Molluscum contagiosum virus
gccgcuccagag

SEQ ID NO: 4030311 - RNA, 17 nt, Molluscum contagiosum virus
gccgcucggcccgcgga

SEQ ID NO: 4030312 - RNA, 16 nt, Molluscum contagiosum virus
gccgcucgucgcugcg

SEQ ID NO: 4030313 - RNA, 17 nt, Molluscum contagiosum virus
gccgcugcgccgccagc

SEQ ID NO: 4030314 - RNA, 18 nt, Molluscum contagiosum virus
gccgcugcgcuugcucac

SEQ ID NO: 4030315 - RNA, 13 nt, Molluscum contagiosum virus
gccgcuggacgcc

SEQ ID NO: 4030316 - RNA, 15 nt, Molluscum contagiosum virus
gccgcuucgggcuca

SEQ ID NO: 4030317 - RNA, 15 nt, Molluscum contagiosum virus
gccgcuucuugacgc

SEQ ID NO: 4030318 - RNA, 22 nt, Molluscum contagiosum virus
gcagcgucgcggagcgcgcacg

SEQ ID NO: 4030319 - RNA, 21 nt, Molluscum contagiosum virus
gcagcgugcgcaccagcugca

SEQ ID NO: 4030320 - RNA, 13 nt, Molluscum contagiosum virus
gcagcgugucaag

SEQ ID NO: 4030321 - RNA, 23 nt, Molluscum contagiosum virus
gcagcguugcuauuaccugaccg

SEQ ID NO: 4030322 - RNA, 20 nt, Molluscum contagiosum virus
gcagcuaccgcgcgcgcaag

SEQ ID NO: 4030323 - RNA, 16 nt, Molluscum contagiosum virus
gcagcuacugcgugcg

SEQ ID NO: 4030324 - RNA, 14 nt, Molluscum contagiosum virus
gcagcuccagcaug

SEQ ID NO: 4030325 - RNA, 12 nt, Molluscum contagiosum virus
gcagcuccgcga

SEQ ID NO: 4030326 - RNA, 18 nt, Molluscum contagiosum virus
gcagcuccuagcgcgcgu

SEQ ID NO: 4030327 - RNA, 17 nt, Molluscum contagiosum virus
gcagcucugcagcgccg

SEQ ID NO: 4030328 - RNA, 12 nt, Molluscum contagiosum virus
gcagcugccgca

SEQ ID NO: 4030329 - RNA, 15 nt, Molluscum contagiosum virus
gcagcugcugcgcac

SEQ ID NO: 4030330 - RNA, 15 nt, Molluscum contagiosum virus
gcagcugcugcgcuc

SEQ ID NO: 4030331 - RNA, 17 nt, Molluscum contagiosum virus
gcagcuucuuggagccc

SEQ ID NO: 4030332 - RNA, 20 nt, Molluscum contagiosum virus
gcagcuucuuggagcccuug

SEQ ID NO: 4030333 - RNA, 21 nt, Molluscum contagiosum virus
gcaggaaagguaccccgcagg

SEQ ID NO: 4030334 - RNA, 17 nt, Molluscum contagiosum virus
gcaggaacgcgcgcucg

SEQ ID NO: 4030335 - RNA, 17 nt, Molluscum contagiosum virus
gcaggaagcuggcgcgg

SEQ ID NO: 4030336 - RNA, 18 nt, Molluscum contagiosum virus
gcaggaccuggcuggcgc

SEQ ID NO: 4030337 - RNA, 19 nt, Molluscum contagiosum virus
gcaggagcacgccuggcgg

SEQ ID NO: 4030338 - RNA, 18 nt, Molluscum contagiosum virus
gcaggcaaagcggggcgc

SEQ ID NO: 4030339 - RNA, 14 nt, Molluscum contagiosum virus
gcaggccgugcuca

SEQ ID NO: 4030340 - RNA, 13 nt, Molluscum contagiosum virus
gcaggcgagguca

SEQ ID NO: 4030341 - RNA, 21 nt, Molluscum contagiosum virus
gcaggcgcugcgcggcgcgcg

SEQ ID NO: 4030342 - RNA, 12 nt, Molluscum contagiosum virus
gcaggcuguguu

SEQ ID NO: 4030343 - RNA, 22 nt, Molluscum contagiosum virus
gcagggaaagagcacgcgcucg

SEQ ID NO: 4030344 - RNA, 19 nt, Molluscum contagiosum virus
gcaggucaacuccgagcgc

SEQ ID NO: 4030345 - RNA, 18 nt, Molluscum contagiosum virus
gcagguggccgcgcgcgc

SEQ ID NO: 4030346 - RNA, 14 nt, Molluscum contagiosum virus
gcagguucucgcac

SEQ ID NO: 4030347 - RNA, 18 nt, Molluscum contagiosum virus
gcagguugaagcucucgc

SEQ ID NO: 4030348 - RNA, 18 nt, Molluscum contagiosum virus
gcaguaccggccaaggca

SEQ ID NO: 4030349 - RNA, 17 nt, Molluscum contagiosum virus
gcagucacgacuguguu

SEQ ID NO: 4030350 - RNA, 14 nt, Molluscum contagiosum virus
gcagucgccuuccu

SEQ ID NO: 4030351 - RNA, 16 nt, Molluscum contagiosum virus
gcagugcaccagcacc

SEQ ID NO: 4030352 - RNA, 18 nt, Molluscum contagiosum virus
gcagugccaagguucugg

SEQ ID NO: 4030353 - RNA, 17 nt, Molluscum contagiosum virus
gcagugccgccgcgcgc

SEQ ID NO: 4030354 - RNA, 17 nt, Molluscum contagiosum virus
gcagugcggccagcacc

SEQ ID NO: 4030355 - RNA, 22 nt, Molluscum contagiosum virus
gcagugcucgcacacgugcacg

SEQ ID NO: 4030356 - RNA, 17 nt, Molluscum contagiosum virus
gcaguguuucgacgccg

SEQ ID NO: 4030357 - RNA, 16 nt, Molluscum contagiosum virus
gcauacacuuccugcu

SEQ ID NO: 4030358 - RNA, 14 nt, Molluscum contagiosum virus
gcauagucaucaaa

SEQ ID NO: 4030359 - RNA, 22 nt, Molluscum contagiosum virus
gcaucccugcgcaccugcacga

SEQ ID NO: 4030360 - RNA, 21 nt, Molluscum contagiosum virus
gcaucgcaguucggcgacacg

SEQ ID NO: 4030361 - RNA, 16 nt, Molluscum contagiosum virus
gcaucgcgcugcuggu

SEQ ID NO: 4030362 - RNA, 17 nt, Molluscum contagiosum virus
gcaucggcggcagcgcc

SEQ ID NO: 4030363 - RNA, 21 nt, Molluscum contagiosum virus
gcaugcgcccucacgugcuga

SEQ ID NO: 4030364 - RNA, 14 nt, Molluscum contagiosum virus
gcaugcgccugcac

SEQ ID NO: 4030365 - RNA, 14 nt, Molluscum contagiosum virus
gcaugcgcgccgcg

SEQ ID NO: 4030366 - RNA, 22 nt, Molluscum contagiosum virus
gcaugcgcgccgcgcugcuggc

SEQ ID NO: 4030367 - RNA, 23 nt, Molluscum contagiosum virus
gcauggacauccucaccuuccug

SEQ ID NO: 4030368 - RNA, 14 nt, Molluscum contagiosum virus
gcauggagggcgag

SEQ ID NO: 4030369 - RNA, 14 nt, Molluscum contagiosum virus
gcauggcggcggcc

SEQ ID NO: 4030370 - RNA, 14 nt, Molluscum contagiosum virus
gcaugguggugaga

SEQ ID NO: 4030371 - RNA, 20 nt, Molluscum contagiosum virus
gcauguccuuggcggugcgc

SEQ ID NO: 4030372 - RNA, 20 nt, Molluscum contagiosum virus
gcaugugcgcaccgcgggcu

SEQ ID NO: 4030373 - RNA, 14 nt, Molluscum contagiosum virus
gcauuaaacaacac

SEQ ID NO: 4030374 - RNA, 21 nt, Molluscum contagiosum virus
gcauuccgagccgccggucuc

SEQ ID NO: 4030375 - RNA, 16 nt, Molluscum contagiosum virus
gcauuccuuguccugg

SEQ ID NO: 4030376 - RNA, 16 nt, Molluscum contagiosum virus
gccaacuucgucucga

SEQ ID NO: 4030377 - RNA, 18 nt, Molluscum contagiosum virus
gccaagcguuggcgcccg

SEQ ID NO: 4030378 - RNA, 20 nt, Molluscum contagiosum virus
gccacaccccguacggcgca

SEQ ID NO: 4030379 - RNA, 23 nt, Molluscum contagiosum virus
gccaccucgcacgugugcaggaa

SEQ ID NO: 4030380 - RNA, 17 nt, Molluscum contagiosum virus
gccacgaacacggcgcg

SEQ ID NO: 4030381 - RNA, 15 nt, Molluscum contagiosum virus
gccacgcccgggccc

SEQ ID NO: 4030382 - RNA, 18 nt, Molluscum contagiosum virus
gccacgcggagcucgcca

SEQ ID NO: 4030383 - RNA, 15 nt, Molluscum contagiosum virus
gccacggccgcgcgc

SEQ ID NO: 4030384 - RNA, 15 nt, Molluscum contagiosum virus
gccacuguugcuucc

SEQ ID NO: 4030385 - RNA, 14 nt, Molluscum contagiosum virus
gccagacgcagagc

SEQ ID NO: 4030386 - RNA, 13 nt, Molluscum contagiosum virus
gccagagucgccg

SEQ ID NO: 4030387 - RNA, 19 nt, Molluscum contagiosum virus
gccagcacgcgcucguccg

SEQ ID NO: 4030388 - RNA, 17 nt, Molluscum contagiosum virus
gccagccaucgugcgcg

SEQ ID NO: 4030389 - RNA, 19 nt, Molluscum contagiosum virus
gccagccgcucguccagcu

SEQ ID NO: 4030390 - RNA, 22 nt, Molluscum contagiosum virus
gccagccucaucgugagccugg

SEQ ID NO: 4030391 - RNA, 16 nt, Molluscum contagiosum virus
gccagcgacgcgacgc

SEQ ID NO: 4030392 - RNA, 22 nt, Molluscum contagiosum virus
gccagcgauugcccgcgcgcgg

SEQ ID NO: 4030393 - RNA, 17 nt, Molluscum contagiosum virus
gccagcgcgcccaccag

SEQ ID NO: 4030394 - RNA, 21 nt, Molluscum contagiosum virus
gccagcgcgcccaccagcagc

SEQ ID NO: 4030395 - RNA, 14 nt, Molluscum contagiosum virus
gccagcggcgccgc

SEQ ID NO: 4030396 - RNA, 22 nt, Molluscum contagiosum virus
gccagcgggaaacugcugcccg

SEQ ID NO: 4030397 - RNA, 16 nt, Molluscum contagiosum virus
gccagcgucgcgcgcc

SEQ ID NO: 4030398 - RNA, 21 nt, Molluscum contagiosum virus
gccagcucgacacugugcugg

SEQ ID NO: 4030399 - RNA, 15 nt, Molluscum contagiosum virus
gccagcuugagcaca

SEQ ID NO: 4030400 - RNA, 11 nt, Molluscum contagiosum virus
gccaggaacga

SEQ ID NO: 4030401 - RNA, 22 nt, Molluscum contagiosum virus
gccaguagcgaaugcagugccc

SEQ ID NO: 4030402 - RNA, 20 nt, Molluscum contagiosum virus
gccagucgcgacgcgcuugc

SEQ ID NO: 4030403 - RNA, 14 nt, Molluscum contagiosum virus
gccaucgagcuucc

SEQ ID NO: 4030404 - RNA, 14 nt, Molluscum contagiosum virus
gccaugaggacagc

SEQ ID NO: 4030405 - RNA, 18 nt, Molluscum contagiosum virus
gccaugccaacgcaccgg

SEQ ID NO: 4030406 - RNA, 20 nt, Molluscum contagiosum virus
gccauggagcgcccgcugcu

SEQ ID NO: 4030407 - RNA, 19 nt, Molluscum contagiosum virus
gcccacggcggcacccgcc

SEQ ID NO: 4030408 - RNA, 15 nt, Molluscum contagiosum virus
gcccacgugccagcu

SEQ ID NO: 4030409 - RNA, 14 nt, Molluscum contagiosum virus
gcccagcacgcgcg

SEQ ID NO: 4030410 - RNA, 17 nt, Molluscum contagiosum virus
gcccagcguggccagcu

SEQ ID NO: 4030411 - RNA, 23 nt, Molluscum contagiosum virus
gcccagcucgaugggcuccaggu

SEQ ID NO: 4030412 - RNA, 18 nt, Molluscum contagiosum virus
gcccaggcgcgcgcucag

SEQ ID NO: 4030413 - RNA, 16 nt, Molluscum contagiosum virus
gcccaugcucgagccu

SEQ ID NO: 4030414 - RNA, 20 nt, Molluscum contagiosum virus
gccccacugugccagcagca

SEQ ID NO: 4030415 - RNA, 14 nt, Molluscum contagiosum virus
gcccccgugcugug

SEQ ID NO: 4030416 - RNA, 11 nt, Molluscum contagiosum virus
gccccgcgcgc

SEQ ID NO: 4030417 - RNA, 15 nt, Molluscum contagiosum virus
gccccgggcccgcau

SEQ ID NO: 4030418 - RNA, 22 nt, Molluscum contagiosum virus
gccccguaggcgggccugcgcc

SEQ ID NO: 4030419 - RNA, 12 nt, Molluscum contagiosum virus
gccccucgagca

SEQ ID NO: 4030420 - RNA, 12 nt, Molluscum contagiosum virus
gccccugggcuu

SEQ ID NO: 4030421 - RNA, 22 nt, Molluscum contagiosum virus
gcccgacacguugcacugcgcg

SEQ ID NO: 4030422 - RNA, 14 nt, Molluscum contagiosum virus
gagggcgaggccuu

SEQ ID NO: 4030423 - RNA, 15 nt, Molluscum contagiosum virus
gagggcgcgcuggag

SEQ ID NO: 4030424 - RNA, 13 nt, Molluscum contagiosum virus
gagggucgugcag

SEQ ID NO: 4030425 - RNA, 19 nt, Molluscum contagiosum virus
gagguaguuugcggagcag

SEQ ID NO: 4030426 - RNA, 19 nt, Molluscum contagiosum virus
gaggugggaaugcccgcaa

SEQ ID NO: 4030427 - RNA, 16 nt, Molluscum contagiosum virus
gaguacagccgcgcgg

SEQ ID NO: 4030428 - RNA, 13 nt, Molluscum contagiosum virus
gaguaccgcgcgc

SEQ ID NO: 4030429 - RNA, 23 nt, Molluscum contagiosum virus
gaguacgcucuccaugcgcgcgc

SEQ ID NO: 4030430 - RNA, 18 nt, Molluscum contagiosum virus
gagucacgcuugcagaca

SEQ ID NO: 4030431 - RNA, 16 nt, Molluscum contagiosum virus
gagugaaggguguggc

SEQ ID NO: 4030432 - RNA, 14 nt, Molluscum contagiosum virus
gagugcuggagcag

SEQ ID NO: 4030433 - RNA, 16 nt, Molluscum contagiosum virus
gagugcuggagcagac

SEQ ID NO: 4030434 - RNA, 20 nt, Molluscum contagiosum virus
gauacuuccgguguccccgg

SEQ ID NO: 4030435 - RNA, 14 nt, Molluscum contagiosum virus
gaucaacgcgcgcg

SEQ ID NO: 4030436 - RNA, 13 nt, Molluscum contagiosum virus
gaucaccgaggag

SEQ ID NO: 4030437 - RNA, 18 nt, Molluscum contagiosum virus
gaucacgccgugacggcc

SEQ ID NO: 4030438 - RNA, 16 nt, Molluscum contagiosum virus
gaucacggcgugcgcg

SEQ ID NO: 4030439 - RNA, 17 nt, Molluscum contagiosum virus
gaucagccccgcgccag

SEQ ID NO: 4030440 - RNA, 18 nt, Molluscum contagiosum virus
gaucccugcccgcgugag

SEQ ID NO: 4030441 - RNA, 21 nt, Molluscum contagiosum virus
gauccuccggaugaacagcuu

SEQ ID NO: 4030442 - RNA, 15 nt, Molluscum contagiosum virus
gaucgcgcucuuccc

SEQ ID NO: 4030443 - RNA, 11 nt, Molluscum contagiosum virus
gaucucugccc

SEQ ID NO: 4030444 - RNA, 16 nt, Molluscum contagiosum virus
gaucuugaugaccacg

SEQ ID NO: 4030445 - RNA, 22 nt, Molluscum contagiosum virus
gaucuuugcuguggaaaacugu

SEQ ID NO: 4030446 - RNA, 21 nt, Molluscum contagiosum virus
gaugaaaagcgugauguugag

SEQ ID NO: 4030447 - RNA, 17 nt, Molluscum contagiosum virus
gaugaguaccgcgggcg

SEQ ID NO: 4030448 - RNA, 15 nt, Molluscum contagiosum virus
gaugccugccagcag

SEQ ID NO: 4030449 - RNA, 18 nt, Molluscum contagiosum virus
gaugccuuucaggggucu

SEQ ID NO: 4030450 - RNA, 14 nt, Molluscum contagiosum virus
gaugcgccuuuucc

SEQ ID NO: 4030451 - RNA, 15 nt, Molluscum contagiosum virus
gaugcgcggacagag

SEQ ID NO: 4030452 - RNA, 20 nt, Molluscum contagiosum virus
gaugcgguccgacucggugc

SEQ ID NO: 4030453 - RNA, 15 nt, Molluscum contagiosum virus
gaugcucgcuugccg

SEQ ID NO: 4030454 - RNA, 20 nt, Molluscum contagiosum virus
gauggaccgguuccgugcgc

SEQ ID NO: 4030455 - RNA, 19 nt, Molluscum contagiosum virus
gauggcgcgcgugggcucg

SEQ ID NO: 4030456 - RNA, 12 nt, Molluscum contagiosum virus
gauggcgcugag

SEQ ID NO: 4030457 - RNA, 16 nt, Molluscum contagiosum virus
gauggcguccucgcuc

SEQ ID NO: 4030458 - RNA, 17 nt, Molluscum contagiosum virus
gaugguggcgcugcugc

SEQ ID NO: 4030459 - RNA, 14 nt, Molluscum contagiosum virus
gauguucucgccag

SEQ ID NO: 4030460 - RNA, 21 nt, Molluscum contagiosum virus
gauuagcaacugccccaugcc

SEQ ID NO: 4030461 - RNA, 20 nt, Molluscum contagiosum virus
gauuccgcuguacgugcugc

SEQ ID NO: 4030462 - RNA, 17 nt, Molluscum contagiosum virus
gauuucgcgcagcaggc

SEQ ID NO: 4030463 - RNA, 18 nt, Molluscum contagiosum virus
gauuugauggcugcucau

SEQ ID NO: 4030464 - RNA, 14 nt, Molluscum contagiosum virus
gcaaaagcgcucgc

SEQ ID NO: 4030465 - RNA, 18 nt, Molluscum contagiosum virus
gcaaacaagcagucucau

SEQ ID NO: 4030466 - RNA, 21 nt, Molluscum contagiosum virus
gcaaagaaugcaugcggagcu

SEQ ID NO: 4030467 - RNA, 15 nt, Molluscum contagiosum virus
gcaaagccugcugcg

SEQ ID NO: 4030468 - RNA, 18 nt, Molluscum contagiosum virus
gcaaagccugcugcgcgc

SEQ ID NO: 4030469 - RNA, 20 nt, Molluscum contagiosum virus
gcaaagccugcugcgcgcgc

SEQ ID NO: 4030470 - RNA, 18 nt, Molluscum contagiosum virus
gcaaagcggggcgcgcgc

SEQ ID NO: 4030471 - RNA, 22 nt, Molluscum contagiosum virus
gcaaaggaguuggcgcgcaagc

SEQ ID NO: 4030472 - RNA, 19 nt, Molluscum contagiosum virus
gcaaaguucucgcguucgc

SEQ ID NO: 4030473 - RNA, 20 nt, Molluscum contagiosum virus
gcaaaugccgagcgcacgcc

SEQ ID NO: 4030474 - RNA, 13 nt, Molluscum contagiosum virus
gcaaaugcgcugc

SEQ ID NO: 4030475 - RNA, 18 nt, Molluscum contagiosum virus
gcaacaaggaaaggcacc

SEQ ID NO: 4030476 - RNA, 13 nt, Molluscum contagiosum virus
gcaacaggggccg

SEQ ID NO: 4030477 - RNA, 14 nt, Molluscum contagiosum virus
gcaaccagcugcug

SEQ ID NO: 4030478 - RNA, 22 nt, Molluscum contagiosum virus
gcaaccucgggaagcccucagg

SEQ ID NO: 4030479 - RNA, 19 nt, Molluscum contagiosum virus
gcaacgacaaggaaaggca

SEQ ID NO: 4030480 - RNA, 18 nt, Molluscum contagiosum virus
gcaacgagcacgugugcg

SEQ ID NO: 4030481 - RNA, 20 nt, Molluscum contagiosum virus
gcaacgagcagcccgugcgc

SEQ ID NO: 4030482 - RNA, 23 nt, Molluscum contagiosum virus
gcaacgcgacgauggccacgcag

SEQ ID NO: 4030483 - RNA, 18 nt, Molluscum contagiosum virus
gcaacgcgcgcgcgcugg

SEQ ID NO: 4030484 - RNA, 17 nt, Molluscum contagiosum virus
gcaacgcgggccaggca

SEQ ID NO: 4030485 - RNA, 16 nt, Molluscum contagiosum virus
gcaacggcggcgcaag

SEQ ID NO: 4030486 - RNA, 16 nt, Molluscum contagiosum virus
gcaacgucgcacuggc

SEQ ID NO: 4030487 - RNA, 18 nt, Molluscum contagiosum virus
gcaacgugcugcgccgcc

SEQ ID NO: 4030488 - RNA, 21 nt, Molluscum contagiosum virus
gcaagaagaucgcggcgccgc

SEQ ID NO: 4030489 - RNA, 17 nt, Molluscum contagiosum virus
gcaagaagcgaaacacg

SEQ ID NO: 4030490 - RNA, 13 nt, Molluscum contagiosum virus
gcaagacccagca

SEQ ID NO: 4030491 - RNA, 19 nt, Molluscum contagiosum virus
gcaagacccagcaaggccc

SEQ ID NO: 4030492 - RNA, 18 nt, Molluscum contagiosum virus
gcaagagccgccggggcc

SEQ ID NO: 4030493 - RNA, 21 nt, Molluscum contagiosum virus
gcaagaugacgacgggagagg

SEQ ID NO: 4030494 - RNA, 16 nt, Molluscum contagiosum virus
gcaagcagcgcgcgca

SEQ ID NO: 4030495 - RNA, 16 nt, Molluscum contagiosum virus
gcaagccagcccgcug

SEQ ID NO: 4030496 - RNA, 21 nt, Molluscum contagiosum virus
gcaagcccggaagcuugcuca

SEQ ID NO: 4030497 - RNA, 20 nt, Molluscum contagiosum virus
gcaagcgcguucgcgcgugc

SEQ ID NO: 4030498 - RNA, 15 nt, Molluscum contagiosum virus
gcaagcgggccagua

SEQ ID NO: 4030499 - RNA, 17 nt, Molluscum contagiosum virus
gcaagcguacgcgucgc

SEQ ID NO: 4030500 - RNA, 18 nt, Molluscum contagiosum virus
gcaagcugagcgcgcugc

SEQ ID NO: 4030501 - RNA, 17 nt, Molluscum contagiosum virus
gcaagcuuugugcucgc

SEQ ID NO: 4030502 - RNA, 15 nt, Molluscum contagiosum virus
gcaaggcccacuucc

SEQ ID NO: 4030503 - RNA, 12 nt, Molluscum contagiosum virus
gcaaggccuggc

SEQ ID NO: 4030504 - RNA, 17 nt, Molluscum contagiosum virus
gcaaggcgcgcgcuggc

SEQ ID NO: 4030505 - RNA, 16 nt, Molluscum contagiosum virus
gcaagguuuacgccgu

SEQ ID NO: 4030506 - RNA, 17 nt, Molluscum contagiosum virus
gcaaguaccagccgcug

SEQ ID NO: 4030507 - RNA, 19 nt, Molluscum contagiosum virus
gcaaguccagcgcgcucga

SEQ ID NO: 4030508 - RNA, 21 nt, Molluscum contagiosum virus
gcaagucugcgcaggacauga

SEQ ID NO: 4030509 - RNA, 14 nt, Molluscum contagiosum virus
gcaaguucgcugcu

SEQ ID NO: 4030510 - RNA, 14 nt, Molluscum contagiosum virus
gcaaugcgugcgug

SEQ ID NO: 4030511 - RNA, 15 nt, Molluscum contagiosum virus
gcaauggcgcgcagc

SEQ ID NO: 4030512 - RNA, 16 nt, Molluscum contagiosum virus
gcaauggcgcgcagcu

SEQ ID NO: 4030513 - RNA, 21 nt, Molluscum contagiosum virus
gcaauggcggccugcccugcu

SEQ ID NO: 4030514 - RNA, 17 nt, Molluscum contagiosum virus
gcaauugcugggcacaa

SEQ ID NO: 4030515 - RNA, 15 nt, Molluscum contagiosum virus
gcacaaacacgcgcg

SEQ ID NO: 4030516 - RNA, 16 nt, Molluscum contagiosum virus
gcacaaacacgcgcgc

SEQ ID NO: 4030517 - RNA, 14 nt, Molluscum contagiosum virus
gcacaaacgcgacu

SEQ ID NO: 4030518 - RNA, 20 nt, Molluscum contagiosum virus
gcacaagccguccgccucga

SEQ ID NO: 4030519 - RNA, 23 nt, Molluscum contagiosum virus
gcacaagccguccgccucgagca

SEQ ID NO: 4030520 - RNA, 13 nt, Molluscum contagiosum virus
gcacaagggcagc

SEQ ID NO: 4030521 - RNA, 15 nt, Molluscum contagiosum virus
gcacacaccgcgagc

SEQ ID NO: 4030522 - RNA, 10 nt, Molluscum contagiosum virus
gcacaccccg

SEQ ID NO: 4030523 - RNA, 22 nt, Molluscum contagiosum virus
gcacacgacgacggcugcucgc

SEQ ID NO: 4030524 - RNA, 18 nt, Molluscum contagiosum virus
gcacacgagugcccgcgc

SEQ ID NO: 4030525 - RNA, 14 nt, Molluscum contagiosum virus
gcacacgcgcgcgc

SEQ ID NO: 4030526 - RNA, 20 nt, Molluscum contagiosum virus
gcacacgcgcgcgugcugcu

SEQ ID NO: 4030527 - RNA, 17 nt, Molluscum contagiosum virus
gcacacgcgucgcgcag

SEQ ID NO: 4030528 - RNA, 16 nt, Molluscum contagiosum virus
gcacagaaagccaacg

SEQ ID NO: 4030529 - RNA, 19 nt, Molluscum contagiosum virus
gcacagacggcgcgcucgg

SEQ ID NO: 4030530 - RNA, 21 nt, Molluscum contagiosum virus
gcacagccccugcugcucgcg

SEQ ID NO: 4030531 - RNA, 19 nt, Molluscum contagiosum virus
gcacagcgcgcggaagccc

SEQ ID NO: 4030532 - RNA, 18 nt, Molluscum contagiosum virus
gcacagggauucgccgcg

SEQ ID NO: 4030533 - RNA, 18 nt, Molluscum contagiosum virus
gcacaguccagcccgcgg

SEQ ID NO: 4030534 - RNA, 11 nt, Molluscum contagiosum virus
gcacaguucac

SEQ ID NO: 4030535 - RNA, 20 nt, Molluscum contagiosum virus
gcacaguucacggcgcuugc

SEQ ID NO: 4030536 - RNA, 17 nt, Molluscum contagiosum virus
gcacaucggcacugcuc

SEQ ID NO: 4030537 - RNA, 16 nt, Molluscum contagiosum virus
gcaccagguagagcaa

SEQ ID NO: 4030538 - RNA, 17 nt, Molluscum contagiosum virus
gcacccaccaggaacga

SEQ ID NO: 4030539 - RNA, 21 nt, Molluscum contagiosum virus
gcaccccgaaggaaaggcccc

SEQ ID NO: 4030540 - RNA, 13 nt, Molluscum contagiosum virus
gcacccgagggcg

SEQ ID NO: 4030541 - RNA, 16 nt, Molluscum contagiosum virus
gcacccgcaacaagga

SEQ ID NO: 4030542 - RNA, 11 nt, Molluscum contagiosum virus
gcacccgcagg

SEQ ID NO: 4030543 - RNA, 16 nt, Molluscum contagiosum virus
gcaccgccguguugcg

SEQ ID NO: 4030544 - RNA, 21 nt, Molluscum contagiosum virus
gcaccgcgacaggggccacaa

SEQ ID NO: 4030545 - RNA, 12 nt, Molluscum contagiosum virus
gcaccgcggcga

SEQ ID NO: 4030546 - RNA, 22 nt, Molluscum contagiosum virus
gcaccggcaacagcgcgacgcc

SEQ ID NO: 4030547 - RNA, 15 nt, Molluscum contagiosum virus
gcaccggcagcgcga

SEQ ID NO: 4030548 - RNA, 19 nt, Molluscum contagiosum virus
gcaccguaccgcgcccgcc

SEQ ID NO: 4030549 - RNA, 23 nt, Molluscum contagiosum virus
gcaccuacgcgccgacaugcgca

SEQ ID NO: 4030550 - RNA, 13 nt, Molluscum contagiosum virus
gcaccugcaggaa

SEQ ID NO: 4030551 - RNA, 15 nt, Molluscum contagiosum virus
gcaccugcaggaaag

SEQ ID NO: 4030552 - RNA, 15 nt, Molluscum contagiosum virus
gcaccugcggcugcg

SEQ ID NO: 4030553 - RNA, 22 nt, Molluscum contagiosum virus
gcaccugcuagagcauauccug

SEQ ID NO: 4030554 - RNA, 23 nt, Molluscum contagiosum virus
gcaccuuuggugcagaucucgcg

SEQ ID NO: 4030555 - RNA, 15 nt, Molluscum contagiosum virus
gcacgaacggacgcc

SEQ ID NO: 4030556 - RNA, 13 nt, Molluscum contagiosum virus
gcacgaaggacgc

SEQ ID NO: 4030557 - RNA, 20 nt, Molluscum contagiosum virus
gcacgagcaguccgccucga

SEQ ID NO: 4030558 - RNA, 13 nt, Molluscum contagiosum virus
gcacgagcgcggg

SEQ ID NO: 4030559 - RNA, 17 nt, Molluscum contagiosum virus
gcacgagcugcugcgcg

SEQ ID NO: 4030560 - RNA, 13 nt, Molluscum contagiosum virus
gcacgaggagccc

SEQ ID NO: 4030561 - RNA, 23 nt, Molluscum contagiosum virus
gcacgaggcagccgcggcgcccg

SEQ ID NO: 4030562 - RNA, 15 nt, Molluscum contagiosum virus
gcacgagggcacagg

SEQ ID NO: 4030563 - RNA, 23 nt, Molluscum contagiosum virus
gcacgagggcacaggguuccgcg

SEQ ID NO: 4030564 - RNA, 18 nt, Molluscum contagiosum virus
gcacgauggggcgcucgg

SEQ ID NO: 4030565 - RNA, 18 nt, Molluscum contagiosum virus
gcacgaugucggaaccca

SEQ ID NO: 4030566 - RNA, 24 nt, Molluscum contagiosum virus
gcacgcacacgacgacggcugcuc

SEQ ID NO: 4030567 - RNA, 22 nt, Molluscum contagiosum virus
gcacgcacggcccgggugcgcg

SEQ ID NO: 4030568 - RNA, 17 nt, Molluscum contagiosum virus
gcacgcauguacgcggc

SEQ ID NO: 4030569 - RNA, 13 nt, Molluscum contagiosum virus
gcacgccagcagc

SEQ ID NO: 4030570 - RNA, 14 nt, Molluscum contagiosum virus
gcacgccagccugg

SEQ ID NO: 4030571 - RNA, 15 nt, Molluscum contagiosum virus
gcacgccagccugga

SEQ ID NO: 4030572 - RNA, 18 nt, Molluscum contagiosum virus
gcacgccagguguuccug

SEQ ID NO: 4030573 - RNA, 22 nt, Molluscum contagiosum virus
gcacgccagguguuccugccgg

SEQ ID NO: 4030574 - RNA, 14 nt, Molluscum contagiosum virus
gcacgccuccaaga

SEQ ID NO: 4030575 - RNA, 21 nt, Molluscum contagiosum virus
gcacgcgcacagucuugcgca

SEQ ID NO: 4030576 - RNA, 16 nt, Molluscum contagiosum virus
gcacgcgcacgcgcac

SEQ ID NO: 4030577 - RNA, 18 nt, Molluscum contagiosum virus
gcacgcgcacgcucucgc

SEQ ID NO: 4030578 - RNA, 15 nt, Molluscum contagiosum virus
gcacgcgcgcagacg

SEQ ID NO: 4030579 - RNA, 14 nt, Molluscum contagiosum virus
gcacgcgggcgccg

SEQ ID NO: 4030580 - RNA, 18 nt, Molluscum contagiosum virus
gcacgcuagcgagcgccc

SEQ ID NO: 4030581 - RNA, 21 nt, Molluscum contagiosum virus
gcacgcucauacuccugcugg

SEQ ID NO: 4030582 - RNA, 16 nt, Molluscum contagiosum virus
gcacgcugcgcacggg

SEQ ID NO: 4030583 - RNA, 16 nt, Molluscum contagiosum virus
gcacgcugcguuucca

SEQ ID NO: 4030584 - RNA, 23 nt, Molluscum contagiosum virus
gcacgcugcuguccuucaagaac

SEQ ID NO: 4030585 - RNA, 18 nt, Molluscum contagiosum virus
gcacgcuguccaggcgcu

SEQ ID NO: 4030586 - RNA, 21 nt, Molluscum contagiosum virus
gcacgcuugccuuggcgcccg

SEQ ID NO: 4030587 - RNA, 15 nt, Molluscum contagiosum virus
gcacgcuuguccgcg

SEQ ID NO: 4030588 - RNA, 22 nt, Molluscum contagiosum virus
gcacggcacgugcguacgcggc

SEQ ID NO: 4030589 - RNA, 18 nt, Molluscum contagiosum virus
gcacgggcacgcgcgcgc

SEQ ID NO: 4030590 - RNA, 22 nt, Molluscum contagiosum virus
gcacggugaucaugagcgugga

SEQ ID NO: 4030591 - RNA, 14 nt, Molluscum contagiosum virus
gcacggugugcuac

SEQ ID NO: 4030592 - RNA, 19 nt, Molluscum contagiosum virus
gcacgucuucgccgugugc

SEQ ID NO: 4030593 - RNA, 23 nt, Molluscum contagiosum virus
gcacgugccccgcgcgugcaguu

SEQ ID NO: 4030594 - RNA, 18 nt, Molluscum contagiosum virus
gcacgugcugcagcugcg

SEQ ID NO: 4030595 - RNA, 19 nt, Molluscum contagiosum virus
gcacuaccgcaaccagcug

SEQ ID NO: 4030596 - RNA, 19 nt, Molluscum contagiosum virus
gcacuacucgucuugcgcg

SEQ ID NO: 4030597 - RNA, 17 nt, Molluscum contagiosum virus
gcacugauguuuucauu

SEQ ID NO: 4030598 - RNA, 17 nt, Molluscum contagiosum virus
gcacuggccugcaaacg

SEQ ID NO: 4030599 - RNA, 14 nt, Molluscum contagiosum virus
gcacuggcgcgcac

SEQ ID NO: 4030600 - RNA, 15 nt, Molluscum contagiosum virus
gcacuuuggccucgc

SEQ ID NO: 4030601 - RNA, 17 nt, Molluscum contagiosum virus
gcagaaggaagggcccg

SEQ ID NO: 4030602 - RNA, 16 nt, Molluscum contagiosum virus
gcagacaaggagaugg

SEQ ID NO: 4030603 - RNA, 22 nt, Molluscum contagiosum virus
gcagacgacucgcugccagaga

SEQ ID NO: 4030604 - RNA, 21 nt, Molluscum contagiosum virus
gcagacgccgagcgggcaaug

SEQ ID NO: 4030605 - RNA, 17 nt, Molluscum contagiosum virus
gcagagcgagggcgacg

SEQ ID NO: 4030606 - RNA, 13 nt, Molluscum contagiosum virus
gcagagcugcccg

SEQ ID NO: 4030607 - RNA, 21 nt, Molluscum contagiosum virus
gcagagguaaucccgagcuuc

SEQ ID NO: 4030608 - RNA, 13 nt, Molluscum contagiosum virus
gcagcaaacugug

SEQ ID NO: 4030609 - RNA, 20 nt, Molluscum contagiosum virus
gcagcaaacugugcuccuga

SEQ ID NO: 4030610 - RNA, 20 nt, Molluscum contagiosum virus
gcagcaaagggcggccgcag

SEQ ID NO: 4030611 - RNA, 20 nt, Molluscum contagiosum virus
gcagcacaugcaggccgaga

SEQ ID NO: 4030612 - RNA, 16 nt, Molluscum contagiosum virus
gcagcacgcgaugagc

SEQ ID NO: 4030613 - RNA, 20 nt, Molluscum contagiosum virus
gcagcagaggaguagcgugc

SEQ ID NO: 4030614 - RNA, 15 nt, Molluscum contagiosum virus
gcagccacggccgcg

SEQ ID NO: 4030615 - RNA, 20 nt, Molluscum contagiosum virus
gcagccccgacgccagcgcg

SEQ ID NO: 4030616 - RNA, 22 nt, Molluscum contagiosum virus
gcagccccguaggcgggccugc

SEQ ID NO: 4030617 - RNA, 20 nt, Molluscum contagiosum virus
gcagccgcggcgcccggugc

SEQ ID NO: 4030618 - RNA, 23 nt, Molluscum contagiosum virus
gcagccgcggcgcccggugccag

SEQ ID NO: 4030619 - RNA, 21 nt, Molluscum contagiosum virus
gcagccgcguagcuagcucug

SEQ ID NO: 4030620 - RNA, 16 nt, Molluscum contagiosum virus
gcagccucaaccugaa

SEQ ID NO: 4030621 - RNA, 22 nt, Molluscum contagiosum virus
gcagccuccgguuuucgcggga

SEQ ID NO: 4030622 - RNA, 18 nt, Molluscum contagiosum virus
gcagcgcccggugcggcg

SEQ ID NO: 4030623 - RNA, 20 nt, Molluscum contagiosum virus
gcagcgccgcgcgcgcgcgu

SEQ ID NO: 4030624 - RNA, 23 nt, Molluscum contagiosum virus
gcagcgccuguaccccgaacggc

SEQ ID NO: 4030625 - RNA, 16 nt, Molluscum contagiosum virus
gcagcgcuagccccag

SEQ ID NO: 4030626 - RNA, 15 nt, Molluscum contagiosum virus
gcagcgcuggagcug

SEQ ID NO: 4030627 - RNA, 18 nt, Molluscum contagiosum virus
gcagcgcuugcgcgccaa

SEQ ID NO: 4030628 - RNA, 19 nt, Molluscum contagiosum virus
gcagcggcgccacgagcgc

SEQ ID NO: 4030629 - RNA, 20 nt, Molluscum contagiosum virus
cugcugcccccgccgcggcg

SEQ ID NO: 4030630 - RNA, 17 nt, Molluscum contagiosum virus
cugcugcggcugcugga

SEQ ID NO: 4030631 - RNA, 20 nt, Molluscum contagiosum virus
cugcugcgguaucuacacuc

SEQ ID NO: 4030632 - RNA, 22 nt, Molluscum contagiosum virus
cugcugcugcaaagcgcggccg

SEQ ID NO: 4030633 - RNA, 18 nt, Molluscum contagiosum virus
cugcuggcagacacagac

SEQ ID NO: 4030634 - RNA, 18 nt, Molluscum contagiosum virus
cugcugggcguggcgcac

SEQ ID NO: 4030635 - RNA, 20 nt, Molluscum contagiosum virus
cugcuggugcucgccugcau

SEQ ID NO: 4030636 - RNA, 22 nt, Molluscum contagiosum virus
cugcugguggugcuggagcggc

SEQ ID NO: 4030637 - RNA, 16 nt, Molluscum contagiosum virus
cugcugguucugcucg

SEQ ID NO: 4030638 - RNA, 20 nt, Molluscum contagiosum virus
cugcuguacucgccguucca

SEQ ID NO: 4030639 - RNA, 17 nt, Molluscum contagiosum virus
cugcuucacgcugcucg

SEQ ID NO: 4030640 - RNA, 19 nt, Molluscum contagiosum virus
cugcuuccgcaccuggucg

SEQ ID NO: 4030641 - RNA, 13 nt, Molluscum contagiosum virus
cugcuuccuccuc

SEQ ID NO: 4030642 - RNA, 15 nt, Molluscum contagiosum virus
cugcuugcggcacac

SEQ ID NO: 4030643 - RNA, 16 nt, Molluscum contagiosum virus
cugcuuugucugcagg

SEQ ID NO: 4030644 - RNA, 17 nt, Molluscum contagiosum virus
cuggaagaacaggccgc

SEQ ID NO: 4030645 - RNA, 19 nt, Molluscum contagiosum virus
cuggacgccguugcgcgug

SEQ ID NO: 4030646 - RNA, 15 nt, Molluscum contagiosum virus
cuggacgggcacgag

SEQ ID NO: 4030647 - RNA, 20 nt, Molluscum contagiosum virus
cuggacgggcacgagcacgu

SEQ ID NO: 4030648 - RNA, 15 nt, Molluscum contagiosum virus
cuggacugagccgca

SEQ ID NO: 4030649 - RNA, 15 nt, Molluscum contagiosum virus
cuggacugugcuucc

SEQ ID NO: 4030650 - RNA, 22 nt, Molluscum contagiosum virus
cuggagcaagcgcguucgcgcg

SEQ ID NO: 4030651 - RNA, 20 nt, Molluscum contagiosum virus
cuggagcgagugcgcgugcg

SEQ ID NO: 4030652 - RNA, 13 nt, Molluscum contagiosum virus
cuggagcgcaaau

SEQ ID NO: 4030653 - RNA, 17 nt, Molluscum contagiosum virus
cuggagcuggcugggca

SEQ ID NO: 4030654 - RNA, 19 nt, Molluscum contagiosum virus
cuggaggcaaucuguccag

SEQ ID NO: 4030655 - RNA, 17 nt, Molluscum contagiosum virus
cuggagggcacgcugca

SEQ ID NO: 4030656 - RNA, 17 nt, Molluscum contagiosum virus
cuggagguucguccgcu

SEQ ID NO: 4030657 - RNA, 19 nt, Molluscum contagiosum virus
cuggaguaccggcucaaga

SEQ ID NO: 4030658 - RNA, 21 nt, Molluscum contagiosum virus
cuggaguacuucaagcacgag

SEQ ID NO: 4030659 - RNA, 23 nt, Molluscum contagiosum virus
cuggaguuuaaugacgcgcacgc

SEQ ID NO: 4030660 - RNA, 17 nt, Molluscum contagiosum virus
cuggcacuugcgcagcc

SEQ ID NO: 4030661 - RNA, 18 nt, Molluscum contagiosum virus
cuggccaucgagcuuccc

SEQ ID NO: 4030662 - RNA, 14 nt, Molluscum contagiosum virus
cuggcccugcuagu

SEQ ID NO: 4030663 - RNA, 16 nt, Molluscum contagiosum virus
cuggcgcgcgccgagc

SEQ ID NO: 4030664 - RNA, 16 nt, Molluscum contagiosum virus
cuggcgcgcgcgcugc

SEQ ID NO: 4030665 - RNA, 17 nt, Molluscum contagiosum virus
cuggcgcguccguucac

SEQ ID NO: 4030666 - RNA, 22 nt, Molluscum contagiosum virus
cuggcuccugugucgcgcgagc

SEQ ID NO: 4030667 - RNA, 14 nt, Molluscum contagiosum virus
cugggaaagggcug

SEQ ID NO: 4030668 - RNA, 20 nt, Molluscum contagiosum virus
cugggaacaccacacgcgcg

SEQ ID NO: 4030669 - RNA, 13 nt, Molluscum contagiosum virus
cugggcaggccgc

SEQ ID NO: 4030670 - RNA, 15 nt, Molluscum contagiosum virus
cugggcgcgccgcgc

SEQ ID NO: 4030671 - RNA, 16 nt, Molluscum contagiosum virus
cugggcgguugccugc

SEQ ID NO: 4030672 - RNA, 15 nt, Molluscum contagiosum virus
cugguaguccugcua

SEQ ID NO: 4030673 - RNA, 19 nt, Molluscum contagiosum virus
cuggugcucgccugcaucu

SEQ ID NO: 4030674 - RNA, 17 nt, Molluscum contagiosum virus
cuggugcugcgcgacau

SEQ ID NO: 4030675 - RNA, 21 nt, Molluscum contagiosum virus
cuggugggcgugcggcgcacc

SEQ ID NO: 4030676 - RNA, 23 nt, Molluscum contagiosum virus
cuggugguaauggguaugggcuu

SEQ ID NO: 4030677 - RNA, 20 nt, Molluscum contagiosum virus
cugguggugcuggagcggca

SEQ ID NO: 4030678 - RNA, 15 nt, Molluscum contagiosum virus
cugguuccucuccuc

SEQ ID NO: 4030679 - RNA, 17 nt, Molluscum contagiosum virus
cugguuccucuccucau

SEQ ID NO: 4030680 - RNA, 17 nt, Molluscum contagiosum virus
cuguaaauggaccacaa

SEQ ID NO: 4030681 - RNA, 18 nt, Molluscum contagiosum virus
cuguaccugcgacagcug

SEQ ID NO: 4030682 - RNA, 15 nt, Molluscum contagiosum virus
cuguacgugcugccc

SEQ ID NO: 4030683 - RNA, 17 nt, Molluscum contagiosum virus
cuguaggggagggcggc

SEQ ID NO: 4030684 - RNA, 18 nt, Molluscum contagiosum virus
cuguccgacgucacgcug

SEQ ID NO: 4030685 - RNA, 12 nt, Molluscum contagiosum virus
cuguccgcggac

SEQ ID NO: 4030686 - RNA, 16 nt, Molluscum contagiosum virus
cuguccgcggaugcag

SEQ ID NO: 4030687 - RNA, 13 nt, Molluscum contagiosum virus
cuguccgugggcg

SEQ ID NO: 4030688 - RNA, 15 nt, Molluscum contagiosum virus
cugucgccgcgggcu

SEQ ID NO: 4030689 - RNA, 15 nt, Molluscum contagiosum virus
cugucgcgcagcugc

SEQ ID NO: 4030690 - RNA, 17 nt, Molluscum contagiosum virus
cugucgcgcagcugcgc

SEQ ID NO: 4030691 - RNA, 12 nt, Molluscum contagiosum virus
cugugagcgcgc

SEQ ID NO: 4030692 - RNA, 15 nt, Molluscum contagiosum virus
cugugagcgcgccgc

SEQ ID NO: 4030693 - RNA, 16 nt, Molluscum contagiosum virus
cugugcgcgacgccug

SEQ ID NO: 4030694 - RNA, 15 nt, Molluscum contagiosum virus
cugugcggagggugc

SEQ ID NO: 4030695 - RNA, 19 nt, Molluscum contagiosum virus
cugugcggagggugcacgc

SEQ ID NO: 4030696 - RNA, 21 nt, Molluscum contagiosum virus
cugugcuacgcgagcacugcg

SEQ ID NO: 4030697 - RNA, 15 nt, Molluscum contagiosum virus
cugugcuucccgaaa

SEQ ID NO: 4030698 - RNA, 13 nt, Molluscum contagiosum virus
cuguggcgcacac

SEQ ID NO: 4030699 - RNA, 15 nt, Molluscum contagiosum virus
cuguucggcaugcag

SEQ ID NO: 4030700 - RNA, 17 nt, Molluscum contagiosum virus
cuguuugccacggccgc

SEQ ID NO: 4030701 - RNA, 20 nt, Molluscum contagiosum virus
cuuaacucagcgggcagaca

SEQ ID NO: 4030702 - RNA, 14 nt, Molluscum contagiosum virus
cuuagccacugugc

SEQ ID NO: 4030703 - RNA, 15 nt, Molluscum contagiosum virus
cuuagccacugugcu

SEQ ID NO: 4030704 - RNA, 20 nt, Molluscum contagiosum virus
cuuagcuuccgucugcugcu

SEQ ID NO: 4030705 - RNA, 16 nt, Molluscum contagiosum virus
cuucaaguuccuggag

SEQ ID NO: 4030706 - RNA, 21 nt, Molluscum contagiosum virus
cuuccaggcgccgcaccucac

SEQ ID NO: 4030707 - RNA, 19 nt, Molluscum contagiosum virus
cuuccccaagaccugcuuc

SEQ ID NO: 4030708 - RNA, 21 nt, Molluscum contagiosum virus
cuuccccguccuugcucuggc

SEQ ID NO: 4030709 - RNA, 14 nt, Molluscum contagiosum virus
cuucccgaggacgc

SEQ ID NO: 4030710 - RNA, 14 nt, Molluscum contagiosum virus
cuuccgcgacgagc

SEQ ID NO: 4030711 - RNA, 21 nt, Molluscum contagiosum virus
cuuccggcccgacacacuccu

SEQ ID NO: 4030712 - RNA, 17 nt, Molluscum contagiosum virus
cuuccggugccggccgc

SEQ ID NO: 4030713 - RNA, 23 nt, Molluscum contagiosum virus
cuuccuggaguaccggcucaaga

SEQ ID NO: 4030714 - RNA, 14 nt, Molluscum contagiosum virus
cuucgaagaggucu

SEQ ID NO: 4030715 - RNA, 19 nt, Molluscum contagiosum virus
cuucgaggaacuugcacgc

SEQ ID NO: 4030716 - RNA, 21 nt, Molluscum contagiosum virus
cuucgcacgcaaaugcgcgcg

SEQ ID NO: 4030717 - RNA, 22 nt, Molluscum contagiosum virus
cuucgcagagaccgucaaccug

SEQ ID NO: 4030718 - RNA, 22 nt, Molluscum contagiosum virus
cuucgcgaaggcaaccgcgacg

SEQ ID NO: 4030719 - RNA, 21 nt, Molluscum contagiosum virus
cuucggcgcaacgcuggccgc

SEQ ID NO: 4030720 - RNA, 15 nt, Molluscum contagiosum virus
cuucguggagcccgu

SEQ ID NO: 4030721 - RNA, 21 nt, Molluscum contagiosum virus
cuucguggccaaagucuuccu

SEQ ID NO: 4030722 - RNA, 20 nt, Molluscum contagiosum virus
cuucguggccuaccugcagg

SEQ ID NO: 4030723 - RNA, 21 nt, Molluscum contagiosum virus
cuucucgcagcguuccaggaa

SEQ ID NO: 4030724 - RNA, 14 nt, Molluscum contagiosum virus
cuucugcaagcugc

SEQ ID NO: 4030725 - RNA, 13 nt, Molluscum contagiosum virus
cuucugccugccc

SEQ ID NO: 4030726 - RNA, 18 nt, Molluscum contagiosum virus
cuucuucgcgagccacuc

SEQ ID NO: 4030727 - RNA, 22 nt, Molluscum contagiosum virus
cuugagcacacgguagagcugc

SEQ ID NO: 4030728 - RNA, 14 nt, Molluscum contagiosum virus
cuugagcgcgccgc

SEQ ID NO: 4030729 - RNA, 19 nt, Molluscum contagiosum virus
cuugaucgacauggagcgc

SEQ ID NO: 4030730 - RNA, 14 nt, Molluscum contagiosum virus
cuugccccucgucc

SEQ ID NO: 4030731 - RNA, 19 nt, Molluscum contagiosum virus
cuugccgcuugagcagcaa

SEQ ID NO: 4030732 - RNA, 21 nt, Molluscum contagiosum virus
cuugcgagcgcugccugugcu

SEQ ID NO: 4030733 - RNA, 15 nt, Molluscum contagiosum virus
cugaagaaggagccc

SEQ ID NO: 4030734 - RNA, 19 nt, Molluscum contagiosum virus
cugacccucgcggcucugg

SEQ ID NO: 4030735 - RNA, 14 nt, Molluscum contagiosum virus
cugacgcgcagugc

SEQ ID NO: 4030736 - RNA, 13 nt, Molluscum contagiosum virus
cugacggcagcaa

SEQ ID NO: 4030737 - RNA, 15 nt, Molluscum contagiosum virus
cugacggcagcaagc

SEQ ID NO: 4030738 - RNA, 13 nt, Molluscum contagiosum virus
cugacggcgcugc

SEQ ID NO: 4030739 - RNA, 21 nt, Molluscum contagiosum virus
cugacggucguccuggagccu

SEQ ID NO: 4030740 - RNA, 13 nt, Molluscum contagiosum virus
cugacugcugccc

SEQ ID NO: 4030741 - RNA, 21 nt, Molluscum contagiosum virus
cugagauauacaaagaagcgc

SEQ ID NO: 4030742 - RNA, 21 nt, Molluscum contagiosum virus
cugagauccacgcgugcugcg

SEQ ID NO: 4030743 - RNA, 13 nt, Molluscum contagiosum virus
cugagcgcggagc

SEQ ID NO: 4030744 - RNA, 17 nt, Molluscum contagiosum virus
cugagcgcggagcuggc

SEQ ID NO: 4030745 - RNA, 23 nt, Molluscum contagiosum virus
cugagcgggguacaggcgcggca

SEQ ID NO: 4030746 - RNA, 17 nt, Molluscum contagiosum virus
cugaugcccaggcgcgu

SEQ ID NO: 4030747 - RNA, 14 nt, Molluscum contagiosum virus
cugauuacauccug

SEQ ID NO: 4030748 - RNA, 20 nt, Molluscum contagiosum virus
cugcaagaggcgcugucgcg

SEQ ID NO: 4030749 - RNA, 13 nt, Molluscum contagiosum virus
cugcaagccagcc

SEQ ID NO: 4030750 - RNA, 16 nt, Molluscum contagiosum virus
cugcaccgagugcugg

SEQ ID NO: 4030751 - RNA, 13 nt, Molluscum contagiosum virus
cugcacgagcugc

SEQ ID NO: 4030752 - RNA, 23 nt, Molluscum contagiosum virus
cugcacgcucuucgagacgcugc

SEQ ID NO: 4030753 - RNA, 22 nt, Molluscum contagiosum virus
cugcacgggcacgccgugggca

SEQ ID NO: 4030754 - RNA, 21 nt, Molluscum contagiosum virus
cugcacgugcagcggcgccac

SEQ ID NO: 4030755 - RNA, 13 nt, Molluscum contagiosum virus
cugcagcagcccc

SEQ ID NO: 4030756 - RNA, 16 nt, Molluscum contagiosum virus
cugcagcagcuccagc

SEQ ID NO: 4030757 - RNA, 20 nt, Molluscum contagiosum virus
cugcagcagcuccagcaugg

SEQ ID NO: 4030758 - RNA, 16 nt, Molluscum contagiosum virus
cugcagcccgacgcgg

SEQ ID NO: 4030759 - RNA, 21 nt, Molluscum contagiosum virus
cugcagcccgacgcgggcgcg

SEQ ID NO: 4030760 - RNA, 16 nt, Molluscum contagiosum virus
cugcagcccuuccacg

SEQ ID NO: 4030761 - RNA, 23 nt, Molluscum contagiosum virus
cugcagcgccgcgcgguugagcu

SEQ ID NO: 4030762 - RNA, 16 nt, Molluscum contagiosum virus
cugcagcugcgcgagc

SEQ ID NO: 4030763 - RNA, 17 nt, Molluscum contagiosum virus
cugcaggaccugcuggu

SEQ ID NO: 4030764 - RNA, 19 nt, Molluscum contagiosum virus
cugcaggaccugcuggugg

SEQ ID NO: 4030765 - RNA, 14 nt, Molluscum contagiosum virus
cugcaggcagaagc

SEQ ID NO: 4030766 - RNA, 16 nt, Molluscum contagiosum virus
cugcaucuagccuccu

SEQ ID NO: 4030767 - RNA, 20 nt, Molluscum contagiosum virus
cugccaauaccaggccacgu

SEQ ID NO: 4030768 - RNA, 13 nt, Molluscum contagiosum virus
cugccacaugcag

SEQ ID NO: 4030769 - RNA, 21 nt, Molluscum contagiosum virus
cugccaccaugcgcacagcac

SEQ ID NO: 4030770 - RNA, 15 nt, Molluscum contagiosum virus
cugccaccgcggcgc

SEQ ID NO: 4030771 - RNA, 17 nt, Molluscum contagiosum virus
cugccagcucgacacug

SEQ ID NO: 4030772 - RNA, 23 nt, Molluscum contagiosum virus
cugccauggcagcucggaggcgc

SEQ ID NO: 4030773 - RNA, 16 nt, Molluscum contagiosum virus
cugcccccgccaugcc

SEQ ID NO: 4030774 - RNA, 15 nt, Molluscum contagiosum virus
cugcccgcgcgcgac

SEQ ID NO: 4030775 - RNA, 13 nt, Molluscum contagiosum virus
cugcccgcggaga

SEQ ID NO: 4030776 - RNA, 21 nt, Molluscum contagiosum virus
cugcccuuuagcguggcgcgc

SEQ ID NO: 4030777 - RNA, 14 nt, Molluscum contagiosum virus
cugccgcagagccg

SEQ ID NO: 4030778 - RNA, 18 nt, Molluscum contagiosum virus
cugccgcgcaugcuggag

SEQ ID NO: 4030779 - RNA, 17 nt, Molluscum contagiosum virus
cugccggcucaagcugg

SEQ ID NO: 4030780 - RNA, 22 nt, Molluscum contagiosum virus
cugccgguggaagagcccgcac

SEQ ID NO: 4030781 - RNA, 20 nt, Molluscum contagiosum virus
cugccguuuuacacagggcu

SEQ ID NO: 4030782 - RNA, 15 nt, Molluscum contagiosum virus
cugccuggugcacac

SEQ ID NO: 4030783 - RNA, 15 nt, Molluscum contagiosum virus
cugcgaguccuccuc

SEQ ID NO: 4030784 - RNA, 17 nt, Molluscum contagiosum virus
cugcgcaagcucagccu

SEQ ID NO: 4030785 - RNA, 14 nt, Molluscum contagiosum virus
cugcgcaccugcac

SEQ ID NO: 4030786 - RNA, 20 nt, Molluscum contagiosum virus
cugcgcacgcuugugcgcac

SEQ ID NO: 4030787 - RNA, 22 nt, Molluscum contagiosum virus
cugcgcacgcuugugcgcacgc

SEQ ID NO: 4030788 - RNA, 13 nt, Molluscum contagiosum virus
cugcgcaggugca

SEQ ID NO: 4030789 - RNA, 18 nt, Molluscum contagiosum virus
cugcgccacugccacggc

SEQ ID NO: 4030790 - RNA, 20 nt, Molluscum contagiosum virus
cugcgccacugccacggcug

SEQ ID NO: 4030791 - RNA, 22 nt, Molluscum contagiosum virus
cugcgcccgcaaaccuuggccc

SEQ ID NO: 4030792 - RNA, 15 nt, Molluscum contagiosum virus
cugcgccgccagcgu

SEQ ID NO: 4030793 - RNA, 20 nt, Molluscum contagiosum virus
cugcgccuucugccugcccg

SEQ ID NO: 4030794 - RNA, 16 nt, Molluscum contagiosum virus
cugcgcgagcagcugc

SEQ ID NO: 4030795 - RNA, 20 nt, Molluscum contagiosum virus
cugcgcgagccgcugcacgc

SEQ ID NO: 4030796 - RNA, 13 nt, Molluscum contagiosum virus
cugcgcgcacugc

SEQ ID NO: 4030797 - RNA, 18 nt, Molluscum contagiosum virus
cugcgcgcacugcucgcg

SEQ ID NO: 4030798 - RNA, 18 nt, Molluscum contagiosum virus
cugcgcgcguugccugag

SEQ ID NO: 4030799 - RNA, 22 nt, Molluscum contagiosum virus
cugcgcgcguugccugagaagc

SEQ ID NO: 4030800 - RNA, 17 nt, Molluscum contagiosum virus
cugcgcgcucuggagcc

SEQ ID NO: 4030801 - RNA, 19 nt, Molluscum contagiosum virus
cugcgcgcucuggagccuc

SEQ ID NO: 4030802 - RNA, 18 nt, Molluscum contagiosum virus
cugcgcguggaguacagc

SEQ ID NO: 4030803 - RNA, 23 nt, Molluscum contagiosum virus
cugcgcguggaguacagccgcgc

SEQ ID NO: 4030804 - RNA, 16 nt, Molluscum contagiosum virus
cugcgcuacauguaug

SEQ ID NO: 4030805 - RNA, 21 nt, Molluscum contagiosum virus
cugcgcugccagcucgacacu

SEQ ID NO: 4030806 - RNA, 16 nt, Molluscum contagiosum virus
cugcggcgcgugccgc

SEQ ID NO: 4030807 - RNA, 22 nt, Molluscum contagiosum virus
cugcggcgcgugccgcugcgcg

SEQ ID NO: 4030808 - RNA, 12 nt, Molluscum contagiosum virus
cugcggcgcucg

SEQ ID NO: 4030809 - RNA, 21 nt, Molluscum contagiosum virus
cugcggcuccaacagcagcug

SEQ ID NO: 4030810 - RNA, 12 nt, Molluscum contagiosum virus
cugcggcugcug

SEQ ID NO: 4030811 - RNA, 13 nt, Molluscum contagiosum virus
cugcgggcgccgg

SEQ ID NO: 4030812 - RNA, 20 nt, Molluscum contagiosum virus
cugcgggcgccgggcgcgcc

SEQ ID NO: 4030813 - RNA, 15 nt, Molluscum contagiosum virus
cugcgggcgcgaccu

SEQ ID NO: 4030814 - RNA, 15 nt, Molluscum contagiosum virus
cugcgggcggcacac

SEQ ID NO: 4030815 - RNA, 23 nt, Molluscum contagiosum virus
cugcguaagcgccugcacacgcg

SEQ ID NO: 4030816 - RNA, 19 nt, Molluscum contagiosum virus
cugcguacacauggccgcg

SEQ ID NO: 4030817 - RNA, 16 nt, Molluscum contagiosum virus
cugcgucucgcggccg

SEQ ID NO: 4030818 - RNA, 22 nt, Molluscum contagiosum virus
cugcguguacgacgugcugcug

SEQ ID NO: 4030819 - RNA, 14 nt, Molluscum contagiosum virus
cugcguugcgcguc

SEQ ID NO: 4030820 - RNA, 17 nt, Molluscum contagiosum virus
cugcguugcgcgucaug

SEQ ID NO: 4030821 - RNA, 19 nt, Molluscum contagiosum virus
cugcguugucuccuccuga

SEQ ID NO: 4030822 - RNA, 18 nt, Molluscum contagiosum virus
cugcguuuugcgcggcac

SEQ ID NO: 4030823 - RNA, 20 nt, Molluscum contagiosum virus
cugcuacaugcacagacagc

SEQ ID NO: 4030824 - RNA, 19 nt, Molluscum contagiosum virus
cugcuagagaaccugugcg

SEQ ID NO: 4030825 - RNA, 22 nt, Molluscum contagiosum virus
cugcuagugcgcgccaagaaca

SEQ ID NO: 4030826 - RNA, 20 nt, Molluscum contagiosum virus
cugcuccgcggaggccaagc

SEQ ID NO: 4030827 - RNA, 19 nt, Molluscum contagiosum virus
cugcucgcacccgcgccgc

SEQ ID NO: 4030828 - RNA, 16 nt, Molluscum contagiosum virus
cugcucgcgcucgcgg

SEQ ID NO: 4030829 - RNA, 21 nt, Molluscum contagiosum virus
cugcucgcgugcgugcugcgc

SEQ ID NO: 4030830 - RNA, 13 nt, Molluscum contagiosum virus
cugcucgggcugc

SEQ ID NO: 4030831 - RNA, 18 nt, Molluscum contagiosum virus
cugcucuacuuccacgag

SEQ ID NO: 4030832 - RNA, 13 nt, Molluscum contagiosum virus
cugcucuggagca

SEQ ID NO: 4030833 - RNA, 18 nt, Molluscum contagiosum virus
cugcucuugaugcugaac

SEQ ID NO: 4030834 - RNA, 13 nt, Molluscum contagiosum virus
cugcugagcgggg

SEQ ID NO: 4030835 - RNA, 15 nt, Molluscum contagiosum virus
cugcugcaaucugcg

SEQ ID NO: 4030836 - RNA, 15 nt, Molluscum contagiosum virus
cugcugcacacaccg

SEQ ID NO: 4030837 - RNA, 21 nt, Molluscum contagiosum virus
ucccgcugagcgcagcacacu

SEQ ID NO: 4030838 - RNA, 21 nt, Molluscum contagiosum virus
ucccggcgcgcgcggcgcgcc

SEQ ID NO: 4030839 - RNA, 14 nt, Molluscum contagiosum virus
ucccggcggcaagc

SEQ ID NO: 4030840 - RNA, 14 nt, Molluscum contagiosum virus
ucccugcauacacu

SEQ ID NO: 4030841 - RNA, 18 nt, Molluscum contagiosum virus
ucccugguaguccugcua

SEQ ID NO: 4030842 - RNA, 20 nt, Molluscum contagiosum virus
uccgaccgugcccuggaccu

SEQ ID NO: 4030843 - RNA, 22 nt, Molluscum contagiosum virus
uccgacggaacgagccugccgc

SEQ ID NO: 4030844 - RNA, 21 nt, Molluscum contagiosum virus
uccgagaaugggagggggaca

SEQ ID NO: 4030845 - RNA, 13 nt, Molluscum contagiosum virus
uccgcaacguggc

SEQ ID NO: 4030846 - RNA, 15 nt, Molluscum contagiosum virus
uccgcaauuacgugc

SEQ ID NO: 4030847 - RNA, 18 nt, Molluscum contagiosum virus
uccgcaauuacgugcgcg

SEQ ID NO: 4030848 - RNA, 23 nt, Molluscum contagiosum virus
uccgcaggcgucaugcgcgcgcg

SEQ ID NO: 4030849 - RNA, 20 nt, Molluscum contagiosum virus
uccgccucgagcacgccucc

SEQ ID NO: 4030850 - RNA, 20 nt, Molluscum contagiosum virus
uccgcgaaguccugggcgag

SEQ ID NO: 4030851 - RNA, 19 nt, Molluscum contagiosum virus
uccgcgcggcgcucugcca

SEQ ID NO: 4030852 - RNA, 18 nt, Molluscum contagiosum virus
uccgcgggcgcacgcuug

SEQ ID NO: 4030853 - RNA, 14 nt, Molluscum contagiosum virus
uccgcgggcgcgcg

SEQ ID NO: 4030854 - RNA, 20 nt, Molluscum contagiosum virus
uccggacgugcacgcacgcg

SEQ ID NO: 4030855 - RNA, 13 nt, Molluscum contagiosum virus
uccggagccaagc

SEQ ID NO: 4030856 - RNA, 19 nt, Molluscum contagiosum virus
uccggcggcuccgcgcgcg

SEQ ID NO: 4030857 - RNA, 20 nt, Molluscum contagiosum virus
uccgggcagauagcaaccuc

SEQ ID NO: 4030858 - RNA, 14 nt, Molluscum contagiosum virus
uccgucgcgcucga

SEQ ID NO: 4030859 - RNA, 12 nt, Molluscum contagiosum virus
uccgugucguuc

SEQ ID NO: 4030860 - RNA, 13 nt, Molluscum contagiosum virus
uccguugcacgug

SEQ ID NO: 4030861 - RNA, 15 nt, Molluscum contagiosum virus
uccucccugcgggcg

SEQ ID NO: 4030862 - RNA, 20 nt, Molluscum contagiosum virus
uccucgaaggcgugcgccgu

SEQ ID NO: 4030863 - RNA, 16 nt, Molluscum contagiosum virus
uccucgaccugcacga

SEQ ID NO: 4030864 - RNA, 20 nt, Molluscum contagiosum virus
uccucggcgcacacuccucg

SEQ ID NO: 4030865 - RNA, 14 nt, Molluscum contagiosum virus
uccucucuccccuu

SEQ ID NO: 4030866 - RNA, 13 nt, Molluscum contagiosum virus
uccugcgcuccga

SEQ ID NO: 4030867 - RNA, 20 nt, Molluscum contagiosum virus
uccuggaguaccggcucaag

SEQ ID NO: 4030868 - RNA, 14 nt, Molluscum contagiosum virus
uccuggccaacagg

SEQ ID NO: 4030869 - RNA, 11 nt, Molluscum contagiosum virus
uccugggcgac

SEQ ID NO: 4030870 - RNA, 22 nt, Molluscum contagiosum virus
uccuuccggagacaccagcucc

SEQ ID NO: 4030871 - RNA, 15 nt, Molluscum contagiosum virus
uccuuucgacgcugc

SEQ ID NO: 4030872 - RNA, 23 nt, Molluscum contagiosum virus
ucgaaaaggcugauccugcgcgu

SEQ ID NO: 4030873 - RNA, 19 nt, Molluscum contagiosum virus
ucgaacgacggcccccuua

SEQ ID NO: 4030874 - RNA, 22 nt, Molluscum contagiosum virus
ucgaagacgucggggcgcgugc

SEQ ID NO: 4030875 - RNA, 14 nt, Molluscum contagiosum virus
ucgaagcgagaggu

SEQ ID NO: 4030876 - RNA, 19 nt, Molluscum contagiosum virus
ucgaaggcgugcgccgugc

SEQ ID NO: 4030877 - RNA, 19 nt, Molluscum contagiosum virus
ucgacaagaucaaggucac

SEQ ID NO: 4030878 - RNA, 19 nt, Molluscum contagiosum virus
ucgacccguaccccgaggg

SEQ ID NO: 4030879 - RNA, 23 nt, Molluscum contagiosum virus
ucgaccucugcuucacgcugcuc

SEQ ID NO: 4030880 - RNA, 22 nt, Molluscum contagiosum virus
ucgaccugcacgacccucuucg

SEQ ID NO: 4030881 - RNA, 16 nt, Molluscum contagiosum virus
ucgacgcgcugcucuc

SEQ ID NO: 4030882 - RNA, 20 nt, Molluscum contagiosum virus
ucgacgggaacgaggucauc

SEQ ID NO: 4030883 - RNA, 13 nt, Molluscum contagiosum virus
ucgacgggcgcag

SEQ ID NO: 4030884 - RNA, 15 nt, Molluscum contagiosum virus
ucgacgugcagacgc

SEQ ID NO: 4030885 - RNA, 19 nt, Molluscum contagiosum virus
ucgacgugcagacgcucaa

SEQ ID NO: 4030886 - RNA, 21 nt, Molluscum contagiosum virus
ucgacgugguacuggcgcccg

SEQ ID NO: 4030887 - RNA, 15 nt, Molluscum contagiosum virus
ucgacuacacgcgcu

SEQ ID NO: 4030888 - RNA, 23 nt, Molluscum contagiosum virus
ucgacuuacggacgcccuccucg

SEQ ID NO: 4030889 - RNA, 16 nt, Molluscum contagiosum virus
ucgagacccacaaugg

SEQ ID NO: 4030890 - RNA, 19 nt, Molluscum contagiosum virus
ucgagaccucgcgcuuccg

SEQ ID NO: 4030891 - RNA, 20 nt, Molluscum contagiosum virus
ucgagaccucgcgcuuccgg

SEQ ID NO: 4030892 - RNA, 15 nt, Molluscum contagiosum virus
ucgagacgcugcgcg

SEQ ID NO: 4030893 - RNA, 23 nt, Molluscum contagiosum virus
ucgagcaccucaacuguugccug

SEQ ID NO: 4030894 - RNA, 19 nt, Molluscum contagiosum virus
ucgagcaccugucgcgcga

SEQ ID NO: 4030895 - RNA, 14 nt, Molluscum contagiosum virus
ucgagcacgcgcga

SEQ ID NO: 4030896 - RNA, 14 nt, Molluscum contagiosum virus
ucgagcccgagccc

SEQ ID NO: 4030897 - RNA, 20 nt, Molluscum contagiosum virus
ucgagccgcgcuucgagcac

SEQ ID NO: 4030898 - RNA, 22 nt, Molluscum contagiosum virus
ucgagcgcgcuggacuugcgcg

SEQ ID NO: 4030899 - RNA, 23 nt, Molluscum contagiosum virus
ucgagcuccgagggcgcgugcuc

SEQ ID NO: 4030900 - RNA, 17 nt, Molluscum contagiosum virus
ucgagcugacucggaca

SEQ ID NO: 4030901 - RNA, 17 nt, Molluscum contagiosum virus
ucgagcuucggacgagc

SEQ ID NO: 4030902 - RNA, 19 nt, Molluscum contagiosum virus
ucgaggagggcguccguaa

SEQ ID NO: 4030903 - RNA, 14 nt, Molluscum contagiosum virus
ucgaggccuucgcg

SEQ ID NO: 4030904 - RNA, 15 nt, Molluscum contagiosum virus
ucgaucucgcgcacg

SEQ ID NO: 4030905 - RNA, 16 nt, Molluscum contagiosum virus
cguccacgaugcgcuc

SEQ ID NO: 4030906 - RNA, 12 nt, Molluscum contagiosum virus
cguccacgcgcc

SEQ ID NO: 4030907 - RNA, 17 nt, Molluscum contagiosum virus
cgucgaagaccaccagc

SEQ ID NO: 4030908 - RNA, 19 nt, Molluscum contagiosum virus
cgucgaaguccgucacgga

SEQ ID NO: 4030909 - RNA, 15 nt, Molluscum contagiosum virus
cgucgaccuggaagc

SEQ ID NO: 4030910 - RNA, 21 nt, Molluscum contagiosum virus
cgucgcccggcaggcucccgc

SEQ ID NO: 4030911 - RNA, 15 nt, Molluscum contagiosum virus
cgucgcgcgccgugc

SEQ ID NO: 4030912 - RNA, 17 nt, Molluscum contagiosum virus
cgucgcggccacgcacu

SEQ ID NO: 4030913 - RNA, 23 nt, Molluscum contagiosum virus
cgucguagcaaaugcgcugcucg

SEQ ID NO: 4030914 - RNA, 12 nt, Molluscum contagiosum virus
cgucgucaagga

SEQ ID NO: 4030915 - RNA, 21 nt, Molluscum contagiosum virus
cgucguccggaggcacgggcu

SEQ ID NO: 4030916 - RNA, 15 nt, Molluscum contagiosum virus
cgucgugcuccacgc

SEQ ID NO: 4030917 - RNA, 22 nt, Molluscum contagiosum virus
cgucucgcggaagaauuccuuc

SEQ ID NO: 4030918 - RNA, 20 nt, Molluscum contagiosum virus
cgucucggagaagaacagca

SEQ ID NO: 4030919 - RNA, 14 nt, Molluscum contagiosum virus
cgucugcaaggccu

SEQ ID NO: 4030920 - RNA, 21 nt, Molluscum contagiosum virus
cgucuggggauggccacggga

SEQ ID NO: 4030921 - RNA, 20 nt, Molluscum contagiosum virus
cgucuucacuccgcacagcu

SEQ ID NO: 4030922 - RNA, 20 nt, Molluscum contagiosum virus
cgucuuugcgaacgcgcaag

SEQ ID NO: 4030923 - RNA, 20 nt, Molluscum contagiosum virus
cgucuuuuugcggcgccgcc

SEQ ID NO: 4030924 - RNA, 15 nt, Molluscum contagiosum virus
cgugaacgaggcugc

SEQ ID NO: 4030925 - RNA, 20 nt, Molluscum contagiosum virus
cgugacaaucucugcgccgc

SEQ ID NO: 4030926 - RNA, 18 nt, Molluscum contagiosum virus
cgugacggugcugcgcac

SEQ ID NO: 4030927 - RNA, 21 nt, Molluscum contagiosum virus
cgugagagcaaagaaugcaug

SEQ ID NO: 4030928 - RNA, 21 nt, Molluscum contagiosum virus
cgugaucgcgcaggcgcgcca

SEQ ID NO: 4030929 - RNA, 14 nt, Molluscum contagiosum virus
cgugcaagcccagc

SEQ ID NO: 4030930 - RNA, 17 nt, Molluscum contagiosum virus
cgugcaccucaagaaga

SEQ ID NO: 4030931 - RNA, 22 nt, Molluscum contagiosum virus
cgugcacgugguuugcucgauc

SEQ ID NO: 4030932 - RNA, 18 nt, Molluscum contagiosum virus
cgugcacucgagaagagg

SEQ ID NO: 4030933 - RNA, 21 nt, Molluscum contagiosum virus
cgugcagacgcucaacguggg

SEQ ID NO: 4030934 - RNA, 16 nt, Molluscum contagiosum virus
cgugcagcggcgccac

SEQ ID NO: 4030935 - RNA, 17 nt, Molluscum contagiosum virus
cgugcagcggcgccacg

SEQ ID NO: 4030936 - RNA, 21 nt, Molluscum contagiosum virus
cuuugcggcacgggcucgagc

SEQ ID NO: 4030937 - RNA, 13 nt, Molluscum contagiosum virus
cuuuucuaggccu

SEQ ID NO: 4030938 - RNA, 18 nt, Molluscum contagiosum virus
cuuuuuaaauggccgaga

SEQ ID NO: 4030939 - RNA, 16 nt, Molluscum contagiosum virus
gaaaaaagagccggcu

SEQ ID NO: 4030940 - RNA, 11 nt, Molluscum contagiosum virus
gaaaacugcau

SEQ ID NO: 4030941 - RNA, 13 nt, Molluscum contagiosum virus
gaaaacuuguggc

SEQ ID NO: 4030942 - RNA, 14 nt, Molluscum contagiosum virus
gaaaagcgcgagcc

SEQ ID NO: 4030943 - RNA, 17 nt, Molluscum contagiosum virus
gaaacacccgcgcucga

SEQ ID NO: 4030944 - RNA, 22 nt, Molluscum contagiosum virus
gaaacagcaccguugccgcggc

SEQ ID NO: 4030945 - RNA, 13 nt, Molluscum contagiosum virus
gaaacaugugucu

SEQ ID NO: 4030946 - RNA, 16 nt, Molluscum contagiosum virus
gaaacgggagucacuu

SEQ ID NO: 4030947 - RNA, 18 nt, Molluscum contagiosum virus
gaaacuggacugagccgc

SEQ ID NO: 4030948 - RNA, 13 nt, Molluscum contagiosum virus
gaaagaaaacgug

SEQ ID NO: 4030949 - RNA, 21 nt, Molluscum contagiosum virus
gaaagauauacaccaggcgcg

SEQ ID NO: 4030950 - RNA, 22 nt, Molluscum contagiosum virus
gaaagcgucgugugcgcgcacg

SEQ ID NO: 4030951 - RNA, 22 nt, Molluscum contagiosum virus
gaaaggcacccaccaggaacga

SEQ ID NO: 4030952 - RNA, 16 nt, Molluscum contagiosum virus
gaaaggcacccgcagg

SEQ ID NO: 4030953 - RNA, 14 nt, Molluscum contagiosum virus
gaaaggcaugauuc

SEQ ID NO: 4030954 - RNA, 12 nt, Molluscum contagiosum virus
gaaaugacggcg

SEQ ID NO: 4030955 - RNA, 19 nt, Molluscum contagiosum virus
gaacaaugaggagaggaac

SEQ ID NO: 4030956 - RNA, 21 nt, Molluscum contagiosum virus
gaacaccuccugcuuugcacg

SEQ ID NO: 4030957 - RNA, 21 nt, Molluscum contagiosum virus
gaacagagaaaggcacccacc

SEQ ID NO: 4030958 - RNA, 22 nt, Molluscum contagiosum virus
gaacaguaacugcugcagugug

SEQ ID NO: 4030959 - RNA, 17 nt, Molluscum contagiosum virus
gaacauguugugcucgu

SEQ ID NO: 4030960 - RNA, 17 nt, Molluscum contagiosum virus
gaaccugcacgcggcgu

SEQ ID NO: 4030961 - RNA, 23 nt, Molluscum contagiosum virus
gaacgccggcgcggggcucgucc

SEQ ID NO: 4030962 - RNA, 20 nt, Molluscum contagiosum virus
gaacgccgugcgcgugcggc

SEQ ID NO: 4030963 - RNA, 14 nt, Molluscum contagiosum virus
gaacgcgcgcucgu

SEQ ID NO: 4030964 - RNA, 17 nt, Molluscum contagiosum virus
gaacggaacacagugcg

SEQ ID NO: 4030965 - RNA, 22 nt, Molluscum contagiosum virus
gaacgucuucuaccgcccgcug

SEQ ID NO: 4030966 - RNA, 17 nt, Molluscum contagiosum virus
gaacucgugcgccgcgc

SEQ ID NO: 4030967 - RNA, 20 nt, Molluscum contagiosum virus
gaacucuacgccgcgcaccu

SEQ ID NO: 4030968 - RNA, 16 nt, Molluscum contagiosum virus
gaacugacugcugccc

SEQ ID NO: 4030969 - RNA, 14 nt, Molluscum contagiosum virus
gaacugcagcagcu

SEQ ID NO: 4030970 - RNA, 14 nt, Molluscum contagiosum virus
gaagaacgcggcgu

SEQ ID NO: 4030971 - RNA, 23 nt, Molluscum contagiosum virus
gaagaagaaaagacgagcugugc

SEQ ID NO: 4030972 - RNA, 22 nt, Molluscum contagiosum virus
gaagacauugccuuuugcacag

SEQ ID NO: 4030973 - RNA, 22 nt, Molluscum contagiosum virus
gaagacgcguaccagcgccugc

SEQ ID NO: 4030974 - RNA, 15 nt, Molluscum contagiosum virus
gaagacggcgcgcgc

SEQ ID NO: 4030975 - RNA, 23 nt, Molluscum contagiosum virus
gaagagacgccaagcgucgcgac

SEQ ID NO: 4030976 - RNA, 19 nt, Molluscum contagiosum virus
gaagaggccagcacaagcc

SEQ ID NO: 4030977 - RNA, 20 nt, Molluscum contagiosum virus
gaagaggccagcacaagccg

SEQ ID NO: 4030978 - RNA, 20 nt, Molluscum contagiosum virus
gaagaggccggcacaagccg

SEQ ID NO: 4030979 - RNA, 15 nt, Molluscum contagiosum virus
gaagaguuggacagc

SEQ ID NO: 4030980 - RNA, 21 nt, Molluscum contagiosum virus
gaagcaagacccagcaaggcc

SEQ ID NO: 4030981 - RNA, 14 nt, Molluscum contagiosum virus
gaagcacguagcuc

SEQ ID NO: 4030982 - RNA, 17 nt, Molluscum contagiosum virus
gaagcaggcgccaucgc

SEQ ID NO: 4030983 - RNA, 15 nt, Molluscum contagiosum virus
gaagcccagcuucag

SEQ ID NO: 4030984 - RNA, 14 nt, Molluscum contagiosum virus
gaagccgcaggcca

SEQ ID NO: 4030985 - RNA, 17 nt, Molluscum contagiosum virus
gaagcgaaaggacgcgc

SEQ ID NO: 4030986 - RNA, 14 nt, Molluscum contagiosum virus
gaagcggugcagcg

SEQ ID NO: 4030987 - RNA, 13 nt, Molluscum contagiosum virus
cggcgcucugcca

SEQ ID NO: 4030988 - RNA, 14 nt, Molluscum contagiosum virus
cggcgcugcgcgug

SEQ ID NO: 4030989 - RNA, 21 nt, Molluscum contagiosum virus
cggcggagaugacgggcacgc

SEQ ID NO: 4030990 - RNA, 14 nt, Molluscum contagiosum virus
cggcggcccgcggc

SEQ ID NO: 4030991 - RNA, 14 nt, Molluscum contagiosum virus
cggcggcgcgugcu

SEQ ID NO: 4030992 - RNA, 13 nt, Molluscum contagiosum virus
cggcggcuuucuc

SEQ ID NO: 4030993 - RNA, 15 nt, Molluscum contagiosum virus
cggcgggcgcgugcu

SEQ ID NO: 4030994 - RNA, 14 nt, Molluscum contagiosum virus
cggcggggcugcug

SEQ ID NO: 4030995 - RNA, 16 nt, Molluscum contagiosum virus
cggcggggcugcuggc

SEQ ID NO: 4030996 - RNA, 19 nt, Molluscum contagiosum virus
cggcgucgucgugaacgcg

SEQ ID NO: 4030997 - RNA, 15 nt, Molluscum contagiosum virus
cggcgugugcgggcu

SEQ ID NO: 4030998 - RNA, 17 nt, Molluscum contagiosum virus
cggcguguuccggcagc

SEQ ID NO: 4030999 - RNA, 13 nt, Molluscum contagiosum virus
cggcuaaagagag

SEQ ID NO: 4031000 - RNA, 15 nt, Molluscum contagiosum virus
cggcuaggcgcggcg

SEQ ID NO: 4031001 - RNA, 20 nt, Molluscum contagiosum virus
cggcucagcguggagcaccu

SEQ ID NO: 4031002 - RNA, 17 nt, Molluscum contagiosum virus
cggcuccuugagaauca

SEQ ID NO: 4031003 - RNA, 15 nt, Molluscum contagiosum virus
cggcucugcguugcg

SEQ ID NO: 4031004 - RNA, 16 nt, Molluscum contagiosum virus
cggcugccgcugccug

SEQ ID NO: 4031005 - RNA, 15 nt, Molluscum contagiosum virus
cggcuuccggcacca

SEQ ID NO: 4031006 - RNA, 18 nt, Molluscum contagiosum virus
cggcuuccggcaccacgu

SEQ ID NO: 4031007 - RNA, 15 nt, Molluscum contagiosum virus
cgggaagcacagucc

SEQ ID NO: 4031008 - RNA, 12 nt, Molluscum contagiosum virus
cgggaagcugca

SEQ ID NO: 4031009 - RNA, 16 nt, Molluscum contagiosum virus
cgggaaggggugaugg

SEQ ID NO: 4031010 - RNA, 21 nt, Molluscum contagiosum virus
cgggaauaccggagacaccag

SEQ ID NO: 4031011 - RNA, 21 nt, Molluscum contagiosum virus
cgggaccgcagacaaagacag

SEQ ID NO: 4031012 - RNA, 21 nt, Molluscum contagiosum virus
cgggaccucuuucucgcgccg

SEQ ID NO: 4031013 - RNA, 22 nt, Molluscum contagiosum virus
cgggacgagagggcgcgcgucg

SEQ ID NO: 4031014 - RNA, 14 nt, Molluscum contagiosum virus
cgggagaguggccg

SEQ ID NO: 4031015 - RNA, 22 nt, Molluscum contagiosum virus
cgcgugcggugacuugccgugu

SEQ ID NO: 4031016 - RNA, 21 nt, Molluscum contagiosum virus
cgcgugcugcgcggcgccgca

SEQ ID NO: 4031017 - RNA, 20 nt, Molluscum contagiosum virus
cgcgugcuggacgcgcacgc

SEQ ID NO: 4031018 - RNA, 16 nt, Molluscum contagiosum virus
cgcgugcugggccccu

SEQ ID NO: 4031019 - RNA, 19 nt, Molluscum contagiosum virus
cgcgugucuacccggcacg

SEQ ID NO: 4031020 - RNA, 15 nt, Molluscum contagiosum virus
cgcguguuugugcug

SEQ ID NO: 4031021 - RNA, 17 nt, Molluscum contagiosum virus
cgcguucgacagcucuu

SEQ ID NO: 4031022 - RNA, 13 nt, Molluscum contagiosum virus
cgcguucuccagg

SEQ ID NO: 4031023 - RNA, 23 nt, Molluscum contagiosum virus
cgcguugucgagaauagcugggg

SEQ ID NO: 4031024 - RNA, 19 nt, Molluscum contagiosum virus
cgcguuugucgcgggcgcg

SEQ ID NO: 4031025 - RNA, 17 nt, Molluscum contagiosum virus
cgcuaaagaucgugcgc

SEQ ID NO: 4031026 - RNA, 14 nt, Molluscum contagiosum virus
cgcuacagcagccg

SEQ ID NO: 4031027 - RNA, 19 nt, Molluscum contagiosum virus
cgcuacccguugcugcgcc

SEQ ID NO: 4031028 - RNA, 16 nt, Molluscum contagiosum virus
cgcuagagcgcggcgc

SEQ ID NO: 4031029 - RNA, 21 nt, Molluscum contagiosum virus
cgcuagcaggcgucgcgcaca

SEQ ID NO: 4031030 - RNA, 16 nt, Molluscum contagiosum virus
cgcuagccgccgcugc

SEQ ID NO: 4031031 - RNA, 18 nt, Molluscum contagiosum virus
cgcuaggggugccgcugc

SEQ ID NO: 4031032 - RNA, 23 nt, Molluscum contagiosum virus
cgcuaugccgcgugcucugcucc

SEQ ID NO: 4031033 - RNA, 19 nt, Molluscum contagiosum virus
cgcucacagcuucgcgagc

SEQ ID NO: 4031034 - RNA, 16 nt, Molluscum contagiosum virus
cgcucacugcagcagc

SEQ ID NO: 4031035 - RNA, 19 nt, Molluscum contagiosum virus
cgcucauccacgcggagga

SEQ ID NO: 4031036 - RNA, 12 nt, Molluscum contagiosum virus
cgcuccaugcug

SEQ ID NO: 4031037 - RNA, 18 nt, Molluscum contagiosum virus
cgcuccgagcggcugcuc

SEQ ID NO: 4031038 - RNA, 13 nt, Molluscum contagiosum virus
cgcuccgcucgcg

SEQ ID NO: 4031039 - RNA, 14 nt, Molluscum contagiosum virus
cgcuccgcucgcgc

SEQ ID NO: 4031040 - RNA, 17 nt, Molluscum contagiosum virus
cgcuccgcucgcgcgug

SEQ ID NO: 4031041 - RNA, 23 nt, Molluscum contagiosum virus
cgcucgaggaccucgcgcgccgc

SEQ ID NO: 4031042 - RNA, 14 nt, Molluscum contagiosum virus
cgcucgcccagcuc

SEQ ID NO: 4031043 - RNA, 15 nt, Molluscum contagiosum virus
cgcucgccuuucccc

SEQ ID NO: 4031044 - RNA, 14 nt, Molluscum contagiosum virus
cgcucgcgagaagu

SEQ ID NO: 4031045 - RNA, 23 nt, Molluscum contagiosum virus
cgcucgcgcgugcucgacucgga

SEQ ID NO: 4031046 - RNA, 15 nt, Molluscum contagiosum virus
cgcucgcgcugcuuc

SEQ ID NO: 4031047 - RNA, 11 nt, Molluscum contagiosum virus
cgcucgcuaga

SEQ ID NO: 4031048 - RNA, 18 nt, Molluscum contagiosum virus
cgcucgcuagaggacgcc

SEQ ID NO: 4031049 - RNA, 16 nt, Molluscum contagiosum virus
cgcucgcucgcucagc

SEQ ID NO: 4031050 - RNA, 15 nt, Molluscum contagiosum virus
cgcucggcugccgug

SEQ ID NO: 4031051 - RNA, 16 nt, Molluscum contagiosum virus
cgcucucucagggugg

SEQ ID NO: 4031052 - RNA, 19 nt, Molluscum contagiosum virus
cgcucugccaccgcggcgc

SEQ ID NO: 4031053 - RNA, 15 nt, Molluscum contagiosum virus
cgcucuuacugcagc

SEQ ID NO: 4031054 - RNA, 21 nt, Molluscum contagiosum virus
cgcucuuuugcaagcgcgaaa

SEQ ID NO: 4031055 - RNA, 17 nt, Molluscum contagiosum virus
cgcugagcaagcucaag

SEQ ID NO: 4031056 - RNA, 13 nt, Molluscum contagiosum virus
cgcugcagcaccu

SEQ ID NO: 4031057 - RNA, 16 nt, Molluscum contagiosum virus
cgcugccaacgcggac

SEQ ID NO: 4031058 - RNA, 19 nt, Molluscum contagiosum virus
cgcugccaacgcggaccgc

SEQ ID NO: 4031059 - RNA, 15 nt, Molluscum contagiosum virus
cgcugcccgcgcaca

SEQ ID NO: 4031060 - RNA, 15 nt, Molluscum contagiosum virus
cgcugccggcaacgc

SEQ ID NO: 4031061 - RNA, 18 nt, Molluscum contagiosum virus
cgcugccuggugcacaca

SEQ ID NO: 4031062 - RNA, 18 nt, Molluscum contagiosum virus
cgcugcgcggagcucgcg

SEQ ID NO: 4031063 - RNA, 17 nt, Molluscum contagiosum virus
cgcugcgcgugcugggc

SEQ ID NO: 4031064 - RNA, 19 nt, Molluscum contagiosum virus
cgcugcgcgugcugggccc

SEQ ID NO: 4031065 - RNA, 22 nt, Molluscum contagiosum virus
cgcugcggcgcucgcagcacau

SEQ ID NO: 4031066 - RNA, 21 nt, Molluscum contagiosum virus
cgcugcguuuccagggcagua

SEQ ID NO: 4031067 - RNA, 13 nt, Molluscum contagiosum virus
cgcugcuccugcu

SEQ ID NO: 4031068 - RNA, 22 nt, Molluscum contagiosum virus
cgcugcucuacgucuccucgcg

SEQ ID NO: 4031069 - RNA, 15 nt, Molluscum contagiosum virus
cgcugcuggcgcaca

SEQ ID NO: 4031070 - RNA, 15 nt, Molluscum contagiosum virus
cgcugcuguccuuca

SEQ ID NO: 4031071 - RNA, 19 nt, Molluscum contagiosum virus
cgcugcuucccgcugagcg

SEQ ID NO: 4031072 - RNA, 14 nt, Molluscum contagiosum virus
cgcuggagcacgac

SEQ ID NO: 4031073 - RNA, 18 nt, Molluscum contagiosum virus
cgcuggagcuggcugggc

SEQ ID NO: 4031074 - RNA, 22 nt, Molluscum contagiosum virus
cgcuggcccacgcuggcgcucg

SEQ ID NO: 4031075 - RNA, 15 nt, Molluscum contagiosum virus
cgcuggccucugccu

SEQ ID NO: 4031076 - RNA, 22 nt, Molluscum contagiosum virus
cgcuggccucugccugcaagga

SEQ ID NO: 4031077 - RNA, 17 nt, Molluscum contagiosum virus
cgcuggcgugcgcagug

SEQ ID NO: 4031078 - RNA, 17 nt, Molluscum contagiosum virus
cgcuggcucgcgccugc

SEQ ID NO: 4031079 - RNA, 16 nt, Molluscum contagiosum virus
cgcugggccgcaugca

SEQ ID NO: 4031080 - RNA, 14 nt, Molluscum contagiosum virus
cgcugggcgcgccg

SEQ ID NO: 4031081 - RNA, 21 nt, Molluscum contagiosum virus
cgcuggugggcgugcggcgca

SEQ ID NO: 4031082 - RNA, 23 nt, Molluscum contagiosum virus
cgcuggugggcgugcggcgcacc

SEQ ID NO: 4031083 - RNA, 16 nt, Molluscum contagiosum virus
cgcuggugugcacuga

SEQ ID NO: 4031084 - RNA, 20 nt, Molluscum contagiosum virus
cgcuguacgugcugcccgug

SEQ ID NO: 4031085 - RNA, 18 nt, Molluscum contagiosum virus
cgcugugagcgcgccgcu

SEQ ID NO: 4031086 - RNA, 16 nt, Molluscum contagiosum virus
cgcuuccggcggcucc

SEQ ID NO: 4031087 - RNA, 14 nt, Molluscum contagiosum virus
cgcuucgagcacgc

SEQ ID NO: 4031088 - RNA, 17 nt, Molluscum contagiosum virus
cgcuucgggcucagcaa

SEQ ID NO: 4031089 - RNA, 13 nt, Molluscum contagiosum virus
cgcuugaaggacg

SEQ ID NO: 4031090 - RNA, 15 nt, Molluscum contagiosum virus
cggaaaacgcccgag

SEQ ID NO: 4031091 - RNA, 20 nt, Molluscum contagiosum virus
cggaaacgaacgcugcagcu

SEQ ID NO: 4031092 - RNA, 14 nt, Molluscum contagiosum virus
cggaaccguggugc

SEQ ID NO: 4031093 - RNA, 21 nt, Molluscum contagiosum virus
cggaacgcgugaggaggcggc

SEQ ID NO: 4031094 - RNA, 17 nt, Molluscum contagiosum virus
cggaagacaaggcugcg

SEQ ID NO: 4031095 - RNA, 14 nt, Molluscum contagiosum virus
cggaagcccgccuc

SEQ ID NO: 4031096 - RNA, 18 nt, Molluscum contagiosum virus
cggaagcucacaucuguc

SEQ ID NO: 4031097 - RNA, 13 nt, Molluscum contagiosum virus
acgagcgccgcga

SEQ ID NO: 4031098 - RNA, 16 nt, Molluscum contagiosum virus
acgagcugcugcccgc

SEQ ID NO: 4031099 - RNA, 22 nt, Molluscum contagiosum virus
acgaggccuacgugcugcgcac

SEQ ID NO: 4031100 - RNA, 16 nt, Molluscum contagiosum virus
acgagugcccgcgcgc

SEQ ID NO: 4031101 - RNA, 14 nt, Molluscum contagiosum virus
acgcaaaagaggcc

SEQ ID NO: 4031102 - RNA, 16 nt, Molluscum contagiosum virus
acgcaagcccgcgcgc

SEQ ID NO: 4031103 - RNA, 19 nt, Molluscum contagiosum virus
acgcaagcccgcgcgcgag

SEQ ID NO: 4031104 - RNA, 17 nt, Molluscum contagiosum virus
acgcaaggcaugcgcgc

SEQ ID NO: 4031105 - RNA, 17 nt, Molluscum contagiosum virus
acgcaaggugugcgcgc

SEQ ID NO: 4031106 - RNA, 14 nt, Molluscum contagiosum virus
acgcaaucgcgcgc

SEQ ID NO: 4031107 - RNA, 15 nt, Molluscum contagiosum virus
acgcacaaaacacaa

SEQ ID NO: 4031108 - RNA, 14 nt, Molluscum contagiosum virus
acgcacacucgcgc

SEQ ID NO: 4031109 - RNA, 14 nt, Molluscum contagiosum virus
acgcacgcgcgggc

SEQ ID NO: 4031110 - RNA, 16 nt, Molluscum contagiosum virus
acgcacuucacggcgu

SEQ ID NO: 4031111 - RNA, 15 nt, Molluscum contagiosum virus
acgcagaaguggcgc

SEQ ID NO: 4031112 - RNA, 14 nt, Molluscum contagiosum virus
acgcagaggcgcgu

SEQ ID NO: 4031113 - RNA, 16 nt, Molluscum contagiosum virus
acgcagcucuuccacg

SEQ ID NO: 4031114 - RNA, 18 nt, Molluscum contagiosum virus
acgcaggaugcuggggcu

SEQ ID NO: 4031115 - RNA, 18 nt, Molluscum contagiosum virus
acgccagcagcagaggag

SEQ ID NO: 4031116 - RNA, 14 nt, Molluscum contagiosum virus
acgccagccuggag

SEQ ID NO: 4031117 - RNA, 15 nt, Molluscum contagiosum virus
acgccaucaggaaug

SEQ ID NO: 4031118 - RNA, 17 nt, Molluscum contagiosum virus
acgccauuuucgugcgc

SEQ ID NO: 4031119 - RNA, 13 nt, Molluscum contagiosum virus
acgccgagcgggc

SEQ ID NO: 4031120 - RNA, 22 nt, Molluscum contagiosum virus
acgccggggggcgccaaguccg

SEQ ID NO: 4031121 - RNA, 23 nt, Molluscum contagiosum virus
acgccgugggcagcuucugcucg

SEQ ID NO: 4031122 - RNA, 23 nt, Molluscum contagiosum virus
acgccuccaagaagaggccagca

SEQ ID NO: 4031123 - RNA, 23 nt, Molluscum contagiosum virus
acgccuccaagaagaggccggca

SEQ ID NO: 4031124 - RNA, 17 nt, Molluscum contagiosum virus
acgccuuccugcuggcg

SEQ ID NO: 4031125 - RNA, 13 nt, Molluscum contagiosum virus
acgcgagcggagc

SEQ ID NO: 4031126 - RNA, 20 nt, Molluscum contagiosum virus
acgcgaucuuccgcgacgag

SEQ ID NO: 4031127 - RNA, 21 nt, Molluscum contagiosum virus
acgcgcagcuguuucugccgc

SEQ ID NO: 4031128 - RNA, 18 nt, Molluscum contagiosum virus
acgcgcaugaggcggcgc

SEQ ID NO: 4031129 - RNA, 15 nt, Molluscum contagiosum virus
acgcgcccuaagggc

SEQ ID NO: 4031130 - RNA, 14 nt, Molluscum contagiosum virus
acgcgccgcgcgag

SEQ ID NO: 4031131 - RNA, 22 nt, Molluscum contagiosum virus
acgcgccgcgcgcuuacuaagc

SEQ ID NO: 4031132 - RNA, 15 nt, Molluscum contagiosum virus
acgcgcgagcggagc

SEQ ID NO: 4031133 - RNA, 24 nt, Molluscum contagiosum virus
acgcgcgagugugugcaucccucg

SEQ ID NO: 4031134 - RNA, 17 nt, Molluscum contagiosum virus
acgcgcgcacaucggca

SEQ ID NO: 4031135 - RNA, 15 nt, Molluscum contagiosum virus
acgcgcgcggcaagc

SEQ ID NO: 4031136 - RNA, 20 nt, Molluscum contagiosum virus
acgcgcgcguaacagcgcgc

SEQ ID NO: 4031137 - RNA, 13 nt, Molluscum contagiosum virus
acgcgcgcuuagc

SEQ ID NO: 4031138 - RNA, 15 nt, Molluscum contagiosum virus
acgcgcucguccgcc

SEQ ID NO: 4031139 - RNA, 14 nt, Molluscum contagiosum virus
acgcgcugcggcgc

SEQ ID NO: 4031140 - RNA, 16 nt, Molluscum contagiosum virus
acgcggccaugcuccu

SEQ ID NO: 4031141 - RNA, 19 nt, Molluscum contagiosum virus
acgcggcgcgugucgcgga

SEQ ID NO: 4031142 - RNA, 21 nt, Molluscum contagiosum virus
acgcggcucuggagcggccac

SEQ ID NO: 4031143 - RNA, 15 nt, Molluscum contagiosum virus
acgcgggccaggcac

SEQ ID NO: 4031144 - RNA, 12 nt, Molluscum contagiosum virus
acgcgggccugu

SEQ ID NO: 4031145 - RNA, 14 nt, Molluscum contagiosum virus
acgcgggccugucc

SEQ ID NO: 4031146 - RNA, 13 nt, Molluscum contagiosum virus
acgcgggcgccgg

SEQ ID NO: 4031147 - RNA, 15 nt, Molluscum contagiosum virus
acgcggugagugcgc

SEQ ID NO: 4031148 - RNA, 17 nt, Molluscum contagiosum virus
acgcggugcgcgcgugc

SEQ ID NO: 4031149 - RNA, 15 nt, Molluscum contagiosum virus
acgcguacauccgcg

SEQ ID NO: 4031150 - RNA, 17 nt, Molluscum contagiosum virus
acgcguacauccgcgag

SEQ ID NO: 4031151 - RNA, 14 nt, Molluscum contagiosum virus
acgcguaccagcgc

SEQ ID NO: 4031152 - RNA, 16 nt, Molluscum contagiosum virus
acgcguacguguccau

SEQ ID NO: 4031153 - RNA, 22 nt, Molluscum contagiosum virus
acgcguagcacgaaggacgcgc

SEQ ID NO: 4031154 - RNA, 23 nt, Molluscum contagiosum virus
acgcguccgccucuuccucgugc

SEQ ID NO: 4031155 - RNA, 23 nt, Molluscum contagiosum virus
acgcgucgcgcaggcgcccaacg

SEQ ID NO: 4031156 - RNA, 18 nt, Molluscum contagiosum virus
acgcuaccugaagcugga

SEQ ID NO: 4031157 - RNA, 16 nt, Molluscum contagiosum virus
acgcucacggccuucg

SEQ ID NO: 4031158 - RNA, 17 nt, Molluscum contagiosum virus
acgcucuccaugcgcgc

SEQ ID NO: 4031159 - RNA, 16 nt, Molluscum contagiosum virus
acgcugcggcggcgca

SEQ ID NO: 4031160 - RNA, 14 nt, Molluscum contagiosum virus
acgcugcugcacag

SEQ ID NO: 4031161 - RNA, 19 nt, Molluscum contagiosum virus
acgcuggacuuccugcugc

SEQ ID NO: 4031162 - RNA, 15 nt, Molluscum contagiosum virus
acgcuggcgcucggc

SEQ ID NO: 4031163 - RNA, 13 nt, Molluscum contagiosum virus
acgcuggcggcgc

SEQ ID NO: 4031164 - RNA, 18 nt, Molluscum contagiosum virus
acgcuguacaugccgcag

SEQ ID NO: 4031165 - RNA, 20 nt, Molluscum contagiosum virus
acgcuguccaggcgcugcac

SEQ ID NO: 4031166 - RNA, 16 nt, Molluscum contagiosum virus
acgcuguugcugcugc

SEQ ID NO: 4031167 - RNA, 16 nt, Molluscum contagiosum virus
acggaaacagcaccgu

SEQ ID NO: 4031168 - RNA, 16 nt, Molluscum contagiosum virus
acggacgcccuccucg

SEQ ID NO: 4031169 - RNA, 11 nt, Molluscum contagiosum virus
acggacgccuu

SEQ ID NO: 4031170 - RNA, 15 nt, Molluscum contagiosum virus
acggacucgccgcgc

SEQ ID NO: 4031171 - RNA, 20 nt, Molluscum contagiosum virus
acggacugggagcaccgcgu

SEQ ID NO: 4031172 - RNA, 12 nt, Molluscum contagiosum virus
acggacuucuug

SEQ ID NO: 4031173 - RNA, 13 nt, Molluscum contagiosum virus
acggagcgcgcgc

SEQ ID NO: 4031174 - RNA, 17 nt, Molluscum contagiosum virus
acggagcggaucgugcu

SEQ ID NO: 4031175 - RNA, 21 nt, Molluscum contagiosum virus
acggagcuacaaaacugaaaa

SEQ ID NO: 4031176 - RNA, 22 nt, Molluscum contagiosum virus
acggcaaacgccacugggucug

SEQ ID NO: 4031177 - RNA, 21 nt, Molluscum contagiosum virus
acggcaagacgacacgagggc

SEQ ID NO: 4031178 - RNA, 14 nt, Molluscum contagiosum virus
acggcacgcugagc

SEQ ID NO: 4031179 - RNA, 15 nt, Molluscum contagiosum virus
acggcagacggcaag

SEQ ID NO: 4031180 - RNA, 12 nt, Molluscum contagiosum virus
acggcccaccuu

SEQ ID NO: 4031181 - RNA, 16 nt, Molluscum contagiosum virus
acggcccaccuucuug

SEQ ID NO: 4031182 - RNA, 14 nt, Molluscum contagiosum virus
acggccgcgcgcga

SEQ ID NO: 4031183 - RNA, 12 nt, Molluscum contagiosum virus
acggccugcggc

SEQ ID NO: 4031184 - RNA, 18 nt, Molluscum contagiosum virus
acggcgacgcgaucgugc

SEQ ID NO: 4031185 - RNA, 20 nt, Molluscum contagiosum virus
acggcgccuucgucgcgcgc

SEQ ID NO: 4031186 - RNA, 23 nt, Molluscum contagiosum virus
acggcgcgcgcgcuagccgccgc

SEQ ID NO: 4031187 - RNA, 19 nt, Molluscum contagiosum virus
acggcgcgggcgcgcccga

SEQ ID NO: 4031188 - RNA, 18 nt, Molluscum contagiosum virus
acggcgcucgccucuggg

SEQ ID NO: 4031189 - RNA, 22 nt, Molluscum contagiosum virus
acggcggcgcaagcgcaagccg

SEQ ID NO: 4031190 - RNA, 15 nt, Molluscum contagiosum virus
acggcggugcccgcc

SEQ ID NO: 4031191 - RNA, 15 nt, Molluscum contagiosum virus
acggcgugcuggcca

SEQ ID NO: 4031192 - RNA, 18 nt, Molluscum contagiosum virus
acggcuucauccgcgcgc

SEQ ID NO: 4031193 - RNA, 13 nt, Molluscum contagiosum virus
acgggccgccgcc

SEQ ID NO: 4031194 - RNA, 17 nt, Molluscum contagiosum virus
acgggcgcgcguacgcg

SEQ ID NO: 4031195 - RNA, 21 nt, Molluscum contagiosum virus
acgggcgcuauugcgcggcgc

SEQ ID NO: 4031196 - RNA, 19 nt, Molluscum contagiosum virus
acgggcucugugcggacau

SEQ ID NO: 4031197 - RNA, 17 nt, Molluscum contagiosum virus
acggguguacaaagagc

SEQ ID NO: 4031198 - RNA, 21 nt, Molluscum contagiosum virus
acggucuugccgaagccgcag

SEQ ID NO: 4031199 - RNA, 20 nt, Molluscum contagiosum virus
acggugcagccgcugcugcu

SEQ ID NO: 4031200 - RNA, 15 nt, Molluscum contagiosum virus
acguacagugcgcgc

SEQ ID NO: 4031201 - RNA, 22 nt, Molluscum contagiosum virus
acguacgagcagcugcugcgca

SEQ ID NO: 4031202 - RNA, 18 nt, Molluscum contagiosum virus
acgucauuguaaaacgac

SEQ ID NO: 4031203 - RNA, 20 nt, Molluscum contagiosum virus
acgucuggcucguacugcug

SEQ ID NO: 4031204 - RNA, 23 nt, Molluscum contagiosum virus
acgucuggcucguacugcugcag

SEQ ID NO: 4031205 - RNA, 19 nt, Molluscum contagiosum virus
acgugacagucagcggcgu

SEQ ID NO: 4031206 - RNA, 15 nt, Molluscum contagiosum virus
acgugcacgcgcacg

SEQ ID NO: 4031207 - RNA, 14 nt, Molluscum contagiosum virus
acgugcagcggcgc

SEQ ID NO: 4031208 - RNA, 19 nt, Molluscum contagiosum virus
acgugccaagaccugggcg

SEQ ID NO: 4031209 - RNA, 15 nt, Molluscum contagiosum virus
acgugcuccgugugc

SEQ ID NO: 4031210 - RNA, 19 nt, Molluscum contagiosum virus
acgugcugcagcugcgcga

SEQ ID NO: 4031211 - RNA, 18 nt, Molluscum contagiosum virus
acguggacaagucacugc

SEQ ID NO: 4031212 - RNA, 21 nt, Molluscum contagiosum virus
acguggagccugaggccgcgg

SEQ ID NO: 4031213 - RNA, 13 nt, Molluscum contagiosum virus
acguggcgccgcu

SEQ ID NO: 4031214 - RNA, 22 nt, Molluscum contagiosum virus
acguguacgcacggggccgcac

SEQ ID NO: 4031215 - RNA, 23 nt, Molluscum contagiosum virus
acgugugcucugugcgcgcagac

SEQ ID NO: 4031216 - RNA, 23 nt, Molluscum contagiosum virus
acguuugcgucugcgaggcgcgc

SEQ ID NO: 4031217 - RNA, 20 nt, Molluscum contagiosum virus
acuaagaacguaaaaaagag

SEQ ID NO: 4031218 - RNA, 18 nt, Molluscum contagiosum virus
acuaagcuaaaagagcug

SEQ ID NO: 4031219 - RNA, 15 nt, Molluscum contagiosum virus
acuacacugucgcgc

SEQ ID NO: 4031220 - RNA, 18 nt, Molluscum contagiosum virus
acuaccacgucggcgaga

SEQ ID NO: 4031221 - RNA, 14 nt, Molluscum contagiosum virus
acuaccucuuugag

SEQ ID NO: 4031222 - RNA, 15 nt, Molluscum contagiosum virus
acuacgcgcugcuag

SEQ ID NO: 4031223 - RNA, 15 nt, Molluscum contagiosum virus
acuacuacacugucg

SEQ ID NO: 4031224 - RNA, 20 nt, Molluscum contagiosum virus
acuagcguagcaugcucguc

SEQ ID NO: 4031225 - RNA, 17 nt, Molluscum contagiosum virus
acucaacaagcugcugg

SEQ ID NO: 4031226 - RNA, 21 nt, Molluscum contagiosum virus
acucaauucaaguuugacaag

SEQ ID NO: 4031227 - RNA, 12 nt, Molluscum contagiosum virus
acucaggaagcg

SEQ ID NO: 4031228 - RNA, 19 nt, Molluscum contagiosum virus
acuccaagugaacuacagu

SEQ ID NO: 4031229 - RNA, 15 nt, Molluscum contagiosum virus
acuccaucugcgcga

SEQ ID NO: 4031230 - RNA, 13 nt, Molluscum contagiosum virus
acuccgagcgcgc

SEQ ID NO: 4031231 - RNA, 19 nt, Molluscum contagiosum virus
acuccgcgaggagauucgc

SEQ ID NO: 4031232 - RNA, 24 nt, Molluscum contagiosum virus
acuccguggaggaucgcuacgugc

SEQ ID NO: 4031233 - RNA, 21 nt, Molluscum contagiosum virus
acucgaacgcaaggugugcgc

SEQ ID NO: 4031234 - RNA, 22 nt, Molluscum contagiosum virus
acucgagcacguagugcucguc

SEQ ID NO: 4031235 - RNA, 21 nt, Molluscum contagiosum virus
acucgagcgagcuacgcgcuc

SEQ ID NO: 4031236 - RNA, 19 nt, Molluscum contagiosum virus
acucgcagaacugcugcgc

SEQ ID NO: 4031237 - RNA, 15 nt, Molluscum contagiosum virus
acucgcgcugcagca

SEQ ID NO: 4031238 - RNA, 14 nt, Molluscum contagiosum virus
acucgcugccagag

SEQ ID NO: 4031239 - RNA, 13 nt, Molluscum contagiosum virus
acucgcugcuccc

SEQ ID NO: 4031240 - RNA, 16 nt, Molluscum contagiosum virus
acucgcugcugcucuu

SEQ ID NO: 4031241 - RNA, 18 nt, Molluscum contagiosum virus
acucgcugcugcucuucc

SEQ ID NO: 4031242 - RNA, 21 nt, Molluscum contagiosum virus
acucgucgagcacgaagacgu

SEQ ID NO: 4031243 - RNA, 17 nt, Molluscum contagiosum virus
acucucaucgagcaccu

SEQ ID NO: 4031244 - RNA, 13 nt, Molluscum contagiosum virus
acugcagcacguc

SEQ ID NO: 4031245 - RNA, 12 nt, Molluscum contagiosum virus
acugcagcagcc

SEQ ID NO: 4031246 - RNA, 13 nt, Molluscum contagiosum virus
acugcagcagccc

SEQ ID NO: 4031247 - RNA, 13 nt, Molluscum contagiosum virus
acugcagcagcuc

SEQ ID NO: 4031248 - RNA, 17 nt, Molluscum contagiosum virus
acugcccgcgcccugca

SEQ ID NO: 4031249 - RNA, 16 nt, Molluscum contagiosum virus
acugccgccgccgcga

SEQ ID NO: 4031250 - RNA, 17 nt, Molluscum contagiosum virus
acugccgccgccgcgag

SEQ ID NO: 4031251 - RNA, 22 nt, Molluscum contagiosum virus
acugccuggucacagacacgcu

SEQ ID NO: 4031252 - RNA, 15 nt, Molluscum contagiosum virus
acugcgccaaggugg

SEQ ID NO: 4031253 - RNA, 18 nt, Molluscum contagiosum virus
acugcggacaccagaacc

SEQ ID NO: 4031254 - RNA, 16 nt, Molluscum contagiosum virus
acugcguugucuccuc

SEQ ID NO: 4031255 - RNA, 19 nt, Molluscum contagiosum virus
acugcguugucuccuccug

SEQ ID NO: 4031256 - RNA, 22 nt, Molluscum contagiosum virus
acugcugcccccgccgcggcgc

SEQ ID NO: 4031257 - RNA, 18 nt, Molluscum contagiosum virus
acuggaagaacaggccgc

SEQ ID NO: 4031258 - RNA, 19 nt, Molluscum contagiosum virus
acuggagcacggacuggga

SEQ ID NO: 4031259 - RNA, 17 nt, Molluscum contagiosum virus
acuggcacgcgccgcgc

SEQ ID NO: 4031260 - RNA, 15 nt, Molluscum contagiosum virus
acuggcgcagcagga

SEQ ID NO: 4031261 - RNA, 20 nt, Molluscum contagiosum virus
acugggaacccguggccgag

SEQ ID NO: 4031262 - RNA, 14 nt, Molluscum contagiosum virus
acugggagcuuucc

SEQ ID NO: 4031263 - RNA, 22 nt, Molluscum contagiosum virus
acugggcuucaaguuccuggag

SEQ ID NO: 4031264 - RNA, 22 nt, Molluscum contagiosum virus
acuguaggggagggcggcaagc

SEQ ID NO: 4031265 - RNA, 22 nt, Molluscum contagiosum virus
acugucgacagagaaguccccg

SEQ ID NO: 4031266 - RNA, 22 nt, Molluscum contagiosum virus
acugucucugcgcgagcagcug

SEQ ID NO: 4031267 - RNA, 14 nt, Molluscum contagiosum virus
acugugccagcagc

SEQ ID NO: 4031268 - RNA, 23 nt, Molluscum contagiosum virus
acuucacggcguucaccuuggcg

SEQ ID NO: 4031269 - RNA, 19 nt, Molluscum contagiosum virus
acuucccgacgucuucccc

SEQ ID NO: 4031270 - RNA, 13 nt, Molluscum contagiosum virus
acuuccgcgcgcu

SEQ ID NO: 4031271 - RNA, 19 nt, Molluscum contagiosum virus
acuuccgcgcgcucuugca

SEQ ID NO: 4031272 - RNA, 14 nt, Molluscum contagiosum virus
acuugcacgcgcac

SEQ ID NO: 4031273 - RNA, 16 nt, Molluscum contagiosum virus
acuugcgcgccuguca

SEQ ID NO: 4031274 - RNA, 19 nt, Molluscum contagiosum virus
acuugcggcgcuagcgccc

SEQ ID NO: 4031275 - RNA, 15 nt, Molluscum contagiosum virus
acuuuaucucucacu

SEQ ID NO: 4031276 - RNA, 15 nt, Molluscum contagiosum virus
agaaacgacgggcgc

SEQ ID NO: 4031277 - RNA, 23 nt, Molluscum contagiosum virus
agaaaggcacccaccaggaacag

SEQ ID NO: 4031278 - RNA, 18 nt, Molluscum contagiosum virus
agaaaugcgcacacuugc

SEQ ID NO: 4031279 - RNA, 21 nt, Molluscum contagiosum virus
agaagacauugccuuuugcac

SEQ ID NO: 4031280 - RNA, 12 nt, Molluscum contagiosum virus
agaagaggccag

SEQ ID NO: 4031281 - RNA, 17 nt, Molluscum contagiosum virus
agaagaggccagcacaa

SEQ ID NO: 4031282 - RNA, 18 nt, Molluscum contagiosum virus
agaaggagcccuugccac

SEQ ID NO: 4031283 - RNA, 14 nt, Molluscum contagiosum virus
agacaccagcuccg

SEQ ID NO: 4031284 - RNA, 15 nt, Molluscum contagiosum virus
agacaggccggggcc

SEQ ID NO: 4031285 - RNA, 15 nt, Molluscum contagiosum virus
agaccaccagcacca

SEQ ID NO: 4031286 - RNA, 17 nt, Molluscum contagiosum virus
agacccgaaagcugccc

SEQ ID NO: 4031287 - RNA, 18 nt, Molluscum contagiosum virus
agaccuggucacacuggu

SEQ ID NO: 4031288 - RNA, 14 nt, Molluscum contagiosum virus
agacgagcugugcg

SEQ ID NO: 4031289 - RNA, 14 nt, Molluscum contagiosum virus
agacgcgcucgcgc

SEQ ID NO: 4031290 - RNA, 16 nt, Molluscum contagiosum virus
agacgcguaccagcgc

SEQ ID NO: 4031291 - RNA, 14 nt, Molluscum contagiosum virus
agacgcugcgcgac

SEQ ID NO: 4031292 - RNA, 16 nt, Molluscum contagiosum virus
agacgugcggcacgcu

SEQ ID NO: 4031293 - RNA, 12 nt, Molluscum contagiosum virus
agacuuccuugc

SEQ ID NO: 4031294 - RNA, 15 nt, Molluscum contagiosum virus
agagaaccugugcgc

SEQ ID NO: 4031295 - RNA, 16 nt, Molluscum contagiosum virus
agagcacggacagcac

SEQ ID NO: 4031296 - RNA, 23 nt, Molluscum contagiosum virus
agagcccaaggggagacauaugu

SEQ ID NO: 4031297 - RNA, 16 nt, Molluscum contagiosum virus
agagcuccccgcgcgc

SEQ ID NO: 4031298 - RNA, 18 nt, Molluscum contagiosum virus
agagcuggcaccgggcgc

SEQ ID NO: 4031299 - RNA, 19 nt, Molluscum contagiosum virus
agagcuuacuagacuggcu

SEQ ID NO: 4031300 - RNA, 14 nt, Molluscum contagiosum virus
agaggagauggcaa

SEQ ID NO: 4031301 - RNA, 16 nt, Molluscum contagiosum virus
agaggggagccagccu

SEQ ID NO: 4031302 - RNA, 12 nt, Molluscum contagiosum virus
agaggggcaaca

SEQ ID NO: 4031303 - RNA, 15 nt, Molluscum contagiosum virus
agagggucgugcagg

SEQ ID NO: 4031304 - RNA, 22 nt, Molluscum contagiosum virus
agagguugagcuuggugcagcg

SEQ ID NO: 4031305 - RNA, 23 nt, Molluscum contagiosum virus
acgcuggcacggccggcgccgcg

SEQ ID NO: 4031306 - RNA, 20 nt, Molluscum contagiosum virus
acgcuggccgugcccgccga

SEQ ID NO: 4031307 - RNA, 15 nt, Molluscum contagiosum virus
acgcuguugcugcug

SEQ ID NO: 4031308 - RNA, 17 nt, Molluscum contagiosum virus
acgcuguugcugcugcc

SEQ ID NO: 4031309 - RNA, 15 nt, Molluscum contagiosum virus
agaaaaauacgugua

SEQ ID NO: 4031310 - RNA, 21 nt, Molluscum contagiosum virus
agaaagaccuugucagugggc

SEQ ID NO: 4031311 - RNA, 16 nt, Molluscum contagiosum virus
agaacaugcucgccag

SEQ ID NO: 4031312 - RNA, 22 nt, Molluscum contagiosum virus
agaacaugugcuccgccaacgc

SEQ ID NO: 4031313 - RNA, 20 nt, Molluscum contagiosum virus
agaacccguauuuccagcgu

SEQ ID NO: 4031314 - RNA, 21 nt, Molluscum contagiosum virus
agaagagggucgugcaggucg

SEQ ID NO: 4031315 - RNA, 19 nt, Molluscum contagiosum virus
agaagugugccugcugcgc

SEQ ID NO: 4031316 - RNA, 23 nt, Molluscum contagiosum virus
agaaguugccgcaggaaccgcgu

SEQ ID NO: 4031317 - RNA, 14 nt, Molluscum contagiosum virus
agaaugacuuagcc

SEQ ID NO: 4031318 - RNA, 20 nt, Molluscum contagiosum virus
agaauuucgacagcauccug

SEQ ID NO: 4031319 - RNA, 21 nt, Molluscum contagiosum virus
agacaacacucgugcucgugu

SEQ ID NO: 4031320 - RNA, 12 nt, Molluscum contagiosum virus
agacaccagcuc

SEQ ID NO: 4031321 - RNA, 15 nt, Molluscum contagiosum virus
agacaccagcuccgc

SEQ ID NO: 4031322 - RNA, 18 nt, Molluscum contagiosum virus
agacagcacggcacgugc

SEQ ID NO: 4031323 - RNA, 18 nt, Molluscum contagiosum virus
agacauaguaccaugacg

SEQ ID NO: 4031324 - RNA, 18 nt, Molluscum contagiosum virus
agacaugucguaccuggu

SEQ ID NO: 4031325 - RNA, 16 nt, Molluscum contagiosum virus
agacgcgcucgcgcuc

SEQ ID NO: 4031326 - RNA, 15 nt, Molluscum contagiosum virus
agacgcuagcugugc

SEQ ID NO: 4031327 - RNA, 17 nt, Molluscum contagiosum virus
agacgcuccauucucuc

SEQ ID NO: 4031328 - RNA, 15 nt, Molluscum contagiosum virus
agacgcugcugcaca

SEQ ID NO: 4031329 - RNA, 15 nt, Molluscum contagiosum virus
agacgugcugcgcgc

SEQ ID NO: 4031330 - RNA, 21 nt, Molluscum contagiosum virus
agacuaccggcaguagcagcg

SEQ ID NO: 4031331 - RNA, 16 nt, Molluscum contagiosum virus
agacuggagcacggac

SEQ ID NO: 4031332 - RNA, 21 nt, Molluscum contagiosum virus
agacuuucugcagucagauug

SEQ ID NO: 4031333 - RNA, 20 nt, Molluscum contagiosum virus
agagcaagcgagagaggagu

SEQ ID NO: 4031334 - RNA, 21 nt, Molluscum contagiosum virus
agagcacugcgcgucugugcg

SEQ ID NO: 4031335 - RNA, 17 nt, Molluscum contagiosum virus
agagcaucgagcuggug

SEQ ID NO: 4031336 - RNA, 17 nt, Molluscum contagiosum virus
agagcauuagcagcgag

SEQ ID NO: 4031337 - RNA, 11 nt, Molluscum contagiosum virus
agagcccgcac

SEQ ID NO: 4031338 - RNA, 15 nt, Molluscum contagiosum virus
agagccgccggggcc

SEQ ID NO: 4031339 - RNA, 20 nt, Molluscum contagiosum virus
agagcgguuccugcuucucg

SEQ ID NO: 4031340 - RNA, 21 nt, Molluscum contagiosum virus
agagcuccccgcgcgcagcgc

SEQ ID NO: 4031341 - RNA, 23 nt, Molluscum contagiosum virus
agagcuccccgcgcgcagcgcgu

SEQ ID NO: 4031342 - RNA, 22 nt, Molluscum contagiosum virus
agagcucguggacagccugcac

SEQ ID NO: 4031343 - RNA, 14 nt, Molluscum contagiosum virus
agaggaaagcgcac

SEQ ID NO: 4031344 - RNA, 14 nt, Molluscum contagiosum virus
agaggacgagcugc

SEQ ID NO: 4031345 - RNA, 14 nt, Molluscum contagiosum virus
agagggcagaacag

SEQ ID NO: 4031346 - RNA, 14 nt, Molluscum contagiosum virus
agagggucgugcag

SEQ ID NO: 4031347 - RNA, 13 nt, Molluscum contagiosum virus
agaucaggcagcu

SEQ ID NO: 4031348 - RNA, 21 nt, Molluscum contagiosum virus
agaucaggcagcugcugcgcu

SEQ ID NO: 4031349 - RNA, 16 nt, Molluscum contagiosum virus
agaucgcgagaggaga

SEQ ID NO: 4031350 - RNA, 17 nt, Molluscum contagiosum virus
agaugcgagcgcgucug

SEQ ID NO: 4031351 - RNA, 13 nt, Molluscum contagiosum virus
agaugcgcggaca

SEQ ID NO: 4031352 - RNA, 13 nt, Molluscum contagiosum virus
agcaaccucggga

SEQ ID NO: 4031353 - RNA, 23 nt, Molluscum contagiosum virus
agcaacgcgaccuacgaggugcu

SEQ ID NO: 4031354 - RNA, 18 nt, Molluscum contagiosum virus
agcaagacccagcaaggc

SEQ ID NO: 4031355 - RNA, 15 nt, Molluscum contagiosum virus
agcaagcagccgcac

SEQ ID NO: 4031356 - RNA, 14 nt, Molluscum contagiosum virus
agcaaggggucugc

SEQ ID NO: 4031357 - RNA, 14 nt, Molluscum contagiosum virus
agcacaccgucgcg

SEQ ID NO: 4031358 - RNA, 15 nt, Molluscum contagiosum virus
agcacagcaggagca

SEQ ID NO: 4031359 - RNA, 15 nt, Molluscum contagiosum virus
agcaccaagaagcgg

SEQ ID NO: 4031360 - RNA, 22 nt, Molluscum contagiosum virus
agcaccaagaagcggcccugca

SEQ ID NO: 4031361 - RNA, 21 nt, Molluscum contagiosum virus
agcaccgccugcugcagcucc

SEQ ID NO: 4031362 - RNA, 21 nt, Molluscum contagiosum virus
agcaccggcggguccgcaggc

SEQ ID NO: 4031363 - RNA, 15 nt, Molluscum contagiosum virus
agcaccugcgcuucc

SEQ ID NO: 4031364 - RNA, 16 nt, Molluscum contagiosum virus
agcacgacggucuucc

SEQ ID NO: 4031365 - RNA, 22 nt, Molluscum contagiosum virus
agcacgccuccaagaagaggcc

SEQ ID NO: 4031366 - RNA, 14 nt, Molluscum contagiosum virus
agcacgggcggaag

SEQ ID NO: 4031367 - RNA, 18 nt, Molluscum contagiosum virus
agcacgggcggaagcucc

SEQ ID NO: 4031368 - RNA, 18 nt, Molluscum contagiosum virus
agcacgggcgggacagac

SEQ ID NO: 4031369 - RNA, 16 nt, Molluscum contagiosum virus
agcacgucuugcgcgg

SEQ ID NO: 4031370 - RNA, 16 nt, Molluscum contagiosum virus
agcacguuguucuugc

SEQ ID NO: 4031371 - RNA, 17 nt, Molluscum contagiosum virus
agcacuguacgcacgca

SEQ ID NO: 4031372 - RNA, 20 nt, Molluscum contagiosum virus
agcacuucucgccgcaccac

SEQ ID NO: 4031373 - RNA, 20 nt, Molluscum contagiosum virus
agcagcgugcauagugggcu

SEQ ID NO: 4031374 - RNA, 23 nt, Molluscum contagiosum virus
agcagcucggcgagagcgcgcag

SEQ ID NO: 4031375 - RNA, 20 nt, Molluscum contagiosum virus
agcagcucggggcugucaga

SEQ ID NO: 4031376 - RNA, 18 nt, Molluscum contagiosum virus
agcagcugcugcgcuucg

SEQ ID NO: 4031377 - RNA, 11 nt, Molluscum contagiosum virus
agcaggcacuc

SEQ ID NO: 4031378 - RNA, 20 nt, Molluscum contagiosum virus
agcagguucucgcacaguac

SEQ ID NO: 4031379 - RNA, 19 nt, Molluscum contagiosum virus
agcauauccugauuucguu

SEQ ID NO: 4031380 - RNA, 14 nt, Molluscum contagiosum virus
agcaucccugccac

SEQ ID NO: 4031381 - RNA, 23 nt, Molluscum contagiosum virus
agcaugccgccgcguacgcgccg

SEQ ID NO: 4031382 - RNA, 21 nt, Molluscum contagiosum virus
agcaugcugucucugucccug

SEQ ID NO: 4031383 - RNA, 13 nt, Molluscum contagiosum virus
agcauggccgcgu

SEQ ID NO: 4031384 - RNA, 10 nt, Molluscum contagiosum virus
agcaugucac

SEQ ID NO: 4031385 - RNA, 13 nt, Molluscum contagiosum virus
agccagccaggcg

SEQ ID NO: 4031386 - RNA, 19 nt, Molluscum contagiosum virus
agccaugaggacagcuugc

SEQ ID NO: 4031387 - RNA, 13 nt, Molluscum contagiosum virus
agcccgagcgcgc

SEQ ID NO: 4031388 - RNA, 14 nt, Molluscum contagiosum virus
agcccgcggugcgc

SEQ ID NO: 4031389 - RNA, 15 nt, Molluscum contagiosum virus
agcccgggcccgugc

SEQ ID NO: 4031390 - RNA, 22 nt, Molluscum contagiosum virus
agcccgugcuggagggcacgcu

SEQ ID NO: 4031391 - RNA, 20 nt, Molluscum contagiosum virus
agccgcccgcggacucgugc

SEQ ID NO: 4031392 - RNA, 21 nt, Molluscum contagiosum virus
agccgccugccgcgcucgugc

SEQ ID NO: 4031393 - RNA, 13 nt, Molluscum contagiosum virus
agccgcgaaagcg

SEQ ID NO: 4031394 - RNA, 13 nt, Molluscum contagiosum virus
agccgcggaggcc

SEQ ID NO: 4031395 - RNA, 19 nt, Molluscum contagiosum virus
agccgcguagcuagcucug

SEQ ID NO: 4031396 - RNA, 20 nt, Molluscum contagiosum virus
agccgcgugcuggcggggcu

SEQ ID NO: 4031397 - RNA, 15 nt, Molluscum contagiosum virus
agccgcugcuccugc

SEQ ID NO: 4031398 - RNA, 18 nt, Molluscum contagiosum virus
agccgcuucgggcucagc

SEQ ID NO: 4031399 - RNA, 21 nt, Molluscum contagiosum virus
agccguccgccucgagcacgc

SEQ ID NO: 4031400 - RNA, 19 nt, Molluscum contagiosum virus
agccucaucgugagccugg

SEQ ID NO: 4031401 - RNA, 20 nt, Molluscum contagiosum virus
agccucaucgugagccuggu

SEQ ID NO: 4031402 - RNA, 24 nt, Molluscum contagiosum virus
agccucaucgugagccuggucgag

SEQ ID NO: 4031403 - RNA, 20 nt, Molluscum contagiosum virus
agccucgagcgccgugcagu

SEQ ID NO: 4031404 - RNA, 24 nt, Molluscum contagiosum virus
agccucuggaaggagcugggcucg

SEQ ID NO: 4031405 - RNA, 13 nt, Molluscum contagiosum virus
agccugaggccgc

SEQ ID NO: 4031406 - RNA, 17 nt, Molluscum contagiosum virus
agccugcaccgagugcu

SEQ ID NO: 4031407 - RNA, 13 nt, Molluscum contagiosum virus
agccugccgcgag

SEQ ID NO: 4031408 - RNA, 12 nt, Molluscum contagiosum virus
agccugcucacg

SEQ ID NO: 4031409 - RNA, 15 nt, Molluscum contagiosum virus
agcgacgagcagcug

SEQ ID NO: 4031410 - RNA, 19 nt, Molluscum contagiosum virus
agcgagucaucggcgaguu

SEQ ID NO: 4031411 - RNA, 15 nt, Molluscum contagiosum virus
agcgcaaaugccgag

SEQ ID NO: 4031412 - RNA, 16 nt, Molluscum contagiosum virus
agcgcagcacacuugu

SEQ ID NO: 4031413 - RNA, 22 nt, Molluscum contagiosum virus
agcgccacgcccucgccugcga

SEQ ID NO: 4031414 - RNA, 16 nt, Molluscum contagiosum virus
agcgccagccugcugg

SEQ ID NO: 4031415 - RNA, 23 nt, Molluscum contagiosum virus
agcgccagcuuggugcgcucgag

SEQ ID NO: 4031416 - RNA, 22 nt, Molluscum contagiosum virus
agcgccgccagcuccgcgcggc

SEQ ID NO: 4031417 - RNA, 18 nt, Molluscum contagiosum virus
agcgccgccaugcugcgc

SEQ ID NO: 4031418 - RNA, 21 nt, Molluscum contagiosum virus
agcgccgccaugcugcgcgag

SEQ ID NO: 4031419 - RNA, 17 nt, Molluscum contagiosum virus
agcgccgcucgcacggc

SEQ ID NO: 4031420 - RNA, 21 nt, Molluscum contagiosum virus
agcgccggcgaccagcucuug

SEQ ID NO: 4031421 - RNA, 19 nt, Molluscum contagiosum virus
agcgccgucucgcggaaga

SEQ ID NO: 4031422 - RNA, 20 nt, Molluscum contagiosum virus
agcgcgaguacaagcucgac

SEQ ID NO: 4031423 - RNA, 15 nt, Molluscum contagiosum virus
agcgcgcaguugugc

SEQ ID NO: 4031424 - RNA, 17 nt, Molluscum contagiosum virus
agcgcgcccaccagcag

SEQ ID NO: 4031425 - RNA, 17 nt, Molluscum contagiosum virus
agcgcgccgcgcgcucg

SEQ ID NO: 4031426 - RNA, 18 nt, Molluscum contagiosum virus
agcgcgccgcucgcgcuc

SEQ ID NO: 4031427 - RNA, 13 nt, Molluscum contagiosum virus
agcgcgccucucg

SEQ ID NO: 4031428 - RNA, 22 nt, Molluscum contagiosum virus
agcgcgcgccgacgugcgcgug

SEQ ID NO: 4031429 - RNA, 16 nt, Molluscum contagiosum virus
agcgcgcgccugcugg

SEQ ID NO: 4031430 - RNA, 15 nt, Molluscum contagiosum virus
agcgcgcgcugcgcg

SEQ ID NO: 4031431 - RNA, 13 nt, Molluscum contagiosum virus
agcgcgcugcaca

SEQ ID NO: 4031432 - RNA, 15 nt, Molluscum contagiosum virus
agcgcgcugcacacc

SEQ ID NO: 4031433 - RNA, 14 nt, Molluscum contagiosum virus
agcgcggagcuggc

SEQ ID NO: 4031434 - RNA, 20 nt, Molluscum contagiosum virus
agcgcguucgcgcgugcugg

SEQ ID NO: 4031435 - RNA, 17 nt, Molluscum contagiosum virus
agcgcuucuuccggcag

SEQ ID NO: 4031436 - RNA, 21 nt, Molluscum contagiosum virus
agcggccuguucuuccagugg

SEQ ID NO: 4031437 - RNA, 14 nt, Molluscum contagiosum virus
agcggcgagcuuug

SEQ ID NO: 4031438 - RNA, 16 nt, Molluscum contagiosum virus
agcggcgcgcgcugag

SEQ ID NO: 4031439 - RNA, 18 nt, Molluscum contagiosum virus
agcggcuuuucgccggag

SEQ ID NO: 4031440 - RNA, 18 nt, Molluscum contagiosum virus
agcguacggcccgaaggc

SEQ ID NO: 4031441 - RNA, 16 nt, Molluscum contagiosum virus
agcguacucgggccgc

SEQ ID NO: 4031442 - RNA, 22 nt, Molluscum contagiosum virus
agcgucgcggagcgcgcacggc

SEQ ID NO: 4031443 - RNA, 15 nt, Molluscum contagiosum virus
agcgugccgcggcac

SEQ ID NO: 4031444 - RNA, 14 nt, Molluscum contagiosum virus
agcguggagcaccu

SEQ ID NO: 4031445 - RNA, 14 nt, Molluscum contagiosum virus
agcgugucgaagcg

SEQ ID NO: 4031446 - RNA, 20 nt, Molluscum contagiosum virus
agcgugugccgccgcacuau

SEQ ID NO: 4031447 - RNA, 16 nt, Molluscum contagiosum virus
agcuacgaucgcgcuc

SEQ ID NO: 4031448 - RNA, 17 nt, Molluscum contagiosum virus
agcuagcucugcgcgcg

SEQ ID NO: 4031449 - RNA, 14 nt, Molluscum contagiosum virus
agcucaaucucgcc

SEQ ID NO: 4031450 - RNA, 23 nt, Molluscum contagiosum virus
agcucccgcgccacgagcgccgc

SEQ ID NO: 4031451 - RNA, 21 nt, Molluscum contagiosum virus
agcucgacugcguugucuccu

SEQ ID NO: 4031452 - RNA, 22 nt, Molluscum contagiosum virus
agcucgccgcgcgccgcugcuc

SEQ ID NO: 4031453 - RNA, 23 nt, Molluscum contagiosum virus
agcucgcguccacgaugcgcucg

SEQ ID NO: 4031454 - RNA, 13 nt, Molluscum contagiosum virus
agcucggguucca

SEQ ID NO: 4031455 - RNA, 22 nt, Molluscum contagiosum virus
agcucuccgagacacgcgagcg

SEQ ID NO: 4031456 - RNA, 17 nt, Molluscum contagiosum virus
agcucuucguggccaaa

SEQ ID NO: 4031457 - RNA, 20 nt, Molluscum contagiosum virus
agcugacccucgcggcucug

SEQ ID NO: 4031458 - RNA, 23 nt, Molluscum contagiosum virus
agcugcccgaguuucggaagagc

SEQ ID NO: 4031459 - RNA, 15 nt, Molluscum contagiosum virus
agcugcuagcggcag

SEQ ID NO: 4031460 - RNA, 16 nt, Molluscum contagiosum virus
agcuggccggcucgcu

SEQ ID NO: 4031461 - RNA, 15 nt, Molluscum contagiosum virus
agcugguccagggcu

SEQ ID NO: 4031462 - RNA, 16 nt, Molluscum contagiosum virus
agcuggugauccugga

SEQ ID NO: 4031463 - RNA, 18 nt, Molluscum contagiosum virus
agcuucuuggagcccuug

SEQ ID NO: 4031464 - RNA, 23 nt, Molluscum contagiosum virus
agcuugacgcguacauccgcgag

SEQ ID NO: 4031465 - RNA, 13 nt, Molluscum contagiosum virus
aggaaagcgcaca

SEQ ID NO: 4031466 - RNA, 18 nt, Molluscum contagiosum virus
aggaaagcgcacacuugc

SEQ ID NO: 4031467 - RNA, 22 nt, Molluscum contagiosum virus
aggaaaggcacccgcaggaaag

SEQ ID NO: 4031468 - RNA, 22 nt, Molluscum contagiosum virus
aggaaaggcaccugcaggaaag

SEQ ID NO: 4031469 - RNA, 16 nt, Molluscum contagiosum virus
aggaaauguaguucuc

SEQ ID NO: 4031470 - RNA, 17 nt, Molluscum contagiosum virus
aggaacucgaggcucug

SEQ ID NO: 4031471 - RNA, 23 nt, Molluscum contagiosum virus
aggaagcuggcgcgguccagccg

SEQ ID NO: 4031472 - RNA, 18 nt, Molluscum contagiosum virus
aggaauguguacgacgcg

SEQ ID NO: 4031473 - RNA, 17 nt, Molluscum contagiosum virus
aggacaaagucgcgcgc

SEQ ID NO: 4031474 - RNA, 12 nt, Molluscum contagiosum virus
aggacaccgcgg

SEQ ID NO: 4031475 - RNA, 13 nt, Molluscum contagiosum virus
aggacgcgugcaa

SEQ ID NO: 4031476 - RNA, 14 nt, Molluscum contagiosum virus
aggagagagagaca

SEQ ID NO: 4031477 - RNA, 13 nt, Molluscum contagiosum virus
aggagagcggcgc

SEQ ID NO: 4031478 - RNA, 16 nt, Molluscum contagiosum virus
aggagccucuguccug

SEQ ID NO: 4031479 - RNA, 19 nt, Molluscum contagiosum virus
aggagcucuucgacagcgu

SEQ ID NO: 4031480 - RNA, 15 nt, Molluscum contagiosum virus
aggagggcagccuca

SEQ ID NO: 4031481 - RNA, 23 nt, Molluscum contagiosum virus
aggaguuggcgcgcaagcgcugc

SEQ ID NO: 4031482 - RNA, 18 nt, Molluscum contagiosum virus
aggaucacgaugugcgcg

SEQ ID NO: 4031483 - RNA, 20 nt, Molluscum contagiosum virus
aggaugccugccagcagagc

SEQ ID NO: 4031484 - RNA, 13 nt, Molluscum contagiosum virus
aggauggacaaag

SEQ ID NO: 4031485 - RNA, 18 nt, Molluscum contagiosum virus
aggcaaagcggggcgcgc

SEQ ID NO: 4031486 - RNA, 16 nt, Molluscum contagiosum virus
aggcacaccccuguaa

SEQ ID NO: 4031487 - RNA, 17 nt, Molluscum contagiosum virus
aggcacccaccaggaac

SEQ ID NO: 4031488 - RNA, 16 nt, Molluscum contagiosum virus
aggcacuccagcgcgc

SEQ ID NO: 4031489 - RNA, 13 nt, Molluscum contagiosum virus
aggcacuccgcgc

SEQ ID NO: 4031490 - RNA, 19 nt, Molluscum contagiosum virus
aggcacucgucgcgcugcu

SEQ ID NO: 4031491 - RNA, 13 nt, Molluscum contagiosum virus
aggcagaagcuca

SEQ ID NO: 4031492 - RNA, 15 nt, Molluscum contagiosum virus
aggcagcugcugcgc

SEQ ID NO: 4031493 - RNA, 23 nt, Molluscum contagiosum virus
aggcaggccccgcaccagugccg

SEQ ID NO: 4031494 - RNA, 19 nt, Molluscum contagiosum virus
aggccaacuaccuggggcu

SEQ ID NO: 4031495 - RNA, 18 nt, Molluscum contagiosum virus
aggccagcacaagccguc

SEQ ID NO: 4031496 - RNA, 12 nt, Molluscum contagiosum virus
aggcccaggcca

SEQ ID NO: 4031497 - RNA, 19 nt, Molluscum contagiosum virus
aggccccccgcaacaagga

SEQ ID NO: 4031498 - RNA, 22 nt, Molluscum contagiosum virus
aggccccccgcaacaaggaaag

SEQ ID NO: 4031499 - RNA, 18 nt, Molluscum contagiosum virus
aggccgcccacgcucaac

SEQ ID NO: 4031500 - RNA, 22 nt, Molluscum contagiosum virus
aggccggcaagcucaagcccgg

SEQ ID NO: 4031501 - RNA, 14 nt, Molluscum contagiosum virus
aggccggcacaagc

SEQ ID NO: 4031502 - RNA, 23 nt, Molluscum contagiosum virus
aggccgggcgcgguagcucgugc

SEQ ID NO: 4031503 - RNA, 15 nt, Molluscum contagiosum virus
aggccugcguggaca

SEQ ID NO: 4031504 - RNA, 19 nt, Molluscum contagiosum virus
aggccuucgcgcccgacga

SEQ ID NO: 4031505 - RNA, 14 nt, Molluscum contagiosum virus
aggccuugcuccca

SEQ ID NO: 4031506 - RNA, 21 nt, Molluscum contagiosum virus
aggcgaccagcugguccugaa

SEQ ID NO: 4031507 - RNA, 16 nt, Molluscum contagiosum virus
aggcgaggucacacuc

SEQ ID NO: 4031508 - RNA, 22 nt, Molluscum contagiosum virus
aggcgccgcaccucaccgcgca

SEQ ID NO: 4031509 - RNA, 21 nt, Molluscum contagiosum virus
aggcgccgcguacgcacgugc

SEQ ID NO: 4031510 - RNA, 12 nt, Molluscum contagiosum virus
acgaagcugugc

SEQ ID NO: 4031511 - RNA, 23 nt, Molluscum contagiosum virus
acgacaagcguaagccaccgcgc

SEQ ID NO: 4031512 - RNA, 18 nt, Molluscum contagiosum virus
acgacaaggaaaggcacc

SEQ ID NO: 4031513 - RNA, 20 nt, Molluscum contagiosum virus
acgacacagcccuggacgac

SEQ ID NO: 4031514 - RNA, 14 nt, Molluscum contagiosum virus
acgacaugcacacg

SEQ ID NO: 4031515 - RNA, 15 nt, Molluscum contagiosum virus
acgaccacgugcagg

SEQ ID NO: 4031516 - RNA, 23 nt, Molluscum contagiosum virus
acgacugcuuugacacgcucauc

SEQ ID NO: 4031517 - RNA, 16 nt, Molluscum contagiosum virus
acgagaaaugcgcaca

SEQ ID NO: 4031518 - RNA, 12 nt, Molluscum contagiosum virus
acgagagggcgc

SEQ ID NO: 4031519 - RNA, 19 nt, Molluscum contagiosum virus
acgagaugggcccgcgcgc

SEQ ID NO: 4031520 - RNA, 19 nt, Molluscum contagiosum virus
acgagcagcgcuugcgcgc

SEQ ID NO: 4031521 - RNA, 13 nt, Molluscum contagiosum virus
acgagcagcugcu

SEQ ID NO: 4031522 - RNA, 16 nt, Molluscum contagiosum virus
acgagcagcugcugcg

SEQ ID NO: 4031523 - RNA, 16 nt, Molluscum contagiosum virus
acgagcgcgugccgcu

SEQ ID NO: 4031524 - RNA, 13 nt, Molluscum contagiosum virus
acgagcugcugcc

SEQ ID NO: 4031525 - RNA, 16 nt, Molluscum contagiosum virus
acgagcugcugcgcgc

SEQ ID NO: 4031526 - RNA, 20 nt, Molluscum contagiosum virus
acgagcugcugcgcgccgcc

SEQ ID NO: 4031527 - RNA, 14 nt, Molluscum contagiosum virus
acgagcugugcgag

SEQ ID NO: 4031528 - RNA, 13 nt, Molluscum contagiosum virus
acgaggagccccg

SEQ ID NO: 4031529 - RNA, 14 nt, Molluscum contagiosum virus
acgaggccuacagc

SEQ ID NO: 4031530 - RNA, 23 nt, Molluscum contagiosum virus
acgaggccuacgugcugcgcacg

SEQ ID NO: 4031531 - RNA, 14 nt, Molluscum contagiosum virus
acgaggugcugcgc

SEQ ID NO: 4031532 - RNA, 23 nt, Molluscum contagiosum virus
acgaguucugcaucuucugccag

SEQ ID NO: 4031533 - RNA, 23 nt, Molluscum contagiosum virus
acgaucuucuucuugcgcaccuc

SEQ ID NO: 4031534 - RNA, 22 nt, Molluscum contagiosum virus
acgaugcaaacauguagcgcgc

SEQ ID NO: 4031535 - RNA, 14 nt, Molluscum contagiosum virus
acgcaaaugcgcgc

SEQ ID NO: 4031536 - RNA, 21 nt, Molluscum contagiosum virus
acgcaaccuacuugcucgugu

SEQ ID NO: 4031537 - RNA, 15 nt, Molluscum contagiosum virus
acgcaagcguacgcg

SEQ ID NO: 4031538 - RNA, 21 nt, Molluscum contagiosum virus
acgcacagccccugcugcucg

SEQ ID NO: 4031539 - RNA, 18 nt, Molluscum contagiosum virus
acgcacagggcugcgugg

SEQ ID NO: 4031540 - RNA, 22 nt, Molluscum contagiosum virus
acgcagaccacggcgcgccgcc

SEQ ID NO: 4031541 - RNA, 16 nt, Molluscum contagiosum virus
acgccagguguuccug

SEQ ID NO: 4031542 - RNA, 22 nt, Molluscum contagiosum virus
acgcccgagggcgggcacgugc

SEQ ID NO: 4031543 - RNA, 14 nt, Molluscum contagiosum virus
acgccgagcccgag

SEQ ID NO: 4031544 - RNA, 17 nt, Molluscum contagiosum virus
acgccgccagcgacgag

SEQ ID NO: 4031545 - RNA, 16 nt, Molluscum contagiosum virus
acgccguccgcgcagc

SEQ ID NO: 4031546 - RNA, 15 nt, Molluscum contagiosum virus
acgccguguaccgcc

SEQ ID NO: 4031547 - RNA, 14 nt, Molluscum contagiosum virus
acgccuagccugca

SEQ ID NO: 4031548 - RNA, 16 nt, Molluscum contagiosum virus
acgccuagccugcagu

SEQ ID NO: 4031549 - RNA, 18 nt, Molluscum contagiosum virus
acgccuccaagaagaggc

SEQ ID NO: 4031550 - RNA, 16 nt, Molluscum contagiosum virus
acgccuucguggagcc

SEQ ID NO: 4031551 - RNA, 15 nt, Molluscum contagiosum virus
acgcgaaacuggacu

SEQ ID NO: 4031552 - RNA, 20 nt, Molluscum contagiosum virus
acgcgaaacuggacugagcc

SEQ ID NO: 4031553 - RNA, 23 nt, Molluscum contagiosum virus
acgcgaaguuccugcauuucaug

SEQ ID NO: 4031554 - RNA, 23 nt, Molluscum contagiosum virus
acgcgaccuucacucgcucgcgc

SEQ ID NO: 4031555 - RNA, 22 nt, Molluscum contagiosum virus
acgcgacgcgcguggagcgcgc

SEQ ID NO: 4031556 - RNA, 18 nt, Molluscum contagiosum virus
acgcgacggugugccgcu

SEQ ID NO: 4031557 - RNA, 21 nt, Molluscum contagiosum virus
acgcgcaaggccgcgcccaag

SEQ ID NO: 4031558 - RNA, 24 nt, Molluscum contagiosum virus
acgcgcaagugugcgcaucccucg

SEQ ID NO: 4031559 - RNA, 13 nt, Molluscum contagiosum virus
acgcgcacacgcu

SEQ ID NO: 4031560 - RNA, 18 nt, Molluscum contagiosum virus
acgcgcacuugccuggcg

SEQ ID NO: 4031561 - RNA, 12 nt, Molluscum contagiosum virus
acgcgcagcugu

SEQ ID NO: 4031562 - RNA, 15 nt, Molluscum contagiosum virus
acgcgcccuggagcg

SEQ ID NO: 4031563 - RNA, 19 nt, Molluscum contagiosum virus
acgcgccucgagcagguca

SEQ ID NO: 4031564 - RNA, 14 nt, Molluscum contagiosum virus
acgcgcgugguaca

SEQ ID NO: 4031565 - RNA, 21 nt, Molluscum contagiosum virus
acgcgcuaccgcaagcucaug

SEQ ID NO: 4031566 - RNA, 18 nt, Molluscum contagiosum virus
acgcgcugcuagagaacc

SEQ ID NO: 4031567 - RNA, 18 nt, Molluscum contagiosum virus
acgcgcuugcgcggaaga

SEQ ID NO: 4031568 - RNA, 15 nt, Molluscum contagiosum virus
acgcggacgcgcagc

SEQ ID NO: 4031569 - RNA, 23 nt, Molluscum contagiosum virus
acgcggaggucgagcgcgccgcg

SEQ ID NO: 4031570 - RNA, 17 nt, Molluscum contagiosum virus
acgcggaugccacgcag

SEQ ID NO: 4031571 - RNA, 22 nt, Molluscum contagiosum virus
acgcggcguacaucgacuacgc

SEQ ID NO: 4031572 - RNA, 14 nt, Molluscum contagiosum virus
acgcggugcgcgcg

SEQ ID NO: 4031573 - RNA, 23 nt, Molluscum contagiosum virus
acgcgugcugcgcggcgccgcag

SEQ ID NO: 4031574 - RNA, 17 nt, Molluscum contagiosum virus
acgcuacagcagccgca

SEQ ID NO: 4031575 - RNA, 23 nt, Molluscum contagiosum virus
acgcucaucucgcagacgcagcg

SEQ ID NO: 4031576 - RNA, 19 nt, Molluscum contagiosum virus
acgcucgcgacgugcgcgc

SEQ ID NO: 4031577 - RNA, 17 nt, Molluscum contagiosum virus
acgcucggcugccgugc

SEQ ID NO: 4031578 - RNA, 23 nt, Molluscum contagiosum virus
acgcugcagcuaggauccugcuc

SEQ ID NO: 4031579 - RNA, 16 nt, Molluscum contagiosum virus
acgcugcgcgugcugg

SEQ ID NO: 4031580 - RNA, 20 nt, Molluscum contagiosum virus
acgcugcgcgugcugggccc

SEQ ID NO: 4031581 - RNA, 20 nt, Molluscum contagiosum virus
acgcugcucgugcugcucug

SEQ ID NO: 4031582 - RNA, 17 nt, Molluscum contagiosum virus
acgcuggucacgcgcuu

SEQ ID NO: 4031583 - RNA, 18 nt, Molluscum contagiosum virus
acgcuucgcauugaccuc

SEQ ID NO: 4031584 - RNA, 19 nt, Molluscum contagiosum virus
acgcuuguccgcggacgcg

SEQ ID NO: 4031585 - RNA, 16 nt, Molluscum contagiosum virus
acggacaugagcuugc

SEQ ID NO: 4031586 - RNA, 12 nt, Molluscum contagiosum virus
acggacccgcga

SEQ ID NO: 4031587 - RNA, 15 nt, Molluscum contagiosum virus
acggacccgcgaacg

SEQ ID NO: 4031588 - RNA, 21 nt, Molluscum contagiosum virus
acggacuuuucgcgcgugcgc

SEQ ID NO: 4031589 - RNA, 20 nt, Molluscum contagiosum virus
acggcaaacgccacuggguc

SEQ ID NO: 4031590 - RNA, 22 nt, Molluscum contagiosum virus
acggcaaguuccuggugugcca

SEQ ID NO: 4031591 - RNA, 15 nt, Molluscum contagiosum virus
acggcacgcugagca

SEQ ID NO: 4031592 - RNA, 17 nt, Molluscum contagiosum virus
acggcccgggugcgcgc

SEQ ID NO: 4031593 - RNA, 19 nt, Molluscum contagiosum virus
acggcccgggugcgcgcgc

SEQ ID NO: 4031594 - RNA, 13 nt, Molluscum contagiosum virus
acggccgucuccu

SEQ ID NO: 4031595 - RNA, 23 nt, Molluscum contagiosum virus
acggccuucuccucgcucugcuc

SEQ ID NO: 4031596 - RNA, 14 nt, Molluscum contagiosum virus
acggcgacgacagc

SEQ ID NO: 4031597 - RNA, 20 nt, Molluscum contagiosum virus
acggcgacuuguagugcccg

SEQ ID NO: 4031598 - RNA, 15 nt, Molluscum contagiosum virus
acggcgagcgccgcu

SEQ ID NO: 4031599 - RNA, 13 nt, Molluscum contagiosum virus
acggcgagcgcgc

SEQ ID NO: 4031600 - RNA, 21 nt, Molluscum contagiosum virus
acggcgccuucgucgcgcgcu

SEQ ID NO: 4031601 - RNA, 14 nt, Molluscum contagiosum virus
acggcgcgcaccua

SEQ ID NO: 4031602 - RNA, 13 nt, Molluscum contagiosum virus
acggcgcgcagcg

SEQ ID NO: 4031603 - RNA, 14 nt, Molluscum contagiosum virus
acggcgcucgccuc

SEQ ID NO: 4031604 - RNA, 20 nt, Molluscum contagiosum virus
acggcgcucgccucugggcg

SEQ ID NO: 4031605 - RNA, 19 nt, Molluscum contagiosum virus
acggcggcacccgccgcgg

SEQ ID NO: 4031606 - RNA, 17 nt, Molluscum contagiosum virus
acggcuaggcgcggcgg

SEQ ID NO: 4031607 - RNA, 19 nt, Molluscum contagiosum virus
acggcugccggcccccgga

SEQ ID NO: 4031608 - RNA, 16 nt, Molluscum contagiosum virus
acggcuguaaugugcu

SEQ ID NO: 4031609 - RNA, 14 nt, Molluscum contagiosum virus
acgggaacgagguc

SEQ ID NO: 4031610 - RNA, 20 nt, Molluscum contagiosum virus
acgggaagcugcacgugcag

SEQ ID NO: 4031611 - RNA, 15 nt, Molluscum contagiosum virus
acgggcacgagcacg

SEQ ID NO: 4031612 - RNA, 15 nt, Molluscum contagiosum virus
agcggcaagccgugc

SEQ ID NO: 4031613 - RNA, 21 nt, Molluscum contagiosum virus
agcggccacucucccgggcuc

SEQ ID NO: 4031614 - RNA, 14 nt, Molluscum contagiosum virus
agcggcgacuugcu

SEQ ID NO: 4031615 - RNA, 22 nt, Molluscum contagiosum virus
agcggcugcccgcggagaccac

SEQ ID NO: 4031616 - RNA, 14 nt, Molluscum contagiosum virus
agcgggaaacugcu

SEQ ID NO: 4031617 - RNA, 21 nt, Molluscum contagiosum virus
agcguacggcccgaaggccac

SEQ ID NO: 4031618 - RNA, 18 nt, Molluscum contagiosum virus
agcguccggcaugcgcgc

SEQ ID NO: 4031619 - RNA, 17 nt, Molluscum contagiosum virus
agcgucgaacuucuccu

SEQ ID NO: 4031620 - RNA, 14 nt, Molluscum contagiosum virus
agcgugcagacgac

SEQ ID NO: 4031621 - RNA, 16 nt, Molluscum contagiosum virus
agcgugcccuucuccg

SEQ ID NO: 4031622 - RNA, 22 nt, Molluscum contagiosum virus
agcgugcccuucuccgaggaaa

SEQ ID NO: 4031623 - RNA, 18 nt, Molluscum contagiosum virus
agcgugcgcgggcacgcc

SEQ ID NO: 4031624 - RNA, 20 nt, Molluscum contagiosum virus
agcguggcgcgcgagcugcu

SEQ ID NO: 4031625 - RNA, 19 nt, Molluscum contagiosum virus
agcguugucuugaugcugu

SEQ ID NO: 4031626 - RNA, 18 nt, Molluscum contagiosum virus
agcuaaaagagcugcugc

SEQ ID NO: 4031627 - RNA, 14 nt, Molluscum contagiosum virus
agcuagugcacacc

SEQ ID NO: 4031628 - RNA, 16 nt, Molluscum contagiosum virus
agcucaagacgcugcu

SEQ ID NO: 4031629 - RNA, 16 nt, Molluscum contagiosum virus
agcucacggcugugga

SEQ ID NO: 4031630 - RNA, 12 nt, Molluscum contagiosum virus
agcucagcaggc

SEQ ID NO: 4031631 - RNA, 16 nt, Molluscum contagiosum virus
agcucauagcccaugc

SEQ ID NO: 4031632 - RNA, 19 nt, Molluscum contagiosum virus
agcuccgcgacuaccugcu

SEQ ID NO: 4031633 - RNA, 14 nt, Molluscum contagiosum virus
agcucgcgcgcgag

SEQ ID NO: 4031634 - RNA, 21 nt, Molluscum contagiosum virus
agcucgguuggcggcgccgcg

SEQ ID NO: 4031635 - RNA, 19 nt, Molluscum contagiosum virus
agcucguggacagccugca

SEQ ID NO: 4031636 - RNA, 15 nt, Molluscum contagiosum virus
agcucucgcgcgcag

SEQ ID NO: 4031637 - RNA, 21 nt, Molluscum contagiosum virus
agcucugauuacauccugccc

SEQ ID NO: 4031638 - RNA, 22 nt, Molluscum contagiosum virus
agcucugauuacauccugcccu

SEQ ID NO: 4031639 - RNA, 17 nt, Molluscum contagiosum virus
agcugcaccggcgcgag

SEQ ID NO: 4031640 - RNA, 15 nt, Molluscum contagiosum virus
agcugcacgugcagc

SEQ ID NO: 4031641 - RNA, 19 nt, Molluscum contagiosum virus
agcugccauggcagcucgg

SEQ ID NO: 4031642 - RNA, 21 nt, Molluscum contagiosum virus
agcugcccuuuagcguggcgc

SEQ ID NO: 4031643 - RNA, 14 nt, Molluscum contagiosum virus
agcugcugcgcucc

SEQ ID NO: 4031644 - RNA, 14 nt, Molluscum contagiosum virus
agcugcugcggcuc

SEQ ID NO: 4031645 - RNA, 21 nt, Molluscum contagiosum virus
agcuggacggugcuggugcug

SEQ ID NO: 4031646 - RNA, 13 nt, Molluscum contagiosum virus
agcuggagcugcc

SEQ ID NO: 4031647 - RNA, 16 nt, Molluscum contagiosum virus
agcuggcguugccgag

SEQ ID NO: 4031648 - RNA, 17 nt, Molluscum contagiosum virus
agcuguaccuggugcgc

SEQ ID NO: 4031649 - RNA, 16 nt, Molluscum contagiosum virus
agcuguccgagccgga

SEQ ID NO: 4031650 - RNA, 13 nt, Molluscum contagiosum virus
agcugugccaucu

SEQ ID NO: 4031651 - RNA, 17 nt, Molluscum contagiosum virus
agcuuacuagacuggcu

SEQ ID NO: 4031652 - RNA, 19 nt, Molluscum contagiosum virus
agcuuccucaaggcgcacg

SEQ ID NO: 4031653 - RNA, 15 nt, Molluscum contagiosum virus
agcuucggacgagcu

SEQ ID NO: 4031654 - RNA, 15 nt, Molluscum contagiosum virus
agcuucucgccagaa

SEQ ID NO: 4031655 - RNA, 16 nt, Molluscum contagiosum virus
aggaaaggcaccccga

SEQ ID NO: 4031656 - RNA, 15 nt, Molluscum contagiosum virus
aggaaaggcacccgc

SEQ ID NO: 4031657 - RNA, 21 nt, Molluscum contagiosum virus
aggaaaggcacccgcaacaag

SEQ ID NO: 4031658 - RNA, 13 nt, Molluscum contagiosum virus
aggaacgaaaguc

SEQ ID NO: 4031659 - RNA, 23 nt, Molluscum contagiosum virus
aggaacgaggaaaggcacacccc

SEQ ID NO: 4031660 - RNA, 15 nt, Molluscum contagiosum virus
aggaacugcccgcgu

SEQ ID NO: 4031661 - RNA, 17 nt, Molluscum contagiosum virus
aggaagcaggucuuggg

SEQ ID NO: 4031662 - RNA, 21 nt, Molluscum contagiosum virus
aggaccucgcgcgccgccgca

SEQ ID NO: 4031663 - RNA, 13 nt, Molluscum contagiosum virus
aggacgagcugcu

SEQ ID NO: 4031664 - RNA, 22 nt, Molluscum contagiosum virus
aggacgccggcaagccgagcca

SEQ ID NO: 4031665 - RNA, 14 nt, Molluscum contagiosum virus
aggacgcgcggagc

SEQ ID NO: 4031666 - RNA, 17 nt, Molluscum contagiosum virus
aggagacguagagcagc

SEQ ID NO: 4031667 - RNA, 15 nt, Molluscum contagiosum virus
aggagagagagacau

SEQ ID NO: 4031668 - RNA, 14 nt, Molluscum contagiosum virus
aggagccgcccgcg

SEQ ID NO: 4031669 - RNA, 21 nt, Molluscum contagiosum virus
aggagccucuguccugcgugc

SEQ ID NO: 4031670 - RNA, 12 nt, Molluscum contagiosum virus
aggagcuguccg

SEQ ID NO: 4031671 - RNA, 19 nt, Molluscum contagiosum virus
aggagcuguccgagccgga

SEQ ID NO: 4031672 - RNA, 18 nt, Molluscum contagiosum virus
aggaggccaacgccagcu

SEQ ID NO: 4031673 - RNA, 15 nt, Molluscum contagiosum virus
aggagggagagcugc

SEQ ID NO: 4031674 - RNA, 17 nt, Molluscum contagiosum virus
aggaucacggcucugcg

SEQ ID NO: 4031675 - RNA, 19 nt, Molluscum contagiosum virus
aggaucggagcgcagcugc

SEQ ID NO: 4031676 - RNA, 14 nt, Molluscum contagiosum virus
aggaugcuggggcu

SEQ ID NO: 4031677 - RNA, 20 nt, Molluscum contagiosum virus
aggcaaaagccgccgcgcgc

SEQ ID NO: 4031678 - RNA, 20 nt, Molluscum contagiosum virus
aggcaaagcggggcgcgcgc

SEQ ID NO: 4031679 - RNA, 13 nt, Molluscum contagiosum virus
aggcaaaguucuc

SEQ ID NO: 4031680 - RNA, 13 nt, Molluscum contagiosum virus
aggcaagcgggcu

SEQ ID NO: 4031681 - RNA, 22 nt, Molluscum contagiosum virus
aggcacaccccuguaacaagga

SEQ ID NO: 4031682 - RNA, 12 nt, Molluscum contagiosum virus
aggcacccgcaa

SEQ ID NO: 4031683 - RNA, 20 nt, Molluscum contagiosum virus
aggcaccugcggcucgcacu

SEQ ID NO: 4031684 - RNA, 14 nt, Molluscum contagiosum virus
aggcagcugcugcg

SEQ ID NO: 4031685 - RNA, 15 nt, Molluscum contagiosum virus
aggccaccucgcacg

SEQ ID NO: 4031686 - RNA, 22 nt, Molluscum contagiosum virus
aggcccacuuccgugagcaguc

SEQ ID NO: 4031687 - RNA, 18 nt, Molluscum contagiosum virus
aggccccgcaccagugcc

SEQ ID NO: 4031688 - RNA, 14 nt, Molluscum contagiosum virus
aggccgagaugagc

SEQ ID NO: 4031689 - RNA, 19 nt, Molluscum contagiosum virus
aggccggucgcggaagacg

SEQ ID NO: 4031690 - RNA, 16 nt, Molluscum contagiosum virus
aggccucagccgagcg

SEQ ID NO: 4031691 - RNA, 23 nt, Molluscum contagiosum virus
aggccucagccgagcgccgccag

SEQ ID NO: 4031692 - RNA, 23 nt, Molluscum contagiosum virus
aggcgcaccuugacgccgcgcgc

SEQ ID NO: 4031693 - RNA, 24 nt, Molluscum contagiosum virus
aggcgcugguggaggagccgugga

SEQ ID NO: 4031694 - RNA, 11 nt, Molluscum contagiosum virus
aggcggcuccu

SEQ ID NO: 4031695 - RNA, 17 nt, Molluscum contagiosum virus
aggcggugggcgccgcg

SEQ ID NO: 4031696 - RNA, 17 nt, Molluscum contagiosum virus
aggcguaugcgccaagc

SEQ ID NO: 4031697 - RNA, 15 nt, Molluscum contagiosum virus
aggcucgagcugcau

SEQ ID NO: 4031698 - RNA, 18 nt, Molluscum contagiosum virus
aggcucgagcugcaucuu

SEQ ID NO: 4031699 - RNA, 19 nt, Molluscum contagiosum virus
aggcucgucguggacgcuc

SEQ ID NO: 4031700 - RNA, 14 nt, Molluscum contagiosum virus
aggcugcucccucu

SEQ ID NO: 4031701 - RNA, 13 nt, Molluscum contagiosum virus
aggcugcugccgc

SEQ ID NO: 4031702 - RNA, 14 nt, Molluscum contagiosum virus
agggaggcucgagc

SEQ ID NO: 4031703 - RNA, 22 nt, Molluscum contagiosum virus
agggaggcucgagcgcgcgccu

SEQ ID NO: 4031704 - RNA, 17 nt, Molluscum contagiosum virus
agggcagcucaagcugc

SEQ ID NO: 4031705 - RNA, 18 nt, Molluscum contagiosum virus
agggccugcgggcggcac

SEQ ID NO: 4031706 - RNA, 22 nt, Molluscum contagiosum virus
agggccugcgggcggcacacac

SEQ ID NO: 4031707 - RNA, 19 nt, Molluscum contagiosum virus
agggcgaccggagagggga

SEQ ID NO: 4031708 - RNA, 13 nt, Molluscum contagiosum virus
agggcgagucucc

SEQ ID NO: 4031709 - RNA, 19 nt, Molluscum contagiosum virus
agggcgcgcgucgagggcg

SEQ ID NO: 4031710 - RNA, 15 nt, Molluscum contagiosum virus
agggcgggcacgugc

SEQ ID NO: 4031711 - RNA, 21 nt, Molluscum contagiosum virus
agggcuccuucuucagcaggc

SEQ ID NO: 4031712 - RNA, 20 nt, Molluscum contagiosum virus
agggcuuccccccacggcag

SEQ ID NO: 4031713 - RNA, 19 nt, Molluscum contagiosum virus
aggggugauggcggugagc

SEQ ID NO: 4031714 - RNA, 22 nt, Molluscum contagiosum virus
agggguguuuccuugccuucuc

SEQ ID NO: 4031715 - RNA, 16 nt, Molluscum contagiosum virus
cgagggaugcgcacac

SEQ ID NO: 4031716 - RNA, 20 nt, Molluscum contagiosum virus
cgagggcgcgaccggcgugc

SEQ ID NO: 4031717 - RNA, 17 nt, Molluscum contagiosum virus
cgagggcgggcacgugc

SEQ ID NO: 4031718 - RNA, 16 nt, Molluscum contagiosum virus
cgagggcucguccucu

SEQ ID NO: 4031719 - RNA, 14 nt, Molluscum contagiosum virus
cgaggucgcgucca

SEQ ID NO: 4031720 - RNA, 19 nt, Molluscum contagiosum virus
cgaggugcgcgcaacacug

SEQ ID NO: 4031721 - RNA, 23 nt, Molluscum contagiosum virus
cgaggugcugcgccacgugcgca

SEQ ID NO: 4031722 - RNA, 20 nt, Molluscum contagiosum virus
cgagguggcacccuggcugc

SEQ ID NO: 4031723 - RNA, 12 nt, Molluscum contagiosum virus
cgaguaccgcgc

SEQ ID NO: 4031724 - RNA, 18 nt, Molluscum contagiosum virus
cgaguacugcugcggcuc

SEQ ID NO: 4031725 - RNA, 20 nt, Molluscum contagiosum virus
cgaguauacucgacgcgcgc

SEQ ID NO: 4031726 - RNA, 14 nt, Molluscum contagiosum virus
cgagucgcgccgag

SEQ ID NO: 4031727 - RNA, 18 nt, Molluscum contagiosum virus
cgagucguacacgcagag

SEQ ID NO: 4031728 - RNA, 12 nt, Molluscum contagiosum virus
cgagugcgcgug

SEQ ID NO: 4031729 - RNA, 15 nt, Molluscum contagiosum virus
cgagugcuggagcag

SEQ ID NO: 4031730 - RNA, 14 nt, Molluscum contagiosum virus
cgagugugugcauc

SEQ ID NO: 4031731 - RNA, 14 nt, Molluscum contagiosum virus
cgaguucacggcga

SEQ ID NO: 4031732 - RNA, 19 nt, Molluscum contagiosum virus
cgaguucugccggcucagc

SEQ ID NO: 4031733 - RNA, 17 nt, Molluscum contagiosum virus
cgaguugcgucucccgc

SEQ ID NO: 4031734 - RNA, 17 nt, Molluscum contagiosum virus
cgauaacaucugcuaua

SEQ ID NO: 4031735 - RNA, 18 nt, Molluscum contagiosum virus
cgauacaaaacaugcugu

SEQ ID NO: 4031736 - RNA, 20 nt, Molluscum contagiosum virus
cgauacaaaacaugcuguau

SEQ ID NO: 4031737 - RNA, 15 nt, Molluscum contagiosum virus
cgauaucgaucacgc

SEQ ID NO: 4031738 - RNA, 14 nt, Molluscum contagiosum virus
cgaucaagacauuu

SEQ ID NO: 4031739 - RNA, 19 nt, Molluscum contagiosum virus
cgaucuuccgcgacgagcu

SEQ ID NO: 4031740 - RNA, 18 nt, Molluscum contagiosum virus
cgaugagcgucucggugc

SEQ ID NO: 4031741 - RNA, 23 nt, Molluscum contagiosum virus
cgauggaaggcgaccagcugguc

SEQ ID NO: 4031742 - RNA, 20 nt, Molluscum contagiosum virus
cgaugguggcgcugcugccc

SEQ ID NO: 4031743 - RNA, 17 nt, Molluscum contagiosum virus
cgaugugacaacaugug

SEQ ID NO: 4031744 - RNA, 20 nt, Molluscum contagiosum virus
cgcaaaaggcacgaggcagc

SEQ ID NO: 4031745 - RNA, 18 nt, Molluscum contagiosum virus
cgcaaagucaucugccuc

SEQ ID NO: 4031746 - RNA, 13 nt, Molluscum contagiosum virus
cgcaaaucuguuc

SEQ ID NO: 4031747 - RNA, 23 nt, Molluscum contagiosum virus
cgcaacaaaagagcgcgccucuc

SEQ ID NO: 4031748 - RNA, 15 nt, Molluscum contagiosum virus
cgcaacacugcagaa

SEQ ID NO: 4031749 - RNA, 15 nt, Molluscum contagiosum virus
cgcaacauguccgca

SEQ ID NO: 4031750 - RNA, 14 nt, Molluscum contagiosum virus
cgcaagagccgccg

SEQ ID NO: 4031751 - RNA, 18 nt, Molluscum contagiosum virus
cgcaagcaccggcagcgc

SEQ ID NO: 4031752 - RNA, 12 nt, Molluscum contagiosum virus
cgcaagccagag

SEQ ID NO: 4031753 - RNA, 14 nt, Molluscum contagiosum virus
cgcaagcgcugcuc

SEQ ID NO: 4031754 - RNA, 19 nt, Molluscum contagiosum virus
cgcaagcgcugcucguaga

SEQ ID NO: 4031755 - RNA, 13 nt, Molluscum contagiosum virus
cgcaagcgugugu

SEQ ID NO: 4031756 - RNA, 18 nt, Molluscum contagiosum virus
cgcaaggaaaacugcauc

SEQ ID NO: 4031757 - RNA, 16 nt, Molluscum contagiosum virus
cgcaaggccgcgccca

SEQ ID NO: 4031758 - RNA, 20 nt, Molluscum contagiosum virus
cgcaaggugugcgcgcugca

SEQ ID NO: 4031759 - RNA, 14 nt, Molluscum contagiosum virus
cgcacaaccacagc

SEQ ID NO: 4031760 - RNA, 20 nt, Molluscum contagiosum virus
cgcacacgaaucgcucgcgg

SEQ ID NO: 4031761 - RNA, 21 nt, Molluscum contagiosum virus
cgcacacgcgucgggaagugu

SEQ ID NO: 4031762 - RNA, 16 nt, Molluscum contagiosum virus
cgcacacuugcgcguc

SEQ ID NO: 4031763 - RNA, 18 nt, Molluscum contagiosum virus
cgcacacuugcgcguccg

SEQ ID NO: 4031764 - RNA, 21 nt, Molluscum contagiosum virus
cgcacagacauggcccgcgcg

SEQ ID NO: 4031765 - RNA, 21 nt, Molluscum contagiosum virus
cgcacagucuccacgcgugcg

SEQ ID NO: 4031766 - RNA, 14 nt, Molluscum contagiosum virus
cgcaccagcugcaa

SEQ ID NO: 4031767 - RNA, 15 nt, Molluscum contagiosum virus
cgcaccagcugcaaa

SEQ ID NO: 4031768 - RNA, 13 nt, Molluscum contagiosum virus
cgcacccgcgccg

SEQ ID NO: 4031769 - RNA, 15 nt, Molluscum contagiosum virus
cgcaccuccuucgcg

SEQ ID NO: 4031770 - RNA, 20 nt, Molluscum contagiosum virus
cgcacgaagacuacggcacu

SEQ ID NO: 4031771 - RNA, 23 nt, Molluscum contagiosum virus
cgcacgagcugcugcccgccuuc

SEQ ID NO: 4031772 - RNA, 13 nt, Molluscum contagiosum virus
cgcacgaggagcc

SEQ ID NO: 4031773 - RNA, 15 nt, Molluscum contagiosum virus
cgcacgaggagcccc

SEQ ID NO: 4031774 - RNA, 14 nt, Molluscum contagiosum virus
cgcacgcagcaggc

SEQ ID NO: 4031775 - RNA, 22 nt, Molluscum contagiosum virus
cgcacgcagcaggcacgacgcc

SEQ ID NO: 4031776 - RNA, 16 nt, Molluscum contagiosum virus
cgcacgcucucgcugg

SEQ ID NO: 4031777 - RNA, 14 nt, Molluscum contagiosum virus
cgcacggaccucaa

SEQ ID NO: 4031778 - RNA, 15 nt, Molluscum contagiosum virus
cgcacggcagcggcg

SEQ ID NO: 4031779 - RNA, 19 nt, Molluscum contagiosum virus
cgcacggcuaggcgcggcg

SEQ ID NO: 4031780 - RNA, 24 nt, Molluscum contagiosum virus
cgcacggugugcuacugcacugca

SEQ ID NO: 4031781 - RNA, 21 nt, Molluscum contagiosum virus
cgcacgucuucgccgugugcg

SEQ ID NO: 4031782 - RNA, 15 nt, Molluscum contagiosum virus
cgcacgugcgcgccg

SEQ ID NO: 4031783 - RNA, 13 nt, Molluscum contagiosum virus
cgcacgugcugcg

SEQ ID NO: 4031784 - RNA, 16 nt, Molluscum contagiosum virus
cgcacucgcuggccuc

SEQ ID NO: 4031785 - RNA, 15 nt, Molluscum contagiosum virus
cgcacuucacggcgu

SEQ ID NO: 4031786 - RNA, 20 nt, Molluscum contagiosum virus
cgcagaaguggcgcugugcg

SEQ ID NO: 4031787 - RNA, 22 nt, Molluscum contagiosum virus
cgcagaggcgcguccgcggccg

SEQ ID NO: 4031788 - RNA, 17 nt, Molluscum contagiosum virus
cgcagcccacgugccag

SEQ ID NO: 4031789 - RNA, 15 nt, Molluscum contagiosum virus
cgcagcccgagcgcg

SEQ ID NO: 4031790 - RNA, 21 nt, Molluscum contagiosum virus
cgcagcccgagcgcgcgugcg

SEQ ID NO: 4031791 - RNA, 13 nt, Molluscum contagiosum virus
cgcagcgcccgcg

SEQ ID NO: 4031792 - RNA, 16 nt, Molluscum contagiosum virus
cgcagcgcgagcugug

SEQ ID NO: 4031793 - RNA, 18 nt, Molluscum contagiosum virus
cgcagcgcgagcugugca

SEQ ID NO: 4031794 - RNA, 17 nt, Molluscum contagiosum virus
cgcagcguccggcaugc

SEQ ID NO: 4031795 - RNA, 16 nt, Molluscum contagiosum virus
cgcagcugccggggcc

SEQ ID NO: 4031796 - RNA, 15 nt, Molluscum contagiosum virus
cgcagcugcgccugc

SEQ ID NO: 4031797 - RNA, 19 nt, Molluscum contagiosum virus
cgcaggaaaggucgggccc

SEQ ID NO: 4031798 - RNA, 14 nt, Molluscum contagiosum virus
cgcaggaccgcgac

SEQ ID NO: 4031799 - RNA, 21 nt, Molluscum contagiosum virus
cgcaggacgcggucgcgcccu

SEQ ID NO: 4031800 - RNA, 18 nt, Molluscum contagiosum virus
cgcaggacuggcaccugc

SEQ ID NO: 4031801 - RNA, 13 nt, Molluscum contagiosum virus
cgcaggccaggug

SEQ ID NO: 4031802 - RNA, 22 nt, Molluscum contagiosum virus
cgcaguaccaguaccugcugcc

SEQ ID NO: 4031803 - RNA, 18 nt, Molluscum contagiosum virus
cgcaguacccgagcugug

SEQ ID NO: 4031804 - RNA, 14 nt, Molluscum contagiosum virus
cgcagucccagcac

SEQ ID NO: 4031805 - RNA, 16 nt, Molluscum contagiosum virus
cgcagucgcaguaccc

SEQ ID NO: 4031806 - RNA, 21 nt, Molluscum contagiosum virus
cgcaguucggcgacacgcccg

SEQ ID NO: 4031807 - RNA, 23 nt, Molluscum contagiosum virus
cgcaguugugcguacccuggcag

SEQ ID NO: 4031808 - RNA, 17 nt, Molluscum contagiosum virus
cgcaguuuuuuuccgca

SEQ ID NO: 4031809 - RNA, 21 nt, Molluscum contagiosum virus
cgcaucagagaagugcuccgc

SEQ ID NO: 4031810 - RNA, 17 nt, Molluscum contagiosum virus
cgcaucccccgcguugu

SEQ ID NO: 4031811 - RNA, 16 nt, Molluscum contagiosum virus
cgcaugcaccuacgcg

SEQ ID NO: 4031812 - RNA, 22 nt, Molluscum contagiosum virus
cgcauggggaacagcuuggcac

SEQ ID NO: 4031813 - RNA, 15 nt, Molluscum contagiosum virus
cgcauguccacggac

SEQ ID NO: 4031814 - RNA, 16 nt, Molluscum contagiosum virus
cgcauucgcgcgcccc

SEQ ID NO: 4031815 - RNA, 16 nt, Molluscum contagiosum virus
cgcauuggcagcgcuu

SEQ ID NO: 4031816 - RNA, 22 nt, Molluscum contagiosum virus
cgccaaccaccacguggaccug

SEQ ID NO: 4031817 - RNA, 20 nt, Molluscum contagiosum virus
cgccaacgcggacgcgcagc

SEQ ID NO: 4031818 - RNA, 18 nt, Molluscum contagiosum virus
cgccaagccugcucacgg

SEQ ID NO: 4031819 - RNA, 22 nt, Molluscum contagiosum virus
cgccaagccugcucacggcggc

SEQ ID NO: 4031820 - RNA, 15 nt, Molluscum contagiosum virus
cgccaauggagccgc

SEQ ID NO: 4031821 - RNA, 16 nt, Molluscum contagiosum virus
cgccaccggcagugcu

SEQ ID NO: 4031822 - RNA, 19 nt, Molluscum contagiosum virus
cgccacgaagaacgcggcg

SEQ ID NO: 4031823 - RNA, 16 nt, Molluscum contagiosum virus
cgccacgagcgccgcg

SEQ ID NO: 4031824 - RNA, 21 nt, Molluscum contagiosum virus
cgccacgagcgccgcgacgcc

SEQ ID NO: 4031825 - RNA, 18 nt, Molluscum contagiosum virus
cgccacugcggcaacgag

SEQ ID NO: 4031826 - RNA, 18 nt, Molluscum contagiosum virus
cgccagcaguccgccguc

SEQ ID NO: 4031827 - RNA, 15 nt, Molluscum contagiosum virus
cgccagcgacgcgac

SEQ ID NO: 4031828 - RNA, 18 nt, Molluscum contagiosum virus
cgccagcgucgcgcgccg

SEQ ID NO: 4031829 - RNA, 21 nt, Molluscum contagiosum virus
cgccagcuaagccggagcagc

SEQ ID NO: 4031830 - RNA, 17 nt, Molluscum contagiosum virus
cgccagcuguagcagga

SEQ ID NO: 4031831 - RNA, 18 nt, Molluscum contagiosum virus
cgccagguguuccugccg

SEQ ID NO: 4031832 - RNA, 20 nt, Molluscum contagiosum virus
cgccauccgcgagcuaauca

SEQ ID NO: 4031833 - RNA, 18 nt, Molluscum contagiosum virus
cgccauccggcacugcgu

SEQ ID NO: 4031834 - RNA, 13 nt, Molluscum contagiosum virus
cgcccacgugcca

SEQ ID NO: 4031835 - RNA, 19 nt, Molluscum contagiosum virus
cgcccgacuuuucgcgccg

SEQ ID NO: 4031836 - RNA, 13 nt, Molluscum contagiosum virus
cgcccgagcgcgu

SEQ ID NO: 4031837 - RNA, 21 nt, Molluscum contagiosum virus
cgcccgcaaugcagugcacca

SEQ ID NO: 4031838 - RNA, 13 nt, Molluscum contagiosum virus
cgcccgccgagua

SEQ ID NO: 4031839 - RNA, 15 nt, Molluscum contagiosum virus
cgcccgccgaguacc

SEQ ID NO: 4031840 - RNA, 14 nt, Molluscum contagiosum virus
cgcccgcggcgcac

SEQ ID NO: 4031841 - RNA, 20 nt, Molluscum contagiosum virus
cgcccguguucgcggagcug

SEQ ID NO: 4031842 - RNA, 22 nt, Molluscum contagiosum virus
cgcccucacgugcugaucacgc

SEQ ID NO: 4031843 - RNA, 21 nt, Molluscum contagiosum virus
cgccgaaacacggccuccagc

SEQ ID NO: 4031844 - RNA, 19 nt, Molluscum contagiosum virus
cgccgacaacgcacccgcg

SEQ ID NO: 4031845 - RNA, 22 nt, Molluscum contagiosum virus
cgccgacugccgccgccgcgag

SEQ ID NO: 4031846 - RNA, 20 nt, Molluscum contagiosum virus
cgccgacuuccgacgggccg

SEQ ID NO: 4031847 - RNA, 17 nt, Molluscum contagiosum virus
cgccgagcccgagcccg

SEQ ID NO: 4031848 - RNA, 23 nt, Molluscum contagiosum virus
cgccgaggacuaccuggcggcgc

SEQ ID NO: 4031849 - RNA, 22 nt, Molluscum contagiosum virus
cgccgcaccucaccgcgcacau

SEQ ID NO: 4031850 - RNA, 15 nt, Molluscum contagiosum virus
cgccgccagcuccgc

SEQ ID NO: 4031851 - RNA, 15 nt, Molluscum contagiosum virus
cgccgccaugcugcg

SEQ ID NO: 4031852 - RNA, 17 nt, Molluscum contagiosum virus
cgccgccaugcugcgcg

SEQ ID NO: 4031853 - RNA, 13 nt, Molluscum contagiosum virus
cgccgccucgcgc

SEQ ID NO: 4031854 - RNA, 14 nt, Molluscum contagiosum virus
cgccgcgcgccgcg

SEQ ID NO: 4031855 - RNA, 14 nt, Molluscum contagiosum virus
cgccgcgcgcgccg

SEQ ID NO: 4031856 - RNA, 15 nt, Molluscum contagiosum virus
cgccgcggccgcgag

SEQ ID NO: 4031857 - RNA, 21 nt, Molluscum contagiosum virus
cgccgcgggcgcagagccugc

SEQ ID NO: 4031858 - RNA, 16 nt, Molluscum contagiosum virus
cgccgcguacgcgccg

SEQ ID NO: 4031859 - RNA, 15 nt, Molluscum contagiosum virus
cgccgcgugcccguc

SEQ ID NO: 4031860 - RNA, 18 nt, Molluscum contagiosum virus
cgccgcucggaauuccuu

SEQ ID NO: 4031861 - RNA, 18 nt, Molluscum contagiosum virus
cgccgcugcccgcgcacg

SEQ ID NO: 4031862 - RNA, 17 nt, Molluscum contagiosum virus
cgccgcugcgcaucugc

SEQ ID NO: 4031863 - RNA, 12 nt, Molluscum contagiosum virus
cgccgcugcgcc

SEQ ID NO: 4031864 - RNA, 16 nt, Molluscum contagiosum virus
cgccggacagcucagc

SEQ ID NO: 4031865 - RNA, 19 nt, Molluscum contagiosum virus
cgccggcauccggccgagg

SEQ ID NO: 4031866 - RNA, 14 nt, Molluscum contagiosum virus
cgccggcgcgcgcg

SEQ ID NO: 4031867 - RNA, 18 nt, Molluscum contagiosum virus
cgccggcgcggcgagccg

SEQ ID NO: 4031868 - RNA, 14 nt, Molluscum contagiosum virus
cgccgggccccugu

SEQ ID NO: 4031869 - RNA, 19 nt, Molluscum contagiosum virus
cgccggugcgugcccagca

SEQ ID NO: 4031870 - RNA, 16 nt, Molluscum contagiosum virus
cgccguccgcgcagcc

SEQ ID NO: 4031871 - RNA, 22 nt, Molluscum contagiosum virus
cgccgugggcagcuucugcucg

SEQ ID NO: 4031872 - RNA, 15 nt, Molluscum contagiosum virus
cgccguuggccaccu

SEQ ID NO: 4031873 - RNA, 13 nt, Molluscum contagiosum virus
cgccuagcuccag

SEQ ID NO: 4031874 - RNA, 17 nt, Molluscum contagiosum virus
cgccucgcgcgcacugc

SEQ ID NO: 4031875 - RNA, 21 nt, Molluscum contagiosum virus
cgccucggacuucgacgcgcg

SEQ ID NO: 4031876 - RNA, 17 nt, Molluscum contagiosum virus
cgccucucgaggccggc

SEQ ID NO: 4031877 - RNA, 22 nt, Molluscum contagiosum virus
cgccucugggcgucgcacaguu

SEQ ID NO: 4031878 - RNA, 18 nt, Molluscum contagiosum virus
cgccugccgcgagcacug

SEQ ID NO: 4031879 - RNA, 15 nt, Molluscum contagiosum virus
cgccugcucucgcgc

SEQ ID NO: 4031880 - RNA, 21 nt, Molluscum contagiosum virus
cgccugcucucgcgcgccagc

SEQ ID NO: 4031881 - RNA, 12 nt, Molluscum contagiosum virus
cgccuggagcgc

SEQ ID NO: 4031882 - RNA, 14 nt, Molluscum contagiosum virus
cgccugugccugca

SEQ ID NO: 4031883 - RNA, 16 nt, Molluscum contagiosum virus
cgccugugccugcaag

SEQ ID NO: 4031884 - RNA, 13 nt, Molluscum contagiosum virus
cgccuucugccug

SEQ ID NO: 4031885 - RNA, 18 nt, Molluscum contagiosum virus
cgccuugcagcgcagcag

SEQ ID NO: 4031886 - RNA, 12 nt, Molluscum contagiosum virus
cgccuuuccccg

SEQ ID NO: 4031887 - RNA, 13 nt, Molluscum contagiosum virus
cgccuuugcgcug

SEQ ID NO: 4031888 - RNA, 21 nt, Molluscum contagiosum virus
cgcgaaaaccggaggcugcgc

SEQ ID NO: 4031889 - RNA, 22 nt, Molluscum contagiosum virus
cgcgaaagaggaaagcgcacac

SEQ ID NO: 4031890 - RNA, 19 nt, Molluscum contagiosum virus
cgcgaacgugcgaacacgg

SEQ ID NO: 4031891 - RNA, 23 nt, Molluscum contagiosum virus
cgcgaacuacuuccugcagcugu

SEQ ID NO: 4031892 - RNA, 16 nt, Molluscum contagiosum virus
cgcgaaguuccugcau

SEQ ID NO: 4031893 - RNA, 17 nt, Molluscum contagiosum virus
cgcgacaugccucgcgg

SEQ ID NO: 4031894 - RNA, 17 nt, Molluscum contagiosum virus
cgcgaccuacuccuggc

SEQ ID NO: 4031895 - RNA, 22 nt, Molluscum contagiosum virus
cgcgacgcaaaagaggccugcu

SEQ ID NO: 4031896 - RNA, 21 nt, Molluscum contagiosum virus
cgcgacgccguccgcgcagcc

SEQ ID NO: 4031897 - RNA, 17 nt, Molluscum contagiosum virus
cgcgacgcguccgccuc

SEQ ID NO: 4031898 - RNA, 17 nt, Molluscum contagiosum virus
cgcgacggugugccgcu

SEQ ID NO: 4031899 - RNA, 23 nt, Molluscum contagiosum virus
cgcgacggugugccgcugguggg

SEQ ID NO: 4031900 - RNA, 18 nt, Molluscum contagiosum virus
cgcgacguccuagagcag

SEQ ID NO: 4031901 - RNA, 17 nt, Molluscum contagiosum virus
cgcgagacgggcacgcg

SEQ ID NO: 4031902 - RNA, 23 nt, Molluscum contagiosum virus
cgcgagagcuacagcaugcgugc

SEQ ID NO: 4031903 - RNA, 13 nt, Molluscum contagiosum virus
cgcgagaugcgcg

SEQ ID NO: 4031904 - RNA, 19 nt, Molluscum contagiosum virus
cgcgagaugcgcggacaga

SEQ ID NO: 4031905 - RNA, 22 nt, Molluscum contagiosum virus
cgcgagcacccccgcugcacgc

SEQ ID NO: 4031906 - RNA, 12 nt, Molluscum contagiosum virus
cgcgagcagcug

SEQ ID NO: 4031907 - RNA, 22 nt, Molluscum contagiosum virus
cgcgagcaguucgcgcgccugc

SEQ ID NO: 4031908 - RNA, 14 nt, Molluscum contagiosum virus
cgcgagcaugccgc

SEQ ID NO: 4031909 - RNA, 23 nt, Molluscum contagiosum virus
cgcgagcgcaugcgcgccgcgcu

SEQ ID NO: 4031910 - RNA, 14 nt, Molluscum contagiosum virus
cgcgagcgcgcgcu

SEQ ID NO: 4031911 - RNA, 12 nt, Molluscum contagiosum virus
cgcgagcugcua

SEQ ID NO: 4031912 - RNA, 13 nt, Molluscum contagiosum virus
cgcgagcugcugc

SEQ ID NO: 4031913 - RNA, 20 nt, Molluscum contagiosum virus
cgcgaggcaugucgcggugc

SEQ ID NO: 4031914 - RNA, 17 nt, Molluscum contagiosum virus
cgcgagggcgcgcugga

SEQ ID NO: 4031915 - RNA, 18 nt, Molluscum contagiosum virus
cgcgagucgcgccgagga

SEQ ID NO: 4031916 - RNA, 12 nt, Molluscum contagiosum virus
cgcgagugugca

SEQ ID NO: 4031917 - RNA, 23 nt, Molluscum contagiosum virus
cgcgaguugcgucucccgcggcc

SEQ ID NO: 4031918 - RNA, 19 nt, Molluscum contagiosum virus
cgcgaucuuccgcgacgag

SEQ ID NO: 4031919 - RNA, 14 nt, Molluscum contagiosum virus
cgcgaugugcaccu

SEQ ID NO: 4031920 - RNA, 22 nt, Molluscum contagiosum virus
cgcggacuucucgcucacgcgc

SEQ ID NO: 4031921 - RNA, 15 nt, Molluscum contagiosum virus
cgcggagcgcgcacg

SEQ ID NO: 4031922 - RNA, 21 nt, Molluscum contagiosum virus
cgcggaggucgagcgcgccgc

SEQ ID NO: 4031923 - RNA, 18 nt, Molluscum contagiosum virus
cgcggauauggcgcgccg

SEQ ID NO: 4031924 - RNA, 17 nt, Molluscum contagiosum virus
cgcggaucugcgcacac

SEQ ID NO: 4031925 - RNA, 17 nt, Molluscum contagiosum virus
cgcggaugcaggcacug

SEQ ID NO: 4031926 - RNA, 16 nt, Molluscum contagiosum virus
cgcggaugccacgcag

SEQ ID NO: 4031927 - RNA, 17 nt, Molluscum contagiosum virus
cgcggcagcucugcagc

SEQ ID NO: 4031928 - RNA, 21 nt, Molluscum contagiosum virus
cgcggccacgcacucgcuggc

SEQ ID NO: 4031929 - RNA, 22 nt, Molluscum contagiosum virus
cgcggccauggucacgcgcacg

SEQ ID NO: 4031930 - RNA, 19 nt, Molluscum contagiosum virus
cgcggcccgcgggcugcaa

SEQ ID NO: 4031931 - RNA, 12 nt, Molluscum contagiosum virus
cgcggccgccac

SEQ ID NO: 4031932 - RNA, 19 nt, Molluscum contagiosum virus
cgcggccguggcacugacg

SEQ ID NO: 4031933 - RNA, 12 nt, Molluscum contagiosum virus
cgcggcgcacaa

SEQ ID NO: 4031934 - RNA, 18 nt, Molluscum contagiosum virus
cgcggcgcacggugugcu

SEQ ID NO: 4031935 - RNA, 17 nt, Molluscum contagiosum virus
cgcggcgccuugcuagu

SEQ ID NO: 4031936 - RNA, 12 nt, Molluscum contagiosum virus
cgcggcgcgccg

SEQ ID NO: 4031937 - RNA, 13 nt, Molluscum contagiosum virus
cgcggcgcgccgg

SEQ ID NO: 4031938 - RNA, 16 nt, Molluscum contagiosum virus
cgcggcgcgugccagu

SEQ ID NO: 4031939 - RNA, 17 nt, Molluscum contagiosum virus
cgcggcgcuacuggccg

SEQ ID NO: 4031940 - RNA, 22 nt, Molluscum contagiosum virus
cgcggcgggcgaaagcgccgcg

SEQ ID NO: 4031941 - RNA, 18 nt, Molluscum contagiosum virus
cgcggcgugugcgggcuc

SEQ ID NO: 4031942 - RNA, 23 nt, Molluscum contagiosum virus
cgcggcuagcaccgcaugggccc

SEQ ID NO: 4031943 - RNA, 17 nt, Molluscum contagiosum virus
cgcggcuuggcgcccuu

SEQ ID NO: 4031944 - RNA, 13 nt, Molluscum contagiosum virus
cgcgggcccgugc

SEQ ID NO: 4031945 - RNA, 16 nt, Molluscum contagiosum virus
cgcgggccgccgggcc

SEQ ID NO: 4031946 - RNA, 19 nt, Molluscum contagiosum virus
cgcgggccuguccgcgggc

SEQ ID NO: 4031947 - RNA, 22 nt, Molluscum contagiosum virus
cgcgggccuguccgcgggcgcg

SEQ ID NO: 4031948 - RNA, 14 nt, Molluscum contagiosum virus
cgcgggcgcgcccg

SEQ ID NO: 4031949 - RNA, 13 nt, Molluscum contagiosum virus
cgcgggcgcggag

SEQ ID NO: 4031950 - RNA, 17 nt, Molluscum contagiosum virus
cgcgggcguguccgcgg

SEQ ID NO: 4031951 - RNA, 19 nt, Molluscum contagiosum virus
cgcgggcucaagucgcccu

SEQ ID NO: 4031952 - RNA, 13 nt, Molluscum contagiosum virus
cgcggggcuccuc

SEQ ID NO: 4031953 - RNA, 22 nt, Molluscum contagiosum virus
cgcggggcucguccucgggcgc

SEQ ID NO: 4031954 - RNA, 13 nt, Molluscum contagiosum virus
cgcgguccagccg

SEQ ID NO: 4031955 - RNA, 19 nt, Molluscum contagiosum virus
cgcgguccuguccgcggac

SEQ ID NO: 4031956 - RNA, 20 nt, Molluscum contagiosum virus
cgcggucgacgagugcgccg

SEQ ID NO: 4031957 - RNA, 22 nt, Molluscum contagiosum virus
cgcggucgacgagugcgccgcg

SEQ ID NO: 4031958 - RNA, 19 nt, Molluscum contagiosum virus
cgcggugagugcgcgcacg

SEQ ID NO: 4031959 - RNA, 13 nt, Molluscum contagiosum virus
cgcgguggcaggc

SEQ ID NO: 4031960 - RNA, 16 nt, Molluscum contagiosum virus
cgcgguggccgcgccg

SEQ ID NO: 4031961 - RNA, 19 nt, Molluscum contagiosum virus
cgcgguggccgcgccgggc

SEQ ID NO: 4031962 - RNA, 20 nt, Molluscum contagiosum virus
cgcguacagcgcgcgugccg

SEQ ID NO: 4031963 - RNA, 17 nt, Molluscum contagiosum virus
cgcgucacggauacugu

SEQ ID NO: 4031964 - RNA, 20 nt, Molluscum contagiosum virus
cgcguccacaaagacggggc

SEQ ID NO: 4031965 - RNA, 23 nt, Molluscum contagiosum virus
cgcguccacaaagacggggccgc

SEQ ID NO: 4031966 - RNA, 21 nt, Molluscum contagiosum virus
cgcguccacaaaggcgggccc

SEQ ID NO: 4031967 - RNA, 21 nt, Molluscum contagiosum virus
cgcguccgcaucggcgccgcc

SEQ ID NO: 4031968 - RNA, 15 nt, Molluscum contagiosum virus
cgcgucgagggcgcc

SEQ ID NO: 4031969 - RNA, 19 nt, Molluscum contagiosum virus
cgcgucgcggucgcggagc

SEQ ID NO: 4031970 - RNA, 20 nt, Molluscum contagiosum virus
cgcgucguagacgcgcccgu

SEQ ID NO: 4031971 - RNA, 19 nt, Molluscum contagiosum virus
cgcgucguucucuaccagc

SEQ ID NO: 4031972 - RNA, 17 nt, Molluscum contagiosum virus
cgcgugaguccgcggcg

SEQ ID NO: 4031973 - RNA, 14 nt, Molluscum contagiosum virus
cgcgugcauggcac

SEQ ID NO: 4031974 - RNA, 13 nt, Molluscum contagiosum virus
cgcgugccgcugc

SEQ ID NO: 4031975 - RNA, 19 nt, Molluscum contagiosum virus
cgcgugccgcugcgcggag

SEQ ID NO: 4031976 - RNA, 16 nt, Molluscum contagiosum virus
cgcgugccucugccag

SEQ ID NO: 4031977 - RNA, 12 nt, Molluscum contagiosum virus
cgcgugcgcgug

SEQ ID NO: 4031978 - RNA, 16 nt, Molluscum contagiosum virus
cgcgugcgugcugcgc

SEQ ID NO: 4031979 - RNA, 19 nt, Molluscum contagiosum virus
cgcgugcucacgcccuuca

SEQ ID NO: 4031980 - RNA, 15 nt, Molluscum contagiosum virus
cgcgugcucgcgagc

SEQ ID NO: 4031981 - RNA, 23 nt, Molluscum contagiosum virus
cgcgugcucugcuccgcggaggc

SEQ ID NO: 4031982 - RNA, 14 nt, Molluscum contagiosum virus
cgcgugcuggacgc

SEQ ID NO: 4031983 - RNA, 22 nt, Molluscum contagiosum virus
cgcgugcuggacgcgcacgcgg

SEQ ID NO: 4031984 - RNA, 19 nt, Molluscum contagiosum virus
cgcguggugcuuacugcgg

SEQ ID NO: 4031985 - RNA, 16 nt, Molluscum contagiosum virus
cgcgugucgcggagca

SEQ ID NO: 4031986 - RNA, 22 nt, Molluscum contagiosum virus
cgcgugucugcgcucgccugcu

SEQ ID NO: 4031987 - RNA, 16 nt, Molluscum contagiosum virus
cgcgugucuggagccc

SEQ ID NO: 4031988 - RNA, 14 nt, Molluscum contagiosum virus
cgcguucacaaagg

SEQ ID NO: 4031989 - RNA, 15 nt, Molluscum contagiosum virus
cgcguucggaacgcg

SEQ ID NO: 4031990 - RNA, 17 nt, Molluscum contagiosum virus
cgcguucuccaggaacg

SEQ ID NO: 4031991 - RNA, 18 nt, Molluscum contagiosum virus
cgcguugccgcccgccga

SEQ ID NO: 4031992 - RNA, 16 nt, Molluscum contagiosum virus
cgcguuucggccugca

SEQ ID NO: 4031993 - RNA, 16 nt, Molluscum contagiosum virus
cgcguuuucgcggccu

SEQ ID NO: 4031994 - RNA, 18 nt, Molluscum contagiosum virus
cgcucaacgugggcaccu

SEQ ID NO: 4031995 - RNA, 22 nt, Molluscum contagiosum virus
cgcuccggucaccgcguccgcu

SEQ ID NO: 4031996 - RNA, 15 nt, Molluscum contagiosum virus
cgcuccuucucaggg

SEQ ID NO: 4031997 - RNA, 22 nt, Molluscum contagiosum virus
cgcucgaacgcgcgugcgcgug

SEQ ID NO: 4031998 - RNA, 20 nt, Molluscum contagiosum virus
cgcucgagcuccgagggcgc

SEQ ID NO: 4031999 - RNA, 13 nt, Molluscum contagiosum virus
cgcucgagggcgc

SEQ ID NO: 4032000 - RNA, 22 nt, Molluscum contagiosum virus
cgcucgcgcaaguccagcgcgc

SEQ ID NO: 4032001 - RNA, 12 nt, Molluscum contagiosum virus
cgcucgcucagc

SEQ ID NO: 4032002 - RNA, 15 nt, Molluscum contagiosum virus
cgcucggcacucgcu

SEQ ID NO: 4032003 - RNA, 16 nt, Molluscum contagiosum virus
cgcucggcccgcggac

SEQ ID NO: 4032004 - RNA, 18 nt, Molluscum contagiosum virus
cgcucggcguggugcugg

SEQ ID NO: 4032005 - RNA, 20 nt, Molluscum contagiosum virus
cgcucggcguggugcuggcc

SEQ ID NO: 4032006 - RNA, 12 nt, Molluscum contagiosum virus
cgcucgggccgg

SEQ ID NO: 4032007 - RNA, 21 nt, Molluscum contagiosum virus
cgcucgggccggcgcgccgcg

SEQ ID NO: 4032008 - RNA, 17 nt, Molluscum contagiosum virus
cgcucguccagcugcgc

SEQ ID NO: 4032009 - RNA, 16 nt, Molluscum contagiosum virus
cgcucuacgccagcga

SEQ ID NO: 4032010 - RNA, 17 nt, Molluscum contagiosum virus
cgcucuccaugcgcgcg

SEQ ID NO: 4032011 - RNA, 17 nt, Molluscum contagiosum virus
cgcucuuacugcagcag

SEQ ID NO: 4032012 - RNA, 12 nt, Molluscum contagiosum virus
cgcugagcgcag

SEQ ID NO: 4032013 - RNA, 16 nt, Molluscum contagiosum virus
cgcugaguuacguggc

SEQ ID NO: 4032014 - RNA, 22 nt, Molluscum contagiosum virus
cgcugaucaccgaggagccgcg

SEQ ID NO: 4032015 - RNA, 16 nt, Molluscum contagiosum virus
cgcugcaaggcgcgcg

SEQ ID NO: 4032016 - RNA, 12 nt, Molluscum contagiosum virus
cgcugccagaga

SEQ ID NO: 4032017 - RNA, 17 nt, Molluscum contagiosum virus
cgcugcccgcgcacaac

SEQ ID NO: 4032018 - RNA, 22 nt, Molluscum contagiosum virus
cgcugccugugcuacgcgagca

SEQ ID NO: 4032019 - RNA, 11 nt, Molluscum contagiosum virus
cgcugcgccac

SEQ ID NO: 4032020 - RNA, 14 nt, Molluscum contagiosum virus
cgcugcgccacugc

SEQ ID NO: 4032021 - RNA, 18 nt, Molluscum contagiosum virus
cgcugcgccggcugcgcc

SEQ ID NO: 4032022 - RNA, 14 nt, Molluscum contagiosum virus
cgcugcgcgccgcg

SEQ ID NO: 4032023 - RNA, 17 nt, Molluscum contagiosum virus
cgcugcgcgcucuggag

SEQ ID NO: 4032024 - RNA, 21 nt, Molluscum contagiosum virus
cgcugcgcgcucuggagccuc

SEQ ID NO: 4032025 - RNA, 13 nt, Molluscum contagiosum virus
cgcugcgcggcgc

SEQ ID NO: 4032026 - RNA, 18 nt, Molluscum contagiosum virus
cgcugcgcucggcgcgcg

SEQ ID NO: 4032027 - RNA, 19 nt, Molluscum contagiosum virus
cgcugcggcaacugccugc

SEQ ID NO: 4032028 - RNA, 21 nt, Molluscum contagiosum virus
cgcugcggcaacugccugcgc

SEQ ID NO: 4032029 - RNA, 18 nt, Molluscum contagiosum virus
cgcugcggcggcgcaacg

SEQ ID NO: 4032030 - RNA, 15 nt, Molluscum contagiosum virus
cgcugcgggcgccgg

SEQ ID NO: 4032031 - RNA, 20 nt, Molluscum contagiosum virus
cgcugcuagagaaccugugc

SEQ ID NO: 4032032 - RNA, 21 nt, Molluscum contagiosum virus
cgcugcuagagaaccugugcg

SEQ ID NO: 4032033 - RNA, 18 nt, Molluscum contagiosum virus
cgcugcuauacgcgccag

SEQ ID NO: 4032034 - RNA, 16 nt, Molluscum contagiosum virus
cgcugcuccccgccag

SEQ ID NO: 4032035 - RNA, 14 nt, Molluscum contagiosum virus
cgcugcuccugcuc

SEQ ID NO: 4032036 - RNA, 16 nt, Molluscum contagiosum virus
cgcugcuccugcucug

SEQ ID NO: 4032037 - RNA, 13 nt, Molluscum contagiosum virus
cgcugcucgcgcu

SEQ ID NO: 4032038 - RNA, 20 nt, Molluscum contagiosum virus
cgcugcucuacuuccacgag

SEQ ID NO: 4032039 - RNA, 14 nt, Molluscum contagiosum virus
cgcugcugcacagc

SEQ ID NO: 4032040 - RNA, 16 nt, Molluscum contagiosum virus
cgcugcugcgugcgcg

SEQ ID NO: 4032041 - RNA, 14 nt, Molluscum contagiosum virus
cgcuggacgccucg

SEQ ID NO: 4032042 - RNA, 18 nt, Molluscum contagiosum virus
cgcuggacuuccugcugc

SEQ ID NO: 4032043 - RNA, 18 nt, Molluscum contagiosum virus
cgcuggacuugcgcgagc

SEQ ID NO: 4032044 - RNA, 20 nt, Molluscum contagiosum virus
cgcuggagaaagaagugugc

SEQ ID NO: 4032045 - RNA, 16 nt, Molluscum contagiosum virus
cgcuggagacggcagu

SEQ ID NO: 4032046 - RNA, 15 nt, Molluscum contagiosum virus
cgcuggccgugcccg

SEQ ID NO: 4032047 - RNA, 16 nt, Molluscum contagiosum virus
cgcuggccgugcccgc

SEQ ID NO: 4032048 - RNA, 16 nt, Molluscum contagiosum virus
cgcuggccucugccug

SEQ ID NO: 4032049 - RNA, 14 nt, Molluscum contagiosum virus
cgcuggcgcgcgcg

SEQ ID NO: 4032050 - RNA, 20 nt, Molluscum contagiosum virus
cgcuggugggcgugcggcgc

SEQ ID NO: 4032051 - RNA, 21 nt, Molluscum contagiosum virus
cgcugguuugcgcgagcugcg

SEQ ID NO: 4032052 - RNA, 16 nt, Molluscum contagiosum virus
cgcuguacaugccgca

SEQ ID NO: 4032053 - RNA, 18 nt, Molluscum contagiosum virus
cgcuguauucggcguacg

SEQ ID NO: 4032054 - RNA, 16 nt, Molluscum contagiosum virus
cgcuguugcugcugcc

SEQ ID NO: 4032055 - RNA, 16 nt, Molluscum contagiosum virus
cgcuucugccugcucc

SEQ ID NO: 4032056 - RNA, 19 nt, Molluscum contagiosum virus
cgcuugcccggagccggcg

SEQ ID NO: 4032057 - RNA, 14 nt, Molluscum contagiosum virus
cgcuugcucgaagu

SEQ ID NO: 4032058 - RNA, 14 nt, Molluscum contagiosum virus
cgcuuguccucuug

SEQ ID NO: 4032059 - RNA, 12 nt, Molluscum contagiosum virus
cgcuuugcgcgg

SEQ ID NO: 4032060 - RNA, 22 nt, Molluscum contagiosum virus
cggaaaaaaacugcgcacgcgg

SEQ ID NO: 4032061 - RNA, 17 nt, Molluscum contagiosum virus
cggaaacgaacgcugca

SEQ ID NO: 4032062 - RNA, 16 nt, Molluscum contagiosum virus
cggaaccguggugcgc

SEQ ID NO: 4032063 - RNA, 21 nt, Molluscum contagiosum virus
cggaacucgcgcgcgccgggc

SEQ ID NO: 4032064 - RNA, 18 nt, Molluscum contagiosum virus
cggaagacgcgagcggcu

SEQ ID NO: 4032065 - RNA, 20 nt, Molluscum contagiosum virus
cggaagucggcguggccagg

SEQ ID NO: 4032066 - RNA, 21 nt, Molluscum contagiosum virus
cggaauuugcggcgcgggcaa

SEQ ID NO: 4032067 - RNA, 16 nt, Molluscum contagiosum virus
cggacaagacaacacu

SEQ ID NO: 4032068 - RNA, 16 nt, Molluscum contagiosum virus
cggacacgggugagcu

SEQ ID NO: 4032069 - RNA, 17 nt, Molluscum contagiosum virus
cggacacguacacgcug

SEQ ID NO: 4032070 - RNA, 17 nt, Molluscum contagiosum virus
cggacacguugcagcag

SEQ ID NO: 4032071 - RNA, 18 nt, Molluscum contagiosum virus
cggacacguugcagcagc

SEQ ID NO: 4032072 - RNA, 19 nt, Molluscum contagiosum virus
cggacacguugcagcagca

SEQ ID NO: 4032073 - RNA, 21 nt, Molluscum contagiosum virus
cggacagugccuccgcggacg

SEQ ID NO: 4032074 - RNA, 18 nt, Molluscum contagiosum virus
cggacaugagcuugcgca

SEQ ID NO: 4032075 - RNA, 16 nt, Molluscum contagiosum virus
cggacgaagagacgcc

SEQ ID NO: 4032076 - RNA, 17 nt, Molluscum contagiosum virus
cggacgaagcugugcaa

SEQ ID NO: 4032077 - RNA, 22 nt, Molluscum contagiosum virus
cggacgaucuuacaggccaccg

SEQ ID NO: 4032078 - RNA, 15 nt, Molluscum contagiosum virus
cggacgcaggaugcu

SEQ ID NO: 4032079 - RNA, 23 nt, Molluscum contagiosum virus
cggacgcccuccucgaccugcac

SEQ ID NO: 4032080 - RNA, 22 nt, Molluscum contagiosum virus
cggacgccuuuugugcagcgcg

SEQ ID NO: 4032081 - RNA, 14 nt, Molluscum contagiosum virus
cggacgcgcagcug

SEQ ID NO: 4032082 - RNA, 15 nt, Molluscum contagiosum virus
cggacgcgcagcugu

SEQ ID NO: 4032083 - RNA, 14 nt, Molluscum contagiosum virus
cggacggcuuuguc

SEQ ID NO: 4032084 - RNA, 14 nt, Molluscum contagiosum virus
cggacgugcacgca

SEQ ID NO: 4032085 - RNA, 14 nt, Molluscum contagiosum virus
cggacucgcgagca

SEQ ID NO: 4032086 - RNA, 19 nt, Molluscum contagiosum virus
cggacuucgacgcgcggca

SEQ ID NO: 4032087 - RNA, 20 nt, Molluscum contagiosum virus
cggacuucgacgcgcggcag

SEQ ID NO: 4032088 - RNA, 20 nt, Molluscum contagiosum virus
cggacuuuucgcgcgugcgc

SEQ ID NO: 4032089 - RNA, 17 nt, Molluscum contagiosum virus
cggagaacaugcucgcc

SEQ ID NO: 4032090 - RNA, 18 nt, Molluscum contagiosum virus
cggagacaccagcuccgc

SEQ ID NO: 4032091 - RNA, 18 nt, Molluscum contagiosum virus
cggagacagugacagacu

SEQ ID NO: 4032092 - RNA, 19 nt, Molluscum contagiosum virus
cggagaccuggucacacug

SEQ ID NO: 4032093 - RNA, 13 nt, Molluscum contagiosum virus
cggagagcagugc

SEQ ID NO: 4032094 - RNA, 19 nt, Molluscum contagiosum virus
cggagagcuccggcugcuc

SEQ ID NO: 4032095 - RNA, 13 nt, Molluscum contagiosum virus
cggagaggggacg

SEQ ID NO: 4032096 - RNA, 18 nt, Molluscum contagiosum virus
cggagaucaggcagcugc

SEQ ID NO: 4032097 - RNA, 14 nt, Molluscum contagiosum virus
cggagcgcagcugc

SEQ ID NO: 4032098 - RNA, 21 nt, Molluscum contagiosum virus
cggagcgcgcacggcagcggc

SEQ ID NO: 4032099 - RNA, 21 nt, Molluscum contagiosum virus
cggagcggaucgugcuggaga

SEQ ID NO: 4032100 - RNA, 19 nt, Molluscum contagiosum virus
cggagcuggccacucucgc

SEQ ID NO: 4032101 - RNA, 18 nt, Molluscum contagiosum virus
cggagcuggcguugccga

SEQ ID NO: 4032102 - RNA, 19 nt, Molluscum contagiosum virus
cggagcugugccgcagcaa

SEQ ID NO: 4032103 - RNA, 17 nt, Molluscum contagiosum virus
cggaggacucggaggcc

SEQ ID NO: 4032104 - RNA, 15 nt, Molluscum contagiosum virus
cggaggcggagcugc

SEQ ID NO: 4032105 - RNA, 14 nt, Molluscum contagiosum virus
cggagggcgaggcc

SEQ ID NO: 4032106 - RNA, 18 nt, Molluscum contagiosum virus
cggaggucuacaacgagc

SEQ ID NO: 4032107 - RNA, 20 nt, Molluscum contagiosum virus
cggaguccucgacaaugagc

SEQ ID NO: 4032108 - RNA, 17 nt, Molluscum contagiosum virus
cggaucugcgcacacgu

SEQ ID NO: 4032109 - RNA, 15 nt, Molluscum contagiosum virus
cggaugucacgcaga

SEQ ID NO: 4032110 - RNA, 22 nt, Molluscum contagiosum virus
cggcaaaugcgucccagcagcu

SEQ ID NO: 4032111 - RNA, 22 nt, Molluscum contagiosum virus
cggcaagcgagaucccuccgag

SEQ ID NO: 4032112 - RNA, 21 nt, Molluscum contagiosum virus
cggcacacaugcuagcgggca

SEQ ID NO: 4032113 - RNA, 15 nt, Molluscum contagiosum virus
cggcacccgccagcu

SEQ ID NO: 4032114 - RNA, 16 nt, Molluscum contagiosum virus
cggcacccgccagcuu

SEQ ID NO: 4032115 - RNA, 16 nt, Molluscum contagiosum virus
cggcacccgugcgcgc

SEQ ID NO: 4032116 - RNA, 13 nt, Molluscum contagiosum virus
cggcaccgcgccg

SEQ ID NO: 4032117 - RNA, 15 nt, Molluscum contagiosum virus
cggcaccugucgcgc

SEQ ID NO: 4032118 - RNA, 16 nt, Molluscum contagiosum virus
cggcacgggcacgcgc

SEQ ID NO: 4032119 - RNA, 13 nt, Molluscum contagiosum virus
cggcacgucgucc

SEQ ID NO: 4032120 - RNA, 15 nt, Molluscum contagiosum virus
cggcacucgcguccg

SEQ ID NO: 4032121 - RNA, 13 nt, Molluscum contagiosum virus
cggcacugcgcgc

SEQ ID NO: 4032122 - RNA, 12 nt, Molluscum contagiosum virus
cggcacugcuag

SEQ ID NO: 4032123 - RNA, 13 nt, Molluscum contagiosum virus
cggcacugcuagc

SEQ ID NO: 4032124 - RNA, 13 nt, Molluscum contagiosum virus
cggcacugcuggc

SEQ ID NO: 4032125 - RNA, 14 nt, Molluscum contagiosum virus
cggcacugcuggcg

SEQ ID NO: 4032126 - RNA, 13 nt, Molluscum contagiosum virus
cgggcgcgcgcca

SEQ ID NO: 4032127 - RNA, 14 nt, Molluscum contagiosum virus
cgggcgcgcgccag

SEQ ID NO: 4032128 - RNA, 15 nt, Molluscum contagiosum virus
cgggcgcggcaccag

SEQ ID NO: 4032129 - RNA, 19 nt, Molluscum contagiosum virus
cgggcgcuauugcgcggcg

SEQ ID NO: 4032130 - RNA, 14 nt, Molluscum contagiosum virus
cgggcggcgcgccg

SEQ ID NO: 4032131 - RNA, 22 nt, Molluscum contagiosum virus
cgggcgucaagacucgcccgcg

SEQ ID NO: 4032132 - RNA, 20 nt, Molluscum contagiosum virus
cgggcguguccgcgggcgcg

SEQ ID NO: 4032133 - RNA, 13 nt, Molluscum contagiosum virus
cgggcucgagcuc

SEQ ID NO: 4032134 - RNA, 19 nt, Molluscum contagiosum virus
cgggcucuuccaccggcag

SEQ ID NO: 4032135 - RNA, 21 nt, Molluscum contagiosum virus
cgggcugcacgacggucacgc

SEQ ID NO: 4032136 - RNA, 15 nt, Molluscum contagiosum virus
cgggcugcagcccuu

SEQ ID NO: 4032137 - RNA, 14 nt, Molluscum contagiosum virus
cgggcuucgccgcc

SEQ ID NO: 4032138 - RNA, 21 nt, Molluscum contagiosum virus
cgggcuucgcgacgacgagca

SEQ ID NO: 4032139 - RNA, 22 nt, Molluscum contagiosum virus
cggggccuguucggcaugcagc

SEQ ID NO: 4032140 - RNA, 15 nt, Molluscum contagiosum virus
cgggggcgcuucccc

SEQ ID NO: 4032141 - RNA, 20 nt, Molluscum contagiosum virus
cgggguaccacagucggugc

SEQ ID NO: 4032142 - RNA, 17 nt, Molluscum contagiosum virus
cggguccgucuuugcgg

SEQ ID NO: 4032143 - RNA, 20 nt, Molluscum contagiosum virus
cgggugcccggacagagccc

SEQ ID NO: 4032144 - RNA, 18 nt, Molluscum contagiosum virus
cgguagcguggagcuggu

SEQ ID NO: 4032145 - RNA, 22 nt, Molluscum contagiosum virus
cgguagggugccgaggcgcugc

SEQ ID NO: 4032146 - RNA, 13 nt, Molluscum contagiosum virus
cggucgacgagug

SEQ ID NO: 4032147 - RNA, 23 nt, Molluscum contagiosum virus
cggucgacgagugcgccgcgccc

SEQ ID NO: 4032148 - RNA, 16 nt, Molluscum contagiosum virus
cggugaccggagcggc

SEQ ID NO: 4032149 - RNA, 21 nt, Molluscum contagiosum virus
cggugcucuucggggacggcg

SEQ ID NO: 4032150 - RNA, 15 nt, Molluscum contagiosum virus
cggugcugcgccagg

SEQ ID NO: 4032151 - RNA, 13 nt, Molluscum contagiosum virus
cggugcugcugcc

SEQ ID NO: 4032152 - RNA, 14 nt, Molluscum contagiosum virus
cgguguccucuuca

SEQ ID NO: 4032153 - RNA, 22 nt, Molluscum contagiosum virus
cguaaaagugagagauaaaguc

SEQ ID NO: 4032154 - RNA, 17 nt, Molluscum contagiosum virus
cguacagcgggcgcugc

SEQ ID NO: 4032155 - RNA, 21 nt, Molluscum contagiosum virus
cguacaucgacuacgcgcugc

SEQ ID NO: 4032156 - RNA, 15 nt, Molluscum contagiosum virus
cguaccagcgccugc

SEQ ID NO: 4032157 - RNA, 17 nt, Molluscum contagiosum virus
cguacgagcagcugcug

SEQ ID NO: 4032158 - RNA, 13 nt, Molluscum contagiosum virus
cguacgagcaggc

SEQ ID NO: 4032159 - RNA, 19 nt, Molluscum contagiosum virus
cguacgagcaggcgcagcg

SEQ ID NO: 4032160 - RNA, 21 nt, Molluscum contagiosum virus
cguacgagcaggcgcagcgcg

SEQ ID NO: 4032161 - RNA, 15 nt, Molluscum contagiosum virus
cguacgugcgccagc

SEQ ID NO: 4032162 - RNA, 18 nt, Molluscum contagiosum virus
cguacucaacaagcugcu

SEQ ID NO: 4032163 - RNA, 19 nt, Molluscum contagiosum virus
cguacucgcguccgcgcag

SEQ ID NO: 4032164 - RNA, 23 nt, Molluscum contagiosum virus
cguacuugcugguugccgcucgc

SEQ ID NO: 4032165 - RNA, 23 nt, Molluscum contagiosum virus
cguagacgcgcccguccuccguc

SEQ ID NO: 4032166 - RNA, 13 nt, Molluscum contagiosum virus
cguagcgcgucuc

SEQ ID NO: 4032167 - RNA, 18 nt, Molluscum contagiosum virus
cguaguccagcgcgucca

SEQ ID NO: 4032168 - RNA, 16 nt, Molluscum contagiosum virus
cguauggaucuucuca

SEQ ID NO: 4032169 - RNA, 15 nt, Molluscum contagiosum virus
cgucaaccugcugcc

SEQ ID NO: 4032170 - RNA, 22 nt, Molluscum contagiosum virus
cgucaagcagguggccgcgcgc

SEQ ID NO: 4032171 - RNA, 14 nt, Molluscum contagiosum virus
cgucacguacucgc

SEQ ID NO: 4032172 - RNA, 21 nt, Molluscum contagiosum virus
cgucagccucugugcggcgcc

SEQ ID NO: 4032173 - RNA, 14 nt, Molluscum contagiosum virus
cgucauggagcagg

SEQ ID NO: 4032174 - RNA, 16 nt, Molluscum contagiosum virus
cgucauggagcaggag

SEQ ID NO: 4032175 - RNA, 13 nt, Molluscum contagiosum virus
cgucaugugcgug

SEQ ID NO: 4032176 - RNA, 17 nt, Molluscum contagiosum virus
cguccacaaaggcgggc

SEQ ID NO: 4032177 - RNA, 14 nt, Molluscum contagiosum virus
cguccacaggcgcg

SEQ ID NO: 4032178 - RNA, 17 nt, Molluscum contagiosum virus
cguccacgcaggacugg

SEQ ID NO: 4032179 - RNA, 20 nt, Molluscum contagiosum virus
cguccacgcaggacuggcac

SEQ ID NO: 4032180 - RNA, 16 nt, Molluscum contagiosum virus
cguccagccgcagccg

SEQ ID NO: 4032181 - RNA, 17 nt, Molluscum contagiosum virus
cguccagccgcagccgc

SEQ ID NO: 4032182 - RNA, 17 nt, Molluscum contagiosum virus
cguccagcugcgcgagc

SEQ ID NO: 4032183 - RNA, 15 nt, Molluscum contagiosum virus
cgucccagcagcugc

SEQ ID NO: 4032184 - RNA, 18 nt, Molluscum contagiosum virus
cguccgcacgaggagccc

SEQ ID NO: 4032185 - RNA, 15 nt, Molluscum contagiosum virus
cguccgcggcacgcg

SEQ ID NO: 4032186 - RNA, 18 nt, Molluscum contagiosum virus
cguccgcggggcuccucg

SEQ ID NO: 4032187 - RNA, 15 nt, Molluscum contagiosum virus
cguccggcaugcgcg

SEQ ID NO: 4032188 - RNA, 13 nt, Molluscum contagiosum virus
cguccggcgcucg

SEQ ID NO: 4032189 - RNA, 16 nt, Molluscum contagiosum virus
cguccggcgcucgccu

SEQ ID NO: 4032190 - RNA, 15 nt, Molluscum contagiosum virus
cguccuguagcaagg

SEQ ID NO: 4032191 - RNA, 12 nt, Molluscum contagiosum virus
cgucgacggcgc

SEQ ID NO: 4032192 - RNA, 19 nt, Molluscum contagiosum virus
cgucgaugaaggcgcggcu

SEQ ID NO: 4032193 - RNA, 19 nt, Molluscum contagiosum virus
cgucgccggacagcucagc

SEQ ID NO: 4032194 - RNA, 13 nt, Molluscum contagiosum virus
cgucgcgcgccgc

SEQ ID NO: 4032195 - RNA, 13 nt, Molluscum contagiosum virus
cgucgcgcgcucg

SEQ ID NO: 4032196 - RNA, 14 nt, Molluscum contagiosum virus
cgucgcggagcgcg

SEQ ID NO: 4032197 - RNA, 23 nt, Molluscum contagiosum virus
cgucggcggcaugcgcgcgcagc

SEQ ID NO: 4032198 - RNA, 21 nt, Molluscum contagiosum virus
cgucggcuuggacagcaagca

SEQ ID NO: 4032199 - RNA, 24 nt, Molluscum contagiosum virus
cgucgggaaguguugccgccggcc

SEQ ID NO: 4032200 - RNA, 16 nt, Molluscum contagiosum virus
cgucguccggaggcac

SEQ ID NO: 4032201 - RNA, 14 nt, Molluscum contagiosum virus
cgucucggagaaga

SEQ ID NO: 4032202 - RNA, 20 nt, Molluscum contagiosum virus
cgucugcucucggcggccgg

SEQ ID NO: 4032203 - RNA, 22 nt, Molluscum contagiosum virus
cgucuuaacucagcgggcagac

SEQ ID NO: 4032204 - RNA, 24 nt, Molluscum contagiosum virus
cgucuuaacucagcgggcagacag

SEQ ID NO: 4032205 - RNA, 13 nt, Molluscum contagiosum virus
cgucuuacugcug

SEQ ID NO: 4032206 - RNA, 16 nt, Molluscum contagiosum virus
cgucuuaugcauccug

SEQ ID NO: 4032207 - RNA, 18 nt, Molluscum contagiosum virus
cgucuuccccaagaccug

SEQ ID NO: 4032208 - RNA, 14 nt, Molluscum contagiosum virus
cgucuucuaccgcc

SEQ ID NO: 4032209 - RNA, 14 nt, Molluscum contagiosum virus
cgugaacgaggcug

SEQ ID NO: 4032210 - RNA, 18 nt, Molluscum contagiosum virus
cgugaccuugugcgcgca

SEQ ID NO: 4032211 - RNA, 18 nt, Molluscum contagiosum virus
cgugagcucccgcgccac

SEQ ID NO: 4032212 - RNA, 23 nt, Molluscum contagiosum virus
cgugaggaagaccuuggacacgu

SEQ ID NO: 4032213 - RNA, 19 nt, Molluscum contagiosum virus
cgugaggaggcggcacugc

SEQ ID NO: 4032214 - RNA, 16 nt, Molluscum contagiosum virus
cgugaugugcgcacag

SEQ ID NO: 4032215 - RNA, 18 nt, Molluscum contagiosum virus
cgugaugugcgcacagac

SEQ ID NO: 4032216 - RNA, 15 nt, Molluscum contagiosum virus
cgugcaacaggagca

SEQ ID NO: 4032217 - RNA, 14 nt, Molluscum contagiosum virus
cgugcaccuggagc

SEQ ID NO: 4032218 - RNA, 17 nt, Molluscum contagiosum virus
cgugcaggaacgcgcgc

SEQ ID NO: 4032219 - RNA, 20 nt, Molluscum contagiosum virus
cgugcaggaacgcgcgcucg

SEQ ID NO: 4032220 - RNA, 22 nt, Molluscum contagiosum virus
cgugcagggcgugcuugccugg

SEQ ID NO: 4032221 - RNA, 12 nt, Molluscum contagiosum virus
cgugcaggucga

SEQ ID NO: 4032222 - RNA, 14 nt, Molluscum contagiosum virus
cgugcaguugagag

SEQ ID NO: 4032223 - RNA, 18 nt, Molluscum contagiosum virus
cgugccacugccgccguu

SEQ ID NO: 4032224 - RNA, 19 nt, Molluscum contagiosum virus
cgugcccacgagcgccagc

SEQ ID NO: 4032225 - RNA, 17 nt, Molluscum contagiosum virus
cgugcccgccgacugcc

SEQ ID NO: 4032226 - RNA, 18 nt, Molluscum contagiosum virus
cgugccgcugcgcggagc

SEQ ID NO: 4032227 - RNA, 23 nt, Molluscum contagiosum virus
cgugccggaaauagcgcgcuagc

SEQ ID NO: 4032228 - RNA, 16 nt, Molluscum contagiosum virus
cgugccucugccagcc

SEQ ID NO: 4032229 - RNA, 23 nt, Molluscum contagiosum virus
gcagcagcucggggcugucagag

SEQ ID NO: 4032230 - RNA, 20 nt, Molluscum contagiosum virus
gcagcagcuggccggcucgc

SEQ ID NO: 4032231 - RNA, 20 nt, Molluscum contagiosum virus
gcagcauucccggcgcgcgc

SEQ ID NO: 4032232 - RNA, 21 nt, Molluscum contagiosum virus
gcagcauucccggcgcgcgcg

SEQ ID NO: 4032233 - RNA, 22 nt, Molluscum contagiosum virus
gcagcauucccggcgcgcgcgg

SEQ ID NO: 4032234 - RNA, 18 nt, Molluscum contagiosum virus
gcagcccgacgcgggcgc

SEQ ID NO: 4032235 - RNA, 19 nt, Molluscum contagiosum virus
gcagcccgugcgccugccg

SEQ ID NO: 4032236 - RNA, 13 nt, Molluscum contagiosum virus
gcagccgcugcug

SEQ ID NO: 4032237 - RNA, 22 nt, Molluscum contagiosum virus
gcagccuccgaacaaugaggag

SEQ ID NO: 4032238 - RNA, 18 nt, Molluscum contagiosum virus
gcagcgccagcuuggugc

SEQ ID NO: 4032239 - RNA, 23 nt, Molluscum contagiosum virus
gcagcgcccgcguacacgugcac

SEQ ID NO: 4032240 - RNA, 13 nt, Molluscum contagiosum virus
gcagcgccgcgcg

SEQ ID NO: 4032241 - RNA, 21 nt, Molluscum contagiosum virus
gcagcgcgcaaaaggcacgag

SEQ ID NO: 4032242 - RNA, 20 nt, Molluscum contagiosum virus
gcagcgcgugacgcucacgg

SEQ ID NO: 4032243 - RNA, 20 nt, Molluscum contagiosum virus
gcagcgcgugcgcaggagca

SEQ ID NO: 4032244 - RNA, 19 nt, Molluscum contagiosum virus
gcagcggcaaaggcccgcg

SEQ ID NO: 4032245 - RNA, 16 nt, Molluscum contagiosum virus
gcagcggcgccacgag

SEQ ID NO: 4032246 - RNA, 14 nt, Molluscum contagiosum virus
gcagcggcgcgugc

SEQ ID NO: 4032247 - RNA, 19 nt, Molluscum contagiosum virus
gcagcucaagacgcugcug

SEQ ID NO: 4032248 - RNA, 18 nt, Molluscum contagiosum virus
gcagcucggcgagagcgc

SEQ ID NO: 4032249 - RNA, 19 nt, Molluscum contagiosum virus
gcagcugcaggaccugcug

SEQ ID NO: 4032250 - RNA, 16 nt, Molluscum contagiosum virus
gcagcugccgcagagc

SEQ ID NO: 4032251 - RNA, 18 nt, Molluscum contagiosum virus
gcagcugccgcagagccg

SEQ ID NO: 4032252 - RNA, 12 nt, Molluscum contagiosum virus
gcagcugcugcg

SEQ ID NO: 4032253 - RNA, 18 nt, Molluscum contagiosum virus
gcagcugcugcgcacgug

SEQ ID NO: 4032254 - RNA, 15 nt, Molluscum contagiosum virus
gcagcugcuucucuu

SEQ ID NO: 4032255 - RNA, 17 nt, Molluscum contagiosum virus
gcagcuguccaagguga

SEQ ID NO: 4032256 - RNA, 13 nt, Molluscum contagiosum virus
gcagcuucugcuc

SEQ ID NO: 4032257 - RNA, 16 nt, Molluscum contagiosum virus
gcaggaaaggcacccg

SEQ ID NO: 4032258 - RNA, 19 nt, Molluscum contagiosum virus
gcaggaggaccgcgagcgc

SEQ ID NO: 4032259 - RNA, 19 nt, Molluscum contagiosum virus
gcaggaucggagcgcagcu

SEQ ID NO: 4032260 - RNA, 18 nt, Molluscum contagiosum virus
gcaggauuuccucgcgga

SEQ ID NO: 4032261 - RNA, 18 nt, Molluscum contagiosum virus
gcaggcacgacgccgaca

SEQ ID NO: 4032262 - RNA, 19 nt, Molluscum contagiosum virus
gcaggccccgcaccagugc

SEQ ID NO: 4032263 - RNA, 21 nt, Molluscum contagiosum virus
gcaggcccggcggcccgcggc

SEQ ID NO: 4032264 - RNA, 12 nt, Molluscum contagiosum virus
gcaggccucuuu

SEQ ID NO: 4032265 - RNA, 14 nt, Molluscum contagiosum virus
gcaggcgcugcgcg

SEQ ID NO: 4032266 - RNA, 15 nt, Molluscum contagiosum virus
gcaggcgucgcgcac

SEQ ID NO: 4032267 - RNA, 23 nt, Molluscum contagiosum virus
gcaggcgucgcgcacagaaagcc

SEQ ID NO: 4032268 - RNA, 18 nt, Molluscum contagiosum virus
gcaggcucuaagcgcacg

SEQ ID NO: 4032269 - RNA, 20 nt, Molluscum contagiosum virus
gcagggaaagagcacgcgcu

SEQ ID NO: 4032270 - RNA, 16 nt, Molluscum contagiosum virus
gcagggagcugcggac

SEQ ID NO: 4032271 - RNA, 19 nt, Molluscum contagiosum virus
gcaggucaucgacgagcac

SEQ ID NO: 4032272 - RNA, 19 nt, Molluscum contagiosum virus
gcaggucaucgggcugcag

SEQ ID NO: 4032273 - RNA, 19 nt, Molluscum contagiosum virus
gcaggucggccagcagcuc

SEQ ID NO: 4032274 - RNA, 17 nt, Molluscum contagiosum virus
gcagguuccggugucag

SEQ ID NO: 4032275 - RNA, 21 nt, Molluscum contagiosum virus
gcagguuugcacccgcgcagc

SEQ ID NO: 4032276 - RNA, 14 nt, Molluscum contagiosum virus
gcagucacgacugu

SEQ ID NO: 4032277 - RNA, 17 nt, Molluscum contagiosum virus
gcagucaguuccgcggc

SEQ ID NO: 4032278 - RNA, 19 nt, Molluscum contagiosum virus
gcaguccgccgucgcccgg

SEQ ID NO: 4032279 - RNA, 22 nt, Molluscum contagiosum virus
gcagugccgccgcgcaaaagca

SEQ ID NO: 4032280 - RNA, 19 nt, Molluscum contagiosum virus
gcagugccgccgcgcgcgc

SEQ ID NO: 4032281 - RNA, 14 nt, Molluscum contagiosum virus
gcagugccgcucgc

SEQ ID NO: 4032282 - RNA, 12 nt, Molluscum contagiosum virus
gcagugccuugu

SEQ ID NO: 4032283 - RNA, 16 nt, Molluscum contagiosum virus
gcagugcggaugugcu

SEQ ID NO: 4032284 - RNA, 13 nt, Molluscum contagiosum virus
gcagugcucgcac

SEQ ID NO: 4032285 - RNA, 18 nt, Molluscum contagiosum virus
gcagugcucuuuaguaca

SEQ ID NO: 4032286 - RNA, 16 nt, Molluscum contagiosum virus
gcaguucgagcugcug

SEQ ID NO: 4032287 - RNA, 22 nt, Molluscum contagiosum virus
gcauauaaaucauggccgcgcc

SEQ ID NO: 4032288 - RNA, 16 nt, Molluscum contagiosum virus
gcaucagcaacaagcu

SEQ ID NO: 4032289 - RNA, 22 nt, Molluscum contagiosum virus
gcaucaugaaagaacgacucgc

SEQ ID NO: 4032290 - RNA, 14 nt, Molluscum contagiosum virus
gcaucccugcgcac

SEQ ID NO: 4032291 - RNA, 20 nt, Molluscum contagiosum virus
gcauccucuccaucaucgag

SEQ ID NO: 4032292 - RNA, 22 nt, Molluscum contagiosum virus
gcauccugaugacggcagacgg

SEQ ID NO: 4032293 - RNA, 19 nt, Molluscum contagiosum virus
gcaucggcggcagcgccag

SEQ ID NO: 4032294 - RNA, 20 nt, Molluscum contagiosum virus
gcaucuagucagcggcgguc

SEQ ID NO: 4032295 - RNA, 16 nt, Molluscum contagiosum virus
gcaucuccacgucggc

SEQ ID NO: 4032296 - RNA, 14 nt, Molluscum contagiosum virus
gcaucugcgagcgc

SEQ ID NO: 4032297 - RNA, 16 nt, Molluscum contagiosum virus
gcaugcacagcugcuc

SEQ ID NO: 4032298 - RNA, 14 nt, Molluscum contagiosum virus
gcaugcccagcaug

SEQ ID NO: 4032299 - RNA, 15 nt, Molluscum contagiosum virus
gcaugcgcgcgcagc

SEQ ID NO: 4032300 - RNA, 14 nt, Molluscum contagiosum virus
gcaugcuugaggcg

SEQ ID NO: 4032301 - RNA, 15 nt, Molluscum contagiosum virus
gcauggcgagcccuu

SEQ ID NO: 4032302 - RNA, 17 nt, Molluscum contagiosum virus
gcauggcggcggccacg

SEQ ID NO: 4032303 - RNA, 19 nt, Molluscum contagiosum virus
gcaugggcccuggcggcuu

SEQ ID NO: 4032304 - RNA, 18 nt, Molluscum contagiosum virus
gcaugugcgagcgcagcu

SEQ ID NO: 4032305 - RNA, 15 nt, Molluscum contagiosum virus
gcauuacccccccuu

SEQ ID NO: 4032306 - RNA, 21 nt, Molluscum contagiosum virus
gcauugcgucuuacugcugca

SEQ ID NO: 4032307 - RNA, 14 nt, Molluscum contagiosum virus
gccaaaaggcucag

SEQ ID NO: 4032308 - RNA, 12 nt, Molluscum contagiosum virus
gccaaagccgcg

SEQ ID NO: 4032309 - RNA, 21 nt, Molluscum contagiosum virus
gccaacacgcaaucgcgcgcg

SEQ ID NO: 4032310 - RNA, 17 nt, Molluscum contagiosum virus
gccaacccucgcaagcu

SEQ ID NO: 4032311 - RNA, 15 nt, Molluscum contagiosum virus
gccaacgccagcugu

SEQ ID NO: 4032312 - RNA, 20 nt, Molluscum contagiosum virus
gccaagaccugggcgucgug

SEQ ID NO: 4032313 - RNA, 20 nt, Molluscum contagiosum virus
gccaaggaugccugccagca

SEQ ID NO: 4032314 - RNA, 23 nt, Molluscum contagiosum virus
gccaaggaugccugccagcagag

SEQ ID NO: 4032315 - RNA, 21 nt, Molluscum contagiosum virus
gccaagguucuggacgugucc

SEQ ID NO: 4032316 - RNA, 13 nt, Molluscum contagiosum virus
gccaccgcggcgc

SEQ ID NO: 4032317 - RNA, 20 nt, Molluscum contagiosum virus
gccacgaagaacgcggcgug

SEQ ID NO: 4032318 - RNA, 21 nt, Molluscum contagiosum virus
gccacgagcgccgcgugcgcg

SEQ ID NO: 4032319 - RNA, 14 nt, Molluscum contagiosum virus
gccacgcagcuggc

SEQ ID NO: 4032320 - RNA, 14 nt, Molluscum contagiosum virus
gccacgccagcccg

SEQ ID NO: 4032321 - RNA, 14 nt, Molluscum contagiosum virus
gccacgcggagcuc

SEQ ID NO: 4032322 - RNA, 22 nt, Molluscum contagiosum virus
gccacucgcauugcguuggcaa

SEQ ID NO: 4032323 - RNA, 18 nt, Molluscum contagiosum virus
gccacucuccuucagugu

SEQ ID NO: 4032324 - RNA, 18 nt, Molluscum contagiosum virus
gccacuggaagaacaggc

SEQ ID NO: 4032325 - RNA, 14 nt, Molluscum contagiosum virus
gccagaagugaaau

SEQ ID NO: 4032326 - RNA, 16 nt, Molluscum contagiosum virus
gccagcacgcgcucgu

SEQ ID NO: 4032327 - RNA, 22 nt, Molluscum contagiosum virus
gccagcagcgcccggugcggcg

SEQ ID NO: 4032328 - RNA, 20 nt, Molluscum contagiosum virus
gccagcccgacuucucgcgc

SEQ ID NO: 4032329 - RNA, 13 nt, Molluscum contagiosum virus
gccagccuggagu

SEQ ID NO: 4032330 - RNA, 21 nt, Molluscum contagiosum virus
gccagcgacaccgacgaggug

SEQ ID NO: 4032331 - RNA, 16 nt, Molluscum contagiosum virus
gccuucgcgcugcccg

SEQ ID NO: 4032332 - RNA, 21 nt, Molluscum contagiosum virus
gccuucgcguuccggcggcug

SEQ ID NO: 4032333 - RNA, 15 nt, Molluscum contagiosum virus
gccuucguggagccc

SEQ ID NO: 4032334 - RNA, 16 nt, Molluscum contagiosum virus
gccuucugcaagcugc

SEQ ID NO: 4032335 - RNA, 18 nt, Molluscum contagiosum virus
gccuucugcaagcugccc

SEQ ID NO: 4032336 - RNA, 15 nt, Molluscum contagiosum virus
gccuucuugcuggcg

SEQ ID NO: 4032337 - RNA, 20 nt, Molluscum contagiosum virus
gccuucuugcuggcgcucgc

SEQ ID NO: 4032338 - RNA, 19 nt, Molluscum contagiosum virus
gccuuucgaguccccagac

SEQ ID NO: 4032339 - RNA, 20 nt, Molluscum contagiosum virus
gcgaaaccugggcgccgcgc

SEQ ID NO: 4032340 - RNA, 12 nt, Molluscum contagiosum virus
gcgaaccgcggc

SEQ ID NO: 4032341 - RNA, 14 nt, Molluscum contagiosum virus
gcgaacgcgcaagu

SEQ ID NO: 4032342 - RNA, 12 nt, Molluscum contagiosum virus
gcgaacugcccg

SEQ ID NO: 4032343 - RNA, 21 nt, Molluscum contagiosum virus
gcgaauguccggcgcuggaga

SEQ ID NO: 4032344 - RNA, 22 nt, Molluscum contagiosum virus
gcgaauuggccgcggaggacuc

SEQ ID NO: 4032345 - RNA, 15 nt, Molluscum contagiosum virus
gcgacaacgacagag

SEQ ID NO: 4032346 - RNA, 18 nt, Molluscum contagiosum virus
gcgacacgcccgcguccc

SEQ ID NO: 4032347 - RNA, 18 nt, Molluscum contagiosum virus
gcgacaugcugcccgcgc

SEQ ID NO: 4032348 - RNA, 13 nt, Molluscum contagiosum virus
gcgaccagcucuu

SEQ ID NO: 4032349 - RNA, 13 nt, Molluscum contagiosum virus
gcgaccagcuggu

SEQ ID NO: 4032350 - RNA, 16 nt, Molluscum contagiosum virus
gcgaccagcugguccu

SEQ ID NO: 4032351 - RNA, 14 nt, Molluscum contagiosum virus
gcgacgacagcgac

SEQ ID NO: 4032352 - RNA, 19 nt, Molluscum contagiosum virus
gcgacgagcucacgccgga

SEQ ID NO: 4032353 - RNA, 20 nt, Molluscum contagiosum virus
gcgacgcaaaagaggccugc

SEQ ID NO: 4032354 - RNA, 15 nt, Molluscum contagiosum virus
gcgacgccguccgcg

SEQ ID NO: 4032355 - RNA, 19 nt, Molluscum contagiosum virus
gcgacggaaccguggugcg

SEQ ID NO: 4032356 - RNA, 21 nt, Molluscum contagiosum virus
gcgacgugugcucugugcgcg

SEQ ID NO: 4032357 - RNA, 17 nt, Molluscum contagiosum virus
gcgacguucgagaccag

SEQ ID NO: 4032358 - RNA, 14 nt, Molluscum contagiosum virus
gcgagacgggcacg

SEQ ID NO: 4032359 - RNA, 14 nt, Molluscum contagiosum virus
gcgagacugugccg

SEQ ID NO: 4032360 - RNA, 16 nt, Molluscum contagiosum virus
gcgagacugugccgcu

SEQ ID NO: 4032361 - RNA, 17 nt, Molluscum contagiosum virus
gcgagaucccuccgaga

SEQ ID NO: 4032362 - RNA, 17 nt, Molluscum contagiosum virus
gcgagauucuggcgcgc

SEQ ID NO: 4032363 - RNA, 20 nt, Molluscum contagiosum virus
gcgagcagugugaugccgcg

SEQ ID NO: 4032364 - RNA, 17 nt, Molluscum contagiosum virus
gcgagcaguucgcgcgc

SEQ ID NO: 4032365 - RNA, 19 nt, Molluscum contagiosum virus
gcgagcaguucgcgcgccu

SEQ ID NO: 4032366 - RNA, 13 nt, Molluscum contagiosum virus
gcgagcaugccgc

SEQ ID NO: 4032367 - RNA, 15 nt, Molluscum contagiosum virus
gcgagccagccaggc

SEQ ID NO: 4032368 - RNA, 20 nt, Molluscum contagiosum virus
gcgagcgcaugcgcgccgcg

SEQ ID NO: 4032369 - RNA, 15 nt, Molluscum contagiosum virus
gcgagcgccgcucgc

SEQ ID NO: 4032370 - RNA, 21 nt, Molluscum contagiosum virus
gcgagcgcgucugcucucggc

SEQ ID NO: 4032371 - RNA, 18 nt, Molluscum contagiosum virus
gcgagcguuucugccgga

SEQ ID NO: 4032372 - RNA, 19 nt, Molluscum contagiosum virus
gcgagcuaaucagcgccau

SEQ ID NO: 4032373 - RNA, 15 nt, Molluscum contagiosum virus
gcgagcucaaggaca

SEQ ID NO: 4032374 - RNA, 12 nt, Molluscum contagiosum virus
gcgagcucgaga

SEQ ID NO: 4032375 - RNA, 15 nt, Molluscum contagiosum virus
gcgagcucgucgcgc

SEQ ID NO: 4032376 - RNA, 18 nt, Molluscum contagiosum virus
gcgagcugaggcaacauc

SEQ ID NO: 4032377 - RNA, 18 nt, Molluscum contagiosum virus
gcgaucgcagcagugcca

SEQ ID NO: 4032378 - RNA, 17 nt, Molluscum contagiosum virus
gcgaugaacccgcauug

SEQ ID NO: 4032379 - RNA, 22 nt, Molluscum contagiosum virus
gcgauggaaggcgaccagcugg

SEQ ID NO: 4032380 - RNA, 20 nt, Molluscum contagiosum virus
gcgcaacauguccgcaagca

SEQ ID NO: 4032381 - RNA, 17 nt, Molluscum contagiosum virus
gcgcaaccgcgugcgug

SEQ ID NO: 4032382 - RNA, 13 nt, Molluscum contagiosum virus
gcgcaacgcgggc

SEQ ID NO: 4032383 - RNA, 22 nt, Molluscum contagiosum virus
gcgcaagaugacgacgggagag

SEQ ID NO: 4032384 - RNA, 20 nt, Molluscum contagiosum virus
gcgcaagucaccgcuccgca

SEQ ID NO: 4032385 - RNA, 21 nt, Molluscum contagiosum virus
gcgcaagugugcgcaucccuc

SEQ ID NO: 4032386 - RNA, 14 nt, Molluscum contagiosum virus
gcgcacacgucagc

SEQ ID NO: 4032387 - RNA, 23 nt, Molluscum contagiosum virus
gcgcaccgcguugccgcccgccg

SEQ ID NO: 4032388 - RNA, 19 nt, Molluscum contagiosum virus
gcgcacgaccacgugcagg

SEQ ID NO: 4032389 - RNA, 18 nt, Molluscum contagiosum virus
gcgcacgagcgcgggcgc

SEQ ID NO: 4032390 - RNA, 12 nt, Molluscum contagiosum virus
gcgcacgcagca

SEQ ID NO: 4032391 - RNA, 14 nt, Molluscum contagiosum virus
gcgcacgcagcagg

SEQ ID NO: 4032392 - RNA, 18 nt, Molluscum contagiosum virus
gcgcacgcgagcacgccu

SEQ ID NO: 4032393 - RNA, 18 nt, Molluscum contagiosum virus
gcgcacgcgcacgggccu

SEQ ID NO: 4032394 - RNA, 17 nt, Molluscum contagiosum virus
gcgcacgcuuguccgcg

SEQ ID NO: 4032395 - RNA, 19 nt, Molluscum contagiosum virus
gcgcacgcuugugcgcacg

SEQ ID NO: 4032396 - RNA, 12 nt, Molluscum contagiosum virus
gcgcacggaccu

SEQ ID NO: 4032397 - RNA, 16 nt, Molluscum contagiosum virus
gcgcacgugcgcgccg

SEQ ID NO: 4032398 - RNA, 13 nt, Molluscum contagiosum virus
gcgcacgugcguc

SEQ ID NO: 4032399 - RNA, 18 nt, Molluscum contagiosum virus
gcgcacucgggugcccgg

SEQ ID NO: 4032400 - RNA, 16 nt, Molluscum contagiosum virus
gcgcagacgcggugga

SEQ ID NO: 4032401 - RNA, 23 nt, Molluscum contagiosum virus
gcgcagcaggcacuccagcgcgc

SEQ ID NO: 4032402 - RNA, 20 nt, Molluscum contagiosum virus
gcgcagcaggugcacgugcu

SEQ ID NO: 4032403 - RNA, 13 nt, Molluscum contagiosum virus
gcgcagccacgac

SEQ ID NO: 4032404 - RNA, 17 nt, Molluscum contagiosum virus
gcgcagggagcugcgga

SEQ ID NO: 4032405 - RNA, 19 nt, Molluscum contagiosum virus
gcgcagguagcggcucgcg

SEQ ID NO: 4032406 - RNA, 21 nt, Molluscum contagiosum virus
gcgcagucccagcaccgcgcc

SEQ ID NO: 4032407 - RNA, 17 nt, Molluscum contagiosum virus
gcgcagugcggccagca

SEQ ID NO: 4032408 - RNA, 19 nt, Molluscum contagiosum virus
gcgcagugcggccagcacc

SEQ ID NO: 4032409 - RNA, 23 nt, Molluscum contagiosum virus
gcgcaguucgagcugcugcgcga

SEQ ID NO: 4032410 - RNA, 15 nt, Molluscum contagiosum virus
gcgcauacgcgccgc

SEQ ID NO: 4032411 - RNA, 14 nt, Molluscum contagiosum virus
gcgcaucagagaag

SEQ ID NO: 4032412 - RNA, 18 nt, Molluscum contagiosum virus
gcgcaucagagaagugcu

SEQ ID NO: 4032413 - RNA, 18 nt, Molluscum contagiosum virus
gcgcaucggcggcagcgc

SEQ ID NO: 4032414 - RNA, 20 nt, Molluscum contagiosum virus
gcgcaugcggcaggcgcugc

SEQ ID NO: 4032415 - RNA, 18 nt, Molluscum contagiosum virus
gcgcaugcucgcgcucuc

SEQ ID NO: 4032416 - RNA, 15 nt, Molluscum contagiosum virus
gcgcauucgcgcgcc

SEQ ID NO: 4032417 - RNA, 16 nt, Molluscum contagiosum virus
gcgcauucgcgcgccc

SEQ ID NO: 4032418 - RNA, 20 nt, Molluscum contagiosum virus
gcgcauuuaccggcgcuugc

SEQ ID NO: 4032419 - RNA, 22 nt, Molluscum contagiosum virus
gcgccacgagcgccgcgugcgc

SEQ ID NO: 4032420 - RNA, 17 nt, Molluscum contagiosum virus
gcgcccaacgcccgcgc

SEQ ID NO: 4032421 - RNA, 18 nt, Molluscum contagiosum virus
gcgcccaaggccgcgggc

SEQ ID NO: 4032422 - RNA, 13 nt, Molluscum contagiosum virus
gcgcccaccagca

SEQ ID NO: 4032423 - RNA, 13 nt, Molluscum contagiosum virus
gcgcccacgggcu

SEQ ID NO: 4032424 - RNA, 14 nt, Molluscum contagiosum virus
gcgcccgacgagcu

SEQ ID NO: 4032425 - RNA, 16 nt, Molluscum contagiosum virus
gcgcccgacgagcuug

SEQ ID NO: 4032426 - RNA, 13 nt, Molluscum contagiosum virus
gcgcccgacucgc

SEQ ID NO: 4032427 - RNA, 13 nt, Molluscum contagiosum virus
gcgcccgccagca

SEQ ID NO: 4032428 - RNA, 16 nt, Molluscum contagiosum virus
gcgcccggcgcccgca

SEQ ID NO: 4032429 - RNA, 15 nt, Molluscum contagiosum virus
gcgcccucgcgcgcg

SEQ ID NO: 4032430 - RNA, 22 nt, Molluscum contagiosum virus
gcgcccuggagcgcagucccag

SEQ ID NO: 4032431 - RNA, 21 nt, Molluscum contagiosum virus
gcgccgacaugcgcacgcgcg

SEQ ID NO: 4032432 - RNA, 16 nt, Molluscum contagiosum virus
gcgccgaggacgcgcc

SEQ ID NO: 4032433 - RNA, 14 nt, Molluscum contagiosum virus
gcgccgaugcagug

SEQ ID NO: 4032434 - RNA, 15 nt, Molluscum contagiosum virus
gcucgccgcacgcga

SEQ ID NO: 4032435 - RNA, 14 nt, Molluscum contagiosum virus
gcucgccgcgcgcc

SEQ ID NO: 4032436 - RNA, 23 nt, Molluscum contagiosum virus
gcucgcgacgugcgcgcugcgcg

SEQ ID NO: 4032437 - RNA, 14 nt, Molluscum contagiosum virus
gcucgcgagugugc

SEQ ID NO: 4032438 - RNA, 18 nt, Molluscum contagiosum virus
gcucgcgcaaguccagcg

SEQ ID NO: 4032439 - RNA, 20 nt, Molluscum contagiosum virus
gcucgcgcaaguccagcgcg

SEQ ID NO: 4032440 - RNA, 12 nt, Molluscum contagiosum virus
gcucgcgcgcau

SEQ ID NO: 4032441 - RNA, 16 nt, Molluscum contagiosum virus
gcucgcgcucgggaag

SEQ ID NO: 4032442 - RNA, 14 nt, Molluscum contagiosum virus
gcucgcgugccgcg

SEQ ID NO: 4032443 - RNA, 18 nt, Molluscum contagiosum virus
gcucgcuaaucugccgcg

SEQ ID NO: 4032444 - RNA, 21 nt, Molluscum contagiosum virus
gcucgcuuagccaacagcgca

SEQ ID NO: 4032445 - RNA, 13 nt, Molluscum contagiosum virus
gcucgcuugcccg

SEQ ID NO: 4032446 - RNA, 23 nt, Molluscum contagiosum virus
gcucgcuugccggcggcgcaagc

SEQ ID NO: 4032447 - RNA, 16 nt, Molluscum contagiosum virus
gcucggaagagcgucc

SEQ ID NO: 4032448 - RNA, 15 nt, Molluscum contagiosum virus
gcucggacacacgca

SEQ ID NO: 4032449 - RNA, 17 nt, Molluscum contagiosum virus
gcucggacacacgcacc

SEQ ID NO: 4032450 - RNA, 14 nt, Molluscum contagiosum virus
gcucggaggcgcag

SEQ ID NO: 4032451 - RNA, 16 nt, Molluscum contagiosum virus
gcucggcugccgugcg

SEQ ID NO: 4032452 - RNA, 20 nt, Molluscum contagiosum virus
gcucgggccggcgcgccgcg

SEQ ID NO: 4032453 - RNA, 18 nt, Molluscum contagiosum virus
gcucggguuccagcuccg

SEQ ID NO: 4032454 - RNA, 21 nt, Molluscum contagiosum virus
gcucggugucgguaccugcag

SEQ ID NO: 4032455 - RNA, 16 nt, Molluscum contagiosum virus
gcucgguuggcggcgc

SEQ ID NO: 4032456 - RNA, 16 nt, Molluscum contagiosum virus
gcucguggacagccug

SEQ ID NO: 4032457 - RNA, 17 nt, Molluscum contagiosum virus
gcucgugguugcgcacg

SEQ ID NO: 4032458 - RNA, 17 nt, Molluscum contagiosum virus
gcucguguugugccugc

SEQ ID NO: 4032459 - RNA, 19 nt, Molluscum contagiosum virus
gcucuacgagacucuggaa

SEQ ID NO: 4032460 - RNA, 14 nt, Molluscum contagiosum virus
gcucuacgccagcg

SEQ ID NO: 4032461 - RNA, 20 nt, Molluscum contagiosum virus
gcucuacggcgaguucugcc

SEQ ID NO: 4032462 - RNA, 16 nt, Molluscum contagiosum virus
gcucucgcugcugccc

SEQ ID NO: 4032463 - RNA, 22 nt, Molluscum contagiosum virus
gcucugcgugcuugugcgccug

SEQ ID NO: 4032464 - RNA, 20 nt, Molluscum contagiosum virus
gcucugucccgcaagccaca

SEQ ID NO: 4032465 - RNA, 23 nt, Molluscum contagiosum virus
gcugaaggcauaccugugccagc

SEQ ID NO: 4032466 - RNA, 17 nt, Molluscum contagiosum virus
gcugaccgagcgugggc

SEQ ID NO: 4032467 - RNA, 16 nt, Molluscum contagiosum virus
gcugagcccuuugaug

SEQ ID NO: 4032468 - RNA, 19 nt, Molluscum contagiosum virus
gcugagcgcggagcuggcg

SEQ ID NO: 4032469 - RNA, 14 nt, Molluscum contagiosum virus
gcugagcgggguac

SEQ ID NO: 4032470 - RNA, 16 nt, Molluscum contagiosum virus
gcugagcuagugccga

SEQ ID NO: 4032471 - RNA, 20 nt, Molluscum contagiosum virus
gcugagcuagugccgagcuc

SEQ ID NO: 4032472 - RNA, 19 nt, Molluscum contagiosum virus
gcugaguuacguggccgcg

SEQ ID NO: 4032473 - RNA, 21 nt, Molluscum contagiosum virus
gcugaucaccgaggagccgcg

SEQ ID NO: 4032474 - RNA, 22 nt, Molluscum contagiosum virus
gcugcaaagcgcggccgcgcuc

SEQ ID NO: 4032475 - RNA, 16 nt, Molluscum contagiosum virus
gcugcaaggcgcgcgc

SEQ ID NO: 4032476 - RNA, 18 nt, Molluscum contagiosum virus
gcugcaauaacaacgacc

SEQ ID NO: 4032477 - RNA, 14 nt, Molluscum contagiosum virus
gcugcacgugcagc

SEQ ID NO: 4032478 - RNA, 18 nt, Molluscum contagiosum virus
gcugcacgugcagcggcg

SEQ ID NO: 4032479 - RNA, 18 nt, Molluscum contagiosum virus
gcugcaggaccugcuggu

SEQ ID NO: 4032480 - RNA, 14 nt, Molluscum contagiosum virus
gcugcccccgccgc

SEQ ID NO: 4032481 - RNA, 14 nt, Molluscum contagiosum virus
gcugcccgugcccg

SEQ ID NO: 4032482 - RNA, 20 nt, Molluscum contagiosum virus
gcugcccuuuagcguggcgc

SEQ ID NO: 4032483 - RNA, 14 nt, Molluscum contagiosum virus
gcugccgcagagcc

SEQ ID NO: 4032484 - RNA, 15 nt, Molluscum contagiosum virus
gcugccgcugcgcga

SEQ ID NO: 4032485 - RNA, 20 nt, Molluscum contagiosum virus
gcugcgcgacaugcugcccg

SEQ ID NO: 4032486 - RNA, 18 nt, Molluscum contagiosum virus
gcugcgcgacgaggaggc

SEQ ID NO: 4032487 - RNA, 21 nt, Molluscum contagiosum virus
gcugcgcgacgucgucaagga

SEQ ID NO: 4032488 - RNA, 18 nt, Molluscum contagiosum virus
gcugcgcgagcgcgcgcu

SEQ ID NO: 4032489 - RNA, 15 nt, Molluscum contagiosum virus
gcugcgcgcccaggc

SEQ ID NO: 4032490 - RNA, 13 nt, Molluscum contagiosum virus
gcugcgcgccgcg

SEQ ID NO: 4032491 - RNA, 13 nt, Molluscum contagiosum virus
gcugcgcuaccac

SEQ ID NO: 4032492 - RNA, 16 nt, Molluscum contagiosum virus
gcugcgcuggaugcug

SEQ ID NO: 4032493 - RNA, 23 nt, Molluscum contagiosum virus
gcugcggacgcgggccgcgcgca

SEQ ID NO: 4032494 - RNA, 17 nt, Molluscum contagiosum virus
gcugcggcaacugccug

SEQ ID NO: 4032495 - RNA, 13 nt, Molluscum contagiosum virus
gcugcggcgcucg

SEQ ID NO: 4032496 - RNA, 20 nt, Molluscum contagiosum virus
gcugcggcucuacccggagg

SEQ ID NO: 4032497 - RNA, 23 nt, Molluscum contagiosum virus
gcugcgguagcggacgcggugac

SEQ ID NO: 4032498 - RNA, 15 nt, Molluscum contagiosum virus
gcugcuccccgccag

SEQ ID NO: 4032499 - RNA, 15 nt, Molluscum contagiosum virus
gcugcuccugcucug

SEQ ID NO: 4032500 - RNA, 17 nt, Molluscum contagiosum virus
gcugcucgacgggcgca

SEQ ID NO: 4032501 - RNA, 19 nt, Molluscum contagiosum virus
gcugcucgacgggcgcagc

SEQ ID NO: 4032502 - RNA, 20 nt, Molluscum contagiosum virus
gcugcucgugcugcucugcg

SEQ ID NO: 4032503 - RNA, 16 nt, Molluscum contagiosum virus
gcugcucucggcagcg

SEQ ID NO: 4032504 - RNA, 16 nt, Molluscum contagiosum virus
gcugcucugcgugcuu

SEQ ID NO: 4032505 - RNA, 17 nt, Molluscum contagiosum virus
gcugcugcccggcagcg

SEQ ID NO: 4032506 - RNA, 14 nt, Molluscum contagiosum virus
gcugcugcucgcac

SEQ ID NO: 4032507 - RNA, 22 nt, Molluscum contagiosum virus
gcugcuggccaacccucgcaag

SEQ ID NO: 4032508 - RNA, 17 nt, Molluscum contagiosum virus
gcugcuggcccugcuag

SEQ ID NO: 4032509 - RNA, 17 nt, Molluscum contagiosum virus
gcugcuggcggugcucu

SEQ ID NO: 4032510 - RNA, 21 nt, Molluscum contagiosum virus
gcugcuggugcucgccugcau

SEQ ID NO: 4032511 - RNA, 17 nt, Molluscum contagiosum virus
gcugcugguucugcucg

SEQ ID NO: 4032512 - RNA, 20 nt, Molluscum contagiosum virus
gcugcuuccgcaccuggucg

SEQ ID NO: 4032513 - RNA, 22 nt, Molluscum contagiosum virus
gcuggagaacggcgugcgagug

SEQ ID NO: 4032514 - RNA, 21 nt, Molluscum contagiosum virus
gcuggagcgagugcgcgugcg

SEQ ID NO: 4032515 - RNA, 17 nt, Molluscum contagiosum virus
gcuggagcugccgcugc

SEQ ID NO: 4032516 - RNA, 12 nt, Molluscum contagiosum virus
gcuggcacgcga

SEQ ID NO: 4032517 - RNA, 18 nt, Molluscum contagiosum virus
gcuggcccugcuagugcg

SEQ ID NO: 4032518 - RNA, 15 nt, Molluscum contagiosum virus
gcuggccucugccug

SEQ ID NO: 4032519 - RNA, 16 nt, Molluscum contagiosum virus
gcuggcgcgcugcgug

SEQ ID NO: 4032520 - RNA, 23 nt, Molluscum contagiosum virus
gcuggcgcguccguucacgggca

SEQ ID NO: 4032521 - RNA, 14 nt, Molluscum contagiosum virus
gcuggcggcgcacg

SEQ ID NO: 4032522 - RNA, 15 nt, Molluscum contagiosum virus
gcuggcggggaaagc

SEQ ID NO: 4032523 - RNA, 13 nt, Molluscum contagiosum virus
gcuggcggugcuc

SEQ ID NO: 4032524 - RNA, 18 nt, Molluscum contagiosum virus
gcugggcgguugccugca

SEQ ID NO: 4032525 - RNA, 15 nt, Molluscum contagiosum virus
gcuggugggcgugcg

SEQ ID NO: 4032526 - RNA, 16 nt, Molluscum contagiosum virus
gcugguggugcuggag

SEQ ID NO: 4032527 - RNA, 14 nt, Molluscum contagiosum virus
gcugguucugcucg

SEQ ID NO: 4032528 - RNA, 18 nt, Molluscum contagiosum virus
gcugguucugcucgcagg

SEQ ID NO: 4032529 - RNA, 14 nt, Molluscum contagiosum virus
gcuguaccuggugc

SEQ ID NO: 4032530 - RNA, 18 nt, Molluscum contagiosum virus
gcuguccuucugguuccu

SEQ ID NO: 4032531 - RNA, 19 nt, Molluscum contagiosum virus
gcugucgcgcagcagcuac

SEQ ID NO: 4032532 - RNA, 20 nt, Molluscum contagiosum virus
gcugugcccgcggcguuccc

SEQ ID NO: 4032533 - RNA, 14 nt, Molluscum contagiosum virus
gcugugcgagccag

SEQ ID NO: 4032534 - RNA, 14 nt, Molluscum contagiosum virus
gcuguggacaugau

SEQ ID NO: 4032535 - RNA, 18 nt, Molluscum contagiosum virus
gcuguugcugcugccgcg

SEQ ID NO: 4032536 - RNA, 13 nt, Molluscum contagiosum virus
gcuguuucugccg

SEQ ID NO: 4032537 - RNA, 21 nt, Molluscum contagiosum virus
ugcgcucggaggggcuccggg

SEQ ID NO: 4032538 - RNA, 16 nt, Molluscum contagiosum virus
ugcgcuucgccgcgcg

SEQ ID NO: 4032539 - RNA, 16 nt, Molluscum contagiosum virus
ugcgcuucggcuccca

SEQ ID NO: 4032540 - RNA, 18 nt, Molluscum contagiosum virus
ugcgcuugggcgucgucu

SEQ ID NO: 4032541 - RNA, 11 nt, Molluscum contagiosum virus
ugcggacaugc

SEQ ID NO: 4032542 - RNA, 20 nt, Molluscum contagiosum virus
ugcggacgcaggaugcuggg

SEQ ID NO: 4032543 - RNA, 16 nt, Molluscum contagiosum virus
ugcggacgcgggccgc

SEQ ID NO: 4032544 - RNA, 18 nt, Molluscum contagiosum virus
ugcggaugugcuagcugc

SEQ ID NO: 4032545 - RNA, 19 nt, Molluscum contagiosum virus
ugcggcaacugccugcgcu

SEQ ID NO: 4032546 - RNA, 16 nt, Molluscum contagiosum virus
ugcggcacgggcucga

SEQ ID NO: 4032547 - RNA, 17 nt, Molluscum contagiosum virus
ugcggcacgggcucgag

SEQ ID NO: 4032548 - RNA, 13 nt, Molluscum contagiosum virus
ugcggcaggcgcu

SEQ ID NO: 4032549 - RNA, 18 nt, Molluscum contagiosum virus
ugcggcaggcgcugcgcg

SEQ ID NO: 4032550 - RNA, 23 nt, Molluscum contagiosum virus
ugcggcgcgggcaagcagggccu

SEQ ID NO: 4032551 - RNA, 20 nt, Molluscum contagiosum virus
ugcggcgcgugccgcugcgc

SEQ ID NO: 4032552 - RNA, 17 nt, Molluscum contagiosum virus
ugcggcgcgugcugagc

SEQ ID NO: 4032553 - RNA, 15 nt, Molluscum contagiosum virus
ugcggcggcgcacgc

SEQ ID NO: 4032554 - RNA, 17 nt, Molluscum contagiosum virus
ugcgggcgcaggcccgc

SEQ ID NO: 4032555 - RNA, 17 nt, Molluscum contagiosum virus
ugcgggcuagcacgcau

SEQ ID NO: 4032556 - RNA, 20 nt, Molluscum contagiosum virus
ugcgggucucggggcuccgc

SEQ ID NO: 4032557 - RNA, 15 nt, Molluscum contagiosum virus
ugcgguacaugcugu

SEQ ID NO: 4032558 - RNA, 20 nt, Molluscum contagiosum virus
ugcggugacgguccugcgcg

SEQ ID NO: 4032559 - RNA, 22 nt, Molluscum contagiosum virus
ugcguagagcaaaggaagagcc

SEQ ID NO: 4032560 - RNA, 13 nt, Molluscum contagiosum virus
ugcgucccagcag

SEQ ID NO: 4032561 - RNA, 16 nt, Molluscum contagiosum virus
ugcgugacccucuucg

SEQ ID NO: 4032562 - RNA, 15 nt, Molluscum contagiosum virus
ugcgugccccucgug

SEQ ID NO: 4032563 - RNA, 15 nt, Molluscum contagiosum virus
ugcgugcgcugcgcg

SEQ ID NO: 4032564 - RNA, 17 nt, Molluscum contagiosum virus
ugcguguuggcuucugc

SEQ ID NO: 4032565 - RNA, 22 nt, Molluscum contagiosum virus
ugcguuggcgccagccuggcgg

SEQ ID NO: 4032566 - RNA, 14 nt, Molluscum contagiosum virus
ugcuacaggacguc

SEQ ID NO: 4032567 - RNA, 19 nt, Molluscum contagiosum virus
ugcuagagcauauccugau

SEQ ID NO: 4032568 - RNA, 16 nt, Molluscum contagiosum virus
ugcucaagcaccugcg

SEQ ID NO: 4032569 - RNA, 16 nt, Molluscum contagiosum virus
ugcucacgcugcgcuc

SEQ ID NO: 4032570 - RNA, 15 nt, Molluscum contagiosum virus
ugcucaugcgcaagc

SEQ ID NO: 4032571 - RNA, 13 nt, Molluscum contagiosum virus
ugcucccucucga

SEQ ID NO: 4032572 - RNA, 17 nt, Molluscum contagiosum virus
ugcuccugcucuguugc

SEQ ID NO: 4032573 - RNA, 23 nt, Molluscum contagiosum virus
ugcucgagauucguggcgagcau

SEQ ID NO: 4032574 - RNA, 17 nt, Molluscum contagiosum virus
ugcucgccagcagguuc

SEQ ID NO: 4032575 - RNA, 20 nt, Molluscum contagiosum virus
ugcucgcggagggcagcauc

SEQ ID NO: 4032576 - RNA, 22 nt, Molluscum contagiosum virus
ugcucuacuggcggcgcccgug

SEQ ID NO: 4032577 - RNA, 22 nt, Molluscum contagiosum virus
ugcucuacuuccacgagcugac

SEQ ID NO: 4032578 - RNA, 22 nt, Molluscum contagiosum virus
ugcugcaguaugaaucuacggc

SEQ ID NO: 4032579 - RNA, 18 nt, Molluscum contagiosum virus
ugcugccaauaccaggcc

SEQ ID NO: 4032580 - RNA, 20 nt, Molluscum contagiosum virus
ugcugccgggagaggaaagg

SEQ ID NO: 4032581 - RNA, 20 nt, Molluscum contagiosum virus
ugcugccucccaagcagcgc

SEQ ID NO: 4032582 - RNA, 15 nt, Molluscum contagiosum virus
ugcugcgcagcaucc

SEQ ID NO: 4032583 - RNA, 16 nt, Molluscum contagiosum virus
ugcugcgcuacaugua

SEQ ID NO: 4032584 - RNA, 17 nt, Molluscum contagiosum virus
ugcugcgcuacauguau

SEQ ID NO: 4032585 - RNA, 23 nt, Molluscum contagiosum virus
ugcuggaacgcuuggcgggcagc

SEQ ID NO: 4032586 - RNA, 15 nt, Molluscum contagiosum virus
ugcuggacgcgcacg

SEQ ID NO: 4032587 - RNA, 15 nt, Molluscum contagiosum virus
ugcuggagggcacgc

SEQ ID NO: 4032588 - RNA, 22 nt, Molluscum contagiosum virus
ugcuggcgcucgcgcgcacgcg

SEQ ID NO: 4032589 - RNA, 17 nt, Molluscum contagiosum virus
ugcuggcggggcuggca

SEQ ID NO: 4032590 - RNA, 14 nt, Molluscum contagiosum virus
ugcugucccucugu

SEQ ID NO: 4032591 - RNA, 13 nt, Molluscum contagiosum virus
ugcuuccuccucc

SEQ ID NO: 4032592 - RNA, 15 nt, Molluscum contagiosum virus
ugcuuccuccuccaa

SEQ ID NO: 4032593 - RNA, 14 nt, Molluscum contagiosum virus
ugcuucugcgcugg

SEQ ID NO: 4032594 - RNA, 11 nt, Molluscum contagiosum virus
ugcuugcuucc

SEQ ID NO: 4032595 - RNA, 16 nt, Molluscum contagiosum virus
ugcuugugcgccugug

SEQ ID NO: 4032596 - RNA, 20 nt, Molluscum contagiosum virus
uggaacggcgacuuguagug

SEQ ID NO: 4032597 - RNA, 15 nt, Molluscum contagiosum virus
uggaaggcgaccagc

SEQ ID NO: 4032598 - RNA, 16 nt, Molluscum contagiosum virus
uggacagcaagcagcg

SEQ ID NO: 4032599 - RNA, 17 nt, Molluscum contagiosum virus
uggacagcaagcagcgc

SEQ ID NO: 4032600 - RNA, 20 nt, Molluscum contagiosum virus
uggaccgguuccgugcgcuc

SEQ ID NO: 4032601 - RNA, 19 nt, Molluscum contagiosum virus
uggacgacaugcugugcgg

SEQ ID NO: 4032602 - RNA, 14 nt, Molluscum contagiosum virus
uggacgagcagagc

SEQ ID NO: 4032603 - RNA, 19 nt, Molluscum contagiosum virus
uggacgaugguggcgcugc

SEQ ID NO: 4032604 - RNA, 21 nt, Molluscum contagiosum virus
uggacgaugguggcgcugcug

SEQ ID NO: 4032605 - RNA, 19 nt, Molluscum contagiosum virus
uggacgccguugcgcguga

SEQ ID NO: 4032606 - RNA, 11 nt, Molluscum contagiosum virus
uggacgcgcac

SEQ ID NO: 4032607 - RNA, 20 nt, Molluscum contagiosum virus
uggacgcgccgcgcgagugc

SEQ ID NO: 4032608 - RNA, 17 nt, Molluscum contagiosum virus
uggacgucgcggccacg

SEQ ID NO: 4032609 - RNA, 19 nt, Molluscum contagiosum virus
uggacgugcugcuggcccu

SEQ ID NO: 4032610 - RNA, 22 nt, Molluscum contagiosum virus
uggacgugggcgaacugcccgg

SEQ ID NO: 4032611 - RNA, 16 nt, Molluscum contagiosum virus
uggacuccgaggcagg

SEQ ID NO: 4032612 - RNA, 12 nt, Molluscum contagiosum virus
uggacugagccg

SEQ ID NO: 4032613 - RNA, 16 nt, Molluscum contagiosum virus
uggacuucaggauggc

SEQ ID NO: 4032614 - RNA, 21 nt, Molluscum contagiosum virus
uggacuuuggcgugaccaugg

SEQ ID NO: 4032615 - RNA, 17 nt, Molluscum contagiosum virus
uggagaucgacaagauc

SEQ ID NO: 4032616 - RNA, 19 nt, Molluscum contagiosum virus
uggagcaagcgcguucgcg

SEQ ID NO: 4032617 - RNA, 21 nt, Molluscum contagiosum virus
uggagcagacguacgagcagg

SEQ ID NO: 4032618 - RNA, 14 nt, Molluscum contagiosum virus
uggagcccgugcug

SEQ ID NO: 4032619 - RNA, 19 nt, Molluscum contagiosum virus
uggagccucccccgcgcac

SEQ ID NO: 4032620 - RNA, 18 nt, Molluscum contagiosum virus
uggagcgagugcgcgugc

SEQ ID NO: 4032621 - RNA, 12 nt, Molluscum contagiosum virus
uggaggagccgc

SEQ ID NO: 4032622 - RNA, 17 nt, Molluscum contagiosum virus
uggagggcacgcugcac

SEQ ID NO: 4032623 - RNA, 22 nt, Molluscum contagiosum virus
uggagggcagugccaagguucu

SEQ ID NO: 4032624 - RNA, 17 nt, Molluscum contagiosum virus
uggagggucacgcgcac

SEQ ID NO: 4032625 - RNA, 22 nt, Molluscum contagiosum virus
uggaguccaugcccacgcgcaa

SEQ ID NO: 4032626 - RNA, 21 nt, Molluscum contagiosum virus
uggcacccuggcugcugcgcg

SEQ ID NO: 4032627 - RNA, 23 nt, Molluscum contagiosum virus
uggcaccgcgcgcgcuccgagac

SEQ ID NO: 4032628 - RNA, 18 nt, Molluscum contagiosum virus
uggcacggccggcgccgc

SEQ ID NO: 4032629 - RNA, 19 nt, Molluscum contagiosum virus
uggcacggccggcgccgcg

SEQ ID NO: 4032630 - RNA, 22 nt, Molluscum contagiosum virus
uggcaugcgcccucacgugcug

SEQ ID NO: 4032631 - RNA, 21 nt, Molluscum contagiosum virus
uggccaagcgcuccaacuucc

SEQ ID NO: 4032632 - RNA, 15 nt, Molluscum contagiosum virus
uggccagccucaucg

SEQ ID NO: 4032633 - RNA, 13 nt, Molluscum contagiosum virus
uggccgagccgcu

SEQ ID NO: 4032634 - RNA, 15 nt, Molluscum contagiosum virus
uggcgagcgcugccg

SEQ ID NO: 4032635 - RNA, 14 nt, Molluscum contagiosum virus
uggcgccugcgcgc

SEQ ID NO: 4032636 - RNA, 21 nt, Molluscum contagiosum virus
uggcgcugcacaguucacggc

SEQ ID NO: 4032637 - RNA, 15 nt, Molluscum contagiosum virus
uggcgcugggcgcgc

SEQ ID NO: 4032638 - RNA, 21 nt, Molluscum contagiosum virus
uggcgcugggcgcgccgcgcg

SEQ ID NO: 4032639 - RNA, 11 nt, Molluscum contagiosum virus
cgccugcuggc

SEQ ID NO: 4032640 - RNA, 13 nt, Molluscum contagiosum virus
cgccuuccugcug

SEQ ID NO: 4032641 - RNA, 14 nt, Molluscum contagiosum virus
cgccuucugccugc

SEQ ID NO: 4032642 - RNA, 15 nt, Molluscum contagiosum virus
cgccuugccgaggag

SEQ ID NO: 4032643 - RNA, 13 nt, Molluscum contagiosum virus
cgcgaaacuggac

SEQ ID NO: 4032644 - RNA, 20 nt, Molluscum contagiosum virus
cgcgaaacuggacugagccg

SEQ ID NO: 4032645 - RNA, 22 nt, Molluscum contagiosum virus
cgcgaaagcgucgugcuccacg

SEQ ID NO: 4032646 - RNA, 20 nt, Molluscum contagiosum virus
cgcgaacgaggagggcagcc

SEQ ID NO: 4032647 - RNA, 19 nt, Molluscum contagiosum virus
cgcgaauuggccgcggagg

SEQ ID NO: 4032648 - RNA, 22 nt, Molluscum contagiosum virus
ucgcguccacgaugcgcucgug

SEQ ID NO: 4032649 - RNA, 18 nt, Molluscum contagiosum virus
ucgcugcgcaggugcacg

SEQ ID NO: 4032650 - RNA, 17 nt, Molluscum contagiosum virus
ucgcugcuccccgccag

SEQ ID NO: 4032651 - RNA, 22 nt, Molluscum contagiosum virus
ucgcugcuccccgccagcacca

SEQ ID NO: 4032652 - RNA, 23 nt, Molluscum contagiosum virus
ucgcuugccggcggcgcaagcac

SEQ ID NO: 4032653 - RNA, 20 nt, Molluscum contagiosum virus
ucggacggaggucugcuuug

SEQ ID NO: 4032654 - RNA, 15 nt, Molluscum contagiosum virus
ucggaggcugcuccc

SEQ ID NO: 4032655 - RNA, 13 nt, Molluscum contagiosum virus
ucggaugcgcugc

SEQ ID NO: 4032656 - RNA, 21 nt, Molluscum contagiosum virus
ucggcacaucucucagggcag

SEQ ID NO: 4032657 - RNA, 12 nt, Molluscum contagiosum virus
ucggcaccgcgc

SEQ ID NO: 4032658 - RNA, 12 nt, Molluscum contagiosum virus
ucggcacugcuc

SEQ ID NO: 4032659 - RNA, 14 nt, Molluscum contagiosum virus
ucggcaugcagcgc

SEQ ID NO: 4032660 - RNA, 12 nt, Molluscum contagiosum virus
ucggccagcagc

SEQ ID NO: 4032661 - RNA, 17 nt, Molluscum contagiosum virus
ucggcgacacgcccgcg

SEQ ID NO: 4032662 - RNA, 22 nt, Molluscum contagiosum virus
ucggcgcuacgcacuucacggc

SEQ ID NO: 4032663 - RNA, 15 nt, Molluscum contagiosum virus
ucggcggcaugcgcg

SEQ ID NO: 4032664 - RNA, 22 nt, Molluscum contagiosum virus
ucggcggcaugcgcgcgcagca

SEQ ID NO: 4032665 - RNA, 13 nt, Molluscum contagiosum virus
ucggcguacgugc

SEQ ID NO: 4032666 - RNA, 15 nt, Molluscum contagiosum virus
ucggcguggccaggc

SEQ ID NO: 4032667 - RNA, 16 nt, Molluscum contagiosum virus
ucggcguuggccacga

SEQ ID NO: 4032668 - RNA, 15 nt, Molluscum contagiosum virus
ucgggaagcccucag

SEQ ID NO: 4032669 - RNA, 16 nt, Molluscum contagiosum virus
ucgggccccugcgcga

SEQ ID NO: 4032670 - RNA, 19 nt, Molluscum contagiosum virus
ucgggccgcugccgucgcg

SEQ ID NO: 4032671 - RNA, 18 nt, Molluscum contagiosum virus
ucggggcccucggcgcgc

SEQ ID NO: 4032672 - RNA, 16 nt, Molluscum contagiosum virus
ucggguacacgugcuu

SEQ ID NO: 4032673 - RNA, 14 nt, Molluscum contagiosum virus
ucggugcucaugcg

SEQ ID NO: 4032674 - RNA, 16 nt, Molluscum contagiosum virus
ucggugcucaugcgcg

SEQ ID NO: 4032675 - RNA, 16 nt, Molluscum contagiosum virus
ucguccggcgcucgcc

SEQ ID NO: 4032676 - RNA, 15 nt, Molluscum contagiosum virus
ucgucgagcacgaag

SEQ ID NO: 4032677 - RNA, 21 nt, Molluscum contagiosum virus
ucgugcaaagcaucgacgugc

SEQ ID NO: 4032678 - RNA, 16 nt, Molluscum contagiosum virus
ucgugcccgcacacgc

SEQ ID NO: 4032679 - RNA, 20 nt, Molluscum contagiosum virus
ucgugccgccugcgcgcacc

SEQ ID NO: 4032680 - RNA, 21 nt, Molluscum contagiosum virus
ucgugccgccugcgcgcaccc

SEQ ID NO: 4032681 - RNA, 16 nt, Molluscum contagiosum virus
ucgugccugucucgca

SEQ ID NO: 4032682 - RNA, 20 nt, Molluscum contagiosum virus
ucgugccuuuugcgcgcugc

SEQ ID NO: 4032683 - RNA, 12 nt, Molluscum contagiosum virus
ucgugcgcgacu

SEQ ID NO: 4032684 - RNA, 23 nt, Molluscum contagiosum virus
ucgugcgcgacuuggggcucgcc

SEQ ID NO: 4032685 - RNA, 21 nt, Molluscum contagiosum virus
ucguggcguugcugcugcgcg

SEQ ID NO: 4032686 - RNA, 23 nt, Molluscum contagiosum virus
ucgugguugcgcacguuggccac

SEQ ID NO: 4032687 - RNA, 15 nt, Molluscum contagiosum virus
ucgugugcgcgcacg

SEQ ID NO: 4032688 - RNA, 19 nt, Molluscum contagiosum virus
ucguguguccgcacgcaca

SEQ ID NO: 4032689 - RNA, 20 nt, Molluscum contagiosum virus
ucguuugcucggggcugucg

SEQ ID NO: 4032690 - RNA, 18 nt, Molluscum contagiosum virus
ucuaagcgcacgcgcgac

SEQ ID NO: 4032691 - RNA, 15 nt, Molluscum contagiosum virus
ucuacgaggagcacg

SEQ ID NO: 4032692 - RNA, 22 nt, Molluscum contagiosum virus
ucuacgccagcgacgcgacgcc

SEQ ID NO: 4032693 - RNA, 16 nt, Molluscum contagiosum virus
ucucagcggcacugcg

SEQ ID NO: 4032694 - RNA, 21 nt, Molluscum contagiosum virus
ucucagggcagcgaaaaguag

SEQ ID NO: 4032695 - RNA, 15 nt, Molluscum contagiosum virus
ucucagggugguuug

SEQ ID NO: 4032696 - RNA, 12 nt, Molluscum contagiosum virus
ucuccacaaaga

SEQ ID NO: 4032697 - RNA, 13 nt, Molluscum contagiosum virus
ucuccaggaacgc

SEQ ID NO: 4032698 - RNA, 15 nt, Molluscum contagiosum virus
ucuccgaccgugccc

SEQ ID NO: 4032699 - RNA, 21 nt, Molluscum contagiosum virus
ucuccgcgcugcacuacaacc

SEQ ID NO: 4032700 - RNA, 18 nt, Molluscum contagiosum virus
ucuccgcgggcagccgcu

SEQ ID NO: 4032701 - RNA, 18 nt, Molluscum contagiosum virus
ucuccggaggccgcuccc

SEQ ID NO: 4032702 - RNA, 22 nt, Molluscum contagiosum virus
ucuccuccuugauuucgcgcag

SEQ ID NO: 4032703 - RNA, 16 nt, Molluscum contagiosum virus
ucucgagacgcugccu

SEQ ID NO: 4032704 - RNA, 20 nt, Molluscum contagiosum virus
ucucgcagacgcagcgcgag

SEQ ID NO: 4032705 - RNA, 20 nt, Molluscum contagiosum virus
ucucgcgcgggcagggcgac

SEQ ID NO: 4032706 - RNA, 20 nt, Molluscum contagiosum virus
ucucguucgcgaccuggcgc

SEQ ID NO: 4032707 - RNA, 13 nt, Molluscum contagiosum virus
ucucugcauguuu

SEQ ID NO: 4032708 - RNA, 13 nt, Molluscum contagiosum virus
ucucugcccucag

SEQ ID NO: 4032709 - RNA, 19 nt, Molluscum contagiosum virus
ucugaaaggacaugggcac

SEQ ID NO: 4032710 - RNA, 20 nt, Molluscum contagiosum virus
ucugacacuugcggcgcuag

SEQ ID NO: 4032711 - RNA, 20 nt, Molluscum contagiosum virus
ucugcaaggccuguccgacg

SEQ ID NO: 4032712 - RNA, 13 nt, Molluscum contagiosum virus
ucugcagcgccgc

SEQ ID NO: 4032713 - RNA, 19 nt, Molluscum contagiosum virus
gucuccacgcgugcgcgcc

SEQ ID NO: 4032714 - RNA, 12 nt, Molluscum contagiosum virus
gucucgcgcgcc

SEQ ID NO: 4032715 - RNA, 15 nt, Molluscum contagiosum virus
gucucgcgcucgccu

SEQ ID NO: 4032716 - RNA, 16 nt, Molluscum contagiosum virus
gucucggggcuccgcc

SEQ ID NO: 4032717 - RNA, 15 nt, Molluscum contagiosum virus
gucucugcgcagagc

SEQ ID NO: 4032718 - RNA, 21 nt, Molluscum contagiosum virus
gucucugcgcgagcagcugcu

SEQ ID NO: 4032719 - RNA, 16 nt, Molluscum contagiosum virus
gucugaccgcgggcac

SEQ ID NO: 4032720 - RNA, 20 nt, Molluscum contagiosum virus
gucugcuuugucugcaggca

SEQ ID NO: 4032721 - RNA, 20 nt, Molluscum contagiosum virus
gucuggcucguacugcugca

SEQ ID NO: 4032722 - RNA, 13 nt, Molluscum contagiosum virus
gucugugcgcgag

SEQ ID NO: 4032723 - RNA, 21 nt, Molluscum contagiosum virus
gucuucgcguagucagggccu

SEQ ID NO: 4032724 - RNA, 20 nt, Molluscum contagiosum virus
gucuucuuguugugcuuuga

SEQ ID NO: 4032725 - RNA, 15 nt, Molluscum contagiosum virus
gucuugcgcagcgcc

SEQ ID NO: 4032726 - RNA, 17 nt, Molluscum contagiosum virus
gugaaucugacacuugc

SEQ ID NO: 4032727 - RNA, 14 nt, Molluscum contagiosum virus
gugacacgagccgu

SEQ ID NO: 4032728 - RNA, 22 nt, Molluscum contagiosum virus
gugaccauggacacgcugcgcg

SEQ ID NO: 4032729 - RNA, 17 nt, Molluscum contagiosum virus
gugaccauuacuucugu

SEQ ID NO: 4032730 - RNA, 19 nt, Molluscum contagiosum virus
gugacgcugcaagacggaa

SEQ ID NO: 4032731 - RNA, 21 nt, Molluscum contagiosum virus
gugcaagagcucguggacagc

SEQ ID NO: 4032732 - RNA, 21 nt, Molluscum contagiosum virus
gugcaauuccguccagugaaa

SEQ ID NO: 4032733 - RNA, 19 nt, Molluscum contagiosum virus
gugcacgcacgcgcgggca

SEQ ID NO: 4032734 - RNA, 20 nt, Molluscum contagiosum virus
gugcacgcggcgcgugucgc

SEQ ID NO: 4032735 - RNA, 16 nt, Molluscum contagiosum virus
gugcagcgcgugcgca

SEQ ID NO: 4032736 - RNA, 16 nt, Molluscum contagiosum virus
gugcagcggcgccacg

SEQ ID NO: 4032737 - RNA, 17 nt, Molluscum contagiosum virus
gugcauacgcagaggcg

SEQ ID NO: 4032738 - RNA, 21 nt, Molluscum contagiosum virus
gugcaugacggcgcgagccag

SEQ ID NO: 4032739 - RNA, 13 nt, Molluscum contagiosum virus
gugcauggcacgc

SEQ ID NO: 4032740 - RNA, 20 nt, Molluscum contagiosum virus
gugccagagucgccgcugcg

SEQ ID NO: 4032741 - RNA, 21 nt, Molluscum contagiosum virus
gugccagagucgccgcugcgc

SEQ ID NO: 4032742 - RNA, 20 nt, Molluscum contagiosum virus
gugccagcguacggcccgaa

SEQ ID NO: 4032743 - RNA, 15 nt, Molluscum contagiosum virus
gugccaucucgcaca

SEQ ID NO: 4032744 - RNA, 17 nt, Molluscum contagiosum virus
gugcccaugcucgagcc

SEQ ID NO: 4032745 - RNA, 15 nt, Molluscum contagiosum virus
gugcccgccaagagc

SEQ ID NO: 4032746 - RNA, 13 nt, Molluscum contagiosum virus
gugcccgcgcgcu

SEQ ID NO: 4032747 - RNA, 17 nt, Molluscum contagiosum virus
gugccgaggcgcugccg

SEQ ID NO: 4032748 - RNA, 17 nt, Molluscum contagiosum virus
gugccgccgcgcgcgcc

SEQ ID NO: 4032749 - RNA, 14 nt, Molluscum contagiosum virus
gugccgccgugggc

SEQ ID NO: 4032750 - RNA, 18 nt, Molluscum contagiosum virus
gugccgcucggaggcuug

SEQ ID NO: 4032751 - RNA, 22 nt, Molluscum contagiosum virus
gugccgcugcgcuggaugcugc

SEQ ID NO: 4032752 - RNA, 16 nt, Molluscum contagiosum virus
gugccguccccgcgcu

SEQ ID NO: 4032753 - RNA, 18 nt, Molluscum contagiosum virus
gugccugcaagaggcgcu

SEQ ID NO: 4032754 - RNA, 19 nt, Molluscum contagiosum virus
gugccugccaucuacgagc

SEQ ID NO: 4032755 - RNA, 21 nt, Molluscum contagiosum virus
gugccuggcguccgcacgcac

SEQ ID NO: 4032756 - RNA, 18 nt, Molluscum contagiosum virus
gugcgaaggcucgagcug

SEQ ID NO: 4032757 - RNA, 12 nt, Molluscum contagiosum virus
gugcgaagggcu

SEQ ID NO: 4032758 - RNA, 13 nt, Molluscum contagiosum virus
gugcgagcacgag

SEQ ID NO: 4032759 - RNA, 17 nt, Molluscum contagiosum virus
gugcgcaaagcaacugc

SEQ ID NO: 4032760 - RNA, 16 nt, Molluscum contagiosum virus
gugcgcaccagcugca

SEQ ID NO: 4032761 - RNA, 19 nt, Molluscum contagiosum virus
gugcgcagcauucccggcg

SEQ ID NO: 4032762 - RNA, 23 nt, Molluscum contagiosum virus
gugcgcaucccugcgcaccugca

SEQ ID NO: 4032763 - RNA, 19 nt, Molluscum contagiosum virus
gugcgccgccgcaggcccg

SEQ ID NO: 4032764 - RNA, 17 nt, Molluscum contagiosum virus
gugcgccucgcaggcga

SEQ ID NO: 4032765 - RNA, 21 nt, Molluscum contagiosum virus
gugcgccucggacuucgacgc

SEQ ID NO: 4032766 - RNA, 16 nt, Molluscum contagiosum virus
gugcgccugcagccug

SEQ ID NO: 4032767 - RNA, 14 nt, Molluscum contagiosum virus
gugcgccugugcug

SEQ ID NO: 4032768 - RNA, 16 nt, Molluscum contagiosum virus
gugcgccuucgucacg

SEQ ID NO: 4032769 - RNA, 14 nt, Molluscum contagiosum virus
gugcgcgacgggcu

SEQ ID NO: 4032770 - RNA, 14 nt, Molluscum contagiosum virus
gugcgcgcacggcu

SEQ ID NO: 4032771 - RNA, 14 nt, Molluscum contagiosum virus
gugcgcgcugcacg

SEQ ID NO: 4032772 - RNA, 18 nt, Molluscum contagiosum virus
gugcgcgcugcgcgcgcu

SEQ ID NO: 4032773 - RNA, 19 nt, Molluscum contagiosum virus
gugcgcgcugcgcgcgcuc

SEQ ID NO: 4032774 - RNA, 16 nt, Molluscum contagiosum virus
gugcgcgugcgccugc

SEQ ID NO: 4032775 - RNA, 12 nt, Molluscum contagiosum virus
gugcggagagcc

SEQ ID NO: 4032776 - RNA, 24 nt, Molluscum contagiosum virus
gugcggagggugcacgcgggcgcc

SEQ ID NO: 4032777 - RNA, 19 nt, Molluscum contagiosum virus
gugcggccaccagcgcggc

SEQ ID NO: 4032778 - RNA, 23 nt, Molluscum contagiosum virus
gugcgucacguacucgcugcucc

SEQ ID NO: 4032779 - RNA, 16 nt, Molluscum contagiosum virus
gugcgugccaggcgua

SEQ ID NO: 4032780 - RNA, 18 nt, Molluscum contagiosum virus
gugcgugguguccacgcg

SEQ ID NO: 4032781 - RNA, 13 nt, Molluscum contagiosum virus
gugcucaggccag

SEQ ID NO: 4032782 - RNA, 17 nt, Molluscum contagiosum virus
gugcuccacgcgcagcu

SEQ ID NO: 4032783 - RNA, 12 nt, Molluscum contagiosum virus
gugcucggcgug

SEQ ID NO: 4032784 - RNA, 20 nt, Molluscum contagiosum virus
gugcucuucggggacggcgu

SEQ ID NO: 4032785 - RNA, 21 nt, Molluscum contagiosum virus
gugcugaagacgcuggccgug

SEQ ID NO: 4032786 - RNA, 13 nt, Molluscum contagiosum virus
gugcugcgccacg

SEQ ID NO: 4032787 - RNA, 16 nt, Molluscum contagiosum virus
gugcuggagcagggcu

SEQ ID NO: 4032788 - RNA, 21 nt, Molluscum contagiosum virus
gugcuggagggcacgcugcac

SEQ ID NO: 4032789 - RNA, 22 nt, Molluscum contagiosum virus
gugcuggucaagaacaugugcu

SEQ ID NO: 4032790 - RNA, 16 nt, Molluscum contagiosum virus
gugcuguugccgcgcu

SEQ ID NO: 4032791 - RNA, 14 nt, Molluscum contagiosum virus
gugcuugccuggaa

SEQ ID NO: 4032792 - RNA, 16 nt, Molluscum contagiosum virus
gugcuugcgcacggac

SEQ ID NO: 4032793 - RNA, 17 nt, Molluscum contagiosum virus
guggacgaugguggcgc

SEQ ID NO: 4032794 - RNA, 23 nt, Molluscum contagiosum virus
guggacgcgcgagugugugcauc

SEQ ID NO: 4032795 - RNA, 20 nt, Molluscum contagiosum virus
guggaggcgacuggcgacac

SEQ ID NO: 4032796 - RNA, 13 nt, Molluscum contagiosum virus
guggcaagggcuc

SEQ ID NO: 4032797 - RNA, 17 nt, Molluscum contagiosum virus
guggcacccuggcugcu

SEQ ID NO: 4032798 - RNA, 20 nt, Molluscum contagiosum virus
guggcacccuggcugcugcg

SEQ ID NO: 4032799 - RNA, 11 nt, Molluscum contagiosum virus
guggccacagc

SEQ ID NO: 4032800 - RNA, 14 nt, Molluscum contagiosum virus
guggccuacguggc

SEQ ID NO: 4032801 - RNA, 20 nt, Molluscum contagiosum virus
guggcgcacacggacgagcc

SEQ ID NO: 4032802 - RNA, 14 nt, Molluscum contagiosum virus
guggcgcaccugcu

SEQ ID NO: 4032803 - RNA, 14 nt, Molluscum contagiosum virus
guggcgcugggcgc

SEQ ID NO: 4032804 - RNA, 15 nt, Molluscum contagiosum virus
guggcgcuuggcgag

SEQ ID NO: 4032805 - RNA, 21 nt, Molluscum contagiosum virus
guggcguccgcacgaggagcc

SEQ ID NO: 4032806 - RNA, 20 nt, Molluscum contagiosum virus
guggcguugcugcugcgcgc

SEQ ID NO: 4032807 - RNA, 14 nt, Molluscum contagiosum virus
guggucaagacugg

SEQ ID NO: 4032808 - RNA, 16 nt, Molluscum contagiosum virus
guggugacucgccgug

SEQ ID NO: 4032809 - RNA, 12 nt, Molluscum contagiosum virus
guggugcgcgac

SEQ ID NO: 4032810 - RNA, 17 nt, Molluscum contagiosum virus
guggugcucguggaaaa

SEQ ID NO: 4032811 - RNA, 18 nt, Molluscum contagiosum virus
gugguggccaagauccug

SEQ ID NO: 4032812 - RNA, 14 nt, Molluscum contagiosum virus
guguacaaagagcu

SEQ ID NO: 4032813 - RNA, 15 nt, Molluscum contagiosum virus
guguaccgccgcggc

SEQ ID NO: 4032814 - RNA, 15 nt, Molluscum contagiosum virus
gugucgagcucgcgc

SEQ ID NO: 4032815 - RNA, 14 nt, Molluscum contagiosum virus
gugugagucgcccu

SEQ ID NO: 4032816 - RNA, 21 nt, Molluscum contagiosum virus
gugugcgcgcugcacgccgcc

SEQ ID NO: 4032817 - RNA, 22 nt, Molluscum contagiosum virus
guguggcuugcgggacagagcu

SEQ ID NO: 4032818 - RNA, 16 nt, Molluscum contagiosum virus
guguucccggcugccg

SEQ ID NO: 4032819 - RNA, 13 nt, Molluscum contagiosum virus
guguuggccaggc

SEQ ID NO: 4032820 - RNA, 23 nt, Molluscum contagiosum virus
guguuuuuuuuguuuggacccau

SEQ ID NO: 4032821 - RNA, 14 nt, Molluscum contagiosum virus
guuacggagaccug

SEQ ID NO: 4032822 - RNA, 16 nt, Molluscum contagiosum virus
guucacggcgcucgcc

SEQ ID NO: 4032823 - RNA, 15 nt, Molluscum contagiosum virus
guuccagcagcgcca

SEQ ID NO: 4032824 - RNA, 14 nt, Molluscum contagiosum virus
guucccauggaugc

SEQ ID NO: 4032825 - RNA, 19 nt, Molluscum contagiosum virus
guuccggacgugcacgcac

SEQ ID NO: 4032826 - RNA, 15 nt, Molluscum contagiosum virus
guuccuggugugcca

SEQ ID NO: 4032827 - RNA, 16 nt, Molluscum contagiosum virus
guuccuggugugccag

SEQ ID NO: 4032828 - RNA, 14 nt, Molluscum contagiosum virus
guucgacaaggacg

SEQ ID NO: 4032829 - RNA, 22 nt, Molluscum contagiosum virus
guucgagaagacggggcgcacg

SEQ ID NO: 4032830 - RNA, 24 nt, Molluscum contagiosum virus
guucgagaagacggggcgcacgcc

SEQ ID NO: 4032831 - RNA, 14 nt, Molluscum contagiosum virus
guucgagcugcugc

SEQ ID NO: 4032832 - RNA, 14 nt, Molluscum contagiosum virus
guucugaauaaucu

SEQ ID NO: 4032833 - RNA, 22 nt, Molluscum contagiosum virus
guucugaauaaucucgagcagg

SEQ ID NO: 4032834 - RNA, 15 nt, Molluscum contagiosum virus
guucugcgcgccgcu

SEQ ID NO: 4032835 - RNA, 16 nt, Molluscum contagiosum virus
guucugcgcgccgcuc

SEQ ID NO: 4032836 - RNA, 15 nt, Molluscum contagiosum virus
guucugcgcugccag

SEQ ID NO: 4032837 - RNA, 14 nt, Molluscum contagiosum virus
guucugcucgcagg

SEQ ID NO: 4032838 - RNA, 20 nt, Molluscum contagiosum virus
guucuggacguguccgacgc

SEQ ID NO: 4032839 - RNA, 17 nt, Molluscum contagiosum virus
guucuucgcagaggaca

SEQ ID NO: 4032840 - RNA, 19 nt, Molluscum contagiosum virus
guucuucgcagaggacagc

SEQ ID NO: 4032841 - RNA, 11 nt, Molluscum contagiosum virus
guugccaggca

SEQ ID NO: 4032842 - RNA, 13 nt, Molluscum contagiosum virus
guugccaggcaca

SEQ ID NO: 4032843 - RNA, 17 nt, Molluscum contagiosum virus
guugccaggcacacgca

SEQ ID NO: 4032844 - RNA, 23 nt, Molluscum contagiosum virus
guugccaggcacacgcagugcca

SEQ ID NO: 4032845 - RNA, 22 nt, Molluscum contagiosum virus
guugccgcgcgcugcucuggag

SEQ ID NO: 4032846 - RNA, 13 nt, Molluscum contagiosum virus
guugccgugccca

SEQ ID NO: 4032847 - RNA, 19 nt, Molluscum contagiosum virus
guugcgagccagccaggcg

SEQ ID NO: 4032848 - RNA, 12 nt, Molluscum contagiosum virus
guugcgcgcgcc

SEQ ID NO: 4032849 - RNA, 17 nt, Molluscum contagiosum virus
guugcguuggcgccagc

SEQ ID NO: 4032850 - RNA, 18 nt, Molluscum contagiosum virus
guugcguuggcgccagcc

SEQ ID NO: 4032851 - RNA, 18 nt, Molluscum contagiosum virus
guuggcacccuucugagg

SEQ ID NO: 4032852 - RNA, 18 nt, Molluscum contagiosum virus
guuggcgccagccuggcg

SEQ ID NO: 4032853 - RNA, 23 nt, Molluscum contagiosum virus
guuguucguacucaacaagcugc

SEQ ID NO: 4032854 - RNA, 18 nt, Molluscum contagiosum virus
guuuacgcucggcugccg

SEQ ID NO: 4032855 - RNA, 17 nt, Molluscum contagiosum virus
guuuacguccacgcgcc

SEQ ID NO: 4032856 - RNA, 21 nt, Molluscum contagiosum virus
guuugacgcccggugccuggc

SEQ ID NO: 4032857 - RNA, 22 nt, Molluscum contagiosum virus
guuugcacccgcgcagcgugcc

SEQ ID NO: 4032858 - RNA, 20 nt, Molluscum contagiosum virus
guuugccacggccgcgcgcg

SEQ ID NO: 4032859 - RNA, 21 nt, Molluscum contagiosum virus
guuugcggaugcucgcuugcc

SEQ ID NO: 4032860 - RNA, 17 nt, Molluscum contagiosum virus
guuuucacgcaaggaag

SEQ ID NO: 4032861 - RNA, 16 nt, Molluscum contagiosum virus
guuuuguguuggccag

SEQ ID NO: 4032862 - RNA, 22 nt, Molluscum contagiosum virus
uaaacaaacgugcaugcacaua

SEQ ID NO: 4032863 - RNA, 15 nt, Molluscum contagiosum virus
uaaacgcggugagug

SEQ ID NO: 4032864 - RNA, 17 nt, Molluscum contagiosum virus
uaaagaagcggugcagc

SEQ ID NO: 4032865 - RNA, 16 nt, Molluscum contagiosum virus
uaacgugauccgagac

SEQ ID NO: 4032866 - RNA, 12 nt, Molluscum contagiosum virus
uaacuauguucu

SEQ ID NO: 4032867 - RNA, 18 nt, Molluscum contagiosum virus
uaagcgccccgagcacgu

SEQ ID NO: 4032868 - RNA, 16 nt, Molluscum contagiosum virus
uaauugaaaggcagaa

SEQ ID NO: 4032869 - RNA, 18 nt, Molluscum contagiosum virus
uacacgcgcuuugucgcg

SEQ ID NO: 4032870 - RNA, 14 nt, Molluscum contagiosum virus
uacagcgcgcugca

SEQ ID NO: 4032871 - RNA, 22 nt, Molluscum contagiosum virus
uaccagcucgucaacggugcgc

SEQ ID NO: 4032872 - RNA, 13 nt, Molluscum contagiosum virus
uacccgcaggaaa

SEQ ID NO: 4032873 - RNA, 15 nt, Molluscum contagiosum virus
uaccggcucaagaac

SEQ ID NO: 4032874 - RNA, 18 nt, Molluscum contagiosum virus
uaccugcaggaggaccgc

SEQ ID NO: 4032875 - RNA, 14 nt, Molluscum contagiosum virus
uaccugcgcaagcu

SEQ ID NO: 4032876 - RNA, 19 nt, Molluscum contagiosum virus
uaccuguguuucguacgcg

SEQ ID NO: 4032877 - RNA, 17 nt, Molluscum contagiosum virus
uacgagacucuggaagc

SEQ ID NO: 4032878 - RNA, 22 nt, Molluscum contagiosum virus
uacgagccgcuguccgaggacu

SEQ ID NO: 4032879 - RNA, 14 nt, Molluscum contagiosum virus
uacgcgccggggcg

SEQ ID NO: 4032880 - RNA, 18 nt, Molluscum contagiosum virus
uacgcgcgcgugcugcua

SEQ ID NO: 4032881 - RNA, 17 nt, Molluscum contagiosum virus
uacgcggcgggguccuc

SEQ ID NO: 4032882 - RNA, 14 nt, Molluscum contagiosum virus
uacucaacaagcug

SEQ ID NO: 4032883 - RNA, 19 nt, Molluscum contagiosum virus
uacugcagcagcuccucca

SEQ ID NO: 4032884 - RNA, 23 nt, Molluscum contagiosum virus
uacugcgcgcguugccugagaag

SEQ ID NO: 4032885 - RNA, 20 nt, Molluscum contagiosum virus
uacuucaucuucaagccgca

SEQ ID NO: 4032886 - RNA, 17 nt, Molluscum contagiosum virus
uacuuggaagagucgcg

SEQ ID NO: 4032887 - RNA, 13 nt, Molluscum contagiosum virus
uagaccuccuugc

SEQ ID NO: 4032888 - RNA, 18 nt, Molluscum contagiosum virus
uagacugucgacagagaa

SEQ ID NO: 4032889 - RNA, 15 nt, Molluscum contagiosum virus
uagaggagauggcaa

SEQ ID NO: 4032890 - RNA, 16 nt, Molluscum contagiosum virus
uagcaaaugcgcugcu

SEQ ID NO: 4032891 - RNA, 10 nt, Molluscum contagiosum virus
uagcagagca

SEQ ID NO: 4032892 - RNA, 20 nt, Molluscum contagiosum virus
uagcagcgugcgcaccagcu

SEQ ID NO: 4032893 - RNA, 17 nt, Molluscum contagiosum virus
uagcagcuucuuggagc

SEQ ID NO: 4032894 - RNA, 13 nt, Molluscum contagiosum virus
uagcccagcacgc

SEQ ID NO: 4032895 - RNA, 17 nt, Molluscum contagiosum virus
uagccgcgacgcaagcg

SEQ ID NO: 4032896 - RNA, 19 nt, Molluscum contagiosum virus
uagcgcgccgcaaagcuca

SEQ ID NO: 4032897 - RNA, 18 nt, Molluscum contagiosum virus
uagcgcgcgugugcaugg

SEQ ID NO: 4032898 - RNA, 21 nt, Molluscum contagiosum virus
uagcgugagagcaaagaaugc

SEQ ID NO: 4032899 - RNA, 16 nt, Molluscum contagiosum virus
uagcguugguaacaag

SEQ ID NO: 4032900 - RNA, 19 nt, Molluscum contagiosum virus
uagcucgugccugucggca

SEQ ID NO: 4032901 - RNA, 21 nt, Molluscum contagiosum virus
uaggcacacacgaacgcacgc

SEQ ID NO: 4032902 - RNA, 15 nt, Molluscum contagiosum virus
uagguacccgcaacc

SEQ ID NO: 4032903 - RNA, 14 nt, Molluscum contagiosum virus
uaguagcgcucgcc

SEQ ID NO: 4032904 - RNA, 19 nt, Molluscum contagiosum virus
uaguagcgcucgcccagcu

SEQ ID NO: 4032905 - RNA, 12 nt, Molluscum contagiosum virus
uauacuccaaaa

SEQ ID NO: 4032906 - RNA, 20 nt, Molluscum contagiosum virus
uauacuccccgcgcgcgugc

SEQ ID NO: 4032907 - RNA, 22 nt, Molluscum contagiosum virus
uaugcgaagcgucgagccccug

SEQ ID NO: 4032908 - RNA, 15 nt, Molluscum contagiosum virus
ucaaauauugugcau

SEQ ID NO: 4032909 - RNA, 19 nt, Molluscum contagiosum virus
ucaacaagcugcuggcaca

SEQ ID NO: 4032910 - RNA, 22 nt, Molluscum contagiosum virus
ucaaccccucggaggaaaagca

SEQ ID NO: 4032911 - RNA, 14 nt, Molluscum contagiosum virus
ucaaccugcugccu

SEQ ID NO: 4032912 - RNA, 22 nt, Molluscum contagiosum virus
ucaacgcgauggcgcagcuccu

SEQ ID NO: 4032913 - RNA, 19 nt, Molluscum contagiosum virus
ucaacgcgcgcgugcuguc

SEQ ID NO: 4032914 - RNA, 17 nt, Molluscum contagiosum virus
ucaacggcacagucugg

SEQ ID NO: 4032915 - RNA, 19 nt, Molluscum contagiosum virus
ucaacuccgagcgcgcgcg

SEQ ID NO: 4032916 - RNA, 18 nt, Molluscum contagiosum virus
ucaacuguugccuggagg

SEQ ID NO: 4032917 - RNA, 15 nt, Molluscum contagiosum virus
ucaacuucgcgcugu

SEQ ID NO: 4032918 - RNA, 19 nt, Molluscum contagiosum virus
ucaagauccaagcgcaaca

SEQ ID NO: 4032919 - RNA, 15 nt, Molluscum contagiosum virus
ucaagcaccugcgcu

SEQ ID NO: 4032920 - RNA, 21 nt, Molluscum contagiosum virus
ucaagcacggcuuccggcacc

SEQ ID NO: 4032921 - RNA, 19 nt, Molluscum contagiosum virus
ucaagcuggcaacgcagau

SEQ ID NO: 4032922 - RNA, 18 nt, Molluscum contagiosum virus
ucacaagcaccgccugcu

SEQ ID NO: 4032923 - RNA, 17 nt, Molluscum contagiosum virus
ucaccccgcugggccgc

SEQ ID NO: 4032924 - RNA, 16 nt, Molluscum contagiosum virus
ucaccuuccugggcgg

SEQ ID NO: 4032925 - RNA, 19 nt, Molluscum contagiosum virus
ucaccuucggaacugcgga

SEQ ID NO: 4032926 - RNA, 17 nt, Molluscum contagiosum virus
ucacgcguccacaaaga

SEQ ID NO: 4032927 - RNA, 15 nt, Molluscum contagiosum virus
ucacgcuagcgggcc

SEQ ID NO: 4032928 - RNA, 17 nt, Molluscum contagiosum virus
ucacggagcgcgcgcag

SEQ ID NO: 4032929 - RNA, 22 nt, Molluscum contagiosum virus
ucacggcaaacgccacuggguc

SEQ ID NO: 4032930 - RNA, 16 nt, Molluscum contagiosum virus
ucacggccuucgcgcu

SEQ ID NO: 4032931 - RNA, 23 nt, Molluscum contagiosum virus
ucacggcgacaacgacagagccc

SEQ ID NO: 4032932 - RNA, 18 nt, Molluscum contagiosum virus
ucacgucaauggcgcgcg

SEQ ID NO: 4032933 - RNA, 22 nt, Molluscum contagiosum virus
ucacgugcugaucacgcucgcg

SEQ ID NO: 4032934 - RNA, 18 nt, Molluscum contagiosum virus
ucacgugcuugcccgacc

SEQ ID NO: 4032935 - RNA, 22 nt, Molluscum contagiosum virus
ucacuucucggaagcgcccgug

SEQ ID NO: 4032936 - RNA, 13 nt, Molluscum contagiosum virus
ucacuuucgcgcg

SEQ ID NO: 4032937 - RNA, 23 nt, Molluscum contagiosum virus
ucagaaauacaccggcuuggcca

SEQ ID NO: 4032938 - RNA, 13 nt, Molluscum contagiosum virus
ucagccgagcgcc

SEQ ID NO: 4032939 - RNA, 17 nt, Molluscum contagiosum virus
ucagccucugugcggcg

SEQ ID NO: 4032940 - RNA, 13 nt, Molluscum contagiosum virus
ucagcgcgcgcag

SEQ ID NO: 4032941 - RNA, 16 nt, Molluscum contagiosum virus
ucaggagcauggccgc

SEQ ID NO: 4032942 - RNA, 19 nt, Molluscum contagiosum virus
ucaggcaagaggggagcca

SEQ ID NO: 4032943 - RNA, 16 nt, Molluscum contagiosum virus
ucagguacguguccac

SEQ ID NO: 4032944 - RNA, 23 nt, Molluscum contagiosum virus
ucaguuuuguccuccccacgaga

SEQ ID NO: 4032945 - RNA, 13 nt, Molluscum contagiosum virus
ucaucgcggagcu

SEQ ID NO: 4032946 - RNA, 13 nt, Molluscum contagiosum virus
ucauggugcccau

SEQ ID NO: 4032947 - RNA, 17 nt, Molluscum contagiosum virus
uccaacuuccacgucuc

SEQ ID NO: 4032948 - RNA, 23 nt, Molluscum contagiosum virus
uccaagaacaauacaaacaacaa

SEQ ID NO: 4032949 - RNA, 14 nt, Molluscum contagiosum virus
uccaagaagaggcc

SEQ ID NO: 4032950 - RNA, 17 nt, Molluscum contagiosum virus
uccaagaagaggccagc

SEQ ID NO: 4032951 - RNA, 21 nt, Molluscum contagiosum virus
uccacaaagcccuccugagaa

SEQ ID NO: 4032952 - RNA, 20 nt, Molluscum contagiosum virus
uccacauuacgcucguggaa

SEQ ID NO: 4032953 - RNA, 12 nt, Molluscum contagiosum virus
uccaccugcgca

SEQ ID NO: 4032954 - RNA, 16 nt, Molluscum contagiosum virus
uccaccugcgcaacgu

SEQ ID NO: 4032955 - RNA, 20 nt, Molluscum contagiosum virus
uccacgauggaacggcgacu

SEQ ID NO: 4032956 - RNA, 16 nt, Molluscum contagiosum virus
uccacgccuucgugga

SEQ ID NO: 4032957 - RNA, 14 nt, Molluscum contagiosum virus
uccacgcgcgugag

SEQ ID NO: 4032958 - RNA, 20 nt, Molluscum contagiosum virus
uccacgcugcguucgagcug

SEQ ID NO: 4032959 - RNA, 23 nt, Molluscum contagiosum virus
uccacggguaccgugcgcgugag

SEQ ID NO: 4032960 - RNA, 12 nt, Molluscum contagiosum virus
uccagcgcauca

SEQ ID NO: 4032961 - RNA, 17 nt, Molluscum contagiosum virus
uccaggcgccgcaccuc

SEQ ID NO: 4032962 - RNA, 17 nt, Molluscum contagiosum virus
uccaggugcugggcgag

SEQ ID NO: 4032963 - RNA, 16 nt, Molluscum contagiosum virus
uccaugcgcgcgcgau

SEQ ID NO: 4032964 - RNA, 16 nt, Molluscum contagiosum virus
ucccaagacucugccg

SEQ ID NO: 4032965 - RNA, 14 nt, Molluscum contagiosum virus
ucccaggaagacgu

SEQ ID NO: 4032966 - RNA, 13 nt, Molluscum contagiosum virus
uccccaagaccug

SEQ ID NO: 4032967 - RNA, 16 nt, Molluscum contagiosum virus
uccccgaacugcuggg

SEQ ID NO: 4032968 - RNA, 17 nt, Molluscum contagiosum virus
uccccgaacugcugggc

SEQ ID NO: 4032969 - RNA, 16 nt, Molluscum contagiosum virus
uccccgccagcaccau

SEQ ID NO: 4032970 - RNA, 22 nt, Molluscum contagiosum virus
uccccgcgcucacugcagcagc

SEQ ID NO: 4032971 - RNA, 15 nt, Molluscum contagiosum virus
uccccgcgggccgcc

SEQ ID NO: 4032972 - RNA, 13 nt, Molluscum contagiosum virus
ucccgcgcuccga

SEQ ID NO: 4032973 - RNA, 21 nt, Molluscum contagiosum virus
ucccgcggccgccacuguugc

SEQ ID NO: 4032974 - RNA, 19 nt, Molluscum contagiosum virus
ucccgggcggcgcgccgcg

SEQ ID NO: 4032975 - RNA, 15 nt, Molluscum contagiosum virus
ucccucgucgcgcuu

SEQ ID NO: 4032976 - RNA, 22 nt, Molluscum contagiosum virus
ucccugcauacacuuccugcua

SEQ ID NO: 4032977 - RNA, 16 nt, Molluscum contagiosum virus
uccgaaaaaggcccgg

SEQ ID NO: 4032978 - RNA, 20 nt, Molluscum contagiosum virus
uccgacuccuuccggagaca

SEQ ID NO: 4032979 - RNA, 22 nt, Molluscum contagiosum virus
uccgagcgaaccgcggcagccu

SEQ ID NO: 4032980 - RNA, 20 nt, Molluscum contagiosum virus
uccgaggaaacgcagcacuu

SEQ ID NO: 4032981 - RNA, 21 nt, Molluscum contagiosum virus
uccgaggacgacgccgagccc

SEQ ID NO: 4032982 - RNA, 18 nt, Molluscum contagiosum virus
uccgaugugagcaagcug

SEQ ID NO: 4032983 - RNA, 18 nt, Molluscum contagiosum virus
uccgcaauucuagcgcga

SEQ ID NO: 4032984 - RNA, 19 nt, Molluscum contagiosum virus
uccgcacagagggacagca

SEQ ID NO: 4032985 - RNA, 20 nt, Molluscum contagiosum virus
uccgcacuuuaaaaggccgg

SEQ ID NO: 4032986 - RNA, 20 nt, Molluscum contagiosum virus
uccgcgacguccuagagcag

SEQ ID NO: 4032987 - RNA, 19 nt, Molluscum contagiosum virus
uccgcguacagcgcgcgug

SEQ ID NO: 4032988 - RNA, 17 nt, Molluscum contagiosum virus
uccggaugaacagcuuc

SEQ ID NO: 4032989 - RNA, 12 nt, Molluscum contagiosum virus
uccggcagcgcc

SEQ ID NO: 4032990 - RNA, 22 nt, Molluscum contagiosum virus
uccggccuguaaauggaccaca

SEQ ID NO: 4032991 - RNA, 20 nt, Molluscum contagiosum virus
uccggcgcucgccccuuccc

SEQ ID NO: 4032992 - RNA, 14 nt, Molluscum contagiosum virus
uccggcgcucgccu

SEQ ID NO: 4032993 - RNA, 15 nt, Molluscum contagiosum virus
uccggcgcuggagaa

SEQ ID NO: 4032994 - RNA, 15 nt, Molluscum contagiosum virus
uccggcggcuggacc

SEQ ID NO: 4032995 - RNA, 22 nt, Molluscum contagiosum virus
uccgggcacguccgccucggaa

SEQ ID NO: 4032996 - RNA, 14 nt, Molluscum contagiosum virus
uccgggcgcuccga

SEQ ID NO: 4032997 - RNA, 12 nt, Molluscum contagiosum virus
uccgggcgcugc

SEQ ID NO: 4032998 - RNA, 20 nt, Molluscum contagiosum virus
uccgucacggacagcagcuc

SEQ ID NO: 4032999 - RNA, 17 nt, Molluscum contagiosum virus
uccgugcccacgagcgc

SEQ ID NO: 4033000 - RNA, 21 nt, Molluscum contagiosum virus
uccuacgaguugagccguucu

SEQ ID NO: 4033001 - RNA, 13 nt, Molluscum contagiosum virus
uccuccagggcac

SEQ ID NO: 4033002 - RNA, 18 nt, Molluscum contagiosum virus
uccucgcuccgcagcagg

SEQ ID NO: 4033003 - RNA, 19 nt, Molluscum contagiosum virus
uccucucacgcccucucga

SEQ ID NO: 4033004 - RNA, 15 nt, Molluscum contagiosum virus
uccuggggcuggaca

SEQ ID NO: 4033005 - RNA, 16 nt, Molluscum contagiosum virus
uccuggggcuggacag

SEQ ID NO: 4033006 - RNA, 14 nt, Molluscum contagiosum virus
uccuguccucucga

SEQ ID NO: 4033007 - RNA, 18 nt, Molluscum contagiosum virus
uccuucugguuccugcgc

SEQ ID NO: 4033008 - RNA, 20 nt, Molluscum contagiosum virus
uccuucuucaaguaccuguc

SEQ ID NO: 4033009 - RNA, 12 nt, Molluscum contagiosum virus
uccuuguccugg

SEQ ID NO: 4033010 - RNA, 19 nt, Molluscum contagiosum virus
ucgaacaccuccugcuuug

SEQ ID NO: 4033011 - RNA, 15 nt, Molluscum contagiosum virus
ucgaacgcgcgugcg

SEQ ID NO: 4033012 - RNA, 17 nt, Molluscum contagiosum virus
ucgaacgcgcgugcgcg

SEQ ID NO: 4033013 - RNA, 13 nt, Molluscum contagiosum virus
ucgaagaggucuc

SEQ ID NO: 4033014 - RNA, 19 nt, Molluscum contagiosum virus
ucgaaggagcccgucuaca

SEQ ID NO: 4033015 - RNA, 15 nt, Molluscum contagiosum virus
ucgacacugugcugg

SEQ ID NO: 4033016 - RNA, 17 nt, Molluscum contagiosum virus
ucgacccuucgcgcgcg

SEQ ID NO: 4033017 - RNA, 22 nt, Molluscum contagiosum virus
ucgacgacgaugacaucuggag

SEQ ID NO: 4033018 - RNA, 17 nt, Molluscum contagiosum virus
ucgacgagugcgccgcg

SEQ ID NO: 4033019 - RNA, 21 nt, Molluscum contagiosum virus
ucgacgcggugcgcgcgugcg

SEQ ID NO: 4033020 - RNA, 16 nt, Molluscum contagiosum virus
ucgacgggcgcagcca

SEQ ID NO: 4033021 - RNA, 11 nt, Molluscum contagiosum virus
ugccagcagca

SEQ ID NO: 4033022 - RNA, 19 nt, Molluscum contagiosum virus
ugccagcgccagccugcug

SEQ ID NO: 4033023 - RNA, 18 nt, Molluscum contagiosum virus
ugccagcggcgccgcagc

SEQ ID NO: 4033024 - RNA, 18 nt, Molluscum contagiosum virus
ugccaggcggucuuccag

SEQ ID NO: 4033025 - RNA, 21 nt, Molluscum contagiosum virus
ugcccaugcucgagccugcca

SEQ ID NO: 4033026 - RNA, 22 nt, Molluscum contagiosum virus
ugcccauguccuuucagacagc

SEQ ID NO: 4033027 - RNA, 13 nt, Molluscum contagiosum virus
ugcccccgaggug

SEQ ID NO: 4033028 - RNA, 16 nt, Molluscum contagiosum virus
ugcccgaguuugcccg

SEQ ID NO: 4033029 - RNA, 17 nt, Molluscum contagiosum virus
ugcccgcgcacgagcug

SEQ ID NO: 4033030 - RNA, 16 nt, Molluscum contagiosum virus
ugcccgcgcgcggaca

SEQ ID NO: 4033031 - RNA, 20 nt, Molluscum contagiosum virus
ugcccgcggagaccaccgcu

SEQ ID NO: 4033032 - RNA, 23 nt, Molluscum contagiosum virus
ugcccgcgggggcguggcagaua

SEQ ID NO: 4033033 - RNA, 21 nt, Molluscum contagiosum virus
ugcccggccucgccuccgggc

SEQ ID NO: 4033034 - RNA, 21 nt, Molluscum contagiosum virus
ugccgagcgugcaagaagucu

SEQ ID NO: 4033035 - RNA, 22 nt, Molluscum contagiosum virus
ugccgagcucugucccgcaagc

SEQ ID NO: 4033036 - RNA, 23 nt, Molluscum contagiosum virus
ugccgcgccuugagcgcgccgcg

SEQ ID NO: 4033037 - RNA, 18 nt, Molluscum contagiosum virus
ugccgcgcgcuacgcgcc

SEQ ID NO: 4033038 - RNA, 15 nt, Molluscum contagiosum virus
ugccgcgggacgaga

SEQ ID NO: 4033039 - RNA, 15 nt, Molluscum contagiosum virus
ugccgcuggugggcg

SEQ ID NO: 4033040 - RNA, 24 nt, Molluscum contagiosum virus
ugccggaaauagcgcgcuagcucc

SEQ ID NO: 4033041 - RNA, 19 nt, Molluscum contagiosum virus
ugccggggaugaacgcgcu

SEQ ID NO: 4033042 - RNA, 15 nt, Molluscum contagiosum virus
ugccgugagcacgag

SEQ ID NO: 4033043 - RNA, 16 nt, Molluscum contagiosum virus
ugccuaugccgaggug

SEQ ID NO: 4033044 - RNA, 16 nt, Molluscum contagiosum virus
ugccugcaaggagguc

SEQ ID NO: 4033045 - RNA, 23 nt, Molluscum contagiosum virus
ugccugcgcaacgcgggccaggc

SEQ ID NO: 4033046 - RNA, 19 nt, Molluscum contagiosum virus
ugccuggagggcagugcca

SEQ ID NO: 4033047 - RNA, 22 nt, Molluscum contagiosum virus
ugccuggagggcagugccaagg

SEQ ID NO: 4033048 - RNA, 16 nt, Molluscum contagiosum virus
ugccuuggcgcccgug

SEQ ID NO: 4033049 - RNA, 17 nt, Molluscum contagiosum virus
ugccuuucaggggucug

SEQ ID NO: 4033050 - RNA, 13 nt, Molluscum contagiosum virus
ugcgacugccagc

SEQ ID NO: 4033051 - RNA, 19 nt, Molluscum contagiosum virus
ugcgagcggcgcgcgcuga

SEQ ID NO: 4033052 - RNA, 20 nt, Molluscum contagiosum virus
ugcgcaacgcgggccaggca

SEQ ID NO: 4033053 - RNA, 22 nt, Molluscum contagiosum virus
ugcgcaacgucuuccgcgcgcu

SEQ ID NO: 4033054 - RNA, 17 nt, Molluscum contagiosum virus
ugcgcaacgugcugcgc

SEQ ID NO: 4033055 - RNA, 14 nt, Molluscum contagiosum virus
ugcgcacagacggc

SEQ ID NO: 4033056 - RNA, 16 nt, Molluscum contagiosum virus
ugcgcaccgcgggcug

SEQ ID NO: 4033057 - RNA, 16 nt, Molluscum contagiosum virus
ugcgcacgcgcgucau

SEQ ID NO: 4033058 - RNA, 22 nt, Molluscum contagiosum virus
ugcgcacggaccucaaggaggc

SEQ ID NO: 4033059 - RNA, 15 nt, Molluscum contagiosum virus
ugcgcacgugcgcgc

SEQ ID NO: 4033060 - RNA, 23 nt, Molluscum contagiosum virus
ugcgcagagcuccccgcgcgcag

SEQ ID NO: 4033061 - RNA, 18 nt, Molluscum contagiosum virus
ugcgcaggagcagucucu

SEQ ID NO: 4033062 - RNA, 11 nt, Molluscum contagiosum virus
ugcgcauggug

SEQ ID NO: 4033063 - RNA, 22 nt, Molluscum contagiosum virus
ugcgcaugguggcgauccuguc

SEQ ID NO: 4033064 - RNA, 18 nt, Molluscum contagiosum virus
ugcgcauuggcagcgcuu

SEQ ID NO: 4033065 - RNA, 14 nt, Molluscum contagiosum virus
ugcgccacugccac

SEQ ID NO: 4033066 - RNA, 13 nt, Molluscum contagiosum virus
ugcgcccgcaaac

SEQ ID NO: 4033067 - RNA, 14 nt, Molluscum contagiosum virus
ugcgccugccggcg

SEQ ID NO: 4033068 - RNA, 20 nt, Molluscum contagiosum virus
ugcgcgacuccaucugcgcg

SEQ ID NO: 4033069 - RNA, 13 nt, Molluscum contagiosum virus
ugcgcgagucgcg

SEQ ID NO: 4033070 - RNA, 21 nt, Molluscum contagiosum virus
ugcgcgcacggcuaggcgcgg

SEQ ID NO: 4033071 - RNA, 11 nt, Molluscum contagiosum virus
ugcgcgccgcg

SEQ ID NO: 4033072 - RNA, 21 nt, Molluscum contagiosum virus
ugcgcgcgcccucgcgcgcag

SEQ ID NO: 4033073 - RNA, 18 nt, Molluscum contagiosum virus
ugcgcgcgcuacugcgcg

SEQ ID NO: 4033074 - RNA, 11 nt, Molluscum contagiosum virus
ugcgcgcgugc

SEQ ID NO: 4033075 - RNA, 19 nt, Molluscum contagiosum virus
ugcgcgcguugccugagaa

SEQ ID NO: 4033076 - RNA, 13 nt, Molluscum contagiosum virus
ugcgcggcgccgc

SEQ ID NO: 4033077 - RNA, 14 nt, Molluscum contagiosum virus
ugcgcggggcaggc

SEQ ID NO: 4033078 - RNA, 22 nt, Molluscum contagiosum virus
ugcgcggggcaggcagugccgc

SEQ ID NO: 4033079 - RNA, 16 nt, Molluscum contagiosum virus
ugcgcgugccucugcc

SEQ ID NO: 4033080 - RNA, 19 nt, Molluscum contagiosum virus
ugcgcgugccucugccagc

SEQ ID NO: 4033081 - RNA, 17 nt, Molluscum contagiosum virus
ugcgcgugcgccugccg

SEQ ID NO: 4033082 - RNA, 11 nt, Molluscum contagiosum virus
ugcgcgugucu

SEQ ID NO: 4033083 - RNA, 17 nt, Molluscum contagiosum virus
ugcgcgugucuggagcc

SEQ ID NO: 4033084 - RNA, 22 nt, Molluscum contagiosum virus
ugcgcgugucuggagcccacgu

SEQ ID NO: 4033085 - RNA, 15 nt, Molluscum contagiosum virus
ugcgcgugugcagca

SEQ ID NO: 4033086 - RNA, 18 nt, Molluscum contagiosum virus
ugcgcuacguuccgcgcg

SEQ ID NO: 4033087 - RNA, 14 nt, Molluscum contagiosum virus
ugcgcuccaugcug

SEQ ID NO: 4033088 - RNA, 19 nt, Molluscum contagiosum virus
ugcgcucgagcuccgaggg

SEQ ID NO: 4033089 - RNA, 17 nt, Molluscum contagiosum virus
ugcgcugccagcucgac

SEQ ID NO: 4033090 - RNA, 21 nt, Molluscum contagiosum virus
ugcgcugccgguggaagagcc

SEQ ID NO: 4033091 - RNA, 22 nt, Molluscum contagiosum virus
ugcgcuuagaccuuuacgucgc

SEQ ID NO: 4033092 - RNA, 18 nt, Molluscum contagiosum virus
ugcgcuugcucacgcugc

SEQ ID NO: 4033093 - RNA, 13 nt, Molluscum contagiosum virus
ugcggagcuggcc

SEQ ID NO: 4033094 - RNA, 19 nt, Molluscum contagiosum virus
ugcggcaggaagcuggcgc

SEQ ID NO: 4033095 - RNA, 14 nt, Molluscum contagiosum virus
ugcggcaggcgcug

SEQ ID NO: 4033096 - RNA, 21 nt, Molluscum contagiosum virus
ugcggcgcgugccgcugcgcg

SEQ ID NO: 4033097 - RNA, 21 nt, Molluscum contagiosum virus
ugcgggagccaugaaagaaaa

SEQ ID NO: 4033098 - RNA, 14 nt, Molluscum contagiosum virus
ugcgggcuguucca

SEQ ID NO: 4033099 - RNA, 14 nt, Molluscum contagiosum virus
ugcguaaugcuggc

SEQ ID NO: 4033100 - RNA, 18 nt, Molluscum contagiosum virus
ugcgucgacguggagccu

SEQ ID NO: 4033101 - RNA, 22 nt, Molluscum contagiosum virus
ugcgugaggaagaccuuggaca

SEQ ID NO: 4033102 - RNA, 14 nt, Molluscum contagiosum virus
ugcgugcccagcag

SEQ ID NO: 4033103 - RNA, 16 nt, Molluscum contagiosum virus
ugcguggacagcaucc

SEQ ID NO: 4033104 - RNA, 17 nt, Molluscum contagiosum virus
ugcguugucuccuccug

SEQ ID NO: 4033105 - RNA, 12 nt, Molluscum contagiosum virus
ugcuaacaacau

SEQ ID NO: 4033106 - RNA, 23 nt, Molluscum contagiosum virus
ugcuaacggacgcggccaugcuc

SEQ ID NO: 4033107 - RNA, 20 nt, Molluscum contagiosum virus
ugcuacgucgcggcgcacgg

SEQ ID NO: 4033108 - RNA, 21 nt, Molluscum contagiosum virus
ugcuagcccgcaccugcgccg

SEQ ID NO: 4033109 - RNA, 17 nt, Molluscum contagiosum virus
ugcuagcgacgcggaca

SEQ ID NO: 4033110 - RNA, 21 nt, Molluscum contagiosum virus
ugcucaccgccgagauggagc

SEQ ID NO: 4033111 - RNA, 23 nt, Molluscum contagiosum virus
ugcucaccgccgagauggagcuc

SEQ ID NO: 4033112 - RNA, 13 nt, Molluscum contagiosum virus
ugcuccaugacag

SEQ ID NO: 4033113 - RNA, 22 nt, Molluscum contagiosum virus
ugcuccccgaaauggcccccgc

SEQ ID NO: 4033114 - RNA, 21 nt, Molluscum contagiosum virus
ugcucccgguccuugcuccuc

SEQ ID NO: 4033115 - RNA, 13 nt, Molluscum contagiosum virus
ugcucccucgcgc

SEQ ID NO: 4033116 - RNA, 19 nt, Molluscum contagiosum virus
ugcucccucgcgcgcagcu

SEQ ID NO: 4033117 - RNA, 12 nt, Molluscum contagiosum virus
ugcuccgaggag

SEQ ID NO: 4033118 - RNA, 19 nt, Molluscum contagiosum virus
ugcuccgcacguggaauca

SEQ ID NO: 4033119 - RNA, 19 nt, Molluscum contagiosum virus
ugcuccgcacguggaguca

SEQ ID NO: 4033120 - RNA, 15 nt, Molluscum contagiosum virus
ugcucgcacccgcgc

SEQ ID NO: 4033121 - RNA, 16 nt, Molluscum contagiosum virus
ugcucgcaggcggugg

SEQ ID NO: 4033122 - RNA, 22 nt, Molluscum contagiosum virus
ugcucgcgccugaaccugggcg

SEQ ID NO: 4033123 - RNA, 19 nt, Molluscum contagiosum virus
caagaucaccccgcagcuc

SEQ ID NO: 4033124 - RNA, 17 nt, Molluscum contagiosum virus
caagaucguuuugcacu

SEQ ID NO: 4033125 - RNA, 22 nt, Molluscum contagiosum virus
caagauuguagagacgcugccg

SEQ ID NO: 4033126 - RNA, 16 nt, Molluscum contagiosum virus
caagcacaacgggcuc

SEQ ID NO: 4033127 - RNA, 19 nt, Molluscum contagiosum virus
caagcacacgacggaacgu

SEQ ID NO: 4033128 - RNA, 14 nt, Molluscum contagiosum virus
caagcacggcuucc

SEQ ID NO: 4033129 - RNA, 21 nt, Molluscum contagiosum virus
caagcacuacauggacgugcu

SEQ ID NO: 4033130 - RNA, 13 nt, Molluscum contagiosum virus
caagccagagcuu

SEQ ID NO: 4033131 - RNA, 20 nt, Molluscum contagiosum virus
caagcccagcagcgaggccg

SEQ ID NO: 4033132 - RNA, 19 nt, Molluscum contagiosum virus
caagccccccucacggcga

SEQ ID NO: 4033133 - RNA, 20 nt, Molluscum contagiosum virus
caagcccgaguucgcggcgc

SEQ ID NO: 4033134 - RNA, 15 nt, Molluscum contagiosum virus
caagccgcaggcgcg

SEQ ID NO: 4033135 - RNA, 16 nt, Molluscum contagiosum virus
caagccgcaggcgcgc

SEQ ID NO: 4033136 - RNA, 16 nt, Molluscum contagiosum virus
caagccguccgccucg

SEQ ID NO: 4033137 - RNA, 12 nt, Molluscum contagiosum virus
caagccugcuca

SEQ ID NO: 4033138 - RNA, 21 nt, Molluscum contagiosum virus
caagcgcaccguugacgagcu

SEQ ID NO: 4033139 - RNA, 23 nt, Molluscum contagiosum virus
caagcgcguucgcgcgugcugga

SEQ ID NO: 4033140 - RNA, 15 nt, Molluscum contagiosum virus
caagcugagcgcgcu

SEQ ID NO: 4033141 - RNA, 19 nt, Molluscum contagiosum virus
caaggaaaacugcauccug

SEQ ID NO: 4033142 - RNA, 23 nt, Molluscum contagiosum virus
caaggaaaggcacccgcaggaaa

SEQ ID NO: 4033143 - RNA, 19 nt, Molluscum contagiosum virus
caaggagaugggcacggca

SEQ ID NO: 4033144 - RNA, 13 nt, Molluscum contagiosum virus
caaggaggucaug

SEQ ID NO: 4033145 - RNA, 16 nt, Molluscum contagiosum virus
caaggccgcgggcgcg

SEQ ID NO: 4033146 - RNA, 21 nt, Molluscum contagiosum virus
caaggcgcgcaucgcgggcac

SEQ ID NO: 4033147 - RNA, 18 nt, Molluscum contagiosum virus
caagggcaucccgccgcu

SEQ ID NO: 4033148 - RNA, 12 nt, Molluscum contagiosum virus
caagggcuccuu

SEQ ID NO: 4033149 - RNA, 22 nt, Molluscum contagiosum virus
caaggucuacguguccgcaucc

SEQ ID NO: 4033150 - RNA, 17 nt, Molluscum contagiosum virus
caagguuugcgggcgca

SEQ ID NO: 4033151 - RNA, 21 nt, Molluscum contagiosum virus
caaguacaacccaaacauguc

SEQ ID NO: 4033152 - RNA, 22 nt, Molluscum contagiosum virus
caaguaccagccgcugcgccgc

SEQ ID NO: 4033153 - RNA, 18 nt, Molluscum contagiosum virus
caagucaccgcuccgcag

SEQ ID NO: 4033154 - RNA, 16 nt, Molluscum contagiosum virus
caagucgcgcgcugcg

SEQ ID NO: 4033155 - RNA, 21 nt, Molluscum contagiosum virus
caagugcacaccagacaaagu

SEQ ID NO: 4033156 - RNA, 16 nt, Molluscum contagiosum virus
caaguucgcugcuggc

SEQ ID NO: 4033157 - RNA, 14 nt, Molluscum contagiosum virus
caauacccgcuucc

SEQ ID NO: 4033158 - RNA, 17 nt, Molluscum contagiosum virus
caauggacacgcacugg

SEQ ID NO: 4033159 - RNA, 16 nt, Molluscum contagiosum virus
caauggcgcgcgagca

SEQ ID NO: 4033160 - RNA, 17 nt, Molluscum contagiosum virus
caauggcgcgcgagcac

SEQ ID NO: 4033161 - RNA, 20 nt, Molluscum contagiosum virus
caauucaaaggugcucaccc

SEQ ID NO: 4033162 - RNA, 15 nt, Molluscum contagiosum virus
cacaaguccgcggcu

SEQ ID NO: 4033163 - RNA, 15 nt, Molluscum contagiosum virus
cacacacgaacgcac

SEQ ID NO: 4033164 - RNA, 16 nt, Molluscum contagiosum virus
cacacacuugcucucu

SEQ ID NO: 4033165 - RNA, 19 nt, Molluscum contagiosum virus
cacaccccuguaacaagga

SEQ ID NO: 4033166 - RNA, 18 nt, Molluscum contagiosum virus
cacaccugugcccugucc

SEQ ID NO: 4033167 - RNA, 14 nt, Molluscum contagiosum virus
cacacgcagugcca

SEQ ID NO: 4033168 - RNA, 18 nt, Molluscum contagiosum virus
cacacuacgcuggcucgc

SEQ ID NO: 4033169 - RNA, 16 nt, Molluscum contagiosum virus
cacacucgcgcgucca

SEQ ID NO: 4033170 - RNA, 16 nt, Molluscum contagiosum virus
cacacuggugcgcgug

SEQ ID NO: 4033171 - RNA, 21 nt, Molluscum contagiosum virus
cacagcaggagcacgccuggc

SEQ ID NO: 4033172 - RNA, 22 nt, Molluscum contagiosum virus
cacagccauuaacgaagagugg

SEQ ID NO: 4033173 - RNA, 15 nt, Molluscum contagiosum virus
cacagccccugcugc

SEQ ID NO: 4033174 - RNA, 22 nt, Molluscum contagiosum virus
cacaggugcguaaugcuggcgc

SEQ ID NO: 4033175 - RNA, 15 nt, Molluscum contagiosum virus
cacaguucacggcgc

SEQ ID NO: 4033176 - RNA, 19 nt, Molluscum contagiosum virus
cacaguucacggcgcucgc

SEQ ID NO: 4033177 - RNA, 21 nt, Molluscum contagiosum virus
cacauaguggcuuguugucga

SEQ ID NO: 4033178 - RNA, 21 nt, Molluscum contagiosum virus
cacaucaugggcucgggcaag

SEQ ID NO: 4033179 - RNA, 17 nt, Molluscum contagiosum virus
cacaugccgcgcugcuc

SEQ ID NO: 4033180 - RNA, 23 nt, Molluscum contagiosum virus
cacauguguuuguagccgcgcga

SEQ ID NO: 4033181 - RNA, 13 nt, Molluscum contagiosum virus
cacauugcgaggc

SEQ ID NO: 4033182 - RNA, 18 nt, Molluscum contagiosum virus
caccagcgcgcagaagcc

SEQ ID NO: 4033183 - RNA, 13 nt, Molluscum contagiosum virus
caccagcgcggcc

SEQ ID NO: 4033184 - RNA, 17 nt, Molluscum contagiosum virus
caccagcgugcccuucu

SEQ ID NO: 4033185 - RNA, 11 nt, Molluscum contagiosum virus
caccaggaaca

SEQ ID NO: 4033186 - RNA, 17 nt, Molluscum contagiosum virus
caccaggaacagggaaa

SEQ ID NO: 4033187 - RNA, 23 nt, Molluscum contagiosum virus
caccagugccgacgugugccgcu

SEQ ID NO: 4033188 - RNA, 17 nt, Molluscum contagiosum virus
caccccgaaaggcaccc

SEQ ID NO: 4033189 - RNA, 17 nt, Molluscum contagiosum virus
caccccgcugggccgca

SEQ ID NO: 4033190 - RNA, 16 nt, Molluscum contagiosum virus
caccccuguaacaagg

SEQ ID NO: 4033191 - RNA, 16 nt, Molluscum contagiosum virus
cacccgagcggggacg

SEQ ID NO: 4033192 - RNA, 14 nt, Molluscum contagiosum virus
cacccgcaacaagg

SEQ ID NO: 4033193 - RNA, 19 nt, Molluscum contagiosum virus
cacccgcaggaaaggcacc

SEQ ID NO: 4033194 - RNA, 13 nt, Molluscum contagiosum virus
cacccgcgccgcg

SEQ ID NO: 4033195 - RNA, 16 nt, Molluscum contagiosum virus
cacccgugcgcgcgcu

SEQ ID NO: 4033196 - RNA, 18 nt, Molluscum contagiosum virus
caccgacacgcgcccgcc

SEQ ID NO: 4033197 - RNA, 14 nt, Molluscum contagiosum virus
caccgcacgccagc

SEQ ID NO: 4033198 - RNA, 14 nt, Molluscum contagiosum virus
caccgcaugggccc

SEQ ID NO: 4033199 - RNA, 16 nt, Molluscum contagiosum virus
caccgcaugggcccug

SEQ ID NO: 4033200 - RNA, 19 nt, Molluscum contagiosum virus
caccgccuggugcugcgcg

SEQ ID NO: 4033201 - RNA, 20 nt, Molluscum contagiosum virus
caccgcgagcaccacuacug

SEQ ID NO: 4033202 - RNA, 15 nt, Molluscum contagiosum virus
caccgcggcgcggag

SEQ ID NO: 4033203 - RNA, 16 nt, Molluscum contagiosum virus
caccgcguggcgcgcg

SEQ ID NO: 4033204 - RNA, 13 nt, Molluscum contagiosum virus
caccggcagcgcg

SEQ ID NO: 4033205 - RNA, 17 nt, Molluscum contagiosum virus
caccgggcgccgcggcu

SEQ ID NO: 4033206 - RNA, 16 nt, Molluscum contagiosum virus
caccguaccgcgcccg

SEQ ID NO: 4033207 - RNA, 16 nt, Molluscum contagiosum virus
caccuagagcacgaag

SEQ ID NO: 4033208 - RNA, 13 nt, Molluscum contagiosum virus
caccucgcacgug

SEQ ID NO: 4033209 - RNA, 15 nt, Molluscum contagiosum virus
caccucugcgcggcc

SEQ ID NO: 4033210 - RNA, 17 nt, Molluscum contagiosum virus
caccucugcgcggcccg

SEQ ID NO: 4033211 - RNA, 20 nt, Molluscum contagiosum virus
caccugcaggaaaggcaccc

SEQ ID NO: 4033212 - RNA, 11 nt, Molluscum contagiosum virus
caccugcgcaa

SEQ ID NO: 4033213 - RNA, 18 nt, Molluscum contagiosum virus
caccugcggcucgcacuu

SEQ ID NO: 4033214 - RNA, 14 nt, Molluscum contagiosum virus
caccuuccugggcg

SEQ ID NO: 4033215 - RNA, 17 nt, Molluscum contagiosum virus
caccuucggaacugcgg

SEQ ID NO: 4033216 - RNA, 15 nt, Molluscum contagiosum virus
cacgaccgcaagugc

SEQ ID NO: 4033217 - RNA, 17 nt, Molluscum contagiosum virus
cacgagcaguccgccuc

SEQ ID NO: 4033218 - RNA, 22 nt, Molluscum contagiosum virus
cacgagcaguccgccucgagca

SEQ ID NO: 4033219 - RNA, 13 nt, Molluscum contagiosum virus
cacgagcccgcaa

SEQ ID NO: 4033220 - RNA, 18 nt, Molluscum contagiosum virus
cacgagugcccgcgcgcu

SEQ ID NO: 4033221 - RNA, 14 nt, Molluscum contagiosum virus
cacgaguuucuuca

SEQ ID NO: 4033222 - RNA, 18 nt, Molluscum contagiosum virus
cacgaucaaggugcagaa

SEQ ID NO: 4033223 - RNA, 19 nt, Molluscum contagiosum virus
cacgaucaaggugcagaac

SEQ ID NO: 4033224 - RNA, 17 nt, Molluscum contagiosum virus
cacgaugcgcucguggu

SEQ ID NO: 4033225 - RNA, 18 nt, Molluscum contagiosum virus
cacgcaaaugcgcgcgaa

SEQ ID NO: 4033226 - RNA, 15 nt, Molluscum contagiosum virus
cacgcacacgacgac

SEQ ID NO: 4033227 - RNA, 17 nt, Molluscum contagiosum virus
cgcgacaagcgcgucug

SEQ ID NO: 4033228 - RNA, 15 nt, Molluscum contagiosum virus
cgcgacaugcugccc

SEQ ID NO: 4033229 - RNA, 15 nt, Molluscum contagiosum virus
cgcgaccuccgcucu

SEQ ID NO: 4033230 - RNA, 15 nt, Molluscum contagiosum virus
cgcgacgagcagacg

SEQ ID NO: 4033231 - RNA, 13 nt, Molluscum contagiosum virus
cgcgacgcgcgug

SEQ ID NO: 4033232 - RNA, 22 nt, Molluscum contagiosum virus
cgcgacggcgugcuggccagcc

SEQ ID NO: 4033233 - RNA, 19 nt, Molluscum contagiosum virus
cgcgacgugugcucugugc

SEQ ID NO: 4033234 - RNA, 21 nt, Molluscum contagiosum virus
cgcgacuccaucugcgcgacg

SEQ ID NO: 4033235 - RNA, 15 nt, Molluscum contagiosum virus
cgcgacuucgcccgu

SEQ ID NO: 4033236 - RNA, 12 nt, Molluscum contagiosum virus
cgcgagaacuuu

SEQ ID NO: 4033237 - RNA, 14 nt, Molluscum contagiosum virus
cgcgagaugcgcgg

SEQ ID NO: 4033238 - RNA, 18 nt, Molluscum contagiosum virus
cgcgagcaagcgcccgcg

SEQ ID NO: 4033239 - RNA, 22 nt, Molluscum contagiosum virus
cgcgagcaagcgcccgcgagcg

SEQ ID NO: 4033240 - RNA, 13 nt, Molluscum contagiosum virus
cgcgagcaccacu

SEQ ID NO: 4033241 - RNA, 16 nt, Molluscum contagiosum virus
cgcgagcacccccgcu

SEQ ID NO: 4033242 - RNA, 18 nt, Molluscum contagiosum virus
cgcgagcacgccugcacg

SEQ ID NO: 4033243 - RNA, 18 nt, Molluscum contagiosum virus
cgcgagcagcugcugcgc

SEQ ID NO: 4033244 - RNA, 22 nt, Molluscum contagiosum virus
cgcgagcaugccgccgcguacg

SEQ ID NO: 4033245 - RNA, 19 nt, Molluscum contagiosum virus
cgcgagcgacggcaggccc

SEQ ID NO: 4033246 - RNA, 13 nt, Molluscum contagiosum virus
cgcgagcgccacu

SEQ ID NO: 4033247 - RNA, 16 nt, Molluscum contagiosum virus
cgcgagcgccacuagc

SEQ ID NO: 4033248 - RNA, 14 nt, Molluscum contagiosum virus
cgcgagcgcgcccc

SEQ ID NO: 4033249 - RNA, 15 nt, Molluscum contagiosum virus
cgcgagcugcgggcg

SEQ ID NO: 4033250 - RNA, 20 nt, Molluscum contagiosum virus
cgcgaguugcgucucccgcg

SEQ ID NO: 4033251 - RNA, 21 nt, Molluscum contagiosum virus
cgcgaucuuccgcgacgagcu

SEQ ID NO: 4033252 - RNA, 18 nt, Molluscum contagiosum virus
cgcgcaaaaggcacgagg

SEQ ID NO: 4033253 - RNA, 15 nt, Molluscum contagiosum virus
cgcgcaacacugcag

SEQ ID NO: 4033254 - RNA, 18 nt, Molluscum contagiosum virus
cgcgcaaccagcuggcgc

SEQ ID NO: 4033255 - RNA, 23 nt, Molluscum contagiosum virus
cgcgcaaguccagcgcgcucgag

SEQ ID NO: 4033256 - RNA, 14 nt, Molluscum contagiosum virus
cgcgcacacgcuga

SEQ ID NO: 4033257 - RNA, 16 nt, Molluscum contagiosum virus
cgcgcacgagcgcggg

SEQ ID NO: 4033258 - RNA, 14 nt, Molluscum contagiosum virus
cgcgcacgcgcacg

SEQ ID NO: 4033259 - RNA, 14 nt, Molluscum contagiosum virus
cgcgcacgcgcgac

SEQ ID NO: 4033260 - RNA, 15 nt, Molluscum contagiosum virus
cgcgcacgcgcgagc

SEQ ID NO: 4033261 - RNA, 13 nt, Molluscum contagiosum virus
cgcgcacgcggcg

SEQ ID NO: 4033262 - RNA, 19 nt, Molluscum contagiosum virus
cgcgcacgcucucgcuggc

SEQ ID NO: 4033263 - RNA, 16 nt, Molluscum contagiosum virus
cgcgcacgcugcgcac

SEQ ID NO: 4033264 - RNA, 20 nt, Molluscum contagiosum virus
cgcgcacuaccgcaaccagc

SEQ ID NO: 4033265 - RNA, 13 nt, Molluscum contagiosum virus
cgcgcagaagcca

SEQ ID NO: 4033266 - RNA, 17 nt, Molluscum contagiosum virus
cgcgcagaagcccgggu

SEQ ID NO: 4033267 - RNA, 13 nt, Molluscum contagiosum virus
cgcgcagacgcgg

SEQ ID NO: 4033268 - RNA, 21 nt, Molluscum contagiosum virus
cgcgcagacguggugcucgug

SEQ ID NO: 4033269 - RNA, 21 nt, Molluscum contagiosum virus
cgcgcagcacaccgucgcgug

SEQ ID NO: 4033270 - RNA, 11 nt, Molluscum contagiosum virus
cgcgcagcgcc

SEQ ID NO: 4033271 - RNA, 13 nt, Molluscum contagiosum virus
cgcgcagcgcccg

SEQ ID NO: 4033272 - RNA, 13 nt, Molluscum contagiosum virus
cgcgcagcgugcc

SEQ ID NO: 4033273 - RNA, 15 nt, Molluscum contagiosum virus
cgcgcagcucgacgc

SEQ ID NO: 4033274 - RNA, 14 nt, Molluscum contagiosum virus
cgcgcagcugcgcc

SEQ ID NO: 4033275 - RNA, 22 nt, Molluscum contagiosum virus
cgcgcaggaccgucaccgcagu

SEQ ID NO: 4033276 - RNA, 14 nt, Molluscum contagiosum virus
cgcgcaggcucgca

SEQ ID NO: 4033277 - RNA, 20 nt, Molluscum contagiosum virus
cgcgcauacgcgccgcgcgc

SEQ ID NO: 4033278 - RNA, 22 nt, Molluscum contagiosum virus
cgcgcaucggcggcagcgccag

SEQ ID NO: 4033279 - RNA, 22 nt, Molluscum contagiosum virus
cgcgcauggggaacagcuuggc

SEQ ID NO: 4033280 - RNA, 14 nt, Molluscum contagiosum virus
cgcgccagcagcgc

SEQ ID NO: 4033281 - RNA, 13 nt, Molluscum contagiosum virus
cgcgccagcgaca

SEQ ID NO: 4033282 - RNA, 21 nt, Molluscum contagiosum virus
cgcgccaugguuuccgugucc

SEQ ID NO: 4033283 - RNA, 19 nt, Molluscum contagiosum virus
cgcgcccaaggccgcgggc

SEQ ID NO: 4033284 - RNA, 14 nt, Molluscum contagiosum virus
cgcgcccaccagca

SEQ ID NO: 4033285 - RNA, 12 nt, Molluscum contagiosum virus
cgcgcccgccgc

SEQ ID NO: 4033286 - RNA, 15 nt, Molluscum contagiosum virus
cgcgcccggcgcccg

SEQ ID NO: 4033287 - RNA, 18 nt, Molluscum contagiosum virus
cgcgcccggcgggcacau

SEQ ID NO: 4033288 - RNA, 22 nt, Molluscum contagiosum virus
cgcgcccugcacgaccgcggac

SEQ ID NO: 4033289 - RNA, 19 nt, Molluscum contagiosum virus
cgcgcccuugcacucgacc

SEQ ID NO: 4033290 - RNA, 22 nt, Molluscum contagiosum virus
cgcgccgaggacgcgcccggga

SEQ ID NO: 4033291 - RNA, 21 nt, Molluscum contagiosum virus
cgcgccgaggacuaccuggcg

SEQ ID NO: 4033292 - RNA, 14 nt, Molluscum contagiosum virus
cgcgccgcccggga

SEQ ID NO: 4033293 - RNA, 15 nt, Molluscum contagiosum virus
cgcgccgcgcgcuua

SEQ ID NO: 4033294 - RNA, 14 nt, Molluscum contagiosum virus
cgcgccgcgcugcu

SEQ ID NO: 4033295 - RNA, 12 nt, Molluscum contagiosum virus
cgcgccgcggcg

SEQ ID NO: 4033296 - RNA, 18 nt, Molluscum contagiosum virus
cgcgccgcgggcgcagag

SEQ ID NO: 4033297 - RNA, 16 nt, Molluscum contagiosum virus
cgcgccgcugcucgcu

SEQ ID NO: 4033298 - RNA, 23 nt, Molluscum contagiosum virus
cgcgccgggaaugcugcgcacgc

SEQ ID NO: 4033299 - RNA, 19 nt, Molluscum contagiosum virus
cgcgccgggccgcgguggc

SEQ ID NO: 4033300 - RNA, 15 nt, Molluscum contagiosum virus
cgcgccgggcgccag

SEQ ID NO: 4033301 - RNA, 18 nt, Molluscum contagiosum virus
cgcgccgucucgcggggc

SEQ ID NO: 4033302 - RNA, 13 nt, Molluscum contagiosum virus
cgcgccugcuggc

SEQ ID NO: 4033303 - RNA, 17 nt, Molluscum contagiosum virus
cgcgccuuuccggccug

SEQ ID NO: 4033304 - RNA, 21 nt, Molluscum contagiosum virus
cgcgcgacgugugcucugugc

SEQ ID NO: 4033305 - RNA, 13 nt, Molluscum contagiosum virus
cgcgcgacuacgc

SEQ ID NO: 4033306 - RNA, 16 nt, Molluscum contagiosum virus
cgcgcgagaagucggg

SEQ ID NO: 4033307 - RNA, 21 nt, Molluscum contagiosum virus
cgcgcgagcaugccgccgcgu

SEQ ID NO: 4033308 - RNA, 19 nt, Molluscum contagiosum virus
cgcgcgagcgcuacaugca

SEQ ID NO: 4033309 - RNA, 20 nt, Molluscum contagiosum virus
cgcgcgagcugcuagcggca

SEQ ID NO: 4033310 - RNA, 14 nt, Molluscum contagiosum virus
cgcgcgagcugcug

SEQ ID NO: 4033311 - RNA, 13 nt, Molluscum contagiosum virus
cgcgcgagcugga

SEQ ID NO: 4033312 - RNA, 17 nt, Molluscum contagiosum virus
cgcgcgagugccagcga

SEQ ID NO: 4033313 - RNA, 16 nt, Molluscum contagiosum virus
cgcgcgagugugugca

SEQ ID NO: 4033314 - RNA, 13 nt, Molluscum contagiosum virus
cgcgcgcacgcga

SEQ ID NO: 4033315 - RNA, 13 nt, Molluscum contagiosum virus
cgcgcgcacugcg

SEQ ID NO: 4033316 - RNA, 11 nt, Molluscum contagiosum virus
cgcgcgcagua

SEQ ID NO: 4033317 - RNA, 18 nt, Molluscum contagiosum virus
cgcgcgcauacgcgccgc

SEQ ID NO: 4033318 - RNA, 19 nt, Molluscum contagiosum virus
cgcgcgcccgcugcgcgcu

SEQ ID NO: 4033319 - RNA, 17 nt, Molluscum contagiosum virus
cgcgcgccgcaaaagca

SEQ ID NO: 4033320 - RNA, 22 nt, Molluscum contagiosum virus
cgcguccacggguagcagcgcc

SEQ ID NO: 4033321 - RNA, 16 nt, Molluscum contagiosum virus
cgcguccgccucuucc

SEQ ID NO: 4033322 - RNA, 14 nt, Molluscum contagiosum virus
cgcgucgcgcgccg

SEQ ID NO: 4033323 - RNA, 12 nt, Molluscum contagiosum virus
cgcgucgcggag

SEQ ID NO: 4033324 - RNA, 17 nt, Molluscum contagiosum virus
cgcgucugcaaggccug

SEQ ID NO: 4033325 - RNA, 13 nt, Molluscum contagiosum virus
cgcgucugcucuc

SEQ ID NO: 4033326 - RNA, 17 nt, Molluscum contagiosum virus
cgcgugacuaccuugug

SEQ ID NO: 4033327 - RNA, 18 nt, Molluscum contagiosum virus
cgcgugcauggcacgcga

SEQ ID NO: 4033328 - RNA, 15 nt, Molluscum contagiosum virus
cgcgugccgcccgag

SEQ ID NO: 4033329 - RNA, 18 nt, Molluscum contagiosum virus
cgcgugccucugccagcc

SEQ ID NO: 4033330 - RNA, 22 nt, Molluscum contagiosum virus
cgcgugcgccgccgcaggcccg

SEQ ID NO: 4033331 - RNA, 13 nt, Molluscum contagiosum virus
cgcgugcgccugc

SEQ ID NO: 4033332 - RNA, 20 nt, Molluscum contagiosum virus
cgcgugcgcgugccucugcc

SEQ ID NO: 4033333 - RNA, 20 nt, Molluscum contagiosum virus
cgcgugcggcggcgcgugcu

SEQ ID NO: 4033334 - RNA, 16 nt, Molluscum contagiosum virus
cacgcacacgacgacg

SEQ ID NO: 4033335 - RNA, 15 nt, Molluscum contagiosum virus
cacgcacgcgcgggc

SEQ ID NO: 4033336 - RNA, 19 nt, Molluscum contagiosum virus
cacgcacggcccgggugcg

SEQ ID NO: 4033337 - RNA, 11 nt, Molluscum contagiosum virus
cacgcagagcc

SEQ ID NO: 4033338 - RNA, 14 nt, Molluscum contagiosum virus
cacgcagugccacg

SEQ ID NO: 4033339 - RNA, 15 nt, Molluscum contagiosum virus
cacgcccgcgcugcg

SEQ ID NO: 4033340 - RNA, 16 nt, Molluscum contagiosum virus
cacgcccgcgucccga

SEQ ID NO: 4033341 - RNA, 21 nt, Molluscum contagiosum virus
cacgccgcucucgugcaaagc

SEQ ID NO: 4033342 - RNA, 20 nt, Molluscum contagiosum virus
cacgccgggaaacgcacagc

SEQ ID NO: 4033343 - RNA, 15 nt, Molluscum contagiosum virus
cacgccugcacgcgc

SEQ ID NO: 4033344 - RNA, 22 nt, Molluscum contagiosum virus
cacgccuggcggcagcacgggc

SEQ ID NO: 4033345 - RNA, 16 nt, Molluscum contagiosum virus
cacgccuucguggagc

SEQ ID NO: 4033346 - RNA, 18 nt, Molluscum contagiosum virus
cacgccuucguggagccc

SEQ ID NO: 4033347 - RNA, 18 nt, Molluscum contagiosum virus
cacgcgaauguccggcgc

SEQ ID NO: 4033348 - RNA, 21 nt, Molluscum contagiosum virus
cacgcgagcaauggcggccug

SEQ ID NO: 4033349 - RNA, 14 nt, Molluscum contagiosum virus
cacgcgcaaggccg

SEQ ID NO: 4033350 - RNA, 17 nt, Molluscum contagiosum virus
cacgcgcacgcgcacac

SEQ ID NO: 4033351 - RNA, 18 nt, Molluscum contagiosum virus
cacgcgcacuugccuggc

SEQ ID NO: 4033352 - RNA, 15 nt, Molluscum contagiosum virus
cacgcgcccgccgcc

SEQ ID NO: 4033353 - RNA, 11 nt, Molluscum contagiosum virus
cacgcgccgcg

SEQ ID NO: 4033354 - RNA, 14 nt, Molluscum contagiosum virus
cacgcgccgcgcgg

SEQ ID NO: 4033355 - RNA, 23 nt, Molluscum contagiosum virus
cacgcgcgccgcugucacgcgag

SEQ ID NO: 4033356 - RNA, 23 nt, Molluscum contagiosum virus
cacgcgcgcgccuuuccggccug

SEQ ID NO: 4033357 - RNA, 14 nt, Molluscum contagiosum virus
cacgcgcgcugccg

SEQ ID NO: 4033358 - RNA, 22 nt, Molluscum contagiosum virus
cacgcgcgugagcacgggcgag

SEQ ID NO: 4033359 - RNA, 16 nt, Molluscum contagiosum virus
cacgcgcucuccagag

SEQ ID NO: 4033360 - RNA, 21 nt, Molluscum contagiosum virus
cacgcgcuucguggacgagcg

SEQ ID NO: 4033361 - RNA, 12 nt, Molluscum contagiosum virus
cacgcgggcgcc

SEQ ID NO: 4033362 - RNA, 19 nt, Molluscum contagiosum virus
cacgcgguuucgaucgcgc

SEQ ID NO: 4033363 - RNA, 21 nt, Molluscum contagiosum virus
cacgcuagcgagcgcccgugc

SEQ ID NO: 4033364 - RNA, 22 nt, Molluscum contagiosum virus
cacgcuagucguuggcgcgccc

SEQ ID NO: 4033365 - RNA, 21 nt, Molluscum contagiosum virus
cacgcucauacuccugcuggc

SEQ ID NO: 4033366 - RNA, 15 nt, Molluscum contagiosum virus
cacgcugcgcgugcu

SEQ ID NO: 4033367 - RNA, 20 nt, Molluscum contagiosum virus
cacgcugcucgugcugcucu

SEQ ID NO: 4033368 - RNA, 18 nt, Molluscum contagiosum virus
cacgcugcugcgugcgcg

SEQ ID NO: 4033369 - RNA, 18 nt, Molluscum contagiosum virus
cacgcuggcacggccggc

SEQ ID NO: 4033370 - RNA, 22 nt, Molluscum contagiosum virus
cacgcuggcacggccggcgccg

SEQ ID NO: 4033371 - RNA, 18 nt, Molluscum contagiosum virus
cacgcuggucacgcgcuu

SEQ ID NO: 4033372 - RNA, 13 nt, Molluscum contagiosum virus
cacgcuugccuug

SEQ ID NO: 4033373 - RNA, 21 nt, Molluscum contagiosum virus
cacgcuuguccgcggacgcgg

SEQ ID NO: 4033374 - RNA, 14 nt, Molluscum contagiosum virus
cacggacagcaccc

SEQ ID NO: 4033375 - RNA, 21 nt, Molluscum contagiosum virus
cacggacuuuucgcgcgugcg

SEQ ID NO: 4033376 - RNA, 17 nt, Molluscum contagiosum virus
cacggagaucaggcagc

SEQ ID NO: 4033377 - RNA, 17 nt, Molluscum contagiosum virus
cacggauacgcgcacac

SEQ ID NO: 4033378 - RNA, 17 nt, Molluscum contagiosum virus
cacggcacccgccagcu

SEQ ID NO: 4033379 - RNA, 21 nt, Molluscum contagiosum virus
cacggcacgugcguacgcggc

SEQ ID NO: 4033380 - RNA, 18 nt, Molluscum contagiosum virus
cacggcccgggugcgcgc

SEQ ID NO: 4033381 - RNA, 22 nt, Molluscum contagiosum virus
ccgcgcgcgacuacgcacuggc

SEQ ID NO: 4033382 - RNA, 19 nt, Molluscum contagiosum virus
ccgcgcgcgcaagcgccgc

SEQ ID NO: 4033383 - RNA, 16 nt, Molluscum contagiosum virus
ccgcgcgcgcagcgcg

SEQ ID NO: 4033384 - RNA, 12 nt, Molluscum contagiosum virus
ccgcgcgcgccg

SEQ ID NO: 4033385 - RNA, 15 nt, Molluscum contagiosum virus
ccgcgcgcucgcgcu

SEQ ID NO: 4033386 - RNA, 22 nt, Molluscum contagiosum virus
ccgcgcguuuucccgaggcguc

SEQ ID NO: 4033387 - RNA, 19 nt, Molluscum contagiosum virus
ccgcgcucacugcagcagc

SEQ ID NO: 4033388 - RNA, 12 nt, Molluscum contagiosum virus
ccgcgcucgaca

SEQ ID NO: 4033389 - RNA, 14 nt, Molluscum contagiosum virus
ccgcgcugcgcaag

SEQ ID NO: 4033390 - RNA, 13 nt, Molluscum contagiosum virus
ccgcgcugcgcgg

SEQ ID NO: 4033391 - RNA, 15 nt, Molluscum contagiosum virus
ccgcgcugcuggcca

SEQ ID NO: 4033392 - RNA, 16 nt, Molluscum contagiosum virus
ccgcgcuucgagcacg

SEQ ID NO: 4033393 - RNA, 14 nt, Molluscum contagiosum virus
ccgcggacgcgcag

SEQ ID NO: 4033394 - RNA, 17 nt, Molluscum contagiosum virus
ccgcggagaccaccgcu

SEQ ID NO: 4033395 - RNA, 23 nt, Molluscum contagiosum virus
ccgcggagaccaccgcuggggcg

SEQ ID NO: 4033396 - RNA, 20 nt, Molluscum contagiosum virus
ccgcggaugcaggcacugcc

SEQ ID NO: 4033397 - RNA, 19 nt, Molluscum contagiosum virus
ccgcggcacaugcagcugc

SEQ ID NO: 4033398 - RNA, 22 nt, Molluscum contagiosum virus
ccgcggcacugggugcccgagc

SEQ ID NO: 4033399 - RNA, 18 nt, Molluscum contagiosum virus
ccgcggccgagucacgcc

SEQ ID NO: 4033400 - RNA, 14 nt, Molluscum contagiosum virus
ccgcggcgcccacg

SEQ ID NO: 4033401 - RNA, 13 nt, Molluscum contagiosum virus
ccgcggcgcggcg

SEQ ID NO: 4033402 - RNA, 21 nt, Molluscum contagiosum virus
ccgcggcgugcagggcgugcu

SEQ ID NO: 4033403 - RNA, 20 nt, Molluscum contagiosum virus
ccgcggcuaccacgggcccg

SEQ ID NO: 4033404 - RNA, 13 nt, Molluscum contagiosum virus
ccgcgggcgcacg

SEQ ID NO: 4033405 - RNA, 17 nt, Molluscum contagiosum virus
ccgcgggcgcgcgccag

SEQ ID NO: 4033406 - RNA, 15 nt, Molluscum contagiosum virus
ccgcgggcgugcccg

SEQ ID NO: 4033407 - RNA, 14 nt, Molluscum contagiosum virus
ccgcgggcugcaag

SEQ ID NO: 4033408 - RNA, 18 nt, Molluscum contagiosum virus
ccgcguacagcgcgcgug

SEQ ID NO: 4033409 - RNA, 17 nt, Molluscum contagiosum virus
ccgcguacgcgccgggg

SEQ ID NO: 4033410 - RNA, 20 nt, Molluscum contagiosum virus
ccgcgucguagacgcgcccg

SEQ ID NO: 4033411 - RNA, 12 nt, Molluscum contagiosum virus
ccgcgugcaccc

SEQ ID NO: 4033412 - RNA, 13 nt, Molluscum contagiosum virus
ccgcgugcgccgc

SEQ ID NO: 4033413 - RNA, 17 nt, Molluscum contagiosum virus
ccgcgugcgccgccgca

SEQ ID NO: 4033414 - RNA, 13 nt, Molluscum contagiosum virus
ccgcgugcuggcg

SEQ ID NO: 4033415 - RNA, 16 nt, Molluscum contagiosum virus
ccgcguggcgcgcgac

SEQ ID NO: 4033416 - RNA, 16 nt, Molluscum contagiosum virus
ccgcuagagugcgcgg

SEQ ID NO: 4033417 - RNA, 22 nt, Molluscum contagiosum virus
ccgcucacagcuucgcgagccc

SEQ ID NO: 4033418 - RNA, 14 nt, Molluscum contagiosum virus
ccgcuccagagccg

SEQ ID NO: 4033419 - RNA, 16 nt, Molluscum contagiosum virus
ccgcugccgcgcgcgc

SEQ ID NO: 4033420 - RNA, 22 nt, Molluscum contagiosum virus
ccgcugccgucgcgcgcugugg

SEQ ID NO: 4033421 - RNA, 18 nt, Molluscum contagiosum virus
ccgcugccugugcccagu

SEQ ID NO: 4033422 - RNA, 14 nt, Molluscum contagiosum virus
ccgcugcgccgcca

SEQ ID NO: 4033423 - RNA, 21 nt, Molluscum contagiosum virus
ccgcugcuucguaaagcuggc

SEQ ID NO: 4033424 - RNA, 17 nt, Molluscum contagiosum virus
ccgcugucacgcgagcu

SEQ ID NO: 4033425 - RNA, 18 nt, Molluscum contagiosum virus
ccgcuucgagugcucccg

SEQ ID NO: 4033426 - RNA, 17 nt, Molluscum contagiosum virus
ccgcuucgugcgcggag

SEQ ID NO: 4033427 - RNA, 19 nt, Molluscum contagiosum virus
ccggaaagaagggcucgcc

SEQ ID NO: 4033428 - RNA, 15 nt, Molluscum contagiosum virus
ccggaacgccgugcg

SEQ ID NO: 4033429 - RNA, 13 nt, Molluscum contagiosum virus
ccggacagcucag

SEQ ID NO: 4033430 - RNA, 17 nt, Molluscum contagiosum virus
ccggacgugcacgcacg

SEQ ID NO: 4033431 - RNA, 14 nt, Molluscum contagiosum virus
ccggagacaccagc

SEQ ID NO: 4033432 - RNA, 17 nt, Molluscum contagiosum virus
ccggcacgagcaguccg

SEQ ID NO: 4033433 - RNA, 22 nt, Molluscum contagiosum virus
ccggcagcgacuacgcgcugcu

SEQ ID NO: 4033434 - RNA, 15 nt, Molluscum contagiosum virus
ccggcagcgcauccg

SEQ ID NO: 4033435 - RNA, 13 nt, Molluscum contagiosum virus
ccggcagcgccgc

SEQ ID NO: 4033436 - RNA, 19 nt, Molluscum contagiosum virus
ccggcagcgcgccuagcuc

SEQ ID NO: 4033437 - RNA, 14 nt, Molluscum contagiosum virus
ccggcaguagcagc

SEQ ID NO: 4033438 - RNA, 16 nt, Molluscum contagiosum virus
ccggcauccggccgag

SEQ ID NO: 4033439 - RNA, 19 nt, Molluscum contagiosum virus
ccggcaucgcgcugcuggu

SEQ ID NO: 4033440 - RNA, 19 nt, Molluscum contagiosum virus
ccggccuuguucgcgcuuc

SEQ ID NO: 4033441 - RNA, 20 nt, Molluscum contagiosum virus
ccggccuuguucgcgcuucu

SEQ ID NO: 4033442 - RNA, 17 nt, Molluscum contagiosum virus
ccggcgcccgcagcgcg

SEQ ID NO: 4033443 - RNA, 14 nt, Molluscum contagiosum virus
ccggcgcgcgcgcg

SEQ ID NO: 4033444 - RNA, 15 nt, Molluscum contagiosum virus
ccggcgcgcgcgcgc

SEQ ID NO: 4033445 - RNA, 11 nt, Molluscum contagiosum virus
ccggcgcggcc

SEQ ID NO: 4033446 - RNA, 19 nt, Molluscum contagiosum virus
ccggcggcauugugguguu

SEQ ID NO: 4033447 - RNA, 17 nt, Molluscum contagiosum virus
ccggcggcuggaccugc

SEQ ID NO: 4033448 - RNA, 20 nt, Molluscum contagiosum virus
ccggcguccggcgcucgccc

SEQ ID NO: 4033449 - RNA, 14 nt, Molluscum contagiosum virus
ccggcguuggcuuu

SEQ ID NO: 4033450 - RNA, 21 nt, Molluscum contagiosum virus
ccggcguuggcuuucugugcg

SEQ ID NO: 4033451 - RNA, 18 nt, Molluscum contagiosum virus
ccggcucaagaacaccaa

SEQ ID NO: 4033452 - RNA, 10 nt, Molluscum contagiosum virus
ccggcugccc

SEQ ID NO: 4033453 - RNA, 13 nt, Molluscum contagiosum virus
ccggcugcuccuc

SEQ ID NO: 4033454 - RNA, 16 nt, Molluscum contagiosum virus
ccgggaaggcaggccc

SEQ ID NO: 4033455 - RNA, 13 nt, Molluscum contagiosum virus
ccgggcacgcccg

SEQ ID NO: 4033456 - RNA, 13 nt, Molluscum contagiosum virus
ccgggcccgggcc

SEQ ID NO: 4033457 - RNA, 15 nt, Molluscum contagiosum virus
ccgggccugcggcgg

SEQ ID NO: 4033458 - RNA, 16 nt, Molluscum contagiosum virus
ccgggcgccggcucug

SEQ ID NO: 4033459 - RNA, 12 nt, Molluscum contagiosum virus
ccgggcgcgcca

SEQ ID NO: 4033460 - RNA, 21 nt, Molluscum contagiosum virus
ccgggcgcuccgagcggcugc

SEQ ID NO: 4033461 - RNA, 17 nt, Molluscum contagiosum virus
ccgggcggcgcgccgcg

SEQ ID NO: 4033462 - RNA, 23 nt, Molluscum contagiosum virus
ccggggagaagaugcugcgcgug

SEQ ID NO: 4033463 - RNA, 15 nt, Molluscum contagiosum virus
ccggggcccaugcuc

SEQ ID NO: 4033464 - RNA, 22 nt, Molluscum contagiosum virus
guaguugcgagccagccaggcg

SEQ ID NO: 4033465 - RNA, 19 nt, Molluscum contagiosum virus
guauauacuccccgcgcgc

SEQ ID NO: 4033466 - RNA, 15 nt, Molluscum contagiosum virus
gucacaagcaccgcc

SEQ ID NO: 4033467 - RNA, 13 nt, Molluscum contagiosum virus
gucacacuacgcu

SEQ ID NO: 4033468 - RNA, 20 nt, Molluscum contagiosum virus
gucacgacuguguucccggc

SEQ ID NO: 4033469 - RNA, 21 nt, Molluscum contagiosum virus
gucacgcaagcuuugugcucg

SEQ ID NO: 4033470 - RNA, 18 nt, Molluscum contagiosum virus
gucacgcuagcgggccug

SEQ ID NO: 4033471 - RNA, 17 nt, Molluscum contagiosum virus
gucacugcuagugcugg

SEQ ID NO: 4033472 - RNA, 13 nt, Molluscum contagiosum virus
gucagaggauucu

SEQ ID NO: 4033473 - RNA, 17 nt, Molluscum contagiosum virus
gucagcggcgugcugca

SEQ ID NO: 4033474 - RNA, 15 nt, Molluscum contagiosum virus
gucaucggagagccc

SEQ ID NO: 4033475 - RNA, 14 nt, Molluscum contagiosum virus
gucaugcgcgcgcg

SEQ ID NO: 4033476 - RNA, 13 nt, Molluscum contagiosum virus
gucaugugcgugg

SEQ ID NO: 4033477 - RNA, 20 nt, Molluscum contagiosum virus
guccaacccgcggcgcgccg

SEQ ID NO: 4033478 - RNA, 22 nt, Molluscum contagiosum virus
guccacgugguccaccagcacg

SEQ ID NO: 4033479 - RNA, 13 nt, Molluscum contagiosum virus
guccagcccgcgg

SEQ ID NO: 4033480 - RNA, 16 nt, Molluscum contagiosum virus
guccagcggcugcccg

SEQ ID NO: 4033481 - RNA, 17 nt, Molluscum contagiosum virus
guccagcuucucgaagg

SEQ ID NO: 4033482 - RNA, 16 nt, Molluscum contagiosum virus
guccaggcgcugcacg

SEQ ID NO: 4033483 - RNA, 23 nt, Molluscum contagiosum virus
guccaucggugggcucgcgcuuu

SEQ ID NO: 4033484 - RNA, 16 nt, Molluscum contagiosum virus
guccccgaacugcugg

SEQ ID NO: 4033485 - RNA, 17 nt, Molluscum contagiosum virus
guccccgaacugcuggg

SEQ ID NO: 4033486 - RNA, 23 nt, Molluscum contagiosum virus
guccccgagcagcggggacucuc

SEQ ID NO: 4033487 - RNA, 18 nt, Molluscum contagiosum virus
guccccgcgcucacugca

SEQ ID NO: 4033488 - RNA, 21 nt, Molluscum contagiosum virus
guccccguccgugucgagcug

SEQ ID NO: 4033489 - RNA, 19 nt, Molluscum contagiosum virus
gucccgcgaacgagggaca

SEQ ID NO: 4033490 - RNA, 14 nt, Molluscum contagiosum virus
gucccgcgcuccga

SEQ ID NO: 4033491 - RNA, 22 nt, Molluscum contagiosum virus
gucccgcuaaagaucgugcgcu

SEQ ID NO: 4033492 - RNA, 15 nt, Molluscum contagiosum virus
guccgagcuguucaa

SEQ ID NO: 4033493 - RNA, 13 nt, Molluscum contagiosum virus
guccgcacgcaca

SEQ ID NO: 4033494 - RNA, 22 nt, Molluscum contagiosum virus
guccgcuccuucucagggcuuc

SEQ ID NO: 4033495 - RNA, 15 nt, Molluscum contagiosum virus
guccucggccagagc

SEQ ID NO: 4033496 - RNA, 17 nt, Molluscum contagiosum virus
guccugcgcgguggcuu

SEQ ID NO: 4033497 - RNA, 20 nt, Molluscum contagiosum virus
gucgaagagggucgugcagg

SEQ ID NO: 4033498 - RNA, 12 nt, Molluscum contagiosum virus
gucgagagcgcg

SEQ ID NO: 4033499 - RNA, 18 nt, Molluscum contagiosum virus
gucgagcaccugucgcgc

SEQ ID NO: 4033500 - RNA, 15 nt, Molluscum contagiosum virus
gucgagcgcgccgcg

SEQ ID NO: 4033501 - RNA, 15 nt, Molluscum contagiosum virus
gucgcaaccccgcgc

SEQ ID NO: 4033502 - RNA, 19 nt, Molluscum contagiosum virus
gucgcacaguucacggcgc

SEQ ID NO: 4033503 - RNA, 20 nt, Molluscum contagiosum virus
gucgcacaguucacggcgcu

SEQ ID NO: 4033504 - RNA, 12 nt, Molluscum contagiosum virus
gucgcacuggcc

SEQ ID NO: 4033505 - RNA, 21 nt, Molluscum contagiosum virus
gucgcaguacccgagcugugc

SEQ ID NO: 4033506 - RNA, 20 nt, Molluscum contagiosum virus
gucgccuacgaggugcgcga

SEQ ID NO: 4033507 - RNA, 13 nt, Molluscum contagiosum virus
gucgcgcagcugc

SEQ ID NO: 4033508 - RNA, 18 nt, Molluscum contagiosum virus
gucgcgcgagaagucggg

SEQ ID NO: 4033509 - RNA, 20 nt, Molluscum contagiosum virus
gucggagcaggacgacgaca

SEQ ID NO: 4033510 - RNA, 22 nt, Molluscum contagiosum virus
gucggcgauguacgcgugcagg

SEQ ID NO: 4033511 - RNA, 18 nt, Molluscum contagiosum virus
gucgguaugcgaggccug

SEQ ID NO: 4033512 - RNA, 20 nt, Molluscum contagiosum virus
gucgucaaaggcaaagccug

SEQ ID NO: 4033513 - RNA, 16 nt, Molluscum contagiosum virus
gucgugcaccuggagc

SEQ ID NO: 4033514 - RNA, 15 nt, Molluscum contagiosum virus
gucgugcaggccgug

SEQ ID NO: 4033515 - RNA, 18 nt, Molluscum contagiosum virus
gucuacaacgagcucucc

SEQ ID NO: 4033516 - RNA, 21 nt, Molluscum contagiosum virus
gucucccaggaagacgugcug

SEQ ID NO: 4033517 - RNA, 16 nt, Molluscum contagiosum virus
gucucccgcggccgcc

SEQ ID NO: 4033518 - RNA, 14 nt, Molluscum contagiosum virus
gucuccguccccgg

SEQ ID NO: 4033519 - RNA, 14 nt, Molluscum contagiosum virus
gucuccuccugaug

SEQ ID NO: 4033520 - RNA, 20 nt, Molluscum contagiosum virus
gucucgaacucgugcgccgc

SEQ ID NO: 4033521 - RNA, 15 nt, Molluscum contagiosum virus
gucucgcgcuuccag

SEQ ID NO: 4033522 - RNA, 22 nt, Molluscum contagiosum virus
gucucgcggggcaagcgcgcuc

SEQ ID NO: 4033523 - RNA, 18 nt, Molluscum contagiosum virus
gucucgcucuuccgcgag

SEQ ID NO: 4033524 - RNA, 17 nt, Molluscum contagiosum virus
gucucggagaagaacag

SEQ ID NO: 4033525 - RNA, 14 nt, Molluscum contagiosum virus
gucucggggcuccg

SEQ ID NO: 4033526 - RNA, 22 nt, Molluscum contagiosum virus
gucucucguucgcgggcccgcc

SEQ ID NO: 4033527 - RNA, 13 nt, Molluscum contagiosum virus
gucugcaagcgug

SEQ ID NO: 4033528 - RNA, 14 nt, Molluscum contagiosum virus
gucuuccagcacug

SEQ ID NO: 4033529 - RNA, 19 nt, Molluscum contagiosum virus
gugaacgaggcugcugccg

SEQ ID NO: 4033530 - RNA, 14 nt, Molluscum contagiosum virus
gugacggcccaccu

SEQ ID NO: 4033531 - RNA, 18 nt, Molluscum contagiosum virus
gugacggcccaccuucuu

SEQ ID NO: 4033532 - RNA, 20 nt, Molluscum contagiosum virus
gugagcucgccaauggagcc

SEQ ID NO: 4033533 - RNA, 12 nt, Molluscum contagiosum virus
gugaguccgcgg

SEQ ID NO: 4033534 - RNA, 13 nt, Molluscum contagiosum virus
gugcaccuggagc

SEQ ID NO: 4033535 - RNA, 15 nt, Molluscum contagiosum virus
gugcaccuggagcag

SEQ ID NO: 4033536 - RNA, 15 nt, Molluscum contagiosum virus
gugcacgcacgcgcg

SEQ ID NO: 4033537 - RNA, 22 nt, Molluscum contagiosum virus
gugcacgcgggcgccggcgucc

SEQ ID NO: 4033538 - RNA, 17 nt, Molluscum contagiosum virus
gugcacguccugcgagu

SEQ ID NO: 4033539 - RNA, 17 nt, Molluscum contagiosum virus
gugcacguggcgcacac

SEQ ID NO: 4033540 - RNA, 17 nt, Molluscum contagiosum virus
gugcacuagcacgggcg

SEQ ID NO: 4033541 - RNA, 22 nt, Molluscum contagiosum virus
gugcauggcggcggccacgcuc

SEQ ID NO: 4033542 - RNA, 23 nt, Molluscum contagiosum virus
gugcauggcggcggccacgcucg

SEQ ID NO: 4033543 - RNA, 22 nt, Molluscum contagiosum virus
gugcauugcgucuuacugcugc

SEQ ID NO: 4033544 - RNA, 18 nt, Molluscum contagiosum virus
gugcccaguuauucucug

SEQ ID NO: 4033545 - RNA, 13 nt, Molluscum contagiosum virus
gugcccgccaaga

SEQ ID NO: 4033546 - RNA, 17 nt, Molluscum contagiosum virus
gugccgacgugugccgc

SEQ ID NO: 4033547 - RNA, 20 nt, Molluscum contagiosum virus
gugccgccgugggcgccgcg

SEQ ID NO: 4033548 - RNA, 16 nt, Molluscum contagiosum virus
gugccgcucgcugucc

SEQ ID NO: 4033549 - RNA, 21 nt, Molluscum contagiosum virus
gugccgcugcgcggagcucgc

SEQ ID NO: 4033550 - RNA, 21 nt, Molluscum contagiosum virus
gugccgggcgccggcucugcc

SEQ ID NO: 4033551 - RNA, 16 nt, Molluscum contagiosum virus
gugccguucacgcaca

SEQ ID NO: 4033552 - RNA, 20 nt, Molluscum contagiosum virus
gugccuccgcggacgcgccc

SEQ ID NO: 4033553 - RNA, 22 nt, Molluscum contagiosum virus
gugccugcgcaacgcgggccag

SEQ ID NO: 4033554 - RNA, 18 nt, Molluscum contagiosum virus
gugccuggcagugccggg

SEQ ID NO: 4033555 - RNA, 15 nt, Molluscum contagiosum virus
gugccuggcuugcgc

SEQ ID NO: 4033556 - RNA, 20 nt, Molluscum contagiosum virus
gugccuggcuugcgcgcgcc

SEQ ID NO: 4033557 - RNA, 17 nt, Molluscum contagiosum virus
gugccugucucgcaagc

SEQ ID NO: 4033558 - RNA, 18 nt, Molluscum contagiosum virus
gugccugucucgcaagca

SEQ ID NO: 4033559 - RNA, 18 nt, Molluscum contagiosum virus
gugccuguggcgcacacg

SEQ ID NO: 4033560 - RNA, 14 nt, Molluscum contagiosum virus
gugccuuguucuga

SEQ ID NO: 4033561 - RNA, 21 nt, Molluscum contagiosum virus
gugcgaacacggauacgcgca

SEQ ID NO: 4033562 - RNA, 17 nt, Molluscum contagiosum virus
gugcgaccugcugcgag

SEQ ID NO: 4033563 - RNA, 16 nt, Molluscum contagiosum virus
gugcgagaucgacugc

SEQ ID NO: 4033564 - RNA, 21 nt, Molluscum contagiosum virus
gugcgcacagacggcgcgcuc

SEQ ID NO: 4033565 - RNA, 15 nt, Molluscum contagiosum virus
gugcgccaguccgcg

SEQ ID NO: 4033566 - RNA, 13 nt, Molluscum contagiosum virus
gugcgccgcgccc

SEQ ID NO: 4033567 - RNA, 23 nt, Molluscum contagiosum virus
gugcgccucggacuucgacgcgc

SEQ ID NO: 4033568 - RNA, 20 nt, Molluscum contagiosum virus
gggcagcucaagcugcucau

SEQ ID NO: 4033569 - RNA, 18 nt, Molluscum contagiosum virus
gggcagcuucugcucgcg

SEQ ID NO: 4033570 - RNA, 18 nt, Molluscum contagiosum virus
gggcaggcagugccgccg

SEQ ID NO: 4033571 - RNA, 22 nt, Molluscum contagiosum virus
gggccaggcacuggcccugcuu

SEQ ID NO: 4033572 - RNA, 13 nt, Molluscum contagiosum virus
gggcccgcgcgcg

SEQ ID NO: 4033573 - RNA, 16 nt, Molluscum contagiosum virus
gggccgcgaaagagga

SEQ ID NO: 4033574 - RNA, 11 nt, Molluscum contagiosum virus
gggccgcgagg

SEQ ID NO: 4033575 - RNA, 17 nt, Molluscum contagiosum virus
gggccgcgaggcauguc

SEQ ID NO: 4033576 - RNA, 12 nt, Molluscum contagiosum virus
gggccgcggcgc

SEQ ID NO: 4033577 - RNA, 20 nt, Molluscum contagiosum virus
gggccgcggcgcggcggaag

SEQ ID NO: 4033578 - RNA, 19 nt, Molluscum contagiosum virus
gggccuuuucacuggccgu

SEQ ID NO: 4033579 - RNA, 21 nt, Molluscum contagiosum virus
gggcgaacugcccggcggcaa

SEQ ID NO: 4033580 - RNA, 17 nt, Molluscum contagiosum virus
gggcgagagacagcacg

SEQ ID NO: 4033581 - RNA, 13 nt, Molluscum contagiosum virus
gggcgagcagugu

SEQ ID NO: 4033582 - RNA, 15 nt, Molluscum contagiosum virus
gggcgcgcaccccgu

SEQ ID NO: 4033583 - RNA, 17 nt, Molluscum contagiosum virus
gggcgcgcacuaccgca

SEQ ID NO: 4033584 - RNA, 14 nt, Molluscum contagiosum virus
gggcgcgggccugu

SEQ ID NO: 4033585 - RNA, 15 nt, Molluscum contagiosum virus
gggcgcuuccccguc

SEQ ID NO: 4033586 - RNA, 17 nt, Molluscum contagiosum virus
gggcucgugcuggagca

SEQ ID NO: 4033587 - RNA, 19 nt, Molluscum contagiosum virus
gggcucugccaccaugcgc

SEQ ID NO: 4033588 - RNA, 14 nt, Molluscum contagiosum virus
gggcugcgcggcgg

SEQ ID NO: 4033589 - RNA, 21 nt, Molluscum contagiosum virus
ggggaaugaucgacucgagca

SEQ ID NO: 4033590 - RNA, 22 nt, Molluscum contagiosum virus
ggggacgcgacgcgcguggagc

SEQ ID NO: 4033591 - RNA, 21 nt, Molluscum contagiosum virus
ggggagcauguccgacuccaa

SEQ ID NO: 4033592 - RNA, 10 nt, Molluscum contagiosum virus
gggggcagca

SEQ ID NO: 4033593 - RNA, 22 nt, Molluscum contagiosum virus
ggguaguugcgagccagccagg

SEQ ID NO: 4033594 - RNA, 10 nt, Molluscum contagiosum virus
ggguguacaa

SEQ ID NO: 4033595 - RNA, 22 nt, Molluscum contagiosum virus
gguaccccgcaggaaaggcacc

SEQ ID NO: 4033596 - RNA, 14 nt, Molluscum contagiosum virus
gguaccugcaggcu

SEQ ID NO: 4033597 - RNA, 16 nt, Molluscum contagiosum virus
gguaccugcaggcucu

SEQ ID NO: 4033598 - RNA, 14 nt, Molluscum contagiosum virus
gguacucaugcugc

SEQ ID NO: 4033599 - RNA, 18 nt, Molluscum contagiosum virus
gguacuggcgcccggcgc

SEQ ID NO: 4033600 - RNA, 16 nt, Molluscum contagiosum virus
ggucaagggugugggc

SEQ ID NO: 4033601 - RNA, 13 nt, Molluscum contagiosum virus
ggucacgcgcaca

SEQ ID NO: 4033602 - RNA, 14 nt, Molluscum contagiosum virus
ggucaucgggcugc

SEQ ID NO: 4033603 - RNA, 21 nt, Molluscum contagiosum virus
gguccaccagcugccgcuuga

SEQ ID NO: 4033604 - RNA, 18 nt, Molluscum contagiosum virus
gguccaccugcgacgccu

SEQ ID NO: 4033605 - RNA, 17 nt, Molluscum contagiosum virus
ggucgacgacgcgcgca

SEQ ID NO: 4033606 - RNA, 20 nt, Molluscum contagiosum virus
ggucgagcgcgccgcgcgcu

SEQ ID NO: 4033607 - RNA, 17 nt, Molluscum contagiosum virus
ggucgaguucacggcga

SEQ ID NO: 4033608 - RNA, 19 nt, Molluscum contagiosum virus
ggucgccuacgaggugcgc

SEQ ID NO: 4033609 - RNA, 18 nt, Molluscum contagiosum virus
ggucguccuggagccuag

SEQ ID NO: 4033610 - RNA, 20 nt, Molluscum contagiosum virus
ggucguguacacgccgggaa

SEQ ID NO: 4033611 - RNA, 18 nt, Molluscum contagiosum virus
ggucgugugcguacuggg

SEQ ID NO: 4033612 - RNA, 17 nt, Molluscum contagiosum virus
ggucuccgcgggcagcc

SEQ ID NO: 4033613 - RNA, 17 nt, Molluscum contagiosum virus
ggucucggggcuccgcc

SEQ ID NO: 4033614 - RNA, 14 nt, Molluscum contagiosum virus
ggugaaaauccagg

SEQ ID NO: 4033615 - RNA, 20 nt, Molluscum contagiosum virus
ggugagccguuccacacaga

SEQ ID NO: 4033616 - RNA, 12 nt, Molluscum contagiosum virus
ggugaggagcuc

SEQ ID NO: 4033617 - RNA, 18 nt, Molluscum contagiosum virus
ggugagugcgcgcacgaa

SEQ ID NO: 4033618 - RNA, 14 nt, Molluscum contagiosum virus
ggugcaaccgcugc

SEQ ID NO: 4033619 - RNA, 23 nt, Molluscum contagiosum virus
ggugccggaguuuguagcucuag

SEQ ID NO: 4033620 - RNA, 14 nt, Molluscum contagiosum virus
ggugccggccgccg

SEQ ID NO: 4033621 - RNA, 17 nt, Molluscum contagiosum virus
ggugcgcgacgggcucu

SEQ ID NO: 4033622 - RNA, 13 nt, Molluscum contagiosum virus
ggugcgcgcgcgc

SEQ ID NO: 4033623 - RNA, 14 nt, Molluscum contagiosum virus
ggugcgugcgggag

SEQ ID NO: 4033624 - RNA, 12 nt, Molluscum contagiosum virus
ggugcuggccau

SEQ ID NO: 4033625 - RNA, 22 nt, Molluscum contagiosum virus
gguggagguuuuccuguggccg

SEQ ID NO: 4033626 - RNA, 17 nt, Molluscum contagiosum virus
gguggccaacggcgcca

SEQ ID NO: 4033627 - RNA, 23 nt, Molluscum contagiosum virus
ggugucgagcucgcgcgccagca

SEQ ID NO: 4033628 - RNA, 18 nt, Molluscum contagiosum virus
gguucagguagcgcgccg

SEQ ID NO: 4033629 - RNA, 18 nt, Molluscum contagiosum virus
gguuccgagguagcucca

SEQ ID NO: 4033630 - RNA, 17 nt, Molluscum contagiosum virus
gguuccgcgccugccca

SEQ ID NO: 4033631 - RNA, 12 nt, Molluscum contagiosum virus
gguucugcgcug

SEQ ID NO: 4033632 - RNA, 20 nt, Molluscum contagiosum virus
gguugccaggcacacgcagu

SEQ ID NO: 4033633 - RNA, 14 nt, Molluscum contagiosum virus
gguugccgcucgca

SEQ ID NO: 4033634 - RNA, 23 nt, Molluscum contagiosum virus
gguugcgcggggcaggcagugcc

SEQ ID NO: 4033635 - RNA, 23 nt, Molluscum contagiosum virus
guaacaaggaaaaggcacacccc

SEQ ID NO: 4033636 - RNA, 14 nt, Molluscum contagiosum virus
guaacagcgcgcga

SEQ ID NO: 4033637 - RNA, 19 nt, Molluscum contagiosum virus
guacaauacaccuuucauu

SEQ ID NO: 4033638 - RNA, 23 nt, Molluscum contagiosum virus
guacaauacaccuuucauucgcu

SEQ ID NO: 4033639 - RNA, 19 nt, Molluscum contagiosum virus
guacacauggccgcgcgcu

SEQ ID NO: 4033640 - RNA, 13 nt, Molluscum contagiosum virus
guacacgcagagc

SEQ ID NO: 4033641 - RNA, 17 nt, Molluscum contagiosum virus
guaccaccguggaggag

SEQ ID NO: 4033642 - RNA, 15 nt, Molluscum contagiosum virus
guaccagccgcugcg

SEQ ID NO: 4033643 - RNA, 22 nt, Molluscum contagiosum virus
guaccagcucgcgccgccgcgc

SEQ ID NO: 4033644 - RNA, 18 nt, Molluscum contagiosum virus
guaccaguaccugcugcc

SEQ ID NO: 4033645 - RNA, 15 nt, Molluscum contagiosum virus
guaccccgcaggaaa

SEQ ID NO: 4033646 - RNA, 21 nt, Molluscum contagiosum virus
guacccgagcugugccaacau

SEQ ID NO: 4033647 - RNA, 19 nt, Molluscum contagiosum virus
guaccgccgcggccgcgag

SEQ ID NO: 4033648 - RNA, 14 nt, Molluscum contagiosum virus
guaccgcgcgcacg

SEQ ID NO: 4033649 - RNA, 17 nt, Molluscum contagiosum virus
guaccgcgcgcacgcgg

SEQ ID NO: 4033650 - RNA, 23 nt, Molluscum contagiosum virus
guacgacgugcugcugcagaacu

SEQ ID NO: 4033651 - RNA, 16 nt, Molluscum contagiosum virus
guacgcacgugccgug

SEQ ID NO: 4033652 - RNA, 14 nt, Molluscum contagiosum virus
guacgcggaggcgc

SEQ ID NO: 4033653 - RNA, 16 nt, Molluscum contagiosum virus
gcgcgcgcgcgccgga

SEQ ID NO: 4033654 - RNA, 15 nt, Molluscum contagiosum virus
gcgcgcgcgcggcgc

SEQ ID NO: 4033655 - RNA, 13 nt, Molluscum contagiosum virus
gcgcgcgcggcgc

SEQ ID NO: 4033656 - RNA, 20 nt, Molluscum contagiosum virus
gcgcgcggagaggacgcgug

SEQ ID NO: 4033657 - RNA, 17 nt, Molluscum contagiosum virus
gcgcgcggcacgccgcu

SEQ ID NO: 4033658 - RNA, 19 nt, Molluscum contagiosum virus
gcgcgcgugccuguggcgc

SEQ ID NO: 4033659 - RNA, 22 nt, Molluscum contagiosum virus
gcgcgcguucauuugcgugagg

SEQ ID NO: 4033660 - RNA, 12 nt, Molluscum contagiosum virus
gcgcgcguugcc

SEQ ID NO: 4033661 - RNA, 15 nt, Molluscum contagiosum virus
gcgcgcuaccugcgc

SEQ ID NO: 4033662 - RNA, 16 nt, Molluscum contagiosum virus
gcgcgcuacugcgcgc

SEQ ID NO: 4033663 - RNA, 19 nt, Molluscum contagiosum virus
gcgcgcuagagcgcggcgc

SEQ ID NO: 4033664 - RNA, 23 nt, Molluscum contagiosum virus
gcgcgcuauucaaagcugugcgu

SEQ ID NO: 4033665 - RNA, 20 nt, Molluscum contagiosum virus
gcgcgcuauucucguggcgu

SEQ ID NO: 4033666 - RNA, 19 nt, Molluscum contagiosum virus
gcgcgcucauggcgcgcaa

SEQ ID NO: 4033667 - RNA, 13 nt, Molluscum contagiosum virus
gcgcgcuccgaga

SEQ ID NO: 4033668 - RNA, 15 nt, Molluscum contagiosum virus
gcgcgcucuacgaga

SEQ ID NO: 4033669 - RNA, 13 nt, Molluscum contagiosum virus
gcgcgcugccgcg

SEQ ID NO: 4033670 - RNA, 13 nt, Molluscum contagiosum virus
gcgcgcugcgaac

SEQ ID NO: 4033671 - RNA, 13 nt, Molluscum contagiosum virus
gcgcgcugcgcac

SEQ ID NO: 4033672 - RNA, 21 nt, Molluscum contagiosum virus
gcgcgcugguuaccaagggca

SEQ ID NO: 4033673 - RNA, 12 nt, Molluscum contagiosum virus
gcgcgcuucuca

SEQ ID NO: 4033674 - RNA, 14 nt, Molluscum contagiosum virus
gcgcggcaagcagc

SEQ ID NO: 4033675 - RNA, 15 nt, Molluscum contagiosum virus
gcgcggcagccgcag

SEQ ID NO: 4033676 - RNA, 13 nt, Molluscum contagiosum virus
gcgcggcgcagug

SEQ ID NO: 4033677 - RNA, 15 nt, Molluscum contagiosum virus
gcgcggcgcgccgcc

SEQ ID NO: 4033678 - RNA, 22 nt, Molluscum contagiosum virus
gcgcggcgcgugccagucgcgc

SEQ ID NO: 4033679 - RNA, 13 nt, Molluscum contagiosum virus
gcgcggcggcagc

SEQ ID NO: 4033680 - RNA, 17 nt, Molluscum contagiosum virus
gcgcggcuagcaccgca

SEQ ID NO: 4033681 - RNA, 14 nt, Molluscum contagiosum virus
gcgcggcucgcgca

SEQ ID NO: 4033682 - RNA, 18 nt, Molluscum contagiosum virus
gcgcggcuuacacacgca

SEQ ID NO: 4033683 - RNA, 16 nt, Molluscum contagiosum virus
gcgcgggagcucacgg

SEQ ID NO: 4033684 - RNA, 17 nt, Molluscum contagiosum virus
gcgcgggaugcuggacg

SEQ ID NO: 4033685 - RNA, 14 nt, Molluscum contagiosum virus
gcgcgggccugucc

SEQ ID NO: 4033686 - RNA, 15 nt, Molluscum contagiosum virus
gcgcgggccuguccg

SEQ ID NO: 4033687 - RNA, 18 nt, Molluscum contagiosum virus
gcgcggggcacugcgcac

SEQ ID NO: 4033688 - RNA, 19 nt, Molluscum contagiosum virus
gcgcggggcacugcgcacg

SEQ ID NO: 4033689 - RNA, 21 nt, Molluscum contagiosum virus
gcgcggggcacugcgcacgga

SEQ ID NO: 4033690 - RNA, 17 nt, Molluscum contagiosum virus
gcgcgguccuguccgcg

SEQ ID NO: 4033691 - RNA, 16 nt, Molluscum contagiosum virus
gcgcggugcugcgcca

SEQ ID NO: 4033692 - RNA, 18 nt, Molluscum contagiosum virus
gcgcguacucgcgccgcg

SEQ ID NO: 4033693 - RNA, 22 nt, Molluscum contagiosum virus
gcgcguaugcgaacagccgccg

SEQ ID NO: 4033694 - RNA, 16 nt, Molluscum contagiosum virus
gcgcgucucugcgcag

SEQ ID NO: 4033695 - RNA, 17 nt, Molluscum contagiosum virus
gcgcgugagcacgggcg

SEQ ID NO: 4033696 - RNA, 14 nt, Molluscum contagiosum virus
gcgcgugcccgcag

SEQ ID NO: 4033697 - RNA, 21 nt, Molluscum contagiosum virus
gcgcgugcguacgugcacgug

SEQ ID NO: 4033698 - RNA, 12 nt, Molluscum contagiosum virus
gcgcgugcucga

SEQ ID NO: 4033699 - RNA, 13 nt, Molluscum contagiosum virus
gcgcgugcugcug

SEQ ID NO: 4033700 - RNA, 14 nt, Molluscum contagiosum virus
gcgcgugcuggacg

SEQ ID NO: 4033701 - RNA, 14 nt, Molluscum contagiosum virus
gcgcguggcucgcg

SEQ ID NO: 4033702 - RNA, 20 nt, Molluscum contagiosum virus
gcgcguucuuugugcggcuc

SEQ ID NO: 4033703 - RNA, 16 nt, Molluscum contagiosum virus
gcgcguuugucgcggg

SEQ ID NO: 4033704 - RNA, 17 nt, Molluscum contagiosum virus
gcgcuagagcgcggcgc

SEQ ID NO: 4033705 - RNA, 16 nt, Molluscum contagiosum virus
gcgcuagugaaccgca

SEQ ID NO: 4033706 - RNA, 13 nt, Molluscum contagiosum virus
gcgcuagugcaga

SEQ ID NO: 4033707 - RNA, 19 nt, Molluscum contagiosum virus
gcgcucacugcagcagccc

SEQ ID NO: 4033708 - RNA, 20 nt, Molluscum contagiosum virus
gcgcucgaacgcgcgugcgc

SEQ ID NO: 4033709 - RNA, 17 nt, Molluscum contagiosum virus
gcgcucgacgcgugcau

SEQ ID NO: 4033710 - RNA, 15 nt, Molluscum contagiosum virus
gcgcucgccccuucc

SEQ ID NO: 4033711 - RNA, 20 nt, Molluscum contagiosum virus
gcgcucgcucgcgcgcagcu

SEQ ID NO: 4033712 - RNA, 17 nt, Molluscum contagiosum virus
gcgcucguacucguugc

SEQ ID NO: 4033713 - RNA, 23 nt, Molluscum contagiosum virus
gcgcucgucaaugcgcacgugcu

SEQ ID NO: 4033714 - RNA, 13 nt, Molluscum contagiosum virus
gcgcucugccgcc

SEQ ID NO: 4033715 - RNA, 22 nt, Molluscum contagiosum virus
gcgcugcacaguucacggcgcu

SEQ ID NO: 4033716 - RNA, 13 nt, Molluscum contagiosum virus
gcgcugcaccgcu

SEQ ID NO: 4033717 - RNA, 17 nt, Molluscum contagiosum virus
gcgcugcagcaccugca

SEQ ID NO: 4033718 - RNA, 13 nt, Molluscum contagiosum virus
gcgcugcgcaagc

SEQ ID NO: 4033719 - RNA, 16 nt, Molluscum contagiosum virus
gcgcugcgcaagcgcu

SEQ ID NO: 4033720 - RNA, 12 nt, Molluscum contagiosum virus
gcgcugcgccgc

SEQ ID NO: 4033721 - RNA, 19 nt, Molluscum contagiosum virus
gcgcugcuacaagcggugc

SEQ ID NO: 4033722 - RNA, 22 nt, Molluscum contagiosum virus
gcgcugcucgccgucgcagaag

SEQ ID NO: 4033723 - RNA, 17 nt, Molluscum contagiosum virus
gcgcugcucgcgcucgc

SEQ ID NO: 4033724 - RNA, 12 nt, Molluscum contagiosum virus
gcgcugcugccc

SEQ ID NO: 4033725 - RNA, 14 nt, Molluscum contagiosum virus
gcgcuggagaaaga

SEQ ID NO: 4033726 - RNA, 15 nt, Molluscum contagiosum virus
gcgcugguggaggag

SEQ ID NO: 4033727 - RNA, 16 nt, Molluscum contagiosum virus
gcgcugguggaggagc

SEQ ID NO: 4033728 - RNA, 18 nt, Molluscum contagiosum virus
gcgcuguauaguccccgg

SEQ ID NO: 4033729 - RNA, 14 nt, Molluscum contagiosum virus
gcgcugucgcgcag

SEQ ID NO: 4033730 - RNA, 22 nt, Molluscum contagiosum virus
gcgcuuccgcgagucugccagc

SEQ ID NO: 4033731 - RNA, 21 nt, Molluscum contagiosum virus
gcgcuucguggacgagcgcua

SEQ ID NO: 4033732 - RNA, 14 nt, Molluscum contagiosum virus
gcgcuugggcacug

SEQ ID NO: 4033733 - RNA, 17 nt, Molluscum contagiosum virus
gcgcuugggcacugcua

SEQ ID NO: 4033734 - RNA, 16 nt, Molluscum contagiosum virus
gcgcuuugcgcggcgu

SEQ ID NO: 4033735 - RNA, 19 nt, Molluscum contagiosum virus
gcggaaaaaaacugcgcac

SEQ ID NO: 4033736 - RNA, 15 nt, Molluscum contagiosum virus
gcggaaacaagcaca

SEQ ID NO: 4033737 - RNA, 16 nt, Molluscum contagiosum virus
gcggaagcccgagcgc

SEQ ID NO: 4033738 - RNA, 12 nt, Molluscum contagiosum virus
gcggacgcgggc

SEQ ID NO: 4033739 - RNA, 19 nt, Molluscum contagiosum virus
gcggacgcgggccgcgcgc

SEQ ID NO: 4033740 - RNA, 16 nt, Molluscum contagiosum virus
gcggacgcgggccugu

SEQ ID NO: 4033741 - RNA, 14 nt, Molluscum contagiosum virus
gcggagagcagugc

SEQ ID NO: 4033742 - RNA, 18 nt, Molluscum contagiosum virus
gcggagagcagugccgcu

SEQ ID NO: 4033743 - RNA, 21 nt, Molluscum contagiosum virus
gcggagagcagugccgcucgc

SEQ ID NO: 4033744 - RNA, 20 nt, Molluscum contagiosum virus
gcggagaucgccgcgcaagu

SEQ ID NO: 4033745 - RNA, 23 nt, Molluscum contagiosum virus
gcggagccggccuagagcuggca

SEQ ID NO: 4033746 - RNA, 23 nt, Molluscum contagiosum virus
gcggagcgcuagcagggcggcgc

SEQ ID NO: 4033747 - RNA, 20 nt, Molluscum contagiosum virus
gcggagcugugccaucucgc

SEQ ID NO: 4033748 - RNA, 19 nt, Molluscum contagiosum virus
gcggagggugcacgcgggc

SEQ ID NO: 4033749 - RNA, 19 nt, Molluscum contagiosum virus
gcggauacuucgcgcgucg

SEQ ID NO: 4033750 - RNA, 19 nt, Molluscum contagiosum virus
gcggcaaaggcccgcgagc

SEQ ID NO: 4033751 - RNA, 14 nt, Molluscum contagiosum virus
gcggcaaccgcgcc

SEQ ID NO: 4033752 - RNA, 21 nt, Molluscum contagiosum virus
gcggcacacaugcuagcgggc

SEQ ID NO: 4033753 - RNA, 19 nt, Molluscum contagiosum virus
gcggcacccgccgcggugc

SEQ ID NO: 4033754 - RNA, 16 nt, Molluscum contagiosum virus
gcggcaccugucgcgc

SEQ ID NO: 4033755 - RNA, 14 nt, Molluscum contagiosum virus
gcggcacuugcagg

SEQ ID NO: 4033756 - RNA, 14 nt, Molluscum contagiosum virus
gcggcaggcgcugc

SEQ ID NO: 4033757 - RNA, 21 nt, Molluscum contagiosum virus
gcggcagguuugcacccgcgc

SEQ ID NO: 4033758 - RNA, 22 nt, Molluscum contagiosum virus
gcggcauugugguguucgcagg

SEQ ID NO: 4033759 - RNA, 20 nt, Molluscum contagiosum virus
gcggccaaccgccugcucuc

SEQ ID NO: 4033760 - RNA, 19 nt, Molluscum contagiosum virus
gcggccauggucacgcgca

SEQ ID NO: 4033761 - RNA, 21 nt, Molluscum contagiosum virus
gcggcccuucguguucgcgga

SEQ ID NO: 4033762 - RNA, 23 nt, Molluscum contagiosum virus
gcggccgggaucggacgcagacg

SEQ ID NO: 4033763 - RNA, 22 nt, Molluscum contagiosum virus
gcggcgccacgagcgccgcgac

SEQ ID NO: 4033764 - RNA, 14 nt, Molluscum contagiosum virus
gcggcgccgcagcu

SEQ ID NO: 4033765 - RNA, 13 nt, Molluscum contagiosum virus
gcggcgcgccgcg

SEQ ID NO: 4033766 - RNA, 14 nt, Molluscum contagiosum virus
gcggcgcgccggcc

SEQ ID NO: 4033767 - RNA, 15 nt, Molluscum contagiosum virus
gcggcgcgccggccc

SEQ ID NO: 4033768 - RNA, 23 nt, Molluscum contagiosum virus
gcggcgcgcgcugagcgcggagc

SEQ ID NO: 4033769 - RNA, 14 nt, Molluscum contagiosum virus
gcggcgcggcugcu

SEQ ID NO: 4033770 - RNA, 19 nt, Molluscum contagiosum virus
gcggcgcguacucgcgccg

SEQ ID NO: 4033771 - RNA, 15 nt, Molluscum contagiosum virus
gcggcgcgugcugag

SEQ ID NO: 4033772 - RNA, 15 nt, Molluscum contagiosum virus
gcggcgcgugucgcg

SEQ ID NO: 4033773 - RNA, 17 nt, Molluscum contagiosum virus
gcggcgcgugucgcgga

SEQ ID NO: 4033774 - RNA, 15 nt, Molluscum contagiosum virus
gcggcgcucgcagca

SEQ ID NO: 4033775 - RNA, 19 nt, Molluscum contagiosum virus
gcggcggaaguggugcccg

SEQ ID NO: 4033776 - RNA, 14 nt, Molluscum contagiosum virus
gcggcggccccugc

SEQ ID NO: 4033777 - RNA, 17 nt, Molluscum contagiosum virus
gcggcggcguaggccug

SEQ ID NO: 4033778 - RNA, 16 nt, Molluscum contagiosum virus
gcggcggggcugcugg

SEQ ID NO: 4033779 - RNA, 16 nt, Molluscum contagiosum virus
gcggcguacgcgcagg

SEQ ID NO: 4033780 - RNA, 17 nt, Molluscum contagiosum virus
gcggcgugcugcagccc

SEQ ID NO: 4033781 - RNA, 13 nt, Molluscum contagiosum virus
gcggcugcuggag

SEQ ID NO: 4033782 - RNA, 21 nt, Molluscum contagiosum virus
gcggcuuuaacguuagcacua

SEQ ID NO: 4033783 - RNA, 20 nt, Molluscum contagiosum virus
gcgggaagaggacgccggca

SEQ ID NO: 4033784 - RNA, 18 nt, Molluscum contagiosum virus
gcgggacagagcucggca

SEQ ID NO: 4033785 - RNA, 21 nt, Molluscum contagiosum virus
gcgggacgcgugccuggcuug

SEQ ID NO: 4033786 - RNA, 14 nt, Molluscum contagiosum virus
gcgggcacggcuac

SEQ ID NO: 4033787 - RNA, 12 nt, Molluscum contagiosum virus
gcgggccaggca

SEQ ID NO: 4033788 - RNA, 23 nt, Molluscum contagiosum virus
gcgggccaggcacuggcccugcu

SEQ ID NO: 4033789 - RNA, 18 nt, Molluscum contagiosum virus
gcgggcccgugcucaggc

SEQ ID NO: 4033790 - RNA, 17 nt, Molluscum contagiosum virus
gcgggccuguaccugcg

SEQ ID NO: 4033791 - RNA, 20 nt, Molluscum contagiosum virus
gcgggccuguaccugcgaca

SEQ ID NO: 4033792 - RNA, 17 nt, Molluscum contagiosum virus
gcgggccuguccgcggg

SEQ ID NO: 4033793 - RNA, 24 nt, Molluscum contagiosum virus
gcgggccuguccgcgggcgcacgc

SEQ ID NO: 4033794 - RNA, 22 nt, Molluscum contagiosum virus
gcgggcgcgcgccagcagcgcc

SEQ ID NO: 4033795 - RNA, 23 nt, Molluscum contagiosum virus
gcgggcucuuccaccggcagcgc

SEQ ID NO: 4033796 - RNA, 22 nt, Molluscum contagiosum virus
gcgggcuguuccaagaagacua

SEQ ID NO: 4033797 - RNA, 14 nt, Molluscum contagiosum virus
gcggggagcucugc

SEQ ID NO: 4033798 - RNA, 20 nt, Molluscum contagiosum virus
gcgguccuguccgcggacgc

SEQ ID NO: 4033799 - RNA, 20 nt, Molluscum contagiosum virus
gcggucucggcagcagcgug

SEQ ID NO: 4033800 - RNA, 23 nt, Molluscum contagiosum virus
gcggucugaaacacggaggagcg

SEQ ID NO: 4033801 - RNA, 16 nt, Molluscum contagiosum virus
gcggugcgugcgggag

SEQ ID NO: 4033802 - RNA, 20 nt, Molluscum contagiosum virus
gcgguggccgcgccgggcgc

SEQ ID NO: 4033803 - RNA, 22 nt, Molluscum contagiosum virus
gcgguguaugcucgucgccggg

SEQ ID NO: 4033804 - RNA, 20 nt, Molluscum contagiosum virus
gcguacacauggccgcgcgc

SEQ ID NO: 4033805 - RNA, 19 nt, Molluscum contagiosum virus
gcguacgugcacguggcgc

SEQ ID NO: 4033806 - RNA, 16 nt, Molluscum contagiosum virus
gcguacuccguggugc

SEQ ID NO: 4033807 - RNA, 13 nt, Molluscum contagiosum virus
gcguagccgccgc

SEQ ID NO: 4033808 - RNA, 18 nt, Molluscum contagiosum virus
gcguagcuagcucugcgc

SEQ ID NO: 4033809 - RNA, 19 nt, Molluscum contagiosum virus
gcguaguaguagcgcucgc

SEQ ID NO: 4033810 - RNA, 22 nt, Molluscum contagiosum virus
gcgucaagacucgcccgcgcgc

SEQ ID NO: 4033811 - RNA, 15 nt, Molluscum contagiosum virus
gcgucacguacucgc

SEQ ID NO: 4033812 - RNA, 16 nt, Molluscum contagiosum virus
gcgucaucgcugcacg

SEQ ID NO: 4033813 - RNA, 15 nt, Molluscum contagiosum virus
gcgucaugcgcgcgc

SEQ ID NO: 4033814 - RNA, 15 nt, Molluscum contagiosum virus
gcguccacggcgcgc

SEQ ID NO: 4033815 - RNA, 22 nt, Molluscum contagiosum virus
gcguccgcaaagccggccccgc

SEQ ID NO: 4033816 - RNA, 24 nt, Molluscum contagiosum virus
gcguccggcaugcgcgcgcugcca

SEQ ID NO: 4033817 - RNA, 14 nt, Molluscum contagiosum virus
gcguccggcgcuug

SEQ ID NO: 4033818 - RNA, 17 nt, Molluscum contagiosum virus
gcguccgugcgcagggc

SEQ ID NO: 4033819 - RNA, 12 nt, Molluscum contagiosum virus
gcgucgcgcagg

SEQ ID NO: 4033820 - RNA, 17 nt, Molluscum contagiosum virus
gcgucgcgcgccgcgcu

SEQ ID NO: 4033821 - RNA, 17 nt, Molluscum contagiosum virus
gcgucgcgcgccgugcc

SEQ ID NO: 4033822 - RNA, 21 nt, Molluscum contagiosum virus
gcgucgugcuccacgcgcagc

SEQ ID NO: 4033823 - RNA, 13 nt, Molluscum contagiosum virus
gcgucgugugcgc

SEQ ID NO: 4033824 - RNA, 14 nt, Molluscum contagiosum virus
gcgucgugugcgcg

SEQ ID NO: 4033825 - RNA, 18 nt, Molluscum contagiosum virus
gcgugaacaauacaugcu

SEQ ID NO: 4033826 - RNA, 23 nt, Molluscum contagiosum virus
gcgugacaaucucugcgccgcgc

SEQ ID NO: 4033827 - RNA, 13 nt, Molluscum contagiosum virus
gcgugaccagugc

SEQ ID NO: 4033828 - RNA, 19 nt, Molluscum contagiosum virus
gcgugaccauggacacgcu

SEQ ID NO: 4033829 - RNA, 19 nt, Molluscum contagiosum virus
gcgugcaagcccagcagcg

SEQ ID NO: 4033830 - RNA, 18 nt, Molluscum contagiosum virus
gcgugcagggcgugcuug

SEQ ID NO: 4033831 - RNA, 16 nt, Molluscum contagiosum virus
gcgugcaugcccagca

SEQ ID NO: 4033832 - RNA, 16 nt, Molluscum contagiosum virus
gcgugcauuuuuccgc

SEQ ID NO: 4033833 - RNA, 19 nt, Molluscum contagiosum virus
gcgugccgggcuugcuccc

SEQ ID NO: 4033834 - RNA, 19 nt, Molluscum contagiosum virus
gcgugccuggcuugcgcgc

SEQ ID NO: 4033835 - RNA, 21 nt, Molluscum contagiosum virus
gcgugccuggcuugcgcgcgc

SEQ ID NO: 4033836 - RNA, 22 nt, Molluscum contagiosum virus
gcgugcgauugccccugggcuu

SEQ ID NO: 4033837 - RNA, 13 nt, Molluscum contagiosum virus
gcgugcgcuggcg

SEQ ID NO: 4033838 - RNA, 18 nt, Molluscum contagiosum virus
gcgugcggaucggcacug

SEQ ID NO: 4033839 - RNA, 13 nt, Molluscum contagiosum virus
gcgugcgugcaca

SEQ ID NO: 4033840 - RNA, 12 nt, Molluscum contagiosum virus
gcgugcuggacg

SEQ ID NO: 4033841 - RNA, 18 nt, Molluscum contagiosum virus
gcgugcuuuuucugugcg

SEQ ID NO: 4033842 - RNA, 14 nt, Molluscum contagiosum virus
gcguggacaacagc

SEQ ID NO: 4033843 - RNA, 18 nt, Molluscum contagiosum virus
gcguggcgcgcgagcugc

SEQ ID NO: 4033844 - RNA, 22 nt, Molluscum contagiosum virus
gcguggcuuugucggugugcuu

SEQ ID NO: 4033845 - RNA, 19 nt, Molluscum contagiosum virus
gcgugggcagccgccuggc

SEQ ID NO: 4033846 - RNA, 16 nt, Molluscum contagiosum virus
gcgugucugcgcucgc

SEQ ID NO: 4033847 - RNA, 14 nt, Molluscum contagiosum virus
gcgugugccggugc

SEQ ID NO: 4033848 - RNA, 19 nt, Molluscum contagiosum virus
gcguguuccggcagcgccg

SEQ ID NO: 4033849 - RNA, 17 nt, Molluscum contagiosum virus
gcguguuugugcugucc

SEQ ID NO: 4033850 - RNA, 23 nt, Molluscum contagiosum virus
gcguucaccuuggcgcugcacag

SEQ ID NO: 4033851 - RNA, 19 nt, Molluscum contagiosum virus
gcguugcucccgucgagca

SEQ ID NO: 4033852 - RNA, 14 nt, Molluscum contagiosum virus
gcguugucgagaau

SEQ ID NO: 4033853 - RNA, 12 nt, Molluscum contagiosum virus
gcuaagcucugc

SEQ ID NO: 4033854 - RNA, 16 nt, Molluscum contagiosum virus
gcuaaucugccgcggc

SEQ ID NO: 4033855 - RNA, 17 nt, Molluscum contagiosum virus
gcuacccguugcugcgc

SEQ ID NO: 4033856 - RNA, 21 nt, Molluscum contagiosum virus
gcuaccgcagccacggccgcg

SEQ ID NO: 4033857 - RNA, 17 nt, Molluscum contagiosum virus
gcuaccugaagcuggac

SEQ ID NO: 4033858 - RNA, 19 nt, Molluscum contagiosum virus
gcuaccugaagcuggacgu

SEQ ID NO: 4033859 - RNA, 21 nt, Molluscum contagiosum virus
gcuaccugcgcaagcucagcc

SEQ ID NO: 4033860 - RNA, 22 nt, Molluscum contagiosum virus
gcuaccugcgcaagcucagccu

SEQ ID NO: 4033861 - RNA, 20 nt, Molluscum contagiosum virus
gccaggcggucuuccagcac

SEQ ID NO: 4033862 - RNA, 14 nt, Molluscum contagiosum virus
gccaggcguagcgc

SEQ ID NO: 4033863 - RNA, 15 nt, Molluscum contagiosum virus
gccaggcuaggcgcg

SEQ ID NO: 4033864 - RNA, 22 nt, Molluscum contagiosum virus
gccaggcuaggcgcgacugcac

SEQ ID NO: 4033865 - RNA, 18 nt, Molluscum contagiosum virus
gccaggugcgaaggcucg

SEQ ID NO: 4033866 - RNA, 14 nt, Molluscum contagiosum virus
gccaguggccagcg

SEQ ID NO: 4033867 - RNA, 19 nt, Molluscum contagiosum virus
gccaucgaaacucugcacg

SEQ ID NO: 4033868 - RNA, 14 nt, Molluscum contagiosum virus
gccaugcgcuugcg

SEQ ID NO: 4033869 - RNA, 14 nt, Molluscum contagiosum virus
gccaugcuccugau

SEQ ID NO: 4033870 - RNA, 16 nt, Molluscum contagiosum virus
gccaugcuccugaucu

SEQ ID NO: 4033871 - RNA, 22 nt, Molluscum contagiosum virus
gccauggaggcgcuagugcaga

SEQ ID NO: 4033872 - RNA, 18 nt, Molluscum contagiosum virus
gcccaagaagaagcagca

SEQ ID NO: 4033873 - RNA, 17 nt, Molluscum contagiosum virus
gcccaccuucuugucgc

SEQ ID NO: 4033874 - RNA, 22 nt, Molluscum contagiosum virus
gcccacgagcgccagccugugc

SEQ ID NO: 4033875 - RNA, 14 nt, Molluscum contagiosum virus
gcccacgcgcaagg

SEQ ID NO: 4033876 - RNA, 18 nt, Molluscum contagiosum virus
gcccacguugccgcgcgc

SEQ ID NO: 4033877 - RNA, 19 nt, Molluscum contagiosum virus
gcccacguugccgcgcgcu

SEQ ID NO: 4033878 - RNA, 14 nt, Molluscum contagiosum virus
gcccacuuccguga

SEQ ID NO: 4033879 - RNA, 22 nt, Molluscum contagiosum virus
gcccagaacaugucgagaccuu

SEQ ID NO: 4033880 - RNA, 19 nt, Molluscum contagiosum virus
gcccagccugacggcagca

SEQ ID NO: 4033881 - RNA, 10 nt, Molluscum contagiosum virus
gcccagcgcc

SEQ ID NO: 4033882 - RNA, 13 nt, Molluscum contagiosum virus
gcccagcgccacg

SEQ ID NO: 4033883 - RNA, 15 nt, Molluscum contagiosum virus
gcccagcguggccag

SEQ ID NO: 4033884 - RNA, 21 nt, Molluscum contagiosum virus
gcccaggccauggagcgcccg

SEQ ID NO: 4033885 - RNA, 17 nt, Molluscum contagiosum virus
gcccaugcucaccgccg

SEQ ID NO: 4033886 - RNA, 19 nt, Molluscum contagiosum virus
gccccacugugccagcagc

SEQ ID NO: 4033887 - RNA, 20 nt, Molluscum contagiosum virus
gccccagaaggucgugcgag

SEQ ID NO: 4033888 - RNA, 20 nt, Molluscum contagiosum virus
gcccccgcaaaagaugaaaa

SEQ ID NO: 4033889 - RNA, 19 nt, Molluscum contagiosum virus
gccccgacgccagcgcgcc

SEQ ID NO: 4033890 - RNA, 21 nt, Molluscum contagiosum virus
gccccguccucgcucgugcuc

SEQ ID NO: 4033891 - RNA, 23 nt, Molluscum contagiosum virus
gccccucgugugucggcccggag

SEQ ID NO: 4033892 - RNA, 16 nt, Molluscum contagiosum virus
gccccugccuuugcca

SEQ ID NO: 4033893 - RNA, 11 nt, Molluscum contagiosum virus
gccccugcugc

SEQ ID NO: 4033894 - RNA, 22 nt, Molluscum contagiosum virus
gcccgacuuuggcuacgacggc

SEQ ID NO: 4033895 - RNA, 20 nt, Molluscum contagiosum virus
gcccgacuuuucgcgccgcg

SEQ ID NO: 4033896 - RNA, 21 nt, Molluscum contagiosum virus
gcccgacuuuucgcgccgcgg

SEQ ID NO: 4033897 - RNA, 13 nt, Molluscum contagiosum virus
gcccgagcccggc

SEQ ID NO: 4033898 - RNA, 20 nt, Molluscum contagiosum virus
gcccgagcgcguccaugagc

SEQ ID NO: 4033899 - RNA, 20 nt, Molluscum contagiosum virus
gcccgaggagagcggcgccc

SEQ ID NO: 4033900 - RNA, 16 nt, Molluscum contagiosum virus
gcccgagggcgggcac

SEQ ID NO: 4033901 - RNA, 22 nt, Molluscum contagiosum virus
gcccgaguagaagagcguggac

SEQ ID NO: 4033902 - RNA, 22 nt, Molluscum contagiosum virus
gcccgaguauacucgacgcgcg

SEQ ID NO: 4033903 - RNA, 18 nt, Molluscum contagiosum virus
gcccgaguuugcccgcgg

SEQ ID NO: 4033904 - RNA, 14 nt, Molluscum contagiosum virus
gcccgccgggcacc

SEQ ID NO: 4033905 - RNA, 23 nt, Molluscum contagiosum virus
gcccgccgggcaccggcgcucac

SEQ ID NO: 4033906 - RNA, 22 nt, Molluscum contagiosum virus
gcccgccuacggggcugcuccg

SEQ ID NO: 4033907 - RNA, 16 nt, Molluscum contagiosum virus
gcccgcgaacgagaga

SEQ ID NO: 4033908 - RNA, 17 nt, Molluscum contagiosum virus
gcccgcgcccgcgccgc

SEQ ID NO: 4033909 - RNA, 13 nt, Molluscum contagiosum virus
gcccgcgcgcgca

SEQ ID NO: 4033910 - RNA, 18 nt, Molluscum contagiosum virus
gcccgcgcucgccgcacg

SEQ ID NO: 4033911 - RNA, 15 nt, Molluscum contagiosum virus
gcccgcggacgcgca

SEQ ID NO: 4033912 - RNA, 20 nt, Molluscum contagiosum virus
gcccgcggacucgugcacca

SEQ ID NO: 4033913 - RNA, 19 nt, Molluscum contagiosum virus
gcccgcggagaccaccgcu

SEQ ID NO: 4033914 - RNA, 22 nt, Molluscum contagiosum virus
gcccgcggcacaugcagcugca

SEQ ID NO: 4033915 - RNA, 23 nt, Molluscum contagiosum virus
gcccgcguacacgugcacgcgca

SEQ ID NO: 4033916 - RNA, 16 nt, Molluscum contagiosum virus
gcccgcgucccgacag

SEQ ID NO: 4033917 - RNA, 16 nt, Molluscum contagiosum virus
gcccggaucugguccg

SEQ ID NO: 4033918 - RNA, 14 nt, Molluscum contagiosum virus
gcccggcaccgcgg

SEQ ID NO: 4033919 - RNA, 16 nt, Molluscum contagiosum virus
gcccggcggcccgcgg

SEQ ID NO: 4033920 - RNA, 23 nt, Molluscum contagiosum virus
gcccgggagaguggccgcuccag

SEQ ID NO: 4033921 - RNA, 12 nt, Molluscum contagiosum virus
gcccgugcucag

SEQ ID NO: 4033922 - RNA, 17 nt, Molluscum contagiosum virus
gcccgugcuugcgcacg

SEQ ID NO: 4033923 - RNA, 22 nt, Molluscum contagiosum virus
gcccguguucgcggagcugugc

SEQ ID NO: 4033924 - RNA, 22 nt, Molluscum contagiosum virus
gcccuacgcgcgcgugcugcua

SEQ ID NO: 4033925 - RNA, 20 nt, Molluscum contagiosum virus
gcccuccucgaccugcacga

SEQ ID NO: 4033926 - RNA, 15 nt, Molluscum contagiosum virus
gcccucgcgcgcagc

SEQ ID NO: 4033927 - RNA, 15 nt, Molluscum contagiosum virus
gcccugcacgaccgc

SEQ ID NO: 4033928 - RNA, 22 nt, Molluscum contagiosum virus
gcccugcucaugcgcaagcagc

SEQ ID NO: 4033929 - RNA, 18 nt, Molluscum contagiosum virus
gcccuggagcgcaguccc

SEQ ID NO: 4033930 - RNA, 20 nt, Molluscum contagiosum virus
gccgaccauuuccugcgagu

SEQ ID NO: 4033931 - RNA, 16 nt, Molluscum contagiosum virus
gccgacggcacgggca

SEQ ID NO: 4033932 - RNA, 16 nt, Molluscum contagiosum virus
gccgagauggagcuca

SEQ ID NO: 4033933 - RNA, 17 nt, Molluscum contagiosum virus
gccgagcgccgccagcu

SEQ ID NO: 4033934 - RNA, 20 nt, Molluscum contagiosum virus
gccgagcgccgccagcuccg

SEQ ID NO: 4033935 - RNA, 15 nt, Molluscum contagiosum virus
gccgaggcgcugccg

SEQ ID NO: 4033936 - RNA, 20 nt, Molluscum contagiosum virus
gccgaguaccgcgcgcacgc

SEQ ID NO: 4033937 - RNA, 22 nt, Molluscum contagiosum virus
ccgugcccgccgacugccgccg

SEQ ID NO: 4033938 - RNA, 23 nt, Molluscum contagiosum virus
ccgugcugcgucacaagcaccgc

SEQ ID NO: 4033939 - RNA, 18 nt, Molluscum contagiosum virus
ccguggaggagccgcccg

SEQ ID NO: 4033940 - RNA, 12 nt, Molluscum contagiosum virus
ccgugggcggca

SEQ ID NO: 4033941 - RNA, 22 nt, Molluscum contagiosum virus
ccguguucgcggagcugugccg

SEQ ID NO: 4033942 - RNA, 19 nt, Molluscum contagiosum virus
ccguugcacgugcgugccc

SEQ ID NO: 4033943 - RNA, 20 nt, Molluscum contagiosum virus
ccuacgagcacauacacgcg

SEQ ID NO: 4033944 - RNA, 21 nt, Molluscum contagiosum virus
ccuagcgcgcgugugcauggc

SEQ ID NO: 4033945 - RNA, 14 nt, Molluscum contagiosum virus
ccuagcuccagcgu

SEQ ID NO: 4033946 - RNA, 21 nt, Molluscum contagiosum virus
ccuagcuucugcguugccagc

SEQ ID NO: 4033947 - RNA, 15 nt, Molluscum contagiosum virus
ccucagccgagcgcc

SEQ ID NO: 4033948 - RNA, 20 nt, Molluscum contagiosum virus
ccuccaagaagaggccagca

SEQ ID NO: 4033949 - RNA, 22 nt, Molluscum contagiosum virus
ccuccacguccaggccgcggca

SEQ ID NO: 4033950 - RNA, 17 nt, Molluscum contagiosum virus
ccuccagcagcggcgcg

SEQ ID NO: 4033951 - RNA, 14 nt, Molluscum contagiosum virus
ccuccagggcacga

SEQ ID NO: 4033952 - RNA, 18 nt, Molluscum contagiosum virus
ccucccucgucgcgcuuc

SEQ ID NO: 4033953 - RNA, 16 nt, Molluscum contagiosum virus
ccuccgagcgcgcgug

SEQ ID NO: 4033954 - RNA, 18 nt, Molluscum contagiosum virus
ccuccgcggacgcgcccu

SEQ ID NO: 4033955 - RNA, 19 nt, Molluscum contagiosum virus
ccuccuagcccagcacgcg

SEQ ID NO: 4033956 - RNA, 15 nt, Molluscum contagiosum virus
ccuccugaugcccgc

SEQ ID NO: 4033957 - RNA, 21 nt, Molluscum contagiosum virus
ccuccuugauuucgcgcagca

SEQ ID NO: 4033958 - RNA, 20 nt, Molluscum contagiosum virus
ccucgaaggcgugcgccgug

SEQ ID NO: 4033959 - RNA, 17 nt, Molluscum contagiosum virus
ccucgacgcgcugcucu

SEQ ID NO: 4033960 - RNA, 22 nt, Molluscum contagiosum virus
ccucgagcacgccuccaagaag

SEQ ID NO: 4033961 - RNA, 19 nt, Molluscum contagiosum virus
ccucgccaaagaggacgug

SEQ ID NO: 4033962 - RNA, 14 nt, Molluscum contagiosum virus
ccucgcgcacagac

SEQ ID NO: 4033963 - RNA, 16 nt, Molluscum contagiosum virus
ccucgcgcgcagcuuu

SEQ ID NO: 4033964 - RNA, 17 nt, Molluscum contagiosum virus
ccucgcguagcagcgcc

SEQ ID NO: 4033965 - RNA, 20 nt, Molluscum contagiosum virus
ccucgcguagcagcgccugc

SEQ ID NO: 4033966 - RNA, 15 nt, Molluscum contagiosum virus
ccucgcucugcucuu

SEQ ID NO: 4033967 - RNA, 18 nt, Molluscum contagiosum virus
ccucggcacucgcguccg

SEQ ID NO: 4033968 - RNA, 13 nt, Molluscum contagiosum virus
ccucggcgcacac

SEQ ID NO: 4033969 - RNA, 16 nt, Molluscum contagiosum virus
ccucggcgcacacucc

SEQ ID NO: 4033970 - RNA, 19 nt, Molluscum contagiosum virus
ccucgggccgcagccgcgc

SEQ ID NO: 4033971 - RNA, 22 nt, Molluscum contagiosum virus
ccucgucgaucauguccacagc

SEQ ID NO: 4033972 - RNA, 18 nt, Molluscum contagiosum virus
ccucgucguccacaggcg

SEQ ID NO: 4033973 - RNA, 20 nt, Molluscum contagiosum virus
ccucgugggauaggcacaca

SEQ ID NO: 4033974 - RNA, 22 nt, Molluscum contagiosum virus
ccucgugggauaggcacacacg

SEQ ID NO: 4033975 - RNA, 15 nt, Molluscum contagiosum virus
ccucuacaccagcug

SEQ ID NO: 4033976 - RNA, 19 nt, Molluscum contagiosum virus
ccucucgaggccggcacga

SEQ ID NO: 4033977 - RNA, 22 nt, Molluscum contagiosum virus
ccucucgaggccggcacgagca

SEQ ID NO: 4033978 - RNA, 20 nt, Molluscum contagiosum virus
ccucugcgagcgccugcgag

SEQ ID NO: 4033979 - RNA, 19 nt, Molluscum contagiosum virus
ccugaaccugggcgcgcac

SEQ ID NO: 4033980 - RNA, 14 nt, Molluscum contagiosum virus
ccugagaagcugua

SEQ ID NO: 4033981 - RNA, 16 nt, Molluscum contagiosum virus
ccugagaaggagcgga

SEQ ID NO: 4033982 - RNA, 20 nt, Molluscum contagiosum virus
ccugaugacggcagacggca

SEQ ID NO: 4033983 - RNA, 17 nt, Molluscum contagiosum virus
ccugaugcccgcgagau

SEQ ID NO: 4033984 - RNA, 21 nt, Molluscum contagiosum virus
ccugcaaacgcgaaacuggac

SEQ ID NO: 4033985 - RNA, 15 nt, Molluscum contagiosum virus
ccugcaccaccagug

SEQ ID NO: 4033986 - RNA, 16 nt, Molluscum contagiosum virus
ccugcaccaccagugc

SEQ ID NO: 4033987 - RNA, 18 nt, Molluscum contagiosum virus
ccugcaccgagugcuggc

SEQ ID NO: 4033988 - RNA, 14 nt, Molluscum contagiosum virus
ccugcacgcacgcg

SEQ ID NO: 4033989 - RNA, 13 nt, Molluscum contagiosum virus
ccugcacgcgcac

SEQ ID NO: 4033990 - RNA, 21 nt, Molluscum contagiosum virus
ccugcacuucggacaccucac

SEQ ID NO: 4033991 - RNA, 22 nt, Molluscum contagiosum virus
ccugcaggaaaggcacccgcag

SEQ ID NO: 4033992 - RNA, 18 nt, Molluscum contagiosum virus
ccugcauuucaugcgcgg

SEQ ID NO: 4033993 - RNA, 13 nt, Molluscum contagiosum virus
ccugccagcagag

SEQ ID NO: 4033994 - RNA, 18 nt, Molluscum contagiosum virus
ccugccgcgagcacuggc

SEQ ID NO: 4033995 - RNA, 17 nt, Molluscum contagiosum virus
ccugcgacagcugcugc

SEQ ID NO: 4033996 - RNA, 22 nt, Molluscum contagiosum virus
ccugcgacagcugcugcucgca

SEQ ID NO: 4033997 - RNA, 20 nt, Molluscum contagiosum virus
ccugcgauacccuuggcagc

SEQ ID NO: 4033998 - RNA, 18 nt, Molluscum contagiosum virus
ccugcgcgcgagagcuuc

SEQ ID NO: 4033999 - RNA, 16 nt, Molluscum contagiosum virus
ccugcggaacgcgcau

SEQ ID NO: 4034000 - RNA, 19 nt, Molluscum contagiosum virus
ccugcggacccgccggugc

SEQ ID NO: 4034001 - RNA, 22 nt, Molluscum contagiosum virus
ccugcggacccgccggugcuug

SEQ ID NO: 4034002 - RNA, 18 nt, Molluscum contagiosum virus
ccugcggcucgcacuugc

SEQ ID NO: 4034003 - RNA, 19 nt, Molluscum contagiosum virus
ccugcggguaguugcgagc

SEQ ID NO: 4034004 - RNA, 22 nt, Molluscum contagiosum virus
ccugcguggacagcaucccugc

SEQ ID NO: 4034005 - RNA, 20 nt, Molluscum contagiosum virus
ccugcucucgcgcgccagca

SEQ ID NO: 4034006 - RNA, 13 nt, Molluscum contagiosum virus
ccugcugcagcuc

SEQ ID NO: 4034007 - RNA, 16 nt, Molluscum contagiosum virus
ccugcugcagcuccgc

SEQ ID NO: 4034008 - RNA, 21 nt, Molluscum contagiosum virus
ccugcugcgagagcaugccua

SEQ ID NO: 4034009 - RNA, 21 nt, Molluscum contagiosum virus
ccugcuggcaccgcgcgcgcu

SEQ ID NO: 4034010 - RNA, 15 nt, Molluscum contagiosum virus
ccugcuggcgcgcug

SEQ ID NO: 4034011 - RNA, 14 nt, Molluscum contagiosum virus
ccugcuggcgugcg

SEQ ID NO: 4034012 - RNA, 20 nt, Molluscum contagiosum virus
ccugcugguggugcuggagc

SEQ ID NO: 4034013 - RNA, 21 nt, Molluscum contagiosum virus
ccugcugguucagguagcgcg

SEQ ID NO: 4034014 - RNA, 20 nt, Molluscum contagiosum virus
ccuggaacgcgaccuucacu

SEQ ID NO: 4034015 - RNA, 11 nt, Molluscum contagiosum virus
ccuggagccua

SEQ ID NO: 4034016 - RNA, 19 nt, Molluscum contagiosum virus
ccuggaguaccggcucaag

SEQ ID NO: 4034017 - RNA, 16 nt, Molluscum contagiosum virus
ccuggcagugccgggc

SEQ ID NO: 4034018 - RNA, 19 nt, Molluscum contagiosum virus
ccuggccgaacugcucugc

SEQ ID NO: 4034019 - RNA, 20 nt, Molluscum contagiosum virus
ccuggcgagcgcucugcauu

SEQ ID NO: 4034020 - RNA, 23 nt, Molluscum contagiosum virus
ccuggcgcgugcgagcagaggca

SEQ ID NO: 4034021 - RNA, 15 nt, Molluscum contagiosum virus
ccuggcggcagcacg

SEQ ID NO: 4034022 - RNA, 15 nt, Molluscum contagiosum virus
ccuggcguccgcacg

SEQ ID NO: 4034023 - RNA, 17 nt, Molluscum contagiosum virus
ccuggcguccgcacgca

SEQ ID NO: 4034024 - RNA, 15 nt, Molluscum contagiosum virus
ccuggcuugcgcgcg

SEQ ID NO: 4034025 - RNA, 18 nt, Molluscum contagiosum virus
gcacgcgccgcgcggcuc

SEQ ID NO: 4034026 - RNA, 16 nt, Molluscum contagiosum virus
gcacgcgcgggcgcag

SEQ ID NO: 4034027 - RNA, 20 nt, Molluscum contagiosum virus
gcacgcgcucguccgccgcg

SEQ ID NO: 4034028 - RNA, 18 nt, Molluscum contagiosum virus
gcacgcugagcaagcuca

SEQ ID NO: 4034029 - RNA, 13 nt, Molluscum contagiosum virus
gcacggacagcac

SEQ ID NO: 4034030 - RNA, 16 nt, Molluscum contagiosum virus
gcacggacugggagca

SEQ ID NO: 4034031 - RNA, 18 nt, Molluscum contagiosum virus
gcacggcacccgccagcu

SEQ ID NO: 4034032 - RNA, 16 nt, Molluscum contagiosum virus
gcacggcgcccaggaa

SEQ ID NO: 4034033 - RNA, 18 nt, Molluscum contagiosum virus
gcacggcuuccggcacca

SEQ ID NO: 4034034 - RNA, 12 nt, Molluscum contagiosum virus
gcacgggcgcag

SEQ ID NO: 4034035 - RNA, 18 nt, Molluscum contagiosum virus
gcacgggcucgagcucuu

SEQ ID NO: 4034036 - RNA, 14 nt, Molluscum contagiosum virus
gcacguagugcucg

SEQ ID NO: 4034037 - RNA, 20 nt, Molluscum contagiosum virus
gcacgugcagcggcgccacg

SEQ ID NO: 4034038 - RNA, 13 nt, Molluscum contagiosum virus
gcacgugcugcgc

SEQ ID NO: 4034039 - RNA, 12 nt, Molluscum contagiosum virus
gcacgugcugcu

SEQ ID NO: 4034040 - RNA, 13 nt, Molluscum contagiosum virus
gcacgugcugcug

SEQ ID NO: 4034041 - RNA, 14 nt, Molluscum contagiosum virus
gcacgugcugcugc

SEQ ID NO: 4034042 - RNA, 22 nt, Molluscum contagiosum virus
gcacguggagucacgaccgacc

SEQ ID NO: 4034043 - RNA, 14 nt, Molluscum contagiosum virus
gcacguggcgcaca

SEQ ID NO: 4034044 - RNA, 19 nt, Molluscum contagiosum virus
gcacguuccaaaagacaga

SEQ ID NO: 4034045 - RNA, 23 nt, Molluscum contagiosum virus
gcacguuccaaaagacagaggcc

SEQ ID NO: 4034046 - RNA, 21 nt, Molluscum contagiosum virus
gcacuacauggacgugcugcu

SEQ ID NO: 4034047 - RNA, 14 nt, Molluscum contagiosum virus
gcacuacugcucca

SEQ ID NO: 4034048 - RNA, 21 nt, Molluscum contagiosum virus
gcacuagacugucgacagaga

SEQ ID NO: 4034049 - RNA, 19 nt, Molluscum contagiosum virus
gcacuagcacgggcgggac

SEQ ID NO: 4034050 - RNA, 18 nt, Molluscum contagiosum virus
gcacuauggacgcuugcu

SEQ ID NO: 4034051 - RNA, 22 nt, Molluscum contagiosum virus
gcacuauggacgcuugcuagca

SEQ ID NO: 4034052 - RNA, 16 nt, Molluscum contagiosum virus
gcacuccgcgcaccgc

SEQ ID NO: 4034053 - RNA, 20 nt, Molluscum contagiosum virus
gcacucguggcaacaacaug

SEQ ID NO: 4034054 - RNA, 19 nt, Molluscum contagiosum virus
gcacugcgcgcaugccuug

SEQ ID NO: 4034055 - RNA, 20 nt, Molluscum contagiosum virus
gcacugcgcgucugugcgcg

SEQ ID NO: 4034056 - RNA, 18 nt, Molluscum contagiosum virus
gcacugcucacggugcgc

SEQ ID NO: 4034057 - RNA, 19 nt, Molluscum contagiosum virus
cgugcagggcgugcuugcc

SEQ ID NO: 4034058 - RNA, 13 nt, Molluscum contagiosum virus
cgugccagcucau

SEQ ID NO: 4034059 - RNA, 15 nt, Molluscum contagiosum virus
cgugcccgagcccgc

SEQ ID NO: 4034060 - RNA, 15 nt, Molluscum contagiosum virus
cgugccgcugcgcgg

SEQ ID NO: 4034061 - RNA, 21 nt, Molluscum contagiosum virus
cgugccucugccagccgcucg

SEQ ID NO: 4034062 - RNA, 21 nt, Molluscum contagiosum virus
cgugcgccaguccgcggcgcg

SEQ ID NO: 4034063 - RNA, 17 nt, Molluscum contagiosum virus
cgugcgccucgcaggcg

SEQ ID NO: 4034064 - RNA, 12 nt, Molluscum contagiosum virus
cgugcgcgcugc

SEQ ID NO: 4034065 - RNA, 18 nt, Molluscum contagiosum virus
cgugcguacucaacgcga

SEQ ID NO: 4034066 - RNA, 14 nt, Molluscum contagiosum virus
cgugcgugcacagc

SEQ ID NO: 4034067 - RNA, 16 nt, Molluscum contagiosum virus
cgugcguuccgggccc

SEQ ID NO: 4034068 - RNA, 17 nt, Molluscum contagiosum virus
cgugcguuccgggcccg

SEQ ID NO: 4034069 - RNA, 16 nt, Molluscum contagiosum virus
cgugcuccacgcgcag

SEQ ID NO: 4034070 - RNA, 20 nt, Molluscum contagiosum virus
cgugcuccacgcgcagcuuc

SEQ ID NO: 4034071 - RNA, 23 nt, Molluscum contagiosum virus
cgugcucgcucggcaacgccagc

SEQ ID NO: 4034072 - RNA, 21 nt, Molluscum contagiosum virus
cgugcucuuucccugccccga

SEQ ID NO: 4034073 - RNA, 18 nt, Molluscum contagiosum virus
cgugcugcgcgcccaggc

SEQ ID NO: 4034074 - RNA, 18 nt, Molluscum contagiosum virus
cgugcugcgcuaccacga

SEQ ID NO: 4034075 - RNA, 20 nt, Molluscum contagiosum virus
cgugcugcucugcgugcuug

SEQ ID NO: 4034076 - RNA, 19 nt, Molluscum contagiosum virus
cgugcuguugccgcgcucg

SEQ ID NO: 4034077 - RNA, 16 nt, Molluscum contagiosum virus
cguggacgaggccaac

SEQ ID NO: 4034078 - RNA, 19 nt, Molluscum contagiosum virus
cguggaggacaccgccgua

SEQ ID NO: 4034079 - RNA, 20 nt, Molluscum contagiosum virus
cguggaggacaccgccguac

SEQ ID NO: 4034080 - RNA, 18 nt, Molluscum contagiosum virus
cguggaguccaugcccac

SEQ ID NO: 4034081 - RNA, 18 nt, Molluscum contagiosum virus
cguggaucgcgcgcaccu

SEQ ID NO: 4034082 - RNA, 17 nt, Molluscum contagiosum virus
cguggccaggccgcgcc

SEQ ID NO: 4034083 - RNA, 19 nt, Molluscum contagiosum virus
cguggccuaccugcaggag

SEQ ID NO: 4034084 - RNA, 23 nt, Molluscum contagiosum virus
cguggcgccauugcucgcggugc

SEQ ID NO: 4034085 - RNA, 13 nt, Molluscum contagiosum virus
cguggcgcgccgg

SEQ ID NO: 4034086 - RNA, 17 nt, Molluscum contagiosum virus
cguggcgcgcgagcugc

SEQ ID NO: 4034087 - RNA, 21 nt, Molluscum contagiosum virus
cguggcgcugggcgcgccgcg

SEQ ID NO: 4034088 - RNA, 17 nt, Molluscum contagiosum virus
cguggcucgcgaccgca

SEQ ID NO: 4034089 - RNA, 18 nt, Molluscum contagiosum virus
cgugggcucggacuuggc

SEQ ID NO: 4034090 - RNA, 20 nt, Molluscum contagiosum virus
cgugguacacguagaggaag

SEQ ID NO: 4034091 - RNA, 16 nt, Molluscum contagiosum virus
cguggucgccgcggcc

SEQ ID NO: 4034092 - RNA, 19 nt, Molluscum contagiosum virus
cguggucgcgcgcgcucug

SEQ ID NO: 4034093 - RNA, 20 nt, Molluscum contagiosum virus
cguggugguuggcgugcucg

SEQ ID NO: 4034094 - RNA, 14 nt, Molluscum contagiosum virus
cgugguugcgcagc

SEQ ID NO: 4034095 - RNA, 23 nt, Molluscum contagiosum virus
cguguacaugaugcccuggugaa

SEQ ID NO: 4034096 - RNA, 16 nt, Molluscum contagiosum virus
cguguacguaauccau

SEQ ID NO: 4034097 - RNA, 22 nt, Molluscum contagiosum virus
cguguccgacgccgccaaugcu

SEQ ID NO: 4034098 - RNA, 18 nt, Molluscum contagiosum virus
cguguccuacacgccgcu

SEQ ID NO: 4034099 - RNA, 19 nt, Molluscum contagiosum virus
cguguuccggcagcgccgc

SEQ ID NO: 4034100 - RNA, 17 nt, Molluscum contagiosum virus
cguuagcguugguaaca

SEQ ID NO: 4034101 - RNA, 16 nt, Molluscum contagiosum virus
cguuccacuacaagca

SEQ ID NO: 4034102 - RNA, 17 nt, Molluscum contagiosum virus
cguuccaggaacgccgc

SEQ ID NO: 4034103 - RNA, 17 nt, Molluscum contagiosum virus
cguucccaagcaaagcc

SEQ ID NO: 4034104 - RNA, 20 nt, Molluscum contagiosum virus
cguuccggcggcuggaccug

SEQ ID NO: 4034105 - RNA, 12 nt, Molluscum contagiosum virus
cguuccuggcca

SEQ ID NO: 4034106 - RNA, 18 nt, Molluscum contagiosum virus
cguucgacuacacgcgcu

SEQ ID NO: 4034107 - RNA, 13 nt, Molluscum contagiosum virus
cguucuccaggaa

SEQ ID NO: 4034108 - RNA, 12 nt, Molluscum contagiosum virus
cguugccugcac

SEQ ID NO: 4034109 - RNA, 15 nt, Molluscum contagiosum virus
cguugcugcccgugc

SEQ ID NO: 4034110 - RNA, 13 nt, Molluscum contagiosum virus
cguuggcgccagc

SEQ ID NO: 4034111 - RNA, 22 nt, Molluscum contagiosum virus
cguuggcgcgcccggcgcccgc

SEQ ID NO: 4034112 - RNA, 13 nt, Molluscum contagiosum virus
cguuggcuuucug

SEQ ID NO: 4034113 - RNA, 21 nt, Molluscum contagiosum virus
cguuucugccggaguaaauga

SEQ ID NO: 4034114 - RNA, 18 nt, Molluscum contagiosum virus
cguuuucgcggccuuaaa

SEQ ID NO: 4034115 - RNA, 20 nt, Molluscum contagiosum virus
cuaacggacgcggccaugcu

SEQ ID NO: 4034116 - RNA, 18 nt, Molluscum contagiosum virus
cuaagcuaaaagagcugc

SEQ ID NO: 4034117 - RNA, 22 nt, Molluscum contagiosum virus
cuacaagcggugcagcuacugc

SEQ ID NO: 4034118 - RNA, 10 nt, Molluscum contagiosum virus
cuacaaggug

SEQ ID NO: 4034119 - RNA, 17 nt, Molluscum contagiosum virus
cuacaccagcuggacgg

SEQ ID NO: 4034120 - RNA, 20 nt, Molluscum contagiosum virus
cuacaccgagaucaugggcg

SEQ ID NO: 4034121 - RNA, 16 nt, Molluscum contagiosum virus
cuacagcgcgcugcac

SEQ ID NO: 4034122 - RNA, 16 nt, Molluscum contagiosum virus
cuaccacgagcacugc

SEQ ID NO: 4034123 - RNA, 12 nt, Molluscum contagiosum virus
uacacuuccugc

SEQ ID NO: 4034124 - RNA, 15 nt, Molluscum contagiosum virus
uacagccgccugccg

SEQ ID NO: 4034125 - RNA, 16 nt, Molluscum contagiosum virus
uacaggcgcggcagcc

SEQ ID NO: 4034126 - RNA, 14 nt, Molluscum contagiosum virus
uaccccgcaggaaa

SEQ ID NO: 4034127 - RNA, 18 nt, Molluscum contagiosum virus
uaccgacguuuucuuugc

SEQ ID NO: 4034128 - RNA, 19 nt, Molluscum contagiosum virus
uaccggagacaccagcucc

SEQ ID NO: 4034129 - RNA, 20 nt, Molluscum contagiosum virus
uaccggagacaccagcuccg

SEQ ID NO: 4034130 - RNA, 21 nt, Molluscum contagiosum virus
uaccugaagcuggacgugggc

SEQ ID NO: 4034131 - RNA, 17 nt, Molluscum contagiosum virus
uaccugcgacagcugcu

SEQ ID NO: 4034132 - RNA, 17 nt, Molluscum contagiosum virus
uaccugguggagcacuu

SEQ ID NO: 4034133 - RNA, 16 nt, Molluscum contagiosum virus
uacgagagcgcaugcc

SEQ ID NO: 4034134 - RNA, 13 nt, Molluscum contagiosum virus
uacgagcagcugc

SEQ ID NO: 4034135 - RNA, 13 nt, Molluscum contagiosum virus
uacgagcaggcgc

SEQ ID NO: 4034136 - RNA, 14 nt, Molluscum contagiosum virus
uacgagcaggcgca

SEQ ID NO: 4034137 - RNA, 19 nt, Molluscum contagiosum virus
uacgagcccaucaaggcgc

SEQ ID NO: 4034138 - RNA, 23 nt, Molluscum contagiosum virus
uacgagccgcugcuccugcucug

SEQ ID NO: 4034139 - RNA, 19 nt, Molluscum contagiosum virus
uacgaggugcugcgccacg

SEQ ID NO: 4034140 - RNA, 17 nt, Molluscum contagiosum virus
uacgaucgcgcucagga

SEQ ID NO: 4034141 - RNA, 14 nt, Molluscum contagiosum virus
uacgcgcagggagc

SEQ ID NO: 4034142 - RNA, 15 nt, Molluscum contagiosum virus
uacgcgcgcgugcug

SEQ ID NO: 4034143 - RNA, 23 nt, Molluscum contagiosum virus
uacgcuacagcagccgcagccca

SEQ ID NO: 4034144 - RNA, 15 nt, Molluscum contagiosum virus
uacggacggcgcacg

SEQ ID NO: 4034145 - RNA, 19 nt, Molluscum contagiosum virus
uacgggcgcuauugcgcgg

SEQ ID NO: 4034146 - RNA, 21 nt, Molluscum contagiosum virus
uacucgagcacggccgccacc

SEQ ID NO: 4034147 - RNA, 19 nt, Molluscum contagiosum virus
uacugcaacguggcgccgc

SEQ ID NO: 4034148 - RNA, 16 nt, Molluscum contagiosum virus
uacugcagcagcuccu

SEQ ID NO: 4034149 - RNA, 18 nt, Molluscum contagiosum virus
uacuucuacgagcagcgc

SEQ ID NO: 4034150 - RNA, 14 nt, Molluscum contagiosum virus
uacuugcugguugc

SEQ ID NO: 4034151 - RNA, 23 nt, Molluscum contagiosum virus
uacuuguugugcacgcuguccag

SEQ ID NO: 4034152 - RNA, 18 nt, Molluscum contagiosum virus
uagaagagcgguuccugc

SEQ ID NO: 4034153 - RNA, 15 nt, Molluscum contagiosum virus
uagcaacuugcucua

SEQ ID NO: 4034154 - RNA, 14 nt, Molluscum contagiosum virus
uagcagagcacgag

SEQ ID NO: 4034155 - RNA, 21 nt, Molluscum contagiosum virus
uagcagggcggcgccugcgcc

SEQ ID NO: 4034156 - RNA, 23 nt, Molluscum contagiosum virus
uagcaugucacgcgucgcgcgcc

SEQ ID NO: 4034157 - RNA, 19 nt, Molluscum contagiosum virus
uagcccaggaacaucugca

SEQ ID NO: 4034158 - RNA, 14 nt, Molluscum contagiosum virus
uagcgccacgagca

SEQ ID NO: 4034159 - RNA, 12 nt, Molluscum contagiosum virus
uagcgcgcgugu

SEQ ID NO: 4034160 - RNA, 16 nt, Molluscum contagiosum virus
uagcgcucgugcacca

SEQ ID NO: 4034161 - RNA, 22 nt, Molluscum contagiosum virus
uagcggcggcguaggccugcgg

SEQ ID NO: 4034162 - RNA, 16 nt, Molluscum contagiosum virus
uaggcgggccugcgcc

SEQ ID NO: 4034163 - RNA, 18 nt, Molluscum contagiosum virus
uagugguccaccagcugc

SEQ ID NO: 4034164 - RNA, 17 nt, Molluscum contagiosum virus
uauacucgacgcgcgcg

SEQ ID NO: 4034165 - RNA, 22 nt, Molluscum contagiosum virus
uauaguccccggcgccggcacc

SEQ ID NO: 4034166 - RNA, 19 nt, Molluscum contagiosum virus
uaugccgcgugcucugcuc

SEQ ID NO: 4034167 - RNA, 14 nt, Molluscum contagiosum virus
uaugcgaggccugc

SEQ ID NO: 4034168 - RNA, 18 nt, Molluscum contagiosum virus
uauuuccggcuccggcuu

SEQ ID NO: 4034169 - RNA, 21 nt, Molluscum contagiosum virus
ucaaauccugguuccucuccu

SEQ ID NO: 4034170 - RNA, 18 nt, Molluscum contagiosum virus
ucaacagcuacaccgaga

SEQ ID NO: 4034171 - RNA, 16 nt, Molluscum contagiosum virus
ucaaccgcaaggaaaa

SEQ ID NO: 4034172 - RNA, 18 nt, Molluscum contagiosum virus
ucaaccucgagaagaccu

SEQ ID NO: 4034173 - RNA, 15 nt, Molluscum contagiosum virus
ucaacgagcgcauca

SEQ ID NO: 4034174 - RNA, 17 nt, Molluscum contagiosum virus
ucaacgcgauggcgcag

SEQ ID NO: 4034175 - RNA, 13 nt, Molluscum contagiosum virus
ucaacgcgcgugc

SEQ ID NO: 4034176 - RNA, 21 nt, Molluscum contagiosum virus
ucaacgcgcgugcguacgugc

SEQ ID NO: 4034177 - RNA, 17 nt, Molluscum contagiosum virus
ucaacucguaggacaac

SEQ ID NO: 4034178 - RNA, 13 nt, Molluscum contagiosum virus
ucaagaagaacaa

SEQ ID NO: 4034179 - RNA, 21 nt, Molluscum contagiosum virus
ucaagacauuucuccuccggg

SEQ ID NO: 4034180 - RNA, 16 nt, Molluscum contagiosum virus
ucaagacgcugcuggc

SEQ ID NO: 4034181 - RNA, 15 nt, Molluscum contagiosum virus
ucaagacgcugguga

SEQ ID NO: 4034182 - RNA, 13 nt, Molluscum contagiosum virus
ucaagauccaagc

SEQ ID NO: 4034183 - RNA, 21 nt, Molluscum contagiosum virus
ucaagcagcgcgccaccacca

SEQ ID NO: 4034184 - RNA, 17 nt, Molluscum contagiosum virus
ucaaugcgcacgugcuc

SEQ ID NO: 4034185 - RNA, 21 nt, Molluscum contagiosum virus
ucacagguagugguccaccag

SEQ ID NO: 4034186 - RNA, 14 nt, Molluscum contagiosum virus
ucaccagccugcuc

SEQ ID NO: 4034187 - RNA, 16 nt, Molluscum contagiosum virus
ucaccccgcagcucaa

SEQ ID NO: 4034188 - RNA, 20 nt, Molluscum contagiosum virus
ucaccgccuguaccugcucg

SEQ ID NO: 4034189 - RNA, 22 nt, Molluscum contagiosum virus
ucaccgggauggucucgcugcu

SEQ ID NO: 4034190 - RNA, 13 nt, Molluscum contagiosum virus
ucaccuuccuggg

SEQ ID NO: 4034191 - RNA, 14 nt, Molluscum contagiosum virus
ucaccuuccugggc

SEQ ID NO: 4034192 - RNA, 18 nt, Molluscum contagiosum virus
ucaccuuggcgcugcaca

SEQ ID NO: 4034193 - RNA, 20 nt, Molluscum contagiosum virus
ucacgaccgacccaucggag

SEQ ID NO: 4034194 - RNA, 15 nt, Molluscum contagiosum virus
ucacgaccugguaga

SEQ ID NO: 4034195 - RNA, 12 nt, Molluscum contagiosum virus
ucacgcaagcuu

SEQ ID NO: 4034196 - RNA, 22 nt, Molluscum contagiosum virus
ucacgcacacgaaucgcucgcg

SEQ ID NO: 4034197 - RNA, 16 nt, Molluscum contagiosum virus
ucacgcccgcgcugcg

SEQ ID NO: 4034198 - RNA, 15 nt, Molluscum contagiosum virus
ucacgcccucucgag

SEQ ID NO: 4034199 - RNA, 18 nt, Molluscum contagiosum virus
ucacgccgguggcgcgcg

SEQ ID NO: 4034200 - RNA, 19 nt, Molluscum contagiosum virus
ucacgcgcuaccgcaagcu

SEQ ID NO: 4034201 - RNA, 16 nt, Molluscum contagiosum virus
ucacgcgcuucgugga

SEQ ID NO: 4034202 - RNA, 23 nt, Molluscum contagiosum virus
ucacgcugcccgcgccgcccgug

SEQ ID NO: 4034203 - RNA, 18 nt, Molluscum contagiosum virus
ucacggcuguggacauga

SEQ ID NO: 4034204 - RNA, 14 nt, Molluscum contagiosum virus
ucacugcagcagcc

SEQ ID NO: 4034205 - RNA, 15 nt, Molluscum contagiosum virus
ucacuuucgcgcgca

SEQ ID NO: 4034206 - RNA, 21 nt, Molluscum contagiosum virus
ucagagaaaucccaagagcca

SEQ ID NO: 4034207 - RNA, 11 nt, Molluscum contagiosum virus
ucagcaaggag

SEQ ID NO: 4034208 - RNA, 16 nt, Molluscum contagiosum virus
ucagcacacgucggag

SEQ ID NO: 4034209 - RNA, 18 nt, Molluscum contagiosum virus
ucagcaccaaggacgugu

SEQ ID NO: 4034210 - RNA, 17 nt, Molluscum contagiosum virus
ucagccccgcgccagca

SEQ ID NO: 4034211 - RNA, 21 nt, Molluscum contagiosum virus
ucagccccgggcccgcaugca

SEQ ID NO: 4034212 - RNA, 19 nt, Molluscum contagiosum virus
ucagccgagcgccgccagc

SEQ ID NO: 4034213 - RNA, 12 nt, Molluscum contagiosum virus
ucagcgcgcgca

SEQ ID NO: 4034214 - RNA, 16 nt, Molluscum contagiosum virus
ucagcgggcagacagg

SEQ ID NO: 4034215 - RNA, 14 nt, Molluscum contagiosum virus
ucagcgucgacggc

SEQ ID NO: 4034216 - RNA, 18 nt, Molluscum contagiosum virus
ucaggaacaaggccaaag

SEQ ID NO: 4034217 - RNA, 20 nt, Molluscum contagiosum virus
ucaggacaaagucgcgcgcg

SEQ ID NO: 4034218 - RNA, 19 nt, Molluscum contagiosum virus
ucaggcaaaagccgccgcg

SEQ ID NO: 4034219 - RNA, 23 nt, Molluscum contagiosum virus
ucaggcaaaagccgccgcgcgcg

SEQ ID NO: 4034220 - RNA, 15 nt, Molluscum contagiosum virus
ucaggcagcugcugc

SEQ ID NO: 4034221 - RNA, 16 nt, Molluscum contagiosum virus
ucauacuccugcuggc

SEQ ID NO: 4034222 - RNA, 13 nt, Molluscum contagiosum virus
ucauagcgccacg

SEQ ID NO: 4034223 - RNA, 15 nt, Molluscum contagiosum virus
ucaucgacgagcacg

SEQ ID NO: 4034224 - RNA, 23 nt, Molluscum contagiosum virus
ucaugagccagucucgcgcuucc

SEQ ID NO: 4034225 - RNA, 14 nt, Molluscum contagiosum virus
ucaugcgcguggcu

SEQ ID NO: 4034226 - RNA, 22 nt, Molluscum contagiosum virus
ucauuguaaaacgacagacccc

SEQ ID NO: 4034227 - RNA, 19 nt, Molluscum contagiosum virus
ggagucacgaccgacccau

SEQ ID NO: 4034228 - RNA, 17 nt, Molluscum contagiosum virus
ggaguccaugcccacgc

SEQ ID NO: 4034229 - RNA, 19 nt, Molluscum contagiosum virus
ggaguccgugacagagugc

SEQ ID NO: 4034230 - RNA, 12 nt, Molluscum contagiosum virus
ggauacgcgcac

SEQ ID NO: 4034231 - RNA, 22 nt, Molluscum contagiosum virus
ggauagccccucgagcagcggu

SEQ ID NO: 4034232 - RNA, 15 nt, Molluscum contagiosum virus
ggaucacggcucugc

SEQ ID NO: 4034233 - RNA, 16 nt, Molluscum contagiosum virus
ggaucagccccgcgcc

SEQ ID NO: 4034234 - RNA, 13 nt, Molluscum contagiosum virus
ggaugccugucuu

SEQ ID NO: 4034235 - RNA, 13 nt, Molluscum contagiosum virus
ggauggccacggg

SEQ ID NO: 4034236 - RNA, 20 nt, Molluscum contagiosum virus
ggcaaagcggggcgcgcgcc

SEQ ID NO: 4034237 - RNA, 21 nt, Molluscum contagiosum virus
ggcaacaacgucacgcucgag

SEQ ID NO: 4034238 - RNA, 13 nt, Molluscum contagiosum virus
ggcaacugccugc

SEQ ID NO: 4034239 - RNA, 17 nt, Molluscum contagiosum virus
ggcaagaggggagccag

SEQ ID NO: 4034240 - RNA, 20 nt, Molluscum contagiosum virus
ggcaagcucccgcugcgcuu

SEQ ID NO: 4034241 - RNA, 18 nt, Molluscum contagiosum virus
ggcaagcuucgggccgcu

SEQ ID NO: 4034242 - RNA, 13 nt, Molluscum contagiosum virus
ggcaagggcuccu

SEQ ID NO: 4034243 - RNA, 22 nt, Molluscum contagiosum virus
ggcaaguuccuggugugccagc

SEQ ID NO: 4034244 - RNA, 22 nt, Molluscum contagiosum virus
ggcaauguuugcggaugcucgc

SEQ ID NO: 4034245 - RNA, 12 nt, Molluscum contagiosum virus
ggcacagucugg

SEQ ID NO: 4034246 - RNA, 24 nt, Molluscum contagiosum virus
ggcacagucugggagguguccggg

SEQ ID NO: 4034247 - RNA, 19 nt, Molluscum contagiosum virus
ggcacagugcuggacacuc

SEQ ID NO: 4034248 - RNA, 17 nt, Molluscum contagiosum virus
ggcacauggacggcgcc

SEQ ID NO: 4034249 - RNA, 15 nt, Molluscum contagiosum virus
ggcacccgcaggaaa

SEQ ID NO: 4034250 - RNA, 21 nt, Molluscum contagiosum virus
ggcacccgcaggaaagguacc

SEQ ID NO: 4034251 - RNA, 16 nt, Molluscum contagiosum virus
ggcacccuggcugcug

SEQ ID NO: 4034252 - RNA, 21 nt, Molluscum contagiosum virus
ggcaccugcaggaaaggcacc

SEQ ID NO: 4034253 - RNA, 20 nt, Molluscum contagiosum virus
ggcaccugcaucgcgccgcc

SEQ ID NO: 4034254 - RNA, 12 nt, Molluscum contagiosum virus
ggcacgcagacc

SEQ ID NO: 4034255 - RNA, 14 nt, Molluscum contagiosum virus
ggcacgcagcucuu

SEQ ID NO: 4034256 - RNA, 16 nt, Molluscum contagiosum virus
ggcacgcagcucuucc

SEQ ID NO: 4034257 - RNA, 13 nt, Molluscum contagiosum virus
ggcacgcugagca

SEQ ID NO: 4034258 - RNA, 21 nt, Molluscum contagiosum virus
ggcacgggcucgagcucuucu

SEQ ID NO: 4034259 - RNA, 20 nt, Molluscum contagiosum virus
ggcacgggcucgaucugcgc

SEQ ID NO: 4034260 - RNA, 21 nt, Molluscum contagiosum virus
ggcacguuugcgucugcgagg

SEQ ID NO: 4034261 - RNA, 16 nt, Molluscum contagiosum virus
ggcacuccgcgcaccg

SEQ ID NO: 4034262 - RNA, 13 nt, Molluscum contagiosum virus
ggcagacuaagaa

SEQ ID NO: 4034263 - RNA, 23 nt, Molluscum contagiosum virus
ggcagauagcucgcgcgcgagca

SEQ ID NO: 4034264 - RNA, 13 nt, Molluscum contagiosum virus
ggcagcagcgugc

SEQ ID NO: 4034265 - RNA, 23 nt, Molluscum contagiosum virus
ggcagcgacuacgcgcugcuaga

SEQ ID NO: 4034266 - RNA, 21 nt, Molluscum contagiosum virus
ggcagcgcgauugcuggaggu

SEQ ID NO: 4034267 - RNA, 23 nt, Molluscum contagiosum virus
ggcagcggcaaaggcccgcgagc

SEQ ID NO: 4034268 - RNA, 17 nt, Molluscum contagiosum virus
ggcagcucaagcugcuc

SEQ ID NO: 4034269 - RNA, 16 nt, Molluscum contagiosum virus
ggcagcucggaggcgc

SEQ ID NO: 4034270 - RNA, 16 nt, Molluscum contagiosum virus
ggcagcuucugcucgc

SEQ ID NO: 4034271 - RNA, 23 nt, Molluscum contagiosum virus
ggcaggcagugccgccgcgcgcg

SEQ ID NO: 4034272 - RNA, 21 nt, Molluscum contagiosum virus
ggcagggaaagagcacgcgcu

SEQ ID NO: 4034273 - RNA, 15 nt, Molluscum contagiosum virus
ggcaggggccgccgc

SEQ ID NO: 4034274 - RNA, 16 nt, Molluscum contagiosum virus
ggcaguacgcgcgugg

SEQ ID NO: 4034275 - RNA, 19 nt, Molluscum contagiosum virus
ggcaguggcgugacagguc

SEQ ID NO: 4034276 - RNA, 19 nt, Molluscum contagiosum virus
gcgcgccugccgccugcag

SEQ ID NO: 4034277 - RNA, 14 nt, Molluscum contagiosum virus
gcgcgccugcgcga

SEQ ID NO: 4034278 - RNA, 14 nt, Molluscum contagiosum virus
gcgcgccugcuggc

SEQ ID NO: 4034279 - RNA, 22 nt, Molluscum contagiosum virus
gcgcgcgacgacguugugcucc

SEQ ID NO: 4034280 - RNA, 17 nt, Molluscum contagiosum virus
gcgcgcgagcugcugcg

SEQ ID NO: 4034281 - RNA, 19 nt, Molluscum contagiosum virus
gcgcgcgccaagugcuccg

SEQ ID NO: 4034282 - RNA, 21 nt, Molluscum contagiosum virus
gcgcgcgccauccagcgcauc

SEQ ID NO: 4034283 - RNA, 14 nt, Molluscum contagiosum virus
gcgcgcgccuugca

SEQ ID NO: 4034284 - RNA, 14 nt, Molluscum contagiosum virus
gcgcgcgcgcaggc

SEQ ID NO: 4034285 - RNA, 14 nt, Molluscum contagiosum virus
gcgcgcggcaagca

SEQ ID NO: 4034286 - RNA, 21 nt, Molluscum contagiosum virus
gcgcgcgucgagggcgccggg

SEQ ID NO: 4034287 - RNA, 14 nt, Molluscum contagiosum virus
gcgcgcgugccgcg

SEQ ID NO: 4034288 - RNA, 14 nt, Molluscum contagiosum virus
gcgcgcgugccggg

SEQ ID NO: 4034289 - RNA, 16 nt, Molluscum contagiosum virus
gcgcgcgugcggacgc

SEQ ID NO: 4034290 - RNA, 12 nt, Molluscum contagiosum virus
gcgcgcgugcuc

SEQ ID NO: 4034291 - RNA, 15 nt, Molluscum contagiosum virus
gcgcgcgugcucgcg

SEQ ID NO: 4034292 - RNA, 21 nt, Molluscum contagiosum virus
gcgcgcguuugucgcgggcgc

SEQ ID NO: 4034293 - RNA, 23 nt, Molluscum contagiosum virus
gcgcgcuaguggcaagggccugc

SEQ ID NO: 4034294 - RNA, 22 nt, Molluscum contagiosum virus
gcgcgcucgaacgcgcgugcgc

SEQ ID NO: 4034295 - RNA, 16 nt, Molluscum contagiosum virus
gcgcgcugcacaccga

SEQ ID NO: 4034296 - RNA, 12 nt, Molluscum contagiosum virus
gcgcgcugcgcc

SEQ ID NO: 4034297 - RNA, 15 nt, Molluscum contagiosum virus
gcgcgcugcgcgccg

SEQ ID NO: 4034298 - RNA, 20 nt, Molluscum contagiosum virus
gcgcgcugcucuggagcaag

SEQ ID NO: 4034299 - RNA, 15 nt, Molluscum contagiosum virus
gcgcggagaucgccg

SEQ ID NO: 4034300 - RNA, 19 nt, Molluscum contagiosum virus
gcgcggagaucgccgcgca

SEQ ID NO: 4034301 - RNA, 13 nt, Molluscum contagiosum virus
gcgcggcacgccc

SEQ ID NO: 4034302 - RNA, 17 nt, Molluscum contagiosum virus
gcgcggcagacgccagc

SEQ ID NO: 4034303 - RNA, 13 nt, Molluscum contagiosum virus
gcgcggcagcagc

SEQ ID NO: 4034304 - RNA, 18 nt, Molluscum contagiosum virus
gcgcggcagcagccucgu

SEQ ID NO: 4034305 - RNA, 14 nt, Molluscum contagiosum virus
gcgcggcagccgca

SEQ ID NO: 4034306 - RNA, 16 nt, Molluscum contagiosum virus
gcgcggcccgagcagg

SEQ ID NO: 4034307 - RNA, 18 nt, Molluscum contagiosum virus
gcgcggcccgagcaggac

SEQ ID NO: 4034308 - RNA, 13 nt, Molluscum contagiosum virus
gcgcggccgcgcu

SEQ ID NO: 4034309 - RNA, 16 nt, Molluscum contagiosum virus
gcgcggccuggccacg

SEQ ID NO: 4034310 - RNA, 13 nt, Molluscum contagiosum virus
gcgcggcgcgccg

SEQ ID NO: 4034311 - RNA, 17 nt, Molluscum contagiosum virus
gcgcggcgcucugccac

SEQ ID NO: 4034312 - RNA, 21 nt, Molluscum contagiosum virus
gcgcggcgcuuucgcccgccg

SEQ ID NO: 4034313 - RNA, 20 nt, Molluscum contagiosum virus
gcgcggcgguguaugcucgu

SEQ ID NO: 4034314 - RNA, 22 nt, Molluscum contagiosum virus
gcgcggcguggcgcugaggaag

SEQ ID NO: 4034315 - RNA, 14 nt, Molluscum contagiosum virus
gcgcgggagcucac

SEQ ID NO: 4034316 - RNA, 16 nt, Molluscum contagiosum virus
gcgcgggcacgccgca

SEQ ID NO: 4034317 - RNA, 17 nt, Molluscum contagiosum virus
gcgcgggccuguccgcg

SEQ ID NO: 4034318 - RNA, 17 nt, Molluscum contagiosum virus
gcgcggggcacugcgca

SEQ ID NO: 4034319 - RNA, 22 nt, Molluscum contagiosum virus
gcgcggggcaggcagugccgcc

SEQ ID NO: 4034320 - RNA, 18 nt, Molluscum contagiosum virus
gcgcgguaacgcgcgcgc

SEQ ID NO: 4034321 - RNA, 16 nt, Molluscum contagiosum virus
gcgcgguccagccgca

SEQ ID NO: 4034322 - RNA, 15 nt, Molluscum contagiosum virus
gcgcgguccuguccg

SEQ ID NO: 4034323 - RNA, 17 nt, Molluscum contagiosum virus
gcgcguacucgcgccgc

SEQ ID NO: 4034324 - RNA, 19 nt, Molluscum contagiosum virus
gcgcgucugcgaguggcgc

SEQ ID NO: 4034325 - RNA, 15 nt, Molluscum contagiosum virus
gcgcgucugugcgcg

SEQ ID NO: 4034326 - RNA, 23 nt, Molluscum contagiosum virus
gcgcgugacacaccgcguggaca

SEQ ID NO: 4034327 - RNA, 17 nt, Molluscum contagiosum virus
gcgcgugaguccgcggc

SEQ ID NO: 4034328 - RNA, 12 nt, Molluscum contagiosum virus
gcgcgugcaguu

SEQ ID NO: 4034329 - RNA, 20 nt, Molluscum contagiosum virus
gcgcgugccagucgcgcgag

SEQ ID NO: 4034330 - RNA, 20 nt, Molluscum contagiosum virus
gcgcgugccuguggcgcaca

SEQ ID NO: 4034331 - RNA, 13 nt, Molluscum contagiosum virus
gcgcgugcgcagg

SEQ ID NO: 4034332 - RNA, 12 nt, Molluscum contagiosum virus
gcgcgugcucgg

SEQ ID NO: 4034333 - RNA, 16 nt, Molluscum contagiosum virus
gcgcgugcugcggcug

SEQ ID NO: 4034334 - RNA, 15 nt, Molluscum contagiosum virus
gcgcgugcugggccc

SEQ ID NO: 4034335 - RNA, 16 nt, Molluscum contagiosum virus
gcgcguggaguacagc

SEQ ID NO: 4034336 - RNA, 14 nt, Molluscum contagiosum virus
gcgcgugugcagca

SEQ ID NO: 4034337 - RNA, 15 nt, Molluscum contagiosum virus
gcgcguucagcgcac

SEQ ID NO: 4034338 - RNA, 19 nt, Molluscum contagiosum virus
gcgcguucauuugcgugag

SEQ ID NO: 4034339 - RNA, 16 nt, Molluscum contagiosum virus
gcgcuacgacgacaug

SEQ ID NO: 4034340 - RNA, 17 nt, Molluscum contagiosum virus
gcgcucacugcgaucgc

SEQ ID NO: 4034341 - RNA, 16 nt, Molluscum contagiosum virus
gcgcuccacgcccgag

SEQ ID NO: 4034342 - RNA, 14 nt, Molluscum contagiosum virus
gcgcucgagcuccg

SEQ ID NO: 4034343 - RNA, 24 nt, Molluscum contagiosum virus
gcgcucgauuuaacucuagcgaga

SEQ ID NO: 4034344 - RNA, 21 nt, Molluscum contagiosum virus
gcgcucuucaagaacagucgc

SEQ ID NO: 4034345 - RNA, 22 nt, Molluscum contagiosum virus
gcgcugaaggcauaccugugcc

SEQ ID NO: 4034346 - RNA, 19 nt, Molluscum contagiosum virus
gcgcugaucaccgaggagc

SEQ ID NO: 4034347 - RNA, 16 nt, Molluscum contagiosum virus
gcgcugcacaccgagc

SEQ ID NO: 4034348 - RNA, 18 nt, Molluscum contagiosum virus
gcgcugcacgccgccagc

SEQ ID NO: 4034349 - RNA, 14 nt, Molluscum contagiosum virus
gcgcugcagcaccu

SEQ ID NO: 4034350 - RNA, 16 nt, Molluscum contagiosum virus
gcgcugcucuggagca

SEQ ID NO: 4034351 - RNA, 18 nt, Molluscum contagiosum virus
gcgcugcugacacgcucu

SEQ ID NO: 4034352 - RNA, 22 nt, Molluscum contagiosum virus
gcgcuggagaaagaagugugcc

SEQ ID NO: 4034353 - RNA, 17 nt, Molluscum contagiosum virus
gcgcuggagcuggcugg

SEQ ID NO: 4034354 - RNA, 17 nt, Molluscum contagiosum virus
gagggaugcacacacuc

SEQ ID NO: 4034355 - RNA, 23 nt, Molluscum contagiosum virus
gagggcagugccaagguucugga

SEQ ID NO: 4034356 - RNA, 13 nt, Molluscum contagiosum virus
cuuggcgcgccgc

SEQ ID NO: 4034357 - RNA, 17 nt, Molluscum contagiosum virus
cuuggcguucgcagugc

SEQ ID NO: 4034358 - RNA, 11 nt, Molluscum contagiosum virus
cuugggcacug

SEQ ID NO: 4034359 - RNA, 17 nt, Molluscum contagiosum virus
cuugguggugaccgaga

SEQ ID NO: 4034360 - RNA, 17 nt, Molluscum contagiosum virus
cuuguucucggagaaca

SEQ ID NO: 4034361 - RNA, 20 nt, Molluscum contagiosum virus
cuuguugucgagcagauuca

SEQ ID NO: 4034362 - RNA, 15 nt, Molluscum contagiosum virus
cuuguugucugcgga

SEQ ID NO: 4034363 - RNA, 16 nt, Molluscum contagiosum virus
cuuuacgggcgccagc

SEQ ID NO: 4034364 - RNA, 19 nt, Molluscum contagiosum virus
cuuuccccuccuagcccag

SEQ ID NO: 4034365 - RNA, 13 nt, Molluscum contagiosum virus
cuuucgacgcugc

SEQ ID NO: 4034366 - RNA, 15 nt, Molluscum contagiosum virus
cuuucucacgcgcua

SEQ ID NO: 4034367 - RNA, 14 nt, Molluscum contagiosum virus
cuuucucagagaaa

SEQ ID NO: 4034368 - RNA, 21 nt, Molluscum contagiosum virus
cuuugaggaacuagugcugcu

SEQ ID NO: 4034369 - RNA, 19 nt, Molluscum contagiosum virus
cuuuggccucgcgagggcu

SEQ ID NO: 4034370 - RNA, 15 nt, Molluscum contagiosum virus
cuuuggcgugaccau

SEQ ID NO: 4034371 - RNA, 20 nt, Molluscum contagiosum virus
cuuuuccgcgaaguccuggg

SEQ ID NO: 4034372 - RNA, 21 nt, Molluscum contagiosum virus
cuuuucgcgccgcgggcacau

SEQ ID NO: 4034373 - RNA, 20 nt, Molluscum contagiosum virus
cuuuuuccugaacaagcugc

SEQ ID NO: 4034374 - RNA, 13 nt, Molluscum contagiosum virus
gaaaaaaacugcg

SEQ ID NO: 4034375 - RNA, 12 nt, Molluscum contagiosum virus
gaaaaaguucuu

SEQ ID NO: 4034376 - RNA, 19 nt, Molluscum contagiosum virus
gaaaacggaaacagcaccg

SEQ ID NO: 4034377 - RNA, 18 nt, Molluscum contagiosum virus
gaaacagccgugcuccga

SEQ ID NO: 4034378 - RNA, 15 nt, Molluscum contagiosum virus
gaaacaugugucuga

SEQ ID NO: 4034379 - RNA, 19 nt, Molluscum contagiosum virus
gaaaccucaccucugcgcg

SEQ ID NO: 4034380 - RNA, 22 nt, Molluscum contagiosum virus
gaaacgcacagccccugcugcu

SEQ ID NO: 4034381 - RNA, 12 nt, Molluscum contagiosum virus
gaaacugcugcc

SEQ ID NO: 4034382 - RNA, 13 nt, Molluscum contagiosum virus
gaaagaagaagga

SEQ ID NO: 4034383 - RNA, 12 nt, Molluscum contagiosum virus
gaaagcgccgcg

SEQ ID NO: 4034384 - RNA, 23 nt, Molluscum contagiosum virus
gaaagcgucgugcuccacgcgca

SEQ ID NO: 4034385 - RNA, 20 nt, Molluscum contagiosum virus
gaaagcuucugucgcuucgc

SEQ ID NO: 4034386 - RNA, 19 nt, Molluscum contagiosum virus
gaaaggcacccaccaggaa

SEQ ID NO: 4034387 - RNA, 17 nt, Molluscum contagiosum virus
gaaaggcaccccgcagg

SEQ ID NO: 4034388 - RNA, 14 nt, Molluscum contagiosum virus
gaaaggcacccgca

SEQ ID NO: 4034389 - RNA, 17 nt, Molluscum contagiosum virus
gaaaggcacccgcagga

SEQ ID NO: 4034390 - RNA, 20 nt, Molluscum contagiosum virus
gaaaggcaccugcggcucgc

SEQ ID NO: 4034391 - RNA, 16 nt, Molluscum contagiosum virus
gaacaaaaaacaacuc

SEQ ID NO: 4034392 - RNA, 23 nt, Molluscum contagiosum virus
gaacaagucgucgaucgccucga

SEQ ID NO: 4034393 - RNA, 18 nt, Molluscum contagiosum virus
gaacaaugaggagaggaa

SEQ ID NO: 4034394 - RNA, 14 nt, Molluscum contagiosum virus
gaacaccuccugcu

SEQ ID NO: 4034395 - RNA, 20 nt, Molluscum contagiosum virus
gaacagagaaaggcacccac

SEQ ID NO: 4034396 - RNA, 17 nt, Molluscum contagiosum virus
gaacagcuucacgauga

SEQ ID NO: 4034397 - RNA, 18 nt, Molluscum contagiosum virus
gaacagggaaaaaucccc

SEQ ID NO: 4034398 - RNA, 18 nt, Molluscum contagiosum virus
gaacccgcauugggccuu

SEQ ID NO: 4034399 - RNA, 23 nt, Molluscum contagiosum virus
gaaccuggaacucuacgccgcgc

SEQ ID NO: 4034400 - RNA, 20 nt, Molluscum contagiosum virus
gaaccugggcaucgucucgc

SEQ ID NO: 4034401 - RNA, 21 nt, Molluscum contagiosum virus
gaacgagagacacgcacacuc

SEQ ID NO: 4034402 - RNA, 15 nt, Molluscum contagiosum virus
gaacgaggcugcugc

SEQ ID NO: 4034403 - RNA, 19 nt, Molluscum contagiosum virus
gaacgaggcugcugccgcg

SEQ ID NO: 4034404 - RNA, 17 nt, Molluscum contagiosum virus
gaacgauuuuacgcaca

SEQ ID NO: 4034405 - RNA, 20 nt, Molluscum contagiosum virus
gaacgauuuuacgcacacga

SEQ ID NO: 4034406 - RNA, 12 nt, Molluscum contagiosum virus
gaacgcgccgcg

SEQ ID NO: 4034407 - RNA, 19 nt, Molluscum contagiosum virus
gaacgcgccgcggaugucc

SEQ ID NO: 4034408 - RNA, 23 nt, Molluscum contagiosum virus
gaacgcguccacggcgcgcaccu

SEQ ID NO: 4034409 - RNA, 18 nt, Molluscum contagiosum virus
gaacgucuucgagagccu

SEQ ID NO: 4034410 - RNA, 14 nt, Molluscum contagiosum virus
gaacuagugcugcu

SEQ ID NO: 4034411 - RNA, 15 nt, Molluscum contagiosum virus
gaacuagugcugcug

SEQ ID NO: 4034412 - RNA, 16 nt, Molluscum contagiosum virus
gaacuagugcugcugg

SEQ ID NO: 4034413 - RNA, 12 nt, Molluscum contagiosum virus
gaacuccaggcg

SEQ ID NO: 4034414 - RNA, 22 nt, Molluscum contagiosum virus
gaacucuacacguggaauugcg

SEQ ID NO: 4034415 - RNA, 15 nt, Molluscum contagiosum virus
gaacugacugcugcc

SEQ ID NO: 4034416 - RNA, 13 nt, Molluscum contagiosum virus
gaacugcagcagc

SEQ ID NO: 4034417 - RNA, 16 nt, Molluscum contagiosum virus
gaacugcccgcgucgc

SEQ ID NO: 4034418 - RNA, 23 nt, Molluscum contagiosum virus
gaacugcugggcguggcgcaccu

SEQ ID NO: 4034419 - RNA, 20 nt, Molluscum contagiosum virus
gaagacgagcgcgugccgcu

SEQ ID NO: 4034420 - RNA, 12 nt, Molluscum contagiosum virus
gaagagucgcgc

SEQ ID NO: 4034421 - RNA, 14 nt, Molluscum contagiosum virus
gaagagucgcgccu

SEQ ID NO: 4034422 - RNA, 19 nt, Molluscum contagiosum virus
gaagcaagacccagcaagg

SEQ ID NO: 4034423 - RNA, 16 nt, Molluscum contagiosum virus
gaagcacguagcucgc

SEQ ID NO: 4034424 - RNA, 14 nt, Molluscum contagiosum virus
gaagcagcagacca

SEQ ID NO: 4034425 - RNA, 15 nt, Molluscum contagiosum virus
gaagcccgucggggc

SEQ ID NO: 4034426 - RNA, 14 nt, Molluscum contagiosum virus
gaagccgccagcca

SEQ ID NO: 4034427 - RNA, 22 nt, Molluscum contagiosum virus
gaagccuucuucgugcugugcc

SEQ ID NO: 4034428 - RNA, 16 nt, Molluscum contagiosum virus
gaagcugcacgugcag

SEQ ID NO: 4034429 - RNA, 11 nt, Molluscum contagiosum virus
gaagcugucaa

SEQ ID NO: 4034430 - RNA, 17 nt, Molluscum contagiosum virus
gaagcugugcaagagcu

SEQ ID NO: 4034431 - RNA, 21 nt, Molluscum contagiosum virus
gaaggaucccugcccgcguga

SEQ ID NO: 4034432 - RNA, 19 nt, Molluscum contagiosum virus
gaaguccaucggugggcuc

SEQ ID NO: 4034433 - RNA, 14 nt, Molluscum contagiosum virus
gaagugcuccgcac

SEQ ID NO: 4034434 - RNA, 23 nt, Molluscum contagiosum virus
gaagugcuccgcacguggaguca

SEQ ID NO: 4034435 - RNA, 18 nt, Molluscum contagiosum virus
gaauaaaauagcagagca

SEQ ID NO: 4034436 - RNA, 19 nt, Molluscum contagiosum virus
gaauaaaauagcagagcac

SEQ ID NO: 4034437 - RNA, 21 nt, Molluscum contagiosum virus
gaauaccggagacaccagcuc

SEQ ID NO: 4034438 - RNA, 23 nt, Molluscum contagiosum virus
gaaucgcucgcggugcagcugcc

SEQ ID NO: 4034439 - RNA, 22 nt, Molluscum contagiosum virus
gaaugacuuagccacugugcug

SEQ ID NO: 4034440 - RNA, 12 nt, Molluscum contagiosum virus
gaaugcccgcaa

SEQ ID NO: 4034441 - RNA, 20 nt, Molluscum contagiosum virus
gaauuuuuauauggcaagcu

SEQ ID NO: 4034442 - RNA, 13 nt, Molluscum contagiosum virus
gacaaagucgcgc

SEQ ID NO: 4034443 - RNA, 17 nt, Molluscum contagiosum virus
gacaaagucgcgcgcgg

SEQ ID NO: 4034444 - RNA, 21 nt, Molluscum contagiosum virus
gacaagcuagacuggagcacg

SEQ ID NO: 4034445 - RNA, 18 nt, Molluscum contagiosum virus
gacaaggaaaggcaccca

SEQ ID NO: 4034446 - RNA, 13 nt, Molluscum contagiosum virus
gacaaggagggag

SEQ ID NO: 4034447 - RNA, 17 nt, Molluscum contagiosum virus
gacaaguacaugcacgu

SEQ ID NO: 4034448 - RNA, 16 nt, Molluscum contagiosum virus
gacacacuccuguccu

SEQ ID NO: 4034449 - RNA, 15 nt, Molluscum contagiosum virus
gacaccagcuccgcc

SEQ ID NO: 4034450 - RNA, 19 nt, Molluscum contagiosum virus
gacaccgacgaggugcgcg

SEQ ID NO: 4034451 - RNA, 20 nt, Molluscum contagiosum virus
gacaccgcgacccagaagcg

SEQ ID NO: 4034452 - RNA, 18 nt, Molluscum contagiosum virus
gacaccgcguuuguggcg

SEQ ID NO: 4034453 - RNA, 19 nt, Molluscum contagiosum virus
gacacgggugagcucgcca

SEQ ID NO: 4034454 - RNA, 16 nt, Molluscum contagiosum virus
gacacguugcagcagc

SEQ ID NO: 4034455 - RNA, 22 nt, Molluscum contagiosum virus
gacacguugcagcagcacaggu

SEQ ID NO: 4034456 - RNA, 21 nt, Molluscum contagiosum virus
gacagagcucggcaacacaaa

SEQ ID NO: 4034457 - RNA, 16 nt, Molluscum contagiosum virus
gacagagugccuggcg

SEQ ID NO: 4034458 - RNA, 18 nt, Molluscum contagiosum virus
gacagagugccuggcgcg

SEQ ID NO: 4034459 - RNA, 13 nt, Molluscum contagiosum virus
gacagcaucccug

SEQ ID NO: 4034460 - RNA, 16 nt, Molluscum contagiosum virus
gacagcgacgagaucu

SEQ ID NO: 4034461 - RNA, 15 nt, Molluscum contagiosum virus
gacagcgcgcgcacg

SEQ ID NO: 4034462 - RNA, 16 nt, Molluscum contagiosum virus
gacagcgcgcgcacgc

SEQ ID NO: 4034463 - RNA, 13 nt, Molluscum contagiosum virus
gacagcgugcgcg

SEQ ID NO: 4034464 - RNA, 15 nt, Molluscum contagiosum virus
gacagcgugcgcggg

SEQ ID NO: 4034465 - RNA, 13 nt, Molluscum contagiosum virus
gacagcucagcag

SEQ ID NO: 4034466 - RNA, 23 nt, Molluscum contagiosum virus
gacagggugccuacucgcgacgc

SEQ ID NO: 4034467 - RNA, 19 nt, Molluscum contagiosum virus
gacagucagcggcgugcug

SEQ ID NO: 4034468 - RNA, 16 nt, Molluscum contagiosum virus
gacaucacgcguucgc

SEQ ID NO: 4034469 - RNA, 16 nt, Molluscum contagiosum virus
gacaugcacacgcacc

SEQ ID NO: 4034470 - RNA, 13 nt, Molluscum contagiosum virus
gacaugcugugcg

SEQ ID NO: 4034471 - RNA, 14 nt, Molluscum contagiosum virus
gaccaaggagggag

SEQ ID NO: 4034472 - RNA, 14 nt, Molluscum contagiosum virus
gaccaccagcacca

SEQ ID NO: 4034473 - RNA, 13 nt, Molluscum contagiosum virus
gaccacgcgcgcu

SEQ ID NO: 4034474 - RNA, 18 nt, Molluscum contagiosum virus
gacccccuccccagcgcc

SEQ ID NO: 4034475 - RNA, 23 nt, Molluscum contagiosum virus
gacccgcgaacgagggaugcaca

SEQ ID NO: 4034476 - RNA, 17 nt, Molluscum contagiosum virus
gacccucgcggcucugg

SEQ ID NO: 4034477 - RNA, 17 nt, Molluscum contagiosum virus
gaccgacccaucggaga

SEQ ID NO: 4034478 - RNA, 19 nt, Molluscum contagiosum virus
gaccgacccaucggagaag

SEQ ID NO: 4034479 - RNA, 20 nt, Molluscum contagiosum virus
gaccgcgaacugcaacguga

SEQ ID NO: 4034480 - RNA, 15 nt, Molluscum contagiosum virus
gaccgcgggcacggg

SEQ ID NO: 4034481 - RNA, 14 nt, Molluscum contagiosum virus
gaccgucaaccugc

SEQ ID NO: 4034482 - RNA, 14 nt, Molluscum contagiosum virus
gaccgucacgacuc

SEQ ID NO: 4034483 - RNA, 23 nt, Molluscum contagiosum virus
gaccgucagccucugugcggcgc

SEQ ID NO: 4034484 - RNA, 11 nt, Molluscum contagiosum virus
gaccugcuggu

SEQ ID NO: 4034485 - RNA, 13 nt, Molluscum contagiosum virus
gaccugcuggugg

SEQ ID NO: 4034486 - RNA, 19 nt, Molluscum contagiosum virus
gaccuuggugcucauccuc

SEQ ID NO: 4034487 - RNA, 17 nt, Molluscum contagiosum virus
gacgaagcgcucgcucg

SEQ ID NO: 4034488 - RNA, 18 nt, Molluscum contagiosum virus
gacgaaggcaagcucccg

SEQ ID NO: 4034489 - RNA, 22 nt, Molluscum contagiosum virus
gacgacaauacggugcagccgc

SEQ ID NO: 4034490 - RNA, 16 nt, Molluscum contagiosum virus
gacgacaugcacacgc

SEQ ID NO: 4034491 - RNA, 20 nt, Molluscum contagiosum virus
gacgacggcugcucgcugcc

SEQ ID NO: 4034492 - RNA, 16 nt, Molluscum contagiosum virus
gacgagacgugggcaa

SEQ ID NO: 4034493 - RNA, 17 nt, Molluscum contagiosum virus
gacgagccccgcgccgg

SEQ ID NO: 4034494 - RNA, 16 nt, Molluscum contagiosum virus
gacgagcgcgugcccg

SEQ ID NO: 4034495 - RNA, 20 nt, Molluscum contagiosum virus
gacgagcugugcgagccagu

SEQ ID NO: 4034496 - RNA, 14 nt, Molluscum contagiosum virus
gacgaggagcuguc

SEQ ID NO: 4034497 - RNA, 19 nt, Molluscum contagiosum virus
gacgaugguggcgcugcug

SEQ ID NO: 4034498 - RNA, 24 nt, Molluscum contagiosum virus
gacgcacagucuccacgcgugcgc

SEQ ID NO: 4034499 - RNA, 23 nt, Molluscum contagiosum virus
gacgccccaaaagugaagaucaa

SEQ ID NO: 4034500 - RNA, 19 nt, Molluscum contagiosum virus
gacgccgccaaugcugccg

SEQ ID NO: 4034501 - RNA, 22 nt, Molluscum contagiosum virus
gacgccucgggaaaacgcgcgg

SEQ ID NO: 4034502 - RNA, 15 nt, Molluscum contagiosum virus
gacgcgagacugugc

SEQ ID NO: 4034503 - RNA, 16 nt, Molluscum contagiosum virus
gacgcgaucuuccgcg

SEQ ID NO: 4034504 - RNA, 16 nt, Molluscum contagiosum virus
gacgcgcaagugugcg

SEQ ID NO: 4034505 - RNA, 15 nt, Molluscum contagiosum virus
gacgcgcagcucgac

SEQ ID NO: 4034506 - RNA, 17 nt, Molluscum contagiosum virus
gacgcgccucgagcagg

SEQ ID NO: 4034507 - RNA, 16 nt, Molluscum contagiosum virus
gacgcgcggcagacgc

SEQ ID NO: 4034508 - RNA, 16 nt, Molluscum contagiosum virus
gacgcgcuugcgcgga

SEQ ID NO: 4034509 - RNA, 22 nt, Molluscum contagiosum virus
gacgcgggccuguccgcgggcg

SEQ ID NO: 4034510 - RNA, 19 nt, Molluscum contagiosum virus
gacgcgugcaagcccagca

SEQ ID NO: 4034511 - RNA, 15 nt, Molluscum contagiosum virus
gacgcuagcugugcg

SEQ ID NO: 4034512 - RNA, 16 nt, Molluscum contagiosum virus
gacgcuagcugugcgc

SEQ ID NO: 4034513 - RNA, 16 nt, Molluscum contagiosum virus
gacgcucaacgugggc

SEQ ID NO: 4034514 - RNA, 14 nt, Molluscum contagiosum virus
gacgcucacggccu

SEQ ID NO: 4034515 - RNA, 20 nt, Molluscum contagiosum virus
gacgcugcaagacggaagac

SEQ ID NO: 4034516 - RNA, 16 nt, Molluscum contagiosum virus
gacgcugcggcggcgc

SEQ ID NO: 4034517 - RNA, 15 nt, Molluscum contagiosum virus
gacgcuggugaucac

SEQ ID NO: 4034518 - RNA, 23 nt, Molluscum contagiosum virus
gacgcuggugaucacgcacgaag

SEQ ID NO: 4034519 - RNA, 13 nt, Molluscum contagiosum virus
gacggacccgcga

SEQ ID NO: 4034520 - RNA, 19 nt, Molluscum contagiosum virus
gacggagagcgcgcggcgc

SEQ ID NO: 4034521 - RNA, 21 nt, Molluscum contagiosum virus
gacggaggucuacaacgagcu

SEQ ID NO: 4034522 - RNA, 22 nt, Molluscum contagiosum virus
gacggcaccguaccgcgcccgc

SEQ ID NO: 4034523 - RNA, 12 nt, Molluscum contagiosum virus
gacggcgagcgc

SEQ ID NO: 4034524 - RNA, 15 nt, Molluscum contagiosum virus
gacggcgugcgccgc

SEQ ID NO: 4034525 - RNA, 20 nt, Molluscum contagiosum virus
gacggcugcucgcugccugg

SEQ ID NO: 4034526 - RNA, 19 nt, Molluscum contagiosum virus
gacggcugguguuaccggg

SEQ ID NO: 4034527 - RNA, 21 nt, Molluscum contagiosum virus
gacggcugguguuaccggguc

SEQ ID NO: 4034528 - RNA, 23 nt, Molluscum contagiosum virus
gacgggcucaucccgggacacga

SEQ ID NO: 4034529 - RNA, 21 nt, Molluscum contagiosum virus
gacggggagcauguccgacuc

SEQ ID NO: 4034530 - RNA, 18 nt, Molluscum contagiosum virus
gacggugcugcgcacgga

SEQ ID NO: 4034531 - RNA, 16 nt, Molluscum contagiosum virus
gacggugugccgcugg

SEQ ID NO: 4034532 - RNA, 22 nt, Molluscum contagiosum virus
gacguacgagcaggcgcagcgc

SEQ ID NO: 4034533 - RNA, 15 nt, Molluscum contagiosum virus
gacgucaaccgggcu

SEQ ID NO: 4034534 - RNA, 19 nt, Molluscum contagiosum virus
gacgugcugcugcagaacu

SEQ ID NO: 4034535 - RNA, 18 nt, Molluscum contagiosum virus
gacgugcugcuggcccug

SEQ ID NO: 4034536 - RNA, 19 nt, Molluscum contagiosum virus
gacguggaccuuggcgcgc

SEQ ID NO: 4034537 - RNA, 22 nt, Molluscum contagiosum virus
gacguggaccuuggcgcgccgc

SEQ ID NO: 4034538 - RNA, 17 nt, Molluscum contagiosum virus
gacguggucgcgcgcgc

SEQ ID NO: 4034539 - RNA, 21 nt, Molluscum contagiosum virus
gacguguguccgagaucacgg

SEQ ID NO: 4034540 - RNA, 21 nt, Molluscum contagiosum virus
gacuacaccuggcgagcgcuc

SEQ ID NO: 4034541 - RNA, 13 nt, Molluscum contagiosum virus
gacuacgcacggc

SEQ ID NO: 4034542 - RNA, 17 nt, Molluscum contagiosum virus
gacuacuacguggugcg

SEQ ID NO: 4034543 - RNA, 24 nt, Molluscum contagiosum virus
gacuaucaggcgauaggacaugac

SEQ ID NO: 4034544 - RNA, 22 nt, Molluscum contagiosum virus
gacuaugcgucuuccugcugcc

SEQ ID NO: 4034545 - RNA, 21 nt, Molluscum contagiosum virus
gacucagcauguugcucuacc

SEQ ID NO: 4034546 - RNA, 14 nt, Molluscum contagiosum virus
gacuccaaggaggu

SEQ ID NO: 4034547 - RNA, 22 nt, Molluscum contagiosum virus
gacuccuuccggagacaccagc

SEQ ID NO: 4034548 - RNA, 20 nt, Molluscum contagiosum virus
gacuccuuugcgagcacugu

SEQ ID NO: 4034549 - RNA, 17 nt, Molluscum contagiosum virus
gacucgcgcccgcuccc

SEQ ID NO: 4034550 - RNA, 14 nt, Molluscum contagiosum virus
gacucgucgagcac

SEQ ID NO: 4034551 - RNA, 22 nt, Molluscum contagiosum virus
gacucucguucuuccggcagcg

SEQ ID NO: 4034552 - RNA, 19 nt, Molluscum contagiosum virus
gacugcccgcgcccugcac

SEQ ID NO: 4034553 - RNA, 22 nt, Molluscum contagiosum virus
gacugcggacgggaagcuuuca

SEQ ID NO: 4034554 - RNA, 19 nt, Molluscum contagiosum virus
gacugcuacgucgcggcgc

SEQ ID NO: 4034555 - RNA, 15 nt, Molluscum contagiosum virus
gacugcugcccccgc

SEQ ID NO: 4034556 - RNA, 19 nt, Molluscum contagiosum virus
gacugcugcccccgccgcg

SEQ ID NO: 4034557 - RNA, 14 nt, Molluscum contagiosum virus
cgcgcucuucccgu

SEQ ID NO: 4034558 - RNA, 14 nt, Molluscum contagiosum virus
cgcgcugcgcacgu

SEQ ID NO: 4034559 - RNA, 13 nt, Molluscum contagiosum virus
cgcgcugcgccac

SEQ ID NO: 4034560 - RNA, 18 nt, Molluscum contagiosum virus
cgcgcugcgcgccgcgcc

SEQ ID NO: 4034561 - RNA, 19 nt, Molluscum contagiosum virus
cgcgcuggacuugcgcgag

SEQ ID NO: 4034562 - RNA, 24 nt, Molluscum contagiosum virus
cgcgcuuagcacacgcgcgcgcag

SEQ ID NO: 4034563 - RNA, 18 nt, Molluscum contagiosum virus
cgcgcuuccgcgagucug

SEQ ID NO: 4034564 - RNA, 16 nt, Molluscum contagiosum virus
cgcgcuuugcgcggcg

SEQ ID NO: 4034565 - RNA, 16 nt, Molluscum contagiosum virus
cgcggaagaagcugcg

SEQ ID NO: 4034566 - RNA, 17 nt, Molluscum contagiosum virus
cgcggaagaucgcgucg

SEQ ID NO: 4034567 - RNA, 22 nt, Molluscum contagiosum virus
cgcggaagcccgagcgcgucca

SEQ ID NO: 4034568 - RNA, 23 nt, Molluscum contagiosum virus
cgcggacacguuccagagcacug

SEQ ID NO: 4034569 - RNA, 13 nt, Molluscum contagiosum virus
cgcggaccgcgcc

SEQ ID NO: 4034570 - RNA, 14 nt, Molluscum contagiosum virus
cgcggagaagugcg

SEQ ID NO: 4034571 - RNA, 20 nt, Molluscum contagiosum virus
cgcggagaagugcgcagcuu

SEQ ID NO: 4034572 - RNA, 15 nt, Molluscum contagiosum virus
cgcggagcugcgcgc

SEQ ID NO: 4034573 - RNA, 14 nt, Molluscum contagiosum virus
cgcggagcugugcc

SEQ ID NO: 4034574 - RNA, 13 nt, Molluscum contagiosum virus
cgcggagggcagc

SEQ ID NO: 4034575 - RNA, 22 nt, Molluscum contagiosum virus
cgcggauguccuugaugccgug

SEQ ID NO: 4034576 - RNA, 21 nt, Molluscum contagiosum virus
cgcggcaaaugcgucccagca

SEQ ID NO: 4034577 - RNA, 23 nt, Molluscum contagiosum virus
cgcggcaaaugcgucccagcagc

SEQ ID NO: 4034578 - RNA, 18 nt, Molluscum contagiosum virus
cgcggcaagccuggcucc

SEQ ID NO: 4034579 - RNA, 18 nt, Molluscum contagiosum virus
cgcggcacaugcagcugc

SEQ ID NO: 4034580 - RNA, 19 nt, Molluscum contagiosum virus
cgcggcacaugcagcugca

SEQ ID NO: 4034581 - RNA, 16 nt, Molluscum contagiosum virus
cgcggcaccugucgcg

SEQ ID NO: 4034582 - RNA, 15 nt, Molluscum contagiosum virus
cgcggcacugggugc

SEQ ID NO: 4034583 - RNA, 20 nt, Molluscum contagiosum virus
cgcggcacugggugcccgag

SEQ ID NO: 4034584 - RNA, 15 nt, Molluscum contagiosum virus
cgcggcagacgccag

SEQ ID NO: 4034585 - RNA, 13 nt, Molluscum contagiosum virus
cgcggcagcagcc

SEQ ID NO: 4034586 - RNA, 13 nt, Molluscum contagiosum virus
cgcggcaguggcc

SEQ ID NO: 4034587 - RNA, 21 nt, Molluscum contagiosum virus
cgcggccaugcuccugaucug

SEQ ID NO: 4034588 - RNA, 22 nt, Molluscum contagiosum virus
cgcggccgagucacgccccagc

SEQ ID NO: 4034589 - RNA, 13 nt, Molluscum contagiosum virus
cgcggccgcgaga

SEQ ID NO: 4034590 - RNA, 13 nt, Molluscum contagiosum virus
cgcggcgagccgc

SEQ ID NO: 4034591 - RNA, 22 nt, Molluscum contagiosum virus
cgcggcgagugcggccaccagc

SEQ ID NO: 4034592 - RNA, 12 nt, Molluscum contagiosum virus
cgcggcgcagug

SEQ ID NO: 4034593 - RNA, 21 nt, Molluscum contagiosum virus
cgcggcgcgcagcucgccgcg

SEQ ID NO: 4034594 - RNA, 14 nt, Molluscum contagiosum virus
cgcggcgcgcccag

SEQ ID NO: 4034595 - RNA, 15 nt, Molluscum contagiosum virus
cgcggcgcgcccagc

SEQ ID NO: 4034596 - RNA, 14 nt, Molluscum contagiosum virus
cgcggcgcgccgcc

SEQ ID NO: 4034597 - RNA, 23 nt, Molluscum contagiosum virus
cgcggcggagaugacgggcacgc

SEQ ID NO: 4034598 - RNA, 19 nt, Molluscum contagiosum virus
cgcggcuaccacgggcccg

SEQ ID NO: 4034599 - RNA, 22 nt, Molluscum contagiosum virus
cgcgggccuguccgcgggcgca

SEQ ID NO: 4034600 - RNA, 13 nt, Molluscum contagiosum virus
cgcgggcgcagag

SEQ ID NO: 4034601 - RNA, 18 nt, Molluscum contagiosum virus
cgcgggcgccggcguccg

SEQ ID NO: 4034602 - RNA, 13 nt, Molluscum contagiosum virus
cgcggggcaagcg

SEQ ID NO: 4034603 - RNA, 17 nt, Molluscum contagiosum virus
cgcggucgcccgccgag

SEQ ID NO: 4034604 - RNA, 18 nt, Molluscum contagiosum virus
cgcggucgcccgccgagc

SEQ ID NO: 4034605 - RNA, 13 nt, Molluscum contagiosum virus
cgcggucgcggag

SEQ ID NO: 4034606 - RNA, 21 nt, Molluscum contagiosum virus
cgcggucgggccccugcgcga

SEQ ID NO: 4034607 - RNA, 17 nt, Molluscum contagiosum virus
cgcggugugcacaugcc

SEQ ID NO: 4034608 - RNA, 18 nt, Molluscum contagiosum virus
cgcguacauccgcgagca

SEQ ID NO: 4034609 - RNA, 18 nt, Molluscum contagiosum virus
cgcguaccuacucgccgu

SEQ ID NO: 4034610 - RNA, 13 nt, Molluscum contagiosum virus
cgcguacgaagag

SEQ ID NO: 4034611 - RNA, 14 nt, Molluscum contagiosum virus
cgcguagcagcgcc

SEQ ID NO: 4034612 - RNA, 13 nt, Molluscum contagiosum virus
cgcguccaugcug

SEQ ID NO: 4034613 - RNA, 13 nt, Molluscum contagiosum virus
cgcguccgcgcag

SEQ ID NO: 4034614 - RNA, 12 nt, Molluscum contagiosum virus
cgcgucgcgcag

SEQ ID NO: 4034615 - RNA, 16 nt, Molluscum contagiosum virus
cgcgucgcgcgccgcg

SEQ ID NO: 4034616 - RNA, 14 nt, Molluscum contagiosum virus
cgcgucgcggaggg

SEQ ID NO: 4034617 - RNA, 18 nt, Molluscum contagiosum virus
cgcgucggucaccaccac

SEQ ID NO: 4034618 - RNA, 16 nt, Molluscum contagiosum virus
cgcgugacacaccgcg

SEQ ID NO: 4034619 - RNA, 15 nt, Molluscum contagiosum virus
cgcgugagagccauu

SEQ ID NO: 4034620 - RNA, 23 nt, Molluscum contagiosum virus
cgcgugaggaggcggcacugcua

SEQ ID NO: 4034621 - RNA, 19 nt, Molluscum contagiosum virus
cgcgugcaagcccagcagc

SEQ ID NO: 4034622 - RNA, 14 nt, Molluscum contagiosum virus
cgcgugcaggaacg

SEQ ID NO: 4034623 - RNA, 19 nt, Molluscum contagiosum virus
cgcgugcaugcgagcgcgg

SEQ ID NO: 4034624 - RNA, 19 nt, Molluscum contagiosum virus
cgcgugccagucgcgcgag

SEQ ID NO: 4034625 - RNA, 14 nt, Molluscum contagiosum virus
cgcgugccgcggac

SEQ ID NO: 4034626 - RNA, 20 nt, Molluscum contagiosum virus
cgcgugccgggcuugcuccc

SEQ ID NO: 4034627 - RNA, 14 nt, Molluscum contagiosum virus
cgcgugccuguggc

SEQ ID NO: 4034628 - RNA, 22 nt, Molluscum contagiosum virus
cgcgugccuguggcgcacacgc

SEQ ID NO: 4034629 - RNA, 17 nt, Molluscum contagiosum virus
cgcgugcgagcggcgcg

SEQ ID NO: 4034630 - RNA, 21 nt, Molluscum contagiosum virus
cgcgugcgagcggcgcgcgcu

SEQ ID NO: 4034631 - RNA, 20 nt, Molluscum contagiosum virus
cgcgugcgccgccgcaggcc

SEQ ID NO: 4034632 - RNA, 14 nt, Molluscum contagiosum virus
cgcgugcgcgccag

SEQ ID NO: 4034633 - RNA, 14 nt, Molluscum contagiosum virus
cgcgugcugcggcu

SEQ ID NO: 4034634 - RNA, 14 nt, Molluscum contagiosum virus
cgcgugcugggccc

SEQ ID NO: 4034635 - RNA, 19 nt, Molluscum contagiosum virus
cgcguguuugugcuguccc

SEQ ID NO: 4034636 - RNA, 17 nt, Molluscum contagiosum virus
cgcguucgcguacggcg

SEQ ID NO: 4034637 - RNA, 20 nt, Molluscum contagiosum virus
cgcuaaucugccgcggcgga

SEQ ID NO: 4034638 - RNA, 13 nt, Molluscum contagiosum virus
cgcuacagcagcc

SEQ ID NO: 4034639 - RNA, 22 nt, Molluscum contagiosum virus
cgcuacccguugcugcgccacg

SEQ ID NO: 4034640 - RNA, 22 nt, Molluscum contagiosum virus
cgcuacgacgacaugcacacgc

SEQ ID NO: 4034641 - RNA, 23 nt, Molluscum contagiosum virus
cgcuacuugcuggcgcgcggaga

SEQ ID NO: 4034642 - RNA, 21 nt, Molluscum contagiosum virus
cgcuagcagggcggcgccugc

SEQ ID NO: 4034643 - RNA, 22 nt, Molluscum contagiosum virus
cgcuaggggugccgcugcgcug

SEQ ID NO: 4034644 - RNA, 16 nt, Molluscum contagiosum virus
cgcuaugccgcgugcu

SEQ ID NO: 4034645 - RNA, 23 nt, Molluscum contagiosum virus
cgcucacagcuucgcgagcccgg

SEQ ID NO: 4034646 - RNA, 19 nt, Molluscum contagiosum virus
cgcucauacuccugcuggc

SEQ ID NO: 4034647 - RNA, 18 nt, Molluscum contagiosum virus
cgcucauccacgcggagg

SEQ ID NO: 4034648 - RNA, 15 nt, Molluscum contagiosum virus
cgcuccacgcccgag

SEQ ID NO: 4034649 - RNA, 16 nt, Molluscum contagiosum virus
cgcuccagagccgcgu

SEQ ID NO: 4034650 - RNA, 20 nt, Molluscum contagiosum virus
cgcuccgagucguacacgca

SEQ ID NO: 4034651 - RNA, 22 nt, Molluscum contagiosum virus
cgcucgaggaccucgcgcgccg

SEQ ID NO: 4034652 - RNA, 14 nt, Molluscum contagiosum virus
cgcucgagggcgcc

SEQ ID NO: 4034653 - RNA, 14 nt, Molluscum contagiosum virus
cgcucgccccuucc

SEQ ID NO: 4034654 - RNA, 14 nt, Molluscum contagiosum virus
cgcucgccucuggg

SEQ ID NO: 4034655 - RNA, 16 nt, Molluscum contagiosum virus
cgcucgccucugggcg

SEQ ID NO: 4034656 - RNA, 22 nt, Molluscum contagiosum virus
cgcucgcgcgcaugcucgcgcu

SEQ ID NO: 4034657 - RNA, 12 nt, Molluscum contagiosum virus
cgcucgcgcucc

SEQ ID NO: 4034658 - RNA, 14 nt, Molluscum contagiosum virus
cgcucgcgugccgc

SEQ ID NO: 4034659 - RNA, 21 nt, Molluscum contagiosum virus
cgcucgcgugccgcggacgcc

SEQ ID NO: 4034660 - RNA, 12 nt, Molluscum contagiosum virus
cgcucgcugucc

SEQ ID NO: 4034661 - RNA, 22 nt, Molluscum contagiosum virus
cgguugccugcacaagcaggag

SEQ ID NO: 4034662 - RNA, 17 nt, Molluscum contagiosum virus
cgguuugcuaacaggaa

SEQ ID NO: 4034663 - RNA, 18 nt, Molluscum contagiosum virus
cguaacaauggacacgca

SEQ ID NO: 4034664 - RNA, 14 nt, Molluscum contagiosum virus
cguaagccaccgcg

SEQ ID NO: 4034665 - RNA, 21 nt, Molluscum contagiosum virus
cguaauccaugucgagcccug

SEQ ID NO: 4034666 - RNA, 17 nt, Molluscum contagiosum virus
cguacagcuccccgcgc

SEQ ID NO: 4034667 - RNA, 13 nt, Molluscum contagiosum virus
cguacccuggcag

SEQ ID NO: 4034668 - RNA, 18 nt, Molluscum contagiosum virus
cguacgcacgugccgugc

SEQ ID NO: 4034669 - RNA, 20 nt, Molluscum contagiosum virus
cguacgcgccggggcgcgcg

SEQ ID NO: 4034670 - RNA, 12 nt, Molluscum contagiosum virus
cguacgcggagg

SEQ ID NO: 4034671 - RNA, 17 nt, Molluscum contagiosum virus
cguacgcgucgcggagg

SEQ ID NO: 4034672 - RNA, 23 nt, Molluscum contagiosum virus
cguacucgcugcuccccgccagc

SEQ ID NO: 4034673 - RNA, 12 nt, Molluscum contagiosum virus
cguacugcugca

SEQ ID NO: 4034674 - RNA, 21 nt, Molluscum contagiosum virus
cguagacagugcggcgcggcu

SEQ ID NO: 4034675 - RNA, 19 nt, Molluscum contagiosum virus
cguagacgauuuugccgca

SEQ ID NO: 4034676 - RNA, 13 nt, Molluscum contagiosum virus
cguagagcagcgc

SEQ ID NO: 4034677 - RNA, 14 nt, Molluscum contagiosum virus
cguagagcagcgcu

SEQ ID NO: 4034678 - RNA, 17 nt, Molluscum contagiosum virus
cguaguacugcagcagc

SEQ ID NO: 4034679 - RNA, 19 nt, Molluscum contagiosum virus
cguauccucgacgcgcugc

SEQ ID NO: 4034680 - RNA, 15 nt, Molluscum contagiosum virus
cgucaagcagcgcgc

SEQ ID NO: 4034681 - RNA, 17 nt, Molluscum contagiosum virus
cgucaagcagcgcgcca

SEQ ID NO: 4034682 - RNA, 19 nt, Molluscum contagiosum virus
cgucaugcgacugccagcc

SEQ ID NO: 4034683 - RNA, 20 nt, Molluscum contagiosum virus
cguccacaaagcccuccuga

SEQ ID NO: 4034684 - RNA, 15 nt, Molluscum contagiosum virus
cguccacaggcgcga

SEQ ID NO: 4034685 - RNA, 20 nt, Molluscum contagiosum virus
cguccaugugcccgcggcgc

SEQ ID NO: 4034686 - RNA, 15 nt, Molluscum contagiosum virus
cguccccggaaagca

SEQ ID NO: 4034687 - RNA, 14 nt, Molluscum contagiosum virus
cguccccucuccgg

SEQ ID NO: 4034688 - RNA, 14 nt, Molluscum contagiosum virus
cgucccgacagcag

SEQ ID NO: 4034689 - RNA, 15 nt, Molluscum contagiosum virus
cguccgcgcagcucg

SEQ ID NO: 4034690 - RNA, 20 nt, Molluscum contagiosum virus
cguccgcucgugccacugcc

SEQ ID NO: 4034691 - RNA, 19 nt, Molluscum contagiosum virus
cguccgugcgcagggcaau

SEQ ID NO: 4034692 - RNA, 16 nt, Molluscum contagiosum virus
cgucgcacaguucacg

SEQ ID NO: 4034693 - RNA, 15 nt, Molluscum contagiosum virus
cgucgccgcgcccgc

SEQ ID NO: 4034694 - RNA, 13 nt, Molluscum contagiosum virus
cgucgccugagcu

SEQ ID NO: 4034695 - RNA, 14 nt, Molluscum contagiosum virus
cgucgcgccgcucg

SEQ ID NO: 4034696 - RNA, 19 nt, Molluscum contagiosum virus
cgucgcggagggcgaggcc

SEQ ID NO: 4034697 - RNA, 17 nt, Molluscum contagiosum virus
cgucgcggucgcggagc

SEQ ID NO: 4034698 - RNA, 20 nt, Molluscum contagiosum virus
cgucgggcgccaacacgagc

SEQ ID NO: 4034699 - RNA, 15 nt, Molluscum contagiosum virus
cgucuccaacaagcu

SEQ ID NO: 4034700 - RNA, 11 nt, Molluscum contagiosum virus
cgucucgagcu

SEQ ID NO: 4034701 - RNA, 14 nt, Molluscum contagiosum virus
cgucucgcucuucc

SEQ ID NO: 4034702 - RNA, 13 nt, Molluscum contagiosum virus
cgucucggagaag

SEQ ID NO: 4034703 - RNA, 13 nt, Molluscum contagiosum virus
cgucugcugcucg

SEQ ID NO: 4034704 - RNA, 14 nt, Molluscum contagiosum virus
cgucuuaacucagc

SEQ ID NO: 4034705 - RNA, 14 nt, Molluscum contagiosum virus
cgucuuacugcugc

SEQ ID NO: 4034706 - RNA, 15 nt, Molluscum contagiosum virus
cgucuuacugcugca

SEQ ID NO: 4034707 - RNA, 20 nt, Molluscum contagiosum virus
cgucuugacaggcgcgcaag

SEQ ID NO: 4034708 - RNA, 21 nt, Molluscum contagiosum virus
cgucuugacaggcgcgcaagu

SEQ ID NO: 4034709 - RNA, 20 nt, Molluscum contagiosum virus
cgucuuucccagaagggcuu

SEQ ID NO: 4034710 - RNA, 21 nt, Molluscum contagiosum virus
cgucuuuuugcggcgccgccg

SEQ ID NO: 4034711 - RNA, 18 nt, Molluscum contagiosum virus
cgugaacgaggcugcugc

SEQ ID NO: 4034712 - RNA, 17 nt, Molluscum contagiosum virus
cgugaacuccaaggucg

SEQ ID NO: 4034713 - RNA, 15 nt, Molluscum contagiosum virus
cgugacaaucucugc

SEQ ID NO: 4034714 - RNA, 20 nt, Molluscum contagiosum virus
cgugacagagugccuggcgc

SEQ ID NO: 4034715 - RNA, 13 nt, Molluscum contagiosum virus
cgugacagucagc

SEQ ID NO: 4034716 - RNA, 19 nt, Molluscum contagiosum virus
cgugacucggccgcggggc

SEQ ID NO: 4034717 - RNA, 14 nt, Molluscum contagiosum virus
cgugagcgcgcucu

SEQ ID NO: 4034718 - RNA, 20 nt, Molluscum contagiosum virus
cgugaggaggcggcacugcu

SEQ ID NO: 4034719 - RNA, 13 nt, Molluscum contagiosum virus
cgugcaagcccag

SEQ ID NO: 4034720 - RNA, 19 nt, Molluscum contagiosum virus
cgugcacccuccgcacaga

SEQ ID NO: 4034721 - RNA, 17 nt, Molluscum contagiosum virus
cgugcacuagcacgggc

SEQ ID NO: 4034722 - RNA, 14 nt, Molluscum contagiosum virus
cgugcagggcgugc

SEQ ID NO: 4034723 - RNA, 16 nt, Molluscum contagiosum virus
cgugcauggcacgcga

SEQ ID NO: 4034724 - RNA, 21 nt, Molluscum contagiosum virus
cgugcccgguacgcucgcgcu

SEQ ID NO: 4034725 - RNA, 15 nt, Molluscum contagiosum virus
cgugcccuggaccuc

SEQ ID NO: 4034726 - RNA, 13 nt, Molluscum contagiosum virus
cgugccgccggcg

SEQ ID NO: 4034727 - RNA, 17 nt, Molluscum contagiosum virus
cgugccgccggcgccgc

SEQ ID NO: 4034728 - RNA, 17 nt, Molluscum contagiosum virus
cgugccuggcagugccg

SEQ ID NO: 4034729 - RNA, 14 nt, Molluscum contagiosum virus
cgugcgcagcacgg

SEQ ID NO: 4034730 - RNA, 16 nt, Molluscum contagiosum virus
cgugcgcagcagcucg

SEQ ID NO: 4034731 - RNA, 20 nt, Molluscum contagiosum virus
cgugcgcagcagcucggggc

SEQ ID NO: 4034732 - RNA, 18 nt, Molluscum contagiosum virus
cgugcgcagugcugcgcg

SEQ ID NO: 4034733 - RNA, 23 nt, Molluscum contagiosum virus
cgugcgcaucccugcgcaccugc

SEQ ID NO: 4034734 - RNA, 13 nt, Molluscum contagiosum virus
cgugcgccgccgc

SEQ ID NO: 4034735 - RNA, 16 nt, Molluscum contagiosum virus
cgugcgcgagacuugu

SEQ ID NO: 4034736 - RNA, 12 nt, Molluscum contagiosum virus
cgugcgcgagcu

SEQ ID NO: 4034737 - RNA, 14 nt, Molluscum contagiosum virus
cgugcgcugcgcgc

SEQ ID NO: 4034738 - RNA, 14 nt, Molluscum contagiosum virus
cgugcgcuuugagg

SEQ ID NO: 4034739 - RNA, 17 nt, Molluscum contagiosum virus
cgugcggcggcgcgugc

SEQ ID NO: 4034740 - RNA, 13 nt, Molluscum contagiosum virus
cgugcucacgcug

SEQ ID NO: 4034741 - RNA, 17 nt, Molluscum contagiosum virus
cgugcucacgcugcccg

SEQ ID NO: 4034742 - RNA, 19 nt, Molluscum contagiosum virus
cgugcucaggccagcaucu

SEQ ID NO: 4034743 - RNA, 22 nt, Molluscum contagiosum virus
cgugcuccucgcguagcagcgc

SEQ ID NO: 4034744 - RNA, 14 nt, Molluscum contagiosum virus
cgugcucgcgagcg

SEQ ID NO: 4034745 - RNA, 21 nt, Molluscum contagiosum virus
cgugcucgcgagcguuucugc

SEQ ID NO: 4034746 - RNA, 20 nt, Molluscum contagiosum virus
cgugcucgguagcguggagc

SEQ ID NO: 4034747 - RNA, 19 nt, Molluscum contagiosum virus
cgugcucugcuccgcggag

SEQ ID NO: 4034748 - RNA, 20 nt, Molluscum contagiosum virus
cgugcucugcuccgcggagg

SEQ ID NO: 4034749 - RNA, 14 nt, Molluscum contagiosum virus
cgugcugaucacgc

SEQ ID NO: 4034750 - RNA, 17 nt, Molluscum contagiosum virus
cgugcugcagcugcgcg

SEQ ID NO: 4034751 - RNA, 14 nt, Molluscum contagiosum virus
cgugcugcggcugc

SEQ ID NO: 4034752 - RNA, 12 nt, Molluscum contagiosum virus
cgugcugcugcg

SEQ ID NO: 4034753 - RNA, 19 nt, Molluscum contagiosum virus
cgugcuggagggcacgcug

SEQ ID NO: 4034754 - RNA, 13 nt, Molluscum contagiosum virus
cguggacaacagc

SEQ ID NO: 4034755 - RNA, 17 nt, Molluscum contagiosum virus
cguggacaacagcacga

SEQ ID NO: 4034756 - RNA, 19 nt, Molluscum contagiosum virus
cguggaccuuggcgcgccg

SEQ ID NO: 4034757 - RNA, 19 nt, Molluscum contagiosum virus
cguggacgagcgcuaccug

SEQ ID NO: 4034758 - RNA, 14 nt, Molluscum contagiosum virus
cguggaggagccgc

SEQ ID NO: 4034759 - RNA, 19 nt, Molluscum contagiosum virus
cguggauaccaugcucucg

SEQ ID NO: 4034760 - RNA, 14 nt, Molluscum contagiosum virus
cguggccagcuuca

SEQ ID NO: 4034761 - RNA, 14 nt, Molluscum contagiosum virus
cguggccaggccgc

SEQ ID NO: 4034762 - RNA, 18 nt, Molluscum contagiosum virus
cguggccaggccgcgccg

SEQ ID NO: 4034763 - RNA, 17 nt, Molluscum contagiosum virus
cguggccguagugcuca

SEQ ID NO: 4034764 - RNA, 16 nt, Molluscum contagiosum virus
cguggcgccgcugcug

SEQ ID NO: 4034765 - RNA, 14 nt, Molluscum contagiosum virus
cguggcgcgccggc

SEQ ID NO: 4034766 - RNA, 17 nt, Molluscum contagiosum virus
cgaggacgacgccgagc

SEQ ID NO: 4034767 - RNA, 17 nt, Molluscum contagiosum virus
cgaggacuuccgcgcgc

SEQ ID NO: 4034768 - RNA, 19 nt, Molluscum contagiosum virus
cgaggaggcgcccucgcgc

SEQ ID NO: 4034769 - RNA, 21 nt, Molluscum contagiosum virus
cgaggauacgcccgcgaaaga

SEQ ID NO: 4034770 - RNA, 20 nt, Molluscum contagiosum virus
cgaggcagccgcggcgcccg

SEQ ID NO: 4034771 - RNA, 21 nt, Molluscum contagiosum virus
cgaggccggccgugcagagca

SEQ ID NO: 4034772 - RNA, 14 nt, Molluscum contagiosum virus
cgaggccugcgugg

SEQ ID NO: 4034773 - RNA, 19 nt, Molluscum contagiosum virus
cgaggcgcuugggcacugc

SEQ ID NO: 4034774 - RNA, 20 nt, Molluscum contagiosum virus
cgaggcguccagcggcugcc

SEQ ID NO: 4034775 - RNA, 12 nt, Molluscum contagiosum virus
cgaggcugcugc

SEQ ID NO: 4034776 - RNA, 13 nt, Molluscum contagiosum virus
cgagggccuuggc

SEQ ID NO: 4034777 - RNA, 16 nt, Molluscum contagiosum virus
cgagggcgaguccccg

SEQ ID NO: 4034778 - RNA, 22 nt, Molluscum contagiosum virus
cgagggggacgugcccuacgcg

SEQ ID NO: 4034779 - RNA, 14 nt, Molluscum contagiosum virus
cgaguaccgcgcgc

SEQ ID NO: 4034780 - RNA, 20 nt, Molluscum contagiosum virus
cgaguacgccaucguggugg

SEQ ID NO: 4034781 - RNA, 16 nt, Molluscum contagiosum virus
cgaguacgcucuccau

SEQ ID NO: 4034782 - RNA, 17 nt, Molluscum contagiosum virus
cgagucaaugacacgag

SEQ ID NO: 4034783 - RNA, 20 nt, Molluscum contagiosum virus
cgagugcccgcgcgcuguau

SEQ ID NO: 4034784 - RNA, 18 nt, Molluscum contagiosum virus
ccuccacguccaggccgc

SEQ ID NO: 4034785 - RNA, 16 nt, Molluscum contagiosum virus
ccuccagcagcggcgc

SEQ ID NO: 4034786 - RNA, 15 nt, Molluscum contagiosum virus
ccuccccagcgccgc

SEQ ID NO: 4034787 - RNA, 18 nt, Molluscum contagiosum virus
ccuccgcacacgcgcgcg

SEQ ID NO: 4034788 - RNA, 18 nt, Molluscum contagiosum virus
ccuccgguacguacagug

SEQ ID NO: 4034789 - RNA, 18 nt, Molluscum contagiosum virus
ccuccugcaccugcugga

SEQ ID NO: 4034790 - RNA, 18 nt, Molluscum contagiosum virus
ccuccugcuuugcacgcg

SEQ ID NO: 4034791 - RNA, 20 nt, Molluscum contagiosum virus
ccucgacaaugagcacuugc

SEQ ID NO: 4034792 - RNA, 15 nt, Molluscum contagiosum virus
ccucgaccugcacga

SEQ ID NO: 4034793 - RNA, 23 nt, Molluscum contagiosum virus
ccucgacgcguucuagcagcgug

SEQ ID NO: 4034794 - RNA, 12 nt, Molluscum contagiosum virus
ccucgagcacgc

SEQ ID NO: 4034795 - RNA, 13 nt, Molluscum contagiosum virus
ccucgagcagcgg

SEQ ID NO: 4034796 - RNA, 23 nt, Molluscum contagiosum virus
ccucgagcaggucaucgggcugc

SEQ ID NO: 4034797 - RNA, 15 nt, Molluscum contagiosum virus
ccucgagcgccgccg

SEQ ID NO: 4034798 - RNA, 15 nt, Molluscum contagiosum virus
ccucgagcgcgcugg

SEQ ID NO: 4034799 - RNA, 23 nt, Molluscum contagiosum virus
ccucgcaggcgaggucacacucg

SEQ ID NO: 4034800 - RNA, 19 nt, Molluscum contagiosum virus
ccucgccgaacggcagacc

SEQ ID NO: 4034801 - RNA, 12 nt, Molluscum contagiosum virus
ccucgcgcacag

SEQ ID NO: 4034802 - RNA, 15 nt, Molluscum contagiosum virus
ccucgcgcgcacugc

SEQ ID NO: 4034803 - RNA, 19 nt, Molluscum contagiosum virus
ccucgcgcgcagcacaccg

SEQ ID NO: 4034804 - RNA, 18 nt, Molluscum contagiosum virus
ccucgcgcgcgcgcggcg

SEQ ID NO: 4034805 - RNA, 16 nt, Molluscum contagiosum virus
ccucgcguagcagcgc

SEQ ID NO: 4034806 - RNA, 20 nt, Molluscum contagiosum virus
ccucggaggaaaagcacgcg

SEQ ID NO: 4034807 - RNA, 13 nt, Molluscum contagiosum virus
ccucggcgcgccg

SEQ ID NO: 4034808 - RNA, 20 nt, Molluscum contagiosum virus
ccucgggaaaacgcgcggca

SEQ ID NO: 4034809 - RNA, 17 nt, Molluscum contagiosum virus
ccucgucguccacaggc

SEQ ID NO: 4034810 - RNA, 20 nt, Molluscum contagiosum virus
ccucguggucgccgcggccg

SEQ ID NO: 4034811 - RNA, 18 nt, Molluscum contagiosum virus
ccucgugguugcgcagca

SEQ ID NO: 4034812 - RNA, 20 nt, Molluscum contagiosum virus
ccucuccaucaucgagcugc

SEQ ID NO: 4034813 - RNA, 12 nt, Molluscum contagiosum virus
ccucugcgagcg

SEQ ID NO: 4034814 - RNA, 13 nt, Molluscum contagiosum virus
ccucugcgcggcc

SEQ ID NO: 4034815 - RNA, 23 nt, Molluscum contagiosum virus
ccucugcgcggcccgcgggcugc

SEQ ID NO: 4034816 - RNA, 15 nt, Molluscum contagiosum virus
ccucuuuugcgucgc

SEQ ID NO: 4034817 - RNA, 16 nt, Molluscum contagiosum virus
ccugaacaagcugcac

SEQ ID NO: 4034818 - RNA, 17 nt, Molluscum contagiosum virus
ccugcacuacugcucca

SEQ ID NO: 4034819 - RNA, 21 nt, Molluscum contagiosum virus
ccugcaucgcgccgcccgggc

SEQ ID NO: 4034820 - RNA, 22 nt, Molluscum contagiosum virus
ccugccgcgagcacuggcuggc

SEQ ID NO: 4034821 - RNA, 12 nt, Molluscum contagiosum virus
ccugccuguggg

SEQ ID NO: 4034822 - RNA, 23 nt, Molluscum contagiosum virus
ccugcgaaaaagcccgcggguac

SEQ ID NO: 4034823 - RNA, 14 nt, Molluscum contagiosum virus
ccugcgacagcugc

SEQ ID NO: 4034824 - RNA, 21 nt, Molluscum contagiosum virus
ccugcgcaacgugcugcgccg

SEQ ID NO: 4034825 - RNA, 22 nt, Molluscum contagiosum virus
ccugcgccgccucaugcgcgug

SEQ ID NO: 4034826 - RNA, 19 nt, Molluscum contagiosum virus
ccugcgcgagcaagcgccc

SEQ ID NO: 4034827 - RNA, 15 nt, Molluscum contagiosum virus
ccugcgcgagcaguu

SEQ ID NO: 4034828 - RNA, 21 nt, Molluscum contagiosum virus
ccugcgcgcggcaguggcgug

SEQ ID NO: 4034829 - RNA, 14 nt, Molluscum contagiosum virus
ccugcgcuagugaa

SEQ ID NO: 4034830 - RNA, 17 nt, Molluscum contagiosum virus
ccugcggcugcggcgcg

SEQ ID NO: 4034831 - RNA, 19 nt, Molluscum contagiosum virus
ccugcgggagauccuggcg

SEQ ID NO: 4034832 - RNA, 12 nt, Molluscum contagiosum virus
ccugcgggcgcu

SEQ ID NO: 4034833 - RNA, 16 nt, Molluscum contagiosum virus
ccugcuagugcgcgcc

SEQ ID NO: 4034834 - RNA, 14 nt, Molluscum contagiosum virus
ccugcucgggcugc

SEQ ID NO: 4034835 - RNA, 23 nt, Molluscum contagiosum virus
ccugcugaagaaggagcccuugc

SEQ ID NO: 4034836 - RNA, 14 nt, Molluscum contagiosum virus
ccugcugccgagcu

SEQ ID NO: 4034837 - RNA, 15 nt, Molluscum contagiosum virus
ccugcugccucccaa

SEQ ID NO: 4034838 - RNA, 15 nt, Molluscum contagiosum virus
ccugcuggcaccgcg

SEQ ID NO: 4034839 - RNA, 19 nt, Molluscum contagiosum virus
ccugcugguggugcuggag

SEQ ID NO: 4034840 - RNA, 14 nt, Molluscum contagiosum virus
ccuggagcgcaguc

SEQ ID NO: 4034841 - RNA, 21 nt, Molluscum contagiosum virus
ccuggcgagcgcucugcauug

SEQ ID NO: 4034842 - RNA, 18 nt, Molluscum contagiosum virus
ccuggcggcagcacgggc

SEQ ID NO: 4034843 - RNA, 14 nt, Molluscum contagiosum virus
ccuggcggcgcugg

SEQ ID NO: 4034844 - RNA, 18 nt, Molluscum contagiosum virus
ccuggcggcgcuggagac

SEQ ID NO: 4034845 - RNA, 21 nt, Molluscum contagiosum virus
ccuggcucgcgagugugcaug

SEQ ID NO: 4034846 - RNA, 13 nt, Molluscum contagiosum virus
ccugguggagcac

SEQ ID NO: 4034847 - RNA, 15 nt, Molluscum contagiosum virus
ccugguggagcacuu

SEQ ID NO: 4034848 - RNA, 18 nt, Molluscum contagiosum virus
ccuggugugccagcggcg

SEQ ID NO: 4034849 - RNA, 20 nt, Molluscum contagiosum virus
ccugucaucaccccgcuggg

SEQ ID NO: 4034850 - RNA, 19 nt, Molluscum contagiosum virus
ccugucgcgcacgagcgcg

SEQ ID NO: 4034851 - RNA, 15 nt, Molluscum contagiosum virus
ccugucggagcagga

SEQ ID NO: 4034852 - RNA, 18 nt, Molluscum contagiosum virus
ccugucggcacaucucuc

SEQ ID NO: 4034853 - RNA, 17 nt, Molluscum contagiosum virus
ccugugaacgcaccgcc

SEQ ID NO: 4034854 - RNA, 14 nt, Molluscum contagiosum virus
ccugugcccugucc

SEQ ID NO: 4034855 - RNA, 23 nt, Molluscum contagiosum virus
ccugugcgccaacaaccacucuu

SEQ ID NO: 4034856 - RNA, 16 nt, Molluscum contagiosum virus
ccuguguugcgcgcgc

SEQ ID NO: 4034857 - RNA, 21 nt, Molluscum contagiosum virus
ccuguuaaauggacgugcucc

SEQ ID NO: 4034858 - RNA, 20 nt, Molluscum contagiosum virus
ccuucaggacgcaggacgcg

SEQ ID NO: 4034859 - RNA, 21 nt, Molluscum contagiosum virus
ccuucgacguugacgagcgcg

SEQ ID NO: 4034860 - RNA, 14 nt, Molluscum contagiosum virus
ccuucgcgcgcgcg

SEQ ID NO: 4034861 - RNA, 21 nt, Molluscum contagiosum virus
ccuucgguuucuaugcccagc

SEQ ID NO: 4034862 - RNA, 16 nt, Molluscum contagiosum virus
ccuucugcaagcugcc

SEQ ID NO: 4034863 - RNA, 14 nt, Molluscum contagiosum virus
ccuucugccugccc

SEQ ID NO: 4034864 - RNA, 14 nt, Molluscum contagiosum virus
ccuucuugcuggcg

SEQ ID NO: 4034865 - RNA, 14 nt, Molluscum contagiosum virus
ccuugaagggcaca

SEQ ID NO: 4034866 - RNA, 14 nt, Molluscum contagiosum virus
ccuugagcgcgccg

SEQ ID NO: 4034867 - RNA, 18 nt, Molluscum contagiosum virus
ccuugauaaaagcacagu

SEQ ID NO: 4034868 - RNA, 15 nt, Molluscum contagiosum virus
ccuugcacucgcgcu

SEQ ID NO: 4034869 - RNA, 18 nt, Molluscum contagiosum virus
ccuugcuacaggacgucc

SEQ ID NO: 4034870 - RNA, 18 nt, Molluscum contagiosum virus
ccuugcucgcuugccgcu

SEQ ID NO: 4034871 - RNA, 14 nt, Molluscum contagiosum virus
ccuuggacacgugc

SEQ ID NO: 4034872 - RNA, 13 nt, Molluscum contagiosum virus
ccuuggcgcgccg

SEQ ID NO: 4034873 - RNA, 12 nt, Molluscum contagiosum virus
ccuuguccuggc

SEQ ID NO: 4034874 - RNA, 20 nt, Molluscum contagiosum virus
ccuuguucaccauccagccg

SEQ ID NO: 4034875 - RNA, 14 nt, Molluscum contagiosum virus
ccuuuacugcaaga

SEQ ID NO: 4034876 - RNA, 19 nt, Molluscum contagiosum virus
ccuuugcgcugucucuccg

SEQ ID NO: 4034877 - RNA, 23 nt, Molluscum contagiosum virus
ccuuugcggcgagcgcuaucucu

SEQ ID NO: 4034878 - RNA, 22 nt, Molluscum contagiosum virus
cgaaagaggaaagcgcacacuu

SEQ ID NO: 4034879 - RNA, 21 nt, Molluscum contagiosum virus
cgaaaggcacccgcaggaaag

SEQ ID NO: 4034880 - RNA, 16 nt, Molluscum contagiosum virus
cgaacaccgacaagga

SEQ ID NO: 4034881 - RNA, 23 nt, Molluscum contagiosum virus
cgaacgacgguaaacucuugcac

SEQ ID NO: 4034882 - RNA, 18 nt, Molluscum contagiosum virus
cgaacucgugcgccgcgc

SEQ ID NO: 4034883 - RNA, 20 nt, Molluscum contagiosum virus
cgaacucucaucgagcaccu

SEQ ID NO: 4034884 - RNA, 23 nt, Molluscum contagiosum virus
cgaagaccaccagcaccagcaca

SEQ ID NO: 4034885 - RNA, 19 nt, Molluscum contagiosum virus
cgaagacgcguaccagcgc

SEQ ID NO: 4034886 - RNA, 13 nt, Molluscum contagiosum virus
cgaagaggucucu

SEQ ID NO: 4034887 - RNA, 13 nt, Molluscum contagiosum virus
cgaagcaaaagcg

SEQ ID NO: 4034888 - RNA, 19 nt, Molluscum contagiosum virus
cagugcggccagcaccgcg

SEQ ID NO: 4034889 - RNA, 16 nt, Molluscum contagiosum virus
cagugcgugcacuguc

SEQ ID NO: 4034890 - RNA, 15 nt, Molluscum contagiosum virus
cagugcuugagcauc

SEQ ID NO: 4034891 - RNA, 20 nt, Molluscum contagiosum virus
cagugugccguucacgcaca

SEQ ID NO: 4034892 - RNA, 17 nt, Molluscum contagiosum virus
caguguuucgacgccgg

SEQ ID NO: 4034893 - RNA, 14 nt, Molluscum contagiosum virus
caguucgagcugcu

SEQ ID NO: 4034894 - RNA, 22 nt, Molluscum contagiosum virus
ccuaccggcagcaugcucacgu

SEQ ID NO: 4034895 - RNA, 17 nt, Molluscum contagiosum virus
ccuagcguuucgcgaag

SEQ ID NO: 4034896 - RNA, 21 nt, Molluscum contagiosum virus
ccuaguucgagaagacggggc

SEQ ID NO: 4034897 - RNA, 21 nt, Molluscum contagiosum virus
ccuaucccggagcgcggggca

SEQ ID NO: 4034898 - RNA, 21 nt, Molluscum contagiosum virus
ccucaagaagacgcagagcga

SEQ ID NO: 4034899 - RNA, 18 nt, Molluscum contagiosum virus
ccucaccucugcgcggcc

SEQ ID NO: 4034900 - RNA, 16 nt, Molluscum contagiosum virus
ccucacggcgagcgcg

SEQ ID NO: 4034901 - RNA, 20 nt, Molluscum contagiosum virus
ccucacggcgagcgcgcccu

SEQ ID NO: 4034902 - RNA, 12 nt, Molluscum contagiosum virus
ccucacgugcug

SEQ ID NO: 4034903 - RNA, 20 nt, Molluscum contagiosum virus
ccucacucacaugugcugcc

SEQ ID NO: 4034904 - RNA, 17 nt, Molluscum contagiosum virus
ccucagccgagcgccgc

SEQ ID NO: 4034905 - RNA, 23 nt, Molluscum contagiosum virus
ccucauuguucggaggcugcucc

SEQ ID NO: 4034906 - RNA, 14 nt, Molluscum contagiosum virus
ccuccaagaagagg

SEQ ID NO: 4034907 - RNA, 23 nt, Molluscum contagiosum virus
acaucgacaagcacgucuuugac

SEQ ID NO: 4034908 - RNA, 13 nt, Molluscum contagiosum virus
acaugcagcugca

SEQ ID NO: 4034909 - RNA, 14 nt, Molluscum contagiosum virus
acaugcagcugcag

SEQ ID NO: 4034910 - RNA, 19 nt, Molluscum contagiosum virus
acaugcagcugcaggaccu

SEQ ID NO: 4034911 - RNA, 12 nt, Molluscum contagiosum virus
acaugccgcgcu

SEQ ID NO: 4034912 - RNA, 23 nt, Molluscum contagiosum virus
acaugcuagcgggcaagcgcuuc

SEQ ID NO: 4034913 - RNA, 23 nt, Molluscum contagiosum virus
acaugcucgacgugaucgcgcag

SEQ ID NO: 4034914 - RNA, 20 nt, Molluscum contagiosum virus
acaugcuucgcgcaaacaag

SEQ ID NO: 4034915 - RNA, 15 nt, Molluscum contagiosum virus
acauggaccgcguca

SEQ ID NO: 4034916 - RNA, 18 nt, Molluscum contagiosum virus
acaugucguaccuggugg

SEQ ID NO: 4034917 - RNA, 19 nt, Molluscum contagiosum virus
accaagguggggcgcaucc

SEQ ID NO: 4034918 - RNA, 15 nt, Molluscum contagiosum virus
accaccaccagcacg

SEQ ID NO: 4034919 - RNA, 16 nt, Molluscum contagiosum virus
accaccagcaccagca

SEQ ID NO: 4034920 - RNA, 14 nt, Molluscum contagiosum virus
accaccgcuggggc

SEQ ID NO: 4034921 - RNA, 14 nt, Molluscum contagiosum virus
accacgagcacugc

SEQ ID NO: 4034922 - RNA, 16 nt, Molluscum contagiosum virus
accacgagcacugccu

SEQ ID NO: 4034923 - RNA, 18 nt, Molluscum contagiosum virus
accacgagcacugccugc

SEQ ID NO: 4034924 - RNA, 13 nt, Molluscum contagiosum virus
accacgugccaga

SEQ ID NO: 4034925 - RNA, 15 nt, Molluscum contagiosum virus
accacguggaccuga

SEQ ID NO: 4034926 - RNA, 13 nt, Molluscum contagiosum virus
accagcagccagg

SEQ ID NO: 4034927 - RNA, 20 nt, Molluscum contagiosum virus
accagcggcaggcggccgcg

SEQ ID NO: 4034928 - RNA, 21 nt, Molluscum contagiosum virus
accagcuacgagccgcugcuc

SEQ ID NO: 4034929 - RNA, 23 nt, Molluscum contagiosum virus
accagcuccgccgggaauaccgg

SEQ ID NO: 4034930 - RNA, 15 nt, Molluscum contagiosum virus
accagcucgcgcagu

SEQ ID NO: 4034931 - RNA, 19 nt, Molluscum contagiosum virus
accagcucuucguggccaa

SEQ ID NO: 4034932 - RNA, 18 nt, Molluscum contagiosum virus
accaggcgcgugcccugc

SEQ ID NO: 4034933 - RNA, 15 nt, Molluscum contagiosum virus
accagguacuccuug

SEQ ID NO: 4034934 - RNA, 14 nt, Molluscum contagiosum virus
accagguagagcaa

SEQ ID NO: 4034935 - RNA, 14 nt, Molluscum contagiosum virus
accaguaccugcug

SEQ ID NO: 4034936 - RNA, 23 nt, Molluscum contagiosum virus
accauccagccgucgccgcgccc

SEQ ID NO: 4034937 - RNA, 13 nt, Molluscum contagiosum virus
acccagcaaggcc

SEQ ID NO: 4034938 - RNA, 18 nt, Molluscum contagiosum virus
acccaucggagaagugcu

SEQ ID NO: 4034939 - RNA, 21 nt, Molluscum contagiosum virus
acccaucggagaagugcuccg

SEQ ID NO: 4034940 - RNA, 14 nt, Molluscum contagiosum virus
accccgaaaggcac

SEQ ID NO: 4034941 - RNA, 18 nt, Molluscum contagiosum virus
accccgaaggaaaggccc

SEQ ID NO: 4034942 - RNA, 21 nt, Molluscum contagiosum virus
accccgaaggaaaggcccccc

SEQ ID NO: 4034943 - RNA, 14 nt, Molluscum contagiosum virus
accccgagcugcgg

SEQ ID NO: 4034944 - RNA, 21 nt, Molluscum contagiosum virus
accccgagcugcggcgcgugc

SEQ ID NO: 4034945 - RNA, 18 nt, Molluscum contagiosum virus
accccgcaggaaaggcac

SEQ ID NO: 4034946 - RNA, 13 nt, Molluscum contagiosum virus
accccgccgcgua

SEQ ID NO: 4034947 - RNA, 14 nt, Molluscum contagiosum virus
accccgcugggccg

SEQ ID NO: 4034948 - RNA, 20 nt, Molluscum contagiosum virus
accccuugcuacaggacguc

SEQ ID NO: 4034949 - RNA, 21 nt, Molluscum contagiosum virus
acccgcaggaaaggcaccccg

SEQ ID NO: 4034950 - RNA, 13 nt, Molluscum contagiosum virus
acccggcacgugc

SEQ ID NO: 4034951 - RNA, 16 nt, Molluscum contagiosum virus
acccggcucgcucauc

SEQ ID NO: 4034952 - RNA, 18 nt, Molluscum contagiosum virus
acccgugcgcgcgcugag

SEQ ID NO: 4034953 - RNA, 23 nt, Molluscum contagiosum virus
acccucgcaagcugagcgcgcug

SEQ ID NO: 4034954 - RNA, 13 nt, Molluscum contagiosum virus
acccucuucgacu

SEQ ID NO: 4034955 - RNA, 12 nt, Molluscum contagiosum virus
acccugauaugc

SEQ ID NO: 4034956 - RNA, 16 nt, Molluscum contagiosum virus
cagcccugugcccgag

SEQ ID NO: 4034957 - RNA, 13 nt, Molluscum contagiosum virus
cagccgagccggg

SEQ ID NO: 4034958 - RNA, 20 nt, Molluscum contagiosum virus
cagccgagcgccgccagcuc

SEQ ID NO: 4034959 - RNA, 18 nt, Molluscum contagiosum virus
cagccgcagaugcgcagc

SEQ ID NO: 4034960 - RNA, 13 nt, Molluscum contagiosum virus
cagccgcgcggca

SEQ ID NO: 4034961 - RNA, 19 nt, Molluscum contagiosum virus
cagccgcguagcuagcucu

SEQ ID NO: 4034962 - RNA, 19 nt, Molluscum contagiosum virus
cagccgcugcgccgccagc

SEQ ID NO: 4034963 - RNA, 14 nt, Molluscum contagiosum virus
cagccgcuggacgc

SEQ ID NO: 4034964 - RNA, 23 nt, Molluscum contagiosum virus
aaggcauccucgccgaacggcag

SEQ ID NO: 4034965 - RNA, 17 nt, Molluscum contagiosum virus
aaggccaaagccgcgga

SEQ ID NO: 4034966 - RNA, 16 nt, Molluscum contagiosum virus
aagguacccgcaggaa

SEQ ID NO: 4034967 - RNA, 13 nt, Molluscum contagiosum virus
aaguccaccuucu

SEQ ID NO: 4034968 - RNA, 21 nt, Molluscum contagiosum virus
aagugcacaccagacaaaguc

SEQ ID NO: 4034969 - RNA, 18 nt, Molluscum contagiosum virus
aagugcuccgcacgugga

SEQ ID NO: 4034970 - RNA, 11 nt, Molluscum contagiosum virus
aaguuccugca

SEQ ID NO: 4034971 - RNA, 18 nt, Molluscum contagiosum virus
aaucucgccggcuguaaa

SEQ ID NO: 4034972 - RNA, 21 nt, Molluscum contagiosum virus
aaugacgcgcacgccagccug

SEQ ID NO: 4034973 - RNA, 20 nt, Molluscum contagiosum virus
aaugagcacuugccgcgccu

SEQ ID NO: 4034974 - RNA, 14 nt, Molluscum contagiosum virus
aaugcgcacacuug

SEQ ID NO: 4034975 - RNA, 23 nt, Molluscum contagiosum virus
aaugugcuggucaagaacaugug

SEQ ID NO: 4034976 - RNA, 20 nt, Molluscum contagiosum virus
aauguguacgacgcgcccac

SEQ ID NO: 4034977 - RNA, 15 nt, Molluscum contagiosum virus
acaaccacagcucuc

SEQ ID NO: 4034978 - RNA, 24 nt, Molluscum contagiosum virus
acaaccacucuuucacgcugcacg

SEQ ID NO: 4034979 - RNA, 23 nt, Molluscum contagiosum virus
acaacguaguacugcagcagcuc

SEQ ID NO: 4034980 - RNA, 15 nt, Molluscum contagiosum virus
acaagaagcgcuucu

SEQ ID NO: 4034981 - RNA, 18 nt, Molluscum contagiosum virus
acaagcuagacuggagca

SEQ ID NO: 4034982 - RNA, 16 nt, Molluscum contagiosum virus
acaagcugcuggcaca

SEQ ID NO: 4034983 - RNA, 17 nt, Molluscum contagiosum virus
acaaggaaaggcaccca

SEQ ID NO: 4034984 - RNA, 16 nt, Molluscum contagiosum virus
acaaggaaaggcaccu

SEQ ID NO: 4034985 - RNA, 18 nt, Molluscum contagiosum virus
acaaggacggagaguugu

SEQ ID NO: 4034986 - RNA, 19 nt, Molluscum contagiosum virus
acaaggagggagagcugcc

SEQ ID NO: 4034987 - RNA, 22 nt, Molluscum contagiosum virus
acaagggcagcucaagcugcuc

SEQ ID NO: 4034988 - RNA, 18 nt, Molluscum contagiosum virus
acaaucucugcgccgcgc

SEQ ID NO: 4034989 - RNA, 14 nt, Molluscum contagiosum virus
acacauuccucggc

SEQ ID NO: 4034990 - RNA, 12 nt, Molluscum contagiosum virus
acaccagcugga

SEQ ID NO: 4034991 - RNA, 20 nt, Molluscum contagiosum virus
acaccauccugcgcuuugcc

SEQ ID NO: 4034992 - RNA, 22 nt, Molluscum contagiosum virus
acacgcugaguuacguggccgc

SEQ ID NO: 4034993 - RNA, 21 nt, Molluscum contagiosum virus
acacguuggaggacguggaca

SEQ ID NO: 4034994 - RNA, 17 nt, Molluscum contagiosum virus
acacugucucugcgcga

SEQ ID NO: 4034995 - RNA, 21 nt, Molluscum contagiosum virus
acacuugcgcguucgcaaaga

SEQ ID NO: 4034996 - RNA, 16 nt, Molluscum contagiosum virus
acacuuuccgucgucg

SEQ ID NO: 4034997 - RNA, 19 nt, Molluscum contagiosum virus
acagacauggcccgcgcgg

SEQ ID NO: 4034998 - RNA, 21 nt, Molluscum contagiosum virus
acagacggcgcgcucggagac

SEQ ID NO: 4034999 - RNA, 16 nt, Molluscum contagiosum virus
acagagugccuggcgc

SEQ ID NO: 4035000 - RNA, 14 nt, Molluscum contagiosum virus
acagcagccgcagc

SEQ ID NO: 4035001 - RNA, 18 nt, Molluscum contagiosum virus
acagcauccccaacaucc

SEQ ID NO: 4035002 - RNA, 11 nt, Molluscum contagiosum virus
acagcaucccu

SEQ ID NO: 4035003 - RNA, 21 nt, Molluscum contagiosum virus
acagccccugcugcucgcgga

SEQ ID NO: 4035004 - RNA, 16 nt, Molluscum contagiosum virus
acagccgccugccgcg

SEQ ID NO: 4035005 - RNA, 18 nt, Molluscum contagiosum virus
acagccgccugccgcgcu

SEQ ID NO: 4035006 - RNA, 12 nt, Molluscum contagiosum virus
acagccgcgcgg

SEQ ID NO: 4035007 - RNA, 18 nt, Molluscum contagiosum virus
acagccuguguugcgcgc

SEQ ID NO: 4035008 - RNA, 14 nt, Molluscum contagiosum virus
acagcgcgcgcacg

SEQ ID NO: 4035009 - RNA, 18 nt, Molluscum contagiosum virus
acagcgggcgcugcucgc

SEQ ID NO: 4035010 - RNA, 16 nt, Molluscum contagiosum virus
acagcgugcgcgggca

SEQ ID NO: 4035011 - RNA, 18 nt, Molluscum contagiosum virus
acagcgugcgcgggcacg

SEQ ID NO: 4035012 - RNA, 17 nt, Molluscum contagiosum virus
acagcuccccgcgcaag

SEQ ID NO: 4035013 - RNA, 22 nt, Molluscum contagiosum virus
acaggccgcuagcaggcgucgc

SEQ ID NO: 4035014 - RNA, 16 nt, Molluscum contagiosum virus
acaguaggacaugucc

SEQ ID NO: 4035015 - RNA, 15 nt, Molluscum contagiosum virus
acauccggcacgugc

SEQ ID NO: 4035016 - RNA, 22 nt, Molluscum contagiosum virus
aaaaacgcgcccccguccgugc

SEQ ID NO: 4035017 - RNA, 19 nt, Molluscum contagiosum virus
aaaaaucccccgccaggaa

SEQ ID NO: 4035018 - RNA, 14 nt, Molluscum contagiosum virus
aaaaggcacacccc

SEQ ID NO: 4035019 - RNA, 18 nt, Molluscum contagiosum virus
aaaccucugagcgagcgc

SEQ ID NO: 4035020 - RNA, 22 nt, Molluscum contagiosum virus
aaacgcacagccccugcugcuc

SEQ ID NO: 4035021 - RNA, 19 nt, Molluscum contagiosum virus
aaacgcugacggcgcugcg

SEQ ID NO: 4035022 - RNA, 18 nt, Molluscum contagiosum virus
aaacgcuggcgagcaaga

SEQ ID NO: 4035023 - RNA, 19 nt, Molluscum contagiosum virus
aaagaagcggugcagcgcc

SEQ ID NO: 4035024 - RNA, 20 nt, Molluscum contagiosum virus
aaagacggacccgcgaacga

SEQ ID NO: 4035025 - RNA, 14 nt, Molluscum contagiosum virus
aaagagcugcugcg

SEQ ID NO: 4035026 - RNA, 21 nt, Molluscum contagiosum virus
aaagcacagcaggagcacgcc

SEQ ID NO: 4035027 - RNA, 20 nt, Molluscum contagiosum virus
aaagccggccccgcgaacga

SEQ ID NO: 4035028 - RNA, 20 nt, Molluscum contagiosum virus
aaagcgaaguuugccagcgu

SEQ ID NO: 4035029 - RNA, 18 nt, Molluscum contagiosum virus
aaagcuaugcgcagcugc

SEQ ID NO: 4035030 - RNA, 20 nt, Molluscum contagiosum virus
aaagcuggccgaggucuucc

SEQ ID NO: 4035031 - RNA, 15 nt, Molluscum contagiosum virus
aaaguacgagagcgc

SEQ ID NO: 4035032 - RNA, 21 nt, Molluscum contagiosum virus
aaauagccaugcuggucacgc

SEQ ID NO: 4035033 - RNA, 18 nt, Molluscum contagiosum virus
aaauccugguuccucucc

SEQ ID NO: 4035034 - RNA, 13 nt, Molluscum contagiosum virus
aaaucgcaaagca

SEQ ID NO: 4035035 - RNA, 22 nt, Molluscum contagiosum virus
aaauggccuugcgagcgcugcc

SEQ ID NO: 4035036 - RNA, 19 nt, Molluscum contagiosum virus
aaauggcugcgaccaagac

SEQ ID NO: 4035037 - RNA, 23 nt, Molluscum contagiosum virus
aacaacuugggagcaaggccugg

SEQ ID NO: 4035038 - RNA, 23 nt, Molluscum contagiosum virus
aacacagugcguuugccagaagc

SEQ ID NO: 4035039 - RNA, 14 nt, Molluscum contagiosum virus
aacaccuccugcuu

SEQ ID NO: 4035040 - RNA, 17 nt, Molluscum contagiosum virus
aacacugucucugcgcg

SEQ ID NO: 4035041 - RNA, 12 nt, Molluscum contagiosum virus
aacagcagcugg

SEQ ID NO: 4035042 - RNA, 22 nt, Molluscum contagiosum virus
aacagcuuggcacagugcugga

SEQ ID NO: 4035043 - RNA, 22 nt, Molluscum contagiosum virus
aacauccugccacaccagcugg

SEQ ID NO: 4035044 - RNA, 15 nt, Molluscum contagiosum virus
aacauugccacgcaa

SEQ ID NO: 4035045 - RNA, 19 nt, Molluscum contagiosum virus
aacccguggccgagccgcu

SEQ ID NO: 4035046 - RNA, 18 nt, Molluscum contagiosum virus
cagugcucgcacacgugc

SEQ ID NO: 4035047 - RNA, 16 nt, Molluscum contagiosum virus
cagugugugaucacgu

SEQ ID NO: 4035048 - RNA, 18 nt, Molluscum contagiosum virus
caguuccaccucgagcuc

SEQ ID NO: 4035049 - RNA, 17 nt, Molluscum contagiosum virus
caguucgagcugcugcg

SEQ ID NO: 4035050 - RNA, 18 nt, Molluscum contagiosum virus
caguucgagcugcugcgc

SEQ ID NO: 4035051 - RNA, 15 nt, Molluscum contagiosum virus
caguucggccgcacg

SEQ ID NO: 4035052 - RNA, 14 nt, Molluscum contagiosum virus
caguugagagcagc

SEQ ID NO: 4035053 - RNA, 13 nt, Molluscum contagiosum virus
cauacgcagaggc

SEQ ID NO: 4035054 - RNA, 15 nt, Molluscum contagiosum virus
cauagcgccacgagc

SEQ ID NO: 4035055 - RNA, 18 nt, Molluscum contagiosum virus
cauaguacgauggaugcu

SEQ ID NO: 4035056 - RNA, 16 nt, Molluscum contagiosum virus
caucaccccgcugggc

SEQ ID NO: 4035057 - RNA, 16 nt, Molluscum contagiosum virus
caucagcaacaagcuc

SEQ ID NO: 4035058 - RNA, 16 nt, Molluscum contagiosum virus
caucaucgagcugcag

SEQ ID NO: 4035059 - RNA, 17 nt, Molluscum contagiosum virus
caucaucgcggagcugc

SEQ ID NO: 4035060 - RNA, 20 nt, Molluscum contagiosum virus
cauccucaccuuccugggcg

SEQ ID NO: 4035061 - RNA, 19 nt, Molluscum contagiosum virus
cauccugccacaccagcug

SEQ ID NO: 4035062 - RNA, 20 nt, Molluscum contagiosum virus
caucgagaugcucaagcacu

SEQ ID NO: 4035063 - RNA, 15 nt, Molluscum contagiosum virus
caucgagcugcagag

SEQ ID NO: 4035064 - RNA, 12 nt, Molluscum contagiosum virus
caucgcgcugcu

SEQ ID NO: 4035065 - RNA, 14 nt, Molluscum contagiosum virus
caucgcgcugcucu

SEQ ID NO: 4035066 - RNA, 17 nt, Molluscum contagiosum virus
caucgcggagcugcgcg

SEQ ID NO: 4035067 - RNA, 16 nt, Molluscum contagiosum virus
caucggcgccgccccg

SEQ ID NO: 4035068 - RNA, 16 nt, Molluscum contagiosum virus
caucggcggcagcgcc

SEQ ID NO: 4035069 - RNA, 16 nt, Molluscum contagiosum virus
caucuacugcgacauc

SEQ ID NO: 4035070 - RNA, 18 nt, Molluscum contagiosum virus
caucuagccuccuugucu

SEQ ID NO: 4035071 - RNA, 18 nt, Molluscum contagiosum virus
caucucgcacacugcagc

SEQ ID NO: 4035072 - RNA, 22 nt, Molluscum contagiosum virus
caucugccucguggaacaaaga

SEQ ID NO: 4035073 - RNA, 20 nt, Molluscum contagiosum virus
caucuucaagccgcaggcgc

SEQ ID NO: 4035074 - RNA, 18 nt, Molluscum contagiosum virus
caugaagaugucgccgcg

SEQ ID NO: 4035075 - RNA, 22 nt, Molluscum contagiosum virus
caugacugcggacgggaagcuu

SEQ ID NO: 4035076 - RNA, 13 nt, Molluscum contagiosum virus
caugaggcagugc

SEQ ID NO: 4035077 - RNA, 17 nt, Molluscum contagiosum virus
caugaguuucuggugcc

SEQ ID NO: 4035078 - RNA, 19 nt, Molluscum contagiosum virus
caugcacagccgcuuucug

SEQ ID NO: 4035079 - RNA, 16 nt, Molluscum contagiosum virus
caugcacagcugcucg

SEQ ID NO: 4035080 - RNA, 19 nt, Molluscum contagiosum virus
caugcccggccucgccucc

SEQ ID NO: 4035081 - RNA, 16 nt, Molluscum contagiosum virus
caugccgcgcugcucc

SEQ ID NO: 4035082 - RNA, 23 nt, Molluscum contagiosum virus
caugccggggaugaacgcgcugc

SEQ ID NO: 4035083 - RNA, 22 nt, Molluscum contagiosum virus
caugccuccguuucccgcggcg

SEQ ID NO: 4035084 - RNA, 18 nt, Molluscum contagiosum virus
caugcgcaagcagcucgg

SEQ ID NO: 4035085 - RNA, 19 nt, Molluscum contagiosum virus
caugcgcaagcagcucggc

SEQ ID NO: 4035086 - RNA, 15 nt, Molluscum contagiosum virus
caugcgcagugccuu

SEQ ID NO: 4035087 - RNA, 20 nt, Molluscum contagiosum virus
caugcgcgcagugccgcuga

SEQ ID NO: 4035088 - RNA, 14 nt, Molluscum contagiosum virus
caugcgcgccgcgc

SEQ ID NO: 4035089 - RNA, 17 nt, Molluscum contagiosum virus
caugcgcgccgcgcugc

SEQ ID NO: 4035090 - RNA, 18 nt, Molluscum contagiosum virus
caugcgcgccgcgcugcu

SEQ ID NO: 4035091 - RNA, 19 nt, Molluscum contagiosum virus
caugcgcgccgcgcugcug

SEQ ID NO: 4035092 - RNA, 14 nt, Molluscum contagiosum virus
caugcgcgcgcugc

SEQ ID NO: 4035093 - RNA, 18 nt, Molluscum contagiosum virus
caugcgcuugcggucgcg

SEQ ID NO: 4035094 - RNA, 13 nt, Molluscum contagiosum virus
caugcggagcugg

SEQ ID NO: 4035095 - RNA, 16 nt, Molluscum contagiosum virus
caugcggagcuggccg

SEQ ID NO: 4035096 - RNA, 17 nt, Molluscum contagiosum virus
caugcggcaggcgcugc

SEQ ID NO: 4035097 - RNA, 20 nt, Molluscum contagiosum virus
caugcggcaggcgcugcgcg

SEQ ID NO: 4035098 - RNA, 14 nt, Molluscum contagiosum virus
caugcgugcuucac

SEQ ID NO: 4035099 - RNA, 20 nt, Molluscum contagiosum virus
caugcucaagcaccugcgcu

SEQ ID NO: 4035100 - RNA, 17 nt, Molluscum contagiosum virus
caugcugcccgcgcgcg

SEQ ID NO: 4035101 - RNA, 17 nt, Molluscum contagiosum virus
caugcugcgcgagcgcg

SEQ ID NO: 4035102 - RNA, 21 nt, Molluscum contagiosum virus
caugcugcgcgagcgcgcgcu

SEQ ID NO: 4035103 - RNA, 16 nt, Molluscum contagiosum virus
cauggaaagcuucucg

SEQ ID NO: 4035104 - RNA, 15 nt, Molluscum contagiosum virus
cauggacgugcugcu

SEQ ID NO: 4035105 - RNA, 23 nt, Molluscum contagiosum virus
cauggagagcguacucgggccgc

SEQ ID NO: 4035106 - RNA, 20 nt, Molluscum contagiosum virus
cauggagcgcccgcugcucu

SEQ ID NO: 4035107 - RNA, 20 nt, Molluscum contagiosum virus
cauggccacgcccgggcccg

SEQ ID NO: 4035108 - RNA, 13 nt, Molluscum contagiosum virus
cauggccgcgucc

SEQ ID NO: 4035109 - RNA, 22 nt, Molluscum contagiosum virus
cauggccuguaguagcagcuuc

SEQ ID NO: 4035110 - RNA, 20 nt, Molluscum contagiosum virus
cauggucgcauccgaccucu

SEQ ID NO: 4035111 - RNA, 15 nt, Molluscum contagiosum virus
caugucacgcucacg

SEQ ID NO: 4035112 - RNA, 13 nt, Molluscum contagiosum virus
cauguccggcccg

SEQ ID NO: 4035113 - RNA, 21 nt, Molluscum contagiosum virus
caugucgagaccuuccuccag

SEQ ID NO: 4035114 - RNA, 23 nt, Molluscum contagiosum virus
caugugcgagaacuggcgcagca

SEQ ID NO: 4035115 - RNA, 14 nt, Molluscum contagiosum virus
cauguuuccugcgg

SEQ ID NO: 4035116 - RNA, 19 nt, Molluscum contagiosum virus
cauguuuguucgcgcgccg

SEQ ID NO: 4035117 - RNA, 19 nt, Molluscum contagiosum virus
cauugcgaggcaccgcccg

SEQ ID NO: 4035118 - RNA, 20 nt, Molluscum contagiosum virus
cauuucacaaguggucuuug

SEQ ID NO: 4035119 - RNA, 18 nt, Molluscum contagiosum virus
cauuuucucuggagagcg

SEQ ID NO: 4035120 - RNA, 18 nt, Molluscum contagiosum virus
ccaacacguuuucuuuca

SEQ ID NO: 4035121 - RNA, 18 nt, Molluscum contagiosum virus
ccaacacuaccacagcca

SEQ ID NO: 4035122 - RNA, 14 nt, Molluscum contagiosum virus
ccaacagcagcugg

SEQ ID NO: 4035123 - RNA, 16 nt, Molluscum contagiosum virus
ccaacagcagcuggcg

SEQ ID NO: 4035124 - RNA, 23 nt, Molluscum contagiosum virus
ccaacagcagcuggcgcgcgccg

SEQ ID NO: 4035125 - RNA, 22 nt, Molluscum contagiosum virus
ccaacccucgcaagcugagcgc

SEQ ID NO: 4035126 - RNA, 16 nt, Molluscum contagiosum virus
ccaaccuccugcaccu

SEQ ID NO: 4035127 - RNA, 15 nt, Molluscum contagiosum virus
ccaacgauggcgugg

SEQ ID NO: 4035128 - RNA, 16 nt, Molluscum contagiosum virus
ccaacgcccgcgcccg

SEQ ID NO: 4035129 - RNA, 20 nt, Molluscum contagiosum virus
ccaacuagacaaggggccau

SEQ ID NO: 4035130 - RNA, 17 nt, Molluscum contagiosum virus
ccaagaagaggccagca

SEQ ID NO: 4035131 - RNA, 12 nt, Molluscum contagiosum virus
ccaagaccuggg

SEQ ID NO: 4035132 - RNA, 19 nt, Molluscum contagiosum virus
ccaagaggccgucacaugc

SEQ ID NO: 4035133 - RNA, 13 nt, Molluscum contagiosum virus
ccaagcacgcgcg

SEQ ID NO: 4035134 - RNA, 13 nt, Molluscum contagiosum virus
ccaagccugcuca

SEQ ID NO: 4035135 - RNA, 15 nt, Molluscum contagiosum virus
ccaaggacgacaaca

SEQ ID NO: 4035136 - RNA, 20 nt, Molluscum contagiosum virus
ccaaggacuucgagaccuac

SEQ ID NO: 4035137 - RNA, 20 nt, Molluscum contagiosum virus
ccaaggccgcgggcgcggag

SEQ ID NO: 4035138 - RNA, 19 nt, Molluscum contagiosum virus
ccaaggugaacgaccucaa

SEQ ID NO: 4035139 - RNA, 13 nt, Molluscum contagiosum virus
ccaagugcgcgug

SEQ ID NO: 4035140 - RNA, 21 nt, Molluscum contagiosum virus
ccaaucccaguaguggcggca

SEQ ID NO: 4035141 - RNA, 15 nt, Molluscum contagiosum virus
ccacaaagacgggcc

SEQ ID NO: 4035142 - RNA, 17 nt, Molluscum contagiosum virus
ccaccacguggaccuga

SEQ ID NO: 4035143 - RNA, 18 nt, Molluscum contagiosum virus
ccaccagcagccaggcua

SEQ ID NO: 4035144 - RNA, 14 nt, Molluscum contagiosum virus
ccaccgcggcgcgg

SEQ ID NO: 4035145 - RNA, 19 nt, Molluscum contagiosum virus
ccaccgucuccccccuguc

SEQ ID NO: 4035146 - RNA, 15 nt, Molluscum contagiosum virus
ccaccuucaggacgc

SEQ ID NO: 4035147 - RNA, 19 nt, Molluscum contagiosum virus
ccacgaacgacagcgccgc

SEQ ID NO: 4035148 - RNA, 16 nt, Molluscum contagiosum virus
ccacgaccgcaagugc

SEQ ID NO: 4035149 - RNA, 13 nt, Molluscum contagiosum virus
ccgcgccgcgccg

SEQ ID NO: 4035150 - RNA, 16 nt, Molluscum contagiosum virus
ccgcgccuugagcgcg

SEQ ID NO: 4035151 - RNA, 15 nt, Molluscum contagiosum virus
ccgcgcgagcgcgcc

SEQ ID NO: 4035152 - RNA, 13 nt, Molluscum contagiosum virus
ccgcgcgcacgcg

SEQ ID NO: 4035153 - RNA, 12 nt, Molluscum contagiosum virus
ccgcgcgcgcca

SEQ ID NO: 4035154 - RNA, 13 nt, Molluscum contagiosum virus
ccgcgcgcgccag

SEQ ID NO: 4035155 - RNA, 20 nt, Molluscum contagiosum virus
ccgcgcgcggugcugcgcca

SEQ ID NO: 4035156 - RNA, 20 nt, Molluscum contagiosum virus
ccgcgcgcugcucuggagca

SEQ ID NO: 4035157 - RNA, 18 nt, Molluscum contagiosum virus
ccgcgcggcgcucugcca

SEQ ID NO: 4035158 - RNA, 12 nt, Molluscum contagiosum virus
ccgcgcguugcu

SEQ ID NO: 4035159 - RNA, 14 nt, Molluscum contagiosum virus
ccgcgcucgccgca

SEQ ID NO: 4035160 - RNA, 17 nt, Molluscum contagiosum virus
ccgcgcucgugccgccu

SEQ ID NO: 4035161 - RNA, 15 nt, Molluscum contagiosum virus
ccgcgcugcuccgug

SEQ ID NO: 4035162 - RNA, 21 nt, Molluscum contagiosum virus
ccgcgcuggcgcgcgcgcugc

SEQ ID NO: 4035163 - RNA, 12 nt, Molluscum contagiosum virus
ccgcgcuucugc

SEQ ID NO: 4035164 - RNA, 15 nt, Molluscum contagiosum virus
ccgcgcuuugcgcgg

SEQ ID NO: 4035165 - RNA, 14 nt, Molluscum contagiosum virus
ccgcggagcugugc

SEQ ID NO: 4035166 - RNA, 16 nt, Molluscum contagiosum virus
ccgcggagcugugcca

SEQ ID NO: 4035167 - RNA, 15 nt, Molluscum contagiosum virus
ccgcggccugggcca

SEQ ID NO: 4035168 - RNA, 16 nt, Molluscum contagiosum virus
ccgcggcgcccacggc

SEQ ID NO: 4035169 - RNA, 17 nt, Molluscum contagiosum virus
ccgcggcgcgcagcucg

SEQ ID NO: 4035170 - RNA, 13 nt, Molluscum contagiosum virus
ccgcggcgcgccg

SEQ ID NO: 4035171 - RNA, 14 nt, Molluscum contagiosum virus
ccgcggcgugcccg

SEQ ID NO: 4035172 - RNA, 22 nt, Molluscum contagiosum virus
ccgcgggcacauggacggcgcc

SEQ ID NO: 4035173 - RNA, 22 nt, Molluscum contagiosum virus
ccgcgggcagccgcuggacgcc

SEQ ID NO: 4035174 - RNA, 16 nt, Molluscum contagiosum virus
ccgcgggccgccgccc

SEQ ID NO: 4035175 - RNA, 19 nt, Molluscum contagiosum virus
ccgcgggcgcacgcuuguc

SEQ ID NO: 4035176 - RNA, 17 nt, Molluscum contagiosum virus
ccgcgggcgcagagccu

SEQ ID NO: 4035177 - RNA, 14 nt, Molluscum contagiosum virus
ccgcggggcuccuc

SEQ ID NO: 4035178 - RNA, 23 nt, Molluscum contagiosum virus
ccgcguagcuagcucugcgcgcg

SEQ ID NO: 4035179 - RNA, 15 nt, Molluscum contagiosum virus
ccgcgucgcgcgccg

SEQ ID NO: 4035180 - RNA, 20 nt, Molluscum contagiosum virus
ccgcgugcacccuccgcaca

SEQ ID NO: 4035181 - RNA, 18 nt, Molluscum contagiosum virus
ccgcgugcaugcccagca

SEQ ID NO: 4035182 - RNA, 13 nt, Molluscum contagiosum virus
ccgcgugcucgug

SEQ ID NO: 4035183 - RNA, 14 nt, Molluscum contagiosum virus
ccgcgugcucgugu

SEQ ID NO: 4035184 - RNA, 13 nt, Molluscum contagiosum virus
ccgcgugcucugc

SEQ ID NO: 4035185 - RNA, 21 nt, Molluscum contagiosum virus
ccgcguggcaagggcuccuuc

SEQ ID NO: 4035186 - RNA, 20 nt, Molluscum contagiosum virus
ccgcuaccgcagccacggcc

SEQ ID NO: 4035187 - RNA, 20 nt, Molluscum contagiosum virus
ccgcugcgcuucgagcugcc

SEQ ID NO: 4035188 - RNA, 18 nt, Molluscum contagiosum virus
ccgcugcuccugcucugu

SEQ ID NO: 4035189 - RNA, 18 nt, Molluscum contagiosum virus
ccgcuggcggcgcacgcg

SEQ ID NO: 4035190 - RNA, 17 nt, Molluscum contagiosum virus
ccgcuguacgugcugcc

SEQ ID NO: 4035191 - RNA, 19 nt, Molluscum contagiosum virus
ccgcuguacgugcugcccg

SEQ ID NO: 4035192 - RNA, 20 nt, Molluscum contagiosum virus
ccgcuuucgcaaacaagcau

SEQ ID NO: 4035193 - RNA, 20 nt, Molluscum contagiosum virus
ccggacgauaaauggaccuc

SEQ ID NO: 4035194 - RNA, 14 nt, Molluscum contagiosum virus
ccggacguccaucc

SEQ ID NO: 4035195 - RNA, 18 nt, Molluscum contagiosum virus
ccggagacaccagcuccg

SEQ ID NO: 4035196 - RNA, 14 nt, Molluscum contagiosum virus
ccggaucagccccg

SEQ ID NO: 4035197 - RNA, 20 nt, Molluscum contagiosum virus
ccggcaccacgugcgcuggc

SEQ ID NO: 4035198 - RNA, 18 nt, Molluscum contagiosum virus
ccggcacccgugcgcgcg

SEQ ID NO: 4035199 - RNA, 14 nt, Molluscum contagiosum virus
ccggcacgugcccg

SEQ ID NO: 4035200 - RNA, 16 nt, Molluscum contagiosum virus
ccggcagcgacuacgc

SEQ ID NO: 4035201 - RNA, 14 nt, Molluscum contagiosum virus
ccggcagcgccgcg

SEQ ID NO: 4035202 - RNA, 19 nt, Molluscum contagiosum virus
ccggcagcgccgcgcgcgc

SEQ ID NO: 4035203 - RNA, 16 nt, Molluscum contagiosum virus
ccggcagcgcgccuag

SEQ ID NO: 4035204 - RNA, 18 nt, Molluscum contagiosum virus
ccggcagcuggagcugcc

SEQ ID NO: 4035205 - RNA, 21 nt, Molluscum contagiosum virus
ccggcagcuggagcugccgcu

SEQ ID NO: 4035206 - RNA, 18 nt, Molluscum contagiosum virus
ccggcaguagcagcgccg

SEQ ID NO: 4035207 - RNA, 15 nt, Molluscum contagiosum virus
ccggcagugcuugcu

SEQ ID NO: 4035208 - RNA, 16 nt, Molluscum contagiosum virus
ccggcaucgcgcugcu

SEQ ID NO: 4035209 - RNA, 23 nt, Molluscum contagiosum virus
ccggcaucgcgcugcuggugcuc

SEQ ID NO: 4035210 - RNA, 15 nt, Molluscum contagiosum virus
ccggccgugcagagc

SEQ ID NO: 4035211 - RNA, 17 nt, Molluscum contagiosum virus
ccggccucgccuccggg

SEQ ID NO: 4035212 - RNA, 23 nt, Molluscum contagiosum virus
ccggcgagaugcgagcgcgucug

SEQ ID NO: 4035213 - RNA, 20 nt, Molluscum contagiosum virus
ccggcgcaucagagaagugc

SEQ ID NO: 4035214 - RNA, 20 nt, Molluscum contagiosum virus
ccggcgcgcgcggcgcgccc

SEQ ID NO: 4035215 - RNA, 15 nt, Molluscum contagiosum virus
ccggcgcggccuggc

SEQ ID NO: 4035216 - RNA, 12 nt, Molluscum contagiosum virus
ccggcgcuugcg

SEQ ID NO: 4035217 - RNA, 20 nt, Molluscum contagiosum virus
ccggcggcaagcccggaagc

SEQ ID NO: 4035218 - RNA, 14 nt, Molluscum contagiosum virus
ccggcgggcgcgug

SEQ ID NO: 4035219 - RNA, 18 nt, Molluscum contagiosum virus
ccggcguguggcucuucu

SEQ ID NO: 4035220 - RNA, 13 nt, Molluscum contagiosum virus
ccggcugcccugu

SEQ ID NO: 4035221 - RNA, 12 nt, Molluscum contagiosum virus
ccggcugccgcu

SEQ ID NO: 4035222 - RNA, 18 nt, Molluscum contagiosum virus
ccggcugccgcugccugu

SEQ ID NO: 4035223 - RNA, 21 nt, Molluscum contagiosum virus
ccgggaaagcaaccacacgcg

SEQ ID NO: 4035224 - RNA, 22 nt, Molluscum contagiosum virus
ccgggaacgaggaaaggcaccc

SEQ ID NO: 4035225 - RNA, 22 nt, Molluscum contagiosum virus
ccgggcagauagcaaccucggg

SEQ ID NO: 4035226 - RNA, 15 nt, Molluscum contagiosum virus
ccgggcccgagcccg

SEQ ID NO: 4035227 - RNA, 21 nt, Molluscum contagiosum virus
ccgggcccggguuugugcccg

SEQ ID NO: 4035228 - RNA, 12 nt, Molluscum contagiosum virus
ccgggcgcacaa

SEQ ID NO: 4035229 - RNA, 18 nt, Molluscum contagiosum virus
ccgggcgccggcucugcc

SEQ ID NO: 4035230 - RNA, 17 nt, Molluscum contagiosum virus
ccgggcucuuccggccc

SEQ ID NO: 4035231 - RNA, 18 nt, Molluscum contagiosum virus
ccgggcucuuccggcccg

SEQ ID NO: 4035232 - RNA, 14 nt, Molluscum contagiosum virus
ccgguacugcugca

SEQ ID NO: 4035233 - RNA, 14 nt, Molluscum contagiosum virus
ccguaccgcgcccg

SEQ ID NO: 4035234 - RNA, 13 nt, Molluscum contagiosum virus
ccgucccccgcgg

SEQ ID NO: 4035235 - RNA, 15 nt, Molluscum contagiosum virus
ccgucccccgcggag

SEQ ID NO: 4035236 - RNA, 23 nt, Molluscum contagiosum virus
ccguccgccucgagcacgccucc

SEQ ID NO: 4035237 - RNA, 17 nt, Molluscum contagiosum virus
ccguccuugcucuggcu

SEQ ID NO: 4035238 - RNA, 13 nt, Molluscum contagiosum virus
ccgucgcccggca

SEQ ID NO: 4035239 - RNA, 18 nt, Molluscum contagiosum virus
ccgucggaagucggcgug

SEQ ID NO: 4035240 - RNA, 13 nt, Molluscum contagiosum virus
ccgucgucgccgu

SEQ ID NO: 4035241 - RNA, 22 nt, Molluscum contagiosum virus
ccgucuccacaaagacgggccc

SEQ ID NO: 4035242 - RNA, 16 nt, Molluscum contagiosum virus
ccgugaacgaggcugc

SEQ ID NO: 4035243 - RNA, 19 nt, Molluscum contagiosum virus
ccgugagcagucccgagga

SEQ ID NO: 4035244 - RNA, 19 nt, Molluscum contagiosum virus
ccgugcaccucccugugaa

SEQ ID NO: 4035245 - RNA, 13 nt, Molluscum contagiosum virus
ccgugccccugcu

SEQ ID NO: 4035246 - RNA, 19 nt, Molluscum contagiosum virus
ccgugccgccggcgccgcu

SEQ ID NO: 4035247 - RNA, 16 nt, Molluscum contagiosum virus
ccgugccuggcagugc

SEQ ID NO: 4035248 - RNA, 11 nt, Molluscum contagiosum virus
ccgugcgagcu

SEQ ID NO: 4035249 - RNA, 14 nt, Molluscum contagiosum virus
ccgugcucaggcca

SEQ ID NO: 4035250 - RNA, 17 nt, Molluscum contagiosum virus
ccgugcucaggccagca

SEQ ID NO: 4035251 - RNA, 22 nt, Molluscum contagiosum virus
ccgugcugcggcaaccgcgccc

SEQ ID NO: 4035252 - RNA, 16 nt, Molluscum contagiosum virus
cucucggcagcgucgc

SEQ ID NO: 4035253 - RNA, 21 nt, Molluscum contagiosum virus
cucucggcagcgucgcggagc

SEQ ID NO: 4035254 - RNA, 17 nt, Molluscum contagiosum virus
cucucggccauggaggc

SEQ ID NO: 4035255 - RNA, 16 nt, Molluscum contagiosum virus
cucugauuacauccug

SEQ ID NO: 4035256 - RNA, 22 nt, Molluscum contagiosum virus
cucugccaccaugcgcacagca

SEQ ID NO: 4035257 - RNA, 12 nt, Molluscum contagiosum virus
cucugccgcccg

SEQ ID NO: 4035258 - RNA, 13 nt, Molluscum contagiosum virus
cucugcgcgagca

SEQ ID NO: 4035259 - RNA, 20 nt, Molluscum contagiosum virus
cucugcgcgcaagucaccgc

SEQ ID NO: 4035260 - RNA, 19 nt, Molluscum contagiosum virus
cucuggcuugcgcuuagac

SEQ ID NO: 4035261 - RNA, 18 nt, Molluscum contagiosum virus
cucugggcgucgcacagu

SEQ ID NO: 4035262 - RNA, 14 nt, Molluscum contagiosum virus
cucugucucccgcc

SEQ ID NO: 4035263 - RNA, 15 nt, Molluscum contagiosum virus
cucuguucugcuugg

SEQ ID NO: 4035264 - RNA, 13 nt, Molluscum contagiosum virus
cucuuccggcccg

SEQ ID NO: 4035265 - RNA, 21 nt, Molluscum contagiosum virus
cucuucucgcagcguuccagg

SEQ ID NO: 4035266 - RNA, 13 nt, Molluscum contagiosum virus
cucuuuguuccug

SEQ ID NO: 4035267 - RNA, 17 nt, Molluscum contagiosum virus
cugacccccuccccagc

SEQ ID NO: 4035268 - RNA, 22 nt, Molluscum contagiosum virus
cugacccccuccccagcgccgc

SEQ ID NO: 4035269 - RNA, 21 nt, Molluscum contagiosum virus
cugaccgacggcgacgacagc

SEQ ID NO: 4035270 - RNA, 22 nt, Molluscum contagiosum virus
cugagaagcaaugcgcaaggcc

SEQ ID NO: 4035271 - RNA, 13 nt, Molluscum contagiosum virus
cugagaggaccuc

SEQ ID NO: 4035272 - RNA, 16 nt, Molluscum contagiosum virus
cugagcaagcucaaga

SEQ ID NO: 4035273 - RNA, 17 nt, Molluscum contagiosum virus
cugagcaagcucaagaa

SEQ ID NO: 4035274 - RNA, 18 nt, Molluscum contagiosum virus
cugagcgcgcugcgccgc

SEQ ID NO: 4035275 - RNA, 20 nt, Molluscum contagiosum virus
cugagcgugucgaagcgcgc

SEQ ID NO: 4035276 - RNA, 21 nt, Molluscum contagiosum virus
cugaggaagcaagacccagca

SEQ ID NO: 4035277 - RNA, 15 nt, Molluscum contagiosum virus
cugagggcgcucgau

SEQ ID NO: 4035278 - RNA, 15 nt, Molluscum contagiosum virus
cugagguuggccagc

SEQ ID NO: 4035279 - RNA, 17 nt, Molluscum contagiosum virus
cugauaguaccacugug

SEQ ID NO: 4035280 - RNA, 21 nt, Molluscum contagiosum virus
cugaucaccgaggagccgcgc

SEQ ID NO: 4035281 - RNA, 22 nt, Molluscum contagiosum virus
cugcaacucgcgcugcagcacc

SEQ ID NO: 4035282 - RNA, 18 nt, Molluscum contagiosum virus
cugcacacaccgcgagca

SEQ ID NO: 4035283 - RNA, 20 nt, Molluscum contagiosum virus
cugcacagcuuccuggagua

SEQ ID NO: 4035284 - RNA, 11 nt, Molluscum contagiosum virus
cugcaccacca

SEQ ID NO: 4035285 - RNA, 23 nt, Molluscum contagiosum virus
cugcacgacggucacgcaagcuu

SEQ ID NO: 4035286 - RNA, 17 nt, Molluscum contagiosum virus
cugcacgacguacgagu

SEQ ID NO: 4035287 - RNA, 17 nt, Molluscum contagiosum virus
cugcacgagcugcugua

SEQ ID NO: 4035288 - RNA, 22 nt, Molluscum contagiosum virus
cugcacgcgcacuugccuggcg

SEQ ID NO: 4035289 - RNA, 16 nt, Molluscum contagiosum virus
cugcacgcuacggcug

SEQ ID NO: 4035290 - RNA, 15 nt, Molluscum contagiosum virus
cugcacgggcacgcc

SEQ ID NO: 4035291 - RNA, 23 nt, Molluscum contagiosum virus
cugcacgucgaagaccaccagca

SEQ ID NO: 4035292 - RNA, 20 nt, Molluscum contagiosum virus
cugcagagcgugcuggucaa

SEQ ID NO: 4035293 - RNA, 14 nt, Molluscum contagiosum virus
cugcaggaaaggca

SEQ ID NO: 4035294 - RNA, 18 nt, Molluscum contagiosum virus
cugcaucuuuuuuaugca

SEQ ID NO: 4035295 - RNA, 17 nt, Molluscum contagiosum virus
cugccagccgcucgucc

SEQ ID NO: 4035296 - RNA, 13 nt, Molluscum contagiosum virus
cugcccgcgcgag

SEQ ID NO: 4035297 - RNA, 14 nt, Molluscum contagiosum virus
cugccgcgcaauac

SEQ ID NO: 4035298 - RNA, 21 nt, Molluscum contagiosum virus
cugccggcgcgugagcgccua

SEQ ID NO: 4035299 - RNA, 14 nt, Molluscum contagiosum virus
cugccgggagagcc

SEQ ID NO: 4035300 - RNA, 16 nt, Molluscum contagiosum virus
cugccgggagagccgc

SEQ ID NO: 4035301 - RNA, 21 nt, Molluscum contagiosum virus
cugccgguggaagagcccgca

SEQ ID NO: 4035302 - RNA, 19 nt, Molluscum contagiosum virus
cugccgucgcgcgcugugg

SEQ ID NO: 4035303 - RNA, 12 nt, Molluscum contagiosum virus
cugccuggugca

SEQ ID NO: 4035304 - RNA, 16 nt, Molluscum contagiosum virus
cugccuggugcacaca

SEQ ID NO: 4035305 - RNA, 17 nt, Molluscum contagiosum virus
cugcgacagcugcugcu

SEQ ID NO: 4035306 - RNA, 17 nt, Molluscum contagiosum virus
cugcgagaucguggacg

SEQ ID NO: 4035307 - RNA, 12 nt, Molluscum contagiosum virus
cugcgagcagcc

SEQ ID NO: 4035308 - RNA, 19 nt, Molluscum contagiosum virus
cugcgagcgccugcgagca

SEQ ID NO: 4035309 - RNA, 18 nt, Molluscum contagiosum virus
cugcgaggcgcgcacgcu

SEQ ID NO: 4035310 - RNA, 14 nt, Molluscum contagiosum virus
cugcgaguggcgcg

SEQ ID NO: 4035311 - RNA, 14 nt, Molluscum contagiosum virus
cugcgcaagcucag

SEQ ID NO: 4035312 - RNA, 22 nt, Molluscum contagiosum virus
cugcgcacacgucagccgcacg

SEQ ID NO: 4035313 - RNA, 19 nt, Molluscum contagiosum virus
cugcgcagggacgcgcuuu

SEQ ID NO: 4035314 - RNA, 22 nt, Molluscum contagiosum virus
cugcgcauggccacgcccgggc

SEQ ID NO: 4035315 - RNA, 14 nt, Molluscum contagiosum virus
cugcgccagucgcg

SEQ ID NO: 4035316 - RNA, 15 nt, Molluscum contagiosum virus
cugcgcccauuccug

SEQ ID NO: 4035317 - RNA, 18 nt, Molluscum contagiosum virus
cugcgccggcugcgccac

SEQ ID NO: 4035318 - RNA, 16 nt, Molluscum contagiosum virus
cugcgcgccgccgacg

SEQ ID NO: 4035319 - RNA, 14 nt, Molluscum contagiosum virus
cugcgcgccgcgcc

SEQ ID NO: 4035320 - RNA, 12 nt, Molluscum contagiosum virus
cugcgcgccgcu

SEQ ID NO: 4035321 - RNA, 14 nt, Molluscum contagiosum virus
cugcgcgccgcucg

SEQ ID NO: 4035322 - RNA, 14 nt, Molluscum contagiosum virus
cugcgcgcgcggcg

SEQ ID NO: 4035323 - RNA, 17 nt, Molluscum contagiosum virus
cugcgcgcuagggucca

SEQ ID NO: 4035324 - RNA, 18 nt, Molluscum contagiosum virus
cugcgcggcccgcgggcu

SEQ ID NO: 4035325 - RNA, 19 nt, Molluscum contagiosum virus
cugcgcgucugugcgcgcu

SEQ ID NO: 4035326 - RNA, 16 nt, Molluscum contagiosum virus
cugcgcgugcugggcc

SEQ ID NO: 4035327 - RNA, 15 nt, Molluscum contagiosum virus
cugcgcuccaugcug

SEQ ID NO: 4035328 - RNA, 16 nt, Molluscum contagiosum virus
cugcgcuccgacgcgg

SEQ ID NO: 4035329 - RNA, 16 nt, Molluscum contagiosum virus
cugcgcucgccugcuu

SEQ ID NO: 4035330 - RNA, 16 nt, Molluscum contagiosum virus
cugcgcugccagcucg

SEQ ID NO: 4035331 - RNA, 19 nt, Molluscum contagiosum virus
cugcgcuggaugcugcucg

SEQ ID NO: 4035332 - RNA, 17 nt, Molluscum contagiosum virus
cugcgcuugcgcgugag

SEQ ID NO: 4035333 - RNA, 23 nt, Molluscum contagiosum virus
cugcgcuuuuuuuguccuguguu

SEQ ID NO: 4035334 - RNA, 14 nt, Molluscum contagiosum virus
cugcggaacgcgca

SEQ ID NO: 4035335 - RNA, 19 nt, Molluscum contagiosum virus
cugcggacgcaaaucuguu

SEQ ID NO: 4035336 - RNA, 23 nt, Molluscum contagiosum virus
cugcggacgcgggccgcgcgcac

SEQ ID NO: 4035337 - RNA, 22 nt, Molluscum contagiosum virus
cugcggagcgccuucugcaagc

SEQ ID NO: 4035338 - RNA, 18 nt, Molluscum contagiosum virus
cugcggcucuacccggag

SEQ ID NO: 4035339 - RNA, 13 nt, Molluscum contagiosum virus
cugcggcugcugg

SEQ ID NO: 4035340 - RNA, 15 nt, Molluscum contagiosum virus
cugcggcugcuggag

SEQ ID NO: 4035341 - RNA, 16 nt, Molluscum contagiosum virus
cugcggcugcuggagc

SEQ ID NO: 4035342 - RNA, 23 nt, Molluscum contagiosum virus
cugcggguaguugcgagccagcc

SEQ ID NO: 4035343 - RNA, 18 nt, Molluscum contagiosum virus
cugcgucacaagcaccgc

SEQ ID NO: 4035344 - RNA, 24 nt, Molluscum contagiosum virus
cugcgugcgauugccccugggcuu

SEQ ID NO: 4035345 - RNA, 20 nt, Molluscum contagiosum virus
cugcguggacagcaucccug

SEQ ID NO: 4035346 - RNA, 22 nt, Molluscum contagiosum virus
cugcuacaagcggugcagcuac

SEQ ID NO: 4035347 - RNA, 16 nt, Molluscum contagiosum virus
cugcuagugcgcgcca

SEQ ID NO: 4035348 - RNA, 15 nt, Molluscum contagiosum virus
cugcucaugcgcaag

SEQ ID NO: 4035349 - RNA, 21 nt, Molluscum contagiosum virus
cugcucgaagccuucgcagag

SEQ ID NO: 4035350 - RNA, 15 nt, Molluscum contagiosum virus
cugcucgacgggcgc

SEQ ID NO: 4035351 - RNA, 14 nt, Molluscum contagiosum virus
cugcucgcgcacgc

SEQ ID NO: 4035352 - RNA, 15 nt, Molluscum contagiosum virus
cugcucgcgcacgcg

SEQ ID NO: 4035353 - RNA, 16 nt, Molluscum contagiosum virus
cugcucgcgcgcgcac

SEQ ID NO: 4035354 - RNA, 20 nt, Molluscum contagiosum virus
cugcucgcugccuggugcac

SEQ ID NO: 4035355 - RNA, 14 nt, Molluscum contagiosum virus
gaagugugccugcu

SEQ ID NO: 4035356 - RNA, 22 nt, Molluscum contagiosum virus
gaaguguugccgccggccuugu

SEQ ID NO: 4035357 - RNA, 18 nt, Molluscum contagiosum virus
gaaucgagaugcgccgca

SEQ ID NO: 4035358 - RNA, 13 nt, Molluscum contagiosum virus
gaaucuugccugu

SEQ ID NO: 4035359 - RNA, 19 nt, Molluscum contagiosum virus
gaauguguacgacgcgccc

SEQ ID NO: 4035360 - RNA, 18 nt, Molluscum contagiosum virus
gaauuaaacaaacgugca

SEQ ID NO: 4035361 - RNA, 19 nt, Molluscum contagiosum virus
gacaaaggcauuuuccugu

SEQ ID NO: 4035362 - RNA, 12 nt, Molluscum contagiosum virus
gacaacgugcug

SEQ ID NO: 4035363 - RNA, 17 nt, Molluscum contagiosum virus
gacaagcuagacuggag

SEQ ID NO: 4035364 - RNA, 19 nt, Molluscum contagiosum virus
gacaagcuagacuggagca

SEQ ID NO: 4035365 - RNA, 18 nt, Molluscum contagiosum virus
gacaaggagaugggcacg

SEQ ID NO: 4035366 - RNA, 15 nt, Molluscum contagiosum virus
gacaaugagcacuug

SEQ ID NO: 4035367 - RNA, 22 nt, Molluscum contagiosum virus
gacacgcgugcaugcgagcgcg

SEQ ID NO: 4035368 - RNA, 14 nt, Molluscum contagiosum virus
gacacgcgugucug

SEQ ID NO: 4035369 - RNA, 17 nt, Molluscum contagiosum virus
gacacgcgugucugcgc

SEQ ID NO: 4035370 - RNA, 20 nt, Molluscum contagiosum virus
gacacgcugcgcgugcuggg

SEQ ID NO: 4035371 - RNA, 22 nt, Molluscum contagiosum virus
gacacggagcggaucgugcugg

SEQ ID NO: 4035372 - RNA, 13 nt, Molluscum contagiosum virus
gacacugugcugg

SEQ ID NO: 4035373 - RNA, 18 nt, Molluscum contagiosum virus
gacagcaagcagcgcgcg

SEQ ID NO: 4035374 - RNA, 21 nt, Molluscum contagiosum virus
gacagcaagcagcgcgcgcag

SEQ ID NO: 4035375 - RNA, 20 nt, Molluscum contagiosum virus
gacagcacaaacacgcgcgc

SEQ ID NO: 4035376 - RNA, 13 nt, Molluscum contagiosum virus
gacagcauccugg

SEQ ID NO: 4035377 - RNA, 14 nt, Molluscum contagiosum virus
gacagcucagcagg

SEQ ID NO: 4035378 - RNA, 16 nt, Molluscum contagiosum virus
gacagcuugcugcugu

SEQ ID NO: 4035379 - RNA, 14 nt, Molluscum contagiosum virus
gacaggaugccugu

SEQ ID NO: 4035380 - RNA, 20 nt, Molluscum contagiosum virus
gacaggcgcgcaagugcgug

SEQ ID NO: 4035381 - RNA, 17 nt, Molluscum contagiosum virus
gacagugccuccgcgga

SEQ ID NO: 4035382 - RNA, 16 nt, Molluscum contagiosum virus
gacaucuacagccgcc

SEQ ID NO: 4035383 - RNA, 18 nt, Molluscum contagiosum virus
gacaugcacacgcaccgc

SEQ ID NO: 4035384 - RNA, 19 nt, Molluscum contagiosum virus
gacaugucguaccuggugg

SEQ ID NO: 4035385 - RNA, 15 nt, Molluscum contagiosum virus
gaccacgcuggcacg

SEQ ID NO: 4035386 - RNA, 17 nt, Molluscum contagiosum virus
gaccacggcgcgccgcc

SEQ ID NO: 4035387 - RNA, 22 nt, Molluscum contagiosum virus
gaccacgugccagagucgccgc

SEQ ID NO: 4035388 - RNA, 17 nt, Molluscum contagiosum virus
gacccagaagcgagagc

SEQ ID NO: 4035389 - RNA, 15 nt, Molluscum contagiosum virus
gacccaucggagaag

SEQ ID NO: 4035390 - RNA, 19 nt, Molluscum contagiosum virus
gacccgcgaacgagggaug

SEQ ID NO: 4035391 - RNA, 15 nt, Molluscum contagiosum virus
gaccggcgucggcaa

SEQ ID NO: 4035392 - RNA, 14 nt, Molluscum contagiosum virus
gaccuacuccuggc

SEQ ID NO: 4035393 - RNA, 15 nt, Molluscum contagiosum virus
gaccucacagcgccg

SEQ ID NO: 4035394 - RNA, 23 nt, Molluscum contagiosum virus
gaccugauuuucccgggcggcgc

SEQ ID NO: 4035395 - RNA, 23 nt, Molluscum contagiosum virus
gaccugggcgucgugcaccugga

SEQ ID NO: 4035396 - RNA, 16 nt, Molluscum contagiosum virus
gaccugucgugcaaug

SEQ ID NO: 4035397 - RNA, 15 nt, Molluscum contagiosum virus
gaccuuggugcucau

SEQ ID NO: 4035398 - RNA, 18 nt, Molluscum contagiosum virus
gacgaagagacgccaagc

SEQ ID NO: 4035399 - RNA, 22 nt, Molluscum contagiosum virus
gacgacaugcugugcggcacgc

SEQ ID NO: 4035400 - RNA, 20 nt, Molluscum contagiosum virus
gacgcagacgacgcccaagc

SEQ ID NO: 4035401 - RNA, 17 nt, Molluscum contagiosum virus
gacgcagagccaugccc

SEQ ID NO: 4035402 - RNA, 15 nt, Molluscum contagiosum virus
gacgcagcgcgagcu

SEQ ID NO: 4035403 - RNA, 19 nt, Molluscum contagiosum virus
gacgcagcgcgagcugugc

SEQ ID NO: 4035404 - RNA, 18 nt, Molluscum contagiosum virus
gacgcaggaugcuggggc

SEQ ID NO: 4035405 - RNA, 20 nt, Molluscum contagiosum virus
gacgccaagcgucgcgacgc

SEQ ID NO: 4035406 - RNA, 20 nt, Molluscum contagiosum virus
gacgccagcgauugcccgcg

SEQ ID NO: 4035407 - RNA, 20 nt, Molluscum contagiosum virus
gacgcccggcaccgcggcgg

SEQ ID NO: 4035408 - RNA, 14 nt, Molluscum contagiosum virus
gacgccuuccugcu

SEQ ID NO: 4035409 - RNA, 16 nt, Molluscum contagiosum virus
gacgccuuccugcugg

SEQ ID NO: 4035410 - RNA, 17 nt, Molluscum contagiosum virus
gacgccuuuugugcagc

SEQ ID NO: 4035411 - RNA, 15 nt, Molluscum contagiosum virus
gacgcgaugacacgc

SEQ ID NO: 4035412 - RNA, 18 nt, Molluscum contagiosum virus
gacgcgcaagugugcgca

SEQ ID NO: 4035413 - RNA, 17 nt, Molluscum contagiosum virus
gacgcgcagcucgacgc

SEQ ID NO: 4035414 - RNA, 16 nt, Molluscum contagiosum virus
gacgcgcgagugugcg

SEQ ID NO: 4035415 - RNA, 17 nt, Molluscum contagiosum virus
gacgcgcgcggcaagca

SEQ ID NO: 4035416 - RNA, 15 nt, Molluscum contagiosum virus
gacgcgcggcggcgc

SEQ ID NO: 4035417 - RNA, 16 nt, Molluscum contagiosum virus
gacgcggccgcggagg

SEQ ID NO: 4035418 - RNA, 13 nt, Molluscum contagiosum virus
gacgcgggccugu

SEQ ID NO: 4035419 - RNA, 22 nt, Molluscum contagiosum virus
gacgcgggcguguccgcgggcg

SEQ ID NO: 4035420 - RNA, 13 nt, Molluscum contagiosum virus
gacgcggucgcgc

SEQ ID NO: 4035421 - RNA, 14 nt, Molluscum contagiosum virus
gacgcuagcugugc

SEQ ID NO: 4035422 - RNA, 14 nt, Molluscum contagiosum virus
gacgcuggcggcgc

SEQ ID NO: 4035423 - RNA, 15 nt, Molluscum contagiosum virus
gacggaaccguggug

SEQ ID NO: 4035424 - RNA, 20 nt, Molluscum contagiosum virus
gacggcacgggcacgcgcgc

SEQ ID NO: 4035425 - RNA, 16 nt, Molluscum contagiosum virus
gacggccggcgggcgc

SEQ ID NO: 4035426 - RNA, 18 nt, Molluscum contagiosum virus
gacggcgacgacagcgac

SEQ ID NO: 4035427 - RNA, 18 nt, Molluscum contagiosum virus
gacggcgccucgagcgcg

SEQ ID NO: 4035428 - RNA, 15 nt, Molluscum contagiosum virus
gacggcgcgcagcgc

SEQ ID NO: 4035429 - RNA, 12 nt, Molluscum contagiosum virus
gacggcgcgcgc

SEQ ID NO: 4035430 - RNA, 14 nt, Molluscum contagiosum virus
gacggcgcugcgcg

SEQ ID NO: 4035431 - RNA, 18 nt, Molluscum contagiosum virus
gacggcgugcgccgcucc

SEQ ID NO: 4035432 - RNA, 13 nt, Molluscum contagiosum virus
gacgggcccgcga

SEQ ID NO: 4035433 - RNA, 13 nt, Molluscum contagiosum virus
gacggggcgcacg

SEQ ID NO: 4035434 - RNA, 16 nt, Molluscum contagiosum virus
gacggucacgcaagcu

SEQ ID NO: 4035435 - RNA, 17 nt, Molluscum contagiosum virus
gacggugcuggugcugg

SEQ ID NO: 4035436 - RNA, 20 nt, Molluscum contagiosum virus
gacggugugccgcugguggg

SEQ ID NO: 4035437 - RNA, 18 nt, Molluscum contagiosum virus
gacguacgagcaggcgca

SEQ ID NO: 4035438 - RNA, 16 nt, Molluscum contagiosum virus
gacgucaaccgggcuc

SEQ ID NO: 4035439 - RNA, 20 nt, Molluscum contagiosum virus
gacgucaaccgggcucucgc

SEQ ID NO: 4035440 - RNA, 11 nt, Molluscum contagiosum virus
gacgucgcggc

SEQ ID NO: 4035441 - RNA, 16 nt, Molluscum contagiosum virus
gacgugaucgcgcagg

SEQ ID NO: 4035442 - RNA, 19 nt, Molluscum contagiosum virus
gacgugaucgcgcaggcgc

SEQ ID NO: 4035443 - RNA, 20 nt, Molluscum contagiosum virus
gacgugaucgcgcaggcgcg

SEQ ID NO: 4035444 - RNA, 14 nt, Molluscum contagiosum virus
gacgugcugcgcaa

SEQ ID NO: 4035445 - RNA, 23 nt, Molluscum contagiosum virus
gacgugcugcgcgcccaggcgcg

SEQ ID NO: 4035446 - RNA, 14 nt, Molluscum contagiosum virus
gacgugcugcugca

SEQ ID NO: 4035447 - RNA, 13 nt, Molluscum contagiosum virus
gacgugcugcugg

SEQ ID NO: 4035448 - RNA, 17 nt, Molluscum contagiosum virus
gacgugcuucacgaccu

SEQ ID NO: 4035449 - RNA, 18 nt, Molluscum contagiosum virus
gacguggacguggauacc

SEQ ID NO: 4035450 - RNA, 22 nt, Molluscum contagiosum virus
gacguggauaccaugcucucgc

SEQ ID NO: 4035451 - RNA, 19 nt, Molluscum contagiosum virus
gacgugguacuggcgcccg

SEQ ID NO: 4035452 - RNA, 23 nt, Molluscum contagiosum virus
gacgugugcucugugcgcgcaga

SEQ ID NO: 4035453 - RNA, 20 nt, Molluscum contagiosum virus
gacuaccuggcggcgcugga

SEQ ID NO: 4035454 - RNA, 23 nt, Molluscum contagiosum virus
gacuaccuggcggcgcuggagac

SEQ ID NO: 4035455 - RNA, 19 nt, Molluscum contagiosum virus
gacuacgcacggcggacgc

SEQ ID NO: 4035456 - RNA, 21 nt, Molluscum contagiosum virus
gacuagaugcguccuaugcau

SEQ ID NO: 4035457 - RNA, 12 nt, Molluscum contagiosum virus
gacucagcaugu

SEQ ID NO: 4035458 - RNA, 23 nt, Molluscum contagiosum virus
gcuuagaccuuuacgucgcgcgc

SEQ ID NO: 4035459 - RNA, 17 nt, Molluscum contagiosum virus
gcuuagcacacgcgcgc

SEQ ID NO: 4035460 - RNA, 21 nt, Molluscum contagiosum virus
gcuuagcuuccgucugcugcu

SEQ ID NO: 4035461 - RNA, 23 nt, Molluscum contagiosum virus
gcuucacgcugcucgugcugcuc

SEQ ID NO: 4035462 - RNA, 16 nt, Molluscum contagiosum virus
gcuucauccgcgcgcu

SEQ ID NO: 4035463 - RNA, 15 nt, Molluscum contagiosum virus
gcuucccgaguacua

SEQ ID NO: 4035464 - RNA, 14 nt, Molluscum contagiosum virus
gcuuccggugccgg

SEQ ID NO: 4035465 - RNA, 14 nt, Molluscum contagiosum virus
gcuuccuuuucucc

SEQ ID NO: 4035466 - RNA, 14 nt, Molluscum contagiosum virus
gcuucgccgcgcgc

SEQ ID NO: 4035467 - RNA, 19 nt, Molluscum contagiosum virus
gcuucggcucccagcagcg

SEQ ID NO: 4035468 - RNA, 13 nt, Molluscum contagiosum virus
gcuucgggcucag

SEQ ID NO: 4035469 - RNA, 13 nt, Molluscum contagiosum virus
gcuucgucuucac

SEQ ID NO: 4035470 - RNA, 20 nt, Molluscum contagiosum virus
gcuucuacugcgcacccgcc

SEQ ID NO: 4035471 - RNA, 19 nt, Molluscum contagiosum virus
gcuucuuuacgggcgccag

SEQ ID NO: 4035472 - RNA, 15 nt, Molluscum contagiosum virus
gcuugccccucgucc

SEQ ID NO: 4035473 - RNA, 19 nt, Molluscum contagiosum virus
gcuugcucccucgcgcgca

SEQ ID NO: 4035474 - RNA, 13 nt, Molluscum contagiosum virus
gcuugcugcgcug

SEQ ID NO: 4035475 - RNA, 22 nt, Molluscum contagiosum virus
gcuugcuucggcggcugugccc

SEQ ID NO: 4035476 - RNA, 18 nt, Molluscum contagiosum virus
gcuuggacagcaagcagc

SEQ ID NO: 4035477 - RNA, 15 nt, Molluscum contagiosum virus
gcuuggccggaacgc

SEQ ID NO: 4035478 - RNA, 21 nt, Molluscum contagiosum virus
gcuuggccggaacgccgugcg

SEQ ID NO: 4035479 - RNA, 17 nt, Molluscum contagiosum virus
gcuuggugcgcucgagc

SEQ ID NO: 4035480 - RNA, 23 nt, Molluscum contagiosum virus
gcuuugaggaacuagugcugcug

SEQ ID NO: 4035481 - RNA, 19 nt, Molluscum contagiosum virus
gcuuugugcgaccugcugc

SEQ ID NO: 4035482 - RNA, 16 nt, Molluscum contagiosum virus
gcuuuuuuuguccugu

SEQ ID NO: 4035483 - RNA, 17 nt, Molluscum contagiosum virus
ggaaaaaucccccgcca

SEQ ID NO: 4035484 - RNA, 22 nt, Molluscum contagiosum virus
ggaaaccucaccucugcgcggc

SEQ ID NO: 4035485 - RNA, 23 nt, Molluscum contagiosum virus
ggaaacgcacagccccugcugcu

SEQ ID NO: 4035486 - RNA, 17 nt, Molluscum contagiosum virus
ggaaacgcuggcgagca

SEQ ID NO: 4035487 - RNA, 22 nt, Molluscum contagiosum virus
ggaaagcuggcgggugccgugc

SEQ ID NO: 4035488 - RNA, 19 nt, Molluscum contagiosum virus
ggaacaccacacgcgcggc

SEQ ID NO: 4035489 - RNA, 23 nt, Molluscum contagiosum virus
ggaacgaggucaucuucgugcug

SEQ ID NO: 4035490 - RNA, 16 nt, Molluscum contagiosum virus
ggaacgccgccacgcc

SEQ ID NO: 4035491 - RNA, 13 nt, Molluscum contagiosum virus
ggaacgcgccgcg

SEQ ID NO: 4035492 - RNA, 22 nt, Molluscum contagiosum virus
ggaacgcuuggcgggcagcggc

SEQ ID NO: 4035493 - RNA, 22 nt, Molluscum contagiosum virus
ggaacucggcuucugcugcaca

SEQ ID NO: 4035494 - RNA, 16 nt, Molluscum contagiosum virus
ggaacucuacgacaug

SEQ ID NO: 4035495 - RNA, 19 nt, Molluscum contagiosum virus
ggaagcaacgacaaggaaa

SEQ ID NO: 4035496 - RNA, 20 nt, Molluscum contagiosum virus
ggaagcaacgacaaggaaag

SEQ ID NO: 4035497 - RNA, 15 nt, Molluscum contagiosum virus
ggaagccgccagcca

SEQ ID NO: 4035498 - RNA, 15 nt, Molluscum contagiosum virus
ggaagcugcacgugc

SEQ ID NO: 4035499 - RNA, 20 nt, Molluscum contagiosum virus
ggaaggacagugucuuguca

SEQ ID NO: 4035500 - RNA, 15 nt, Molluscum contagiosum virus
ggaaggcgaccagcu

SEQ ID NO: 4035501 - RNA, 15 nt, Molluscum contagiosum virus
ggaauaccggagaca

SEQ ID NO: 4035502 - RNA, 16 nt, Molluscum contagiosum virus
ggacaccgcgggcgug

SEQ ID NO: 4035503 - RNA, 19 nt, Molluscum contagiosum virus
ggacacgggugagcucgcc

SEQ ID NO: 4035504 - RNA, 16 nt, Molluscum contagiosum virus
ggacacuggcaccgga

SEQ ID NO: 4035505 - RNA, 22 nt, Molluscum contagiosum virus
ggacagagcccgcggcgcacgg

SEQ ID NO: 4035506 - RNA, 18 nt, Molluscum contagiosum virus
ggacagcaagcagcgcgc

SEQ ID NO: 4035507 - RNA, 15 nt, Molluscum contagiosum virus
ggacagccugcaccg

SEQ ID NO: 4035508 - RNA, 14 nt, Molluscum contagiosum virus
ggacagcggaagaa

SEQ ID NO: 4035509 - RNA, 19 nt, Molluscum contagiosum virus
ggacaugagcuugcgcacg

SEQ ID NO: 4035510 - RNA, 14 nt, Molluscum contagiosum virus
ggaccugcgccagc

SEQ ID NO: 4035511 - RNA, 15 nt, Molluscum contagiosum virus
ggaccugcugguggu

SEQ ID NO: 4035512 - RNA, 18 nt, Molluscum contagiosum virus
ggacgaagcugugcaaga

SEQ ID NO: 4035513 - RNA, 15 nt, Molluscum contagiosum virus
ggacgcacagggcug

SEQ ID NO: 4035514 - RNA, 19 nt, Molluscum contagiosum virus
ggacgcaggaugcuggggc

SEQ ID NO: 4035515 - RNA, 20 nt, Molluscum contagiosum virus
ggacgccagcuugagcacac

SEQ ID NO: 4035516 - RNA, 12 nt, Molluscum contagiosum virus
ggacgcgcaagu

SEQ ID NO: 4035517 - RNA, 19 nt, Molluscum contagiosum virus
ggacgcgcuugcgcggaag

SEQ ID NO: 4035518 - RNA, 24 nt, Molluscum contagiosum virus
ggacgcggugaccggagcggcgga

SEQ ID NO: 4035519 - RNA, 11 nt, Molluscum contagiosum virus
ggacggagguc

SEQ ID NO: 4035520 - RNA, 23 nt, Molluscum contagiosum virus
ggacgugcccuacgcgcgcgugc

SEQ ID NO: 4035521 - RNA, 22 nt, Molluscum contagiosum virus
ggacgugcuccgaguccagcuu

SEQ ID NO: 4035522 - RNA, 17 nt, Molluscum contagiosum virus
ggacguggucgcgcgcg

SEQ ID NO: 4035523 - RNA, 14 nt, Molluscum contagiosum virus
ggacuacgcacggc

SEQ ID NO: 4035524 - RNA, 13 nt, Molluscum contagiosum virus
ggacuuuucgcgc

SEQ ID NO: 4035525 - RNA, 18 nt, Molluscum contagiosum virus
ggagaacgcgaggccggc

SEQ ID NO: 4035526 - RNA, 13 nt, Molluscum contagiosum virus
ggagacguagagc

SEQ ID NO: 4035527 - RNA, 15 nt, Molluscum contagiosum virus
ggagagagagacaug

SEQ ID NO: 4035528 - RNA, 14 nt, Molluscum contagiosum virus
ggagagcgcgcggc

SEQ ID NO: 4035529 - RNA, 22 nt, Molluscum contagiosum virus
ggagagguugcgcggggcaggc

SEQ ID NO: 4035530 - RNA, 15 nt, Molluscum contagiosum virus
ggagaugacgggcac

SEQ ID NO: 4035531 - RNA, 16 nt, Molluscum contagiosum virus
ggagaugacgggcacg

SEQ ID NO: 4035532 - RNA, 22 nt, Molluscum contagiosum virus
ggagccaagcaacggcggcgca

SEQ ID NO: 4035533 - RNA, 15 nt, Molluscum contagiosum virus
ggagcccgugcugga

SEQ ID NO: 4035534 - RNA, 12 nt, Molluscum contagiosum virus
ggagccgcggca

SEQ ID NO: 4035535 - RNA, 21 nt, Molluscum contagiosum virus
ggagccggccuagagcuggca

SEQ ID NO: 4035536 - RNA, 23 nt, Molluscum contagiosum virus
ggagcgacauagcgcaccagcug

SEQ ID NO: 4035537 - RNA, 19 nt, Molluscum contagiosum virus
ggagcgcagucccagcacc

SEQ ID NO: 4035538 - RNA, 13 nt, Molluscum contagiosum virus
ggagcgcgcacgg

SEQ ID NO: 4035539 - RNA, 20 nt, Molluscum contagiosum virus
ggagcucgacucgagcgagc

SEQ ID NO: 4035540 - RNA, 17 nt, Molluscum contagiosum virus
ggagcugcgcgagacgc

SEQ ID NO: 4035541 - RNA, 17 nt, Molluscum contagiosum virus
ggagcugguccagggcu

SEQ ID NO: 4035542 - RNA, 14 nt, Molluscum contagiosum virus
ggaggacacgcgca

SEQ ID NO: 4035543 - RNA, 20 nt, Molluscum contagiosum virus
ggaggaucgcuacgugcgca

SEQ ID NO: 4035544 - RNA, 14 nt, Molluscum contagiosum virus
ggaggcaagcgggc

SEQ ID NO: 4035545 - RNA, 18 nt, Molluscum contagiosum virus
ggaggccaacgccagcug

SEQ ID NO: 4035546 - RNA, 19 nt, Molluscum contagiosum virus
ggaggccgucuucgccggc

SEQ ID NO: 4035547 - RNA, 20 nt, Molluscum contagiosum virus
ggaggccgucuucgccggca

SEQ ID NO: 4035548 - RNA, 21 nt, Molluscum contagiosum virus
ggaggcgcuaccucgcgggag

SEQ ID NO: 4035549 - RNA, 19 nt, Molluscum contagiosum virus
ggaggcgcuagugcagaug

SEQ ID NO: 4035550 - RNA, 16 nt, Molluscum contagiosum virus
ggaggcggcacugcua

SEQ ID NO: 4035551 - RNA, 20 nt, Molluscum contagiosum virus
ggaggcggcacugcuagcga

SEQ ID NO: 4035552 - RNA, 15 nt, Molluscum contagiosum virus
ggaggcucgagcgcg

SEQ ID NO: 4035553 - RNA, 18 nt, Molluscum contagiosum virus
ggagggcacgcugcacau

SEQ ID NO: 4035554 - RNA, 14 nt, Molluscum contagiosum virus
ggagguuggaagca

SEQ ID NO: 4035555 - RNA, 18 nt, Molluscum contagiosum virus
ggaguagcgugcgccugc

SEQ ID NO: 4035556 - RNA, 12 nt, Molluscum contagiosum virus
ggaguccaugcc

SEQ ID NO: 4035557 - RNA, 18 nt, Molluscum contagiosum virus
ggaguccucgacaaugag

SEQ ID NO: 4035558 - RNA, 18 nt, Molluscum contagiosum virus
ggauacagcgcggagaga

SEQ ID NO: 4035559 - RNA, 21 nt, Molluscum contagiosum virus
ggauacagcgcggagagaaca

SEQ ID NO: 4035560 - RNA, 20 nt, Molluscum contagiosum virus
gucaggccggucgcggaaga

SEQ ID NO: 4035561 - RNA, 13 nt, Molluscum contagiosum virus
gucaucgggcugc

SEQ ID NO: 4035562 - RNA, 16 nt, Molluscum contagiosum virus
guccaacccgcggcgc

SEQ ID NO: 4035563 - RNA, 22 nt, Molluscum contagiosum virus
guccacgaacgacagcgccgcc

SEQ ID NO: 4035564 - RNA, 20 nt, Molluscum contagiosum virus
guccagccgcaccgggacga

SEQ ID NO: 4035565 - RNA, 19 nt, Molluscum contagiosum virus
guccagcggcugcccgcgg

SEQ ID NO: 4035566 - RNA, 18 nt, Molluscum contagiosum virus
gucccagcaccgcgccgc

SEQ ID NO: 4035567 - RNA, 20 nt, Molluscum contagiosum virus
gucccagcagcugcuccgcc

SEQ ID NO: 4035568 - RNA, 15 nt, Molluscum contagiosum virus
guccgcacgcacgga

SEQ ID NO: 4035569 - RNA, 17 nt, Molluscum contagiosum virus
guccgcaucggcgccgc

SEQ ID NO: 4035570 - RNA, 16 nt, Molluscum contagiosum virus
guccgccucgagcacg

SEQ ID NO: 4035571 - RNA, 15 nt, Molluscum contagiosum virus
guccgcgggcgcacg

SEQ ID NO: 4035572 - RNA, 19 nt, Molluscum contagiosum virus
guccgcgggcgcgcgccag

SEQ ID NO: 4035573 - RNA, 20 nt, Molluscum contagiosum virus
guccgcuccuucucagggcu

SEQ ID NO: 4035574 - RNA, 17 nt, Molluscum contagiosum virus
guccggaggcacgggcu

SEQ ID NO: 4035575 - RNA, 14 nt, Molluscum contagiosum virus
guccggcgcucgcc

SEQ ID NO: 4035576 - RNA, 15 nt, Molluscum contagiosum virus
guccggcgcucgccu

SEQ ID NO: 4035577 - RNA, 15 nt, Molluscum contagiosum virus
guccggcgcuugccc

SEQ ID NO: 4035578 - RNA, 16 nt, Molluscum contagiosum virus
guccgguacugcugca

SEQ ID NO: 4035579 - RNA, 18 nt, Molluscum contagiosum virus
guccgguguccacgacac

SEQ ID NO: 4035580 - RNA, 16 nt, Molluscum contagiosum virus
guccgucacggacagc

SEQ ID NO: 4035581 - RNA, 19 nt, Molluscum contagiosum virus
guccuacacgccgcuggag

SEQ ID NO: 4035582 - RNA, 20 nt, Molluscum contagiosum virus
guccucgugggauaggcaca

SEQ ID NO: 4035583 - RNA, 14 nt, Molluscum contagiosum virus
guccugaacagcau

SEQ ID NO: 4035584 - RNA, 12 nt, Molluscum contagiosum virus
guccuggagccu

SEQ ID NO: 4035585 - RNA, 22 nt, Molluscum contagiosum virus
guccuuuuuugugucuacggac

SEQ ID NO: 4035586 - RNA, 13 nt, Molluscum contagiosum virus
gucgacagagaag

SEQ ID NO: 4035587 - RNA, 21 nt, Molluscum contagiosum virus
gucgaccuggaagccgccagc

SEQ ID NO: 4035588 - RNA, 18 nt, Molluscum contagiosum virus
gucgacgagugcgccgcg

SEQ ID NO: 4035589 - RNA, 12 nt, Molluscum contagiosum virus
gucgacggcgcc

SEQ ID NO: 4035590 - RNA, 19 nt, Molluscum contagiosum virus
gucgacgggaacgagguca

SEQ ID NO: 4035591 - RNA, 16 nt, Molluscum contagiosum virus
gucgacguggagccug

SEQ ID NO: 4035592 - RNA, 19 nt, Molluscum contagiosum virus
gucgaggagggcguccgua

SEQ ID NO: 4035593 - RNA, 14 nt, Molluscum contagiosum virus
gucgaggccuucgc

SEQ ID NO: 4035594 - RNA, 15 nt, Molluscum contagiosum virus
gucgaguucgcucgc

SEQ ID NO: 4035595 - RNA, 23 nt, Molluscum contagiosum virus
gucgcagcagcggucucggcagc

SEQ ID NO: 4035596 - RNA, 19 nt, Molluscum contagiosum virus
gucgcccggcaggcucccg

SEQ ID NO: 4035597 - RNA, 18 nt, Molluscum contagiosum virus
gucgcgagugugcgcgcc

SEQ ID NO: 4035598 - RNA, 11 nt, Molluscum contagiosum virus
gucgcgcacgc

SEQ ID NO: 4035599 - RNA, 21 nt, Molluscum contagiosum virus
gucgcgcaucaccgagcgaga

SEQ ID NO: 4035600 - RNA, 16 nt, Molluscum contagiosum virus
gucgcgccgaggacgc

SEQ ID NO: 4035601 - RNA, 12 nt, Molluscum contagiosum virus
gucggagcagga

SEQ ID NO: 4035602 - RNA, 22 nt, Molluscum contagiosum virus
gucggcaccgcgccgaaacacg

SEQ ID NO: 4035603 - RNA, 18 nt, Molluscum contagiosum virus
gucggcggcaugcgcgcg

SEQ ID NO: 4035604 - RNA, 16 nt, Molluscum contagiosum virus
gucgugcaggccgugc

SEQ ID NO: 4035605 - RNA, 20 nt, Molluscum contagiosum virus
gucgugcgcguucggaacgc

SEQ ID NO: 4035606 - RNA, 13 nt, Molluscum contagiosum virus
gucuaccccgcgu

SEQ ID NO: 4035607 - RNA, 18 nt, Molluscum contagiosum virus
gucuccccuugggcucug

SEQ ID NO: 4035608 - RNA, 21 nt, Molluscum contagiosum virus
gucucgaaccgaggccgcgcu

SEQ ID NO: 4035609 - RNA, 15 nt, Molluscum contagiosum virus
gucucgaugugacaa

SEQ ID NO: 4035610 - RNA, 19 nt, Molluscum contagiosum virus
gucucgaugugacaacaug

SEQ ID NO: 4035611 - RNA, 14 nt, Molluscum contagiosum virus
gucucgcgcucgcc

SEQ ID NO: 4035612 - RNA, 14 nt, Molluscum contagiosum virus
gucucgcugcuggg

SEQ ID NO: 4035613 - RNA, 15 nt, Molluscum contagiosum virus
gucucucugucuccc

SEQ ID NO: 4035614 - RNA, 13 nt, Molluscum contagiosum virus
gucucugcgcgag

SEQ ID NO: 4035615 - RNA, 13 nt, Molluscum contagiosum virus
gucugcaaggccu

SEQ ID NO: 4035616 - RNA, 15 nt, Molluscum contagiosum virus
gucugggaggugucc

SEQ ID NO: 4035617 - RNA, 18 nt, Molluscum contagiosum virus
gucuuaacucagcgggca

SEQ ID NO: 4035618 - RNA, 14 nt, Molluscum contagiosum virus
gucuuacugcugca

SEQ ID NO: 4035619 - RNA, 18 nt, Molluscum contagiosum virus
gucuuaugcauccugaug

SEQ ID NO: 4035620 - RNA, 13 nt, Molluscum contagiosum virus
gucuucuaccgcc

SEQ ID NO: 4035621 - RNA, 23 nt, Molluscum contagiosum virus
gucuugccgaagccgcaggccag

SEQ ID NO: 4035622 - RNA, 16 nt, Molluscum contagiosum virus
gugaaguccucucucc

SEQ ID NO: 4035623 - RNA, 15 nt, Molluscum contagiosum virus
gugacaaucucugcg

SEQ ID NO: 4035624 - RNA, 20 nt, Molluscum contagiosum virus
gugacaaucucugcgccgcg

SEQ ID NO: 4035625 - RNA, 23 nt, Molluscum contagiosum virus
gugacaaucucugcgccgcgcgc

SEQ ID NO: 4035626 - RNA, 21 nt, Molluscum contagiosum virus
gugacuagcgcuggcugcagg

SEQ ID NO: 4035627 - RNA, 14 nt, Molluscum contagiosum virus
gugacucggccgcg

SEQ ID NO: 4035628 - RNA, 19 nt, Molluscum contagiosum virus
gugacucggccgcggggcg

SEQ ID NO: 4035629 - RNA, 21 nt, Molluscum contagiosum virus
gugagaaaguucccguccgcg

SEQ ID NO: 4035630 - RNA, 23 nt, Molluscum contagiosum virus
gugcaaaucgcguacgguguccu

SEQ ID NO: 4035631 - RNA, 19 nt, Molluscum contagiosum virus
gugcacagcguagcggacg

SEQ ID NO: 4035632 - RNA, 18 nt, Molluscum contagiosum virus
gugcacauugcugcugca

SEQ ID NO: 4035633 - RNA, 14 nt, Molluscum contagiosum virus
gugcaccagcaccg

SEQ ID NO: 4035634 - RNA, 23 nt, Molluscum contagiosum virus
gugcacccuccgcacagagggac

SEQ ID NO: 4035635 - RNA, 12 nt, Molluscum contagiosum virus
gugcaccuggag

SEQ ID NO: 4035636 - RNA, 21 nt, Molluscum contagiosum virus
gugcacgcuguccaggcgcug

SEQ ID NO: 4035637 - RNA, 21 nt, Molluscum contagiosum virus
gugcagcugccgcagagccgc

SEQ ID NO: 4035638 - RNA, 17 nt, Molluscum contagiosum virus
gugcaggaacgcgcgcu

SEQ ID NO: 4035639 - RNA, 18 nt, Molluscum contagiosum virus
gugcaguggcuacuggag

SEQ ID NO: 4035640 - RNA, 18 nt, Molluscum contagiosum virus
gugcauggcacgcgagca

SEQ ID NO: 4035641 - RNA, 16 nt, Molluscum contagiosum virus
gugcauggcggcggcc

SEQ ID NO: 4035642 - RNA, 17 nt, Molluscum contagiosum virus
gugccagcagcauuuug

SEQ ID NO: 4035643 - RNA, 18 nt, Molluscum contagiosum virus
gugcccacgcuggcgcgc

SEQ ID NO: 4035644 - RNA, 19 nt, Molluscum contagiosum virus
gugcccaugcucgagccug

SEQ ID NO: 4035645 - RNA, 13 nt, Molluscum contagiosum virus
gugcccgagcccg

SEQ ID NO: 4035646 - RNA, 18 nt, Molluscum contagiosum virus
gugccgacgugugccgcu

SEQ ID NO: 4035647 - RNA, 16 nt, Molluscum contagiosum virus
gugccgaggcgcugcc

SEQ ID NO: 4035648 - RNA, 16 nt, Molluscum contagiosum virus
gugccgccgugggcgc

SEQ ID NO: 4035649 - RNA, 13 nt, Molluscum contagiosum virus
gugccgcugcgcg

SEQ ID NO: 4035650 - RNA, 15 nt, Molluscum contagiosum virus
gugccgggcgccggc

SEQ ID NO: 4035651 - RNA, 13 nt, Molluscum contagiosum virus
gugccucugccag

SEQ ID NO: 4035652 - RNA, 19 nt, Molluscum contagiosum virus
gugccugcaagaggcgcug

SEQ ID NO: 4035653 - RNA, 13 nt, Molluscum contagiosum virus
gugcgaaggcucg

SEQ ID NO: 4035654 - RNA, 22 nt, Molluscum contagiosum virus
gugcgacucgucgagcacgaag

SEQ ID NO: 4035655 - RNA, 22 nt, Molluscum contagiosum virus
gugcgccgcgccgaaguacuuu

SEQ ID NO: 4035656 - RNA, 19 nt, Molluscum contagiosum virus
gugcgcgacggcgagcucu

SEQ ID NO: 4035657 - RNA, 18 nt, Molluscum contagiosum virus
gugcgcgacuuggggcuc

SEQ ID NO: 4035658 - RNA, 15 nt, Molluscum contagiosum virus
gugcgcgagcugagg

SEQ ID NO: 4035659 - RNA, 22 nt, Molluscum contagiosum virus
gugcgcgguggugcugggcgug

SEQ ID NO: 4035660 - RNA, 17 nt, Molluscum contagiosum virus
gugcgcgugacacaccg

SEQ ID NO: 4035661 - RNA, 19 nt, Molluscum contagiosum virus
gugcgcgugucuggagccc

SEQ ID NO: 4035662 - RNA, 21 nt, Molluscum contagiosum virus
gugcgcucgcuagaggacgcc

SEQ ID NO: 4035663 - RNA, 18 nt, Molluscum contagiosum virus
uccacggguagcagcgcc

SEQ ID NO: 4035664 - RNA, 19 nt, Molluscum contagiosum virus
uccacguccgacucggaca

SEQ ID NO: 4035665 - RNA, 19 nt, Molluscum contagiosum virus
uccacgucgaucagcuccg

SEQ ID NO: 4035666 - RNA, 21 nt, Molluscum contagiosum virus
uccagcccgcggugcgcacau

SEQ ID NO: 4035667 - RNA, 20 nt, Molluscum contagiosum virus
uccagcggcugcccgcggag

SEQ ID NO: 4035668 - RNA, 22 nt, Molluscum contagiosum virus
uccagcucggguuccagcuccg

SEQ ID NO: 4035669 - RNA, 14 nt, Molluscum contagiosum virus
uccagcugcgcgag

SEQ ID NO: 4035670 - RNA, 24 nt, Molluscum contagiosum virus
uccagguggccaacggcgccaucg

SEQ ID NO: 4035671 - RNA, 15 nt, Molluscum contagiosum virus
uccagugaaaugacg

SEQ ID NO: 4035672 - RNA, 16 nt, Molluscum contagiosum virus
uccaguggcgcccgug

SEQ ID NO: 4035673 - RNA, 17 nt, Molluscum contagiosum virus
uccccaagaccugcuuc

SEQ ID NO: 4035674 - RNA, 17 nt, Molluscum contagiosum virus
ucccccgccaggaacga

SEQ ID NO: 4035675 - RNA, 21 nt, Molluscum contagiosum virus
uccccgcacaagggcagcuca

SEQ ID NO: 4035676 - RNA, 14 nt, Molluscum contagiosum virus
uccccgccagcacc

SEQ ID NO: 4035677 - RNA, 17 nt, Molluscum contagiosum virus
uccccgcgggccgccgc

SEQ ID NO: 4035678 - RNA, 13 nt, Molluscum contagiosum virus
ucccgacagcaga

SEQ ID NO: 4035679 - RNA, 18 nt, Molluscum contagiosum virus
ucccgaggcguccagcgg

SEQ ID NO: 4035680 - RNA, 18 nt, Molluscum contagiosum virus
ucccgcgccacgagcgcc

SEQ ID NO: 4035681 - RNA, 21 nt, Molluscum contagiosum virus
ucccgcgccacgagcgccgcg

SEQ ID NO: 4035682 - RNA, 20 nt, Molluscum contagiosum virus
ucccggcugccgcugccugu

SEQ ID NO: 4035683 - RNA, 15 nt, Molluscum contagiosum virus
ucccgggcggcgcgc

SEQ ID NO: 4035684 - RNA, 18 nt, Molluscum contagiosum virus
ucccugccacaugcagua

SEQ ID NO: 4035685 - RNA, 16 nt, Molluscum contagiosum virus
uccgacccggcucgcu

SEQ ID NO: 4035686 - RNA, 17 nt, Molluscum contagiosum virus
uccgacccgugcugcuu

SEQ ID NO: 4035687 - RNA, 16 nt, Molluscum contagiosum virus
uccgaccgugcccugg

SEQ ID NO: 4035688 - RNA, 18 nt, Molluscum contagiosum virus
uccgagccggacgcgcga

SEQ ID NO: 4035689 - RNA, 14 nt, Molluscum contagiosum virus
uccgaggacgacgc

SEQ ID NO: 4035690 - RNA, 21 nt, Molluscum contagiosum virus
uccgcaggcgucaugcgcgcg

SEQ ID NO: 4035691 - RNA, 22 nt, Molluscum contagiosum virus
uccgccucggaaaacgcccgag

SEQ ID NO: 4035692 - RNA, 18 nt, Molluscum contagiosum virus
uccgcgacgaacucgaca

SEQ ID NO: 4035693 - RNA, 15 nt, Molluscum contagiosum virus
uccgcggcacgcgag

SEQ ID NO: 4035694 - RNA, 15 nt, Molluscum contagiosum virus
uccgcguacagcgcg

SEQ ID NO: 4035695 - RNA, 17 nt, Molluscum contagiosum virus
uccgcucgcgcugcuuc

SEQ ID NO: 4035696 - RNA, 12 nt, Molluscum contagiosum virus
uccgcucucgag

SEQ ID NO: 4035697 - RNA, 16 nt, Molluscum contagiosum virus
uccggcagcuggagcu

SEQ ID NO: 4035698 - RNA, 22 nt, Molluscum contagiosum virus
uccggcggcuggaccugcgcca

SEQ ID NO: 4035699 - RNA, 18 nt, Molluscum contagiosum virus
uccgggcacguccgccuc

SEQ ID NO: 4035700 - RNA, 14 nt, Molluscum contagiosum virus
uccggggcgcaagc

SEQ ID NO: 4035701 - RNA, 16 nt, Molluscum contagiosum virus
uccucaccuuccuggg

SEQ ID NO: 4035702 - RNA, 20 nt, Molluscum contagiosum virus
uccuccaauccuccugccgc

SEQ ID NO: 4035703 - RNA, 22 nt, Molluscum contagiosum virus
uccucgagagggagcagccucc

SEQ ID NO: 4035704 - RNA, 13 nt, Molluscum contagiosum virus
uccucggcgcaca

SEQ ID NO: 4035705 - RNA, 20 nt, Molluscum contagiosum virus
uccucuacaccagcuggacg

SEQ ID NO: 4035706 - RNA, 15 nt, Molluscum contagiosum virus
uccucuuggccccuc

SEQ ID NO: 4035707 - RNA, 16 nt, Molluscum contagiosum virus
uccugccgucgcccgu

SEQ ID NO: 4035708 - RNA, 19 nt, Molluscum contagiosum virus
uccugcugccgggagagga

SEQ ID NO: 4035709 - RNA, 21 nt, Molluscum contagiosum virus
uccugcuggcgcgcugcgugc

SEQ ID NO: 4035710 - RNA, 14 nt, Molluscum contagiosum virus
uccuggcaauccug

SEQ ID NO: 4035711 - RNA, 22 nt, Molluscum contagiosum virus
uccugguaguugcagcccacca

SEQ ID NO: 4035712 - RNA, 13 nt, Molluscum contagiosum virus
uccuggugugcca

SEQ ID NO: 4035713 - RNA, 19 nt, Molluscum contagiosum virus
uccuguagcaaggggucug

SEQ ID NO: 4035714 - RNA, 22 nt, Molluscum contagiosum virus
uccuucgaagaggucucucaaa

SEQ ID NO: 4035715 - RNA, 23 nt, Molluscum contagiosum virus
ucgaacgcaaggugugcgcgcug

SEQ ID NO: 4035716 - RNA, 14 nt, Molluscum contagiosum virus
ucgaacgcgcgugc

SEQ ID NO: 4035717 - RNA, 19 nt, Molluscum contagiosum virus
ucgaagaccaccagcacca

SEQ ID NO: 4035718 - RNA, 16 nt, Molluscum contagiosum virus
ucgaagcccagcuuca

SEQ ID NO: 4035719 - RNA, 17 nt, Molluscum contagiosum virus
ucgaagcccagcuucag

SEQ ID NO: 4035720 - RNA, 18 nt, Molluscum contagiosum virus
ucgaccaaaugcgcgugc

SEQ ID NO: 4035721 - RNA, 16 nt, Molluscum contagiosum virus
ucgacgacgcgcgcac

SEQ ID NO: 4035722 - RNA, 17 nt, Molluscum contagiosum virus
ucgacgacgcgcgcacg

SEQ ID NO: 4035723 - RNA, 13 nt, Molluscum contagiosum virus
ucgacgcgcgcgg

SEQ ID NO: 4035724 - RNA, 18 nt, Molluscum contagiosum virus
ucgacggcuucauccgcg

SEQ ID NO: 4035725 - RNA, 20 nt, Molluscum contagiosum virus
ucgacggcuucauccgcgcg

SEQ ID NO: 4035726 - RNA, 20 nt, Molluscum contagiosum virus
ucgacugcgccuucugccug

SEQ ID NO: 4035727 - RNA, 18 nt, Molluscum contagiosum virus
ucgagacgcugccugacg

SEQ ID NO: 4035728 - RNA, 16 nt, Molluscum contagiosum virus
ucgagcaccugucgcg

SEQ ID NO: 4035729 - RNA, 14 nt, Molluscum contagiosum virus
ucgagcaggucauc

SEQ ID NO: 4035730 - RNA, 16 nt, Molluscum contagiosum virus
ucgagcgcgccgcgcg

SEQ ID NO: 4035731 - RNA, 18 nt, Molluscum contagiosum virus
ucgagcgcgccgcgcgcu

SEQ ID NO: 4035732 - RNA, 22 nt, Molluscum contagiosum virus
ucgagcgcgcgccugcuggcgg

SEQ ID NO: 4035733 - RNA, 17 nt, Molluscum contagiosum virus
ucgagcgcgcuggacuu

SEQ ID NO: 4035734 - RNA, 16 nt, Molluscum contagiosum virus
ucgagcuuccucaagg

SEQ ID NO: 4035735 - RNA, 16 nt, Molluscum contagiosum virus
ucgaggccuucgcgcc

SEQ ID NO: 4035736 - RNA, 17 nt, Molluscum contagiosum virus
ucgagggcgaggccaag

SEQ ID NO: 4035737 - RNA, 12 nt, Molluscum contagiosum virus
ucgagggcgccg

SEQ ID NO: 4035738 - RNA, 23 nt, Molluscum contagiosum virus
ucgagggggacgugcccuacgcg

SEQ ID NO: 4035739 - RNA, 17 nt, Molluscum contagiosum virus
ucgaugacagcaucggg

SEQ ID NO: 4035740 - RNA, 20 nt, Molluscum contagiosum virus
ucgcaagcugagcgcgcugc

SEQ ID NO: 4035741 - RNA, 22 nt, Molluscum contagiosum virus
ucgcaagucucccucgcgcgca

SEQ ID NO: 4035742 - RNA, 14 nt, Molluscum contagiosum virus
ucgcacacugcagc

SEQ ID NO: 4035743 - RNA, 15 nt, Molluscum contagiosum virus
ucgcacacugcagca

SEQ ID NO: 4035744 - RNA, 22 nt, Molluscum contagiosum virus
ucgcacgcuagcgagcgcccgu

SEQ ID NO: 4035745 - RNA, 19 nt, Molluscum contagiosum virus
ucgcagacgcagcgcgagc

SEQ ID NO: 4035746 - RNA, 23 nt, Molluscum contagiosum virus
ucgccggaggaaggacagugucu

SEQ ID NO: 4035747 - RNA, 19 nt, Molluscum contagiosum virus
ucgccggcaucgcgcugcu

SEQ ID NO: 4035748 - RNA, 17 nt, Molluscum contagiosum virus
ucgccuucuugcuggcg

SEQ ID NO: 4035749 - RNA, 20 nt, Molluscum contagiosum virus
ucgccuucuugcuggcgcuc

SEQ ID NO: 4035750 - RNA, 22 nt, Molluscum contagiosum virus
ucgcgagcacuuuggccucgcg

SEQ ID NO: 4035751 - RNA, 16 nt, Molluscum contagiosum virus
ucgcgagcguuucugc

SEQ ID NO: 4035752 - RNA, 23 nt, Molluscum contagiosum virus
ucgcgaucugcgugacccucuuc

SEQ ID NO: 4035753 - RNA, 19 nt, Molluscum contagiosum virus
ucgcgcaucaccgagcgag

SEQ ID NO: 4035754 - RNA, 14 nt, Molluscum contagiosum virus
ucgcgcccugcgcg

SEQ ID NO: 4035755 - RNA, 15 nt, Molluscum contagiosum virus
ucgcgccgcucggaa

SEQ ID NO: 4035756 - RNA, 19 nt, Molluscum contagiosum virus
ucgcgccugaaccugggcg

SEQ ID NO: 4035757 - RNA, 14 nt, Molluscum contagiosum virus
ucgcgcgagaaguc

SEQ ID NO: 4035758 - RNA, 23 nt, Molluscum contagiosum virus
ucgcgcgccaguacgcaugcgcg

SEQ ID NO: 4035759 - RNA, 21 nt, Molluscum contagiosum virus
ucgcgcgccgcgcuggcgcgc

SEQ ID NO: 4035760 - RNA, 17 nt, Molluscum contagiosum virus
ucgcgcgccugcgcgag

SEQ ID NO: 4035761 - RNA, 18 nt, Molluscum contagiosum virus
ucgcgcguccgcaaagac

SEQ ID NO: 4035762 - RNA, 21 nt, Molluscum contagiosum virus
ucgcgcgucgcggucgcggag

SEQ ID NO: 4035763 - RNA, 12 nt, Molluscum contagiosum virus
ucgcgcgugcug

SEQ ID NO: 4035764 - RNA, 15 nt, Molluscum contagiosum virus
ucgcgcucgcgggag

SEQ ID NO: 4035765 - RNA, 14 nt, Molluscum contagiosum virus
aacccucgcaagcu

SEQ ID NO: 4035766 - RNA, 14 nt, Molluscum contagiosum virus
aacgcccaauucug

SEQ ID NO: 4035767 - RNA, 19 nt, Molluscum contagiosum virus
aacgcgaggccggccgugc

SEQ ID NO: 4035768 - RNA, 19 nt, Molluscum contagiosum virus
aacgcgcaagugugcgcau

SEQ ID NO: 4035769 - RNA, 14 nt, Molluscum contagiosum virus
aacgcgcgcucguc

SEQ ID NO: 4035770 - RNA, 18 nt, Molluscum contagiosum virus
aacgcggugagugcgcgc

SEQ ID NO: 4035771 - RNA, 12 nt, Molluscum contagiosum virus
aacgcugccgcu

SEQ ID NO: 4035772 - RNA, 22 nt, Molluscum contagiosum virus
aacggcggcgcaagcgcaagcc

SEQ ID NO: 4035773 - RNA, 15 nt, Molluscum contagiosum virus
aacgugcugcgccgc

SEQ ID NO: 4035774 - RNA, 20 nt, Molluscum contagiosum virus
aacuacuuccugcagcuguc

SEQ ID NO: 4035775 - RNA, 21 nt, Molluscum contagiosum virus
aacucgcgugccuuguucuga

SEQ ID NO: 4035776 - RNA, 14 nt, Molluscum contagiosum virus
aacucguaggacaa

SEQ ID NO: 4035777 - RNA, 14 nt, Molluscum contagiosum virus
aacucugcucgugc

SEQ ID NO: 4035778 - RNA, 18 nt, Molluscum contagiosum virus
aagaaacgggagucacuu

SEQ ID NO: 4035779 - RNA, 17 nt, Molluscum contagiosum virus
aagaaacucaggaagcg

SEQ ID NO: 4035780 - RNA, 14 nt, Molluscum contagiosum virus
aagaacaccaagag

SEQ ID NO: 4035781 - RNA, 22 nt, Molluscum contagiosum virus
aagaagaggccagcacaagccg

SEQ ID NO: 4035782 - RNA, 22 nt, Molluscum contagiosum virus
aagaagaggccggcacaagccg

SEQ ID NO: 4035783 - RNA, 22 nt, Molluscum contagiosum virus
aagagccauguuuccugcggcg

SEQ ID NO: 4035784 - RNA, 16 nt, Molluscum contagiosum virus
aagaggacguguacgc

SEQ ID NO: 4035785 - RNA, 18 nt, Molluscum contagiosum virus
aagaggccggcacaagcc

SEQ ID NO: 4035786 - RNA, 14 nt, Molluscum contagiosum virus
aagaugcugcgcgu

SEQ ID NO: 4035787 - RNA, 20 nt, Molluscum contagiosum virus
aagcaagacccagcaaggcc

SEQ ID NO: 4035788 - RNA, 15 nt, Molluscum contagiosum virus
aagcacaguccagcc

SEQ ID NO: 4035789 - RNA, 15 nt, Molluscum contagiosum virus
aagcacgagcugcug

SEQ ID NO: 4035790 - RNA, 20 nt, Molluscum contagiosum virus
aagcacgccagguguuccug

SEQ ID NO: 4035791 - RNA, 14 nt, Molluscum contagiosum virus
aagcccagcuucag

SEQ ID NO: 4035792 - RNA, 14 nt, Molluscum contagiosum virus
aagcgccgcgcgcg

SEQ ID NO: 4035793 - RNA, 18 nt, Molluscum contagiosum virus
aagcgcgaguacaagcuc

SEQ ID NO: 4035794 - RNA, 16 nt, Molluscum contagiosum virus
aagcgcucgcggcucg

SEQ ID NO: 4035795 - RNA, 12 nt, Molluscum contagiosum virus
aagcggugcagc

SEQ ID NO: 4035796 - RNA, 19 nt, Molluscum contagiosum virus
aagcugcacgugcagcggc

SEQ ID NO: 4035797 - RNA, 19 nt, Molluscum contagiosum virus
aagcuggaggcugccccuc

SEQ ID NO: 4035798 - RNA, 22 nt, Molluscum contagiosum virus
aagcuggccgaggucuuccaca

SEQ ID NO: 4035799 - RNA, 19 nt, Molluscum contagiosum virus
aagcuguaccuggugcgcc

SEQ ID NO: 4035800 - RNA, 15 nt, Molluscum contagiosum virus
aagcugucgcgcagc

SEQ ID NO: 4035801 - RNA, 14 nt, Molluscum contagiosum virus
aaggaaaacugcau

SEQ ID NO: 4035802 - RNA, 22 nt, Molluscum contagiosum virus
aaggacuaccagcucuucgugg

SEQ ID NO: 4035803 - RNA, 17 nt, Molluscum contagiosum virus
aaggcacccaccaggaa

SEQ ID NO: 4035804 - RNA, 23 nt, Molluscum contagiosum virus
aaggcaccccgcaggaaagguac

SEQ ID NO: 4035805 - RNA, 22 nt, Molluscum contagiosum virus
aaggcacccgcaggaaagguac

SEQ ID NO: 4035806 - RNA, 20 nt, Molluscum contagiosum virus
aaggcaccugcaggaaaggc

SEQ ID NO: 4035807 - RNA, 15 nt, Molluscum contagiosum virus
aaggccguccccgga

SEQ ID NO: 4035808 - RNA, 12 nt, Molluscum contagiosum virus
aaggcgccgcgu

SEQ ID NO: 4035809 - RNA, 15 nt, Molluscum contagiosum virus
aagguggccaagcgc

SEQ ID NO: 4035810 - RNA, 23 nt, Molluscum contagiosum virus
aaguaccagccgcugcgccgcca

SEQ ID NO: 4035811 - RNA, 14 nt, Molluscum contagiosum virus
aagucaugcucgcg

SEQ ID NO: 4035812 - RNA, 12 nt, Molluscum contagiosum virus
aaguccagcgcg

SEQ ID NO: 4035813 - RNA, 22 nt, Molluscum contagiosum virus
aaguccgcccccagguggagcu

SEQ ID NO: 4035814 - RNA, 13 nt, Molluscum contagiosum virus
aagucugcgcagg

SEQ ID NO: 4035815 - RNA, 14 nt, Molluscum contagiosum virus
aagugacuagcgcu

SEQ ID NO: 4035816 - RNA, 16 nt, Molluscum contagiosum virus
aagugugcgcaucccu

SEQ ID NO: 4035817 - RNA, 21 nt, Molluscum contagiosum virus
aauaccggagacaccagcucc

SEQ ID NO: 4035818 - RNA, 24 nt, Molluscum contagiosum virus
aaucccacguacgagcagcugcug

SEQ ID NO: 4035819 - RNA, 12 nt, Molluscum contagiosum virus
aaugacgcgcac

SEQ ID NO: 4035820 - RNA, 23 nt, Molluscum contagiosum virus
aaugacgcgcacgccagccugga

SEQ ID NO: 4035821 - RNA, 18 nt, Molluscum contagiosum virus
aaugcaugcggagcuggc

SEQ ID NO: 4035822 - RNA, 18 nt, Molluscum contagiosum virus
aauggacacgcacuggcg

SEQ ID NO: 4035823 - RNA, 13 nt, Molluscum contagiosum virus
acaaaaacugaaa

SEQ ID NO: 4035824 - RNA, 21 nt, Molluscum contagiosum virus
acaaacacgcgcgcgcgaagg

SEQ ID NO: 4035825 - RNA, 16 nt, Molluscum contagiosum virus
acaaagggguccgcgu

SEQ ID NO: 4035826 - RNA, 14 nt, Molluscum contagiosum virus
acaaccacagcucu

SEQ ID NO: 4035827 - RNA, 19 nt, Molluscum contagiosum virus
acaacucauagcgccacga

SEQ ID NO: 4035828 - RNA, 22 nt, Molluscum contagiosum virus
acaacuccggcgucgaaacacu

SEQ ID NO: 4035829 - RNA, 16 nt, Molluscum contagiosum virus
acaacucugcucgugc

SEQ ID NO: 4035830 - RNA, 23 nt, Molluscum contagiosum virus
acaagaagcgcuucuuugcgcgc

SEQ ID NO: 4035831 - RNA, 20 nt, Molluscum contagiosum virus
acaagauggcgcagcacuuc

SEQ ID NO: 4035832 - RNA, 22 nt, Molluscum contagiosum virus
acaagcguaagccaccgcgcag

SEQ ID NO: 4035833 - RNA, 16 nt, Molluscum contagiosum virus
acaagcguguucgugc

SEQ ID NO: 4035834 - RNA, 16 nt, Molluscum contagiosum virus
acaaggaaaggcaccc

SEQ ID NO: 4035835 - RNA, 20 nt, Molluscum contagiosum virus
acaaggaaaggcacccacca

SEQ ID NO: 4035836 - RNA, 16 nt, Molluscum contagiosum virus
acaaggaggcuuucuu

SEQ ID NO: 4035837 - RNA, 14 nt, Molluscum contagiosum virus
acaagggcagcuca

SEQ ID NO: 4035838 - RNA, 21 nt, Molluscum contagiosum virus
acaagucgucgaucgccucga

SEQ ID NO: 4035839 - RNA, 23 nt, Molluscum contagiosum virus
acaaugaggagaggaaccaggau

SEQ ID NO: 4035840 - RNA, 12 nt, Molluscum contagiosum virus
acacacucgcgc

SEQ ID NO: 4035841 - RNA, 16 nt, Molluscum contagiosum virus
acacacucgcgcgucc

SEQ ID NO: 4035842 - RNA, 12 nt, Molluscum contagiosum virus
acacagggcuuc

SEQ ID NO: 4035843 - RNA, 16 nt, Molluscum contagiosum virus
acacauggccgcgcgc

SEQ ID NO: 4035844 - RNA, 12 nt, Molluscum contagiosum virus
acaccaugcagc

SEQ ID NO: 4035845 - RNA, 18 nt, Molluscum contagiosum virus
acacccgugcccgcuccg

SEQ ID NO: 4035846 - RNA, 12 nt, Molluscum contagiosum virus
acaccuccugcu

SEQ ID NO: 4035847 - RNA, 16 nt, Molluscum contagiosum virus
acacgagggccuuggc

SEQ ID NO: 4035848 - RNA, 14 nt, Molluscum contagiosum virus
acacgccgcuggag

SEQ ID NO: 4035849 - RNA, 14 nt, Molluscum contagiosum virus
acacgcgcgcgugc

SEQ ID NO: 4035850 - RNA, 19 nt, Molluscum contagiosum virus
acacgcgcgcgugcugcug

SEQ ID NO: 4035851 - RNA, 15 nt, Molluscum contagiosum virus
acacgcgucgcgcag

SEQ ID NO: 4035852 - RNA, 16 nt, Molluscum contagiosum virus
acacggauacgcgcac

SEQ ID NO: 4035853 - RNA, 18 nt, Molluscum contagiosum virus
acacgucagccgcacggc

SEQ ID NO: 4035854 - RNA, 14 nt, Molluscum contagiosum virus
acacgucuugcaga

SEQ ID NO: 4035855 - RNA, 15 nt, Molluscum contagiosum virus
acacucuucgcaggc

SEQ ID NO: 4035856 - RNA, 21 nt, Molluscum contagiosum virus
acacugcagaaacagccgugc

SEQ ID NO: 4035857 - RNA, 15 nt, Molluscum contagiosum virus
acacuuuccgucguc

SEQ ID NO: 4035858 - RNA, 13 nt, Molluscum contagiosum virus
acagacggcgcgc

SEQ ID NO: 4035859 - RNA, 18 nt, Molluscum contagiosum virus
acagacgugcacaaagcc

SEQ ID NO: 4035860 - RNA, 16 nt, Molluscum contagiosum virus
acagagaaaggcaccc

SEQ ID NO: 4035861 - RNA, 13 nt, Molluscum contagiosum virus
acagagccccguu

SEQ ID NO: 4035862 - RNA, 17 nt, Molluscum contagiosum virus
acagagcccgcggcgca

SEQ ID NO: 4035863 - RNA, 13 nt, Molluscum contagiosum virus
acagagggacagc

SEQ ID NO: 4035864 - RNA, 16 nt, Molluscum contagiosum virus
acagcacggcacgugc

SEQ ID NO: 4035865 - RNA, 13 nt, Molluscum contagiosum virus
acagcagccgcag

SEQ ID NO: 4035866 - RNA, 14 nt, Molluscum contagiosum virus
acagcauccuggag

SEQ ID NO: 4035867 - RNA, 23 nt, Molluscum contagiosum virus
acagccgccugccgcgcucgugc

SEQ ID NO: 4035868 - RNA, 22 nt, Molluscum contagiosum virus
cacgcgcacgggccugcgcgcu

SEQ ID NO: 4035869 - RNA, 23 nt, Molluscum contagiosum virus
cacgcgcgagcggagcgggcacg

SEQ ID NO: 4035870 - RNA, 13 nt, Molluscum contagiosum virus
cacgcgcgggcau

SEQ ID NO: 4035871 - RNA, 11 nt, Molluscum contagiosum virus
cacgcggccau

SEQ ID NO: 4035872 - RNA, 21 nt, Molluscum contagiosum virus
cacgcggcgcgugucgcggag

SEQ ID NO: 4035873 - RNA, 15 nt, Molluscum contagiosum virus
cacgcgggcgccggc

SEQ ID NO: 4035874 - RNA, 22 nt, Molluscum contagiosum virus
cacgcgguugcaauagacacgg

SEQ ID NO: 4035875 - RNA, 22 nt, Molluscum contagiosum virus
cacgcgugcugcgcggcgccgc

SEQ ID NO: 4035876 - RNA, 24 nt, Molluscum contagiosum virus
cacgcgugcugcgcggcgccgcag

SEQ ID NO: 4035877 - RNA, 16 nt, Molluscum contagiosum virus
cacgcgugucugcgcu

SEQ ID NO: 4035878 - RNA, 18 nt, Molluscum contagiosum virus
cacgcgugucugcgcucg

SEQ ID NO: 4035879 - RNA, 18 nt, Molluscum contagiosum virus
cacgcuacggcugccggc

SEQ ID NO: 4035880 - RNA, 13 nt, Molluscum contagiosum virus
cacgcuagcgggc

SEQ ID NO: 4035881 - RNA, 24 nt, Molluscum contagiosum virus
cacgcucaucucgcagacgcagcg

SEQ ID NO: 4035882 - RNA, 18 nt, Molluscum contagiosum virus
cacgcugacgcgcagugc

SEQ ID NO: 4035883 - RNA, 18 nt, Molluscum contagiosum virus
cacgcugcucgugcugcu

SEQ ID NO: 4035884 - RNA, 23 nt, Molluscum contagiosum virus
cacgcugcucgugcugcucugcg

SEQ ID NO: 4035885 - RNA, 19 nt, Molluscum contagiosum virus
cacgcuggucacgcgcuuc

SEQ ID NO: 4035886 - RNA, 14 nt, Molluscum contagiosum virus
cacgcuguccaggc

SEQ ID NO: 4035887 - RNA, 18 nt, Molluscum contagiosum virus
cacgcuguugcugcugcc

SEQ ID NO: 4035888 - RNA, 19 nt, Molluscum contagiosum virus
cacgcuugugcgcacgcug

SEQ ID NO: 4035889 - RNA, 20 nt, Molluscum contagiosum virus
cacggacccgggcgcggcac

SEQ ID NO: 4035890 - RNA, 20 nt, Molluscum contagiosum virus
cacggacucgccgcgcgccg

SEQ ID NO: 4035891 - RNA, 23 nt, Molluscum contagiosum virus
cacggagacgucuggggauggcc

SEQ ID NO: 4035892 - RNA, 18 nt, Molluscum contagiosum virus
cacggcacccgccagcuu

SEQ ID NO: 4035893 - RNA, 18 nt, Molluscum contagiosum virus
cacggccuccagcagcgg

SEQ ID NO: 4035894 - RNA, 22 nt, Molluscum contagiosum virus
cacggcgacaacgacagagccc

SEQ ID NO: 4035895 - RNA, 13 nt, Molluscum contagiosum virus
cacggcgagcgcg

SEQ ID NO: 4035896 - RNA, 18 nt, Molluscum contagiosum virus
cacggcguucaccuuggc

SEQ ID NO: 4035897 - RNA, 22 nt, Molluscum contagiosum virus
cacggcguucaccuuggcgcug

SEQ ID NO: 4035898 - RNA, 18 nt, Molluscum contagiosum virus
cacggcuugccgcucggc

SEQ ID NO: 4035899 - RNA, 14 nt, Molluscum contagiosum virus
cacgggaaggcucu

SEQ ID NO: 4035900 - RNA, 17 nt, Molluscum contagiosum virus
cacgggaaggcucucaa

SEQ ID NO: 4035901 - RNA, 21 nt, Molluscum contagiosum virus
cacgggcaugcacagcugcuc

SEQ ID NO: 4035902 - RNA, 14 nt, Molluscum contagiosum virus
cacguacgagcagc

SEQ ID NO: 4035903 - RNA, 22 nt, Molluscum contagiosum virus
cacguccuccaauccuccugcc

SEQ ID NO: 4035904 - RNA, 14 nt, Molluscum contagiosum virus
cacgucuucgccgu

SEQ ID NO: 4035905 - RNA, 20 nt, Molluscum contagiosum virus
cacgugccccgcgcgugcag

SEQ ID NO: 4035906 - RNA, 18 nt, Molluscum contagiosum virus
cacgugcugcagcugcgc

SEQ ID NO: 4035907 - RNA, 23 nt, Molluscum contagiosum virus
cacgugcugcugcggcugcugga

SEQ ID NO: 4035908 - RNA, 17 nt, Molluscum contagiosum virus
cacguggaaucacggcc

SEQ ID NO: 4035909 - RNA, 15 nt, Molluscum contagiosum virus
cacguggaccugauu

SEQ ID NO: 4035910 - RNA, 20 nt, Molluscum contagiosum virus
cacguugccgcgcgcugcuc

SEQ ID NO: 4035911 - RNA, 22 nt, Molluscum contagiosum virus
cacguugggguugucgggcgcu

SEQ ID NO: 4035912 - RNA, 19 nt, Molluscum contagiosum virus
cacguuuuucgcgggcgcc

SEQ ID NO: 4035913 - RNA, 19 nt, Molluscum contagiosum virus
cacuaccgcaaccagcugc

SEQ ID NO: 4035914 - RNA, 18 nt, Molluscum contagiosum virus
cacuagcaaggcgccgcg

SEQ ID NO: 4035915 - RNA, 16 nt, Molluscum contagiosum virus
cacuccagcgcgcccu

SEQ ID NO: 4035916 - RNA, 14 nt, Molluscum contagiosum virus
cacuccgucgcgcu

SEQ ID NO: 4035917 - RNA, 21 nt, Molluscum contagiosum virus
cacucgcuggccucugccugc

SEQ ID NO: 4035918 - RNA, 21 nt, Molluscum contagiosum virus
cacugacgguacucaugcugc

SEQ ID NO: 4035919 - RNA, 15 nt, Molluscum contagiosum virus
cacugccacggcugc

SEQ ID NO: 4035920 - RNA, 15 nt, Molluscum contagiosum virus
cacugcguacacaug

SEQ ID NO: 4035921 - RNA, 11 nt, Molluscum contagiosum virus
cacugcuggcg

SEQ ID NO: 4035922 - RNA, 15 nt, Molluscum contagiosum virus
cacugcuggcgcgcg

SEQ ID NO: 4035923 - RNA, 19 nt, Molluscum contagiosum virus
cacuggaagaacaggccgc

SEQ ID NO: 4035924 - RNA, 13 nt, Molluscum contagiosum virus
cacuggaggugag

SEQ ID NO: 4035925 - RNA, 11 nt, Molluscum contagiosum virus
cacuggcccug

SEQ ID NO: 4035926 - RNA, 22 nt, Molluscum contagiosum virus
cacugggaacaccacacgcgcg

SEQ ID NO: 4035927 - RNA, 15 nt, Molluscum contagiosum virus
cacuguaaucgucac

SEQ ID NO: 4035928 - RNA, 19 nt, Molluscum contagiosum virus
cacugucguaacaauggac

SEQ ID NO: 4035929 - RNA, 19 nt, Molluscum contagiosum virus
cacugugcugacccccucc

SEQ ID NO: 4035930 - RNA, 17 nt, Molluscum contagiosum virus
cacugugcuggcgcacu

SEQ ID NO: 4035931 - RNA, 15 nt, Molluscum contagiosum virus
cacuucgucaagcag

SEQ ID NO: 4035932 - RNA, 22 nt, Molluscum contagiosum virus
cacuucucgagaccucgcgcuu

SEQ ID NO: 4035933 - RNA, 20 nt, Molluscum contagiosum virus
cacuugcgcgcgugccugug

SEQ ID NO: 4035934 - RNA, 15 nt, Molluscum contagiosum virus
cagaaacucuccgac

SEQ ID NO: 4035935 - RNA, 15 nt, Molluscum contagiosum virus
cagaagcgagagcgc

SEQ ID NO: 4035936 - RNA, 23 nt, Molluscum contagiosum virus
cagaaggcguaugcgccaagccu

SEQ ID NO: 4035937 - RNA, 21 nt, Molluscum contagiosum virus
cagaaggggggguaaugcaga

SEQ ID NO: 4035938 - RNA, 18 nt, Molluscum contagiosum virus
cagacgcagagccaugcc

SEQ ID NO: 4035939 - RNA, 17 nt, Molluscum contagiosum virus
cagacgcagcgcgagcu

SEQ ID NO: 4035940 - RNA, 17 nt, Molluscum contagiosum virus
cagacgugcacaaagcc

SEQ ID NO: 4035941 - RNA, 15 nt, Molluscum contagiosum virus
cagacguggugcucg

SEQ ID NO: 4035942 - RNA, 14 nt, Molluscum contagiosum virus
cagagaaaggcacc

SEQ ID NO: 4035943 - RNA, 19 nt, Molluscum contagiosum virus
cagagaaaggcacccacca

SEQ ID NO: 4035944 - RNA, 23 nt, Molluscum contagiosum virus
cagagaaaggcacccaccaggaa

SEQ ID NO: 4035945 - RNA, 22 nt, Molluscum contagiosum virus
cagagaaaucccaagagccaug

SEQ ID NO: 4035946 - RNA, 17 nt, Molluscum contagiosum virus
cagagcacugcgcgucu

SEQ ID NO: 4035947 - RNA, 17 nt, Molluscum contagiosum virus
cagagcauuagcagcga

SEQ ID NO: 4035948 - RNA, 23 nt, Molluscum contagiosum virus
cagagcccaaggggagacauaug

SEQ ID NO: 4035949 - RNA, 13 nt, Molluscum contagiosum virus
cagagccgggacg

SEQ ID NO: 4035950 - RNA, 15 nt, Molluscum contagiosum virus
cagagccugcugcuc

SEQ ID NO: 4035951 - RNA, 12 nt, Molluscum contagiosum virus
cagagcgccagc

SEQ ID NO: 4035952 - RNA, 17 nt, Molluscum contagiosum virus
cagagcgugcuggucaa

SEQ ID NO: 4035953 - RNA, 19 nt, Molluscum contagiosum virus
cagagcuccccgcgcgcag

SEQ ID NO: 4035954 - RNA, 19 nt, Molluscum contagiosum virus
cagagcugcccgccagaag

SEQ ID NO: 4035955 - RNA, 15 nt, Molluscum contagiosum virus
cagaggacuuuaucu

SEQ ID NO: 4035956 - RNA, 19 nt, Molluscum contagiosum virus
cagauaguuuggacgagcu

SEQ ID NO: 4035957 - RNA, 17 nt, Molluscum contagiosum virus
cagauccgggcgcugca

SEQ ID NO: 4035958 - RNA, 22 nt, Molluscum contagiosum virus
cagauccgggcgcugcaccgcu

SEQ ID NO: 4035959 - RNA, 16 nt, Molluscum contagiosum virus
cagaucgcgagaggag

SEQ ID NO: 4035960 - RNA, 18 nt, Molluscum contagiosum virus
cagauucacgagcucggu

SEQ ID NO: 4035961 - RNA, 22 nt, Molluscum contagiosum virus
cagauucggaggcggagcugcc

SEQ ID NO: 4035962 - RNA, 16 nt, Molluscum contagiosum virus
cagcaaacagccugug

SEQ ID NO: 4035963 - RNA, 17 nt, Molluscum contagiosum virus
cagcacaccgucgcgug

SEQ ID NO: 4035964 - RNA, 14 nt, Molluscum contagiosum virus
cagcaccaucacgu

SEQ ID NO: 4035965 - RNA, 15 nt, Molluscum contagiosum virus
cagcaccgcgccgcg

SEQ ID NO: 4035966 - RNA, 12 nt, Molluscum contagiosum virus
cagcaccugcag

SEQ ID NO: 4035967 - RNA, 17 nt, Molluscum contagiosum virus
cagcaccugcaguucca

SEQ ID NO: 4035968 - RNA, 22 nt, Molluscum contagiosum virus
cagcacgggccggggccucgcg

SEQ ID NO: 4035969 - RNA, 21 nt, Molluscum contagiosum virus
cagcagcggcgcgugcuccuc

SEQ ID NO: 4035970 - RNA, 15 nt, Molluscum contagiosum virus
ccacgagcagugccg

SEQ ID NO: 4035971 - RNA, 22 nt, Molluscum contagiosum virus
ccacgagcgccgcgugcgcgcg

SEQ ID NO: 4035972 - RNA, 19 nt, Molluscum contagiosum virus
ccacgagcguguccaggug

SEQ ID NO: 4035973 - RNA, 21 nt, Molluscum contagiosum virus
ccacgcagcuggcgggcgugc

SEQ ID NO: 4035974 - RNA, 13 nt, Molluscum contagiosum virus
ccacgcgugcgcg

SEQ ID NO: 4035975 - RNA, 17 nt, Molluscum contagiosum virus
ccacgcgugcugcgcgg

SEQ ID NO: 4035976 - RNA, 15 nt, Molluscum contagiosum virus
ccacggcgagcugcc

SEQ ID NO: 4035977 - RNA, 18 nt, Molluscum contagiosum virus
ccacggguaccgugcgcg

SEQ ID NO: 4035978 - RNA, 19 nt, Molluscum contagiosum virus
ccacguacgagcagcugcu

SEQ ID NO: 4035979 - RNA, 13 nt, Molluscum contagiosum virus
ccacgugcgcugg

SEQ ID NO: 4035980 - RNA, 22 nt, Molluscum contagiosum virus
ccacgugcgcuggcccacgcug

SEQ ID NO: 4035981 - RNA, 20 nt, Molluscum contagiosum virus
ccacuccgucgcgcucgaag

SEQ ID NO: 4035982 - RNA, 11 nt, Molluscum contagiosum virus
ccacugggaac

SEQ ID NO: 4035983 - RNA, 19 nt, Molluscum contagiosum virus
ccagacaaagucgacgaca

SEQ ID NO: 4035984 - RNA, 13 nt, Molluscum contagiosum virus
ccagacgcagagc

SEQ ID NO: 4035985 - RNA, 17 nt, Molluscum contagiosum virus
ccagagccuucucggug

SEQ ID NO: 4035986 - RNA, 21 nt, Molluscum contagiosum virus
ccagaggguggcuugcugcag

SEQ ID NO: 4035987 - RNA, 17 nt, Molluscum contagiosum virus
ccagauccgggcgcugc

SEQ ID NO: 4035988 - RNA, 20 nt, Molluscum contagiosum virus
ccagauguucucgccagugg

SEQ ID NO: 4035989 - RNA, 20 nt, Molluscum contagiosum virus
ccagauuagcaacugcccca

SEQ ID NO: 4035990 - RNA, 20 nt, Molluscum contagiosum virus
ccagauugccggcgcgcgcu

SEQ ID NO: 4035991 - RNA, 12 nt, Molluscum contagiosum virus
ccagcacgcgcg

SEQ ID NO: 4035992 - RNA, 9 nt, Molluscum contagiosum virus
ccagcagcg

SEQ ID NO: 4035993 - RNA, 13 nt, Molluscum contagiosum virus
ccagcagcgccag

SEQ ID NO: 4035994 - RNA, 15 nt, Molluscum contagiosum virus
ccagcagcugcuccg

SEQ ID NO: 4035995 - RNA, 18 nt, Molluscum contagiosum virus
ccagcagguagcuggcag

SEQ ID NO: 4035996 - RNA, 12 nt, Molluscum contagiosum virus
ccagccgcagcc

SEQ ID NO: 4035997 - RNA, 23 nt, Molluscum contagiosum virus
ccagccgcucguccagcugcgcg

SEQ ID NO: 4035998 - RNA, 15 nt, Molluscum contagiosum virus
ccagccgcugcgccg

SEQ ID NO: 4035999 - RNA, 21 nt, Molluscum contagiosum virus
ccagccugcucacgcccgagg

SEQ ID NO: 4036000 - RNA, 22 nt, Molluscum contagiosum virus
ccagccuggcggccaaccgccu

SEQ ID NO: 4036001 - RNA, 23 nt, Molluscum contagiosum virus
ccagcgagaucaacgcgcgcgug

SEQ ID NO: 4036002 - RNA, 14 nt, Molluscum contagiosum virus
ccagcgccuccgcg

SEQ ID NO: 4036003 - RNA, 15 nt, Molluscum contagiosum virus
ccagcgcgcagaagc

SEQ ID NO: 4036004 - RNA, 16 nt, Molluscum contagiosum virus
ccagcgcgcccaccag

SEQ ID NO: 4036005 - RNA, 13 nt, Molluscum contagiosum virus
ccagcggcgccgc

SEQ ID NO: 4036006 - RNA, 16 nt, Molluscum contagiosum virus
ccagcggcgccgcagc

SEQ ID NO: 4036007 - RNA, 13 nt, Molluscum contagiosum virus
ccagcggcugccc

SEQ ID NO: 4036008 - RNA, 18 nt, Molluscum contagiosum virus
ccagcguacggcccgaag

SEQ ID NO: 4036009 - RNA, 18 nt, Molluscum contagiosum virus
ccagcguggccagcuuca

SEQ ID NO: 4036010 - RNA, 14 nt, Molluscum contagiosum virus
ccagcuccgccggg

SEQ ID NO: 4036011 - RNA, 13 nt, Molluscum contagiosum virus
ccagcuccgcgcg

SEQ ID NO: 4036012 - RNA, 19 nt, Molluscum contagiosum virus
ccagcucuuggcgggcacc

SEQ ID NO: 4036013 - RNA, 14 nt, Molluscum contagiosum virus
ccagcugcaaacau

SEQ ID NO: 4036014 - RNA, 22 nt, Molluscum contagiosum virus
ccagcugcaaacauugccuggc

SEQ ID NO: 4036015 - RNA, 20 nt, Molluscum contagiosum virus
ccagcuucaucaagcacggc

SEQ ID NO: 4036016 - RNA, 12 nt, Molluscum contagiosum virus
ccaggaucacga

SEQ ID NO: 4036017 - RNA, 17 nt, Molluscum contagiosum virus
ccaggcacacgcagugc

SEQ ID NO: 4036018 - RNA, 13 nt, Molluscum contagiosum virus
ccagucgcgcgag

SEQ ID NO: 4036019 - RNA, 15 nt, Molluscum contagiosum virus
ccagucucgcgcuuc

SEQ ID NO: 4036020 - RNA, 20 nt, Molluscum contagiosum virus
ccagugcgccucggacuucg

SEQ ID NO: 4036021 - RNA, 17 nt, Molluscum contagiosum virus
ccauacgccuagccugc

SEQ ID NO: 4036022 - RNA, 23 nt, Molluscum contagiosum virus
ccaucggagaagugcuccgcacg

SEQ ID NO: 4036023 - RNA, 14 nt, Molluscum contagiosum virus
ccaucggugggcuc

SEQ ID NO: 4036024 - RNA, 13 nt, Molluscum contagiosum virus
ccaucguggugga

SEQ ID NO: 4036025 - RNA, 17 nt, Molluscum contagiosum virus
ccaugcccacgcgcaag

SEQ ID NO: 4036026 - RNA, 18 nt, Molluscum contagiosum virus
ccaugcccgaccacgugc

SEQ ID NO: 4036027 - RNA, 16 nt, Molluscum contagiosum virus
ccaugucgaacaccuc

SEQ ID NO: 4036028 - RNA, 16 nt, Molluscum contagiosum virus
ccauguuuccugcggc

SEQ ID NO: 4036029 - RNA, 22 nt, Molluscum contagiosum virus
cccaagagccauguuuccugcg

SEQ ID NO: 4036030 - RNA, 22 nt, Molluscum contagiosum virus
cccaagcgcaccguugacgagc

SEQ ID NO: 4036031 - RNA, 14 nt, Molluscum contagiosum virus
cccaagugcgcgug

SEQ ID NO: 4036032 - RNA, 11 nt, Molluscum contagiosum virus
cccaccaggaa

SEQ ID NO: 4036033 - RNA, 14 nt, Molluscum contagiosum virus
cccacgcuguacau

SEQ ID NO: 4036034 - RNA, 19 nt, Molluscum contagiosum virus
cccacguacgagcagcugc

SEQ ID NO: 4036035 - RNA, 16 nt, Molluscum contagiosum virus
cccacgugccagcuca

SEQ ID NO: 4036036 - RNA, 15 nt, Molluscum contagiosum virus
cccacugugccagca

SEQ ID NO: 4036037 - RNA, 14 nt, Molluscum contagiosum virus
cccagcguggccag

SEQ ID NO: 4036038 - RNA, 21 nt, Molluscum contagiosum virus
cccaggaagacgugcugcgcg

SEQ ID NO: 4036039 - RNA, 15 nt, Molluscum contagiosum virus
cccaugcccgaccac

SEQ ID NO: 4036040 - RNA, 16 nt, Molluscum contagiosum virus
cccauuagugugccuc

SEQ ID NO: 4036041 - RNA, 16 nt, Molluscum contagiosum virus
cccccagguggagcug

SEQ ID NO: 4036042 - RNA, 13 nt, Molluscum contagiosum virus
ccccgaaggaaag

SEQ ID NO: 4036043 - RNA, 16 nt, Molluscum contagiosum virus
ccccgacgccagcgcg

SEQ ID NO: 4036044 - RNA, 15 nt, Molluscum contagiosum virus
ccccgcacaagggca

SEQ ID NO: 4036045 - RNA, 21 nt, Molluscum contagiosum virus
ccccgcaggaaaggcaccccg

SEQ ID NO: 4036046 - RNA, 12 nt, Molluscum contagiosum virus
ccccgccagcac

SEQ ID NO: 4036047 - RNA, 13 nt, Molluscum contagiosum virus
ccccgccgcggcg

SEQ ID NO: 4036048 - RNA, 15 nt, Molluscum contagiosum virus
ccccgcgcgugcagu

SEQ ID NO: 4036049 - RNA, 14 nt, Molluscum contagiosum virus
ccccgcgcugcgcg

SEQ ID NO: 4036050 - RNA, 13 nt, Molluscum contagiosum virus
ccccgcugggccg

SEQ ID NO: 4036051 - RNA, 18 nt, Molluscum contagiosum virus
ccccgguucccggugcug

SEQ ID NO: 4036052 - RNA, 21 nt, Molluscum contagiosum virus
ccccguccgugucgagcugcc

SEQ ID NO: 4036053 - RNA, 19 nt, Molluscum contagiosum virus
ccccuagaagaccacaucc

SEQ ID NO: 4036054 - RNA, 23 nt, Molluscum contagiosum virus
ccccuugcgucuccgcgaguccu

SEQ ID NO: 4036055 - RNA, 13 nt, Molluscum contagiosum virus
cccgaacugcugg

SEQ ID NO: 4036056 - RNA, 15 nt, Molluscum contagiosum virus
cccgaacugcugggc

SEQ ID NO: 4036057 - RNA, 22 nt, Molluscum contagiosum virus
cccgacacguugcacugcgcgg

SEQ ID NO: 4036058 - RNA, 19 nt, Molluscum contagiosum virus
cccgacuuuucgcgccgcg

SEQ ID NO: 4036059 - RNA, 15 nt, Molluscum contagiosum virus
cccgagcccgcggcg

SEQ ID NO: 4036060 - RNA, 12 nt, Molluscum contagiosum virus
cccgaggacgcg

SEQ ID NO: 4036061 - RNA, 16 nt, Molluscum contagiosum virus
cccgaggacgcgggcg

SEQ ID NO: 4036062 - RNA, 17 nt, Molluscum contagiosum virus
cccgaggagagcggcgc

SEQ ID NO: 4036063 - RNA, 17 nt, Molluscum contagiosum virus
cccgaggcguccagcgg

SEQ ID NO: 4036064 - RNA, 21 nt, Molluscum contagiosum virus
cccgaggucaagggugugggc

SEQ ID NO: 4036065 - RNA, 21 nt, Molluscum contagiosum virus
cccgaguuccuguugcgcgag

SEQ ID NO: 4036066 - RNA, 15 nt, Molluscum contagiosum virus
cccgcaaccccgcgc

SEQ ID NO: 4036067 - RNA, 13 nt, Molluscum contagiosum virus
cccgcaagccaca

SEQ ID NO: 4036068 - RNA, 19 nt, Molluscum contagiosum virus
cccgccagcaccaugcgug

SEQ ID NO: 4036069 - RNA, 14 nt, Molluscum contagiosum virus
cccgcccagcgugg

SEQ ID NO: 4036070 - RNA, 16 nt, Molluscum contagiosum virus
cccgccgcgugcccgu

SEQ ID NO: 4036071 - RNA, 17 nt, Molluscum contagiosum virus
cccgccugccgcgagca

SEQ ID NO: 4036072 - RNA, 22 nt, Molluscum contagiosum virus
cccgcgaacgagggacacgcac

SEQ ID NO: 4036073 - RNA, 13 nt, Molluscum contagiosum virus
ccgugcuugcuag

SEQ ID NO: 4036074 - RNA, 20 nt, Molluscum contagiosum virus
ccgugggcagcuucugcucg

SEQ ID NO: 4036075 - RNA, 13 nt, Molluscum contagiosum virus
ccgugggcgccgc

SEQ ID NO: 4036076 - RNA, 18 nt, Molluscum contagiosum virus
ccguguccuacacgccgc

SEQ ID NO: 4036077 - RNA, 18 nt, Molluscum contagiosum virus
ccgugucgggcugcaucu

SEQ ID NO: 4036078 - RNA, 17 nt, Molluscum contagiosum virus
ccgugugcgaagggcuu

SEQ ID NO: 4036079 - RNA, 14 nt, Molluscum contagiosum virus
ccuaccgcgcggga

SEQ ID NO: 4036080 - RNA, 24 nt, Molluscum contagiosum virus
ccuacgaggugcugcgccacgugc

SEQ ID NO: 4036081 - RNA, 17 nt, Molluscum contagiosum virus
ccuacgcuaccugaagc

SEQ ID NO: 4036082 - RNA, 22 nt, Molluscum contagiosum virus
ccuacgcuaccugaagcuggac

SEQ ID NO: 4036083 - RNA, 21 nt, Molluscum contagiosum virus
ccuacguggcgucgcgccgcu

SEQ ID NO: 4036084 - RNA, 14 nt, Molluscum contagiosum virus
ccuagacacgagcg

SEQ ID NO: 4036085 - RNA, 23 nt, Molluscum contagiosum virus
ccuagagcuggcaccgggcgccg

SEQ ID NO: 4036086 - RNA, 20 nt, Molluscum contagiosum virus
ccuagaggaugcggauccuc

SEQ ID NO: 4036087 - RNA, 11 nt, Molluscum contagiosum virus
ccuagcuccag

SEQ ID NO: 4036088 - RNA, 19 nt, Molluscum contagiosum virus
ccuauaaauggacgcgcuc

SEQ ID NO: 4036089 - RNA, 16 nt, Molluscum contagiosum virus
ccucccaagcagcgcg

SEQ ID NO: 4036090 - RNA, 14 nt, Molluscum contagiosum virus
ccuccgagcgcgcg

SEQ ID NO: 4036091 - RNA, 13 nt, Molluscum contagiosum virus
ccuccgcucugag

SEQ ID NO: 4036092 - RNA, 23 nt, Molluscum contagiosum virus
ccuccgguuuucgcgggagcggc

SEQ ID NO: 4036093 - RNA, 21 nt, Molluscum contagiosum virus
ccuccguguccgacgccgcca

SEQ ID NO: 4036094 - RNA, 22 nt, Molluscum contagiosum virus
ccucgacgaggccuacagcgcg

SEQ ID NO: 4036095 - RNA, 18 nt, Molluscum contagiosum virus
ccucgagaaagucaugcu

SEQ ID NO: 4036096 - RNA, 15 nt, Molluscum contagiosum virus
ccucgagaagaccug

SEQ ID NO: 4036097 - RNA, 16 nt, Molluscum contagiosum virus
ccucgagcacgccucc

SEQ ID NO: 4036098 - RNA, 13 nt, Molluscum contagiosum virus
ccucgagcgccgc

SEQ ID NO: 4036099 - RNA, 18 nt, Molluscum contagiosum virus
ccucgcaagcugagcgcg

SEQ ID NO: 4036100 - RNA, 22 nt, Molluscum contagiosum virus
ccucgcaggcgaggucacacuc

SEQ ID NO: 4036101 - RNA, 15 nt, Molluscum contagiosum virus
ccucgcuccgcagca

SEQ ID NO: 4036102 - RNA, 22 nt, Molluscum contagiosum virus
ccucggacuucgacgcgcggca

SEQ ID NO: 4036103 - RNA, 20 nt, Molluscum contagiosum virus
ccucgugcucggcgugaucu

SEQ ID NO: 4036104 - RNA, 21 nt, Molluscum contagiosum virus
ccucgugcugggccugccgca

SEQ ID NO: 4036105 - RNA, 16 nt, Molluscum contagiosum virus
ccucucgugcgucgug

SEQ ID NO: 4036106 - RNA, 16 nt, Molluscum contagiosum virus
ccucucuccccuucag

SEQ ID NO: 4036107 - RNA, 14 nt, Molluscum contagiosum virus
ccucugccugcaag

SEQ ID NO: 4036108 - RNA, 19 nt, Molluscum contagiosum virus
ccucuggaaggagcugggc

SEQ ID NO: 4036109 - RNA, 15 nt, Molluscum contagiosum virus
ccucuuuugggcacg

SEQ ID NO: 4036110 - RNA, 17 nt, Molluscum contagiosum virus
ccucuuuuugcgccgca

SEQ ID NO: 4036111 - RNA, 15 nt, Molluscum contagiosum virus
ccugaacaagcugca

SEQ ID NO: 4036112 - RNA, 12 nt, Molluscum contagiosum virus
ccugacggcagc

SEQ ID NO: 4036113 - RNA, 15 nt, Molluscum contagiosum virus
ccugaugacggcaga

SEQ ID NO: 4036114 - RNA, 14 nt, Molluscum contagiosum virus
ccugcaccugcugg

SEQ ID NO: 4036115 - RNA, 15 nt, Molluscum contagiosum virus
ccugcaccugcugga

SEQ ID NO: 4036116 - RNA, 19 nt, Molluscum contagiosum virus
ccugcaggaaaggcacccg

SEQ ID NO: 4036117 - RNA, 21 nt, Molluscum contagiosum virus
ccugcaggaaaggcacccgca

SEQ ID NO: 4036118 - RNA, 14 nt, Molluscum contagiosum virus
ccugccagcagagc

SEQ ID NO: 4036119 - RNA, 23 nt, Molluscum contagiosum virus
ccugcgcaacgcgggccaggcac

SEQ ID NO: 4036120 - RNA, 14 nt, Molluscum contagiosum virus
ccugcgcgagcagu

SEQ ID NO: 4036121 - RNA, 12 nt, Molluscum contagiosum virus
ccugcgcgugcg

SEQ ID NO: 4036122 - RNA, 13 nt, Molluscum contagiosum virus
ccugcggcucgca

SEQ ID NO: 4036123 - RNA, 20 nt, Molluscum contagiosum virus
ccugcgggcggcacacacuu

SEQ ID NO: 4036124 - RNA, 16 nt, Molluscum contagiosum virus
ccugcucaugcgcaag

SEQ ID NO: 4036125 - RNA, 17 nt, Molluscum contagiosum virus
ccugcucgggcugcgcg

SEQ ID NO: 4036126 - RNA, 18 nt, Molluscum contagiosum virus
ccugcugccgagcuucgu

SEQ ID NO: 4036127 - RNA, 14 nt, Molluscum contagiosum virus
ccugcugcgcagca

SEQ ID NO: 4036128 - RNA, 13 nt, Molluscum contagiosum virus
ccugcugcgcgcg

SEQ ID NO: 4036129 - RNA, 14 nt, Molluscum contagiosum virus
ccugcuggcaccgc

SEQ ID NO: 4036130 - RNA, 18 nt, Molluscum contagiosum virus
ccugcugguggugcugga

SEQ ID NO: 4036131 - RNA, 23 nt, Molluscum contagiosum virus
ccuggaacgcgagacgggcacgc

SEQ ID NO: 4036132 - RNA, 19 nt, Molluscum contagiosum virus
ccuggagggucacgcgcac

SEQ ID NO: 4036133 - RNA, 16 nt, Molluscum contagiosum virus
ccuggauaucgagcgc

SEQ ID NO: 4036134 - RNA, 21 nt, Molluscum contagiosum virus
ccuggauaucgagcgcgagau

SEQ ID NO: 4036135 - RNA, 21 nt, Molluscum contagiosum virus
ccuggcacuggcgcgcacgcg

SEQ ID NO: 4036136 - RNA, 18 nt, Molluscum contagiosum virus
ccuggcagugccgggcgc

SEQ ID NO: 4036137 - RNA, 19 nt, Molluscum contagiosum virus
ccuggcgagcgcucugcau

SEQ ID NO: 4036138 - RNA, 15 nt, Molluscum contagiosum virus
ccuggcugcugcgcg

SEQ ID NO: 4036139 - RNA, 18 nt, Molluscum contagiosum virus
ccuggcuugcgcgcgccc

SEQ ID NO: 4036140 - RNA, 15 nt, Molluscum contagiosum virus
ccugggcaggccgcc

SEQ ID NO: 4036141 - RNA, 20 nt, Molluscum contagiosum virus
ccuggucgagcaccugucgc

SEQ ID NO: 4036142 - RNA, 18 nt, Molluscum contagiosum virus
ccuggugcgcccgcggca

SEQ ID NO: 4036143 - RNA, 15 nt, Molluscum contagiosum virus
ccuguaacaaggaaa

SEQ ID NO: 4036144 - RNA, 22 nt, Molluscum contagiosum virus
ccugucaucaccccgcugggcc

SEQ ID NO: 4036145 - RNA, 15 nt, Molluscum contagiosum virus
ccuguccgcgggcgc

SEQ ID NO: 4036146 - RNA, 17 nt, Molluscum contagiosum virus
ccugucggcacaucucu

SEQ ID NO: 4036147 - RNA, 20 nt, Molluscum contagiosum virus
ccugucggcacaucucucag

SEQ ID NO: 4036148 - RNA, 21 nt, Molluscum contagiosum virus
ccugugcccgaccccgccguc

SEQ ID NO: 4036149 - RNA, 20 nt, Molluscum contagiosum virus
ccugugcugugcagaacuuc

SEQ ID NO: 4036150 - RNA, 22 nt, Molluscum contagiosum virus
ccuguucggcaugcagcgcagg

SEQ ID NO: 4036151 - RNA, 13 nt, Molluscum contagiosum virus
ccuguucuuccag

SEQ ID NO: 4036152 - RNA, 18 nt, Molluscum contagiosum virus
ccuguucuuucagcgcgc

SEQ ID NO: 4036153 - RNA, 23 nt, Molluscum contagiosum virus
ccuucgacguugacgagcgcgug

SEQ ID NO: 4036154 - RNA, 18 nt, Molluscum contagiosum virus
ccuucgccaaugacggcg

SEQ ID NO: 4036155 - RNA, 17 nt, Molluscum contagiosum virus
ccuucgcggagcgcacg

SEQ ID NO: 4036156 - RNA, 20 nt, Molluscum contagiosum virus
ccuucgcuugucgugcuucc

SEQ ID NO: 4036157 - RNA, 22 nt, Molluscum contagiosum virus
ccuucgcuugucgugcuuccug

SEQ ID NO: 4036158 - RNA, 19 nt, Molluscum contagiosum virus
ccuucucgucgagagcgcg

SEQ ID NO: 4036159 - RNA, 14 nt, Molluscum contagiosum virus
ccuugcagcgcagc

SEQ ID NO: 4036160 - RNA, 16 nt, Molluscum contagiosum virus
ccuugcucuggcucuc

SEQ ID NO: 4036161 - RNA, 17 nt, Molluscum contagiosum virus
ccuugcuggcacgcgag

SEQ ID NO: 4036162 - RNA, 23 nt, Molluscum contagiosum virus
ccuuguccgagcgaaccgcggca

SEQ ID NO: 4036163 - RNA, 22 nt, Molluscum contagiosum virus
ccuugucgagacaggccggggc

SEQ ID NO: 4036164 - RNA, 15 nt, Molluscum contagiosum virus
ccuuguggacgcgcg

SEQ ID NO: 4036165 - RNA, 20 nt, Molluscum contagiosum virus
ccuuuguucuuagcagcgcc

SEQ ID NO: 4036166 - RNA, 22 nt, Molluscum contagiosum virus
ccuuuguucuuagcagcgccgc

SEQ ID NO: 4036167 - RNA, 23 nt, Molluscum contagiosum virus
ccuuuugcgcgcugcgggcgccg

SEQ ID NO: 4036168 - RNA, 15 nt, Molluscum contagiosum virus
cgaaaucgcaaagca

SEQ ID NO: 4036169 - RNA, 22 nt, Molluscum contagiosum virus
cgaacaagacgcuagcugugcg

SEQ ID NO: 4036170 - RNA, 16 nt, Molluscum contagiosum virus
cgaacaccuccugcuu

SEQ ID NO: 4036171 - RNA, 12 nt, Molluscum contagiosum virus
cgaacagagcgc

SEQ ID NO: 4036172 - RNA, 20 nt, Molluscum contagiosum virus
cgaacgagggacacgcacuu

SEQ ID NO: 4036173 - RNA, 20 nt, Molluscum contagiosum virus
cgaacguuauccccuccaag

SEQ ID NO: 4036174 - RNA, 21 nt, Molluscum contagiosum virus
cgaacugcccggcggcaagcc

SEQ ID NO: 4036175 - RNA, 12 nt, Molluscum contagiosum virus
cgaacugcuggg

SEQ ID NO: 4036176 - RNA, 18 nt, Molluscum contagiosum virus
cgaagaccaccagcacca

SEQ ID NO: 4036177 - RNA, 19 nt, Molluscum contagiosum virus
cgaagacgucguagcgcuc

SEQ ID NO: 4036178 - RNA, 23 nt, Molluscum contagiosum virus
cgaagagcacgaugcccagcagc

SEQ ID NO: 4036179 - RNA, 19 nt, Molluscum contagiosum virus
cgaagaguuggacagccau

SEQ ID NO: 4036180 - RNA, 23 nt, Molluscum contagiosum virus
cgaagccuucgcagagaccguca

SEQ ID NO: 4036181 - RNA, 14 nt, Molluscum contagiosum virus
cgaagcgcgcagcg

SEQ ID NO: 4036182 - RNA, 19 nt, Molluscum contagiosum virus
cgaaggcaaccgcgacgag

SEQ ID NO: 4036183 - RNA, 16 nt, Molluscum contagiosum virus
cgaagucuaggcagcg

SEQ ID NO: 4036184 - RNA, 19 nt, Molluscum contagiosum virus
cgaaguuggucaacaacac

SEQ ID NO: 4036185 - RNA, 11 nt, Molluscum contagiosum virus
cgaaguuucac

SEQ ID NO: 4036186 - RNA, 15 nt, Molluscum contagiosum virus
cgaauccuuuacugc

SEQ ID NO: 4036187 - RNA, 19 nt, Molluscum contagiosum virus
cgacaaggaaaggcaccca

SEQ ID NO: 4036188 - RNA, 15 nt, Molluscum contagiosum virus
cgacagagcccggga

SEQ ID NO: 4036189 - RNA, 17 nt, Molluscum contagiosum virus
cgacagcauccuggagu

SEQ ID NO: 4036190 - RNA, 12 nt, Molluscum contagiosum virus
cgacagcucuuc

SEQ ID NO: 4036191 - RNA, 13 nt, Molluscum contagiosum virus
cgacaggaacgca

SEQ ID NO: 4036192 - RNA, 18 nt, Molluscum contagiosum virus
cgacaggaacgcaccacg

SEQ ID NO: 4036193 - RNA, 11 nt, Molluscum contagiosum virus
cgaccagcugg

SEQ ID NO: 4036194 - RNA, 19 nt, Molluscum contagiosum virus
cgaccauuuccugcgagug

SEQ ID NO: 4036195 - RNA, 20 nt, Molluscum contagiosum virus
cgacccaucggagaagugcu

SEQ ID NO: 4036196 - RNA, 12 nt, Molluscum contagiosum virus
cgaccccaagaa

SEQ ID NO: 4036197 - RNA, 16 nt, Molluscum contagiosum virus
cgaccgcgcacgcagc

SEQ ID NO: 4036198 - RNA, 16 nt, Molluscum contagiosum virus
cgaccuacgaggugcu

SEQ ID NO: 4036199 - RNA, 13 nt, Molluscum contagiosum virus
cgacgagcagcug

SEQ ID NO: 4036200 - RNA, 18 nt, Molluscum contagiosum virus
cgacgaggccuacagcgc

SEQ ID NO: 4036201 - RNA, 14 nt, Molluscum contagiosum virus
cgacgauggccacg

SEQ ID NO: 4036202 - RNA, 19 nt, Molluscum contagiosum virus
cgacgcaaaagaggccugc

SEQ ID NO: 4036203 - RNA, 17 nt, Molluscum contagiosum virus
cgacgccgagcccgagc

SEQ ID NO: 4036204 - RNA, 17 nt, Molluscum contagiosum virus
cgacgccguccgcgcag

SEQ ID NO: 4036205 - RNA, 14 nt, Molluscum contagiosum virus
cgacgcgcugcucu

SEQ ID NO: 4036206 - RNA, 19 nt, Molluscum contagiosum virus
cgacgcuuucguccgccgc

SEQ ID NO: 4036207 - RNA, 21 nt, Molluscum contagiosum virus
cgacggaacgagccugccgcg

SEQ ID NO: 4036208 - RNA, 13 nt, Molluscum contagiosum virus
cgacggcugcucg

SEQ ID NO: 4036209 - RNA, 20 nt, Molluscum contagiosum virus
cgacggucuuccaggucuuc

SEQ ID NO: 4036210 - RNA, 15 nt, Molluscum contagiosum virus
cgacguacgagugcu

SEQ ID NO: 4036211 - RNA, 20 nt, Molluscum contagiosum virus
cgacgucacgcuggucacgc

SEQ ID NO: 4036212 - RNA, 14 nt, Molluscum contagiosum virus
cgacgugcagacgc

SEQ ID NO: 4036213 - RNA, 21 nt, Molluscum contagiosum virus
cgacgugcugcugcagaacug

SEQ ID NO: 4036214 - RNA, 16 nt, Molluscum contagiosum virus
cgacuagccugugccc

SEQ ID NO: 4036215 - RNA, 21 nt, Molluscum contagiosum virus
cgacuagcgugcgcagcauuc

SEQ ID NO: 4036216 - RNA, 13 nt, Molluscum contagiosum virus
cgacuucucgcgc

SEQ ID NO: 4036217 - RNA, 18 nt, Molluscum contagiosum virus
cgacuuuguccugagccu

SEQ ID NO: 4036218 - RNA, 13 nt, Molluscum contagiosum virus
cgagaacuggcgc

SEQ ID NO: 4036219 - RNA, 17 nt, Molluscum contagiosum virus
cgagaacuggcgcagca

SEQ ID NO: 4036220 - RNA, 20 nt, Molluscum contagiosum virus
cgagaagaccuguucuuuca

SEQ ID NO: 4036221 - RNA, 20 nt, Molluscum contagiosum virus
cgagaagacggggcgcacgc

SEQ ID NO: 4036222 - RNA, 17 nt, Molluscum contagiosum virus
cgagaccagccgcgagc

SEQ ID NO: 4036223 - RNA, 15 nt, Molluscum contagiosum virus
cgagacgcugcgcga

SEQ ID NO: 4036224 - RNA, 21 nt, Molluscum contagiosum virus
cgagacggaaauguuguuuga

SEQ ID NO: 4036225 - RNA, 21 nt, Molluscum contagiosum virus
cgagacuucuccgaccgugcc

SEQ ID NO: 4036226 - RNA, 22 nt, Molluscum contagiosum virus
cgagaucacggcgugcgcgaga

SEQ ID NO: 4036227 - RNA, 13 nt, Molluscum contagiosum virus
cgagaugcucgcc

SEQ ID NO: 4036228 - RNA, 15 nt, Molluscum contagiosum virus
cgagauucguggcga

SEQ ID NO: 4036229 - RNA, 19 nt, Molluscum contagiosum virus
cgagcaauugcugggcaca

SEQ ID NO: 4036230 - RNA, 23 nt, Molluscum contagiosum virus
cgagcacccccgcugcacgcucu

SEQ ID NO: 4036231 - RNA, 22 nt, Molluscum contagiosum virus
cgagcacgccuccaagaagagg

SEQ ID NO: 4036232 - RNA, 17 nt, Molluscum contagiosum virus
cgagcacgccugcacgc

SEQ ID NO: 4036233 - RNA, 18 nt, Molluscum contagiosum virus
cgagcacgccugcacgcg

SEQ ID NO: 4036234 - RNA, 14 nt, Molluscum contagiosum virus
cgagcacgggcgcc

SEQ ID NO: 4036235 - RNA, 16 nt, Molluscum contagiosum virus
cgagcacuacgugcuc

SEQ ID NO: 4036236 - RNA, 16 nt, Molluscum contagiosum virus
cgagcacugccugccg

SEQ ID NO: 4036237 - RNA, 15 nt, Molluscum contagiosum virus
cgagcacugcgcgcg

SEQ ID NO: 4036238 - RNA, 22 nt, Molluscum contagiosum virus
cgagcagcgcuugcgcgccaac

SEQ ID NO: 4036239 - RNA, 23 nt, Molluscum contagiosum virus
cgagcaggucaucgggcugcagc

SEQ ID NO: 4036240 - RNA, 18 nt, Molluscum contagiosum virus
cgagcaguccgccucgag

SEQ ID NO: 4036241 - RNA, 16 nt, Molluscum contagiosum virus
cgagcaguucgcgcgc

SEQ ID NO: 4036242 - RNA, 14 nt, Molluscum contagiosum virus
cgagcaucugcgcg

SEQ ID NO: 4036243 - RNA, 16 nt, Molluscum contagiosum virus
cgagcaucugcgcgug

SEQ ID NO: 4036244 - RNA, 18 nt, Molluscum contagiosum virus
cgagcaugucacgcucac

SEQ ID NO: 4036245 - RNA, 15 nt, Molluscum contagiosum virus
cgagccaaggaugcc

SEQ ID NO: 4036246 - RNA, 16 nt, Molluscum contagiosum virus
cgagccccgcgccggc

SEQ ID NO: 4036247 - RNA, 17 nt, Molluscum contagiosum virus
cgagcccgagcccgggc

SEQ ID NO: 4036248 - RNA, 19 nt, Molluscum contagiosum virus
cgagcccgcggcgcgcagc

SEQ ID NO: 4036249 - RNA, 15 nt, Molluscum contagiosum virus
cgagccgcgcgagcg

SEQ ID NO: 4036250 - RNA, 21 nt, Molluscum contagiosum virus
cgagcgaaaacgcgugucuuc

SEQ ID NO: 4036251 - RNA, 19 nt, Molluscum contagiosum virus
cgagcgaaccgcggcagcc

SEQ ID NO: 4036252 - RNA, 14 nt, Molluscum contagiosum virus
cgagcgccagccug

SEQ ID NO: 4036253 - RNA, 18 nt, Molluscum contagiosum virus
cgagcgccagccugugcg

SEQ ID NO: 4036254 - RNA, 15 nt, Molluscum contagiosum virus
cgagcgccgcucgca

SEQ ID NO: 4036255 - RNA, 16 nt, Molluscum contagiosum virus
cgagcgccugcgagca

SEQ ID NO: 4036256 - RNA, 15 nt, Molluscum contagiosum virus
cgagcgcgcgccugc

SEQ ID NO: 4036257 - RNA, 18 nt, Molluscum contagiosum virus
cgagcgcgcgccugcugg

SEQ ID NO: 4036258 - RNA, 16 nt, Molluscum contagiosum virus
cgagcgcuaucucugg

SEQ ID NO: 4036259 - RNA, 23 nt, Molluscum contagiosum virus
cgagcgcugccgcuucgugcgcg

SEQ ID NO: 4036260 - RNA, 15 nt, Molluscum contagiosum virus
cgagcgcuucuuccg

SEQ ID NO: 4036261 - RNA, 23 nt, Molluscum contagiosum virus
cgagcgcuucuuccggcagcugg

SEQ ID NO: 4036262 - RNA, 21 nt, Molluscum contagiosum virus
cgagcggcuuuucgccggagg

SEQ ID NO: 4036263 - RNA, 13 nt, Molluscum contagiosum virus
cgagcguguccag

SEQ ID NO: 4036264 - RNA, 19 nt, Molluscum contagiosum virus
cgagcucgcgcgccagcac

SEQ ID NO: 4036265 - RNA, 11 nt, Molluscum contagiosum virus
cgagcugcuag

SEQ ID NO: 4036266 - RNA, 16 nt, Molluscum contagiosum virus
cgagcugugcgagcca

SEQ ID NO: 4036267 - RNA, 18 nt, Molluscum contagiosum virus
cgaggaaaggcaccccga

SEQ ID NO: 4036268 - RNA, 18 nt, Molluscum contagiosum virus
cgaggaauuugcccccac

SEQ ID NO: 4036269 - RNA, 13 nt, Molluscum contagiosum virus
cgaggaccccgcc

SEQ ID NO: 4036270 - RNA, 20 nt, Molluscum contagiosum virus
cgaggaccggcgcaacgagc

SEQ ID NO: 4036271 - RNA, 18 nt, Molluscum contagiosum virus
cgaggaccucgcgcgccg

SEQ ID NO: 4036272 - RNA, 20 nt, Molluscum contagiosum virus
cgaggacgagccccgcgccg

SEQ ID NO: 4036273 - RNA, 20 nt, Molluscum contagiosum virus
cgaggacuuccgcgcgcucu

SEQ ID NO: 4036274 - RNA, 21 nt, Molluscum contagiosum virus
cgaggccaaccuccugcaccu

SEQ ID NO: 4036275 - RNA, 23 nt, Molluscum contagiosum virus
cgaggccugcguggacagcaucc

SEQ ID NO: 4036276 - RNA, 21 nt, Molluscum contagiosum virus
cgaggcgccgaagagugcgca

SEQ ID NO: 4036277 - RNA, 18 nt, Molluscum contagiosum virus
cgaggcguccagcggcug

SEQ ID NO: 4036278 - RNA, 18 nt, Molluscum contagiosum virus
cugcucuccgcgggaaga

SEQ ID NO: 4036279 - RNA, 12 nt, Molluscum contagiosum virus
cugcucuggagc

SEQ ID NO: 4036280 - RNA, 18 nt, Molluscum contagiosum virus
cugcugcacacaccgcga

SEQ ID NO: 4036281 - RNA, 21 nt, Molluscum contagiosum virus
cugcugcacacaccgcgagca

SEQ ID NO: 4036282 - RNA, 21 nt, Molluscum contagiosum virus
cugcugcacagcuuccuggag

SEQ ID NO: 4036283 - RNA, 21 nt, Molluscum contagiosum virus
cugcugcccgcgcagcgccac

SEQ ID NO: 4036284 - RNA, 18 nt, Molluscum contagiosum virus
cugcugccgagcuucguc

SEQ ID NO: 4036285 - RNA, 16 nt, Molluscum contagiosum virus
cugcugcgcagcaucc

SEQ ID NO: 4036286 - RNA, 14 nt, Molluscum contagiosum virus
cugcugcucuucca

SEQ ID NO: 4036287 - RNA, 21 nt, Molluscum contagiosum virus
cugcuggcgcgcgcgcgccgg

SEQ ID NO: 4036288 - RNA, 15 nt, Molluscum contagiosum virus
cugcuggcggugcuc

SEQ ID NO: 4036289 - RNA, 17 nt, Molluscum contagiosum virus
cugcuggugcucgccug

SEQ ID NO: 4036290 - RNA, 22 nt, Molluscum contagiosum virus
cugcuggugcucgccugcaucu

SEQ ID NO: 4036291 - RNA, 18 nt, Molluscum contagiosum virus
cugcugguggugcuggag

SEQ ID NO: 4036292 - RNA, 13 nt, Molluscum contagiosum virus
cugcuguuggccu

SEQ ID NO: 4036293 - RNA, 12 nt, Molluscum contagiosum virus
cugcuguuucug

SEQ ID NO: 4036294 - RNA, 23 nt, Molluscum contagiosum virus
cugcuucccgcugagcgcagcac

SEQ ID NO: 4036295 - RNA, 18 nt, Molluscum contagiosum virus
cugcuuccgcaccugguc

SEQ ID NO: 4036296 - RNA, 17 nt, Molluscum contagiosum virus
cugcuugcccgcgccgc

SEQ ID NO: 4036297 - RNA, 14 nt, Molluscum contagiosum virus
cuggaccugcgcca

SEQ ID NO: 4036298 - RNA, 15 nt, Molluscum contagiosum virus
cuggacgccucggga

SEQ ID NO: 4036299 - RNA, 16 nt, Molluscum contagiosum virus
cuggacgggcacgagc

SEQ ID NO: 4036300 - RNA, 20 nt, Molluscum contagiosum virus
cuggagaaagaagugugccu

SEQ ID NO: 4036301 - RNA, 19 nt, Molluscum contagiosum virus
cuggagaccugucgugcaa

SEQ ID NO: 4036302 - RNA, 14 nt, Molluscum contagiosum virus
cuggagcagguucu

SEQ ID NO: 4036303 - RNA, 18 nt, Molluscum contagiosum virus
cuggagcuggcugggcac

SEQ ID NO: 4036304 - RNA, 18 nt, Molluscum contagiosum virus
cuggaguuuaaugacgcg

SEQ ID NO: 4036305 - RNA, 19 nt, Molluscum contagiosum virus
cuggcacaaaucgaggcgc

SEQ ID NO: 4036306 - RNA, 15 nt, Molluscum contagiosum virus
cuggcaccgggcgcc

SEQ ID NO: 4036307 - RNA, 17 nt, Molluscum contagiosum virus
cuggcaccgggcgccgc

SEQ ID NO: 4036308 - RNA, 12 nt, Molluscum contagiosum virus
cuggcaccugcg

SEQ ID NO: 4036309 - RNA, 14 nt, Molluscum contagiosum virus
cuggcacgcgccgc

SEQ ID NO: 4036310 - RNA, 17 nt, Molluscum contagiosum virus
cuggcacuggcgcgcac

SEQ ID NO: 4036311 - RNA, 21 nt, Molluscum contagiosum virus
cuggcacuggcgcgcacgcgc

SEQ ID NO: 4036312 - RNA, 21 nt, Molluscum contagiosum virus
cuggcagugccgggcgccggc

SEQ ID NO: 4036313 - RNA, 22 nt, Molluscum contagiosum virus
cuggcagugccgggcgccggcu

SEQ ID NO: 4036314 - RNA, 11 nt, Molluscum contagiosum virus
cuggccaacac

SEQ ID NO: 4036315 - RNA, 19 nt, Molluscum contagiosum virus
cuggccgaacugcucugcg

SEQ ID NO: 4036316 - RNA, 17 nt, Molluscum contagiosum virus
cuggccgaggucuucca

SEQ ID NO: 4036317 - RNA, 14 nt, Molluscum contagiosum virus
cuggccgaugccua

SEQ ID NO: 4036318 - RNA, 19 nt, Molluscum contagiosum virus
cuggcgaaaccugggcgcc

SEQ ID NO: 4036319 - RNA, 13 nt, Molluscum contagiosum virus
cuggcgagcacgu

SEQ ID NO: 4036320 - RNA, 13 nt, Molluscum contagiosum virus
cuggcgcagcagg

SEQ ID NO: 4036321 - RNA, 21 nt, Molluscum contagiosum virus
cuggcgcgcggagagcagugc

SEQ ID NO: 4036322 - RNA, 17 nt, Molluscum contagiosum virus
cuggcgcgugcgagcag

SEQ ID NO: 4036323 - RNA, 21 nt, Molluscum contagiosum virus
cuggcgcgugcgagcagaggc

SEQ ID NO: 4036324 - RNA, 16 nt, Molluscum contagiosum virus
cuggcggcgcacgcga

SEQ ID NO: 4036325 - RNA, 14 nt, Molluscum contagiosum virus
cuggcggggcuggc

SEQ ID NO: 4036326 - RNA, 16 nt, Molluscum contagiosum virus
cuggcggggcuggcag

SEQ ID NO: 4036327 - RNA, 22 nt, Molluscum contagiosum virus
cuggcucagaacgacaccgcga

SEQ ID NO: 4036328 - RNA, 14 nt, Molluscum contagiosum virus
cuggcuccgcugga

SEQ ID NO: 4036329 - RNA, 20 nt, Molluscum contagiosum virus
cuggcuuccgacgucaagca

SEQ ID NO: 4036330 - RNA, 15 nt, Molluscum contagiosum virus
cugggaaagggcugc

SEQ ID NO: 4036331 - RNA, 19 nt, Molluscum contagiosum virus
cugggaacaccacacgcgc

SEQ ID NO: 4036332 - RNA, 16 nt, Molluscum contagiosum virus
cugggaacccguggcc

SEQ ID NO: 4036333 - RNA, 21 nt, Molluscum contagiosum virus
cugggcaacgcgcgcgcgcug

SEQ ID NO: 4036334 - RNA, 23 nt, Molluscum contagiosum virus
cugggccaucgaaacucugcacg

SEQ ID NO: 4036335 - RNA, 22 nt, Molluscum contagiosum virus
cugggccccuacguggucaugg

SEQ ID NO: 4036336 - RNA, 17 nt, Molluscum contagiosum virus
cugggcguggcgcaccu

SEQ ID NO: 4036337 - RNA, 14 nt, Molluscum contagiosum virus
cuggggcuagcgcu

SEQ ID NO: 4036338 - RNA, 23 nt, Molluscum contagiosum virus
cuggucaagaaggcgcuggugga

SEQ ID NO: 4036339 - RNA, 14 nt, Molluscum contagiosum virus
cuggugcgcccgcg

SEQ ID NO: 4036340 - RNA, 17 nt, Molluscum contagiosum virus
cugguucugcgcugcca

SEQ ID NO: 4036341 - RNA, 14 nt, Molluscum contagiosum virus
cuguaaauggaccc

SEQ ID NO: 4036342 - RNA, 15 nt, Molluscum contagiosum virus
cuguaacaaggaaaa

SEQ ID NO: 4036343 - RNA, 14 nt, Molluscum contagiosum virus
cuguaccggcucag

SEQ ID NO: 4036344 - RNA, 16 nt, Molluscum contagiosum virus
cuguaugaucugcagu

SEQ ID NO: 4036345 - RNA, 18 nt, Molluscum contagiosum virus
cugucccuugauccaggc

SEQ ID NO: 4036346 - RNA, 21 nt, Molluscum contagiosum virus
cuguccgcggacgcgggccug

SEQ ID NO: 4036347 - RNA, 22 nt, Molluscum contagiosum virus
cugucguaacaauggacacgca

SEQ ID NO: 4036348 - RNA, 18 nt, Molluscum contagiosum virus
cugugagcgcgccgcucg

SEQ ID NO: 4036349 - RNA, 23 nt, Molluscum contagiosum virus
cugugcagaacuucucgcgagcg

SEQ ID NO: 4036350 - RNA, 14 nt, Molluscum contagiosum virus
cugugcgagccagu

SEQ ID NO: 4036351 - RNA, 18 nt, Molluscum contagiosum virus
cugugcuacgcgagcacu

SEQ ID NO: 4036352 - RNA, 20 nt, Molluscum contagiosum virus
cugugcuacgcgagcacugc

SEQ ID NO: 4036353 - RNA, 21 nt, Molluscum contagiosum virus
cuguguggaacggcucaccgc

SEQ ID NO: 4036354 - RNA, 21 nt, Molluscum contagiosum virus
cuguucggcaugcagcgcagg

SEQ ID NO: 4036355 - RNA, 16 nt, Molluscum contagiosum virus
cuuaacucagcgggca

SEQ ID NO: 4036356 - RNA, 12 nt, Molluscum contagiosum virus
cuuacugcugca

SEQ ID NO: 4036357 - RNA, 14 nt, Molluscum contagiosum virus
cuucaagcacgagc

SEQ ID NO: 4036358 - RNA, 18 nt, Molluscum contagiosum virus
cuucaagcacgagcugcu

SEQ ID NO: 4036359 - RNA, 19 nt, Molluscum contagiosum virus
cuucaaguuccuggagccc

SEQ ID NO: 4036360 - RNA, 22 nt, Molluscum contagiosum virus
cuucaggcaagaggggagccag

SEQ ID NO: 4036361 - RNA, 17 nt, Molluscum contagiosum virus
cuucauccgcgcgcucu

SEQ ID NO: 4036362 - RNA, 17 nt, Molluscum contagiosum virus
cuucccguuccugggca

SEQ ID NO: 4036363 - RNA, 13 nt, Molluscum contagiosum virus
cuuccgcggcgug

SEQ ID NO: 4036364 - RNA, 20 nt, Molluscum contagiosum virus
cuuccggagacaccagcucc

SEQ ID NO: 4036365 - RNA, 17 nt, Molluscum contagiosum virus
cuuccggaggcagcgcu

SEQ ID NO: 4036366 - RNA, 14 nt, Molluscum contagiosum virus
cuuccggcagcgcg

SEQ ID NO: 4036367 - RNA, 15 nt, Molluscum contagiosum virus
cuuccgucugcugcu

SEQ ID NO: 4036368 - RNA, 11 nt, Molluscum contagiosum virus
cuuccugcagc

SEQ ID NO: 4036369 - RNA, 12 nt, Molluscum contagiosum virus
cuuccugcuggc

SEQ ID NO: 4036370 - RNA, 20 nt, Molluscum contagiosum virus
cuuccuuuccgugcuugaca

SEQ ID NO: 4036371 - RNA, 19 nt, Molluscum contagiosum virus
cuucgaaggcagcgaaggc

SEQ ID NO: 4036372 - RNA, 20 nt, Molluscum contagiosum virus
cuucgacggcuucauccgcg

SEQ ID NO: 4036373 - RNA, 20 nt, Molluscum contagiosum virus
cuucgcagaggacagcuccu

SEQ ID NO: 4036374 - RNA, 20 nt, Molluscum contagiosum virus
cuucgcgaaggcaaccgcga

SEQ ID NO: 4036375 - RNA, 17 nt, Molluscum contagiosum virus
cuucgcgaugugcaccu

SEQ ID NO: 4036376 - RNA, 18 nt, Molluscum contagiosum virus
cuucgcguagucagggcc

SEQ ID NO: 4036377 - RNA, 15 nt, Molluscum contagiosum virus
cuucgggccgcugcc

SEQ ID NO: 4036378 - RNA, 20 nt, Molluscum contagiosum virus
cuucguaaagcuggccgagg

SEQ ID NO: 4036379 - RNA, 16 nt, Molluscum contagiosum virus
cuucgucaagcagcgc

SEQ ID NO: 4036380 - RNA, 14 nt, Molluscum contagiosum virus
cuucguggcgcugg

SEQ ID NO: 4036381 - RNA, 17 nt, Molluscum contagiosum virus
gacucagcauguugcuc

SEQ ID NO: 4036382 - RNA, 21 nt, Molluscum contagiosum virus
gacuccaaggaggucccuagc

SEQ ID NO: 4036383 - RNA, 20 nt, Molluscum contagiosum virus
gacuccaucugcgcgacgcc

SEQ ID NO: 4036384 - RNA, 22 nt, Molluscum contagiosum virus
gacuccgaggcagguuccggug

SEQ ID NO: 4036385 - RNA, 12 nt, Molluscum contagiosum virus
gacucgcagcuc

SEQ ID NO: 4036386 - RNA, 21 nt, Molluscum contagiosum virus
gacucgcgucugcaaggccug

SEQ ID NO: 4036387 - RNA, 13 nt, Molluscum contagiosum virus
gacucgcugccag

SEQ ID NO: 4036388 - RNA, 18 nt, Molluscum contagiosum virus
gacucggaugcgcugccg

SEQ ID NO: 4036389 - RNA, 12 nt, Molluscum contagiosum virus
gacucggugcuc

SEQ ID NO: 4036390 - RNA, 19 nt, Molluscum contagiosum virus
gacucuggcuucuccaccu

SEQ ID NO: 4036391 - RNA, 20 nt, Molluscum contagiosum virus
gacugacgccgauguccugc

SEQ ID NO: 4036392 - RNA, 22 nt, Molluscum contagiosum virus
gacugcgccuucugccugcccg

SEQ ID NO: 4036393 - RNA, 22 nt, Molluscum contagiosum virus
gacugcguugucuccuccugau

SEQ ID NO: 4036394 - RNA, 17 nt, Molluscum contagiosum virus
gacugcuacgucgcggc

SEQ ID NO: 4036395 - RNA, 23 nt, Molluscum contagiosum virus
gacugcugcccccgccgcggcgc

SEQ ID NO: 4036396 - RNA, 14 nt, Molluscum contagiosum virus
gacuggcacgcgcc

SEQ ID NO: 4036397 - RNA, 16 nt, Molluscum contagiosum virus
gacuggcacgcgccgc

SEQ ID NO: 4036398 - RNA, 14 nt, Molluscum contagiosum virus
gacugugccgcucc

SEQ ID NO: 4036399 - RNA, 18 nt, Molluscum contagiosum virus
gacuuagccacugugcug

SEQ ID NO: 4036400 - RNA, 17 nt, Molluscum contagiosum virus
gacuugugcccaugucc

SEQ ID NO: 4036401 - RNA, 23 nt, Molluscum contagiosum virus
gagaaaggcacccaccaggaaca

SEQ ID NO: 4036402 - RNA, 23 nt, Molluscum contagiosum virus
gagaacgcaagcguacgcgucgc

SEQ ID NO: 4036403 - RNA, 15 nt, Molluscum contagiosum virus
gagaacucgcgugcc

SEQ ID NO: 4036404 - RNA, 18 nt, Molluscum contagiosum virus
gagaagagggucgugcag

SEQ ID NO: 4036405 - RNA, 17 nt, Molluscum contagiosum virus
gagaagcuguaccuggu

SEQ ID NO: 4036406 - RNA, 18 nt, Molluscum contagiosum virus
gagaagcuguaccuggug

SEQ ID NO: 4036407 - RNA, 18 nt, Molluscum contagiosum virus
gagaagugaaaauaaaga

SEQ ID NO: 4036408 - RNA, 12 nt, Molluscum contagiosum virus
gagacaccagcu

SEQ ID NO: 4036409 - RNA, 15 nt, Molluscum contagiosum virus
gagacacgaguuucu

SEQ ID NO: 4036410 - RNA, 14 nt, Molluscum contagiosum virus
gagacauauguucu

SEQ ID NO: 4036411 - RNA, 18 nt, Molluscum contagiosum virus
gagacaucaucgcggagc

SEQ ID NO: 4036412 - RNA, 14 nt, Molluscum contagiosum virus
gagaccgucaaccu

SEQ ID NO: 4036413 - RNA, 20 nt, Molluscum contagiosum virus
gagaccgucaaccugcugcc

SEQ ID NO: 4036414 - RNA, 20 nt, Molluscum contagiosum virus
gagacggaaauguuguuuga

SEQ ID NO: 4036415 - RNA, 21 nt, Molluscum contagiosum virus
gagacugacgccgauguccug

SEQ ID NO: 4036416 - RNA, 23 nt, Molluscum contagiosum virus
gagacuucuccgaccgugcccug

SEQ ID NO: 4036417 - RNA, 22 nt, Molluscum contagiosum virus
gagacuugugcccauguccuuu

SEQ ID NO: 4036418 - RNA, 12 nt, Molluscum contagiosum virus
gagagacagcac

SEQ ID NO: 4036419 - RNA, 20 nt, Molluscum contagiosum virus
gagagccgccuuugcgcugu

SEQ ID NO: 4036420 - RNA, 14 nt, Molluscum contagiosum virus
gagagcgugagcag

SEQ ID NO: 4036421 - RNA, 14 nt, Molluscum contagiosum virus
gagagguugcgcgg

SEQ ID NO: 4036422 - RNA, 23 nt, Molluscum contagiosum virus
gagaucaggcagcugcugcgcuc

SEQ ID NO: 4036423 - RNA, 16 nt, Molluscum contagiosum virus
gagaucccuccgagac

SEQ ID NO: 4036424 - RNA, 23 nt, Molluscum contagiosum virus
gagaugauuccgucccccgcgga

SEQ ID NO: 4036425 - RNA, 20 nt, Molluscum contagiosum virus
gagaugcgccuuuuccgcga

SEQ ID NO: 4036426 - RNA, 23 nt, Molluscum contagiosum virus
gagcaagcgagagaggagugaag

SEQ ID NO: 4036427 - RNA, 14 nt, Molluscum contagiosum virus
gagcaagcgcccgc

SEQ ID NO: 4036428 - RNA, 15 nt, Molluscum contagiosum virus
gagcaaugcgagcaa

SEQ ID NO: 4036429 - RNA, 20 nt, Molluscum contagiosum virus
gagcacaaagagacgcggcc

SEQ ID NO: 4036430 - RNA, 16 nt, Molluscum contagiosum virus
gagcaccgcguggcgc

SEQ ID NO: 4036431 - RNA, 22 nt, Molluscum contagiosum virus
gagcacgacuacggcgagccca

SEQ ID NO: 4036432 - RNA, 21 nt, Molluscum contagiosum virus
gagcacgagcauuccgagccg

SEQ ID NO: 4036433 - RNA, 12 nt, Molluscum contagiosum virus
gagcacgcgcga

SEQ ID NO: 4036434 - RNA, 19 nt, Molluscum contagiosum virus
gagcacguccucugcgagc

SEQ ID NO: 4036435 - RNA, 15 nt, Molluscum contagiosum virus
gagcacugcgcgcgc

SEQ ID NO: 4036436 - RNA, 13 nt, Molluscum contagiosum virus
gagcacuggcugg

SEQ ID NO: 4036437 - RNA, 15 nt, Molluscum contagiosum virus
gagcacuuuggccuc

SEQ ID NO: 4036438 - RNA, 22 nt, Molluscum contagiosum virus
gagcagcccgugcgccugccgc

SEQ ID NO: 4036439 - RNA, 23 nt, Molluscum contagiosum virus
gagcagcccgugcgccugccgcg

SEQ ID NO: 4036440 - RNA, 19 nt, Molluscum contagiosum virus
gagcagcgcuagccccagc

SEQ ID NO: 4036441 - RNA, 13 nt, Molluscum contagiosum virus
gagcagcugcugc

SEQ ID NO: 4036442 - RNA, 14 nt, Molluscum contagiosum virus
gagcagugccgccg

SEQ ID NO: 4036443 - RNA, 18 nt, Molluscum contagiosum virus
gagcagugccgcucgcug

SEQ ID NO: 4036444 - RNA, 20 nt, Molluscum contagiosum virus
gagcagugccgcucgcuguc

SEQ ID NO: 4036445 - RNA, 16 nt, Molluscum contagiosum virus
gagcaguuccggucuc

SEQ ID NO: 4036446 - RNA, 19 nt, Molluscum contagiosum virus
gagcaguucgcgcgccugc

SEQ ID NO: 4036447 - RNA, 22 nt, Molluscum contagiosum virus
gagcaugccgccgcguacgcgc

SEQ ID NO: 4036448 - RNA, 19 nt, Molluscum contagiosum virus
gagccgcgcgagcgcgccc

SEQ ID NO: 4036449 - RNA, 12 nt, Molluscum contagiosum virus
gagccugcugcu

SEQ ID NO: 4036450 - RNA, 21 nt, Molluscum contagiosum virus
gagccuucucgucgagagcgc

SEQ ID NO: 4036451 - RNA, 22 nt, Molluscum contagiosum virus
gagcgaguucgcacgcuagcga

SEQ ID NO: 4036452 - RNA, 16 nt, Molluscum contagiosum virus
gagcgaguugagcagg

SEQ ID NO: 4036453 - RNA, 13 nt, Molluscum contagiosum virus
gagcgcagcugcc

SEQ ID NO: 4036454 - RNA, 15 nt, Molluscum contagiosum virus
gagcgcagucccagc

SEQ ID NO: 4036455 - RNA, 14 nt, Molluscum contagiosum virus
gagcgcaugcgcgc

SEQ ID NO: 4036456 - RNA, 20 nt, Molluscum contagiosum virus
gagcgcauucgcgcgccccc

SEQ ID NO: 4036457 - RNA, 12 nt, Molluscum contagiosum virus
gagcgcgcacga

SEQ ID NO: 4036458 - RNA, 22 nt, Molluscum contagiosum virus
gagcgcgcggcgccgagcaacu

SEQ ID NO: 4036459 - RNA, 18 nt, Molluscum contagiosum virus
gagcgcggcaacagcacg

SEQ ID NO: 4036460 - RNA, 21 nt, Molluscum contagiosum virus
gagcgcuucuuccggcagcug

SEQ ID NO: 4036461 - RNA, 22 nt, Molluscum contagiosum virus
gagcggaccccggugggggcaa

SEQ ID NO: 4036462 - RNA, 20 nt, Molluscum contagiosum virus
gagcggcacgggaaggcucu

SEQ ID NO: 4036463 - RNA, 19 nt, Molluscum contagiosum virus
gagcgggcaaugggcacgc

SEQ ID NO: 4036464 - RNA, 15 nt, Molluscum contagiosum virus
gagcgucgaacuucu

SEQ ID NO: 4036465 - RNA, 14 nt, Molluscum contagiosum virus
gagcguugucuuga

SEQ ID NO: 4036466 - RNA, 16 nt, Molluscum contagiosum virus
gagcuccccgcgcgca

SEQ ID NO: 4036467 - RNA, 17 nt, Molluscum contagiosum virus
gagcuccgcgcaugcca

SEQ ID NO: 4036468 - RNA, 14 nt, Molluscum contagiosum virus
gagcuccggcugcu

SEQ ID NO: 4036469 - RNA, 19 nt, Molluscum contagiosum virus
gagcuccgugcugcggcaa

SEQ ID NO: 4036470 - RNA, 18 nt, Molluscum contagiosum virus
gagcucgguagccaggcg

SEQ ID NO: 4036471 - RNA, 16 nt, Molluscum contagiosum virus
gagcucgucgcgcgcg

SEQ ID NO: 4036472 - RNA, 21 nt, Molluscum contagiosum virus
gagcucuucgacagcgugcgc

SEQ ID NO: 4036473 - RNA, 13 nt, Molluscum contagiosum virus
gagcugcagagcg

SEQ ID NO: 4036474 - RNA, 19 nt, Molluscum contagiosum virus
gagcugcagagcgugcugg

SEQ ID NO: 4036475 - RNA, 11 nt, Molluscum contagiosum virus
gagcugcugcc

SEQ ID NO: 4036476 - RNA, 15 nt, Molluscum contagiosum virus
gagcugcugcgcuac

SEQ ID NO: 4036477 - RNA, 20 nt, Molluscum contagiosum virus
gagcuggccgaagucgcagc

SEQ ID NO: 4036478 - RNA, 18 nt, Molluscum contagiosum virus
gagcugugccgcagcaac

SEQ ID NO: 4036479 - RNA, 22 nt, Molluscum contagiosum virus
gagcuguucaacaucguggcgc

SEQ ID NO: 4036480 - RNA, 13 nt, Molluscum contagiosum virus
gaggaaaggcaca

SEQ ID NO: 4036481 - RNA, 18 nt, Molluscum contagiosum virus
gaggaaaggcacaccccu

SEQ ID NO: 4036482 - RNA, 19 nt, Molluscum contagiosum virus
gaggaacuagugcugcugg

SEQ ID NO: 4036483 - RNA, 14 nt, Molluscum contagiosum virus
gaggaccccgccgc

SEQ ID NO: 4036484 - RNA, 15 nt, Molluscum contagiosum virus
gaggaccgcgagcgc

SEQ ID NO: 4036485 - RNA, 15 nt, Molluscum contagiosum virus
gaggaccucgcgcgc

SEQ ID NO: 4036486 - RNA, 20 nt, Molluscum contagiosum virus
gaggacgccggcaagccgag

SEQ ID NO: 4036487 - RNA, 23 nt, Molluscum contagiosum virus
gaggacgccggcaagccgagcca

SEQ ID NO: 4036488 - RNA, 21 nt, Molluscum contagiosum virus
gaggacgcgggcguguccgcg

SEQ ID NO: 4036489 - RNA, 15 nt, Molluscum contagiosum virus
gaggacggcgcgggc

SEQ ID NO: 4036490 - RNA, 16 nt, Molluscum contagiosum virus
gaggacuuccgcgcgc

SEQ ID NO: 4036491 - RNA, 23 nt, Molluscum contagiosum virus
gaggagauggaacugcagcagcu

SEQ ID NO: 4036492 - RNA, 14 nt, Molluscum contagiosum virus
gaggagccgcccgc

SEQ ID NO: 4036493 - RNA, 14 nt, Molluscum contagiosum virus
gaggagcucgacuc

SEQ ID NO: 4036494 - RNA, 23 nt, Molluscum contagiosum virus
gaggcccugcuugcccgcgccgc

SEQ ID NO: 4036495 - RNA, 16 nt, Molluscum contagiosum virus
gaggccggcacaagcc

SEQ ID NO: 4036496 - RNA, 14 nt, Molluscum contagiosum virus
gaggccuucgcgcc

SEQ ID NO: 4036497 - RNA, 19 nt, Molluscum contagiosum virus
gaggcgcuaccucgcggga

SEQ ID NO: 4036498 - RNA, 16 nt, Molluscum contagiosum virus
gaggcgcuagugcaga

SEQ ID NO: 4036499 - RNA, 20 nt, Molluscum contagiosum virus
gaggcgcugccgcgggacga

SEQ ID NO: 4036500 - RNA, 15 nt, Molluscum contagiosum virus
gaggcggcacugcua

SEQ ID NO: 4036501 - RNA, 14 nt, Molluscum contagiosum virus
gaggcucuguucug

SEQ ID NO: 4036502 - RNA, 12 nt, Molluscum contagiosum virus
gaggcugcucuc

SEQ ID NO: 4036503 - RNA, 21 nt, Molluscum contagiosum virus
gagggcagccucaaccugaac

SEQ ID NO: 4036504 - RNA, 20 nt, Molluscum contagiosum virus
gagggccuuggcggcgcggc

SEQ ID NO: 4036505 - RNA, 17 nt, Molluscum contagiosum virus
gaggggcaguguuccug

SEQ ID NO: 4036506 - RNA, 15 nt, Molluscum contagiosum virus
gagggucacgcgcac

SEQ ID NO: 4036507 - RNA, 15 nt, Molluscum contagiosum virus
gagggucgugcaggu

SEQ ID NO: 4036508 - RNA, 18 nt, Molluscum contagiosum virus
gaggucaagggugugggc

SEQ ID NO: 4036509 - RNA, 17 nt, Molluscum contagiosum virus
gaggucaugaccaagga

SEQ ID NO: 4036510 - RNA, 17 nt, Molluscum contagiosum virus
gaggucgagcgcgccgc

SEQ ID NO: 4036511 - RNA, 14 nt, Molluscum contagiosum virus
gaggucuagccgug

SEQ ID NO: 4036512 - RNA, 13 nt, Molluscum contagiosum virus
gaggugcgcgcaa

SEQ ID NO: 4036513 - RNA, 20 nt, Molluscum contagiosum virus
gagguucguccgcucgugcc

SEQ ID NO: 4036514 - RNA, 22 nt, Molluscum contagiosum virus
gaguaccgcgcgcacgcggcgc

SEQ ID NO: 4036515 - RNA, 23 nt, Molluscum contagiosum virus
gaguacgagcgcguaagaccaug

SEQ ID NO: 4036516 - RNA, 14 nt, Molluscum contagiosum virus
gagugacgccucga

SEQ ID NO: 4036517 - RNA, 22 nt, Molluscum contagiosum virus
gagugcgggagcaagucugcgc

SEQ ID NO: 4036518 - RNA, 13 nt, Molluscum contagiosum virus
gagugcugagcca

SEQ ID NO: 4036519 - RNA, 15 nt, Molluscum contagiosum virus
gagugcugagccaca

SEQ ID NO: 4036520 - RNA, 17 nt, Molluscum contagiosum virus
gagugcuggagcagacg

SEQ ID NO: 4036521 - RNA, 19 nt, Molluscum contagiosum virus
gagugcuggccgagcguga

SEQ ID NO: 4036522 - RNA, 22 nt, Molluscum contagiosum virus
gaguggcguccgcacgaggagc

SEQ ID NO: 4036523 - RNA, 18 nt, Molluscum contagiosum virus
gaguggcucacagccgug

SEQ ID NO: 4036524 - RNA, 14 nt, Molluscum contagiosum virus
gaguucaacacgca

SEQ ID NO: 4036525 - RNA, 23 nt, Molluscum contagiosum virus
gauacacauugcguguggggcau

SEQ ID NO: 4036526 - RNA, 16 nt, Molluscum contagiosum virus
gauaugcgccugugcc

SEQ ID NO: 4036527 - RNA, 17 nt, Molluscum contagiosum virus
gaucaccccgcagcuca

SEQ ID NO: 4036528 - RNA, 15 nt, Molluscum contagiosum virus
gaucacgaugugcgc

SEQ ID NO: 4036529 - RNA, 18 nt, Molluscum contagiosum virus
gaucaggcagcugcugcg

SEQ ID NO: 4036530 - RNA, 15 nt, Molluscum contagiosum virus
gauccacgcgugcug

SEQ ID NO: 4036531 - RNA, 14 nt, Molluscum contagiosum virus
gaucgcgcucuucc

SEQ ID NO: 4036532 - RNA, 16 nt, Molluscum contagiosum virus
gaucgcgguggcaggc

SEQ ID NO: 4036533 - RNA, 15 nt, Molluscum contagiosum virus
gaucggacucagcau

SEQ ID NO: 4036534 - RNA, 21 nt, Molluscum contagiosum virus
gaucuccacgucgaucagcuc

SEQ ID NO: 4036535 - RNA, 17 nt, Molluscum contagiosum virus
gaugaacaccauccugc

SEQ ID NO: 4036536 - RNA, 16 nt, Molluscum contagiosum virus
gaugaacuaccgugug

SEQ ID NO: 4036537 - RNA, 22 nt, Molluscum contagiosum virus
gaugcaaacauguagcgcgcgc

SEQ ID NO: 4036538 - RNA, 19 nt, Molluscum contagiosum virus
gaugccguuuucuccgugc

SEQ ID NO: 4036539 - RNA, 23 nt, Molluscum contagiosum virus
gaugcucaagcacugccucaugu

SEQ ID NO: 4036540 - RNA, 18 nt, Molluscum contagiosum virus
gaugcucuacgugcugca

SEQ ID NO: 4036541 - RNA, 13 nt, Molluscum contagiosum virus
gaugcugcgcgug

SEQ ID NO: 4036542 - RNA, 14 nt, Molluscum contagiosum virus
gauggucucgcugc

SEQ ID NO: 4036543 - RNA, 20 nt, Molluscum contagiosum virus
gauguagguacccgcaaccc

SEQ ID NO: 4036544 - RNA, 19 nt, Molluscum contagiosum virus
gauucacuuucgucgccuc

SEQ ID NO: 4036545 - RNA, 19 nt, Molluscum contagiosum virus
gauucccaucgacgagguc

SEQ ID NO: 4036546 - RNA, 13 nt, Molluscum contagiosum virus
gauuucgcgcagc

SEQ ID NO: 4036547 - RNA, 14 nt, Molluscum contagiosum virus
gauuucgcgcagca

SEQ ID NO: 4036548 - RNA, 22 nt, Molluscum contagiosum virus
gcaaaagcgcucgcggcucggc

SEQ ID NO: 4036549 - RNA, 13 nt, Molluscum contagiosum virus
gcaaacgcacugu

SEQ ID NO: 4036550 - RNA, 21 nt, Molluscum contagiosum virus
gcaaacgcugacggcgcugcg

SEQ ID NO: 4036551 - RNA, 23 nt, Molluscum contagiosum virus
gcaaacgcuguuuucacgcaagg

SEQ ID NO: 4036552 - RNA, 22 nt, Molluscum contagiosum virus
gcaaagaaugcaugcggagcug

SEQ ID NO: 4036553 - RNA, 16 nt, Molluscum contagiosum virus
gcaaagacgagggaug

SEQ ID NO: 4036554 - RNA, 14 nt, Molluscum contagiosum virus
gcaacaaagaggaa

SEQ ID NO: 4036555 - RNA, 20 nt, Molluscum contagiosum virus
gcaacaaggaaaggcacccg

SEQ ID NO: 4036556 - RNA, 19 nt, Molluscum contagiosum virus
gcaacaggaaagcuucugu

SEQ ID NO: 4036557 - RNA, 18 nt, Molluscum contagiosum virus
gcaaccagcuggcgcccg

SEQ ID NO: 4036558 - RNA, 15 nt, Molluscum contagiosum virus
gcaaccgcgcccgcg

SEQ ID NO: 4036559 - RNA, 15 nt, Molluscum contagiosum virus
gcaaccgcgugcgug

SEQ ID NO: 4036560 - RNA, 23 nt, Molluscum contagiosum virus
gcaaccucgggaagcccucaggg

SEQ ID NO: 4036561 - RNA, 13 nt, Molluscum contagiosum virus
gcaacgcgggcca

SEQ ID NO: 4036562 - RNA, 18 nt, Molluscum contagiosum virus
gcaacgcgggccaggcac

SEQ ID NO: 4036563 - RNA, 18 nt, Molluscum contagiosum virus
gcaacguugugcgcaacg

SEQ ID NO: 4036564 - RNA, 12 nt, Molluscum contagiosum virus
gcaacugccugc

SEQ ID NO: 4036565 - RNA, 20 nt, Molluscum contagiosum virus
gcaagaagaucgcggcgccg

SEQ ID NO: 4036566 - RNA, 15 nt, Molluscum contagiosum virus
gcaagagccgccggg

SEQ ID NO: 4036567 - RNA, 16 nt, Molluscum contagiosum virus
gcaagaggggagccag

SEQ ID NO: 4036568 - RNA, 20 nt, Molluscum contagiosum virus
gcaagcaccggcagcgcgau

SEQ ID NO: 4036569 - RNA, 23 nt, Molluscum contagiosum virus
gcaagcccgcgcgcgagcuggag

SEQ ID NO: 4036570 - RNA, 13 nt, Molluscum contagiosum virus
gcaagccuggcuc

SEQ ID NO: 4036571 - RNA, 15 nt, Molluscum contagiosum virus
gcaagccuggcuccu

SEQ ID NO: 4036572 - RNA, 13 nt, Molluscum contagiosum virus
gcaagcgcccgcg

SEQ ID NO: 4036573 - RNA, 21 nt, Molluscum contagiosum virus
gcaagcgccgccaugcugcgc

SEQ ID NO: 4036574 - RNA, 14 nt, Molluscum contagiosum virus
gcaagcgcguucgc

SEQ ID NO: 4036575 - RNA, 16 nt, Molluscum contagiosum virus
gcaagcgcguucgcgc

SEQ ID NO: 4036576 - RNA, 20 nt, Molluscum contagiosum virus
gcaagcguacgcgucgcgga

SEQ ID NO: 4036577 - RNA, 16 nt, Molluscum contagiosum virus
gcaagcugagcgcgcu

SEQ ID NO: 4036578 - RNA, 15 nt, Molluscum contagiosum virus
gcaagcuuugugcuc

SEQ ID NO: 4036579 - RNA, 14 nt, Molluscum contagiosum virus
gcaaggcggacgcc

SEQ ID NO: 4036580 - RNA, 15 nt, Molluscum contagiosum virus
gcaagggcuccuucu

SEQ ID NO: 4036581 - RNA, 16 nt, Molluscum contagiosum virus
gcaaguacaacccaaa

SEQ ID NO: 4036582 - RNA, 14 nt, Molluscum contagiosum virus
gcaagucucccucg

SEQ ID NO: 4036583 - RNA, 21 nt, Molluscum contagiosum virus
gcaaucgcgugcuugcugcgc

SEQ ID NO: 4036584 - RNA, 16 nt, Molluscum contagiosum virus
gcaaugcgugcgugcg

SEQ ID NO: 4036585 - RNA, 14 nt, Molluscum contagiosum virus
gcacaaaacacaaa

SEQ ID NO: 4036586 - RNA, 17 nt, Molluscum contagiosum virus
ggaucggagcgcagcug

SEQ ID NO: 4036587 - RNA, 21 nt, Molluscum contagiosum virus
ggaugcuggugucgagcucgc

SEQ ID NO: 4036588 - RNA, 23 nt, Molluscum contagiosum virus
ggcaaagaguugcgcgagaacuc

SEQ ID NO: 4036589 - RNA, 20 nt, Molluscum contagiosum virus
ggcaaccgcgcccgcgcgcu

SEQ ID NO: 4036590 - RNA, 22 nt, Molluscum contagiosum virus
ggcaagaccaucaucgcgcugc

SEQ ID NO: 4036591 - RNA, 10 nt, Molluscum contagiosum virus
ggcaagccug

SEQ ID NO: 4036592 - RNA, 18 nt, Molluscum contagiosum virus
ggcaaugccgaugcuagc

SEQ ID NO: 4036593 - RNA, 20 nt, Molluscum contagiosum virus
ggcacacacuugcacgcgca

SEQ ID NO: 4036594 - RNA, 17 nt, Molluscum contagiosum virus
ggcacccaccaggaacg

SEQ ID NO: 4036595 - RNA, 17 nt, Molluscum contagiosum virus
ggcaccccgaaggaaag

SEQ ID NO: 4036596 - RNA, 18 nt, Molluscum contagiosum virus
ggcacccgcaggaaaggc

SEQ ID NO: 4036597 - RNA, 18 nt, Molluscum contagiosum virus
ggcacccgugcgcgcgcu

SEQ ID NO: 4036598 - RNA, 15 nt, Molluscum contagiosum virus
ggcacccuggcugcu

SEQ ID NO: 4036599 - RNA, 21 nt, Molluscum contagiosum virus
ggcacccuggcugcugcgcga

SEQ ID NO: 4036600 - RNA, 20 nt, Molluscum contagiosum virus
ggcaccgcggcgggugccgc

SEQ ID NO: 4036601 - RNA, 20 nt, Molluscum contagiosum virus
ggcaccguaccgcgcccgcc

SEQ ID NO: 4036602 - RNA, 14 nt, Molluscum contagiosum virus
ggcaccugcaggaa

SEQ ID NO: 4036603 - RNA, 15 nt, Molluscum contagiosum virus
ggcaccugcaggaaa

SEQ ID NO: 4036604 - RNA, 17 nt, Molluscum contagiosum virus
ggcacgagcaguccgcc

SEQ ID NO: 4036605 - RNA, 15 nt, Molluscum contagiosum virus
ggcacgcacaaaguu

SEQ ID NO: 4036606 - RNA, 18 nt, Molluscum contagiosum virus
ggcacgccgcagcgcugg

SEQ ID NO: 4036607 - RNA, 12 nt, Molluscum contagiosum virus
ggcacgggcucg

SEQ ID NO: 4036608 - RNA, 22 nt, Molluscum contagiosum virus
ggcacgugcugcugcggcugcu

SEQ ID NO: 4036609 - RNA, 16 nt, Molluscum contagiosum virus
ggcacugcguacacau

SEQ ID NO: 4036610 - RNA, 22 nt, Molluscum contagiosum virus
ggcagaacaguaacugcugcag

SEQ ID NO: 4036611 - RNA, 14 nt, Molluscum contagiosum virus
ggcagauagcucgc

SEQ ID NO: 4036612 - RNA, 14 nt, Molluscum contagiosum virus
ggcagcaacugcac

SEQ ID NO: 4036613 - RNA, 20 nt, Molluscum contagiosum virus
ggcagcaacugcacagggau

SEQ ID NO: 4036614 - RNA, 14 nt, Molluscum contagiosum virus
ggcagccgccuggc

SEQ ID NO: 4036615 - RNA, 15 nt, Molluscum contagiosum virus
ggcagcgccgcgcgc

SEQ ID NO: 4036616 - RNA, 16 nt, Molluscum contagiosum virus
ggcagcgccgcgcgcg

SEQ ID NO: 4036617 - RNA, 12 nt, Molluscum contagiosum virus
ggcagcugcugc

SEQ ID NO: 4036618 - RNA, 20 nt, Molluscum contagiosum virus
ggcaggagccucuguccugc

SEQ ID NO: 4036619 - RNA, 17 nt, Molluscum contagiosum virus
ggcaggccgcccacgcu

SEQ ID NO: 4036620 - RNA, 21 nt, Molluscum contagiosum virus
ggcaggcggccgcguugcagc

SEQ ID NO: 4036621 - RNA, 12 nt, Molluscum contagiosum virus
ggcaggcucccg

SEQ ID NO: 4036622 - RNA, 22 nt, Molluscum contagiosum virus
ggcagugcuugcuucggcggcu

SEQ ID NO: 4036623 - RNA, 21 nt, Molluscum contagiosum virus
ggcauaccugugccagcgccu

SEQ ID NO: 4036624 - RNA, 16 nt, Molluscum contagiosum virus
ggcaucaugagccagu

SEQ ID NO: 4036625 - RNA, 21 nt, Molluscum contagiosum virus
ggcaugcgcgcagugccgcug

SEQ ID NO: 4036626 - RNA, 13 nt, Molluscum contagiosum virus
ggccacgcucgcg

SEQ ID NO: 4036627 - RNA, 14 nt, Molluscum contagiosum virus
ggccacgcucgcgc

SEQ ID NO: 4036628 - RNA, 17 nt, Molluscum contagiosum virus
ggccacgcucgcgcgca

SEQ ID NO: 4036629 - RNA, 19 nt, Molluscum contagiosum virus
ggccacucucccgggcucu

SEQ ID NO: 4036630 - RNA, 20 nt, Molluscum contagiosum virus
ggccacucucccgggcucug

SEQ ID NO: 4036631 - RNA, 21 nt, Molluscum contagiosum virus
ggccagcacaagccguccgcc

SEQ ID NO: 4036632 - RNA, 15 nt, Molluscum contagiosum virus
ggccagcgugcagac

SEQ ID NO: 4036633 - RNA, 23 nt, Molluscum contagiosum virus
ggccaugaucauggcgccgcugc

SEQ ID NO: 4036634 - RNA, 16 nt, Molluscum contagiosum virus
ggccaugucugugcgc

SEQ ID NO: 4036635 - RNA, 23 nt, Molluscum contagiosum virus
ggcccaccuucuugucgcgcgcc

SEQ ID NO: 4036636 - RNA, 13 nt, Molluscum contagiosum virus
ggccccugcgcga

SEQ ID NO: 4036637 - RNA, 17 nt, Molluscum contagiosum virus
ggcccgcgcggagacgc

SEQ ID NO: 4036638 - RNA, 20 nt, Molluscum contagiosum virus
ggcccgugcucaggccagca

SEQ ID NO: 4036639 - RNA, 22 nt, Molluscum contagiosum virus
ggcccuucuugacgcgagacug

SEQ ID NO: 4036640 - RNA, 23 nt, Molluscum contagiosum virus
ggcccuucuugacgcgagacugu

SEQ ID NO: 4036641 - RNA, 23 nt, Molluscum contagiosum virus
ggcccuuuucuaggccucagccg

SEQ ID NO: 4036642 - RNA, 19 nt, Molluscum contagiosum virus
ggccgaagucgcagcagcg

SEQ ID NO: 4036643 - RNA, 12 nt, Molluscum contagiosum virus
ggccgacggcac

SEQ ID NO: 4036644 - RNA, 15 nt, Molluscum contagiosum virus
ggccgacggcacggg

SEQ ID NO: 4036645 - RNA, 14 nt, Molluscum contagiosum virus
ggccgagcgugacc

SEQ ID NO: 4036646 - RNA, 16 nt, Molluscum contagiosum virus
ggccgaggcacgcggu

SEQ ID NO: 4036647 - RNA, 14 nt, Molluscum contagiosum virus
ggccgcacucgccg

SEQ ID NO: 4036648 - RNA, 13 nt, Molluscum contagiosum virus
ggccgcaugcacc

SEQ ID NO: 4036649 - RNA, 21 nt, Molluscum contagiosum virus
ggccgcaugcaccuacgcgcc

SEQ ID NO: 4036650 - RNA, 18 nt, Molluscum contagiosum virus
ggccgcauuuucucugga

SEQ ID NO: 4036651 - RNA, 14 nt, Molluscum contagiosum virus
ggccgcccacgcuc

SEQ ID NO: 4036652 - RNA, 19 nt, Molluscum contagiosum virus
ggccgcccacgcucaacca

SEQ ID NO: 4036653 - RNA, 19 nt, Molluscum contagiosum virus
ggccgcgaggcaugucgcg

SEQ ID NO: 4036654 - RNA, 19 nt, Molluscum contagiosum virus
ggccgcggaggacucggag

SEQ ID NO: 4036655 - RNA, 22 nt, Molluscum contagiosum virus
ggccgcggaggacucggaggcc

SEQ ID NO: 4036656 - RNA, 14 nt, Molluscum contagiosum virus
ggccgcuagcaggc

SEQ ID NO: 4036657 - RNA, 16 nt, Molluscum contagiosum virus
ggccgcuccagagccg

SEQ ID NO: 4036658 - RNA, 15 nt, Molluscum contagiosum virus
ggccggcgcgccgcg

SEQ ID NO: 4036659 - RNA, 17 nt, Molluscum contagiosum virus
ggccgucgcgagcuugg

SEQ ID NO: 4036660 - RNA, 14 nt, Molluscum contagiosum virus
ggccgugcagagca

SEQ ID NO: 4036661 - RNA, 13 nt, Molluscum contagiosum virus
ggccugcacggcu

SEQ ID NO: 4036662 - RNA, 18 nt, Molluscum contagiosum virus
ggccugcccugcucaugc

SEQ ID NO: 4036663 - RNA, 17 nt, Molluscum contagiosum virus
ggccugcguggacagca

SEQ ID NO: 4036664 - RNA, 14 nt, Molluscum contagiosum virus
ggccugcugaagaa

SEQ ID NO: 4036665 - RNA, 20 nt, Molluscum contagiosum virus
ggccugcugaagaaggagcc

SEQ ID NO: 4036666 - RNA, 14 nt, Molluscum contagiosum virus
ggccugugcugugc

SEQ ID NO: 4036667 - RNA, 17 nt, Molluscum contagiosum virus
ggccuguucggcaugca

SEQ ID NO: 4036668 - RNA, 19 nt, Molluscum contagiosum virus
ggccuucuaccacagguuu

SEQ ID NO: 4036669 - RNA, 23 nt, Molluscum contagiosum virus
ggccuucuaccacagguuucuca

SEQ ID NO: 4036670 - RNA, 14 nt, Molluscum contagiosum virus
ggccuugggcacuu

SEQ ID NO: 4036671 - RNA, 16 nt, Molluscum contagiosum virus
ggccuuuagcagcggc

SEQ ID NO: 4036672 - RNA, 20 nt, Molluscum contagiosum virus
ggcgaacaucucggcuccgc

SEQ ID NO: 4036673 - RNA, 18 nt, Molluscum contagiosum virus
ggcgacaacgacagagcc

SEQ ID NO: 4036674 - RNA, 19 nt, Molluscum contagiosum virus
ggcgacaacgacagagccc

SEQ ID NO: 4036675 - RNA, 18 nt, Molluscum contagiosum virus
ggcgaccagcugguccug

SEQ ID NO: 4036676 - RNA, 20 nt, Molluscum contagiosum virus
ggcgacguucgagaccagcc

SEQ ID NO: 4036677 - RNA, 18 nt, Molluscum contagiosum virus
ggcgagacgugcggcacg

SEQ ID NO: 4036678 - RNA, 19 nt, Molluscum contagiosum virus
ggcgagcaucugcgcgugc

SEQ ID NO: 4036679 - RNA, 14 nt, Molluscum contagiosum virus
ggcgagcgcucugc

SEQ ID NO: 4036680 - RNA, 23 nt, Molluscum contagiosum virus
ggcgagucucccguggcgcgccg

SEQ ID NO: 4036681 - RNA, 23 nt, Molluscum contagiosum virus
ggcgcaaccgcgugcgugcacag

SEQ ID NO: 4036682 - RNA, 16 nt, Molluscum contagiosum virus
ggcgcaacgcuggccg

SEQ ID NO: 4036683 - RNA, 15 nt, Molluscum contagiosum virus
ggcgcaagcgcaagc

SEQ ID NO: 4036684 - RNA, 24 nt, Molluscum contagiosum virus
ggcgcacacuccucggcgcuacgc

SEQ ID NO: 4036685 - RNA, 20 nt, Molluscum contagiosum virus
ggcgcacauuaguagcgagc

SEQ ID NO: 4036686 - RNA, 17 nt, Molluscum contagiosum virus
ggcgcaccugcuagagc

SEQ ID NO: 4036687 - RNA, 19 nt, Molluscum contagiosum virus
ggcgcaccuuuggugcaga

SEQ ID NO: 4036688 - RNA, 18 nt, Molluscum contagiosum virus
ggcgcacgccgaagagcc

SEQ ID NO: 4036689 - RNA, 20 nt, Molluscum contagiosum virus
ggcgcacgccgaagagccgc

SEQ ID NO: 4036690 - RNA, 15 nt, Molluscum contagiosum virus
ggcgcacgcggcucu

SEQ ID NO: 4036691 - RNA, 12 nt, Molluscum contagiosum virus
ggcgcacgcuug

SEQ ID NO: 4036692 - RNA, 24 nt, Molluscum contagiosum virus
ggcgcacggugugcuacugcacug

SEQ ID NO: 4036693 - RNA, 14 nt, Molluscum contagiosum virus
ggcgcagcaggaug

SEQ ID NO: 4036694 - RNA, 15 nt, Molluscum contagiosum virus
ggcgcagcgcggccu

SEQ ID NO: 4036695 - RNA, 16 nt, Molluscum contagiosum virus
ggcgcaggccgcgccc

SEQ ID NO: 4036696 - RNA, 22 nt, Molluscum contagiosum virus
ggcgcaggugcgggcuagcacg

SEQ ID NO: 4036697 - RNA, 18 nt, Molluscum contagiosum virus
ggcgcauccuccacgcug

SEQ ID NO: 4036698 - RNA, 22 nt, Molluscum contagiosum virus
ggcgcaucucgauucacaucuu

SEQ ID NO: 4036699 - RNA, 16 nt, Molluscum contagiosum virus
ggcgccaaccgcgagc

SEQ ID NO: 4036700 - RNA, 19 nt, Molluscum contagiosum virus
ggcgccagcuaagccggag

SEQ ID NO: 4036701 - RNA, 16 nt, Molluscum contagiosum virus
ggcgcccuuccuggag

SEQ ID NO: 4036702 - RNA, 16 nt, Molluscum contagiosum virus
ggcgccgaugcagugc

SEQ ID NO: 4036703 - RNA, 18 nt, Molluscum contagiosum virus
ggcgccgccccgccagca

SEQ ID NO: 4036704 - RNA, 17 nt, Molluscum contagiosum virus
ggcgccgcgcugaugcu

SEQ ID NO: 4036705 - RNA, 18 nt, Molluscum contagiosum virus
ggcgccgcuaccagcucg

SEQ ID NO: 4036706 - RNA, 14 nt, Molluscum contagiosum virus
ggcgccgcugcugg

SEQ ID NO: 4036707 - RNA, 16 nt, Molluscum contagiosum virus
ggcgccggcgcgcgcg

SEQ ID NO: 4036708 - RNA, 20 nt, Molluscum contagiosum virus
ggcgccguccaugugcccgc

SEQ ID NO: 4036709 - RNA, 17 nt, Molluscum contagiosum virus
ggcgcgaagcaggcgcc

SEQ ID NO: 4036710 - RNA, 20 nt, Molluscum contagiosum virus
ggcgcgagaugcucgccggc

SEQ ID NO: 4036711 - RNA, 21 nt, Molluscum contagiosum virus
ggcgcgagaugcucgccggca

SEQ ID NO: 4036712 - RNA, 15 nt, Molluscum contagiosum virus
ggcgcgcagcucgcc

SEQ ID NO: 4036713 - RNA, 16 nt, Molluscum contagiosum virus
ggcgcgcagcucgccg

SEQ ID NO: 4036714 - RNA, 13 nt, Molluscum contagiosum virus
ggcgcgcccagcg

SEQ ID NO: 4036715 - RNA, 14 nt, Molluscum contagiosum virus
ggcgcgccgccggu

SEQ ID NO: 4036716 - RNA, 11 nt, Molluscum contagiosum virus
ggcgcgccgcg

SEQ ID NO: 4036717 - RNA, 21 nt, Molluscum contagiosum virus
ggcgcgccgcgggccgccggg

SEQ ID NO: 4036718 - RNA, 20 nt, Molluscum contagiosum virus
ggcgcgccuaguucgagaag

SEQ ID NO: 4036719 - RNA, 19 nt, Molluscum contagiosum virus
ggcgcgcgagcacagcgcg

SEQ ID NO: 4036720 - RNA, 23 nt, Molluscum contagiosum virus
ggcgcgcgagcacagcgcgcgga

SEQ ID NO: 4036721 - RNA, 16 nt, Molluscum contagiosum virus
ggcgcgcgagcugcua

SEQ ID NO: 4036722 - RNA, 15 nt, Molluscum contagiosum virus
ggcgcgcgcgcgccg

SEQ ID NO: 4036723 - RNA, 13 nt, Molluscum contagiosum virus
ggcgcgcgugcuu

SEQ ID NO: 4036724 - RNA, 17 nt, Molluscum contagiosum virus
ggcgcgggagcucacgg

SEQ ID NO: 4036725 - RNA, 13 nt, Molluscum contagiosum virus
ggcgcgggcgcgc

SEQ ID NO: 4036726 - RNA, 17 nt, Molluscum contagiosum virus
ggcgcggucgcccgccg

SEQ ID NO: 4036727 - RNA, 12 nt, Molluscum contagiosum virus
ggcgcgugccgc

SEQ ID NO: 4036728 - RNA, 17 nt, Molluscum contagiosum virus
ggcgcguuucggccugc

SEQ ID NO: 4036729 - RNA, 18 nt, Molluscum contagiosum virus
ggcgcguuuucgcggccu

SEQ ID NO: 4036730 - RNA, 16 nt, Molluscum contagiosum virus
ggcgcucgccuuuccc

SEQ ID NO: 4036731 - RNA, 14 nt, Molluscum contagiosum virus
ggcgcucgcgcgca

SEQ ID NO: 4036732 - RNA, 21 nt, Molluscum contagiosum virus
ggcgcucggcguggugcuggc

SEQ ID NO: 4036733 - RNA, 13 nt, Molluscum contagiosum virus
ggcgcugcucgcg

SEQ ID NO: 4036734 - RNA, 20 nt, Molluscum contagiosum virus
ggcgcugucgcgcaggcucu

SEQ ID NO: 4036735 - RNA, 13 nt, Molluscum contagiosum virus
ggcgcuuggcgag

SEQ ID NO: 4036736 - RNA, 15 nt, Molluscum contagiosum virus
ggcggaaguggugcc

SEQ ID NO: 4036737 - RNA, 17 nt, Molluscum contagiosum virus
ggcggcaagcuuugcuu

SEQ ID NO: 4036738 - RNA, 14 nt, Molluscum contagiosum virus
ggcggcacccgccg

SEQ ID NO: 4036739 - RNA, 21 nt, Molluscum contagiosum virus
ggcggcacccgccgcggugcc

SEQ ID NO: 4036740 - RNA, 16 nt, Molluscum contagiosum virus
ggcggccaaccgccug

SEQ ID NO: 4036741 - RNA, 19 nt, Molluscum contagiosum virus
ggcggcgcacgcggcucug

SEQ ID NO: 4036742 - RNA, 14 nt, Molluscum contagiosum virus
ggcggcggccacgc

SEQ ID NO: 4036743 - RNA, 16 nt, Molluscum contagiosum virus
ggcggcgucgcgcgcg

SEQ ID NO: 4036744 - RNA, 13 nt, Molluscum contagiosum virus
ggcggggcugcug

SEQ ID NO: 4036745 - RNA, 14 nt, Molluscum contagiosum virus
ggcgggggcagcag

SEQ ID NO: 4036746 - RNA, 19 nt, Molluscum contagiosum virus
ggcguacgcgcagggagcu

SEQ ID NO: 4036747 - RNA, 14 nt, Molluscum contagiosum virus
ggcguacgugcgcc

SEQ ID NO: 4036748 - RNA, 18 nt, Molluscum contagiosum virus
ggcguacgugcgccagcu

SEQ ID NO: 4036749 - RNA, 21 nt, Molluscum contagiosum virus
ggcguccggcgcuugccccuc

SEQ ID NO: 4036750 - RNA, 17 nt, Molluscum contagiosum virus
ggcguccggugcucgcc

SEQ ID NO: 4036751 - RNA, 21 nt, Molluscum contagiosum virus
ggcguccggugcucgccccuc

SEQ ID NO: 4036752 - RNA, 18 nt, Molluscum contagiosum virus
ggcgucgugcaccuggag

SEQ ID NO: 4036753 - RNA, 16 nt, Molluscum contagiosum virus
ggcgugcucagcacca

SEQ ID NO: 4036754 - RNA, 16 nt, Molluscum contagiosum virus
ggcgugcugugccugc

SEQ ID NO: 4036755 - RNA, 13 nt, Molluscum contagiosum virus
ggcuaagcucugc

SEQ ID NO: 4036756 - RNA, 18 nt, Molluscum contagiosum virus
ggcuccuucuucagcagg

SEQ ID NO: 4036757 - RNA, 15 nt, Molluscum contagiosum virus
ggcucgaggugugcc

SEQ ID NO: 4036758 - RNA, 21 nt, Molluscum contagiosum virus
ggcucgcggcuaggacuagca

SEQ ID NO: 4036759 - RNA, 19 nt, Molluscum contagiosum virus
ggcucguacugcugcaggc

SEQ ID NO: 4036760 - RNA, 19 nt, Molluscum contagiosum virus
ggcucucaacugcaggccc

SEQ ID NO: 4036761 - RNA, 21 nt, Molluscum contagiosum virus
ggcugcagcccuuccacgaca

SEQ ID NO: 4036762 - RNA, 13 nt, Molluscum contagiosum virus
ggcugcccgcgga

SEQ ID NO: 4036763 - RNA, 20 nt, Molluscum contagiosum virus
ggcugccggcgcgugagcgc

SEQ ID NO: 4036764 - RNA, 23 nt, Molluscum contagiosum virus
ggcugccguuuuacacagggcuu

SEQ ID NO: 4036765 - RNA, 16 nt, Molluscum contagiosum virus
ggcugcugccgcgcgu

SEQ ID NO: 4036766 - RNA, 18 nt, Molluscum contagiosum virus
ggcugcuggcggugcucu

SEQ ID NO: 4036767 - RNA, 19 nt, Molluscum contagiosum virus
ggcuggaccugcgccagcg

SEQ ID NO: 4036768 - RNA, 15 nt, Molluscum contagiosum virus
ggcuguguuccagcu

SEQ ID NO: 4036769 - RNA, 22 nt, Molluscum contagiosum virus
gggaauaccggagacaccagcu

SEQ ID NO: 4036770 - RNA, 21 nt, Molluscum contagiosum virus
gggacacgcacuugcgcgccu

SEQ ID NO: 4036771 - RNA, 13 nt, Molluscum contagiosum virus
gggacggaauuug

SEQ ID NO: 4036772 - RNA, 17 nt, Molluscum contagiosum virus
gggagccagccucucuc

SEQ ID NO: 4036773 - RNA, 17 nt, Molluscum contagiosum virus
gggaugcgcacacuugc

SEQ ID NO: 4036774 - RNA, 21 nt, Molluscum contagiosum virus
gggauugaccucgcgacggga

SEQ ID NO: 4036775 - RNA, 22 nt, Molluscum contagiosum virus
gggauuugccgguugcgcgugu

SEQ ID NO: 4036776 - RNA, 13 nt, Molluscum contagiosum virus
gggcaagcucgcg

SEQ ID NO: 4036777 - RNA, 20 nt, Molluscum contagiosum virus
gggcaagcucgcgcugcuga

SEQ ID NO: 4036778 - RNA, 19 nt, Molluscum contagiosum virus
gggcacauggacggcgccu

SEQ ID NO: 4036779 - RNA, 18 nt, Molluscum contagiosum virus
gggcacggcacccgccag

SEQ ID NO: 4036780 - RNA, 19 nt, Molluscum contagiosum virus
gggcagggaaagagcacgc

SEQ ID NO: 4036781 - RNA, 14 nt, Molluscum contagiosum virus
gggcccugugccuc

SEQ ID NO: 4036782 - RNA, 17 nt, Molluscum contagiosum virus
gggcccugugccucuug

SEQ ID NO: 4036783 - RNA, 12 nt, Molluscum contagiosum virus
gggccgcgaggc

SEQ ID NO: 4036784 - RNA, 20 nt, Molluscum contagiosum virus
gggccuguucggcaugcagc

SEQ ID NO: 4036785 - RNA, 15 nt, Molluscum contagiosum virus
gggcgagcaguguga

SEQ ID NO: 4036786 - RNA, 11 nt, Molluscum contagiosum virus
gggcgccagcu

SEQ ID NO: 4036787 - RNA, 14 nt, Molluscum contagiosum virus
gggcgccgcggccu

SEQ ID NO: 4036788 - RNA, 17 nt, Molluscum contagiosum virus
gggcgcgaccggcgugc

SEQ ID NO: 4036789 - RNA, 20 nt, Molluscum contagiosum virus
gggcgcgaccuuagcgaggu

SEQ ID NO: 4036790 - RNA, 18 nt, Molluscum contagiosum virus
gggcgcgcgccagcagcg

SEQ ID NO: 4036791 - RNA, 20 nt, Molluscum contagiosum virus
gugcgcucggaggggcuccg

SEQ ID NO: 4036792 - RNA, 14 nt, Molluscum contagiosum virus
gugcguacccuggc

SEQ ID NO: 4036793 - RNA, 15 nt, Molluscum contagiosum virus
gugcguacccuggca

SEQ ID NO: 4036794 - RNA, 13 nt, Molluscum contagiosum virus
gugcgugcccagc

SEQ ID NO: 4036795 - RNA, 19 nt, Molluscum contagiosum virus
gugcgugcccagcagguag

SEQ ID NO: 4036796 - RNA, 15 nt, Molluscum contagiosum virus
gugcgugcgcugcgc

SEQ ID NO: 4036797 - RNA, 14 nt, Molluscum contagiosum virus
gugcuccacgcgca

SEQ ID NO: 4036798 - RNA, 22 nt, Molluscum contagiosum virus
gugcuccacgcgcagcuucucu

SEQ ID NO: 4036799 - RNA, 17 nt, Molluscum contagiosum virus
gugcuccgaggaggcaa

SEQ ID NO: 4036800 - RNA, 14 nt, Molluscum contagiosum virus
gugcucgcacacgu

SEQ ID NO: 4036801 - RNA, 17 nt, Molluscum contagiosum virus
gugcucgcacacgugca

SEQ ID NO: 4036802 - RNA, 22 nt, Molluscum contagiosum virus
gugcucgcgagcguuucugccg

SEQ ID NO: 4036803 - RNA, 22 nt, Molluscum contagiosum virus
gugcucguggaaaagcagggcc

SEQ ID NO: 4036804 - RNA, 20 nt, Molluscum contagiosum virus
gugcucguguguccgcacgc

SEQ ID NO: 4036805 - RNA, 13 nt, Molluscum contagiosum virus
gugcugcgcacgc

SEQ ID NO: 4036806 - RNA, 17 nt, Molluscum contagiosum virus
gugcugcgccacgugcg

SEQ ID NO: 4036807 - RNA, 16 nt, Molluscum contagiosum virus
gugcugcgcgcccagg

SEQ ID NO: 4036808 - RNA, 20 nt, Molluscum contagiosum virus
gugcugcgcgcccaggcgcg

SEQ ID NO: 4036809 - RNA, 16 nt, Molluscum contagiosum virus
gugcugcgucacaagc

SEQ ID NO: 4036810 - RNA, 17 nt, Molluscum contagiosum virus
gugcugcucugcgugcu

SEQ ID NO: 4036811 - RNA, 23 nt, Molluscum contagiosum virus
gugcugcugcggcugcuggagcu

SEQ ID NO: 4036812 - RNA, 12 nt, Molluscum contagiosum virus
gugcuggggcua

SEQ ID NO: 4036813 - RNA, 19 nt, Molluscum contagiosum virus
gugcuggggcuagcgcugc

SEQ ID NO: 4036814 - RNA, 16 nt, Molluscum contagiosum virus
gugcuggugcugguca

SEQ ID NO: 4036815 - RNA, 21 nt, Molluscum contagiosum virus
gugcugucccucugugcggag

SEQ ID NO: 4036816 - RNA, 22 nt, Molluscum contagiosum virus
gugcuguccuacuucgucaagc

SEQ ID NO: 4036817 - RNA, 18 nt, Molluscum contagiosum virus
guggagccugaggccgcg

SEQ ID NO: 4036818 - RNA, 19 nt, Molluscum contagiosum virus
guggaguuuagcaagguca

SEQ ID NO: 4036819 - RNA, 16 nt, Molluscum contagiosum virus
guggcaugcgcccuca

SEQ ID NO: 4036820 - RNA, 23 nt, Molluscum contagiosum virus
guggccaaagucuuccuggggcu

SEQ ID NO: 4036821 - RNA, 18 nt, Molluscum contagiosum virus
guggccaacggcgccauc

SEQ ID NO: 4036822 - RNA, 21 nt, Molluscum contagiosum virus
guggccaacuucgcggucgac

SEQ ID NO: 4036823 - RNA, 15 nt, Molluscum contagiosum virus
guggccaaggucucg

SEQ ID NO: 4036824 - RNA, 18 nt, Molluscum contagiosum virus
guggccgagccgcuggcc

SEQ ID NO: 4036825 - RNA, 21 nt, Molluscum contagiosum virus
guggccgcgccgggcgccaga

SEQ ID NO: 4036826 - RNA, 22 nt, Molluscum contagiosum virus
guggccgcgccgggcgccagaa

SEQ ID NO: 4036827 - RNA, 18 nt, Molluscum contagiosum virus
guggcgccgaugcagugc

SEQ ID NO: 4036828 - RNA, 20 nt, Molluscum contagiosum virus
guggcgcgcgagcugcugcg

SEQ ID NO: 4036829 - RNA, 14 nt, Molluscum contagiosum virus
guggcggcucugcc

SEQ ID NO: 4036830 - RNA, 17 nt, Molluscum contagiosum virus
guggcguugcugcugcg

SEQ ID NO: 4036831 - RNA, 13 nt, Molluscum contagiosum virus
gugggccgcggcg

SEQ ID NO: 4036832 - RNA, 20 nt, Molluscum contagiosum virus
gugggcgacgugaagacgcu

SEQ ID NO: 4036833 - RNA, 23 nt, Molluscum contagiosum virus
gugggcgccgcggcgggggcagc

SEQ ID NO: 4036834 - RNA, 14 nt, Molluscum contagiosum virus
gugguccaccagcu

SEQ ID NO: 4036835 - RNA, 16 nt, Molluscum contagiosum virus
guggugcugggcgugg

SEQ ID NO: 4036836 - RNA, 20 nt, Molluscum contagiosum virus
guguacgacgugcugcugca

SEQ ID NO: 4036837 - RNA, 21 nt, Molluscum contagiosum virus
gugucaacuucgcgcuguacc

SEQ ID NO: 4036838 - RNA, 18 nt, Molluscum contagiosum virus
gugucgagcucgcgcgcc

SEQ ID NO: 4036839 - RNA, 14 nt, Molluscum contagiosum virus
gugugcacauugcu

SEQ ID NO: 4036840 - RNA, 21 nt, Molluscum contagiosum virus
gugugccuguuugccacggcc

SEQ ID NO: 4036841 - RNA, 13 nt, Molluscum contagiosum virus
guguucugcgcgc

SEQ ID NO: 4036842 - RNA, 16 nt, Molluscum contagiosum virus
guguuggccaggcgcg

SEQ ID NO: 4036843 - RNA, 14 nt, Molluscum contagiosum virus
guguuuugugccug

SEQ ID NO: 4036844 - RNA, 17 nt, Molluscum contagiosum virus
guuaaauggacgugcuc

SEQ ID NO: 4036845 - RNA, 14 nt, Molluscum contagiosum virus
guuaaucacgauga

SEQ ID NO: 4036846 - RNA, 14 nt, Molluscum contagiosum virus
guuccacuccugug

SEQ ID NO: 4036847 - RNA, 16 nt, Molluscum contagiosum virus
guuccagcagcgccag

SEQ ID NO: 4036848 - RNA, 12 nt, Molluscum contagiosum virus
guuccagcuccg

SEQ ID NO: 4036849 - RNA, 16 nt, Molluscum contagiosum virus
guucccgcucaaccuc

SEQ ID NO: 4036850 - RNA, 17 nt, Molluscum contagiosum virus
guuccgcgccugcccau

SEQ ID NO: 4036851 - RNA, 16 nt, Molluscum contagiosum virus
guuccggcagcgccgc

SEQ ID NO: 4036852 - RNA, 17 nt, Molluscum contagiosum virus
guuccggcagcgccgcg

SEQ ID NO: 4036853 - RNA, 17 nt, Molluscum contagiosum virus
guuccggugucagcccc

SEQ ID NO: 4036854 - RNA, 20 nt, Molluscum contagiosum virus
guuccguucgucagagggac

SEQ ID NO: 4036855 - RNA, 20 nt, Molluscum contagiosum virus
guucgcaaagacgagggaug

SEQ ID NO: 4036856 - RNA, 15 nt, Molluscum contagiosum virus
guucgcaacaaaaga

SEQ ID NO: 4036857 - RNA, 13 nt, Molluscum contagiosum virus
guucgcgcugcuc

SEQ ID NO: 4036858 - RNA, 13 nt, Molluscum contagiosum virus
guucgcugcuggc

SEQ ID NO: 4036859 - RNA, 20 nt, Molluscum contagiosum virus
guucuccacguccgacucgg

SEQ ID NO: 4036860 - RNA, 12 nt, Molluscum contagiosum virus
guucuccaggaa

SEQ ID NO: 4036861 - RNA, 18 nt, Molluscum contagiosum virus
guucucuuuguuccugcg

SEQ ID NO: 4036862 - RNA, 19 nt, Molluscum contagiosum virus
guucugcgcugccagcucg

SEQ ID NO: 4036863 - RNA, 20 nt, Molluscum contagiosum virus
guucuuuccggacgauaaau

SEQ ID NO: 4036864 - RNA, 14 nt, Molluscum contagiosum virus
guugcacgugcgug

SEQ ID NO: 4036865 - RNA, 18 nt, Molluscum contagiosum virus
guugcgagccagccaggc

SEQ ID NO: 4036866 - RNA, 16 nt, Molluscum contagiosum virus
guugcgcgugugcagc

SEQ ID NO: 4036867 - RNA, 14 nt, Molluscum contagiosum virus
guugcgguggugca

SEQ ID NO: 4036868 - RNA, 22 nt, Molluscum contagiosum virus
guugcugcugccgcgcggcacg

SEQ ID NO: 4036869 - RNA, 21 nt, Molluscum contagiosum virus
guuggcgcgcaagcgcugcuc

SEQ ID NO: 4036870 - RNA, 16 nt, Molluscum contagiosum virus
guugucuugaugcugu

SEQ ID NO: 4036871 - RNA, 19 nt, Molluscum contagiosum virus
guugugcacgcuguccagg

SEQ ID NO: 4036872 - RNA, 20 nt, Molluscum contagiosum virus
guuuacaucggcuccgcgcc

SEQ ID NO: 4036873 - RNA, 22 nt, Molluscum contagiosum virus
guuuccugcggcgcugcuacaa

SEQ ID NO: 4036874 - RNA, 17 nt, Molluscum contagiosum virus
guuucugccgcgccucc

SEQ ID NO: 4036875 - RNA, 15 nt, Molluscum contagiosum virus
guuugcacccgcgca

SEQ ID NO: 4036876 - RNA, 20 nt, Molluscum contagiosum virus
guuuucuuucauggcucccg

SEQ ID NO: 4036877 - RNA, 19 nt, Molluscum contagiosum virus
uaaagaguuccagcagcgc

SEQ ID NO: 4036878 - RNA, 16 nt, Molluscum contagiosum virus
uaaauggaccucaaga

SEQ ID NO: 4036879 - RNA, 15 nt, Molluscum contagiosum virus
uaaauggcgcgcgcg

SEQ ID NO: 4036880 - RNA, 12 nt, Molluscum contagiosum virus
uaacaucugcua

SEQ ID NO: 4036881 - RNA, 23 nt, Molluscum contagiosum virus
uaagaguccacugccaaagcuau

SEQ ID NO: 4036882 - RNA, 15 nt, Molluscum contagiosum virus
uaaggcggaccgcgc

SEQ ID NO: 4036883 - RNA, 16 nt, Molluscum contagiosum virus
uaagggcccgcuggcg

SEQ ID NO: 4036884 - RNA, 20 nt, Molluscum contagiosum virus
uaagggcggacgcacuagac

SEQ ID NO: 4036885 - RNA, 16 nt, Molluscum contagiosum virus
uacaaaacaugcugua

SEQ ID NO: 4036886 - RNA, 18 nt, Molluscum contagiosum virus
uacacgcagagccagcgc

SEQ ID NO: 4036887 - RNA, 17 nt, Molluscum contagiosum virus
uacacgugcacgcgcac

SEQ ID NO: 4036888 - RNA, 14 nt, Molluscum contagiosum virus
uacacuuccugcua

SEQ ID NO: 4036889 - RNA, 20 nt, Molluscum contagiosum virus
uacagaugccacgaccgcgc

SEQ ID NO: 4036890 - RNA, 18 nt, Molluscum contagiosum virus
uacagcaugcgugcaaca

SEQ ID NO: 4036891 - RNA, 14 nt, Molluscum contagiosum virus
uacagcgcgcgugc

SEQ ID NO: 4036892 - RNA, 14 nt, Molluscum contagiosum virus
uacagugcgcgcac

SEQ ID NO: 4036893 - RNA, 15 nt, Molluscum contagiosum virus
uacaucggacuggcg

SEQ ID NO: 4036894 - RNA, 15 nt, Molluscum contagiosum virus
acgggcacgccgcgg

SEQ ID NO: 4036895 - RNA, 19 nt, Molluscum contagiosum virus
acgggcccgcgaaggagag

SEQ ID NO: 4036896 - RNA, 15 nt, Molluscum contagiosum virus
acggguaccgugcgc

SEQ ID NO: 4036897 - RNA, 16 nt, Molluscum contagiosum virus
acgguaaacucuugca

SEQ ID NO: 4036898 - RNA, 18 nt, Molluscum contagiosum virus
acggucguccuggagccu

SEQ ID NO: 4036899 - RNA, 14 nt, Molluscum contagiosum virus
acguacagcgggcg

SEQ ID NO: 4036900 - RNA, 19 nt, Molluscum contagiosum virus
acguacgagugcuggagca

SEQ ID NO: 4036901 - RNA, 20 nt, Molluscum contagiosum virus
acguacucgcugcuccccgc

SEQ ID NO: 4036902 - RNA, 21 nt, Molluscum contagiosum virus
acguacuggugcccaccccgc

SEQ ID NO: 4036903 - RNA, 21 nt, Molluscum contagiosum virus
acguaguacugcagcagcucc

SEQ ID NO: 4036904 - RNA, 23 nt, Molluscum contagiosum virus
acguaugcguaguaguagcgcuc

SEQ ID NO: 4036905 - RNA, 15 nt, Molluscum contagiosum virus
acgucaauggcgcgc

SEQ ID NO: 4036906 - RNA, 22 nt, Molluscum contagiosum virus
acguccaggccgcggcagcucu

SEQ ID NO: 4036907 - RNA, 12 nt, Molluscum contagiosum virus
acgucuucgccg

SEQ ID NO: 4036908 - RNA, 13 nt, Molluscum contagiosum virus
acgucuuucucga

SEQ ID NO: 4036909 - RNA, 19 nt, Molluscum contagiosum virus
acgugaccucgcugcugag

SEQ ID NO: 4036910 - RNA, 19 nt, Molluscum contagiosum virus
acgugacgcgccucgagca

SEQ ID NO: 4036911 - RNA, 16 nt, Molluscum contagiosum virus
acgugacugagggcgc

SEQ ID NO: 4036912 - RNA, 18 nt, Molluscum contagiosum virus
acgugcagcggcgccacg

SEQ ID NO: 4036913 - RNA, 20 nt, Molluscum contagiosum virus
acgugcgccagcucugggcg

SEQ ID NO: 4036914 - RNA, 21 nt, Molluscum contagiosum virus
acgugcgccagcucugggcgc

SEQ ID NO: 4036915 - RNA, 17 nt, Molluscum contagiosum virus
acgugcguacgcggcgc

SEQ ID NO: 4036916 - RNA, 22 nt, Molluscum contagiosum virus
acgugcgugguguccacgcgcg

SEQ ID NO: 4036917 - RNA, 20 nt, Molluscum contagiosum virus
acgugcugcagcugcgcgag

SEQ ID NO: 4036918 - RNA, 13 nt, Molluscum contagiosum virus
acgugcugcgccg

SEQ ID NO: 4036919 - RNA, 19 nt, Molluscum contagiosum virus
acguggauaccaugcucuc

SEQ ID NO: 4036920 - RNA, 17 nt, Molluscum contagiosum virus
acgugguccaccagcac

SEQ ID NO: 4036921 - RNA, 17 nt, Molluscum contagiosum virus
acguguccgcauccgcc

SEQ ID NO: 4036922 - RNA, 20 nt, Molluscum contagiosum virus
acguugcgcguucagcgcac

SEQ ID NO: 4036923 - RNA, 23 nt, Molluscum contagiosum virus
acguuuucuuugcgcucaucaag

SEQ ID NO: 4036924 - RNA, 21 nt, Molluscum contagiosum virus
acuacauggacgugcugcugg

SEQ ID NO: 4036925 - RNA, 20 nt, Molluscum contagiosum virus
acuaccgcaaccagcugcug

SEQ ID NO: 4036926 - RNA, 13 nt, Molluscum contagiosum virus
acuaccugcugcu

SEQ ID NO: 4036927 - RNA, 20 nt, Molluscum contagiosum virus
acuacugcuccauggagcgc

SEQ ID NO: 4036928 - RNA, 15 nt, Molluscum contagiosum virus
acuacuuccugcagc

SEQ ID NO: 4036929 - RNA, 18 nt, Molluscum contagiosum virus
acuagcacgggcgggaca

SEQ ID NO: 4036930 - RNA, 14 nt, Molluscum contagiosum virus
acuagcgugcgcag

SEQ ID NO: 4036931 - RNA, 14 nt, Molluscum contagiosum virus
acuagugcugcugg

SEQ ID NO: 4036932 - RNA, 16 nt, Molluscum contagiosum virus
acucaacaagcugcug

SEQ ID NO: 4036933 - RNA, 14 nt, Molluscum contagiosum virus
acuccaaggagggc

SEQ ID NO: 4036934 - RNA, 20 nt, Molluscum contagiosum virus
acuccaaggucgagcugacu

SEQ ID NO: 4036935 - RNA, 19 nt, Molluscum contagiosum virus
acuccgaggcagguuccgg

SEQ ID NO: 4036936 - RNA, 23 nt, Molluscum contagiosum virus
acuccguuuuucugugcucgcgc

SEQ ID NO: 4036937 - RNA, 12 nt, Molluscum contagiosum virus
acuccuguccuc

SEQ ID NO: 4036938 - RNA, 22 nt, Molluscum contagiosum virus
acuccuuccggagacaccagcu

SEQ ID NO: 4036939 - RNA, 20 nt, Molluscum contagiosum virus
acucgagcacguagugcucg

SEQ ID NO: 4036940 - RNA, 12 nt, Molluscum contagiosum virus
acucgcugcugc

SEQ ID NO: 4036941 - RNA, 21 nt, Molluscum contagiosum virus
acucgcugcugcucuuccagg

SEQ ID NO: 4036942 - RNA, 18 nt, Molluscum contagiosum virus
acucggacacguugcagc

SEQ ID NO: 4036943 - RNA, 15 nt, Molluscum contagiosum virus
acucggcaugugcgc

SEQ ID NO: 4036944 - RNA, 17 nt, Molluscum contagiosum virus
acucggcuucugcugca

SEQ ID NO: 4036945 - RNA, 18 nt, Molluscum contagiosum virus
acucggcuucugcugcac

SEQ ID NO: 4036946 - RNA, 13 nt, Molluscum contagiosum virus
acucgggugcccg

SEQ ID NO: 4036947 - RNA, 19 nt, Molluscum contagiosum virus
acucgugcgccgcgccgaa

SEQ ID NO: 4036948 - RNA, 18 nt, Molluscum contagiosum virus
acucuuguuuguuguccc

SEQ ID NO: 4036949 - RNA, 13 nt, Molluscum contagiosum virus
acugacugcugcc

SEQ ID NO: 4036950 - RNA, 16 nt, Molluscum contagiosum virus
acugagugcugagcca

SEQ ID NO: 4036951 - RNA, 16 nt, Molluscum contagiosum virus
acugcaagaucuauca

SEQ ID NO: 4036952 - RNA, 21 nt, Molluscum contagiosum virus
acugcacugcagcgagcucgc

SEQ ID NO: 4036953 - RNA, 14 nt, Molluscum contagiosum virus
acugcagcagcccc

SEQ ID NO: 4036954 - RNA, 17 nt, Molluscum contagiosum virus
acugcagcgagcucgcg

SEQ ID NO: 4036955 - RNA, 18 nt, Molluscum contagiosum virus
acugccccaugcccgacc

SEQ ID NO: 4036956 - RNA, 14 nt, Molluscum contagiosum virus
acugccgccaggaa

SEQ ID NO: 4036957 - RNA, 13 nt, Molluscum contagiosum virus
acugccuggucac

SEQ ID NO: 4036958 - RNA, 22 nt, Molluscum contagiosum virus
acugcgaucgcagcagugccag

SEQ ID NO: 4036959 - RNA, 18 nt, Molluscum contagiosum virus
acugcgccuucugccugc

SEQ ID NO: 4036960 - RNA, 12 nt, Molluscum contagiosum virus
acugcgcgcaug

SEQ ID NO: 4036961 - RNA, 14 nt, Molluscum contagiosum virus
acugcuacgucgcg

SEQ ID NO: 4036962 - RNA, 19 nt, Molluscum contagiosum virus
acugcucgcgcacgcgcac

SEQ ID NO: 4036963 - RNA, 22 nt, Molluscum contagiosum virus
acugcugcaaucugcgcuccac

SEQ ID NO: 4036964 - RNA, 19 nt, Molluscum contagiosum virus
acugcugcaguguguacgg

SEQ ID NO: 4036965 - RNA, 17 nt, Molluscum contagiosum virus
acugcugcccccgccgc

SEQ ID NO: 4036966 - RNA, 22 nt, Molluscum contagiosum virus
acugcugcccgcgcagcgccac

SEQ ID NO: 4036967 - RNA, 12 nt, Molluscum contagiosum virus
acuggacugagc

SEQ ID NO: 4036968 - RNA, 14 nt, Molluscum contagiosum virus
acuggacugagccg

SEQ ID NO: 4036969 - RNA, 22 nt, Molluscum contagiosum virus
acuggagaccugucgugcaaug

SEQ ID NO: 4036970 - RNA, 14 nt, Molluscum contagiosum virus
acuggagcacggac

SEQ ID NO: 4036971 - RNA, 23 nt, Molluscum contagiosum virus
acuggcaaugagggcgaggccgc

SEQ ID NO: 4036972 - RNA, 15 nt, Molluscum contagiosum virus
acuggcaccugcggc

SEQ ID NO: 4036973 - RNA, 16 nt, Molluscum contagiosum virus
acuggcaccugcggcu

SEQ ID NO: 4036974 - RNA, 19 nt, Molluscum contagiosum virus
acuggccgcgauucugcuc

SEQ ID NO: 4036975 - RNA, 15 nt, Molluscum contagiosum virus
acuggccguguaagu

SEQ ID NO: 4036976 - RNA, 18 nt, Molluscum contagiosum virus
acuggcgcgcacgcgcac

SEQ ID NO: 4036977 - RNA, 20 nt, Molluscum contagiosum virus
acuggggcgaucgcgucacg

SEQ ID NO: 4036978 - RNA, 23 nt, Molluscum contagiosum virus
acugucucugcgcgagcagcugc

SEQ ID NO: 4036979 - RNA, 23 nt, Molluscum contagiosum virus
acuguugccuggagggcagugcc

SEQ ID NO: 4036980 - RNA, 17 nt, Molluscum contagiosum virus
acuucaagcacgagcug

SEQ ID NO: 4036981 - RNA, 14 nt, Molluscum contagiosum virus
acuuccacgagcug

SEQ ID NO: 4036982 - RNA, 18 nt, Molluscum contagiosum virus
acuuccgcgcgcucuugc

SEQ ID NO: 4036983 - RNA, 15 nt, Molluscum contagiosum virus
acuuccuugcgcagg

SEQ ID NO: 4036984 - RNA, 23 nt, Molluscum contagiosum virus
acuugagcaccaagaagcggccc

SEQ ID NO: 4036985 - RNA, 15 nt, Molluscum contagiosum virus
acuugccguguucua

SEQ ID NO: 4036986 - RNA, 20 nt, Molluscum contagiosum virus
acuugcgcguccacaaaggc

SEQ ID NO: 4036987 - RNA, 19 nt, Molluscum contagiosum virus
acuugcgcguucgcaaaga

SEQ ID NO: 4036988 - RNA, 16 nt, Molluscum contagiosum virus
acuugcuuccucuccc

SEQ ID NO: 4036989 - RNA, 14 nt, Molluscum contagiosum virus
acuugugcgccccc

SEQ ID NO: 4036990 - RNA, 22 nt, Molluscum contagiosum virus
agaacaagaagcgcuucuuugc

SEQ ID NO: 4036991 - RNA, 14 nt, Molluscum contagiosum virus
agaagcggcccugc

SEQ ID NO: 4036992 - RNA, 16 nt, Molluscum contagiosum virus
agaagcggcccugcac

SEQ ID NO: 4036993 - RNA, 15 nt, Molluscum contagiosum virus
agaaggagcccuugc

SEQ ID NO: 4036994 - RNA, 15 nt, Molluscum contagiosum virus
agaagugugccugcu

SEQ ID NO: 4036995 - RNA, 12 nt, Molluscum contagiosum virus
agaauagcuggg

SEQ ID NO: 4036996 - RNA, 20 nt, Molluscum contagiosum virus
agguacccgcaaccccgcgc

SEQ ID NO: 4036997 - RNA, 22 nt, Molluscum contagiosum virus
aggucaucgacgagcacgagca

SEQ ID NO: 4036998 - RNA, 18 nt, Molluscum contagiosum virus
aggucggaagaaggcgcc

SEQ ID NO: 4036999 - RNA, 22 nt, Molluscum contagiosum virus
aggugcagaaccugcgggugga

SEQ ID NO: 4037000 - RNA, 20 nt, Molluscum contagiosum virus
aggugcgaaggcucgagcug

SEQ ID NO: 4037001 - RNA, 20 nt, Molluscum contagiosum virus
agguggccaacggcgccauc

SEQ ID NO: 4037002 - RNA, 19 nt, Molluscum contagiosum virus
aguaccagauuagcaacug

SEQ ID NO: 4037003 - RNA, 12 nt, Molluscum contagiosum virus
aguaccugggca

SEQ ID NO: 4037004 - RNA, 22 nt, Molluscum contagiosum virus
aguacgagcgcguaagaccaug

SEQ ID NO: 4037005 - RNA, 17 nt, Molluscum contagiosum virus
aguacgauggaugcugg

SEQ ID NO: 4037006 - RNA, 22 nt, Molluscum contagiosum virus
aguacgcgcgugguacagauga

SEQ ID NO: 4037007 - RNA, 18 nt, Molluscum contagiosum virus
agucaaugacacgagccc

SEQ ID NO: 4037008 - RNA, 20 nt, Molluscum contagiosum virus
agucacugcuagugcuggcc

SEQ ID NO: 4037009 - RNA, 16 nt, Molluscum contagiosum virus
agucagaguccgaccc

SEQ ID NO: 4037010 - RNA, 12 nt, Molluscum contagiosum virus
agucagcggcgg

SEQ ID NO: 4037011 - RNA, 16 nt, Molluscum contagiosum virus
aguccaugcccacgcg

SEQ ID NO: 4037012 - RNA, 20 nt, Molluscum contagiosum virus
aguccgacccgugcugcuug

SEQ ID NO: 4037013 - RNA, 22 nt, Molluscum contagiosum virus
aguccgcccccagguggagcug

SEQ ID NO: 4037014 - RNA, 17 nt, Molluscum contagiosum virus
aguccgcgcccaaggcc

SEQ ID NO: 4037015 - RNA, 11 nt, Molluscum contagiosum virus
aguccugggcg

SEQ ID NO: 4037016 - RNA, 13 nt, Molluscum contagiosum virus
aguccugggcgag

SEQ ID NO: 4037017 - RNA, 12 nt, Molluscum contagiosum virus
agucugcgcagg

SEQ ID NO: 4037018 - RNA, 15 nt, Molluscum contagiosum virus
agucuucaagacugg

SEQ ID NO: 4037019 - RNA, 19 nt, Molluscum contagiosum virus
agugaaggguguggccuac

SEQ ID NO: 4037020 - RNA, 23 nt, Molluscum contagiosum virus
agugaaggguguggccuacgugg

SEQ ID NO: 4037021 - RNA, 16 nt, Molluscum contagiosum virus
agugacagacuaggca

SEQ ID NO: 4037022 - RNA, 17 nt, Molluscum contagiosum virus
agugcagaugaggcugc

SEQ ID NO: 4037023 - RNA, 22 nt, Molluscum contagiosum virus
agugcccggaauuauguguagu

SEQ ID NO: 4037024 - RNA, 15 nt, Molluscum contagiosum virus
agugccgagcgugca

SEQ ID NO: 4037025 - RNA, 11 nt, Molluscum contagiosum virus
agugccgccgc

SEQ ID NO: 4037026 - RNA, 17 nt, Molluscum contagiosum virus
agugcgccgcgcccgcg

SEQ ID NO: 4037027 - RNA, 13 nt, Molluscum contagiosum virus
agugcggaugugc

SEQ ID NO: 4037028 - RNA, 15 nt, Molluscum contagiosum virus
agugcggccagcacc

SEQ ID NO: 4037029 - RNA, 19 nt, Molluscum contagiosum virus
agugcgggagcaagucugc

SEQ ID NO: 4037030 - RNA, 23 nt, Molluscum contagiosum virus
agugcgggagcaagucugcgcag

SEQ ID NO: 4037031 - RNA, 20 nt, Molluscum contagiosum virus
agugcgucgacguggagccu

SEQ ID NO: 4037032 - RNA, 11 nt, Molluscum contagiosum virus
agugcucuuua

SEQ ID NO: 4037033 - RNA, 23 nt, Molluscum contagiosum virus
agugcuuugucgcaaccccgcgc

SEQ ID NO: 4037034 - RNA, 20 nt, Molluscum contagiosum virus
aguggcguccgcacgaggag

SEQ ID NO: 4037035 - RNA, 21 nt, Molluscum contagiosum virus
aguggcucuagaguacuaggu

SEQ ID NO: 4037036 - RNA, 18 nt, Molluscum contagiosum virus
agugguccaccagcugcc

SEQ ID NO: 4037037 - RNA, 16 nt, Molluscum contagiosum virus
aguuccuggugugcca

SEQ ID NO: 4037038 - RNA, 13 nt, Molluscum contagiosum virus
aguucggccgcac

SEQ ID NO: 4037039 - RNA, 23 nt, Molluscum contagiosum virus
aguucucgggcucgggcaggucg

SEQ ID NO: 4037040 - RNA, 19 nt, Molluscum contagiosum virus
aguugcgagccagccaggc

SEQ ID NO: 4037041 - RNA, 20 nt, Molluscum contagiosum virus
aguugcgagccagccaggcg

SEQ ID NO: 4037042 - RNA, 16 nt, Molluscum contagiosum virus
auacaaaguugaccac

SEQ ID NO: 4037043 - RNA, 19 nt, Molluscum contagiosum virus
auaccaugcucucgcugcu

SEQ ID NO: 4037044 - RNA, 20 nt, Molluscum contagiosum virus
auacccuuggcagcaacugc

SEQ ID NO: 4037045 - RNA, 15 nt, Molluscum contagiosum virus
auaccggagacacca

SEQ ID NO: 4037046 - RNA, 16 nt, Molluscum contagiosum virus
auacgccuagccugca

SEQ ID NO: 4037047 - RNA, 13 nt, Molluscum contagiosum virus
auagcagagcacg

SEQ ID NO: 4037048 - RNA, 18 nt, Molluscum contagiosum virus
auagccccucgagcagcg

SEQ ID NO: 4037049 - RNA, 18 nt, Molluscum contagiosum virus
auagucaucaaagcacaa

SEQ ID NO: 4037050 - RNA, 23 nt, Molluscum contagiosum virus
auauggcgcgccgaguacugcug

SEQ ID NO: 4037051 - RNA, 18 nt, Molluscum contagiosum virus
aucaacaucuacaaggag

SEQ ID NO: 4037052 - RNA, 17 nt, Molluscum contagiosum virus
aucaaccgcaaggaaaa

SEQ ID NO: 4037053 - RNA, 18 nt, Molluscum contagiosum virus
aucaaggccuacggcaag

SEQ ID NO: 4037054 - RNA, 17 nt, Molluscum contagiosum virus
aucacggcgugcgcgag

SEQ ID NO: 4037055 - RNA, 20 nt, Molluscum contagiosum virus
aucagcuccgacgugaccuc

SEQ ID NO: 4037056 - RNA, 17 nt, Molluscum contagiosum virus
aucaggcagcugcugcg

SEQ ID NO: 4037057 - RNA, 11 nt, Molluscum contagiosum virus
aucaugagcca

SEQ ID NO: 4037058 - RNA, 17 nt, Molluscum contagiosum virus
auccaaaccaacgugag

SEQ ID NO: 4037059 - RNA, 19 nt, Molluscum contagiosum virus
auccacauuacgcucgugg

SEQ ID NO: 4037060 - RNA, 21 nt, Molluscum contagiosum virus
auccagcgcaucaugcgcuuc

SEQ ID NO: 4037061 - RNA, 17 nt, Molluscum contagiosum virus
auccaugucgagcccug

SEQ ID NO: 4037062 - RNA, 22 nt, Molluscum contagiosum virus
aucccacguacgagcagcugcu

SEQ ID NO: 4037063 - RNA, 18 nt, Molluscum contagiosum virus
aucccccgccaggaacga

SEQ ID NO: 4037064 - RNA, 20 nt, Molluscum contagiosum virus
aucccggaacgcaaguacaa

SEQ ID NO: 4037065 - RNA, 16 nt, Molluscum contagiosum virus
auccucaaccgcugca

SEQ ID NO: 4037066 - RNA, 19 nt, Molluscum contagiosum virus
auccucgccgaacggcaga

SEQ ID NO: 4037067 - RNA, 19 nt, Molluscum contagiosum virus
aucgacauggucgcauccg

SEQ ID NO: 4037068 - RNA, 13 nt, Molluscum contagiosum virus
aucgacgagcacg

SEQ ID NO: 4037069 - RNA, 12 nt, Molluscum contagiosum virus
aucgacgagguc

SEQ ID NO: 4037070 - RNA, 23 nt, Molluscum contagiosum virus
aucgacugcgccuucugccugcc

SEQ ID NO: 4037071 - RNA, 21 nt, Molluscum contagiosum virus
aucgagauggaggcccaggcc

SEQ ID NO: 4037072 - RNA, 16 nt, Molluscum contagiosum virus
aucgagcugguggccu

SEQ ID NO: 4037073 - RNA, 15 nt, Molluscum contagiosum virus
aucgcgagaggagac

SEQ ID NO: 4037074 - RNA, 16 nt, Molluscum contagiosum virus
aucgcgcugcuggugc

SEQ ID NO: 4037075 - RNA, 14 nt, Molluscum contagiosum virus
aucggcacugcuca

SEQ ID NO: 4037076 - RNA, 17 nt, Molluscum contagiosum virus
aucuccaacuagacaag

SEQ ID NO: 4037077 - RNA, 20 nt, Molluscum contagiosum virus
aucucgcacacugcagcacg

SEQ ID NO: 4037078 - RNA, 12 nt, Molluscum contagiosum virus
aucucugcgccg

SEQ ID NO: 4037079 - RNA, 14 nt, Molluscum contagiosum virus
aucucugcgccgcg

SEQ ID NO: 4037080 - RNA, 17 nt, Molluscum contagiosum virus
aucugcaacucgcgcug

SEQ ID NO: 4037081 - RNA, 14 nt, Molluscum contagiosum virus
aucuugaugaccac

SEQ ID NO: 4037082 - RNA, 19 nt, Molluscum contagiosum virus
augaacaccauccugcgcu

SEQ ID NO: 4037083 - RNA, 23 nt, Molluscum contagiosum virus
augaagcucucgcgcgcagggcg

SEQ ID NO: 4037084 - RNA, 21 nt, Molluscum contagiosum virus
augacacgcgugucugcgcuc

SEQ ID NO: 4037085 - RNA, 12 nt, Molluscum contagiosum virus
augaccaaggag

SEQ ID NO: 4037086 - RNA, 22 nt, Molluscum contagiosum virus
augagaauaaaauagcagagca

SEQ ID NO: 4037087 - RNA, 17 nt, Molluscum contagiosum virus
augagccagucucgcgc

SEQ ID NO: 4037088 - RNA, 13 nt, Molluscum contagiosum virus
augaggcugcucu

SEQ ID NO: 4037089 - RNA, 17 nt, Molluscum contagiosum virus
augagguacuccacgcc

SEQ ID NO: 4037090 - RNA, 18 nt, Molluscum contagiosum virus
augaguaccgcgggcgca

SEQ ID NO: 4037091 - RNA, 17 nt, Molluscum contagiosum virus
augcacacgcaccgccu

SEQ ID NO: 4037092 - RNA, 13 nt, Molluscum contagiosum virus
augcacagcugcu

SEQ ID NO: 4037093 - RNA, 21 nt, Molluscum contagiosum virus
augccagacccgaaagcugcc

SEQ ID NO: 4037094 - RNA, 15 nt, Molluscum contagiosum virus
augcccgcaaugcaa

SEQ ID NO: 4037095 - RNA, 19 nt, Molluscum contagiosum virus
augccgcgugcucugcucc

SEQ ID NO: 4037096 - RNA, 22 nt, Molluscum contagiosum virus
augcgcccucacgugcugauca

SEQ ID NO: 4037097 - RNA, 19 nt, Molluscum contagiosum virus
augcgcuugcggucgcgag

SEQ ID NO: 4037098 - RNA, 23 nt, Molluscum contagiosum virus
cgcgauugcguguuggcuucugc

SEQ ID NO: 4037099 - RNA, 23 nt, Molluscum contagiosum virus
cgcgauuuacuucgacgcggugc

SEQ ID NO: 4037100 - RNA, 16 nt, Molluscum contagiosum virus
cgcgcaaaagcacagc

SEQ ID NO: 4037101 - RNA, 13 nt, Molluscum contagiosum virus
cgcgcaagugcgu

SEQ ID NO: 4037102 - RNA, 14 nt, Molluscum contagiosum virus
cgcgcaagugugcg

SEQ ID NO: 4037103 - RNA, 18 nt, Molluscum contagiosum virus
cgcgcaagugugcgcauc

SEQ ID NO: 4037104 - RNA, 16 nt, Molluscum contagiosum virus
cgcgcaauagcgcccg

SEQ ID NO: 4037105 - RNA, 17 nt, Molluscum contagiosum virus
cgcgcaauagcgcccgu

SEQ ID NO: 4037106 - RNA, 13 nt, Molluscum contagiosum virus
cgcgcacacgcug

SEQ ID NO: 4037107 - RNA, 17 nt, Molluscum contagiosum virus
cgcgcacgagcgcgggc

SEQ ID NO: 4037108 - RNA, 14 nt, Molluscum contagiosum virus
cgcgcacgcggcgc

SEQ ID NO: 4037109 - RNA, 21 nt, Molluscum contagiosum virus
cgcgcacgcggcgcucguggc

SEQ ID NO: 4037110 - RNA, 22 nt, Molluscum contagiosum virus
cgcgcacguaccuucgcggagc

SEQ ID NO: 4037111 - RNA, 13 nt, Molluscum contagiosum virus
cgcgcacugcucg

SEQ ID NO: 4037112 - RNA, 21 nt, Molluscum contagiosum virus
cgcgcagcucgccgcgcgccg

SEQ ID NO: 4037113 - RNA, 17 nt, Molluscum contagiosum virus
cgcgcaggcgcgccaug

SEQ ID NO: 4037114 - RNA, 18 nt, Molluscum contagiosum virus
cgcgcaguucgagcugcu

SEQ ID NO: 4037115 - RNA, 14 nt, Molluscum contagiosum virus
cgcgcaguugugcg

SEQ ID NO: 4037116 - RNA, 13 nt, Molluscum contagiosum virus
cgcgcaucagcac

SEQ ID NO: 4037117 - RNA, 14 nt, Molluscum contagiosum virus
cgcgcaucgcgggc

SEQ ID NO: 4037118 - RNA, 21 nt, Molluscum contagiosum virus
cgcgccaacgacuagcgugcg

SEQ ID NO: 4037119 - RNA, 15 nt, Molluscum contagiosum virus
cgcgccauggcgagc

SEQ ID NO: 4037120 - RNA, 16 nt, Molluscum contagiosum virus
cgcgcccaccagcagc

SEQ ID NO: 4037121 - RNA, 17 nt, Molluscum contagiosum virus
cgcgcccaccagcagcc

SEQ ID NO: 4037122 - RNA, 12 nt, Molluscum contagiosum virus
cgcgcccucgcg

SEQ ID NO: 4037123 - RNA, 20 nt, Molluscum contagiosum virus
cgcgccgaggacuaccuggc

SEQ ID NO: 4037124 - RNA, 12 nt, Molluscum contagiosum virus
cgcgccgcaaac

SEQ ID NO: 4037125 - RNA, 16 nt, Molluscum contagiosum virus
cgcgccgcacgugcug

SEQ ID NO: 4037126 - RNA, 19 nt, Molluscum contagiosum virus
cgcgccgcgcgcgccggga

SEQ ID NO: 4037127 - RNA, 17 nt, Molluscum contagiosum virus
cgcgccgcgcugcuggc

SEQ ID NO: 4037128 - RNA, 12 nt, Molluscum contagiosum virus
cgcgccgcgggc

SEQ ID NO: 4037129 - RNA, 16 nt, Molluscum contagiosum virus
cgcgccgcgggccgcc

SEQ ID NO: 4037130 - RNA, 15 nt, Molluscum contagiosum virus
cgcgccgcucgcgcu

SEQ ID NO: 4037131 - RNA, 20 nt, Molluscum contagiosum virus
cgcgccgcugucacgcgagc

SEQ ID NO: 4037132 - RNA, 19 nt, Molluscum contagiosum virus
cgcgccggcccgagcguca

SEQ ID NO: 4037133 - RNA, 15 nt, Molluscum contagiosum virus
cgcgccggcgcggcg

SEQ ID NO: 4037134 - RNA, 20 nt, Molluscum contagiosum virus
cgcgccggcguucgcggagc

SEQ ID NO: 4037135 - RNA, 15 nt, Molluscum contagiosum virus
cgcgccuaccgcgcg

SEQ ID NO: 4037136 - RNA, 15 nt, Molluscum contagiosum virus
cgcgccuuccgcgcg

SEQ ID NO: 4037137 - RNA, 20 nt, Molluscum contagiosum virus
cgcgcgacuggcacgcgccg

SEQ ID NO: 4037138 - RNA, 16 nt, Molluscum contagiosum virus
cgcgcgagcugcugcg

SEQ ID NO: 4037139 - RNA, 13 nt, Molluscum contagiosum virus
cgcgcgagggcgc

SEQ ID NO: 4037140 - RNA, 22 nt, Molluscum contagiosum virus
cgcgcgagugugugcaucccuc

SEQ ID NO: 4037141 - RNA, 16 nt, Molluscum contagiosum virus
cgcgcgaucgcggcca

SEQ ID NO: 4037142 - RNA, 14 nt, Molluscum contagiosum virus
cgcgcgcaagaaca

SEQ ID NO: 4037143 - RNA, 19 nt, Molluscum contagiosum virus
cgcgcgcaagcgccgcucg

SEQ ID NO: 4037144 - RNA, 20 nt, Molluscum contagiosum virus
cgcgcgcacaucggcacugc

SEQ ID NO: 4037145 - RNA, 13 nt, Molluscum contagiosum virus
cgcgcgcagcaca

SEQ ID NO: 4037146 - RNA, 15 nt, Molluscum contagiosum virus
cgcgcgcagcacacc

SEQ ID NO: 4037147 - RNA, 13 nt, Molluscum contagiosum virus
cgcgcgcagcucg

SEQ ID NO: 4037148 - RNA, 14 nt, Molluscum contagiosum virus
cgcgcgcagggcgc

SEQ ID NO: 4037149 - RNA, 16 nt, Molluscum contagiosum virus
cgcgcgcaugcucgcg

SEQ ID NO: 4037150 - RNA, 11 nt, Molluscum contagiosum virus
cgcgcgccaca

SEQ ID NO: 4037151 - RNA, 17 nt, Molluscum contagiosum virus
cgcgcgcccgcugcgcg

SEQ ID NO: 4037152 - RNA, 11 nt, Molluscum contagiosum virus
cgcgcgccgag

SEQ ID NO: 4037153 - RNA, 13 nt, Molluscum contagiosum virus
cgcgcgccgcgcg

SEQ ID NO: 4037154 - RNA, 15 nt, Molluscum contagiosum virus
cgcgcgccugcuggc

SEQ ID NO: 4037155 - RNA, 12 nt, Molluscum contagiosum virus
cgcgcgcgccag

SEQ ID NO: 4037156 - RNA, 13 nt, Molluscum contagiosum virus
cgcgcgcgcgcag

SEQ ID NO: 4037157 - RNA, 18 nt, Molluscum contagiosum virus
cgcgcgcggagaggacgc

SEQ ID NO: 4037158 - RNA, 11 nt, Molluscum contagiosum virus
cgcgcgcggca

SEQ ID NO: 4037159 - RNA, 16 nt, Molluscum contagiosum virus
cgcgcgcuacugcgcg

SEQ ID NO: 4037160 - RNA, 21 nt, Molluscum contagiosum virus
cgcgcgcuagccgccgcugcc

SEQ ID NO: 4037161 - RNA, 22 nt, Molluscum contagiosum virus
cgcgcgcuagccgccgcugccg

SEQ ID NO: 4037162 - RNA, 16 nt, Molluscum contagiosum virus
cgcgcgcuaggggugc

SEQ ID NO: 4037163 - RNA, 13 nt, Molluscum contagiosum virus
cgcgcgcuccgag

SEQ ID NO: 4037164 - RNA, 17 nt, Molluscum contagiosum virus
cgcgcgcucgcucgcgc

SEQ ID NO: 4037165 - RNA, 13 nt, Molluscum contagiosum virus
cgcgcgcugagcg

SEQ ID NO: 4037166 - RNA, 13 nt, Molluscum contagiosum virus
cgcgcgcugcgcg

SEQ ID NO: 4037167 - RNA, 13 nt, Molluscum contagiosum virus
cgcgcgcugcucu

SEQ ID NO: 4037168 - RNA, 13 nt, Molluscum contagiosum virus
cgcgcggacagcc

SEQ ID NO: 4037169 - RNA, 23 nt, Molluscum contagiosum virus
cgcgcggaugcuggcgagcacgu

SEQ ID NO: 4037170 - RNA, 14 nt, Molluscum contagiosum virus
cgcgcggcgccgag

SEQ ID NO: 4037171 - RNA, 17 nt, Molluscum contagiosum virus
cgcgcggugcugcgcca

SEQ ID NO: 4037172 - RNA, 14 nt, Molluscum contagiosum virus
cgcgcguccacaag

SEQ ID NO: 4037173 - RNA, 20 nt, Molluscum contagiosum virus
cgcgcgucugcgaguggcgc

SEQ ID NO: 4037174 - RNA, 23 nt, Molluscum contagiosum virus
cgcgcgugccuguggcgcacacg

SEQ ID NO: 4037175 - RNA, 14 nt, Molluscum contagiosum virus
cgcgcgugcuggac

SEQ ID NO: 4037176 - RNA, 16 nt, Molluscum contagiosum virus
cgcgcguugcugcccg

SEQ ID NO: 4037177 - RNA, 20 nt, Molluscum contagiosum virus
cgcgcuacguacucuccaac

SEQ ID NO: 4037178 - RNA, 20 nt, Molluscum contagiosum virus
cgcgcuauucaaagcugugc

SEQ ID NO: 4037179 - RNA, 19 nt, Molluscum contagiosum virus
cgcgcucacugcagcagcc

SEQ ID NO: 4037180 - RNA, 19 nt, Molluscum contagiosum virus
cgcgcucgcucgcgcuccg

SEQ ID NO: 4037181 - RNA, 11 nt, Molluscum contagiosum virus
cgcgcucugcc

SEQ ID NO: 4037182 - RNA, 12 nt, Molluscum contagiosum virus
cgcgcucuuccc

SEQ ID NO: 4037183 - RNA, 16 nt, Molluscum contagiosum virus
cgcgcugagcgcggag

SEQ ID NO: 4037184 - RNA, 21 nt, Molluscum contagiosum virus
cgcgcugcacgccgccagcga

SEQ ID NO: 4037185 - RNA, 15 nt, Molluscum contagiosum virus
cgcgcugcagcaccu

SEQ ID NO: 4037186 - RNA, 16 nt, Molluscum contagiosum virus
cgcgcugcagcaccug

SEQ ID NO: 4037187 - RNA, 14 nt, Molluscum contagiosum virus
cgcgcugcgccacu

SEQ ID NO: 4037188 - RNA, 15 nt, Molluscum contagiosum virus
cgcgcugcgcgcgcu

SEQ ID NO: 4037189 - RNA, 12 nt, Molluscum contagiosum virus
cgcgcugcucuc

SEQ ID NO: 4037190 - RNA, 17 nt, Molluscum contagiosum virus
cgcgcugcucuggagca

SEQ ID NO: 4037191 - RNA, 12 nt, Molluscum contagiosum virus
cgcgcugcugcu

SEQ ID NO: 4037192 - RNA, 14 nt, Molluscum contagiosum virus
cgcgcugcuggugc

SEQ ID NO: 4037193 - RNA, 13 nt, Molluscum contagiosum virus
cgcgcuugcgcgg

SEQ ID NO: 4037194 - RNA, 22 nt, Molluscum contagiosum virus
cgcgcuuuuugccgcucacagc

SEQ ID NO: 4037195 - RNA, 16 nt, Molluscum contagiosum virus
cgcggaacugacugcu

SEQ ID NO: 4037196 - RNA, 18 nt, Molluscum contagiosum virus
cgcggaacugacugcugc

SEQ ID NO: 4037197 - RNA, 21 nt, Molluscum contagiosum virus
cgcggacagagcccgcggcgc

SEQ ID NO: 4037198 - RNA, 17 nt, Molluscum contagiosum virus
cgcggaccuaaagcugc

SEQ ID NO: 4037199 - RNA, 21 nt, Molluscum contagiosum virus
cgcggaccuaaagcugcuggc

SEQ ID NO: 4037200 - RNA, 17 nt, Molluscum contagiosum virus
cgcggacggcgcgcagc

SEQ ID NO: 4037201 - RNA, 19 nt, Molluscum contagiosum virus
cgcggacucgugcaccacg

SEQ ID NO: 4037202 - RNA, 20 nt, Molluscum contagiosum virus
cggcacuguguccccugagc

SEQ ID NO: 4037203 - RNA, 22 nt, Molluscum contagiosum virus
cggcagcacgggcggaagcucc

SEQ ID NO: 4037204 - RNA, 14 nt, Molluscum contagiosum virus
cggcagcagccucg

SEQ ID NO: 4037205 - RNA, 19 nt, Molluscum contagiosum virus
cggcagccgcagaugcgca

SEQ ID NO: 4037206 - RNA, 13 nt, Molluscum contagiosum virus
cggcagcgccgcg

SEQ ID NO: 4037207 - RNA, 16 nt, Molluscum contagiosum virus
cggcagcgccgcgcgc

SEQ ID NO: 4037208 - RNA, 17 nt, Molluscum contagiosum virus
cggcagcgucgcggagc

SEQ ID NO: 4037209 - RNA, 17 nt, Molluscum contagiosum virus
cggcagcuaccgcgcgc

SEQ ID NO: 4037210 - RNA, 17 nt, Molluscum contagiosum virus
cggcagcuggagcugcc

SEQ ID NO: 4037211 - RNA, 21 nt, Molluscum contagiosum virus
cggcagcuggagcugccgcug

SEQ ID NO: 4037212 - RNA, 16 nt, Molluscum contagiosum virus
cggcaggaagcuggcg

SEQ ID NO: 4037213 - RNA, 18 nt, Molluscum contagiosum virus
cggcaguguccugguucu

SEQ ID NO: 4037214 - RNA, 15 nt, Molluscum contagiosum virus
cggcaucgcgcugcu

SEQ ID NO: 4037215 - RNA, 18 nt, Molluscum contagiosum virus
cggccaaccgccugcucu

SEQ ID NO: 4037216 - RNA, 12 nt, Molluscum contagiosum virus
cggccaccagcg

SEQ ID NO: 4037217 - RNA, 14 nt, Molluscum contagiosum virus
cggccacgcucgcg

SEQ ID NO: 4037218 - RNA, 15 nt, Molluscum contagiosum virus
cggcccgagcaggac

SEQ ID NO: 4037219 - RNA, 14 nt, Molluscum contagiosum virus
cggccgcgcucguc

SEQ ID NO: 4037220 - RNA, 13 nt, Molluscum contagiosum virus
cggccgcggacca

SEQ ID NO: 4037221 - RNA, 19 nt, Molluscum contagiosum virus
cggccggauugccgcagcc

SEQ ID NO: 4037222 - RNA, 22 nt, Molluscum contagiosum virus
cggccguggcaaacaggcacac

SEQ ID NO: 4037223 - RNA, 21 nt, Molluscum contagiosum virus
cggccguguacaugcucaagc

SEQ ID NO: 4037224 - RNA, 13 nt, Molluscum contagiosum virus
cggccguugccgg

SEQ ID NO: 4037225 - RNA, 19 nt, Molluscum contagiosum virus
cggccuccagcagcggcgc

SEQ ID NO: 4037226 - RNA, 22 nt, Molluscum contagiosum virus
cggccugcccugcucaugcgca

SEQ ID NO: 4037227 - RNA, 15 nt, Molluscum contagiosum virus
cggccuguucuucca

SEQ ID NO: 4037228 - RNA, 15 nt, Molluscum contagiosum virus
cggccuuagugccgu

SEQ ID NO: 4037229 - RNA, 21 nt, Molluscum contagiosum virus
cggcgaacaucucggcuccgc

SEQ ID NO: 4037230 - RNA, 22 nt, Molluscum contagiosum virus
cggcgagcgcauucgcgcgccc

SEQ ID NO: 4037231 - RNA, 14 nt, Molluscum contagiosum virus
cggcgagcgcgccc

SEQ ID NO: 4037232 - RNA, 14 nt, Molluscum contagiosum virus
cggcgauguacgcg

SEQ ID NO: 4037233 - RNA, 16 nt, Molluscum contagiosum virus
cggcgauguacgcgug

SEQ ID NO: 4037234 - RNA, 17 nt, Molluscum contagiosum virus
cggcgcccggugccagc

SEQ ID NO: 4037235 - RNA, 18 nt, Molluscum contagiosum virus
cggcgcccgugagcaugg

SEQ ID NO: 4037236 - RNA, 23 nt, Molluscum contagiosum virus
cggcgccgacaacgugcugcuca

SEQ ID NO: 4037237 - RNA, 22 nt, Molluscum contagiosum virus
cggcgccgcuaccagcucgcgc

SEQ ID NO: 4037238 - RNA, 13 nt, Molluscum contagiosum virus
cggcgcgaagcag

SEQ ID NO: 4037239 - RNA, 14 nt, Molluscum contagiosum virus
cggcgcgcccagcg

SEQ ID NO: 4037240 - RNA, 18 nt, Molluscum contagiosum virus
cggcgcgccgcacgcugc

SEQ ID NO: 4037241 - RNA, 19 nt, Molluscum contagiosum virus
cggcgcgcgcgcgcaggcu

SEQ ID NO: 4037242 - RNA, 14 nt, Molluscum contagiosum virus
cggcgcgcgcggcg

SEQ ID NO: 4037243 - RNA, 13 nt, Molluscum contagiosum virus
cggcgcggagcgc

SEQ ID NO: 4037244 - RNA, 20 nt, Molluscum contagiosum virus
cggcgcggaucugcgcacac

SEQ ID NO: 4037245 - RNA, 21 nt, Molluscum contagiosum virus
cggcgcggcuagcaccgcaug

SEQ ID NO: 4037246 - RNA, 20 nt, Molluscum contagiosum virus
cggcgcgggcaagcagggcc

SEQ ID NO: 4037247 - RNA, 16 nt, Molluscum contagiosum virus
cggcgcgugccgcugc

SEQ ID NO: 4037248 - RNA, 16 nt, Molluscum contagiosum virus
cggcgcgugcuccucg

SEQ ID NO: 4037249 - RNA, 23 nt, Molluscum contagiosum virus
cggcgcgugcugcggcugcugcc

SEQ ID NO: 4037250 - RNA, 15 nt, Molluscum contagiosum virus
cggcgcuaugccgcg

SEQ ID NO: 4037251 - RNA, 14 nt, Molluscum contagiosum virus
cggcgcucacugcg

SEQ ID NO: 4037252 - RNA, 19 nt, Molluscum contagiosum virus
cggcgcuuucgcccgccgc

SEQ ID NO: 4037253 - RNA, 12 nt, Molluscum contagiosum virus
cggcggccacgc

SEQ ID NO: 4037254 - RNA, 12 nt, Molluscum contagiosum virus
cggcggcgcaac

SEQ ID NO: 4037255 - RNA, 22 nt, Molluscum contagiosum virus
cggcggcuuucucacgcccgcg

SEQ ID NO: 4037256 - RNA, 15 nt, Molluscum contagiosum virus
cggcggggcugcugg

SEQ ID NO: 4037257 - RNA, 15 nt, Molluscum contagiosum virus
cggcgggggcagcag

SEQ ID NO: 4037258 - RNA, 13 nt, Molluscum contagiosum virus
cggcgggugccgc

SEQ ID NO: 4037259 - RNA, 16 nt, Molluscum contagiosum virus
cggcguccggugcucg

SEQ ID NO: 4037260 - RNA, 18 nt, Molluscum contagiosum virus
cggcguccggugcucgcc

SEQ ID NO: 4037261 - RNA, 19 nt, Molluscum contagiosum virus
cggcguccucuuuugggca

SEQ ID NO: 4037262 - RNA, 22 nt, Molluscum contagiosum virus
cggcgugagcucgucgcggaag

SEQ ID NO: 4037263 - RNA, 14 nt, Molluscum contagiosum virus
cggcgugcugugcc

SEQ ID NO: 4037264 - RNA, 22 nt, Molluscum contagiosum virus
cggcguggccaggccgcgccgg

SEQ ID NO: 4037265 - RNA, 16 nt, Molluscum contagiosum virus
cggcguggugcuggcc

SEQ ID NO: 4037266 - RNA, 17 nt, Molluscum contagiosum virus
cggcgugugcgcgagcu

SEQ ID NO: 4037267 - RNA, 15 nt, Molluscum contagiosum virus
cggcguuucucaggu

SEQ ID NO: 4037268 - RNA, 14 nt, Molluscum contagiosum virus
cggcuagaccuccu

SEQ ID NO: 4037269 - RNA, 13 nt, Molluscum contagiosum virus
cggcucaagaaca

SEQ ID NO: 4037270 - RNA, 15 nt, Molluscum contagiosum virus
cggcucuggagcggc

SEQ ID NO: 4037271 - RNA, 12 nt, Molluscum contagiosum virus
cggcugcccugu

SEQ ID NO: 4037272 - RNA, 13 nt, Molluscum contagiosum virus
cggcugcugccug

SEQ ID NO: 4037273 - RNA, 17 nt, Molluscum contagiosum virus
cggcugugcccgcggcg

SEQ ID NO: 4037274 - RNA, 14 nt, Molluscum contagiosum virus
cggcuucugcugca

SEQ ID NO: 4037275 - RNA, 17 nt, Molluscum contagiosum virus
cggcuucugcugcacac

SEQ ID NO: 4037276 - RNA, 17 nt, Molluscum contagiosum virus
cggcuuggacagcaagc

SEQ ID NO: 4037277 - RNA, 16 nt, Molluscum contagiosum virus
cggcuuguagucgccc

SEQ ID NO: 4037278 - RNA, 17 nt, Molluscum contagiosum virus
cgggaaaacgcgcggca

SEQ ID NO: 4037279 - RNA, 23 nt, Molluscum contagiosum virus
cgggaacgaggaaaggcaccccg

SEQ ID NO: 4037280 - RNA, 23 nt, Molluscum contagiosum virus
cgggaagcugcacgugcagcggc

SEQ ID NO: 4037281 - RNA, 22 nt, Molluscum contagiosum virus
cgggaaggggugauggcgguga

SEQ ID NO: 4037282 - RNA, 22 nt, Molluscum contagiosum virus
cgggaggcguccugcgggagca

SEQ ID NO: 4037283 - RNA, 19 nt, Molluscum contagiosum virus
cgggaggcucucgagcacu

SEQ ID NO: 4037284 - RNA, 21 nt, Molluscum contagiosum virus
cgggaucggacgcagacgcgc

SEQ ID NO: 4037285 - RNA, 17 nt, Molluscum contagiosum virus
cgggcaaugggcacgcu

SEQ ID NO: 4037286 - RNA, 23 nt, Molluscum contagiosum virus
cgggcacauccgcuaccuggugg

SEQ ID NO: 4037287 - RNA, 18 nt, Molluscum contagiosum virus
cgggcacauggacggcgc

SEQ ID NO: 4037288 - RNA, 15 nt, Molluscum contagiosum virus
cgggcacgagcacgu

SEQ ID NO: 4037289 - RNA, 22 nt, Molluscum contagiosum virus
cgggcacgcucauacuccugcu

SEQ ID NO: 4037290 - RNA, 16 nt, Molluscum contagiosum virus
cgggcacgugcugcug

SEQ ID NO: 4037291 - RNA, 21 nt, Molluscum contagiosum virus
cgggcacgugcugcugcggcu

SEQ ID NO: 4037292 - RNA, 17 nt, Molluscum contagiosum virus
cgggcaugcacagcugc

SEQ ID NO: 4037293 - RNA, 16 nt, Molluscum contagiosum virus
cgggccccugcgcgag

SEQ ID NO: 4037294 - RNA, 22 nt, Molluscum contagiosum virus
cgggcccgccuuuguggacgcg

SEQ ID NO: 4037295 - RNA, 14 nt, Molluscum contagiosum virus
cgggcccgcgaacg

SEQ ID NO: 4037296 - RNA, 22 nt, Molluscum contagiosum virus
cgggcccggguuugugcccgag

SEQ ID NO: 4037297 - RNA, 17 nt, Molluscum contagiosum virus
cgggcccgugcccgagc

SEQ ID NO: 4037298 - RNA, 22 nt, Molluscum contagiosum virus
cgggcccgugcucaggccagca

SEQ ID NO: 4037299 - RNA, 15 nt, Molluscum contagiosum virus
cgggccugcgcccgc

SEQ ID NO: 4037300 - RNA, 16 nt, Molluscum contagiosum virus
cgggccugcgcccgca

SEQ ID NO: 4037301 - RNA, 21 nt, Molluscum contagiosum virus
cgggccuguaccugcgacagc

SEQ ID NO: 4037302 - RNA, 22 nt, Molluscum contagiosum virus
cgggcgagagacagcacggcac

SEQ ID NO: 4037303 - RNA, 20 nt, Molluscum contagiosum virus
cgggcgcagagccugcugcu

SEQ ID NO: 4037304 - RNA, 15 nt, Molluscum contagiosum virus
cgugccuggcagugc

SEQ ID NO: 4037305 - RNA, 14 nt, Molluscum contagiosum virus
cgugcgagcggcgc

SEQ ID NO: 4037306 - RNA, 22 nt, Molluscum contagiosum virus
cgugcgagcggcgcgcgcugag

SEQ ID NO: 4037307 - RNA, 16 nt, Molluscum contagiosum virus
cgugcgcaggagcagu

SEQ ID NO: 4037308 - RNA, 17 nt, Molluscum contagiosum virus
cgugcgcgcacacgacg

SEQ ID NO: 4037309 - RNA, 20 nt, Molluscum contagiosum virus
cgugcgcgugcggcggcgcg

SEQ ID NO: 4037310 - RNA, 16 nt, Molluscum contagiosum virus
cgugcgcuggcgcgcg

SEQ ID NO: 4037311 - RNA, 17 nt, Molluscum contagiosum virus
cgugcgggcgagcaugu

SEQ ID NO: 4037312 - RNA, 17 nt, Molluscum contagiosum virus
cgugcguacgugcacgu

SEQ ID NO: 4037313 - RNA, 14 nt, Molluscum contagiosum virus
cgugcuagcccgca

SEQ ID NO: 4037314 - RNA, 22 nt, Molluscum contagiosum virus
cgugcuagcccgcaccugcgcc

SEQ ID NO: 4037315 - RNA, 15 nt, Molluscum contagiosum virus
cgugcucaggccagc

SEQ ID NO: 4037316 - RNA, 14 nt, Molluscum contagiosum virus
cgugcuccacgcgc

SEQ ID NO: 4037317 - RNA, 17 nt, Molluscum contagiosum virus
cgugcuccacgcgcagc

SEQ ID NO: 4037318 - RNA, 23 nt, Molluscum contagiosum virus
cgugcucgguagcguggagcugg

SEQ ID NO: 4037319 - RNA, 14 nt, Molluscum contagiosum virus
cgugcugcagcugc

SEQ ID NO: 4037320 - RNA, 17 nt, Molluscum contagiosum virus
cgugcugcgccgccugc

SEQ ID NO: 4037321 - RNA, 23 nt, Molluscum contagiosum virus
cgugcugcggcaaccgcgcccgc

SEQ ID NO: 4037322 - RNA, 15 nt, Molluscum contagiosum virus
cgugcugcugcagaa

SEQ ID NO: 4037323 - RNA, 19 nt, Molluscum contagiosum virus
cgugcuggacgcgcacgcg

SEQ ID NO: 4037324 - RNA, 20 nt, Molluscum contagiosum virus
cgugcuggagggcacgcugc

SEQ ID NO: 4037325 - RNA, 21 nt, Molluscum contagiosum virus
cgugcuuacggacaggaugcc

SEQ ID NO: 4037326 - RNA, 14 nt, Molluscum contagiosum virus
cgugcuugcgcacg

SEQ ID NO: 4037327 - RNA, 17 nt, Molluscum contagiosum virus
cgugcuugugcgccugu

SEQ ID NO: 4037328 - RNA, 12 nt, Molluscum contagiosum virus
cguggacagcau

SEQ ID NO: 4037329 - RNA, 12 nt, Molluscum contagiosum virus
cguggacgagca

SEQ ID NO: 4037330 - RNA, 16 nt, Molluscum contagiosum virus
cguggaggaaacaccc

SEQ ID NO: 4037331 - RNA, 20 nt, Molluscum contagiosum virus
cguggagucacgaccgaccc

SEQ ID NO: 4037332 - RNA, 20 nt, Molluscum contagiosum virus
cguggaucgcgcgcaccugc

SEQ ID NO: 4037333 - RNA, 14 nt, Molluscum contagiosum virus
cguggccgagccgc

SEQ ID NO: 4037334 - RNA, 16 nt, Molluscum contagiosum virus
cguggcgagcaucugc

SEQ ID NO: 4037335 - RNA, 17 nt, Molluscum contagiosum virus
cguggcgccgcugcugg

SEQ ID NO: 4037336 - RNA, 21 nt, Molluscum contagiosum virus
cguggcgcgcgacgugugcuc

SEQ ID NO: 4037337 - RNA, 14 nt, Molluscum contagiosum virus
cguggcgcgcgagc

SEQ ID NO: 4037338 - RNA, 20 nt, Molluscum contagiosum virus
cguggcgcugggcgcgccgc

SEQ ID NO: 4037339 - RNA, 22 nt, Molluscum contagiosum virus
cguggcgugcuuguagcgcaag

SEQ ID NO: 4037340 - RNA, 15 nt, Molluscum contagiosum virus
cguggcguugcugcu

SEQ ID NO: 4037341 - RNA, 12 nt, Molluscum contagiosum virus
cgugggcgccgc

SEQ ID NO: 4037342 - RNA, 16 nt, Molluscum contagiosum virus
cgugggcggcauccug

SEQ ID NO: 4037343 - RNA, 19 nt, Molluscum contagiosum virus
cgugggcggcauccugaug

SEQ ID NO: 4037344 - RNA, 17 nt, Molluscum contagiosum virus
cguggggagcuggagcg

SEQ ID NO: 4037345 - RNA, 17 nt, Molluscum contagiosum virus
cguggucgccgcggccg

SEQ ID NO: 4037346 - RNA, 23 nt, Molluscum contagiosum virus
cguggucgcgcgcgcucugccgc

SEQ ID NO: 4037347 - RNA, 13 nt, Molluscum contagiosum virus
cguggugggccgc

SEQ ID NO: 4037348 - RNA, 15 nt, Molluscum contagiosum virus
cgugguguccacgcg

SEQ ID NO: 4037349 - RNA, 19 nt, Molluscum contagiosum virus
cgugucagcagcgcgagcu

SEQ ID NO: 4037350 - RNA, 13 nt, Molluscum contagiosum virus
cgugucgagcugc

SEQ ID NO: 4037351 - RNA, 21 nt, Molluscum contagiosum virus
cgugucugguguauccaggau

SEQ ID NO: 4037352 - RNA, 14 nt, Molluscum contagiosum virus
cgugugcgagcacg

SEQ ID NO: 4037353 - RNA, 16 nt, Molluscum contagiosum virus
cgugugcgggcacggc

SEQ ID NO: 4037354 - RNA, 16 nt, Molluscum contagiosum virus
cguguuccggcagcgc

SEQ ID NO: 4037355 - RNA, 21 nt, Molluscum contagiosum virus
cguuccagagcacugcgcguc

SEQ ID NO: 4037356 - RNA, 15 nt, Molluscum contagiosum virus
cguucgcgcgccagu

SEQ ID NO: 4037357 - RNA, 18 nt, Molluscum contagiosum virus
cguucucuaccagcucgu

SEQ ID NO: 4037358 - RNA, 14 nt, Molluscum contagiosum virus
cguugcugcgccac

SEQ ID NO: 4037359 - RNA, 16 nt, Molluscum contagiosum virus
cguugcugcugcgcgc

SEQ ID NO: 4037360 - RNA, 15 nt, Molluscum contagiosum virus
cguuguccgcgucca

SEQ ID NO: 4037361 - RNA, 17 nt, Molluscum contagiosum virus
cguuuucgucauggagc

SEQ ID NO: 4037362 - RNA, 22 nt, Molluscum contagiosum virus
cuaaagucgcgcgugcgcagca

SEQ ID NO: 4037363 - RNA, 16 nt, Molluscum contagiosum virus
cuaacggacgcggcca

SEQ ID NO: 4037364 - RNA, 24 nt, Molluscum contagiosum virus
cuacagcagccgcagcccacgugc

SEQ ID NO: 4037365 - RNA, 15 nt, Molluscum contagiosum virus
cuacauggacgugcu

SEQ ID NO: 4037366 - RNA, 19 nt, Molluscum contagiosum virus
cuacauggacgugcugcug

SEQ ID NO: 4037367 - RNA, 21 nt, Molluscum contagiosum virus
cuacauggacgugcugcuggc

SEQ ID NO: 4037368 - RNA, 13 nt, Molluscum contagiosum virus
cuaccacgucggc

SEQ ID NO: 4037369 - RNA, 16 nt, Molluscum contagiosum virus
cuaccagcucgcgcag

SEQ ID NO: 4037370 - RNA, 19 nt, Molluscum contagiosum virus
cuaccggcaguagcagcgc

SEQ ID NO: 4037371 - RNA, 16 nt, Molluscum contagiosum virus
cuaccuggugcugggg

SEQ ID NO: 4037372 - RNA, 14 nt, Molluscum contagiosum virus
cuacgagcagcgcu

SEQ ID NO: 4037373 - RNA, 20 nt, Molluscum contagiosum virus
cuacgcgagcacugcgcgcg

SEQ ID NO: 4037374 - RNA, 15 nt, Molluscum contagiosum virus
cuacgggaagcugca

SEQ ID NO: 4037375 - RNA, 12 nt, Molluscum contagiosum virus
cuacuacacugu

SEQ ID NO: 4037376 - RNA, 20 nt, Molluscum contagiosum virus
cuacugcgcacccgccacga

SEQ ID NO: 4037377 - RNA, 19 nt, Molluscum contagiosum virus
cuacugggaggacacgcgc

SEQ ID NO: 4037378 - RNA, 22 nt, Molluscum contagiosum virus
cuagacuucuugguggacagcc

SEQ ID NO: 4037379 - RNA, 19 nt, Molluscum contagiosum virus
cuagagaaccugugcgcgg

SEQ ID NO: 4037380 - RNA, 21 nt, Molluscum contagiosum virus
cuagagcagaaggugcgcagc

SEQ ID NO: 4037381 - RNA, 15 nt, Molluscum contagiosum virus
cuagcaaggcgccgc

SEQ ID NO: 4037382 - RNA, 14 nt, Molluscum contagiosum virus
cuagcccagcacgc

SEQ ID NO: 4037383 - RNA, 22 nt, Molluscum contagiosum virus
cuagccgccgcugccgcgcgcg

SEQ ID NO: 4037384 - RNA, 20 nt, Molluscum contagiosum virus
cuagccgugaacgaggcugc

SEQ ID NO: 4037385 - RNA, 18 nt, Molluscum contagiosum virus
cuagccuccuugucuucc

SEQ ID NO: 4037386 - RNA, 13 nt, Molluscum contagiosum virus
cuagccugugccc

SEQ ID NO: 4037387 - RNA, 17 nt, Molluscum contagiosum virus
cuagccugugcccugga

SEQ ID NO: 4037388 - RNA, 20 nt, Molluscum contagiosum virus
cuagccugugcccuggaagc

SEQ ID NO: 4037389 - RNA, 17 nt, Molluscum contagiosum virus
cuagcgagcgcccgugc

SEQ ID NO: 4037390 - RNA, 21 nt, Molluscum contagiosum virus
cuagcgggcaagcgcuucccu

SEQ ID NO: 4037391 - RNA, 18 nt, Molluscum contagiosum virus
cuagcgggccuguaccug

SEQ ID NO: 4037392 - RNA, 18 nt, Molluscum contagiosum virus
cuagcgugagagcaaaga

SEQ ID NO: 4037393 - RNA, 16 nt, Molluscum contagiosum virus
cuagcgugcgcagcau

SEQ ID NO: 4037394 - RNA, 13 nt, Molluscum contagiosum virus
cuagcgugugccg

SEQ ID NO: 4037395 - RNA, 14 nt, Molluscum contagiosum virus
cuagcucugcgcgc

SEQ ID NO: 4037396 - RNA, 23 nt, Molluscum contagiosum virus
cuagcugugcgcuacguggcgcg

SEQ ID NO: 4037397 - RNA, 17 nt, Molluscum contagiosum virus
cuagugccgagcucgcc

SEQ ID NO: 4037398 - RNA, 21 nt, Molluscum contagiosum virus
cuauguaaagaaacgcgcccg

SEQ ID NO: 4037399 - RNA, 20 nt, Molluscum contagiosum virus
cuauuaccugaccgacggcg

SEQ ID NO: 4037400 - RNA, 23 nt, Molluscum contagiosum virus
cuauucucguggcguugcugcug

SEQ ID NO: 4037401 - RNA, 17 nt, Molluscum contagiosum virus
cucaagacgcugcuggc

SEQ ID NO: 4037402 - RNA, 15 nt, Molluscum contagiosum virus
cucacggacucgccg

SEQ ID NO: 4037403 - RNA, 19 nt, Molluscum contagiosum virus
cucacggccuucgcguucc

SEQ ID NO: 4037404 - RNA, 23 nt, Molluscum contagiosum virus
cucacucacaugugcugccggcu

SEQ ID NO: 4037405 - RNA, 15 nt, Molluscum contagiosum virus
cucagcauguugcuc

SEQ ID NO: 4037406 - RNA, 20 nt, Molluscum contagiosum virus
gccagcgacgagcagcugcu

SEQ ID NO: 4037407 - RNA, 23 nt, Molluscum contagiosum virus
gccagcgagaucaacgcgcgcgu

SEQ ID NO: 4037408 - RNA, 20 nt, Molluscum contagiosum virus
gccagcgagucucgcgcgcc

SEQ ID NO: 4037409 - RNA, 14 nt, Molluscum contagiosum virus
gccagcgcgcgccu

SEQ ID NO: 4037410 - RNA, 14 nt, Molluscum contagiosum virus
gccagcgggaaacu

SEQ ID NO: 4037411 - RNA, 20 nt, Molluscum contagiosum virus
gccagcgucgcgcgccgugc

SEQ ID NO: 4037412 - RNA, 23 nt, Molluscum contagiosum virus
gccagcuccgcgcggcgcucugc

SEQ ID NO: 4037413 - RNA, 18 nt, Molluscum contagiosum virus
gccagcucgacacugugc

SEQ ID NO: 4037414 - RNA, 23 nt, Molluscum contagiosum virus
gccagcuuggugcgcucgagcuc

SEQ ID NO: 4037415 - RNA, 16 nt, Molluscum contagiosum virus
gccagcuuucccuagc

SEQ ID NO: 4037416 - RNA, 19 nt, Molluscum contagiosum virus
gccaggcgccggcgcgcgc

SEQ ID NO: 4037417 - RNA, 22 nt, Molluscum contagiosum virus
gccaggcgcggucgcccgccga

SEQ ID NO: 4037418 - RNA, 14 nt, Molluscum contagiosum virus
gccagugcaguggc

SEQ ID NO: 4037419 - RNA, 16 nt, Molluscum contagiosum virus
gccagugcgugcacug

SEQ ID NO: 4037420 - RNA, 23 nt, Molluscum contagiosum virus
gccagugcuuugucgcaaccccg

SEQ ID NO: 4037421 - RNA, 13 nt, Molluscum contagiosum virus
gccaucaauucaa

SEQ ID NO: 4037422 - RNA, 20 nt, Molluscum contagiosum virus
gccaugaacaacauggugcu

SEQ ID NO: 4037423 - RNA, 22 nt, Molluscum contagiosum virus
gccaugaacaacauggugcugg

SEQ ID NO: 4037424 - RNA, 14 nt, Molluscum contagiosum virus
gccaugcugcgcga

SEQ ID NO: 4037425 - RNA, 24 nt, Molluscum contagiosum virus
gccauggaggcgcuagugcagaug

SEQ ID NO: 4037426 - RNA, 19 nt, Molluscum contagiosum virus
gccauggucacgcgcacgc

SEQ ID NO: 4037427 - RNA, 13 nt, Molluscum contagiosum virus
gcccaggccaugg

SEQ ID NO: 4037428 - RNA, 16 nt, Molluscum contagiosum virus
gccccaugcccgacca

SEQ ID NO: 4037429 - RNA, 14 nt, Molluscum contagiosum virus
gcccccgagcgcuu

SEQ ID NO: 4037430 - RNA, 16 nt, Molluscum contagiosum virus
gcccccgccaugccaa

SEQ ID NO: 4037431 - RNA, 13 nt, Molluscum contagiosum virus
gcccccgccgcgg

SEQ ID NO: 4037432 - RNA, 22 nt, Molluscum contagiosum virus
gcccccgguucccggugcugcu

SEQ ID NO: 4037433 - RNA, 16 nt, Molluscum contagiosum virus
gccccgacgccagcgc

SEQ ID NO: 4037434 - RNA, 15 nt, Molluscum contagiosum virus
gccccgagacccgca

SEQ ID NO: 4037435 - RNA, 14 nt, Molluscum contagiosum virus
gccccgcgccagca

SEQ ID NO: 4037436 - RNA, 15 nt, Molluscum contagiosum virus
gccccgcgccagcag

SEQ ID NO: 4037437 - RNA, 21 nt, Molluscum contagiosum virus
gccccgcgcgcccgcugcgcg

SEQ ID NO: 4037438 - RNA, 19 nt, Molluscum contagiosum virus
gccccguccucgcucgugc

SEQ ID NO: 4037439 - RNA, 13 nt, Molluscum contagiosum virus
gccccugcugcuc

SEQ ID NO: 4037440 - RNA, 14 nt, Molluscum contagiosum virus
gccccugcugcucg

SEQ ID NO: 4037441 - RNA, 15 nt, Molluscum contagiosum virus
gcccgacgcgggcgc

SEQ ID NO: 4037442 - RNA, 17 nt, Molluscum contagiosum virus
gcccgacucgcagcuca

SEQ ID NO: 4037443 - RNA, 22 nt, Molluscum contagiosum virus
gcccgagcaggacgugcacgug

SEQ ID NO: 4037444 - RNA, 18 nt, Molluscum contagiosum virus
gcccgagcccggccagac

SEQ ID NO: 4037445 - RNA, 19 nt, Molluscum contagiosum virus
gcccgaggagagcggcgcc

SEQ ID NO: 4037446 - RNA, 15 nt, Molluscum contagiosum virus
gcccgaguccgcgcu

SEQ ID NO: 4037447 - RNA, 19 nt, Molluscum contagiosum virus
gcccgaguuucggaagagc

SEQ ID NO: 4037448 - RNA, 17 nt, Molluscum contagiosum virus
gcccgcaaugcagugca

SEQ ID NO: 4037449 - RNA, 20 nt, Molluscum contagiosum virus
gcccgcaaugcagugcacca

SEQ ID NO: 4037450 - RNA, 17 nt, Molluscum contagiosum virus
gcccgcaccugcgccgc

SEQ ID NO: 4037451 - RNA, 12 nt, Molluscum contagiosum virus
gcccgccagcau

SEQ ID NO: 4037452 - RNA, 13 nt, Molluscum contagiosum virus
gcccgccagcaug

SEQ ID NO: 4037453 - RNA, 13 nt, Molluscum contagiosum virus
gcccgcccgcgcu

SEQ ID NO: 4037454 - RNA, 14 nt, Molluscum contagiosum virus
gcccgccuccgggc

SEQ ID NO: 4037455 - RNA, 18 nt, Molluscum contagiosum virus
gcccgcgaaggagagaga

SEQ ID NO: 4037456 - RNA, 20 nt, Molluscum contagiosum virus
gcccgcgagcacgggcgcca

SEQ ID NO: 4037457 - RNA, 22 nt, Molluscum contagiosum virus
gcccgcgcacgagcugcugccc

SEQ ID NO: 4037458 - RNA, 22 nt, Molluscum contagiosum virus
gcccgcgcgagacuugugccca

SEQ ID NO: 4037459 - RNA, 22 nt, Molluscum contagiosum virus
gcccgcgcuucugccugcuccc

SEQ ID NO: 4037460 - RNA, 14 nt, Molluscum contagiosum virus
gcccgcggcgcgcc

SEQ ID NO: 4037461 - RNA, 19 nt, Molluscum contagiosum virus
gcccgcgggcugcaagauu

SEQ ID NO: 4037462 - RNA, 15 nt, Molluscum contagiosum virus
gcccgcgggggcgug

SEQ ID NO: 4037463 - RNA, 16 nt, Molluscum contagiosum virus
gcccgcgucgcgcacg

SEQ ID NO: 4037464 - RNA, 18 nt, Molluscum contagiosum virus
gcccgcgugcacccuccg

SEQ ID NO: 4037465 - RNA, 13 nt, Molluscum contagiosum virus
gcccgcugcgcau

SEQ ID NO: 4037466 - RNA, 14 nt, Molluscum contagiosum virus
gcccggaagcuugc

SEQ ID NO: 4037467 - RNA, 20 nt, Molluscum contagiosum virus
gcccggacacguagcccagg

SEQ ID NO: 4037468 - RNA, 14 nt, Molluscum contagiosum virus
gcccggcgggcucu

SEQ ID NO: 4037469 - RNA, 23 nt, Molluscum contagiosum virus
gcccggcguuggcuuucugugcg

SEQ ID NO: 4037470 - RNA, 20 nt, Molluscum contagiosum virus
gcccgggcguagccuagcca

SEQ ID NO: 4037471 - RNA, 15 nt, Molluscum contagiosum virus
gcccgguacgcucgc

SEQ ID NO: 4037472 - RNA, 12 nt, Molluscum contagiosum virus
gcccguccuccg

SEQ ID NO: 4037473 - RNA, 17 nt, Molluscum contagiosum virus
gcccgucggggcaggga

SEQ ID NO: 4037474 - RNA, 18 nt, Molluscum contagiosum virus
gcccgucuuuccuggcuc

SEQ ID NO: 4037475 - RNA, 21 nt, Molluscum contagiosum virus
gcccgugcccgaguuugcccg

SEQ ID NO: 4037476 - RNA, 15 nt, Molluscum contagiosum virus
gcccgugccgccggc

SEQ ID NO: 4037477 - RNA, 19 nt, Molluscum contagiosum virus
gcccgugcucaggccagca

SEQ ID NO: 4037478 - RNA, 13 nt, Molluscum contagiosum virus
gcccugcucaugc

SEQ ID NO: 4037479 - RNA, 18 nt, Molluscum contagiosum virus
gccgaagucgcagcagcg

SEQ ID NO: 4037480 - RNA, 15 nt, Molluscum contagiosum virus
gccgaaucgucggca

SEQ ID NO: 4037481 - RNA, 15 nt, Molluscum contagiosum virus
gccgacaugcgcacg

SEQ ID NO: 4037482 - RNA, 22 nt, Molluscum contagiosum virus
gccgacgccuuccugcuggcgc

SEQ ID NO: 4037483 - RNA, 16 nt, Molluscum contagiosum virus
gccgagcaauugcugg

SEQ ID NO: 4037484 - RNA, 20 nt, Molluscum contagiosum virus
gccgagccaaggaugccugc

SEQ ID NO: 4037485 - RNA, 19 nt, Molluscum contagiosum virus
gccgagcggcaagccgugc

SEQ ID NO: 4037486 - RNA, 21 nt, Molluscum contagiosum virus
gccgagcgggcaaugggcacg

SEQ ID NO: 4037487 - RNA, 15 nt, Molluscum contagiosum virus
gccgagcucgccucc

SEQ ID NO: 4037488 - RNA, 15 nt, Molluscum contagiosum virus
gccgaggucuuccac

SEQ ID NO: 4037489 - RNA, 13 nt, Molluscum contagiosum virus
gccgaugcagugc

SEQ ID NO: 4037490 - RNA, 12 nt, Molluscum contagiosum virus
gccgaugccuau

SEQ ID NO: 4037491 - RNA, 23 nt, Molluscum contagiosum virus
gccgaugccuaugccgagguggc

SEQ ID NO: 4037492 - RNA, 14 nt, Molluscum contagiosum virus
gccgcaaccucuuc

SEQ ID NO: 4037493 - RNA, 21 nt, Molluscum contagiosum virus
gccgcacaaccacagcucucc

SEQ ID NO: 4037494 - RNA, 18 nt, Molluscum contagiosum virus
gccgcacgcugcugcgug

SEQ ID NO: 4037495 - RNA, 16 nt, Molluscum contagiosum virus
gccgcacucgccgcgg

SEQ ID NO: 4037496 - RNA, 19 nt, Molluscum contagiosum virus
gccgcaggaaccgcgugcg

SEQ ID NO: 4037497 - RNA, 17 nt, Molluscum contagiosum virus
gccgcagugcucgcaca

SEQ ID NO: 4037498 - RNA, 14 nt, Molluscum contagiosum virus
gccgccaccucggc

SEQ ID NO: 4037499 - RNA, 13 nt, Molluscum contagiosum virus
gccgccagcgacg

SEQ ID NO: 4037500 - RNA, 13 nt, Molluscum contagiosum virus
gccgccauccuga

SEQ ID NO: 4037501 - RNA, 16 nt, Molluscum contagiosum virus
gccgcccaagggcgua

SEQ ID NO: 4037502 - RNA, 17 nt, Molluscum contagiosum virus
gccgccgacgccuuccu

SEQ ID NO: 4037503 - RNA, 13 nt, Molluscum contagiosum virus
gccgccgcaggcc

SEQ ID NO: 4037504 - RNA, 14 nt, Molluscum contagiosum virus
gccgccgcaggccc

SEQ ID NO: 4037505 - RNA, 13 nt, Molluscum contagiosum virus
gccgccgcccgcg

SEQ ID NO: 4037506 - RNA, 15 nt, Molluscum contagiosum virus
gccgccgcugccgcg

SEQ ID NO: 4037507 - RNA, 21 nt, Molluscum contagiosum virus
gccgccgcugccgcgcgcgcc

SEQ ID NO: 4037508 - RNA, 15 nt, Molluscum contagiosum virus
gccgccgcuggggcg

SEQ ID NO: 4037509 - RNA, 18 nt, Molluscum contagiosum virus
gcgcguacgcugcucgag

SEQ ID NO: 4037510 - RNA, 17 nt, Molluscum contagiosum virus
gcgcguccgcaggcguc

SEQ ID NO: 4037511 - RNA, 15 nt, Molluscum contagiosum virus
gcgcgucgcggucgc

SEQ ID NO: 4037512 - RNA, 12 nt, Molluscum contagiosum virus
gcgcgugccugu

SEQ ID NO: 4037513 - RNA, 13 nt, Molluscum contagiosum virus
gcgcgugcgucuc

SEQ ID NO: 4037514 - RNA, 23 nt, Molluscum contagiosum virus
gcgcgugcucgacucggaugcgc

SEQ ID NO: 4037515 - RNA, 17 nt, Molluscum contagiosum virus
gcgcgugcuggacgcgc

SEQ ID NO: 4037516 - RNA, 19 nt, Molluscum contagiosum virus
gcgcgugcuggacgcgcac

SEQ ID NO: 4037517 - RNA, 16 nt, Molluscum contagiosum virus
gcgcgugcugucagug

SEQ ID NO: 4037518 - RNA, 15 nt, Molluscum contagiosum virus
gcgcguggaggacac

SEQ ID NO: 4037519 - RNA, 17 nt, Molluscum contagiosum virus
gcgcguggcucgcgacc

SEQ ID NO: 4037520 - RNA, 17 nt, Molluscum contagiosum virus
gcgcgugucuggagccc

SEQ ID NO: 4037521 - RNA, 17 nt, Molluscum contagiosum virus
gcgcguucagcgcacgc

SEQ ID NO: 4037522 - RNA, 15 nt, Molluscum contagiosum virus
gcgcguucggaacgc

SEQ ID NO: 4037523 - RNA, 12 nt, Molluscum contagiosum virus
gcgcuaccugau

SEQ ID NO: 4037524 - RNA, 17 nt, Molluscum contagiosum virus
gcgcuacuugcuggcgc

SEQ ID NO: 4037525 - RNA, 16 nt, Molluscum contagiosum virus
gcgcuagccccagcac

SEQ ID NO: 4037526 - RNA, 14 nt, Molluscum contagiosum virus
gcgcucaggaccag

SEQ ID NO: 4037527 - RNA, 11 nt, Molluscum contagiosum virus
gcgcucaucaa

SEQ ID NO: 4037528 - RNA, 16 nt, Molluscum contagiosum virus
gcgcucgagcuccgag

SEQ ID NO: 4037529 - RNA, 14 nt, Molluscum contagiosum virus
gcgcucgccucugg

SEQ ID NO: 4037530 - RNA, 13 nt, Molluscum contagiosum virus
gcgcucgcgcagg

SEQ ID NO: 4037531 - RNA, 19 nt, Molluscum contagiosum virus
gcgcucgcgcgcacgcgca

SEQ ID NO: 4037532 - RNA, 15 nt, Molluscum contagiosum virus
gcgcucggaggggcu

SEQ ID NO: 4037533 - RNA, 14 nt, Molluscum contagiosum virus
gcgcucgugucuag

SEQ ID NO: 4037534 - RNA, 20 nt, Molluscum contagiosum virus
gcgcucuacgagacucugga

SEQ ID NO: 4037535 - RNA, 17 nt, Molluscum contagiosum virus
gcgcucucagagcauua

SEQ ID NO: 4037536 - RNA, 17 nt, Molluscum contagiosum virus
gcgcucuggagccuccc

SEQ ID NO: 4037537 - RNA, 20 nt, Molluscum contagiosum virus
gcgcucuucguggugcucac

SEQ ID NO: 4037538 - RNA, 16 nt, Molluscum contagiosum virus
gcgcugccagcucgac

SEQ ID NO: 4037539 - RNA, 17 nt, Molluscum contagiosum virus
gcgcugccagcucgaca

SEQ ID NO: 4037540 - RNA, 13 nt, Molluscum contagiosum virus
gcgcugcgccacu

SEQ ID NO: 4037541 - RNA, 22 nt, Molluscum contagiosum virus
gcgcugcgccacugccacggcu

SEQ ID NO: 4037542 - RNA, 14 nt, Molluscum contagiosum virus
gcgcugcgcgcgcu

SEQ ID NO: 4037543 - RNA, 17 nt, Molluscum contagiosum virus
gcgcugcgcgcgcucgc

SEQ ID NO: 4037544 - RNA, 20 nt, Molluscum contagiosum virus
gcgcugcgcgcgcucgcgca

SEQ ID NO: 4037545 - RNA, 19 nt, Molluscum contagiosum virus
gcgcugcgcggcggcagcu

SEQ ID NO: 4037546 - RNA, 20 nt, Molluscum contagiosum virus
gcgcugcuggugcucgccug

SEQ ID NO: 4037547 - RNA, 13 nt, Molluscum contagiosum virus
gcgcugcugguuc

SEQ ID NO: 4037548 - RNA, 19 nt, Molluscum contagiosum virus
gcgcuggagaaagaagugu

SEQ ID NO: 4037549 - RNA, 16 nt, Molluscum contagiosum virus
gcgcuggaugcugcuc

SEQ ID NO: 4037550 - RNA, 16 nt, Molluscum contagiosum virus
gcgcuggcccacgcug

SEQ ID NO: 4037551 - RNA, 19 nt, Molluscum contagiosum virus
gcgcugguuaccaagggca

SEQ ID NO: 4037552 - RNA, 21 nt, Molluscum contagiosum virus
gcgcuucggcucccagcagcg

SEQ ID NO: 4037553 - RNA, 18 nt, Molluscum contagiosum virus
gcgcuucuuccggcagcu

SEQ ID NO: 4037554 - RNA, 21 nt, Molluscum contagiosum virus
gcgcuugcucacgcugcgcuc

SEQ ID NO: 4037555 - RNA, 22 nt, Molluscum contagiosum virus
gcggaccgucagccucugugcg

SEQ ID NO: 4037556 - RNA, 13 nt, Molluscum contagiosum virus
gcggacgccggcg

SEQ ID NO: 4037557 - RNA, 13 nt, Molluscum contagiosum virus
gcggacgcgcagc

SEQ ID NO: 4037558 - RNA, 19 nt, Molluscum contagiosum virus
gcggacgcgggccuguccg

SEQ ID NO: 4037559 - RNA, 20 nt, Molluscum contagiosum virus
gcggagaaaaggaagcuugc

SEQ ID NO: 4037560 - RNA, 15 nt, Molluscum contagiosum virus
gcggagcgcacgaag

SEQ ID NO: 4037561 - RNA, 11 nt, Molluscum contagiosum virus
gcggagcuggc

SEQ ID NO: 4037562 - RNA, 17 nt, Molluscum contagiosum virus
gcggaucgugcuggaga

SEQ ID NO: 4037563 - RNA, 17 nt, Molluscum contagiosum virus
gcggcaaaggcccgcga

SEQ ID NO: 4037564 - RNA, 24 nt, Molluscum contagiosum virus
gcggcaaaugcgucccagcagcug

SEQ ID NO: 4037565 - RNA, 15 nt, Molluscum contagiosum virus
gcggcaaccgcgccc

SEQ ID NO: 4037566 - RNA, 16 nt, Molluscum contagiosum virus
gcggcaacgagcacgu

SEQ ID NO: 4037567 - RNA, 14 nt, Molluscum contagiosum virus
gcggcaagcuuugc

SEQ ID NO: 4037568 - RNA, 20 nt, Molluscum contagiosum virus
gcggcacaugcagcugcagg

SEQ ID NO: 4037569 - RNA, 14 nt, Molluscum contagiosum virus
gcggcacccgccgc

SEQ ID NO: 4037570 - RNA, 18 nt, Molluscum contagiosum virus
gcggcacgcccuggcccu

SEQ ID NO: 4037571 - RNA, 18 nt, Molluscum contagiosum virus
gcggcacgccgcucggca

SEQ ID NO: 4037572 - RNA, 18 nt, Molluscum contagiosum virus
gcggcacugggugcccga

SEQ ID NO: 4037573 - RNA, 22 nt, Molluscum contagiosum virus
gcggcagacaacaccagcgugc

SEQ ID NO: 4037574 - RNA, 10 nt, Molluscum contagiosum virus
gcggcagcag

SEQ ID NO: 4037575 - RNA, 18 nt, Molluscum contagiosum virus
gcggcagcuaccgcgcgc

SEQ ID NO: 4037576 - RNA, 23 nt, Molluscum contagiosum virus
gcggcaggcgcugcgcggcgcgc

SEQ ID NO: 4037577 - RNA, 14 nt, Molluscum contagiosum virus
gcggcauccugaug

SEQ ID NO: 4037578 - RNA, 15 nt, Molluscum contagiosum virus
gcggcaugcgcgcgc

SEQ ID NO: 4037579 - RNA, 18 nt, Molluscum contagiosum virus
gcggccaccagcgcggcc

SEQ ID NO: 4037580 - RNA, 13 nt, Molluscum contagiosum virus
gcggccacucucc

SEQ ID NO: 4037581 - RNA, 22 nt, Molluscum contagiosum virus
gcggccacucucccgggcucug

SEQ ID NO: 4037582 - RNA, 20 nt, Molluscum contagiosum virus
gcggccgagucacgccccag

SEQ ID NO: 4037583 - RNA, 18 nt, Molluscum contagiosum virus
gcggccgcgcucgucggc

SEQ ID NO: 4037584 - RNA, 15 nt, Molluscum contagiosum virus
gcggccguugccgga

SEQ ID NO: 4037585 - RNA, 16 nt, Molluscum contagiosum virus
gcggccuggccacgcc

SEQ ID NO: 4037586 - RNA, 18 nt, Molluscum contagiosum virus
gcggcgcaagcaccggca

SEQ ID NO: 4037587 - RNA, 21 nt, Molluscum contagiosum virus
gcggcgcacaaucucgccggc

SEQ ID NO: 4037588 - RNA, 14 nt, Molluscum contagiosum virus
gcggcgcgccgcgc

SEQ ID NO: 4037589 - RNA, 22 nt, Molluscum contagiosum virus
gcggcgcguccucggccagagc

SEQ ID NO: 4037590 - RNA, 14 nt, Molluscum contagiosum virus
gcggcgcgugucgc

SEQ ID NO: 4037591 - RNA, 16 nt, Molluscum contagiosum virus
gcggcgcucguggcgc

SEQ ID NO: 4037592 - RNA, 15 nt, Molluscum contagiosum virus
gcggcgcucugccac

SEQ ID NO: 4037593 - RNA, 13 nt, Molluscum contagiosum virus
gcggcggacagca

SEQ ID NO: 4037594 - RNA, 22 nt, Molluscum contagiosum virus
gcggcuacgaugaacuaccgug

SEQ ID NO: 4037595 - RNA, 13 nt, Molluscum contagiosum virus
gcggcugcggcgc

SEQ ID NO: 4037596 - RNA, 14 nt, Molluscum contagiosum virus
gcggcuggaccugc

SEQ ID NO: 4037597 - RNA, 17 nt, Molluscum contagiosum virus
gcggcugugcccgcggc

SEQ ID NO: 4037598 - RNA, 19 nt, Molluscum contagiosum virus
gcggcugugcccgcggcgu

SEQ ID NO: 4037599 - RNA, 17 nt, Molluscum contagiosum virus
gcggcuuucucacgccc

SEQ ID NO: 4037600 - RNA, 14 nt, Molluscum contagiosum virus
gcgggaagggguga

SEQ ID NO: 4037601 - RNA, 22 nt, Molluscum contagiosum virus
gcgggaccucuuucucgcgccg

SEQ ID NO: 4037602 - RNA, 18 nt, Molluscum contagiosum virus
gcgggaggcucucgagca

SEQ ID NO: 4037603 - RNA, 20 nt, Molluscum contagiosum virus
gcgggaggcucucgagcacu

SEQ ID NO: 4037604 - RNA, 17 nt, Molluscum contagiosum virus
gcgggcaagcagggccu

SEQ ID NO: 4037605 - RNA, 15 nt, Molluscum contagiosum virus
gcgggccaggcacug

SEQ ID NO: 4037606 - RNA, 20 nt, Molluscum contagiosum virus
gcgggcccgcgaacgagaga

SEQ ID NO: 4037607 - RNA, 13 nt, Molluscum contagiosum virus
gcgggccugcgcc

SEQ ID NO: 4037608 - RNA, 14 nt, Molluscum contagiosum virus
gcgggccugcgccc

SEQ ID NO: 4037609 - RNA, 17 nt, Molluscum contagiosum virus
gcgggccugcgcccgca

SEQ ID NO: 4037610 - RNA, 19 nt, Molluscum contagiosum virus
gcgggccuguaccugcgac

SEQ ID NO: 4037611 - RNA, 19 nt, Molluscum contagiosum virus
gcgggccuuugccgcugcc

SEQ ID NO: 4037612 - RNA, 14 nt, Molluscum contagiosum virus
ucgcgcucuucccg

SEQ ID NO: 4037613 - RNA, 23 nt, Molluscum contagiosum virus
ucgcgcuuuuccagguggccaac

SEQ ID NO: 4037614 - RNA, 14 nt, Molluscum contagiosum virus
ucgcggacggcgcg

SEQ ID NO: 4037615 - RNA, 15 nt, Molluscum contagiosum virus
ucgcggacggcgcgc

SEQ ID NO: 4037616 - RNA, 14 nt, Molluscum contagiosum virus
ucgcggagcgcacg

SEQ ID NO: 4037617 - RNA, 16 nt, Molluscum contagiosum virus
ucgcggcgcuacuggc

SEQ ID NO: 4037618 - RNA, 18 nt, Molluscum contagiosum virus
ucgcgggcacgagcaugu

SEQ ID NO: 4037619 - RNA, 14 nt, Molluscum contagiosum virus
ucgcgggcgccgcg

SEQ ID NO: 4037620 - RNA, 13 nt, Molluscum contagiosum virus
ucgcggugcagcu

SEQ ID NO: 4037621 - RNA, 14 nt, Molluscum contagiosum virus
ucgcguccgcgcag

SEQ ID NO: 4037622 - RNA, 23 nt, Molluscum contagiosum virus
ucgcguggugcuuacugcgggcu

SEQ ID NO: 4037623 - RNA, 15 nt, Molluscum contagiosum virus
ucgcugcacgcgaau

SEQ ID NO: 4037624 - RNA, 12 nt, Molluscum contagiosum virus
ucgcugccuggu

SEQ ID NO: 4037625 - RNA, 18 nt, Molluscum contagiosum virus
ucgcugcuccccgccagc

SEQ ID NO: 4037626 - RNA, 17 nt, Molluscum contagiosum virus
ucggagcaggacgacga

SEQ ID NO: 4037627 - RNA, 16 nt, Molluscum contagiosum virus
ucggaugcgcugccgg

SEQ ID NO: 4037628 - RNA, 19 nt, Molluscum contagiosum virus
ucggcgagacgugcggcac

SEQ ID NO: 4037629 - RNA, 21 nt, Molluscum contagiosum virus
ucggcgcuaugccgcgugcuc

SEQ ID NO: 4037630 - RNA, 15 nt, Molluscum contagiosum virus
ucggcguacgugcgc

SEQ ID NO: 4037631 - RNA, 23 nt, Molluscum contagiosum virus
ucggcuuggacagcaagcagcgc

SEQ ID NO: 4037632 - RNA, 15 nt, Molluscum contagiosum virus
ucgggccccugcgcg

SEQ ID NO: 4037633 - RNA, 19 nt, Molluscum contagiosum virus
ucgggcugcagcccuucca

SEQ ID NO: 4037634 - RNA, 19 nt, Molluscum contagiosum virus
ucggggcccucggcgcgcc

SEQ ID NO: 4037635 - RNA, 12 nt, Molluscum contagiosum virus
ucggggcuguca

SEQ ID NO: 4037636 - RNA, 20 nt, Molluscum contagiosum virus
ucgggugcccggacagagcc

SEQ ID NO: 4037637 - RNA, 18 nt, Molluscum contagiosum virus
ucgguagccaggcgccgg

SEQ ID NO: 4037638 - RNA, 22 nt, Molluscum contagiosum virus
ucggugccagauugccggcgcg

SEQ ID NO: 4037639 - RNA, 14 nt, Molluscum contagiosum virus
ucggugggcucgcg

SEQ ID NO: 4037640 - RNA, 14 nt, Molluscum contagiosum virus
ucgucaaugcgcac

SEQ ID NO: 4037641 - RNA, 15 nt, Molluscum contagiosum virus
ucgucaaugcgcacg

SEQ ID NO: 4037642 - RNA, 14 nt, Molluscum contagiosum virus
ucgucacgcuagcg

SEQ ID NO: 4037643 - RNA, 12 nt, Molluscum contagiosum virus
ucguccacaggc

SEQ ID NO: 4037644 - RNA, 19 nt, Molluscum contagiosum virus
ucgugcaauggcaggugcg

SEQ ID NO: 4037645 - RNA, 21 nt, Molluscum contagiosum virus
ucgugccugucggcacaucuc

SEQ ID NO: 4037646 - RNA, 20 nt, Molluscum contagiosum virus
ucgugcucguguguccgcac

SEQ ID NO: 4037647 - RNA, 22 nt, Molluscum contagiosum virus
ucgugcucguguguccgcacgc

SEQ ID NO: 4037648 - RNA, 18 nt, Molluscum contagiosum virus
ucguggacgagcagagcc

SEQ ID NO: 4037649 - RNA, 18 nt, Molluscum contagiosum virus
ucguggccaacuucgcgg

SEQ ID NO: 4037650 - RNA, 22 nt, Molluscum contagiosum virus
ucguggggaggacaaaacugaa

SEQ ID NO: 4037651 - RNA, 19 nt, Molluscum contagiosum virus
ucguucgcggggccggcuu

SEQ ID NO: 4037652 - RNA, 16 nt, Molluscum contagiosum virus
ucguuggcgcgcccgg

SEQ ID NO: 4037653 - RNA, 19 nt, Molluscum contagiosum virus
ucuacggcgugcugugccu

SEQ ID NO: 4037654 - RNA, 23 nt, Molluscum contagiosum virus
ucuacuaaaguacgagagcgcau

SEQ ID NO: 4037655 - RNA, 20 nt, Molluscum contagiosum virus
ucuacugcgacauccacaug

SEQ ID NO: 4037656 - RNA, 17 nt, Molluscum contagiosum virus
ucuacuggcggcgcccg

SEQ ID NO: 4037657 - RNA, 15 nt, Molluscum contagiosum virus
ucuagcucgcgcgcg

SEQ ID NO: 4037658 - RNA, 13 nt, Molluscum contagiosum virus
ucuaguucccaug

SEQ ID NO: 4037659 - RNA, 18 nt, Molluscum contagiosum virus
ucucagcggcacugcgcg

SEQ ID NO: 4037660 - RNA, 23 nt, Molluscum contagiosum virus
ucuccaagaagacggcgcgcgcg

SEQ ID NO: 4037661 - RNA, 20 nt, Molluscum contagiosum virus
ucuccacgucgaucagcucc

SEQ ID NO: 4037662 - RNA, 20 nt, Molluscum contagiosum virus
ucuccaucaucgagcugcag

SEQ ID NO: 4037663 - RNA, 16 nt, Molluscum contagiosum virus
ucucccgggcucuguc

SEQ ID NO: 4037664 - RNA, 17 nt, Molluscum contagiosum virus
ucuccgagacacgcgag

SEQ ID NO: 4037665 - RNA, 14 nt, Molluscum contagiosum virus
ucucgccggcugua

SEQ ID NO: 4037666 - RNA, 20 nt, Molluscum contagiosum virus
ucucgcggggcaagcgcgcu

SEQ ID NO: 4037667 - RNA, 19 nt, Molluscum contagiosum virus
ucucggcagcgucgcggag

SEQ ID NO: 4037668 - RNA, 21 nt, Molluscum contagiosum virus
ucucuccccuucagaggacuu

SEQ ID NO: 4037669 - RNA, 14 nt, Molluscum contagiosum virus
ucucucgagagaca

SEQ ID NO: 4037670 - RNA, 20 nt, Molluscum contagiosum virus
ucucugcgaucgcgggcacg

SEQ ID NO: 4037671 - RNA, 13 nt, Molluscum contagiosum virus
ucucugcgcgcaa

SEQ ID NO: 4037672 - RNA, 13 nt, Molluscum contagiosum virus
ucugccucgugga

SEQ ID NO: 4037673 - RNA, 20 nt, Molluscum contagiosum virus
ucugcgugcuugugcgccug

SEQ ID NO: 4037674 - RNA, 14 nt, Molluscum contagiosum virus
ucugcuccgcggag

SEQ ID NO: 4037675 - RNA, 12 nt, Molluscum contagiosum virus
ucugcucgcagu

SEQ ID NO: 4037676 - RNA, 16 nt, Molluscum contagiosum virus
ucugucccgcaagcca

SEQ ID NO: 4037677 - RNA, 16 nt, Molluscum contagiosum virus
ucuuaugcauccugau

SEQ ID NO: 4037678 - RNA, 18 nt, Molluscum contagiosum virus
ucuucaggaacaaggcca

SEQ ID NO: 4037679 - RNA, 11 nt, Molluscum contagiosum virus
ucuuccacaug

SEQ ID NO: 4037680 - RNA, 15 nt, Molluscum contagiosum virus
ucuuccccgagagcu

SEQ ID NO: 4037681 - RNA, 22 nt, Molluscum contagiosum virus
ucuucgaaguggccgucgcgag

SEQ ID NO: 4037682 - RNA, 20 nt, Molluscum contagiosum virus
ucuucgacaacaugcucgug

SEQ ID NO: 4037683 - RNA, 23 nt, Molluscum contagiosum virus
ucuucgagacgcugcgcgacgag

SEQ ID NO: 4037684 - RNA, 21 nt, Molluscum contagiosum virus
ucuucgggaaggaacaaugcu

SEQ ID NO: 4037685 - RNA, 14 nt, Molluscum contagiosum virus
ucuuuccggcgcgg

SEQ ID NO: 4037686 - RNA, 20 nt, Molluscum contagiosum virus
ugaaaggcaccugcggcucg

SEQ ID NO: 4037687 - RNA, 12 nt, Molluscum contagiosum virus
ugaacaagcugc

SEQ ID NO: 4037688 - RNA, 17 nt, Molluscum contagiosum virus
ugaaccugggcgcgcac

SEQ ID NO: 4037689 - RNA, 17 nt, Molluscum contagiosum virus
ugaacgcgcugcgccac

SEQ ID NO: 4037690 - RNA, 22 nt, Molluscum contagiosum virus
ugaaggacgcguucuccaggaa

SEQ ID NO: 4037691 - RNA, 13 nt, Molluscum contagiosum virus
ugaaggcauaccu

SEQ ID NO: 4037692 - RNA, 14 nt, Molluscum contagiosum virus
ugacaggcgcgcaa

SEQ ID NO: 4037693 - RNA, 21 nt, Molluscum contagiosum virus
ugacaggcgcgcaagugcgug

SEQ ID NO: 4037694 - RNA, 17 nt, Molluscum contagiosum virus
ugaccauggacacgcug

SEQ ID NO: 4037695 - RNA, 21 nt, Molluscum contagiosum virus
ugaccuucaccaucaacaucu

SEQ ID NO: 4037696 - RNA, 18 nt, Molluscum contagiosum virus
ugacgaagcugcgcuugc

SEQ ID NO: 4037697 - RNA, 21 nt, Molluscum contagiosum virus
ugacgauuaucguggacgagc

SEQ ID NO: 4037698 - RNA, 21 nt, Molluscum contagiosum virus
ugacgcgcacgccagccugga

SEQ ID NO: 4037699 - RNA, 19 nt, Molluscum contagiosum virus
ugacgcguacauccgcgag

SEQ ID NO: 4037700 - RNA, 18 nt, Molluscum contagiosum virus
ugacggcgcugcgcgugg

SEQ ID NO: 4037701 - RNA, 15 nt, Molluscum contagiosum virus
ugacgguccugcgcg

SEQ ID NO: 4037702 - RNA, 11 nt, Molluscum contagiosum virus
ugagaagcugu

SEQ ID NO: 4037703 - RNA, 14 nt, Molluscum contagiosum virus
ugagcaagcucaag

SEQ ID NO: 4037704 - RNA, 21 nt, Molluscum contagiosum virus
ugagcagcaccgcacgccagc

SEQ ID NO: 4037705 - RNA, 21 nt, Molluscum contagiosum virus
ugagcaggucggccagcagcu

SEQ ID NO: 4037706 - RNA, 22 nt, Molluscum contagiosum virus
ugagcaggucggccagcagcuc

SEQ ID NO: 4037707 - RNA, 19 nt, Molluscum contagiosum virus
ugagccacaaacacucgcg

SEQ ID NO: 4037708 - RNA, 17 nt, Molluscum contagiosum virus
ugagcgcgccgcucgcg

SEQ ID NO: 4037709 - RNA, 23 nt, Molluscum contagiosum virus
ugagcggcacgggaaggcucuca

SEQ ID NO: 4037710 - RNA, 21 nt, Molluscum contagiosum virus
ugagcgggguacaggcgcggc

SEQ ID NO: 4037711 - RNA, 15 nt, Molluscum contagiosum virus
ugagcuagugccgag

SEQ ID NO: 4037712 - RNA, 22 nt, Molluscum contagiosum virus
ugaggcagugcuugagcaucuc

SEQ ID NO: 4037713 - RNA, 16 nt, Molluscum contagiosum virus
ugagucacgcuugcag

SEQ ID NO: 4037714 - RNA, 14 nt, Molluscum contagiosum virus
uggcggaugucacg

SEQ ID NO: 4037715 - RNA, 23 nt, Molluscum contagiosum virus
uggcggccugcccugcucaugcg

SEQ ID NO: 4037716 - RNA, 13 nt, Molluscum contagiosum virus
uggcggggcuggc

SEQ ID NO: 4037717 - RNA, 18 nt, Molluscum contagiosum virus
uggcggugcggcgcacgc

SEQ ID NO: 4037718 - RNA, 23 nt, Molluscum contagiosum virus
uggcgugaccauggacacgcugc

SEQ ID NO: 4037719 - RNA, 20 nt, Molluscum contagiosum virus
uggcucuagaguacuaggug

SEQ ID NO: 4037720 - RNA, 15 nt, Molluscum contagiosum virus
uggcuucggggacac

SEQ ID NO: 4037721 - RNA, 17 nt, Molluscum contagiosum virus
uggcuucggggacacaa

SEQ ID NO: 4037722 - RNA, 17 nt, Molluscum contagiosum virus
ugggaaagggcugcuug

SEQ ID NO: 4037723 - RNA, 14 nt, Molluscum contagiosum virus
ugggagaacacgag

SEQ ID NO: 4037724 - RNA, 15 nt, Molluscum contagiosum virus
ugggcacugcuacga

SEQ ID NO: 4037725 - RNA, 21 nt, Molluscum contagiosum virus
ugggcacugcuacgagccgcu

SEQ ID NO: 4037726 - RNA, 23 nt, Molluscum contagiosum virus
ugggcaucgucucgcucuuccgc

SEQ ID NO: 4037727 - RNA, 12 nt, Molluscum contagiosum virus
ugggcccgccuc

SEQ ID NO: 4037728 - RNA, 17 nt, Molluscum contagiosum virus
ugggccgaaucgucggc

SEQ ID NO: 4037729 - RNA, 12 nt, Molluscum contagiosum virus
ugggcgcgccgc

SEQ ID NO: 4037730 - RNA, 16 nt, Molluscum contagiosum virus
ugggcuucggaacgcu

SEQ ID NO: 4037731 - RNA, 14 nt, Molluscum contagiosum virus
uggggcucgccggc

SEQ ID NO: 4037732 - RNA, 13 nt, Molluscum contagiosum virus
ugguacagaugag

SEQ ID NO: 4037733 - RNA, 14 nt, Molluscum contagiosum virus
ugguaguugcagcc

SEQ ID NO: 4037734 - RNA, 16 nt, Molluscum contagiosum virus
ugguccaccagcugcc

SEQ ID NO: 4037735 - RNA, 19 nt, Molluscum contagiosum virus
ugguccaccagcugccgcu

SEQ ID NO: 4037736 - RNA, 16 nt, Molluscum contagiosum virus
uggucucgcugcuggg

SEQ ID NO: 4037737 - RNA, 17 nt, Molluscum contagiosum virus
uggucuucccgcuggcg

SEQ ID NO: 4037738 - RNA, 12 nt, Molluscum contagiosum virus
uggugcagaucu

SEQ ID NO: 4037739 - RNA, 17 nt, Molluscum contagiosum virus
uggugcgcccgcggcac

SEQ ID NO: 4037740 - RNA, 21 nt, Molluscum contagiosum virus
uggugcugcgcgacaugcugc

SEQ ID NO: 4037741 - RNA, 13 nt, Molluscum contagiosum virus
uggugggcacgca

SEQ ID NO: 4037742 - RNA, 18 nt, Molluscum contagiosum virus
uggugggccgcggcgcgg

SEQ ID NO: 4037743 - RNA, 14 nt, Molluscum contagiosum virus
uguaacaaggaaaa

SEQ ID NO: 4037744 - RNA, 19 nt, Molluscum contagiosum virus
uguaccugcgacagcugcu

SEQ ID NO: 4037745 - RNA, 17 nt, Molluscum contagiosum virus
uguacgacgugcugcug

SEQ ID NO: 4037746 - RNA, 22 nt, Molluscum contagiosum virus
uguacgggcgugcgcagcagcu

SEQ ID NO: 4037747 - RNA, 14 nt, Molluscum contagiosum virus
uguacgugcugccc

SEQ ID NO: 4037748 - RNA, 16 nt, Molluscum contagiosum virus
uguagaacgccaggaa

SEQ ID NO: 4037749 - RNA, 16 nt, Molluscum contagiosum virus
uguagagacgcugccg

SEQ ID NO: 4037750 - RNA, 17 nt, Molluscum contagiosum virus
uguagcgguugaccagc

SEQ ID NO: 4037751 - RNA, 22 nt, Molluscum contagiosum virus
uguccaaggugaacgaccucaa

SEQ ID NO: 4037752 - RNA, 17 nt, Molluscum contagiosum virus
uguccacaaaaccaaaa

SEQ ID NO: 4037753 - RNA, 17 nt, Molluscum contagiosum virus
uguccgcgggcgcacgc

SEQ ID NO: 4037754 - RNA, 12 nt, Molluscum contagiosum virus
uguccucucgag

SEQ ID NO: 4037755 - RNA, 16 nt, Molluscum contagiosum virus
uguccugcgugcuucc

SEQ ID NO: 4037756 - RNA, 22 nt, Molluscum contagiosum virus
uguccuucugguuccugcgcuc

SEQ ID NO: 4037757 - RNA, 22 nt, Molluscum contagiosum virus
ugucgucaaaggcaaagccugc

SEQ ID NO: 4037758 - RNA, 19 nt, Molluscum contagiosum virus
ugucugggcgagagcuuuu

SEQ ID NO: 4037759 - RNA, 18 nt, Molluscum contagiosum virus
ugucuugaugcuguuacu

SEQ ID NO: 4037760 - RNA, 21 nt, Molluscum contagiosum virus
ugugacacgagccgugugcuc

SEQ ID NO: 4037761 - RNA, 24 nt, Molluscum contagiosum virus
ugugaugauuugauggcugcucau

SEQ ID NO: 4037762 - RNA, 13 nt, Molluscum contagiosum virus
ugugcaggaacug

SEQ ID NO: 4037763 - RNA, 14 nt, Molluscum contagiosum virus
ugugccugcgcaac

SEQ ID NO: 4037764 - RNA, 21 nt, Molluscum contagiosum virus
ugugcgagaacuggcgcagca

SEQ ID NO: 4037765 - RNA, 12 nt, Molluscum contagiosum virus
ugugcgagcgca

SEQ ID NO: 4037766 - RNA, 16 nt, Molluscum contagiosum virus
ugugcgcacgcugacc

SEQ ID NO: 4037767 - RNA, 16 nt, Molluscum contagiosum virus
ugugcgugacacgcga

SEQ ID NO: 4037768 - RNA, 14 nt, Molluscum contagiosum virus
ugugcgugcaccuc

SEQ ID NO: 4037769 - RNA, 17 nt, Molluscum contagiosum virus
ugugcuacugcacugca

SEQ ID NO: 4037770 - RNA, 23 nt, Molluscum contagiosum virus
uguguacgacgcgcccacgugcc

SEQ ID NO: 4037771 - RNA, 22 nt, Molluscum contagiosum virus
ugugucgcgagugugcgcgccc

SEQ ID NO: 4037772 - RNA, 23 nt, Molluscum contagiosum virus
uguguucccggcugccgcugccu

SEQ ID NO: 4037773 - RNA, 12 nt, Molluscum contagiosum virus
uguuauuucagu

SEQ ID NO: 4037774 - RNA, 20 nt, Molluscum contagiosum virus
uguucgcggacggcgcgcag

SEQ ID NO: 4037775 - RNA, 13 nt, Molluscum contagiosum virus
uguugagccuucu

SEQ ID NO: 4037776 - RNA, 15 nt, Molluscum contagiosum virus
uguugcguagagcaa

SEQ ID NO: 4037777 - RNA, 19 nt, Molluscum contagiosum virus
uguuggaagucguggccgu

SEQ ID NO: 4037778 - RNA, 14 nt, Molluscum contagiosum virus
uguugucucucgag

SEQ ID NO: 4037779 - RNA, 21 nt, Molluscum contagiosum virus
uguuucgcaugcacagccgcu

SEQ ID NO: 4037780 - RNA, 14 nt, Molluscum contagiosum virus
uguuuucauuucgc

SEQ ID NO: 4037781 - RNA, 18 nt, Molluscum contagiosum virus
uuacggacgcccuccucg

SEQ ID NO: 4037782 - RNA, 14 nt, Molluscum contagiosum virus
uucaccugcauuga

SEQ ID NO: 4037783 - RNA, 19 nt, Molluscum contagiosum virus
uucaccuuggcgcugcaca

SEQ ID NO: 4037784 - RNA, 20 nt, Molluscum contagiosum virus
uucacgcaaggaagcaacaa

SEQ ID NO: 4037785 - RNA, 20 nt, Molluscum contagiosum virus
uucacgcugcacgagcugcu

SEQ ID NO: 4037786 - RNA, 18 nt, Molluscum contagiosum virus
uucaguguuuuaauuuuc

SEQ ID NO: 4037787 - RNA, 14 nt, Molluscum contagiosum virus
uuccacgcuugcac

SEQ ID NO: 4037788 - RNA, 23 nt, Molluscum contagiosum virus
uuccagcucggguuccagcuccg

SEQ ID NO: 4037789 - RNA, 19 nt, Molluscum contagiosum virus
uucccggcugccgcugccu

SEQ ID NO: 4037790 - RNA, 21 nt, Molluscum contagiosum virus
uuccgacaacucgcgcuggcc

SEQ ID NO: 4037791 - RNA, 13 nt, Molluscum contagiosum virus
uuccgcgacgagc

SEQ ID NO: 4037792 - RNA, 23 nt, Molluscum contagiosum virus
uuccgucccccgcggagcugugc

SEQ ID NO: 4037793 - RNA, 14 nt, Molluscum contagiosum virus
uuccguccccucuc

SEQ ID NO: 4037794 - RNA, 18 nt, Molluscum contagiosum virus
uuccugaacaagcugcac

SEQ ID NO: 4037795 - RNA, 16 nt, Molluscum contagiosum virus
uuccugcugcgcagca

SEQ ID NO: 4037796 - RNA, 21 nt, Molluscum contagiosum virus
uuccuggcacuggcgcgcacg

SEQ ID NO: 4037797 - RNA, 19 nt, Molluscum contagiosum virus
uucgacuucuccgcgcugc

SEQ ID NO: 4037798 - RNA, 20 nt, Molluscum contagiosum virus
uucgcaagucucccucgcgc

SEQ ID NO: 4037799 - RNA, 15 nt, Molluscum contagiosum virus
uucgcacgaccacgc

SEQ ID NO: 4037800 - RNA, 13 nt, Molluscum contagiosum virus
uucgccgcgcgcg

SEQ ID NO: 4037801 - RNA, 14 nt, Molluscum contagiosum virus
uucgccggaggaag

SEQ ID NO: 4037802 - RNA, 22 nt, Molluscum contagiosum virus
uucgcgaccuggcgcgugcgag

SEQ ID NO: 4037803 - RNA, 20 nt, Molluscum contagiosum virus
uucguguucgcggacggcgc

SEQ ID NO: 4037804 - RNA, 20 nt, Molluscum contagiosum virus
uucguugagaccgccgcuga

SEQ ID NO: 4037805 - RNA, 21 nt, Molluscum contagiosum virus
uucuacgggaagcugcacgug

SEQ ID NO: 4037806 - RNA, 13 nt, Molluscum contagiosum virus
uucucaaauaaag

SEQ ID NO: 4037807 - RNA, 21 nt, Molluscum contagiosum virus
uucucauagcauauaaaucau

SEQ ID NO: 4037808 - RNA, 22 nt, Molluscum contagiosum virus
uucugcgcgccgcucgucgcug

SEQ ID NO: 4037809 - RNA, 13 nt, Molluscum contagiosum virus
uucugcgcugcca

SEQ ID NO: 4037810 - RNA, 16 nt, Molluscum contagiosum virus
uucuggcgcgcgugcc

SEQ ID NO: 4037811 - RNA, 17 nt, Molluscum contagiosum virus
uucuggucuggaaacac

SEQ ID NO: 4037812 - RNA, 22 nt, Molluscum contagiosum virus
uucuucgcagaggacagcuccu

SEQ ID NO: 4037813 - RNA, 13 nt, Molluscum contagiosum virus
uugaaaggcagaa

SEQ ID NO: 4037814 - RNA, 20 nt, Molluscum contagiosum virus
uugaacaucuaugcacggca

SEQ ID NO: 4037815 - RNA, 22 nt, Molluscum contagiosum virus
uugaccgcuucgagugcucccg

SEQ ID NO: 4037816 - RNA, 14 nt, Molluscum contagiosum virus
uggcacuggcgcgc

SEQ ID NO: 4037817 - RNA, 14 nt, Molluscum contagiosum virus
uggcaggcgcgcgc

SEQ ID NO: 4037818 - RNA, 21 nt, Molluscum contagiosum virus
uggcaugcgcccucacgugcu

SEQ ID NO: 4037819 - RNA, 13 nt, Molluscum contagiosum virus
uggcaugcgugcu

SEQ ID NO: 4037820 - RNA, 18 nt, Molluscum contagiosum virus
uggcaugcgugcuucacg

SEQ ID NO: 4037821 - RNA, 19 nt, Molluscum contagiosum virus
uggccaaagucuuccuggg

SEQ ID NO: 4037822 - RNA, 22 nt, Molluscum contagiosum virus
uggccaacaggaauguguacga

SEQ ID NO: 4037823 - RNA, 19 nt, Molluscum contagiosum virus
uggccacucucgcgcguga

SEQ ID NO: 4037824 - RNA, 20 nt, Molluscum contagiosum virus
uggcccuuuucuaggccuca

SEQ ID NO: 4037825 - RNA, 17 nt, Molluscum contagiosum virus
uggccgagccgcuggcc

SEQ ID NO: 4037826 - RNA, 19 nt, Molluscum contagiosum virus
uggccgcgauucugcucuu

SEQ ID NO: 4037827 - RNA, 23 nt, Molluscum contagiosum virus
uggccgcgcccucgcucgagggc

SEQ ID NO: 4037828 - RNA, 22 nt, Molluscum contagiosum virus
uggccgcgcgcgcacgcaagcc

SEQ ID NO: 4037829 - RNA, 19 nt, Molluscum contagiosum virus
uggccucugccugcaagga

SEQ ID NO: 4037830 - RNA, 16 nt, Molluscum contagiosum virus
uggccuguaguagcag

SEQ ID NO: 4037831 - RNA, 20 nt, Molluscum contagiosum virus
uggcgaaaccugggcgccgc

SEQ ID NO: 4037832 - RNA, 22 nt, Molluscum contagiosum virus
uggcgagcaucugcgcgugcug

SEQ ID NO: 4037833 - RNA, 16 nt, Molluscum contagiosum virus
uggcgcaccugcuaga

SEQ ID NO: 4037834 - RNA, 22 nt, Molluscum contagiosum virus
uggcgcagcaggaugcuggugu

SEQ ID NO: 4037835 - RNA, 21 nt, Molluscum contagiosum virus
uggcgccgcugcuggaacagg

SEQ ID NO: 4037836 - RNA, 17 nt, Molluscum contagiosum virus
uggcgcgcccggcgccc

SEQ ID NO: 4037837 - RNA, 19 nt, Molluscum contagiosum virus
uggcgcgcccggcgcccgc

SEQ ID NO: 4037838 - RNA, 15 nt, Molluscum contagiosum virus
uggcgcgcgagcugc

SEQ ID NO: 4037839 - RNA, 17 nt, Molluscum contagiosum virus
uggcgcgcgcgcugcgc

SEQ ID NO: 4037840 - RNA, 20 nt, Molluscum contagiosum virus
uggcgcgcgcggucgacggg

SEQ ID NO: 4037841 - RNA, 16 nt, Molluscum contagiosum virus
uggcgcucgcgcgcac

SEQ ID NO: 4037842 - RNA, 20 nt, Molluscum contagiosum virus
uggcguccgcacgaggagcc

SEQ ID NO: 4037843 - RNA, 13 nt, Molluscum contagiosum virus
uggcgugacaggu

SEQ ID NO: 4037844 - RNA, 15 nt, Molluscum contagiosum virus
uggcugugcgcccac

SEQ ID NO: 4037845 - RNA, 20 nt, Molluscum contagiosum virus
uggcuucuccaccuucagga

SEQ ID NO: 4037846 - RNA, 21 nt, Molluscum contagiosum virus
ugggaacaccacacgcgcggc

SEQ ID NO: 4037847 - RNA, 19 nt, Molluscum contagiosum virus
ugggaggacacgcgcacgc

SEQ ID NO: 4037848 - RNA, 21 nt, Molluscum contagiosum virus
ugggcaacgcgcgcgcgcugg

SEQ ID NO: 4037849 - RNA, 17 nt, Molluscum contagiosum virus
ugggcagccgccuggcc

SEQ ID NO: 4037850 - RNA, 17 nt, Molluscum contagiosum virus
ugggcagcuucugcucg

SEQ ID NO: 4037851 - RNA, 22 nt, Molluscum contagiosum virus
ugggcgucgcacaguucacggc

SEQ ID NO: 4037852 - RNA, 17 nt, Molluscum contagiosum virus
ugggcgugcggcgcacc

SEQ ID NO: 4037853 - RNA, 16 nt, Molluscum contagiosum virus
ugggcguggcgcaccu

SEQ ID NO: 4037854 - RNA, 14 nt, Molluscum contagiosum virus
ugggcuucaaguuc

SEQ ID NO: 4037855 - RNA, 15 nt, Molluscum contagiosum virus
ugguaacaagagcuu

SEQ ID NO: 4037856 - RNA, 14 nt, Molluscum contagiosum virus
uggucaacagcuac

SEQ ID NO: 4037857 - RNA, 16 nt, Molluscum contagiosum virus
uggucaacagcuacac

SEQ ID NO: 4037858 - RNA, 15 nt, Molluscum contagiosum virus
uggucacgcgcacgc

SEQ ID NO: 4037859 - RNA, 20 nt, Molluscum contagiosum virus
uggucgagggcgaggccaag

SEQ ID NO: 4037860 - RNA, 18 nt, Molluscum contagiosum virus
uggugccgcgcgcuacgc

SEQ ID NO: 4037861 - RNA, 21 nt, Molluscum contagiosum virus
uggugcgcgacgacggcacgc

SEQ ID NO: 4037862 - RNA, 13 nt, Molluscum contagiosum virus
ugguggagcacuu

SEQ ID NO: 4037863 - RNA, 20 nt, Molluscum contagiosum virus
ugguggccaagauccuguac

SEQ ID NO: 4037864 - RNA, 21 nt, Molluscum contagiosum virus
ugguguauccaggaucacgau

SEQ ID NO: 4037865 - RNA, 18 nt, Molluscum contagiosum virus
ugguguccacgcgcguga

SEQ ID NO: 4037866 - RNA, 16 nt, Molluscum contagiosum virus
ggacucgccgcgcgcc

SEQ ID NO: 4037867 - RNA, 16 nt, Molluscum contagiosum virus
ggacugggaacccgug

SEQ ID NO: 4037868 - RNA, 13 nt, Molluscum contagiosum virus
ggacuucuugcgc

SEQ ID NO: 4037869 - RNA, 17 nt, Molluscum contagiosum virus
ggagaacaugcucgcca

SEQ ID NO: 4037870 - RNA, 16 nt, Molluscum contagiosum virus
ggagaagugcuccgca

SEQ ID NO: 4037871 - RNA, 17 nt, Molluscum contagiosum virus
ggagaagugcuccgcac

SEQ ID NO: 4037872 - RNA, 17 nt, Molluscum contagiosum virus
ggagacaccagcuccgc

SEQ ID NO: 4037873 - RNA, 17 nt, Molluscum contagiosum virus
ggagacagggugccuac

SEQ ID NO: 4037874 - RNA, 18 nt, Molluscum contagiosum virus
uaccggcaguagcagcgc

SEQ ID NO: 4037875 - RNA, 21 nt, Molluscum contagiosum virus
uaccugcgacagcugcugcuc

SEQ ID NO: 4037876 - RNA, 12 nt, Molluscum contagiosum virus
uaccugcugcug

SEQ ID NO: 4037877 - RNA, 13 nt, Molluscum contagiosum virus
uaccuugaagaaa

SEQ ID NO: 4037878 - RNA, 14 nt, Molluscum contagiosum virus
uacgaaaguacuuu

SEQ ID NO: 4037879 - RNA, 19 nt, Molluscum contagiosum virus
uacgacaugcucgcgcucu

SEQ ID NO: 4037880 - RNA, 14 nt, Molluscum contagiosum virus
uacgacgacaugca

SEQ ID NO: 4037881 - RNA, 20 nt, Molluscum contagiosum virus
uacgacgcgcccacgugcca

SEQ ID NO: 4037882 - RNA, 21 nt, Molluscum contagiosum virus
uacgcacgcacguggcgcugc

SEQ ID NO: 4037883 - RNA, 13 nt, Molluscum contagiosum virus
uacgcgccagugc

SEQ ID NO: 4037884 - RNA, 22 nt, Molluscum contagiosum virus
uacgcgccggggcgcgcgcugc

SEQ ID NO: 4037885 - RNA, 14 nt, Molluscum contagiosum virus
uacgcgucgcggag

SEQ ID NO: 4037886 - RNA, 14 nt, Molluscum contagiosum virus
uacgcuacagcagc

SEQ ID NO: 4037887 - RNA, 14 nt, Molluscum contagiosum virus
uacgcucgcgcugu

SEQ ID NO: 4037888 - RNA, 17 nt, Molluscum contagiosum virus
uacggacggcgcacgca

SEQ ID NO: 4037889 - RNA, 20 nt, Molluscum contagiosum virus
uacgggaagcugcacgugca

SEQ ID NO: 4037890 - RNA, 17 nt, Molluscum contagiosum virus
uacuccacuaccaacuc

SEQ ID NO: 4037891 - RNA, 13 nt, Molluscum contagiosum virus
uacugcacugcag

SEQ ID NO: 4037892 - RNA, 21 nt, Molluscum contagiosum virus
uacugccgccaggaaaacgga

SEQ ID NO: 4037893 - RNA, 17 nt, Molluscum contagiosum virus
uacuuccgguguccccg

SEQ ID NO: 4037894 - RNA, 17 nt, Molluscum contagiosum virus
uacuucgucaagcagcg

SEQ ID NO: 4037895 - RNA, 21 nt, Molluscum contagiosum virus
uagacagugcggcgcggcugc

SEQ ID NO: 4037896 - RNA, 21 nt, Molluscum contagiosum virus
uagagcaaaggaagagcccgc

SEQ ID NO: 4037897 - RNA, 16 nt, Molluscum contagiosum virus
uagagcaauacguggc

SEQ ID NO: 4037898 - RNA, 20 nt, Molluscum contagiosum virus
uagagcagaaggugcgcagc

SEQ ID NO: 4037899 - RNA, 14 nt, Molluscum contagiosum virus
uagcaaggcgccgc

SEQ ID NO: 4037900 - RNA, 15 nt, Molluscum contagiosum virus
uagcacacgcgcgcg

SEQ ID NO: 4037901 - RNA, 22 nt, Molluscum contagiosum virus
uagcaccgcaugggcccuggcg

SEQ ID NO: 4037902 - RNA, 18 nt, Molluscum contagiosum virus
uagcagcgccugcacgca

SEQ ID NO: 4037903 - RNA, 14 nt, Molluscum contagiosum virus
uagcagcgugcgca

SEQ ID NO: 4037904 - RNA, 21 nt, Molluscum contagiosum virus
uagcagcuucuuggagcccuu

SEQ ID NO: 4037905 - RNA, 21 nt, Molluscum contagiosum virus
uagcaggaucggagcgcagcu

SEQ ID NO: 4037906 - RNA, 18 nt, Molluscum contagiosum virus
uagcagggcggcgccugc

SEQ ID NO: 4037907 - RNA, 14 nt, Molluscum contagiosum virus
uagccgccgcugcc

SEQ ID NO: 4037908 - RNA, 14 nt, Molluscum contagiosum virus
uagccuccuugucu

SEQ ID NO: 4037909 - RNA, 23 nt, Molluscum contagiosum virus
uagcgucugggugcccaaacagc

SEQ ID NO: 4037910 - RNA, 16 nt, Molluscum contagiosum virus
uagcgugugccgccgc

SEQ ID NO: 4037911 - RNA, 16 nt, Molluscum contagiosum virus
uagcguucccaagcaa

SEQ ID NO: 4037912 - RNA, 14 nt, Molluscum contagiosum virus
uaggacaugacugc

SEQ ID NO: 4037913 - RNA, 17 nt, Molluscum contagiosum virus
uaggcacuccgcgcacc

SEQ ID NO: 4037914 - RNA, 17 nt, Molluscum contagiosum virus
uaguccgcguacagcgc

SEQ ID NO: 4037915 - RNA, 15 nt, Molluscum contagiosum virus
uaguugcgagccagc

SEQ ID NO: 4037916 - RNA, 18 nt, Molluscum contagiosum virus
ucaaagcacaacaagaag

SEQ ID NO: 4037917 - RNA, 18 nt, Molluscum contagiosum virus
ucaaaggcaaagccugcu

SEQ ID NO: 4037918 - RNA, 13 nt, Molluscum contagiosum virus
ucaacaagcugcu

SEQ ID NO: 4037919 - RNA, 13 nt, Molluscum contagiosum virus
ucaaccugcugcc

SEQ ID NO: 4037920 - RNA, 15 nt, Molluscum contagiosum virus
ucaaccugcugccuc

SEQ ID NO: 4037921 - RNA, 20 nt, Molluscum contagiosum virus
ucaacgugggcaccugcauc

SEQ ID NO: 4037922 - RNA, 19 nt, Molluscum contagiosum virus
ucaacuacaaggugcuguc

SEQ ID NO: 4037923 - RNA, 14 nt, Molluscum contagiosum virus
ucaacuuccacauc

SEQ ID NO: 4037924 - RNA, 16 nt, Molluscum contagiosum virus
ucaagaacaauuacuc

SEQ ID NO: 4037925 - RNA, 22 nt, Molluscum contagiosum virus
ucaagaacagucgcgcgccugc

SEQ ID NO: 4037926 - RNA, 19 nt, Molluscum contagiosum virus
ucaagcaccugcgcuuccu

SEQ ID NO: 4037927 - RNA, 16 nt, Molluscum contagiosum virus
ucaagcacgagcugcu

SEQ ID NO: 4037928 - RNA, 17 nt, Molluscum contagiosum virus
ucaagcacggcuuccgg

SEQ ID NO: 4037929 - RNA, 22 nt, Molluscum contagiosum virus
ucaagcacggcuuccggcacca

SEQ ID NO: 4037930 - RNA, 23 nt, Molluscum contagiosum virus
ucaagcacuacauggacgugcug

SEQ ID NO: 4037931 - RNA, 19 nt, Molluscum contagiosum virus
ucaagcagguggccgcgcg

SEQ ID NO: 4037932 - RNA, 22 nt, Molluscum contagiosum virus
ucaagccgcaggcgcgcgccau

SEQ ID NO: 4037933 - RNA, 19 nt, Molluscum contagiosum virus
ucaaucucgcccagcaccu

SEQ ID NO: 4037934 - RNA, 14 nt, Molluscum contagiosum virus
ucaccaccaccucc

SEQ ID NO: 4037935 - RNA, 14 nt, Molluscum contagiosum virus
ucaccauccagccg

SEQ ID NO: 4037936 - RNA, 21 nt, Molluscum contagiosum virus
ucacgacuguguucccggcug

SEQ ID NO: 4037937 - RNA, 11 nt, Molluscum contagiosum virus
ucacgccgccc

SEQ ID NO: 4037938 - RNA, 15 nt, Molluscum contagiosum virus
ucacgcugcgcucgg

SEQ ID NO: 4037939 - RNA, 20 nt, Molluscum contagiosum virus
ucacgcugcucgugcugcuc

SEQ ID NO: 4037940 - RNA, 16 nt, Molluscum contagiosum virus
ucacggcgcucgccuc

SEQ ID NO: 4037941 - RNA, 14 nt, Molluscum contagiosum virus
ucacggcucugcgu

SEQ ID NO: 4037942 - RNA, 13 nt, Molluscum contagiosum virus
ucacucgcucgcg

SEQ ID NO: 4037943 - RNA, 16 nt, Molluscum contagiosum virus
ucacugcagcagcccc

SEQ ID NO: 4037944 - RNA, 13 nt, Molluscum contagiosum virus
ucagaacgacacc

SEQ ID NO: 4037945 - RNA, 16 nt, Molluscum contagiosum virus
ucgcacccgcgccgcg

SEQ ID NO: 4037946 - RNA, 14 nt, Molluscum contagiosum virus
ucgcagcguuccag

SEQ ID NO: 4037947 - RNA, 15 nt, Molluscum contagiosum virus
ucgcagugcccgggg

SEQ ID NO: 4037948 - RNA, 16 nt, Molluscum contagiosum virus
ucgccaaugacggcgu

SEQ ID NO: 4037949 - RNA, 22 nt, Molluscum contagiosum virus
ucgccagcaucaagggcaaggg

SEQ ID NO: 4037950 - RNA, 20 nt, Molluscum contagiosum virus
ucgcccguguucgcggagcu

SEQ ID NO: 4037951 - RNA, 18 nt, Molluscum contagiosum virus
ucgccgaacggcagaccc

SEQ ID NO: 4037952 - RNA, 17 nt, Molluscum contagiosum virus
ucgccgcgcgcgccagc

SEQ ID NO: 4037953 - RNA, 16 nt, Molluscum contagiosum virus
ucgccggacagcucag

SEQ ID NO: 4037954 - RNA, 21 nt, Molluscum contagiosum virus
ucgccggcaucgcgcugcugg

SEQ ID NO: 4037955 - RNA, 19 nt, Molluscum contagiosum virus
ucgccgggccccugucgcg

SEQ ID NO: 4037956 - RNA, 17 nt, Molluscum contagiosum virus
ucgcgacgacgagcacu

SEQ ID NO: 4037957 - RNA, 18 nt, Molluscum contagiosum virus
ucgcgcaaguccagcgcg

SEQ ID NO: 4037958 - RNA, 14 nt, Molluscum contagiosum virus
ucgcgcagcagcua

SEQ ID NO: 4037959 - RNA, 23 nt, Molluscum contagiosum virus
ucgcgcagcaggcacuccagcgc

SEQ ID NO: 4037960 - RNA, 14 nt, Molluscum contagiosum virus
ucgcgcaggucauc

SEQ ID NO: 4037961 - RNA, 16 nt, Molluscum contagiosum virus
ucgcgcccugcgcgcg

SEQ ID NO: 4037962 - RNA, 15 nt, Molluscum contagiosum virus
ucgcgcgccugccgc

SEQ ID NO: 4037963 - RNA, 13 nt, Molluscum contagiosum virus
ucgcgcgcgggcu

SEQ ID NO: 4037964 - RNA, 17 nt, Molluscum contagiosum virus
ucgcgcgcuaccugcgc

SEQ ID NO: 4037965 - RNA, 11 nt, Molluscum contagiosum virus
ucgcgcuuccc

SEQ ID NO: 4037966 - RNA, 13 nt, Molluscum contagiosum virus
ucgcgcuuugcgc

SEQ ID NO: 4037967 - RNA, 16 nt, Molluscum contagiosum virus
ucgcggagcgcgcacg

SEQ ID NO: 4037968 - RNA, 21 nt, Molluscum contagiosum virus
ucgcggagcugugccgcagca

SEQ ID NO: 4037969 - RNA, 12 nt, Molluscum contagiosum virus
ucgcggagggcg

SEQ ID NO: 4037970 - RNA, 20 nt, Molluscum contagiosum virus
ucgcgggauacgggcgcuau

SEQ ID NO: 4037971 - RNA, 12 nt, Molluscum contagiosum virus
ucgcgggcgccg

SEQ ID NO: 4037972 - RNA, 13 nt, Molluscum contagiosum virus
ucgcgggcgcgcg

SEQ ID NO: 4037973 - RNA, 22 nt, Molluscum contagiosum virus
ucgcgggcgcgcgcggagagga

SEQ ID NO: 4037974 - RNA, 19 nt, Molluscum contagiosum virus
ucgcgggcguggggagcug

SEQ ID NO: 4037975 - RNA, 13 nt, Molluscum contagiosum virus
ucgcggugccgga

SEQ ID NO: 4037976 - RNA, 16 nt, Molluscum contagiosum virus
ucgcgguggcaggcgc

SEQ ID NO: 4037977 - RNA, 20 nt, Molluscum contagiosum virus
ucgcguaccaagccgugacg

SEQ ID NO: 4037978 - RNA, 24 nt, Molluscum contagiosum virus
ucgcguaccaagccgugacgcugc

SEQ ID NO: 4037979 - RNA, 22 nt, Molluscum contagiosum virus
ucgcguagcagcgccugcacgc

SEQ ID NO: 4037980 - RNA, 15 nt, Molluscum contagiosum virus
ggagacguagagcag

SEQ ID NO: 4037981 - RNA, 23 nt, Molluscum contagiosum virus
ggagacgucguggauggcguccu

SEQ ID NO: 4037982 - RNA, 18 nt, Molluscum contagiosum virus
ggagagcacuucucgccg

SEQ ID NO: 4037983 - RNA, 15 nt, Molluscum contagiosum virus
ggagaggacgcgugc

SEQ ID NO: 4037984 - RNA, 15 nt, Molluscum contagiosum virus
ggagaucaggcagcu

SEQ ID NO: 4037985 - RNA, 21 nt, Molluscum contagiosum virus
ggagcaccgcguggcgcgcga

SEQ ID NO: 4037986 - RNA, 20 nt, Molluscum contagiosum virus
ggagcacgccuggcggcagc

SEQ ID NO: 4037987 - RNA, 20 nt, Molluscum contagiosum virus
ggagcagacguacgagcagg

SEQ ID NO: 4037988 - RNA, 16 nt, Molluscum contagiosum virus
ggagcccgugcuggag

SEQ ID NO: 4037989 - RNA, 16 nt, Molluscum contagiosum virus
ggagcccuugaucgac

SEQ ID NO: 4037990 - RNA, 23 nt, Molluscum contagiosum virus
ggagcgcuucuagcucgcgcgcg

SEQ ID NO: 4037991 - RNA, 13 nt, Molluscum contagiosum virus
ggagcuagcgcgc

SEQ ID NO: 4037992 - RNA, 14 nt, Molluscum contagiosum virus
ggagcugccgcugc

SEQ ID NO: 4037993 - RNA, 14 nt, Molluscum contagiosum virus
ggagcugcggacgc

SEQ ID NO: 4037994 - RNA, 13 nt, Molluscum contagiosum virus
ggagcugugccgc

SEQ ID NO: 4037995 - RNA, 16 nt, Molluscum contagiosum virus
ggagcuuuccuugcgc

SEQ ID NO: 4037996 - RNA, 18 nt, Molluscum contagiosum virus
ggaggaccacgccgacca

SEQ ID NO: 4037997 - RNA, 20 nt, Molluscum contagiosum virus
ggaggaccgcgagcgcaugc

SEQ ID NO: 4037998 - RNA, 16 nt, Molluscum contagiosum virus
ggaggcgcuagugcag

SEQ ID NO: 4037999 - RNA, 17 nt, Molluscum contagiosum virus
ggagguuggaagcacgc

SEQ ID NO: 4038000 - RNA, 21 nt, Molluscum contagiosum virus
ggagucaggcaaaagccgccg

SEQ ID NO: 4038001 - RNA, 22 nt, Molluscum contagiosum virus
ggauaccaugcucucgcugcug

SEQ ID NO: 4038002 - RNA, 13 nt, Molluscum contagiosum virus
ggaucacggcucu

SEQ ID NO: 4038003 - RNA, 18 nt, Molluscum contagiosum virus
ggaugccacgcagcuggc

SEQ ID NO: 4038004 - RNA, 17 nt, Molluscum contagiosum virus
ggaugccuuucaggggu

SEQ ID NO: 4038005 - RNA, 16 nt, Molluscum contagiosum virus
ggcaaagccugcugcg

SEQ ID NO: 4038006 - RNA, 22 nt, Molluscum contagiosum virus
ggcaaagccugcugcgcgcgcc

SEQ ID NO: 4038007 - RNA, 19 nt, Molluscum contagiosum virus
ggcaacaugcggagacugu

SEQ ID NO: 4038008 - RNA, 19 nt, Molluscum contagiosum virus
ggcaaccgcgacgagcaga

SEQ ID NO: 4038009 - RNA, 19 nt, Molluscum contagiosum virus
ggcaacugccugcgcuagu

SEQ ID NO: 4038010 - RNA, 23 nt, Molluscum contagiosum virus
ggcaagaccaucaucgcgcugcu

SEQ ID NO: 4038011 - RNA, 14 nt, Molluscum contagiosum virus
ggcaagaggggagc

SEQ ID NO: 4038012 - RNA, 18 nt, Molluscum contagiosum virus
ggcaagaggggagccagc

SEQ ID NO: 4038013 - RNA, 14 nt, Molluscum contagiosum virus
ggcaagccgagcca

SEQ ID NO: 4038014 - RNA, 22 nt, Molluscum contagiosum virus
ggcaagcgccgccaugcugcgc

SEQ ID NO: 4038015 - RNA, 17 nt, Molluscum contagiosum virus
ggcaaucgcgugcuugc

SEQ ID NO: 4038016 - RNA, 21 nt, Molluscum contagiosum virus
ggcacaggguuccgcgccugc

SEQ ID NO: 4038017 - RNA, 14 nt, Molluscum contagiosum virus
ggcacagucuggga

SEQ ID NO: 4038018 - RNA, 16 nt, Molluscum contagiosum virus
ggcacauccgcuaccu

SEQ ID NO: 4038019 - RNA, 19 nt, Molluscum contagiosum virus
ggcacaucucucagggcag

SEQ ID NO: 4038020 - RNA, 18 nt, Molluscum contagiosum virus
ggcacccaccaggaacga

SEQ ID NO: 4038021 - RNA, 15 nt, Molluscum contagiosum virus
ggcaccccgaaggaa

SEQ ID NO: 4038022 - RNA, 14 nt, Molluscum contagiosum virus
ggcaccccgcagga

SEQ ID NO: 4038023 - RNA, 17 nt, Molluscum contagiosum virus
ggcaccccgcaggaaag

SEQ ID NO: 4038024 - RNA, 18 nt, Molluscum contagiosum virus
ggcacccgcaacaaggaa

SEQ ID NO: 4038025 - RNA, 19 nt, Molluscum contagiosum virus
ggcacccgcaacaaggaaa

SEQ ID NO: 4038026 - RNA, 22 nt, Molluscum contagiosum virus
ggcacccgcaacaaggaaaggc

SEQ ID NO: 4038027 - RNA, 21 nt, Molluscum contagiosum virus
ggcacccgccgcggugccggg

SEQ ID NO: 4038028 - RNA, 16 nt, Molluscum contagiosum virus
ggcaccugcaggaaag

SEQ ID NO: 4038029 - RNA, 21 nt, Molluscum contagiosum virus
ggcacgaggcagccgcggcgc

SEQ ID NO: 4038030 - RNA, 16 nt, Molluscum contagiosum virus
ggcacgggcacgcgcg

SEQ ID NO: 4038031 - RNA, 12 nt, Molluscum contagiosum virus
ggcacguccgcc

SEQ ID NO: 4038032 - RNA, 21 nt, Molluscum contagiosum virus
ggcacguggcuaugagcggca

SEQ ID NO: 4038033 - RNA, 15 nt, Molluscum contagiosum virus
ggcacuccagcgcgc

SEQ ID NO: 4038034 - RNA, 14 nt, Molluscum contagiosum virus
ggcacuucucgcgc

SEQ ID NO: 4038035 - RNA, 12 nt, Molluscum contagiosum virus
ggcagaagcuca

SEQ ID NO: 4038036 - RNA, 20 nt, Molluscum contagiosum virus
ggcagcaggaagacgcauag

SEQ ID NO: 4038037 - RNA, 15 nt, Molluscum contagiosum virus
ggcagccuugcgaga

SEQ ID NO: 4038038 - RNA, 21 nt, Molluscum contagiosum virus
ggcagcgucgcggagcgcgca

SEQ ID NO: 4038039 - RNA, 17 nt, Molluscum contagiosum virus
ggcagcuaccgcgcgcg

SEQ ID NO: 4038040 - RNA, 18 nt, Molluscum contagiosum virus
ggcagcucugcagcgccg

SEQ ID NO: 4038041 - RNA, 17 nt, Molluscum contagiosum virus
ggcagggaaagagcacg

SEQ ID NO: 4038042 - RNA, 13 nt, Molluscum contagiosum virus
ggcaggucgcggu

SEQ ID NO: 4038043 - RNA, 17 nt, Molluscum contagiosum virus
ggcaguagcagcgccgg

SEQ ID NO: 4038044 - RNA, 14 nt, Molluscum contagiosum virus
ggcagugcuugagc

SEQ ID NO: 4038045 - RNA, 17 nt, Molluscum contagiosum virus
ggcauaccugugccagc

SEQ ID NO: 4038046 - RNA, 15 nt, Molluscum contagiosum virus
ggcaucaugagccag

SEQ ID NO: 4038047 - RNA, 15 nt, Molluscum contagiosum virus
ggcaucgcgcugcug

SEQ ID NO: 4038048 - RNA, 14 nt, Molluscum contagiosum virus
ggcaugcuugaggc

SEQ ID NO: 4038049 - RNA, 12 nt, Molluscum contagiosum virus
ggcauggagggc

SEQ ID NO: 4038050 - RNA, 15 nt, Molluscum contagiosum virus
ggccaaagccgcgga

SEQ ID NO: 4038051 - RNA, 19 nt, Molluscum contagiosum virus
ggccaaagccgcggaggcc

SEQ ID NO: 4038052 - RNA, 22 nt, Molluscum contagiosum virus
ggccaccucgcacgugugcagg

SEQ ID NO: 4038053 - RNA, 21 nt, Molluscum contagiosum virus
ggccacgggauguuggagcgc

SEQ ID NO: 4038054 - RNA, 21 nt, Molluscum contagiosum virus
ggccacucucccgggcucugu

SEQ ID NO: 4038055 - RNA, 16 nt, Molluscum contagiosum virus
ggccagcgcgcggcgc

SEQ ID NO: 4038056 - RNA, 12 nt, Molluscum contagiosum virus
ggccaggcgcgg

SEQ ID NO: 4038057 - RNA, 22 nt, Molluscum contagiosum virus
ggccauggagcgcccgcugcuc

SEQ ID NO: 4038058 - RNA, 17 nt, Molluscum contagiosum virus
ggcccaccgcgccagcg

SEQ ID NO: 4038059 - RNA, 21 nt, Molluscum contagiosum virus
ggcccacgcuggcgcucggcg

SEQ ID NO: 4038060 - RNA, 15 nt, Molluscum contagiosum virus
ggccccuacgugguc

SEQ ID NO: 4038061 - RNA, 16 nt, Molluscum contagiosum virus
ggcccgagcagaagga

SEQ ID NO: 4038062 - RNA, 14 nt, Molluscum contagiosum virus
ggcccgcgagcacg

SEQ ID NO: 4038063 - RNA, 18 nt, Molluscum contagiosum virus
ggccgaagucuaggcagc

SEQ ID NO: 4038064 - RNA, 23 nt, Molluscum contagiosum virus
ggccgaaucgucggcacgcugca

SEQ ID NO: 4038065 - RNA, 23 nt, Molluscum contagiosum virus
ggccgagcgugaccagugcgugc

SEQ ID NO: 4038066 - RNA, 12 nt, Molluscum contagiosum virus
ggccgcacgcgu

SEQ ID NO: 4038067 - RNA, 17 nt, Molluscum contagiosum virus
ggccgccacuguugcuu

SEQ ID NO: 4038068 - RNA, 15 nt, Molluscum contagiosum virus
ggccgccgggccugc

SEQ ID NO: 4038069 - RNA, 16 nt, Molluscum contagiosum virus
ggccgcgccgcgccga

SEQ ID NO: 4038070 - RNA, 20 nt, Molluscum contagiosum virus
ggccgcgcucgucggcggca

SEQ ID NO: 4038071 - RNA, 21 nt, Molluscum contagiosum virus
ggccgcggaggacucggaggc

SEQ ID NO: 4038072 - RNA, 13 nt, Molluscum contagiosum virus
ggccggcgcgccg

SEQ ID NO: 4038073 - RNA, 22 nt, Molluscum contagiosum virus
ggccguagugcucaucgugccc

SEQ ID NO: 4038074 - RNA, 21 nt, Molluscum contagiosum virus
ggccguguacaugcucaagca

SEQ ID NO: 4038075 - RNA, 14 nt, Molluscum contagiosum virus
ggccuaccugcagg

SEQ ID NO: 4038076 - RNA, 15 nt, Molluscum contagiosum virus
ggccuccuucccuga

SEQ ID NO: 4038077 - RNA, 14 nt, Molluscum contagiosum virus
ggccucguccugga

SEQ ID NO: 4038078 - RNA, 17 nt, Molluscum contagiosum virus
ggccucguccuggaggg

SEQ ID NO: 4038079 - RNA, 17 nt, Molluscum contagiosum virus
ggccugcggcaggaagc

SEQ ID NO: 4038080 - RNA, 21 nt, Molluscum contagiosum virus
ggccugcugaagaaggagccc

SEQ ID NO: 4038081 - RNA, 22 nt, Molluscum contagiosum virus
ggccuguccgcggaugcaggca

SEQ ID NO: 4038082 - RNA, 15 nt, Molluscum contagiosum virus
ggcgaccagcucuug

SEQ ID NO: 4038083 - RNA, 21 nt, Molluscum contagiosum virus
ggcgacgacagcgacgagauc

SEQ ID NO: 4038084 - RNA, 20 nt, Molluscum contagiosum virus
ggcgacuggcgacacauugc

SEQ ID NO: 4038085 - RNA, 19 nt, Molluscum contagiosum virus
ggcgagacgugcggcacgc

SEQ ID NO: 4038086 - RNA, 15 nt, Molluscum contagiosum virus
ggcgagauugagcuc

SEQ ID NO: 4038087 - RNA, 22 nt, Molluscum contagiosum virus
ggcgagcaagauggugucgccg

SEQ ID NO: 4038088 - RNA, 23 nt, Molluscum contagiosum virus
ggcgagcgcacgucuacgacauc

SEQ ID NO: 4038089 - RNA, 19 nt, Molluscum contagiosum virus
ggcgagcgccgcucgcacg

SEQ ID NO: 4038090 - RNA, 21 nt, Molluscum contagiosum virus
ggcgcacaacuugggcccgcc

SEQ ID NO: 4038091 - RNA, 20 nt, Molluscum contagiosum virus
ggcgcacgcuuguccgcgga

SEQ ID NO: 4038092 - RNA, 14 nt, Molluscum contagiosum virus
ggcgcagagccugc

SEQ ID NO: 4038093 - RNA, 19 nt, Molluscum contagiosum virus
ggcgcagcuccuagcgcgc

SEQ ID NO: 4038094 - RNA, 20 nt, Molluscum contagiosum virus
ggcgccaaguccgagcaagc

SEQ ID NO: 4038095 - RNA, 14 nt, Molluscum contagiosum virus
ggcgcccgcggaca

SEQ ID NO: 4038096 - RNA, 21 nt, Molluscum contagiosum virus
ggcgcccgugcucgcgggccu

SEQ ID NO: 4038097 - RNA, 17 nt, Molluscum contagiosum virus
ggcgccgaugcagugcg

SEQ ID NO: 4038098 - RNA, 16 nt, Molluscum contagiosum virus
ggcgccgcggcugccu

SEQ ID NO: 4038099 - RNA, 16 nt, Molluscum contagiosum virus
ggcgccgcuaccagcu

SEQ ID NO: 4038100 - RNA, 15 nt, Molluscum contagiosum virus
ggcgccggcucugcc

SEQ ID NO: 4038101 - RNA, 19 nt, Molluscum contagiosum virus
ggcgccuucgucgcgcgcu

SEQ ID NO: 4038102 - RNA, 18 nt, Molluscum contagiosum virus
ggcgcgagaugcucgccg

SEQ ID NO: 4038103 - RNA, 19 nt, Molluscum contagiosum virus
ggcgcgagcgacggcaggc

SEQ ID NO: 4038104 - RNA, 13 nt, Molluscum contagiosum virus
ggcgcgccgcacg

SEQ ID NO: 4038105 - RNA, 20 nt, Molluscum contagiosum virus
ggcgcgccgccggugcgugc

SEQ ID NO: 4038106 - RNA, 15 nt, Molluscum contagiosum virus
ggcgcgccgcgcgcg

SEQ ID NO: 4038107 - RNA, 13 nt, Molluscum contagiosum virus
ggcgcgcgccagc

SEQ ID NO: 4038108 - RNA, 16 nt, Molluscum contagiosum virus
ggcgcgcgccagcagc

SEQ ID NO: 4038109 - RNA, 17 nt, Molluscum contagiosum virus
ggcgcgcgcgcuagccg

SEQ ID NO: 4038110 - RNA, 14 nt, Molluscum contagiosum virus
ggcgcgcgcgcugc

SEQ ID NO: 4038111 - RNA, 18 nt, Molluscum contagiosum virus
ggcgcgcgcgcuggcgug

SEQ ID NO: 4038112 - RNA, 13 nt, Molluscum contagiosum virus
ggcgcgcgcucag

SEQ ID NO: 4038113 - RNA, 18 nt, Molluscum contagiosum virus
ggcgcgcgcugcgcacgu

SEQ ID NO: 4038114 - RNA, 21 nt, Molluscum contagiosum virus
ggcgcgcgucgagggcgccgg

SEQ ID NO: 4038115 - RNA, 19 nt, Molluscum contagiosum virus
ggcgcgcucgcgugcuagg

SEQ ID NO: 4038116 - RNA, 16 nt, Molluscum contagiosum virus
ggcgcgcugugagcgc

SEQ ID NO: 4038117 - RNA, 14 nt, Molluscum contagiosum virus
ggcgcggccucuuu

SEQ ID NO: 4038118 - RNA, 14 nt, Molluscum contagiosum virus
ggcgcggcgagccg

SEQ ID NO: 4038119 - RNA, 14 nt, Molluscum contagiosum virus
ggcgcggcugcucg

SEQ ID NO: 4038120 - RNA, 14 nt, Molluscum contagiosum virus
ggcgcgguccagcc

SEQ ID NO: 4038121 - RNA, 15 nt, Molluscum contagiosum virus
ggcgcgguccagccg

SEQ ID NO: 4038122 - RNA, 14 nt, Molluscum contagiosum virus
ggcgcgugcgagca

SEQ ID NO: 4038123 - RNA, 11 nt, Molluscum contagiosum virus
ggcgcgugcuc

SEQ ID NO: 4038124 - RNA, 18 nt, Molluscum contagiosum virus
ggcgcuagugcagaugag

SEQ ID NO: 4038125 - RNA, 22 nt, Molluscum contagiosum virus
ggcgcuaugccgcgugcucugc

SEQ ID NO: 4038126 - RNA, 20 nt, Molluscum contagiosum virus
ggcgcucgcagcacaugcag

SEQ ID NO: 4038127 - RNA, 12 nt, Molluscum contagiosum virus
ggcgcugucgcg

SEQ ID NO: 4038128 - RNA, 18 nt, Molluscum contagiosum virus
ggcgcuugggcacugcua

SEQ ID NO: 4038129 - RNA, 17 nt, Molluscum contagiosum virus
ggcgcuuucgcccgccg

SEQ ID NO: 4038130 - RNA, 18 nt, Molluscum contagiosum virus
ggcgcuuucgcccgccgc

SEQ ID NO: 4038131 - RNA, 15 nt, Molluscum contagiosum virus
ggcggcaagcccgga

SEQ ID NO: 4038132 - RNA, 17 nt, Molluscum contagiosum virus
ggcggcccgcggcgcgc

SEQ ID NO: 4038133 - RNA, 20 nt, Molluscum contagiosum virus
ggcggccucccucgucgcgc

SEQ ID NO: 4038134 - RNA, 12 nt, Molluscum contagiosum virus
ggcggcgcaagg

SEQ ID NO: 4038135 - RNA, 17 nt, Molluscum contagiosum virus
ggcggcgcaaggacacc

SEQ ID NO: 4038136 - RNA, 12 nt, Molluscum contagiosum virus
ggcggcgcggcu

SEQ ID NO: 4038137 - RNA, 14 nt, Molluscum contagiosum virus
ggcggcgcuggaga

SEQ ID NO: 4038138 - RNA, 13 nt, Molluscum contagiosum virus
ggcggcgucgcgc

SEQ ID NO: 4038139 - RNA, 19 nt, Molluscum contagiosum virus
ggcgguggcggcucugccg

SEQ ID NO: 4038140 - RNA, 15 nt, Molluscum contagiosum virus
ggcggugggcgccgc

SEQ ID NO: 4038141 - RNA, 17 nt, Molluscum contagiosum virus
ggcguccggcgcuugcc

SEQ ID NO: 4038142 - RNA, 16 nt, Molluscum contagiosum virus
ggcgucgcgcacagaa

SEQ ID NO: 4038143 - RNA, 19 nt, Molluscum contagiosum virus
ggcgugcauuuuuccgcuu

SEQ ID NO: 4038144 - RNA, 22 nt, Molluscum contagiosum virus
ggcgugcgccgugcgucucucu

SEQ ID NO: 4038145 - RNA, 13 nt, Molluscum contagiosum virus
ggcgugcucacgc

SEQ ID NO: 4038146 - RNA, 12 nt, Molluscum contagiosum virus
ggcgugcucagc

SEQ ID NO: 4038147 - RNA, 11 nt, Molluscum contagiosum virus
ggcgugcucgc

SEQ ID NO: 4038148 - RNA, 19 nt, Molluscum contagiosum virus
ggcguguccgcgggcgcgc

SEQ ID NO: 4038149 - RNA, 21 nt, Molluscum contagiosum virus
ggcgugugcgcgagcugaggc

SEQ ID NO: 4038150 - RNA, 19 nt, Molluscum contagiosum virus
ggcguguuccggcagcgcc

SEQ ID NO: 4038151 - RNA, 13 nt, Molluscum contagiosum virus
ggcucacagccgu

SEQ ID NO: 4038152 - RNA, 20 nt, Molluscum contagiosum virus
ggcucacagccguggagucc

SEQ ID NO: 4038153 - RNA, 23 nt, Molluscum contagiosum virus
ggcuccgaaccccucgugcuggg

SEQ ID NO: 4038154 - RNA, 18 nt, Molluscum contagiosum virus
ggcuccggcuuggacucc

SEQ ID NO: 4038155 - RNA, 20 nt, Molluscum contagiosum virus
ggcuccuacaucgacaagca

SEQ ID NO: 4038156 - RNA, 13 nt, Molluscum contagiosum virus
ggcucgccaugcu

SEQ ID NO: 4038157 - RNA, 16 nt, Molluscum contagiosum virus
ggcucgcgagugugca

SEQ ID NO: 4038158 - RNA, 20 nt, Molluscum contagiosum virus
ggcucgcgcacuacucgucu

SEQ ID NO: 4038159 - RNA, 14 nt, Molluscum contagiosum virus
ggcucguacugcug

SEQ ID NO: 4038160 - RNA, 20 nt, Molluscum contagiosum virus
ggcucguccucgggcgccaa

SEQ ID NO: 4038161 - RNA, 16 nt, Molluscum contagiosum virus
ggcucgugcuggagca

SEQ ID NO: 4038162 - RNA, 19 nt, Molluscum contagiosum virus
ggcucugugcggacaugcc

SEQ ID NO: 4038163 - RNA, 22 nt, Molluscum contagiosum virus
ggcucuguucugcuuggacgac

SEQ ID NO: 4038164 - RNA, 13 nt, Molluscum contagiosum virus
ggcugcagcccuu

SEQ ID NO: 4038165 - RNA, 21 nt, Molluscum contagiosum virus
ggcugcccuguuacggacggc

SEQ ID NO: 4038166 - RNA, 23 nt, Molluscum contagiosum virus
ggcugcucgcugccuggugcaca

SEQ ID NO: 4038167 - RNA, 18 nt, Molluscum contagiosum virus
ggcugcucuccgaagaag

SEQ ID NO: 4038168 - RNA, 18 nt, Molluscum contagiosum virus
ggcugggaaagggcugcu

SEQ ID NO: 4038169 - RNA, 16 nt, Molluscum contagiosum virus
ggcuugccccgcgcgu

SEQ ID NO: 4038170 - RNA, 18 nt, Molluscum contagiosum virus
ggcuuuauuuccggcucc

SEQ ID NO: 4038171 - RNA, 12 nt, Molluscum contagiosum virus
ggcuuugacaug

SEQ ID NO: 4038172 - RNA, 15 nt, Molluscum contagiosum virus
ggcuuugacaugcac

SEQ ID NO: 4038173 - RNA, 16 nt, Molluscum contagiosum virus
ggcuuugacaugcacc

SEQ ID NO: 4038174 - RNA, 18 nt, Molluscum contagiosum virus
gggaaagaugaagcucuc

SEQ ID NO: 4038175 - RNA, 13 nt, Molluscum contagiosum virus
gggaacgaggaaa

SEQ ID NO: 4038176 - RNA, 12 nt, Molluscum contagiosum virus
gggaagcacagu

SEQ ID NO: 4038177 - RNA, 19 nt, Molluscum contagiosum virus
gggaagcacguagcucgcg

SEQ ID NO: 4038178 - RNA, 18 nt, Molluscum contagiosum virus
gggagcauguccgacucc

SEQ ID NO: 4038179 - RNA, 13 nt, Molluscum contagiosum virus
gggaucuugcgug

SEQ ID NO: 4038180 - RNA, 14 nt, Molluscum contagiosum virus
gggcaacgcgcgcg

SEQ ID NO: 4038181 - RNA, 18 nt, Molluscum contagiosum virus
gggcaccugcaucgcgcc

SEQ ID NO: 4038182 - RNA, 18 nt, Molluscum contagiosum virus
gggcacgcccgcgguguc

SEQ ID NO: 4038183 - RNA, 15 nt, Molluscum contagiosum virus
gggcacgccgugggc

SEQ ID NO: 4038184 - RNA, 13 nt, Molluscum contagiosum virus
gggcacgcgcgcg

SEQ ID NO: 4038185 - RNA, 23 nt, Molluscum contagiosum virus
gggcacgcucauacuccugcugg

SEQ ID NO: 4038186 - RNA, 21 nt, Molluscum contagiosum virus
gggcagccgcuggacgccucg

SEQ ID NO: 4038187 - RNA, 17 nt, Molluscum contagiosum virus
gggcagcucaagcugcu

SEQ ID NO: 4038188 - RNA, 14 nt, Molluscum contagiosum virus
gcgcacggcuaggc

SEQ ID NO: 4038189 - RNA, 18 nt, Molluscum contagiosum virus
gcgcacgggccugcgcgc

SEQ ID NO: 4038190 - RNA, 13 nt, Molluscum contagiosum virus
gcgcacugcggga

SEQ ID NO: 4038191 - RNA, 15 nt, Molluscum contagiosum virus
gcgcagagcuccccg

SEQ ID NO: 4038192 - RNA, 23 nt, Molluscum contagiosum virus
gcgcagagcuccccgcgcgcagc

SEQ ID NO: 4038193 - RNA, 14 nt, Molluscum contagiosum virus
gcgcaggccgcgcc

SEQ ID NO: 4038194 - RNA, 16 nt, Molluscum contagiosum virus
gcgcaggccgcgcccg

SEQ ID NO: 4038195 - RNA, 14 nt, Molluscum contagiosum virus
gcgcagucccagca

SEQ ID NO: 4038196 - RNA, 18 nt, Molluscum contagiosum virus
gcgcagugcggccagcac

SEQ ID NO: 4038197 - RNA, 13 nt, Molluscum contagiosum virus
gcgcagugcugcg

SEQ ID NO: 4038198 - RNA, 19 nt, Molluscum contagiosum virus
gcgcaguucgagcugcugc

SEQ ID NO: 4038199 - RNA, 20 nt, Molluscum contagiosum virus
gcgcauacgcgccgcgcgcu

SEQ ID NO: 4038200 - RNA, 20 nt, Molluscum contagiosum virus
gacgcgugcaagcccagcag

SEQ ID NO: 4038201 - RNA, 18 nt, Molluscum contagiosum virus
gacgcguucuagcagcgu

SEQ ID NO: 4038202 - RNA, 21 nt, Molluscum contagiosum virus
gacgcguucuagcagcgugcg

SEQ ID NO: 4038203 - RNA, 17 nt, Molluscum contagiosum virus
gacgcucgggccggcgc

SEQ ID NO: 4038204 - RNA, 22 nt, Molluscum contagiosum virus
gacgcugccggcaacgcugccg

SEQ ID NO: 4038205 - RNA, 15 nt, Molluscum contagiosum virus
gacggaacgagccug

SEQ ID NO: 4038206 - RNA, 16 nt, Molluscum contagiosum virus
gacggagacagugaca

SEQ ID NO: 4038207 - RNA, 19 nt, Molluscum contagiosum virus
gacggcaccguaccgcgcc

SEQ ID NO: 4038208 - RNA, 16 nt, Molluscum contagiosum virus
gacggcacgggcacgc

SEQ ID NO: 4038209 - RNA, 11 nt, Molluscum contagiosum virus
gacggcaggcc

SEQ ID NO: 4038210 - RNA, 17 nt, Molluscum contagiosum virus
gacggccguuuuuggga

SEQ ID NO: 4038211 - RNA, 13 nt, Molluscum contagiosum virus
gacggcgcgcagc

SEQ ID NO: 4038212 - RNA, 14 nt, Molluscum contagiosum virus
gacggcgcgggcgc

SEQ ID NO: 4038213 - RNA, 14 nt, Molluscum contagiosum virus
gacggcuaaagaga

SEQ ID NO: 4038214 - RNA, 14 nt, Molluscum contagiosum virus
gacgggcacgagca

SEQ ID NO: 4038215 - RNA, 17 nt, Molluscum contagiosum virus
gacgggccgccgcccgc

SEQ ID NO: 4038216 - RNA, 22 nt, Molluscum contagiosum virus
gacgggcgcagccacgacucgc

SEQ ID NO: 4038217 - RNA, 17 nt, Molluscum contagiosum virus
gacggugcugcgcacgg

SEQ ID NO: 4038218 - RNA, 23 nt, Molluscum contagiosum virus
gacgucaaccgggcucucgcgga

SEQ ID NO: 4038219 - RNA, 22 nt, Molluscum contagiosum virus
gacguccacaaagcccuccuga

SEQ ID NO: 4038220 - RNA, 21 nt, Molluscum contagiosum virus
gacgugaucguuccuggccaa

SEQ ID NO: 4038221 - RNA, 16 nt, Molluscum contagiosum virus
gacgugcugcugcaga

SEQ ID NO: 4038222 - RNA, 14 nt, Molluscum contagiosum virus
gacgugcugcuggc

SEQ ID NO: 4038223 - RNA, 17 nt, Molluscum contagiosum virus
gacguggugcucgugga

SEQ ID NO: 4038224 - RNA, 21 nt, Molluscum contagiosum virus
gacuaccuggcggcgcuggag

SEQ ID NO: 4038225 - RNA, 17 nt, Molluscum contagiosum virus
gacuacgcgcugcuaga

SEQ ID NO: 4038226 - RNA, 14 nt, Molluscum contagiosum virus
gacuagccugugcc

SEQ ID NO: 4038227 - RNA, 15 nt, Molluscum contagiosum virus
gacuagccugugccc

SEQ ID NO: 4038228 - RNA, 17 nt, Molluscum contagiosum virus
gacuagccugugcccug

SEQ ID NO: 4038229 - RNA, 19 nt, Molluscum contagiosum virus
gacuaugcgucuuccugcu

SEQ ID NO: 4038230 - RNA, 21 nt, Molluscum contagiosum virus
gacucgagcgagcuacgcgcu

SEQ ID NO: 4038231 - RNA, 17 nt, Molluscum contagiosum virus
gacucggaugcgcugcc

SEQ ID NO: 4038232 - RNA, 15 nt, Molluscum contagiosum virus
gacucuggaagccuu

SEQ ID NO: 4038233 - RNA, 13 nt, Molluscum contagiosum virus
gacugcgcccgug

SEQ ID NO: 4038234 - RNA, 14 nt, Molluscum contagiosum virus
gacuggcaccugcg

SEQ ID NO: 4038235 - RNA, 15 nt, Molluscum contagiosum virus
gacuuacggacgccc

SEQ ID NO: 4038236 - RNA, 15 nt, Molluscum contagiosum virus
gacuuccgacgggcc

SEQ ID NO: 4038237 - RNA, 18 nt, Molluscum contagiosum virus
gacuucuccgaccgugcc

SEQ ID NO: 4038238 - RNA, 13 nt, Molluscum contagiosum virus
gacuugcugcgga

SEQ ID NO: 4038239 - RNA, 20 nt, Molluscum contagiosum virus
gacuugcugcggagcgccuu

SEQ ID NO: 4038240 - RNA, 12 nt, Molluscum contagiosum virus
gagaaaggcacc

SEQ ID NO: 4038241 - RNA, 16 nt, Molluscum contagiosum virus
gagaaaggcacccacc

SEQ ID NO: 4038242 - RNA, 18 nt, Molluscum contagiosum virus
gagaacucgcgugccuug

SEQ ID NO: 4038243 - RNA, 21 nt, Molluscum contagiosum virus
gagaagcuuuaguccaugccg

SEQ ID NO: 4038244 - RNA, 15 nt, Molluscum contagiosum virus
gagacaggggggaga

SEQ ID NO: 4038245 - RNA, 18 nt, Molluscum contagiosum virus
gagaccagccgcgagcgc

SEQ ID NO: 4038246 - RNA, 12 nt, Molluscum contagiosum virus
gagacggcagug

SEQ ID NO: 4038247 - RNA, 17 nt, Molluscum contagiosum virus
gagacuaccggcaguag

SEQ ID NO: 4038248 - RNA, 13 nt, Molluscum contagiosum virus
gagacucuggaag

SEQ ID NO: 4038249 - RNA, 18 nt, Molluscum contagiosum virus
gagacuuccuugcgcagg

SEQ ID NO: 4038250 - RNA, 14 nt, Molluscum contagiosum virus
gagacuugugccca

SEQ ID NO: 4038251 - RNA, 17 nt, Molluscum contagiosum virus
gagagacagcacggcac

SEQ ID NO: 4038252 - RNA, 20 nt, Molluscum contagiosum virus
gagagccuucgucauccucg

SEQ ID NO: 4038253 - RNA, 17 nt, Molluscum contagiosum virus
gagagcgcgcggcgccg

SEQ ID NO: 4038254 - RNA, 19 nt, Molluscum contagiosum virus
gagagcguacucgggccgc

SEQ ID NO: 4038255 - RNA, 17 nt, Molluscum contagiosum virus
gagaggaaaggcgcacc

SEQ ID NO: 4038256 - RNA, 16 nt, Molluscum contagiosum virus
gagagugacgccucga

SEQ ID NO: 4038257 - RNA, 19 nt, Molluscum contagiosum virus
gagaucaacgcgcgcgugc

SEQ ID NO: 4038258 - RNA, 19 nt, Molluscum contagiosum virus
gagaugacgggcacgcuca

SEQ ID NO: 4038259 - RNA, 19 nt, Molluscum contagiosum virus
gagaugcgguccgacucgg

SEQ ID NO: 4038260 - RNA, 20 nt, Molluscum contagiosum virus
gagaugcgguccgacucggu

SEQ ID NO: 4038261 - RNA, 23 nt, Molluscum contagiosum virus
gagauggcugcucucggcagcgu

SEQ ID NO: 4038262 - RNA, 23 nt, Molluscum contagiosum virus
gagaugggcccgcgcgcgcagcg

SEQ ID NO: 4038263 - RNA, 16 nt, Molluscum contagiosum virus
gagcaauggcggccug

SEQ ID NO: 4038264 - RNA, 23 nt, Molluscum contagiosum virus
gagcacaaagagacgcggccgcg

SEQ ID NO: 4038265 - RNA, 21 nt, Molluscum contagiosum virus
gagcaccaagaagcggcccug

SEQ ID NO: 4038266 - RNA, 20 nt, Molluscum contagiosum virus
gagcacgccugcacgcgcac

SEQ ID NO: 4038267 - RNA, 17 nt, Molluscum contagiosum virus
gagcacgcgcucgcgca

SEQ ID NO: 4038268 - RNA, 22 nt, Molluscum contagiosum virus
gagcacgcuuuccuuugcggcg

SEQ ID NO: 4038269 - RNA, 18 nt, Molluscum contagiosum virus
gagcacguggacagcauc

SEQ ID NO: 4038270 - RNA, 21 nt, Molluscum contagiosum virus
gagcacugcgcgucugugcgc

SEQ ID NO: 4038271 - RNA, 20 nt, Molluscum contagiosum virus
gagcacuggcuggcguucga

SEQ ID NO: 4038272 - RNA, 12 nt, Molluscum contagiosum virus
gagcagcugcug

SEQ ID NO: 4038273 - RNA, 22 nt, Molluscum contagiosum virus
gagcagcugcugcgcuucgccg

SEQ ID NO: 4038274 - RNA, 21 nt, Molluscum contagiosum virus
gagcaggacgacgacacagcc

SEQ ID NO: 4038275 - RNA, 18 nt, Molluscum contagiosum virus
gagcaggcgcagcgcggc

SEQ ID NO: 4038276 - RNA, 15 nt, Molluscum contagiosum virus
gagcagggcuacgag

SEQ ID NO: 4038277 - RNA, 20 nt, Molluscum contagiosum virus
gagcaggguuuucacgcagg

SEQ ID NO: 4038278 - RNA, 16 nt, Molluscum contagiosum virus
gagcaguucgcgcgcc

SEQ ID NO: 4038279 - RNA, 20 nt, Molluscum contagiosum virus
gagcauguugucgaagaaca

SEQ ID NO: 4038280 - RNA, 19 nt, Molluscum contagiosum virus
gagccauucuuaauccagu

SEQ ID NO: 4038281 - RNA, 16 nt, Molluscum contagiosum virus
gagcccgaccccaaga

SEQ ID NO: 4038282 - RNA, 22 nt, Molluscum contagiosum virus
gagcccgaucuugaaugucgcg

SEQ ID NO: 4038283 - RNA, 13 nt, Molluscum contagiosum virus
gagcccgcggcgc

SEQ ID NO: 4038284 - RNA, 18 nt, Molluscum contagiosum virus
gagcccggaucagccccg

SEQ ID NO: 4038285 - RNA, 12 nt, Molluscum contagiosum virus
gagccgcccgcg

SEQ ID NO: 4038286 - RNA, 14 nt, Molluscum contagiosum virus
gagccgcccgcgga

SEQ ID NO: 4038287 - RNA, 14 nt, Molluscum contagiosum virus
gagccugccgcgag

SEQ ID NO: 4038288 - RNA, 20 nt, Molluscum contagiosum virus
gagcgaaccgcggcagccuu

SEQ ID NO: 4038289 - RNA, 18 nt, Molluscum contagiosum virus
gagcgacauagcgcacca

SEQ ID NO: 4038290 - RNA, 14 nt, Molluscum contagiosum virus
gagcgagcacgcca

SEQ ID NO: 4038291 - RNA, 15 nt, Molluscum contagiosum virus
gagcgagugccgagc

SEQ ID NO: 4038292 - RNA, 16 nt, Molluscum contagiosum virus
gagcgcgcgcacgcga

SEQ ID NO: 4038293 - RNA, 18 nt, Molluscum contagiosum virus
gagcgcgcgccugcuggc

SEQ ID NO: 4038294 - RNA, 15 nt, Molluscum contagiosum virus
gagcgcggcaacagc

SEQ ID NO: 4038295 - RNA, 13 nt, Molluscum contagiosum virus
gagcgcugccgcu

SEQ ID NO: 4038296 - RNA, 14 nt, Molluscum contagiosum virus
gagcggagcuggcc

SEQ ID NO: 4038297 - RNA, 20 nt, Molluscum contagiosum virus
gagcggcgacuugcugcgga

SEQ ID NO: 4038298 - RNA, 14 nt, Molluscum contagiosum virus
gagcggcgcgcgcu

SEQ ID NO: 4038299 - RNA, 15 nt, Molluscum contagiosum virus
gagcgugucagcagc

SEQ ID NO: 4038300 - RNA, 18 nt, Molluscum contagiosum virus
gagcucacgccggaccag

SEQ ID NO: 4038301 - RNA, 22 nt, Molluscum contagiosum virus
gagcucacgccggaccagaucc

SEQ ID NO: 4038302 - RNA, 22 nt, Molluscum contagiosum virus
gagcucgacugcguugucuccu

SEQ ID NO: 4038303 - RNA, 15 nt, Molluscum contagiosum virus
gagcucgccuccuug

SEQ ID NO: 4038304 - RNA, 13 nt, Molluscum contagiosum virus
gagcucgcgcgca

SEQ ID NO: 4038305 - RNA, 23 nt, Molluscum contagiosum virus
gagcucgcgcgccagcacgcgcu

SEQ ID NO: 4038306 - RNA, 14 nt, Molluscum contagiosum virus
gagcugccauggca

SEQ ID NO: 4038307 - RNA, 14 nt, Molluscum contagiosum virus
gagcugcgugugcc

SEQ ID NO: 4038308 - RNA, 17 nt, Molluscum contagiosum virus
gagcugcugcccgccuu

SEQ ID NO: 4038309 - RNA, 20 nt, Molluscum contagiosum virus
gagcugcugcccgccuucga

SEQ ID NO: 4038310 - RNA, 23 nt, Molluscum contagiosum virus
gagcugcugcgcgaguaccuggg

SEQ ID NO: 4038311 - RNA, 23 nt, Molluscum contagiosum virus
gagcugggauaacaggcgugcgc

SEQ ID NO: 4038312 - RNA, 16 nt, Molluscum contagiosum virus
gagcugugcgagccag

SEQ ID NO: 4038313 - RNA, 16 nt, Molluscum contagiosum virus
gagcuucgucuucacc

SEQ ID NO: 4038314 - RNA, 20 nt, Molluscum contagiosum virus
gagcuucgucuucaccugca

SEQ ID NO: 4038315 - RNA, 15 nt, Molluscum contagiosum virus
gagcuugcgcacgcc

SEQ ID NO: 4038316 - RNA, 16 nt, Molluscum contagiosum virus
gaggaaaggcacaccc

SEQ ID NO: 4038317 - RNA, 14 nt, Molluscum contagiosum virus
gaggaaaggcgcac

SEQ ID NO: 4038318 - RNA, 13 nt, Molluscum contagiosum virus
gaggacacgcgca

SEQ ID NO: 4038319 - RNA, 17 nt, Molluscum contagiosum virus
gaggaccacgccgacca

SEQ ID NO: 4038320 - RNA, 12 nt, Molluscum contagiosum virus
gaggacgcgggc

SEQ ID NO: 4038321 - RNA, 17 nt, Molluscum contagiosum virus
gaggacggcgcgggcgc

SEQ ID NO: 4038322 - RNA, 14 nt, Molluscum contagiosum virus
gaggacuaccuggc

SEQ ID NO: 4038323 - RNA, 14 nt, Molluscum contagiosum virus
gaggagagcggcgc

SEQ ID NO: 4038324 - RNA, 16 nt, Molluscum contagiosum virus
gaggaggcaagcgggc

SEQ ID NO: 4038325 - RNA, 16 nt, Molluscum contagiosum virus
gaggaggcgcccucgc

SEQ ID NO: 4038326 - RNA, 16 nt, Molluscum contagiosum virus
gaggcccugcuugccc

SEQ ID NO: 4038327 - RNA, 18 nt, Molluscum contagiosum virus
gaggcgcgcacgcugcgc

SEQ ID NO: 4038328 - RNA, 21 nt, Molluscum contagiosum virus
gaggcgcguccgcggccggga

SEQ ID NO: 4038329 - RNA, 17 nt, Molluscum contagiosum virus
gagggccuuggcggcgc

SEQ ID NO: 4038330 - RNA, 21 nt, Molluscum contagiosum virus
gagggcgaguccccgagcagc

SEQ ID NO: 4038331 - RNA, 22 nt, Molluscum contagiosum virus
gagggcgagucucccguggcgc

SEQ ID NO: 4038332 - RNA, 15 nt, Molluscum contagiosum virus
gagggcgccgggcgc

SEQ ID NO: 4038333 - RNA, 23 nt, Molluscum contagiosum virus
gagggcgggcacgugcugcugcg

SEQ ID NO: 4038334 - RNA, 20 nt, Molluscum contagiosum virus
gaggggaaagaugaagcucu

SEQ ID NO: 4038335 - RNA, 20 nt, Molluscum contagiosum virus
gaggguggcuugcugcagua

SEQ ID NO: 4038336 - RNA, 15 nt, Molluscum contagiosum virus
gagguggcacccugg

SEQ ID NO: 4038337 - RNA, 11 nt, Molluscum contagiosum virus
gagguggccaa

SEQ ID NO: 4038338 - RNA, 12 nt, Molluscum contagiosum virus
gaggugugccug

SEQ ID NO: 4038339 - RNA, 15 nt, Molluscum contagiosum virus
gagguucuccagaau

SEQ ID NO: 4038340 - RNA, 18 nt, Molluscum contagiosum virus
gaguacgacgcggagguc

SEQ ID NO: 4038341 - RNA, 19 nt, Molluscum contagiosum virus
gaguauacucgacgcgcgc

SEQ ID NO: 4038342 - RNA, 12 nt, Molluscum contagiosum virus
gagucacgaccg

SEQ ID NO: 4038343 - RNA, 17 nt, Molluscum contagiosum virus
gaguccacugccaaagc

SEQ ID NO: 4038344 - RNA, 10 nt, Molluscum contagiosum virus
gaguccgcgc

SEQ ID NO: 4038345 - RNA, 13 nt, Molluscum contagiosum virus
gaguccgcggcga

SEQ ID NO: 4038346 - RNA, 19 nt, Molluscum contagiosum virus
gagucgccgcugcgcaucu

SEQ ID NO: 4038347 - RNA, 11 nt, Molluscum contagiosum virus
gagucgcgccu

SEQ ID NO: 4038348 - RNA, 13 nt, Molluscum contagiosum virus
gaguggcucacag

SEQ ID NO: 4038349 - RNA, 21 nt, Molluscum contagiosum virus
gagugucucgaaccgaggccg

SEQ ID NO: 4038350 - RNA, 17 nt, Molluscum contagiosum virus
gauaaaguccucugaag

SEQ ID NO: 4038351 - RNA, 20 nt, Molluscum contagiosum virus
gauacacauugcgugugggg

SEQ ID NO: 4038352 - RNA, 22 nt, Molluscum contagiosum virus
gauagcgauggcuguuccggcg

SEQ ID NO: 4038353 - RNA, 22 nt, Molluscum contagiosum virus
gaucccuucgcguccacgggua

SEQ ID NO: 4038354 - RNA, 21 nt, Molluscum contagiosum virus
gaucugcucgcagucgucgcc

SEQ ID NO: 4038355 - RNA, 20 nt, Molluscum contagiosum virus
gaugaguaccgcgggcgcag

SEQ ID NO: 4038356 - RNA, 22 nt, Molluscum contagiosum virus
gaugcagugcggaugugcuagc

SEQ ID NO: 4038357 - RNA, 20 nt, Molluscum contagiosum virus
gaugccgugguacacguaga

SEQ ID NO: 4038358 - RNA, 14 nt, Molluscum contagiosum virus
gaugcgcagcgucc

SEQ ID NO: 4038359 - RNA, 13 nt, Molluscum contagiosum virus
gaugcgcaugcgg

SEQ ID NO: 4038360 - RNA, 23 nt, Molluscum contagiosum virus
gaugcgguccgacucggugcuca

SEQ ID NO: 4038361 - RNA, 16 nt, Molluscum contagiosum virus
gaugcuagcgugugcc

SEQ ID NO: 4038362 - RNA, 18 nt, Molluscum contagiosum virus
gccugcacuacugcucca

SEQ ID NO: 4038363 - RNA, 15 nt, Molluscum contagiosum virus
gccugccagcagagc

SEQ ID NO: 4038364 - RNA, 23 nt, Molluscum contagiosum virus
gccugccagcgccagccugcugg

SEQ ID NO: 4038365 - RNA, 14 nt, Molluscum contagiosum virus
gccugcccgugugc

SEQ ID NO: 4038366 - RNA, 15 nt, Molluscum contagiosum virus
gccugccgcgagcac

SEQ ID NO: 4038367 - RNA, 18 nt, Molluscum contagiosum virus
gccugccgcgcaugcugg

SEQ ID NO: 4038368 - RNA, 20 nt, Molluscum contagiosum virus
gccugccgcgcaugcuggag

SEQ ID NO: 4038369 - RNA, 22 nt, Molluscum contagiosum virus
gccugccgcgcaugcuggagac

SEQ ID NO: 4038370 - RNA, 16 nt, Molluscum contagiosum virus
gccugcgcgagcaagc

SEQ ID NO: 4038371 - RNA, 16 nt, Molluscum contagiosum virus
gccugcucucgaagca

SEQ ID NO: 4038372 - RNA, 20 nt, Molluscum contagiosum virus
gccugcugggagcuugcacg

SEQ ID NO: 4038373 - RNA, 20 nt, Molluscum contagiosum virus
gccuggagggcagugccaag

SEQ ID NO: 4038374 - RNA, 16 nt, Molluscum contagiosum virus
gccuggcaugcuugag

SEQ ID NO: 4038375 - RNA, 19 nt, Molluscum contagiosum virus
gccuggccgaacugcucug

SEQ ID NO: 4038376 - RNA, 12 nt, Molluscum contagiosum virus
gccuggcuugcg

SEQ ID NO: 4038377 - RNA, 19 nt, Molluscum contagiosum virus
gccuggucacagacacgcu

SEQ ID NO: 4038378 - RNA, 16 nt, Molluscum contagiosum virus
gccugugccugcaaga

SEQ ID NO: 4038379 - RNA, 13 nt, Molluscum contagiosum virus
gccugugcuggcg

SEQ ID NO: 4038380 - RNA, 13 nt, Molluscum contagiosum virus
gccuuccugcgcc

SEQ ID NO: 4038381 - RNA, 13 nt, Molluscum contagiosum virus
gccuucucggugu

SEQ ID NO: 4038382 - RNA, 17 nt, Molluscum contagiosum virus
gccuugagcgcgccgcg

SEQ ID NO: 4038383 - RNA, 22 nt, Molluscum contagiosum virus
gccuuuguucuuagcagcgccg

SEQ ID NO: 4038384 - RNA, 13 nt, Molluscum contagiosum virus
gcgaaagaacacg

SEQ ID NO: 4038385 - RNA, 15 nt, Molluscum contagiosum virus
gcgaacgagggacac

SEQ ID NO: 4038386 - RNA, 17 nt, Molluscum contagiosum virus
gcgaacgccagaaaaca

SEQ ID NO: 4038387 - RNA, 16 nt, Molluscum contagiosum virus
gcgaacgugcgaacac

SEQ ID NO: 4038388 - RNA, 16 nt, Molluscum contagiosum virus
gcgaagagccccacca

SEQ ID NO: 4038389 - RNA, 16 nt, Molluscum contagiosum virus
gcgaaguccugggcga

SEQ ID NO: 4038390 - RNA, 16 nt, Molluscum contagiosum virus
gcgaccagcucuuggc

SEQ ID NO: 4038391 - RNA, 23 nt, Molluscum contagiosum virus
gcgaccagcucuuggcgggcacc

SEQ ID NO: 4038392 - RNA, 21 nt, Molluscum contagiosum virus
gcgaccaguacaucaccgcca

SEQ ID NO: 4038393 - RNA, 13 nt, Molluscum contagiosum virus
gcgacccagaagc

SEQ ID NO: 4038394 - RNA, 15 nt, Molluscum contagiosum virus
gcgaccgcgaacugc

SEQ ID NO: 4038395 - RNA, 16 nt, Molluscum contagiosum virus
gcgaccuacuccuggc

SEQ ID NO: 4038396 - RNA, 19 nt, Molluscum contagiosum virus
gcgaccuacuccuggccaa

SEQ ID NO: 4038397 - RNA, 15 nt, Molluscum contagiosum virus
gcgacgacgagcacu

SEQ ID NO: 4038398 - RNA, 16 nt, Molluscum contagiosum virus
gcgacgacgagcacua

SEQ ID NO: 4038399 - RNA, 20 nt, Molluscum contagiosum virus
gcgacgccauuuucgugcgc

SEQ ID NO: 4038400 - RNA, 15 nt, Molluscum contagiosum virus
gcgacgccccggcgc

SEQ ID NO: 4038401 - RNA, 16 nt, Molluscum contagiosum virus
gcgacggugugccgcu

SEQ ID NO: 4038402 - RNA, 19 nt, Molluscum contagiosum virus
gcgacgugaagacgcuggc

SEQ ID NO: 4038403 - RNA, 14 nt, Molluscum contagiosum virus
gcgacuacaccugg

SEQ ID NO: 4038404 - RNA, 16 nt, Molluscum contagiosum virus
gcgacuccaucugcgc

SEQ ID NO: 4038405 - RNA, 21 nt, Molluscum contagiosum virus
gcgacuccaucugcgcgacgc

SEQ ID NO: 4038406 - RNA, 19 nt, Molluscum contagiosum virus
gcgacuggcacgcgccgcg

SEQ ID NO: 4038407 - RNA, 14 nt, Molluscum contagiosum virus
gcgacuuggggcuc

SEQ ID NO: 4038408 - RNA, 20 nt, Molluscum contagiosum virus
gcgacuuuguccugagccuu

SEQ ID NO: 4038409 - RNA, 21 nt, Molluscum contagiosum virus
gcgagaccaucccggugauga

SEQ ID NO: 4038410 - RNA, 17 nt, Molluscum contagiosum virus
gcgagaccgcuagagug

SEQ ID NO: 4038411 - RNA, 14 nt, Molluscum contagiosum virus
gcgagagcgcgcgc

SEQ ID NO: 4038412 - RNA, 20 nt, Molluscum contagiosum virus
gcgagcaagcgcccgcgagc

SEQ ID NO: 4038413 - RNA, 14 nt, Molluscum contagiosum virus
gcgagcacgggcgc

SEQ ID NO: 4038414 - RNA, 22 nt, Molluscum contagiosum virus
gcgagcacugcgcgcgcggcgc

SEQ ID NO: 4038415 - RNA, 16 nt, Molluscum contagiosum virus
gcgagccagccaggcg

SEQ ID NO: 4038416 - RNA, 16 nt, Molluscum contagiosum virus
gcgagcgacggcaggc

SEQ ID NO: 4038417 - RNA, 15 nt, Molluscum contagiosum virus
gcgagcgcgcgcugc

SEQ ID NO: 4038418 - RNA, 15 nt, Molluscum contagiosum virus
gcgagcgcgucugcu

SEQ ID NO: 4038419 - RNA, 20 nt, Molluscum contagiosum virus
gcgagcggcuuuucgccgga

SEQ ID NO: 4038420 - RNA, 17 nt, Molluscum contagiosum virus
gcgagcguuucugccgg

SEQ ID NO: 4038421 - RNA, 17 nt, Molluscum contagiosum virus
gcgaggacaacucgcgg

SEQ ID NO: 4038422 - RNA, 13 nt, Molluscum contagiosum virus
gcgaggcgcgcac

SEQ ID NO: 4038423 - RNA, 23 nt, Molluscum contagiosum virus
gcgagggcgaguccccgagcagc

SEQ ID NO: 4038424 - RNA, 18 nt, Molluscum contagiosum virus
gcgaguccccgagcagcg

SEQ ID NO: 4038425 - RNA, 18 nt, Molluscum contagiosum virus
gcgagucucccguggcgc

SEQ ID NO: 4038426 - RNA, 19 nt, Molluscum contagiosum virus
gcgagucucccguggcgcg

SEQ ID NO: 4038427 - RNA, 19 nt, Molluscum contagiosum virus
gcgaucacaaguccgcggc

SEQ ID NO: 4038428 - RNA, 21 nt, Molluscum contagiosum virus
gcgauccuugcguacuuggaa

SEQ ID NO: 4038429 - RNA, 19 nt, Molluscum contagiosum virus
gcgaucgcggccaugcgcu

SEQ ID NO: 4038430 - RNA, 17 nt, Molluscum contagiosum virus
gcgauugccccugggcu

SEQ ID NO: 4038431 - RNA, 13 nt, Molluscum contagiosum virus
gcgcaaaagcaca

SEQ ID NO: 4038432 - RNA, 14 nt, Molluscum contagiosum virus
gcgcaacacggccu

SEQ ID NO: 4038433 - RNA, 15 nt, Molluscum contagiosum virus
gcgcaaccagcuggc

SEQ ID NO: 4038434 - RNA, 17 nt, Molluscum contagiosum virus
gcgcaacgagcagcccg

SEQ ID NO: 4038435 - RNA, 18 nt, Molluscum contagiosum virus
gcgcaacgagcagcccgu

SEQ ID NO: 4038436 - RNA, 16 nt, Molluscum contagiosum virus
gcgcaacgcgggccag

SEQ ID NO: 4038437 - RNA, 17 nt, Molluscum contagiosum virus
gcgcaacgcgggccagg

SEQ ID NO: 4038438 - RNA, 12 nt, Molluscum contagiosum virus
gcgcaacgugcu

SEQ ID NO: 4038439 - RNA, 15 nt, Molluscum contagiosum virus
gcgcaagagccgccg

SEQ ID NO: 4038440 - RNA, 21 nt, Molluscum contagiosum virus
gcgcaagcagcucggcgagag

SEQ ID NO: 4038441 - RNA, 19 nt, Molluscum contagiosum virus
gcgcaagcauggucuucgc

SEQ ID NO: 4038442 - RNA, 19 nt, Molluscum contagiosum virus
gcgcaaggacaccgcgggc

SEQ ID NO: 4038443 - RNA, 15 nt, Molluscum contagiosum virus
gcgcaaggccgcgcc

SEQ ID NO: 4038444 - RNA, 17 nt, Molluscum contagiosum virus
gcgcaagucaccgcucc

SEQ ID NO: 4038445 - RNA, 18 nt, Molluscum contagiosum virus
gcgcaagucaccgcuccg

SEQ ID NO: 4038446 - RNA, 13 nt, Molluscum contagiosum virus
gcgcaagugcgug

SEQ ID NO: 4038447 - RNA, 23 nt, Molluscum contagiosum virus
gcgcaagugggcgucgaccugga

SEQ ID NO: 4038448 - RNA, 12 nt, Molluscum contagiosum virus
gcgcaagugugc

SEQ ID NO: 4038449 - RNA, 17 nt, Molluscum contagiosum virus
gcgcaauacugcgggcu

SEQ ID NO: 4038450 - RNA, 14 nt, Molluscum contagiosum virus
gcgcacaacuuggg

SEQ ID NO: 4038451 - RNA, 21 nt, Molluscum contagiosum virus
gcgcacacgcgucgggaagug

SEQ ID NO: 4038452 - RNA, 13 nt, Molluscum contagiosum virus
gcgcaccgcgggc

SEQ ID NO: 4038453 - RNA, 17 nt, Molluscum contagiosum virus
gcgcaccgcgggcugga

SEQ ID NO: 4038454 - RNA, 21 nt, Molluscum contagiosum virus
gcgcaccgcguugccgcccgc

SEQ ID NO: 4038455 - RNA, 22 nt, Molluscum contagiosum virus
gcgcaccugcacgagccggcgc

SEQ ID NO: 4038456 - RNA, 22 nt, Molluscum contagiosum virus
gcgcacgaagcggcggacagca

SEQ ID NO: 4038457 - RNA, 17 nt, Molluscum contagiosum virus
gcgcacgaccacgugca

SEQ ID NO: 4038458 - RNA, 17 nt, Molluscum contagiosum virus
gcgcacgagcugcugcc

SEQ ID NO: 4038459 - RNA, 24 nt, Molluscum contagiosum virus
gcgcacgcaagcccgcgcgcgagc

SEQ ID NO: 4038460 - RNA, 18 nt, Molluscum contagiosum virus
gcgcacgccgcucucgug

SEQ ID NO: 4038461 - RNA, 15 nt, Molluscum contagiosum virus
gcgcacgcgagcacg

SEQ ID NO: 4038462 - RNA, 20 nt, Molluscum contagiosum virus
gcgcacgcgcgagcaugccg

SEQ ID NO: 4038463 - RNA, 22 nt, Molluscum contagiosum virus
gcgcacgcgggacgcgugccug

SEQ ID NO: 4038464 - RNA, 21 nt, Molluscum contagiosum virus
gcgcacgcuagucguuggcgc

SEQ ID NO: 4038465 - RNA, 17 nt, Molluscum contagiosum virus
gcgcacgcugcgcacgg

SEQ ID NO: 4038466 - RNA, 16 nt, Molluscum contagiosum virus
gccgaugccuaugccg

SEQ ID NO: 4038467 - RNA, 16 nt, Molluscum contagiosum virus
gccgcaaacacugucu

SEQ ID NO: 4038468 - RNA, 22 nt, Molluscum contagiosum virus
gccgccagcuccgcgcggcgcu

SEQ ID NO: 4038469 - RNA, 14 nt, Molluscum contagiosum virus
gccgccaugcugcg

SEQ ID NO: 4038470 - RNA, 14 nt, Molluscum contagiosum virus
gccgcccacgcuca

SEQ ID NO: 4038471 - RNA, 15 nt, Molluscum contagiosum virus
gccgcccguguacaa

SEQ ID NO: 4038472 - RNA, 14 nt, Molluscum contagiosum virus
gccgccgggccugc

SEQ ID NO: 4038473 - RNA, 14 nt, Molluscum contagiosum virus
gccgccggugcgug

SEQ ID NO: 4038474 - RNA, 21 nt, Molluscum contagiosum virus
gccgccggugcgugcccagca

SEQ ID NO: 4038475 - RNA, 14 nt, Molluscum contagiosum virus
gccgccgugggcgc

SEQ ID NO: 4038476 - RNA, 15 nt, Molluscum contagiosum virus
gccgccucgcgcgca

SEQ ID NO: 4038477 - RNA, 19 nt, Molluscum contagiosum virus
gccgcgagacgcagacgac

SEQ ID NO: 4038478 - RNA, 15 nt, Molluscum contagiosum virus
gccgcgcaccuggag

SEQ ID NO: 4038479 - RNA, 12 nt, Molluscum contagiosum virus
gccgcgcccgcg

SEQ ID NO: 4038480 - RNA, 18 nt, Molluscum contagiosum virus
gccgcgcccgcggcgcac

SEQ ID NO: 4038481 - RNA, 18 nt, Molluscum contagiosum virus
gccgcgccuagccgugcg

SEQ ID NO: 4038482 - RNA, 20 nt, Molluscum contagiosum virus
gccgcgccuagccgugcgcg

SEQ ID NO: 4038483 - RNA, 17 nt, Molluscum contagiosum virus
gccgcgcgagugccagc

SEQ ID NO: 4038484 - RNA, 18 nt, Molluscum contagiosum virus
gccgcgcgccgcugcucg

SEQ ID NO: 4038485 - RNA, 18 nt, Molluscum contagiosum virus
gccgcgcgcggugcugcg

SEQ ID NO: 4038486 - RNA, 19 nt, Molluscum contagiosum virus
gccgcgcgcuacgcgccga

SEQ ID NO: 4038487 - RNA, 13 nt, Molluscum contagiosum virus
gccgcgcgcucgc

SEQ ID NO: 4038488 - RNA, 16 nt, Molluscum contagiosum virus
gccgcgcggcacgccc

SEQ ID NO: 4038489 - RNA, 15 nt, Molluscum contagiosum virus
gccgcgcggcagaca

SEQ ID NO: 4038490 - RNA, 17 nt, Molluscum contagiosum virus
gccgcgcucgugccgcc

SEQ ID NO: 4038491 - RNA, 13 nt, Molluscum contagiosum virus
gccgcgcucgugu

SEQ ID NO: 4038492 - RNA, 15 nt, Molluscum contagiosum virus
gccgcgcugcuggcc

SEQ ID NO: 4038493 - RNA, 19 nt, Molluscum contagiosum virus
gccgcgcugguggccgcac

SEQ ID NO: 4038494 - RNA, 19 nt, Molluscum contagiosum virus
gccgcggacgccggcgccc

SEQ ID NO: 4038495 - RNA, 21 nt, Molluscum contagiosum virus
gccgcggacgccggcgcccgc

SEQ ID NO: 4038496 - RNA, 19 nt, Molluscum contagiosum virus
gccgcggagaagugcgcag

SEQ ID NO: 4038497 - RNA, 14 nt, Molluscum contagiosum virus
gccgcggaggacuc

SEQ ID NO: 4038498 - RNA, 23 nt, Molluscum contagiosum virus
gccgcggaggacucggaggccgu

SEQ ID NO: 4038499 - RNA, 12 nt, Molluscum contagiosum virus
gccgcggaggga

SEQ ID NO: 4038500 - RNA, 13 nt, Molluscum contagiosum virus
gccgcggccgccg

SEQ ID NO: 4038501 - RNA, 15 nt, Molluscum contagiosum virus
gccgcggccgcgaga

SEQ ID NO: 4038502 - RNA, 21 nt, Molluscum contagiosum virus
gccgcguacgcacgugccgug

SEQ ID NO: 4038503 - RNA, 12 nt, Molluscum contagiosum virus
gccgcgugcccg

SEQ ID NO: 4038504 - RNA, 13 nt, Molluscum contagiosum virus
gccgcgugcgccg

SEQ ID NO: 4038505 - RNA, 14 nt, Molluscum contagiosum virus
gccgcgugcgcgcg

SEQ ID NO: 4038506 - RNA, 20 nt, Molluscum contagiosum virus
gccgcgugcgcgcgguacuc

SEQ ID NO: 4038507 - RNA, 15 nt, Molluscum contagiosum virus
gccgcgugcucugcu

SEQ ID NO: 4038508 - RNA, 13 nt, Molluscum contagiosum virus
gccgcgugcuggc

SEQ ID NO: 4038509 - RNA, 20 nt, Molluscum contagiosum virus
gccgcuccuucgaagagguc

SEQ ID NO: 4038510 - RNA, 19 nt, Molluscum contagiosum virus
gccgcucgcaagaguucaa

SEQ ID NO: 4038511 - RNA, 19 nt, Molluscum contagiosum virus
gccgcucguccagcugcgc

SEQ ID NO: 4038512 - RNA, 16 nt, Molluscum contagiosum virus
gccgcugcccgcgcac

SEQ ID NO: 4038513 - RNA, 13 nt, Molluscum contagiosum virus
gccgcugcgccgc

SEQ ID NO: 4038514 - RNA, 14 nt, Molluscum contagiosum virus
gccgcugcgccgcc

SEQ ID NO: 4038515 - RNA, 14 nt, Molluscum contagiosum virus
gccgcuggacgccu

SEQ ID NO: 4038516 - RNA, 21 nt, Molluscum contagiosum virus
gccgcuggugggcgugcggcg

SEQ ID NO: 4038517 - RNA, 14 nt, Molluscum contagiosum virus
gccgcuuccuggca

SEQ ID NO: 4038518 - RNA, 19 nt, Molluscum contagiosum virus
gccgcuucgugcgcggaga

SEQ ID NO: 4038519 - RNA, 23 nt, Molluscum contagiosum virus
gccggaaauagcgcgcuagcucc

SEQ ID NO: 4038520 - RNA, 23 nt, Molluscum contagiosum virus
gccggcaacgcugccgcuggcgc

SEQ ID NO: 4038521 - RNA, 17 nt, Molluscum contagiosum virus
gccggcaaggggccagc

SEQ ID NO: 4038522 - RNA, 17 nt, Molluscum contagiosum virus
gccggcacccgugcgcg

SEQ ID NO: 4038523 - RNA, 19 nt, Molluscum contagiosum virus
gccggcgcccgcgugcacc

SEQ ID NO: 4038524 - RNA, 13 nt, Molluscum contagiosum virus
gccggcgcggcga

SEQ ID NO: 4038525 - RNA, 14 nt, Molluscum contagiosum virus
gccggcgcggcgag

SEQ ID NO: 4038526 - RNA, 20 nt, Molluscum contagiosum virus
gccggcgcuucuacugcgca

SEQ ID NO: 4038527 - RNA, 14 nt, Molluscum contagiosum virus
gccggcggcgcaag

SEQ ID NO: 4038528 - RNA, 17 nt, Molluscum contagiosum virus
gccggcguucgcggagc

SEQ ID NO: 4038529 - RNA, 17 nt, Molluscum contagiosum virus
gccggcucaagcuggca

SEQ ID NO: 4038530 - RNA, 16 nt, Molluscum contagiosum virus
gccggcucugccuccg

SEQ ID NO: 4038531 - RNA, 13 nt, Molluscum contagiosum virus
gccggcugcccug

SEQ ID NO: 4038532 - RNA, 18 nt, Molluscum contagiosum virus
gccgggcacgcccgcggu

SEQ ID NO: 4038533 - RNA, 19 nt, Molluscum contagiosum virus
gccgggcgccggcucugcc

SEQ ID NO: 4038534 - RNA, 15 nt, Molluscum contagiosum virus
gccgggggaacacgc

SEQ ID NO: 4038535 - RNA, 17 nt, Molluscum contagiosum virus
gccgguacucgugcguc

SEQ ID NO: 4038536 - RNA, 14 nt, Molluscum contagiosum virus
gccgguacugcgga

SEQ ID NO: 4038537 - RNA, 14 nt, Molluscum contagiosum virus
gccgguggaagagc

SEQ ID NO: 4038538 - RNA, 16 nt, Molluscum contagiosum virus
gccguacccggggaga

SEQ ID NO: 4038539 - RNA, 13 nt, Molluscum contagiosum virus
gccguaguccggc

SEQ ID NO: 4038540 - RNA, 19 nt, Molluscum contagiosum virus
gccguagucuucgugcgug

SEQ ID NO: 4038541 - RNA, 14 nt, Molluscum contagiosum virus
gccguagugcucau

SEQ ID NO: 4038542 - RNA, 22 nt, Molluscum contagiosum virus
gccguagugcucaucgugcccg

SEQ ID NO: 4038543 - RNA, 13 nt, Molluscum contagiosum virus
gccgucacggccg

SEQ ID NO: 4038544 - RNA, 17 nt, Molluscum contagiosum virus
gccgucgccgcgcccgc

SEQ ID NO: 4038545 - RNA, 18 nt, Molluscum contagiosum virus
gccgucgcgagcuuggcc

SEQ ID NO: 4038546 - RNA, 15 nt, Molluscum contagiosum virus
gccgucgggcgccaa

SEQ ID NO: 4038547 - RNA, 22 nt, Molluscum contagiosum virus
gccgucuccucucgcgaucugc

SEQ ID NO: 4038548 - RNA, 16 nt, Molluscum contagiosum virus
gccgucucgcgcucgc

SEQ ID NO: 4038549 - RNA, 19 nt, Molluscum contagiosum virus
gccgugaacgaggcugcug

SEQ ID NO: 4038550 - RNA, 15 nt, Molluscum contagiosum virus
gccgugacgcugcgg

SEQ ID NO: 4038551 - RNA, 20 nt, Molluscum contagiosum virus
gccguguacaugcucaagca

SEQ ID NO: 4038552 - RNA, 22 nt, Molluscum contagiosum virus
gccguguccuacacgccgcugg

SEQ ID NO: 4038553 - RNA, 15 nt, Molluscum contagiosum virus
gccgugucggcaccg

SEQ ID NO: 4038554 - RNA, 22 nt, Molluscum contagiosum virus
gccuagagcuggcaccgggcgc

SEQ ID NO: 4038555 - RNA, 14 nt, Molluscum contagiosum virus
gccuagccugcagu

SEQ ID NO: 4038556 - RNA, 13 nt, Molluscum contagiosum virus
gccucccccgcgc

SEQ ID NO: 4038557 - RNA, 22 nt, Molluscum contagiosum virus
gccuccgaggacgacgccgagc

SEQ ID NO: 4038558 - RNA, 15 nt, Molluscum contagiosum virus
gccucgagcacgccu

SEQ ID NO: 4038559 - RNA, 16 nt, Molluscum contagiosum virus
gccucgaugccaacag

SEQ ID NO: 4038560 - RNA, 20 nt, Molluscum contagiosum virus
gccucgcaggcgaggucaca

SEQ ID NO: 4038561 - RNA, 20 nt, Molluscum contagiosum virus
gccucgccuccgggcgcaca

SEQ ID NO: 4038562 - RNA, 23 nt, Molluscum contagiosum virus
gccucggacggaggucugcuuug

SEQ ID NO: 4038563 - RNA, 16 nt, Molluscum contagiosum virus
gccucucucggagaag

SEQ ID NO: 4038564 - RNA, 18 nt, Molluscum contagiosum virus
gccucucucggagaagug

SEQ ID NO: 4038565 - RNA, 23 nt, Molluscum contagiosum virus
gccucugccagccgcucguccag

SEQ ID NO: 4038566 - RNA, 15 nt, Molluscum contagiosum virus
gccucugccucgugc

SEQ ID NO: 4038567 - RNA, 21 nt, Molluscum contagiosum virus
gccucugccugcaaggagguc

SEQ ID NO: 4038568 - RNA, 16 nt, Molluscum contagiosum virus
gccugagaagcuguac

SEQ ID NO: 4038569 - RNA, 12 nt, Molluscum contagiosum virus
gccugcacggcu

SEQ ID NO: 4038570 - RNA, 16 nt, Molluscum contagiosum virus
ugggaaaccucaccuc

SEQ ID NO: 4038571 - RNA, 16 nt, Molluscum contagiosum virus
ugggagcuuuccuugc

SEQ ID NO: 4038572 - RNA, 17 nt, Molluscum contagiosum virus
ugggauaacaggcgugc

SEQ ID NO: 4038573 - RNA, 21 nt, Molluscum contagiosum virus
ugggcaccugcaucgcgccgc

SEQ ID NO: 4038574 - RNA, 17 nt, Molluscum contagiosum virus
ugggcacgcucuacggc

SEQ ID NO: 4038575 - RNA, 23 nt, Molluscum contagiosum virus
ugggcacgcucuacggcgugcug

SEQ ID NO: 4038576 - RNA, 18 nt, Molluscum contagiosum virus
ugggcaggccgcccacgc

SEQ ID NO: 4038577 - RNA, 16 nt, Molluscum contagiosum virus
ugggcgagagcuuuuc

SEQ ID NO: 4038578 - RNA, 17 nt, Molluscum contagiosum virus
ugggcggcauccugaug

SEQ ID NO: 4038579 - RNA, 18 nt, Molluscum contagiosum virus
uggggagacuugagccca

SEQ ID NO: 4038580 - RNA, 14 nt, Molluscum contagiosum virus
ugguacagaugagu

SEQ ID NO: 4038581 - RNA, 13 nt, Molluscum contagiosum virus
uggucacgcgcac

SEQ ID NO: 4038582 - RNA, 13 nt, Molluscum contagiosum virus
ugguccaccagcu

SEQ ID NO: 4038583 - RNA, 16 nt, Molluscum contagiosum virus
ugguccggcgugagcu

SEQ ID NO: 4038584 - RNA, 13 nt, Molluscum contagiosum virus
uggucgcgcgcgc

SEQ ID NO: 4038585 - RNA, 14 nt, Molluscum contagiosum virus
uggucgcgcgcgcu

SEQ ID NO: 4038586 - RNA, 20 nt, Molluscum contagiosum virus
uggucgcgcgcgcucugccg

SEQ ID NO: 4038587 - RNA, 13 nt, Molluscum contagiosum virus
uggugcacacaca

SEQ ID NO: 4038588 - RNA, 16 nt, Molluscum contagiosum virus
ugguggacagccuuug

SEQ ID NO: 4038589 - RNA, 22 nt, Molluscum contagiosum virus
ugguguacgaaaguacuuuugc

SEQ ID NO: 4038590 - RNA, 20 nt, Molluscum contagiosum virus
uggugugccagcggcgccgc

SEQ ID NO: 4038591 - RNA, 15 nt, Molluscum contagiosum virus
ugguguucugcgcgc

SEQ ID NO: 4038592 - RNA, 13 nt, Molluscum contagiosum virus
ugguucaugcugg

SEQ ID NO: 4038593 - RNA, 18 nt, Molluscum contagiosum virus
ugguugccaggcacacgc

SEQ ID NO: 4038594 - RNA, 15 nt, Molluscum contagiosum virus
ugguugccgcucgca

SEQ ID NO: 4038595 - RNA, 11 nt, Molluscum contagiosum virus
uguaacaagga

SEQ ID NO: 4038596 - RNA, 18 nt, Molluscum contagiosum virus
uguaauaguacacuuuga

SEQ ID NO: 4038597 - RNA, 19 nt, Molluscum contagiosum virus
uguagcaucugcgacacgc

SEQ ID NO: 4038598 - RNA, 16 nt, Molluscum contagiosum virus
uguagucgcccccgug

SEQ ID NO: 4038599 - RNA, 15 nt, Molluscum contagiosum virus
uguaguuaaaugacg

SEQ ID NO: 4038600 - RNA, 20 nt, Molluscum contagiosum virus
uguauaguccccggcgccgg

SEQ ID NO: 4038601 - RNA, 11 nt, Molluscum contagiosum virus
ugucaagcacu

SEQ ID NO: 4038602 - RNA, 20 nt, Molluscum contagiosum virus
ugucacgcgucgcgcgccgc

SEQ ID NO: 4038603 - RNA, 15 nt, Molluscum contagiosum virus
uguccacgacacugg

SEQ ID NO: 4038604 - RNA, 13 nt, Molluscum contagiosum virus
ugucccgcaagcc

SEQ ID NO: 4038605 - RNA, 13 nt, Molluscum contagiosum virus
uguccucuucaca

SEQ ID NO: 4038606 - RNA, 12 nt, Molluscum contagiosum virus
uguccugagccu

SEQ ID NO: 4038607 - RNA, 16 nt, Molluscum contagiosum virus
ugucgccgcgggcugg

SEQ ID NO: 4038608 - RNA, 20 nt, Molluscum contagiosum virus
ugucgucaaaggcaaagccu

SEQ ID NO: 4038609 - RNA, 13 nt, Molluscum contagiosum virus
ugucguggaggaa

SEQ ID NO: 4038610 - RNA, 22 nt, Molluscum contagiosum virus
ugucucugcgcgagcagcugcu

SEQ ID NO: 4038611 - RNA, 12 nt, Molluscum contagiosum virus
ugucuuccgcuc

SEQ ID NO: 4038612 - RNA, 12 nt, Molluscum contagiosum virus
ugugagcaagcu

SEQ ID NO: 4038613 - RNA, 14 nt, Molluscum contagiosum virus
ugugagcgcgccgc

SEQ ID NO: 4038614 - RNA, 22 nt, Molluscum contagiosum virus
ugugcacaugcccgugcaccuc

SEQ ID NO: 4038615 - RNA, 16 nt, Molluscum contagiosum virus
ugugcccaguuauucu

SEQ ID NO: 4038616 - RNA, 16 nt, Molluscum contagiosum virus
ugugccugcgcaacgc

SEQ ID NO: 4038617 - RNA, 19 nt, Molluscum contagiosum virus
ugugcgacucgucgagcac

SEQ ID NO: 4038618 - RNA, 18 nt, Molluscum contagiosum virus
ugugcggagggugcacgc

SEQ ID NO: 4038619 - RNA, 20 nt, Molluscum contagiosum virus
ugugcggcucgagacccaca

SEQ ID NO: 4038620 - RNA, 13 nt, Molluscum contagiosum virus
ugugcuacugcac

SEQ ID NO: 4038621 - RNA, 17 nt, Molluscum contagiosum virus
uguggcgccgaugcagu

SEQ ID NO: 4038622 - RNA, 15 nt, Molluscum contagiosum virus
uguguuuugugccug

SEQ ID NO: 4038623 - RNA, 17 nt, Molluscum contagiosum virus
uguucacaccaugcagc

SEQ ID NO: 4038624 - RNA, 13 nt, Molluscum contagiosum virus
uguucacgugcuc

SEQ ID NO: 4038625 - RNA, 14 nt, Molluscum contagiosum virus
uguugcucuaccug

SEQ ID NO: 4038626 - RNA, 16 nt, Molluscum contagiosum virus
uguuggcgcgguccgc

SEQ ID NO: 4038627 - RNA, 22 nt, Molluscum contagiosum virus
uguuuccgcucgcgcugcuucc

SEQ ID NO: 4038628 - RNA, 17 nt, Molluscum contagiosum virus
uuaacuaagcuaaaaga

SEQ ID NO: 4038629 - RNA, 13 nt, Molluscum contagiosum virus
uuaaucacgauga

SEQ ID NO: 4038630 - RNA, 13 nt, Molluscum contagiosum virus
uuacggagcuaca

SEQ ID NO: 4038631 - RNA, 16 nt, Molluscum contagiosum virus
uuagcacacgcgcgcg

SEQ ID NO: 4038632 - RNA, 17 nt, Molluscum contagiosum virus
uuagcguggcgcgcgag

SEQ ID NO: 4038633 - RNA, 20 nt, Molluscum contagiosum virus
uuagcuuccgucugcugcuc

SEQ ID NO: 4038634 - RNA, 15 nt, Molluscum contagiosum virus
uuauugaaaauaaag

SEQ ID NO: 4038635 - RNA, 20 nt, Molluscum contagiosum virus
uucaagacuggcacuugcgc

SEQ ID NO: 4038636 - RNA, 17 nt, Molluscum contagiosum virus
uucaaguuugacaaggg

SEQ ID NO: 4038637 - RNA, 22 nt, Molluscum contagiosum virus
uucacaagguagucacgcgcga

SEQ ID NO: 4038638 - RNA, 13 nt, Molluscum contagiosum virus
uuccacgucucca

SEQ ID NO: 4038639 - RNA, 18 nt, Molluscum contagiosum virus
uuccagcacugcgccaag

SEQ ID NO: 4038640 - RNA, 21 nt, Molluscum contagiosum virus
uucccgaggcguccagcggcu

SEQ ID NO: 4038641 - RNA, 15 nt, Molluscum contagiosum virus
uuccgacgggccgcc

SEQ ID NO: 4038642 - RNA, 20 nt, Molluscum contagiosum virus
uuccgagccgccggucucca

SEQ ID NO: 4038643 - RNA, 20 nt, Molluscum contagiosum virus
uuccgagcucgcaaacacaa

SEQ ID NO: 4038644 - RNA, 22 nt, Molluscum contagiosum virus
uuccgcgagcacguggacagca

SEQ ID NO: 4038645 - RNA, 12 nt, Molluscum contagiosum virus
uuccgcucgcgc

SEQ ID NO: 4038646 - RNA, 13 nt, Molluscum contagiosum virus
uuccggcaccacg

SEQ ID NO: 4038647 - RNA, 13 nt, Molluscum contagiosum virus
uuccggcgcggcc

SEQ ID NO: 4038648 - RNA, 21 nt, Molluscum contagiosum virus
uuccggcgcggccuggccacg

SEQ ID NO: 4038649 - RNA, 10 nt, Molluscum contagiosum virus
uuccgggccc

SEQ ID NO: 4038650 - RNA, 17 nt, Molluscum contagiosum virus
uuccgugcuugacaagu

SEQ ID NO: 4038651 - RNA, 21 nt, Molluscum contagiosum virus
uuccucgacgaggccuacagc

SEQ ID NO: 4038652 - RNA, 11 nt, Molluscum contagiosum virus
uuccugcuggc

SEQ ID NO: 4038653 - RNA, 20 nt, Molluscum contagiosum virus
uucgaccucugcuucacgcu

SEQ ID NO: 4038654 - RNA, 17 nt, Molluscum contagiosum virus
uucgagaccagccgcga

SEQ ID NO: 4038655 - RNA, 18 nt, Molluscum contagiosum virus
uucgcagaggacagcucc

SEQ ID NO: 4038656 - RNA, 20 nt, Molluscum contagiosum virus
uucgccccgagaauaccguc

SEQ ID NO: 4038657 - RNA, 23 nt, Molluscum contagiosum virus
uucgcgaaggcaaccgcgacgag

SEQ ID NO: 4038658 - RNA, 13 nt, Molluscum contagiosum virus
uucgcgccgccgc

SEQ ID NO: 4038659 - RNA, 21 nt, Molluscum contagiosum virus
uucgcggagcugugccgcagc

SEQ ID NO: 4038660 - RNA, 22 nt, Molluscum contagiosum virus
uucgggcgcaaucacggcugua

SEQ ID NO: 4038661 - RNA, 14 nt, Molluscum contagiosum virus
ugcucgcgcucgcg

SEQ ID NO: 4038662 - RNA, 17 nt, Molluscum contagiosum virus
ugcucgcggagggcagc

SEQ ID NO: 4038663 - RNA, 21 nt, Molluscum contagiosum virus
ugcucgcggucgggccccugc

SEQ ID NO: 4038664 - RNA, 16 nt, Molluscum contagiosum virus
ugcucggacacacgca

SEQ ID NO: 4038665 - RNA, 23 nt, Molluscum contagiosum virus
ugcucuacuggcggcgcccguga

SEQ ID NO: 4038666 - RNA, 16 nt, Molluscum contagiosum virus
ugcucugugcgcgcag

SEQ ID NO: 4038667 - RNA, 19 nt, Molluscum contagiosum virus
ugcugcacagcuuccugga

SEQ ID NO: 4038668 - RNA, 21 nt, Molluscum contagiosum virus
ugcugcccccgccgcggcgcc

SEQ ID NO: 4038669 - RNA, 20 nt, Molluscum contagiosum virus
ugcugcccgccuucgacggc

SEQ ID NO: 4038670 - RNA, 13 nt, Molluscum contagiosum virus
ugcugcgagagca

SEQ ID NO: 4038671 - RNA, 16 nt, Molluscum contagiosum virus
ugcugcgcacggaggg

SEQ ID NO: 4038672 - RNA, 14 nt, Molluscum contagiosum virus
ugcugcgcagcauc

SEQ ID NO: 4038673 - RNA, 13 nt, Molluscum contagiosum virus
ugcugcgccacgu

SEQ ID NO: 4038674 - RNA, 11 nt, Molluscum contagiosum virus
ugcugcgcgac

SEQ ID NO: 4038675 - RNA, 15 nt, Molluscum contagiosum virus
ugcugcgcgcgccau

SEQ ID NO: 4038676 - RNA, 13 nt, Molluscum contagiosum virus
ugcugcgcgcgcu

SEQ ID NO: 4038677 - RNA, 15 nt, Molluscum contagiosum virus
ugcugcgcggcgccg

SEQ ID NO: 4038678 - RNA, 15 nt, Molluscum contagiosum virus
ugcugcggcugcugg

SEQ ID NO: 4038679 - RNA, 23 nt, Molluscum contagiosum virus
ugcugcucaaggacuaccagcuc

SEQ ID NO: 4038680 - RNA, 14 nt, Molluscum contagiosum virus
ugcugcucgacggg

SEQ ID NO: 4038681 - RNA, 16 nt, Molluscum contagiosum virus
ugcugcugcagaacug

SEQ ID NO: 4038682 - RNA, 19 nt, Molluscum contagiosum virus
ugcugcuggcccugcuagu

SEQ ID NO: 4038683 - RNA, 22 nt, Molluscum contagiosum virus
ugcugcuuguugugggcucgcg

SEQ ID NO: 4038684 - RNA, 15 nt, Molluscum contagiosum virus
ugcuggacgggcacg

SEQ ID NO: 4038685 - RNA, 19 nt, Molluscum contagiosum virus
ugcuggcaccgcgcgcgcu

SEQ ID NO: 4038686 - RNA, 22 nt, Molluscum contagiosum virus
ugcuggcgaaaccugggcgccg

SEQ ID NO: 4038687 - RNA, 19 nt, Molluscum contagiosum virus
ugcuggcgagcacguccuc

SEQ ID NO: 4038688 - RNA, 22 nt, Molluscum contagiosum virus
ugcuggcgcgcgcgcgccggaa

SEQ ID NO: 4038689 - RNA, 12 nt, Molluscum contagiosum virus
ugcuggcgcgcu

SEQ ID NO: 4038690 - RNA, 15 nt, Molluscum contagiosum virus
ugcuggcggggcugg

SEQ ID NO: 4038691 - RNA, 15 nt, Molluscum contagiosum virus
ugcuggugcucgccu

SEQ ID NO: 4038692 - RNA, 15 nt, Molluscum contagiosum virus
ugcugguucugcucg

SEQ ID NO: 4038693 - RNA, 18 nt, Molluscum contagiosum virus
ugcugguucugcucgcag

SEQ ID NO: 4038694 - RNA, 15 nt, Molluscum contagiosum virus
ugcugugccugcgca

SEQ ID NO: 4038695 - RNA, 18 nt, Molluscum contagiosum virus
ugcuugcccgaccuuggu

SEQ ID NO: 4038696 - RNA, 21 nt, Molluscum contagiosum virus
ugcuuugucugcaggcagaag

SEQ ID NO: 4038697 - RNA, 18 nt, Molluscum contagiosum virus
uggaacaggugcgcaagc

SEQ ID NO: 4038698 - RNA, 23 nt, Molluscum contagiosum virus
uggaacgagagugugcaugcugu

SEQ ID NO: 4038699 - RNA, 20 nt, Molluscum contagiosum virus
uggaacugcagcagcuggcc

SEQ ID NO: 4038700 - RNA, 13 nt, Molluscum contagiosum virus
uggacagcaagca

SEQ ID NO: 4038701 - RNA, 15 nt, Molluscum contagiosum virus
uggacagcaagcagc

SEQ ID NO: 4038702 - RNA, 21 nt, Molluscum contagiosum virus
uggacagcaagcagcgcgcgc

SEQ ID NO: 4038703 - RNA, 12 nt, Molluscum contagiosum virus
uggacagcaucc

SEQ ID NO: 4038704 - RNA, 13 nt, Molluscum contagiosum virus
uggacagccauga

SEQ ID NO: 4038705 - RNA, 23 nt, Molluscum contagiosum virus
uggacagccugcaccgagugcug

SEQ ID NO: 4038706 - RNA, 21 nt, Molluscum contagiosum virus
uggacauccucaccuuccugg

SEQ ID NO: 4038707 - RNA, 14 nt, Molluscum contagiosum virus
uggacgaggccaac

SEQ ID NO: 4038708 - RNA, 16 nt, Molluscum contagiosum virus
uggacgcacagggcug

SEQ ID NO: 4038709 - RNA, 21 nt, Molluscum contagiosum virus
uggacgcacagggcugcgugg

SEQ ID NO: 4038710 - RNA, 23 nt, Molluscum contagiosum virus
uggacgccggggggcgccaaguc

SEQ ID NO: 4038711 - RNA, 14 nt, Molluscum contagiosum virus
uggacgcgcacgcg

SEQ ID NO: 4038712 - RNA, 17 nt, Molluscum contagiosum virus
uggacgcgccgcgcgag

SEQ ID NO: 4038713 - RNA, 12 nt, Molluscum contagiosum virus
uggacuucagga

SEQ ID NO: 4038714 - RNA, 15 nt, Molluscum contagiosum virus
uggagaacggcgugc

SEQ ID NO: 4038715 - RNA, 20 nt, Molluscum contagiosum virus
uggagaacggcgugcgagug

SEQ ID NO: 4038716 - RNA, 21 nt, Molluscum contagiosum virus
uggagcccacguugccgcgcg

SEQ ID NO: 4038717 - RNA, 21 nt, Molluscum contagiosum virus
uggagcccgugcuggagggca

SEQ ID NO: 4038718 - RNA, 17 nt, Molluscum contagiosum virus
uggagccgcugcugcgg

SEQ ID NO: 4038719 - RNA, 19 nt, Molluscum contagiosum virus
uggagcgccuugccgagga

SEQ ID NO: 4038720 - RNA, 17 nt, Molluscum contagiosum virus
uggaggaggaagcaggu

SEQ ID NO: 4038721 - RNA, 15 nt, Molluscum contagiosum virus
uggaggauucuugua

SEQ ID NO: 4038722 - RNA, 19 nt, Molluscum contagiosum virus
uggagggguguuuccuugc

SEQ ID NO: 4038723 - RNA, 17 nt, Molluscum contagiosum virus
uggaggugcgcgacucc

SEQ ID NO: 4038724 - RNA, 21 nt, Molluscum contagiosum virus
uggaguccaugcccacgcgca

SEQ ID NO: 4038725 - RNA, 16 nt, Molluscum contagiosum virus
uggauaccaugcucuc

SEQ ID NO: 4038726 - RNA, 19 nt, Molluscum contagiosum virus
uggauuucggcgcgcgugc

SEQ ID NO: 4038727 - RNA, 15 nt, Molluscum contagiosum virus
uggcaaaccacgagc

SEQ ID NO: 4038728 - RNA, 19 nt, Molluscum contagiosum virus
uggcaacgcaaacgcacgc

SEQ ID NO: 4038729 - RNA, 17 nt, Molluscum contagiosum virus
uggcaacgcgggggcca

SEQ ID NO: 4038730 - RNA, 15 nt, Molluscum contagiosum virus
uggcacccuggcugc

SEQ ID NO: 4038731 - RNA, 16 nt, Molluscum contagiosum virus
uggcacccuggcugcu

SEQ ID NO: 4038732 - RNA, 17 nt, Molluscum contagiosum virus
uggcacccuggcugcug

SEQ ID NO: 4038733 - RNA, 16 nt, Molluscum contagiosum virus
uggcaccgggcgccgc

SEQ ID NO: 4038734 - RNA, 16 nt, Molluscum contagiosum virus
uggcacuagccuccuu

SEQ ID NO: 4038735 - RNA, 20 nt, Molluscum contagiosum virus
uggcagcggcaaaggcccgc

SEQ ID NO: 4038736 - RNA, 17 nt, Molluscum contagiosum virus
uggcauggcgcgcucgc

SEQ ID NO: 4038737 - RNA, 14 nt, Molluscum contagiosum virus
uggccaaggucucg

SEQ ID NO: 4038738 - RNA, 13 nt, Molluscum contagiosum virus
uggccauggugga

SEQ ID NO: 4038739 - RNA, 19 nt, Molluscum contagiosum virus
uggccgcauuuucucugga

SEQ ID NO: 4038740 - RNA, 17 nt, Molluscum contagiosum virus
uggccgcuccagagccg

SEQ ID NO: 4038741 - RNA, 18 nt, Molluscum contagiosum virus
uggccguagugcucaucg

SEQ ID NO: 4038742 - RNA, 19 nt, Molluscum contagiosum virus
uggccuaccugcaggagga

SEQ ID NO: 4038743 - RNA, 22 nt, Molluscum contagiosum virus
uggccucugccugcaaggaggu

SEQ ID NO: 4038744 - RNA, 21 nt, Molluscum contagiosum virus
uggccuguaguagcagcuucu

SEQ ID NO: 4038745 - RNA, 20 nt, Molluscum contagiosum virus
uggcgagcaucugcgcgugc

SEQ ID NO: 4038746 - RNA, 18 nt, Molluscum contagiosum virus
uggcgagcuagugcacac

SEQ ID NO: 4038747 - RNA, 16 nt, Molluscum contagiosum virus
uggcgauagcgauggc

SEQ ID NO: 4038748 - RNA, 17 nt, Molluscum contagiosum virus
uggcgaucugcucgcag

SEQ ID NO: 4038749 - RNA, 19 nt, Molluscum contagiosum virus
uggcgcccgaggacgagcc

SEQ ID NO: 4038750 - RNA, 20 nt, Molluscum contagiosum virus
uggcgcccuuuggcuagcac

SEQ ID NO: 4038751 - RNA, 12 nt, Molluscum contagiosum virus
uggcgcgccgcu

SEQ ID NO: 4038752 - RNA, 15 nt, Molluscum contagiosum virus
uggcgcgccgcugcc

SEQ ID NO: 4038753 - RNA, 14 nt, Molluscum contagiosum virus
uggcgcgcgagcug

SEQ ID NO: 4038754 - RNA, 19 nt, Molluscum contagiosum virus
uggcgcgcgagcugcuagc

SEQ ID NO: 4038755 - RNA, 14 nt, Molluscum contagiosum virus
uggcgcgcgugccg

SEQ ID NO: 4038756 - RNA, 18 nt, Molluscum contagiosum virus
uggcgcgguccagccgca

SEQ ID NO: 4038757 - RNA, 18 nt, Molluscum contagiosum virus
uggcgcucgcgcgcacgc

SEQ ID NO: 4038758 - RNA, 22 nt, Molluscum contagiosum virus
uggcggccaaccgccugcucuc

SEQ ID NO: 4038759 - RNA, 13 nt, Molluscum contagiosum virus
uggcggcgcacgc

SEQ ID NO: 4038760 - RNA, 16 nt, Molluscum contagiosum virus
acgaaagcaaaggagu

SEQ ID NO: 4038761 - RNA, 20 nt, Molluscum contagiosum virus
acgaaucgccgucuuuacgu

SEQ ID NO: 4038762 - RNA, 13 nt, Molluscum contagiosum virus
acgacaaggaaag

SEQ ID NO: 4038763 - RNA, 22 nt, Molluscum contagiosum virus
acgacaaggaaaggcacccacc

SEQ ID NO: 4038764 - RNA, 18 nt, Molluscum contagiosum virus
acgacaauacggugcagc

SEQ ID NO: 4038765 - RNA, 22 nt, Molluscum contagiosum virus
acgacaugcugugcggcacgcc

SEQ ID NO: 4038766 - RNA, 15 nt, Molluscum contagiosum virus
acgacccucuucgac

SEQ ID NO: 4038767 - RNA, 22 nt, Molluscum contagiosum virus
acgaccgcaagugcacgcggcg

SEQ ID NO: 4038768 - RNA, 23 nt, Molluscum contagiosum virus
acgaccgcaagugcacgcggcgc

SEQ ID NO: 4038769 - RNA, 23 nt, Molluscum contagiosum virus
acgacgacggcugcucgcugccu

SEQ ID NO: 4038770 - RNA, 13 nt, Molluscum contagiosum virus
acgacgagcacua

SEQ ID NO: 4038771 - RNA, 19 nt, Molluscum contagiosum virus
acgacgcgcccacgugcca

SEQ ID NO: 4038772 - RNA, 15 nt, Molluscum contagiosum virus
acgacggcugcucgc

SEQ ID NO: 4038773 - RNA, 22 nt, Molluscum contagiosum virus
acgacggcugcucgcugccugg

SEQ ID NO: 4038774 - RNA, 22 nt, Molluscum contagiosum virus
acgacucgcgucugcaaggccu

SEQ ID NO: 4038775 - RNA, 14 nt, Molluscum contagiosum virus
acgacucgcugcca

SEQ ID NO: 4038776 - RNA, 21 nt, Molluscum contagiosum virus
acgacuuccgcggcgugcagg

SEQ ID NO: 4038777 - RNA, 13 nt, Molluscum contagiosum virus
acgagaaugacuu

SEQ ID NO: 4038778 - RNA, 14 nt, Molluscum contagiosum virus
acgagcagcugcug

SEQ ID NO: 4038779 - RNA, 17 nt, Molluscum contagiosum virus
acgagcagcugcugcgc

SEQ ID NO: 4038780 - RNA, 14 nt, Molluscum contagiosum virus
acgagcaggcgcag

SEQ ID NO: 4038781 - RNA, 22 nt, Molluscum contagiosum virus
acgagcaggcgcagcgcggccu

SEQ ID NO: 4038782 - RNA, 14 nt, Molluscum contagiosum virus
acgagcaguccgcc

SEQ ID NO: 4038783 - RNA, 16 nt, Molluscum contagiosum virus
acgagccccgcgccgg

SEQ ID NO: 4038784 - RNA, 14 nt, Molluscum contagiosum virus
acgagcccgcaaga

SEQ ID NO: 4038785 - RNA, 13 nt, Molluscum contagiosum virus
acgagccgcugcu

SEQ ID NO: 4038786 - RNA, 20 nt, Molluscum contagiosum virus
acgagcgccagccugugcgc

SEQ ID NO: 4038787 - RNA, 19 nt, Molluscum contagiosum virus
acgagcugacgcagacgca

SEQ ID NO: 4038788 - RNA, 13 nt, Molluscum contagiosum virus
acgagcugcugua

SEQ ID NO: 4038789 - RNA, 18 nt, Molluscum contagiosum virus
acgagcugugcgagccag

SEQ ID NO: 4038790 - RNA, 15 nt, Molluscum contagiosum virus
acgaggaaaggcacc

SEQ ID NO: 4038791 - RNA, 16 nt, Molluscum contagiosum virus
acgaggaaaggcaccc

SEQ ID NO: 4038792 - RNA, 13 nt, Molluscum contagiosum virus
acgaggacuggga

SEQ ID NO: 4038793 - RNA, 16 nt, Molluscum contagiosum virus
acgagggaugcgcaca

SEQ ID NO: 4038794 - RNA, 13 nt, Molluscum contagiosum virus
acgaggugcgcgc

SEQ ID NO: 4038795 - RNA, 17 nt, Molluscum contagiosum virus
acgaggugcgcgcaaca

SEQ ID NO: 4038796 - RNA, 16 nt, Molluscum contagiosum virus
acgcaacgucgcacug

SEQ ID NO: 4038797 - RNA, 20 nt, Molluscum contagiosum virus
acgcaacgucgcacuggccu

SEQ ID NO: 4038798 - RNA, 14 nt, Molluscum contagiosum virus
acgcaacugcccgc

SEQ ID NO: 4038799 - RNA, 18 nt, Molluscum contagiosum virus
acgcacacucgcgcgucc

SEQ ID NO: 4038800 - RNA, 19 nt, Molluscum contagiosum virus
acgcacagccccugcugcu

SEQ ID NO: 4038801 - RNA, 16 nt, Molluscum contagiosum virus
acgcaccgccuggugc

SEQ ID NO: 4038802 - RNA, 17 nt, Molluscum contagiosum virus
acgcacgcacguggcgc

SEQ ID NO: 4038803 - RNA, 15 nt, Molluscum contagiosum virus
acgcacgcgcgggca

SEQ ID NO: 4038804 - RNA, 14 nt, Molluscum contagiosum virus
acgcacuugcgcgc

SEQ ID NO: 4038805 - RNA, 23 nt, Molluscum contagiosum virus
acgcagcuguggcgccugcgcgc

SEQ ID NO: 4038806 - RNA, 20 nt, Molluscum contagiosum virus
acgcaggaccuggcuggcgc

SEQ ID NO: 4038807 - RNA, 17 nt, Molluscum contagiosum virus
acgcaggaugcuggggc

SEQ ID NO: 4038808 - RNA, 21 nt, Molluscum contagiosum virus
acgcagucgccuuccugcgcc

SEQ ID NO: 4038809 - RNA, 17 nt, Molluscum contagiosum virus
acgcauguacgcggcgg

SEQ ID NO: 4038810 - RNA, 23 nt, Molluscum contagiosum virus
acgccaacuucgucucgagcuuc

SEQ ID NO: 4038811 - RNA, 13 nt, Molluscum contagiosum virus
acgccagcgacgc

SEQ ID NO: 4038812 - RNA, 12 nt, Molluscum contagiosum virus
acgccagcgcgc

SEQ ID NO: 4038813 - RNA, 18 nt, Molluscum contagiosum virus
acgccgagcccgagcccg

SEQ ID NO: 4038814 - RNA, 19 nt, Molluscum contagiosum virus
acgccgcgcaccuggagua

SEQ ID NO: 4038815 - RNA, 22 nt, Molluscum contagiosum virus
acgccgcguucuucguggcgcu

SEQ ID NO: 4038816 - RNA, 14 nt, Molluscum contagiosum virus
acgccgcuggagca

SEQ ID NO: 4038817 - RNA, 12 nt, Molluscum contagiosum virus
acgccggcaagc

SEQ ID NO: 4038818 - RNA, 18 nt, Molluscum contagiosum virus
acgccgggcacgcccgcg

SEQ ID NO: 4038819 - RNA, 15 nt, Molluscum contagiosum virus
acgccuucguggagc

SEQ ID NO: 4038820 - RNA, 16 nt, Molluscum contagiosum virus
acgcgaacugcccgag

SEQ ID NO: 4038821 - RNA, 17 nt, Molluscum contagiosum virus
acgcgacuucgcccgug

SEQ ID NO: 4038822 - RNA, 18 nt, Molluscum contagiosum virus
acgcgcacgcgcacacgc

SEQ ID NO: 4038823 - RNA, 16 nt, Molluscum contagiosum virus
acgcgcacgggccugc

SEQ ID NO: 4038824 - RNA, 20 nt, Molluscum contagiosum virus
acgcgcacgggccugcgcgc

SEQ ID NO: 4038825 - RNA, 15 nt, Molluscum contagiosum virus
acgcgcagugcggcc

SEQ ID NO: 4038826 - RNA, 23 nt, Molluscum contagiosum virus
acgcgccagugcgugcacugucu

SEQ ID NO: 4038827 - RNA, 18 nt, Molluscum contagiosum virus
acgcgcccuggagcgcag

SEQ ID NO: 4038828 - RNA, 19 nt, Molluscum contagiosum virus
acgcgccgacaugcgcacg

SEQ ID NO: 4038829 - RNA, 22 nt, Molluscum contagiosum virus
acgcgccgaggacuaccuggcg

SEQ ID NO: 4038830 - RNA, 17 nt, Molluscum contagiosum virus
acgcgcgcgccucgcca

SEQ ID NO: 4038831 - RNA, 17 nt, Molluscum contagiosum virus
acgcgcgcgugcugcua

SEQ ID NO: 4038832 - RNA, 14 nt, Molluscum contagiosum virus
acgcgcggcggcgc

SEQ ID NO: 4038833 - RNA, 22 nt, Molluscum contagiosum virus
acgcgcguccgcaggcgucaug

SEQ ID NO: 4038834 - RNA, 17 nt, Molluscum contagiosum virus
acgcgcguggagcgcgc

SEQ ID NO: 4038835 - RNA, 20 nt, Molluscum contagiosum virus
acgcgcugcgccacugccac

SEQ ID NO: 4038836 - RNA, 14 nt, Molluscum contagiosum virus
acgcgcuugcgcgg

SEQ ID NO: 4038837 - RNA, 19 nt, Molluscum contagiosum virus
acgcggcucuggagcggcc

SEQ ID NO: 4038838 - RNA, 23 nt, Molluscum contagiosum virus
acgcggugugcacaugcccgugc

SEQ ID NO: 4038839 - RNA, 23 nt, Molluscum contagiosum virus
acgcguacguguccaugcacgac

SEQ ID NO: 4038840 - RNA, 16 nt, Molluscum contagiosum virus
acgcgucgcgcgccgc

SEQ ID NO: 4038841 - RNA, 21 nt, Molluscum contagiosum virus
acgcgugccuggcuugcgcgc

SEQ ID NO: 4038842 - RNA, 15 nt, Molluscum contagiosum virus
acgcgugcugcgcgg

SEQ ID NO: 4038843 - RNA, 13 nt, Molluscum contagiosum virus
acgcgugugcgag

SEQ ID NO: 4038844 - RNA, 21 nt, Molluscum contagiosum virus
acgcguucuagcagcgugcgc

SEQ ID NO: 4038845 - RNA, 23 nt, Molluscum contagiosum virus
acgcuaaagucgcgcgugcgcag

SEQ ID NO: 4038846 - RNA, 15 nt, Molluscum contagiosum virus
acgcuagcuacgagu

SEQ ID NO: 4038847 - RNA, 13 nt, Molluscum contagiosum virus
acgcucacggccu

SEQ ID NO: 4038848 - RNA, 20 nt, Molluscum contagiosum virus
acgcucgcgcgcaugcucgc

SEQ ID NO: 4038849 - RNA, 22 nt, Molluscum contagiosum virus
acgcucgcgcuguauucggcgu

SEQ ID NO: 4038850 - RNA, 21 nt, Molluscum contagiosum virus
acgcugcacaugugcgugcac

SEQ ID NO: 4038851 - RNA, 18 nt, Molluscum contagiosum virus
acgcugcacgagcugcug

SEQ ID NO: 4038852 - RNA, 15 nt, Molluscum contagiosum virus
acgcugcggcggcgc

SEQ ID NO: 4038853 - RNA, 16 nt, Molluscum contagiosum virus
acgcugcucgugcugc

SEQ ID NO: 4038854 - RNA, 18 nt, Molluscum contagiosum virus
caguccgcggcgcgccgg

SEQ ID NO: 4038855 - RNA, 19 nt, Molluscum contagiosum virus
cagucgccuuccugcgccc

SEQ ID NO: 4038856 - RNA, 14 nt, Molluscum contagiosum virus
cagucuccacgcgu

SEQ ID NO: 4038857 - RNA, 12 nt, Molluscum contagiosum virus
cagucucgcgcu

SEQ ID NO: 4038858 - RNA, 20 nt, Molluscum contagiosum virus
cagugccgccgcgcaaaagc

SEQ ID NO: 4038859 - RNA, 19 nt, Molluscum contagiosum virus
cagugcggcgcggcugcuc

SEQ ID NO: 4038860 - RNA, 15 nt, Molluscum contagiosum virus
cagugcgugccaggc

SEQ ID NO: 4038861 - RNA, 9 nt, Molluscum contagiosum virus
cagugucuu

SEQ ID NO: 4038862 - RNA, 20 nt, Molluscum contagiosum virus
caguuagaaaugcuugcuuc

SEQ ID NO: 4038863 - RNA, 14 nt, Molluscum contagiosum virus
caguuccgaucgcg

SEQ ID NO: 4038864 - RNA, 15 nt, Molluscum contagiosum virus
caguucgagcugcug

SEQ ID NO: 4038865 - RNA, 16 nt, Molluscum contagiosum virus
caguucgagcugcugc

SEQ ID NO: 4038866 - RNA, 17 nt, Molluscum contagiosum virus
caguucggccgcacgug

SEQ ID NO: 4038867 - RNA, 19 nt, Molluscum contagiosum virus
cauacgcagaggcgcgucc

SEQ ID NO: 4038868 - RNA, 14 nt, Molluscum contagiosum virus
cauacuccugcugg

SEQ ID NO: 4038869 - RNA, 15 nt, Molluscum contagiosum virus
cauacuccugcuggc

SEQ ID NO: 4038870 - RNA, 19 nt, Molluscum contagiosum virus
cauagcccaugcgcagugc

SEQ ID NO: 4038871 - RNA, 17 nt, Molluscum contagiosum virus
cauagcgcaccagcugc

SEQ ID NO: 4038872 - RNA, 14 nt, Molluscum contagiosum virus
cauagcgccacgag

SEQ ID NO: 4038873 - RNA, 13 nt, Molluscum contagiosum virus
caucaccccgcug

SEQ ID NO: 4038874 - RNA, 22 nt, Molluscum contagiosum virus
caucagagaagugcuccgcacg

SEQ ID NO: 4038875 - RNA, 18 nt, Molluscum contagiosum virus
caucaucgccagcaucaa

SEQ ID NO: 4038876 - RNA, 19 nt, Molluscum contagiosum virus
caucccgcacgugggcuac

SEQ ID NO: 4038877 - RNA, 20 nt, Molluscum contagiosum virus
cauccuugauaaaagcacag

SEQ ID NO: 4038878 - RNA, 21 nt, Molluscum contagiosum virus
caucgagcugcagagcgugcu

SEQ ID NO: 4038879 - RNA, 13 nt, Molluscum contagiosum virus
caucgcgcugcug

SEQ ID NO: 4038880 - RNA, 15 nt, Molluscum contagiosum virus
caucgcgcugcuggu

SEQ ID NO: 4038881 - RNA, 18 nt, Molluscum contagiosum virus
caucgcgcugcuggugcu

SEQ ID NO: 4038882 - RNA, 21 nt, Molluscum contagiosum virus
caucggagaagugcuccgcac

SEQ ID NO: 4038883 - RNA, 22 nt, Molluscum contagiosum virus
caucggagaagugcuccgcacg

SEQ ID NO: 4038884 - RNA, 14 nt, Molluscum contagiosum virus
caucgggcugcagc

SEQ ID NO: 4038885 - RNA, 21 nt, Molluscum contagiosum virus
caucgggcugcagcccuucca

SEQ ID NO: 4038886 - RNA, 15 nt, Molluscum contagiosum virus
caucuacagccgccu

SEQ ID NO: 4038887 - RNA, 17 nt, Molluscum contagiosum virus
caucucgauggcgccgu

SEQ ID NO: 4038888 - RNA, 22 nt, Molluscum contagiosum virus
caucucgcacacugcagcacgu

SEQ ID NO: 4038889 - RNA, 17 nt, Molluscum contagiosum virus
caucucgcagacgcagc

SEQ ID NO: 4038890 - RNA, 15 nt, Molluscum contagiosum virus
caucucgugcaugac

SEQ ID NO: 4038891 - RNA, 16 nt, Molluscum contagiosum virus
caucucucagggcagc

SEQ ID NO: 4038892 - RNA, 16 nt, Molluscum contagiosum virus
caucuucaagccgcag

SEQ ID NO: 4038893 - RNA, 21 nt, Molluscum contagiosum virus
caugaacaacauggugcuggc

SEQ ID NO: 4038894 - RNA, 23 nt, Molluscum contagiosum virus
caugaacucgcugcugcucuucc

SEQ ID NO: 4038895 - RNA, 16 nt, Molluscum contagiosum virus
caugaccgcucgcgga

SEQ ID NO: 4038896 - RNA, 15 nt, Molluscum contagiosum virus
caugacgacgccgga

SEQ ID NO: 4038897 - RNA, 16 nt, Molluscum contagiosum virus
caugaggggcggagac

SEQ ID NO: 4038898 - RNA, 15 nt, Molluscum contagiosum virus
caugcacagcugcuc

SEQ ID NO: 4038899 - RNA, 14 nt, Molluscum contagiosum virus
caugcccggccucg

SEQ ID NO: 4038900 - RNA, 14 nt, Molluscum contagiosum virus
caugcgacugccag

SEQ ID NO: 4038901 - RNA, 16 nt, Molluscum contagiosum virus
caugcgacugccagcc

SEQ ID NO: 4038902 - RNA, 17 nt, Molluscum contagiosum virus
caugcgcaagcagcucg

SEQ ID NO: 4038903 - RNA, 19 nt, Molluscum contagiosum virus
caugcgcaagcgcuaugcu

SEQ ID NO: 4038904 - RNA, 14 nt, Molluscum contagiosum virus
caugcgcccucacg

SEQ ID NO: 4038905 - RNA, 16 nt, Molluscum contagiosum virus
caugcgcgcgcgcucg

SEQ ID NO: 4038906 - RNA, 14 nt, Molluscum contagiosum virus
caugcggagcuggc

SEQ ID NO: 4038907 - RNA, 23 nt, Molluscum contagiosum virus
caugcucgcggucgggccccugc

SEQ ID NO: 4038908 - RNA, 21 nt, Molluscum contagiosum virus
caugcugucucugucccugca

SEQ ID NO: 4038909 - RNA, 20 nt, Molluscum contagiosum virus
caugcugugcggcacgccug

SEQ ID NO: 4038910 - RNA, 16 nt, Molluscum contagiosum virus
caugucacgcucacgc

SEQ ID NO: 4038911 - RNA, 22 nt, Molluscum contagiosum virus
caugucgagaccuuccuccagg

SEQ ID NO: 4038912 - RNA, 21 nt, Molluscum contagiosum virus
cauguugcucuaccuggugcu

SEQ ID NO: 4038913 - RNA, 19 nt, Molluscum contagiosum virus
cauuguaaaacgacagacc

SEQ ID NO: 4038914 - RNA, 14 nt, Molluscum contagiosum virus
ccaaaucgccgccc

SEQ ID NO: 4038915 - RNA, 22 nt, Molluscum contagiosum virus
ccaacacguuuucuuucauggc

SEQ ID NO: 4038916 - RNA, 23 nt, Molluscum contagiosum virus
ccaacacguuuucuuucauggcu

SEQ ID NO: 4038917 - RNA, 16 nt, Molluscum contagiosum virus
ccaacacuaccacagc

SEQ ID NO: 4038918 - RNA, 15 nt, Molluscum contagiosum virus
ccaaccgccugcucu

SEQ ID NO: 4038919 - RNA, 15 nt, Molluscum contagiosum virus
ccaacuaccuggggc

SEQ ID NO: 4038920 - RNA, 23 nt, Molluscum contagiosum virus
ccaagaacaauacaaacaacaac

SEQ ID NO: 4038921 - RNA, 23 nt, Molluscum contagiosum virus
ccaagaacagagaaaggcaccca

SEQ ID NO: 4038922 - RNA, 19 nt, Molluscum contagiosum virus
ccaagaagaggccagcaca

SEQ ID NO: 4038923 - RNA, 19 nt, Molluscum contagiosum virus
ccaagcacauucucaacca

SEQ ID NO: 4038924 - RNA, 16 nt, Molluscum contagiosum virus
ccaaggacgacaacac

SEQ ID NO: 4038925 - RNA, 20 nt, Molluscum contagiosum virus
ccaagggcguagagcaauac

SEQ ID NO: 4038926 - RNA, 20 nt, Molluscum contagiosum virus
ccaaguccgagcaagcgggc

SEQ ID NO: 4038927 - RNA, 16 nt, Molluscum contagiosum virus
ccaagucgcgcucuuc

SEQ ID NO: 4038928 - RNA, 22 nt, Molluscum contagiosum virus
ccaagugcgcgugucuggagcc

SEQ ID NO: 4038929 - RNA, 20 nt, Molluscum contagiosum virus
ccacaaagcccuccugagaa

SEQ ID NO: 4038930 - RNA, 22 nt, Molluscum contagiosum virus
ccacaccgggaauggccgcgag

SEQ ID NO: 4038931 - RNA, 19 nt, Molluscum contagiosum virus
ccacaugaccaagcacauu

SEQ ID NO: 4038932 - RNA, 22 nt, Molluscum contagiosum virus
ccacauuucaaaaacgcgcccc

SEQ ID NO: 4038933 - RNA, 11 nt, Molluscum contagiosum virus
ccaccaccagc

SEQ ID NO: 4038934 - RNA, 12 nt, Molluscum contagiosum virus
ccaccagcacca

SEQ ID NO: 4038935 - RNA, 14 nt, Molluscum contagiosum virus
ccaccagcaccagc

SEQ ID NO: 4038936 - RNA, 13 nt, Molluscum contagiosum virus
ccaccagcagcca

SEQ ID NO: 4038937 - RNA, 14 nt, Molluscum contagiosum virus
ccaccagcagccag

SEQ ID NO: 4038938 - RNA, 12 nt, Molluscum contagiosum virus
ccaccagcugcc

SEQ ID NO: 4038939 - RNA, 14 nt, Molluscum contagiosum virus
ccaccaggaacagg

SEQ ID NO: 4038940 - RNA, 20 nt, Molluscum contagiosum virus
ccacgagcguguccaggugc

SEQ ID NO: 4038941 - RNA, 21 nt, Molluscum contagiosum virus
ccacgcccgagggcgggcacg

SEQ ID NO: 4038942 - RNA, 14 nt, Molluscum contagiosum virus
ccacgcccgggccc

SEQ ID NO: 4038943 - RNA, 19 nt, Molluscum contagiosum virus
ccacgccgucgaaguacuu

SEQ ID NO: 4038944 - RNA, 14 nt, Molluscum contagiosum virus
ccacgcgggcccgu

SEQ ID NO: 4038945 - RNA, 14 nt, Molluscum contagiosum virus
ccacgcgugcugcg

SEQ ID NO: 4038946 - RNA, 18 nt, Molluscum contagiosum virus
ccacgcucgcgcgcaugc

SEQ ID NO: 4038947 - RNA, 13 nt, Molluscum contagiosum virus
ccacggcgcgccg

SEQ ID NO: 4038948 - RNA, 20 nt, Molluscum contagiosum virus
ccacggcgcgccgccggugc

SEQ ID NO: 4038949 - RNA, 16 nt, Molluscum contagiosum virus
ccacgggcuucgcugc

SEQ ID NO: 4038950 - RNA, 16 nt, Molluscum contagiosum virus
ccacggguaccgugcg

SEQ ID NO: 4038951 - RNA, 15 nt, Molluscum contagiosum virus
ccacgugccagaguc

SEQ ID NO: 4038952 - RNA, 18 nt, Molluscum contagiosum virus
ccacgugccagagucgcc

SEQ ID NO: 4038953 - RNA, 18 nt, Molluscum contagiosum virus
ccacgugcgcuggcccac

SEQ ID NO: 4038954 - RNA, 15 nt, Molluscum contagiosum virus
ccacgugcucaagug

SEQ ID NO: 4038955 - RNA, 23 nt, Molluscum contagiosum virus
ccacgugguccaccagcacgaag

SEQ ID NO: 4038956 - RNA, 19 nt, Molluscum contagiosum virus
ccacguggugguuggcgug

SEQ ID NO: 4038957 - RNA, 19 nt, Molluscum contagiosum virus
ccacguugccgcgcgcugc

SEQ ID NO: 4038958 - RNA, 15 nt, Molluscum contagiosum virus
ccacugugccagcag

SEQ ID NO: 4038959 - RNA, 17 nt, Molluscum contagiosum virus
ccagaggguggcuugcu

SEQ ID NO: 4038960 - RNA, 14 nt, Molluscum contagiosum virus
ccagcacugcgcca

SEQ ID NO: 4038961 - RNA, 12 nt, Molluscum contagiosum virus
ccagcagcgaga

SEQ ID NO: 4038962 - RNA, 16 nt, Molluscum contagiosum virus
ccagcagcuccuggua

SEQ ID NO: 4038963 - RNA, 12 nt, Molluscum contagiosum virus
ccagcagcugcu

SEQ ID NO: 4038964 - RNA, 15 nt, Molluscum contagiosum virus
ccagccacgaagagu

SEQ ID NO: 4038965 - RNA, 16 nt, Molluscum contagiosum virus
ccagccaucgugcgcg

SEQ ID NO: 4038966 - RNA, 15 nt, Molluscum contagiosum virus
ccagcccgcggugcg

SEQ ID NO: 4038967 - RNA, 19 nt, Molluscum contagiosum virus
ccagcccgcugcgcauggc

SEQ ID NO: 4038968 - RNA, 22 nt, Molluscum contagiosum virus
ccagcgacaccgacgaggugcg

SEQ ID NO: 4038969 - RNA, 14 nt, Molluscum contagiosum virus
ccagcgacgagcag

SEQ ID NO: 4038970 - RNA, 18 nt, Molluscum contagiosum virus
ccagcgauugcccgcgcg

SEQ ID NO: 4038971 - RNA, 18 nt, Molluscum contagiosum virus
ccagcgccucugcgagau

SEQ ID NO: 4038972 - RNA, 20 nt, Molluscum contagiosum virus
ccagcgcgcccaccagcagc

SEQ ID NO: 4038973 - RNA, 22 nt, Molluscum contagiosum virus
ccagcgcgcgccuugcagcgca

SEQ ID NO: 4038974 - RNA, 19 nt, Molluscum contagiosum virus
ccagcgcgcucgaggcgcc

SEQ ID NO: 4038975 - RNA, 21 nt, Molluscum contagiosum virus
ccagcggauaugcgccugugc

SEQ ID NO: 4038976 - RNA, 11 nt, Molluscum contagiosum virus
ccagcggcgcc

SEQ ID NO: 4038977 - RNA, 23 nt, Molluscum contagiosum virus
ccagcguaaugaagcgcugugcg

SEQ ID NO: 4038978 - RNA, 16 nt, Molluscum contagiosum virus
ccagcgucgcgcgccg

SEQ ID NO: 4038979 - RNA, 22 nt, Molluscum contagiosum virus
ccagcgugcagacgaccgucac

SEQ ID NO: 4038980 - RNA, 15 nt, Molluscum contagiosum virus
ccagcgugugaccgc

SEQ ID NO: 4038981 - RNA, 19 nt, Molluscum contagiosum virus
ccagcuaagccggagcagc

SEQ ID NO: 4038982 - RNA, 15 nt, Molluscum contagiosum virus
ccagcuccgccggga

SEQ ID NO: 4038983 - RNA, 21 nt, Molluscum contagiosum virus
ccagcucggguuccagcuccg

SEQ ID NO: 4038984 - RNA, 23 nt, Molluscum contagiosum virus
ccagcucggguuccagcuccggc

SEQ ID NO: 4038985 - RNA, 13 nt, Molluscum contagiosum virus
ccagcugcgcgag

SEQ ID NO: 4038986 - RNA, 18 nt, Molluscum contagiosum virus
ccagcuggacggugcugg

SEQ ID NO: 4038987 - RNA, 21 nt, Molluscum contagiosum virus
ccaggaaaacggaaacagcac

SEQ ID NO: 4038988 - RNA, 23 nt, Molluscum contagiosum virus
ccaggaaaggcaggagccucugu

SEQ ID NO: 4038989 - RNA, 15 nt, Molluscum contagiosum virus
ccaggaacaguaccg

SEQ ID NO: 4038990 - RNA, 14 nt, Molluscum contagiosum virus
ccaggaacgcgccg

SEQ ID NO: 4038991 - RNA, 12 nt, Molluscum contagiosum virus
ccaggcacuggc

SEQ ID NO: 4038992 - RNA, 13 nt, Molluscum contagiosum virus
ccaggccgcgccg

SEQ ID NO: 4038993 - RNA, 11 nt, Molluscum contagiosum virus
ccaggcgccgg

SEQ ID NO: 4038994 - RNA, 13 nt, Molluscum contagiosum virus
ccaggugcugggc

SEQ ID NO: 4038995 - RNA, 14 nt, Molluscum contagiosum virus
ccaggugcugggcg

SEQ ID NO: 4038996 - RNA, 21 nt, Molluscum contagiosum virus
ccaguagcgaaugcagugccc

SEQ ID NO: 4038997 - RNA, 17 nt, Molluscum contagiosum virus
ccagucgcgcgagaagu

SEQ ID NO: 4038998 - RNA, 20 nt, Molluscum contagiosum virus
ccagucucgaugugacaaca

SEQ ID NO: 4038999 - RNA, 17 nt, Molluscum contagiosum virus
ccagugcgugcacuguc

SEQ ID NO: 4039000 - RNA, 15 nt, Molluscum contagiosum virus
ccaucgaaacucugc

SEQ ID NO: 4039001 - RNA, 12 nt, Molluscum contagiosum virus
ccaucuccuugu

SEQ ID NO: 4039002 - RNA, 22 nt, Molluscum contagiosum virus
ccaugaacaacauggugcuggc

SEQ ID NO: 4039003 - RNA, 18 nt, Molluscum contagiosum virus
ccaugaucauggcgccgc

SEQ ID NO: 4039004 - RNA, 15 nt, Molluscum contagiosum virus
ccaugcgcagugccu

SEQ ID NO: 4039005 - RNA, 15 nt, Molluscum contagiosum virus
ccaugcuccugaucu

SEQ ID NO: 4039006 - RNA, 12 nt, Molluscum contagiosum virus
ccaugcugaucu

SEQ ID NO: 4039007 - RNA, 17 nt, Molluscum contagiosum virus
ccauggacacgcugcgc

SEQ ID NO: 4039008 - RNA, 20 nt, Molluscum contagiosum virus
ccauggagcgcccgcugcuc

SEQ ID NO: 4039009 - RNA, 23 nt, Molluscum contagiosum virus
ccauggcgagcuagugcacaccg

SEQ ID NO: 4039010 - RNA, 16 nt, Molluscum contagiosum virus
ccauggucacgcgcac

SEQ ID NO: 4039011 - RNA, 16 nt, Molluscum contagiosum virus
ccaugugucuuguggc

SEQ ID NO: 4039012 - RNA, 20 nt, Molluscum contagiosum virus
cccaaaagugaagaucaagc

SEQ ID NO: 4039013 - RNA, 16 nt, Molluscum contagiosum virus
cccaagggcguagagc

SEQ ID NO: 4039014 - RNA, 14 nt, Molluscum contagiosum virus
cccaccagcagcca

SEQ ID NO: 4039015 - RNA, 17 nt, Molluscum contagiosum virus
cccaccagcagccaggc

SEQ ID NO: 4039016 - RNA, 12 nt, Molluscum contagiosum virus
cccacgagcgcc

SEQ ID NO: 4039017 - RNA, 12 nt, Molluscum contagiosum virus
cccacgcuggcg

SEQ ID NO: 4039018 - RNA, 14 nt, Molluscum contagiosum virus
cccacugugccagc

SEQ ID NO: 4039019 - RNA, 19 nt, Molluscum contagiosum virus
cccagaaaacgcacugucg

SEQ ID NO: 4039020 - RNA, 16 nt, Molluscum contagiosum virus
cccagcagcgaggccg

SEQ ID NO: 4039021 - RNA, 20 nt, Molluscum contagiosum virus
cccagcucgaugggcuccag

SEQ ID NO: 4039022 - RNA, 20 nt, Molluscum contagiosum virus
cccaggccauggagcgcccg

SEQ ID NO: 4039023 - RNA, 17 nt, Molluscum contagiosum virus
cccaggcgcgcgcucag

SEQ ID NO: 4039024 - RNA, 23 nt, Molluscum contagiosum virus
cccauacucgaacgcaaggugug

SEQ ID NO: 4039025 - RNA, 19 nt, Molluscum contagiosum virus
cccaugcucaccgccgaga

SEQ ID NO: 4039026 - RNA, 23 nt, Molluscum contagiosum virus
ccccaaaagugaagaucaagcac

SEQ ID NO: 4039027 - RNA, 21 nt, Molluscum contagiosum virus
ccccaugcccgaccacgugcc

SEQ ID NO: 4039028 - RNA, 12 nt, Molluscum contagiosum virus
cccccgcggagc

SEQ ID NO: 4039029 - RNA, 20 nt, Molluscum contagiosum virus
ccccgaacugcugggcgugg

SEQ ID NO: 4039030 - RNA, 22 nt, Molluscum contagiosum virus
ccccgagggcgcgaccggcgug

SEQ ID NO: 4039031 - RNA, 16 nt, Molluscum contagiosum virus
ccccgcgcgcagcgcg

SEQ ID NO: 4039032 - RNA, 20 nt, Molluscum contagiosum virus
ccccgcgcgcccgcugcgcg

SEQ ID NO: 4039033 - RNA, 19 nt, Molluscum contagiosum virus
ccccgcugggccgcaugca

SEQ ID NO: 4039034 - RNA, 15 nt, Molluscum contagiosum virus
ccccggcgccggcac

SEQ ID NO: 4039035 - RNA, 19 nt, Molluscum contagiosum virus
ccccugcugcucgcggagg

SEQ ID NO: 4039036 - RNA, 13 nt, Molluscum contagiosum virus
cccgacucgcagc

SEQ ID NO: 4039037 - RNA, 16 nt, Molluscum contagiosum virus
cccgacuuuucgcgcc

SEQ ID NO: 4039038 - RNA, 18 nt, Molluscum contagiosum virus
cccgacuuuucgcgccgc

SEQ ID NO: 4039039 - RNA, 16 nt, Molluscum contagiosum virus
cccgagagugacgccu

SEQ ID NO: 4039040 - RNA, 12 nt, Molluscum contagiosum virus
cccgagcccgcg

SEQ ID NO: 4039041 - RNA, 22 nt, Molluscum contagiosum virus
cccgagcccgcggcgcgcagcu

SEQ ID NO: 4039042 - RNA, 16 nt, Molluscum contagiosum virus
cccgagcuacugcgcg

SEQ ID NO: 4039043 - RNA, 21 nt, Molluscum contagiosum virus
cccgagcucgacugcguuguc

SEQ ID NO: 4039044 - RNA, 15 nt, Molluscum contagiosum virus
cccgagcugcgugug

SEQ ID NO: 4039045 - RNA, 17 nt, Molluscum contagiosum virus
cccgagcugcgugugcc

SEQ ID NO: 4039046 - RNA, 14 nt, Molluscum contagiosum virus
cccgagcuggugau

SEQ ID NO: 4039047 - RNA, 20 nt, Molluscum contagiosum virus
cccgcaaaccuuggcccuuu

SEQ ID NO: 4039048 - RNA, 23 nt, Molluscum contagiosum virus
cccgcaggaaaggcaccccgcag

SEQ ID NO: 4039049 - RNA, 23 nt, Molluscum contagiosum virus
cccgcaggaaagguaccccgcag

SEQ ID NO: 4039050 - RNA, 17 nt, Molluscum contagiosum virus
cccgccagaagugaaau

SEQ ID NO: 4039051 - RNA, 13 nt, Molluscum contagiosum virus
cccgcgaagagca

SEQ ID NO: 4039052 - RNA, 17 nt, Molluscum contagiosum virus
cccgcgagcacgggcgc

SEQ ID NO: 4039053 - RNA, 14 nt, Molluscum contagiosum virus
cccgcgauuuacuu

SEQ ID NO: 4039054 - RNA, 22 nt, Molluscum contagiosum virus
cccgcgcaagagccgccggggc

SEQ ID NO: 4039055 - RNA, 15 nt, Molluscum contagiosum virus
cccgcgcagcgugcc

SEQ ID NO: 4039056 - RNA, 18 nt, Molluscum contagiosum virus
cccgcgcguugcugcccg

SEQ ID NO: 4039057 - RNA, 13 nt, Molluscum contagiosum virus
cccgcgcucgccg

SEQ ID NO: 4039058 - RNA, 17 nt, Molluscum contagiosum virus
cccgcggacgcgcagcu

SEQ ID NO: 4039059 - RNA, 16 nt, Molluscum contagiosum virus
cccgcggcgugcccgu

SEQ ID NO: 4039060 - RNA, 18 nt, Molluscum contagiosum virus
cccgcggcgugcccgucu

SEQ ID NO: 4039061 - RNA, 12 nt, Molluscum contagiosum virus
cccgcgggccgc

SEQ ID NO: 4039062 - RNA, 18 nt, Molluscum contagiosum virus
cccgcuaugaacagcgcg

SEQ ID NO: 4039063 - RNA, 14 nt, Molluscum contagiosum virus
cccgcugcgcgcuc

SEQ ID NO: 4039064 - RNA, 13 nt, Molluscum contagiosum virus
cccgcugcucuac

SEQ ID NO: 4039065 - RNA, 17 nt, Molluscum contagiosum virus
cccgcuggcggcgcacg

SEQ ID NO: 4039066 - RNA, 19 nt, Molluscum contagiosum virus
cccgcuggcggcgcacgcg

SEQ ID NO: 4039067 - RNA, 16 nt, Molluscum contagiosum virus
cccgcuuccgcggccg

SEQ ID NO: 4039068 - RNA, 17 nt, Molluscum contagiosum virus
cccggaaagcagcaaac

SEQ ID NO: 4039069 - RNA, 14 nt, Molluscum contagiosum virus
cccggaauuccgug

SEQ ID NO: 4039070 - RNA, 17 nt, Molluscum contagiosum virus
cccggaucagccccgcg

SEQ ID NO: 4039071 - RNA, 18 nt, Molluscum contagiosum virus
cccggcacgugccccgcg

SEQ ID NO: 4039072 - RNA, 17 nt, Molluscum contagiosum virus
cccggcaggcucccgcu

SEQ ID NO: 4039073 - RNA, 21 nt, Molluscum contagiosum virus
cccggcaggcucccgcugucg

SEQ ID NO: 4039074 - RNA, 15 nt, Molluscum contagiosum virus
cccggccucgccucc

SEQ ID NO: 4039075 - RNA, 21 nt, Molluscum contagiosum virus
cccggcggcccgcggcgcgcc

SEQ ID NO: 4039076 - RNA, 17 nt, Molluscum contagiosum virus
cccggcgggcucuuccu

SEQ ID NO: 4039077 - RNA, 14 nt, Molluscum contagiosum virus
cccgggcccggguu

SEQ ID NO: 4039078 - RNA, 17 nt, Molluscum contagiosum virus
cccguaggcgggccugc

SEQ ID NO: 4039079 - RNA, 17 nt, Molluscum contagiosum virus
cccguccucgcucgugc

SEQ ID NO: 4039080 - RNA, 16 nt, Molluscum contagiosum virus
cccguccuugcucugg

SEQ ID NO: 4039081 - RNA, 21 nt, Molluscum contagiosum virus
cccgucuccacaaagacgggc

SEQ ID NO: 4039082 - RNA, 14 nt, Molluscum contagiosum virus
cccgugcgcgcgcu

SEQ ID NO: 4039083 - RNA, 22 nt, Molluscum contagiosum virus
cccgugcucaggccagcaucuu

SEQ ID NO: 4039084 - RNA, 20 nt, Molluscum contagiosum virus
cccgugcuggagggcacgcu

SEQ ID NO: 4039085 - RNA, 16 nt, Molluscum contagiosum virus
cccgugcuugcgcacg

SEQ ID NO: 4039086 - RNA, 11 nt, Molluscum contagiosum virus
cccgugguggg

SEQ ID NO: 4039087 - RNA, 19 nt, Molluscum contagiosum virus
cccgugucgggcugcaucu

SEQ ID NO: 4039088 - RNA, 21 nt, Molluscum contagiosum virus
cccguguucgcggagcugugc

SEQ ID NO: 4039089 - RNA, 18 nt, Molluscum contagiosum virus
cccucaggggcucuccua

SEQ ID NO: 4039090 - RNA, 19 nt, Molluscum contagiosum virus
cccucgcgcgcgcgcggcg

SEQ ID NO: 4039091 - RNA, 15 nt, Molluscum contagiosum virus
cccucguguacgaga

SEQ ID NO: 4039092 - RNA, 18 nt, Molluscum contagiosum virus
cccugcccgcgcgagacu

SEQ ID NO: 4039093 - RNA, 14 nt, Molluscum contagiosum virus
cccugcccgcguga

SEQ ID NO: 4039094 - RNA, 16 nt, Molluscum contagiosum virus
cccugguaguccugcu

SEQ ID NO: 4039095 - RNA, 19 nt, Molluscum contagiosum virus
cccugguuugcgcucucag

SEQ ID NO: 4039096 - RNA, 21 nt, Molluscum contagiosum virus
cccugguuugcgcucucagag

SEQ ID NO: 4039097 - RNA, 12 nt, Molluscum contagiosum virus
ccgaaagcugcc

SEQ ID NO: 4039098 - RNA, 15 nt, Molluscum contagiosum virus
ccgaagucgcagcag

SEQ ID NO: 4039099 - RNA, 17 nt, Molluscum contagiosum virus
ccgacaacgugcugcuc

SEQ ID NO: 4039100 - RNA, 22 nt, Molluscum contagiosum virus
ccgacaaggagggagagcugcc

SEQ ID NO: 4039101 - RNA, 14 nt, Molluscum contagiosum virus
ccgacggcgacgac

SEQ ID NO: 4039102 - RNA, 14 nt, Molluscum contagiosum virus
ccgacuccaaggag

SEQ ID NO: 4039103 - RNA, 17 nt, Molluscum contagiosum virus
ccgacuccuuccggaga

SEQ ID NO: 4039104 - RNA, 16 nt, Molluscum contagiosum virus
ccgacucgcagcucac

SEQ ID NO: 4039105 - RNA, 16 nt, Molluscum contagiosum virus
ccgacuuuucgcgccg

SEQ ID NO: 4039106 - RNA, 22 nt, Molluscum contagiosum virus
ccgagcaacucgcgagagacac

SEQ ID NO: 4039107 - RNA, 17 nt, Molluscum contagiosum virus
ccgagcaauugcugggc

SEQ ID NO: 4039108 - RNA, 20 nt, Molluscum contagiosum virus
ccgagcagaaggaagggccc

SEQ ID NO: 4039109 - RNA, 20 nt, Molluscum contagiosum virus
ccgagcccgcggcgcgcagc

SEQ ID NO: 4039110 - RNA, 19 nt, Molluscum contagiosum virus
ccgagccggacgcgcgaac

SEQ ID NO: 4039111 - RNA, 18 nt, Molluscum contagiosum virus
ccgagcgcgcgcgcugcu

SEQ ID NO: 4039112 - RNA, 23 nt, Molluscum contagiosum virus
ccgagcgcguccaugagcaucuc

SEQ ID NO: 4039113 - RNA, 22 nt, Molluscum contagiosum virus
ccgagcugcggcgcgugcugag

SEQ ID NO: 4039114 - RNA, 21 nt, Molluscum contagiosum virus
ccgaggacgacgccgagcccg

SEQ ID NO: 4039115 - RNA, 13 nt, Molluscum contagiosum virus
ccgaggaggugcu

SEQ ID NO: 4039116 - RNA, 15 nt, Molluscum contagiosum virus
ccgagggcgcgaccg

SEQ ID NO: 4039117 - RNA, 22 nt, Molluscum contagiosum virus
ccgaguauacucgacgcgcgcg

SEQ ID NO: 4039118 - RNA, 15 nt, Molluscum contagiosum virus
ccgagucacgcccca

SEQ ID NO: 4039119 - RNA, 15 nt, Molluscum contagiosum virus
ccgaucgcgagaacg

SEQ ID NO: 4039120 - RNA, 16 nt, Molluscum contagiosum virus
ccgaugcagugcggau

SEQ ID NO: 4039121 - RNA, 20 nt, Molluscum contagiosum virus
ccgcaaaauguagacgggcu

SEQ ID NO: 4039122 - RNA, 18 nt, Molluscum contagiosum virus
ccgcaaacacugucucug

SEQ ID NO: 4039123 - RNA, 14 nt, Molluscum contagiosum virus
ccgcaccagugccg

SEQ ID NO: 4039124 - RNA, 23 nt, Molluscum contagiosum virus
ccgcacuauggacgcuugcuagc

SEQ ID NO: 4039125 - RNA, 14 nt, Molluscum contagiosum virus
ccgcacucgccgcg

SEQ ID NO: 4039126 - RNA, 15 nt, Molluscum contagiosum virus
ccgcagaugcgcagc

SEQ ID NO: 4039127 - RNA, 16 nt, Molluscum contagiosum virus
ccgcagcaagcagccg

SEQ ID NO: 4039128 - RNA, 18 nt, Molluscum contagiosum virus
ccgcagcacgcgugugcg

SEQ ID NO: 4039129 - RNA, 15 nt, Molluscum contagiosum virus
ccgcagccacggccg

SEQ ID NO: 4039130 - RNA, 19 nt, Molluscum contagiosum virus
ccgcagcgcuggagcuggc

SEQ ID NO: 4039131 - RNA, 23 nt, Molluscum contagiosum virus
ccgcaggaaagguacccgcagga

SEQ ID NO: 4039132 - RNA, 18 nt, Molluscum contagiosum virus
ccgcaggaaccgcgugcg

SEQ ID NO: 4039133 - RNA, 17 nt, Molluscum contagiosum virus
ccgcaggccgggcaccc

SEQ ID NO: 4039134 - RNA, 22 nt, Molluscum contagiosum virus
ccgcaggcgucaugcgcgcgcg

SEQ ID NO: 4039135 - RNA, 20 nt, Molluscum contagiosum virus
ccgcagugcucgcacacgug

SEQ ID NO: 4039136 - RNA, 23 nt, Molluscum contagiosum virus
ccgcaguuggucaccgccuguac

SEQ ID NO: 4039137 - RNA, 16 nt, Molluscum contagiosum virus
ccgcauugggccuuga

SEQ ID NO: 4039138 - RNA, 20 nt, Molluscum contagiosum virus
ccgcauuuucucuggagagc

SEQ ID NO: 4039139 - RNA, 13 nt, Molluscum contagiosum virus
ccgccagcaccau

SEQ ID NO: 4039140 - RNA, 19 nt, Molluscum contagiosum virus
ccgccagcgucgcgcgccg

SEQ ID NO: 4039141 - RNA, 22 nt, Molluscum contagiosum virus
ccgccauuuccgagcgcgcacg

SEQ ID NO: 4039142 - RNA, 14 nt, Molluscum contagiosum virus
ccgcccccaggugg

SEQ ID NO: 4039143 - RNA, 22 nt, Molluscum contagiosum virus
ccgcccgggcguagccuagcca

SEQ ID NO: 4039144 - RNA, 21 nt, Molluscum contagiosum virus
ccgcccuuguggacgcgcgag

SEQ ID NO: 4039145 - RNA, 18 nt, Molluscum contagiosum virus
ccgccgcaacauagucaa

SEQ ID NO: 4039146 - RNA, 19 nt, Molluscum contagiosum virus
ccgccgcgcaaaagcacag

SEQ ID NO: 4039147 - RNA, 14 nt, Molluscum contagiosum virus
ccgccgcgugcccg

SEQ ID NO: 4039148 - RNA, 14 nt, Molluscum contagiosum virus
ccgccggcgccgcu

SEQ ID NO: 4039149 - RNA, 19 nt, Molluscum contagiosum virus
ccgccggugcgugcccagc

SEQ ID NO: 4039150 - RNA, 17 nt, Molluscum contagiosum virus
ccgccgucggcgugccg

SEQ ID NO: 4039151 - RNA, 14 nt, Molluscum contagiosum virus
ccgccugcugcagc

SEQ ID NO: 4039152 - RNA, 15 nt, Molluscum contagiosum virus
ccgcgacccagaagc

SEQ ID NO: 4039153 - RNA, 18 nt, Molluscum contagiosum virus
ccgcgagcacuggcuggc

SEQ ID NO: 4039154 - RNA, 20 nt, Molluscum contagiosum virus
ccgcgagcuaaucagcgcca

SEQ ID NO: 4039155 - RNA, 21 nt, Molluscum contagiosum virus
ccgcgaggacccgcgcuuugu

SEQ ID NO: 4039156 - RNA, 23 nt, Molluscum contagiosum virus
ccgcgcaauacgguggaggcgac

SEQ ID NO: 4039157 - RNA, 17 nt, Molluscum contagiosum virus
ccgcgcacugccacgcg

SEQ ID NO: 4039158 - RNA, 13 nt, Molluscum contagiosum virus
ccgcgcagcgugc

SEQ ID NO: 4039159 - RNA, 12 nt, Molluscum contagiosum virus
ccgcgccacgag

SEQ ID NO: 4039160 - RNA, 14 nt, Molluscum contagiosum virus
ccgcgccagcaguc

SEQ ID NO: 4039161 - RNA, 13 nt, Molluscum contagiosum virus
ccgcgccagcgac

SEQ ID NO: 4039162 - RNA, 17 nt, Molluscum contagiosum virus
ccgcgcccgcgcgcuuu

SEQ ID NO: 4039163 - RNA, 18 nt, Molluscum contagiosum virus
ccgcgcccgcggcgcacg

SEQ ID NO: 4039164 - RNA, 20 nt, Molluscum contagiosum virus
ccgcgcccgcggcgcacggc

SEQ ID NO: 4039165 - RNA, 21 nt, Molluscum contagiosum virus
ccgcgcccggcgggcacaucc

SEQ ID NO: 4039166 - RNA, 23 nt, Molluscum contagiosum virus
ccgcgccgaaacacggccuccag

SEQ ID NO: 4039167 - RNA, 22 nt, Molluscum contagiosum virus
ccgcgcgaacaaaaaacaacuc

SEQ ID NO: 4039168 - RNA, 21 nt, Molluscum contagiosum virus
ccgcgcgcgagcuggagcgcg

SEQ ID NO: 4039169 - RNA, 17 nt, Molluscum contagiosum virus
ccgcgcgcgccagcuau

SEQ ID NO: 4039170 - RNA, 20 nt, Molluscum contagiosum virus
ccgcgcgcgccagcuaugcg

SEQ ID NO: 4039171 - RNA, 16 nt, Molluscum contagiosum virus
ccgcgcgcgcgcgaac

SEQ ID NO: 4039172 - RNA, 21 nt, Molluscum contagiosum virus
ccgcgcguacgcugcucgaga

SEQ ID NO: 4039173 - RNA, 11 nt, Molluscum contagiosum virus
ccgcgcgucug

SEQ ID NO: 4039174 - RNA, 17 nt, Molluscum contagiosum virus
ccgcgcgucugcgagug

SEQ ID NO: 4039175 - RNA, 14 nt, Molluscum contagiosum virus
ccgcgcgugcaguu

SEQ ID NO: 4039176 - RNA, 15 nt, Molluscum contagiosum virus
ccgcgcucacugcag

SEQ ID NO: 4039177 - RNA, 21 nt, Molluscum contagiosum virus
ccgcgcucgccgcacgcgaag

SEQ ID NO: 4039178 - RNA, 23 nt, Molluscum contagiosum virus
ccgcgcugaugcuagcgugugcc

SEQ ID NO: 4039179 - RNA, 13 nt, Molluscum contagiosum virus
ccgcgcugcuggc

SEQ ID NO: 4039180 - RNA, 19 nt, Molluscum contagiosum virus
ccgcgcugguggccgcacu

SEQ ID NO: 4039181 - RNA, 16 nt, Molluscum contagiosum virus
ccgcgcuucugccugc

SEQ ID NO: 4039182 - RNA, 17 nt, Molluscum contagiosum virus
ccgcggaagugcgagcc

SEQ ID NO: 4039183 - RNA, 18 nt, Molluscum contagiosum virus
ccgcggacgccggcgccc

SEQ ID NO: 4039184 - RNA, 18 nt, Molluscum contagiosum virus
ccgcggacgcgggccugu

SEQ ID NO: 4039185 - RNA, 14 nt, Molluscum contagiosum virus
ccgcggacucgugc

SEQ ID NO: 4039186 - RNA, 20 nt, Molluscum contagiosum virus
ccgcggagggaggcucgagc

SEQ ID NO: 4039187 - RNA, 20 nt, Molluscum contagiosum virus
ccgcggcgugcagggcgugc

SEQ ID NO: 4039188 - RNA, 16 nt, Molluscum contagiosum virus
ccgcggcgugcccguc

SEQ ID NO: 4039189 - RNA, 17 nt, Molluscum contagiosum virus
ccgcggcugccucgugc

SEQ ID NO: 4039190 - RNA, 21 nt, Molluscum contagiosum virus
ccgcgggcgcagacgccgagc

SEQ ID NO: 4039191 - RNA, 18 nt, Molluscum contagiosum virus
ccgcgggcuggacugugc

SEQ ID NO: 4039192 - RNA, 22 nt, Molluscum contagiosum virus
ccgcggugcguugugcggggcu

SEQ ID NO: 4039193 - RNA, 17 nt, Molluscum contagiosum virus
ccgcgguggccgcgccg

SEQ ID NO: 4039194 - RNA, 23 nt, Molluscum contagiosum virus
ccgcguacacgugcacgcgcacg

SEQ ID NO: 4039195 - RNA, 22 nt, Molluscum contagiosum virus
ccgcguaccaccguggaggagc

SEQ ID NO: 4039196 - RNA, 14 nt, Molluscum contagiosum virus
ccgcguacgcgccg

SEQ ID NO: 4039197 - RNA, 15 nt, Molluscum contagiosum virus
ccgcgugcacccucc

SEQ ID NO: 4039198 - RNA, 15 nt, Molluscum contagiosum virus
ccgcgugcgugcaca

SEQ ID NO: 4039199 - RNA, 18 nt, Molluscum contagiosum virus
ccgcgugcucugcuccgc

SEQ ID NO: 4039200 - RNA, 12 nt, Molluscum contagiosum virus
ccgcgugcuggc

SEQ ID NO: 4039201 - RNA, 21 nt, Molluscum contagiosum virus
ccgcguucuucguggcgcugg

SEQ ID NO: 4039202 - RNA, 15 nt, Molluscum contagiosum virus
ccgcuaccagcucgc

SEQ ID NO: 4039203 - RNA, 19 nt, Molluscum contagiosum virus
ccgcuagagugcgcggaag

SEQ ID NO: 4039204 - RNA, 14 nt, Molluscum contagiosum virus
ccgcucgcgcugcu

SEQ ID NO: 4039205 - RNA, 15 nt, Molluscum contagiosum virus
ccgcucggaauuccu

SEQ ID NO: 4039206 - RNA, 16 nt, Molluscum contagiosum virus
ccgcucggcacugcug

SEQ ID NO: 4039207 - RNA, 19 nt, Molluscum contagiosum virus
ccgcucguccagcugcgcg

SEQ ID NO: 4039208 - RNA, 15 nt, Molluscum contagiosum virus
ccgcucguguuuguc

SEQ ID NO: 4039209 - RNA, 14 nt, Molluscum contagiosum virus
ccgcugagcgcagc

SEQ ID NO: 4039210 - RNA, 15 nt, Molluscum contagiosum virus
ccgcugagcgcagca

SEQ ID NO: 4039211 - RNA, 23 nt, Molluscum contagiosum virus
ccgcugcgcuggaugcugcucga

SEQ ID NO: 4039212 - RNA, 14 nt, Molluscum contagiosum virus
ccgcugcucgacau

SEQ ID NO: 4039213 - RNA, 23 nt, Molluscum contagiosum virus
ccgcuggaccccgagcugcggcg

SEQ ID NO: 4039214 - RNA, 19 nt, Molluscum contagiosum virus
ccgcuggggcggagagcuc

SEQ ID NO: 4039215 - RNA, 17 nt, Molluscum contagiosum virus
ccgcuggugggcgugcg

SEQ ID NO: 4039216 - RNA, 15 nt, Molluscum contagiosum virus
ccgcuuccuggcacu

SEQ ID NO: 4039217 - RNA, 21 nt, Molluscum contagiosum virus
ccgcuuccuggcacuggcgcg

SEQ ID NO: 4039218 - RNA, 20 nt, Molluscum contagiosum virus
ccggaaagauauacaccagg

SEQ ID NO: 4039219 - RNA, 17 nt, Molluscum contagiosum virus
ccggaauguagccuuug

SEQ ID NO: 4039220 - RNA, 15 nt, Molluscum contagiosum virus
ccggagacaccagcu

SEQ ID NO: 4039221 - RNA, 14 nt, Molluscum contagiosum virus
ccggagcgcggggc

SEQ ID NO: 4039222 - RNA, 23 nt, Molluscum contagiosum virus
ccggcaacgcugccgcuggcgcu

SEQ ID NO: 4039223 - RNA, 15 nt, Molluscum contagiosum virus
ccggcacgugccccg

SEQ ID NO: 4039224 - RNA, 14 nt, Molluscum contagiosum virus
ccggcagcgcgccu

SEQ ID NO: 4039225 - RNA, 15 nt, Molluscum contagiosum virus
ccggcagcuggagcu

SEQ ID NO: 4039226 - RNA, 16 nt, Molluscum contagiosum virus
ccggcagcuggagcug

SEQ ID NO: 4039227 - RNA, 17 nt, Molluscum contagiosum virus
ccggcagcuggagcugc

SEQ ID NO: 4039228 - RNA, 20 nt, Molluscum contagiosum virus
ccggcccgacacacuccugu

SEQ ID NO: 4039229 - RNA, 16 nt, Molluscum contagiosum virus
ccggccuagagcuggc

SEQ ID NO: 4039230 - RNA, 19 nt, Molluscum contagiosum virus
ccggcgaaccgacugcccg

SEQ ID NO: 4039231 - RNA, 23 nt, Molluscum contagiosum virus
ccggcgccgacagcgcgcgcacg

SEQ ID NO: 4039232 - RNA, 13 nt, Molluscum contagiosum virus
ccggcgcgccgcg

SEQ ID NO: 4039233 - RNA, 20 nt, Molluscum contagiosum virus
ccggcgcggcgagccgcgcg

SEQ ID NO: 4039234 - RNA, 15 nt, Molluscum contagiosum virus
ccggcgcucgccccu

SEQ ID NO: 4039235 - RNA, 13 nt, Molluscum contagiosum virus
ccggcgcucgccu

SEQ ID NO: 4039236 - RNA, 17 nt, Molluscum contagiosum virus
ccggcggcaagcgagau

SEQ ID NO: 4039237 - RNA, 20 nt, Molluscum contagiosum virus
ccggcggcccgcggcgcgcc

SEQ ID NO: 4039238 - RNA, 21 nt, Molluscum contagiosum virus
ccggcggcuggaccugcgcca

SEQ ID NO: 4039239 - RNA, 12 nt, Molluscum contagiosum virus
ccggcucugccu

SEQ ID NO: 4039240 - RNA, 15 nt, Molluscum contagiosum virus
ccgggaaacgcacag

SEQ ID NO: 4039241 - RNA, 20 nt, Molluscum contagiosum virus
ccgggagagccgcuccuggu

SEQ ID NO: 4039242 - RNA, 23 nt, Molluscum contagiosum virus
ccgggauuugccgguugcgcgug

SEQ ID NO: 4039243 - RNA, 20 nt, Molluscum contagiosum virus
ccgggccccugucgcgcacg

SEQ ID NO: 4039244 - RNA, 21 nt, Molluscum contagiosum virus
ccgggccugcggcggcgcacg

SEQ ID NO: 4039245 - RNA, 15 nt, Molluscum contagiosum virus
ccgggcgcugcaccg

SEQ ID NO: 4039246 - RNA, 23 nt, Molluscum contagiosum virus
ccggggaugaacgcgcugcgcca

SEQ ID NO: 4039247 - RNA, 21 nt, Molluscum contagiosum virus
ccggggcgcgcgcugcgcacg

SEQ ID NO: 4039248 - RNA, 23 nt, Molluscum contagiosum virus
cacgcgacgacgcacgcuugccu

SEQ ID NO: 4039249 - RNA, 19 nt, Molluscum contagiosum virus
cacgcgacggugugccgcu

SEQ ID NO: 4039250 - RNA, 21 nt, Molluscum contagiosum virus
cacgcgacggugugccgcugg

SEQ ID NO: 4039251 - RNA, 17 nt, Molluscum contagiosum virus
cacgcgagcggagcugg

SEQ ID NO: 4039252 - RNA, 13 nt, Molluscum contagiosum virus
cacgcgcacacgc

SEQ ID NO: 4039253 - RNA, 16 nt, Molluscum contagiosum virus
cacgcgcacgcgcgag

SEQ ID NO: 4039254 - RNA, 22 nt, Molluscum contagiosum virus
cggcagcgucgcggagcgcgca

SEQ ID NO: 4039255 - RNA, 15 nt, Molluscum contagiosum virus
cggcagcucugcagc

SEQ ID NO: 4039256 - RNA, 17 nt, Molluscum contagiosum virus
cggcagcucugcagcgc

SEQ ID NO: 4039257 - RNA, 12 nt, Molluscum contagiosum virus
cggcagcuggag

SEQ ID NO: 4039258 - RNA, 17 nt, Molluscum contagiosum virus
cggcaggcgcugcgcgg

SEQ ID NO: 4039259 - RNA, 22 nt, Molluscum contagiosum virus
cggcaggcucccgcugucgcgc

SEQ ID NO: 4039260 - RNA, 22 nt, Molluscum contagiosum virus
cggcagguuugcacccgcgcag

SEQ ID NO: 4039261 - RNA, 15 nt, Molluscum contagiosum virus
cggcaguagcagcgc

SEQ ID NO: 4039262 - RNA, 21 nt, Molluscum contagiosum virus
cggcaguggccgucgggcgcc

SEQ ID NO: 4039263 - RNA, 22 nt, Molluscum contagiosum virus
cggcaugugcgcaccgcgggcu

SEQ ID NO: 4039264 - RNA, 16 nt, Molluscum contagiosum virus
cggccaaccgccugcu

SEQ ID NO: 4039265 - RNA, 23 nt, Molluscum contagiosum virus
cggccagagccuucucgguguag

SEQ ID NO: 4039266 - RNA, 21 nt, Molluscum contagiosum virus
cggccagcgugcagacgaccg

SEQ ID NO: 4039267 - RNA, 23 nt, Molluscum contagiosum virus
cggcccccuuacgcuacagcagc

SEQ ID NO: 4039268 - RNA, 20 nt, Molluscum contagiosum virus
cggcccgaguacgcucucca

SEQ ID NO: 4039269 - RNA, 12 nt, Molluscum contagiosum virus
cggcccgcggac

SEQ ID NO: 4039270 - RNA, 13 nt, Molluscum contagiosum virus
cggccgccggcgc

SEQ ID NO: 4039271 - RNA, 22 nt, Molluscum contagiosum virus
cggccgcgagacgcagacgacg

SEQ ID NO: 4039272 - RNA, 15 nt, Molluscum contagiosum virus
cggccgcggaccacg

SEQ ID NO: 4039273 - RNA, 14 nt, Molluscum contagiosum virus
cggccgcguugcag

SEQ ID NO: 4039274 - RNA, 14 nt, Molluscum contagiosum virus
cggccguggcugcg

SEQ ID NO: 4039275 - RNA, 21 nt, Molluscum contagiosum virus
cggccguguccuacacgccgc

SEQ ID NO: 4039276 - RNA, 13 nt, Molluscum contagiosum virus
cggccuccagcag

SEQ ID NO: 4039277 - RNA, 21 nt, Molluscum contagiosum virus
cggccugcacggcuaccgcga

SEQ ID NO: 4039278 - RNA, 13 nt, Molluscum contagiosum virus
cggccugcccugc

SEQ ID NO: 4039279 - RNA, 19 nt, Molluscum contagiosum virus
cggccugcccugcucaugc

SEQ ID NO: 4039280 - RNA, 12 nt, Molluscum contagiosum virus
cggccuggccac

SEQ ID NO: 4039281 - RNA, 15 nt, Molluscum contagiosum virus
cggcgaacaccccga

SEQ ID NO: 4039282 - RNA, 23 nt, Molluscum contagiosum virus
cggcgaaccgacugcccgcgccc

SEQ ID NO: 4039283 - RNA, 21 nt, Molluscum contagiosum virus
cggcgagacgugcggcacgcu

SEQ ID NO: 4039284 - RNA, 13 nt, Molluscum contagiosum virus
cggcgcaacgcca

SEQ ID NO: 4039285 - RNA, 18 nt, Molluscum contagiosum virus
cggcgcaagcaccggcag

SEQ ID NO: 4039286 - RNA, 15 nt, Molluscum contagiosum virus
cggcgcaaucucgcg

SEQ ID NO: 4039287 - RNA, 20 nt, Molluscum contagiosum virus
cggcgcacacuccucggcgc

SEQ ID NO: 4039288 - RNA, 18 nt, Molluscum contagiosum virus
cggcgccaccggcagugc

SEQ ID NO: 4039289 - RNA, 22 nt, Molluscum contagiosum virus
cggcgccacgagcgccgcgacg

SEQ ID NO: 4039290 - RNA, 22 nt, Molluscum contagiosum virus
cggcgccccuccuaucucaaag

SEQ ID NO: 4039291 - RNA, 11 nt, Molluscum contagiosum virus
cggcgcccgca

SEQ ID NO: 4039292 - RNA, 15 nt, Molluscum contagiosum virus
cggcgcccgcgugca

SEQ ID NO: 4039293 - RNA, 22 nt, Molluscum contagiosum virus
cggcgcccgcgugcacccuccg

SEQ ID NO: 4039294 - RNA, 20 nt, Molluscum contagiosum virus
cggcgcccgugagcauggag

SEQ ID NO: 4039295 - RNA, 14 nt, Molluscum contagiosum virus
cggcgccgacagcg

SEQ ID NO: 4039296 - RNA, 21 nt, Molluscum contagiosum virus
cggcgccgacagcgcgcgcac

SEQ ID NO: 4039297 - RNA, 16 nt, Molluscum contagiosum virus
cggcgcgagaugcucg

SEQ ID NO: 4039298 - RNA, 12 nt, Molluscum contagiosum virus
cggcgcgcaccu

SEQ ID NO: 4039299 - RNA, 13 nt, Molluscum contagiosum virus
cggcgcgcagcgc

SEQ ID NO: 4039300 - RNA, 14 nt, Molluscum contagiosum virus
cggcgcgcagcgcg

SEQ ID NO: 4039301 - RNA, 12 nt, Molluscum contagiosum virus
cggcgcgccggc

SEQ ID NO: 4039302 - RNA, 15 nt, Molluscum contagiosum virus
cggcgcgccggcccg

SEQ ID NO: 4039303 - RNA, 13 nt, Molluscum contagiosum virus
cggcgcgcgccgc

SEQ ID NO: 4039304 - RNA, 16 nt, Molluscum contagiosum virus
cggcgcgcgcgcgcag

SEQ ID NO: 4039305 - RNA, 16 nt, Molluscum contagiosum virus
cggcgcgcgcgcuagc

SEQ ID NO: 4039306 - RNA, 15 nt, Molluscum contagiosum virus
cggcgcgggcaagca

SEQ ID NO: 4039307 - RNA, 21 nt, Molluscum contagiosum virus
cggcgcguccucggccagagc

SEQ ID NO: 4039308 - RNA, 19 nt, Molluscum contagiosum virus
cggcgcgugccgcugcgcg

SEQ ID NO: 4039309 - RNA, 16 nt, Molluscum contagiosum virus
cggcgcucgccuuucc

SEQ ID NO: 4039310 - RNA, 22 nt, Molluscum contagiosum virus
cggcgcucgccuuuccccggcg

SEQ ID NO: 4039311 - RNA, 15 nt, Molluscum contagiosum virus
cggcggcaagcgaga

SEQ ID NO: 4039312 - RNA, 14 nt, Molluscum contagiosum virus
cggcggcgcgaagc

SEQ ID NO: 4039313 - RNA, 19 nt, Molluscum contagiosum virus
cggcggcugugcccgcggc

SEQ ID NO: 4039314 - RNA, 20 nt, Molluscum contagiosum virus
cggcggcuuucucacgcccg

SEQ ID NO: 4039315 - RNA, 16 nt, Molluscum contagiosum virus
cggcgggaagggguga

SEQ ID NO: 4039316 - RNA, 22 nt, Molluscum contagiosum virus
cggcgggcacauccgcuaccug

SEQ ID NO: 4039317 - RNA, 21 nt, Molluscum contagiosum virus
cggcggggcugcuggcggugc

SEQ ID NO: 4039318 - RNA, 21 nt, Molluscum contagiosum virus
cggcguccgcagcggcgccac

SEQ ID NO: 4039319 - RNA, 19 nt, Molluscum contagiosum virus
cggcguccgcggcacgcga

SEQ ID NO: 4039320 - RNA, 19 nt, Molluscum contagiosum virus
cggcguccggugcucgccc

SEQ ID NO: 4039321 - RNA, 19 nt, Molluscum contagiosum virus
cggcgucgaaacacugcgg

SEQ ID NO: 4039322 - RNA, 22 nt, Molluscum contagiosum virus
cggcgucgcgcgcgaccuccgc

SEQ ID NO: 4039323 - RNA, 16 nt, Molluscum contagiosum virus
cggcgugcuggccagc

SEQ ID NO: 4039324 - RNA, 14 nt, Molluscum contagiosum virus
cggcguggccaggc

SEQ ID NO: 4039325 - RNA, 14 nt, Molluscum contagiosum virus
cggcguucgcggag

SEQ ID NO: 4039326 - RNA, 21 nt, Molluscum contagiosum virus
cggcuaagcucugcguuuugc

SEQ ID NO: 4039327 - RNA, 19 nt, Molluscum contagiosum virus
cggcucaccgcgcagaagc

SEQ ID NO: 4039328 - RNA, 16 nt, Molluscum contagiosum virus
cggcucagcguggagc

SEQ ID NO: 4039329 - RNA, 14 nt, Molluscum contagiosum virus
cggcucccagcagc

SEQ ID NO: 4039330 - RNA, 18 nt, Molluscum contagiosum virus
cggcucuggagcggccac

SEQ ID NO: 4039331 - RNA, 17 nt, Molluscum contagiosum virus
cggcugccgcugccugu

SEQ ID NO: 4039332 - RNA, 22 nt, Molluscum contagiosum virus
cggcugcucgcugccuggugca

SEQ ID NO: 4039333 - RNA, 15 nt, Molluscum contagiosum virus
cggcuguggacauga

SEQ ID NO: 4039334 - RNA, 15 nt, Molluscum contagiosum virus
cgggaaacugcugcc

SEQ ID NO: 4039335 - RNA, 22 nt, Molluscum contagiosum virus
cgggaaggcaggccccgcacca

SEQ ID NO: 4039336 - RNA, 21 nt, Molluscum contagiosum virus
cgggaaguguugccgccggcc

SEQ ID NO: 4039337 - RNA, 20 nt, Molluscum contagiosum virus
cgggaauaccggagacacca

SEQ ID NO: 4039338 - RNA, 22 nt, Molluscum contagiosum virus
cgggaauaccggagacaccagc

SEQ ID NO: 4039339 - RNA, 23 nt, Molluscum contagiosum virus
cgggaauaccggagacaccagcu

SEQ ID NO: 4039340 - RNA, 19 nt, Molluscum contagiosum virus
cgggaaugcugcgcacgcu

SEQ ID NO: 4039341 - RNA, 22 nt, Molluscum contagiosum virus
cgggaccgcccuuguggacgcg

SEQ ID NO: 4039342 - RNA, 13 nt, Molluscum contagiosum virus
cgggacgcgugcc

SEQ ID NO: 4039343 - RNA, 17 nt, Molluscum contagiosum virus
cgggagcaacgaaccgu

SEQ ID NO: 4039344 - RNA, 21 nt, Molluscum contagiosum virus
cgggagcaagucugcgcagga

SEQ ID NO: 4039345 - RNA, 18 nt, Molluscum contagiosum virus
cgggauggucucgcugcu

SEQ ID NO: 4039346 - RNA, 23 nt, Molluscum contagiosum virus
cgggcacgccgcagcgcuggagc

SEQ ID NO: 4039347 - RNA, 21 nt, Molluscum contagiosum virus
cgggcacgcgcgcgccuuucc

SEQ ID NO: 4039348 - RNA, 20 nt, Molluscum contagiosum virus
cgggcacgcucauacuccug

SEQ ID NO: 4039349 - RNA, 17 nt, Molluscum contagiosum virus
cgggcacgugcugcugc

SEQ ID NO: 4039350 - RNA, 18 nt, Molluscum contagiosum virus
cgggcaugcacagcugcu

SEQ ID NO: 4039351 - RNA, 18 nt, Molluscum contagiosum virus
cgggcccaccgcgccagc

SEQ ID NO: 4039352 - RNA, 17 nt, Molluscum contagiosum virus
cgggccccugcgcgagc

SEQ ID NO: 4039353 - RNA, 18 nt, Molluscum contagiosum virus
cgggccccugcgcgagca

SEQ ID NO: 4039354 - RNA, 21 nt, Molluscum contagiosum virus
cgggccccugucgcgcacgag

SEQ ID NO: 4039355 - RNA, 12 nt, Molluscum contagiosum virus
cgggcccgccuu

SEQ ID NO: 4039356 - RNA, 16 nt, Molluscum contagiosum virus
cgggcccgugcccgag

SEQ ID NO: 4039357 - RNA, 21 nt, Molluscum contagiosum virus
cgugaggaggcggcacugcua

SEQ ID NO: 4039358 - RNA, 14 nt, Molluscum contagiosum virus
cgugcaccucaaga

SEQ ID NO: 4039359 - RNA, 15 nt, Molluscum contagiosum virus
cgugcaccucaagaa

SEQ ID NO: 4039360 - RNA, 19 nt, Molluscum contagiosum virus
cgugcacguggcgcacacg

SEQ ID NO: 4039361 - RNA, 21 nt, Molluscum contagiosum virus
cgugcacguggcgcacacgga

SEQ ID NO: 4039362 - RNA, 13 nt, Molluscum contagiosum virus
cgugcagcggcgc

SEQ ID NO: 4039363 - RNA, 16 nt, Molluscum contagiosum virus
cgugcaguuucuccuc

SEQ ID NO: 4039364 - RNA, 15 nt, Molluscum contagiosum virus
cgugcaugcccagca

SEQ ID NO: 4039365 - RNA, 18 nt, Molluscum contagiosum virus
cgugcauggcacgcgagc

SEQ ID NO: 4039366 - RNA, 16 nt, Molluscum contagiosum virus
cgugccacugccgccg

SEQ ID NO: 4039367 - RNA, 14 nt, Molluscum contagiosum virus
cgugccccgcgcgu

SEQ ID NO: 4039368 - RNA, 18 nt, Molluscum contagiosum virus
cgugccgcggcacugggu

SEQ ID NO: 4039369 - RNA, 13 nt, Molluscum contagiosum virus
cgugcgagcagag

SEQ ID NO: 4039370 - RNA, 17 nt, Molluscum contagiosum virus
cgugcgcaccaucuuca

SEQ ID NO: 4039371 - RNA, 13 nt, Molluscum contagiosum virus
cgugcgcagcagc

SEQ ID NO: 4039372 - RNA, 19 nt, Molluscum contagiosum virus
cgugcgcgacggcgagcuc

SEQ ID NO: 4039373 - RNA, 13 nt, Molluscum contagiosum virus
cgugcgcgccagg

SEQ ID NO: 4039374 - RNA, 15 nt, Molluscum contagiosum virus
cgugcgcgcugcgcg

SEQ ID NO: 4039375 - RNA, 16 nt, Molluscum contagiosum virus
cgugcgcgggcacgcc

SEQ ID NO: 4039376 - RNA, 17 nt, Molluscum contagiosum virus
cgugcgcuggcccacgc

SEQ ID NO: 4039377 - RNA, 17 nt, Molluscum contagiosum virus
cgugcguacucaacgcg

SEQ ID NO: 4039378 - RNA, 15 nt, Molluscum contagiosum virus
cgugcucacgcugcc

SEQ ID NO: 4039379 - RNA, 13 nt, Molluscum contagiosum virus
cgugcuccacgcg

SEQ ID NO: 4039380 - RNA, 17 nt, Molluscum contagiosum virus
cgugcuccucgcguagc

SEQ ID NO: 4039381 - RNA, 16 nt, Molluscum contagiosum virus
cgugcucguguguccg

SEQ ID NO: 4039382 - RNA, 15 nt, Molluscum contagiosum virus
cgugcucugcuccgc

SEQ ID NO: 4039383 - RNA, 17 nt, Molluscum contagiosum virus
cgugcugcccguggugg

SEQ ID NO: 4039384 - RNA, 15 nt, Molluscum contagiosum virus
cgugcuggagcaggg

SEQ ID NO: 4039385 - RNA, 13 nt, Molluscum contagiosum virus
cgugcugucagug

SEQ ID NO: 4039386 - RNA, 17 nt, Molluscum contagiosum virus
cgugcuuacggacagga

SEQ ID NO: 4039387 - RNA, 17 nt, Molluscum contagiosum virus
cgugcuuguagcgcaag

SEQ ID NO: 4039388 - RNA, 18 nt, Molluscum contagiosum virus
cguggaaaagcagggccc

SEQ ID NO: 4039389 - RNA, 18 nt, Molluscum contagiosum virus
cguggcaaacaggcacac

SEQ ID NO: 4039390 - RNA, 15 nt, Molluscum contagiosum virus
cguggcgcgcgagcu

SEQ ID NO: 4039391 - RNA, 19 nt, Molluscum contagiosum virus
cguggcgcgcgagcugcua

SEQ ID NO: 4039392 - RNA, 22 nt, Molluscum contagiosum virus
cguggcgcuuggcgagcgcugc

SEQ ID NO: 4039393 - RNA, 23 nt, Molluscum contagiosum virus
cguggcgcuuggcgagcgcugcc

SEQ ID NO: 4039394 - RNA, 16 nt, Molluscum contagiosum virus
cguggcguugcugcug

SEQ ID NO: 4039395 - RNA, 17 nt, Molluscum contagiosum virus
cguggcguugcugcugc

SEQ ID NO: 4039396 - RNA, 18 nt, Molluscum contagiosum virus
cguggcguugcugcugcg

SEQ ID NO: 4039397 - RNA, 22 nt, Molluscum contagiosum virus
cguggcuaugagcggcacggga

SEQ ID NO: 4039398 - RNA, 22 nt, Molluscum contagiosum virus
cgugggcaccugcaucgcgccg

SEQ ID NO: 4039399 - RNA, 13 nt, Molluscum contagiosum virus
cgugggcagccgc

SEQ ID NO: 4039400 - RNA, 13 nt, Molluscum contagiosum virus
cgugggcagcuuc

SEQ ID NO: 4039401 - RNA, 16 nt, Molluscum contagiosum virus
cgugggcgccgcggcg

SEQ ID NO: 4039402 - RNA, 19 nt, Molluscum contagiosum virus
cguggucgagggcgaggcc

SEQ ID NO: 4039403 - RNA, 18 nt, Molluscum contagiosum virus
cguguaccgccgcggccg

SEQ ID NO: 4039404 - RNA, 20 nt, Molluscum contagiosum virus
cguguacgacgugcugcugc

SEQ ID NO: 4039405 - RNA, 23 nt, Molluscum contagiosum virus
cguguguccgcacgcacacgacg

SEQ ID NO: 4039406 - RNA, 20 nt, Molluscum contagiosum virus
cguuacggagaccuggucac

SEQ ID NO: 4039407 - RNA, 19 nt, Molluscum contagiosum virus
cguuagcguugguaacaag

SEQ ID NO: 4039408 - RNA, 17 nt, Molluscum contagiosum virus
gcacauccgcuaccugg

SEQ ID NO: 4039409 - RNA, 20 nt, Molluscum contagiosum virus
gcacaucucucagggcagcg

SEQ ID NO: 4039410 - RNA, 19 nt, Molluscum contagiosum virus
gcacaugugcgugcaccuc

SEQ ID NO: 4039411 - RNA, 21 nt, Molluscum contagiosum virus
gcacaugugcgugcaccucaa

SEQ ID NO: 4039412 - RNA, 12 nt, Molluscum contagiosum virus
gcacauugcugc

SEQ ID NO: 4039413 - RNA, 14 nt, Molluscum contagiosum virus
gcacauugcugcug

SEQ ID NO: 4039414 - RNA, 15 nt, Molluscum contagiosum virus
gcacccaccaggaac

SEQ ID NO: 4039415 - RNA, 17 nt, Molluscum contagiosum virus
gcacccaccaggaacag

SEQ ID NO: 4039416 - RNA, 16 nt, Molluscum contagiosum virus
gcaccccgcaggaaag

SEQ ID NO: 4039417 - RNA, 18 nt, Molluscum contagiosum virus
gcacccgcaggaaaggca

SEQ ID NO: 4039418 - RNA, 13 nt, Molluscum contagiosum virus
gcacccgcgcggc

SEQ ID NO: 4039419 - RNA, 13 nt, Molluscum contagiosum virus
gcacccuggcugc

SEQ ID NO: 4039420 - RNA, 17 nt, Molluscum contagiosum virus
gcacccuggcugcugcg

SEQ ID NO: 4039421 - RNA, 18 nt, Molluscum contagiosum virus
gcacccuggcugcugcgc

SEQ ID NO: 4039422 - RNA, 21 nt, Molluscum contagiosum virus
gcacccuucugaggggcagug

SEQ ID NO: 4039423 - RNA, 15 nt, Molluscum contagiosum virus
gcaccgagugcuggc

SEQ ID NO: 4039424 - RNA, 17 nt, Molluscum contagiosum virus
gcaccgcacgccagcag

SEQ ID NO: 4039425 - RNA, 18 nt, Molluscum contagiosum virus
gcaccgcaugggcccugg

SEQ ID NO: 4039426 - RNA, 16 nt, Molluscum contagiosum virus
gcaccgcgcgcgcucc

SEQ ID NO: 4039427 - RNA, 17 nt, Molluscum contagiosum virus
gcaccgcguggcgcgcg

SEQ ID NO: 4039428 - RNA, 20 nt, Molluscum contagiosum virus
gcaccgcguugccgcccgcc

SEQ ID NO: 4039429 - RNA, 20 nt, Molluscum contagiosum virus
gcaccucaacuguugccugg

SEQ ID NO: 4039430 - RNA, 15 nt, Molluscum contagiosum virus
gcaccugcacgagcc

SEQ ID NO: 4039431 - RNA, 17 nt, Molluscum contagiosum virus
gcaccugcaucgcgccg

SEQ ID NO: 4039432 - RNA, 13 nt, Molluscum contagiosum virus
gcaccugcgccgc

SEQ ID NO: 4039433 - RNA, 14 nt, Molluscum contagiosum virus
gcaccugcuggaac

SEQ ID NO: 4039434 - RNA, 16 nt, Molluscum contagiosum virus
gcaccuggucgagcac

SEQ ID NO: 4039435 - RNA, 19 nt, Molluscum contagiosum virus
gcacgaaggacgcgcuugc

SEQ ID NO: 4039436 - RNA, 15 nt, Molluscum contagiosum virus
gcacgaccacgcugg

SEQ ID NO: 4039437 - RNA, 21 nt, Molluscum contagiosum virus
gcacgaccucacagcgccgga

SEQ ID NO: 4039438 - RNA, 20 nt, Molluscum contagiosum virus
gcacgacguacgagugcugg

SEQ ID NO: 4039439 - RNA, 23 nt, Molluscum contagiosum virus
gcacgagcaguccgccucgagca

SEQ ID NO: 4039440 - RNA, 14 nt, Molluscum contagiosum virus
gcacgagcugcugc

SEQ ID NO: 4039441 - RNA, 15 nt, Molluscum contagiosum virus
gcacgagcugcugcc

SEQ ID NO: 4039442 - RNA, 18 nt, Molluscum contagiosum virus
gcacgauguacuccacca

SEQ ID NO: 4039443 - RNA, 15 nt, Molluscum contagiosum virus
gcacgcagcucuucc

SEQ ID NO: 4039444 - RNA, 22 nt, Molluscum contagiosum virus
gcacgcccuggcccucggggcu

SEQ ID NO: 4039445 - RNA, 16 nt, Molluscum contagiosum virus
gcacgccgugggcagc

SEQ ID NO: 4039446 - RNA, 22 nt, Molluscum contagiosum virus
gcacgcgaugagcgucucggug

SEQ ID NO: 4039447 - RNA, 21 nt, Molluscum contagiosum virus
gcacgcgcacgggccugcgcg

SEQ ID NO: 4039448 - RNA, 16 nt, Molluscum contagiosum virus
gcacgcgcgagcaugc

SEQ ID NO: 4039449 - RNA, 23 nt, Molluscum contagiosum virus
gcacgcgcgagcaugccgccgcg

SEQ ID NO: 4039450 - RNA, 13 nt, Molluscum contagiosum virus
gcacgcggcgcuc

SEQ ID NO: 4039451 - RNA, 14 nt, Molluscum contagiosum virus
gcacgcggcucugg

SEQ ID NO: 4039452 - RNA, 17 nt, Molluscum contagiosum virus
gcacgcggcucuggagc

SEQ ID NO: 4039453 - RNA, 18 nt, Molluscum contagiosum virus
gcacgcuacggcugccgg

SEQ ID NO: 4039454 - RNA, 20 nt, Molluscum contagiosum virus
gcacgcucauacuccugcug

SEQ ID NO: 4039455 - RNA, 17 nt, Molluscum contagiosum virus
gcacgcucggcacucgc

SEQ ID NO: 4039456 - RNA, 22 nt, Molluscum contagiosum virus
gcacgcucuacggcgugcugug

SEQ ID NO: 4039457 - RNA, 19 nt, Molluscum contagiosum virus
gcacgcugagcaagcucaa

SEQ ID NO: 4039458 - RNA, 20 nt, Molluscum contagiosum virus
gcacgcugcguuuccagggc

SEQ ID NO: 4039459 - RNA, 19 nt, Molluscum contagiosum virus
gcacgcugcugcgugcgcg

SEQ ID NO: 4039460 - RNA, 18 nt, Molluscum contagiosum virus
gcacgcuugugcgcacgc

SEQ ID NO: 4039461 - RNA, 15 nt, Molluscum contagiosum virus
gcacggacagcaccc

SEQ ID NO: 4039462 - RNA, 19 nt, Molluscum contagiosum virus
gcacggacccgggcgcggc

SEQ ID NO: 4039463 - RNA, 15 nt, Molluscum contagiosum virus
gcacggccggcgccg

SEQ ID NO: 4039464 - RNA, 17 nt, Molluscum contagiosum virus
gcacggccggcgccgcg

SEQ ID NO: 4039465 - RNA, 15 nt, Molluscum contagiosum virus
gcacggcgcccagga

SEQ ID NO: 4039466 - RNA, 19 nt, Molluscum contagiosum virus
gcacggcuaccacgagcac

SEQ ID NO: 4039467 - RNA, 17 nt, Molluscum contagiosum virus
gcacggcuaggcgcggc

SEQ ID NO: 4039468 - RNA, 15 nt, Molluscum contagiosum virus
gcacgggcucgagcu

SEQ ID NO: 4039469 - RNA, 20 nt, Molluscum contagiosum virus
gcacgggcucgaucugcgcc

SEQ ID NO: 4039470 - RNA, 17 nt, Molluscum contagiosum virus
gcacgucuuugacccca

SEQ ID NO: 4039471 - RNA, 19 nt, Molluscum contagiosum virus
gcacgugccccgcgcgugc

SEQ ID NO: 4039472 - RNA, 24 nt, Molluscum contagiosum virus
gcacgugggcuacaagugcauccg

SEQ ID NO: 4039473 - RNA, 17 nt, Molluscum contagiosum virus
gcacgugugcggagagc

SEQ ID NO: 4039474 - RNA, 18 nt, Molluscum contagiosum virus
gcacgugugcggagagcc

SEQ ID NO: 4039475 - RNA, 21 nt, Molluscum contagiosum virus
gcacguuguucuugcgcgugg

SEQ ID NO: 4039476 - RNA, 14 nt, Molluscum contagiosum virus
gcacucgcgcucgc

SEQ ID NO: 4039477 - RNA, 14 nt, Molluscum contagiosum virus
gcacugagaaguga

SEQ ID NO: 4039478 - RNA, 18 nt, Molluscum contagiosum virus
gcacugcagcgagcucgc

SEQ ID NO: 4039479 - RNA, 19 nt, Molluscum contagiosum virus
gcacugccacgcggagcuc

SEQ ID NO: 4039480 - RNA, 21 nt, Molluscum contagiosum virus
gcacugccacgcggagcucgc

SEQ ID NO: 4039481 - RNA, 21 nt, Molluscum contagiosum virus
gcacugccgcguccucagguu

SEQ ID NO: 4039482 - RNA, 15 nt, Molluscum contagiosum virus
gcacugccugccgcc

SEQ ID NO: 4039483 - RNA, 18 nt, Molluscum contagiosum virus
gcacugcgcgucugugcg

SEQ ID NO: 4039484 - RNA, 16 nt, Molluscum contagiosum virus
gcacugcucgcgcacg

SEQ ID NO: 4039485 - RNA, 17 nt, Molluscum contagiosum virus
gcacugcucgcgcacgc

SEQ ID NO: 4039486 - RNA, 16 nt, Molluscum contagiosum virus
gcacugcuggcgcgcg

SEQ ID NO: 4039487 - RNA, 22 nt, Molluscum contagiosum virus
gcacuggcuggcguucgacggc

SEQ ID NO: 4039488 - RNA, 16 nt, Molluscum contagiosum virus
gcacuggggcgaucgc

SEQ ID NO: 4039489 - RNA, 18 nt, Molluscum contagiosum virus
gcacuguguccccugagc

SEQ ID NO: 4039490 - RNA, 17 nt, Molluscum contagiosum virus
gcagaacugcugcgcgc

SEQ ID NO: 4039491 - RNA, 20 nt, Molluscum contagiosum virus
gcagaagacggaguccucga

SEQ ID NO: 4039492 - RNA, 17 nt, Molluscum contagiosum virus
gcagacaaagacagucc

SEQ ID NO: 4039493 - RNA, 19 nt, Molluscum contagiosum virus
gcagaccaagaagcccgag

SEQ ID NO: 4039494 - RNA, 12 nt, Molluscum contagiosum virus
gcagagcacgag

SEQ ID NO: 4039495 - RNA, 20 nt, Molluscum contagiosum virus
gcagagguaaucccgagcuu

SEQ ID NO: 4039496 - RNA, 18 nt, Molluscum contagiosum virus
gcagaucgcgagaggaga

SEQ ID NO: 4039497 - RNA, 14 nt, Molluscum contagiosum virus
gcagauuggaggag

SEQ ID NO: 4039498 - RNA, 16 nt, Molluscum contagiosum virus
gcagcaagcagccgca

SEQ ID NO: 4039499 - RNA, 22 nt, Molluscum contagiosum virus
gcagcagaccaagaagcccgag

SEQ ID NO: 4039500 - RNA, 21 nt, Molluscum contagiosum virus
gcagcaggaugcuggugucga

SEQ ID NO: 4039501 - RNA, 15 nt, Molluscum contagiosum virus
gcagcaggcacucca

SEQ ID NO: 4039502 - RNA, 19 nt, Molluscum contagiosum virus
gcagcaggugcacgugcug

SEQ ID NO: 4039503 - RNA, 20 nt, Molluscum contagiosum virus
gcagcaggugcacgugcugc

SEQ ID NO: 4039504 - RNA, 16 nt, Molluscum contagiosum virus
gcagcagugccagcag

SEQ ID NO: 4039505 - RNA, 17 nt, Molluscum contagiosum virus
gcagcagugccagcagc

SEQ ID NO: 4039506 - RNA, 20 nt, Molluscum contagiosum virus
gcagcauuuuggugggcacg

SEQ ID NO: 4039507 - RNA, 17 nt, Molluscum contagiosum virus
gcagcccgagcgcgcgu

SEQ ID NO: 4039508 - RNA, 14 nt, Molluscum contagiosum virus
gcagccgcgcucgu

SEQ ID NO: 4039509 - RNA, 18 nt, Molluscum contagiosum virus
gcagccgcugcugcugca

SEQ ID NO: 4039510 - RNA, 15 nt, Molluscum contagiosum virus
gcagccgcuggacgc

SEQ ID NO: 4039511 - RNA, 14 nt, Molluscum contagiosum virus
gcagccucaaccug

SEQ ID NO: 4039512 - RNA, 17 nt, Molluscum contagiosum virus
gcagcgcccggugcggc

SEQ ID NO: 4039513 - RNA, 13 nt, Molluscum contagiosum virus
gcagcgccggcag

SEQ ID NO: 4039514 - RNA, 14 nt, Molluscum contagiosum virus
gcagcgcgccacca

SEQ ID NO: 4039515 - RNA, 13 nt, Molluscum contagiosum virus
gcagcgcgcgcag

SEQ ID NO: 4039516 - RNA, 15 nt, Molluscum contagiosum virus
gcagcggcaaaggcc

SEQ ID NO: 4039517 - RNA, 12 nt, Molluscum contagiosum virus
gcagcgugccgc

SEQ ID NO: 4039518 - RNA, 13 nt, Molluscum contagiosum virus
gcagcugcaggac

SEQ ID NO: 4039519 - RNA, 14 nt, Molluscum contagiosum virus
gcagcugcgccugc

SEQ ID NO: 4039520 - RNA, 17 nt, Molluscum contagiosum virus
gcagcugcgcgagccgc

SEQ ID NO: 4039521 - RNA, 18 nt, Molluscum contagiosum virus
gcagcuggagcugccgcu

SEQ ID NO: 4039522 - RNA, 21 nt, Molluscum contagiosum virus
gcagcuggcgcgcgccgagcc

SEQ ID NO: 4039523 - RNA, 20 nt, Molluscum contagiosum virus
gcagcuggcgggcgugccca

SEQ ID NO: 4039524 - RNA, 16 nt, Molluscum contagiosum virus
gcagcuucugcucgcg

SEQ ID NO: 4039525 - RNA, 21 nt, Molluscum contagiosum virus
gcaggaaagguacccgcagga

SEQ ID NO: 4039526 - RNA, 17 nt, Molluscum contagiosum virus
gcaggaaccgcgugcgc

SEQ ID NO: 4039527 - RNA, 16 nt, Molluscum contagiosum virus
gcaggagcacgccugg

SEQ ID NO: 4039528 - RNA, 17 nt, Molluscum contagiosum virus
gcaggagcacgccuggc

SEQ ID NO: 4039529 - RNA, 21 nt, Molluscum contagiosum virus
gcaggaucggagcgcagcugc

SEQ ID NO: 4039530 - RNA, 13 nt, Molluscum contagiosum virus
gcaggaugcuggg

SEQ ID NO: 4039531 - RNA, 16 nt, Molluscum contagiosum virus
gcaggaugcuggggcu

SEQ ID NO: 4039532 - RNA, 16 nt, Molluscum contagiosum virus
gcaggcacgacgccga

SEQ ID NO: 4039533 - RNA, 17 nt, Molluscum contagiosum virus
gcaggcacgacgccgac

SEQ ID NO: 4039534 - RNA, 14 nt, Molluscum contagiosum virus
gcaggccaggugca

SEQ ID NO: 4039535 - RNA, 22 nt, Molluscum contagiosum virus
gcaggccccgcaccagugccga

SEQ ID NO: 4039536 - RNA, 13 nt, Molluscum contagiosum virus
gcaggccgcccac

SEQ ID NO: 4039537 - RNA, 16 nt, Molluscum contagiosum virus
gcaggcgcaggccgcg

SEQ ID NO: 4039538 - RNA, 13 nt, Molluscum contagiosum virus
gcaggcgcgcgcg

SEQ ID NO: 4039539 - RNA, 14 nt, Molluscum contagiosum virus
gcaggcgugcucag

SEQ ID NO: 4039540 - RNA, 16 nt, Molluscum contagiosum virus
gcagggcccgcgcucg

SEQ ID NO: 4039541 - RNA, 17 nt, Molluscum contagiosum virus
gcagggcccgcgcucgc

SEQ ID NO: 4039542 - RNA, 15 nt, Molluscum contagiosum virus
gcaggucggccagca

SEQ ID NO: 4039543 - RNA, 21 nt, Molluscum contagiosum virus
gcaguaugugaacacgacaug

SEQ ID NO: 4039544 - RNA, 14 nt, Molluscum contagiosum virus
gcaguccgccucga

SEQ ID NO: 4039545 - RNA, 17 nt, Molluscum contagiosum virus
gcaguccgccucgagca

SEQ ID NO: 4039546 - RNA, 19 nt, Molluscum contagiosum virus
gcagucgccuuccugcgcc

SEQ ID NO: 4039547 - RNA, 16 nt, Molluscum contagiosum virus
gcaguggccgucgggc

SEQ ID NO: 4039548 - RNA, 18 nt, Molluscum contagiosum virus
gcaguuccaccucgagcu

SEQ ID NO: 4039549 - RNA, 23 nt, Molluscum contagiosum virus
gcaguuccgauauacgggcccug

SEQ ID NO: 4039550 - RNA, 22 nt, Molluscum contagiosum virus
gcaguucggcgacacgcccgcg

SEQ ID NO: 4039551 - RNA, 13 nt, Molluscum contagiosum virus
gcaguuggucacc

SEQ ID NO: 4039552 - RNA, 18 nt, Molluscum contagiosum virus
gcauaccugugccagcgc

SEQ ID NO: 4039553 - RNA, 19 nt, Molluscum contagiosum virus
gcauagugggcuugcggca

SEQ ID NO: 4039554 - RNA, 21 nt, Molluscum contagiosum virus
gcaucagagaagugcuccgca

SEQ ID NO: 4039555 - RNA, 23 nt, Molluscum contagiosum virus
gcauccugaugacggcagacggc

SEQ ID NO: 4039556 - RNA, 13 nt, Molluscum contagiosum virus
gcaucgagaacgc

SEQ ID NO: 4039557 - RNA, 20 nt, Molluscum contagiosum virus
gcaucgcgggcacgcagcuc

SEQ ID NO: 4039558 - RNA, 20 nt, Molluscum contagiosum virus
gcaucgugcucuucgcggga

SEQ ID NO: 4039559 - RNA, 15 nt, Molluscum contagiosum virus
gcaucuucugccagg

SEQ ID NO: 4039560 - RNA, 23 nt, Molluscum contagiosum virus
gcaucuucuuguuguugugacac

SEQ ID NO: 4039561 - RNA, 22 nt, Molluscum contagiosum virus
gcaugaaaggcaccugcggcuc

SEQ ID NO: 4039562 - RNA, 15 nt, Molluscum contagiosum virus
gcaugaacucgcugc

SEQ ID NO: 4039563 - RNA, 14 nt, Molluscum contagiosum virus
gcaugcacagcugc

SEQ ID NO: 4039564 - RNA, 23 nt, Molluscum contagiosum virus
gcaugcgcgguccuguccgcgga

SEQ ID NO: 4039565 - RNA, 22 nt, Molluscum contagiosum virus
gcaugcucacguacgacugcuu

SEQ ID NO: 4039566 - RNA, 20 nt, Molluscum contagiosum virus
gcaugcucgcgcucucgguc

SEQ ID NO: 4039567 - RNA, 21 nt, Molluscum contagiosum virus
gcauggagagcguacucgggc

SEQ ID NO: 4039568 - RNA, 16 nt, Molluscum contagiosum virus
gcaugucacgcgucgc

SEQ ID NO: 4039569 - RNA, 14 nt, Molluscum contagiosum virus
gcauguccuuggcg

SEQ ID NO: 4039570 - RNA, 19 nt, Molluscum contagiosum virus
gcauguccuuggcggugcg

SEQ ID NO: 4039571 - RNA, 20 nt, Molluscum contagiosum virus
gccaacacgcaaucgcgcgc

SEQ ID NO: 4039572 - RNA, 16 nt, Molluscum contagiosum virus
gccaacgccagcugua

SEQ ID NO: 4039573 - RNA, 17 nt, Molluscum contagiosum virus
gccaacuaccuggggcu

SEQ ID NO: 4039574 - RNA, 13 nt, Molluscum contagiosum virus
gccaagaacaagc

SEQ ID NO: 4039575 - RNA, 20 nt, Molluscum contagiosum virus
gccaagguuugcgggcgcag

SEQ ID NO: 4039576 - RNA, 13 nt, Molluscum contagiosum virus
gccaaugacggcg

SEQ ID NO: 4039577 - RNA, 21 nt, Molluscum contagiosum virus
gccaccgcgcgguccgccagu

SEQ ID NO: 4039578 - RNA, 22 nt, Molluscum contagiosum virus
gccacgaagagucgcgccugga

SEQ ID NO: 4039579 - RNA, 18 nt, Molluscum contagiosum virus
gccacgcagaucaggagc

SEQ ID NO: 4039580 - RNA, 15 nt, Molluscum contagiosum virus
gccacgcagcuggcg

SEQ ID NO: 4039581 - RNA, 13 nt, Molluscum contagiosum virus
gccacgcccgggc

SEQ ID NO: 4039582 - RNA, 23 nt, Molluscum contagiosum virus
gccacgcgggcccgugcucaggc

SEQ ID NO: 4039583 - RNA, 14 nt, Molluscum contagiosum virus
gccacggccgcgcu

SEQ ID NO: 4039584 - RNA, 18 nt, Molluscum contagiosum virus
gccacggcgagcugccau

SEQ ID NO: 4039585 - RNA, 17 nt, Molluscum contagiosum virus
gccacggcugcaagcac

SEQ ID NO: 4039586 - RNA, 21 nt, Molluscum contagiosum virus
gccacugccacggcugcaagc

SEQ ID NO: 4039587 - RNA, 16 nt, Molluscum contagiosum virus
gccagcaccaugcgug

SEQ ID NO: 4039588 - RNA, 16 nt, Molluscum contagiosum virus
gccagcagcuccuggu

SEQ ID NO: 4039589 - RNA, 13 nt, Molluscum contagiosum virus
gccagccaggcgc

SEQ ID NO: 4039590 - RNA, 22 nt, Molluscum contagiosum virus
gccagccgcucguccagcugcg

SEQ ID NO: 4039591 - RNA, 20 nt, Molluscum contagiosum virus
gccagccucaucgugagccu

SEQ ID NO: 4039592 - RNA, 17 nt, Molluscum contagiosum virus
gccagccugcuggcacc

SEQ ID NO: 4039593 - RNA, 16 nt, Molluscum contagiosum virus
gccagccugugcgcca

SEQ ID NO: 4039594 - RNA, 23 nt, Molluscum contagiosum virus
gccagcgagucucgcgcgccacc

SEQ ID NO: 4039595 - RNA, 15 nt, Molluscum contagiosum virus
gccagcgauugcccg

SEQ ID NO: 4039596 - RNA, 16 nt, Molluscum contagiosum virus
gccagcguacggcccg

SEQ ID NO: 4039597 - RNA, 20 nt, Molluscum contagiosum virus
gccagcguacggcccgaagg

SEQ ID NO: 4039598 - RNA, 17 nt, Molluscum contagiosum virus
gccagcgugcagacgac

SEQ ID NO: 4039599 - RNA, 18 nt, Molluscum contagiosum virus
gccagcuccgcgcggcgc

SEQ ID NO: 4039600 - RNA, 16 nt, Molluscum contagiosum virus
gccagcuuggugcgcu

SEQ ID NO: 4039601 - RNA, 19 nt, Molluscum contagiosum virus
gccagcuuggugcgcucga

SEQ ID NO: 4039602 - RNA, 22 nt, Molluscum contagiosum virus
gccaggcacacgcagugccacg

SEQ ID NO: 4039603 - RNA, 15 nt, Molluscum contagiosum virus
gccagguguuccugc

SEQ ID NO: 4039604 - RNA, 15 nt, Molluscum contagiosum virus
gccaguccgcggcgc

SEQ ID NO: 4039605 - RNA, 16 nt, Molluscum contagiosum virus
gccagucgcgccucgc

SEQ ID NO: 4039606 - RNA, 21 nt, Molluscum contagiosum virus
gccagugcuuugucgcaaccc

SEQ ID NO: 4039607 - RNA, 15 nt, Molluscum contagiosum virus
gccauccacgugggc

SEQ ID NO: 4039608 - RNA, 19 nt, Molluscum contagiosum virus
gccaucgagaugcucaagc

SEQ ID NO: 4039609 - RNA, 22 nt, Molluscum contagiosum virus
gccaucgugcgcgacuuggggc

SEQ ID NO: 4039610 - RNA, 20 nt, Molluscum contagiosum virus
gccaucucgcacacugcagc

SEQ ID NO: 4039611 - RNA, 19 nt, Molluscum contagiosum virus
gccaugaucauggcgccgc

SEQ ID NO: 4039612 - RNA, 16 nt, Molluscum contagiosum virus
gccauggagcgcccgc

SEQ ID NO: 4039613 - RNA, 16 nt, Molluscum contagiosum virus
gccaugucugugcgcg

SEQ ID NO: 4039614 - RNA, 22 nt, Molluscum contagiosum virus
gccauguuuccugcggcgcugc

SEQ ID NO: 4039615 - RNA, 14 nt, Molluscum contagiosum virus
gccauugugacacg

SEQ ID NO: 4039616 - RNA, 14 nt, Molluscum contagiosum virus
gcccaccagcagcc

SEQ ID NO: 4039617 - RNA, 18 nt, Molluscum contagiosum virus
gcccaccagcagccaggc

SEQ ID NO: 4039618 - RNA, 19 nt, Molluscum contagiosum virus
gcccaccagcagccaggcu

SEQ ID NO: 4039619 - RNA, 15 nt, Molluscum contagiosum virus
gcccacguugccgcg

SEQ ID NO: 4039620 - RNA, 14 nt, Molluscum contagiosum virus
gcccagcuucagca

SEQ ID NO: 4039621 - RNA, 21 nt, Molluscum contagiosum virus
gcccaucaaggcgcgcaucgc

SEQ ID NO: 4039622 - RNA, 18 nt, Molluscum contagiosum virus
gccccaaaagugaagauc

SEQ ID NO: 4039623 - RNA, 15 nt, Molluscum contagiosum virus
gccccacugugccag

SEQ ID NO: 4039624 - RNA, 18 nt, Molluscum contagiosum virus
gccccacugugccagcag

SEQ ID NO: 4039625 - RNA, 20 nt, Molluscum contagiosum virus
gccccagcaccagguagagc

SEQ ID NO: 4039626 - RNA, 16 nt, Molluscum contagiosum virus
gcccccgagcugcgug

SEQ ID NO: 4039627 - RNA, 12 nt, Molluscum contagiosum virus
gcccccgugcug

SEQ ID NO: 4039628 - RNA, 14 nt, Molluscum contagiosum virus
gccccgacgccagc

SEQ ID NO: 4039629 - RNA, 15 nt, Molluscum contagiosum virus
gccccgacgccagcg

SEQ ID NO: 4039630 - RNA, 17 nt, Molluscum contagiosum virus
gccccgacgccagcgcg

SEQ ID NO: 4039631 - RNA, 16 nt, Molluscum contagiosum virus
gccccgcaccagugcc

SEQ ID NO: 4039632 - RNA, 17 nt, Molluscum contagiosum virus
gccccgcgcgugcaguu

SEQ ID NO: 4039633 - RNA, 20 nt, Molluscum contagiosum virus
gccccgcgcguugcugcccg

SEQ ID NO: 4039634 - RNA, 15 nt, Molluscum contagiosum virus
gccccugcgcgagca

SEQ ID NO: 4039635 - RNA, 16 nt, Molluscum contagiosum virus
gccccugggcuucugg

SEQ ID NO: 4039636 - RNA, 14 nt, Molluscum contagiosum virus
gcccgaagccguag

SEQ ID NO: 4039637 - RNA, 18 nt, Molluscum contagiosum virus
gcccgacacguugcacug

SEQ ID NO: 4039638 - RNA, 19 nt, Molluscum contagiosum virus
gcccgacuuuucgcgccgc

SEQ ID NO: 4039639 - RNA, 12 nt, Molluscum contagiosum virus
gcccgagcccga

SEQ ID NO: 4039640 - RNA, 17 nt, Molluscum contagiosum virus
gcccgagcccgagcccg

SEQ ID NO: 4039641 - RNA, 17 nt, Molluscum contagiosum virus
gcccgagcgcgcgugcg

SEQ ID NO: 4039642 - RNA, 24 nt, Molluscum contagiosum virus
gcccgagcuaaauggacgcggacc

SEQ ID NO: 4039643 - RNA, 13 nt, Molluscum contagiosum virus
gcccgcacacgca

SEQ ID NO: 4039644 - RNA, 20 nt, Molluscum contagiosum virus
gcccgccagcauggcgagcc

SEQ ID NO: 4039645 - RNA, 15 nt, Molluscum contagiosum virus
gcccgccgacugccg

SEQ ID NO: 4039646 - RNA, 17 nt, Molluscum contagiosum virus
gcccgccgacugccgcc

SEQ ID NO: 4039647 - RNA, 14 nt, Molluscum contagiosum virus
gcccgccugccgcg

SEQ ID NO: 4039648 - RNA, 20 nt, Molluscum contagiosum virus
gcccgccuuuguggacgcgc

SEQ ID NO: 4039649 - RNA, 19 nt, Molluscum contagiosum virus
gcccgcgagauugagagcg

SEQ ID NO: 4039650 - RNA, 13 nt, Molluscum contagiosum virus
gcccgcgcggaga

SEQ ID NO: 4039651 - RNA, 21 nt, Molluscum contagiosum virus
gcccgcgcugcgcaagcgcua

SEQ ID NO: 4039652 - RNA, 21 nt, Molluscum contagiosum virus
gcccgcggacaucgacgccaa

SEQ ID NO: 4039653 - RNA, 22 nt, Molluscum contagiosum virus
gcccgcggacaucgacgccaac

SEQ ID NO: 4039654 - RNA, 19 nt, Molluscum contagiosum virus
gcccgcggacucgugcacc

SEQ ID NO: 4039655 - RNA, 19 nt, Molluscum contagiosum virus
gcccgcugcgcgcucugga

SEQ ID NO: 4039656 - RNA, 21 nt, Molluscum contagiosum virus
gcccggcagcgacuacgcgcu

SEQ ID NO: 4039657 - RNA, 15 nt, Molluscum contagiosum virus
gcccggcgcccgcag

SEQ ID NO: 4039658 - RNA, 18 nt, Molluscum contagiosum virus
gcccgguuuuccggggac

SEQ ID NO: 4039659 - RNA, 18 nt, Molluscum contagiosum virus
gcccucaggggcucuccu

SEQ ID NO: 4039660 - RNA, 14 nt, Molluscum contagiosum virus
gcccuccucgaccu

SEQ ID NO: 4039661 - RNA, 18 nt, Molluscum contagiosum virus
gcccuccucgaccugcac

SEQ ID NO: 4039662 - RNA, 19 nt, Molluscum contagiosum virus
gcccuccucgaccugcacg

SEQ ID NO: 4039663 - RNA, 19 nt, Molluscum contagiosum virus
gcccucgcgcgcgcgcggc

SEQ ID NO: 4039664 - RNA, 23 nt, Molluscum contagiosum virus
gcccuuauacaaaguugaccacc

SEQ ID NO: 4039665 - RNA, 22 nt, Molluscum contagiosum virus
gcccuucguguucgcggacggc

SEQ ID NO: 4039666 - RNA, 16 nt, Molluscum contagiosum virus
gccgaacggcagaccc

SEQ ID NO: 4039667 - RNA, 16 nt, Molluscum contagiosum virus
gccgaacugcucugcg

SEQ ID NO: 4039668 - RNA, 21 nt, Molluscum contagiosum virus
gccgacaacgcacccgcgcgg

SEQ ID NO: 4039669 - RNA, 20 nt, Molluscum contagiosum virus
gccgacuuccgacgggccgc

SEQ ID NO: 4039670 - RNA, 21 nt, Molluscum contagiosum virus
gccgagaaaaagcugucgcgc

SEQ ID NO: 4039671 - RNA, 18 nt, Molluscum contagiosum virus
gccgagcgccgccagcuc

SEQ ID NO: 4039672 - RNA, 14 nt, Molluscum contagiosum virus
gccgagcgugacca

SEQ ID NO: 4039673 - RNA, 13 nt, Molluscum contagiosum virus
gccgagcucgccu

SEQ ID NO: 4039674 - RNA, 13 nt, Molluscum contagiosum virus
gccgagguggcac

SEQ ID NO: 4039675 - RNA, 16 nt, Molluscum contagiosum virus
gccgagguggcacccu

SEQ ID NO: 4039676 - RNA, 16 nt, Molluscum contagiosum virus
gccgaguacugcugcg

SEQ ID NO: 4039677 - RNA, 14 nt, Molluscum contagiosum virus
gccgcaaaagcaag

SEQ ID NO: 4039678 - RNA, 15 nt, Molluscum contagiosum virus
gccgcaaccucuucc

SEQ ID NO: 4039679 - RNA, 14 nt, Molluscum contagiosum virus
gccgcacggcgccc

SEQ ID NO: 4039680 - RNA, 14 nt, Molluscum contagiosum virus
gccgcacgugcugc

SEQ ID NO: 4039681 - RNA, 12 nt, Molluscum contagiosum virus
cgcgcugcuggu

SEQ ID NO: 4039682 - RNA, 14 nt, Molluscum contagiosum virus
cgcgcugcuucccg

SEQ ID NO: 4039683 - RNA, 20 nt, Molluscum contagiosum virus
cgcgcugcuucccgcugagc

SEQ ID NO: 4039684 - RNA, 15 nt, Molluscum contagiosum virus
cgcggaaacaugugu

SEQ ID NO: 4039685 - RNA, 19 nt, Molluscum contagiosum virus
cgcggaacugacugcugcc

SEQ ID NO: 4039686 - RNA, 13 nt, Molluscum contagiosum virus
cgcggaacuggac

SEQ ID NO: 4039687 - RNA, 19 nt, Molluscum contagiosum virus
cgcggacacauugcgaggc

SEQ ID NO: 4039688 - RNA, 22 nt, Molluscum contagiosum virus
cgcggacacauugcgaggcacc

SEQ ID NO: 4039689 - RNA, 16 nt, Molluscum contagiosum virus
cgcggacucgugcacc

SEQ ID NO: 4039690 - RNA, 13 nt, Molluscum contagiosum virus
cgcggaggcgcaa

SEQ ID NO: 4039691 - RNA, 17 nt, Molluscum contagiosum virus
cgcggagggcgaggccu

SEQ ID NO: 4039692 - RNA, 20 nt, Molluscum contagiosum virus
cgcggaggucgagcgcgccg

SEQ ID NO: 4039693 - RNA, 18 nt, Molluscum contagiosum virus
cgcggaucugcgcacacg

SEQ ID NO: 4039694 - RNA, 14 nt, Molluscum contagiosum virus
cgcggaugcgaccg

SEQ ID NO: 4039695 - RNA, 21 nt, Molluscum contagiosum virus
cgcggcaagccuggcuccugu

SEQ ID NO: 4039696 - RNA, 21 nt, Molluscum contagiosum virus
cgcggcaccugucgcgcgccg

SEQ ID NO: 4039697 - RNA, 16 nt, Molluscum contagiosum virus
cgcggcagacgccagc

SEQ ID NO: 4039698 - RNA, 12 nt, Molluscum contagiosum virus
cgcggcagugcu

SEQ ID NO: 4039699 - RNA, 18 nt, Molluscum contagiosum virus
cgcggccaugcgcuugcg

SEQ ID NO: 4039700 - RNA, 14 nt, Molluscum contagiosum virus
cgcggcccgcgggc

SEQ ID NO: 4039701 - RNA, 14 nt, Molluscum contagiosum virus
cgcggccgcgcucg

SEQ ID NO: 4039702 - RNA, 12 nt, Molluscum contagiosum virus
cgcggccgcggc

SEQ ID NO: 4039703 - RNA, 12 nt, Molluscum contagiosum virus
cgcggccugggc

SEQ ID NO: 4039704 - RNA, 17 nt, Molluscum contagiosum virus
cgcggcgagucgcgggc

SEQ ID NO: 4039705 - RNA, 19 nt, Molluscum contagiosum virus
cgcggcgagucgcgggcgc

SEQ ID NO: 4039706 - RNA, 23 nt, Molluscum contagiosum virus
cgcggcgcacaaucucgccggcu

SEQ ID NO: 4039707 - RNA, 13 nt, Molluscum contagiosum virus
cgcggcgcagugc

SEQ ID NO: 4039708 - RNA, 13 nt, Molluscum contagiosum virus
cgcggcgcgccgc

SEQ ID NO: 4039709 - RNA, 20 nt, Molluscum contagiosum virus
cgcggcgcguacucgcgccg

SEQ ID NO: 4039710 - RNA, 14 nt, Molluscum contagiosum virus
cgcggcgcucugcc

SEQ ID NO: 4039711 - RNA, 21 nt, Molluscum contagiosum virus
cgcggcgcuuucgcccgccgc

SEQ ID NO: 4039712 - RNA, 22 nt, Molluscum contagiosum virus
cgcggcggagaugacgggcacg

SEQ ID NO: 4039713 - RNA, 15 nt, Molluscum contagiosum virus
cgcggcggcagcuac

SEQ ID NO: 4039714 - RNA, 16 nt, Molluscum contagiosum virus
cgcggcgggggcagca

SEQ ID NO: 4039715 - RNA, 14 nt, Molluscum contagiosum virus
cgcggcgguugccc

SEQ ID NO: 4039716 - RNA, 14 nt, Molluscum contagiosum virus
cgcggcgugcccgu

SEQ ID NO: 4039717 - RNA, 15 nt, Molluscum contagiosum virus
cgcggcguucccgcu

SEQ ID NO: 4039718 - RNA, 14 nt, Molluscum contagiosum virus
cgcggcuagcaccg

SEQ ID NO: 4039719 - RNA, 20 nt, Molluscum contagiosum virus
cgcgggccuguccgcgggcg

SEQ ID NO: 4039720 - RNA, 17 nt, Molluscum contagiosum virus
cgcgggccuuugccgcu

SEQ ID NO: 4039721 - RNA, 20 nt, Molluscum contagiosum virus
cgcgggccuuugccgcugcc

SEQ ID NO: 4039722 - RNA, 19 nt, Molluscum contagiosum virus
cgcgggcgcagagccugcu

SEQ ID NO: 4039723 - RNA, 21 nt, Molluscum contagiosum virus
cgcgggcguguccgcgggcgc

SEQ ID NO: 4039724 - RNA, 20 nt, Molluscum contagiosum virus
cgcgggcucaagucgcccuu

SEQ ID NO: 4039725 - RNA, 22 nt, Molluscum contagiosum virus
cgcgggcugggaaagggcugcu

SEQ ID NO: 4039726 - RNA, 16 nt, Molluscum contagiosum virus
cgcgguaacgcgcgcg

SEQ ID NO: 4039727 - RNA, 17 nt, Molluscum contagiosum virus
cgcgguccuguccgcgg

SEQ ID NO: 4039728 - RNA, 16 nt, Molluscum contagiosum virus
cgcggucgcccgccga

SEQ ID NO: 4039729 - RNA, 17 nt, Molluscum contagiosum virus
cgcggucgcgcccuugc

SEQ ID NO: 4039730 - RNA, 17 nt, Molluscum contagiosum virus
cgcggucgggccccugc

SEQ ID NO: 4039731 - RNA, 18 nt, Molluscum contagiosum virus
cgcggugagugcgcgcac

SEQ ID NO: 4039732 - RNA, 15 nt, Molluscum contagiosum virus
cgcggugcgggcgcg

SEQ ID NO: 4039733 - RNA, 16 nt, Molluscum contagiosum virus
cgcggugcugcgccag

SEQ ID NO: 4039734 - RNA, 17 nt, Molluscum contagiosum virus
cgcgguggccgcgccgg

SEQ ID NO: 4039735 - RNA, 17 nt, Molluscum contagiosum virus
cgcguaaaagacuggcu

SEQ ID NO: 4039736 - RNA, 14 nt, Molluscum contagiosum virus
cgcguacagcgcgc

SEQ ID NO: 4039737 - RNA, 14 nt, Molluscum contagiosum virus
cgcguacauccgcg

SEQ ID NO: 4039738 - RNA, 17 nt, Molluscum contagiosum virus
cgcguacauccgcgagc

SEQ ID NO: 4039739 - RNA, 15 nt, Molluscum contagiosum virus
cgcguaccagcgccu

SEQ ID NO: 4039740 - RNA, 15 nt, Molluscum contagiosum virus
cgcguacucgcgccg

SEQ ID NO: 4039741 - RNA, 18 nt, Molluscum contagiosum virus
cgcgucaucgcugcacgc

SEQ ID NO: 4039742 - RNA, 19 nt, Molluscum contagiosum virus
cgcguccacgaacgacagc

SEQ ID NO: 4039743 - RNA, 22 nt, Molluscum contagiosum virus
cgcguccacgaacgacagcgcc

SEQ ID NO: 4039744 - RNA, 20 nt, Molluscum contagiosum virus
cgcguccucagguugcucgc

SEQ ID NO: 4039745 - RNA, 16 nt, Molluscum contagiosum virus
cgcgucgcgcgccgca

SEQ ID NO: 4039746 - RNA, 19 nt, Molluscum contagiosum virus
cgcgucguagacgcgcccg

SEQ ID NO: 4039747 - RNA, 14 nt, Molluscum contagiosum virus
cgcgucgucgccgu

SEQ ID NO: 4039748 - RNA, 18 nt, Molluscum contagiosum virus
cgcgucugcgaguggcgc

SEQ ID NO: 4039749 - RNA, 12 nt, Molluscum contagiosum virus
cgcgucugcucu

SEQ ID NO: 4039750 - RNA, 15 nt, Molluscum contagiosum virus
cgcgucugugcgcgc

SEQ ID NO: 4039751 - RNA, 15 nt, Molluscum contagiosum virus
cgcgugaguccgcgg

SEQ ID NO: 4039752 - RNA, 14 nt, Molluscum contagiosum virus
cgcgugccgggcuu

SEQ ID NO: 4039753 - RNA, 14 nt, Molluscum contagiosum virus
cgcgugccuggcuu

SEQ ID NO: 4039754 - RNA, 15 nt, Molluscum contagiosum virus
cgcgugcgcagcacg

SEQ ID NO: 4039755 - RNA, 22 nt, Molluscum contagiosum virus
cgcgugcugagcuagugccgag

SEQ ID NO: 4039756 - RNA, 15 nt, Molluscum contagiosum virus
cgcgugcugcuacgc

SEQ ID NO: 4039757 - RNA, 18 nt, Molluscum contagiosum virus
cgcgugcuugcugcgcug

SEQ ID NO: 4039758 - RNA, 18 nt, Molluscum contagiosum virus
cgcguggcgaucugcucg

SEQ ID NO: 4039759 - RNA, 14 nt, Molluscum contagiosum virus
cgcguggugcuuac

SEQ ID NO: 4039760 - RNA, 21 nt, Molluscum contagiosum virus
cgcuacauguaugccagcgag

SEQ ID NO: 4039761 - RNA, 20 nt, Molluscum contagiosum virus
cgcuaccagcucgcgcaguu

SEQ ID NO: 4039762 - RNA, 17 nt, Molluscum contagiosum virus
cgcuaccuaccggcagc

SEQ ID NO: 4039763 - RNA, 18 nt, Molluscum contagiosum virus
cgcuaccugaugcgcaug

SEQ ID NO: 4039764 - RNA, 14 nt, Molluscum contagiosum virus
cgcuaugccgcgug

SEQ ID NO: 4039765 - RNA, 16 nt, Molluscum contagiosum virus
cgcucauacuccugcu

SEQ ID NO: 4039766 - RNA, 22 nt, Molluscum contagiosum virus
cgcucauacuccugcuggcgug

SEQ ID NO: 4039767 - RNA, 20 nt, Molluscum contagiosum virus
cgcucaucaccgacacgcgc

SEQ ID NO: 4039768 - RNA, 21 nt, Molluscum contagiosum virus
cgcucaucaccgacacgcgcc

SEQ ID NO: 4039769 - RNA, 21 nt, Molluscum contagiosum virus
cgcucaucucgcagacgcagc

SEQ ID NO: 4039770 - RNA, 16 nt, Molluscum contagiosum virus
cgcuccgcagccggag

SEQ ID NO: 4039771 - RNA, 18 nt, Molluscum contagiosum virus
cgcucgaggaggaccacg

SEQ ID NO: 4039772 - RNA, 14 nt, Molluscum contagiosum virus
cgcucgccaccgcg

SEQ ID NO: 4039773 - RNA, 20 nt, Molluscum contagiosum virus
cgcucgcgacgugcgcgcug

SEQ ID NO: 4039774 - RNA, 23 nt, Molluscum contagiosum virus
cgcucgcgcaaguccagcgcgcu

SEQ ID NO: 4039775 - RNA, 13 nt, Molluscum contagiosum virus
cgcucgcgcuucc

SEQ ID NO: 4039776 - RNA, 18 nt, Molluscum contagiosum virus
cgcucgcggugcagcugc

SEQ ID NO: 4039777 - RNA, 18 nt, Molluscum contagiosum virus
cgcucgcgugccgcggac

SEQ ID NO: 4039778 - RNA, 18 nt, Molluscum contagiosum virus
cgcucggaaagagcgcgc

SEQ ID NO: 4039779 - RNA, 16 nt, Molluscum contagiosum virus
cgcucggcacugcugg

SEQ ID NO: 4039780 - RNA, 18 nt, Molluscum contagiosum virus
cgcucggcgcgcgccgcg

SEQ ID NO: 4039781 - RNA, 23 nt, Molluscum contagiosum virus
cgcucgucggcggcaugcgcgcg

SEQ ID NO: 4039782 - RNA, 19 nt, Molluscum contagiosum virus
cgcucgugccgccugcgcg

SEQ ID NO: 4039783 - RNA, 19 nt, Molluscum contagiosum virus
cgcucucgggcaugcacuu

SEQ ID NO: 4039784 - RNA, 13 nt, Molluscum contagiosum virus
cgcucugccgccc

SEQ ID NO: 4039785 - RNA, 21 nt, Molluscum contagiosum virus
cgcucuuacugcagcagcucc

SEQ ID NO: 4039786 - RNA, 22 nt, Molluscum contagiosum virus
cgcugagcaagcucaagaagcc

SEQ ID NO: 4039787 - RNA, 14 nt, Molluscum contagiosum virus
cgcugagcgcagca

SEQ ID NO: 4039788 - RNA, 18 nt, Molluscum contagiosum virus
cgcugagcgcggagcugg

SEQ ID NO: 4039789 - RNA, 13 nt, Molluscum contagiosum virus
cgcugcacgcucu

SEQ ID NO: 4039790 - RNA, 13 nt, Molluscum contagiosum virus
cgcugcagcuagg

SEQ ID NO: 4039791 - RNA, 15 nt, Molluscum contagiosum virus
cgcugcccgcgccgc

SEQ ID NO: 4039792 - RNA, 19 nt, Molluscum contagiosum virus
cgcugccgcgcgcgccgca

SEQ ID NO: 4039793 - RNA, 20 nt, Molluscum contagiosum virus
cgcugccgcgcgcgccgcag

SEQ ID NO: 4039794 - RNA, 23 nt, Molluscum contagiosum virus
cgcugccgcuucgugcgcggaga

SEQ ID NO: 4039795 - RNA, 22 nt, Molluscum contagiosum virus
cgcugccgguggaagagcccgc

SEQ ID NO: 4039796 - RNA, 12 nt, Molluscum contagiosum virus
cgcugcgccgcu

SEQ ID NO: 4039797 - RNA, 19 nt, Molluscum contagiosum virus
cgcugcgccgcuuccuggc

SEQ ID NO: 4039798 - RNA, 14 nt, Molluscum contagiosum virus
cgcugcgcgacgag

SEQ ID NO: 4039799 - RNA, 13 nt, Molluscum contagiosum virus
cgcugcgcgccgc

SEQ ID NO: 4039800 - RNA, 14 nt, Molluscum contagiosum virus
cgcugcgcgcucug

SEQ ID NO: 4039801 - RNA, 17 nt, Molluscum contagiosum virus
cgcugcgcggagcucgc

SEQ ID NO: 4039802 - RNA, 21 nt, Molluscum contagiosum virus
cgcugcgcuggaugcugcucg

SEQ ID NO: 4039803 - RNA, 12 nt, Molluscum contagiosum virus
cgcugcgggcgc

SEQ ID NO: 4039804 - RNA, 13 nt, Molluscum contagiosum virus
cgcugcgggcgcc

SEQ ID NO: 4039805 - RNA, 14 nt, Molluscum contagiosum virus
cgcugcgggcgccg

SEQ ID NO: 4039806 - RNA, 18 nt, Molluscum contagiosum virus
cgcugcuacaagcggugc

SEQ ID NO: 4039807 - RNA, 23 nt, Molluscum contagiosum virus
cgcugcuagagaaccugugcgcg

SEQ ID NO: 4039808 - RNA, 18 nt, Molluscum contagiosum virus
cgcugcucgugcugcucu

SEQ ID NO: 4039809 - RNA, 15 nt, Molluscum contagiosum virus
cgcugcucuggagca

SEQ ID NO: 4039810 - RNA, 16 nt, Molluscum contagiosum virus
cgcugcuggcgcacau

SEQ ID NO: 4039811 - RNA, 18 nt, Molluscum contagiosum virus
cgcugcugguucugcucg

SEQ ID NO: 4039812 - RNA, 19 nt, Molluscum contagiosum virus
cgcuggaccccgagcugcg

SEQ ID NO: 4039813 - RNA, 16 nt, Molluscum contagiosum virus
cgcuggaugcugcucg

SEQ ID NO: 4039814 - RNA, 20 nt, Molluscum contagiosum virus
cgcuggccgugcccgccgac

SEQ ID NO: 4039815 - RNA, 15 nt, Molluscum contagiosum virus
cgcuggccucugcca

SEQ ID NO: 4039816 - RNA, 18 nt, Molluscum contagiosum virus
cgcuggcgcgcgcgcugc

SEQ ID NO: 4039817 - RNA, 15 nt, Molluscum contagiosum virus
cgcuggcggcgcacg

SEQ ID NO: 4039818 - RNA, 15 nt, Molluscum contagiosum virus
cgcuggucacgcgcu

SEQ ID NO: 4039819 - RNA, 22 nt, Molluscum contagiosum virus
cgcuguauaguccccggcgccg

SEQ ID NO: 4039820 - RNA, 15 nt, Molluscum contagiosum virus
cgcugucgcgcgucg

SEQ ID NO: 4039821 - RNA, 15 nt, Molluscum contagiosum virus
cgcuguugcugcugc

SEQ ID NO: 4039822 - RNA, 21 nt, Molluscum contagiosum virus
cgcuguuuggaauugugcugc

SEQ ID NO: 4039823 - RNA, 15 nt, Molluscum contagiosum virus
cgcuuagcacacgcg

SEQ ID NO: 4039824 - RNA, 13 nt, Molluscum contagiosum virus
cgcuuccgcggcc

SEQ ID NO: 4039825 - RNA, 14 nt, Molluscum contagiosum virus
cgcuucggcuccca

SEQ ID NO: 4039826 - RNA, 15 nt, Molluscum contagiosum virus
cgcuucgggcucagc

SEQ ID NO: 4039827 - RNA, 19 nt, Molluscum contagiosum virus
cgcuugccuuggcgcccgu

SEQ ID NO: 4039828 - RNA, 16 nt, Molluscum contagiosum virus
cgcuugcucacgcugc

SEQ ID NO: 4039829 - RNA, 15 nt, Molluscum contagiosum virus
cgcuuguccgcggac

SEQ ID NO: 4039830 - RNA, 16 nt, Molluscum contagiosum virus
cgcuuucgcccgccgc

SEQ ID NO: 4039831 - RNA, 16 nt, Molluscum contagiosum virus
cgcuuucguccgccgc

SEQ ID NO: 4039832 - RNA, 14 nt, Molluscum contagiosum virus
cggaaagagcgcgc

SEQ ID NO: 4039833 - RNA, 20 nt, Molluscum contagiosum virus
cggaaagagcgcgcgaagca

SEQ ID NO: 4039834 - RNA, 23 nt, Molluscum contagiosum virus
cggaaagauauacaccaggcgcg

SEQ ID NO: 4039835 - RNA, 13 nt, Molluscum contagiosum virus
cggaacucgaaga

SEQ ID NO: 4039836 - RNA, 18 nt, Molluscum contagiosum virus
cggaagaauuccuucccg

SEQ ID NO: 4039837 - RNA, 14 nt, Molluscum contagiosum virus
cggaagcuccugcu

SEQ ID NO: 4039838 - RNA, 22 nt, Molluscum contagiosum virus
cggacaagacaacacucgugcu

SEQ ID NO: 4039839 - RNA, 12 nt, Molluscum contagiosum virus
cggacagcaccc

SEQ ID NO: 4039840 - RNA, 21 nt, Molluscum contagiosum virus
cggacagcaccccgaagacgu

SEQ ID NO: 4039841 - RNA, 18 nt, Molluscum contagiosum virus
cggacagcagcucgccgu

SEQ ID NO: 4039842 - RNA, 14 nt, Molluscum contagiosum virus
cggacagcucagca

SEQ ID NO: 4039843 - RNA, 22 nt, Molluscum contagiosum virus
cggacgcccuccucgaccugca

SEQ ID NO: 4039844 - RNA, 16 nt, Molluscum contagiosum virus
cggacgcggccaugcu

SEQ ID NO: 4039845 - RNA, 22 nt, Molluscum contagiosum virus
cggacgcgggccgcgcgcacaa

SEQ ID NO: 4039846 - RNA, 17 nt, Molluscum contagiosum virus
cggacgcgggccugucc

SEQ ID NO: 4039847 - RNA, 15 nt, Molluscum contagiosum virus
cggacggcgcgcagc

SEQ ID NO: 4039848 - RNA, 15 nt, Molluscum contagiosum virus
cggacuucucgcuca

SEQ ID NO: 4039849 - RNA, 18 nt, Molluscum contagiosum virus
cggacuucuugcgcggcg

SEQ ID NO: 4039850 - RNA, 20 nt, Molluscum contagiosum virus
cggagaacaugcucgccagc

SEQ ID NO: 4039851 - RNA, 21 nt, Molluscum contagiosum virus
cggagagcagugccgcucgcu

SEQ ID NO: 4039852 - RNA, 20 nt, Molluscum contagiosum virus
cggagagcuccggcugcucc

SEQ ID NO: 4039853 - RNA, 18 nt, Molluscum contagiosum virus
cggagauggacacagcaa

SEQ ID NO: 4039854 - RNA, 14 nt, Molluscum contagiosum virus
cggagccgcggcag

SEQ ID NO: 4039855 - RNA, 15 nt, Molluscum contagiosum virus
cggagcgcacgaagc

SEQ ID NO: 4039856 - RNA, 16 nt, Molluscum contagiosum virus
cggagcgcagcugccg

SEQ ID NO: 4039857 - RNA, 23 nt, Molluscum contagiosum virus
cggagcgccuucugcaagcugcc

SEQ ID NO: 4039858 - RNA, 16 nt, Molluscum contagiosum virus
cggagcgcuagcaggg

SEQ ID NO: 4039859 - RNA, 12 nt, Molluscum contagiosum virus
cggagcugugcc

SEQ ID NO: 4039860 - RNA, 13 nt, Molluscum contagiosum virus
cggagcugugccg

SEQ ID NO: 4039861 - RNA, 19 nt, Molluscum contagiosum virus
cggaggagcgauccacgag

SEQ ID NO: 4039862 - RNA, 20 nt, Molluscum contagiosum virus
cggaggcacgggcucgaucu

SEQ ID NO: 4039863 - RNA, 18 nt, Molluscum contagiosum virus
cggaggccgcucccgcga

SEQ ID NO: 4039864 - RNA, 22 nt, Molluscum contagiosum virus
cggaggcgcaaccgcgugcgug

SEQ ID NO: 4039865 - RNA, 11 nt, Molluscum contagiosum virus
cggaggcugcu

SEQ ID NO: 4039866 - RNA, 16 nt, Molluscum contagiosum virus
cggaggcugcucccuc

SEQ ID NO: 4039867 - RNA, 20 nt, Molluscum contagiosum virus
cggaucagccccgcgccagc

SEQ ID NO: 4039868 - RNA, 21 nt, Molluscum contagiosum virus
cggaucagccccgcgccagca

SEQ ID NO: 4039869 - RNA, 16 nt, Molluscum contagiosum virus
cggaugcaggcacugc

SEQ ID NO: 4039870 - RNA, 18 nt, Molluscum contagiosum virus
cggaugccacgcagcugg

SEQ ID NO: 4039871 - RNA, 18 nt, Molluscum contagiosum virus
cggaugucacgcagaagu

SEQ ID NO: 4039872 - RNA, 12 nt, Molluscum contagiosum virus
cggauugccgca

SEQ ID NO: 4039873 - RNA, 14 nt, Molluscum contagiosum virus
cggcaaaggcccgc

SEQ ID NO: 4039874 - RNA, 18 nt, Molluscum contagiosum virus
cggcaaaggcccgcgagc

SEQ ID NO: 4039875 - RNA, 20 nt, Molluscum contagiosum virus
cggcacacacuugcacgcgc

SEQ ID NO: 4039876 - RNA, 22 nt, Molluscum contagiosum virus
cggcacacaugcuagcgggcaa

SEQ ID NO: 4039877 - RNA, 23 nt, Molluscum contagiosum virus
cggcacccgugcgcgcgcugaga

SEQ ID NO: 4039878 - RNA, 22 nt, Molluscum contagiosum virus
cggcacggacccgggcgcggca

SEQ ID NO: 4039879 - RNA, 19 nt, Molluscum contagiosum virus
cggcacgggcacgcgcgcg

SEQ ID NO: 4039880 - RNA, 13 nt, Molluscum contagiosum virus
cggcacugggugc

SEQ ID NO: 4039881 - RNA, 14 nt, Molluscum contagiosum virus
cggcagacgccagc

SEQ ID NO: 4039882 - RNA, 16 nt, Molluscum contagiosum virus
cggcagcaagcgcacc

SEQ ID NO: 4039883 - RNA, 15 nt, Molluscum contagiosum virus
cggcagcagcgugca

SEQ ID NO: 4039884 - RNA, 16 nt, Molluscum contagiosum virus
cggcagccgcagaugc

SEQ ID NO: 4039885 - RNA, 20 nt, Molluscum contagiosum virus
cggcagcgacuacgcgcugc

SEQ ID NO: 4039886 - RNA, 13 nt, Molluscum contagiosum virus
cggcagcgccagc

SEQ ID NO: 4039887 - RNA, 17 nt, Molluscum contagiosum virus
cggcagcgccgcgcgcg

SEQ ID NO: 4039888 - RNA, 13 nt, Molluscum contagiosum virus
cggcagcgcgccu

SEQ ID NO: 4039889 - RNA, 16 nt, Molluscum contagiosum virus
cacgcgcacgcucucg

SEQ ID NO: 4039890 - RNA, 13 nt, Molluscum contagiosum virus
cacgcgcccgccg

SEQ ID NO: 4039891 - RNA, 16 nt, Molluscum contagiosum virus
cacgcgccgcgcggcu

SEQ ID NO: 4039892 - RNA, 15 nt, Molluscum contagiosum virus
cacgcgcgcgcgaag

SEQ ID NO: 4039893 - RNA, 17 nt, Molluscum contagiosum virus
cacgcgcgcgugcugcu

SEQ ID NO: 4039894 - RNA, 13 nt, Molluscum contagiosum virus
cacgcgcucgcgc

SEQ ID NO: 4039895 - RNA, 20 nt, Molluscum contagiosum virus
cacgcgggcccgugcucagg

SEQ ID NO: 4039896 - RNA, 16 nt, Molluscum contagiosum virus
cacgcguacgaagagc

SEQ ID NO: 4039897 - RNA, 18 nt, Molluscum contagiosum virus
cacgcgucgcgcaggcgc

SEQ ID NO: 4039898 - RNA, 18 nt, Molluscum contagiosum virus
cacgcgugcugcgcggcg

SEQ ID NO: 4039899 - RNA, 17 nt, Molluscum contagiosum virus
cacgcuacgcagcgcgc

SEQ ID NO: 4039900 - RNA, 19 nt, Molluscum contagiosum virus
cacgcucauacuccugcug

SEQ ID NO: 4039901 - RNA, 17 nt, Molluscum contagiosum virus
cacgcucgcgacgugcg

SEQ ID NO: 4039902 - RNA, 18 nt, Molluscum contagiosum virus
cacgcucgcgcgcaugcu

SEQ ID NO: 4039903 - RNA, 15 nt, Molluscum contagiosum virus
cacgcugcacgagcu

SEQ ID NO: 4039904 - RNA, 19 nt, Molluscum contagiosum virus
cacgcugcgcacgggcgcg

SEQ ID NO: 4039905 - RNA, 18 nt, Molluscum contagiosum virus
cacgcugcgcucggcgcg

SEQ ID NO: 4039906 - RNA, 22 nt, Molluscum contagiosum virus
cacgcugcguuuccagggcagu

SEQ ID NO: 4039907 - RNA, 16 nt, Molluscum contagiosum virus
cacgcuggcgcucggc

SEQ ID NO: 4039908 - RNA, 22 nt, Molluscum contagiosum virus
cacggaaacgaacgcugcagcu

SEQ ID NO: 4039909 - RNA, 16 nt, Molluscum contagiosum virus
cacggacccgggcgcg

SEQ ID NO: 4039910 - RNA, 23 nt, Molluscum contagiosum virus
cacggccuucuccucgcucugcu

SEQ ID NO: 4039911 - RNA, 17 nt, Molluscum contagiosum virus
cacggcgcccaggaaca

SEQ ID NO: 4039912 - RNA, 14 nt, Molluscum contagiosum virus
cacggcgcgcaccu

SEQ ID NO: 4039913 - RNA, 17 nt, Molluscum contagiosum virus
cacggcgcucgccucug

SEQ ID NO: 4039914 - RNA, 14 nt, Molluscum contagiosum virus
cacggcuugccgcu

SEQ ID NO: 4039915 - RNA, 17 nt, Molluscum contagiosum virus
cacgggcccgcgcguga

SEQ ID NO: 4039916 - RNA, 14 nt, Molluscum contagiosum virus
cacgggccugcgcg

SEQ ID NO: 4039917 - RNA, 19 nt, Molluscum contagiosum virus
cacgggcucgaucugcgcc

SEQ ID NO: 4039918 - RNA, 20 nt, Molluscum contagiosum virus
cacgggcucgaucugcgccu

SEQ ID NO: 4039919 - RNA, 20 nt, Molluscum contagiosum virus
cacgguguccacgaugaacg

SEQ ID NO: 4039920 - RNA, 16 nt, Molluscum contagiosum virus
cacguacucgcugcuc

SEQ ID NO: 4039921 - RNA, 13 nt, Molluscum contagiosum virus
cacguagaggaag

SEQ ID NO: 4039922 - RNA, 14 nt, Molluscum contagiosum virus
cacguccaggccgc

SEQ ID NO: 4039923 - RNA, 22 nt, Molluscum contagiosum virus
cacguccguugcacgugcgugc

SEQ ID NO: 4039924 - RNA, 19 nt, Molluscum contagiosum virus
cacgucgacaaguccaccu

SEQ ID NO: 4039925 - RNA, 14 nt, Molluscum contagiosum virus
cacgucggcccgag

SEQ ID NO: 4039926 - RNA, 19 nt, Molluscum contagiosum virus
cacgucggcgagacgugcg

SEQ ID NO: 4039927 - RNA, 19 nt, Molluscum contagiosum virus
cacgugaacuccaaggucg

SEQ ID NO: 4039928 - RNA, 17 nt, Molluscum contagiosum virus
cacgugcagcggcgcca

SEQ ID NO: 4039929 - RNA, 20 nt, Molluscum contagiosum virus
cacgugcugaucacgcucgc

SEQ ID NO: 4039930 - RNA, 23 nt, Molluscum contagiosum virus
cacgugcugcagcugcgcgagcc

SEQ ID NO: 4039931 - RNA, 13 nt, Molluscum contagiosum virus
cacgugcugcgcu

SEQ ID NO: 4039932 - RNA, 14 nt, Molluscum contagiosum virus
cacgugcugcugcg

SEQ ID NO: 4039933 - RNA, 19 nt, Molluscum contagiosum virus
cacguggaaucacggccag

SEQ ID NO: 4039934 - RNA, 19 nt, Molluscum contagiosum virus
cacguggaauugcggccag

SEQ ID NO: 4039935 - RNA, 21 nt, Molluscum contagiosum virus
cacguggugguuggcgugcuc

SEQ ID NO: 4039936 - RNA, 23 nt, Molluscum contagiosum virus
cacguggugguuggcgugcucgc

SEQ ID NO: 4039937 - RNA, 15 nt, Molluscum contagiosum virus
cacguugcacugcgc

SEQ ID NO: 4039938 - RNA, 15 nt, Molluscum contagiosum virus
cacguugcagcagca

SEQ ID NO: 4039939 - RNA, 11 nt, Molluscum contagiosum virus
cacguuggagg

SEQ ID NO: 4039940 - RNA, 23 nt, Molluscum contagiosum virus
cacuaccgcaaccagcugcuguc

SEQ ID NO: 4039941 - RNA, 23 nt, Molluscum contagiosum virus
cacuacucgucuugcgcgccacu

SEQ ID NO: 4039942 - RNA, 14 nt, Molluscum contagiosum virus
cacucgcgcucgcg

SEQ ID NO: 4039943 - RNA, 15 nt, Molluscum contagiosum virus
cacuggcccugcuug

SEQ ID NO: 4039944 - RNA, 20 nt, Molluscum contagiosum virus
cacuggcgcgcacgcgcacg

SEQ ID NO: 4039945 - RNA, 21 nt, Molluscum contagiosum virus
cacugucucugcgcgagcagc

SEQ ID NO: 4039946 - RNA, 15 nt, Molluscum contagiosum virus
cacuguguccccuga

SEQ ID NO: 4039947 - RNA, 15 nt, Molluscum contagiosum virus
cacuucggacaccuc

SEQ ID NO: 4039948 - RNA, 22 nt, Molluscum contagiosum virus
cacuugcacgcgcacgcgcccu

SEQ ID NO: 4039949 - RNA, 22 nt, Molluscum contagiosum virus
cacuugcgcgcgugccuguggc

SEQ ID NO: 4039950 - RNA, 21 nt, Molluscum contagiosum virus
cagaccagagugacgucuucc

SEQ ID NO: 4039951 - RNA, 15 nt, Molluscum contagiosum virus
cagacggcgcgcucg

SEQ ID NO: 4039952 - RNA, 20 nt, Molluscum contagiosum virus
cagacguacgagcaggcgca

SEQ ID NO: 4039953 - RNA, 13 nt, Molluscum contagiosum virus
cagacuaggcaau

SEQ ID NO: 4039954 - RNA, 14 nt, Molluscum contagiosum virus
cagacuucuccaag

SEQ ID NO: 4039955 - RNA, 15 nt, Molluscum contagiosum virus
cagacuuucugcagu

SEQ ID NO: 4039956 - RNA, 20 nt, Molluscum contagiosum virus
cagagccaugcccgggcgug

SEQ ID NO: 4039957 - RNA, 18 nt, Molluscum contagiosum virus
cagagcccgcggcgcacg

SEQ ID NO: 4039958 - RNA, 23 nt, Molluscum contagiosum virus
cagagcccgggagaguggccgcu

SEQ ID NO: 4039959 - RNA, 20 nt, Molluscum contagiosum virus
cagagcgccagcgccuccgc

SEQ ID NO: 4039960 - RNA, 23 nt, Molluscum contagiosum virus
cagagcgugcuggucaacagcua

SEQ ID NO: 4039961 - RNA, 21 nt, Molluscum contagiosum virus
cagaggauucuugcacgggca

SEQ ID NO: 4039962 - RNA, 18 nt, Molluscum contagiosum virus
cagaggcgcguccgcggc

SEQ ID NO: 4039963 - RNA, 20 nt, Molluscum contagiosum virus
cagagguaaucccgagcuuc

SEQ ID NO: 4039964 - RNA, 21 nt, Molluscum contagiosum virus
cagaguccgacccgugcugcu

SEQ ID NO: 4039965 - RNA, 16 nt, Molluscum contagiosum virus
cagagugccuggcgcg

SEQ ID NO: 4039966 - RNA, 16 nt, Molluscum contagiosum virus
cagaugaggcugcucu

SEQ ID NO: 4039967 - RNA, 17 nt, Molluscum contagiosum virus
cagaugaggcugcucuc

SEQ ID NO: 4039968 - RNA, 24 nt, Molluscum contagiosum virus
cagcaaaacugaauaaguauucgc

SEQ ID NO: 4039969 - RNA, 22 nt, Molluscum contagiosum virus
cagcaaacugugcuccugagga

SEQ ID NO: 4039970 - RNA, 14 nt, Molluscum contagiosum virus
cagcaagcagcgcg

SEQ ID NO: 4039971 - RNA, 22 nt, Molluscum contagiosum virus
cagcacaaagagcacggacagc

SEQ ID NO: 4039972 - RNA, 11 nt, Molluscum contagiosum virus
cagcagccagg

SEQ ID NO: 4039973 - RNA, 16 nt, Molluscum contagiosum virus
cagcagccgcagccca

SEQ ID NO: 4039974 - RNA, 21 nt, Molluscum contagiosum virus
cagcagccgcguagcuagcuc

SEQ ID NO: 4039975 - RNA, 12 nt, Molluscum contagiosum virus
cagcagccucgu

SEQ ID NO: 4039976 - RNA, 16 nt, Molluscum contagiosum virus
cagcagcgcgaagcuc

SEQ ID NO: 4039977 - RNA, 22 nt, Molluscum contagiosum virus
cagcagcgcgacuagccugugc

SEQ ID NO: 4039978 - RNA, 13 nt, Molluscum contagiosum virus
cagcagcgugcau

SEQ ID NO: 4039979 - RNA, 14 nt, Molluscum contagiosum virus
cagcagcuccagca

SEQ ID NO: 4039980 - RNA, 23 nt, Molluscum contagiosum virus
cagcagcuccagcauggcgccac

SEQ ID NO: 4039981 - RNA, 16 nt, Molluscum contagiosum virus
cagcaggccucuuuug

SEQ ID NO: 4039982 - RNA, 17 nt, Molluscum contagiosum virus
cagcaggugcacgugcu

SEQ ID NO: 4039983 - RNA, 15 nt, Molluscum contagiosum virus
cagcaucccugccac

SEQ ID NO: 4039984 - RNA, 22 nt, Molluscum contagiosum virus
cagcaugaacucgcugcugcuc

SEQ ID NO: 4039985 - RNA, 15 nt, Molluscum contagiosum virus
cagcauggcgccaca

SEQ ID NO: 4039986 - RNA, 16 nt, Molluscum contagiosum virus
cagcauucccggcgcg

SEQ ID NO: 4039987 - RNA, 24 nt, Molluscum contagiosum virus
cagccaggcuaggcgcgacugcac

SEQ ID NO: 4039988 - RNA, 14 nt, Molluscum contagiosum virus
cagccccgcgccag

SEQ ID NO: 4039989 - RNA, 15 nt, Molluscum contagiosum virus
cagccccugcugcuc

SEQ ID NO: 4039990 - RNA, 16 nt, Molluscum contagiosum virus
cagccccugcugcucg

SEQ ID NO: 4039991 - RNA, 15 nt, Molluscum contagiosum virus
cagcccgacuucucg

SEQ ID NO: 4039992 - RNA, 22 nt, Molluscum contagiosum virus
cagcccgacuucucgcgcgacu

SEQ ID NO: 4039993 - RNA, 15 nt, Molluscum contagiosum virus
cagccgagcgccgcc

SEQ ID NO: 4039994 - RNA, 19 nt, Molluscum contagiosum virus
cagccgagcgccgccagcu

SEQ ID NO: 4039995 - RNA, 16 nt, Molluscum contagiosum virus
cagccgcaccgggacg

SEQ ID NO: 4039996 - RNA, 14 nt, Molluscum contagiosum virus
cagccgcacggcgc

SEQ ID NO: 4039997 - RNA, 19 nt, Molluscum contagiosum virus
cagccgccugccgcgcucg

SEQ ID NO: 4039998 - RNA, 22 nt, Molluscum contagiosum virus
cagccgcucguccagcugcgcg

SEQ ID NO: 4039999 - RNA, 19 nt, Molluscum contagiosum virus
cagccguggaguccaugcc

SEQ ID NO: 4040000 - RNA, 22 nt, Molluscum contagiosum virus
cagccuccgguuuucgcgggag

SEQ ID NO: 4040001 - RNA, 21 nt, Molluscum contagiosum virus
cagccuccgugcgccaguccg

SEQ ID NO: 4040002 - RNA, 20 nt, Molluscum contagiosum virus
cagccucugugcggcgccgu

SEQ ID NO: 4040003 - RNA, 13 nt, Molluscum contagiosum virus
cagccuguuuuua

SEQ ID NO: 4040004 - RNA, 19 nt, Molluscum contagiosum virus
cagcgacgagcagcugcuu

SEQ ID NO: 4040005 - RNA, 20 nt, Molluscum contagiosum virus
cagcgagaucaacgcgcgcg

SEQ ID NO: 4040006 - RNA, 24 nt, Molluscum contagiosum virus
cagcgauugcccgcgcgcggacag

SEQ ID NO: 4040007 - RNA, 10 nt, Molluscum contagiosum virus
cagcgcagca

SEQ ID NO: 4040008 - RNA, 18 nt, Molluscum contagiosum virus
cagcgcagcagcgcgacu

SEQ ID NO: 4040009 - RNA, 18 nt, Molluscum contagiosum virus
cagcgccagccugcuggc

SEQ ID NO: 4040010 - RNA, 20 nt, Molluscum contagiosum virus
cagcgccagccugcuggcac

SEQ ID NO: 4040011 - RNA, 14 nt, Molluscum contagiosum virus
cagcgccgccaccu

SEQ ID NO: 4040012 - RNA, 20 nt, Molluscum contagiosum virus
cagcgccgccaccucggcgu

SEQ ID NO: 4040013 - RNA, 13 nt, Molluscum contagiosum virus
cagcgccgccucg

SEQ ID NO: 4040014 - RNA, 14 nt, Molluscum contagiosum virus
cagcgccgcgcggu

SEQ ID NO: 4040015 - RNA, 18 nt, Molluscum contagiosum virus
cagcgccugcuugcgcac

SEQ ID NO: 4040016 - RNA, 15 nt, Molluscum contagiosum virus
cagcgcgagcugugc

SEQ ID NO: 4040017 - RNA, 15 nt, Molluscum contagiosum virus
cagcgcgcagaagcc

SEQ ID NO: 4040018 - RNA, 16 nt, Molluscum contagiosum virus
cagcgcgcgacugucu

SEQ ID NO: 4040019 - RNA, 15 nt, Molluscum contagiosum virus
cagcgcuagccccag

SEQ ID NO: 4040020 - RNA, 22 nt, Molluscum contagiosum virus
cagcgcuuuguugccucaguac

SEQ ID NO: 4040021 - RNA, 17 nt, Molluscum contagiosum virus
cagcggcaaaggcccgc

SEQ ID NO: 4040022 - RNA, 20 nt, Molluscum contagiosum virus
cagcggcaaaggcccgcgag

SEQ ID NO: 4040023 - RNA, 21 nt, Molluscum contagiosum virus
cagcggcgccaccggcagugc

SEQ ID NO: 4040024 - RNA, 14 nt, Molluscum contagiosum virus
cagcggcgccgcag

SEQ ID NO: 4040025 - RNA, 18 nt, Molluscum contagiosum virus
cagcggcgugcugcagcc

SEQ ID NO: 4040026 - RNA, 17 nt, Molluscum contagiosum virus
cagcgggcgcugcucgc

SEQ ID NO: 4040027 - RNA, 21 nt, Molluscum contagiosum virus
cagcgggcuacucgagcacgg

SEQ ID NO: 4040028 - RNA, 17 nt, Molluscum contagiosum virus
cagcggucucggcagca

SEQ ID NO: 4040029 - RNA, 20 nt, Molluscum contagiosum virus
cagcguacggcccgaaggcc

SEQ ID NO: 4040030 - RNA, 17 nt, Molluscum contagiosum virus
cagcguggagcaccugg

SEQ ID NO: 4040031 - RNA, 18 nt, Molluscum contagiosum virus
cagcguguucggggccgc

SEQ ID NO: 4040032 - RNA, 20 nt, Molluscum contagiosum virus
cagcuacgagccgcugcucc

SEQ ID NO: 4040033 - RNA, 19 nt, Molluscum contagiosum virus
cagcucaagacgcugcugg

SEQ ID NO: 4040034 - RNA, 17 nt, Molluscum contagiosum virus
cagcucaagcugcucau

SEQ ID NO: 4040035 - RNA, 23 nt, Molluscum contagiosum virus
cagcuccgcgacuaccugcugcu

SEQ ID NO: 4040036 - RNA, 15 nt, Molluscum contagiosum virus
cagcuccgcgcggcg

SEQ ID NO: 4040037 - RNA, 18 nt, Molluscum contagiosum virus
cagcucgaugggcuccag

SEQ ID NO: 4040038 - RNA, 12 nt, Molluscum contagiosum virus
cagcucgcgccg

SEQ ID NO: 4040039 - RNA, 16 nt, Molluscum contagiosum virus
cagcucggcgagagcg

SEQ ID NO: 4040040 - RNA, 18 nt, Molluscum contagiosum virus
cagcucgucaacggugcg

SEQ ID NO: 4040041 - RNA, 19 nt, Molluscum contagiosum virus
cagcucguugcgcagccgg

SEQ ID NO: 4040042 - RNA, 12 nt, Molluscum contagiosum virus
cagcugcgcgag

SEQ ID NO: 4040043 - RNA, 19 nt, Molluscum contagiosum virus
cagcugcugucgcucgugg

SEQ ID NO: 4040044 - RNA, 23 nt, Molluscum contagiosum virus
cagcuuagcuuccgucugcugcu

SEQ ID NO: 4040045 - RNA, 16 nt, Molluscum contagiosum virus
cagcuucgcgagcccg

SEQ ID NO: 4040046 - RNA, 21 nt, Molluscum contagiosum virus
cagcuucuuggagcccuugau

SEQ ID NO: 4040047 - RNA, 17 nt, Molluscum contagiosum virus
caggaaagguaccccgc

SEQ ID NO: 4040048 - RNA, 18 nt, Molluscum contagiosum virus
caggaaagguacccgcag

SEQ ID NO: 4040049 - RNA, 20 nt, Molluscum contagiosum virus
caggaacgaggaaaggcaca

SEQ ID NO: 4040050 - RNA, 18 nt, Molluscum contagiosum virus
caggaacugcccgcgucg

SEQ ID NO: 4040051 - RNA, 17 nt, Molluscum contagiosum virus
caggaagcgcgucauga

SEQ ID NO: 4040052 - RNA, 15 nt, Molluscum contagiosum virus
caggaagcuggcgcg

SEQ ID NO: 4040053 - RNA, 21 nt, Molluscum contagiosum virus
caggacgacgacacagcccug

SEQ ID NO: 4040054 - RNA, 15 nt, Molluscum contagiosum virus
caggacgugcacgug

SEQ ID NO: 4040055 - RNA, 16 nt, Molluscum contagiosum virus
caggagcagucucugc

SEQ ID NO: 4040056 - RNA, 19 nt, Molluscum contagiosum virus
caggagcauggccgcgucc

SEQ ID NO: 4040057 - RNA, 12 nt, Molluscum contagiosum virus
caggcacuccag

SEQ ID NO: 4040058 - RNA, 14 nt, Molluscum contagiosum virus
caggcagcugcugc

SEQ ID NO: 4040059 - RNA, 18 nt, Molluscum contagiosum virus
caggcagugccgccgcgc

SEQ ID NO: 4040060 - RNA, 14 nt, Molluscum contagiosum virus
caggccaggugcag

SEQ ID NO: 4040061 - RNA, 18 nt, Molluscum contagiosum virus
caggccccgcaccagugc

SEQ ID NO: 4040062 - RNA, 21 nt, Molluscum contagiosum virus
caggccgcccacgcucaacca

SEQ ID NO: 4040063 - RNA, 23 nt, Molluscum contagiosum virus
caggccgggcgcgguagcucgug

SEQ ID NO: 4040064 - RNA, 17 nt, Molluscum contagiosum virus
caggccggucgcggaag

SEQ ID NO: 4040065 - RNA, 21 nt, Molluscum contagiosum virus
caggccucuuuugcgucgcga

SEQ ID NO: 4040066 - RNA, 16 nt, Molluscum contagiosum virus
caggcgcagcgcggcc

SEQ ID NO: 4040067 - RNA, 22 nt, Molluscum contagiosum virus
caggcgccgcaccucaccgcgc

SEQ ID NO: 4040068 - RNA, 14 nt, Molluscum contagiosum virus
caggcgccggcgcg

SEQ ID NO: 4040069 - RNA, 18 nt, Molluscum contagiosum virus
caggcgcgcaagugcgug

SEQ ID NO: 4040070 - RNA, 14 nt, Molluscum contagiosum virus
caggcgcgcgcgau

SEQ ID NO: 4040071 - RNA, 18 nt, Molluscum contagiosum virus
caggcgcggucgcccgcc

SEQ ID NO: 4040072 - RNA, 18 nt, Molluscum contagiosum virus
caggcgcugcgcggcgcg

SEQ ID NO: 4040073 - RNA, 18 nt, Molluscum contagiosum virus
caggcggugggcgccgcg

SEQ ID NO: 4040074 - RNA, 16 nt, Molluscum contagiosum virus
caggcguagcgcgucu

SEQ ID NO: 4040075 - RNA, 21 nt, Molluscum contagiosum virus
caggcgucaugcgcgcgcgcu

SEQ ID NO: 4040076 - RNA, 21 nt, Molluscum contagiosum virus
caggcuguguuccagcucggg

SEQ ID NO: 4040077 - RNA, 21 nt, Molluscum contagiosum virus
cagggaaaaaucccccgccag

SEQ ID NO: 4040078 - RNA, 23 nt, Molluscum contagiosum virus
cagggaaagagcacgcgcucgcg

SEQ ID NO: 4040079 - RNA, 22 nt, Molluscum contagiosum virus
cagggcccgcgcucgccgcacg

SEQ ID NO: 4040080 - RNA, 21 nt, Molluscum contagiosum virus
caggguuuucacgcaggaccu

SEQ ID NO: 4040081 - RNA, 14 nt, Molluscum contagiosum virus
caggucggccagca

SEQ ID NO: 4040082 - RNA, 14 nt, Molluscum contagiosum virus
cagguggagcuguc

SEQ ID NO: 4040083 - RNA, 20 nt, Molluscum contagiosum virus
cagguggccgcgcgcgcacg

SEQ ID NO: 4040084 - RNA, 20 nt, Molluscum contagiosum virus
cagguucucgcacaguacca

SEQ ID NO: 4040085 - RNA, 20 nt, Molluscum contagiosum virus
caguaacgguaccuggcuug

SEQ ID NO: 4040086 - RNA, 17 nt, Molluscum contagiosum virus
caguacaugcccggccu

SEQ ID NO: 4040087 - RNA, 16 nt, Molluscum contagiosum virus
caguaccaguaccugc

SEQ ID NO: 4040088 - RNA, 15 nt, Molluscum contagiosum virus
caguaccgugucaaa

SEQ ID NO: 4040089 - RNA, 23 nt, Molluscum contagiosum virus
caguaccgugucaaacugcuugu

SEQ ID NO: 4040090 - RNA, 14 nt, Molluscum contagiosum virus
caguaccugcugcc

SEQ ID NO: 4040091 - RNA, 15 nt, Molluscum contagiosum virus
caguaccugcugccg

SEQ ID NO: 4040092 - RNA, 21 nt, Molluscum contagiosum virus
caguaggacauguccggcccg

SEQ ID NO: 4040093 - RNA, 17 nt, Molluscum contagiosum virus
cagucccagcaccgcgc

SEQ ID NO: 4040094 - RNA, 21 nt, Molluscum contagiosum virus
cagucccagcaccgcgccgcg

SEQ ID NO: 4040095 - RNA, 22 nt, Molluscum contagiosum virus
ucucacgcgcuaccgcaagcuc

SEQ ID NO: 4040096 - RNA, 21 nt, Molluscum contagiosum virus
ucucagagcuccgcgcaugcc

SEQ ID NO: 4040097 - RNA, 22 nt, Molluscum contagiosum virus
ucucagagcuccgcgcaugcca

SEQ ID NO: 4040098 - RNA, 16 nt, Molluscum contagiosum virus
ucuccaugucgucaaa

SEQ ID NO: 4040099 - RNA, 17 nt, Molluscum contagiosum virus
ucucccgccgcgugccc

SEQ ID NO: 4040100 - RNA, 22 nt, Molluscum contagiosum virus
ucuccgaagagcagaaggcgua

SEQ ID NO: 4040101 - RNA, 14 nt, Molluscum contagiosum virus
ucuccgcgcugcac

SEQ ID NO: 4040102 - RNA, 12 nt, Molluscum contagiosum virus
ucucgaggccgg

SEQ ID NO: 4040103 - RNA, 22 nt, Molluscum contagiosum virus
ucucgcagacgcagcgcgagcu

SEQ ID NO: 4040104 - RNA, 19 nt, Molluscum contagiosum virus
ucucgcuggcuccgcugga

SEQ ID NO: 4040105 - RNA, 17 nt, Molluscum contagiosum virus
ucucggacagugccucc

SEQ ID NO: 4040106 - RNA, 17 nt, Molluscum contagiosum virus
ucucgggugugugccug

SEQ ID NO: 4040107 - RNA, 19 nt, Molluscum contagiosum virus
ucucguggcguugcugcug

SEQ ID NO: 4040108 - RNA, 20 nt, Molluscum contagiosum virus
ucucugauaguaccacugug

SEQ ID NO: 4040109 - RNA, 13 nt, Molluscum contagiosum virus
ucucugcgccgcg

SEQ ID NO: 4040110 - RNA, 13 nt, Molluscum contagiosum virus
ucucuucaugaaa

SEQ ID NO: 4040111 - RNA, 11 nt, Molluscum contagiosum virus
ucugcaagcug

SEQ ID NO: 4040112 - RNA, 15 nt, Molluscum contagiosum virus
ucugcacgggcacgc

SEQ ID NO: 4040113 - RNA, 17 nt, Molluscum contagiosum virus
ucugcagcgccgcgcgg

SEQ ID NO: 4040114 - RNA, 18 nt, Molluscum contagiosum virus
ucugccaccgcggcgcgg

SEQ ID NO: 4040115 - RNA, 16 nt, Molluscum contagiosum virus
ucugccgcccgcgccc

SEQ ID NO: 4040116 - RNA, 15 nt, Molluscum contagiosum virus
ucugccggaguaaau

SEQ ID NO: 4040117 - RNA, 16 nt, Molluscum contagiosum virus
ucugccguucggcgag

SEQ ID NO: 4040118 - RNA, 22 nt, Molluscum contagiosum virus
ucugcgcagguagcggcucgcg

SEQ ID NO: 4040119 - RNA, 19 nt, Molluscum contagiosum virus
ucugcgcccgcggagaaag

SEQ ID NO: 4040120 - RNA, 15 nt, Molluscum contagiosum virus
ucugcgccgcgcgcg

SEQ ID NO: 4040121 - RNA, 18 nt, Molluscum contagiosum virus
ucugcgcgagcagcugcu

SEQ ID NO: 4040122 - RNA, 24 nt, Molluscum contagiosum virus
ucugcgcgcgguaacgcgcgcgcc

SEQ ID NO: 4040123 - RNA, 17 nt, Molluscum contagiosum virus
ucugcguugcgcgucau

SEQ ID NO: 4040124 - RNA, 17 nt, Molluscum contagiosum virus
ucuggacguguccgacg

SEQ ID NO: 4040125 - RNA, 20 nt, Molluscum contagiosum virus
ucuggcguacucgugucaca

SEQ ID NO: 4040126 - RNA, 19 nt, Molluscum contagiosum virus
ucuggcucguacugcugca

SEQ ID NO: 4040127 - RNA, 19 nt, Molluscum contagiosum virus
ucuguccgucuugcgcaca

SEQ ID NO: 4040128 - RNA, 19 nt, Molluscum contagiosum virus
ucugucguggaggaaacac

SEQ ID NO: 4040129 - RNA, 16 nt, Molluscum contagiosum virus
ucugugaccugcgcca

SEQ ID NO: 4040130 - RNA, 23 nt, Molluscum contagiosum virus
ucuuacggagcuacaaaacugaa

SEQ ID NO: 4040131 - RNA, 20 nt, Molluscum contagiosum virus
ucuucaccugcauugagcuc

SEQ ID NO: 4040132 - RNA, 20 nt, Molluscum contagiosum virus
ucuuccacgccuucguggag

SEQ ID NO: 4040133 - RNA, 19 nt, Molluscum contagiosum virus
ucuuccagcacugcgccaa

SEQ ID NO: 4040134 - RNA, 20 nt, Molluscum contagiosum virus
ucuuccccgcgggccgccgc

SEQ ID NO: 4040135 - RNA, 16 nt, Molluscum contagiosum virus
ucuucccgugcaaggu

SEQ ID NO: 4040136 - RNA, 20 nt, Molluscum contagiosum virus
ucuucccguuccugggcaac

SEQ ID NO: 4040137 - RNA, 14 nt, Molluscum contagiosum virus
ucuuccggcccgac

SEQ ID NO: 4040138 - RNA, 15 nt, Molluscum contagiosum virus
ucuucguggcgcugg

SEQ ID NO: 4040139 - RNA, 19 nt, Molluscum contagiosum virus
ucuucguggcgcugggcgc

SEQ ID NO: 4040140 - RNA, 20 nt, Molluscum contagiosum virus
ucuugaaaugauugguucuu

SEQ ID NO: 4040141 - RNA, 22 nt, Molluscum contagiosum virus
ucuugacgcccauuaaauggcc

SEQ ID NO: 4040142 - RNA, 15 nt, Molluscum contagiosum virus
ucuuucauggcuccc

SEQ ID NO: 4040143 - RNA, 24 nt, Molluscum contagiosum virus
ucuuugccccccccccgacgcgag

SEQ ID NO: 4040144 - RNA, 18 nt, Molluscum contagiosum virus
ucuuugcgaacgcgcaag

SEQ ID NO: 4040145 - RNA, 20 nt, Molluscum contagiosum virus
ucuuugcgcgcggggcacug

SEQ ID NO: 4040146 - RNA, 16 nt, Molluscum contagiosum virus
ugaaaauaaagaggcu

SEQ ID NO: 4040147 - RNA, 11 nt, Molluscum contagiosum virus
ugaacaagcug

SEQ ID NO: 4040148 - RNA, 18 nt, Molluscum contagiosum virus
ugaacaauacaugcugga

SEQ ID NO: 4040149 - RNA, 12 nt, Molluscum contagiosum virus
ugaacgcgcugc

SEQ ID NO: 4040150 - RNA, 14 nt, Molluscum contagiosum virus
ugaacucgcugcug

SEQ ID NO: 4040151 - RNA, 15 nt, Molluscum contagiosum virus
ugaacucgcugcugc

SEQ ID NO: 4040152 - RNA, 22 nt, Molluscum contagiosum virus
ugaacucuucccguuccugggc

SEQ ID NO: 4040153 - RNA, 12 nt, Molluscum contagiosum virus
ugaaggcgcggc

SEQ ID NO: 4040154 - RNA, 17 nt, Molluscum contagiosum virus
ugaaguccucucucccc

SEQ ID NO: 4040155 - RNA, 14 nt, Molluscum contagiosum virus
ugaaucccacaaau

SEQ ID NO: 4040156 - RNA, 15 nt, Molluscum contagiosum virus
ugacacgcgugucug

SEQ ID NO: 4040157 - RNA, 11 nt, Molluscum contagiosum virus
ugacagcaucg

SEQ ID NO: 4040158 - RNA, 16 nt, Molluscum contagiosum virus
ugaccgcuucgagugc

SEQ ID NO: 4040159 - RNA, 16 nt, Molluscum contagiosum virus
ugacggcgcugcgcgu

SEQ ID NO: 4040160 - RNA, 20 nt, Molluscum contagiosum virus
ugacggcgguucucgcgcuu

SEQ ID NO: 4040161 - RNA, 19 nt, Molluscum contagiosum virus
ugacggcgucucucgaaca

SEQ ID NO: 4040162 - RNA, 16 nt, Molluscum contagiosum virus
ugacgguacucaugcu

SEQ ID NO: 4040163 - RNA, 19 nt, Molluscum contagiosum virus
ugacucggacacuggaggu

SEQ ID NO: 4040164 - RNA, 17 nt, Molluscum contagiosum virus
ugagaggaccucccggc

SEQ ID NO: 4040165 - RNA, 13 nt, Molluscum contagiosum virus
ugagcucgcgcgc

SEQ ID NO: 4040166 - RNA, 14 nt, Molluscum contagiosum virus
ugaggcugcucucc

SEQ ID NO: 4040167 - RNA, 14 nt, Molluscum contagiosum virus
ugagugcugagcca

SEQ ID NO: 4040168 - RNA, 15 nt, Molluscum contagiosum virus
ugaucccggaacgca

SEQ ID NO: 4040169 - RNA, 23 nt, Molluscum contagiosum virus
ugaucuccacaugccuucaggaa

SEQ ID NO: 4040170 - RNA, 22 nt, Molluscum contagiosum virus
ugcaaccgcugcucgacauuaa

SEQ ID NO: 4040171 - RNA, 22 nt, Molluscum contagiosum virus
ugcaacucgcgcugcagcaccu

SEQ ID NO: 4040172 - RNA, 22 nt, Molluscum contagiosum virus
ugcaagagcucguggacagccu

SEQ ID NO: 4040173 - RNA, 16 nt, Molluscum contagiosum virus
ugcacaccggcgcgcu

SEQ ID NO: 4040174 - RNA, 20 nt, Molluscum contagiosum virus
ugcacccgcgcagcgugccg

SEQ ID NO: 4040175 - RNA, 16 nt, Molluscum contagiosum virus
ugcaccuacgcgccga

SEQ ID NO: 4040176 - RNA, 22 nt, Molluscum contagiosum virus
ugcaccugcuggaacgcuuggc

SEQ ID NO: 4040177 - RNA, 22 nt, Molluscum contagiosum virus
ugcacgacguacgagugcugga

SEQ ID NO: 4040178 - RNA, 21 nt, Molluscum contagiosum virus
ugcacgcgugugguugcuugc

SEQ ID NO: 4040179 - RNA, 17 nt, Molluscum contagiosum virus
ugcacggggaagcacgc

SEQ ID NO: 4040180 - RNA, 15 nt, Molluscum contagiosum virus
ugcacguccugcgag

SEQ ID NO: 4040181 - RNA, 21 nt, Molluscum contagiosum virus
ugcacuuucaacucucuaccu

SEQ ID NO: 4040182 - RNA, 18 nt, Molluscum contagiosum virus
ugcagauuggaggaggaa

SEQ ID NO: 4040183 - RNA, 23 nt, Molluscum contagiosum virus
ugcagcguuacguacagcgggcg

SEQ ID NO: 4040184 - RNA, 20 nt, Molluscum contagiosum virus
ugcagcugcaggaccugcug

SEQ ID NO: 4040185 - RNA, 12 nt, Molluscum contagiosum virus
ugcagcugcgcg

SEQ ID NO: 4040186 - RNA, 18 nt, Molluscum contagiosum virus
ugcagcugcgcgagccgc

SEQ ID NO: 4040187 - RNA, 17 nt, Molluscum contagiosum virus
ugcaggauuuccucgcg

SEQ ID NO: 4040188 - RNA, 17 nt, Molluscum contagiosum virus
ugcaguuccaccucgag

SEQ ID NO: 4040189 - RNA, 18 nt, Molluscum contagiosum virus
ugcaguuucuccucgaag

SEQ ID NO: 4040190 - RNA, 15 nt, Molluscum contagiosum virus
ugcaugcccagcaug

SEQ ID NO: 4040191 - RNA, 17 nt, Molluscum contagiosum virus
ugccacaugcaguacgc

SEQ ID NO: 4040192 - RNA, 21 nt, Molluscum contagiosum virus
ugccaccaugcgcacagcacu

SEQ ID NO: 4040193 - RNA, 18 nt, Molluscum contagiosum virus
ugccacgaccgcgcacgc

SEQ ID NO: 4040194 - RNA, 22 nt, Molluscum contagiosum virus
ugccagagucgccgcugcgcau

SEQ ID NO: 4040195 - RNA, 21 nt, Molluscum contagiosum virus
gucguccggaggcacgggcuc

SEQ ID NO: 4040196 - RNA, 17 nt, Molluscum contagiosum virus
gucgugcaccuggagca

SEQ ID NO: 4040197 - RNA, 15 nt, Molluscum contagiosum virus
gucgugcaggucgag

SEQ ID NO: 4040198 - RNA, 22 nt, Molluscum contagiosum virus
gucgugcuuccugcaaacuuga

SEQ ID NO: 4040199 - RNA, 19 nt, Molluscum contagiosum virus
gucguuccggacgugcacg

SEQ ID NO: 4040200 - RNA, 21 nt, Molluscum contagiosum virus
gucucaugguggccggccgcc

SEQ ID NO: 4040201 - RNA, 15 nt, Molluscum contagiosum virus
ucgacguggagccug

SEQ ID NO: 4040202 - RNA, 15 nt, Molluscum contagiosum virus
ucgacguugacgagc

SEQ ID NO: 4040203 - RNA, 17 nt, Molluscum contagiosum virus
ucgagaagaccuguucu

SEQ ID NO: 4040204 - RNA, 21 nt, Molluscum contagiosum virus
ucgagaagacggggcgcacgc

SEQ ID NO: 4040205 - RNA, 14 nt, Molluscum contagiosum virus
ucgagacaggccgg

SEQ ID NO: 4040206 - RNA, 15 nt, Molluscum contagiosum virus
ucgagcacgcgcgag

SEQ ID NO: 4040207 - RNA, 21 nt, Molluscum contagiosum virus
ucgagcauuugcucgcucgga

SEQ ID NO: 4040208 - RNA, 19 nt, Molluscum contagiosum virus
ucgagcgcgcgccugcugg

SEQ ID NO: 4040209 - RNA, 20 nt, Molluscum contagiosum virus
ucgagcgcgcgccugcuggc

SEQ ID NO: 4040210 - RNA, 13 nt, Molluscum contagiosum virus
ucgagcgcgcugg

SEQ ID NO: 4040211 - RNA, 17 nt, Molluscum contagiosum virus
ucgagcugcugcgcgag

SEQ ID NO: 4040212 - RNA, 15 nt, Molluscum contagiosum virus
ucgagcuuccucaag

SEQ ID NO: 4040213 - RNA, 19 nt, Molluscum contagiosum virus
ucgagcuucggacgagcuc

SEQ ID NO: 4040214 - RNA, 21 nt, Molluscum contagiosum virus
ucgaggcgcuugggcacugcu

SEQ ID NO: 4040215 - RNA, 16 nt, Molluscum contagiosum virus
ucgagggggacgugcc

SEQ ID NO: 4040216 - RNA, 12 nt, Molluscum contagiosum virus
ucgaucagcucc

SEQ ID NO: 4040217 - RNA, 14 nt, Molluscum contagiosum virus
ucgcaacaaaagag

SEQ ID NO: 4040218 - RNA, 20 nt, Molluscum contagiosum virus
ucgcaaccccgcgcugcgcg

SEQ ID NO: 4040219 - RNA, 18 nt, Molluscum contagiosum virus
ucgcagaacugcugcgcg

SEQ ID NO: 4040220 - RNA, 16 nt, Molluscum contagiosum virus
ucgcagacgacucgcu

SEQ ID NO: 4040221 - RNA, 20 nt, Molluscum contagiosum virus
ucgcagacgacucgcugcca

SEQ ID NO: 4040222 - RNA, 21 nt, Molluscum contagiosum virus
ucgcagacgcagcgcgagcug

SEQ ID NO: 4040223 - RNA, 16 nt, Molluscum contagiosum virus
ucgcagcagugccagc

SEQ ID NO: 4040224 - RNA, 20 nt, Molluscum contagiosum virus
ucgcagccuccgugcgccag

SEQ ID NO: 4040225 - RNA, 13 nt, Molluscum contagiosum virus
ucgcaggcgugcu

SEQ ID NO: 4040226 - RNA, 22 nt, Molluscum contagiosum virus
ucgcagggggggcuugcggucu

SEQ ID NO: 4040227 - RNA, 12 nt, Molluscum contagiosum virus
ucgcagugcccg

SEQ ID NO: 4040228 - RNA, 22 nt, Molluscum contagiosum virus
ucgcauuaaacaacacgcgcga

SEQ ID NO: 4040229 - RNA, 11 nt, Molluscum contagiosum virus
ucgccaaagag

SEQ ID NO: 4040230 - RNA, 22 nt, Molluscum contagiosum virus
ucgcccaucaucgccagcauca

SEQ ID NO: 4040231 - RNA, 23 nt, Molluscum contagiosum virus
ucgcccggcaggcucccgcuguc

SEQ ID NO: 4040232 - RNA, 16 nt, Molluscum contagiosum virus
ucgcccugcccgcgcg

SEQ ID NO: 4040233 - RNA, 19 nt, Molluscum contagiosum virus
ucgccgcgcgccgcugcuc

SEQ ID NO: 4040234 - RNA, 16 nt, Molluscum contagiosum virus
ucgccggcaccacggu

SEQ ID NO: 4040235 - RNA, 22 nt, Molluscum contagiosum virus
ucgccguguuggaagucguggc

SEQ ID NO: 4040236 - RNA, 17 nt, Molluscum contagiosum virus
ucgccuccgggcgcaca

SEQ ID NO: 4040237 - RNA, 15 nt, Molluscum contagiosum virus
ucgccuuccugcgcc

SEQ ID NO: 4040238 - RNA, 18 nt, Molluscum contagiosum virus
ucgccuuugugacaagga

SEQ ID NO: 4040239 - RNA, 18 nt, Molluscum contagiosum virus
ucgcgaccuggcgcgugc

SEQ ID NO: 4040240 - RNA, 14 nt, Molluscum contagiosum virus
ucgcgacgugcgcg

SEQ ID NO: 4040241 - RNA, 19 nt, Molluscum contagiosum virus
ucgcgagaaguucugcaca

SEQ ID NO: 4040242 - RNA, 14 nt, Molluscum contagiosum virus
ucgcgagcgccacu

SEQ ID NO: 4040243 - RNA, 22 nt, Molluscum contagiosum virus
ucgcgcacgaccacgugcagga

SEQ ID NO: 4040244 - RNA, 16 nt, Molluscum contagiosum virus
ucgcgcacgcgcacgc

SEQ ID NO: 4040245 - RNA, 18 nt, Molluscum contagiosum virus
ucgcgcccugcgcgcgag

SEQ ID NO: 4040246 - RNA, 22 nt, Molluscum contagiosum virus
ucgcgcgacuggcacgcgccgc

SEQ ID NO: 4040247 - RNA, 18 nt, Molluscum contagiosum virus
ucgcgcgccgccgcaaca

SEQ ID NO: 4040248 - RNA, 16 nt, Molluscum contagiosum virus
ucgcgcgccgcgcugg

SEQ ID NO: 4040249 - RNA, 14 nt, Molluscum contagiosum virus
ucgcgcgccugccg

SEQ ID NO: 4040250 - RNA, 13 nt, Molluscum contagiosum virus
ucgcgcgccugcg

SEQ ID NO: 4040251 - RNA, 20 nt, Molluscum contagiosum virus
ucgcgcgccugcgcgagcaa

SEQ ID NO: 4040252 - RNA, 18 nt, Molluscum contagiosum virus
ucgcgcgcuaccugcgca

SEQ ID NO: 4040253 - RNA, 13 nt, Molluscum contagiosum virus
ucgcgcgugcgca

SEQ ID NO: 4040254 - RNA, 19 nt, Molluscum contagiosum virus
ucgcgcucuucaagaacag

SEQ ID NO: 4040255 - RNA, 16 nt, Molluscum contagiosum virus
ucgcgcugcucuucgc

SEQ ID NO: 4040256 - RNA, 19 nt, Molluscum contagiosum virus
ucgcgcuuccggcggcucc

SEQ ID NO: 4040257 - RNA, 15 nt, Molluscum contagiosum virus
ucgcggagggcagca

SEQ ID NO: 4040258 - RNA, 13 nt, Molluscum contagiosum virus
ucgcgggcacgag

SEQ ID NO: 4040259 - RNA, 13 nt, Molluscum contagiosum virus
ucgcgggcgccgc

SEQ ID NO: 4040260 - RNA, 16 nt, Molluscum contagiosum virus
ucgcgucacguccuca

SEQ ID NO: 4040261 - RNA, 15 nt, Molluscum contagiosum virus
ucgcuggaggauucu

SEQ ID NO: 4040262 - RNA, 18 nt, Molluscum contagiosum virus
ucgcuugcccggagccgg

SEQ ID NO: 4040263 - RNA, 17 nt, Molluscum contagiosum virus
ucggaacccagaaagaa

SEQ ID NO: 4040264 - RNA, 14 nt, Molluscum contagiosum virus
ucggaacgcuaucc

SEQ ID NO: 4040265 - RNA, 14 nt, Molluscum contagiosum virus
ucggaagagcgucc

SEQ ID NO: 4040266 - RNA, 18 nt, Molluscum contagiosum virus
ucggacagugccuccgcg

SEQ ID NO: 4040267 - RNA, 15 nt, Molluscum contagiosum virus
ucggacuuggccccu

SEQ ID NO: 4040268 - RNA, 14 nt, Molluscum contagiosum virus
ucggagaagugcuc

SEQ ID NO: 4040269 - RNA, 17 nt, Molluscum contagiosum virus
ucggaggcggagcugcc

SEQ ID NO: 4040270 - RNA, 15 nt, Molluscum contagiosum virus
ucggcaugcagcgca

SEQ ID NO: 4040271 - RNA, 18 nt, Molluscum contagiosum virus
ucggcgcgccgucucgcg

SEQ ID NO: 4040272 - RNA, 17 nt, Molluscum contagiosum virus
ucggcggcagcgccagc

SEQ ID NO: 4040273 - RNA, 12 nt, Molluscum contagiosum virus
ucggcggccgga

SEQ ID NO: 4040274 - RNA, 17 nt, Molluscum contagiosum virus
ucggcggcugugcccgc

SEQ ID NO: 4040275 - RNA, 14 nt, Molluscum contagiosum virus
ucggcguggccagg

SEQ ID NO: 4040276 - RNA, 18 nt, Molluscum contagiosum virus
ucggcguggccaggccgc

SEQ ID NO: 4040277 - RNA, 14 nt, Molluscum contagiosum virus
ucggcguuggccac

SEQ ID NO: 4040278 - RNA, 14 nt, Molluscum contagiosum virus
ucgggccggcgcgc

SEQ ID NO: 4040279 - RNA, 16 nt, Molluscum contagiosum virus
ucgggcuagcaagcac

SEQ ID NO: 4040280 - RNA, 23 nt, Molluscum contagiosum virus
ucgggcuagcaagcacgccaggu

SEQ ID NO: 4040281 - RNA, 13 nt, Molluscum contagiosum virus
ucgggcugcgcgg

SEQ ID NO: 4040282 - RNA, 22 nt, Molluscum contagiosum virus
ucggggcagggaaagagcacgc

SEQ ID NO: 4040283 - RNA, 15 nt, Molluscum contagiosum virus
ucggggcugacggcc

SEQ ID NO: 4040284 - RNA, 12 nt, Molluscum contagiosum virus
ucgucagaggga

SEQ ID NO: 4040285 - RNA, 13 nt, Molluscum contagiosum virus
ucguccgcucgug

SEQ ID NO: 4040286 - RNA, 16 nt, Molluscum contagiosum virus
ucguccgcucgugcca

SEQ ID NO: 4040287 - RNA, 20 nt, Molluscum contagiosum virus
ucguccgcucgugccacugc

SEQ ID NO: 4040288 - RNA, 22 nt, Molluscum contagiosum virus
ucgucgaucgccucgacgcugg

SEQ ID NO: 4040289 - RNA, 13 nt, Molluscum contagiosum virus
ucgucgccgggcc

SEQ ID NO: 4040290 - RNA, 21 nt, Molluscum contagiosum virus
ucgucuccgggggcgcgcugg

SEQ ID NO: 4040291 - RNA, 16 nt, Molluscum contagiosum virus
ucgucugcgucucgcg

SEQ ID NO: 4040292 - RNA, 18 nt, Molluscum contagiosum virus
ucgugcugggccugccgc

SEQ ID NO: 4040293 - RNA, 14 nt, Molluscum contagiosum virus
ucgugcugugccua

SEQ ID NO: 4040294 - RNA, 18 nt, Molluscum contagiosum virus
ucguggaucgcgcgcacc

SEQ ID NO: 4040295 - RNA, 17 nt, Molluscum contagiosum virus
ucguggccguagugcuc

SEQ ID NO: 4040296 - RNA, 18 nt, Molluscum contagiosum virus
ucguggcguugcugcugc

SEQ ID NO: 4040297 - RNA, 13 nt, Molluscum contagiosum virus
ucgugucuguguu

SEQ ID NO: 4040298 - RNA, 19 nt, Molluscum contagiosum virus
ucguucgcgggcccgccuu

SEQ ID NO: 4040299 - RNA, 18 nt, Molluscum contagiosum virus
ucuacagccgccugccgc

SEQ ID NO: 4040300 - RNA, 20 nt, Molluscum contagiosum virus
ucuacggcgugcugugccug

SEQ ID NO: 4040301 - RNA, 14 nt, Molluscum contagiosum virus
ucuagccuccuugu

SEQ ID NO: 4040302 - RNA, 20 nt, Molluscum contagiosum virus
ucucaaccaccugagccucu

SEQ ID NO: 4040303 - RNA, 18 nt, Molluscum contagiosum virus
cgggcccuucuugacgcg

SEQ ID NO: 4040304 - RNA, 15 nt, Molluscum contagiosum virus
cgggccggcgcgccg

SEQ ID NO: 4040305 - RNA, 13 nt, Molluscum contagiosum virus
cgggccuguccgc

SEQ ID NO: 4040306 - RNA, 14 nt, Molluscum contagiosum virus
cgggccuguccgcg

SEQ ID NO: 4040307 - RNA, 22 nt, Molluscum contagiosum virus
cgggccuguccgcgggcgcacg

SEQ ID NO: 4040308 - RNA, 16 nt, Molluscum contagiosum virus
cgggcgaaagcgccgc

SEQ ID NO: 4040309 - RNA, 18 nt, Molluscum contagiosum virus
cgggcgaaagcgccgcgc

SEQ ID NO: 4040310 - RNA, 17 nt, Molluscum contagiosum virus
cgggcgcagacgccgag

SEQ ID NO: 4040311 - RNA, 21 nt, Molluscum contagiosum virus
cgggcgcagagccugcugcuc

SEQ ID NO: 4040312 - RNA, 21 nt, Molluscum contagiosum virus
cgggcgccgcgcaauagcgcc

SEQ ID NO: 4040313 - RNA, 14 nt, Molluscum contagiosum virus
cgggcgccgcggcu

SEQ ID NO: 4040314 - RNA, 14 nt, Molluscum contagiosum virus
cgggcgccggcguc

SEQ ID NO: 4040315 - RNA, 17 nt, Molluscum contagiosum virus
cgggcgccggcucugcc

SEQ ID NO: 4040316 - RNA, 13 nt, Molluscum contagiosum virus
cgggcgcgccaac

SEQ ID NO: 4040317 - RNA, 21 nt, Molluscum contagiosum virus
cgggcgcgccaacgacuagcg

SEQ ID NO: 4040318 - RNA, 15 nt, Molluscum contagiosum virus
cgggcgcgcgccagc

SEQ ID NO: 4040319 - RNA, 15 nt, Molluscum contagiosum virus
cgggcgcgcgcggag

SEQ ID NO: 4040320 - RNA, 14 nt, Molluscum contagiosum virus
cgggcgcggcgucg

SEQ ID NO: 4040321 - RNA, 18 nt, Molluscum contagiosum virus
cgggcgcuccgagcggcu

SEQ ID NO: 4040322 - RNA, 15 nt, Molluscum contagiosum virus
cgggcggaagcuccu

SEQ ID NO: 4040323 - RNA, 15 nt, Molluscum contagiosum virus
cgggcggcgcgccgc

SEQ ID NO: 4040324 - RNA, 18 nt, Molluscum contagiosum virus
cgggcguggggagcugga

SEQ ID NO: 4040325 - RNA, 18 nt, Molluscum contagiosum virus
cgggcugcgcggcggugu

SEQ ID NO: 4040326 - RNA, 20 nt, Molluscum contagiosum virus
cgggcugucgcccggcagcg

SEQ ID NO: 4040327 - RNA, 24 nt, Molluscum contagiosum virus
cgggcuugcucccucgcgcgcagc

SEQ ID NO: 4040328 - RNA, 15 nt, Molluscum contagiosum virus
cggggcccaugcuca

SEQ ID NO: 4040329 - RNA, 12 nt, Molluscum contagiosum virus
cggggccgcacg

SEQ ID NO: 4040330 - RNA, 17 nt, Molluscum contagiosum virus
cggggccggcuuugcgg

SEQ ID NO: 4040331 - RNA, 14 nt, Molluscum contagiosum virus
cgggggcgcuuccc

SEQ ID NO: 4040332 - RNA, 20 nt, Molluscum contagiosum virus
cggguaccgugcgcgugagc

SEQ ID NO: 4040333 - RNA, 15 nt, Molluscum contagiosum virus
cgggucgcggggccc

SEQ ID NO: 4040334 - RNA, 14 nt, Molluscum contagiosum virus
cgggugcauacgca

SEQ ID NO: 4040335 - RNA, 17 nt, Molluscum contagiosum virus
cgggugcccggacagag

SEQ ID NO: 4040336 - RNA, 11 nt, Molluscum contagiosum virus
cgguacugcug

SEQ ID NO: 4040337 - RNA, 16 nt, Molluscum contagiosum virus
cggucaacggcacagu

SEQ ID NO: 4040338 - RNA, 18 nt, Molluscum contagiosum virus
cggucaacggcacagucu

SEQ ID NO: 4040339 - RNA, 12 nt, Molluscum contagiosum virus
cggucagacuuu

SEQ ID NO: 4040340 - RNA, 15 nt, Molluscum contagiosum virus
cgguccagccgcacc

SEQ ID NO: 4040341 - RNA, 15 nt, Molluscum contagiosum virus
cggucgcccgccgag

SEQ ID NO: 4040342 - RNA, 15 nt, Molluscum contagiosum virus
cggucucggcagcag

SEQ ID NO: 4040343 - RNA, 16 nt, Molluscum contagiosum virus
cggugcaaccgcugcu

SEQ ID NO: 4040344 - RNA, 17 nt, Molluscum contagiosum virus
cggugcagccgcugcug

SEQ ID NO: 4040345 - RNA, 18 nt, Molluscum contagiosum virus
cggugcagcugccgcaga

SEQ ID NO: 4040346 - RNA, 15 nt, Molluscum contagiosum virus
cggugcccgccaaga

SEQ ID NO: 4040347 - RNA, 17 nt, Molluscum contagiosum virus
cggugcccgccaagagc

SEQ ID NO: 4040348 - RNA, 23 nt, Molluscum contagiosum virus
cggugcccgccaagagcuggucg

SEQ ID NO: 4040349 - RNA, 17 nt, Molluscum contagiosum virus
cggugccggccgccggc

SEQ ID NO: 4040350 - RNA, 15 nt, Molluscum contagiosum virus
cgguggcaggcgcgc

SEQ ID NO: 4040351 - RNA, 22 nt, Molluscum contagiosum virus
cgguggccgcgccgggcgccag

SEQ ID NO: 4040352 - RNA, 13 nt, Molluscum contagiosum virus
cggugggcgccgc

SEQ ID NO: 4040353 - RNA, 19 nt, Molluscum contagiosum virus
cggugggcgccgcggccug

SEQ ID NO: 4040354 - RNA, 20 nt, Molluscum contagiosum virus
cgguggucuccgcgggcagc

SEQ ID NO: 4040355 - RNA, 23 nt, Molluscum contagiosum virus
cgguggucuccgcgggcagccgc

SEQ ID NO: 4040356 - RNA, 18 nt, Molluscum contagiosum virus
cgguggugcgccugcacu

SEQ ID NO: 4040357 - RNA, 22 nt, Molluscum contagiosum virus
cggugucgguaccugcaggcuc

SEQ ID NO: 4040358 - RNA, 14 nt, Molluscum contagiosum virus
cgguugagcgccgu

SEQ ID NO: 4040359 - RNA, 19 nt, Molluscum contagiosum virus
cgguugcgcgugugcagca

SEQ ID NO: 4040360 - RNA, 20 nt, Molluscum contagiosum virus
cguaaagcuggccgaggucu

SEQ ID NO: 4040361 - RNA, 17 nt, Molluscum contagiosum virus
cguacagcgcgcgugcc

SEQ ID NO: 4040362 - RNA, 15 nt, Molluscum contagiosum virus
cguacgagcagcugc

SEQ ID NO: 4040363 - RNA, 18 nt, Molluscum contagiosum virus
cguacgagcagcugcugc

SEQ ID NO: 4040364 - RNA, 14 nt, Molluscum contagiosum virus
cguacgagcaggcg

SEQ ID NO: 4040365 - RNA, 16 nt, Molluscum contagiosum virus
cguacgagcaggcgca

SEQ ID NO: 4040366 - RNA, 19 nt, Molluscum contagiosum virus
cguacgcgcagggagcugc

SEQ ID NO: 4040367 - RNA, 20 nt, Molluscum contagiosum virus
cguacucgcguccgcgcagc

SEQ ID NO: 4040368 - RNA, 23 nt, Molluscum contagiosum virus
cguagacagugcggcgcggcugc

SEQ ID NO: 4040369 - RNA, 21 nt, Molluscum contagiosum virus
cguagcaaaugcgcugcucgc

SEQ ID NO: 4040370 - RNA, 19 nt, Molluscum contagiosum virus
cguagcagcgccugcacgc

SEQ ID NO: 4040371 - RNA, 19 nt, Molluscum contagiosum virus
cguagcggacgaagcugug

SEQ ID NO: 4040372 - RNA, 21 nt, Molluscum contagiosum virus
cguagcggacgaagcugugca

SEQ ID NO: 4040373 - RNA, 18 nt, Molluscum contagiosum virus
cgucaagcagcgcgccac

SEQ ID NO: 4040374 - RNA, 15 nt, Molluscum contagiosum virus
cgucacggccggcgc

SEQ ID NO: 4040375 - RNA, 14 nt, Molluscum contagiosum virus
cgucacggccuucg

SEQ ID NO: 4040376 - RNA, 22 nt, Molluscum contagiosum virus
cgucagggaugccagugcagug

SEQ ID NO: 4040377 - RNA, 22 nt, Molluscum contagiosum virus
cguccacaaagcccuccugaga

SEQ ID NO: 4040378 - RNA, 13 nt, Molluscum contagiosum virus
cguccacaaaggc

SEQ ID NO: 4040379 - RNA, 20 nt, Molluscum contagiosum virus
cguccacggguagcagcgcc

SEQ ID NO: 4040380 - RNA, 18 nt, Molluscum contagiosum virus
cguccaugugcccgcggc

SEQ ID NO: 4040381 - RNA, 15 nt, Molluscum contagiosum virus
cguccgcauccucaa

SEQ ID NO: 4040382 - RNA, 16 nt, Molluscum contagiosum virus
cguccuagagcagaag

SEQ ID NO: 4040383 - RNA, 18 nt, Molluscum contagiosum virus
cguccucaagcgcccucg

SEQ ID NO: 4040384 - RNA, 15 nt, Molluscum contagiosum virus
cguccuugcucuggc

SEQ ID NO: 4040385 - RNA, 18 nt, Molluscum contagiosum virus
cgucgaagaccaccagca

SEQ ID NO: 4040386 - RNA, 22 nt, Molluscum contagiosum virus
cgucgaccuggaagccgccagc

SEQ ID NO: 4040387 - RNA, 15 nt, Molluscum contagiosum virus
cgucgagggcgccgg

SEQ ID NO: 4040388 - RNA, 20 nt, Molluscum contagiosum virus
cgucgcacaguucacggcgc

SEQ ID NO: 4040389 - RNA, 18 nt, Molluscum contagiosum virus
cgucgcccggcaggcucc

SEQ ID NO: 4040390 - RNA, 17 nt, Molluscum contagiosum virus
cgucgccggacagcuca

SEQ ID NO: 4040391 - RNA, 14 nt, Molluscum contagiosum virus
cgucgccgggcccc

SEQ ID NO: 4040392 - RNA, 13 nt, Molluscum contagiosum virus
cgucgcgcaggcg

SEQ ID NO: 4040393 - RNA, 21 nt, Molluscum contagiosum virus
cgucgcggagcgcgcacggca

SEQ ID NO: 4040394 - RNA, 17 nt, Molluscum contagiosum virus
cgucgggaaguguugcc

SEQ ID NO: 4040395 - RNA, 20 nt, Molluscum contagiosum virus
cgucggucaccaccaccucc

SEQ ID NO: 4040396 - RNA, 23 nt, Molluscum contagiosum virus
cgucguagcgcucgugcaccagc

SEQ ID NO: 4040397 - RNA, 14 nt, Molluscum contagiosum virus
cgucgucgucgucg

SEQ ID NO: 4040398 - RNA, 18 nt, Molluscum contagiosum virus
cgucuccgggggcgcgcu

SEQ ID NO: 4040399 - RNA, 21 nt, Molluscum contagiosum virus
cgucucgcggggcaagcgcgc

SEQ ID NO: 4040400 - RNA, 19 nt, Molluscum contagiosum virus
cgucugcgaggcgcgcacg

SEQ ID NO: 4040401 - RNA, 20 nt, Molluscum contagiosum virus
cgucuuugcggacgcgcgag

SEQ ID NO: 4040402 - RNA, 15 nt, Molluscum contagiosum virus
cgugaauguacgcgg

SEQ ID NO: 4040403 - RNA, 18 nt, Molluscum contagiosum virus
cgugacacuaccgucgcc

SEQ ID NO: 4040404 - RNA, 15 nt, Molluscum contagiosum virus
cgugaccauggacac

SEQ ID NO: 4040405 - RNA, 19 nt, Molluscum contagiosum virus
cgugaccauggacacgcug

SEQ ID NO: 4040406 - RNA, 12 nt, Molluscum contagiosum virus
cgugacggugcu

SEQ ID NO: 4040407 - RNA, 13 nt, Molluscum contagiosum virus
gcgccucgcaggc

SEQ ID NO: 4040408 - RNA, 14 nt, Molluscum contagiosum virus
gcgccugcacacgc

SEQ ID NO: 4040409 - RNA, 23 nt, Molluscum contagiosum virus
gcgccuuggcggggaucuugcgu

SEQ ID NO: 4040410 - RNA, 23 nt, Molluscum contagiosum virus
gcgcgaacucucaucgagcaccu

SEQ ID NO: 4040411 - RNA, 20 nt, Molluscum contagiosum virus
gcgcgaccuacuccuggcca

SEQ ID NO: 4040412 - RNA, 20 nt, Molluscum contagiosum virus
gcgcgagauucuggcgcgcg

SEQ ID NO: 4040413 - RNA, 13 nt, Molluscum contagiosum virus
gcgcgagcagcug

SEQ ID NO: 4040414 - RNA, 15 nt, Molluscum contagiosum virus
gcgcgagcaugccgc

SEQ ID NO: 4040415 - RNA, 15 nt, Molluscum contagiosum virus
gcgcgagcgacggca

SEQ ID NO: 4040416 - RNA, 21 nt, Molluscum contagiosum virus
gcgcgcaaccagcuggcgccc

SEQ ID NO: 4040417 - RNA, 19 nt, Molluscum contagiosum virus
gcgcgcacaagauggcgca

SEQ ID NO: 4040418 - RNA, 23 nt, Molluscum contagiosum virus
gcgcgcacaucggcacugcucac

SEQ ID NO: 4040419 - RNA, 14 nt, Molluscum contagiosum virus
gcgcgcaccugcac

SEQ ID NO: 4040420 - RNA, 12 nt, Molluscum contagiosum virus
gcgcgcacggca

SEQ ID NO: 4040421 - RNA, 15 nt, Molluscum contagiosum virus
gcgcgcacggcagcg

SEQ ID NO: 4040422 - RNA, 13 nt, Molluscum contagiosum virus
gcgcgcacugcuc

SEQ ID NO: 4040423 - RNA, 18 nt, Molluscum contagiosum virus
gcgcgcagcaggugcacg

SEQ ID NO: 4040424 - RNA, 14 nt, Molluscum contagiosum virus
gcgcgcaggcucgc

SEQ ID NO: 4040425 - RNA, 22 nt, Molluscum contagiosum virus
gcgcgcaucggcggcagcgcca

SEQ ID NO: 4040426 - RNA, 16 nt, Molluscum contagiosum virus
gcgcgcauuuaccggc

SEQ ID NO: 4040427 - RNA, 17 nt, Molluscum contagiosum virus
gcgcgccaagugcuccg

SEQ ID NO: 4040428 - RNA, 19 nt, Molluscum contagiosum virus
gcgcgcccgcugcgcgcuc

SEQ ID NO: 4040429 - RNA, 19 nt, Molluscum contagiosum virus
gcgcgcccggcgcccgcag

SEQ ID NO: 4040430 - RNA, 16 nt, Molluscum contagiosum virus
gcgcgccgacgugcgc

SEQ ID NO: 4040431 - RNA, 17 nt, Molluscum contagiosum virus
gcgcgccgacgugcgcg

SEQ ID NO: 4040432 - RNA, 13 nt, Molluscum contagiosum virus
gcgcgccgccgca

SEQ ID NO: 4040433 - RNA, 17 nt, Molluscum contagiosum virus
gcgcgccgcgcuggcgc

SEQ ID NO: 4040434 - RNA, 21 nt, Molluscum contagiosum virus
gcgcgccgguagggugccgag

SEQ ID NO: 4040435 - RNA, 19 nt, Molluscum contagiosum virus
gcgcgccgugccuggcagu

SEQ ID NO: 4040436 - RNA, 18 nt, Molluscum contagiosum virus
gcgcgccugccgccugca

SEQ ID NO: 4040437 - RNA, 13 nt, Molluscum contagiosum virus
gcgcgcgagcaca

SEQ ID NO: 4040438 - RNA, 15 nt, Molluscum contagiosum virus
gcgcgcgcacgcgcg

SEQ ID NO: 4040439 - RNA, 15 nt, Molluscum contagiosum virus
gcgcgcgcagcaccg

SEQ ID NO: 4040440 - RNA, 15 nt, Molluscum contagiosum virus
gcgcgcgccagcagc

SEQ ID NO: 4040441 - RNA, 12 nt, Molluscum contagiosum virus
gcgcgcgccgca

SEQ ID NO: 4040442 - RNA, 15 nt, Molluscum contagiosum virus
gcgcgcgccggaacu

SEQ ID NO: 4040443 - RNA, 13 nt, Molluscum contagiosum virus
gcgcgcgcgcagg

SEQ ID NO: 4040444 - RNA, 13 nt, Molluscum contagiosum virus
gcgcgcgcgcgag

SEQ ID NO: 4040445 - RNA, 14 nt, Molluscum contagiosum virus
gcgcgcgcgcgcag

SEQ ID NO: 4040446 - RNA, 15 nt, Molluscum contagiosum virus
gcgcgcgcucugccg

SEQ ID NO: 4040447 - RNA, 16 nt, Molluscum contagiosum virus
gcgcgcgguacucggc

SEQ ID NO: 4040448 - RNA, 14 nt, Molluscum contagiosum virus
gcgcgcgugccgcc

SEQ ID NO: 4040449 - RNA, 13 nt, Molluscum contagiosum virus
gcgcgcgugccgg

SEQ ID NO: 4040450 - RNA, 13 nt, Molluscum contagiosum virus
gcgcgcgugcucg

SEQ ID NO: 4040451 - RNA, 14 nt, Molluscum contagiosum virus
gcgcgcgugcugcu

SEQ ID NO: 4040452 - RNA, 16 nt, Molluscum contagiosum virus
gcgcgcucgaggcgcc

SEQ ID NO: 4040453 - RNA, 13 nt, Molluscum contagiosum virus
gcgcgcucugccg

SEQ ID NO: 4040454 - RNA, 22 nt, Molluscum contagiosum virus
gcgcgcucugccgcccgcgccc

SEQ ID NO: 4040455 - RNA, 13 nt, Molluscum contagiosum virus
gcgcgcugcacac

SEQ ID NO: 4040456 - RNA, 15 nt, Molluscum contagiosum virus
gcgcgcugcacgccg

SEQ ID NO: 4040457 - RNA, 13 nt, Molluscum contagiosum virus
gcgcgcugcgcgc

SEQ ID NO: 4040458 - RNA, 15 nt, Molluscum contagiosum virus
gcgcgcugcgggcgc

SEQ ID NO: 4040459 - RNA, 12 nt, Molluscum contagiosum virus
gcgcgcugugag

SEQ ID NO: 4040460 - RNA, 15 nt, Molluscum contagiosum virus
gcgcgcuuagcacac

SEQ ID NO: 4040461 - RNA, 13 nt, Molluscum contagiosum virus
gcgcggacagccu

SEQ ID NO: 4040462 - RNA, 22 nt, Molluscum contagiosum virus
gcgcggagacuuccuugcgcag

SEQ ID NO: 4040463 - RNA, 13 nt, Molluscum contagiosum virus
gcgcggagcucgc

SEQ ID NO: 4040464 - RNA, 14 nt, Molluscum contagiosum virus
gcgcggagcucgcg

SEQ ID NO: 4040465 - RNA, 20 nt, Molluscum contagiosum virus
gcgcggauauggcgcgccga

SEQ ID NO: 4040466 - RNA, 16 nt, Molluscum contagiosum virus
gcgcggaucugcgcac

SEQ ID NO: 4040467 - RNA, 17 nt, Molluscum contagiosum virus
gcgcggcaagcagcgug

SEQ ID NO: 4040468 - RNA, 14 nt, Molluscum contagiosum virus
gcgcggcacgcccu

SEQ ID NO: 4040469 - RNA, 22 nt, Molluscum contagiosum virus
gcgcggccauggucacgcgcac

SEQ ID NO: 4040470 - RNA, 17 nt, Molluscum contagiosum virus
gcgcggcgcgcccagcg

SEQ ID NO: 4040471 - RNA, 22 nt, Molluscum contagiosum virus
gcgcggcgcguccucggccaga

SEQ ID NO: 4040472 - RNA, 21 nt, Molluscum contagiosum virus
gcgcggcuuggcgcccuuccu

SEQ ID NO: 4040473 - RNA, 13 nt, Molluscum contagiosum virus
gcgcggggcacug

SEQ ID NO: 4040474 - RNA, 16 nt, Molluscum contagiosum virus
gcgcgguagcucgugc

SEQ ID NO: 4040475 - RNA, 19 nt, Molluscum contagiosum virus
gcgcgucugcaucgugggc

SEQ ID NO: 4040476 - RNA, 15 nt, Molluscum contagiosum virus
gcgcgugaguccgcg

SEQ ID NO: 4040477 - RNA, 18 nt, Molluscum contagiosum virus
gcgcgugccgcugcgcgg

SEQ ID NO: 4040478 - RNA, 21 nt, Molluscum contagiosum virus
gcgcgugcgagcggcgcgcgc

SEQ ID NO: 4040479 - RNA, 13 nt, Molluscum contagiosum virus
gcgcgugcgcgug

SEQ ID NO: 4040480 - RNA, 12 nt, Molluscum contagiosum virus
gcgcgugcucgc

SEQ ID NO: 4040481 - RNA, 19 nt, Molluscum contagiosum virus
gcgcgugugcagcagguag

SEQ ID NO: 4040482 - RNA, 23 nt, Molluscum contagiosum virus
gcgcguugcucccgucgagcacg

SEQ ID NO: 4040483 - RNA, 14 nt, Molluscum contagiosum virus
gcgcuacguggcgc

SEQ ID NO: 4040484 - RNA, 19 nt, Molluscum contagiosum virus
gcgcuagccgccgcugccg

SEQ ID NO: 4040485 - RNA, 22 nt, Molluscum contagiosum virus
gcgcuagcuccacgugccgcuc

SEQ ID NO: 4040486 - RNA, 16 nt, Molluscum contagiosum virus
gcgcuauugcgcggcg

SEQ ID NO: 4040487 - RNA, 18 nt, Molluscum contagiosum virus
gcgcuccgagcggcugcu

SEQ ID NO: 4040488 - RNA, 19 nt, Molluscum contagiosum virus
gcgcucgcucgcgcgcagc

SEQ ID NO: 4040489 - RNA, 15 nt, Molluscum contagiosum virus
gcgcucgcucgcgcu

SEQ ID NO: 4040490 - RNA, 12 nt, Molluscum contagiosum virus
gcgcucuucccg

SEQ ID NO: 4040491 - RNA, 13 nt, Molluscum contagiosum virus
gcgcugaaggcau

SEQ ID NO: 4040492 - RNA, 17 nt, Molluscum contagiosum virus
gcgcugagcgcggagcu

SEQ ID NO: 4040493 - RNA, 14 nt, Molluscum contagiosum virus
gcgcugcccgcgca

SEQ ID NO: 4040494 - RNA, 16 nt, Molluscum contagiosum virus
gcgcugcccgcgcaca

SEQ ID NO: 4040495 - RNA, 19 nt, Molluscum contagiosum virus
gcgcugcgccgcuuccugg

SEQ ID NO: 4040496 - RNA, 11 nt, Molluscum contagiosum virus
gcgcugcgcgg

SEQ ID NO: 4040497 - RNA, 14 nt, Molluscum contagiosum virus
gcgcugcgcggcgg

SEQ ID NO: 4040498 - RNA, 20 nt, Molluscum contagiosum virus
gcgcugcuauacgcgccagu

SEQ ID NO: 4040499 - RNA, 13 nt, Molluscum contagiosum virus
gcgcugcucgccg

SEQ ID NO: 4040500 - RNA, 14 nt, Molluscum contagiosum virus
gcgcugcucgcgcu

SEQ ID NO: 4040501 - RNA, 18 nt, Molluscum contagiosum virus
gcgcugcucgcgcucgcg

SEQ ID NO: 4040502 - RNA, 14 nt, Molluscum contagiosum virus
gcgcugcucuucgc

SEQ ID NO: 4040503 - RNA, 16 nt, Molluscum contagiosum virus
gcgcugcugcuucugc

SEQ ID NO: 4040504 - RNA, 13 nt, Molluscum contagiosum virus
gcgcugcuggugc

SEQ ID NO: 4040505 - RNA, 20 nt, Molluscum contagiosum virus
gcgcugcugguucugcucgc

SEQ ID NO: 4040506 - RNA, 22 nt, Molluscum contagiosum virus
gcgcugcugguucugcucgcag

SEQ ID NO: 4040507 - RNA, 14 nt, Molluscum contagiosum virus
gcgcuggaugcugc

SEQ ID NO: 4040508 - RNA, 17 nt, Molluscum contagiosum virus
gcgcuggaugcugcucg

SEQ ID NO: 4040509 - RNA, 21 nt, Molluscum contagiosum virus
gcgcugucgcgcaggcucugg

SEQ ID NO: 4040510 - RNA, 14 nt, Molluscum contagiosum virus
gcgcuuccgcgagu

SEQ ID NO: 4040511 - RNA, 21 nt, Molluscum contagiosum virus
gcgcuuccucuacaccagcug

SEQ ID NO: 4040512 - RNA, 13 nt, Molluscum contagiosum virus
gcgcuucuauugc

SEQ ID NO: 4040513 - RNA, 19 nt, Molluscum contagiosum virus
gcgcuucuauugccgcgug

SEQ ID NO: 4040514 - RNA, 13 nt, Molluscum contagiosum virus
gcgcuugcucacg

SEQ ID NO: 4040515 - RNA, 16 nt, Molluscum contagiosum virus
gcggaaguggugcccg

SEQ ID NO: 4040516 - RNA, 18 nt, Molluscum contagiosum virus
gcggacagagcccgcggc

SEQ ID NO: 4040517 - RNA, 20 nt, Molluscum contagiosum virus
gcggaccuaaagcugcuggc

SEQ ID NO: 4040518 - RNA, 14 nt, Molluscum contagiosum virus
gcggacgccggcgc

SEQ ID NO: 4040519 - RNA, 14 nt, Molluscum contagiosum virus
gcggacguggucgc

SEQ ID NO: 4040520 - RNA, 18 nt, Molluscum contagiosum virus
gcggacguggucgcgcgc

SEQ ID NO: 4040521 - RNA, 21 nt, Molluscum contagiosum virus
gcggagacuuccuugcgcagg

SEQ ID NO: 4040522 - RNA, 17 nt, Molluscum contagiosum virus
gcggagaucgccgcgca

SEQ ID NO: 4040523 - RNA, 18 nt, Molluscum contagiosum virus
gcggagaugacgggcacg

SEQ ID NO: 4040524 - RNA, 19 nt, Molluscum contagiosum virus
gcggagcgccuucugcaag

SEQ ID NO: 4040525 - RNA, 13 nt, Molluscum contagiosum virus
gcggagcugcccg

SEQ ID NO: 4040526 - RNA, 14 nt, Molluscum contagiosum virus
gcggagcuggccac

SEQ ID NO: 4040527 - RNA, 12 nt, Molluscum contagiosum virus
gcggagcugugc

SEQ ID NO: 4040528 - RNA, 13 nt, Molluscum contagiosum virus
gcggagcugugcc

SEQ ID NO: 4040529 - RNA, 19 nt, Molluscum contagiosum virus
gcggagcugugccgcagca

SEQ ID NO: 4040530 - RNA, 16 nt, Molluscum contagiosum virus
gcggagggugcacgcg

SEQ ID NO: 4040531 - RNA, 21 nt, Molluscum contagiosum virus
gcggaggucgagcgcgccgcg

SEQ ID NO: 4040532 - RNA, 21 nt, Molluscum contagiosum virus
gcggaugccacgcagcuggcg

SEQ ID NO: 4040533 - RNA, 20 nt, Molluscum contagiosum virus
gcggaugugcuagcugcgug

SEQ ID NO: 4040534 - RNA, 15 nt, Molluscum contagiosum virus
gcggcaacagcacga

SEQ ID NO: 4040535 - RNA, 18 nt, Molluscum contagiosum virus
gccgcagaacacgggggc

SEQ ID NO: 4040536 - RNA, 20 nt, Molluscum contagiosum virus
gccgcagcgcuggagcuggc

SEQ ID NO: 4040537 - RNA, 17 nt, Molluscum contagiosum virus
gccgccaaugcugccgu

SEQ ID NO: 4040538 - RNA, 20 nt, Molluscum contagiosum virus
gccgcccgggaaaaucaggu

SEQ ID NO: 4040539 - RNA, 15 nt, Molluscum contagiosum virus
gccgccgccgcgagg

SEQ ID NO: 4040540 - RNA, 17 nt, Molluscum contagiosum virus
gccgcgaaagcgucgug

SEQ ID NO: 4040541 - RNA, 21 nt, Molluscum contagiosum virus
gccgcgaaagcgucgugcucc

SEQ ID NO: 4040542 - RNA, 21 nt, Molluscum contagiosum virus
gccgcgcaugacagccauggc

SEQ ID NO: 4040543 - RNA, 19 nt, Molluscum contagiosum virus
gccgcgcccacgggcuucg

SEQ ID NO: 4040544 - RNA, 20 nt, Molluscum contagiosum virus
gccgcgccgcacgugcugcg

SEQ ID NO: 4040545 - RNA, 11 nt, Molluscum contagiosum virus
gccgcgccgcg

SEQ ID NO: 4040546 - RNA, 18 nt, Molluscum contagiosum virus
gccgcgccgggcgccaga

SEQ ID NO: 4040547 - RNA, 22 nt, Molluscum contagiosum virus
gccgcgccuugagcgcgccgcg

SEQ ID NO: 4040548 - RNA, 14 nt, Molluscum contagiosum virus
gccgcgcgcgcacg

SEQ ID NO: 4040549 - RNA, 16 nt, Molluscum contagiosum virus
gccgcgcugcuggcca

SEQ ID NO: 4040550 - RNA, 22 nt, Molluscum contagiosum virus
gccgcggaccacgacgggcuca

SEQ ID NO: 4040551 - RNA, 15 nt, Molluscum contagiosum virus
gccgcggcagcucug

SEQ ID NO: 4040552 - RNA, 16 nt, Molluscum contagiosum virus
gccgcggcgcccacgg

SEQ ID NO: 4040553 - RNA, 17 nt, Molluscum contagiosum virus
gccgcgggcgcagagcc

SEQ ID NO: 4040554 - RNA, 19 nt, Molluscum contagiosum virus
gccgcggucguguacacgc

SEQ ID NO: 4040555 - RNA, 13 nt, Molluscum contagiosum virus
gccgcggugccgg

SEQ ID NO: 4040556 - RNA, 15 nt, Molluscum contagiosum virus
gccgcguagccgccg

SEQ ID NO: 4040557 - RNA, 23 nt, Molluscum contagiosum virus
gccgcguagcuagcucugcgcgc

SEQ ID NO: 4040558 - RNA, 16 nt, Molluscum contagiosum virus
gccgcgucguagcaaa

SEQ ID NO: 4040559 - RNA, 19 nt, Molluscum contagiosum virus
gccgcgugcaugcccagca

SEQ ID NO: 4040560 - RNA, 14 nt, Molluscum contagiosum virus
gccgcgugcuggcg

SEQ ID NO: 4040561 - RNA, 19 nt, Molluscum contagiosum virus
gccgcgugcuggcggggcu

SEQ ID NO: 4040562 - RNA, 19 nt, Molluscum contagiosum virus
gccgcugccaacgcggacc

SEQ ID NO: 4040563 - RNA, 21 nt, Molluscum contagiosum virus
gccgcugccaacgcggaccgc

SEQ ID NO: 4040564 - RNA, 18 nt, Molluscum contagiosum virus
gccgcuucgggcucagca

SEQ ID NO: 4040565 - RNA, 15 nt, Molluscum contagiosum virus
gccgcuucgugcgcg

SEQ ID NO: 4040566 - RNA, 17 nt, Molluscum contagiosum virus
gccgcuugaaggacgcg

SEQ ID NO: 4040567 - RNA, 22 nt, Molluscum contagiosum virus
gccggcaacgcugccgcuggcg

SEQ ID NO: 4040568 - RNA, 19 nt, Molluscum contagiosum virus
gccggccccgcgaacgaga

SEQ ID NO: 4040569 - RNA, 17 nt, Molluscum contagiosum virus
gccggccuuguucgcgc

SEQ ID NO: 4040570 - RNA, 13 nt, Molluscum contagiosum virus
gccggcgaaccga

SEQ ID NO: 4040571 - RNA, 20 nt, Molluscum contagiosum virus
gccggcgaaccgacugcccg

SEQ ID NO: 4040572 - RNA, 20 nt, Molluscum contagiosum virus
gccggcgcccgcgugcaccc

SEQ ID NO: 4040573 - RNA, 15 nt, Molluscum contagiosum virus
gccggcguccgcggc

SEQ ID NO: 4040574 - RNA, 19 nt, Molluscum contagiosum virus
gccggcguccgcggcacgc

SEQ ID NO: 4040575 - RNA, 23 nt, Molluscum contagiosum virus
gccggcguucacggacucgagcc

SEQ ID NO: 4040576 - RNA, 18 nt, Molluscum contagiosum virus
gccggcucagcguggagc

SEQ ID NO: 4040577 - RNA, 15 nt, Molluscum contagiosum virus
gccggcugcgccacc

SEQ ID NO: 4040578 - RNA, 17 nt, Molluscum contagiosum virus
gccgggaauaccggaga

SEQ ID NO: 4040579 - RNA, 13 nt, Molluscum contagiosum virus
gccgggagagccg

SEQ ID NO: 4040580 - RNA, 18 nt, Molluscum contagiosum virus
gccgggcacccagcccug

SEQ ID NO: 4040581 - RNA, 18 nt, Molluscum contagiosum virus
gccgggccccugucgcgc

SEQ ID NO: 4040582 - RNA, 19 nt, Molluscum contagiosum virus
gccgggccugcggcggcgc

SEQ ID NO: 4040583 - RNA, 16 nt, Molluscum contagiosum virus
gccgggcgccagaaca

SEQ ID NO: 4040584 - RNA, 17 nt, Molluscum contagiosum virus
gccgggcgccggcucug

SEQ ID NO: 4040585 - RNA, 17 nt, Molluscum contagiosum virus
gccggggcgcgcgcugc

SEQ ID NO: 4040586 - RNA, 21 nt, Molluscum contagiosum virus
gccggguguugaccaaagguc

SEQ ID NO: 4040587 - RNA, 15 nt, Molluscum contagiosum virus
gccggugcgugccca

SEQ ID NO: 4040588 - RNA, 17 nt, Molluscum contagiosum virus
gccgguggaagagcccg

SEQ ID NO: 4040589 - RNA, 22 nt, Molluscum contagiosum virus
gccguccaugugcccgcggcgc

SEQ ID NO: 4040590 - RNA, 17 nt, Molluscum contagiosum virus
gccguccccgcgcucac

SEQ ID NO: 4040591 - RNA, 17 nt, Molluscum contagiosum virus
gccguccgccucgagca

SEQ ID NO: 4040592 - RNA, 19 nt, Molluscum contagiosum virus
gccguccgccucgagcacg

SEQ ID NO: 4040593 - RNA, 14 nt, Molluscum contagiosum virus
gccgucgacgcuga

SEQ ID NO: 4040594 - RNA, 19 nt, Molluscum contagiosum virus
gccgucgacgcugacggcc

SEQ ID NO: 4040595 - RNA, 19 nt, Molluscum contagiosum virus
gccgugcgucucucugucu

SEQ ID NO: 4040596 - RNA, 22 nt, Molluscum contagiosum virus
gccguggcacugacgguacuca

SEQ ID NO: 4040597 - RNA, 19 nt, Molluscum contagiosum virus
gccguguacgucuuuccca

SEQ ID NO: 4040598 - RNA, 17 nt, Molluscum contagiosum virus
gccguucacgcacacga

SEQ ID NO: 4040599 - RNA, 14 nt, Molluscum contagiosum virus
gccuaccugcagga

SEQ ID NO: 4040600 - RNA, 23 nt, Molluscum contagiosum virus
gccuacgagcacauacacgcgca

SEQ ID NO: 4040601 - RNA, 15 nt, Molluscum contagiosum virus
gccucagccgagcgc

SEQ ID NO: 4040602 - RNA, 22 nt, Molluscum contagiosum virus
gccuccaagaagaggccagcac

SEQ ID NO: 4040603 - RNA, 22 nt, Molluscum contagiosum virus
gccuccaagaagaggccggcac

SEQ ID NO: 4040604 - RNA, 17 nt, Molluscum contagiosum virus
gccucccccgcgcacug

SEQ ID NO: 4040605 - RNA, 19 nt, Molluscum contagiosum virus
gccuccgguacguacagug

SEQ ID NO: 4040606 - RNA, 21 nt, Molluscum contagiosum virus
gccuccguuucccgcggcgug

SEQ ID NO: 4040607 - RNA, 12 nt, Molluscum contagiosum virus
gccucgagcagg

SEQ ID NO: 4040608 - RNA, 22 nt, Molluscum contagiosum virus
gccucgcguuagcgcuggcccg

SEQ ID NO: 4040609 - RNA, 21 nt, Molluscum contagiosum virus
gccucgucguccacaggcgcg

SEQ ID NO: 4040610 - RNA, 21 nt, Molluscum contagiosum virus
gccucucucguggggaggaca

SEQ ID NO: 4040611 - RNA, 15 nt, Molluscum contagiosum virus
gccucugccugcaag

SEQ ID NO: 4040612 - RNA, 12 nt, Molluscum contagiosum virus
gccugaggccgc

SEQ ID NO: 4040613 - RNA, 15 nt, Molluscum contagiosum virus
gccugcaaggagguc

SEQ ID NO: 4040614 - RNA, 14 nt, Molluscum contagiosum virus
gccugcacacgcgu

SEQ ID NO: 4040615 - RNA, 21 nt, Molluscum contagiosum virus
gccugcacgcgcacuugccug

SEQ ID NO: 4040616 - RNA, 10 nt, Molluscum contagiosum virus
gccugcacug

SEQ ID NO: 4040617 - RNA, 15 nt, Molluscum contagiosum virus
gccugccaucuacga

SEQ ID NO: 4040618 - RNA, 15 nt, Molluscum contagiosum virus
gccugcccgugugcg

SEQ ID NO: 4040619 - RNA, 12 nt, Molluscum contagiosum virus
gccugcccugcu

SEQ ID NO: 4040620 - RNA, 14 nt, Molluscum contagiosum virus
gccugccgcgagca

SEQ ID NO: 4040621 - RNA, 18 nt, Molluscum contagiosum virus
gccugccgcgagcacugg

SEQ ID NO: 4040622 - RNA, 12 nt, Molluscum contagiosum virus
gccugcgagcag

SEQ ID NO: 4040623 - RNA, 14 nt, Molluscum contagiosum virus
gccugcgagcagcc

SEQ ID NO: 4040624 - RNA, 22 nt, Molluscum contagiosum virus
gccugcggacccgccggugcuu

SEQ ID NO: 4040625 - RNA, 21 nt, Molluscum contagiosum virus
gccugcgggcggcacacacuu

SEQ ID NO: 4040626 - RNA, 15 nt, Molluscum contagiosum virus
gccugcucacgcccg

SEQ ID NO: 4040627 - RNA, 20 nt, Molluscum contagiosum virus
gccugcugaagaaggagccc

SEQ ID NO: 4040628 - RNA, 20 nt, Molluscum contagiosum virus
gccugcugcucuucgugcug

SEQ ID NO: 4040629 - RNA, 15 nt, Molluscum contagiosum virus
gccugcuggcgggga

SEQ ID NO: 4040630 - RNA, 22 nt, Molluscum contagiosum virus
gccugcuggcggggaaagcuga

SEQ ID NO: 4040631 - RNA, 21 nt, Molluscum contagiosum virus
gccuggagggcagugccaagg

SEQ ID NO: 4040632 - RNA, 22 nt, Molluscum contagiosum virus
gccuggcggccaaccgccugcu

SEQ ID NO: 4040633 - RNA, 18 nt, Molluscum contagiosum virus
gccugugggauggcucgc

SEQ ID NO: 4040634 - RNA, 19 nt, Molluscum contagiosum virus
gccuguuuccgcucgcgcu

SEQ ID NO: 4040635 - RNA, 19 nt, Molluscum contagiosum virus
gccuucucgucgagagcgc

SEQ ID NO: 4040636 - RNA, 17 nt, Molluscum contagiosum virus
gccuuggcgcccgugcc

SEQ ID NO: 4040637 - RNA, 16 nt, Molluscum contagiosum virus
gccuuucuugcggcac

SEQ ID NO: 4040638 - RNA, 17 nt, Molluscum contagiosum virus
gcgaaagcgccgcgcgc

SEQ ID NO: 4040639 - RNA, 15 nt, Molluscum contagiosum virus
gcgaaccgcggcagc

SEQ ID NO: 4040640 - RNA, 20 nt, Molluscum contagiosum virus
gcgaacgcguccacggcgcg

SEQ ID NO: 4040641 - RNA, 21 nt, Molluscum contagiosum virus
gcgaagagcacgaugcccagc

SEQ ID NO: 4040642 - RNA, 14 nt, Molluscum contagiosum virus
gcgacagcugcugc

SEQ ID NO: 4040643 - RNA, 14 nt, Molluscum contagiosum virus
gcgacaugcugccc

SEQ ID NO: 4040644 - RNA, 16 nt, Molluscum contagiosum virus
gcgaccggcgugccuu

SEQ ID NO: 4040645 - RNA, 16 nt, Molluscum contagiosum virus
gcgaccuuagcgaggu

SEQ ID NO: 4040646 - RNA, 17 nt, Molluscum contagiosum virus
gcgacgcgaucgugcgc

SEQ ID NO: 4040647 - RNA, 21 nt, Molluscum contagiosum virus
gcgacggagauggacacagca

SEQ ID NO: 4040648 - RNA, 14 nt, Molluscum contagiosum virus
gcgacggcaggccc

SEQ ID NO: 4040649 - RNA, 12 nt, Molluscum contagiosum virus
gcgacgugcgcg

SEQ ID NO: 4040650 - RNA, 20 nt, Molluscum contagiosum virus
gcgacgugcgcgcugcgcgc

SEQ ID NO: 4040651 - RNA, 13 nt, Molluscum contagiosum virus
gcgacuacgcgcu

SEQ ID NO: 4040652 - RNA, 17 nt, Molluscum contagiosum virus
gcgacuagccugugccc

SEQ ID NO: 4040653 - RNA, 17 nt, Molluscum contagiosum virus
gcgacuugcugcggagc

SEQ ID NO: 4040654 - RNA, 17 nt, Molluscum contagiosum virus
gcgacuuguagugcccg

SEQ ID NO: 4040655 - RNA, 18 nt, Molluscum contagiosum virus
gcgagaacuggcgcagca

SEQ ID NO: 4040656 - RNA, 13 nt, Molluscum contagiosum virus
gcgagaugcgcgg

SEQ ID NO: 4040657 - RNA, 16 nt, Molluscum contagiosum virus
gcgagaugcgcggaca

SEQ ID NO: 4040658 - RNA, 18 nt, Molluscum contagiosum virus
gcgagaugcucgccggca

SEQ ID NO: 4040659 - RNA, 14 nt, Molluscum contagiosum virus
gcgagcacgccugc

SEQ ID NO: 4040660 - RNA, 16 nt, Molluscum contagiosum virus
gcgagcacgccugcac

SEQ ID NO: 4040661 - RNA, 16 nt, Molluscum contagiosum virus
gcgagcagaggcaugc

SEQ ID NO: 4040662 - RNA, 23 nt, Molluscum contagiosum virus
gcgagcagugugaugccgcgcgu

SEQ ID NO: 4040663 - RNA, 16 nt, Molluscum contagiosum virus
gcgagcaucugcgcgu

SEQ ID NO: 4040664 - RNA, 16 nt, Molluscum contagiosum virus
gcgagcaugccgccgc

SEQ ID NO: 4040665 - RNA, 15 nt, Molluscum contagiosum virus
gcgagccacgcgcau

SEQ ID NO: 4040666 - RNA, 19 nt, Molluscum contagiosum virus
gcgagcccggaucagcccc

SEQ ID NO: 4040667 - RNA, 23 nt, Molluscum contagiosum virus
gcgagcccuucuuuccggcgcgg

SEQ ID NO: 4040668 - RNA, 12 nt, Molluscum contagiosum virus
gcgagcgccugc

SEQ ID NO: 4040669 - RNA, 14 nt, Molluscum contagiosum virus
gcgagcgcgccccc

SEQ ID NO: 4040670 - RNA, 16 nt, Molluscum contagiosum virus
gcgagcuagugcacac

SEQ ID NO: 4040671 - RNA, 17 nt, Molluscum contagiosum virus
gcgagcucgucgcgcgc

SEQ ID NO: 4040672 - RNA, 15 nt, Molluscum contagiosum virus
gcgagcugcgggcgc

SEQ ID NO: 4040673 - RNA, 16 nt, Molluscum contagiosum virus
gcgagcugcuagcggc

SEQ ID NO: 4040674 - RNA, 12 nt, Molluscum contagiosum virus
gcgaggccaagg

SEQ ID NO: 4040675 - RNA, 14 nt, Molluscum contagiosum virus
gcgaggcgcgcacg

SEQ ID NO: 4040676 - RNA, 15 nt, Molluscum contagiosum virus
gcgagugcggccacc

SEQ ID NO: 4040677 - RNA, 17 nt, Molluscum contagiosum virus
gcgaguucugccggcuc

SEQ ID NO: 4040678 - RNA, 18 nt, Molluscum contagiosum virus
gcgaucgcggccaugcgc

SEQ ID NO: 4040679 - RNA, 13 nt, Molluscum contagiosum virus
gcgaugcgcucgc

SEQ ID NO: 4040680 - RNA, 18 nt, Molluscum contagiosum virus
gcgauguacgcgugcagg

SEQ ID NO: 4040681 - RNA, 21 nt, Molluscum contagiosum virus
gcgauguuuugaacagacaac

SEQ ID NO: 4040682 - RNA, 21 nt, Molluscum contagiosum virus
gcgcaagucgcgcgcugcgaa

SEQ ID NO: 4040683 - RNA, 16 nt, Molluscum contagiosum virus
gcgcacaaacgcgcgc

SEQ ID NO: 4040684 - RNA, 23 nt, Molluscum contagiosum virus
gcgcacaagauggcgcagcacuu

SEQ ID NO: 4040685 - RNA, 18 nt, Molluscum contagiosum virus
gcgcacacccacacgugc

SEQ ID NO: 4040686 - RNA, 14 nt, Molluscum contagiosum virus
gcgcacacuugcgc

SEQ ID NO: 4040687 - RNA, 14 nt, Molluscum contagiosum virus
gcgcaccagcugca

SEQ ID NO: 4040688 - RNA, 14 nt, Molluscum contagiosum virus
gcgcacccgccacg

SEQ ID NO: 4040689 - RNA, 13 nt, Molluscum contagiosum virus
gcgcaccuggagu

SEQ ID NO: 4040690 - RNA, 20 nt, Molluscum contagiosum virus
gcgcacgcaagcccgcgcgc

SEQ ID NO: 4040691 - RNA, 19 nt, Molluscum contagiosum virus
gcgcacgcgagcacgccug

SEQ ID NO: 4040692 - RNA, 20 nt, Molluscum contagiosum virus
gcgcacgcuuguccgcggac

SEQ ID NO: 4040693 - RNA, 16 nt, Molluscum contagiosum virus
gcgcacggcagcggcg

SEQ ID NO: 4040694 - RNA, 15 nt, Molluscum contagiosum virus
gcgcacgugcucgcg

SEQ ID NO: 4040695 - RNA, 16 nt, Molluscum contagiosum virus
gcgcacguuggccacg

SEQ ID NO: 4040696 - RNA, 20 nt, Molluscum contagiosum virus
gcgcacuacucgucuugcgc

SEQ ID NO: 4040697 - RNA, 13 nt, Molluscum contagiosum virus
gcgcacugcucgc

SEQ ID NO: 4040698 - RNA, 18 nt, Molluscum contagiosum virus
gcgcagagcuccccgcgc

SEQ ID NO: 4040699 - RNA, 13 nt, Molluscum contagiosum virus
gcgcagcugcgcc

SEQ ID NO: 4040700 - RNA, 16 nt, Molluscum contagiosum virus
gcgcagcuguuucugc

SEQ ID NO: 4040701 - RNA, 22 nt, Molluscum contagiosum virus
gcgcagcuguuucugccgcgcc

SEQ ID NO: 4040702 - RNA, 16 nt, Molluscum contagiosum virus
gcgcagucccagcacc

SEQ ID NO: 4040703 - RNA, 19 nt, Molluscum contagiosum virus
gcgcagugccgcugagaga

SEQ ID NO: 4040704 - RNA, 21 nt, Molluscum contagiosum virus
gcgcaucgcgggcacgcagcu

SEQ ID NO: 4040705 - RNA, 18 nt, Molluscum contagiosum virus
gcgcaugcggcaggcgcu

SEQ ID NO: 4040706 - RNA, 23 nt, Molluscum contagiosum virus
gcgcauguauauacuccccgcgc

SEQ ID NO: 4040707 - RNA, 17 nt, Molluscum contagiosum virus
gcgcauuuaccggcgcu

SEQ ID NO: 4040708 - RNA, 15 nt, Molluscum contagiosum virus
gcgccaaccgcgagc

SEQ ID NO: 4040709 - RNA, 21 nt, Molluscum contagiosum virus
gcgccacgagcgccgcgacgc

SEQ ID NO: 4040710 - RNA, 13 nt, Molluscum contagiosum virus
gcgccacugccac

SEQ ID NO: 4040711 - RNA, 12 nt, Molluscum contagiosum virus
gcgccagcacgc

SEQ ID NO: 4040712 - RNA, 15 nt, Molluscum contagiosum virus
gcgccauccagcgca

SEQ ID NO: 4040713 - RNA, 14 nt, Molluscum contagiosum virus
gcgcccaaggccgc

SEQ ID NO: 4040714 - RNA, 20 nt, Molluscum contagiosum virus
gcgcccacggcggcacccgc

SEQ ID NO: 4040715 - RNA, 15 nt, Molluscum contagiosum virus
gcgcccgacgagcuu

SEQ ID NO: 4040716 - RNA, 17 nt, Molluscum contagiosum virus
gcgcccgccaccaugcu

SEQ ID NO: 4040717 - RNA, 13 nt, Molluscum contagiosum virus
gcgcccgcgcgcu

SEQ ID NO: 4040718 - RNA, 12 nt, Molluscum contagiosum virus
gcgcccgcggac

SEQ ID NO: 4040719 - RNA, 13 nt, Molluscum contagiosum virus
gcgcccgcggaga

SEQ ID NO: 4040720 - RNA, 11 nt, Molluscum contagiosum virus
gcgcccgcggc

SEQ ID NO: 4040721 - RNA, 22 nt, Molluscum contagiosum virus
gcgcccgcgugcacccuccgca

SEQ ID NO: 4040722 - RNA, 14 nt, Molluscum contagiosum virus
gcgcccgugccgcc

SEQ ID NO: 4040723 - RNA, 21 nt, Molluscum contagiosum virus
gcgcccgugcucgcgggccuu

SEQ ID NO: 4040724 - RNA, 19 nt, Molluscum contagiosum virus
gcgcccuaagggcccgcug

SEQ ID NO: 4040725 - RNA, 21 nt, Molluscum contagiosum virus
gcgcccuuugcggcacgggcu

SEQ ID NO: 4040726 - RNA, 23 nt, Molluscum contagiosum virus
gcgccgacgugcgcgugacgauu

SEQ ID NO: 4040727 - RNA, 17 nt, Molluscum contagiosum virus
gcgccgaugcagugcgg

SEQ ID NO: 4040728 - RNA, 15 nt, Molluscum contagiosum virus
gcgccgcacgcugcu

SEQ ID NO: 4040729 - RNA, 15 nt, Molluscum contagiosum virus
gcgccgccagcuccg

SEQ ID NO: 4040730 - RNA, 20 nt, Molluscum contagiosum virus
gcgccgccgcgccgcugcgc

SEQ ID NO: 4040731 - RNA, 21 nt, Molluscum contagiosum virus
gcgccgcgcaugacagccaug

SEQ ID NO: 4040732 - RNA, 15 nt, Molluscum contagiosum virus
gcgccgcugcgccgg

SEQ ID NO: 4040733 - RNA, 12 nt, Molluscum contagiosum virus
gcgccgcuuccu

SEQ ID NO: 4040734 - RNA, 21 nt, Molluscum contagiosum virus
gcgccggaaagaagggcucgc

SEQ ID NO: 4040735 - RNA, 14 nt, Molluscum contagiosum virus
gcgccggaaguaga

SEQ ID NO: 4040736 - RNA, 15 nt, Molluscum contagiosum virus
gcgccggcucugccu

SEQ ID NO: 4040737 - RNA, 15 nt, Molluscum contagiosum virus
gcgccggcugcgcca

SEQ ID NO: 4040738 - RNA, 24 nt, Molluscum contagiosum virus
gcgccgggaauaggucggaagaag

SEQ ID NO: 4040739 - RNA, 19 nt, Molluscum contagiosum virus
gcgccgguagggugccgag

SEQ ID NO: 4040740 - RNA, 18 nt, Molluscum contagiosum virus
gcgccguccaugugcccg

SEQ ID NO: 4040741 - RNA, 19 nt, Molluscum contagiosum virus
gcgccgucucgcggaagaa

SEQ ID NO: 4040742 - RNA, 24 nt, Molluscum contagiosum virus
gcgccuaccgcgcgggaggcgucc

SEQ ID NO: 4040743 - RNA, 22 nt, Molluscum contagiosum virus
ugcgcgcacugcucgcgcacgc

SEQ ID NO: 4040744 - RNA, 14 nt, Molluscum contagiosum virus
ugcgcgcaugccuu

SEQ ID NO: 4040745 - RNA, 16 nt, Molluscum contagiosum virus
ugcgcgccaagaacaa

SEQ ID NO: 4040746 - RNA, 12 nt, Molluscum contagiosum virus
ugcgcgcgcgcu

SEQ ID NO: 4040747 - RNA, 12 nt, Molluscum contagiosum virus
ugcgcgcgcuga

SEQ ID NO: 4040748 - RNA, 20 nt, Molluscum contagiosum virus
ugcgcgguggugcugggcgu

SEQ ID NO: 4040749 - RNA, 18 nt, Molluscum contagiosum virus
ugcgcgucugugcgcgcu

SEQ ID NO: 4040750 - RNA, 13 nt, Molluscum contagiosum virus
ugcgcgugccucu

SEQ ID NO: 4040751 - RNA, 22 nt, Molluscum contagiosum virus
ugcgcgugccucugccagccgc

SEQ ID NO: 4040752 - RNA, 21 nt, Molluscum contagiosum virus
ugcgcgugcggcgcaaccuca

SEQ ID NO: 4040753 - RNA, 19 nt, Molluscum contagiosum virus
ugcgcgugcgggcgagcau

SEQ ID NO: 4040754 - RNA, 20 nt, Molluscum contagiosum virus
ugcgcguguagcggcgcuug

SEQ ID NO: 4040755 - RNA, 13 nt, Molluscum contagiosum virus
ugcgcgugugcag

SEQ ID NO: 4040756 - RNA, 17 nt, Molluscum contagiosum virus
ugcgcuggaugcugcuc

SEQ ID NO: 4040757 - RNA, 16 nt, Molluscum contagiosum virus
ugcgcuggcccacgcu

SEQ ID NO: 4040758 - RNA, 18 nt, Molluscum contagiosum virus
ugcggagggugcacgcgg

SEQ ID NO: 4040759 - RNA, 22 nt, Molluscum contagiosum virus
ugcggagggugcacgcgggcgc

SEQ ID NO: 4040760 - RNA, 21 nt, Molluscum contagiosum virus
ugcggcaaccgcgcccgcgcg

SEQ ID NO: 4040761 - RNA, 21 nt, Molluscum contagiosum virus
ugcggcaggaagcuggcgcgg

SEQ ID NO: 4040762 - RNA, 16 nt, Molluscum contagiosum virus
ugcggccaccagcgcg

SEQ ID NO: 4040763 - RNA, 13 nt, Molluscum contagiosum virus
ugcggccagcacc

SEQ ID NO: 4040764 - RNA, 12 nt, Molluscum contagiosum virus
ugcggcgcgugc

SEQ ID NO: 4040765 - RNA, 12 nt, Molluscum contagiosum virus
ugcggcggcucg

SEQ ID NO: 4040766 - RNA, 20 nt, Molluscum contagiosum virus
ugcggcguacgcgcagggag

SEQ ID NO: 4040767 - RNA, 12 nt, Molluscum contagiosum virus
ugcggcugcugg

SEQ ID NO: 4040768 - RNA, 23 nt, Molluscum contagiosum virus
ugcgucacaagcaccgccugcug

SEQ ID NO: 4040769 - RNA, 14 nt, Molluscum contagiosum virus
ugcgucccagcagc

SEQ ID NO: 4040770 - RNA, 15 nt, Molluscum contagiosum virus
ugcgugcccagcagg

SEQ ID NO: 4040771 - RNA, 13 nt, Molluscum contagiosum virus
ugcgugcuagccc

SEQ ID NO: 4040772 - RNA, 12 nt, Molluscum contagiosum virus
ugcguggacagc

SEQ ID NO: 4040773 - RNA, 14 nt, Molluscum contagiosum virus
ugcgugguguccac

SEQ ID NO: 4040774 - RNA, 21 nt, Molluscum contagiosum virus
ugcgugguguccacgcgcgug

SEQ ID NO: 4040775 - RNA, 21 nt, Molluscum contagiosum virus
ugcguguuggcuucugcgcgg

SEQ ID NO: 4040776 - RNA, 13 nt, Molluscum contagiosum virus
ugcguuccgggcc

SEQ ID NO: 4040777 - RNA, 12 nt, Molluscum contagiosum virus
ugcguuuccagg

SEQ ID NO: 4040778 - RNA, 22 nt, Molluscum contagiosum virus
ugcucaaggacuaccagcucuu

SEQ ID NO: 4040779 - RNA, 12 nt, Molluscum contagiosum virus
ugcucauccucc

SEQ ID NO: 4040780 - RNA, 16 nt, Molluscum contagiosum virus
ugcuccacgcgcagcu

SEQ ID NO: 4040781 - RNA, 18 nt, Molluscum contagiosum virus
ugcuccgcacguggaguc

SEQ ID NO: 4040782 - RNA, 18 nt, Molluscum contagiosum virus
ugcuccugaucugcgugg

SEQ ID NO: 4040783 - RNA, 12 nt, Molluscum contagiosum virus
ugcucgccccuc

SEQ ID NO: 4040784 - RNA, 17 nt, Molluscum contagiosum virus
ugcucgcgugcgugcug

SEQ ID NO: 4040785 - RNA, 17 nt, Molluscum contagiosum virus
ugcucggacacacgcac

SEQ ID NO: 4040786 - RNA, 17 nt, Molluscum contagiosum virus
ugcucgucgccgggccc

SEQ ID NO: 4040787 - RNA, 22 nt, Molluscum contagiosum virus
ugcucguggaaaagcagggccc

SEQ ID NO: 4040788 - RNA, 20 nt, Molluscum contagiosum virus
ugcucucgcugcugcccaua

SEQ ID NO: 4040789 - RNA, 14 nt, Molluscum contagiosum virus
ugcucuuccaggag

SEQ ID NO: 4040790 - RNA, 14 nt, Molluscum contagiosum virus
ugcucuucggggac

SEQ ID NO: 4040791 - RNA, 15 nt, Molluscum contagiosum virus
ugcugaagacgcugg

SEQ ID NO: 4040792 - RNA, 15 nt, Molluscum contagiosum virus
ugcugcagcugcgcg

SEQ ID NO: 4040793 - RNA, 13 nt, Molluscum contagiosum virus
ugcugcgcgccgc

SEQ ID NO: 4040794 - RNA, 19 nt, Molluscum contagiosum virus
ugcugcggcaaccgcgccc

SEQ ID NO: 4040795 - RNA, 17 nt, Molluscum contagiosum virus
ugcugcgugcgcgcgau

SEQ ID NO: 4040796 - RNA, 22 nt, Molluscum contagiosum virus
ugcugcucgacgggcgcagcca

SEQ ID NO: 4040797 - RNA, 18 nt, Molluscum contagiosum virus
ugcugcucgcacccgcgc

SEQ ID NO: 4040798 - RNA, 15 nt, Molluscum contagiosum virus
ugcugcugcgcgcgc

SEQ ID NO: 4040799 - RNA, 20 nt, Molluscum contagiosum virus
ugcuggacacucgcggcaag

SEQ ID NO: 4040800 - RNA, 14 nt, Molluscum contagiosum virus
ugcuggagcggcau

SEQ ID NO: 4040801 - RNA, 20 nt, Molluscum contagiosum virus
ugcuggcgcgcggagagcag

SEQ ID NO: 4040802 - RNA, 19 nt, Molluscum contagiosum virus
ugcuggcgcucgcgcgcac

SEQ ID NO: 4040803 - RNA, 21 nt, Molluscum contagiosum virus
ugcuggcggggcuggcagaag

SEQ ID NO: 4040804 - RNA, 22 nt, Molluscum contagiosum virus
ugcugguucugcgcugccagcu

SEQ ID NO: 4040805 - RNA, 21 nt, Molluscum contagiosum virus
ugcugucccaagacucugccg

SEQ ID NO: 4040806 - RNA, 21 nt, Molluscum contagiosum virus
ugcuguccuucaagaacgaca

SEQ ID NO: 4040807 - RNA, 19 nt, Molluscum contagiosum virus
ugcuguugccgcgcucgug

SEQ ID NO: 4040808 - RNA, 19 nt, Molluscum contagiosum virus
ugcuuccgcaccuggucga

SEQ ID NO: 4040809 - RNA, 23 nt, Molluscum contagiosum virus
ugcuuccggugccggccgccggc

SEQ ID NO: 4040810 - RNA, 19 nt, Molluscum contagiosum virus
ugcuuugugcgucucccag

SEQ ID NO: 4040811 - RNA, 19 nt, Molluscum contagiosum virus
ugcuuuuucugugcgccuu

SEQ ID NO: 4040812 - RNA, 17 nt, Molluscum contagiosum virus
uggaacugcagcagcug

SEQ ID NO: 4040813 - RNA, 16 nt, Molluscum contagiosum virus
uggaagccgccagcca

SEQ ID NO: 4040814 - RNA, 20 nt, Molluscum contagiosum virus
uggaagcuuccuuuuucacu

SEQ ID NO: 4040815 - RNA, 16 nt, Molluscum contagiosum virus
uggacacgcacuggcg

SEQ ID NO: 4040816 - RNA, 20 nt, Molluscum contagiosum virus
uggacacgcacuggcgcugc

SEQ ID NO: 4040817 - RNA, 16 nt, Molluscum contagiosum virus
uggacacgcugcgcgu

SEQ ID NO: 4040818 - RNA, 12 nt, Molluscum contagiosum virus
uggacacgugcg

SEQ ID NO: 4040819 - RNA, 17 nt, Molluscum contagiosum virus
uggacacgugcguggug

SEQ ID NO: 4040820 - RNA, 15 nt, Molluscum contagiosum virus
uggacagcaucccca

SEQ ID NO: 4040821 - RNA, 11 nt, Molluscum contagiosum virus
uggaccugauu

SEQ ID NO: 4040822 - RNA, 18 nt, Molluscum contagiosum virus
uggacgagcgcuaccuga

SEQ ID NO: 4040823 - RNA, 20 nt, Molluscum contagiosum virus
uggacgagcgcuaccugaug

SEQ ID NO: 4040824 - RNA, 20 nt, Molluscum contagiosum virus
uggacgaugguggcgcugcu

SEQ ID NO: 4040825 - RNA, 11 nt, Molluscum contagiosum virus
uggacgcgcaa

SEQ ID NO: 4040826 - RNA, 23 nt, Molluscum contagiosum virus
uggacgcgcucaagauccgagaa

SEQ ID NO: 4040827 - RNA, 12 nt, Molluscum contagiosum virus
uggacggugcug

SEQ ID NO: 4040828 - RNA, 15 nt, Molluscum contagiosum virus
uggacgugcugcugg

SEQ ID NO: 4040829 - RNA, 21 nt, Molluscum contagiosum virus
uggacguguccggagccaagc

SEQ ID NO: 4040830 - RNA, 22 nt, Molluscum contagiosum virus
uggagaaggucuacgaggagca

SEQ ID NO: 4040831 - RNA, 20 nt, Molluscum contagiosum virus
uggagaccugucgugcaaug

SEQ ID NO: 4040832 - RNA, 21 nt, Molluscum contagiosum virus
uggagagcguacucgggccgc

SEQ ID NO: 4040833 - RNA, 18 nt, Molluscum contagiosum virus
uggagcaccuggaacgcg

SEQ ID NO: 4040834 - RNA, 14 nt, Molluscum contagiosum virus
uggagcgagugcgc

SEQ ID NO: 4040835 - RNA, 14 nt, Molluscum contagiosum virus
uggagcgcgcggac

SEQ ID NO: 4040836 - RNA, 19 nt, Molluscum contagiosum virus
uggagcugccgcugcgcga

SEQ ID NO: 4040837 - RNA, 18 nt, Molluscum contagiosum virus
uggaggcaaucuguccag

SEQ ID NO: 4040838 - RNA, 16 nt, Molluscum contagiosum virus
uggaggcccaggccau

SEQ ID NO: 4040839 - RNA, 18 nt, Molluscum contagiosum virus
uggaggcgcuagugcaga

SEQ ID NO: 4040840 - RNA, 21 nt, Molluscum contagiosum virus
uggagucacgaccgacccauc

SEQ ID NO: 4040841 - RNA, 20 nt, Molluscum contagiosum virus
uggaguuuaaugacgcgcac

SEQ ID NO: 4040842 - RNA, 23 nt, Molluscum contagiosum virus
uggaucaccacuggacacgugcc

SEQ ID NO: 4040843 - RNA, 19 nt, Molluscum contagiosum virus
uggaucgcgcgcaccugca

SEQ ID NO: 4040844 - RNA, 20 nt, Molluscum contagiosum virus
uggaucuucucaagagccgc

SEQ ID NO: 4040845 - RNA, 20 nt, Molluscum contagiosum virus
uggcaccugcggcugcggcg

SEQ ID NO: 4040846 - RNA, 16 nt, Molluscum contagiosum virus
uggcacgcgccgcgcg

SEQ ID NO: 4040847 - RNA, 13 nt, Molluscum contagiosum virus
ugcccgccagaag

SEQ ID NO: 4040848 - RNA, 19 nt, Molluscum contagiosum virus
ugcccgccagaagugaaau

SEQ ID NO: 4040849 - RNA, 17 nt, Molluscum contagiosum virus
ugccgacgugugccgcu

SEQ ID NO: 4040850 - RNA, 14 nt, Molluscum contagiosum virus
ugccgaggcgcugc

SEQ ID NO: 4040851 - RNA, 13 nt, Molluscum contagiosum virus
ugccgcagcccga

SEQ ID NO: 4040852 - RNA, 15 nt, Molluscum contagiosum virus
ugccgccggcgccgc

SEQ ID NO: 4040853 - RNA, 17 nt, Molluscum contagiosum virus
ugccgcgagcacuggcu

SEQ ID NO: 4040854 - RNA, 22 nt, Molluscum contagiosum virus
ugccgcgccuugagcgcgccgc

SEQ ID NO: 4040855 - RNA, 16 nt, Molluscum contagiosum virus
ugccgcggcaguggcc

SEQ ID NO: 4040856 - RNA, 20 nt, Molluscum contagiosum virus
ugccgcucgcuguccuuccg

SEQ ID NO: 4040857 - RNA, 16 nt, Molluscum contagiosum virus
ugccgcugagagacuu

SEQ ID NO: 4040858 - RNA, 15 nt, Molluscum contagiosum virus
ugccgcuugagcagc

SEQ ID NO: 4040859 - RNA, 21 nt, Molluscum contagiosum virus
ugccggcaacgcugccgcugg

SEQ ID NO: 4040860 - RNA, 17 nt, Molluscum contagiosum virus
ugccggcgcgugagcgc

SEQ ID NO: 4040861 - RNA, 21 nt, Molluscum contagiosum virus
ugccgggcgccggcucugccu

SEQ ID NO: 4040862 - RNA, 13 nt, Molluscum contagiosum virus
ugccguccccgcg

SEQ ID NO: 4040863 - RNA, 14 nt, Molluscum contagiosum virus
ugccgucgcccgug

SEQ ID NO: 4040864 - RNA, 16 nt, Molluscum contagiosum virus
ugccguucacgcacac

SEQ ID NO: 4040865 - RNA, 18 nt, Molluscum contagiosum virus
ugccugagaagcuguacc

SEQ ID NO: 4040866 - RNA, 15 nt, Molluscum contagiosum virus
ugccugcacugagaa

SEQ ID NO: 4040867 - RNA, 11 nt, Molluscum contagiosum virus
ugccuggcagu

SEQ ID NO: 4040868 - RNA, 19 nt, Molluscum contagiosum virus
ugccuuucgaguccccaga

SEQ ID NO: 4040869 - RNA, 14 nt, Molluscum contagiosum virus
ugccuuucuuccag

SEQ ID NO: 4040870 - RNA, 17 nt, Molluscum contagiosum virus
ugcgacagcugcugcuc

SEQ ID NO: 4040871 - RNA, 20 nt, Molluscum contagiosum virus
ugcgagcacuguacgcacgc

SEQ ID NO: 4040872 - RNA, 14 nt, Molluscum contagiosum virus
ugcgagcggcgcgc

SEQ ID NO: 4040873 - RNA, 15 nt, Molluscum contagiosum virus
ugcgaguggcgcgca

SEQ ID NO: 4040874 - RNA, 14 nt, Molluscum contagiosum virus
ugcgcaacgugcug

SEQ ID NO: 4040875 - RNA, 16 nt, Molluscum contagiosum virus
ugcgcaagcucagccu

SEQ ID NO: 4040876 - RNA, 12 nt, Molluscum contagiosum virus
ugcgcaaggccg

SEQ ID NO: 4040877 - RNA, 18 nt, Molluscum contagiosum virus
ugcgcaauaaggcggugg

SEQ ID NO: 4040878 - RNA, 23 nt, Molluscum contagiosum virus
ugcgcaccgcgggcuggacugug

SEQ ID NO: 4040879 - RNA, 23 nt, Molluscum contagiosum virus
ugcgcagcauucccggcgcgcgc

SEQ ID NO: 4040880 - RNA, 15 nt, Molluscum contagiosum virus
ugcgcaggaccgcga

SEQ ID NO: 4040881 - RNA, 22 nt, Molluscum contagiosum virus
ugcgcauggccacgcccgggcc

SEQ ID NO: 4040882 - RNA, 19 nt, Molluscum contagiosum virus
ugcgcccgugcgaggagca

SEQ ID NO: 4040883 - RNA, 11 nt, Molluscum contagiosum virus
ugcgccgccgc

SEQ ID NO: 4040884 - RNA, 17 nt, Molluscum contagiosum virus
ugcgccggcugcgccac

SEQ ID NO: 4040885 - RNA, 20 nt, Molluscum contagiosum virus
ugcgccugccgcgcaugcug

SEQ ID NO: 4040886 - RNA, 21 nt, Molluscum contagiosum virus
ugcgcgagacgcugcugcaca

SEQ ID NO: 4040887 - RNA, 17 nt, Molluscum contagiosum virus
ugcgcgagccgcugcac

SEQ ID NO: 4040888 - RNA, 19 nt, Molluscum contagiosum virus
ugcgcgagccgcugcacgc

SEQ ID NO: 4040889 - RNA, 22 nt, Molluscum contagiosum virus
ugcgcgcacggcuaggcgcggc

SEQ ID NO: 4040890 - RNA, 18 nt, Molluscum contagiosum virus
agcccgcgcgcgagcugg

SEQ ID NO: 4040891 - RNA, 17 nt, Molluscum contagiosum virus
agcccgcugcgcauggc

SEQ ID NO: 4040892 - RNA, 22 nt, Molluscum contagiosum virus
agcccgcugcgcauggccacgc

SEQ ID NO: 4040893 - RNA, 12 nt, Molluscum contagiosum virus
agcccuccugag

SEQ ID NO: 4040894 - RNA, 20 nt, Molluscum contagiosum virus
agcccuuccacgacauggac

SEQ ID NO: 4040895 - RNA, 13 nt, Molluscum contagiosum virus
agccgagcgccgc

SEQ ID NO: 4040896 - RNA, 17 nt, Molluscum contagiosum virus
agccgcaaccucuuccg

SEQ ID NO: 4040897 - RNA, 13 nt, Molluscum contagiosum virus
agccgcacggcgc

SEQ ID NO: 4040898 - RNA, 14 nt, Molluscum contagiosum virus
agccgccgcugccg

SEQ ID NO: 4040899 - RNA, 18 nt, Molluscum contagiosum virus
agccgcguagcuagcucu

SEQ ID NO: 4040900 - RNA, 14 nt, Molluscum contagiosum virus
agccgcuccugguc

SEQ ID NO: 4040901 - RNA, 21 nt, Molluscum contagiosum virus
agccgcuccuggucuucccgc

SEQ ID NO: 4040902 - RNA, 18 nt, Molluscum contagiosum virus
agccgcuggacgccucgg

SEQ ID NO: 4040903 - RNA, 21 nt, Molluscum contagiosum virus
agccggccuagagcuggcacc

SEQ ID NO: 4040904 - RNA, 14 nt, Molluscum contagiosum virus
agccuagccauaca

SEQ ID NO: 4040905 - RNA, 21 nt, Molluscum contagiosum virus
agccucccccgcgcacugcca

SEQ ID NO: 4040906 - RNA, 15 nt, Molluscum contagiosum virus
agccucgcuggugug

SEQ ID NO: 4040907 - RNA, 19 nt, Molluscum contagiosum virus
agccucucucguggggagg

SEQ ID NO: 4040908 - RNA, 19 nt, Molluscum contagiosum virus
agccugcucacggcggcgc

SEQ ID NO: 4040909 - RNA, 17 nt, Molluscum contagiosum virus
agccuuuuggcggcgca

SEQ ID NO: 4040910 - RNA, 17 nt, Molluscum contagiosum virus
agcgacuacgcgcugcu

SEQ ID NO: 4040911 - RNA, 14 nt, Molluscum contagiosum virus
agcgagugcgcgug

SEQ ID NO: 4040912 - RNA, 14 nt, Molluscum contagiosum virus
agcgccgccagcuc

SEQ ID NO: 4040913 - RNA, 21 nt, Molluscum contagiosum virus
agcgccggaaacggaccugga

SEQ ID NO: 4040914 - RNA, 18 nt, Molluscum contagiosum virus
agcgccgucucgcggaag

SEQ ID NO: 4040915 - RNA, 21 nt, Molluscum contagiosum virus
agcgccuguaccccgaacggc

SEQ ID NO: 4040916 - RNA, 17 nt, Molluscum contagiosum virus
agcgccuguccgugggc

SEQ ID NO: 4040917 - RNA, 14 nt, Molluscum contagiosum virus
agcgccuugccgag

SEQ ID NO: 4040918 - RNA, 20 nt, Molluscum contagiosum virus
agcgcgaauuggccgcggag

SEQ ID NO: 4040919 - RNA, 14 nt, Molluscum contagiosum virus
agcgcgagcugugc

SEQ ID NO: 4040920 - RNA, 22 nt, Molluscum contagiosum virus
agcgcgcccaccagcagccagg

SEQ ID NO: 4040921 - RNA, 19 nt, Molluscum contagiosum virus
agcgcgccuagcuccagcg

SEQ ID NO: 4040922 - RNA, 16 nt, Molluscum contagiosum virus
agcgcgcuagcuccac

SEQ ID NO: 4040923 - RNA, 14 nt, Molluscum contagiosum virus
agcgcgcugcgccg

SEQ ID NO: 4040924 - RNA, 21 nt, Molluscum contagiosum virus
agcgcgcuggacuugcgcgag

SEQ ID NO: 4040925 - RNA, 19 nt, Molluscum contagiosum virus
agcgcggcaacagcacgac

SEQ ID NO: 4040926 - RNA, 16 nt, Molluscum contagiosum virus
agcgcggccgcgcucg

SEQ ID NO: 4040927 - RNA, 19 nt, Molluscum contagiosum virus
agcgcguccaugcugaucu

SEQ ID NO: 4040928 - RNA, 15 nt, Molluscum contagiosum virus
agcgcgugccgcucg

SEQ ID NO: 4040929 - RNA, 23 nt, Molluscum contagiosum virus
agcgcguucgcgcgugcuggacg

SEQ ID NO: 4040930 - RNA, 16 nt, Molluscum contagiosum virus
agcgcucgcccagcuc

SEQ ID NO: 4040931 - RNA, 13 nt, Molluscum contagiosum virus
agcgcucugcauu

SEQ ID NO: 4040932 - RNA, 13 nt, Molluscum contagiosum virus
agcgcuggagcug

SEQ ID NO: 4040933 - RNA, 20 nt, Molluscum contagiosum virus
agcggacuacaucgcucucu

SEQ ID NO: 4040934 - RNA, 23 nt, Molluscum contagiosum virus
agcggcgccacgagcgccgcgac

SEQ ID NO: 4040935 - RNA, 19 nt, Molluscum contagiosum virus
agcgguguugcuguuucca

SEQ ID NO: 4040936 - RNA, 14 nt, Molluscum contagiosum virus
agcgguuccugcuu

SEQ ID NO: 4040937 - RNA, 21 nt, Molluscum contagiosum virus
agcgucgugugcgcgcacggc

SEQ ID NO: 4040938 - RNA, 15 nt, Molluscum contagiosum virus
agcguggcgcgcgag

SEQ ID NO: 4040939 - RNA, 19 nt, Molluscum contagiosum virus
agcgugucgaagcgcgcag

SEQ ID NO: 4040940 - RNA, 18 nt, Molluscum contagiosum virus
agcuagcucuggcagccc

SEQ ID NO: 4040941 - RNA, 19 nt, Molluscum contagiosum virus
agcuauccgcugucugaaa

SEQ ID NO: 4040942 - RNA, 17 nt, Molluscum contagiosum virus
agcucaaucucgcccag

SEQ ID NO: 4040943 - RNA, 18 nt, Molluscum contagiosum virus
agcucacggcuguggaca

SEQ ID NO: 4040944 - RNA, 16 nt, Molluscum contagiosum virus
agcuccgccgggaaua

SEQ ID NO: 4040945 - RNA, 20 nt, Molluscum contagiosum virus
agcuccgcgcaugccagacc

SEQ ID NO: 4040946 - RNA, 14 nt, Molluscum contagiosum virus
agcuccuagcgcgc

SEQ ID NO: 4040947 - RNA, 14 nt, Molluscum contagiosum virus
agcuccugcugguu

SEQ ID NO: 4040948 - RNA, 19 nt, Molluscum contagiosum virus
agcucgacacugugcuggc

SEQ ID NO: 4040949 - RNA, 23 nt, Molluscum contagiosum virus
agcucgcagccuccgugcgccag

SEQ ID NO: 4040950 - RNA, 20 nt, Molluscum contagiosum virus
agcucgccuccuugcccgag

SEQ ID NO: 4040951 - RNA, 23 nt, Molluscum contagiosum virus
agcucgcgcaguuagaaaugcuu

SEQ ID NO: 4040952 - RNA, 16 nt, Molluscum contagiosum virus
agcucgcgcgcaagaa

SEQ ID NO: 4040953 - RNA, 12 nt, Molluscum contagiosum virus
agcucguggaca

SEQ ID NO: 4040954 - RNA, 23 nt, Molluscum contagiosum virus
agcucugucccgcaagccacaca

SEQ ID NO: 4040955 - RNA, 11 nt, Molluscum contagiosum virus
agcucuucccc

SEQ ID NO: 4040956 - RNA, 20 nt, Molluscum contagiosum virus
agcucuucgacagcgugcgc

SEQ ID NO: 4040957 - RNA, 23 nt, Molluscum contagiosum virus
agcugacucggacacuggaggug

SEQ ID NO: 4040958 - RNA, 16 nt, Molluscum contagiosum virus
agcugcaagccagccc

SEQ ID NO: 4040959 - RNA, 14 nt, Molluscum contagiosum virus
agcugcaccggcgc

SEQ ID NO: 4040960 - RNA, 21 nt, Molluscum contagiosum virus
agcugcacgugcagcggcgcc

SEQ ID NO: 4040961 - RNA, 17 nt, Molluscum contagiosum virus
agcugcgcuugcgcgug

SEQ ID NO: 4040962 - RNA, 14 nt, Molluscum contagiosum virus
agcugcggacgcgg

SEQ ID NO: 4040963 - RNA, 22 nt, Molluscum contagiosum virus
agcuggagcugccgcugcgcga

SEQ ID NO: 4040964 - RNA, 16 nt, Molluscum contagiosum virus
agcugugcgagccagu

SEQ ID NO: 4040965 - RNA, 20 nt, Molluscum contagiosum virus
agcuucgucuucaccugcau

SEQ ID NO: 4040966 - RNA, 21 nt, Molluscum contagiosum virus
agcuucuccggaggccgcucc

SEQ ID NO: 4040967 - RNA, 15 nt, Molluscum contagiosum virus
agcuuggugcgcucg

SEQ ID NO: 4040968 - RNA, 16 nt, Molluscum contagiosum virus
ccggucaccgcguccg

SEQ ID NO: 4040969 - RNA, 12 nt, Molluscum contagiosum virus
ccgguccugacu

SEQ ID NO: 4040970 - RNA, 14 nt, Molluscum contagiosum virus
ccgguccugacucc

SEQ ID NO: 4040971 - RNA, 21 nt, Molluscum contagiosum virus
ccguaccccgagggcgcgacc

SEQ ID NO: 4040972 - RNA, 19 nt, Molluscum contagiosum virus
ccgucaaccugcugccucc

SEQ ID NO: 4040973 - RNA, 19 nt, Molluscum contagiosum virus
ccguccaguaagcgacagg

SEQ ID NO: 4040974 - RNA, 13 nt, Molluscum contagiosum virus
ccguccgcgcagc

SEQ ID NO: 4040975 - RNA, 17 nt, Molluscum contagiosum virus
ccguccucgcucgugcu

SEQ ID NO: 4040976 - RNA, 13 nt, Molluscum contagiosum virus
ccguccuugcucu

SEQ ID NO: 4040977 - RNA, 21 nt, Molluscum contagiosum virus
ccgucucgcggaagaauuccu

SEQ ID NO: 4040978 - RNA, 19 nt, Molluscum contagiosum virus
ccgucuugcgcacacacuu

SEQ ID NO: 4040979 - RNA, 19 nt, Molluscum contagiosum virus
ccgucuuugcggacgcgcg

SEQ ID NO: 4040980 - RNA, 13 nt, Molluscum contagiosum virus
ccgugaacucgac

SEQ ID NO: 4040981 - RNA, 16 nt, Molluscum contagiosum virus
ccgugacgcugcggcg

SEQ ID NO: 4040982 - RNA, 13 nt, Molluscum contagiosum virus
ccgugcccgagcc

SEQ ID NO: 4040983 - RNA, 19 nt, Molluscum contagiosum virus
cucagcgccgcgugcaugc

SEQ ID NO: 4040984 - RNA, 21 nt, Molluscum contagiosum virus
cucagcgcuucgacuuccagc

SEQ ID NO: 4040985 - RNA, 16 nt, Molluscum contagiosum virus
cucagcgggcagacag

SEQ ID NO: 4040986 - RNA, 15 nt, Molluscum contagiosum virus
cucaggggcucuccu

SEQ ID NO: 4040987 - RNA, 14 nt, Molluscum contagiosum virus
cucauagcccaugc

SEQ ID NO: 4040988 - RNA, 20 nt, Molluscum contagiosum virus
cucauagcgccacgagcagu

SEQ ID NO: 4040989 - RNA, 15 nt, Molluscum contagiosum virus
cucaucaagcccgag

SEQ ID NO: 4040990 - RNA, 12 nt, Molluscum contagiosum virus
cucauccaccug

SEQ ID NO: 4040991 - RNA, 16 nt, Molluscum contagiosum virus
cucauccucccugcgg

SEQ ID NO: 4040992 - RNA, 17 nt, Molluscum contagiosum virus
cucaucgagcaccucaa

SEQ ID NO: 4040993 - RNA, 18 nt, Molluscum contagiosum virus
cucaucggcgagcucuuu

SEQ ID NO: 4040994 - RNA, 23 nt, Molluscum contagiosum virus
cucaugcgcgggaugcuggacgg

SEQ ID NO: 4040995 - RNA, 16 nt, Molluscum contagiosum virus
cuccaacagcagcugg

SEQ ID NO: 4040996 - RNA, 13 nt, Molluscum contagiosum virus
cuccaagaacgag

SEQ ID NO: 4040997 - RNA, 16 nt, Molluscum contagiosum virus
cuccaagaagaggcca

SEQ ID NO: 4040998 - RNA, 17 nt, Molluscum contagiosum virus
cuccaagaagaggccag

SEQ ID NO: 4040999 - RNA, 19 nt, Molluscum contagiosum virus
cuccacuaccaacucugug

SEQ ID NO: 4041000 - RNA, 13 nt, Molluscum contagiosum virus
cuccagcguggug

SEQ ID NO: 4041001 - RNA, 15 nt, Molluscum contagiosum virus
cuccagguccuccag

SEQ ID NO: 4041002 - RNA, 17 nt, Molluscum contagiosum virus
cuccaucaucgagcugc

SEQ ID NO: 4041003 - RNA, 13 nt, Molluscum contagiosum virus
cuccauggagcgc

SEQ ID NO: 4041004 - RNA, 14 nt, Molluscum contagiosum virus
cuccauggagcgcc

SEQ ID NO: 4041005 - RNA, 23 nt, Molluscum contagiosum virus
cucccaggaagacgugcugcgcg

SEQ ID NO: 4041006 - RNA, 20 nt, Molluscum contagiosum virus
cucccgccgcgugcccgucu

SEQ ID NO: 4041007 - RNA, 17 nt, Molluscum contagiosum virus
cucccucgcgcgcaugu

SEQ ID NO: 4041008 - RNA, 17 nt, Molluscum contagiosum virus
cuccgaaaaaggcccgg

SEQ ID NO: 4041009 - RNA, 22 nt, Molluscum contagiosum virus
cuccgagcgcgacuuguccuca

SEQ ID NO: 4041010 - RNA, 13 nt, Molluscum contagiosum virus
cuccgagcgcgcg

SEQ ID NO: 4041011 - RNA, 21 nt, Molluscum contagiosum virus
cuccgaggaaacgcagcacuu

SEQ ID NO: 4041012 - RNA, 15 nt, Molluscum contagiosum virus
cuccgaggaggcaag

SEQ ID NO: 4041013 - RNA, 14 nt, Molluscum contagiosum virus
cuccgaguccagcu

SEQ ID NO: 4041014 - RNA, 22 nt, Molluscum contagiosum virus
cuccgcgaccgcgaacugcaac

SEQ ID NO: 4041015 - RNA, 14 nt, Molluscum contagiosum virus
cuccgcgcaccgcg

SEQ ID NO: 4041016 - RNA, 21 nt, Molluscum contagiosum virus
cuccgcggaggccaagcaaac

SEQ ID NO: 4041017 - RNA, 19 nt, Molluscum contagiosum virus
cuccgcgggaagaggacgc

SEQ ID NO: 4041018 - RNA, 15 nt, Molluscum contagiosum virus
cuccgcgggcagccg

SEQ ID NO: 4041019 - RNA, 19 nt, Molluscum contagiosum virus
cuccggucgcccuccgccg

SEQ ID NO: 4041020 - RNA, 12 nt, Molluscum contagiosum virus
cuccgugcgcca

SEQ ID NO: 4041021 - RNA, 14 nt, Molluscum contagiosum virus
cuccguuucccgcg

SEQ ID NO: 4041022 - RNA, 23 nt, Molluscum contagiosum virus
cuccuacacauuccucggcgcac

SEQ ID NO: 4041023 - RNA, 18 nt, Molluscum contagiosum virus
cuccucggcgcuacgcac

SEQ ID NO: 4041024 - RNA, 17 nt, Molluscum contagiosum virus
cuccucucacgcccucu

SEQ ID NO: 4041025 - RNA, 17 nt, Molluscum contagiosum virus
cuccugagaagcaaugc

SEQ ID NO: 4041026 - RNA, 23 nt, Molluscum contagiosum virus
cuccugugucgcgcgagcaaaga

SEQ ID NO: 4041027 - RNA, 19 nt, Molluscum contagiosum virus
cuccuucgacgcgcguucu

SEQ ID NO: 4041028 - RNA, 23 nt, Molluscum contagiosum virus
cucgaacgcaaggugugcgcgcu

SEQ ID NO: 4041029 - RNA, 19 nt, Molluscum contagiosum virus
cucgaccugcacgacccuc

SEQ ID NO: 4041030 - RNA, 16 nt, Molluscum contagiosum virus
cucgacgugaucgcgc

SEQ ID NO: 4041031 - RNA, 21 nt, Molluscum contagiosum virus
cucgagcacgccuccaagaag

SEQ ID NO: 4041032 - RNA, 12 nt, Molluscum contagiosum virus
cucgagcagcgg

SEQ ID NO: 4041033 - RNA, 20 nt, Molluscum contagiosum virus
cucgagcaggucaucgggcu

SEQ ID NO: 4041034 - RNA, 23 nt, Molluscum contagiosum virus
cucgagccugccagcgccagccu

SEQ ID NO: 4041035 - RNA, 22 nt, Molluscum contagiosum virus
cucgagcgcgcgccugcuggcg

SEQ ID NO: 4041036 - RNA, 15 nt, Molluscum contagiosum virus
cucgagcgcgcugga

SEQ ID NO: 4041037 - RNA, 23 nt, Molluscum contagiosum virus
cucgagcucuucucgcagcggga

SEQ ID NO: 4041038 - RNA, 14 nt, Molluscum contagiosum virus
cucgagugcacgua

SEQ ID NO: 4041039 - RNA, 17 nt, Molluscum contagiosum virus
cucgauggacgccagcu

SEQ ID NO: 4041040 - RNA, 17 nt, Molluscum contagiosum virus
cucgcagacgcagcgcg

SEQ ID NO: 4041041 - RNA, 15 nt, Molluscum contagiosum virus
cucgcagcucacgag

SEQ ID NO: 4041042 - RNA, 22 nt, Molluscum contagiosum virus
cucgccaguggccagcgcgcgg

SEQ ID NO: 4041043 - RNA, 22 nt, Molluscum contagiosum virus
cucgcccgcgcgcgcgcgaacg

SEQ ID NO: 4041044 - RNA, 13 nt, Molluscum contagiosum virus
cucgccgcacgcg

SEQ ID NO: 4041045 - RNA, 18 nt, Molluscum contagiosum virus
cucgccggcaccacggug

SEQ ID NO: 4041046 - RNA, 20 nt, Molluscum contagiosum virus
cucgccuccuugcccgagga

SEQ ID NO: 4041047 - RNA, 15 nt, Molluscum contagiosum virus
cucgccuuuccccgg

SEQ ID NO: 4041048 - RNA, 22 nt, Molluscum contagiosum virus
cucgcgcaggucaucgacgagc

SEQ ID NO: 4041049 - RNA, 16 nt, Molluscum contagiosum virus
cucgcgcaucugccgc

SEQ ID NO: 4041050 - RNA, 16 nt, Molluscum contagiosum virus
cucgcgcgcagcacac

SEQ ID NO: 4041051 - RNA, 12 nt, Molluscum contagiosum virus
cucgcgcgcgag

SEQ ID NO: 4041052 - RNA, 17 nt, Molluscum contagiosum virus
cucgcgcgcgagcacgu

SEQ ID NO: 4041053 - RNA, 19 nt, Molluscum contagiosum virus
cucgcgcguccgcaaagac

SEQ ID NO: 4041054 - RNA, 20 nt, Molluscum contagiosum virus
cucgcgcucgggaagcacgu

SEQ ID NO: 4041055 - RNA, 19 nt, Molluscum contagiosum virus
cucgcguaccuacucgccg

SEQ ID NO: 4041056 - RNA, 22 nt, Molluscum contagiosum virus
cucgcgucaucgcugcacgcga

SEQ ID NO: 4041057 - RNA, 19 nt, Molluscum contagiosum virus
cucgcguccgcgcagcucg

SEQ ID NO: 4041058 - RNA, 14 nt, Molluscum contagiosum virus
cucgcucgcgcaag

SEQ ID NO: 4041059 - RNA, 20 nt, Molluscum contagiosum virus
cucgcuguccuuccgacccg

SEQ ID NO: 4041060 - RNA, 17 nt, Molluscum contagiosum virus
cucggacggaggucugc

SEQ ID NO: 4041061 - RNA, 18 nt, Molluscum contagiosum virus
cucggacggaggucugcu

SEQ ID NO: 4041062 - RNA, 14 nt, Molluscum contagiosum virus
cucggacuuggccc

SEQ ID NO: 4041063 - RNA, 15 nt, Molluscum contagiosum virus
cucggcacugcuggc

SEQ ID NO: 4041064 - RNA, 12 nt, Molluscum contagiosum virus
cucggcgcacac

SEQ ID NO: 4041065 - RNA, 19 nt, Molluscum contagiosum virus
cucggcguggugcuggcca

SEQ ID NO: 4041066 - RNA, 16 nt, Molluscum contagiosum virus
cucgggcuagcaagca

SEQ ID NO: 4041067 - RNA, 20 nt, Molluscum contagiosum virus
cucgggcuagcaagcacgcc

SEQ ID NO: 4041068 - RNA, 18 nt, Molluscum contagiosum virus
cucgggugugugccugcu

SEQ ID NO: 4041069 - RNA, 15 nt, Molluscum contagiosum virus
cucggguuccagcuc

SEQ ID NO: 4041070 - RNA, 22 nt, Molluscum contagiosum virus
cucgguacaacuuuuccugcgu

SEQ ID NO: 4041071 - RNA, 14 nt, Molluscum contagiosum virus
cucgguggugcgcc

SEQ ID NO: 4041072 - RNA, 21 nt, Molluscum contagiosum virus
cucguacugcugcaggcaaag

SEQ ID NO: 4041073 - RNA, 14 nt, Molluscum contagiosum virus
cucguccggcgcuc

SEQ ID NO: 4041074 - RNA, 15 nt, Molluscum contagiosum virus
cucgucgccgggccc

SEQ ID NO: 4041075 - RNA, 15 nt, Molluscum contagiosum virus
cucgugccacugccg

SEQ ID NO: 4041076 - RNA, 13 nt, Molluscum contagiosum virus
cucgugcugcucu

SEQ ID NO: 4041077 - RNA, 14 nt, Molluscum contagiosum virus
cucgugcugggccu

SEQ ID NO: 4041078 - RNA, 17 nt, Molluscum contagiosum virus
cucguggaaaagcaggg

SEQ ID NO: 4041079 - RNA, 18 nt, Molluscum contagiosum virus
cucguggaucgcgcgcac

SEQ ID NO: 4041080 - RNA, 22 nt, Molluscum contagiosum virus
cucgugucacaauggcacuagc

SEQ ID NO: 4041081 - RNA, 16 nt, Molluscum contagiosum virus
cucguguguccgcacg

SEQ ID NO: 4041082 - RNA, 21 nt, Molluscum contagiosum virus
cucguguguccgcacgcacac

SEQ ID NO: 4041083 - RNA, 15 nt, Molluscum contagiosum virus
cucguguuguugcau

SEQ ID NO: 4041084 - RNA, 18 nt, Molluscum contagiosum virus
cucuacgccguguaccgc

SEQ ID NO: 4041085 - RNA, 17 nt, Molluscum contagiosum virus
cucucccgggcucuguc

SEQ ID NO: 4041086 - RNA, 23 nt, Molluscum contagiosum virus
cucuccgucagggaugccagugc

SEQ ID NO: 4041087 - RNA, 10 nt, Molluscum contagiosum virus
gcauugagcu

SEQ ID NO: 4041088 - RNA, 21 nt, Molluscum contagiosum virus
gccaaagucuuccuggggcug

SEQ ID NO: 4041089 - RNA, 20 nt, Molluscum contagiosum virus
gccaacacuaccacagccau

SEQ ID NO: 4041090 - RNA, 17 nt, Molluscum contagiosum virus
gccaaccuccugcaccu

SEQ ID NO: 4041091 - RNA, 23 nt, Molluscum contagiosum virus
gccaacgcggacgcgcagcucga

SEQ ID NO: 4041092 - RNA, 20 nt, Molluscum contagiosum virus
gccaagcguuggcgcccgag

SEQ ID NO: 4041093 - RNA, 13 nt, Molluscum contagiosum virus
gccaaggucucga

SEQ ID NO: 4041094 - RNA, 23 nt, Molluscum contagiosum virus
gccaccagcgcggccguggcugc

SEQ ID NO: 4041095 - RNA, 15 nt, Molluscum contagiosum virus
gccaccgcgcccuuu

SEQ ID NO: 4041096 - RNA, 15 nt, Molluscum contagiosum virus
gccacgagcgccgcg

SEQ ID NO: 4041097 - RNA, 16 nt, Molluscum contagiosum virus
gccacgauggccggca

SEQ ID NO: 4041098 - RNA, 18 nt, Molluscum contagiosum virus
gccacgcagcuggcgggc

SEQ ID NO: 4041099 - RNA, 21 nt, Molluscum contagiosum virus
gccacgcagcuggcgggcgug

SEQ ID NO: 4041100 - RNA, 15 nt, Molluscum contagiosum virus
gccacucuccuucag

SEQ ID NO: 4041101 - RNA, 20 nt, Molluscum contagiosum virus
gccacugccacggcugcaag

SEQ ID NO: 4041102 - RNA, 17 nt, Molluscum contagiosum virus
gccagcaagcucgaugc

SEQ ID NO: 4041103 - RNA, 17 nt, Molluscum contagiosum virus
gccagcauggcgagccc

SEQ ID NO: 4041104 - RNA, 15 nt, Molluscum contagiosum virus
gccagccaggcgccg

SEQ ID NO: 4041105 - RNA, 21 nt, Molluscum contagiosum virus
gccagcgccuguccgugggcg

SEQ ID NO: 4041106 - RNA, 13 nt, Molluscum contagiosum virus
gccagcggcgccg

SEQ ID NO: 4041107 - RNA, 15 nt, Molluscum contagiosum virus
gccagcggcgccgca

SEQ ID NO: 4041108 - RNA, 17 nt, Molluscum contagiosum virus
gccagcgucgcgcgccg

SEQ ID NO: 4041109 - RNA, 15 nt, Molluscum contagiosum virus
gccagcuccgcgcgg

SEQ ID NO: 4041110 - RNA, 17 nt, Molluscum contagiosum virus
gccagcucgacacugug

SEQ ID NO: 4041111 - RNA, 19 nt, Molluscum contagiosum virus
gccaggaaaacggaaacag

SEQ ID NO: 4041112 - RNA, 15 nt, Molluscum contagiosum virus
gccaggccgcgccgg

SEQ ID NO: 4041113 - RNA, 15 nt, Molluscum contagiosum virus
gccaggcgcggucgc

SEQ ID NO: 4041114 - RNA, 17 nt, Molluscum contagiosum virus
gcacugcuggcgcgcgc

SEQ ID NO: 4041115 - RNA, 16 nt, Molluscum contagiosum virus
gcacuggcgcgcacgc

SEQ ID NO: 4041116 - RNA, 20 nt, Molluscum contagiosum virus
gcacuucgcagacgacucgc

SEQ ID NO: 4041117 - RNA, 19 nt, Molluscum contagiosum virus
gcacuugccgggcgacggc

SEQ ID NO: 4041118 - RNA, 21 nt, Molluscum contagiosum virus
gcagacgacucgcugccagag

SEQ ID NO: 4041119 - RNA, 23 nt, Molluscum contagiosum virus
gcagacggucgacgacgcgcgca

SEQ ID NO: 4041120 - RNA, 17 nt, Molluscum contagiosum virus
gcagacguacgagcagg

SEQ ID NO: 4041121 - RNA, 21 nt, Molluscum contagiosum virus
gcagacguacgagcaggcgca

SEQ ID NO: 4041122 - RNA, 15 nt, Molluscum contagiosum virus
gcagacuaagaacgu

SEQ ID NO: 4041123 - RNA, 17 nt, Molluscum contagiosum virus
gcagaggacagcuccuu

SEQ ID NO: 4041124 - RNA, 19 nt, Molluscum contagiosum virus
gcagagugaaucuugccug

SEQ ID NO: 4041125 - RNA, 19 nt, Molluscum contagiosum virus
gcagauaguuuggacgagc

SEQ ID NO: 4041126 - RNA, 22 nt, Molluscum contagiosum virus
gcagcacaccgucgcguggugc

SEQ ID NO: 4041127 - RNA, 17 nt, Molluscum contagiosum virus
gcagcacggacaugagc

SEQ ID NO: 4041128 - RNA, 16 nt, Molluscum contagiosum virus
gcagcaggaugcuggu

SEQ ID NO: 4041129 - RNA, 21 nt, Molluscum contagiosum virus
gcagcaggugcacgugcugca

SEQ ID NO: 4041130 - RNA, 15 nt, Molluscum contagiosum virus
gcagcagugccagca

SEQ ID NO: 4041131 - RNA, 22 nt, Molluscum contagiosum virus
gcagcauuuuggugggcacgca

SEQ ID NO: 4041132 - RNA, 13 nt, Molluscum contagiosum virus
gcagcccaccagc

SEQ ID NO: 4041133 - RNA, 19 nt, Molluscum contagiosum virus
gcagccccgacgccagcgc

SEQ ID NO: 4041134 - RNA, 21 nt, Molluscum contagiosum virus
gcagccccguaggcgggccug

SEQ ID NO: 4041135 - RNA, 14 nt, Molluscum contagiosum virus
gcagcccuuccacg

SEQ ID NO: 4041136 - RNA, 16 nt, Molluscum contagiosum virus
gcagccgcagcccacg

SEQ ID NO: 4041137 - RNA, 20 nt, Molluscum contagiosum virus
gcagccgcagcccacgugcc

SEQ ID NO: 4041138 - RNA, 20 nt, Molluscum contagiosum virus
gcagccuccgguuuucgcgg

SEQ ID NO: 4041139 - RNA, 22 nt, Molluscum contagiosum virus
gcagcgcgacuagccugugccc

SEQ ID NO: 4041140 - RNA, 15 nt, Molluscum contagiosum virus
gcagcgcgcgcguag

SEQ ID NO: 4041141 - RNA, 23 nt, Molluscum contagiosum virus
gcagcgcgugacgcucacggccu

SEQ ID NO: 4041142 - RNA, 14 nt, Molluscum contagiosum virus
gcagcgcuugcgcg

SEQ ID NO: 4041143 - RNA, 22 nt, Molluscum contagiosum virus
gcagcggcgcgugcuccucgcg

SEQ ID NO: 4041144 - RNA, 23 nt, Molluscum contagiosum virus
gcagcgucgcggagcgcgcacgg

SEQ ID NO: 4041145 - RNA, 13 nt, Molluscum contagiosum virus
gcagcgugccgcg

SEQ ID NO: 4041146 - RNA, 13 nt, Molluscum contagiosum virus
gcagcgugcgcac

SEQ ID NO: 4041147 - RNA, 15 nt, Molluscum contagiosum virus
gcagcguuccaggaa

SEQ ID NO: 4041148 - RNA, 16 nt, Molluscum contagiosum virus
gcagcguuccaggaac

SEQ ID NO: 4041149 - RNA, 14 nt, Molluscum contagiosum virus
gcagcuaccgcgcg

SEQ ID NO: 4041150 - RNA, 15 nt, Molluscum contagiosum virus
gcagcucaagacgcu

SEQ ID NO: 4041151 - RNA, 22 nt, Molluscum contagiosum virus
gcagcucaagacgcugcuggcg

SEQ ID NO: 4041152 - RNA, 15 nt, Molluscum contagiosum virus
gcagcucuuccacga

SEQ ID NO: 4041153 - RNA, 13 nt, Molluscum contagiosum virus
gcagcugccgcag

SEQ ID NO: 4041154 - RNA, 13 nt, Molluscum contagiosum virus
gcagcuggagcug

SEQ ID NO: 4041155 - RNA, 16 nt, Molluscum contagiosum virus
gcagcuggcgcgcgcc

SEQ ID NO: 4041156 - RNA, 18 nt, Molluscum contagiosum virus
gcagcuguuucugccgcg

SEQ ID NO: 4041157 - RNA, 19 nt, Molluscum contagiosum virus
gcagcuucuuggagcccuu

SEQ ID NO: 4041158 - RNA, 16 nt, Molluscum contagiosum virus
gcaggaaaggcacccc

SEQ ID NO: 4041159 - RNA, 22 nt, Molluscum contagiosum virus
gcaggaaaggcaccccgcagga

SEQ ID NO: 4041160 - RNA, 21 nt, Molluscum contagiosum virus
gcaggaaaggcacccgcagga

SEQ ID NO: 4041161 - RNA, 20 nt, Molluscum contagiosum virus
gcaggaaagguacccgcagg

SEQ ID NO: 4041162 - RNA, 17 nt, Molluscum contagiosum virus
gcaggacgacgacacag

SEQ ID NO: 4041163 - RNA, 15 nt, Molluscum contagiosum virus
gcaggcgcagcgcgg

SEQ ID NO: 4041164 - RNA, 19 nt, Molluscum contagiosum virus
gcaggcggugggcgccgcg

SEQ ID NO: 4041165 - RNA, 18 nt, Molluscum contagiosum virus
gcaggcgugcucagcacc

SEQ ID NO: 4041166 - RNA, 12 nt, Molluscum contagiosum virus
gcaggcucuggc

SEQ ID NO: 4041167 - RNA, 23 nt, Molluscum contagiosum virus
gcaggucaacuccgagcgcgcgc

SEQ ID NO: 4041168 - RNA, 17 nt, Molluscum contagiosum virus
gcagguggccgcgcgcg

SEQ ID NO: 4041169 - RNA, 19 nt, Molluscum contagiosum virus
gcagguuugcacccgcgca

SEQ ID NO: 4041170 - RNA, 18 nt, Molluscum contagiosum virus
gcaguagcagcgccggca

SEQ ID NO: 4041171 - RNA, 19 nt, Molluscum contagiosum virus
gcagucacggucuugccga

SEQ ID NO: 4041172 - RNA, 14 nt, Molluscum contagiosum virus
gcagucccagcacc

SEQ ID NO: 4041173 - RNA, 21 nt, Molluscum contagiosum virus
gcagucccagcaccgcgccgc

SEQ ID NO: 4041174 - RNA, 14 nt, Molluscum contagiosum virus
gcagugccagcagc

SEQ ID NO: 4041175 - RNA, 12 nt, Molluscum contagiosum virus
gcagugcuugcu

SEQ ID NO: 4041176 - RNA, 22 nt, Molluscum contagiosum virus
gcaucagagaagugcuccgcac

SEQ ID NO: 4041177 - RNA, 16 nt, Molluscum contagiosum virus
gcauccggcacgcaca

SEQ ID NO: 4041178 - RNA, 18 nt, Molluscum contagiosum virus
gcauccucgccgaacggc

SEQ ID NO: 4041179 - RNA, 13 nt, Molluscum contagiosum virus
gcaucgucucgcu

SEQ ID NO: 4041180 - RNA, 20 nt, Molluscum contagiosum virus
gcaucugcgcgugcugucag

SEQ ID NO: 4041181 - RNA, 15 nt, Molluscum contagiosum virus
gcauggcgcgcucgc

SEQ ID NO: 4041182 - RNA, 14 nt, Molluscum contagiosum virus
gcaugucgcggugc

SEQ ID NO: 4041183 - RNA, 14 nt, Molluscum contagiosum virus
gcaugugcgagcgc

SEQ ID NO: 4041184 - RNA, 19 nt, Molluscum contagiosum virus
gcauuaaacaacacgcgcg

SEQ ID NO: 4041185 - RNA, 17 nt, Molluscum contagiosum virus
gcauucucggacagugc

SEQ ID NO: 4041186 - RNA, 14 nt, Molluscum contagiosum virus
gcaaugggcacgcu

SEQ ID NO: 4041187 - RNA, 18 nt, Molluscum contagiosum virus
gcacaaacacgcgcgcgc

SEQ ID NO: 4041188 - RNA, 16 nt, Molluscum contagiosum virus
gcacaacaagaagacg

SEQ ID NO: 4041189 - RNA, 22 nt, Molluscum contagiosum virus
gcacaacgggcucgugcuggag

SEQ ID NO: 4041190 - RNA, 16 nt, Molluscum contagiosum virus
gcacaagauggcgcag

SEQ ID NO: 4041191 - RNA, 15 nt, Molluscum contagiosum virus
gcacaagggcagcuc

SEQ ID NO: 4041192 - RNA, 17 nt, Molluscum contagiosum virus
gcacaagggcagcucaa

SEQ ID NO: 4041193 - RNA, 22 nt, Molluscum contagiosum virus
gcacaagggcagcucaagcugc

SEQ ID NO: 4041194 - RNA, 10 nt, Molluscum contagiosum virus
gcacaccccu

SEQ ID NO: 4041195 - RNA, 12 nt, Molluscum contagiosum virus
gcacaccggcgc

SEQ ID NO: 4041196 - RNA, 22 nt, Molluscum contagiosum virus
gcacacgagugcccgcgcgcug

SEQ ID NO: 4041197 - RNA, 22 nt, Molluscum contagiosum virus
gcacacgcaccgccuggugcug

SEQ ID NO: 4041198 - RNA, 13 nt, Molluscum contagiosum virus
gcacacgcgcgcg

SEQ ID NO: 4041199 - RNA, 21 nt, Molluscum contagiosum virus
gcacacgcgcgcgugcugcug

SEQ ID NO: 4041200 - RNA, 13 nt, Molluscum contagiosum virus
gcacacgcgucgc

SEQ ID NO: 4041201 - RNA, 23 nt, Molluscum contagiosum virus
gcacacugcagcacgucuugcgc

SEQ ID NO: 4041202 - RNA, 15 nt, Molluscum contagiosum virus
gcacagaaagccaac

SEQ ID NO: 4041203 - RNA, 21 nt, Molluscum contagiosum virus
gcacagacauggcccgcgcgg

SEQ ID NO: 4041204 - RNA, 18 nt, Molluscum contagiosum virus
gcacagcacaggccccag

SEQ ID NO: 4041205 - RNA, 20 nt, Molluscum contagiosum virus
gcacagcacaggccccagca

SEQ ID NO: 4041206 - RNA, 19 nt, Molluscum contagiosum virus
gcacaguccaacccgcggc

SEQ ID NO: 4041207 - RNA, 17 nt, Molluscum contagiosum virus
gcacaguccagcccgcg

SEQ ID NO: 4041208 - RNA, 23 nt, Molluscum contagiosum virus
gcacaguccagcccgcggugcgc

SEQ ID NO: 4041209 - RNA, 20 nt, Molluscum contagiosum virus
gcacaguucacggcgcucgc

SEQ ID NO: 4041210 - RNA, 18 nt, Molluscum contagiosum virus
gcacaucucucagggcag

SEQ ID NO: 4041211 - RNA, 15 nt, Molluscum contagiosum virus
gcacaugcagcugca

SEQ ID NO: 4041212 - RNA, 15 nt, Molluscum contagiosum virus
gcacauucucaacca

SEQ ID NO: 4041213 - RNA, 13 nt, Molluscum contagiosum virus
gcaccaccagugc

SEQ ID NO: 4041214 - RNA, 15 nt, Molluscum contagiosum virus
gcaccacgugcgcug

SEQ ID NO: 4041215 - RNA, 14 nt, Molluscum contagiosum virus
gcaccagcgcgcag

SEQ ID NO: 4041216 - RNA, 15 nt, Molluscum contagiosum virus
gcaccagcgcgcaga

SEQ ID NO: 4041217 - RNA, 22 nt, Molluscum contagiosum virus
gcaccagucucgaugugacaac

SEQ ID NO: 4041218 - RNA, 15 nt, Molluscum contagiosum virus
gcacccgcaggaaag

SEQ ID NO: 4041219 - RNA, 16 nt, Molluscum contagiosum virus
gcacccgcgcagcgug

SEQ ID NO: 4041220 - RNA, 14 nt, Molluscum contagiosum virus
gcaccgagcccgcc

SEQ ID NO: 4041221 - RNA, 15 nt, Molluscum contagiosum virus
gcaccgcaugggccc

SEQ ID NO: 4041222 - RNA, 21 nt, Molluscum contagiosum virus
gcaccgcccgcccgcgcucga

SEQ ID NO: 4041223 - RNA, 16 nt, Molluscum contagiosum virus
gcaccgccgacaacgc

SEQ ID NO: 4041224 - RNA, 18 nt, Molluscum contagiosum virus
gcaccgcgccccacugug

SEQ ID NO: 4041225 - RNA, 21 nt, Molluscum contagiosum virus
gcaccggaagcaacgacaagg

SEQ ID NO: 4041226 - RNA, 14 nt, Molluscum contagiosum virus
gcaccggcgcucac

SEQ ID NO: 4041227 - RNA, 14 nt, Molluscum contagiosum virus
gcaccgggcgccgc

SEQ ID NO: 4041228 - RNA, 18 nt, Molluscum contagiosum virus
gcaccguaccgcgcccgc

SEQ ID NO: 4041229 - RNA, 22 nt, Molluscum contagiosum virus
gcaccguacucgcguccgcgca

SEQ ID NO: 4041230 - RNA, 15 nt, Molluscum contagiosum virus
gcaccuggaacgcga

SEQ ID NO: 4041231 - RNA, 18 nt, Molluscum contagiosum virus
gcacgaagcuacgcuccg

SEQ ID NO: 4041232 - RNA, 19 nt, Molluscum contagiosum virus
gcacgaccacgugcaggau

SEQ ID NO: 4041233 - RNA, 22 nt, Molluscum contagiosum virus
gcacgacccucuucgacuuacg

SEQ ID NO: 4041234 - RNA, 23 nt, Molluscum contagiosum virus
gcacgagaugggcccgcgcgcgc

SEQ ID NO: 4041235 - RNA, 13 nt, Molluscum contagiosum virus
gcacgagcugcug

SEQ ID NO: 4041236 - RNA, 17 nt, Molluscum contagiosum virus
gcacgagcugcugcccg

SEQ ID NO: 4041237 - RNA, 14 nt, Molluscum contagiosum virus
gcacgaggagcccc

SEQ ID NO: 4041238 - RNA, 22 nt, Molluscum contagiosum virus
gcacgaggcagccgcggcgccc

SEQ ID NO: 4041239 - RNA, 20 nt, Molluscum contagiosum virus
gcacgauggggcgcucgggc

SEQ ID NO: 4041240 - RNA, 21 nt, Molluscum contagiosum virus
gcacgauggggcgcucgggca

SEQ ID NO: 4041241 - RNA, 13 nt, Molluscum contagiosum virus
gcacgcacgcgcu

SEQ ID NO: 4041242 - RNA, 11 nt, Molluscum contagiosum virus
gcacgcacggc

SEQ ID NO: 4041243 - RNA, 15 nt, Molluscum contagiosum virus
gcacgcacguggcgc

SEQ ID NO: 4041244 - RNA, 20 nt, Molluscum contagiosum virus
gcacgccagguguuccugcc

SEQ ID NO: 4041245 - RNA, 23 nt, Molluscum contagiosum virus
gcacgccgccagcgacgagcagc

SEQ ID NO: 4041246 - RNA, 18 nt, Molluscum contagiosum virus
gcacgccgcucggcacug

SEQ ID NO: 4041247 - RNA, 18 nt, Molluscum contagiosum virus
gcacgcgaaguuccugca

SEQ ID NO: 4041248 - RNA, 23 nt, Molluscum contagiosum virus
gcacgcgaugagcgucucggugc

SEQ ID NO: 4041249 - RNA, 13 nt, Molluscum contagiosum virus
gcacgcgcacggg

SEQ ID NO: 4041250 - RNA, 19 nt, Molluscum contagiosum virus
gcacgcgcacuugccuggc

SEQ ID NO: 4041251 - RNA, 22 nt, Molluscum contagiosum virus
cucuccuacacauuccucggcg

SEQ ID NO: 4041252 - RNA, 21 nt, Molluscum contagiosum virus
cucucgaagcagugcucggga

SEQ ID NO: 4041253 - RNA, 18 nt, Molluscum contagiosum virus
cucugauuacauccugcc

SEQ ID NO: 4041254 - RNA, 16 nt, Molluscum contagiosum virus
cucugcacgggcacgc

SEQ ID NO: 4041255 - RNA, 18 nt, Molluscum contagiosum virus
cucugccaccgcggcgcg

SEQ ID NO: 4041256 - RNA, 13 nt, Molluscum contagiosum virus
cucugcccucaga

SEQ ID NO: 4041257 - RNA, 17 nt, Molluscum contagiosum virus
cucugccggcgcaaucu

SEQ ID NO: 4041258 - RNA, 14 nt, Molluscum contagiosum virus
cucugcgccgcgcg

SEQ ID NO: 4041259 - RNA, 16 nt, Molluscum contagiosum virus
cucugcuccgcggagg

SEQ ID NO: 4041260 - RNA, 17 nt, Molluscum contagiosum virus
cucuggagccucccccg

SEQ ID NO: 4041261 - RNA, 20 nt, Molluscum contagiosum virus
cucuguagcaucugcgacac

SEQ ID NO: 4041262 - RNA, 17 nt, Molluscum contagiosum virus
cucuucccguuccuggg

SEQ ID NO: 4041263 - RNA, 13 nt, Molluscum contagiosum virus
cucuucggcgucc

SEQ ID NO: 4041264 - RNA, 16 nt, Molluscum contagiosum virus
cucuucggggacggcg

SEQ ID NO: 4041265 - RNA, 15 nt, Molluscum contagiosum virus
cugaaaauagagagu

SEQ ID NO: 4041266 - RNA, 14 nt, Molluscum contagiosum virus
cugaacaagcugca

SEQ ID NO: 4041267 - RNA, 21 nt, Molluscum contagiosum virus
cugacagcguguucggggccg

SEQ ID NO: 4041268 - RNA, 23 nt, Molluscum contagiosum virus
cugacagcguguucggggccgcg

SEQ ID NO: 4041269 - RNA, 23 nt, Molluscum contagiosum virus
cugagaggaccucccggcggcaa

SEQ ID NO: 4041270 - RNA, 17 nt, Molluscum contagiosum virus
cugagccgcaagcacac

SEQ ID NO: 4041271 - RNA, 12 nt, Molluscum contagiosum virus
cugagcgcagca

SEQ ID NO: 4041272 - RNA, 13 nt, Molluscum contagiosum virus
cugagcgcgcugc

SEQ ID NO: 4041273 - RNA, 15 nt, Molluscum contagiosum virus
cugcaaagcgcggcc

SEQ ID NO: 4041274 - RNA, 15 nt, Molluscum contagiosum virus
cugcaacucgcgcug

SEQ ID NO: 4041275 - RNA, 20 nt, Molluscum contagiosum virus
cugcaacucgcgcugcagca

SEQ ID NO: 4041276 - RNA, 14 nt, Molluscum contagiosum virus
cugcacaguucacg

SEQ ID NO: 4041277 - RNA, 21 nt, Molluscum contagiosum virus
cugcacgaccgcggacuccuu

SEQ ID NO: 4041278 - RNA, 13 nt, Molluscum contagiosum virus
cugcacgccgcca

SEQ ID NO: 4041279 - RNA, 20 nt, Molluscum contagiosum virus
cugcacgcgaauguccggcg

SEQ ID NO: 4041280 - RNA, 18 nt, Molluscum contagiosum virus
cugcacgugcagcggcgc

SEQ ID NO: 4041281 - RNA, 22 nt, Molluscum contagiosum virus
cugcagaaacagccgugcuccg

SEQ ID NO: 4041282 - RNA, 22 nt, Molluscum contagiosum virus
cugcagcagccccgacgccagc

SEQ ID NO: 4041283 - RNA, 17 nt, Molluscum contagiosum virus
cugcagcagcuccagca

SEQ ID NO: 4041284 - RNA, 16 nt, Molluscum contagiosum virus
cugcagcagcuccucc

SEQ ID NO: 4041285 - RNA, 13 nt, Molluscum contagiosum virus
cugcagcagcugg

SEQ ID NO: 4041286 - RNA, 14 nt, Molluscum contagiosum virus
cugcagcagcuggc

SEQ ID NO: 4041287 - RNA, 15 nt, Molluscum contagiosum virus
cugcagcagcuggcc

SEQ ID NO: 4041288 - RNA, 14 nt, Molluscum contagiosum virus
cugcagcccuucca

SEQ ID NO: 4041289 - RNA, 13 nt, Molluscum contagiosum virus
cugcaggaccugc

SEQ ID NO: 4041290 - RNA, 14 nt, Molluscum contagiosum virus
cugcaggaccugcu

SEQ ID NO: 4041291 - RNA, 21 nt, Molluscum contagiosum virus
cugcaggcaaagcggggcgcg

SEQ ID NO: 4041292 - RNA, 21 nt, Molluscum contagiosum virus
cugccagccaucgugcgcgac

SEQ ID NO: 4041293 - RNA, 16 nt, Molluscum contagiosum virus
cugcccgcgcacgagc

SEQ ID NO: 4041294 - RNA, 18 nt, Molluscum contagiosum virus
cugcccguggugggccgc

SEQ ID NO: 4041295 - RNA, 17 nt, Molluscum contagiosum virus
cugcccgugugcgggca

SEQ ID NO: 4041296 - RNA, 12 nt, Molluscum contagiosum virus
cugcccucggga

SEQ ID NO: 4041297 - RNA, 22 nt, Molluscum contagiosum virus
cugccgcccgcgcccgcgccgc

SEQ ID NO: 4041298 - RNA, 22 nt, Molluscum contagiosum virus
cugccgccgccgcgaggacccg

SEQ ID NO: 4041299 - RNA, 18 nt, Molluscum contagiosum virus
cugccgcgagcacuggcu

SEQ ID NO: 4041300 - RNA, 19 nt, Molluscum contagiosum virus
cugccgcgagcacuggcug

SEQ ID NO: 4041301 - RNA, 19 nt, Molluscum contagiosum virus
cugccgcgcaugcuggaga

SEQ ID NO: 4041302 - RNA, 21 nt, Molluscum contagiosum virus
cugccgcgccuccgagcgcgc

SEQ ID NO: 4041303 - RNA, 16 nt, Molluscum contagiosum virus
cugccgcgcgcgccgc

SEQ ID NO: 4041304 - RNA, 19 nt, Molluscum contagiosum virus
cugccguuuuacacagggc

SEQ ID NO: 4041305 - RNA, 14 nt, Molluscum contagiosum virus
cugccucgugccuu

SEQ ID NO: 4041306 - RNA, 14 nt, Molluscum contagiosum virus
cugccucguggaac

SEQ ID NO: 4041307 - RNA, 19 nt, Molluscum contagiosum virus
cugcgacagcugcugcucg

SEQ ID NO: 4041308 - RNA, 21 nt, Molluscum contagiosum virus
cugcgauacccuuggcagcaa

SEQ ID NO: 4041309 - RNA, 15 nt, Molluscum contagiosum virus
cugcgaucgcagcag

SEQ ID NO: 4041310 - RNA, 15 nt, Molluscum contagiosum virus
cugcgaucgcgggca

SEQ ID NO: 4041311 - RNA, 21 nt, Molluscum contagiosum virus
cugcgaucgcgggcacgagca

SEQ ID NO: 4041312 - RNA, 17 nt, Molluscum contagiosum virus
cugcgcaccugcacgac

SEQ ID NO: 4041313 - RNA, 22 nt, Molluscum contagiosum virus
cugcgccacgugcgcaucccug

SEQ ID NO: 4041314 - RNA, 14 nt, Molluscum contagiosum virus
cugcgcccgcggag

SEQ ID NO: 4041315 - RNA, 19 nt, Molluscum contagiosum virus
cugcgccgccucaugcgcg

SEQ ID NO: 4041316 - RNA, 18 nt, Molluscum contagiosum virus
cugcgccgccugcucucg

SEQ ID NO: 4041317 - RNA, 16 nt, Molluscum contagiosum virus
cugcgccgcuuccugg

SEQ ID NO: 4041318 - RNA, 18 nt, Molluscum contagiosum virus
cugcgcgagacgcugcug

SEQ ID NO: 4041319 - RNA, 16 nt, Molluscum contagiosum virus
cugcgcgagccgcugc

SEQ ID NO: 4041320 - RNA, 14 nt, Molluscum contagiosum virus
cugcgcgcgccaug

SEQ ID NO: 4041321 - RNA, 22 nt, Molluscum contagiosum virus
cugcgcgcgcuacugcgcgcac

SEQ ID NO: 4041322 - RNA, 15 nt, Molluscum contagiosum virus
cugcgcgcggacuuc

SEQ ID NO: 4041323 - RNA, 21 nt, Molluscum contagiosum virus
cugcgcuggaugcugcucgac

SEQ ID NO: 4041324 - RNA, 16 nt, Molluscum contagiosum virus
cugcgcuucgagcugc

SEQ ID NO: 4041325 - RNA, 17 nt, Molluscum contagiosum virus
cugcgcuucgccgcgcg

SEQ ID NO: 4041326 - RNA, 17 nt, Molluscum contagiosum virus
cugcggacgcgggccgc

SEQ ID NO: 4041327 - RNA, 20 nt, Molluscum contagiosum virus
cugcggcaaccgcgcccgcg

SEQ ID NO: 4041328 - RNA, 13 nt, Molluscum contagiosum virus
cugcggcucgcac

SEQ ID NO: 4041329 - RNA, 14 nt, Molluscum contagiosum virus
cugcggcugcugga

SEQ ID NO: 4041330 - RNA, 13 nt, Molluscum contagiosum virus
cugcgggcugccg

SEQ ID NO: 4041331 - RNA, 13 nt, Molluscum contagiosum virus
cugcggugucaac

SEQ ID NO: 4041332 - RNA, 22 nt, Molluscum contagiosum virus
cugcguaagcgccugcacacgc

SEQ ID NO: 4041333 - RNA, 23 nt, Molluscum contagiosum virus
cugcgugcgauugccccugggcu

SEQ ID NO: 4041334 - RNA, 17 nt, Molluscum contagiosum virus
cugcgugcuugugcgcc

SEQ ID NO: 4041335 - RNA, 16 nt, Molluscum contagiosum virus
cugcguugcgcgucau

SEQ ID NO: 4041336 - RNA, 13 nt, Molluscum contagiosum virus
cugcguugucucc

SEQ ID NO: 4041337 - RNA, 21 nt, Molluscum contagiosum virus
cugcucgacgggcgcagccac

SEQ ID NO: 4041338 - RNA, 21 nt, Molluscum contagiosum virus
cugcucgugcccgcacacgca

SEQ ID NO: 4041339 - RNA, 15 nt, Molluscum contagiosum virus
cugcucgugcugcuc

SEQ ID NO: 4041340 - RNA, 17 nt, Molluscum contagiosum virus
cugcucucgcgcgccag

SEQ ID NO: 4041341 - RNA, 21 nt, Molluscum contagiosum virus
cugcugcagaacugccugguc

SEQ ID NO: 4041342 - RNA, 22 nt, Molluscum contagiosum virus
cugcugcccauacucgaacgca

SEQ ID NO: 4041343 - RNA, 16 nt, Molluscum contagiosum virus
cugcugccgcgcggca

SEQ ID NO: 4041344 - RNA, 14 nt, Molluscum contagiosum virus
cugcugcgcgccgc

SEQ ID NO: 4041345 - RNA, 22 nt, Molluscum contagiosum virus
cugcugcgcgccgccgacgccu

SEQ ID NO: 4041346 - RNA, 16 nt, Molluscum contagiosum virus
cugcugcgcgcgccau

SEQ ID NO: 4041347 - RNA, 14 nt, Molluscum contagiosum virus
cugcugcucgaagc

SEQ ID NO: 4041348 - RNA, 16 nt, Molluscum contagiosum virus
cugcugcucgcggagg

SEQ ID NO: 4041349 - RNA, 15 nt, Molluscum contagiosum virus
cugcugcugcaaagc

SEQ ID NO: 4041350 - RNA, 14 nt, Molluscum contagiosum virus
cugcuggcagacac

SEQ ID NO: 4041351 - RNA, 15 nt, Molluscum contagiosum virus
cugcuggcagacaca

SEQ ID NO: 4041352 - RNA, 21 nt, Molluscum contagiosum virus
cugcuggccaacccucgcaag

SEQ ID NO: 4041353 - RNA, 15 nt, Molluscum contagiosum virus
cugcuggcgcgcgcg

SEQ ID NO: 4041354 - RNA, 15 nt, Molluscum contagiosum virus
cugcuggugcucgcc

SEQ ID NO: 4041355 - RNA, 14 nt, Molluscum contagiosum virus
cgcacgugcugcgc

SEQ ID NO: 4041356 - RNA, 20 nt, Molluscum contagiosum virus
cgcacguggaaucacggcca

SEQ ID NO: 4041357 - RNA, 15 nt, Molluscum contagiosum virus
cgcagagccagcgcg

SEQ ID NO: 4041358 - RNA, 15 nt, Molluscum contagiosum virus
cgcagaucaggagca

SEQ ID NO: 4041359 - RNA, 22 nt, Molluscum contagiosum virus
cgcagcaaagggcggccgcagc

SEQ ID NO: 4041360 - RNA, 20 nt, Molluscum contagiosum virus
cgcagcaggugcacgugcug

SEQ ID NO: 4041361 - RNA, 13 nt, Molluscum contagiosum virus
cgcagcagugcca

SEQ ID NO: 4041362 - RNA, 21 nt, Molluscum contagiosum virus
cgcagcagugccagcagccgc

SEQ ID NO: 4041363 - RNA, 22 nt, Molluscum contagiosum virus
cgcagcccacgugccagcucau

SEQ ID NO: 4041364 - RNA, 17 nt, Molluscum contagiosum virus
cgcagccuccgugcgcc

SEQ ID NO: 4041365 - RNA, 21 nt, Molluscum contagiosum virus
cgcagccuccgugcgccaguc

SEQ ID NO: 4041366 - RNA, 13 nt, Molluscum contagiosum virus
cgcagcgcgagcu

SEQ ID NO: 4041367 - RNA, 13 nt, Molluscum contagiosum virus
cgcagcgcgcggu

SEQ ID NO: 4041368 - RNA, 23 nt, Molluscum contagiosum virus
cgcagcgcuggagcuggcugggc

SEQ ID NO: 4041369 - RNA, 14 nt, Molluscum contagiosum virus
cgcagcggcgccac

SEQ ID NO: 4041370 - RNA, 13 nt, Molluscum contagiosum virus
cgcagcgugccgc

SEQ ID NO: 4041371 - RNA, 21 nt, Molluscum contagiosum virus
cgcagcucgccgcgcgccgcu

SEQ ID NO: 4041372 - RNA, 19 nt, Molluscum contagiosum virus
cgcaggaaagguacccgca

SEQ ID NO: 4041373 - RNA, 20 nt, Molluscum contagiosum virus
cgcaggaaaggucgggcccg

SEQ ID NO: 4041374 - RNA, 13 nt, Molluscum contagiosum virus
cgcaggagcaguc

SEQ ID NO: 4041375 - RNA, 23 nt, Molluscum contagiosum virus
cgcaggccgggcacccagcccug

SEQ ID NO: 4041376 - RNA, 17 nt, Molluscum contagiosum virus
cgcaggcgucaugcgcg

SEQ ID NO: 4041377 - RNA, 14 nt, Molluscum contagiosum virus
cgcagugcucgcac

SEQ ID NO: 4041378 - RNA, 22 nt, Molluscum contagiosum virus
cgcaucccccgcguuguccgcg

SEQ ID NO: 4041379 - RNA, 19 nt, Molluscum contagiosum virus
cgcaugaaaggcaccugcg

SEQ ID NO: 4041380 - RNA, 23 nt, Molluscum contagiosum virus
cgcaugaaaggcaccugcggcuc

SEQ ID NO: 4041381 - RNA, 22 nt, Molluscum contagiosum virus
cgcaugcgcgguccuguccgcg

SEQ ID NO: 4041382 - RNA, 13 nt, Molluscum contagiosum virus
cgcaugcuggaga

SEQ ID NO: 4041383 - RNA, 22 nt, Molluscum contagiosum virus
cgcauggccacgcccgggcccg

SEQ ID NO: 4041384 - RNA, 23 nt, Molluscum contagiosum virus
cgcaugguggcgauccuguccau

SEQ ID NO: 4041385 - RNA, 14 nt, Molluscum contagiosum virus
cgccaaccgcgagc

SEQ ID NO: 4041386 - RNA, 12 nt, Molluscum contagiosum virus
cgccaacuccuu

SEQ ID NO: 4041387 - RNA, 21 nt, Molluscum contagiosum virus
cgccaauaucacgccgguggc

SEQ ID NO: 4041388 - RNA, 18 nt, Molluscum contagiosum virus
cgccaccucggcguuggc

SEQ ID NO: 4041389 - RNA, 14 nt, Molluscum contagiosum virus
cgccacugccacgg

SEQ ID NO: 4041390 - RNA, 18 nt, Molluscum contagiosum virus
cgccacugccacggcugc

SEQ ID NO: 4041391 - RNA, 16 nt, Molluscum contagiosum virus
cgccacuggaagaaca

SEQ ID NO: 4041392 - RNA, 22 nt, Molluscum contagiosum virus
cgccacuggaagaacaggccgc

SEQ ID NO: 4041393 - RNA, 23 nt, Molluscum contagiosum virus
cgccagccuggaguacucgaagu

SEQ ID NO: 4041394 - RNA, 17 nt, Molluscum contagiosum virus
cgccagccugugcgcca

SEQ ID NO: 4041395 - RNA, 15 nt, Molluscum contagiosum virus
cgccagcgcgcccac

SEQ ID NO: 4041396 - RNA, 20 nt, Molluscum contagiosum virus
cgccagcgcgcccaccagca

SEQ ID NO: 4041397 - RNA, 18 nt, Molluscum contagiosum virus
cgccagcuaagccggagc

SEQ ID NO: 4041398 - RNA, 19 nt, Molluscum contagiosum virus
cgccagcuccgcgcggcgc

SEQ ID NO: 4041399 - RNA, 22 nt, Molluscum contagiosum virus
cgccaggaaaggcaggagccuc

SEQ ID NO: 4041400 - RNA, 20 nt, Molluscum contagiosum virus
cgccagggcggagccccgag

SEQ ID NO: 4041401 - RNA, 18 nt, Molluscum contagiosum virus
cgccaguacgcaugcgcg

SEQ ID NO: 4041402 - RNA, 15 nt, Molluscum contagiosum virus
cgccagugcuuuguc

SEQ ID NO: 4041403 - RNA, 23 nt, Molluscum contagiosum virus
cgccaguggccagcgcgcggcgc

SEQ ID NO: 4041404 - RNA, 16 nt, Molluscum contagiosum virus
cgccaugccaacgcac

SEQ ID NO: 4041405 - RNA, 15 nt, Molluscum contagiosum virus
cgccaugcugcgcga

SEQ ID NO: 4041406 - RNA, 19 nt, Molluscum contagiosum virus
cgccauuuucgugcgcguc

SEQ ID NO: 4041407 - RNA, 18 nt, Molluscum contagiosum virus
cgcccaccagcagccagg

SEQ ID NO: 4041408 - RNA, 12 nt, Molluscum contagiosum virus
cgccccuucccg

SEQ ID NO: 4041409 - RNA, 20 nt, Molluscum contagiosum virus
cgcccgcgaaaaacgugacu

SEQ ID NO: 4041410 - RNA, 14 nt, Molluscum contagiosum virus
cgcccgcgcccgcg

SEQ ID NO: 4041411 - RNA, 17 nt, Molluscum contagiosum virus
cgcccgcgcccgcgccg

SEQ ID NO: 4041412 - RNA, 13 nt, Molluscum contagiosum virus
cgcccgcugcucu

SEQ ID NO: 4041413 - RNA, 16 nt, Molluscum contagiosum virus
cgcccguaaagaagcg

SEQ ID NO: 4041414 - RNA, 17 nt, Molluscum contagiosum virus
cgcccgugcucgcgggc

SEQ ID NO: 4041415 - RNA, 18 nt, Molluscum contagiosum virus
cgcccguguucgcggagc

SEQ ID NO: 4041416 - RNA, 16 nt, Molluscum contagiosum virus
cgcccucgcgccugac

SEQ ID NO: 4041417 - RNA, 16 nt, Molluscum contagiosum virus
cgcccuggagcgcagu

SEQ ID NO: 4041418 - RNA, 13 nt, Molluscum contagiosum virus
cgccgaaguacuu

SEQ ID NO: 4041419 - RNA, 16 nt, Molluscum contagiosum virus
cgccgacgugcgcgug

SEQ ID NO: 4041420 - RNA, 14 nt, Molluscum contagiosum virus
cgccgacugccgcc

SEQ ID NO: 4041421 - RNA, 13 nt, Molluscum contagiosum virus
cgccgagcccgag

SEQ ID NO: 4041422 - RNA, 23 nt, Molluscum contagiosum virus
cgccgaucuccacgucgaucagc

SEQ ID NO: 4041423 - RNA, 13 nt, Molluscum contagiosum virus
cgccgaugcagug

SEQ ID NO: 4041424 - RNA, 17 nt, Molluscum contagiosum virus
cgccgauguccugcgga

SEQ ID NO: 4041425 - RNA, 16 nt, Molluscum contagiosum virus
cgccgcacgugcugcg

SEQ ID NO: 4041426 - RNA, 14 nt, Molluscum contagiosum virus
cgccgccagcuccg

SEQ ID NO: 4041427 - RNA, 13 nt, Molluscum contagiosum virus
cgccgccaugcug

SEQ ID NO: 4041428 - RNA, 19 nt, Molluscum contagiosum virus
cgccgccaugcugcgcgag

SEQ ID NO: 4041429 - RNA, 12 nt, Molluscum contagiosum virus
cgccgcgcggcu

SEQ ID NO: 4041430 - RNA, 18 nt, Molluscum contagiosum virus
cgccgcguacaugcgugc

SEQ ID NO: 4041431 - RNA, 14 nt, Molluscum contagiosum virus
cgccgcgugcccgu

SEQ ID NO: 4041432 - RNA, 13 nt, Molluscum contagiosum virus
cgccgcuggagca

SEQ ID NO: 4041433 - RNA, 17 nt, Molluscum contagiosum virus
cgccggacagcucagca

SEQ ID NO: 4041434 - RNA, 19 nt, Molluscum contagiosum virus
cgccggccuuguucgcgcu

SEQ ID NO: 4041435 - RNA, 17 nt, Molluscum contagiosum virus
cgccggggcccaugcuc

SEQ ID NO: 4041436 - RNA, 12 nt, Molluscum contagiosum virus
cgccggugcgug

SEQ ID NO: 4041437 - RNA, 14 nt, Molluscum contagiosum virus
cgccgguuugcuaa

SEQ ID NO: 4041438 - RNA, 23 nt, Molluscum contagiosum virus
cgccguccaugugcccgcggcgc

SEQ ID NO: 4041439 - RNA, 17 nt, Molluscum contagiosum virus
cgccgucggccucgggc

SEQ ID NO: 4041440 - RNA, 19 nt, Molluscum contagiosum virus
cgccgucgucgccgccguc

SEQ ID NO: 4041441 - RNA, 21 nt, Molluscum contagiosum virus
cgccguuccacuacaagcagc

SEQ ID NO: 4041442 - RNA, 20 nt, Molluscum contagiosum virus
cgccguuggccaccuggaaa

SEQ ID NO: 4041443 - RNA, 21 nt, Molluscum contagiosum virus
cgccuaccaccgggcacuucu

SEQ ID NO: 4041444 - RNA, 18 nt, Molluscum contagiosum virus
cgccuccgagcgcgcgug

SEQ ID NO: 4041445 - RNA, 14 nt, Molluscum contagiosum virus
cgccuccgggcgca

SEQ ID NO: 4041446 - RNA, 17 nt, Molluscum contagiosum virus
cgccucgagcacgccuc

SEQ ID NO: 4041447 - RNA, 15 nt, Molluscum contagiosum virus
cgccucgagcgcgcu

SEQ ID NO: 4041448 - RNA, 18 nt, Molluscum contagiosum virus
cgccugcuagcggccugu

SEQ ID NO: 4041449 - RNA, 22 nt, Molluscum contagiosum virus
cgccugcucucgcgcgccagca

SEQ ID NO: 4041450 - RNA, 12 nt, Molluscum contagiosum virus
cgcgcgccgcgc

SEQ ID NO: 4041451 - RNA, 17 nt, Molluscum contagiosum virus
cgcgcgccuugcagcgc

SEQ ID NO: 4041452 - RNA, 20 nt, Molluscum contagiosum virus
cgcgcgccuugcagcgcagc

SEQ ID NO: 4041453 - RNA, 15 nt, Molluscum contagiosum virus
cgcgcgcgagcacgu

SEQ ID NO: 4041454 - RNA, 13 nt, Molluscum contagiosum virus
cgcgcgcgcacgc

SEQ ID NO: 4041455 - RNA, 12 nt, Molluscum contagiosum virus
cgcgcgcgccgg

SEQ ID NO: 4041456 - RNA, 14 nt, Molluscum contagiosum virus
cgcgcgcgccucgc

SEQ ID NO: 4041457 - RNA, 13 nt, Molluscum contagiosum virus
cgcgcgcgcggcg

SEQ ID NO: 4041458 - RNA, 14 nt, Molluscum contagiosum virus
cgcgcgcgcggcgc

SEQ ID NO: 4041459 - RNA, 14 nt, Molluscum contagiosum virus
cgcgcgcgcugcug

SEQ ID NO: 4041460 - RNA, 12 nt, Molluscum contagiosum virus
cgcgcgcggcaa

SEQ ID NO: 4041461 - RNA, 12 nt, Molluscum contagiosum virus
cgcgcgcggcac

SEQ ID NO: 4041462 - RNA, 17 nt, Molluscum contagiosum virus
guacgguguccucuuca

SEQ ID NO: 4041463 - RNA, 22 nt, Molluscum contagiosum virus
guacuacuuccgcaacgagguc

SEQ ID NO: 4041464 - RNA, 16 nt, Molluscum contagiosum virus
guacuccguggugcgc

SEQ ID NO: 4041465 - RNA, 20 nt, Molluscum contagiosum virus
guacuccuugaagggcacaa

SEQ ID NO: 4041466 - RNA, 16 nt, Molluscum contagiosum virus
guacucgcguccgcgc

SEQ ID NO: 4041467 - RNA, 19 nt, Molluscum contagiosum virus
guacucgcguccgcgcagc

SEQ ID NO: 4041468 - RNA, 21 nt, Molluscum contagiosum virus
guacugaacgucuucgagagc

SEQ ID NO: 4041469 - RNA, 15 nt, Molluscum contagiosum virus
guacugcugcaggca

SEQ ID NO: 4041470 - RNA, 20 nt, Molluscum contagiosum virus
guacuucaagcacgagcugc

SEQ ID NO: 4041471 - RNA, 21 nt, Molluscum contagiosum virus
guacuucaucuucaagccgca

SEQ ID NO: 4041472 - RNA, 12 nt, Molluscum contagiosum virus
guagccgcgcga

SEQ ID NO: 4041473 - RNA, 23 nt, Molluscum contagiosum virus
guagccuuuguucuuagcagcgc

SEQ ID NO: 4041474 - RNA, 21 nt, Molluscum contagiosum virus
guagcgcgucucugcgcagag

SEQ ID NO: 4041475 - RNA, 17 nt, Molluscum contagiosum virus
guagcgguugaccagcu

SEQ ID NO: 4041476 - RNA, 14 nt, Molluscum contagiosum virus
guagcguggagcug

SEQ ID NO: 4041477 - RNA, 20 nt, Molluscum contagiosum virus
guagggugccgaggcgcugc

SEQ ID NO: 4041478 - RNA, 15 nt, Molluscum contagiosum virus
guaguaguagcgcuc

SEQ ID NO: 4041479 - RNA, 21 nt, Molluscum contagiosum virus
guagucgcccccgugccggaa

SEQ ID NO: 4041480 - RNA, 21 nt, Molluscum contagiosum virus
guagucuggccgggcucgggc

SEQ ID NO: 4041481 - RNA, 13 nt, Molluscum contagiosum virus
ucugcucgcgcau

SEQ ID NO: 4041482 - RNA, 22 nt, Molluscum contagiosum virus
ucuggaucaccacuggacacgu

SEQ ID NO: 4041483 - RNA, 15 nt, Molluscum contagiosum virus
ucugucccgcccgug

SEQ ID NO: 4041484 - RNA, 12 nt, Molluscum contagiosum virus
ucuuaauccagu

SEQ ID NO: 4041485 - RNA, 20 nt, Molluscum contagiosum virus
ucuucacuccgcacagcuuc

SEQ ID NO: 4041486 - RNA, 15 nt, Molluscum contagiosum virus
ucuucauggacgucg

SEQ ID NO: 4041487 - RNA, 18 nt, Molluscum contagiosum virus
ucuuccggaggcagcgcu

SEQ ID NO: 4041488 - RNA, 19 nt, Molluscum contagiosum virus
ucuuccggcccgacacacu

SEQ ID NO: 4041489 - RNA, 15 nt, Molluscum contagiosum virus
ucuuccuggggcugg

SEQ ID NO: 4041490 - RNA, 17 nt, Molluscum contagiosum virus
ucuucguggcgcugggc

SEQ ID NO: 4041491 - RNA, 22 nt, Molluscum contagiosum virus
ucuucguggcgcugggcgcgcc

SEQ ID NO: 4041492 - RNA, 21 nt, Molluscum contagiosum virus
ucuugaaacaguaggacaugu

SEQ ID NO: 4041493 - RNA, 17 nt, Molluscum contagiosum virus
ucuugcuggcgcucgcg

SEQ ID NO: 4041494 - RNA, 23 nt, Molluscum contagiosum virus
ucuugcuggcgcucgcgcgcacg

SEQ ID NO: 4041495 - RNA, 21 nt, Molluscum contagiosum virus
ucuugguggacagccuuugug

SEQ ID NO: 4041496 - RNA, 16 nt, Molluscum contagiosum virus
ucuugugaggaaacac

SEQ ID NO: 4041497 - RNA, 14 nt, Molluscum contagiosum virus
ucuuguugcgcaug

SEQ ID NO: 4041498 - RNA, 17 nt, Molluscum contagiosum virus
ucuuucacgcugcacga

SEQ ID NO: 4041499 - RNA, 16 nt, Molluscum contagiosum virus
ucuuucccgggcacug

SEQ ID NO: 4041500 - RNA, 11 nt, Molluscum contagiosum virus
ucuuucucuag

SEQ ID NO: 4041501 - RNA, 22 nt, Molluscum contagiosum virus
ucuuuguggucaagacuggccu

SEQ ID NO: 4041502 - RNA, 20 nt, Molluscum contagiosum virus
ugaaaagcgugauguugagc

SEQ ID NO: 4041503 - RNA, 22 nt, Molluscum contagiosum virus
ugaacaaauacaguggcugugc

SEQ ID NO: 4041504 - RNA, 17 nt, Molluscum contagiosum virus
ugaacaacauggugcug

SEQ ID NO: 4041505 - RNA, 18 nt, Molluscum contagiosum virus
ugaacaccauccugcgcu

SEQ ID NO: 4041506 - RNA, 17 nt, Molluscum contagiosum virus
ugaacagcauuagcgcc

SEQ ID NO: 4041507 - RNA, 13 nt, Molluscum contagiosum virus
ugaaccugggcau

SEQ ID NO: 4041508 - RNA, 15 nt, Molluscum contagiosum virus
ugaagcuggacgugg

SEQ ID NO: 4041509 - RNA, 19 nt, Molluscum contagiosum virus
ugaaggacgcguucuccag

SEQ ID NO: 4041510 - RNA, 20 nt, Molluscum contagiosum virus
ugaaucaugccuuuccgagc

SEQ ID NO: 4041511 - RNA, 16 nt, Molluscum contagiosum virus
ugacaaggauggacaa

SEQ ID NO: 4041512 - RNA, 22 nt, Molluscum contagiosum virus
ugacacgaguacgccagaauug

SEQ ID NO: 4041513 - RNA, 20 nt, Molluscum contagiosum virus
ugacaggcgcgcaagugcgu

SEQ ID NO: 4041514 - RNA, 20 nt, Molluscum contagiosum virus
ugacagucagcggcgugcug

SEQ ID NO: 4041515 - RNA, 16 nt, Molluscum contagiosum virus
ugaccagugcgugcuc

SEQ ID NO: 4041516 - RNA, 15 nt, Molluscum contagiosum virus
ugaccgacggcgacg

SEQ ID NO: 4041517 - RNA, 24 nt, Molluscum contagiosum virus
ugaccgcuucgagugcucccgagg

SEQ ID NO: 4041518 - RNA, 14 nt, Molluscum contagiosum virus
ugacgaagcugcgc

SEQ ID NO: 4041519 - RNA, 17 nt, Molluscum contagiosum virus
gcuacgcgcucuacgcu

SEQ ID NO: 4041520 - RNA, 21 nt, Molluscum contagiosum virus
gcuacgcuggacuuccugcug

SEQ ID NO: 4041521 - RNA, 13 nt, Molluscum contagiosum virus
gcuacguuccgcg

SEQ ID NO: 4041522 - RNA, 14 nt, Molluscum contagiosum virus
gcuacucaggcgcg

SEQ ID NO: 4041523 - RNA, 19 nt, Molluscum contagiosum virus
gcuagcgacgcggacacau

SEQ ID NO: 4041524 - RNA, 14 nt, Molluscum contagiosum virus
gcuagcgugugccg

SEQ ID NO: 4041525 - RNA, 23 nt, Molluscum contagiosum virus
gcucaagacgcugcuggcgcaca

SEQ ID NO: 4041526 - RNA, 14 nt, Molluscum contagiosum virus
gcucaagcugcuca

SEQ ID NO: 4041527 - RNA, 18 nt, Molluscum contagiosum virus
gcucaaggacuaccagcu

SEQ ID NO: 4041528 - RNA, 21 nt, Molluscum contagiosum virus
gcucacgagauggcugcucuc

SEQ ID NO: 4041529 - RNA, 21 nt, Molluscum contagiosum virus
gcucacggacucgccgcgcgc

SEQ ID NO: 4041530 - RNA, 14 nt, Molluscum contagiosum virus
gcucagccccagca

SEQ ID NO: 4041531 - RNA, 19 nt, Molluscum contagiosum virus
gcucagcgccgcgugcaug

SEQ ID NO: 4041532 - RNA, 12 nt, Molluscum contagiosum virus
gcucagcgcuuc

SEQ ID NO: 4041533 - RNA, 16 nt, Molluscum contagiosum virus
gcucaguugcgacgga

SEQ ID NO: 4041534 - RNA, 14 nt, Molluscum contagiosum virus
gcucauagcccaug

SEQ ID NO: 4041535 - RNA, 17 nt, Molluscum contagiosum virus
gcucauggacaugcucg

SEQ ID NO: 4041536 - RNA, 19 nt, Molluscum contagiosum virus
gcucauggcgcgcaaccag

SEQ ID NO: 4041537 - RNA, 20 nt, Molluscum contagiosum virus
gcucaugguuugcgugggug

SEQ ID NO: 4041538 - RNA, 19 nt, Molluscum contagiosum virus
gcuccaacagcagcuggcg

SEQ ID NO: 4041539 - RNA, 20 nt, Molluscum contagiosum virus
gcuccagcauggcgccacac

SEQ ID NO: 4041540 - RNA, 14 nt, Molluscum contagiosum virus
gcuccccgcgcgca

SEQ ID NO: 4041541 - RNA, 17 nt, Molluscum contagiosum virus
gcucccgucgagcacga

SEQ ID NO: 4041542 - RNA, 16 nt, Molluscum contagiosum virus
gcuccgagacugcuac

SEQ ID NO: 4041543 - RNA, 18 nt, Molluscum contagiosum virus
gcuccgagcggcugcucg

SEQ ID NO: 4041544 - RNA, 22 nt, Molluscum contagiosum virus
gcuccgcacguggagucacgac

SEQ ID NO: 4041545 - RNA, 14 nt, Molluscum contagiosum virus
gcuccgcagcagga

SEQ ID NO: 4041546 - RNA, 18 nt, Molluscum contagiosum virus
gcuccgcggaggccaagc

SEQ ID NO: 4041547 - RNA, 19 nt, Molluscum contagiosum virus
gcuccgcggaggccaagca

SEQ ID NO: 4041548 - RNA, 15 nt, Molluscum contagiosum virus
gcuccgcuggacccc

SEQ ID NO: 4041549 - RNA, 16 nt, Molluscum contagiosum virus
gcuccggucaccgcgu

SEQ ID NO: 4041550 - RNA, 13 nt, Molluscum contagiosum virus
gcuccgugcugcg

SEQ ID NO: 4041551 - RNA, 16 nt, Molluscum contagiosum virus
gcuccuagcgcgcgug

SEQ ID NO: 4041552 - RNA, 12 nt, Molluscum contagiosum virus
gcuccugcucug

SEQ ID NO: 4041553 - RNA, 22 nt, Molluscum contagiosum virus
gcucgaaaaaguucuuggugga

SEQ ID NO: 4041554 - RNA, 15 nt, Molluscum contagiosum virus
gcucgacgggcgcag

SEQ ID NO: 4041555 - RNA, 17 nt, Molluscum contagiosum virus
gcucgacgggcgcagcc

SEQ ID NO: 4041556 - RNA, 23 nt, Molluscum contagiosum virus
gcucgagccugccagcgccagcc

SEQ ID NO: 4041557 - RNA, 14 nt, Molluscum contagiosum virus
gcucgagcuccgag

SEQ ID NO: 4041558 - RNA, 13 nt, Molluscum contagiosum virus
gcucgaggcgacg

SEQ ID NO: 4041559 - RNA, 21 nt, Molluscum contagiosum virus
gcucgagggcgccgugcugcg

SEQ ID NO: 4041560 - RNA, 17 nt, Molluscum contagiosum virus
gcucgaucugcgccucc

SEQ ID NO: 4041561 - RNA, 15 nt, Molluscum contagiosum virus
gcucgaugggcucca

SEQ ID NO: 4041562 - RNA, 15 nt, Molluscum contagiosum virus
gcucgcacacgugca

SEQ ID NO: 4041563 - RNA, 22 nt, Molluscum contagiosum virus
gcucgcagccuccgugcgccag

SEQ ID NO: 4041564 - RNA, 19 nt, Molluscum contagiosum virus
gcucgcaggcggugggcgc

SEQ ID NO: 4041565 - RNA, 12 nt, Molluscum contagiosum virus
gcucgccagcag

SEQ ID NO: 4041566 - RNA, 19 nt, Molluscum contagiosum virus
gcucgccuccuugcccgag

SEQ ID NO: 4041567 - RNA, 17 nt, Molluscum contagiosum virus
gcucgcgagugugcaug

SEQ ID NO: 4041568 - RNA, 22 nt, Molluscum contagiosum virus
gcucgcgcaaguccagcgcgcu

SEQ ID NO: 4041569 - RNA, 23 nt, Molluscum contagiosum virus
gcucgcgcgcaagaacaaccaga

SEQ ID NO: 4041570 - RNA, 19 nt, Molluscum contagiosum virus
gcucgcgcgcacgcgcacg

SEQ ID NO: 4041571 - RNA, 23 nt, Molluscum contagiosum virus
gcucgcgcuguauucggcguacg

SEQ ID NO: 4041572 - RNA, 12 nt, Molluscum contagiosum virus
gcucgcggaggg

SEQ ID NO: 4041573 - RNA, 18 nt, Molluscum contagiosum virus
gcucgcggugcagcugcc

SEQ ID NO: 4041574 - RNA, 15 nt, Molluscum contagiosum virus
gcucgcggugccgga

SEQ ID NO: 4041575 - RNA, 16 nt, Molluscum contagiosum virus
gcucgcgugccgcgga

SEQ ID NO: 4041576 - RNA, 21 nt, Molluscum contagiosum virus
gcucggaggcuugccccgcgc

SEQ ID NO: 4041577 - RNA, 15 nt, Molluscum contagiosum virus
gcucggcacugcugg

SEQ ID NO: 4041578 - RNA, 22 nt, Molluscum contagiosum virus
gcucggcccgcggacgcgcagc

SEQ ID NO: 4041579 - RNA, 15 nt, Molluscum contagiosum virus
gcucggcguggugcu

SEQ ID NO: 4041580 - RNA, 21 nt, Molluscum contagiosum virus
gcucguggacagccugcaccg

SEQ ID NO: 4041581 - RNA, 22 nt, Molluscum contagiosum virus
gcucguugcgcagccgguacuc

SEQ ID NO: 4041582 - RNA, 19 nt, Molluscum contagiosum virus
gcucguuuucggauagccc

SEQ ID NO: 4041583 - RNA, 22 nt, Molluscum contagiosum virus
gcucguuuucggauagccccuc

SEQ ID NO: 4041584 - RNA, 21 nt, Molluscum contagiosum virus
gcucuaccuggugcuggggcu

SEQ ID NO: 4041585 - RNA, 20 nt, Molluscum contagiosum virus
gcucuacgagacucuggaag

SEQ ID NO: 4041586 - RNA, 13 nt, Molluscum contagiosum virus
gcucuacggcgug

SEQ ID NO: 4041587 - RNA, 20 nt, Molluscum contagiosum virus
gcucuacggcgugcugugcc

SEQ ID NO: 4041588 - RNA, 21 nt, Molluscum contagiosum virus
gcucuacggcgugcugugccu

SEQ ID NO: 4041589 - RNA, 13 nt, Molluscum contagiosum virus
gcucuacgugcug

SEQ ID NO: 4041590 - RNA, 15 nt, Molluscum contagiosum virus
gcucucgcgcgccag

SEQ ID NO: 4041591 - RNA, 15 nt, Molluscum contagiosum virus
gcucucgcugcugcc

SEQ ID NO: 4041592 - RNA, 18 nt, Molluscum contagiosum virus
gcucucgcugcugcccau

SEQ ID NO: 4041593 - RNA, 15 nt, Molluscum contagiosum virus
gcucugccgcccgcg

SEQ ID NO: 4041594 - RNA, 18 nt, Molluscum contagiosum virus
gcucugcguuuugcgcgg

SEQ ID NO: 4041595 - RNA, 21 nt, Molluscum contagiosum virus
gcucuguugcguuggcgccag

SEQ ID NO: 4041596 - RNA, 21 nt, Molluscum contagiosum virus
gcucuuggcguucgcagugcc

SEQ ID NO: 4041597 - RNA, 15 nt, Molluscum contagiosum virus
gcugaagaaggagcc

SEQ ID NO: 4041598 - RNA, 16 nt, Molluscum contagiosum virus
gcugagcgcagcacac

SEQ ID NO: 4041599 - RNA, 15 nt, Molluscum contagiosum virus
gcugauucugcuugc

SEQ ID NO: 4041600 - RNA, 23 nt, Molluscum contagiosum virus
gcugcaagccagcccgcugcgca

SEQ ID NO: 4041601 - RNA, 20 nt, Molluscum contagiosum virus
gcugcacgccgccagcgacg

SEQ ID NO: 4041602 - RNA, 21 nt, Molluscum contagiosum virus
gcugcacuacaaccauggcgc

SEQ ID NO: 4041603 - RNA, 20 nt, Molluscum contagiosum virus
gcugcaguguguacggcgug

SEQ ID NO: 4041604 - RNA, 21 nt, Molluscum contagiosum virus
gcugccagagauccgcccgcg

SEQ ID NO: 4041605 - RNA, 18 nt, Molluscum contagiosum virus
gcugcccgcgcacgagcu

SEQ ID NO: 4041606 - RNA, 15 nt, Molluscum contagiosum virus
gcugccgcgcgcgcc

SEQ ID NO: 4041607 - RNA, 18 nt, Molluscum contagiosum virus
gcugccgcgggacgagag

SEQ ID NO: 4041608 - RNA, 16 nt, Molluscum contagiosum virus
gcugccgcugcgcgac

SEQ ID NO: 4041609 - RNA, 16 nt, Molluscum contagiosum virus
gcugcgaccaagacag

SEQ ID NO: 4041610 - RNA, 19 nt, Molluscum contagiosum virus
gcugcgagaacucgcgugc

SEQ ID NO: 4041611 - RNA, 18 nt, Molluscum contagiosum virus
gcugcgcacgugcgcgcc

SEQ ID NO: 4041612 - RNA, 21 nt, Molluscum contagiosum virus
gcugcgcaucugcgagcgcga

SEQ ID NO: 4041613 - RNA, 21 nt, Molluscum contagiosum virus
gcugcgccaggaaaggcagga

SEQ ID NO: 4041614 - RNA, 23 nt, Molluscum contagiosum virus
gcugcgcgaguaccugggcaggc

SEQ ID NO: 4041615 - RNA, 13 nt, Molluscum contagiosum virus
gcugcgcgccgcc

SEQ ID NO: 4041616 - RNA, 14 nt, Molluscum contagiosum virus
gcugcgcgcggacu

SEQ ID NO: 4041617 - RNA, 22 nt, Molluscum contagiosum virus
gcugcgcgcggggagcucugcg

SEQ ID NO: 4041618 - RNA, 22 nt, Molluscum contagiosum virus
gcugcgcggcgccgcagcacgc

SEQ ID NO: 4041619 - RNA, 20 nt, Molluscum contagiosum virus
uccaagaacaauacaaacaa

SEQ ID NO: 4041620 - RNA, 23 nt, Molluscum contagiosum virus
uccaagaagacggcgcgcgcgcu

SEQ ID NO: 4041621 - RNA, 16 nt, Molluscum contagiosum virus
uccaagaagaggccgg

SEQ ID NO: 4041622 - RNA, 16 nt, Molluscum contagiosum virus
uccacaaagacgggcc

SEQ ID NO: 4041623 - RNA, 21 nt, Molluscum contagiosum virus
uccacaugccgcgcugcuccg

SEQ ID NO: 4041624 - RNA, 18 nt, Molluscum contagiosum virus
uccacgacgagccugcgg

SEQ ID NO: 4041625 - RNA, 23 nt, Molluscum contagiosum virus
uccacgcaggacuggcaccugcg

SEQ ID NO: 4041626 - RNA, 17 nt, Molluscum contagiosum virus
uccacgcccggcgugau

SEQ ID NO: 4041627 - RNA, 20 nt, Molluscum contagiosum virus
uggcccgugcacguccucca

SEQ ID NO: 4041628 - RNA, 12 nt, Molluscum contagiosum virus
uggccgagccgc

SEQ ID NO: 4041629 - RNA, 15 nt, Molluscum contagiosum virus
uggccgcgcgcgcac

SEQ ID NO: 4041630 - RNA, 17 nt, Molluscum contagiosum virus
uggccgcgcgcgcacgc

SEQ ID NO: 4041631 - RNA, 19 nt, Molluscum contagiosum virus
uggccggcaaggggccagc

SEQ ID NO: 4041632 - RNA, 23 nt, Molluscum contagiosum virus
uggccguagucuggccgggcucg

SEQ ID NO: 4041633 - RNA, 12 nt, Molluscum contagiosum virus
uggccucugcca

SEQ ID NO: 4041634 - RNA, 16 nt, Molluscum contagiosum virus
uggcgccagccuggcg

SEQ ID NO: 4041635 - RNA, 16 nt, Molluscum contagiosum virus
uggcgcccggcgccga

SEQ ID NO: 4041636 - RNA, 15 nt, Molluscum contagiosum virus
uggcgccgaugcagu

SEQ ID NO: 4041637 - RNA, 14 nt, Molluscum contagiosum virus
uggcgccgcugcug

SEQ ID NO: 4041638 - RNA, 20 nt, Molluscum contagiosum virus
uggcgccguuggccaccugg

SEQ ID NO: 4041639 - RNA, 21 nt, Molluscum contagiosum virus
uggcgccugcgcgcggcagug

SEQ ID NO: 4041640 - RNA, 17 nt, Molluscum contagiosum virus
uggcgcgccgcugcccg

SEQ ID NO: 4041641 - RNA, 15 nt, Molluscum contagiosum virus
uggcgcgccggcgcg

SEQ ID NO: 4041642 - RNA, 14 nt, Molluscum contagiosum virus
uggcgcgcgcgcug

SEQ ID NO: 4041643 - RNA, 16 nt, Molluscum contagiosum virus
uggcgcgcuccaugua

SEQ ID NO: 4041644 - RNA, 17 nt, Molluscum contagiosum virus
uggcgcucggcguggug

SEQ ID NO: 4041645 - RNA, 13 nt, Molluscum contagiosum virus
uggcggagguggc

SEQ ID NO: 4041646 - RNA, 21 nt, Molluscum contagiosum virus
uggcggcgcacgcgagcacgc

SEQ ID NO: 4041647 - RNA, 12 nt, Molluscum contagiosum virus
uggcggcgcugg

SEQ ID NO: 4041648 - RNA, 14 nt, Molluscum contagiosum virus
uggcggggcuggca

SEQ ID NO: 4041649 - RNA, 13 nt, Molluscum contagiosum virus
uggcgugcgcagu

SEQ ID NO: 4041650 - RNA, 12 nt, Molluscum contagiosum virus
uggcguguacgu

SEQ ID NO: 4041651 - RNA, 22 nt, Molluscum contagiosum virus
uggcuacuggaggagugucgcg

SEQ ID NO: 4041652 - RNA, 19 nt, Molluscum contagiosum virus
uggcugcgguagcggacgc

SEQ ID NO: 4041653 - RNA, 14 nt, Molluscum contagiosum virus
uggcugcugcgcga

SEQ ID NO: 4041654 - RNA, 15 nt, Molluscum contagiosum virus
uggcuucgcaagcau

SEQ ID NO: 4041655 - RNA, 23 nt, Molluscum contagiosum virus
ugggaaaccucaccucugcgcgg

SEQ ID NO: 4041656 - RNA, 16 nt, Molluscum contagiosum virus
ugggcaacgcgcgcgc

SEQ ID NO: 4041657 - RNA, 16 nt, Molluscum contagiosum virus
ugggcccgccuccggg

SEQ ID NO: 4041658 - RNA, 15 nt, Molluscum contagiosum virus
ugggcgagcgcacgu

SEQ ID NO: 4041659 - RNA, 11 nt, Molluscum contagiosum virus
ugggcgcgugc

SEQ ID NO: 4041660 - RNA, 18 nt, Molluscum contagiosum virus
ugggcgugcggcgcaccu

SEQ ID NO: 4041661 - RNA, 15 nt, Molluscum contagiosum virus
ugggcgugcucacgc

SEQ ID NO: 4041662 - RNA, 20 nt, Molluscum contagiosum virus
ugggcgugcucacgcugccc

SEQ ID NO: 4041663 - RNA, 20 nt, Molluscum contagiosum virus
ugggcucgcgcuuuuccagg

SEQ ID NO: 4041664 - RNA, 20 nt, Molluscum contagiosum virus
ugggcucggaguccgcgccc

SEQ ID NO: 4041665 - RNA, 16 nt, Molluscum contagiosum virus
ugggcuugcggcacgc

SEQ ID NO: 4041666 - RNA, 11 nt, Molluscum contagiosum virus
uggggcucgcg

SEQ ID NO: 4041667 - RNA, 16 nt, Molluscum contagiosum virus
uggucaagauccaagc

SEQ ID NO: 4041668 - RNA, 16 nt, Molluscum contagiosum virus
uggucacgcgcacgcg

SEQ ID NO: 4041669 - RNA, 19 nt, Molluscum contagiosum virus
uggucuccgcgggcagccg

SEQ ID NO: 4041670 - RNA, 14 nt, Molluscum contagiosum virus
uggugcccaugcuc

SEQ ID NO: 4041671 - RNA, 14 nt, Molluscum contagiosum virus
uggugccgcgcgcu

SEQ ID NO: 4041672 - RNA, 17 nt, Molluscum contagiosum virus
uggugcgcgacgacggc

SEQ ID NO: 4041673 - RNA, 19 nt, Molluscum contagiosum virus
uggugcucguggaaaagca

SEQ ID NO: 4041674 - RNA, 14 nt, Molluscum contagiosum virus
uggugcuggccaac

SEQ ID NO: 4041675 - RNA, 18 nt, Molluscum contagiosum virus
ugguguucugcgcgccgc

SEQ ID NO: 4041676 - RNA, 13 nt, Molluscum contagiosum virus
ugguugccaggca

SEQ ID NO: 4041677 - RNA, 13 nt, Molluscum contagiosum virus
ugguugcgcacgu

SEQ ID NO: 4041678 - RNA, 14 nt, Molluscum contagiosum virus
ugguugcuugcaug

SEQ ID NO: 4041679 - RNA, 23 nt, Molluscum contagiosum virus
uguaaguggcuucgcaagcaugc

SEQ ID NO: 4041680 - RNA, 14 nt, Molluscum contagiosum virus
uguacaacucggug

SEQ ID NO: 4041681 - RNA, 20 nt, Molluscum contagiosum virus
uguaccgccgcggccgcgag

SEQ ID NO: 4041682 - RNA, 21 nt, Molluscum contagiosum virus
uguaccuggugcgcccgcggc

SEQ ID NO: 4041683 - RNA, 14 nt, Molluscum contagiosum virus
uguacgacgcgccc

SEQ ID NO: 4041684 - RNA, 19 nt, Molluscum contagiosum virus
uguacggcgugugcgcgag

SEQ ID NO: 4041685 - RNA, 13 nt, Molluscum contagiosum virus
uguacuugcuucc

SEQ ID NO: 4041686 - RNA, 15 nt, Molluscum contagiosum virus
uguagaagcgcacga

SEQ ID NO: 4041687 - RNA, 15 nt, Molluscum contagiosum virus
uguaucaugcacaug

SEQ ID NO: 4041688 - RNA, 20 nt, Molluscum contagiosum virus
uguccacgaugaacggcucc

SEQ ID NO: 4041689 - RNA, 21 nt, Molluscum contagiosum virus
ugucccugcauacacuuccug

SEQ ID NO: 4041690 - RNA, 22 nt, Molluscum contagiosum virus
ugucccugcauacacuuccugc

SEQ ID NO: 4041691 - RNA, 23 nt, Molluscum contagiosum virus
uguccgcggacgcgggccugucc

SEQ ID NO: 4041692 - RNA, 13 nt, Molluscum contagiosum virus
uguccggcccgaa

SEQ ID NO: 4041693 - RNA, 17 nt, Molluscum contagiosum virus
uguccuuccgacccggc

SEQ ID NO: 4041694 - RNA, 13 nt, Molluscum contagiosum virus
ugucgacagagaa

SEQ ID NO: 4041695 - RNA, 19 nt, Molluscum contagiosum virus
ugucgaggccuucgcgccc

SEQ ID NO: 4041696 - RNA, 13 nt, Molluscum contagiosum virus
ugucucgcaagca

SEQ ID NO: 4041697 - RNA, 16 nt, Molluscum contagiosum virus
ugugaacacgacaugu

SEQ ID NO: 4041698 - RNA, 23 nt, Molluscum contagiosum virus
ugugccgccgcacuauggacgcu

SEQ ID NO: 4041699 - RNA, 23 nt, Molluscum contagiosum virus
ugugccgcucggcccgcggacgc

SEQ ID NO: 4041700 - RNA, 18 nt, Molluscum contagiosum virus
ugugccggugcugcggcg

SEQ ID NO: 4041701 - RNA, 14 nt, Molluscum contagiosum virus
ugugccuaggagga

SEQ ID NO: 4041702 - RNA, 16 nt, Molluscum contagiosum virus
ugugcgagaacuggcg

SEQ ID NO: 4041703 - RNA, 18 nt, Molluscum contagiosum virus
ugugcuccuuguccgagc

SEQ ID NO: 4041704 - RNA, 23 nt, Molluscum contagiosum virus
ugugcugacccccuccccagcgc

SEQ ID NO: 4041705 - RNA, 15 nt, Molluscum contagiosum virus
uguggccuacguggc

SEQ ID NO: 4041706 - RNA, 19 nt, Molluscum contagiosum virus
uguuacggacggcgcacgc

SEQ ID NO: 4041707 - RNA, 17 nt, Molluscum contagiosum virus
uguucaccauccagccg

SEQ ID NO: 4041708 - RNA, 20 nt, Molluscum contagiosum virus
uguuccguucgucagaggga

SEQ ID NO: 4041709 - RNA, 20 nt, Molluscum contagiosum virus
uguucgcgcugcucgcgcuc

SEQ ID NO: 4041710 - RNA, 12 nt, Molluscum contagiosum virus
uguucgcggagc

SEQ ID NO: 4041711 - RNA, 15 nt, Molluscum contagiosum virus
uguugccuggagggc

SEQ ID NO: 4041712 - RNA, 14 nt, Molluscum contagiosum virus
uguugcgcgcgccu

SEQ ID NO: 4041713 - RNA, 15 nt, Molluscum contagiosum virus
uguuuguagccgcgc

SEQ ID NO: 4041714 - RNA, 18 nt, Molluscum contagiosum virus
agcagcucggggcuguca

SEQ ID NO: 4041715 - RNA, 16 nt, Molluscum contagiosum virus
agcagcugcuccgccu

SEQ ID NO: 4041716 - RNA, 13 nt, Molluscum contagiosum virus
agcaggcgcaggc

SEQ ID NO: 4041717 - RNA, 18 nt, Molluscum contagiosum virus
agcaggcgccaucgcgcg

SEQ ID NO: 4041718 - RNA, 16 nt, Molluscum contagiosum virus
agcagguucucgcaca

SEQ ID NO: 4041719 - RNA, 16 nt, Molluscum contagiosum virus
agcaugcgugcaacag

SEQ ID NO: 4041720 - RNA, 19 nt, Molluscum contagiosum virus
agcauuccuuguccuggca

SEQ ID NO: 4041721 - RNA, 15 nt, Molluscum contagiosum virus
agccaaccccgagcc

SEQ ID NO: 4041722 - RNA, 19 nt, Molluscum contagiosum virus
agccacgaagagucgcgcc

SEQ ID NO: 4041723 - RNA, 15 nt, Molluscum contagiosum virus
agccacggccgcgcu

SEQ ID NO: 4041724 - RNA, 12 nt, Molluscum contagiosum virus
agccagccaggc

SEQ ID NO: 4041725 - RNA, 18 nt, Molluscum contagiosum virus
agccagucucgcgcuucc

SEQ ID NO: 4041726 - RNA, 20 nt, Molluscum contagiosum virus
agccagucucgcgcuuccag

SEQ ID NO: 4041727 - RNA, 14 nt, Molluscum contagiosum virus
agcccaaggagcug

SEQ ID NO: 4041728 - RNA, 18 nt, Molluscum contagiosum virus
agcccaggaacaucugca

SEQ ID NO: 4041729 - RNA, 14 nt, Molluscum contagiosum virus
agccccugcugcuc

SEQ ID NO: 4041730 - RNA, 19 nt, Molluscum contagiosum virus
agcccgacgcgggcgcgca

SEQ ID NO: 4041731 - RNA, 14 nt, Molluscum contagiosum virus
agcccgcccccgag

SEQ ID NO: 4041732 - RNA, 17 nt, Molluscum contagiosum virus
uuccggugccggccgcc

SEQ ID NO: 4041733 - RNA, 18 nt, Molluscum contagiosum virus
uuccgucccccgcggagc

SEQ ID NO: 4041734 - RNA, 17 nt, Molluscum contagiosum virus
uuccuugcgcuuguccu

SEQ ID NO: 4041735 - RNA, 20 nt, Molluscum contagiosum virus
uucgagaccuacgucaagca

SEQ ID NO: 4041736 - RNA, 18 nt, Molluscum contagiosum virus
uucgcggacggcgcgcag

SEQ ID NO: 4041737 - RNA, 19 nt, Molluscum contagiosum virus
uucgcggacggcgcgcagc

SEQ ID NO: 4041738 - RNA, 15 nt, Molluscum contagiosum virus
uucgcggagcugugc

SEQ ID NO: 4041739 - RNA, 15 nt, Molluscum contagiosum virus
uucgggaagcacagu

SEQ ID NO: 4041740 - RNA, 13 nt, Molluscum contagiosum virus
uucguaaagcugg

SEQ ID NO: 4041741 - RNA, 13 nt, Molluscum contagiosum virus
uucgucauggagc

SEQ ID NO: 4041742 - RNA, 19 nt, Molluscum contagiosum virus
uucguggagcccgugcugg

SEQ ID NO: 4041743 - RNA, 20 nt, Molluscum contagiosum virus
uucucgcagcguuccaggaa

SEQ ID NO: 4041744 - RNA, 17 nt, Molluscum contagiosum virus
uucuucaaguaccuguc

SEQ ID NO: 4041745 - RNA, 20 nt, Molluscum contagiosum virus
uucuuuacgggcgccagcua

SEQ ID NO: 4041746 - RNA, 15 nt, Molluscum contagiosum virus
uugaaugucgcgacg

SEQ ID NO: 4041747 - RNA, 15 nt, Molluscum contagiosum virus
uugacgcccauuaaa

SEQ ID NO: 4041748 - RNA, 22 nt, Molluscum contagiosum virus
uugaggaacuagugcugcuggg

SEQ ID NO: 4041749 - RNA, 15 nt, Molluscum contagiosum virus
uugcacccgcgcagc

SEQ ID NO: 4041750 - RNA, 14 nt, Molluscum contagiosum virus
uugcacgcgcacgc

SEQ ID NO: 4041751 - RNA, 18 nt, Molluscum contagiosum virus
uugcagcccaccagcagg

SEQ ID NO: 4041752 - RNA, 20 nt, Molluscum contagiosum virus
uugccccgcgcguugcugcc

SEQ ID NO: 4041753 - RNA, 13 nt, Molluscum contagiosum virus
uugccgaggaggu

SEQ ID NO: 4041754 - RNA, 14 nt, Molluscum contagiosum virus
uugccgcgcgcugc

SEQ ID NO: 4041755 - RNA, 12 nt, Molluscum contagiosum virus
uugcgcagagcu

SEQ ID NO: 4041756 - RNA, 16 nt, Molluscum contagiosum virus
uugcggaugcucgcuu

SEQ ID NO: 4041757 - RNA, 15 nt, Molluscum contagiosum virus
uugcuccaugacaga

SEQ ID NO: 4041758 - RNA, 22 nt, Molluscum contagiosum virus
uugcugggcacaagcuuucuca

SEQ ID NO: 4041759 - RNA, 13 nt, Molluscum contagiosum virus
uuggccgcggagg

SEQ ID NO: 4041760 - RNA, 15 nt, Molluscum contagiosum virus
uuggcgugaccaugg

SEQ ID NO: 4041761 - RNA, 22 nt, Molluscum contagiosum virus
uuuccuggcucgcgagugugca

SEQ ID NO: 4041762 - RNA, 16 nt, Molluscum contagiosum virus
uuuccuugccuucucg

SEQ ID NO: 4041763 - RNA, 15 nt, Molluscum contagiosum virus
uuucguccgccgcuc

SEQ ID NO: 4041764 - RNA, 14 nt, Molluscum contagiosum virus
uuucguugccugca

SEQ ID NO: 4041765 - RNA, 15 nt, Molluscum contagiosum virus
uuugcgcgagagcua

SEQ ID NO: 4041766 - RNA, 14 nt, Molluscum contagiosum virus
uuuguccugagccu

SEQ ID NO: 4041767 - RNA, 16 nt, Molluscum contagiosum virus
uuuguguuggccaggc

SEQ ID NO: 4041768 - RNA, 16 nt, Molluscum contagiosum virus
uuuuccggggacggag

SEQ ID NO: 4041769 - RNA, 20 nt, Molluscum contagiosum virus
gggugaggagcucgacucga

SEQ ID NO: 4041770 - RNA, 22 nt, Molluscum contagiosum virus
gguacccgcaaccccgcgcgua

SEQ ID NO: 4041771 - RNA, 14 nt, Molluscum contagiosum virus
gguagcgcgccgca

SEQ ID NO: 4041772 - RNA, 14 nt, Molluscum contagiosum virus
gguagcuagcucug

SEQ ID NO: 4041773 - RNA, 16 nt, Molluscum contagiosum virus
gguagcucgugccugu

SEQ ID NO: 4041774 - RNA, 21 nt, Molluscum contagiosum virus
ggucaacuccgagcgcgcgcg

SEQ ID NO: 4041775 - RNA, 13 nt, Molluscum contagiosum virus
ggucaagauccaa

SEQ ID NO: 4041776 - RNA, 16 nt, Molluscum contagiosum virus
gguccaccugcgacgc

SEQ ID NO: 4041777 - RNA, 15 nt, Molluscum contagiosum virus
ggucccuagccuucc

SEQ ID NO: 4041778 - RNA, 21 nt, Molluscum contagiosum virus
gguccgacaccagcggcaggc

SEQ ID NO: 4041779 - RNA, 21 nt, Molluscum contagiosum virus
ggucgcccgccgagcucuucc

SEQ ID NO: 4041780 - RNA, 17 nt, Molluscum contagiosum virus
ggucgcccuccgccgua

SEQ ID NO: 4041781 - RNA, 18 nt, Molluscum contagiosum virus
ggucgccuacgaggugcg

SEQ ID NO: 4041782 - RNA, 16 nt, Molluscum contagiosum virus
ggucguccuggagccu

SEQ ID NO: 4041783 - RNA, 14 nt, Molluscum contagiosum virus
ggugagugcgcgca

SEQ ID NO: 4041784 - RNA, 17 nt, Molluscum contagiosum virus
ggugcacgugcugcagc

SEQ ID NO: 4041785 - RNA, 21 nt, Molluscum contagiosum virus
ggugcacgugcugcagcugcg

SEQ ID NO: 4041786 - RNA, 20 nt, Molluscum contagiosum virus
ggugccgccgugggcgccgc

SEQ ID NO: 4041787 - RNA, 21 nt, Molluscum contagiosum virus
ggugccuggcguccgcacgca

SEQ ID NO: 4041788 - RNA, 14 nt, Molluscum contagiosum virus
ggugcgcgcgcgcg

SEQ ID NO: 4041789 - RNA, 14 nt, Molluscum contagiosum virus
ggugcugcgcacgg

SEQ ID NO: 4041790 - RNA, 20 nt, Molluscum contagiosum virus
ggugcugcgccacgugcgca

SEQ ID NO: 4041791 - RNA, 18 nt, Molluscum contagiosum virus
ggugcuggugcuggucaa

SEQ ID NO: 4041792 - RNA, 21 nt, Molluscum contagiosum virus
gguggaagagcccgcacacgc

SEQ ID NO: 4041793 - RNA, 14 nt, Molluscum contagiosum virus
gguggacguggacg

SEQ ID NO: 4041794 - RNA, 19 nt, Molluscum contagiosum virus
gguggcacccuggcugcug

SEQ ID NO: 4041795 - RNA, 14 nt, Molluscum contagiosum virus
gguggccaagcgcu

SEQ ID NO: 4041796 - RNA, 14 nt, Molluscum contagiosum virus
gguggccgcgcgcg

SEQ ID NO: 4041797 - RNA, 23 nt, Molluscum contagiosum virus
gguggugcgccugcacuacugcu

SEQ ID NO: 4041798 - RNA, 17 nt, Molluscum contagiosum virus
gguggugggcggguguc

SEQ ID NO: 4041799 - RNA, 16 nt, Molluscum contagiosum virus
ggugucgagcucgcgc

SEQ ID NO: 4041800 - RNA, 13 nt, Molluscum contagiosum virus
ggugugugccugc

SEQ ID NO: 4041801 - RNA, 16 nt, Molluscum contagiosum virus
gguguucugcgcgccg

SEQ ID NO: 4041802 - RNA, 17 nt, Molluscum contagiosum virus
gguucacuagcgcaggc

SEQ ID NO: 4041803 - RNA, 15 nt, Molluscum contagiosum virus
gguuccagcuccggc

SEQ ID NO: 4041804 - RNA, 13 nt, Molluscum contagiosum virus
gguuccugcgcuc

SEQ ID NO: 4041805 - RNA, 17 nt, Molluscum contagiosum virus
gguuccugcgcuccgac

SEQ ID NO: 4041806 - RNA, 15 nt, Molluscum contagiosum virus
gguucgcgcccugcg

SEQ ID NO: 4041807 - RNA, 16 nt, Molluscum contagiosum virus
gguucugcgcugccag

SEQ ID NO: 4041808 - RNA, 14 nt, Molluscum contagiosum virus
gguugccaggcaca

SEQ ID NO: 4041809 - RNA, 22 nt, Molluscum contagiosum virus
gguugcccgccugccgcgagca

SEQ ID NO: 4041810 - RNA, 19 nt, Molluscum contagiosum virus
gguuguagcgguugaccag

SEQ ID NO: 4041811 - RNA, 18 nt, Molluscum contagiosum virus
guaaagguacacuuuccg

SEQ ID NO: 4041812 - RNA, 15 nt, Molluscum contagiosum virus
guaagcgacagguca

SEQ ID NO: 4041813 - RNA, 13 nt, Molluscum contagiosum virus
guacacgcugacg

SEQ ID NO: 4041814 - RNA, 19 nt, Molluscum contagiosum virus
guacagcgggcgcugcucg

SEQ ID NO: 4041815 - RNA, 13 nt, Molluscum contagiosum virus
guacagugcgcgc

SEQ ID NO: 4041816 - RNA, 14 nt, Molluscum contagiosum virus
guacagugcgcgca

SEQ ID NO: 4041817 - RNA, 12 nt, Molluscum contagiosum virus
guaccagccgcu

SEQ ID NO: 4041818 - RNA, 17 nt, Molluscum contagiosum virus
guaccgccgcggccgcg

SEQ ID NO: 4041819 - RNA, 12 nt, Molluscum contagiosum virus
guaccgcgcgca

SEQ ID NO: 4041820 - RNA, 20 nt, Molluscum contagiosum virus
guaccugcucgggcugcgcg

SEQ ID NO: 4041821 - RNA, 15 nt, Molluscum contagiosum virus
guaccuggugcgccc

SEQ ID NO: 4041822 - RNA, 17 nt, Molluscum contagiosum virus
guacgagcagcugcugc

SEQ ID NO: 4041823 - RNA, 19 nt, Molluscum contagiosum virus
guacgagcagcugcugcgc

SEQ ID NO: 4041824 - RNA, 19 nt, Molluscum contagiosum virus
guacgcgugcgcuggcgcg

SEQ ID NO: 4041825 - RNA, 20 nt, Molluscum contagiosum virus
guacgugcgccagcucuggg

SEQ ID NO: 4041826 - RNA, 16 nt, Molluscum contagiosum virus
guacgugcuugcgcgc

SEQ ID NO: 4041827 - RNA, 13 nt, Molluscum contagiosum virus
cuugcgcagcgcc

SEQ ID NO: 4041828 - RNA, 16 nt, Molluscum contagiosum virus
cuugcgcgcgcccucg

SEQ ID NO: 4041829 - RNA, 12 nt, Molluscum contagiosum virus
cuugcuggcacg

SEQ ID NO: 4041830 - RNA, 18 nt, Molluscum contagiosum virus
cuuggacagcaagcagcg

SEQ ID NO: 4041831 - RNA, 15 nt, Molluscum contagiosum virus
cuuggcaugcgugcu

SEQ ID NO: 4041832 - RNA, 21 nt, Molluscum contagiosum virus
cuuggcgcccgugccgccggc

SEQ ID NO: 4041833 - RNA, 13 nt, Molluscum contagiosum virus
ggcgcacuggggc

SEQ ID NO: 4041834 - RNA, 15 nt, Molluscum contagiosum virus
ggcgcaucagagaag

SEQ ID NO: 4041835 - RNA, 16 nt, Molluscum contagiosum virus
ggcgccauugcucgcg

SEQ ID NO: 4041836 - RNA, 21 nt, Molluscum contagiosum virus
ggcgccgacaacgugcugcuc

SEQ ID NO: 4041837 - RNA, 19 nt, Molluscum contagiosum virus
ggcgccgcggccugggcca

SEQ ID NO: 4041838 - RNA, 15 nt, Molluscum contagiosum virus
ggcgccgcugcugga

SEQ ID NO: 4041839 - RNA, 16 nt, Molluscum contagiosum virus
ggcgccggcucugccu

SEQ ID NO: 4041840 - RNA, 16 nt, Molluscum contagiosum virus
ggcgcgacggcgacgc

SEQ ID NO: 4041841 - RNA, 14 nt, Molluscum contagiosum virus
ggcgcgacugcacg

SEQ ID NO: 4041842 - RNA, 16 nt, Molluscum contagiosum virus
ggcgcgcagcuccgcg

SEQ ID NO: 4041843 - RNA, 20 nt, Molluscum contagiosum virus
ggcgcgccgaguacugcugc

SEQ ID NO: 4041844 - RNA, 16 nt, Molluscum contagiosum virus
ggcgcgccggccagcg

SEQ ID NO: 4041845 - RNA, 21 nt, Molluscum contagiosum virus
ggcgcgcgcgcuagccgccgc

SEQ ID NO: 4041846 - RNA, 14 nt, Molluscum contagiosum virus
ggcgcgcgugccgc

SEQ ID NO: 4041847 - RNA, 14 nt, Molluscum contagiosum virus
ggcgcgcugugagc

SEQ ID NO: 4041848 - RNA, 12 nt, Molluscum contagiosum virus
ggcgcggcagcc

SEQ ID NO: 4041849 - RNA, 22 nt, Molluscum contagiosum virus
ggcgcgguccgcguuggcagcg

SEQ ID NO: 4041850 - RNA, 24 nt, Molluscum contagiosum virus
ggcgcgugccagucgcgcgagaag

SEQ ID NO: 4041851 - RNA, 16 nt, Molluscum contagiosum virus
ggcgcgugcugagcua

SEQ ID NO: 4041852 - RNA, 15 nt, Molluscum contagiosum virus
ggcgcguugcucccg

SEQ ID NO: 4041853 - RNA, 14 nt, Molluscum contagiosum virus
ggcgcucgccccuu

SEQ ID NO: 4041854 - RNA, 17 nt, Molluscum contagiosum virus
ggcgcucgccccuuccc

SEQ ID NO: 4041855 - RNA, 15 nt, Molluscum contagiosum virus
ggcgcucgcgagaag

SEQ ID NO: 4041856 - RNA, 23 nt, Molluscum contagiosum virus
ggcgcucggcguggugcuggcca

SEQ ID NO: 4041857 - RNA, 21 nt, Molluscum contagiosum virus
ggcgcugucgcgcaggcucug

SEQ ID NO: 4041858 - RNA, 20 nt, Molluscum contagiosum virus
ggcggagaugacgggcacgc

SEQ ID NO: 4041859 - RNA, 13 nt, Molluscum contagiosum virus
ggcggcacugcua

SEQ ID NO: 4041860 - RNA, 22 nt, Molluscum contagiosum virus
ggcggcauccugaugacggcag

SEQ ID NO: 4041861 - RNA, 20 nt, Molluscum contagiosum virus
ggcggcgauggcgauagcga

SEQ ID NO: 4041862 - RNA, 15 nt, Molluscum contagiosum virus
ggcggcugugcccgc

SEQ ID NO: 4041863 - RNA, 18 nt, Molluscum contagiosum virus
ggcgggccugcgcccgca

SEQ ID NO: 4041864 - RNA, 15 nt, Molluscum contagiosum virus
ggcgggcggcgucgc

SEQ ID NO: 4041865 - RNA, 18 nt, Molluscum contagiosum virus
ggcggguccgcaggcucg

SEQ ID NO: 4041866 - RNA, 22 nt, Molluscum contagiosum virus
ggcggucuuccagcacugcgcc

SEQ ID NO: 4041867 - RNA, 20 nt, Molluscum contagiosum virus
ggcguccgcacgaggagccc

SEQ ID NO: 4041868 - RNA, 17 nt, Molluscum contagiosum virus
ggcguccggcgcucgcc

SEQ ID NO: 4041869 - RNA, 14 nt, Molluscum contagiosum virus
ggcgucgcgcacag

SEQ ID NO: 4041870 - RNA, 13 nt, Molluscum contagiosum virus
ggcgugacagguc

SEQ ID NO: 4041871 - RNA, 18 nt, Molluscum contagiosum virus
ggcgugcagggcgugcuu

SEQ ID NO: 4041872 - RNA, 23 nt, Molluscum contagiosum virus
ggcgugcgcagcagcucggggcu

SEQ ID NO: 4041873 - RNA, 14 nt, Molluscum contagiosum virus
ggcguggccaggcc

SEQ ID NO: 4041874 - RNA, 21 nt, Molluscum contagiosum virus
ggcguguuccggcagcgccgc

SEQ ID NO: 4041875 - RNA, 20 nt, Molluscum contagiosum virus
ggcucaacucguaggacaac

SEQ ID NO: 4041876 - RNA, 14 nt, Molluscum contagiosum virus
ggcucaagcuggca

SEQ ID NO: 4041877 - RNA, 23 nt, Molluscum contagiosum virus
ggcucaccgcgcagaagccaaca

SEQ ID NO: 4041878 - RNA, 13 nt, Molluscum contagiosum virus
ggcuccgcuggac

SEQ ID NO: 4041879 - RNA, 15 nt, Molluscum contagiosum virus
ggcuccuucuucagc

SEQ ID NO: 4041880 - RNA, 20 nt, Molluscum contagiosum virus
ggcuccuucuucagcaggcc

SEQ ID NO: 4041881 - RNA, 17 nt, Molluscum contagiosum virus
ggcucgcgccugcgcuu

SEQ ID NO: 4041882 - RNA, 22 nt, Molluscum contagiosum virus
ggcucgcucaucaccgacacgc

SEQ ID NO: 4041883 - RNA, 15 nt, Molluscum contagiosum virus
ggcucguacugcugc

SEQ ID NO: 4041884 - RNA, 16 nt, Molluscum contagiosum virus
ggcucucaacugcagg

SEQ ID NO: 4041885 - RNA, 19 nt, Molluscum contagiosum virus
ggcucugucguugucgccg

SEQ ID NO: 4041886 - RNA, 18 nt, Molluscum contagiosum virus
ggcugauccugcgcgugu

SEQ ID NO: 4041887 - RNA, 15 nt, Molluscum contagiosum virus
ggcugcacgacgguc

SEQ ID NO: 4041888 - RNA, 19 nt, Molluscum contagiosum virus
gcgagcgcccgugcuugcg

SEQ ID NO: 4041889 - RNA, 14 nt, Molluscum contagiosum virus
gcgagcgcucugca

SEQ ID NO: 4041890 - RNA, 20 nt, Molluscum contagiosum virus
gcgagcggcgacuugcugcg

SEQ ID NO: 4041891 - RNA, 14 nt, Molluscum contagiosum virus
gcgagcggcgcgcg

SEQ ID NO: 4041892 - RNA, 19 nt, Molluscum contagiosum virus
gcgagcucgucgcgcgcgu

SEQ ID NO: 4041893 - RNA, 18 nt, Molluscum contagiosum virus
gcgaggccugcguggaca

SEQ ID NO: 4041894 - RNA, 22 nt, Molluscum contagiosum virus
gcgaguaccugggcaggccgcc

SEQ ID NO: 4041895 - RNA, 18 nt, Molluscum contagiosum virus
gcgagucaaugacacgag

SEQ ID NO: 4041896 - RNA, 22 nt, Molluscum contagiosum virus
gcgagucgcccguguucgcgga

SEQ ID NO: 4041897 - RNA, 15 nt, Molluscum contagiosum virus
gcgagucgcgggcgc

SEQ ID NO: 4041898 - RNA, 13 nt, Molluscum contagiosum virus
gcgagugugcaug

SEQ ID NO: 4041899 - RNA, 13 nt, Molluscum contagiosum virus
gcgagugugcgug

SEQ ID NO: 4041900 - RNA, 21 nt, Molluscum contagiosum virus
gcgagugugcgugucucucgu

SEQ ID NO: 4041901 - RNA, 15 nt, Molluscum contagiosum virus
gcgauaggacaugac

SEQ ID NO: 4041902 - RNA, 17 nt, Molluscum contagiosum virus
gcgauggcgccugcuuc

SEQ ID NO: 4041903 - RNA, 16 nt, Molluscum contagiosum virus
gcgauugcccgcgcgc

SEQ ID NO: 4041904 - RNA, 15 nt, Molluscum contagiosum virus
gcgcaaaccucugag

SEQ ID NO: 4041905 - RNA, 23 nt, Molluscum contagiosum virus
gcgcaaaccucugagcgagcgca

SEQ ID NO: 4041906 - RNA, 21 nt, Molluscum contagiosum virus
gcgcaacgucuuccgcgcgcu

SEQ ID NO: 4041907 - RNA, 19 nt, Molluscum contagiosum virus
gcgcaacgugcugcgccgc

SEQ ID NO: 4041908 - RNA, 19 nt, Molluscum contagiosum virus
gcgcaagcaccggcagcgc

SEQ ID NO: 4041909 - RNA, 20 nt, Molluscum contagiosum virus
gcgcaagcagcucggcgaga

SEQ ID NO: 4041910 - RNA, 19 nt, Molluscum contagiosum virus
gcgcaagccgcguaccacc

SEQ ID NO: 4041911 - RNA, 17 nt, Molluscum contagiosum virus
gcgcaaguccagcgcgc

SEQ ID NO: 4041912 - RNA, 18 nt, Molluscum contagiosum virus
gcgcacacuccucggcgc

SEQ ID NO: 4041913 - RNA, 19 nt, Molluscum contagiosum virus
gcgcacacuccucggcgcu

SEQ ID NO: 4041914 - RNA, 21 nt, Molluscum contagiosum virus
gcgcacagacauggcccgcgc

SEQ ID NO: 4041915 - RNA, 16 nt, Molluscum contagiosum virus
gcgcacagacggcgcg

SEQ ID NO: 4041916 - RNA, 20 nt, Molluscum contagiosum virus
gcgcacccgagggcgugcgc

SEQ ID NO: 4041917 - RNA, 21 nt, Molluscum contagiosum virus
gcgcaccugcacgagccggcg

SEQ ID NO: 4041918 - RNA, 14 nt, Molluscum contagiosum virus
gcgcaccugcuaga

SEQ ID NO: 4041919 - RNA, 19 nt, Molluscum contagiosum virus
gcgcaccugcuagagcaua

SEQ ID NO: 4041920 - RNA, 16 nt, Molluscum contagiosum virus
gcgcacgagcgcgggc

SEQ ID NO: 4041921 - RNA, 15 nt, Molluscum contagiosum virus
gcgcacgccagccug

SEQ ID NO: 4041922 - RNA, 16 nt, Molluscum contagiosum virus
gcgcacgcccucgccg

SEQ ID NO: 4041923 - RNA, 18 nt, Molluscum contagiosum virus
gcgcacgcggcucuggag

SEQ ID NO: 4041924 - RNA, 21 nt, Molluscum contagiosum virus
gcgcacgcugcgcacgggcgc

SEQ ID NO: 4041925 - RNA, 18 nt, Molluscum contagiosum virus
gcgcacgcuuguccgcgg

SEQ ID NO: 4041926 - RNA, 22 nt, Molluscum contagiosum virus
gcgcacgcuuguccgcggacgc

SEQ ID NO: 4041927 - RNA, 14 nt, Molluscum contagiosum virus
gcgcacugcucgcg

SEQ ID NO: 4041928 - RNA, 16 nt, Molluscum contagiosum virus
gcgcagaagccaacac

SEQ ID NO: 4041929 - RNA, 15 nt, Molluscum contagiosum virus
gcgcagacgccgagc

SEQ ID NO: 4041930 - RNA, 18 nt, Molluscum contagiosum virus
gcgcagcauucccggcgc

SEQ ID NO: 4041931 - RNA, 21 nt, Molluscum contagiosum virus
gcgcagcauucccggcgcgcg

SEQ ID NO: 4041932 - RNA, 18 nt, Molluscum contagiosum virus
gcgcagcucgccgcgcgc

SEQ ID NO: 4041933 - RNA, 21 nt, Molluscum contagiosum virus
gcgcagcucgccgcgcgccgc

SEQ ID NO: 4041934 - RNA, 17 nt, Molluscum contagiosum virus
gcgcagcugcgccugca

SEQ ID NO: 4041935 - RNA, 21 nt, Molluscum contagiosum virus
gcgcagcuucucugcgaucgc

SEQ ID NO: 4041936 - RNA, 22 nt, Molluscum contagiosum virus
gcgcaggucaucgacgagcacg

SEQ ID NO: 4041937 - RNA, 15 nt, Molluscum contagiosum virus
gcgcagucccagcac

SEQ ID NO: 4041938 - RNA, 17 nt, Molluscum contagiosum virus
gcgcagucccagcaccg

SEQ ID NO: 4041939 - RNA, 13 nt, Molluscum contagiosum virus
gcgcaucaugcgc

SEQ ID NO: 4041940 - RNA, 20 nt, Molluscum contagiosum virus
gcgcaucgcgggcacgcagc

SEQ ID NO: 4041941 - RNA, 14 nt, Molluscum contagiosum virus
gcgcaugcgcgccg

SEQ ID NO: 4041942 - RNA, 15 nt, Molluscum contagiosum virus
gcgcaugcgcgccgc

SEQ ID NO: 4041943 - RNA, 20 nt, Molluscum contagiosum virus
gcgcaugguggcgauccugu

SEQ ID NO: 4041944 - RNA, 13 nt, Molluscum contagiosum virus
gcgccaagaacaa

SEQ ID NO: 4041945 - RNA, 13 nt, Molluscum contagiosum virus
gcgccaaggcgcu

SEQ ID NO: 4041946 - RNA, 20 nt, Molluscum contagiosum virus
gcgccacgagcgccgcgugc

SEQ ID NO: 4041947 - RNA, 22 nt, Molluscum contagiosum virus
gcgccacuagcaaggcgccgcg

SEQ ID NO: 4041948 - RNA, 15 nt, Molluscum contagiosum virus
gcgccagcacgcgcu

SEQ ID NO: 4041949 - RNA, 14 nt, Molluscum contagiosum virus
gcgccauugcucgc

SEQ ID NO: 4041950 - RNA, 16 nt, Molluscum contagiosum virus
gcgcccaacgcccgcg

SEQ ID NO: 4041951 - RNA, 17 nt, Molluscum contagiosum virus
gcgcccgccgcccaagg

SEQ ID NO: 4041952 - RNA, 14 nt, Molluscum contagiosum virus
gcgcccgcggcaca

SEQ ID NO: 4041953 - RNA, 22 nt, Molluscum contagiosum virus
gcgcccgcggcacaugcagcug

SEQ ID NO: 4041954 - RNA, 13 nt, Molluscum contagiosum virus
gcgcccgcggcgc

SEQ ID NO: 4041955 - RNA, 17 nt, Molluscum contagiosum virus
gcgcccgcggcgcacgg

SEQ ID NO: 4041956 - RNA, 17 nt, Molluscum contagiosum virus
gcgcccggugcggcgug

SEQ ID NO: 4041957 - RNA, 20 nt, Molluscum contagiosum virus
gcgcccgugcuugcgcacgg

SEQ ID NO: 4041958 - RNA, 15 nt, Molluscum contagiosum virus
gcgcccucacgugcu

SEQ ID NO: 4041959 - RNA, 15 nt, Molluscum contagiosum virus
gcgcccucgcgcgca

SEQ ID NO: 4041960 - RNA, 19 nt, Molluscum contagiosum virus
gcgcccuuugcggcacggg

SEQ ID NO: 4041961 - RNA, 23 nt, Molluscum contagiosum virus
gcgccgaaguacuuuccucuucg

SEQ ID NO: 4041962 - RNA, 15 nt, Molluscum contagiosum virus
gcgccgacaugcgca

SEQ ID NO: 4041963 - RNA, 13 nt, Molluscum contagiosum virus
gcgccgaggacua

SEQ ID NO: 4041964 - RNA, 23 nt, Molluscum contagiosum virus
gcgccgcacgcugcugcgugcgc

SEQ ID NO: 4041965 - RNA, 18 nt, Molluscum contagiosum virus
gcgccgcacgugcugcgc

SEQ ID NO: 4041966 - RNA, 23 nt, Molluscum contagiosum virus
gcgccgccaugcugcgcgagcgc

SEQ ID NO: 4041967 - RNA, 12 nt, Molluscum contagiosum virus
gcgccgccucgc

SEQ ID NO: 4041968 - RNA, 18 nt, Molluscum contagiosum virus
gcgccgccucgcgcgcac

SEQ ID NO: 4041969 - RNA, 15 nt, Molluscum contagiosum virus
gcgccgcgcgccgcg

SEQ ID NO: 4041970 - RNA, 21 nt, Molluscum contagiosum virus
gcgccgcgcgcgcgcgagggc

SEQ ID NO: 4041971 - RNA, 14 nt, Molluscum contagiosum virus
gcgccgcgugcaug

SEQ ID NO: 4041972 - RNA, 21 nt, Molluscum contagiosum virus
gcgccggaacucgcgcgcgcc

SEQ ID NO: 4041973 - RNA, 19 nt, Molluscum contagiosum virus
gcgccggcgcgcgcgcgca

SEQ ID NO: 4041974 - RNA, 14 nt, Molluscum contagiosum virus
gcgccggcucugcc

SEQ ID NO: 4041975 - RNA, 14 nt, Molluscum contagiosum virus
gcgccuagcuccag

SEQ ID NO: 4041976 - RNA, 16 nt, Molluscum contagiosum virus
gcgccuagcuccagcg

SEQ ID NO: 4041977 - RNA, 14 nt, Molluscum contagiosum virus
gcgccugccgcgca

SEQ ID NO: 4041978 - RNA, 23 nt, Molluscum contagiosum virus
gcgccugccgcgcaugcuggaga

SEQ ID NO: 4041979 - RNA, 18 nt, Molluscum contagiosum virus
gcgccugugccugcaaga

SEQ ID NO: 4041980 - RNA, 15 nt, Molluscum contagiosum virus
gcgccuuccgcgcgg

SEQ ID NO: 4041981 - RNA, 18 nt, Molluscum contagiosum virus
gcgccuuuuccgcgaagu

SEQ ID NO: 4041982 - RNA, 19 nt, Molluscum contagiosum virus
gcgcgacaugcugcccgcg

SEQ ID NO: 4041983 - RNA, 24 nt, Molluscum contagiosum virus
gcgcgaccaguacaucaccgccau

SEQ ID NO: 4041984 - RNA, 14 nt, Molluscum contagiosum virus
gcgcgacgccauca

SEQ ID NO: 4041985 - RNA, 17 nt, Molluscum contagiosum virus
gcgcgacgccgucgaug

SEQ ID NO: 4041986 - RNA, 24 nt, Molluscum contagiosum virus
gcgcgacgucgucaaggauguagc

SEQ ID NO: 4041987 - RNA, 15 nt, Molluscum contagiosum virus
gcgcgacuuggggcu

SEQ ID NO: 4041988 - RNA, 21 nt, Molluscum contagiosum virus
gcgcgacuuguccucaagucg

SEQ ID NO: 4041989 - RNA, 20 nt, Molluscum contagiosum virus
gcgcgagcggagcgggcacg

SEQ ID NO: 4041990 - RNA, 20 nt, Molluscum contagiosum virus
gcgcuggaugcugcucgacg

SEQ ID NO: 4041991 - RNA, 14 nt, Molluscum contagiosum virus
gcgcuggcgugcgc

SEQ ID NO: 4041992 - RNA, 17 nt, Molluscum contagiosum virus
gcgcuguaccggcucag

SEQ ID NO: 4041993 - RNA, 17 nt, Molluscum contagiosum virus
gcgcuguauucggcgua

SEQ ID NO: 4041994 - RNA, 18 nt, Molluscum contagiosum virus
gcgcugugagcgcgccgc

SEQ ID NO: 4041995 - RNA, 17 nt, Molluscum contagiosum virus
gcgcuucugccugcucc

SEQ ID NO: 4041996 - RNA, 14 nt, Molluscum contagiosum virus
gcgcuucuuugcgc

SEQ ID NO: 4041997 - RNA, 17 nt, Molluscum contagiosum virus
gcgcuuguagccgcgac

SEQ ID NO: 4041998 - RNA, 16 nt, Molluscum contagiosum virus
gcgcuuguccucuugg

SEQ ID NO: 4041999 - RNA, 18 nt, Molluscum contagiosum virus
gcgcuuuuuuuguccugu

SEQ ID NO: 4042000 - RNA, 22 nt, Molluscum contagiosum virus
gcggaacuggacgccguugcgc

SEQ ID NO: 4042001 - RNA, 15 nt, Molluscum contagiosum virus
gcggaagacgcgagc

SEQ ID NO: 4042002 - RNA, 20 nt, Molluscum contagiosum virus
gcggacagagcccgcggcgc

SEQ ID NO: 4042003 - RNA, 23 nt, Molluscum contagiosum virus
gcggacgaaagcgucgugugcgc

SEQ ID NO: 4042004 - RNA, 14 nt, Molluscum contagiosum virus
gcggacgaagcugu

SEQ ID NO: 4042005 - RNA, 16 nt, Molluscum contagiosum virus
gcggagaucgccgcgc

SEQ ID NO: 4042006 - RNA, 15 nt, Molluscum contagiosum virus
gcggagcgccuucug

SEQ ID NO: 4042007 - RNA, 21 nt, Molluscum contagiosum virus
gcggagcgcgcacggcagcgg

SEQ ID NO: 4042008 - RNA, 19 nt, Molluscum contagiosum virus
gcggaggucgagcgcgccg

SEQ ID NO: 4042009 - RNA, 13 nt, Molluscum contagiosum virus
gcggaugcucgcu

SEQ ID NO: 4042010 - RNA, 18 nt, Molluscum contagiosum virus
gcggaugcuggcgagcac

SEQ ID NO: 4042011 - RNA, 14 nt, Molluscum contagiosum virus
gcggcaaaggcccg

SEQ ID NO: 4042012 - RNA, 21 nt, Molluscum contagiosum virus
gcggcaaccgcgcccgcgcgc

SEQ ID NO: 4042013 - RNA, 22 nt, Molluscum contagiosum virus
gcggcacacacuugcacgcgca

SEQ ID NO: 4042014 - RNA, 18 nt, Molluscum contagiosum virus
gcggcaccugucgcgcgc

SEQ ID NO: 4042015 - RNA, 23 nt, Molluscum contagiosum virus
gcggcacgccgcucggcacugcu

SEQ ID NO: 4042016 - RNA, 13 nt, Molluscum contagiosum virus
cgcgcaaccagcu

SEQ ID NO: 4042017 - RNA, 21 nt, Molluscum contagiosum virus
cgcgcaaccagcuggcgcccg

SEQ ID NO: 4042018 - RNA, 19 nt, Molluscum contagiosum virus
cgcgcaagaacaaccagac

SEQ ID NO: 4042019 - RNA, 17 nt, Molluscum contagiosum virus
cgcgcaaggccgcgccc

SEQ ID NO: 4042020 - RNA, 18 nt, Molluscum contagiosum virus
cgcgcaaguccagcgcgc

SEQ ID NO: 4042021 - RNA, 16 nt, Molluscum contagiosum virus
cgcgcaagucgcgcgc

SEQ ID NO: 4042022 - RNA, 12 nt, Molluscum contagiosum virus
cgcgcaagugug

SEQ ID NO: 4042023 - RNA, 13 nt, Molluscum contagiosum virus
cgcgcaagugugc

SEQ ID NO: 4042024 - RNA, 12 nt, Molluscum contagiosum virus
cgcgcacaagau

SEQ ID NO: 4042025 - RNA, 14 nt, Molluscum contagiosum virus
cgcgcacgagcugc

SEQ ID NO: 4042026 - RNA, 17 nt, Molluscum contagiosum virus
cgcgcacugccacgcgg

SEQ ID NO: 4042027 - RNA, 20 nt, Molluscum contagiosum virus
cgcgcacugccacgcggagc

SEQ ID NO: 4042028 - RNA, 14 nt, Molluscum contagiosum virus
cgcgcacugcucgc

SEQ ID NO: 4042029 - RNA, 19 nt, Molluscum contagiosum virus
cgcgcacugcucgcgcacg

SEQ ID NO: 4042030 - RNA, 15 nt, Molluscum contagiosum virus
cgcgcagcgcgucuu

SEQ ID NO: 4042031 - RNA, 15 nt, Molluscum contagiosum virus
cgcgcagcugcgccu

SEQ ID NO: 4042032 - RNA, 24 nt, Molluscum contagiosum virus
cgcgcagguugagcgcgcggaugc

SEQ ID NO: 4042033 - RNA, 17 nt, Molluscum contagiosum virus
cgcgcaguucgagcugc

SEQ ID NO: 4042034 - RNA, 22 nt, Molluscum contagiosum virus
cgcgcaguucgagcugcugcgc

SEQ ID NO: 4042035 - RNA, 15 nt, Molluscum contagiosum virus
cgcgcauacgcgccg

SEQ ID NO: 4042036 - RNA, 14 nt, Molluscum contagiosum virus
cgcgcaucugccgc

SEQ ID NO: 4042037 - RNA, 17 nt, Molluscum contagiosum virus
cgcgcaucugccgcgac

SEQ ID NO: 4042038 - RNA, 18 nt, Molluscum contagiosum virus
cgcgcauggagagcguac

SEQ ID NO: 4042039 - RNA, 22 nt, Molluscum contagiosum virus
cgcgccaacacguuuucuuuca

SEQ ID NO: 4042040 - RNA, 22 nt, Molluscum contagiosum virus
cgcgccagcacgcgcucguccg

SEQ ID NO: 4042041 - RNA, 13 nt, Molluscum contagiosum virus
cgcgccagcagcg

SEQ ID NO: 4042042 - RNA, 22 nt, Molluscum contagiosum virus
cgcgccaugguuuccguguccg

SEQ ID NO: 4042043 - RNA, 19 nt, Molluscum contagiosum virus
cgcgcccaccagcagccag

SEQ ID NO: 4042044 - RNA, 17 nt, Molluscum contagiosum virus
cgcgcccagcgccacga

SEQ ID NO: 4042045 - RNA, 21 nt, Molluscum contagiosum virus
cgcgcccaggcgcgcgcucag

SEQ ID NO: 4042046 - RNA, 22 nt, Molluscum contagiosum virus
cgcgcccccgugucggcgaaga

SEQ ID NO: 4042047 - RNA, 14 nt, Molluscum contagiosum virus
cgcgcccgcgcccg

SEQ ID NO: 4042048 - RNA, 17 nt, Molluscum contagiosum virus
cgcgcccgcggcgcacg

SEQ ID NO: 4042049 - RNA, 13 nt, Molluscum contagiosum virus
cgcgcccgcgucg

SEQ ID NO: 4042050 - RNA, 13 nt, Molluscum contagiosum virus
cgcgcccugcacg

SEQ ID NO: 4042051 - RNA, 14 nt, Molluscum contagiosum virus
cgcgcccugcacga

SEQ ID NO: 4042052 - RNA, 14 nt, Molluscum contagiosum virus
cgcgcccugcgcgc

SEQ ID NO: 4042053 - RNA, 18 nt, Molluscum contagiosum virus
cgcgcccuuugcggcacg

SEQ ID NO: 4042054 - RNA, 11 nt, Molluscum contagiosum virus
cgcgccgagua

SEQ ID NO: 4042055 - RNA, 17 nt, Molluscum contagiosum virus
cgcgccgaguacugcug

SEQ ID NO: 4042056 - RNA, 14 nt, Molluscum contagiosum virus
cgcgccgcgccgaa

SEQ ID NO: 4042057 - RNA, 14 nt, Molluscum contagiosum virus
cgcgccgcgcgccg

SEQ ID NO: 4042058 - RNA, 15 nt, Molluscum contagiosum virus
cgcgccgcgcugcug

SEQ ID NO: 4042059 - RNA, 14 nt, Molluscum contagiosum virus
cgcgccgcgcuggc

SEQ ID NO: 4042060 - RNA, 19 nt, Molluscum contagiosum virus
cgcgccgcgggcgcagagc

SEQ ID NO: 4042061 - RNA, 14 nt, Molluscum contagiosum virus
cgcgccgcugcccg

SEQ ID NO: 4042062 - RNA, 20 nt, Molluscum contagiosum virus
cgcgccgcugcccgcgcacg

SEQ ID NO: 4042063 - RNA, 15 nt, Molluscum contagiosum virus
cgcgccgcugcgccg

SEQ ID NO: 4042064 - RNA, 17 nt, Molluscum contagiosum virus
cgcgccgggaaugcugc

SEQ ID NO: 4042065 - RNA, 22 nt, Molluscum contagiosum virus
cgcgccgggaaugcugcgcacg

SEQ ID NO: 4042066 - RNA, 13 nt, Molluscum contagiosum virus
cgcgccgggccgc

SEQ ID NO: 4042067 - RNA, 13 nt, Molluscum contagiosum virus
cgcgccgggcgcc

SEQ ID NO: 4042068 - RNA, 16 nt, Molluscum contagiosum virus
cgcgccucgaacugcu

SEQ ID NO: 4042069 - RNA, 17 nt, Molluscum contagiosum virus
cgcgccucucgaggccg

SEQ ID NO: 4042070 - RNA, 15 nt, Molluscum contagiosum virus
cgcgccugccgccug

SEQ ID NO: 4042071 - RNA, 13 nt, Molluscum contagiosum virus
cgcgccugcucuc

SEQ ID NO: 4042072 - RNA, 23 nt, Molluscum contagiosum virus
cgcgccugucaagacgggcacgc

SEQ ID NO: 4042073 - RNA, 18 nt, Molluscum contagiosum virus
cgcgccuuccgcgcgggc

SEQ ID NO: 4042074 - RNA, 20 nt, Molluscum contagiosum virus
cgcgccuugagcgcgccgcg

SEQ ID NO: 4042075 - RNA, 20 nt, Molluscum contagiosum virus
cgcgcgagaugcgcggacag

SEQ ID NO: 4042076 - RNA, 14 nt, Molluscum contagiosum virus
cgcgcgagcgccgg

SEQ ID NO: 4042077 - RNA, 12 nt, Molluscum contagiosum virus
cgcgcgagcgga

SEQ ID NO: 4042078 - RNA, 13 nt, Molluscum contagiosum virus
cgcgcgagcugcu

SEQ ID NO: 4042079 - RNA, 18 nt, Molluscum contagiosum virus
cgcgcgagggcgcgcugg

SEQ ID NO: 4042080 - RNA, 14 nt, Molluscum contagiosum virus
cguggcgcugggcg

SEQ ID NO: 4042081 - RNA, 19 nt, Molluscum contagiosum virus
cgugggcagcuucugcucg

SEQ ID NO: 4042082 - RNA, 16 nt, Molluscum contagiosum virus
cgugggcgagcgcacg

SEQ ID NO: 4042083 - RNA, 22 nt, Molluscum contagiosum virus
cguggugcuuacugcgggcugc

SEQ ID NO: 4042084 - RNA, 22 nt, Molluscum contagiosum virus
cguguacaugaugcccugguga

SEQ ID NO: 4042085 - RNA, 23 nt, Molluscum contagiosum virus
cguguacaugcucaagcaccugc

SEQ ID NO: 4042086 - RNA, 16 nt, Molluscum contagiosum virus
cguguacgagaaguuc

SEQ ID NO: 4042087 - RNA, 17 nt, Molluscum contagiosum virus
cgugucaagcggcacgu

SEQ ID NO: 4042088 - RNA, 21 nt, Molluscum contagiosum virus
cgugucacaauggcacuagcc

SEQ ID NO: 4042089 - RNA, 13 nt, Molluscum contagiosum virus
cgugucgcggagc

SEQ ID NO: 4042090 - RNA, 22 nt, Molluscum contagiosum virus
cgugucuggagcccacguugcc

SEQ ID NO: 4042091 - RNA, 15 nt, Molluscum contagiosum virus
cguguuggcuucugc

SEQ ID NO: 4042092 - RNA, 13 nt, Molluscum contagiosum virus
cguucaccuuggc

SEQ ID NO: 4042093 - RNA, 16 nt, Molluscum contagiosum virus
cguucccaagcaaagc

SEQ ID NO: 4042094 - RNA, 16 nt, Molluscum contagiosum virus
cguuccgggcccgggc

SEQ ID NO: 4042095 - RNA, 17 nt, Molluscum contagiosum virus
cguucgacggcuggugu

SEQ ID NO: 4042096 - RNA, 17 nt, Molluscum contagiosum virus
cguucgcgcgccaguac

SEQ ID NO: 4042097 - RNA, 17 nt, Molluscum contagiosum virus
cguugcacgugcgugcc

SEQ ID NO: 4042098 - RNA, 16 nt, Molluscum contagiosum virus
cguugccgagcgagca

SEQ ID NO: 4042099 - RNA, 16 nt, Molluscum contagiosum virus
cguugccgcgcgcugc

SEQ ID NO: 4042100 - RNA, 13 nt, Molluscum contagiosum virus
cguugcugcugcg

SEQ ID NO: 4042101 - RNA, 13 nt, Molluscum contagiosum virus
cguuggcgcgccc

SEQ ID NO: 4042102 - RNA, 14 nt, Molluscum contagiosum virus
cguuggcgcgcccg

SEQ ID NO: 4042103 - RNA, 11 nt, Molluscum contagiosum virus
cguugucuuua

SEQ ID NO: 4042104 - RNA, 14 nt, Molluscum contagiosum virus
cguugugcuccuug

SEQ ID NO: 4042105 - RNA, 14 nt, Molluscum contagiosum virus
cguuugucgcgggc

SEQ ID NO: 4042106 - RNA, 21 nt, Molluscum contagiosum virus
cuaaauaaugaaccugcacgc

SEQ ID NO: 4042107 - RNA, 17 nt, Molluscum contagiosum virus
cuacacauuccucggcg

SEQ ID NO: 4042108 - RNA, 17 nt, Molluscum contagiosum virus
cuacagcagccgcagcc

SEQ ID NO: 4042109 - RNA, 15 nt, Molluscum contagiosum virus
cuacagcgcgcugca

SEQ ID NO: 4042110 - RNA, 23 nt, Molluscum contagiosum virus
cuacagcgcgcugcacaccgagc

SEQ ID NO: 4042111 - RNA, 20 nt, Molluscum contagiosum virus
cuaccacgggcccgcgcgug

SEQ ID NO: 4042112 - RNA, 16 nt, Molluscum contagiosum virus
cuaccacgucggcgag

SEQ ID NO: 4042113 - RNA, 14 nt, Molluscum contagiosum virus
cuaccgucgccggu

SEQ ID NO: 4042114 - RNA, 23 nt, Molluscum contagiosum virus
cuaccugcgcaagcucagccucu

SEQ ID NO: 4042115 - RNA, 18 nt, Molluscum contagiosum virus
cuaccuggcggcgcugga

SEQ ID NO: 4042116 - RNA, 21 nt, Molluscum contagiosum virus
cuaccuggcggcgcuggagac

SEQ ID NO: 4042117 - RNA, 18 nt, Molluscum contagiosum virus
cuaccuggugcuggggcu

SEQ ID NO: 4042118 - RNA, 19 nt, Molluscum contagiosum virus
cuaccugguggagcacuuc

SEQ ID NO: 4042119 - RNA, 19 nt, Molluscum contagiosum virus
cuacgacaugcucgcgcuc

SEQ ID NO: 4042120 - RNA, 13 nt, Molluscum contagiosum virus
cuacgagcagcgc

SEQ ID NO: 4042121 - RNA, 23 nt, Molluscum contagiosum virus
cuacgaggccuacgugcugcgca

SEQ ID NO: 4042122 - RNA, 20 nt, Molluscum contagiosum virus
cuacgcaagcugaggcgugc

SEQ ID NO: 4042123 - RNA, 13 nt, Molluscum contagiosum virus
cuacgcagcgcgc

SEQ ID NO: 4042124 - RNA, 13 nt, Molluscum contagiosum virus
cuacgcgcgcgug

SEQ ID NO: 4042125 - RNA, 15 nt, Molluscum contagiosum virus
cuacgcgcugcuaga

SEQ ID NO: 4042126 - RNA, 21 nt, Molluscum contagiosum virus
cuacggcgaguucugccggcu

SEQ ID NO: 4042127 - RNA, 21 nt, Molluscum contagiosum virus
cuacguguccgcauccgccuu

SEQ ID NO: 4042128 - RNA, 20 nt, Molluscum contagiosum virus
cuacugcgcgcacugcucgc

SEQ ID NO: 4042129 - RNA, 17 nt, Molluscum contagiosum virus
cuacuucgaggccggca

SEQ ID NO: 4042130 - RNA, 20 nt, Molluscum contagiosum virus
cuagaagaccacauccuuga

SEQ ID NO: 4042131 - RNA, 15 nt, Molluscum contagiosum virus
cuagacaaggggcca

SEQ ID NO: 4042132 - RNA, 20 nt, Molluscum contagiosum virus
cuagacacgagcgcggcaac

SEQ ID NO: 4042133 - RNA, 14 nt, Molluscum contagiosum virus
cuagacuggagcac

SEQ ID NO: 4042134 - RNA, 21 nt, Molluscum contagiosum virus
cuagagcuggcaccgggcgcc

SEQ ID NO: 4042135 - RNA, 20 nt, Molluscum contagiosum virus
cuagaguacuagguggcaug

SEQ ID NO: 4042136 - RNA, 18 nt, Molluscum contagiosum virus
cuagcaccgcaugggccc

SEQ ID NO: 4042137 - RNA, 19 nt, Molluscum contagiosum virus
cuagcagcgugcgcaccag

SEQ ID NO: 4042138 - RNA, 13 nt, Molluscum contagiosum virus
cuagccccagcac

SEQ ID NO: 4042139 - RNA, 16 nt, Molluscum contagiosum virus
cuagccccagcaccag

SEQ ID NO: 4042140 - RNA, 16 nt, Molluscum contagiosum virus
cuagcucugcgcgcgg

SEQ ID NO: 4042141 - RNA, 14 nt, Molluscum contagiosum virus
cuaggccucagccg

SEQ ID NO: 4042142 - RNA, 17 nt, Molluscum contagiosum virus
cuagugcacgcccuuau

SEQ ID NO: 4042143 - RNA, 19 nt, Molluscum contagiosum virus
cuagugcagaugaggcugc

SEQ ID NO: 4042144 - RNA, 18 nt, Molluscum contagiosum virus
cuagugcgcgccaagaac

SEQ ID NO: 4042145 - RNA, 15 nt, Molluscum contagiosum virus
cuagugcugcugggc

SEQ ID NO: 4042146 - RNA, 19 nt, Molluscum contagiosum virus
cuaguggcaagggccugcg

SEQ ID NO: 4042147 - RNA, 13 nt, Molluscum contagiosum virus
cuauugcgcggcg

SEQ ID NO: 4042148 - RNA, 16 nt, Molluscum contagiosum virus
cucaacaagcugcugg

SEQ ID NO: 4042149 - RNA, 14 nt, Molluscum contagiosum virus
cucaagcacugccu

SEQ ID NO: 4042150 - RNA, 16 nt, Molluscum contagiosum virus
cucaccuuccugggcg

SEQ ID NO: 4042151 - RNA, 12 nt, Molluscum contagiosum virus
cucacgcccucu

SEQ ID NO: 4042152 - RNA, 17 nt, Molluscum contagiosum virus
cucacgcuucguggcca

SEQ ID NO: 4042153 - RNA, 16 nt, Molluscum contagiosum virus
cucacggcgagcgcgc

SEQ ID NO: 4042154 - RNA, 13 nt, Molluscum contagiosum virus
cucacggcugugg

SEQ ID NO: 4042155 - RNA, 14 nt, Molluscum contagiosum virus
cucacugcagcagc

SEQ ID NO: 4042156 - RNA, 16 nt, Molluscum contagiosum virus
cucagcacgcgcacag

SEQ ID NO: 4042157 - RNA, 13 nt, Molluscum contagiosum virus
cucagcaggcugu

SEQ ID NO: 4042158 - RNA, 20 nt, Molluscum contagiosum virus
cucagcggcacugcgcgcau

SEQ ID NO: 4042159 - RNA, 22 nt, Molluscum contagiosum virus
cucagcggcacugcgcgcaugc

SEQ ID NO: 4042160 - RNA, 14 nt, Molluscum contagiosum virus
cucauagcgccacg

SEQ ID NO: 4042161 - RNA, 15 nt, Molluscum contagiosum virus
cucauccucccugcg

SEQ ID NO: 4042162 - RNA, 17 nt, Molluscum contagiosum virus
cuccaacguuuucggcu

SEQ ID NO: 4042163 - RNA, 15 nt, Molluscum contagiosum virus
cuccaagaagaggcc

SEQ ID NO: 4042164 - RNA, 18 nt, Molluscum contagiosum virus
cuccaagaagaggccagc

SEQ ID NO: 4042165 - RNA, 22 nt, Molluscum contagiosum virus
cuccaagaagaggccagcacaa

SEQ ID NO: 4042166 - RNA, 12 nt, Molluscum contagiosum virus
cuccaaggaggu

SEQ ID NO: 4042167 - RNA, 16 nt, Molluscum contagiosum virus
cuccacgcgcagcuuc

SEQ ID NO: 4042168 - RNA, 19 nt, Molluscum contagiosum virus
cuccacgcugcguucgagc

SEQ ID NO: 4042169 - RNA, 20 nt, Molluscum contagiosum virus
cuccacgcugcguucgagcu

SEQ ID NO: 4042170 - RNA, 18 nt, Molluscum contagiosum virus
cuccagaaucgcuuugcc

SEQ ID NO: 4042171 - RNA, 13 nt, Molluscum contagiosum virus
cuccaggaacgcg

SEQ ID NO: 4042172 - RNA, 17 nt, Molluscum contagiosum virus
cuccaggaacgcgccgc

SEQ ID NO: 4042173 - RNA, 16 nt, Molluscum contagiosum virus
cuccaugagguacucc

SEQ ID NO: 4042174 - RNA, 13 nt, Molluscum contagiosum virus
cuccaugcugccg

SEQ ID NO: 4042175 - RNA, 13 nt, Molluscum contagiosum virus
cucccagcagcgu

SEQ ID NO: 4042176 - RNA, 14 nt, Molluscum contagiosum virus
cucccgucgagcac

SEQ ID NO: 4042177 - RNA, 13 nt, Molluscum contagiosum virus
cucccugcgggcg

SEQ ID NO: 4042178 - RNA, 19 nt, Molluscum contagiosum virus
cuccgacgugcugcgcaac

SEQ ID NO: 4042179 - RNA, 22 nt, Molluscum contagiosum virus
cuccgagcgcgcgcgcugcugg

SEQ ID NO: 4042180 - RNA, 13 nt, Molluscum contagiosum virus
cuccgaggcaggu

SEQ ID NO: 4042181 - RNA, 16 nt, Molluscum contagiosum virus
cuccgagucgcgccuc

SEQ ID NO: 4042182 - RNA, 14 nt, Molluscum contagiosum virus
cuccgcacacgcgc

SEQ ID NO: 4042183 - RNA, 15 nt, Molluscum contagiosum virus
cuccgcacacgcgcg

SEQ ID NO: 4042184 - RNA, 22 nt, Molluscum contagiosum virus
cuccgcacacgcgcgcgugcug

SEQ ID NO: 4042185 - RNA, 21 nt, Molluscum contagiosum virus
aaaaagcugucgcgcagcagc

SEQ ID NO: 4042186 - RNA, 17 nt, Molluscum contagiosum virus
aaaacacaaaaauaagu

SEQ ID NO: 4042187 - RNA, 18 nt, Molluscum contagiosum virus
aaaacgcgcggcagcagc

SEQ ID NO: 4042188 - RNA, 21 nt, Molluscum contagiosum virus
aaaagcaaguaccagccgcug

SEQ ID NO: 4042189 - RNA, 17 nt, Molluscum contagiosum virus
aaacacgcuacgcagcg

SEQ ID NO: 4042190 - RNA, 14 nt, Molluscum contagiosum virus
aaacgcacuguguu

SEQ ID NO: 4042191 - RNA, 23 nt, Molluscum contagiosum virus
aaacguguuggcgcgguccgcgu

SEQ ID NO: 4042192 - RNA, 17 nt, Molluscum contagiosum virus
aaacuccguacagcucc

SEQ ID NO: 4042193 - RNA, 14 nt, Molluscum contagiosum virus
aaacugcauccugg

SEQ ID NO: 4042194 - RNA, 15 nt, Molluscum contagiosum virus
aaacugugcuccuga

SEQ ID NO: 4042195 - RNA, 22 nt, Molluscum contagiosum virus
aaagacgagcugugcgagccag

SEQ ID NO: 4042196 - RNA, 23 nt, Molluscum contagiosum virus
aaagacgagcugugcgagccagu

SEQ ID NO: 4042197 - RNA, 22 nt, Molluscum contagiosum virus
aaagacggacccgcgaacgagg

SEQ ID NO: 4042198 - RNA, 15 nt, Molluscum contagiosum virus
aaagagcguccagcc

SEQ ID NO: 4042199 - RNA, 15 nt, Molluscum contagiosum virus
aaagaggccugcuga

SEQ ID NO: 4042200 - RNA, 19 nt, Molluscum contagiosum virus
aaagcccuccugagaagca

SEQ ID NO: 4042201 - RNA, 14 nt, Molluscum contagiosum virus
aaagcgcacacuug

SEQ ID NO: 4042202 - RNA, 22 nt, Molluscum contagiosum virus
aaagcugcuggcggagacacuc

SEQ ID NO: 4042203 - RNA, 18 nt, Molluscum contagiosum virus
aaagguacccgcaggaaa

SEQ ID NO: 4042204 - RNA, 18 nt, Molluscum contagiosum virus
aaaucuguucgagcaaca

SEQ ID NO: 4042205 - RNA, 12 nt, Molluscum contagiosum virus
aaaugcgcugcu

SEQ ID NO: 4042206 - RNA, 20 nt, Molluscum contagiosum virus
aaaugguguacgaaaguacu

SEQ ID NO: 4042207 - RNA, 12 nt, Molluscum contagiosum virus
aacaagcugcug

SEQ ID NO: 4042208 - RNA, 21 nt, Molluscum contagiosum virus
aacaaggaaaggcacccgcag

SEQ ID NO: 4042209 - RNA, 23 nt, Molluscum contagiosum virus
aacaaguuccccgugagcgcgcu

SEQ ID NO: 4042210 - RNA, 21 nt, Molluscum contagiosum virus
aacaccagcgugcccuucucc

SEQ ID NO: 4042211 - RNA, 17 nt, Molluscum contagiosum virus
aacacugacgcucgggc

SEQ ID NO: 4042212 - RNA, 20 nt, Molluscum contagiosum virus
aacacugacgcucgggccgg

SEQ ID NO: 4042213 - RNA, 17 nt, Molluscum contagiosum virus
aacagagaaaggcaccc

SEQ ID NO: 4042214 - RNA, 22 nt, Molluscum contagiosum virus
aacagagaaaggcacccaccag

SEQ ID NO: 4042215 - RNA, 15 nt, Molluscum contagiosum virus
aacagcgcaagcuga

SEQ ID NO: 4042216 - RNA, 12 nt, Molluscum contagiosum virus
aacagucgcgcg

SEQ ID NO: 4042217 - RNA, 14 nt, Molluscum contagiosum virus
aaccacagcucucc

SEQ ID NO: 4042218 - RNA, 17 nt, Molluscum contagiosum virus
aaccuacuugcucgugu

SEQ ID NO: 4042219 - RNA, 23 nt, Molluscum contagiosum virus
aaccucugagcgagcgcaguugu

SEQ ID NO: 4042220 - RNA, 17 nt, Molluscum contagiosum virus
aaccugggcgccgcgcu

SEQ ID NO: 4042221 - RNA, 11 nt, Molluscum contagiosum virus
aacgaccucaa

SEQ ID NO: 4042222 - RNA, 12 nt, Molluscum contagiosum virus
aacgagggaugc

SEQ ID NO: 4042223 - RNA, 21 nt, Molluscum contagiosum virus
aacgcaaguacaacccaaaca

SEQ ID NO: 4042224 - RNA, 17 nt, Molluscum contagiosum virus
aacgcgagacgggcacg

SEQ ID NO: 4042225 - RNA, 18 nt, Molluscum contagiosum virus
aacgcgcgcgugcugucc

SEQ ID NO: 4042226 - RNA, 15 nt, Molluscum contagiosum virus
aacgcgcgugcgcgu

SEQ ID NO: 4042227 - RNA, 19 nt, Molluscum contagiosum virus
aacguagacagugcggcgc

SEQ ID NO: 4042228 - RNA, 15 nt, Molluscum contagiosum virus
aacgucgcacuggcc

SEQ ID NO: 4042229 - RNA, 19 nt, Molluscum contagiosum virus
aacgugcugcgccgccugc

SEQ ID NO: 4042230 - RNA, 20 nt, Molluscum contagiosum virus
aacgugggcaccugcaucgc

SEQ ID NO: 4042231 - RNA, 23 nt, Molluscum contagiosum virus
aacuaagcuaaaagagcugcugc

SEQ ID NO: 4042232 - RNA, 17 nt, Molluscum contagiosum virus
aacucacggaugcgcgc

SEQ ID NO: 4042233 - RNA, 19 nt, Molluscum contagiosum virus
aacucggcuucugcugcac

SEQ ID NO: 4042234 - RNA, 20 nt, Molluscum contagiosum virus
aacucuccgacgugcugcgc

SEQ ID NO: 4042235 - RNA, 21 nt, Molluscum contagiosum virus
aagaacagucgcgcgccugcc

SEQ ID NO: 4042236 - RNA, 21 nt, Molluscum contagiosum virus
aagaagcagcagaccaagaag

SEQ ID NO: 4042237 - RNA, 15 nt, Molluscum contagiosum virus
aagaagcccaaggag

SEQ ID NO: 4042238 - RNA, 14 nt, Molluscum contagiosum virus
aagaccaccagcac

SEQ ID NO: 4042239 - RNA, 15 nt, Molluscum contagiosum virus
aagacgggcccgcga

SEQ ID NO: 4042240 - RNA, 15 nt, Molluscum contagiosum virus
aagacggggccgcga

SEQ ID NO: 4042241 - RNA, 16 nt, Molluscum contagiosum virus
aagacuggcucagaac

SEQ ID NO: 4042242 - RNA, 20 nt, Molluscum contagiosum virus
aagagcacgaugcccagcag

SEQ ID NO: 4042243 - RNA, 19 nt, Molluscum contagiosum virus
aagauacuuccgguguccc

SEQ ID NO: 4042244 - RNA, 15 nt, Molluscum contagiosum virus
aagauccaagcgcaa

SEQ ID NO: 4042245 - RNA, 14 nt, Molluscum contagiosum virus
aagcacugccucau

SEQ ID NO: 4042246 - RNA, 17 nt, Molluscum contagiosum virus
aagcauggucuucgcgc

SEQ ID NO: 4042247 - RNA, 17 nt, Molluscum contagiosum virus
aagccaccgcgcaggac

SEQ ID NO: 4042248 - RNA, 17 nt, Molluscum contagiosum virus
aagcccggaagcuugcu

SEQ ID NO: 4042249 - RNA, 21 nt, Molluscum contagiosum virus
aagcgccgcucgguacaacuu

SEQ ID NO: 4042250 - RNA, 23 nt, Molluscum contagiosum virus
aagcgccggcgaccagcucuugg

SEQ ID NO: 4042251 - RNA, 13 nt, Molluscum contagiosum virus
aagcgcgucugca

SEQ ID NO: 4042252 - RNA, 16 nt, Molluscum contagiosum virus
aagcuaaaagagcugc

SEQ ID NO: 4042253 - RNA, 15 nt, Molluscum contagiosum virus
aagcucaagcccggc

SEQ ID NO: 4042254 - RNA, 23 nt, Molluscum contagiosum virus
aagcucgcgcugcugacacgcuc

SEQ ID NO: 4042255 - RNA, 23 nt, Molluscum contagiosum virus
aagcugcucaucggcgagcucuu

SEQ ID NO: 4042256 - RNA, 23 nt, Molluscum contagiosum virus
aagcuggcgggugccgugccccu

SEQ ID NO: 4042257 - RNA, 18 nt, Molluscum contagiosum virus
aagcuucgggccgcugcc

SEQ ID NO: 4042258 - RNA, 21 nt, Molluscum contagiosum virus
aaggagcccgucuacauuuug

SEQ ID NO: 4042259 - RNA, 19 nt, Molluscum contagiosum virus
aaggauuuaaauggcgcgc

SEQ ID NO: 4042260 - RNA, 12 nt, Molluscum contagiosum virus
aaggcacacccc

SEQ ID NO: 4042261 - RNA, 16 nt, Molluscum contagiosum virus
aaggcacccgcaggaa

SEQ ID NO: 4042262 - RNA, 17 nt, Molluscum contagiosum virus
aaggcacccgcaggaaa

SEQ ID NO: 4042263 - RNA, 20 nt, Molluscum contagiosum virus
aaggcacccgcaggaaaggc

SEQ ID NO: 4042264 - RNA, 17 nt, Molluscum contagiosum virus
aaggcaccugcaggaaa

SEQ ID NO: 4042265 - RNA, 19 nt, Molluscum contagiosum virus
aaggcgguggcggcucugc

SEQ ID NO: 4042266 - RNA, 16 nt, Molluscum contagiosum virus
aaggcgugcgccgugc

SEQ ID NO: 4042267 - RNA, 16 nt, Molluscum contagiosum virus
aagggcggucccgcga

SEQ ID NO: 4042268 - RNA, 17 nt, Molluscum contagiosum virus
aagguaccccgcaggaa

SEQ ID NO: 4042269 - RNA, 12 nt, Molluscum contagiosum virus
aagguggggcgc

SEQ ID NO: 4042270 - RNA, 19 nt, Molluscum contagiosum virus
aaguacaacccaaacaugu

SEQ ID NO: 4042271 - RNA, 14 nt, Molluscum contagiosum virus
aaguaccagccgcu

SEQ ID NO: 4042272 - RNA, 13 nt, Molluscum contagiosum virus
aagucgaagaggg

SEQ ID NO: 4042273 - RNA, 14 nt, Molluscum contagiosum virus
aagucgaagagggu

SEQ ID NO: 4042274 - RNA, 20 nt, Molluscum contagiosum virus
aaguuguuccggugaaaauc

SEQ ID NO: 4042275 - RNA, 13 nt, Molluscum contagiosum virus
aaugcgcaaggcc

SEQ ID NO: 4042276 - RNA, 22 nt, Molluscum contagiosum virus
aaugcgguucacuagcgcaggc

SEQ ID NO: 4042277 - RNA, 17 nt, Molluscum contagiosum virus
aaugcugccguguacgu

SEQ ID NO: 4042278 - RNA, 21 nt, Molluscum contagiosum virus
aauggccuugcgagcgcugcc

SEQ ID NO: 4042279 - RNA, 18 nt, Molluscum contagiosum virus
aauggggcaaacgcugac

SEQ ID NO: 4042280 - RNA, 16 nt, Molluscum contagiosum virus
aauguguacgacgcgc

SEQ ID NO: 4042281 - RNA, 20 nt, Molluscum contagiosum virus
acaacuacuucgaggccggc

SEQ ID NO: 4042282 - RNA, 11 nt, Molluscum contagiosum virus
acaacuuuucc

SEQ ID NO: 4042283 - RNA, 23 nt, Molluscum contagiosum virus
acaagcagccgcaguaccaguac

SEQ ID NO: 4042284 - RNA, 11 nt, Molluscum contagiosum virus
acaagcugcac

SEQ ID NO: 4042285 - RNA, 19 nt, Molluscum contagiosum virus
acaagcugcaccggcgcga

SEQ ID NO: 4042286 - RNA, 20 nt, Molluscum contagiosum virus
acaaggagggagagcugccc

SEQ ID NO: 4042287 - RNA, 16 nt, Molluscum contagiosum virus
acaaggugcuguccuu

SEQ ID NO: 4042288 - RNA, 21 nt, Molluscum contagiosum virus
acaaucucgccggcuguaaau

SEQ ID NO: 4042289 - RNA, 15 nt, Molluscum contagiosum virus
acacccgugcccgcu

SEQ ID NO: 4042290 - RNA, 23 nt, Molluscum contagiosum virus
acacgacgacggcugcucgcugc

SEQ ID NO: 4042291 - RNA, 15 nt, Molluscum contagiosum virus
acacgcacuggcgcu

SEQ ID NO: 4042292 - RNA, 13 nt, Molluscum contagiosum virus
acacgcgcggcgg

SEQ ID NO: 4042293 - RNA, 16 nt, Molluscum contagiosum virus
acacgcgcggcggaga

SEQ ID NO: 4042294 - RNA, 19 nt, Molluscum contagiosum virus
acacguugcagcagcacag

SEQ ID NO: 4042295 - RNA, 21 nt, Molluscum contagiosum virus
acacucacgcguccacaaaga

SEQ ID NO: 4042296 - RNA, 21 nt, Molluscum contagiosum virus
acacucgcgcguccgcaaaga

SEQ ID NO: 4042297 - RNA, 21 nt, Molluscum contagiosum virus
acagacgaugacgaggagcug

SEQ ID NO: 4042298 - RNA, 17 nt, Molluscum contagiosum virus
acagagaaaggcaccca

SEQ ID NO: 4042299 - RNA, 20 nt, Molluscum contagiosum virus
acagagaaaggcacccacca

SEQ ID NO: 4042300 - RNA, 12 nt, Molluscum contagiosum virus
acagagcccgcg

SEQ ID NO: 4042301 - RNA, 16 nt, Molluscum contagiosum virus
acagcaagcagcgcgc

SEQ ID NO: 4042302 - RNA, 19 nt, Molluscum contagiosum virus
acagcaggagcacgccugg

SEQ ID NO: 4042303 - RNA, 15 nt, Molluscum contagiosum virus
acagccccugcugcu

SEQ ID NO: 4042304 - RNA, 15 nt, Molluscum contagiosum virus
acagccgccugccgc

SEQ ID NO: 4042305 - RNA, 21 nt, Molluscum contagiosum virus
acagcguguucggggccgcga

SEQ ID NO: 4042306 - RNA, 14 nt, Molluscum contagiosum virus
acagcucuucgucu

SEQ ID NO: 4042307 - RNA, 12 nt, Molluscum contagiosum virus
acagcuuccugg

SEQ ID NO: 4042308 - RNA, 19 nt, Molluscum contagiosum virus
acaggcgcggcagccgcag

SEQ ID NO: 4042309 - RNA, 22 nt, Molluscum contagiosum virus
acagguagugguccaccagcug

SEQ ID NO: 4042310 - RNA, 20 nt, Molluscum contagiosum virus
acagugcggcgcggcugcuc

SEQ ID NO: 4042311 - RNA, 15 nt, Molluscum contagiosum virus
acaucuaugcacggc

SEQ ID NO: 4042312 - RNA, 17 nt, Molluscum contagiosum virus
acaugaccaagcacauu

SEQ ID NO: 4042313 - RNA, 23 nt, Molluscum contagiosum virus
acaugcacacucacgcguccaca

SEQ ID NO: 4042314 - RNA, 20 nt, Molluscum contagiosum virus
acaugcgcacgcgcgucaug

SEQ ID NO: 4042315 - RNA, 16 nt, Molluscum contagiosum virus
acaugcgugcuagccc

SEQ ID NO: 4042316 - RNA, 21 nt, Molluscum contagiosum virus
acaugcucaagcaccugcgcu

SEQ ID NO: 4042317 - RNA, 23 nt, Molluscum contagiosum virus
acauggacgugcugcuggcccug

SEQ ID NO: 4042318 - RNA, 17 nt, Molluscum contagiosum virus
acauggagcgcaucaug

SEQ ID NO: 4042319 - RNA, 13 nt, Molluscum contagiosum virus
acauguccaagaa

SEQ ID NO: 4042320 - RNA, 16 nt, Molluscum contagiosum virus
acauugccuuuugcac

SEQ ID NO: 4042321 - RNA, 17 nt, Molluscum contagiosum virus
acauugcugcugcaggc

SEQ ID NO: 4042322 - RNA, 15 nt, Molluscum contagiosum virus
accaagaagcccgag

SEQ ID NO: 4042323 - RNA, 14 nt, Molluscum contagiosum virus
accacgugcgcugg

SEQ ID NO: 4042324 - RNA, 14 nt, Molluscum contagiosum virus
accagauguucucg

SEQ ID NO: 4042325 - RNA, 12 nt, Molluscum contagiosum virus
accagcagccag

SEQ ID NO: 4042326 - RNA, 14 nt, Molluscum contagiosum virus
accaggaacaggga

SEQ ID NO: 4042327 - RNA, 20 nt, Molluscum contagiosum virus
accaugcucucgcugcugcc

SEQ ID NO: 4042328 - RNA, 21 nt, Molluscum contagiosum virus
accaugcucucgcugcugccc

SEQ ID NO: 4042329 - RNA, 22 nt, Molluscum contagiosum virus
accccagugcgagaucgacugc

SEQ ID NO: 4042330 - RNA, 21 nt, Molluscum contagiosum virus
accccgaaaggcacccgcagg

SEQ ID NO: 4042331 - RNA, 13 nt, Molluscum contagiosum virus
accccgagggcgc

SEQ ID NO: 4042332 - RNA, 10 nt, Molluscum contagiosum virus
accccgccgc

SEQ ID NO: 4042333 - RNA, 22 nt, Molluscum contagiosum virus
acccgcgcucgacgcgugcaug

SEQ ID NO: 4042334 - RNA, 21 nt, Molluscum contagiosum virus
acccgcggcucucgcggcccu

SEQ ID NO: 4042335 - RNA, 15 nt, Molluscum contagiosum virus
acccgugcgcgcgcu

SEQ ID NO: 4042336 - RNA, 15 nt, Molluscum contagiosum virus
accgaucccggccgc

SEQ ID NO: 4042337 - RNA, 14 nt, Molluscum contagiosum virus
accgcaccgagccc

SEQ ID NO: 4042338 - RNA, 20 nt, Molluscum contagiosum virus
accgccguacccggggagaa

SEQ ID NO: 4042339 - RNA, 22 nt, Molluscum contagiosum virus
accgcgagcgcaugcgcgccgc

SEQ ID NO: 4042340 - RNA, 21 nt, Molluscum contagiosum virus
accgcgcgaacgaggagggca

SEQ ID NO: 4042341 - RNA, 21 nt, Molluscum contagiosum virus
accgcgcgcgcaagcgccgcu

SEQ ID NO: 4042342 - RNA, 21 nt, Molluscum contagiosum virus
accgcggacuccuuucggugg

SEQ ID NO: 4042343 - RNA, 13 nt, Molluscum contagiosum virus
accgcgugcgugc

SEQ ID NO: 4042344 - RNA, 16 nt, Molluscum contagiosum virus
accgcuagagugcgcg

SEQ ID NO: 4042345 - RNA, 19 nt, Molluscum contagiosum virus
accggagacaccagcuccg

SEQ ID NO: 4042346 - RNA, 20 nt, Molluscum contagiosum virus
accggcaagcuucgggccgc

SEQ ID NO: 4042347 - RNA, 13 nt, Molluscum contagiosum virus
accgggcgccgcg

SEQ ID NO: 4042348 - RNA, 12 nt, Molluscum contagiosum virus
accgggcucucg

SEQ ID NO: 4042349 - RNA, 21 nt, Molluscum contagiosum virus
accguacucgcguccgcgcag

SEQ ID NO: 4042350 - RNA, 20 nt, Molluscum contagiosum virus
accgucaaccugcugccucc

SEQ ID NO: 4042351 - RNA, 21 nt, Molluscum contagiosum virus
accgugcccuggaccuccauc

SEQ ID NO: 4042352 - RNA, 19 nt, Molluscum contagiosum virus
accuacaugaguuucuggu

SEQ ID NO: 4042353 - RNA, 14 nt, Molluscum contagiosum virus
accuagagcacgaa

SEQ ID NO: 4042354 - RNA, 18 nt, Molluscum contagiosum virus
accucaccgcgcacaucu

SEQ ID NO: 4042355 - RNA, 13 nt, Molluscum contagiosum virus
accuccuucgcgu

SEQ ID NO: 4042356 - RNA, 18 nt, Molluscum contagiosum virus
accucgagaagaccuguu

SEQ ID NO: 4042357 - RNA, 14 nt, Molluscum contagiosum virus
accucgcgcgccgc

SEQ ID NO: 4042358 - RNA, 13 nt, Molluscum contagiosum virus
accucgcgcuucc

SEQ ID NO: 4042359 - RNA, 18 nt, Molluscum contagiosum virus
accucugagcgagcgcag

SEQ ID NO: 4042360 - RNA, 18 nt, Molluscum contagiosum virus
accucuuucucgcgccgu

SEQ ID NO: 4042361 - RNA, 22 nt, Molluscum contagiosum virus
accugauuuucccgggcggcgc

SEQ ID NO: 4042362 - RNA, 23 nt, Molluscum contagiosum virus
accugcaggaaaggcacccgcag

SEQ ID NO: 4042363 - RNA, 22 nt, Molluscum contagiosum virus
accugcaggcucuaagcgcacg

SEQ ID NO: 4042364 - RNA, 20 nt, Molluscum contagiosum virus
accugcgacagcugcugcuc

SEQ ID NO: 4042365 - RNA, 14 nt, Molluscum contagiosum virus
ugacgagcgcgugc

SEQ ID NO: 4042366 - RNA, 14 nt, Molluscum contagiosum virus
ugacgccgcgcgcg

SEQ ID NO: 4042367 - RNA, 16 nt, Molluscum contagiosum virus
ugacgcgcggcggcgc

SEQ ID NO: 4042368 - RNA, 14 nt, Molluscum contagiosum virus
ugacggcagcaagc

SEQ ID NO: 4042369 - RNA, 15 nt, Molluscum contagiosum virus
ugacucggacacugg

SEQ ID NO: 4042370 - RNA, 21 nt, Molluscum contagiosum virus
ugacugugucgacuucaccuu

SEQ ID NO: 4042371 - RNA, 13 nt, Molluscum contagiosum virus
ugagagcaaagaa

SEQ ID NO: 4042372 - RNA, 20 nt, Molluscum contagiosum virus
ugagcaagcugcaagccagc

SEQ ID NO: 4042373 - RNA, 17 nt, Molluscum contagiosum virus
ugagcccagaacauguc

SEQ ID NO: 4042374 - RNA, 14 nt, Molluscum contagiosum virus
ugagcgcgcugcgc

SEQ ID NO: 4042375 - RNA, 18 nt, Molluscum contagiosum virus
ugagcuagugccgagcuc

SEQ ID NO: 4042376 - RNA, 21 nt, Molluscum contagiosum virus
ugagcucuuuguacacccgug

SEQ ID NO: 4042377 - RNA, 21 nt, Molluscum contagiosum virus
ugaggaggccaacgccagcug

SEQ ID NO: 4042378 - RNA, 22 nt, Molluscum contagiosum virus
ugaggaggccaacgccagcugu

SEQ ID NO: 4042379 - RNA, 18 nt, Molluscum contagiosum virus
ugaggaggcggcacugcu

SEQ ID NO: 4042380 - RNA, 13 nt, Molluscum contagiosum virus
ugagugcgcgcac

SEQ ID NO: 4042381 - RNA, 15 nt, Molluscum contagiosum virus
ugagugcgggucaca

SEQ ID NO: 4042382 - RNA, 16 nt, Molluscum contagiosum virus
ugaucaccgaggagcc

SEQ ID NO: 4042383 - RNA, 20 nt, Molluscum contagiosum virus
ugaucgcgcaggcgcgccau

SEQ ID NO: 4042384 - RNA, 13 nt, Molluscum contagiosum virus
ugaugcuuuuguu

SEQ ID NO: 4042385 - RNA, 14 nt, Molluscum contagiosum virus
ugauuugcgcacca

SEQ ID NO: 4042386 - RNA, 18 nt, Molluscum contagiosum virus
ugcaacgcaggacacugu

SEQ ID NO: 4042387 - RNA, 21 nt, Molluscum contagiosum virus
ugcaacucgcgcugcagcacc

SEQ ID NO: 4042388 - RNA, 22 nt, Molluscum contagiosum virus
ugcaagcacaacgggcucgugc

SEQ ID NO: 4042389 - RNA, 15 nt, Molluscum contagiosum virus
ugcaagcccagcagc

SEQ ID NO: 4042390 - RNA, 13 nt, Molluscum contagiosum virus
ugcaaggagguca

SEQ ID NO: 4042391 - RNA, 14 nt, Molluscum contagiosum virus
ugcaaggcgcgcgc

SEQ ID NO: 4042392 - RNA, 14 nt, Molluscum contagiosum virus
ugcaaucugcgcuc

SEQ ID NO: 4042393 - RNA, 16 nt, Molluscum contagiosum virus
ugcacaagcaggaguc

SEQ ID NO: 4042394 - RNA, 21 nt, Molluscum contagiosum virus
ugcacagccgcuuucugggcg

SEQ ID NO: 4042395 - RNA, 20 nt, Molluscum contagiosum virus
ugcacgacguacgagugcug

SEQ ID NO: 4042396 - RNA, 20 nt, Molluscum contagiosum virus
ugcacgcacgcgcucuccag

SEQ ID NO: 4042397 - RNA, 18 nt, Molluscum contagiosum virus
ugcacgccgccagcgacg

SEQ ID NO: 4042398 - RNA, 16 nt, Molluscum contagiosum virus
ugcacgcggcgcgugu

SEQ ID NO: 4042399 - RNA, 13 nt, Molluscum contagiosum virus
ugcacucgcgcuc

SEQ ID NO: 4042400 - RNA, 19 nt, Molluscum contagiosum virus
ugcacuuucaacucucuac

SEQ ID NO: 4042401 - RNA, 15 nt, Molluscum contagiosum virus
ugcagaacagcacgu

SEQ ID NO: 4042402 - RNA, 18 nt, Molluscum contagiosum virus
ugcagcacgucuugcgcg

SEQ ID NO: 4042403 - RNA, 15 nt, Molluscum contagiosum virus
ugcagcagcacaggu

SEQ ID NO: 4042404 - RNA, 16 nt, Molluscum contagiosum virus
ugcagccgcugcugcu

SEQ ID NO: 4042405 - RNA, 12 nt, Molluscum contagiosum virus
ugcagcgcccgg

SEQ ID NO: 4042406 - RNA, 19 nt, Molluscum contagiosum virus
ugcagcugcgcgagccgcu

SEQ ID NO: 4042407 - RNA, 22 nt, Molluscum contagiosum virus
ugcagcuguccaaggugaacga

SEQ ID NO: 4042408 - RNA, 22 nt, Molluscum contagiosum virus
ugcaggaggaccgcgagcgcau

SEQ ID NO: 4042409 - RNA, 18 nt, Molluscum contagiosum virus
ugcaggauuuccucgcgg

SEQ ID NO: 4042410 - RNA, 20 nt, Molluscum contagiosum virus
ugcaggccccuacacgcaac

SEQ ID NO: 4042411 - RNA, 23 nt, Molluscum contagiosum virus
ugcaggccgagaugagcggcgcc

SEQ ID NO: 4042412 - RNA, 20 nt, Molluscum contagiosum virus
ugcaucuuugccuucgugga

SEQ ID NO: 4042413 - RNA, 17 nt, Molluscum contagiosum virus
ugcaugacggcgcgagc

SEQ ID NO: 4042414 - RNA, 22 nt, Molluscum contagiosum virus
ugccaagaccugggcgucgugc

SEQ ID NO: 4042415 - RNA, 22 nt, Molluscum contagiosum virus
ugccaagguucuggacgugucc

SEQ ID NO: 4042416 - RNA, 22 nt, Molluscum contagiosum virus
ugccagaagcccugagaaggag

SEQ ID NO: 4042417 - RNA, 22 nt, Molluscum contagiosum virus
ugccagcgagcucaaggacauc

SEQ ID NO: 4042418 - RNA, 24 nt, Molluscum contagiosum virus
ugccagcgccagccugcuggcacc

SEQ ID NO: 4042419 - RNA, 16 nt, Molluscum contagiosum virus
ugccagcgccucugcg

SEQ ID NO: 4042420 - RNA, 21 nt, Molluscum contagiosum virus
ugccaggcggucuuccagcac

SEQ ID NO: 4042421 - RNA, 19 nt, Molluscum contagiosum virus
ugccagucgcgccucgcau

SEQ ID NO: 4042422 - RNA, 22 nt, Molluscum contagiosum virus
ugcccccaccgggguccgcucc

SEQ ID NO: 4042423 - RNA, 13 nt, Molluscum contagiosum virus
ugccccgcgcgcc

SEQ ID NO: 4042424 - RNA, 19 nt, Molluscum contagiosum virus
ugccccgcgcguugcugcc

SEQ ID NO: 4042425 - RNA, 20 nt, Molluscum contagiosum virus
ugccccguccucgcucgugc

SEQ ID NO: 4042426 - RNA, 15 nt, Molluscum contagiosum virus
aaacacugucucugc

SEQ ID NO: 4042427 - RNA, 20 nt, Molluscum contagiosum virus
aaacgcacagccccugcugc

SEQ ID NO: 4042428 - RNA, 20 nt, Molluscum contagiosum virus
aaacgcgaaacuggacugag

SEQ ID NO: 4042429 - RNA, 21 nt, Molluscum contagiosum virus
aaacugcugcccgcgcagcgc

SEQ ID NO: 4042430 - RNA, 16 nt, Molluscum contagiosum virus
aaacuggacugagccg

SEQ ID NO: 4042431 - RNA, 20 nt, Molluscum contagiosum virus
aaagaccgugucugguguau

SEQ ID NO: 4042432 - RNA, 18 nt, Molluscum contagiosum virus
aaagccagacgcagagcc

SEQ ID NO: 4042433 - RNA, 23 nt, Molluscum contagiosum virus
aaagcgccgcgcgcggcuaagcu

SEQ ID NO: 4042434 - RNA, 23 nt, Molluscum contagiosum virus
aaaggaguuggcgcgcaagcgcu

SEQ ID NO: 4042435 - RNA, 18 nt, Molluscum contagiosum virus
aaaggcacccaccaggaa

SEQ ID NO: 4042436 - RNA, 23 nt, Molluscum contagiosum virus
aaaggcacccgcaacaaggaaag

SEQ ID NO: 4042437 - RNA, 15 nt, Molluscum contagiosum virus
aaagggcggccgcag

SEQ ID NO: 4042438 - RNA, 19 nt, Molluscum contagiosum virus
aaagguaccccgcaggaaa

SEQ ID NO: 4042439 - RNA, 20 nt, Molluscum contagiosum virus
aaaguacuugccgucacggc

SEQ ID NO: 4042440 - RNA, 13 nt, Molluscum contagiosum virus
aaagucaucugcc

SEQ ID NO: 4042441 - RNA, 13 nt, Molluscum contagiosum virus
aaagucuuccugg

SEQ ID NO: 4042442 - RNA, 16 nt, Molluscum contagiosum virus
aaauagcaugucacgc

SEQ ID NO: 4042443 - RNA, 16 nt, Molluscum contagiosum virus
aaauaugaaccacuuc

SEQ ID NO: 4042444 - RNA, 17 nt, Molluscum contagiosum virus
aaaucccaagagccaug

SEQ ID NO: 4042445 - RNA, 15 nt, Molluscum contagiosum virus
aaaugcgcacacuug

SEQ ID NO: 4042446 - RNA, 21 nt, Molluscum contagiosum virus
aaaugguguacgaaaguacuu

SEQ ID NO: 4042447 - RNA, 16 nt, Molluscum contagiosum virus
aacaagacgaacaugu

SEQ ID NO: 4042448 - RNA, 21 nt, Molluscum contagiosum virus
aacaagcguuuucgucaugga

SEQ ID NO: 4042449 - RNA, 22 nt, Molluscum contagiosum virus
aacaagcugcuggcacaaaucg

SEQ ID NO: 4042450 - RNA, 11 nt, Molluscum contagiosum virus
aacaaggccaa

SEQ ID NO: 4042451 - RNA, 16 nt, Molluscum contagiosum virus
aacacgcaaucgcgcg

SEQ ID NO: 4042452 - RNA, 20 nt, Molluscum contagiosum virus
aacacgcuguugcugcugcc

SEQ ID NO: 4042453 - RNA, 23 nt, Molluscum contagiosum virus
aacacgcuguugcugcugccgcg

SEQ ID NO: 4042454 - RNA, 16 nt, Molluscum contagiosum virus
aacagcagcuggcgcg

SEQ ID NO: 4042455 - RNA, 16 nt, Molluscum contagiosum virus
aacagcuuggcacagu

SEQ ID NO: 4042456 - RNA, 13 nt, Molluscum contagiosum virus
aaccacagcucuc

SEQ ID NO: 4042457 - RNA, 17 nt, Molluscum contagiosum virus
aaccagcuggcgcccgc

SEQ ID NO: 4042458 - RNA, 16 nt, Molluscum contagiosum virus
aaccuacgcuaccuga

SEQ ID NO: 4042459 - RNA, 12 nt, Molluscum contagiosum virus
aacgaaaagcca

SEQ ID NO: 4042460 - RNA, 11 nt, Molluscum contagiosum virus
aacgacagacc

SEQ ID NO: 4042461 - RNA, 14 nt, Molluscum contagiosum virus
aacgacuagcgugc

SEQ ID NO: 4042462 - RNA, 14 nt, Molluscum contagiosum virus
aacgagcagcccgu

SEQ ID NO: 4042463 - RNA, 13 nt, Molluscum contagiosum virus
aacgggcucgugc

SEQ ID NO: 4042464 - RNA, 16 nt, Molluscum contagiosum virus
aacuagggagcggcau

SEQ ID NO: 4042465 - RNA, 14 nt, Molluscum contagiosum virus
aacuagugcugcug

SEQ ID NO: 4042466 - RNA, 21 nt, Molluscum contagiosum virus
aacuccggcgucgaaacacug

SEQ ID NO: 4042467 - RNA, 18 nt, Molluscum contagiosum virus
aacucggcuucugcugca

SEQ ID NO: 4042468 - RNA, 19 nt, Molluscum contagiosum virus
aacugcgucucaagacaag

SEQ ID NO: 4042469 - RNA, 13 nt, Molluscum contagiosum virus
aacugcugggcgu

SEQ ID NO: 4042470 - RNA, 13 nt, Molluscum contagiosum virus
aagacaacacucg

SEQ ID NO: 4042471 - RNA, 19 nt, Molluscum contagiosum virus
aagaccugcuuccuccucc

SEQ ID NO: 4042472 - RNA, 14 nt, Molluscum contagiosum virus
aagacgagcugugc

SEQ ID NO: 4042473 - RNA, 17 nt, Molluscum contagiosum virus
aagacggaguuggagac

SEQ ID NO: 4042474 - RNA, 21 nt, Molluscum contagiosum virus
aagacggggccgcgaaagagg

SEQ ID NO: 4042475 - RNA, 14 nt, Molluscum contagiosum virus
aagacuugccgucu

SEQ ID NO: 4042476 - RNA, 21 nt, Molluscum contagiosum virus
aagagaccuggagguacuguc

SEQ ID NO: 4042477 - RNA, 21 nt, Molluscum contagiosum virus
aagagcacgaugcccagcagc

SEQ ID NO: 4042478 - RNA, 20 nt, Molluscum contagiosum virus
aagagcccgcacacgccgcg

SEQ ID NO: 4042479 - RNA, 15 nt, Molluscum contagiosum virus
aagagcgcgccucuc

SEQ ID NO: 4042480 - RNA, 20 nt, Molluscum contagiosum virus
aagaggaaagcgcacacuug

SEQ ID NO: 4042481 - RNA, 18 nt, Molluscum contagiosum virus
aagaggccagcacaagcc

SEQ ID NO: 4042482 - RNA, 15 nt, Molluscum contagiosum virus
aagaggggagccagc

SEQ ID NO: 4042483 - RNA, 16 nt, Molluscum contagiosum virus
aagaggugcgugcccc

SEQ ID NO: 4042484 - RNA, 19 nt, Molluscum contagiosum virus
aagaucgcgguggcaggcg

SEQ ID NO: 4042485 - RNA, 21 nt, Molluscum contagiosum virus
aagcaccgccugcugcagcuc

SEQ ID NO: 4042486 - RNA, 17 nt, Molluscum contagiosum virus
aagcacggaaacacucg

SEQ ID NO: 4042487 - RNA, 12 nt, Molluscum contagiosum virus
aagcagccgcag

SEQ ID NO: 4042488 - RNA, 21 nt, Molluscum contagiosum virus
aagcagcgugucaagcggcac

SEQ ID NO: 4042489 - RNA, 11 nt, Molluscum contagiosum virus
aagcagcucgg

SEQ ID NO: 4042490 - RNA, 18 nt, Molluscum contagiosum virus
aagcagguggccgcgcgc

SEQ ID NO: 4042491 - RNA, 17 nt, Molluscum contagiosum virus
aagcaucaugaaagaac

SEQ ID NO: 4042492 - RNA, 20 nt, Molluscum contagiosum virus
aagcauccaggccuucgggc

SEQ ID NO: 4042493 - RNA, 13 nt, Molluscum contagiosum virus
aagcccagcagcg

SEQ ID NO: 4042494 - RNA, 12 nt, Molluscum contagiosum virus
aagccugcugcg

SEQ ID NO: 4042495 - RNA, 23 nt, Molluscum contagiosum virus
aagcgcgcucgggcuagcaagca

SEQ ID NO: 4042496 - RNA, 21 nt, Molluscum contagiosum virus
aagcgcguucgcgcgugcugg

SEQ ID NO: 4042497 - RNA, 18 nt, Molluscum contagiosum virus
aagcguacgcgucgcgga

SEQ ID NO: 4042498 - RNA, 22 nt, Molluscum contagiosum virus
aagcguuuucgucauggagcag

SEQ ID NO: 4042499 - RNA, 17 nt, Molluscum contagiosum virus
aagcucgaggcgcuugg

SEQ ID NO: 4042500 - RNA, 19 nt, Molluscum contagiosum virus
aaggaaaaggcacaccccg

SEQ ID NO: 4042501 - RNA, 13 nt, Molluscum contagiosum virus
aaggaagcaacaa

SEQ ID NO: 4042502 - RNA, 16 nt, Molluscum contagiosum virus
aaggacguccuguagc

SEQ ID NO: 4042503 - RNA, 15 nt, Molluscum contagiosum virus
aaggagcccaagcac

SEQ ID NO: 4042504 - RNA, 18 nt, Molluscum contagiosum virus
aaggcaaagccugcugcg

SEQ ID NO: 4042505 - RNA, 21 nt, Molluscum contagiosum virus
aaggcaccccgaaggaaaggc

SEQ ID NO: 4042506 - RNA, 15 nt, Molluscum contagiosum virus
aaggcgggcccgcga

SEQ ID NO: 4042507 - RNA, 24 nt, Molluscum contagiosum virus
aaguacaugaggcagugcuugagc

SEQ ID NO: 4042508 - RNA, 23 nt, Molluscum contagiosum virus
aaguacuuuccucuucggcgucc

SEQ ID NO: 4042509 - RNA, 23 nt, Molluscum contagiosum virus
aagucguuugcucggggcugucg

SEQ ID NO: 4042510 - RNA, 17 nt, Molluscum contagiosum virus
aagucucucagcggcac

SEQ ID NO: 4042511 - RNA, 12 nt, Molluscum contagiosum virus
aagugcgcgugu

SEQ ID NO: 4042512 - RNA, 13 nt, Molluscum contagiosum virus
aagugcuccgcac

SEQ ID NO: 4042513 - RNA, 15 nt, Molluscum contagiosum virus
aaguguacuauuaca

SEQ ID NO: 4042514 - RNA, 21 nt, Molluscum contagiosum virus
aauacggugcagccgcugcug

SEQ ID NO: 4042515 - RNA, 17 nt, Molluscum contagiosum virus
aauagcuggggcaaaga

SEQ ID NO: 4042516 - RNA, 18 nt, Molluscum contagiosum virus
aauccaugucgagcccug

SEQ ID NO: 4042517 - RNA, 16 nt, Molluscum contagiosum virus
aaugaaccggcaagcu

SEQ ID NO: 4042518 - RNA, 15 nt, Molluscum contagiosum virus
aaugcgagcaaggcg

SEQ ID NO: 4042519 - RNA, 20 nt, Molluscum contagiosum virus
aaugcgguucacuagcgcag

SEQ ID NO: 4042520 - RNA, 16 nt, Molluscum contagiosum virus
aaugcgucccagcagc

SEQ ID NO: 4042521 - RNA, 13 nt, Molluscum contagiosum virus
aauuccgugucgu

SEQ ID NO: 4042522 - RNA, 22 nt, Molluscum contagiosum virus
ugaaaagcuauccgcugucuga

SEQ ID NO: 4042523 - RNA, 18 nt, Molluscum contagiosum virus
ugaaacaguaggacaugu

SEQ ID NO: 4042524 - RNA, 20 nt, Molluscum contagiosum virus
acaacaaguuccccgugagc

SEQ ID NO: 4042525 - RNA, 14 nt, Molluscum contagiosum virus
acaacgacagagcc

SEQ ID NO: 4042526 - RNA, 14 nt, Molluscum contagiosum virus
acaacgugcugcuc

SEQ ID NO: 4042527 - RNA, 14 nt, Molluscum contagiosum virus
acaagccguccgcc

SEQ ID NO: 4042528 - RNA, 18 nt, Molluscum contagiosum virus
acaagcguguucgugccg

SEQ ID NO: 4042529 - RNA, 20 nt, Molluscum contagiosum virus
acaagggcagcucaagcugc

SEQ ID NO: 4042530 - RNA, 15 nt, Molluscum contagiosum virus
acacacacacacucg

SEQ ID NO: 4042531 - RNA, 22 nt, Molluscum contagiosum virus
acacagaaguugccgcaggaac

SEQ ID NO: 4042532 - RNA, 16 nt, Molluscum contagiosum virus
acaccacacgcgcggc

SEQ ID NO: 4042533 - RNA, 23 nt, Molluscum contagiosum virus
acaccgagaucaugggcgugcuc

SEQ ID NO: 4042534 - RNA, 13 nt, Molluscum contagiosum virus
acaccggcgcgcu

SEQ ID NO: 4042535 - RNA, 20 nt, Molluscum contagiosum virus
acaccuggcgagcgcucugc

SEQ ID NO: 4042536 - RNA, 22 nt, Molluscum contagiosum virus
acaccuggcgagcgcucugcau

SEQ ID NO: 4042537 - RNA, 12 nt, Molluscum contagiosum virus
acaccugugccc

SEQ ID NO: 4042538 - RNA, 13 nt, Molluscum contagiosum virus
acacgagggccuu

SEQ ID NO: 4042539 - RNA, 22 nt, Molluscum contagiosum virus
acacgagggccuuggcggcgcg

SEQ ID NO: 4042540 - RNA, 21 nt, Molluscum contagiosum virus
acacgaggggcaagcucgcgc

SEQ ID NO: 4042541 - RNA, 19 nt, Molluscum contagiosum virus
acacgagugcccgcgcgcu

SEQ ID NO: 4042542 - RNA, 20 nt, Molluscum contagiosum virus
acacgccgggaaacgcacag

SEQ ID NO: 4042543 - RNA, 17 nt, Molluscum contagiosum virus
acacgcucuucggcacg

SEQ ID NO: 4042544 - RNA, 18 nt, Molluscum contagiosum virus
acacgcugcgcgugcugg

SEQ ID NO: 4042545 - RNA, 14 nt, Molluscum contagiosum virus
acacgcuggcgaag

SEQ ID NO: 4042546 - RNA, 18 nt, Molluscum contagiosum virus
acacgcuguugcugcugc

SEQ ID NO: 4042547 - RNA, 19 nt, Molluscum contagiosum virus
acacgcuguugcugcugcc

SEQ ID NO: 4042548 - RNA, 15 nt, Molluscum contagiosum virus
acacggccuccagca

SEQ ID NO: 4042549 - RNA, 15 nt, Molluscum contagiosum virus
acacucgcggcaagu

SEQ ID NO: 4042550 - RNA, 22 nt, Molluscum contagiosum virus
acacucggcaugugcgcaccgc

SEQ ID NO: 4042551 - RNA, 16 nt, Molluscum contagiosum virus
acacucgugcucgugu

SEQ ID NO: 4042552 - RNA, 18 nt, Molluscum contagiosum virus
acacuugcacgcgcacgc

SEQ ID NO: 4042553 - RNA, 14 nt, Molluscum contagiosum virus
acagagugccuggc

SEQ ID NO: 4042554 - RNA, 15 nt, Molluscum contagiosum virus
acagaugccacgacc

SEQ ID NO: 4042555 - RNA, 16 nt, Molluscum contagiosum virus
acagcaucgggcuguc

SEQ ID NO: 4042556 - RNA, 20 nt, Molluscum contagiosum virus
acagcaugaacucgcugcug

SEQ ID NO: 4042557 - RNA, 23 nt, Molluscum contagiosum virus
acagcaugaacucgcugcugcuc

SEQ ID NO: 4042558 - RNA, 13 nt, Molluscum contagiosum virus
acagcccccucuu

SEQ ID NO: 4042559 - RNA, 16 nt, Molluscum contagiosum virus
acagccccugcugcuc

SEQ ID NO: 4042560 - RNA, 18 nt, Molluscum contagiosum virus
acagccccugcugcucgc

SEQ ID NO: 4042561 - RNA, 23 nt, Molluscum contagiosum virus
acagccccugcugcucgcggagg

SEQ ID NO: 4042562 - RNA, 19 nt, Molluscum contagiosum virus
acagccgcuuucugggcgc

SEQ ID NO: 4042563 - RNA, 13 nt, Molluscum contagiosum virus
acagccguggagu

SEQ ID NO: 4042564 - RNA, 13 nt, Molluscum contagiosum virus
acagcgcgcgugc

SEQ ID NO: 4042565 - RNA, 15 nt, Molluscum contagiosum virus
acagcuugcugcugu

SEQ ID NO: 4042566 - RNA, 17 nt, Molluscum contagiosum virus
acaguccagcccgcggu

SEQ ID NO: 4042567 - RNA, 21 nt, Molluscum contagiosum virus
acagucuccacgcgugcgcgc

SEQ ID NO: 4042568 - RNA, 23 nt, Molluscum contagiosum virus
acaucuacuuccugccuguggga

SEQ ID NO: 4042569 - RNA, 17 nt, Molluscum contagiosum virus
acaugaucgacgaggac

SEQ ID NO: 4042570 - RNA, 21 nt, Molluscum contagiosum virus
acaugcaacgcaggacacugu

SEQ ID NO: 4042571 - RNA, 17 nt, Molluscum contagiosum virus
acaugccgcgcugcucc

SEQ ID NO: 4042572 - RNA, 18 nt, Molluscum contagiosum virus
acaugccuuucuuccaga

SEQ ID NO: 4042573 - RNA, 20 nt, Molluscum contagiosum virus
acaugcgugcuagcccgcac

SEQ ID NO: 4042574 - RNA, 16 nt, Molluscum contagiosum virus
acaugcuguccaccuc

SEQ ID NO: 4042575 - RNA, 17 nt, Molluscum contagiosum virus
acaugcugugcggcacg

SEQ ID NO: 4042576 - RNA, 20 nt, Molluscum contagiosum virus
acaugucguaccugguggcc

SEQ ID NO: 4042577 - RNA, 17 nt, Molluscum contagiosum virus
acauguugugcucgugu

SEQ ID NO: 4042578 - RNA, 16 nt, Molluscum contagiosum virus
accacagucggugcca

SEQ ID NO: 4042579 - RNA, 18 nt, Molluscum contagiosum virus
accaccagguacuccuug

SEQ ID NO: 4042580 - RNA, 18 nt, Molluscum contagiosum virus
accacgagcguguccagg

SEQ ID NO: 4042581 - RNA, 16 nt, Molluscum contagiosum virus
accacgguccugggcg

SEQ ID NO: 4042582 - RNA, 17 nt, Molluscum contagiosum virus
accacuccgucgcgcuc

SEQ ID NO: 4042583 - RNA, 22 nt, Molluscum contagiosum virus
accagaaccuucuucgucgugc

SEQ ID NO: 4042584 - RNA, 21 nt, Molluscum contagiosum virus
accagagugacgucuuccaga

SEQ ID NO: 4042585 - RNA, 14 nt, Molluscum contagiosum virus
accagcaccagcac

SEQ ID NO: 4042586 - RNA, 14 nt, Molluscum contagiosum virus
accagcagccaggc

SEQ ID NO: 4042587 - RNA, 15 nt, Molluscum contagiosum virus
accagccgcugcgcc

SEQ ID NO: 4042588 - RNA, 19 nt, Molluscum contagiosum virus
accagcgcggccguggcug

SEQ ID NO: 4042589 - RNA, 23 nt, Molluscum contagiosum virus
accagcuacgagccgcugcuccu

SEQ ID NO: 4042590 - RNA, 14 nt, Molluscum contagiosum virus
accagcucgcgccg

SEQ ID NO: 4042591 - RNA, 15 nt, Molluscum contagiosum virus
accagcucgcgccgc

SEQ ID NO: 4042592 - RNA, 19 nt, Molluscum contagiosum virus
accagcucgcgccgccgcg

SEQ ID NO: 4042593 - RNA, 13 nt, Molluscum contagiosum virus
accagcugccgcu

SEQ ID NO: 4042594 - RNA, 19 nt, Molluscum contagiosum virus
accagcuggacggugcugg

SEQ ID NO: 4042595 - RNA, 23 nt, Molluscum contagiosum virus
accagugccgacgugugccgcuc

SEQ ID NO: 4042596 - RNA, 13 nt, Molluscum contagiosum virus
accagugcgccuc

SEQ ID NO: 4042597 - RNA, 14 nt, Molluscum contagiosum virus
accaucaucgcgcu

SEQ ID NO: 4042598 - RNA, 20 nt, Molluscum contagiosum virus
accaugcggcguacgcgcag

SEQ ID NO: 4042599 - RNA, 18 nt, Molluscum contagiosum virus
accauggcgcgcucuuuu

SEQ ID NO: 4042600 - RNA, 17 nt, Molluscum contagiosum virus
acccaucggagaagugc

SEQ ID NO: 4042601 - RNA, 23 nt, Molluscum contagiosum virus
accccgagcuggugauccuggau

SEQ ID NO: 4042602 - RNA, 18 nt, Molluscum contagiosum virus
accccgagguucuccaga

SEQ ID NO: 4042603 - RNA, 22 nt, Molluscum contagiosum virus
accccucgugcugggccugccg

SEQ ID NO: 4042604 - RNA, 15 nt, Molluscum contagiosum virus
accccuugcuacagg

SEQ ID NO: 4042605 - RNA, 17 nt, Molluscum contagiosum virus
acccgagggcgugcgcu

SEQ ID NO: 4042606 - RNA, 17 nt, Molluscum contagiosum virus
acccgcaggaaaggcac

SEQ ID NO: 4042607 - RNA, 23 nt, Molluscum contagiosum virus
acccgcaggaaagguacccgcag

SEQ ID NO: 4042608 - RNA, 17 nt, Molluscum contagiosum virus
acccgugcccgcuccgc

SEQ ID NO: 4042609 - RNA, 12 nt, Molluscum contagiosum virus
acccgugcuugc

SEQ ID NO: 4042610 - RNA, 16 nt, Molluscum contagiosum virus
acccguggccgagccg

SEQ ID NO: 4042611 - RNA, 15 nt, Molluscum contagiosum virus
acccucagaccagag

SEQ ID NO: 4042612 - RNA, 15 nt, Molluscum contagiosum virus
acccuggcagccgag

SEQ ID NO: 4042613 - RNA, 15 nt, Molluscum contagiosum virus
acccuggcugcugcg

SEQ ID NO: 4042614 - RNA, 16 nt, Molluscum contagiosum virus
acccuggcugcugcgc

SEQ ID NO: 4042615 - RNA, 19 nt, Molluscum contagiosum virus
acccuuaauaaaaaaucaa

SEQ ID NO: 4042616 - RNA, 18 nt, Molluscum contagiosum virus
acccuuggcagcaacugc

SEQ ID NO: 4042617 - RNA, 21 nt, Molluscum contagiosum virus
accgacguuuucuuugcgcuc

SEQ ID NO: 4042618 - RNA, 14 nt, Molluscum contagiosum virus
accgcaaccagcug

SEQ ID NO: 4042619 - RNA, 18 nt, Molluscum contagiosum virus
accgcaaccagcugcugu

SEQ ID NO: 4042620 - RNA, 19 nt, Molluscum contagiosum virus
accgcauuuguguugccga

SEQ ID NO: 4042621 - RNA, 13 nt, Molluscum contagiosum virus
accgccugcucuc

SEQ ID NO: 4042622 - RNA, 17 nt, Molluscum contagiosum virus
accgccugcugcagcuc

SEQ ID NO: 4042623 - RNA, 21 nt, Molluscum contagiosum virus
accgccuguaccugcucgggc

SEQ ID NO: 4042624 - RNA, 17 nt, Molluscum contagiosum virus
acgcgcggcagcagccu

SEQ ID NO: 4042625 - RNA, 19 nt, Molluscum contagiosum virus
acgcgcggcagcagccucg

SEQ ID NO: 4042626 - RNA, 12 nt, Molluscum contagiosum virus
acgcgcugcgcc

SEQ ID NO: 4042627 - RNA, 14 nt, Molluscum contagiosum virus
acgcgcugcgccac

SEQ ID NO: 4042628 - RNA, 14 nt, Molluscum contagiosum virus
acgcgcugcuagag

SEQ ID NO: 4042629 - RNA, 13 nt, Molluscum contagiosum virus
aggaaaaggcaca

SEQ ID NO: 4042630 - RNA, 21 nt, Molluscum contagiosum virus
aggaaaggcacccaccaggaa

SEQ ID NO: 4042631 - RNA, 23 nt, Molluscum contagiosum virus
aggaaaggcaccccgaaggaaag

SEQ ID NO: 4042632 - RNA, 16 nt, Molluscum contagiosum virus
aggaaaggcaccccgc

SEQ ID NO: 4042633 - RNA, 18 nt, Molluscum contagiosum virus
aggaaaggcacccgcagg

SEQ ID NO: 4042634 - RNA, 16 nt, Molluscum contagiosum virus
aggaaaggccccccgc

SEQ ID NO: 4042635 - RNA, 23 nt, Molluscum contagiosum virus
aggaaagguaccccgcaggaaag

SEQ ID NO: 4042636 - RNA, 17 nt, Molluscum contagiosum virus
aggaagggcccgcggcu

SEQ ID NO: 4042637 - RNA, 15 nt, Molluscum contagiosum virus
aggacaucuacaucg

SEQ ID NO: 4042638 - RNA, 19 nt, Molluscum contagiosum virus
aggacgcguucuccaggaa

SEQ ID NO: 4042639 - RNA, 12 nt, Molluscum contagiosum virus
aggacuaccugg

SEQ ID NO: 4042640 - RNA, 22 nt, Molluscum contagiosum virus
aggacuagcauuccuucacaca

SEQ ID NO: 4042641 - RNA, 14 nt, Molluscum contagiosum virus
aggagacguagagc

SEQ ID NO: 4042642 - RNA, 18 nt, Molluscum contagiosum virus
aggagacguagagcagcg

SEQ ID NO: 4042643 - RNA, 14 nt, Molluscum contagiosum virus
aggagcugcgcgag

SEQ ID NO: 4042644 - RNA, 13 nt, Molluscum contagiosum virus
aggaggagaacuc

SEQ ID NO: 4042645 - RNA, 23 nt, Molluscum contagiosum virus
aggaguagcgugcgccugcagcc

SEQ ID NO: 4042646 - RNA, 14 nt, Molluscum contagiosum virus
aggaucccugcccg

SEQ ID NO: 4042647 - RNA, 18 nt, Molluscum contagiosum virus
aggaucggagcgcagcug

SEQ ID NO: 4042648 - RNA, 20 nt, Molluscum contagiosum virus
aggaucggagcgcagcugcc

SEQ ID NO: 4042649 - RNA, 15 nt, Molluscum contagiosum virus
aggaugcuggggcuc

SEQ ID NO: 4042650 - RNA, 17 nt, Molluscum contagiosum virus
aggaugcuggugucgag

SEQ ID NO: 4042651 - RNA, 18 nt, Molluscum contagiosum virus
aggauuuaaauggcgcgc

SEQ ID NO: 4042652 - RNA, 13 nt, Molluscum contagiosum virus
aggcacaccccgg

SEQ ID NO: 4042653 - RNA, 14 nt, Molluscum contagiosum virus
aggcacccaccagg

SEQ ID NO: 4042654 - RNA, 18 nt, Molluscum contagiosum virus
aggcacccgcaacaagga

SEQ ID NO: 4042655 - RNA, 21 nt, Molluscum contagiosum virus
agugccacguacuugcugguu

SEQ ID NO: 4042656 - RNA, 22 nt, Molluscum contagiosum virus
agugccacguacuugcugguug

SEQ ID NO: 4042657 - RNA, 18 nt, Molluscum contagiosum virus
agugccgcucgcuguccu

SEQ ID NO: 4042658 - RNA, 18 nt, Molluscum contagiosum virus
agugccgcugagagacuu

SEQ ID NO: 4042659 - RNA, 22 nt, Molluscum contagiosum virus
agugcgagaucgacugcgccuu

SEQ ID NO: 4042660 - RNA, 15 nt, Molluscum contagiosum virus
agugcgcgugcgccu

SEQ ID NO: 4042661 - RNA, 14 nt, Molluscum contagiosum virus
agugcgugccaggc

SEQ ID NO: 4042662 - RNA, 23 nt, Molluscum contagiosum virus
aguggacaagcuagacuggagca

SEQ ID NO: 4042663 - RNA, 19 nt, Molluscum contagiosum virus
aguggccgcuccagagccg

SEQ ID NO: 4042664 - RNA, 15 nt, Molluscum contagiosum virus
aguggccgucgcgag

SEQ ID NO: 4042665 - RNA, 23 nt, Molluscum contagiosum virus
aguggcggcaaaagggcucugcc

SEQ ID NO: 4042666 - RNA, 14 nt, Molluscum contagiosum virus
agugugccugcugc

SEQ ID NO: 4042667 - RNA, 18 nt, Molluscum contagiosum virus
agugugccugcugcgcuu

SEQ ID NO: 4042668 - RNA, 14 nt, Molluscum contagiosum virus
aguuagaaaugcuu

SEQ ID NO: 4042669 - RNA, 17 nt, Molluscum contagiosum virus
aguuauucucugcgcgc

SEQ ID NO: 4042670 - RNA, 13 nt, Molluscum contagiosum virus
aguuccacuccug

SEQ ID NO: 4042671 - RNA, 21 nt, Molluscum contagiosum virus
aguugagagcagcggcuacuu

SEQ ID NO: 4042672 - RNA, 21 nt, Molluscum contagiosum virus
aguugcagcccaccagcaggu

SEQ ID NO: 4042673 - RNA, 18 nt, Molluscum contagiosum virus
aguugcgagccagccagg

SEQ ID NO: 4042674 - RNA, 17 nt, Molluscum contagiosum virus
auaaaugaaccugggca

SEQ ID NO: 4042675 - RNA, 19 nt, Molluscum contagiosum virus
auacaccggcuuggccaag

SEQ ID NO: 4042676 - RNA, 12 nt, Molluscum contagiosum virus
auaccugugcca

SEQ ID NO: 4042677 - RNA, 14 nt, Molluscum contagiosum virus
auacuccugcuggc

SEQ ID NO: 4042678 - RNA, 15 nt, Molluscum contagiosum virus
auacuucaacuacaa

SEQ ID NO: 4042679 - RNA, 23 nt, Molluscum contagiosum virus
auagcgcgcuagcuccacgugcc

SEQ ID NO: 4042680 - RNA, 17 nt, Molluscum contagiosum virus
auaguccccggcgccgg

SEQ ID NO: 4042681 - RNA, 13 nt, Molluscum contagiosum virus
auagugggcuugc

SEQ ID NO: 4042682 - RNA, 11 nt, Molluscum contagiosum virus
auauccagccc

SEQ ID NO: 4042683 - RNA, 22 nt, Molluscum contagiosum virus
aucaacgcgcgcgugcuguccu

SEQ ID NO: 4042684 - RNA, 20 nt, Molluscum contagiosum virus
aucaagaucggacucagcau

SEQ ID NO: 4042685 - RNA, 15 nt, Molluscum contagiosum virus
aucaccccgcagcuc

SEQ ID NO: 4042686 - RNA, 16 nt, Molluscum contagiosum virus
aucaccccgcugggcc

SEQ ID NO: 4042687 - RNA, 22 nt, Molluscum contagiosum virus
caggcccggcggcccgcggcgc

SEQ ID NO: 4042688 - RNA, 14 nt, Molluscum contagiosum virus
caggccgcgcccgu

SEQ ID NO: 4042689 - RNA, 15 nt, Molluscum contagiosum virus
caggccgggcgcggu

SEQ ID NO: 4042690 - RNA, 21 nt, Molluscum contagiosum virus
caggccuccuucccugacagc

SEQ ID NO: 4042691 - RNA, 19 nt, Molluscum contagiosum virus
caggcgcccaacgcccgcg

SEQ ID NO: 4042692 - RNA, 19 nt, Molluscum contagiosum virus
caggcgcgaacucgcggca

SEQ ID NO: 4042693 - RNA, 21 nt, Molluscum contagiosum virus
caggcgcgcaagugcgugucc

SEQ ID NO: 4042694 - RNA, 16 nt, Molluscum contagiosum virus
caggcgcugcgcggcg

SEQ ID NO: 4042695 - RNA, 23 nt, Molluscum contagiosum virus
caggcggucuuccagcacugcgc

SEQ ID NO: 4042696 - RNA, 21 nt, Molluscum contagiosum virus
caggcggugggcgccgcggcc

SEQ ID NO: 4042697 - RNA, 16 nt, Molluscum contagiosum virus
caggcgucgcgcacag

SEQ ID NO: 4042698 - RNA, 21 nt, Molluscum contagiosum virus
caggcgucgcgcacagaaagc

SEQ ID NO: 4042699 - RNA, 16 nt, Molluscum contagiosum virus
caggcuaggcgcgacu

SEQ ID NO: 4042700 - RNA, 19 nt, Molluscum contagiosum virus
caggcucgucguggacgcu

SEQ ID NO: 4042701 - RNA, 16 nt, Molluscum contagiosum virus
cagggaaagagcacgc

SEQ ID NO: 4042702 - RNA, 17 nt, Molluscum contagiosum virus
cagggcaaucgcgugcu

SEQ ID NO: 4042703 - RNA, 15 nt, Molluscum contagiosum virus
cagggcacgaucgcg

SEQ ID NO: 4042704 - RNA, 15 nt, Molluscum contagiosum virus
cagggcccgcgcucg

SEQ ID NO: 4042705 - RNA, 18 nt, Molluscum contagiosum virus
cagggcggcgccugcgcc

SEQ ID NO: 4042706 - RNA, 19 nt, Molluscum contagiosum virus
cagggcgugcuugccugga

SEQ ID NO: 4042707 - RNA, 20 nt, Molluscum contagiosum virus
caggggccguucgcgcgcca

SEQ ID NO: 4042708 - RNA, 22 nt, Molluscum contagiosum virus
cagguagagcaacaugcugagu

SEQ ID NO: 4042709 - RNA, 22 nt, Molluscum contagiosum virus
caggucaacuccgagcgcgcgc

SEQ ID NO: 4042710 - RNA, 21 nt, Molluscum contagiosum virus
caggucaucgacgagcacgag

SEQ ID NO: 4042711 - RNA, 21 nt, Molluscum contagiosum virus
caggucaucgggcugcagccc

SEQ ID NO: 4042712 - RNA, 22 nt, Molluscum contagiosum virus
caggucaucgggcugcagcccu

SEQ ID NO: 4042713 - RNA, 12 nt, Molluscum contagiosum virus
cagguugcucgc

SEQ ID NO: 4042714 - RNA, 15 nt, Molluscum contagiosum virus
caguagcagcgccgg

SEQ ID NO: 4042715 - RNA, 16 nt, Molluscum contagiosum virus
cagucgcgacgcgcuu

SEQ ID NO: 4042716 - RNA, 12 nt, Molluscum contagiosum virus
cagugacagacu

SEQ ID NO: 4042717 - RNA, 13 nt, Molluscum contagiosum virus
cagugcaccagca

SEQ ID NO: 4042718 - RNA, 14 nt, Molluscum contagiosum virus
cagugccgccgcgc

SEQ ID NO: 4042719 - RNA, 15 nt, Molluscum contagiosum virus
cagugccgcugagag

SEQ ID NO: 4042720 - RNA, 21 nt, Molluscum contagiosum virus
cagugcgagaucgacugcgcc

SEQ ID NO: 4042721 - RNA, 18 nt, Molluscum contagiosum virus
cagugcgccucggacuuc

SEQ ID NO: 4042722 - RNA, 14 nt, Molluscum contagiosum virus
cagugcgcgcacaa

SEQ ID NO: 4042723 - RNA, 13 nt, Molluscum contagiosum virus
cagugcggccagc

SEQ ID NO: 4042724 - RNA, 12 nt, Molluscum contagiosum virus
cagugcgugcac

SEQ ID NO: 4042725 - RNA, 21 nt, Molluscum contagiosum virus
cagugcgugcucgguagcgug

SEQ ID NO: 4042726 - RNA, 14 nt, Molluscum contagiosum virus
caguguugugaagu

SEQ ID NO: 4042727 - RNA, 16 nt, Molluscum contagiosum virus
cauacacuuccugcua

SEQ ID NO: 4042728 - RNA, 18 nt, Molluscum contagiosum virus
cauagcgccacgagcagu

SEQ ID NO: 4042729 - RNA, 20 nt, Molluscum contagiosum virus
caucaagcacggcuuccggc

SEQ ID NO: 4042730 - RNA, 22 nt, Molluscum contagiosum virus
caucaugggcucgggcaagacc

SEQ ID NO: 4042731 - RNA, 21 nt, Molluscum contagiosum virus
cauccacauuacgcucgugga

SEQ ID NO: 4042732 - RNA, 17 nt, Molluscum contagiosum virus
cauccagccgucgccgc

SEQ ID NO: 4042733 - RNA, 22 nt, Molluscum contagiosum virus
cauccagccgucgccgcgcccg

SEQ ID NO: 4042734 - RNA, 14 nt, Molluscum contagiosum virus
cauccggcacgcac

SEQ ID NO: 4042735 - RNA, 14 nt, Molluscum contagiosum virus
cauccucaccuucc

SEQ ID NO: 4042736 - RNA, 23 nt, Molluscum contagiosum virus
cauccuugauaaaagcacagucc

SEQ ID NO: 4042737 - RNA, 13 nt, Molluscum contagiosum virus
caucgggcugucg

SEQ ID NO: 4042738 - RNA, 22 nt, Molluscum contagiosum virus
caucugcaacucgcgcugcagc

SEQ ID NO: 4042739 - RNA, 15 nt, Molluscum contagiosum virus
caugaaaggcaccug

SEQ ID NO: 4042740 - RNA, 15 nt, Molluscum contagiosum virus
caugaacucgcugcu

SEQ ID NO: 4042741 - RNA, 17 nt, Molluscum contagiosum virus
caugaacucgcugcugc

SEQ ID NO: 4042742 - RNA, 19 nt, Molluscum contagiosum virus
caugaggcggcgcaggugc

SEQ ID NO: 4042743 - RNA, 22 nt, Molluscum contagiosum virus
caugagguacuccacgcccggc

SEQ ID NO: 4042744 - RNA, 19 nt, Molluscum contagiosum virus
caugcacacucacgcgucc

SEQ ID NO: 4042745 - RNA, 15 nt, Molluscum contagiosum virus
caugcagcugcagga

SEQ ID NO: 4042746 - RNA, 20 nt, Molluscum contagiosum virus
caugcagucacgacuguguu

SEQ ID NO: 4042747 - RNA, 21 nt, Molluscum contagiosum virus
caugccaacgcaccggcaggg

SEQ ID NO: 4042748 - RNA, 19 nt, Molluscum contagiosum virus
caugccgaguguugucguc

SEQ ID NO: 4042749 - RNA, 15 nt, Molluscum contagiosum virus
caugccuucaggaac

SEQ ID NO: 4042750 - RNA, 17 nt, Molluscum contagiosum virus
caugccuuuccgagcuc

SEQ ID NO: 4042751 - RNA, 21 nt, Molluscum contagiosum virus
caugcgcgccgcgcugcuggc

SEQ ID NO: 4042752 - RNA, 23 nt, Molluscum contagiosum virus
caugcgugcuucacgugcuugcc

SEQ ID NO: 4042753 - RNA, 16 nt, Molluscum contagiosum virus
caugcucgcgcucucg

SEQ ID NO: 4042754 - RNA, 18 nt, Molluscum contagiosum virus
caugcucucgcugcugcc

SEQ ID NO: 4042755 - RNA, 16 nt, Molluscum contagiosum virus
caugcuggcgggcgcg

SEQ ID NO: 4042756 - RNA, 15 nt, Molluscum contagiosum virus
cauggagcaggagaa

SEQ ID NO: 4042757 - RNA, 15 nt, Molluscum contagiosum virus
cauggagcgcccgcu

SEQ ID NO: 4042758 - RNA, 17 nt, Molluscum contagiosum virus
cauggaggcgcuagugc

SEQ ID NO: 4042759 - RNA, 14 nt, Molluscum contagiosum virus
cauggccgcguccg

SEQ ID NO: 4042760 - RNA, 12 nt, Molluscum contagiosum virus
caugggcccugg

SEQ ID NO: 4042761 - RNA, 18 nt, Molluscum contagiosum virus
cauguacauagcccccua

SEQ ID NO: 4042762 - RNA, 21 nt, Molluscum contagiosum virus
caugucacgcgucgcgcgccg

SEQ ID NO: 4042763 - RNA, 18 nt, Molluscum contagiosum virus
caugucaggccggucgcg

SEQ ID NO: 4042764 - RNA, 22 nt, Molluscum contagiosum virus
cauuaacgaagaguggcucaca

SEQ ID NO: 4042765 - RNA, 13 nt, Molluscum contagiosum virus
cauucgcuggugc

SEQ ID NO: 4042766 - RNA, 20 nt, Molluscum contagiosum virus
cauugcgucuuacugcugca

SEQ ID NO: 4042767 - RNA, 17 nt, Molluscum contagiosum virus
cauugcguguggggcau

SEQ ID NO: 4042768 - RNA, 13 nt, Molluscum contagiosum virus
cauugcugcugca

SEQ ID NO: 4042769 - RNA, 22 nt, Molluscum contagiosum virus
ccaacacgcaaucgcgcgcgca

SEQ ID NO: 4042770 - RNA, 21 nt, Molluscum contagiosum virus
ccaacgcaccggcagggaaau

SEQ ID NO: 4042771 - RNA, 18 nt, Molluscum contagiosum virus
ccaacucugugaccugcg

SEQ ID NO: 4042772 - RNA, 13 nt, Molluscum contagiosum virus
ccaacuucgcggu

SEQ ID NO: 4042773 - RNA, 15 nt, Molluscum contagiosum virus
ccaagaacagagaaa

SEQ ID NO: 4042774 - RNA, 21 nt, Molluscum contagiosum virus
ccaagaagaagcagcagacca

SEQ ID NO: 4042775 - RNA, 15 nt, Molluscum contagiosum virus
ccaagaagacuacca

SEQ ID NO: 4042776 - RNA, 23 nt, Molluscum contagiosum virus
ccaagaccugggcgucgugcacc

SEQ ID NO: 4042777 - RNA, 17 nt, Molluscum contagiosum virus
ccaaggagcugcgcgag

SEQ ID NO: 4042778 - RNA, 19 nt, Molluscum contagiosum virus
ccaagguuugcgggcgcag

SEQ ID NO: 4042779 - RNA, 23 nt, Molluscum contagiosum virus
ccacaggcgcgaacucgcggcag

SEQ ID NO: 4042780 - RNA, 22 nt, Molluscum contagiosum virus
ccacagguuucucaacaugaau

SEQ ID NO: 4042781 - RNA, 14 nt, Molluscum contagiosum virus
ccaccaccuccagg

SEQ ID NO: 4042782 - RNA, 17 nt, Molluscum contagiosum virus
ccaccggcagugcuugc

SEQ ID NO: 4042783 - RNA, 16 nt, Molluscum contagiosum virus
ccaccguggaggagcc

SEQ ID NO: 4042784 - RNA, 21 nt, Molluscum contagiosum virus
ccaccucggcguuggccacga

SEQ ID NO: 4042785 - RNA, 21 nt, Molluscum contagiosum virus
ccaccugagccucuggaagga

SEQ ID NO: 4042786 - RNA, 13 nt, Molluscum contagiosum virus
ccacgcagcuggc

SEQ ID NO: 4042787 - RNA, 21 nt, Molluscum contagiosum virus
ccacgcaggacuggcaccugc

SEQ ID NO: 4042788 - RNA, 22 nt, Molluscum contagiosum virus
ccacgccaagcgcuugcucuuc

SEQ ID NO: 4042789 - RNA, 24 nt, Molluscum contagiosum virus
ccacgcccgggcccgacacguugc

SEQ ID NO: 4042790 - RNA, 18 nt, Molluscum contagiosum virus
ccacgcgcaugaggcggc

SEQ ID NO: 4042791 - RNA, 13 nt, Molluscum contagiosum virus
ccacgcgggcccg

SEQ ID NO: 4042792 - RNA, 20 nt, Molluscum contagiosum virus
ccacgcgugcgcgccaggug

SEQ ID NO: 4042793 - RNA, 13 nt, Molluscum contagiosum virus
ccacgcuggcacg

SEQ ID NO: 4042794 - RNA, 22 nt, Molluscum contagiosum virus
ccacgcuguacaugccgcagua

SEQ ID NO: 4042795 - RNA, 15 nt, Molluscum contagiosum virus
ccacggccgcgcgcg

SEQ ID NO: 4042796 - RNA, 20 nt, Molluscum contagiosum virus
ccacggguaccgugcgcgug

SEQ ID NO: 4042797 - RNA, 16 nt, Molluscum contagiosum virus
ccacggguagcagcgc

SEQ ID NO: 4042798 - RNA, 19 nt, Molluscum contagiosum virus
ccacguccaggccgcggca

SEQ ID NO: 4042799 - RNA, 20 nt, Molluscum contagiosum virus
ccacguccgacucggacacg

SEQ ID NO: 4042800 - RNA, 12 nt, Molluscum contagiosum virus
ccacgugccaag

SEQ ID NO: 4042801 - RNA, 12 nt, Molluscum contagiosum virus
ccacgugcgcug

SEQ ID NO: 4042802 - RNA, 17 nt, Molluscum contagiosum virus
ccacgugcgcuggccca

SEQ ID NO: 4042803 - RNA, 18 nt, Molluscum contagiosum virus
ccacgugguccaccagca

SEQ ID NO: 4042804 - RNA, 19 nt, Molluscum contagiosum virus
ccacuacaagcagccgcag

SEQ ID NO: 4042805 - RNA, 16 nt, Molluscum contagiosum virus
ccacuccgucgcgcuc

SEQ ID NO: 4042806 - RNA, 12 nt, Molluscum contagiosum virus
ccacuggugugu

SEQ ID NO: 4042807 - RNA, 17 nt, Molluscum contagiosum virus
ccacugugccagcagca

SEQ ID NO: 4042808 - RNA, 19 nt, Molluscum contagiosum virus
ccagaaaacaggcacuucg

SEQ ID NO: 4042809 - RNA, 15 nt, Molluscum contagiosum virus
ccagacgcagagcca

SEQ ID NO: 4042810 - RNA, 21 nt, Molluscum contagiosum virus
ccagagccgcgugcgccgccg

SEQ ID NO: 4042811 - RNA, 20 nt, Molluscum contagiosum virus
ccagcagagcugcccgccag

SEQ ID NO: 4042812 - RNA, 23 nt, Molluscum contagiosum virus
ccagcagcgcccggugcggcgug

SEQ ID NO: 4042813 - RNA, 16 nt, Molluscum contagiosum virus
ccagcagcggcgcgug

SEQ ID NO: 4042814 - RNA, 20 nt, Molluscum contagiosum virus
ccagcaugugcgagcgcagc

SEQ ID NO: 4042815 - RNA, 17 nt, Molluscum contagiosum virus
ccagcccgcugcgcaug

SEQ ID NO: 4042816 - RNA, 14 nt, Molluscum contagiosum virus
ccagccgcagccgc

SEQ ID NO: 4042817 - RNA, 13 nt, Molluscum contagiosum virus
ccagccgcgagcg

SEQ ID NO: 4042818 - RNA, 16 nt, Molluscum contagiosum virus
ccagcgcgcagaagcc

SEQ ID NO: 4042819 - RNA, 14 nt, Molluscum contagiosum virus
ccagcggcugcccg

SEQ ID NO: 4042820 - RNA, 23 nt, Molluscum contagiosum virus
ccagcgugacaaucucugcgccg

SEQ ID NO: 4042821 - RNA, 19 nt, Molluscum contagiosum virus
ccagcgugcccuucuccga

SEQ ID NO: 4042822 - RNA, 17 nt, Molluscum contagiosum virus
ccagcguuugauacagu

SEQ ID NO: 4042823 - RNA, 21 nt, Molluscum contagiosum virus
ccagcucgacacugugcuggc

SEQ ID NO: 4042824 - RNA, 22 nt, Molluscum contagiosum virus
ccagcucgacacugugcuggcg

SEQ ID NO: 4042825 - RNA, 20 nt, Molluscum contagiosum virus
ccagcucggguuccagcucc

SEQ ID NO: 4042826 - RNA, 18 nt, Molluscum contagiosum virus
ccagcuuggugcgcucga

SEQ ID NO: 4042827 - RNA, 14 nt, Molluscum contagiosum virus
ccaggaacagggaa

SEQ ID NO: 4042828 - RNA, 17 nt, Molluscum contagiosum virus
ccaggaacaucugcaac

SEQ ID NO: 4042829 - RNA, 15 nt, Molluscum contagiosum virus
ccaggaacgaggaaa

SEQ ID NO: 4042830 - RNA, 15 nt, Molluscum contagiosum virus
ccaggaacgccgcca

SEQ ID NO: 4042831 - RNA, 22 nt, Molluscum contagiosum virus
ccaggaucacgaugugcgcgcg

SEQ ID NO: 4042832 - RNA, 19 nt, Molluscum contagiosum virus
ccaggcacacgcagugcca

SEQ ID NO: 4042833 - RNA, 17 nt, Molluscum contagiosum virus
ccaggccgcggcagcuc

SEQ ID NO: 4042834 - RNA, 21 nt, Molluscum contagiosum virus
ccaggcggucuuccagcacug

SEQ ID NO: 4042835 - RNA, 19 nt, Molluscum contagiosum virus
ccagggcaguacgcgcgug

SEQ ID NO: 4042836 - RNA, 21 nt, Molluscum contagiosum virus
ccaggugcgaaggcucgagcu

SEQ ID NO: 4042837 - RNA, 20 nt, Molluscum contagiosum virus
ccaguaccagcucgcgccgc

SEQ ID NO: 4042838 - RNA, 15 nt, Molluscum contagiosum virus
ccaguaccugcugcc

SEQ ID NO: 4042839 - RNA, 16 nt, Molluscum contagiosum virus
ccaguaccugcugccg

SEQ ID NO: 4042840 - RNA, 14 nt, Molluscum contagiosum virus
ccaguacuucaucu

SEQ ID NO: 4042841 - RNA, 22 nt, Molluscum contagiosum virus
ccaguccgcggcgcgccggcca

SEQ ID NO: 4042842 - RNA, 13 nt, Molluscum contagiosum virus
ccagugcgcuugc

SEQ ID NO: 4042843 - RNA, 20 nt, Molluscum contagiosum virus
ccagugcuuugucgcaaccc

SEQ ID NO: 4042844 - RNA, 20 nt, Molluscum contagiosum virus
ccaguggcgcccgugcucgc

SEQ ID NO: 4042845 - RNA, 14 nt, Molluscum contagiosum virus
ccaucgacgagguc

SEQ ID NO: 4042846 - RNA, 17 nt, Molluscum contagiosum virus
ccaucggagaagugcuc

SEQ ID NO: 4042847 - RNA, 17 nt, Molluscum contagiosum virus
ccaugcgcacagcacuu

SEQ ID NO: 4042848 - RNA, 17 nt, Molluscum contagiosum virus
ccaugcuccugaucugc

SEQ ID NO: 4042849 - RNA, 22 nt, Molluscum contagiosum virus
ccaugcucgagccugccagcgc

SEQ ID NO: 4042850 - RNA, 20 nt, Molluscum contagiosum virus
ccauggacacgcugcgcgug

SEQ ID NO: 4042851 - RNA, 17 nt, Molluscum contagiosum virus
ccauggucacgcgcacg

SEQ ID NO: 4042852 - RNA, 22 nt, Molluscum contagiosum virus
ccauguccuuucagacagcgga

SEQ ID NO: 4042853 - RNA, 21 nt, Molluscum contagiosum virus
ccaugucgcgcaucaccgagc

SEQ ID NO: 4042854 - RNA, 21 nt, Molluscum contagiosum virus
ccaugugcccgcggcgcgaaa

SEQ ID NO: 4042855 - RNA, 16 nt, Molluscum contagiosum virus
cccaaggccgcgggcg

SEQ ID NO: 4042856 - RNA, 22 nt, Molluscum contagiosum virus
cccaagugcgcgugucuggagc

SEQ ID NO: 4042857 - RNA, 18 nt, Molluscum contagiosum virus
cccacgagcgccagccug

SEQ ID NO: 4042858 - RNA, 18 nt, Molluscum contagiosum virus
cccacguacgagcagcug

SEQ ID NO: 4042859 - RNA, 13 nt, Molluscum contagiosum virus
cccagcaaggccc

SEQ ID NO: 4042860 - RNA, 15 nt, Molluscum contagiosum virus
cccagcaccgcgccg

SEQ ID NO: 4042861 - RNA, 17 nt, Molluscum contagiosum virus
cccagcagcgagaccau

SEQ ID NO: 4042862 - RNA, 16 nt, Molluscum contagiosum virus
cccagcagcugcuccg

SEQ ID NO: 4042863 - RNA, 20 nt, Molluscum contagiosum virus
cccagcgguggucuccgcgg

SEQ ID NO: 4042864 - RNA, 21 nt, Molluscum contagiosum virus
cccagcgugacaaucucugcg

SEQ ID NO: 4042865 - RNA, 22 nt, Molluscum contagiosum virus
cccagcguggccagcuucauca

SEQ ID NO: 4042866 - RNA, 13 nt, Molluscum contagiosum virus
cccagcuucagca

SEQ ID NO: 4042867 - RNA, 16 nt, Molluscum contagiosum virus
cccagguucagcgcuc

SEQ ID NO: 4042868 - RNA, 17 nt, Molluscum contagiosum virus
ccccgagcugcggcgcg

SEQ ID NO: 4042869 - RNA, 16 nt, Molluscum contagiosum virus
ccccgcgcguugcugc

SEQ ID NO: 4042870 - RNA, 19 nt, Molluscum contagiosum virus
ccccggcguccggcgcucg

SEQ ID NO: 4042871 - RNA, 19 nt, Molluscum contagiosum virus
ccccguucacuugcgcgcg

SEQ ID NO: 4042872 - RNA, 14 nt, Molluscum contagiosum virus
ccccugagcgaguu

SEQ ID NO: 4042873 - RNA, 18 nt, Molluscum contagiosum virus
ccccuguaacaaggaaaa

SEQ ID NO: 4042874 - RNA, 15 nt, Molluscum contagiosum virus
cccgaaggccaccuc

SEQ ID NO: 4042875 - RNA, 12 nt, Molluscum contagiosum virus
cccgacacacuc

SEQ ID NO: 4042876 - RNA, 15 nt, Molluscum contagiosum virus
cccgacucgcagcuc

SEQ ID NO: 4042877 - RNA, 19 nt, Molluscum contagiosum virus
cccgacuucucgcgcgacu

SEQ ID NO: 4042878 - RNA, 19 nt, Molluscum contagiosum virus
cccgagcacguuccaaaag

SEQ ID NO: 4042879 - RNA, 21 nt, Molluscum contagiosum virus
cccgagcaggacgugcacgug

SEQ ID NO: 4042880 - RNA, 14 nt, Molluscum contagiosum virus
cccgagcgcgcgug

SEQ ID NO: 4042881 - RNA, 23 nt, Molluscum contagiosum virus
cccgagcuaaauggacgcggacc

SEQ ID NO: 4042882 - RNA, 22 nt, Molluscum contagiosum virus
cccgaggacgagccccgcgccg

SEQ ID NO: 4042883 - RNA, 21 nt, Molluscum contagiosum virus
cccgaguacuacuacacuguc

SEQ ID NO: 4042884 - RNA, 23 nt, Molluscum contagiosum virus
cccgaguuccuguugcgcgagcg

SEQ ID NO: 4042885 - RNA, 21 nt, Molluscum contagiosum virus
cccgcaaacacgagacugagu

SEQ ID NO: 4042886 - RNA, 14 nt, Molluscum contagiosum virus
cccgcaagccacac

SEQ ID NO: 4042887 - RNA, 15 nt, Molluscum contagiosum virus
cccgcacgcaccgcg

SEQ ID NO: 4042888 - RNA, 16 nt, Molluscum contagiosum virus
cccgcacgugggcuac

SEQ ID NO: 4042889 - RNA, 12 nt, Molluscum contagiosum virus
cccgcaggaaag

SEQ ID NO: 4042890 - RNA, 22 nt, Molluscum contagiosum virus
cccgcaggaaaggcaccccgca

SEQ ID NO: 4042891 - RNA, 17 nt, Molluscum contagiosum virus
cccgccgacugccgccg

SEQ ID NO: 4042892 - RNA, 22 nt, Molluscum contagiosum virus
cccgccgaguaccgcgcgcacg

SEQ ID NO: 4042893 - RNA, 18 nt, Molluscum contagiosum virus
cccgccuucgacggcuuc

SEQ ID NO: 4042894 - RNA, 22 nt, Molluscum contagiosum virus
cccgcgaacgagagacacgcac

SEQ ID NO: 4042895 - RNA, 19 nt, Molluscum contagiosum virus
cccgcgcacgagcugcugc

SEQ ID NO: 4042896 - RNA, 13 nt, Molluscum contagiosum virus
cccgcgcagcgcc

SEQ ID NO: 4042897 - RNA, 15 nt, Molluscum contagiosum virus
cccgcgcccgcgccg

SEQ ID NO: 4042898 - RNA, 16 nt, Molluscum contagiosum virus
cccgcgcccgcgccgc

SEQ ID NO: 4042899 - RNA, 12 nt, Molluscum contagiosum virus
cccgcgccgccc

SEQ ID NO: 4042900 - RNA, 14 nt, Molluscum contagiosum virus
cccgcgccgcggcg

SEQ ID NO: 4042901 - RNA, 19 nt, Molluscum contagiosum virus
cccgcgcgcgacuacgcac

SEQ ID NO: 4042902 - RNA, 14 nt, Molluscum contagiosum virus
cccgcgcgcgagcu

SEQ ID NO: 4042903 - RNA, 18 nt, Molluscum contagiosum virus
cccgcgcgcggacagccu

SEQ ID NO: 4042904 - RNA, 19 nt, Molluscum contagiosum virus
cccgcgcucuuacugcagc

SEQ ID NO: 4042905 - RNA, 20 nt, Molluscum contagiosum virus
cccgcggacggacgaagaga

SEQ ID NO: 4042906 - RNA, 13 nt, Molluscum contagiosum virus
cccgcggagcugu

SEQ ID NO: 4042907 - RNA, 17 nt, Molluscum contagiosum virus
cccgcggagcugugcca

SEQ ID NO: 4042908 - RNA, 18 nt, Molluscum contagiosum virus
cccgcggccgccacuguu

SEQ ID NO: 4042909 - RNA, 14 nt, Molluscum contagiosum virus
cccgcggcgcgccg

SEQ ID NO: 4042910 - RNA, 16 nt, Molluscum contagiosum virus
cccgcggcgcgccgca

SEQ ID NO: 4042911 - RNA, 20 nt, Molluscum contagiosum virus
cccgcgguguccuugcgccg

SEQ ID NO: 4042912 - RNA, 17 nt, Molluscum contagiosum virus
cccgcgucccgacagca

SEQ ID NO: 4042913 - RNA, 21 nt, Molluscum contagiosum virus
cccgcuccgcucgcgcgugcu

SEQ ID NO: 4042914 - RNA, 17 nt, Molluscum contagiosum virus
cccgcugcacgcucuuc

SEQ ID NO: 4042915 - RNA, 15 nt, Molluscum contagiosum virus
cccgcuggcggcacg

SEQ ID NO: 4042916 - RNA, 16 nt, Molluscum contagiosum virus
cccgcugucgcgcguc

SEQ ID NO: 4042917 - RNA, 23 nt, Molluscum contagiosum virus
cccgcugucgcgcgucgcggucg

SEQ ID NO: 4042918 - RNA, 16 nt, Molluscum contagiosum virus
cccggcacgugccccg

SEQ ID NO: 4042919 - RNA, 13 nt, Molluscum contagiosum virus
cccggcgcgcgcg

SEQ ID NO: 4042920 - RNA, 20 nt, Molluscum contagiosum virus
cccggcgcgcgcggcgcgcc

SEQ ID NO: 4042921 - RNA, 19 nt, Molluscum contagiosum virus
cccggcggcccgcggcgcg

SEQ ID NO: 4042922 - RNA, 13 nt, Molluscum contagiosum virus
cccgggcccgagc

SEQ ID NO: 4042923 - RNA, 15 nt, Molluscum contagiosum virus
cgagcacgcgcgagc

SEQ ID NO: 4042924 - RNA, 21 nt, Molluscum contagiosum virus
cgagcacguccguugcacgug

SEQ ID NO: 4042925 - RNA, 20 nt, Molluscum contagiosum virus
cgagcacguggacagcaucc

SEQ ID NO: 4042926 - RNA, 24 nt, Molluscum contagiosum virus
cgagcacguuccaaaagacagagg

SEQ ID NO: 4042927 - RNA, 17 nt, Molluscum contagiosum virus
cgagcacugcgcgcgcg

SEQ ID NO: 4042928 - RNA, 19 nt, Molluscum contagiosum virus
cgagcagagccgggacgcg

SEQ ID NO: 4042929 - RNA, 24 nt, Molluscum contagiosum virus
cgagcagagccgggacgcggaugc

SEQ ID NO: 4042930 - RNA, 19 nt, Molluscum contagiosum virus
cgagcagauucacgagcuc

SEQ ID NO: 4042931 - RNA, 19 nt, Molluscum contagiosum virus
cgagcagcccgugcgccug

SEQ ID NO: 4042932 - RNA, 20 nt, Molluscum contagiosum virus
cgagcagcggggacucuccc

SEQ ID NO: 4042933 - RNA, 15 nt, Molluscum contagiosum virus
cgagcagcugcugcg

SEQ ID NO: 4042934 - RNA, 13 nt, Molluscum contagiosum virus
cgagcaggcgcag

SEQ ID NO: 4042935 - RNA, 15 nt, Molluscum contagiosum virus
cgagcaggcgcagcg

SEQ ID NO: 4042936 - RNA, 15 nt, Molluscum contagiosum virus
cgagcaucugcgcgu

SEQ ID NO: 4042937 - RNA, 16 nt, Molluscum contagiosum virus
cgagcccgcggcgcgc

SEQ ID NO: 4042938 - RNA, 13 nt, Molluscum contagiosum virus
cgagccgcgcgag

SEQ ID NO: 4042939 - RNA, 20 nt, Molluscum contagiosum virus
cgagccgcugcuccugcucu

SEQ ID NO: 4042940 - RNA, 19 nt, Molluscum contagiosum virus
cgagccugccagcgccagc

SEQ ID NO: 4042941 - RNA, 15 nt, Molluscum contagiosum virus
cgagccugccgcgag

SEQ ID NO: 4042942 - RNA, 18 nt, Molluscum contagiosum virus
cgagcgcccgugcuugcg

SEQ ID NO: 4042943 - RNA, 20 nt, Molluscum contagiosum virus
cgagcgcccgugcuugcgca

SEQ ID NO: 4042944 - RNA, 19 nt, Molluscum contagiosum virus
cgagcgcccucagucacgu

SEQ ID NO: 4042945 - RNA, 16 nt, Molluscum contagiosum virus
cgagcgccgccagcuc

SEQ ID NO: 4042946 - RNA, 17 nt, Molluscum contagiosum virus
cgagcgccgccagcucc

SEQ ID NO: 4042947 - RNA, 21 nt, Molluscum contagiosum virus
cgagcgccgccagcuccgcgc

SEQ ID NO: 4042948 - RNA, 13 nt, Molluscum contagiosum virus
cgagcgcgcgcgc

SEQ ID NO: 4042949 - RNA, 16 nt, Molluscum contagiosum virus
cgagcgcgcgcgcugc

SEQ ID NO: 4042950 - RNA, 14 nt, Molluscum contagiosum virus
cgagcgcgcgcugc

SEQ ID NO: 4042951 - RNA, 19 nt, Molluscum contagiosum virus
cgagcgcgcgcugcgcgcc

SEQ ID NO: 4042952 - RNA, 16 nt, Molluscum contagiosum virus
cgagcgcgcgugcucg

SEQ ID NO: 4042953 - RNA, 18 nt, Molluscum contagiosum virus
cgagcgcgcuggacuugc

SEQ ID NO: 4042954 - RNA, 15 nt, Molluscum contagiosum virus
cgagcgcggcaacag

SEQ ID NO: 4042955 - RNA, 14 nt, Molluscum contagiosum virus
cgagcgcgggcgcc

SEQ ID NO: 4042956 - RNA, 20 nt, Molluscum contagiosum virus
cgagcgcguccaugagcauc

SEQ ID NO: 4042957 - RNA, 22 nt, Molluscum contagiosum virus
cgagcgcguccaugagcaucuc

SEQ ID NO: 4042958 - RNA, 18 nt, Molluscum contagiosum virus
cgagcgcugccgcuucgu

SEQ ID NO: 4042959 - RNA, 20 nt, Molluscum contagiosum virus
cgagcggcaagccgugcuuu

SEQ ID NO: 4042960 - RNA, 14 nt, Molluscum contagiosum virus
cgagcggcugcucg

SEQ ID NO: 4042961 - RNA, 11 nt, Molluscum contagiosum virus
cgagcgugcaa

SEQ ID NO: 4042962 - RNA, 17 nt, Molluscum contagiosum virus
cgagcuaaauggacgcg

SEQ ID NO: 4042963 - RNA, 12 nt, Molluscum contagiosum virus
cgagcucuccga

SEQ ID NO: 4042964 - RNA, 13 nt, Molluscum contagiosum virus
cgagcugcugccc

SEQ ID NO: 4042965 - RNA, 15 nt, Molluscum contagiosum virus
cgagcugcugcgcgc

SEQ ID NO: 4042966 - RNA, 16 nt, Molluscum contagiosum virus
cgagcugcuguacucg

SEQ ID NO: 4042967 - RNA, 11 nt, Molluscum contagiosum virus
cgagcugugcg

SEQ ID NO: 4042968 - RNA, 23 nt, Molluscum contagiosum virus
cgagcuuccucaaggcgcacgag

SEQ ID NO: 4042969 - RNA, 23 nt, Molluscum contagiosum virus
cgagcuuugugcgaccugcugcg

SEQ ID NO: 4042970 - RNA, 20 nt, Molluscum contagiosum virus
cgaggacgcgggcguguccg

SEQ ID NO: 4042971 - RNA, 19 nt, Molluscum contagiosum virus
cgaggagggcagccucaac

SEQ ID NO: 4042972 - RNA, 14 nt, Molluscum contagiosum virus
cgaggcaccgcccg

SEQ ID NO: 4042973 - RNA, 20 nt, Molluscum contagiosum virus
cgaggcacucgucgcgcugc

SEQ ID NO: 4042974 - RNA, 23 nt, Molluscum contagiosum virus
cgaggccaaccuccugcaccugc

SEQ ID NO: 4042975 - RNA, 16 nt, Molluscum contagiosum virus
cgaggccggcacgagc

SEQ ID NO: 4042976 - RNA, 22 nt, Molluscum contagiosum virus
cgaggccggccgugcagagcaa

SEQ ID NO: 4042977 - RNA, 20 nt, Molluscum contagiosum virus
cgaggccugcguggacagca

SEQ ID NO: 4042978 - RNA, 22 nt, Molluscum contagiosum virus
cgaggccugcguggacagcauc

SEQ ID NO: 4042979 - RNA, 13 nt, Molluscum contagiosum virus
cgaggcgcgcacg

SEQ ID NO: 4042980 - RNA, 17 nt, Molluscum contagiosum virus
cgaggcgcgcacgcugc

SEQ ID NO: 4042981 - RNA, 14 nt, Molluscum contagiosum virus
cgagggcgaggcca

SEQ ID NO: 4042982 - RNA, 14 nt, Molluscum contagiosum virus
cgagggcgcgcugg

SEQ ID NO: 4042983 - RNA, 19 nt, Molluscum contagiosum virus
cgaggucacucgcuacugc

SEQ ID NO: 4042984 - RNA, 14 nt, Molluscum contagiosum virus
cgaggugcugcgcc

SEQ ID NO: 4042985 - RNA, 20 nt, Molluscum contagiosum virus
cgaguccccagacuucucca

SEQ ID NO: 4042986 - RNA, 17 nt, Molluscum contagiosum virus
cgagucguacacgcaga

SEQ ID NO: 4042987 - RNA, 21 nt, Molluscum contagiosum virus
cgagucguacacgcagagcca

SEQ ID NO: 4042988 - RNA, 20 nt, Molluscum contagiosum virus
cgaucaagacauuucuccuc

SEQ ID NO: 4042989 - RNA, 17 nt, Molluscum contagiosum virus
cgaugagaacaacagcg

SEQ ID NO: 4042990 - RNA, 16 nt, Molluscum contagiosum virus
cgauggcgcagcuccu

SEQ ID NO: 4042991 - RNA, 16 nt, Molluscum contagiosum virus
cgauguacuccaccau

SEQ ID NO: 4042992 - RNA, 21 nt, Molluscum contagiosum virus
cgauguagguacccgcaaccc

SEQ ID NO: 4042993 - RNA, 20 nt, Molluscum contagiosum virus
cgauuuggacgcggcaccug

SEQ ID NO: 4042994 - RNA, 23 nt, Molluscum contagiosum virus
cgauuuguuugcaccggcaacag

SEQ ID NO: 4042995 - RNA, 21 nt, Molluscum contagiosum virus
cgcaaacaagcagucucaugg

SEQ ID NO: 4042996 - RNA, 16 nt, Molluscum contagiosum virus
cgcaaacaagcauggu

SEQ ID NO: 4042997 - RNA, 16 nt, Molluscum contagiosum virus
cgcaaagacggacccg

SEQ ID NO: 4042998 - RNA, 20 nt, Molluscum contagiosum virus
cgcaaccgcgugcgugcaca

SEQ ID NO: 4042999 - RNA, 17 nt, Molluscum contagiosum virus
cgcaagcguacgcgucg

SEQ ID NO: 4043000 - RNA, 18 nt, Molluscum contagiosum virus
cgcaagucaccgcuccgc

SEQ ID NO: 4043001 - RNA, 17 nt, Molluscum contagiosum virus
cgcaagugcacgcggcg

SEQ ID NO: 4043002 - RNA, 13 nt, Molluscum contagiosum virus
cgcaauucccggc

SEQ ID NO: 4043003 - RNA, 17 nt, Molluscum contagiosum virus
cgcacaacuugggcccg

SEQ ID NO: 4043004 - RNA, 17 nt, Molluscum contagiosum virus
cgcacaagggcagcuca

SEQ ID NO: 4043005 - RNA, 18 nt, Molluscum contagiosum virus
cgcacacuugcgcgucca

SEQ ID NO: 4043006 - RNA, 18 nt, Molluscum contagiosum virus
cgcacacuugcgcguucg

SEQ ID NO: 4043007 - RNA, 15 nt, Molluscum contagiosum virus
cgcacagccccugcu

SEQ ID NO: 4043008 - RNA, 17 nt, Molluscum contagiosum virus
cgcacagccccugcugc

SEQ ID NO: 4043009 - RNA, 17 nt, Molluscum contagiosum virus
cgcacaguaccagauua

SEQ ID NO: 4043010 - RNA, 15 nt, Molluscum contagiosum virus
cgcacccgcgcggcu

SEQ ID NO: 4043011 - RNA, 16 nt, Molluscum contagiosum virus
cgcaccgccuggugcu

SEQ ID NO: 4043012 - RNA, 14 nt, Molluscum contagiosum virus
cgcaccguacucgc

SEQ ID NO: 4043013 - RNA, 21 nt, Molluscum contagiosum virus
cgcaccuggucgagcaccugu

SEQ ID NO: 4043014 - RNA, 19 nt, Molluscum contagiosum virus
cgcaccuugacgccgcgcg

SEQ ID NO: 4043015 - RNA, 19 nt, Molluscum contagiosum virus
cgcacgaccacgcuggcac

SEQ ID NO: 4043016 - RNA, 20 nt, Molluscum contagiosum virus
cgcacgcgaacgccuacgcg

SEQ ID NO: 4043017 - RNA, 16 nt, Molluscum contagiosum virus
cgcacgcgagcacgcc

SEQ ID NO: 4043018 - RNA, 11 nt, Molluscum contagiosum virus
cgcacgcgcac

SEQ ID NO: 4043019 - RNA, 12 nt, Molluscum contagiosum virus
cgcacgcgcccu

SEQ ID NO: 4043020 - RNA, 18 nt, Molluscum contagiosum virus
cgcacgcgcgggcaucaa

SEQ ID NO: 4043021 - RNA, 18 nt, Molluscum contagiosum virus
cgcacgcggaaacaagca

SEQ ID NO: 4043022 - RNA, 13 nt, Molluscum contagiosum virus
cgcacgcgggacg

SEQ ID NO: 4043023 - RNA, 20 nt, Molluscum contagiosum virus
cgcacgcuagcgagcgcccg

SEQ ID NO: 4043024 - RNA, 22 nt, Molluscum contagiosum virus
cgcacgcuugccuuggcgcccg

SEQ ID NO: 4043025 - RNA, 22 nt, Molluscum contagiosum virus
cgcacggcuaggcgcggcgggc

SEQ ID NO: 4043026 - RNA, 18 nt, Molluscum contagiosum virus
cgcacggugugcuacugc

SEQ ID NO: 4043027 - RNA, 13 nt, Molluscum contagiosum virus
ccuggucuucccg

SEQ ID NO: 4043028 - RNA, 19 nt, Molluscum contagiosum virus
ccuggucuucccgcuggcg

SEQ ID NO: 4043029 - RNA, 13 nt, Molluscum contagiosum virus
ccuggugcugcgc

SEQ ID NO: 4043030 - RNA, 23 nt, Molluscum contagiosum virus
ccuggugcuggggcuagcgcugc

SEQ ID NO: 4043031 - RNA, 13 nt, Molluscum contagiosum virus
ccuguaccacccg

SEQ ID NO: 4043032 - RNA, 15 nt, Molluscum contagiosum virus
ccugucaagacgggc

SEQ ID NO: 4043033 - RNA, 20 nt, Molluscum contagiosum virus
ccugucaagacgggcacgcc

SEQ ID NO: 4043034 - RNA, 16 nt, Molluscum contagiosum virus
ccuguccgcggacgcg

SEQ ID NO: 4043035 - RNA, 16 nt, Molluscum contagiosum virus
ccugucgugcaauggc

SEQ ID NO: 4043036 - RNA, 17 nt, Molluscum contagiosum virus
ccuguggcgcacacgcg

SEQ ID NO: 4043037 - RNA, 14 nt, Molluscum contagiosum virus
ccuucccggcgucc

SEQ ID NO: 4043038 - RNA, 15 nt, Molluscum contagiosum virus
ccuuccgcgcgggca

SEQ ID NO: 4043039 - RNA, 16 nt, Molluscum contagiosum virus
ccuuccgcgcgggcau

SEQ ID NO: 4043040 - RNA, 17 nt, Molluscum contagiosum virus
ccuucgcguccacgggu

SEQ ID NO: 4043041 - RNA, 21 nt, Molluscum contagiosum virus
ccuucguguucgcggacggcg

SEQ ID NO: 4043042 - RNA, 22 nt, Molluscum contagiosum virus
ccuucuuccugcgcgugcgucc

SEQ ID NO: 4043043 - RNA, 15 nt, Molluscum contagiosum virus
ccuugaagggcacaa

SEQ ID NO: 4043044 - RNA, 18 nt, Molluscum contagiosum virus
ccuugaugccgugguaca

SEQ ID NO: 4043045 - RNA, 22 nt, Molluscum contagiosum virus
ccuugcccgaggagagcggcgc

SEQ ID NO: 4043046 - RNA, 20 nt, Molluscum contagiosum virus
ccuugccgaggaggugcucu

SEQ ID NO: 4043047 - RNA, 21 nt, Molluscum contagiosum virus
ccuugcgagcgcugccugugc

SEQ ID NO: 4043048 - RNA, 15 nt, Molluscum contagiosum virus
ccuugcuggcacgcg

SEQ ID NO: 4043049 - RNA, 23 nt, Molluscum contagiosum virus
ccuuggcaacgcaaacgcacgcg

SEQ ID NO: 4043050 - RNA, 17 nt, Molluscum contagiosum virus
ccuuggcagcaacugca

SEQ ID NO: 4043051 - RNA, 16 nt, Molluscum contagiosum virus
ccuuggcgcugcacag

SEQ ID NO: 4043052 - RNA, 21 nt, Molluscum contagiosum virus
ccuuggcggcgcggcuagcac

SEQ ID NO: 4043053 - RNA, 18 nt, Molluscum contagiosum virus
ccuuggcggugcgcaaag

SEQ ID NO: 4043054 - RNA, 16 nt, Molluscum contagiosum virus
ccuuggugcucauccu

SEQ ID NO: 4043055 - RNA, 16 nt, Molluscum contagiosum virus
ccuuuccccggcgucc

SEQ ID NO: 4043056 - RNA, 14 nt, Molluscum contagiosum virus
ccuuuguggacgcg

SEQ ID NO: 4043057 - RNA, 18 nt, Molluscum contagiosum virus
cgaaacacggccuccagc

SEQ ID NO: 4043058 - RNA, 17 nt, Molluscum contagiosum virus
cgaacacggcgcggauc

SEQ ID NO: 4043059 - RNA, 21 nt, Molluscum contagiosum virus
cgaaccgcggcagccuugcga

SEQ ID NO: 4043060 - RNA, 15 nt, Molluscum contagiosum virus
cgaacugcaacguga

SEQ ID NO: 4043061 - RNA, 14 nt, Molluscum contagiosum virus
cgaagaaggggccg

SEQ ID NO: 4043062 - RNA, 15 nt, Molluscum contagiosum virus
cgaagaccaccagca

SEQ ID NO: 4043063 - RNA, 16 nt, Molluscum contagiosum virus
cgaagacgaagcgcuc

SEQ ID NO: 4043064 - RNA, 18 nt, Molluscum contagiosum virus
cgaagacgagcgcgugcc

SEQ ID NO: 4043065 - RNA, 13 nt, Molluscum contagiosum virus
cgaagagcagaag

SEQ ID NO: 4043066 - RNA, 14 nt, Molluscum contagiosum virus
cgaagagcagaagg

SEQ ID NO: 4043067 - RNA, 15 nt, Molluscum contagiosum virus
cgaagagcgagaaca

SEQ ID NO: 4043068 - RNA, 18 nt, Molluscum contagiosum virus
cgaagagcgagaacacgg

SEQ ID NO: 4043069 - RNA, 16 nt, Molluscum contagiosum virus
cgaagagugcgcaaca

SEQ ID NO: 4043070 - RNA, 16 nt, Molluscum contagiosum virus
cgaagcaggcgccauc

SEQ ID NO: 4043071 - RNA, 18 nt, Molluscum contagiosum virus
cgaagcugcgcuugcgcg

SEQ ID NO: 4043072 - RNA, 18 nt, Molluscum contagiosum virus
cgaaggccgguccugacu

SEQ ID NO: 4043073 - RNA, 16 nt, Molluscum contagiosum virus
cgacaacgacagagcc

SEQ ID NO: 4043074 - RNA, 19 nt, Molluscum contagiosum virus
cgacaacgcacccgcgcgg

SEQ ID NO: 4043075 - RNA, 13 nt, Molluscum contagiosum virus
cgacaacucgcgc

SEQ ID NO: 4043076 - RNA, 18 nt, Molluscum contagiosum virus
cgacaauacggugcagcc

SEQ ID NO: 4043077 - RNA, 22 nt, Molluscum contagiosum virus
cgacacgagcgaguugagcagg

SEQ ID NO: 4043078 - RNA, 11 nt, Molluscum contagiosum virus
cgacagagccc

SEQ ID NO: 4043079 - RNA, 14 nt, Molluscum contagiosum virus
cgacagcgugcgcg

SEQ ID NO: 4043080 - RNA, 13 nt, Molluscum contagiosum virus
cgacaugcugccc

SEQ ID NO: 4043081 - RNA, 17 nt, Molluscum contagiosum virus
cgacauuucgcgccugu

SEQ ID NO: 4043082 - RNA, 18 nt, Molluscum contagiosum virus
cgacauuucgcgccuguc

SEQ ID NO: 4043083 - RNA, 16 nt, Molluscum contagiosum virus
cgaccaaaugcgcgug

SEQ ID NO: 4043084 - RNA, 16 nt, Molluscum contagiosum virus
cgaccacgugccagag

SEQ ID NO: 4043085 - RNA, 20 nt, Molluscum contagiosum virus
cgaccacgugccagagucgc

SEQ ID NO: 4043086 - RNA, 15 nt, Molluscum contagiosum virus
cgaccagcugguccu

SEQ ID NO: 4043087 - RNA, 13 nt, Molluscum contagiosum virus
cgacgacacgcgu

SEQ ID NO: 4043088 - RNA, 15 nt, Molluscum contagiosum virus
cgacgacggcacgcu

SEQ ID NO: 4043089 - RNA, 13 nt, Molluscum contagiosum virus
cgacgagggcgcc

SEQ ID NO: 4043090 - RNA, 17 nt, Molluscum contagiosum virus
cgacgccaucaggaaug

SEQ ID NO: 4043091 - RNA, 14 nt, Molluscum contagiosum virus
cgacgccgagcccg

SEQ ID NO: 4043092 - RNA, 15 nt, Molluscum contagiosum virus
cgacgccgagcccga

SEQ ID NO: 4043093 - RNA, 17 nt, Molluscum contagiosum virus
cgacgccuuccugcugg

SEQ ID NO: 4043094 - RNA, 14 nt, Molluscum contagiosum virus
cgacgcgcgcggca

SEQ ID NO: 4043095 - RNA, 14 nt, Molluscum contagiosum virus
cgacgggccccugu

SEQ ID NO: 4043096 - RNA, 23 nt, Molluscum contagiosum virus
cgacgggcucugugcggacaugc

SEQ ID NO: 4043097 - RNA, 21 nt, Molluscum contagiosum virus
cgacggucacgcaagcuuugu

SEQ ID NO: 4043098 - RNA, 16 nt, Molluscum contagiosum virus
cgacggugugccgcug

SEQ ID NO: 4043099 - RNA, 23 nt, Molluscum contagiosum virus
cgacgucgucaaggauguagccu

SEQ ID NO: 4043100 - RNA, 20 nt, Molluscum contagiosum virus
cgacgugaucgcgcaggcgc

SEQ ID NO: 4043101 - RNA, 19 nt, Molluscum contagiosum virus
cgacgugcugcugcagaac

SEQ ID NO: 4043102 - RNA, 22 nt, Molluscum contagiosum virus
cgacguggagccugaggccgcg

SEQ ID NO: 4043103 - RNA, 22 nt, Molluscum contagiosum virus
cgacguguguccgagaucacgg

SEQ ID NO: 4043104 - RNA, 14 nt, Molluscum contagiosum virus
cgacuacgcgcugc

SEQ ID NO: 4043105 - RNA, 17 nt, Molluscum contagiosum virus
cgacucgcagcucacga

SEQ ID NO: 4043106 - RNA, 13 nt, Molluscum contagiosum virus
cgacucgcgcccg

SEQ ID NO: 4043107 - RNA, 22 nt, Molluscum contagiosum virus
cgacugcgccuucugccugccc

SEQ ID NO: 4043108 - RNA, 21 nt, Molluscum contagiosum virus
cgacuuacggacgcccuccuc

SEQ ID NO: 4043109 - RNA, 12 nt, Molluscum contagiosum virus
cgacuuuguccu

SEQ ID NO: 4043110 - RNA, 18 nt, Molluscum contagiosum virus
cgacuuuucgcgccgcgg

SEQ ID NO: 4043111 - RNA, 20 nt, Molluscum contagiosum virus
cgagaaagaccuugucagug

SEQ ID NO: 4043112 - RNA, 18 nt, Molluscum contagiosum virus
cgagaaaugcgcacacuu

SEQ ID NO: 4043113 - RNA, 14 nt, Molluscum contagiosum virus
cgagaacggcucaa

SEQ ID NO: 4043114 - RNA, 20 nt, Molluscum contagiosum virus
cgagaauuucgacagcaucc

SEQ ID NO: 4043115 - RNA, 14 nt, Molluscum contagiosum virus
cgagacacgcgagc

SEQ ID NO: 4043116 - RNA, 17 nt, Molluscum contagiosum virus
cgagacgcagacgacgc

SEQ ID NO: 4043117 - RNA, 14 nt, Molluscum contagiosum virus
cgagacgcugcugc

SEQ ID NO: 4043118 - RNA, 15 nt, Molluscum contagiosum virus
cgagacgcugcugca

SEQ ID NO: 4043119 - RNA, 17 nt, Molluscum contagiosum virus
cgagacgugcggcacgc

SEQ ID NO: 4043120 - RNA, 18 nt, Molluscum contagiosum virus
cgagagugacgccucgag

SEQ ID NO: 4043121 - RNA, 19 nt, Molluscum contagiosum virus
cgagagugacgccucgaga

SEQ ID NO: 4043122 - RNA, 16 nt, Molluscum contagiosum virus
cgagauugagcucuuu

SEQ ID NO: 4043123 - RNA, 20 nt, Molluscum contagiosum virus
cgagcacagcgcgcggaagc

SEQ ID NO: 4043124 - RNA, 15 nt, Molluscum contagiosum virus
cgagcaccugucgcg

SEQ ID NO: 4043125 - RNA, 16 nt, Molluscum contagiosum virus
cgagcaccugucgcgc

SEQ ID NO: 4043126 - RNA, 16 nt, Molluscum contagiosum virus
cgagcacgagcauucc

SEQ ID NO: 4043127 - RNA, 13 nt, Molluscum contagiosum virus
cgagcacgccucc

SEQ ID NO: 4043128 - RNA, 18 nt, Molluscum contagiosum virus
cgagcacgccuccaagaa

SEQ ID NO: 4043129 - RNA, 23 nt, Molluscum contagiosum virus
cgagcacgccuccaagaagaggc

SEQ ID NO: 4043130 - RNA, 16 nt, Molluscum contagiosum virus
cgagcacgccugcacg

SEQ ID NO: 4043131 - RNA, 16 nt, Molluscum contagiosum virus
gugcgcacaugccgag

SEQ ID NO: 4043132 - RNA, 12 nt, Molluscum contagiosum virus
gugcgcaccauc

SEQ ID NO: 4043133 - RNA, 15 nt, Molluscum contagiosum virus
gugcgccgcgcccgc

SEQ ID NO: 4043134 - RNA, 17 nt, Molluscum contagiosum virus
gugcgcgacggcgagcu

SEQ ID NO: 4043135 - RNA, 15 nt, Molluscum contagiosum virus
gugcgcgcagacgug

SEQ ID NO: 4043136 - RNA, 13 nt, Molluscum contagiosum virus
gugcgcgcugcgc

SEQ ID NO: 4043137 - RNA, 15 nt, Molluscum contagiosum virus
gugcgcgugcgccug

SEQ ID NO: 4043138 - RNA, 17 nt, Molluscum contagiosum virus
gugcgcuggcgcgcgcg

SEQ ID NO: 4043139 - RNA, 20 nt, Molluscum contagiosum virus
gugcgucgacguggagccug

SEQ ID NO: 4043140 - RNA, 17 nt, Molluscum contagiosum virus
gugcgucucccaggaag

SEQ ID NO: 4043141 - RNA, 17 nt, Molluscum contagiosum virus
gugcgucucucugucuc

SEQ ID NO: 4043142 - RNA, 13 nt, Molluscum contagiosum virus
gugcgugcacagc

SEQ ID NO: 4043143 - RNA, 12 nt, Molluscum contagiosum virus
gugcgugcugcg

SEQ ID NO: 4043144 - RNA, 13 nt, Molluscum contagiosum virus
gugcucagcacgc

SEQ ID NO: 4043145 - RNA, 15 nt, Molluscum contagiosum virus
gugcucaggccagca

SEQ ID NO: 4043146 - RNA, 17 nt, Molluscum contagiosum virus
gugcucgccugcaucuu

SEQ ID NO: 4043147 - RNA, 22 nt, Molluscum contagiosum virus
gugcucguguguccgcacgcac

SEQ ID NO: 4043148 - RNA, 22 nt, Molluscum contagiosum virus
gugcucuuuaguacaacgcgcu

SEQ ID NO: 4043149 - RNA, 18 nt, Molluscum contagiosum virus
gugcugaagacgcuggcc

SEQ ID NO: 4043150 - RNA, 18 nt, Molluscum contagiosum virus
gugcugcagcugcgcgag

SEQ ID NO: 4043151 - RNA, 21 nt, Molluscum contagiosum virus
gugcuggacacucgcggcaag

SEQ ID NO: 4043152 - RNA, 14 nt, Molluscum contagiosum virus
gugcuggacgcgca

SEQ ID NO: 4043153 - RNA, 23 nt, Molluscum contagiosum virus
gugcuggagcagacguacgagca

SEQ ID NO: 4043154 - RNA, 16 nt, Molluscum contagiosum virus
gugcuggcggggcugg

SEQ ID NO: 4043155 - RNA, 21 nt, Molluscum contagiosum virus
gugcuggucaacagcuacacc

SEQ ID NO: 4043156 - RNA, 17 nt, Molluscum contagiosum virus
gugcugucccucugugc

SEQ ID NO: 4043157 - RNA, 12 nt, Molluscum contagiosum virus
gugcugugccua

SEQ ID NO: 4043158 - RNA, 14 nt, Molluscum contagiosum virus
gugcugugccuagg

SEQ ID NO: 4043159 - RNA, 14 nt, Molluscum contagiosum virus
gugcuugcgcacgg

SEQ ID NO: 4043160 - RNA, 23 nt, Molluscum contagiosum virus
guggaccuuggcgcgccgcugcc

SEQ ID NO: 4043161 - RNA, 13 nt, Molluscum contagiosum virus
guggacgagcaga

SEQ ID NO: 4043162 - RNA, 22 nt, Molluscum contagiosum virus
guggacgagcgcuaccugaugc

SEQ ID NO: 4043163 - RNA, 20 nt, Molluscum contagiosum virus
guggaucgcgcgcaccugca

SEQ ID NO: 4043164 - RNA, 16 nt, Molluscum contagiosum virus
guggauuucggcgcgc

SEQ ID NO: 4043165 - RNA, 18 nt, Molluscum contagiosum virus
guggcacccuggcugcug

SEQ ID NO: 4043166 - RNA, 19 nt, Molluscum contagiosum virus
guggcacccuggcugcugc

SEQ ID NO: 4043167 - RNA, 21 nt, Molluscum contagiosum virus
guggccaaggucucgagcucc

SEQ ID NO: 4043168 - RNA, 14 nt, Molluscum contagiosum virus
guggccaggccgcg

SEQ ID NO: 4043169 - RNA, 23 nt, Molluscum contagiosum virus
guggccgcgccgggcgccagaac

SEQ ID NO: 4043170 - RNA, 18 nt, Molluscum contagiosum virus
guggccuuuagcagcggc

SEQ ID NO: 4043171 - RNA, 13 nt, Molluscum contagiosum virus
guggcgagcaucu

SEQ ID NO: 4043172 - RNA, 20 nt, Molluscum contagiosum virus
guggcgagcaucugcgcgug

SEQ ID NO: 4043173 - RNA, 23 nt, Molluscum contagiosum virus
guggcgccauugcucgcggugcc

SEQ ID NO: 4043174 - RNA, 16 nt, Molluscum contagiosum virus
guggcgccugcgcgcg

SEQ ID NO: 4043175 - RNA, 22 nt, Molluscum contagiosum virus
guggcgcgaagugaacucuucc

SEQ ID NO: 4043176 - RNA, 17 nt, Molluscum contagiosum virus
guggcggcucugccgcg

SEQ ID NO: 4043177 - RNA, 11 nt, Molluscum contagiosum virus
guggcugugcg

SEQ ID NO: 4043178 - RNA, 22 nt, Molluscum contagiosum virus
gugggcaccugcaucgcgccgc

SEQ ID NO: 4043179 - RNA, 16 nt, Molluscum contagiosum virus
guggucgcgcgcgcuc

SEQ ID NO: 4043180 - RNA, 17 nt, Molluscum contagiosum virus
gugguuuacaucggcuc

SEQ ID NO: 4043181 - RNA, 22 nt, Molluscum contagiosum virus
guguacgcacggggccgcacgc

SEQ ID NO: 4043182 - RNA, 14 nt, Molluscum contagiosum virus
guguccacgacacu

SEQ ID NO: 4043183 - RNA, 22 nt, Molluscum contagiosum virus
guguccacgaugaacggcuccu

SEQ ID NO: 4043184 - RNA, 19 nt, Molluscum contagiosum virus
guguccgcgggcgcgcgcc

SEQ ID NO: 4043185 - RNA, 14 nt, Molluscum contagiosum virus
guguccucuucaca

SEQ ID NO: 4043186 - RNA, 16 nt, Molluscum contagiosum virus
gugucuggagcccacg

SEQ ID NO: 4043187 - RNA, 24 nt, Molluscum contagiosum virus
gugugcaggaacugcccgcgucgc

SEQ ID NO: 4043188 - RNA, 18 nt, Molluscum contagiosum virus
gugugccagcggcgccgc

SEQ ID NO: 4043189 - RNA, 17 nt, Molluscum contagiosum virus
gugugcggagagccgcc

SEQ ID NO: 4043190 - RNA, 13 nt, Molluscum contagiosum virus
gugugcguacugg

SEQ ID NO: 4043191 - RNA, 17 nt, Molluscum contagiosum virus
gugugcucugugcgcgc

SEQ ID NO: 4043192 - RNA, 19 nt, Molluscum contagiosum virus
guguggcuugcgggacaga

SEQ ID NO: 4043193 - RNA, 13 nt, Molluscum contagiosum virus
guguugcuguucc

SEQ ID NO: 4043194 - RNA, 11 nt, Molluscum contagiosum virus
guguuucucgc

SEQ ID NO: 4043195 - RNA, 14 nt, Molluscum contagiosum virus
guuacucucagagc

SEQ ID NO: 4043196 - RNA, 22 nt, Molluscum contagiosum virus
guucaacaucguggcgcgcgcg

SEQ ID NO: 4043197 - RNA, 15 nt, Molluscum contagiosum virus
guucagguagcgcgc

SEQ ID NO: 4043198 - RNA, 17 nt, Molluscum contagiosum virus
guuccacuacaagcagc

SEQ ID NO: 4043199 - RNA, 16 nt, Molluscum contagiosum virus
guuccagcuccggcuu

SEQ ID NO: 4043200 - RNA, 17 nt, Molluscum contagiosum virus
guuccaggaacgccgcc

SEQ ID NO: 4043201 - RNA, 20 nt, Molluscum contagiosum virus
guuccaggaacgccgccacg

SEQ ID NO: 4043202 - RNA, 13 nt, Molluscum contagiosum virus
guuccccgugagc

SEQ ID NO: 4043203 - RNA, 17 nt, Molluscum contagiosum virus
guuccgaacaguacuuu

SEQ ID NO: 4043204 - RNA, 22 nt, Molluscum contagiosum virus
guuccgccuaccccuugcuuca

SEQ ID NO: 4043205 - RNA, 14 nt, Molluscum contagiosum virus
guuccugccgggag

SEQ ID NO: 4043206 - RNA, 17 nt, Molluscum contagiosum virus
guuccuggugugccagc

SEQ ID NO: 4043207 - RNA, 17 nt, Molluscum contagiosum virus
guucgacuacacgcgcu

SEQ ID NO: 4043208 - RNA, 17 nt, Molluscum contagiosum virus
guucgagaccagccgcg

SEQ ID NO: 4043209 - RNA, 15 nt, Molluscum contagiosum virus
guucgagcugcugcg

SEQ ID NO: 4043210 - RNA, 17 nt, Molluscum contagiosum virus
guucgcggagcugugcc

SEQ ID NO: 4043211 - RNA, 18 nt, Molluscum contagiosum virus
guucgcggagcugugccg

SEQ ID NO: 4043212 - RNA, 16 nt, Molluscum contagiosum virus
guucgcgggaccgccc

SEQ ID NO: 4043213 - RNA, 15 nt, Molluscum contagiosum virus
guucgcugcuggcag

SEQ ID NO: 4043214 - RNA, 17 nt, Molluscum contagiosum virus
guucguccgcucgugcc

SEQ ID NO: 4043215 - RNA, 20 nt, Molluscum contagiosum virus
guucugcaucuucugccagg

SEQ ID NO: 4043216 - RNA, 20 nt, Molluscum contagiosum virus
guugaagcucucgcagagga

SEQ ID NO: 4043217 - RNA, 14 nt, Molluscum contagiosum virus
guugcagcccacca

SEQ ID NO: 4043218 - RNA, 17 nt, Molluscum contagiosum virus
guugccgcgcgcugcuc

SEQ ID NO: 4043219 - RNA, 13 nt, Molluscum contagiosum virus
guugccugcacug

SEQ ID NO: 4043220 - RNA, 19 nt, Molluscum contagiosum virus
guugcgcacguuggccacg

SEQ ID NO: 4043221 - RNA, 24 nt, Molluscum contagiosum virus
guugcgcagcacaaacucgcagaa

SEQ ID NO: 4043222 - RNA, 15 nt, Molluscum contagiosum virus
guuggucuccuccuu

SEQ ID NO: 4043223 - RNA, 16 nt, Molluscum contagiosum virus
guugucgaguucgcuc

SEQ ID NO: 4043224 - RNA, 18 nt, Molluscum contagiosum virus
guuguugcaucuucuugc

SEQ ID NO: 4043225 - RNA, 23 nt, Molluscum contagiosum virus
guuuccagggcaguacgcgcgug

SEQ ID NO: 4043226 - RNA, 19 nt, Molluscum contagiosum virus
guuugcgcucucagagcau

SEQ ID NO: 4043227 - RNA, 21 nt, Molluscum contagiosum virus
guuugcgggcgcaggcccgcc

SEQ ID NO: 4043228 - RNA, 12 nt, Molluscum contagiosum virus
uaacaaggaaaa

SEQ ID NO: 4043229 - RNA, 14 nt, Molluscum contagiosum virus
uaagaguccacugc

SEQ ID NO: 4043230 - RNA, 23 nt, Molluscum contagiosum virus
uaagcucugcguuuugcgcggca

SEQ ID NO: 4043231 - RNA, 15 nt, Molluscum contagiosum virus
uacacauugcgugug

SEQ ID NO: 4043232 - RNA, 20 nt, Molluscum contagiosum virus
uacaccagcuggacggugcu

SEQ ID NO: 4043233 - RNA, 17 nt, Molluscum contagiosum virus
uacacgcacgaccucac

SEQ ID NO: 4043234 - RNA, 22 nt, Molluscum contagiosum virus
uacacguggaauugcggccagg

SEQ ID NO: 4043235 - RNA, 18 nt, Molluscum contagiosum virus
gcgugucgcggagcaacg

SEQ ID NO: 4043236 - RNA, 23 nt, Molluscum contagiosum virus
gcgugucgguaugcgaggccugc

SEQ ID NO: 4043237 - RNA, 16 nt, Molluscum contagiosum virus
gcgugucuggagccca

SEQ ID NO: 4043238 - RNA, 21 nt, Molluscum contagiosum virus
gcgugugcgcgagcugaggca

SEQ ID NO: 4043239 - RNA, 18 nt, Molluscum contagiosum virus
gcguguugaacucgagca

SEQ ID NO: 4043240 - RNA, 16 nt, Molluscum contagiosum virus
gcguucacggacucga

SEQ ID NO: 4043241 - RNA, 17 nt, Molluscum contagiosum virus
gcguucuccaggaacgc

SEQ ID NO: 4043242 - RNA, 16 nt, Molluscum contagiosum virus
gcguucuucguggcgc

SEQ ID NO: 4043243 - RNA, 13 nt, Molluscum contagiosum virus
gcguugcugcugc

SEQ ID NO: 4043244 - RNA, 13 nt, Molluscum contagiosum virus
gcguuguccgcgu

SEQ ID NO: 4043245 - RNA, 16 nt, Molluscum contagiosum virus
gcguugugcggggcuc

SEQ ID NO: 4043246 - RNA, 19 nt, Molluscum contagiosum virus
gcuacagcagccgcagccc

SEQ ID NO: 4043247 - RNA, 23 nt, Molluscum contagiosum virus
gcuaccaagaacagagaaaggca

SEQ ID NO: 4043248 - RNA, 16 nt, Molluscum contagiosum virus
gcuaccagcucgcgca

SEQ ID NO: 4043249 - RNA, 16 nt, Molluscum contagiosum virus
gcuacccguugcugcg

SEQ ID NO: 4043250 - RNA, 14 nt, Molluscum contagiosum virus
gcuacgcagcgcgc

SEQ ID NO: 4043251 - RNA, 14 nt, Molluscum contagiosum virus
gcuacgcgagcacu

SEQ ID NO: 4043252 - RNA, 15 nt, Molluscum contagiosum virus
gcuacgcgagcacug

SEQ ID NO: 4043253 - RNA, 19 nt, Molluscum contagiosum virus
gcuacgcgagcacugcgcg

SEQ ID NO: 4043254 - RNA, 18 nt, Molluscum contagiosum virus
gcuacgucgcggcgcacg

SEQ ID NO: 4043255 - RNA, 20 nt, Molluscum contagiosum virus
gcuacgucgcggcgcacggu

SEQ ID NO: 4043256 - RNA, 18 nt, Molluscum contagiosum virus
gcuacugcaacguggcgc

SEQ ID NO: 4043257 - RNA, 17 nt, Molluscum contagiosum virus
gcuacuuggacgcgauc

SEQ ID NO: 4043258 - RNA, 13 nt, Molluscum contagiosum virus
gcuagagugcgcg

SEQ ID NO: 4043259 - RNA, 18 nt, Molluscum contagiosum virus
gcuagcaggcgucgcgca

SEQ ID NO: 4043260 - RNA, 22 nt, Molluscum contagiosum virus
gcuagccgccgcugccgcgcgc

SEQ ID NO: 4043261 - RNA, 17 nt, Molluscum contagiosum virus
gcuagcgcuggagauga

SEQ ID NO: 4043262 - RNA, 19 nt, Molluscum contagiosum virus
gcuagcuccacgugccgcu

SEQ ID NO: 4043263 - RNA, 11 nt, Molluscum contagiosum virus
gcuagcucugc

SEQ ID NO: 4043264 - RNA, 23 nt, Molluscum contagiosum virus
gcuaguccgcguacagcgcgcgu

SEQ ID NO: 4043265 - RNA, 21 nt, Molluscum contagiosum virus
gcucaaaguguacuauuacac

SEQ ID NO: 4043266 - RNA, 14 nt, Molluscum contagiosum virus
gcucaagaucucgc

SEQ ID NO: 4043267 - RNA, 22 nt, Molluscum contagiosum virus
gcucacccugcacgcuacggcu

SEQ ID NO: 4043268 - RNA, 16 nt, Molluscum contagiosum virus
gcucaccgccgagaug

SEQ ID NO: 4043269 - RNA, 22 nt, Molluscum contagiosum virus
gcucaccgccgagauggagcuc

SEQ ID NO: 4043270 - RNA, 14 nt, Molluscum contagiosum virus
gcucaccgcgcaga

SEQ ID NO: 4043271 - RNA, 19 nt, Molluscum contagiosum virus
gcucaccgcgcagaagcca

SEQ ID NO: 4043272 - RNA, 14 nt, Molluscum contagiosum virus
gcucacgcugcccg

SEQ ID NO: 4043273 - RNA, 18 nt, Molluscum contagiosum virus
gcucacggcggcgcucaa

SEQ ID NO: 4043274 - RNA, 21 nt, Molluscum contagiosum virus
gcucacguacgacugcuuuga

SEQ ID NO: 4043275 - RNA, 17 nt, Molluscum contagiosum virus
gcucauacuccugcugg

SEQ ID NO: 4043276 - RNA, 23 nt, Molluscum contagiosum virus
gcucaucaccgacacgcgcccgc

SEQ ID NO: 4043277 - RNA, 21 nt, Molluscum contagiosum virus
gcucaugcgcgggaugcugga

SEQ ID NO: 4043278 - RNA, 18 nt, Molluscum contagiosum virus
gcucauggacaugcucga

SEQ ID NO: 4043279 - RNA, 23 nt, Molluscum contagiosum virus
gcucauggucgucuccgggggcg

SEQ ID NO: 4043280 - RNA, 14 nt, Molluscum contagiosum virus
gcuccaacagcagc

SEQ ID NO: 4043281 - RNA, 15 nt, Molluscum contagiosum virus
gcuccaacagcagcu

SEQ ID NO: 4043282 - RNA, 22 nt, Molluscum contagiosum virus
gcuccagagccgcgugcgccgc

SEQ ID NO: 4043283 - RNA, 19 nt, Molluscum contagiosum virus
gcuccagcauggcgccaca

SEQ ID NO: 4043284 - RNA, 20 nt, Molluscum contagiosum virus
gcuccagcguuuccucuggc

SEQ ID NO: 4043285 - RNA, 15 nt, Molluscum contagiosum virus
gcucccucgcgcgca

SEQ ID NO: 4043286 - RNA, 19 nt, Molluscum contagiosum virus
gcuccgcacguggagucac

SEQ ID NO: 4043287 - RNA, 12 nt, Molluscum contagiosum virus
gcuccgccugca

SEQ ID NO: 4043288 - RNA, 22 nt, Molluscum contagiosum virus
gcuccgcgcggcgcucugccac

SEQ ID NO: 4043289 - RNA, 18 nt, Molluscum contagiosum virus
gcuccgggcgcuccgagc

SEQ ID NO: 4043290 - RNA, 22 nt, Molluscum contagiosum virus
gcuccgugcccacgagcgccag

SEQ ID NO: 4043291 - RNA, 22 nt, Molluscum contagiosum virus
gcuccuauaaauggccgcgccc

SEQ ID NO: 4043292 - RNA, 16 nt, Molluscum contagiosum virus
gcuccucgcacgggcg

SEQ ID NO: 4043293 - RNA, 16 nt, Molluscum contagiosum virus
gcuccugaucugcgug

SEQ ID NO: 4043294 - RNA, 18 nt, Molluscum contagiosum virus
gcuccuggucuucccgcu

SEQ ID NO: 4043295 - RNA, 17 nt, Molluscum contagiosum virus
gcuccuucucagggcuu

SEQ ID NO: 4043296 - RNA, 19 nt, Molluscum contagiosum virus
gcucgaacgcgcgugcgcg

SEQ ID NO: 4043297 - RNA, 17 nt, Molluscum contagiosum virus
gcucgaaguagccuccg

SEQ ID NO: 4043298 - RNA, 12 nt, Molluscum contagiosum virus
gcucgagaacga

SEQ ID NO: 4043299 - RNA, 19 nt, Molluscum contagiosum virus
gcucgagccugccagcgcc

SEQ ID NO: 4043300 - RNA, 15 nt, Molluscum contagiosum virus
gcucgagcgcgcgcc

SEQ ID NO: 4043301 - RNA, 20 nt, Molluscum contagiosum virus
gcucgaggaccucgcgcgcc

SEQ ID NO: 4043302 - RNA, 15 nt, Molluscum contagiosum virus
gcucgaggcgccguc

SEQ ID NO: 4043303 - RNA, 15 nt, Molluscum contagiosum virus
gcucgaggugugccu

SEQ ID NO: 4043304 - RNA, 19 nt, Molluscum contagiosum virus
guacuccuugaagggcaca

SEQ ID NO: 4043305 - RNA, 16 nt, Molluscum contagiosum virus
guacugccgccaggaa

SEQ ID NO: 4043306 - RNA, 13 nt, Molluscum contagiosum virus
guacugcugcagg

SEQ ID NO: 4043307 - RNA, 14 nt, Molluscum contagiosum virus
guagcaaggggucu

SEQ ID NO: 4043308 - RNA, 19 nt, Molluscum contagiosum virus
guagcacgaaggacgcgcu

SEQ ID NO: 4043309 - RNA, 16 nt, Molluscum contagiosum virus
guagcagcgccggcag

SEQ ID NO: 4043310 - RNA, 20 nt, Molluscum contagiosum virus
guagcagcgccugcacgcac

SEQ ID NO: 4043311 - RNA, 20 nt, Molluscum contagiosum virus
guagcccaggaacaucugca

SEQ ID NO: 4043312 - RNA, 20 nt, Molluscum contagiosum virus
guagcgaaugcagugcccgg

SEQ ID NO: 4043313 - RNA, 17 nt, Molluscum contagiosum virus
guagcgcucgcccagcu

SEQ ID NO: 4043314 - RNA, 15 nt, Molluscum contagiosum virus
guagcgugcgccugc

SEQ ID NO: 4043315 - RNA, 18 nt, Molluscum contagiosum virus
guagcuagcucugcgcgc

SEQ ID NO: 4043316 - RNA, 15 nt, Molluscum contagiosum virus
guaguacggcacgga

SEQ ID NO: 4043317 - RNA, 17 nt, Molluscum contagiosum virus
guaugcccacugggaac

SEQ ID NO: 4043318 - RNA, 19 nt, Molluscum contagiosum virus
guaugcgaggccugcgugg

SEQ ID NO: 4043319 - RNA, 19 nt, Molluscum contagiosum virus
gucaacagugcgugccagg

SEQ ID NO: 4043320 - RNA, 18 nt, Molluscum contagiosum virus
gucaagcagcgcgccacc

SEQ ID NO: 4043321 - RNA, 15 nt, Molluscum contagiosum virus
gucaaugacacgagc

SEQ ID NO: 4043322 - RNA, 20 nt, Molluscum contagiosum virus
gucaauggcgcgcgagcaca

SEQ ID NO: 4043323 - RNA, 18 nt, Molluscum contagiosum virus
gucacgcgcaaggccgcg

SEQ ID NO: 4043324 - RNA, 19 nt, Molluscum contagiosum virus
gucacgcuggucacgcgcu

SEQ ID NO: 4043325 - RNA, 16 nt, Molluscum contagiosum virus
gucacggccuucgcgc

SEQ ID NO: 4043326 - RNA, 18 nt, Molluscum contagiosum virus
gucacucgcgagacggaa

SEQ ID NO: 4043327 - RNA, 16 nt, Molluscum contagiosum virus
gucagcagcgcgagcu

SEQ ID NO: 4043328 - RNA, 17 nt, Molluscum contagiosum virus
gucagccgcacggcgcc

SEQ ID NO: 4043329 - RNA, 18 nt, Molluscum contagiosum virus
gucagccucugugcggcg

SEQ ID NO: 4043330 - RNA, 15 nt, Molluscum contagiosum virus
gucaguacaugcccg

SEQ ID NO: 4043331 - RNA, 17 nt, Molluscum contagiosum virus
gucaucaccagccugcu

SEQ ID NO: 4043332 - RNA, 14 nt, Molluscum contagiosum virus
gucaucggagagcc

SEQ ID NO: 4043333 - RNA, 19 nt, Molluscum contagiosum virus
gucaucgggcugcagcccu

SEQ ID NO: 4043334 - RNA, 21 nt, Molluscum contagiosum virus
guccacaaagcccuccugaga

SEQ ID NO: 4043335 - RNA, 12 nt, Molluscum contagiosum virus
guccacguggug

SEQ ID NO: 4043336 - RNA, 17 nt, Molluscum contagiosum virus
guccagccgcagccgcg

SEQ ID NO: 4043337 - RNA, 17 nt, Molluscum contagiosum virus
guccaucaaggccuacg

SEQ ID NO: 4043338 - RNA, 14 nt, Molluscum contagiosum virus
guccaucggugggc

SEQ ID NO: 4043339 - RNA, 19 nt, Molluscum contagiosum virus
gucccagcaccgcgccgcg

SEQ ID NO: 4043340 - RNA, 12 nt, Molluscum contagiosum virus
guccccaagagc

SEQ ID NO: 4043341 - RNA, 21 nt, Molluscum contagiosum virus
guccgacaccggacgaaaggu

SEQ ID NO: 4043342 - RNA, 19 nt, Molluscum contagiosum virus
guccgacuccaaggagguc

SEQ ID NO: 4043343 - RNA, 22 nt, Molluscum contagiosum virus
guccgcacgaggagccccgcgg

SEQ ID NO: 4043344 - RNA, 16 nt, Molluscum contagiosum virus
guccgcacgcacacga

SEQ ID NO: 4043345 - RNA, 20 nt, Molluscum contagiosum virus
guccgcacgcacggagcaca

SEQ ID NO: 4043346 - RNA, 20 nt, Molluscum contagiosum virus
guccgccucgagcacgccuc

SEQ ID NO: 4043347 - RNA, 19 nt, Molluscum contagiosum virus
guccgcggacgcgggccug

SEQ ID NO: 4043348 - RNA, 20 nt, Molluscum contagiosum virus
guccgcggacgcgggccugu

SEQ ID NO: 4043349 - RNA, 14 nt, Molluscum contagiosum virus
guccgcggcgcgcc

SEQ ID NO: 4043350 - RNA, 22 nt, Molluscum contagiosum virus
guccgcucgugccacugccgcc

SEQ ID NO: 4043351 - RNA, 21 nt, Molluscum contagiosum virus
guccggcaugcgcgcgcugcc

SEQ ID NO: 4043352 - RNA, 16 nt, Molluscum contagiosum virus
guccggcccgaagccg

SEQ ID NO: 4043353 - RNA, 15 nt, Molluscum contagiosum virus
guccggcgcucgccc

SEQ ID NO: 4043354 - RNA, 20 nt, Molluscum contagiosum virus
guccuacacgccgcuggagc

SEQ ID NO: 4043355 - RNA, 13 nt, Molluscum contagiosum virus
guccugcgugcuu

SEQ ID NO: 4043356 - RNA, 14 nt, Molluscum contagiosum virus
guccugcuagcgug

SEQ ID NO: 4043357 - RNA, 18 nt, Molluscum contagiosum virus
guccuguccgcggacgcg

SEQ ID NO: 4043358 - RNA, 16 nt, Molluscum contagiosum virus
guccuucaagaacgac

SEQ ID NO: 4043359 - RNA, 21 nt, Molluscum contagiosum virus
gucgagagcgcguucacaaag

SEQ ID NO: 4043360 - RNA, 18 nt, Molluscum contagiosum virus
gucgaguucgcucgcucg

SEQ ID NO: 4043361 - RNA, 22 nt, Molluscum contagiosum virus
gucgcaaccccgcgcugcgcgg

SEQ ID NO: 4043362 - RNA, 14 nt, Molluscum contagiosum virus
gucgcccgccgagc

SEQ ID NO: 4043363 - RNA, 22 nt, Molluscum contagiosum virus
gucgccggacagcucagcaggc

SEQ ID NO: 4043364 - RNA, 12 nt, Molluscum contagiosum virus
gucgccgucguc

SEQ ID NO: 4043365 - RNA, 13 nt, Molluscum contagiosum virus
gucgcgacgcgcu

SEQ ID NO: 4043366 - RNA, 15 nt, Molluscum contagiosum virus
gucgcgacggagaug

SEQ ID NO: 4043367 - RNA, 14 nt, Molluscum contagiosum virus
gucgcgcgccacaa

SEQ ID NO: 4043368 - RNA, 13 nt, Molluscum contagiosum virus
gucgcgcgccgca

SEQ ID NO: 4043369 - RNA, 21 nt, Molluscum contagiosum virus
gucgcgcgcuaccugcgcaag

SEQ ID NO: 4043370 - RNA, 15 nt, Molluscum contagiosum virus
gucgcgcgcugugga

SEQ ID NO: 4043371 - RNA, 16 nt, Molluscum contagiosum virus
gucgcgcuuccgcgag

SEQ ID NO: 4043372 - RNA, 16 nt, Molluscum contagiosum virus
gucgcgggcgcgcgcg

SEQ ID NO: 4043373 - RNA, 14 nt, Molluscum contagiosum virus
gucguaccuguguu

SEQ ID NO: 4043374 - RNA, 21 nt, Molluscum contagiosum virus
gucguagcaaaugcgcugcuc

SEQ ID NO: 4043375 - RNA, 13 nt, Molluscum contagiosum virus
gucguagcggcgg

SEQ ID NO: 4043376 - RNA, 12 nt, Molluscum contagiosum virus
gucuacgugucc

SEQ ID NO: 4043377 - RNA, 22 nt, Molluscum contagiosum virus
gucuagccgugaacgaggcugc

SEQ ID NO: 4043378 - RNA, 21 nt, Molluscum contagiosum virus
gucuccacgcgugcgcgccag

SEQ ID NO: 4043379 - RNA, 21 nt, Molluscum contagiosum virus
gucuccuccuugauuucgcgc

SEQ ID NO: 4043380 - RNA, 23 nt, Molluscum contagiosum virus
gucucgagcuuccucaaggcgca

SEQ ID NO: 4043381 - RNA, 21 nt, Molluscum contagiosum virus
gucugaaaggacaugggcaca

SEQ ID NO: 4043382 - RNA, 15 nt, Molluscum contagiosum virus
gucugcaaggccugu

SEQ ID NO: 4043383 - RNA, 15 nt, Molluscum contagiosum virus
gucuggccgggcucg

SEQ ID NO: 4043384 - RNA, 21 nt, Molluscum contagiosum virus
gugaacgaggcugcugccgcg

SEQ ID NO: 4043385 - RNA, 19 nt, Molluscum contagiosum virus
gugaagacgcuggcggcgc

SEQ ID NO: 4043386 - RNA, 15 nt, Molluscum contagiosum virus
gugaccugcgccauc

SEQ ID NO: 4043387 - RNA, 20 nt, Molluscum contagiosum virus
gugacggccguguacaugcu

SEQ ID NO: 4043388 - RNA, 12 nt, Molluscum contagiosum virus
gugagugcgcgc

SEQ ID NO: 4043389 - RNA, 16 nt, Molluscum contagiosum virus
gugaugugcgcacaga

SEQ ID NO: 4043390 - RNA, 17 nt, Molluscum contagiosum virus
gugcaagcccagcagcg

SEQ ID NO: 4043391 - RNA, 13 nt, Molluscum contagiosum virus
gugcaauuccguc

SEQ ID NO: 4043392 - RNA, 19 nt, Molluscum contagiosum virus
gugcacauugcugcugcag

SEQ ID NO: 4043393 - RNA, 20 nt, Molluscum contagiosum virus
gugcacucgagaagaggguc

SEQ ID NO: 4043394 - RNA, 21 nt, Molluscum contagiosum virus
gugcagaugaggcugcucucc

SEQ ID NO: 4043395 - RNA, 18 nt, Molluscum contagiosum virus
gugcagggcgugcuugcc

SEQ ID NO: 4043396 - RNA, 11 nt, Molluscum contagiosum virus
gugccacugcc

SEQ ID NO: 4043397 - RNA, 20 nt, Molluscum contagiosum virus
gugccaucucgcacacugca

SEQ ID NO: 4043398 - RNA, 21 nt, Molluscum contagiosum virus
gugccaucucgcacacugcag

SEQ ID NO: 4043399 - RNA, 16 nt, Molluscum contagiosum virus
gugcccuacgcgcgcg

SEQ ID NO: 4043400 - RNA, 12 nt, Molluscum contagiosum virus
gugcccugucca

SEQ ID NO: 4043401 - RNA, 15 nt, Molluscum contagiosum virus
gugccgacgugugcc

SEQ ID NO: 4043402 - RNA, 18 nt, Molluscum contagiosum virus
gugccgagcucgccuccu

SEQ ID NO: 4043403 - RNA, 21 nt, Molluscum contagiosum virus
gugccgcaagaaaggcggugc

SEQ ID NO: 4043404 - RNA, 23 nt, Molluscum contagiosum virus
gugccgcuccuucgaagaggucu

SEQ ID NO: 4043405 - RNA, 18 nt, Molluscum contagiosum virus
gugccgggcuugcucccu

SEQ ID NO: 4043406 - RNA, 19 nt, Molluscum contagiosum virus
gugccuuguacgggugcau

SEQ ID NO: 4043407 - RNA, 21 nt, Molluscum contagiosum virus
gugcgagaacuggcgcagcag

SEQ ID NO: 4043408 - RNA, 17 nt, Molluscum contagiosum virus
gcucuucgacagcgugc

SEQ ID NO: 4043409 - RNA, 19 nt, Molluscum contagiosum virus
gcucuucgaccucugcuuc

SEQ ID NO: 4043410 - RNA, 13 nt, Molluscum contagiosum virus
gcucuucucgcag

SEQ ID NO: 4043411 - RNA, 18 nt, Molluscum contagiosum virus
gcugaagaaggagcccuu

SEQ ID NO: 4043412 - RNA, 24 nt, Molluscum contagiosum virus
gcugaaggcauaccugugccagcg

SEQ ID NO: 4043413 - RNA, 18 nt, Molluscum contagiosum virus
gcugacccucgcggcucu

SEQ ID NO: 4043414 - RNA, 19 nt, Molluscum contagiosum virus
gcugacggccggcgggcgc

SEQ ID NO: 4043415 - RNA, 19 nt, Molluscum contagiosum virus
gcugagagacuucuugcac

SEQ ID NO: 4043416 - RNA, 17 nt, Molluscum contagiosum virus
gcugagcaagcucaaga

SEQ ID NO: 4043417 - RNA, 18 nt, Molluscum contagiosum virus
gcugagcgcgcugcgccg

SEQ ID NO: 4043418 - RNA, 14 nt, Molluscum contagiosum virus
gcugagcgugucga

SEQ ID NO: 4043419 - RNA, 17 nt, Molluscum contagiosum virus
gcugagcuagugccgag

SEQ ID NO: 4043420 - RNA, 14 nt, Molluscum contagiosum virus
gcugaugcccaggc

SEQ ID NO: 4043421 - RNA, 18 nt, Molluscum contagiosum virus
gcugcaagauuguagaga

SEQ ID NO: 4043422 - RNA, 19 nt, Molluscum contagiosum virus
gcugcacacaccgcgagca

SEQ ID NO: 4043423 - RNA, 16 nt, Molluscum contagiosum virus
gcugcacaugugcgug

SEQ ID NO: 4043424 - RNA, 13 nt, Molluscum contagiosum virus
gcugcaccggcgc

SEQ ID NO: 4043425 - RNA, 15 nt, Molluscum contagiosum virus
gcugcacgugcagcg

SEQ ID NO: 4043426 - RNA, 16 nt, Molluscum contagiosum virus
gcugcagaacugccug

SEQ ID NO: 4043427 - RNA, 20 nt, Molluscum contagiosum virus
gcugcagaacugccugguca

SEQ ID NO: 4043428 - RNA, 17 nt, Molluscum contagiosum virus
gcugcaggaccugcugg

SEQ ID NO: 4043429 - RNA, 19 nt, Molluscum contagiosum virus
gcugcaggaccugcuggug

SEQ ID NO: 4043430 - RNA, 12 nt, Molluscum contagiosum virus
gcugccccccuc

SEQ ID NO: 4043431 - RNA, 21 nt, Molluscum contagiosum virus
gcugcccccgccaugccaacg

SEQ ID NO: 4043432 - RNA, 21 nt, Molluscum contagiosum virus
gcugcccgcgcgcgacuacgc

SEQ ID NO: 4043433 - RNA, 19 nt, Molluscum contagiosum virus
gcugcccgcggagaccacc

SEQ ID NO: 4043434 - RNA, 20 nt, Molluscum contagiosum virus
gcugcccguggugggccgcg

SEQ ID NO: 4043435 - RNA, 15 nt, Molluscum contagiosum virus
gcugccggcucaagc

SEQ ID NO: 4043436 - RNA, 16 nt, Molluscum contagiosum virus
gcugcgcacgugcgcg

SEQ ID NO: 4043437 - RNA, 20 nt, Molluscum contagiosum virus
gcugcgcauggccacgcccg

SEQ ID NO: 4043438 - RNA, 15 nt, Molluscum contagiosum virus
gcugcgccggcugcg

SEQ ID NO: 4043439 - RNA, 20 nt, Molluscum contagiosum virus
gcugcgccggcugcgccacc

SEQ ID NO: 4043440 - RNA, 12 nt, Molluscum contagiosum virus
gcugcgcgcgcu

SEQ ID NO: 4043441 - RNA, 18 nt, Molluscum contagiosum virus
gcugcgcuccaugcugcc

SEQ ID NO: 4043442 - RNA, 19 nt, Molluscum contagiosum virus
gcugcgcuggaugcugcuc

SEQ ID NO: 4043443 - RNA, 17 nt, Molluscum contagiosum virus
gcugcggcugcugccug

SEQ ID NO: 4043444 - RNA, 15 nt, Molluscum contagiosum virus
gcugcggcugcugga

SEQ ID NO: 4043445 - RNA, 19 nt, Molluscum contagiosum virus
gcugcguucgagcugaucg

SEQ ID NO: 4043446 - RNA, 17 nt, Molluscum contagiosum virus
gcugcguuuccagggca

SEQ ID NO: 4043447 - RNA, 19 nt, Molluscum contagiosum virus
gcugcguuuccagggcagu

SEQ ID NO: 4043448 - RNA, 20 nt, Molluscum contagiosum virus
gcugcuccccgccagcacca

SEQ ID NO: 4043449 - RNA, 24 nt, Molluscum contagiosum virus
gcugcucgagauucguggcgagca

SEQ ID NO: 4043450 - RNA, 20 nt, Molluscum contagiosum virus
gcugcucuacuuccacgagc

SEQ ID NO: 4043451 - RNA, 21 nt, Molluscum contagiosum virus
gcugcucuacuuccacgagcu

SEQ ID NO: 4043452 - RNA, 18 nt, Molluscum contagiosum virus
gcugcugcggcugcugga

SEQ ID NO: 4043453 - RNA, 19 nt, Molluscum contagiosum virus
gcugcugcggcugcuggag

SEQ ID NO: 4043454 - RNA, 19 nt, Molluscum contagiosum virus
gcugcugcucuuccaggag

SEQ ID NO: 4043455 - RNA, 16 nt, Molluscum contagiosum virus
gcugcugguucugcuc

SEQ ID NO: 4043456 - RNA, 18 nt, Molluscum contagiosum virus
gcugcuucccgcugagcg

SEQ ID NO: 4043457 - RNA, 13 nt, Molluscum contagiosum virus
gcuggacgugggc

SEQ ID NO: 4043458 - RNA, 22 nt, Molluscum contagiosum virus
gcuggagaaagaagugugccug

SEQ ID NO: 4043459 - RNA, 16 nt, Molluscum contagiosum virus
gcuggagacggcagug

SEQ ID NO: 4043460 - RNA, 13 nt, Molluscum contagiosum virus
gcuggagcacgac

SEQ ID NO: 4043461 - RNA, 23 nt, Molluscum contagiosum virus
gcuggagcagacguacgagcagg

SEQ ID NO: 4043462 - RNA, 22 nt, Molluscum contagiosum virus
gcuggagcgagugcgcgugcgc

SEQ ID NO: 4043463 - RNA, 13 nt, Molluscum contagiosum virus
gcuggaggauucu

SEQ ID NO: 4043464 - RNA, 15 nt, Molluscum contagiosum virus
gcuggcaccgggcgc

SEQ ID NO: 4043465 - RNA, 23 nt, Molluscum contagiosum virus
gcuggcacggccggcgccgcgca

SEQ ID NO: 4043466 - RNA, 22 nt, Molluscum contagiosum virus
gcuggccaacacuaccacagcc

SEQ ID NO: 4043467 - RNA, 12 nt, Molluscum contagiosum virus
gcuggcccugcu

SEQ ID NO: 4043468 - RNA, 13 nt, Molluscum contagiosum virus
gcuggccucugcc

SEQ ID NO: 4043469 - RNA, 15 nt, Molluscum contagiosum virus
gcuggcgagcacguc

SEQ ID NO: 4043470 - RNA, 14 nt, Molluscum contagiosum virus
cuccgcacguggaa

SEQ ID NO: 4043471 - RNA, 21 nt, Molluscum contagiosum virus
cuccgccgggaauaccggaga

SEQ ID NO: 4043472 - RNA, 24 nt, Molluscum contagiosum virus
cuccgcgcggcgcucugccaccgc

SEQ ID NO: 4043473 - RNA, 20 nt, Molluscum contagiosum virus
cuccgcggacgcgcccugga

SEQ ID NO: 4043474 - RNA, 14 nt, Molluscum contagiosum virus
cuccgcgggcagcc

SEQ ID NO: 4043475 - RNA, 19 nt, Molluscum contagiosum virus
cuccgggcacguccgccuc

SEQ ID NO: 4043476 - RNA, 13 nt, Molluscum contagiosum virus
cuccggggcgcaa

SEQ ID NO: 4043477 - RNA, 17 nt, Molluscum contagiosum virus
cuccgguacguacagug

SEQ ID NO: 4043478 - RNA, 15 nt, Molluscum contagiosum virus
cuccuagcccagcac

SEQ ID NO: 4043479 - RNA, 14 nt, Molluscum contagiosum virus
cuccuaucucaaag

SEQ ID NO: 4043480 - RNA, 19 nt, Molluscum contagiosum virus
cuccuccugaugcccgcga

SEQ ID NO: 4043481 - RNA, 16 nt, Molluscum contagiosum virus
cuccucgagcgccgcc

SEQ ID NO: 4043482 - RNA, 14 nt, Molluscum contagiosum virus
cuccugaggaagca

SEQ ID NO: 4043483 - RNA, 14 nt, Molluscum contagiosum virus
cuccuggccaacag

SEQ ID NO: 4043484 - RNA, 18 nt, Molluscum contagiosum virus
cuccuggucuucccgcug

SEQ ID NO: 4043485 - RNA, 17 nt, Molluscum contagiosum virus
cuccugugucgcgcgag

SEQ ID NO: 4043486 - RNA, 21 nt, Molluscum contagiosum virus
cuccuuuccaucggaacuagc

SEQ ID NO: 4043487 - RNA, 19 nt, Molluscum contagiosum virus
cuccuuugcgagcacugua

SEQ ID NO: 4043488 - RNA, 19 nt, Molluscum contagiosum virus
cggcaggcucccgcugucg

SEQ ID NO: 4043489 - RNA, 23 nt, Molluscum contagiosum virus
cggcagguuugcacccgcgcagc

SEQ ID NO: 4043490 - RNA, 14 nt, Molluscum contagiosum virus
cggcauccugauga

SEQ ID NO: 4043491 - RNA, 14 nt, Molluscum contagiosum virus
cggcaugcgcgcgc

SEQ ID NO: 4043492 - RNA, 17 nt, Molluscum contagiosum virus
cggcaugcgcgcgcagc

SEQ ID NO: 4043493 - RNA, 21 nt, Molluscum contagiosum virus
cggccacaccccguacggcgc

SEQ ID NO: 4043494 - RNA, 13 nt, Molluscum contagiosum virus
cggccagagccca

SEQ ID NO: 4043495 - RNA, 17 nt, Molluscum contagiosum virus
cggcccgagcaggacgu

SEQ ID NO: 4043496 - RNA, 17 nt, Molluscum contagiosum virus
cggccgccggcgccugu

SEQ ID NO: 4043497 - RNA, 22 nt, Molluscum contagiosum virus
cggcgacaacgacagagcccgg

SEQ ID NO: 4043498 - RNA, 13 nt, Molluscum contagiosum virus
cggcgagcgccgc

SEQ ID NO: 4043499 - RNA, 18 nt, Molluscum contagiosum virus
cggcgagcgccgcucgca

SEQ ID NO: 4043500 - RNA, 23 nt, Molluscum contagiosum virus
cggcgagcugccauggcagcucg

SEQ ID NO: 4043501 - RNA, 21 nt, Molluscum contagiosum virus
cggcgagucgcgggcgcgcgc

SEQ ID NO: 4043502 - RNA, 13 nt, Molluscum contagiosum virus
cggcgcacgcaca

SEQ ID NO: 4043503 - RNA, 17 nt, Molluscum contagiosum virus
cggcgcccaggaacagu

SEQ ID NO: 4043504 - RNA, 21 nt, Molluscum contagiosum virus
cggcgccuguuuccgcucgcg

SEQ ID NO: 4043505 - RNA, 21 nt, Molluscum contagiosum virus
cggcgccuuugccacgccagc

SEQ ID NO: 4043506 - RNA, 17 nt, Molluscum contagiosum virus
cggcgcgaaaagucggg

SEQ ID NO: 4043507 - RNA, 16 nt, Molluscum contagiosum virus
cggcgcgaagcaggcg

SEQ ID NO: 4043508 - RNA, 19 nt, Molluscum contagiosum virus
cggcgcgacggcgacgcga

SEQ ID NO: 4043509 - RNA, 23 nt, Molluscum contagiosum virus
cggcgcgccgcgggccgccgggc

SEQ ID NO: 4043510 - RNA, 16 nt, Molluscum contagiosum virus
cggcgcggcgagccgc

SEQ ID NO: 4043511 - RNA, 18 nt, Molluscum contagiosum virus
cggcgcgggcaagcaggg

SEQ ID NO: 4043512 - RNA, 23 nt, Molluscum contagiosum virus
cggcgcguccucggccagagccu

SEQ ID NO: 4043513 - RNA, 18 nt, Molluscum contagiosum virus
cggcgcgugagcgccuac

SEQ ID NO: 4043514 - RNA, 19 nt, Molluscum contagiosum virus
cggcgcgugucgcggagca

SEQ ID NO: 4043515 - RNA, 17 nt, Molluscum contagiosum virus
cggcgcucgccucuggg

SEQ ID NO: 4043516 - RNA, 14 nt, Molluscum contagiosum virus
cggcggcaugcgcg

SEQ ID NO: 4043517 - RNA, 12 nt, Molluscum contagiosum virus
cggcggccacac

SEQ ID NO: 4043518 - RNA, 18 nt, Molluscum contagiosum virus
cggcggcgcacgcggcuc

SEQ ID NO: 4043519 - RNA, 12 nt, Molluscum contagiosum virus
cggcggcuccgc

SEQ ID NO: 4043520 - RNA, 14 nt, Molluscum contagiosum virus
cggcggcugugccc

SEQ ID NO: 4043521 - RNA, 18 nt, Molluscum contagiosum virus
cggcggggaugcuucccc

SEQ ID NO: 4043522 - RNA, 16 nt, Molluscum contagiosum virus
cggcggugcccgccaa

SEQ ID NO: 4043523 - RNA, 22 nt, Molluscum contagiosum virus
cggcguacgcgcagggagcugc

SEQ ID NO: 4043524 - RNA, 15 nt, Molluscum contagiosum virus
cggcguccgcggcac

SEQ ID NO: 4043525 - RNA, 19 nt, Molluscum contagiosum virus
cggcguccggcgcucgccc

SEQ ID NO: 4043526 - RNA, 17 nt, Molluscum contagiosum virus
cggcguggccaggccgc

SEQ ID NO: 4043527 - RNA, 16 nt, Molluscum contagiosum virus
cggcguguuccggcag

SEQ ID NO: 4043528 - RNA, 19 nt, Molluscum contagiosum virus
cggcguguuuugugucgcg

SEQ ID NO: 4043529 - RNA, 19 nt, Molluscum contagiosum virus
cggcuccaacagcagcugg

SEQ ID NO: 4043530 - RNA, 22 nt, Molluscum contagiosum virus
cggcugccgugcgggcgcggcg

SEQ ID NO: 4043531 - RNA, 12 nt, Molluscum contagiosum virus
cggcugcgccac

SEQ ID NO: 4043532 - RNA, 13 nt, Molluscum contagiosum virus
cggcugcgccacc

SEQ ID NO: 4043533 - RNA, 16 nt, Molluscum contagiosum virus
cggcugcggcgcgacg

SEQ ID NO: 4043534 - RNA, 14 nt, Molluscum contagiosum virus
cggcugcuggagcu

SEQ ID NO: 4043535 - RNA, 21 nt, Molluscum contagiosum virus
cggcugguguuaccgggucgc

SEQ ID NO: 4043536 - RNA, 15 nt, Molluscum contagiosum virus
cggcuuacacacgca

SEQ ID NO: 4043537 - RNA, 20 nt, Molluscum contagiosum virus
cgggaaguguugccgccggc

SEQ ID NO: 4043538 - RNA, 22 nt, Molluscum contagiosum virus
cgggacagacaucacgcguucg

SEQ ID NO: 4043539 - RNA, 19 nt, Molluscum contagiosum virus
cgggacgcggaugccacgc

SEQ ID NO: 4043540 - RNA, 23 nt, Molluscum contagiosum virus
cgggaggcuccugccgucgcccg

SEQ ID NO: 4043541 - RNA, 16 nt, Molluscum contagiosum virus
cgggcacccagcccug

SEQ ID NO: 4043542 - RNA, 20 nt, Molluscum contagiosum virus
cgggcaccggcgcucacugc

SEQ ID NO: 4043543 - RNA, 12 nt, Molluscum contagiosum virus
cgggcacgagca

SEQ ID NO: 4043544 - RNA, 22 nt, Molluscum contagiosum virus
cgggcacggguguacaaagagc

SEQ ID NO: 4043545 - RNA, 18 nt, Molluscum contagiosum virus
cgggcacgugcugcugcg

SEQ ID NO: 4043546 - RNA, 16 nt, Molluscum contagiosum virus
cgggcacuucucgcgc

SEQ ID NO: 4043547 - RNA, 14 nt, Molluscum contagiosum virus
cgggcccgacacgu

SEQ ID NO: 4043548 - RNA, 17 nt, Molluscum contagiosum virus
cgggcccgccuuugugg

SEQ ID NO: 4043549 - RNA, 19 nt, Molluscum contagiosum virus
cgggcccgcguggcaaggg

SEQ ID NO: 4043550 - RNA, 19 nt, Molluscum contagiosum virus
cgggcccgugcucaggcca

SEQ ID NO: 4043551 - RNA, 14 nt, Molluscum contagiosum virus
cgggccgccgcccg

SEQ ID NO: 4043552 - RNA, 16 nt, Molluscum contagiosum virus
cgggccgccgcccgcg

SEQ ID NO: 4043553 - RNA, 17 nt, Molluscum contagiosum virus
cgggccgccgcccgcga

SEQ ID NO: 4043554 - RNA, 13 nt, Molluscum contagiosum virus
cgggccugcgcgc

SEQ ID NO: 4043555 - RNA, 23 nt, Molluscum contagiosum virus
cgggccuguccgcgggcgcacgc

SEQ ID NO: 4043556 - RNA, 17 nt, Molluscum contagiosum virus
cgggccuuugccgcugc

SEQ ID NO: 4043557 - RNA, 19 nt, Molluscum contagiosum virus
cgggcgcagacgccgagcg

SEQ ID NO: 4043558 - RNA, 16 nt, Molluscum contagiosum virus
cgggcgcgccaacgac

SEQ ID NO: 4043559 - RNA, 14 nt, Molluscum contagiosum virus
cgggcgcgcguacg

SEQ ID NO: 4043560 - RNA, 20 nt, Molluscum contagiosum virus
cgggcgcuccgagcggcugc

SEQ ID NO: 4043561 - RNA, 12 nt, Molluscum contagiosum virus
cgggcgugcgca

SEQ ID NO: 4043562 - RNA, 20 nt, Molluscum contagiosum virus
cgggcucgaggugugccugu

SEQ ID NO: 4043563 - RNA, 21 nt, Molluscum contagiosum virus
cgggcucgaucugcgccuccg

SEQ ID NO: 4043564 - RNA, 17 nt, Molluscum contagiosum virus
cgggcucgugcuggagc

SEQ ID NO: 4043565 - RNA, 22 nt, Molluscum contagiosum virus
cgggcucuuccaccggcagcgc

SEQ ID NO: 4043566 - RNA, 14 nt, Molluscum contagiosum virus
cgggcugcgcggcg

SEQ ID NO: 4043567 - RNA, 18 nt, Molluscum contagiosum virus
cgggcugucgcccggcag

SEQ ID NO: 4043568 - RNA, 15 nt, Molluscum contagiosum virus
cgggcuucgccgccg

SEQ ID NO: 4043569 - RNA, 13 nt, Molluscum contagiosum virus
cggggaggagcuc

SEQ ID NO: 4043570 - RNA, 22 nt, Molluscum contagiosum virus
cggggaugaacgcgcugcgcca

SEQ ID NO: 4043571 - RNA, 21 nt, Molluscum contagiosum virus
cggggcccucggcgcgccguc

SEQ ID NO: 4043572 - RNA, 15 nt, Molluscum contagiosum virus
cggggcgcgcgcugc

SEQ ID NO: 4043573 - RNA, 18 nt, Molluscum contagiosum virus
cggggcgcgcgcugcgca

SEQ ID NO: 4043574 - RNA, 19 nt, Molluscum contagiosum virus
cgggguacaggcgcggcag

SEQ ID NO: 4043575 - RNA, 17 nt, Molluscum contagiosum virus
cgggugcauacgcagag

SEQ ID NO: 4043576 - RNA, 18 nt, Molluscum contagiosum virus
cgggugccgugccccugc

SEQ ID NO: 4043577 - RNA, 17 nt, Molluscum contagiosum virus
cgguaacgcgcgcgccu

SEQ ID NO: 4043578 - RNA, 13 nt, Molluscum contagiosum virus
cgguaagcgcccc

SEQ ID NO: 4043579 - RNA, 15 nt, Molluscum contagiosum virus
cgguacaugcugucc

SEQ ID NO: 4043580 - RNA, 13 nt, Molluscum contagiosum virus
cgguccuguccgc

SEQ ID NO: 4043581 - RNA, 20 nt, Molluscum contagiosum virus
cggucgacgagugcgccgcg

SEQ ID NO: 4043582 - RNA, 18 nt, Molluscum contagiosum virus
cggucgcccuccgccgua

SEQ ID NO: 4043583 - RNA, 13 nt, Molluscum contagiosum virus
cggugagcgccgu

SEQ ID NO: 4043584 - RNA, 18 nt, Molluscum contagiosum virus
cggugcgggucucggggc

SEQ ID NO: 4043585 - RNA, 16 nt, Molluscum contagiosum virus
cggugcgugcccagca

SEQ ID NO: 4043586 - RNA, 15 nt, Molluscum contagiosum virus
cggugcucgccccuc

SEQ ID NO: 4043587 - RNA, 22 nt, Molluscum contagiosum virus
cggugcucgccccuccccggcg

SEQ ID NO: 4043588 - RNA, 17 nt, Molluscum contagiosum virus
cggugggcgccgcggcc

SEQ ID NO: 4043589 - RNA, 15 nt, Molluscum contagiosum virus
cgguggugcauccug

SEQ ID NO: 4043590 - RNA, 20 nt, Molluscum contagiosum virus
cggugugcuacugcacugca

SEQ ID NO: 4043591 - RNA, 23 nt, Molluscum contagiosum virus
cggugugcuacugcacugcagcg

SEQ ID NO: 4043592 - RNA, 23 nt, Molluscum contagiosum virus
cgcucggaauuccuugugcaauu

SEQ ID NO: 4043593 - RNA, 20 nt, Molluscum contagiosum virus
cgcucggaggcuugccccgc

SEQ ID NO: 4043594 - RNA, 20 nt, Molluscum contagiosum virus
cgcucggaggggcuccgggc

SEQ ID NO: 4043595 - RNA, 20 nt, Molluscum contagiosum virus
cgcucguccagcugcgcgag

SEQ ID NO: 4043596 - RNA, 22 nt, Molluscum contagiosum virus
cgcucguggaucgcgcgcaccu

SEQ ID NO: 4043597 - RNA, 16 nt, Molluscum contagiosum virus
cgcucucgcuggcucc

SEQ ID NO: 4043598 - RNA, 21 nt, Molluscum contagiosum virus
cgcucuucguggugcucacgc

SEQ ID NO: 4043599 - RNA, 12 nt, Molluscum contagiosum virus
cgcugacggcgc

SEQ ID NO: 4043600 - RNA, 20 nt, Molluscum contagiosum virus
cgcugacggcgcugcgcgug

SEQ ID NO: 4043601 - RNA, 19 nt, Molluscum contagiosum virus
cgcugaguuacguggccgc

SEQ ID NO: 4043602 - RNA, 20 nt, Molluscum contagiosum virus
cgcugcacaguucacggcgc

SEQ ID NO: 4043603 - RNA, 23 nt, Molluscum contagiosum virus
cgcugcacaguucacggcgcucg

SEQ ID NO: 4043604 - RNA, 17 nt, Molluscum contagiosum virus
cgcugcacgagcugcug

SEQ ID NO: 4043605 - RNA, 22 nt, Molluscum contagiosum virus
cgcugcagaacuguagcguccg

SEQ ID NO: 4043606 - RNA, 15 nt, Molluscum contagiosum virus
cgcugcagcaccugc

SEQ ID NO: 4043607 - RNA, 22 nt, Molluscum contagiosum virus
cgcugcagcuaggauccugcuc

SEQ ID NO: 4043608 - RNA, 15 nt, Molluscum contagiosum virus
cgcugcccgcgcacg

SEQ ID NO: 4043609 - RNA, 17 nt, Molluscum contagiosum virus
cgcugcccgcgcacgag

SEQ ID NO: 4043610 - RNA, 17 nt, Molluscum contagiosum virus
cgcugccgcgcgcgccg

SEQ ID NO: 4043611 - RNA, 14 nt, Molluscum contagiosum virus
cgcugccgcuggcg

SEQ ID NO: 4043612 - RNA, 19 nt, Molluscum contagiosum virus
cgcugcgaacauggacgcg

SEQ ID NO: 4043613 - RNA, 20 nt, Molluscum contagiosum virus
cgcugcgcacgugcgcgccg

SEQ ID NO: 4043614 - RNA, 15 nt, Molluscum contagiosum virus
cgcugcgccgcuucc

SEQ ID NO: 4043615 - RNA, 17 nt, Molluscum contagiosum virus
cgcugcgccgcuuccug

SEQ ID NO: 4043616 - RNA, 19 nt, Molluscum contagiosum virus
cgcugcgccggcugcgcca

SEQ ID NO: 4043617 - RNA, 16 nt, Molluscum contagiosum virus
cgcugcgcggcgcgcg

SEQ ID NO: 4043618 - RNA, 18 nt, Molluscum contagiosum virus
cgcugcuccccgccagca

SEQ ID NO: 4043619 - RNA, 21 nt, Molluscum contagiosum virus
cgcugcuccccgccagcacca

SEQ ID NO: 4043620 - RNA, 21 nt, Molluscum contagiosum virus
cgcugcucgcuugcccggagc

SEQ ID NO: 4043621 - RNA, 21 nt, Molluscum contagiosum virus
cgcugcucuacuuccacgagc

SEQ ID NO: 4043622 - RNA, 12 nt, Molluscum contagiosum virus
cgcugcuggcag

SEQ ID NO: 4043623 - RNA, 14 nt, Molluscum contagiosum virus
cgcugcuucccgcu

SEQ ID NO: 4043624 - RNA, 19 nt, Molluscum contagiosum virus
cgcuggagaugauuccguc

SEQ ID NO: 4043625 - RNA, 15 nt, Molluscum contagiosum virus
cgcuggcacggccgg

SEQ ID NO: 4043626 - RNA, 20 nt, Molluscum contagiosum virus
cgcuggcacggccggcgccg

SEQ ID NO: 4043627 - RNA, 14 nt, Molluscum contagiosum virus
cgcuggcuccgcug

SEQ ID NO: 4043628 - RNA, 16 nt, Molluscum contagiosum virus
cgcugggcgcgccgcg

SEQ ID NO: 4043629 - RNA, 22 nt, Molluscum contagiosum virus
cgcuggggcgugacucggccgc

SEQ ID NO: 4043630 - RNA, 13 nt, Molluscum contagiosum virus
cgcugucacgcga

SEQ ID NO: 4043631 - RNA, 22 nt, Molluscum contagiosum virus
cgcuguuuggaauugugcugcu

SEQ ID NO: 4043632 - RNA, 22 nt, Molluscum contagiosum virus
cgcuucggcucgggaacaaagg

SEQ ID NO: 4043633 - RNA, 16 nt, Molluscum contagiosum virus
cgcuucuagcucgcgc

SEQ ID NO: 4043634 - RNA, 12 nt, Molluscum contagiosum virus
cgcuugccccuc

SEQ ID NO: 4043635 - RNA, 17 nt, Molluscum contagiosum virus
cgcuugcccggagccgg

SEQ ID NO: 4043636 - RNA, 22 nt, Molluscum contagiosum virus
cgcuugcuuccaggcgccgcac

SEQ ID NO: 4043637 - RNA, 15 nt, Molluscum contagiosum virus
cgcuuggcgagcgcu

SEQ ID NO: 4043638 - RNA, 19 nt, Molluscum contagiosum virus
cgcuuggcgagcgcugccg

SEQ ID NO: 4043639 - RNA, 17 nt, Molluscum contagiosum virus
cggaaauguuguuugaa

SEQ ID NO: 4043640 - RNA, 13 nt, Molluscum contagiosum virus
cggaacuggacgc

SEQ ID NO: 4043641 - RNA, 13 nt, Molluscum contagiosum virus
cggaagcgcccgu

SEQ ID NO: 4043642 - RNA, 12 nt, Molluscum contagiosum virus
cggaagcuccug

SEQ ID NO: 4043643 - RNA, 17 nt, Molluscum contagiosum virus
cggacaaaauggcugcg

SEQ ID NO: 4043644 - RNA, 12 nt, Molluscum contagiosum virus
cggacagugccu

SEQ ID NO: 4043645 - RNA, 22 nt, Molluscum contagiosum virus
cggacagugccuccgcggacgc

SEQ ID NO: 4043646 - RNA, 18 nt, Molluscum contagiosum virus
cggaccuaaagcugcugg

SEQ ID NO: 4043647 - RNA, 17 nt, Molluscum contagiosum virus
cggacgccggcgcccgc

SEQ ID NO: 4043648 - RNA, 22 nt, Molluscum contagiosum virus
cggacgccggcgcccgcgugca

SEQ ID NO: 4043649 - RNA, 12 nt, Molluscum contagiosum virus
cggacgcgcagc

SEQ ID NO: 4043650 - RNA, 13 nt, Molluscum contagiosum virus
cggacgcgcagcu

SEQ ID NO: 4043651 - RNA, 23 nt, Molluscum contagiosum virus
cggacgcgcgagugugcgugucu

SEQ ID NO: 4043652 - RNA, 14 nt, Molluscum contagiosum virus
cggacgcgggccgc

SEQ ID NO: 4043653 - RNA, 14 nt, Molluscum contagiosum virus
cggacgcgggccug

SEQ ID NO: 4043654 - RNA, 19 nt, Molluscum contagiosum virus
cggacgcggugaccggagc

SEQ ID NO: 4043655 - RNA, 14 nt, Molluscum contagiosum virus
cggacggcgcgcag

SEQ ID NO: 4043656 - RNA, 17 nt, Molluscum contagiosum virus
cggacggcgcgcagcgc

SEQ ID NO: 4043657 - RNA, 13 nt, Molluscum contagiosum virus
cggacucgcgagc

SEQ ID NO: 4043658 - RNA, 18 nt, Molluscum contagiosum virus
cggagaacaugcucgcca

SEQ ID NO: 4043659 - RNA, 23 nt, Molluscum contagiosum virus
cggagaagugcuccgcacgugga

SEQ ID NO: 4043660 - RNA, 22 nt, Molluscum contagiosum virus
cggagaucaggcagcugcugcg

SEQ ID NO: 4043661 - RNA, 16 nt, Molluscum contagiosum virus
cggagaucgacacgag

SEQ ID NO: 4043662 - RNA, 19 nt, Molluscum contagiosum virus
cggagcaggacgacgacac

SEQ ID NO: 4043663 - RNA, 22 nt, Molluscum contagiosum virus
cggagcgccuucugcaagcugc

SEQ ID NO: 4043664 - RNA, 16 nt, Molluscum contagiosum virus
cggagcuggcguugcc

SEQ ID NO: 4043665 - RNA, 13 nt, Molluscum contagiosum virus
cggagcugugcca

SEQ ID NO: 4043666 - RNA, 17 nt, Molluscum contagiosum virus
cggagcugugccgcagc

SEQ ID NO: 4043667 - RNA, 11 nt, Molluscum contagiosum virus
cggaggcagcg

SEQ ID NO: 4043668 - RNA, 15 nt, Molluscum contagiosum virus
cggaggcugcucccu

SEQ ID NO: 4043669 - RNA, 18 nt, Molluscum contagiosum virus
cggaggucgagcgcgccg

SEQ ID NO: 4043670 - RNA, 17 nt, Molluscum contagiosum virus
cggaggucugcuuuguc

SEQ ID NO: 4043671 - RNA, 20 nt, Molluscum contagiosum virus
cggagguuggaagcacgcaa

SEQ ID NO: 4043672 - RNA, 18 nt, Molluscum contagiosum virus
cggauagccccucgagca

SEQ ID NO: 4043673 - RNA, 15 nt, Molluscum contagiosum virus
cggauaugcgccugu

SEQ ID NO: 4043674 - RNA, 17 nt, Molluscum contagiosum virus
cggcaaccgcgcccgcg

SEQ ID NO: 4043675 - RNA, 17 nt, Molluscum contagiosum virus
cggcaacugccugcgcu

SEQ ID NO: 4043676 - RNA, 18 nt, Molluscum contagiosum virus
cggcaagcuucgggccgc

SEQ ID NO: 4043677 - RNA, 19 nt, Molluscum contagiosum virus
cggcacacacuugcacgcg

SEQ ID NO: 4043678 - RNA, 16 nt, Molluscum contagiosum virus
cggcacaugcagcugc

SEQ ID NO: 4043679 - RNA, 13 nt, Molluscum contagiosum virus
cggcacccgccag

SEQ ID NO: 4043680 - RNA, 13 nt, Molluscum contagiosum virus
cggcacccgccgc

SEQ ID NO: 4043681 - RNA, 18 nt, Molluscum contagiosum virus
cggcacccgccgcggugc

SEQ ID NO: 4043682 - RNA, 21 nt, Molluscum contagiosum virus
cggcaccguaccgcgcccgcc

SEQ ID NO: 4043683 - RNA, 14 nt, Molluscum contagiosum virus
cggcacgagcaguc

SEQ ID NO: 4043684 - RNA, 12 nt, Molluscum contagiosum virus
cggcacgcgagc

SEQ ID NO: 4043685 - RNA, 16 nt, Molluscum contagiosum virus
cggcacgcugcagaac

SEQ ID NO: 4043686 - RNA, 17 nt, Molluscum contagiosum virus
cggcacgcugcguuucc

SEQ ID NO: 4043687 - RNA, 17 nt, Molluscum contagiosum virus
cggcagcaugcucacgu

SEQ ID NO: 4043688 - RNA, 23 nt, Molluscum contagiosum virus
cggcagcgcauccgagucgagca

SEQ ID NO: 4043689 - RNA, 18 nt, Molluscum contagiosum virus
cggcagcuaccgcgcgcg

SEQ ID NO: 4043690 - RNA, 20 nt, Molluscum contagiosum virus
cggcagcucugcagcgccgc

SEQ ID NO: 4043691 - RNA, 21 nt, Molluscum contagiosum virus
cggcagcucugcagcgccgcg

SEQ ID NO: 4043692 - RNA, 19 nt, Molluscum contagiosum virus
cggcagcuggagcugccgc

SEQ ID NO: 4043693 - RNA, 20 nt, Molluscum contagiosum virus
cggcaggcgcugcgcggcgc

SEQ ID NO: 4043694 - RNA, 13 nt, Molluscum contagiosum virus
cggcaggcucccg

SEQ ID NO: 4043695 - RNA, 15 nt, Molluscum contagiosum virus
cggcaggcucccgcu

SEQ ID NO: 4043696 - RNA, 16 nt, Molluscum contagiosum virus
cgccaugcuggcgggc

SEQ ID NO: 4043697 - RNA, 20 nt, Molluscum contagiosum virus
cgccauugcucgcggugccg

SEQ ID NO: 4043698 - RNA, 19 nt, Molluscum contagiosum virus
cgcccaacgcccgcgcccg

SEQ ID NO: 4043699 - RNA, 20 nt, Molluscum contagiosum virus
cgcccaccagcagccaggcu

SEQ ID NO: 4043700 - RNA, 12 nt, Molluscum contagiosum virus
cgcccagcaccu

SEQ ID NO: 4043701 - RNA, 14 nt, Molluscum contagiosum virus
cgcccagcgccacg

SEQ ID NO: 4043702 - RNA, 19 nt, Molluscum contagiosum virus
cgcccagcucgaugggcuc

SEQ ID NO: 4043703 - RNA, 17 nt, Molluscum contagiosum virus
cgcccgagcgcgugucu

SEQ ID NO: 4043704 - RNA, 13 nt, Molluscum contagiosum virus
cgcccgcgccgca

SEQ ID NO: 4043705 - RNA, 12 nt, Molluscum contagiosum virus
cgcccgcggcac

SEQ ID NO: 4043706 - RNA, 21 nt, Molluscum contagiosum virus
cgcccgcggcuuucucgcacu

SEQ ID NO: 4043707 - RNA, 14 nt, Molluscum contagiosum virus
cgcccgcugcucua

SEQ ID NO: 4043708 - RNA, 22 nt, Molluscum contagiosum virus
cgcccggcaccgcggcgggugc

SEQ ID NO: 4043709 - RNA, 17 nt, Molluscum contagiosum virus
cgcccggcaggcucccg

SEQ ID NO: 4043710 - RNA, 22 nt, Molluscum contagiosum virus
cgcccguaaagaagcggugcag

SEQ ID NO: 4043711 - RNA, 13 nt, Molluscum contagiosum virus
cgcccgugccgcc

SEQ ID NO: 4043712 - RNA, 17 nt, Molluscum contagiosum virus
cgcccgugcuugcgcac

SEQ ID NO: 4043713 - RNA, 15 nt, Molluscum contagiosum virus
cgcccucgcgcgcag

SEQ ID NO: 4043714 - RNA, 14 nt, Molluscum contagiosum virus
cgcccucguguacg

SEQ ID NO: 4043715 - RNA, 18 nt, Molluscum contagiosum virus
cgcccuucaacgcgcgug

SEQ ID NO: 4043716 - RNA, 18 nt, Molluscum contagiosum virus
cgccgaucuccacgucga

SEQ ID NO: 4043717 - RNA, 12 nt, Molluscum contagiosum virus
cgccgcaaagcu

SEQ ID NO: 4043718 - RNA, 16 nt, Molluscum contagiosum virus
cgccgcaaauuccguc

SEQ ID NO: 4043719 - RNA, 21 nt, Molluscum contagiosum virus
cgccgccagcgucgcgcgccg

SEQ ID NO: 4043720 - RNA, 12 nt, Molluscum contagiosum virus
cgccgccaugcu

SEQ ID NO: 4043721 - RNA, 13 nt, Molluscum contagiosum virus
cgccgccgcgccg

SEQ ID NO: 4043722 - RNA, 15 nt, Molluscum contagiosum virus
cgccgccgcgccgcu

SEQ ID NO: 4043723 - RNA, 13 nt, Molluscum contagiosum virus
cgccgccggugcg

SEQ ID NO: 4043724 - RNA, 19 nt, Molluscum contagiosum virus
cgccgccucgcgcgcacug

SEQ ID NO: 4043725 - RNA, 20 nt, Molluscum contagiosum virus
cgccgcgcaaaagcacagca

SEQ ID NO: 4043726 - RNA, 23 nt, Molluscum contagiosum virus
cgccgcgcaugacagccauggcc

SEQ ID NO: 4043727 - RNA, 13 nt, Molluscum contagiosum virus
cgccgcgccgcac

SEQ ID NO: 4043728 - RNA, 18 nt, Molluscum contagiosum virus
cgccgcgcgagugccagc

SEQ ID NO: 4043729 - RNA, 16 nt, Molluscum contagiosum virus
cgccgcgcgcgccagc

SEQ ID NO: 4043730 - RNA, 16 nt, Molluscum contagiosum virus
cgccgcggccugggcc

SEQ ID NO: 4043731 - RNA, 16 nt, Molluscum contagiosum virus
cgccgcggcgguugcc

SEQ ID NO: 4043732 - RNA, 13 nt, Molluscum contagiosum virus
cgccgcgggcaca

SEQ ID NO: 4043733 - RNA, 14 nt, Molluscum contagiosum virus
cgccgcgggcacau

SEQ ID NO: 4043734 - RNA, 13 nt, Molluscum contagiosum virus
cgccgcgggccgc

SEQ ID NO: 4043735 - RNA, 22 nt, Molluscum contagiosum virus
cgccgcgggccgccgggccugc

SEQ ID NO: 4043736 - RNA, 17 nt, Molluscum contagiosum virus
cgccgcguacgcgccgg

SEQ ID NO: 4043737 - RNA, 13 nt, Molluscum contagiosum virus
cgccgcgugcaug

SEQ ID NO: 4043738 - RNA, 14 nt, Molluscum contagiosum virus
cgccgcugcgccgg

SEQ ID NO: 4043739 - RNA, 22 nt, Molluscum contagiosum virus
cgccgcugcgccggcugcgcca

SEQ ID NO: 4043740 - RNA, 12 nt, Molluscum contagiosum virus
cgccgcugcucg

SEQ ID NO: 4043741 - RNA, 23 nt, Molluscum contagiosum virus
cgccgcuggagcacgacuacggc

SEQ ID NO: 4043742 - RNA, 16 nt, Molluscum contagiosum virus
cgccgcugucacgcga

SEQ ID NO: 4043743 - RNA, 15 nt, Molluscum contagiosum virus
cgccggacagcucag

SEQ ID NO: 4043744 - RNA, 21 nt, Molluscum contagiosum virus
cgccggaccagauccgggcgc

SEQ ID NO: 4043745 - RNA, 23 nt, Molluscum contagiosum virus
cgccggccagcgagucucgcgcg

SEQ ID NO: 4043746 - RNA, 13 nt, Molluscum contagiosum virus
cgccggcgcggcg

SEQ ID NO: 4043747 - RNA, 13 nt, Molluscum contagiosum virus
cgccggcucugcc

SEQ ID NO: 4043748 - RNA, 15 nt, Molluscum contagiosum virus
cgccggcucugccuc

SEQ ID NO: 4043749 - RNA, 15 nt, Molluscum contagiosum virus
cgccggcugcgccac

SEQ ID NO: 4043750 - RNA, 20 nt, Molluscum contagiosum virus
cgccgggccugcggcggcgc

SEQ ID NO: 4043751 - RNA, 15 nt, Molluscum contagiosum virus
cgccgggcgccagaa

SEQ ID NO: 4043752 - RNA, 23 nt, Molluscum contagiosum virus
cgccgguggcgcgcgagcugcug

SEQ ID NO: 4043753 - RNA, 17 nt, Molluscum contagiosum virus
cgccgucaauacucugu

SEQ ID NO: 4043754 - RNA, 15 nt, Molluscum contagiosum virus
cgccguucguugucc

SEQ ID NO: 4043755 - RNA, 14 nt, Molluscum contagiosum virus
cgccguugcgcgug

SEQ ID NO: 4043756 - RNA, 15 nt, Molluscum contagiosum virus
cgccuagccugcagu

SEQ ID NO: 4043757 - RNA, 14 nt, Molluscum contagiosum virus
cgccuccaagaaga

SEQ ID NO: 4043758 - RNA, 21 nt, Molluscum contagiosum virus
cgccuccaagaagaggccagc

SEQ ID NO: 4043759 - RNA, 21 nt, Molluscum contagiosum virus
cgccuccaagaagaggccggc

SEQ ID NO: 4043760 - RNA, 13 nt, Molluscum contagiosum virus
cgccucgcauucu

SEQ ID NO: 4043761 - RNA, 20 nt, Molluscum contagiosum virus
cgccucggacggaggucugc

SEQ ID NO: 4043762 - RNA, 20 nt, Molluscum contagiosum virus
cgccucggacuucgacgcgc

SEQ ID NO: 4043763 - RNA, 24 nt, Molluscum contagiosum virus
cgccucgggaaaacgcgcggcagc

SEQ ID NO: 4043764 - RNA, 21 nt, Molluscum contagiosum virus
cgccugaaccugggcgcgcac

SEQ ID NO: 4043765 - RNA, 18 nt, Molluscum contagiosum virus
cgccugacucccgucagc

SEQ ID NO: 4043766 - RNA, 22 nt, Molluscum contagiosum virus
cgccugccgcgagcacuggcug

SEQ ID NO: 4043767 - RNA, 16 nt, Molluscum contagiosum virus
cgccuuccugcuggcg

SEQ ID NO: 4043768 - RNA, 17 nt, Molluscum contagiosum virus
cgccuucgucgcgcgcu

SEQ ID NO: 4043769 - RNA, 23 nt, Molluscum contagiosum virus
cgccuucuugcuggcgcucgcgc

SEQ ID NO: 4043770 - RNA, 22 nt, Molluscum contagiosum virus
cgcgaacgaggagggcagccuc

SEQ ID NO: 4043771 - RNA, 14 nt, Molluscum contagiosum virus
cgcgaacgcgucca

SEQ ID NO: 4043772 - RNA, 24 nt, Molluscum contagiosum virus
cgcgaaggcaaccgcgacgagcag

SEQ ID NO: 4043773 - RNA, 15 nt, Molluscum contagiosum virus
cgcgaaguccugggc

SEQ ID NO: 4043774 - RNA, 15 nt, Molluscum contagiosum virus
cgcgaccggcgugcc

SEQ ID NO: 4043775 - RNA, 20 nt, Molluscum contagiosum virus
cgcgaccuacuccuggccaa

SEQ ID NO: 4043776 - RNA, 21 nt, Molluscum contagiosum virus
cgcgacgacggcacgcugagc

SEQ ID NO: 4043777 - RNA, 20 nt, Molluscum contagiosum virus
cgcgacgacguugugcuccu

SEQ ID NO: 4043778 - RNA, 16 nt, Molluscum contagiosum virus
cgcgacgagcucacgc

SEQ ID NO: 4043779 - RNA, 16 nt, Molluscum contagiosum virus
cgcgacgauggccacg

SEQ ID NO: 4043780 - RNA, 17 nt, Molluscum contagiosum virus
cgcgacgcgcguggagc

SEQ ID NO: 4043781 - RNA, 16 nt, Molluscum contagiosum virus
cgcgacgugcgcgcug

SEQ ID NO: 4043782 - RNA, 17 nt, Molluscum contagiosum virus
cgcgacuaccugcugcu

SEQ ID NO: 4043783 - RNA, 20 nt, Molluscum contagiosum virus
cgcgacuggcacgcgccgcg

SEQ ID NO: 4043784 - RNA, 22 nt, Molluscum contagiosum virus
cgcgagaagucgggcuggcgug

SEQ ID NO: 4043785 - RNA, 17 nt, Molluscum contagiosum virus
cgcgagaugcgcggaca

SEQ ID NO: 4043786 - RNA, 13 nt, Molluscum contagiosum virus
cgcgagcagcugc

SEQ ID NO: 4043787 - RNA, 20 nt, Molluscum contagiosum virus
cgcgagcaguucgcgcgccu

SEQ ID NO: 4043788 - RNA, 17 nt, Molluscum contagiosum virus
cgcgagcaugccgccgc

SEQ ID NO: 4043789 - RNA, 13 nt, Molluscum contagiosum virus
cgcgagccacgcg

SEQ ID NO: 4043790 - RNA, 22 nt, Molluscum contagiosum virus
cgcgagcccaccgauggacuuc

SEQ ID NO: 4043791 - RNA, 19 nt, Molluscum contagiosum virus
cgcgagcgcaugcgcgccg

SEQ ID NO: 4043792 - RNA, 20 nt, Molluscum contagiosum virus
cgcgagcgcaugcgcgccgc

SEQ ID NO: 4043793 - RNA, 22 nt, Molluscum contagiosum virus
cgcgagcgcgcgcugcgcgccg

SEQ ID NO: 4043794 - RNA, 17 nt, Molluscum contagiosum virus
cgcgagcguuucugccg

SEQ ID NO: 4043795 - RNA, 15 nt, Molluscum contagiosum virus
cgcgagcugcugcgc

SEQ ID NO: 4043796 - RNA, 19 nt, Molluscum contagiosum virus
cgcgagcuggagcgcgucg

SEQ ID NO: 4043797 - RNA, 19 nt, Molluscum contagiosum virus
cgcgaggagacguagagca

SEQ ID NO: 4043798 - RNA, 17 nt, Molluscum contagiosum virus
cgcgagugugcgugucu

SEQ ID NO: 4043799 - RNA, 21 nt, Molluscum contagiosum virus
cgcgcaaaagcacagcaggag

SEQ ID NO: 4043800 - RNA, 23 nt, Molluscum contagiosum virus
cgagugcucccgaggcgcgcucu

SEQ ID NO: 4043801 - RNA, 13 nt, Molluscum contagiosum virus
cgagugugugcau

SEQ ID NO: 4043802 - RNA, 15 nt, Molluscum contagiosum virus
cgaguucgagggcaa

SEQ ID NO: 4043803 - RNA, 18 nt, Molluscum contagiosum virus
cgauacccuuggcagcaa

SEQ ID NO: 4043804 - RNA, 15 nt, Molluscum contagiosum virus
cgaucgcagcagugc

SEQ ID NO: 4043805 - RNA, 17 nt, Molluscum contagiosum virus
cgaucgcgggcacgagc

SEQ ID NO: 4043806 - RNA, 21 nt, Molluscum contagiosum virus
cgaucuucuucuugcgcaccu

SEQ ID NO: 4043807 - RNA, 22 nt, Molluscum contagiosum virus
cgaugacaucuggaggcaaucu

SEQ ID NO: 4043808 - RNA, 17 nt, Molluscum contagiosum virus
cgaugcccagcagcgag

SEQ ID NO: 4043809 - RNA, 16 nt, Molluscum contagiosum virus
cgauggacgccagcuu

SEQ ID NO: 4043810 - RNA, 22 nt, Molluscum contagiosum virus
cgauggccacgcagaucaggag

SEQ ID NO: 4043811 - RNA, 14 nt, Molluscum contagiosum virus
cgauggcgcagcuc

SEQ ID NO: 4043812 - RNA, 14 nt, Molluscum contagiosum virus
cgauggggcgcucg

SEQ ID NO: 4043813 - RNA, 19 nt, Molluscum contagiosum virus
cgauguacgcgugcaggaa

SEQ ID NO: 4043814 - RNA, 15 nt, Molluscum contagiosum virus
cgauguacuccacca

SEQ ID NO: 4043815 - RNA, 20 nt, Molluscum contagiosum virus
cgcaaaagaggccugcugaa

SEQ ID NO: 4043816 - RNA, 16 nt, Molluscum contagiosum virus
cgcaacacggcggugc

SEQ ID NO: 4043817 - RNA, 19 nt, Molluscum contagiosum virus
cgcaacacggcggugcccg

SEQ ID NO: 4043818 - RNA, 14 nt, Molluscum contagiosum virus
cgcaaccccgcgcg

SEQ ID NO: 4043819 - RNA, 20 nt, Molluscum contagiosum virus
cgcaaccccgcgcugcgcgg

SEQ ID NO: 4043820 - RNA, 14 nt, Molluscum contagiosum virus
cgcaaccgcgugcg

SEQ ID NO: 4043821 - RNA, 12 nt, Molluscum contagiosum virus
cgcaagccacac

SEQ ID NO: 4043822 - RNA, 15 nt, Molluscum contagiosum virus
cgcaagccgcguacc

SEQ ID NO: 4043823 - RNA, 23 nt, Molluscum contagiosum virus
cgcaagcuuugugcucgcuuagc

SEQ ID NO: 4043824 - RNA, 17 nt, Molluscum contagiosum virus
cgcaaggucuuccacgc

SEQ ID NO: 4043825 - RNA, 19 nt, Molluscum contagiosum virus
cgcaaguccagcgcgcucg

SEQ ID NO: 4043826 - RNA, 21 nt, Molluscum contagiosum virus
cgcaaguccagcgcgcucgag

SEQ ID NO: 4043827 - RNA, 19 nt, Molluscum contagiosum virus
cgcaagugcacaccagaca

SEQ ID NO: 4043828 - RNA, 24 nt, Molluscum contagiosum virus
cgcaagugugcgcaucccucgucu

SEQ ID NO: 4043829 - RNA, 20 nt, Molluscum contagiosum virus
cgcacaaagaacgcgcgucg

SEQ ID NO: 4043830 - RNA, 21 nt, Molluscum contagiosum virus
cgcacaaccacagcucuccga

SEQ ID NO: 4043831 - RNA, 18 nt, Molluscum contagiosum virus
cgcacacgaucucgggug

SEQ ID NO: 4043832 - RNA, 14 nt, Molluscum contagiosum virus
cgcacacgccgcgu

SEQ ID NO: 4043833 - RNA, 21 nt, Molluscum contagiosum virus
cgcacacgcgcgcgugcugcu

SEQ ID NO: 4043834 - RNA, 18 nt, Molluscum contagiosum virus
cgcacacggacgagcccu

SEQ ID NO: 4043835 - RNA, 14 nt, Molluscum contagiosum virus
cgcacacuugcgcg

SEQ ID NO: 4043836 - RNA, 23 nt, Molluscum contagiosum virus
cgcacacuugcgcguccgcaaag

SEQ ID NO: 4043837 - RNA, 20 nt, Molluscum contagiosum virus
cgcacagucuccacgcgugc

SEQ ID NO: 4043838 - RNA, 20 nt, Molluscum contagiosum virus
cgcacaguucacggcgcuug

SEQ ID NO: 4043839 - RNA, 12 nt, Molluscum contagiosum virus
cgcacccgccac

SEQ ID NO: 4043840 - RNA, 13 nt, Molluscum contagiosum virus
cgcacccucacac

SEQ ID NO: 4043841 - RNA, 14 nt, Molluscum contagiosum virus
cgcaccugcuagag

SEQ ID NO: 4043842 - RNA, 19 nt, Molluscum contagiosum virus
cgcacgaccacgugcagga

SEQ ID NO: 4043843 - RNA, 15 nt, Molluscum contagiosum virus
cgcacgauguacucc

SEQ ID NO: 4043844 - RNA, 19 nt, Molluscum contagiosum virus
cgcacgauguacuccacca

SEQ ID NO: 4043845 - RNA, 14 nt, Molluscum contagiosum virus
cgcacgcgcgagca

SEQ ID NO: 4043846 - RNA, 18 nt, Molluscum contagiosum virus
cgcacgcgcgcuuagcac

SEQ ID NO: 4043847 - RNA, 14 nt, Molluscum contagiosum virus
cgcacgcgcucucc

SEQ ID NO: 4043848 - RNA, 21 nt, Molluscum contagiosum virus
cgcacgcugcgcacgggcgcg

SEQ ID NO: 4043849 - RNA, 16 nt, Molluscum contagiosum virus
cgcacgcuuguccgcg

SEQ ID NO: 4043850 - RNA, 13 nt, Molluscum contagiosum virus
cgcacggagcaca

SEQ ID NO: 4043851 - RNA, 22 nt, Molluscum contagiosum virus
cgcacggccugcggcaggaagc

SEQ ID NO: 4043852 - RNA, 19 nt, Molluscum contagiosum virus
cgcacgguagcuagcucug

SEQ ID NO: 4043853 - RNA, 16 nt, Molluscum contagiosum virus
cgcacgugccgugcug

SEQ ID NO: 4043854 - RNA, 18 nt, Molluscum contagiosum virus
cgcacucgggugcccgga

SEQ ID NO: 4043855 - RNA, 22 nt, Molluscum contagiosum virus
cgcacugccacgcggagcucgc

SEQ ID NO: 4043856 - RNA, 17 nt, Molluscum contagiosum virus
cgcacuugcgcgccugu

SEQ ID NO: 4043857 - RNA, 17 nt, Molluscum contagiosum virus
cgcagaacugcugcgcg

SEQ ID NO: 4043858 - RNA, 17 nt, Molluscum contagiosum virus
cgcagaaguggcgcugu

SEQ ID NO: 4043859 - RNA, 15 nt, Molluscum contagiosum virus
cgcagcaagcagccg

SEQ ID NO: 4043860 - RNA, 18 nt, Molluscum contagiosum virus
cgcagcauucccggcgcg

SEQ ID NO: 4043861 - RNA, 19 nt, Molluscum contagiosum virus
cgcagccucgagcgccgug

SEQ ID NO: 4043862 - RNA, 13 nt, Molluscum contagiosum virus
cgcagcgcgcgcg

SEQ ID NO: 4043863 - RNA, 13 nt, Molluscum contagiosum virus
cgcagcgcggccu

SEQ ID NO: 4043864 - RNA, 20 nt, Molluscum contagiosum virus
cgcagcguuccaggaacgcc

SEQ ID NO: 4043865 - RNA, 14 nt, Molluscum contagiosum virus
cgcagcuguuucug

SEQ ID NO: 4043866 - RNA, 20 nt, Molluscum contagiosum virus
cgcaggacaugauccgcgac

SEQ ID NO: 4043867 - RNA, 12 nt, Molluscum contagiosum virus
cgcaggacgcgg

SEQ ID NO: 4043868 - RNA, 20 nt, Molluscum contagiosum virus
cgcaggacuggcaccugcgg

SEQ ID NO: 4043869 - RNA, 21 nt, Molluscum contagiosum virus
cgcaggaugcuggggcucgcg

SEQ ID NO: 4043870 - RNA, 18 nt, Molluscum contagiosum virus
cgcaggccaggugcagcg

SEQ ID NO: 4043871 - RNA, 15 nt, Molluscum contagiosum virus
cgcaggccgcgcccg

SEQ ID NO: 4043872 - RNA, 15 nt, Molluscum contagiosum virus
cgcaggccgggcacc

SEQ ID NO: 4043873 - RNA, 13 nt, Molluscum contagiosum virus
cgcaggcucgucg

SEQ ID NO: 4043874 - RNA, 18 nt, Molluscum contagiosum virus
cgcagggacgcgcuuuuc

SEQ ID NO: 4043875 - RNA, 17 nt, Molluscum contagiosum virus
cgcagggagcugcggac

SEQ ID NO: 4043876 - RNA, 19 nt, Molluscum contagiosum virus
cgcaggucaucgacgagca

SEQ ID NO: 4043877 - RNA, 21 nt, Molluscum contagiosum virus
cgcagucccagcaccgcgccg

SEQ ID NO: 4043878 - RNA, 21 nt, Molluscum contagiosum virus
cgcagucgccuuccugcgccc

SEQ ID NO: 4043879 - RNA, 16 nt, Molluscum contagiosum virus
cgcagugcggccagca

SEQ ID NO: 4043880 - RNA, 19 nt, Molluscum contagiosum virus
cgcagugcggccagcaccg

SEQ ID NO: 4043881 - RNA, 23 nt, Molluscum contagiosum virus
cgcaguuggucaccgccuguacc

SEQ ID NO: 4043882 - RNA, 17 nt, Molluscum contagiosum virus
cgcaucccugcgcaccu

SEQ ID NO: 4043883 - RNA, 21 nt, Molluscum contagiosum virus
cgcauccucaaccgcugcaau

SEQ ID NO: 4043884 - RNA, 19 nt, Molluscum contagiosum virus
cgcaugcggcaggcgcugc

SEQ ID NO: 4043885 - RNA, 16 nt, Molluscum contagiosum virus
cgcauggccacgcccg

SEQ ID NO: 4043886 - RNA, 20 nt, Molluscum contagiosum virus
cgccaaagaggacguguacg

SEQ ID NO: 4043887 - RNA, 23 nt, Molluscum contagiosum virus
cgccaacuucgucucgagcuucc

SEQ ID NO: 4043888 - RNA, 22 nt, Molluscum contagiosum virus
cgccaccucggcguuggccacg

SEQ ID NO: 4043889 - RNA, 14 nt, Molluscum contagiosum virus
cgccacgagcgccg

SEQ ID NO: 4043890 - RNA, 20 nt, Molluscum contagiosum virus
cgccacgagcgccgcgugcg

SEQ ID NO: 4043891 - RNA, 17 nt, Molluscum contagiosum virus
cgccacuagcaaggcgc

SEQ ID NO: 4043892 - RNA, 13 nt, Molluscum contagiosum virus
cgccacugccacg

SEQ ID NO: 4043893 - RNA, 15 nt, Molluscum contagiosum virus
cgccagaagugaaau

SEQ ID NO: 4043894 - RNA, 11 nt, Molluscum contagiosum virus
cgccagcacca

SEQ ID NO: 4043895 - RNA, 13 nt, Molluscum contagiosum virus
cgccagcacgcgc

SEQ ID NO: 4043896 - RNA, 15 nt, Molluscum contagiosum virus
cgccagcagcgcccg

SEQ ID NO: 4043897 - RNA, 15 nt, Molluscum contagiosum virus
cgccagccugcuggc

SEQ ID NO: 4043898 - RNA, 17 nt, Molluscum contagiosum virus
cgccaggugcgaaggcu

SEQ ID NO: 4043899 - RNA, 16 nt, Molluscum contagiosum virus
cgccaguccgcggcgc

SEQ ID NO: 4043900 - RNA, 22 nt, Molluscum contagiosum virus
cgccaguggccagcgcgcggcg

SEQ ID NO: 4043901 - RNA, 23 nt, Molluscum contagiosum virus
cgccaguuccacuccugugagca

SEQ ID NO: 4043902 - RNA, 14 nt, Molluscum contagiosum virus
cgccauccgcgagc

SEQ ID NO: 4043903 - RNA, 18 nt, Molluscum contagiosum virus
cgccaucgugguggagga

SEQ ID NO: 4043904 - RNA, 16 nt, Molluscum contagiosum virus
ccagcgccgccucgcg

SEQ ID NO: 4043905 - RNA, 18 nt, Molluscum contagiosum virus
ccagcgcgcccaccagca

SEQ ID NO: 4043906 - RNA, 20 nt, Molluscum contagiosum virus
ccagcgcgcccucgcgcgcg

SEQ ID NO: 4043907 - RNA, 18 nt, Molluscum contagiosum virus
ccagcggauaugcgccug

SEQ ID NO: 4043908 - RNA, 17 nt, Molluscum contagiosum virus
ccagcggcgccgcagcu

SEQ ID NO: 4043909 - RNA, 15 nt, Molluscum contagiosum virus
ccagcggcugcccgc

SEQ ID NO: 4043910 - RNA, 18 nt, Molluscum contagiosum virus
ccagcgggaaacugcugc

SEQ ID NO: 4043911 - RNA, 21 nt, Molluscum contagiosum virus
ccagcgggaaacugcugcccg

SEQ ID NO: 4043912 - RNA, 13 nt, Molluscum contagiosum virus
ccagcgugcagac

SEQ ID NO: 4043913 - RNA, 18 nt, Molluscum contagiosum virus
ccagcguuuccucuggcu

SEQ ID NO: 4043914 - RNA, 16 nt, Molluscum contagiosum virus
ccagcuacgagccgcu

SEQ ID NO: 4043915 - RNA, 24 nt, Molluscum contagiosum virus
ccagcucauagcccaugcgcagug

SEQ ID NO: 4043916 - RNA, 19 nt, Molluscum contagiosum virus
ccagcugccgcuugaagga

SEQ ID NO: 4043917 - RNA, 15 nt, Molluscum contagiosum virus
ccagcugcgcgagcu

SEQ ID NO: 4043918 - RNA, 17 nt, Molluscum contagiosum virus
ccagcuucaucaagcac

SEQ ID NO: 4043919 - RNA, 17 nt, Molluscum contagiosum virus
ccagcuugagcacacgg

SEQ ID NO: 4043920 - RNA, 22 nt, Molluscum contagiosum virus
ccagcuuggugcgcucgagcuc

SEQ ID NO: 4043921 - RNA, 23 nt, Molluscum contagiosum virus
ccaggaacgaggaaaggcacacc

SEQ ID NO: 4043922 - RNA, 21 nt, Molluscum contagiosum virus
ccaggaacgcgccgcggaugu

SEQ ID NO: 4043923 - RNA, 13 nt, Molluscum contagiosum virus
ccaggcacacgca

SEQ ID NO: 4043924 - RNA, 15 nt, Molluscum contagiosum virus
ccaggcacuggcccu

SEQ ID NO: 4043925 - RNA, 11 nt, Molluscum contagiosum virus
ccaggcgccgc

SEQ ID NO: 4043926 - RNA, 14 nt, Molluscum contagiosum virus
ccaggcuaggcgcg

SEQ ID NO: 4043927 - RNA, 15 nt, Molluscum contagiosum virus
ccagguccuccagcg

SEQ ID NO: 4043928 - RNA, 21 nt, Molluscum contagiosum virus
ccagguucucgcgguuguagc

SEQ ID NO: 4043929 - RNA, 17 nt, Molluscum contagiosum virus
ccaguaagcgacagguc

SEQ ID NO: 4043930 - RNA, 18 nt, Molluscum contagiosum virus
ccaguggccagcgcgcgg

SEQ ID NO: 4043931 - RNA, 21 nt, Molluscum contagiosum virus
ccaucaucgcgcugcucuucg

SEQ ID NO: 4043932 - RNA, 13 nt, Molluscum contagiosum virus
ccaucgagcuucc

SEQ ID NO: 4043933 - RNA, 21 nt, Molluscum contagiosum virus
ccaucggaacuagcccuagcc

SEQ ID NO: 4043934 - RNA, 19 nt, Molluscum contagiosum virus
ccaucuccaagcacgcgcg

SEQ ID NO: 4043935 - RNA, 14 nt, Molluscum contagiosum virus
ccaucugcgcgacg

SEQ ID NO: 4043936 - RNA, 16 nt, Molluscum contagiosum virus
ccaugaggacagcuug

SEQ ID NO: 4043937 - RNA, 19 nt, Molluscum contagiosum virus
ccaugaggacagcuugcug

SEQ ID NO: 4043938 - RNA, 23 nt, Molluscum contagiosum virus
ccaugaggacagcuugcugcugu

SEQ ID NO: 4043939 - RNA, 18 nt, Molluscum contagiosum virus
ccaugcucucgcugcugc

SEQ ID NO: 4043940 - RNA, 15 nt, Molluscum contagiosum virus
ccauggaggcgcuag

SEQ ID NO: 4043941 - RNA, 14 nt, Molluscum contagiosum virus
ccaugucgagcccu

SEQ ID NO: 4043942 - RNA, 22 nt, Molluscum contagiosum virus
ccaugucgcgcaucaccgagcg

SEQ ID NO: 4043943 - RNA, 17 nt, Molluscum contagiosum virus
ccaugucugugcgcgag

SEQ ID NO: 4043944 - RNA, 21 nt, Molluscum contagiosum virus
ccauguuuccugcggcgcugc

SEQ ID NO: 4043945 - RNA, 18 nt, Molluscum contagiosum virus
ccauuuuuacgcuacuca

SEQ ID NO: 4043946 - RNA, 22 nt, Molluscum contagiosum virus
ccauuuuuugccccgcgcgccc

SEQ ID NO: 4043947 - RNA, 19 nt, Molluscum contagiosum virus
cccaaggccgcgggcgcgg

SEQ ID NO: 4043948 - RNA, 22 nt, Molluscum contagiosum virus
cccaccagcagccaggcuaggc

SEQ ID NO: 4043949 - RNA, 13 nt, Molluscum contagiosum virus
cccacguacgagc

SEQ ID NO: 4043950 - RNA, 14 nt, Molluscum contagiosum virus
cccacgugccaaga

SEQ ID NO: 4043951 - RNA, 18 nt, Molluscum contagiosum virus
cccagcaccgcgccgcga

SEQ ID NO: 4043952 - RNA, 22 nt, Molluscum contagiosum virus
cccagcaccuggaacgcgaccu

SEQ ID NO: 4043953 - RNA, 12 nt, Molluscum contagiosum virus
cccagguggagc

SEQ ID NO: 4043954 - RNA, 21 nt, Molluscum contagiosum virus
cccaucggagaagugcuccgc

SEQ ID NO: 4043955 - RNA, 16 nt, Molluscum contagiosum virus
cccaugcucgagccug

SEQ ID NO: 4043956 - RNA, 16 nt, Molluscum contagiosum virus
cccauuccuguugcuc

SEQ ID NO: 4043957 - RNA, 16 nt, Molluscum contagiosum virus
ccccacgagagaggcu

SEQ ID NO: 4043958 - RNA, 14 nt, Molluscum contagiosum virus
ccccacugugccag

SEQ ID NO: 4043959 - RNA, 22 nt, Molluscum contagiosum virus
ccccaugcccgaccacgugcca

SEQ ID NO: 4043960 - RNA, 13 nt, Molluscum contagiosum virus
ccccccuucuguc

SEQ ID NO: 4043961 - RNA, 16 nt, Molluscum contagiosum virus
ccccgaaaggcacccg

SEQ ID NO: 4043962 - RNA, 21 nt, Molluscum contagiosum virus
ccccgaaaggcacccgcagga

SEQ ID NO: 4043963 - RNA, 13 nt, Molluscum contagiosum virus
ccccgagcagcgg

SEQ ID NO: 4043964 - RNA, 14 nt, Molluscum contagiosum virus
ccccgagcugcggc

SEQ ID NO: 4043965 - RNA, 13 nt, Molluscum contagiosum virus
ccccgccagcacc

SEQ ID NO: 4043966 - RNA, 14 nt, Molluscum contagiosum virus
ccccguccucgcuc

SEQ ID NO: 4043967 - RNA, 14 nt, Molluscum contagiosum virus
ccccguccuugcuc

SEQ ID NO: 4043968 - RNA, 13 nt, Molluscum contagiosum virus
ccccgugagcgcg

SEQ ID NO: 4043969 - RNA, 14 nt, Molluscum contagiosum virus
ccccugucgcgcac

SEQ ID NO: 4043970 - RNA, 18 nt, Molluscum contagiosum virus
cccgaacugcugggcgug

SEQ ID NO: 4043971 - RNA, 16 nt, Molluscum contagiosum virus
cccgagcccgagcccg

SEQ ID NO: 4043972 - RNA, 15 nt, Molluscum contagiosum virus
cccgagcccgggccc

SEQ ID NO: 4043973 - RNA, 20 nt, Molluscum contagiosum virus
cccgagcugcggcgcgugcu

SEQ ID NO: 4043974 - RNA, 21 nt, Molluscum contagiosum virus
cccgaggacgcgggcgugucc

SEQ ID NO: 4043975 - RNA, 23 nt, Molluscum contagiosum virus
cccgagggcgcgaccggcgugcc

SEQ ID NO: 4043976 - RNA, 13 nt, Molluscum contagiosum virus
cccgcaccagugc

SEQ ID NO: 4043977 - RNA, 20 nt, Molluscum contagiosum virus
cccgcaggaaaggcaccccg

SEQ ID NO: 4043978 - RNA, 22 nt, Molluscum contagiosum virus
cccgcaggaaagguaccccgca

SEQ ID NO: 4043979 - RNA, 23 nt, Molluscum contagiosum virus
cccgcaggaaagguacccgcagg

SEQ ID NO: 4043980 - RNA, 11 nt, Molluscum contagiosum virus
cccgcccgugc

SEQ ID NO: 4043981 - RNA, 19 nt, Molluscum contagiosum virus
cccgccgcguacaugcgug

SEQ ID NO: 4043982 - RNA, 13 nt, Molluscum contagiosum virus
cccgccgcgugcc

SEQ ID NO: 4043983 - RNA, 13 nt, Molluscum contagiosum virus
cccgccgggcacc

SEQ ID NO: 4043984 - RNA, 17 nt, Molluscum contagiosum virus
cccgcgaacgagagaca

SEQ ID NO: 4043985 - RNA, 23 nt, Molluscum contagiosum virus
cccgcgcacugccacgcggagcu

SEQ ID NO: 4043986 - RNA, 18 nt, Molluscum contagiosum virus
cccgcgcagcgccacgcc

SEQ ID NO: 4043987 - RNA, 12 nt, Molluscum contagiosum virus
cccgcgccagca

SEQ ID NO: 4043988 - RNA, 12 nt, Molluscum contagiosum virus
cccgcgcgcccg

SEQ ID NO: 4043989 - RNA, 15 nt, Molluscum contagiosum virus
cccgcgcgugcaguu

SEQ ID NO: 4043990 - RNA, 13 nt, Molluscum contagiosum virus
cccgcgcugcgcg

SEQ ID NO: 4043991 - RNA, 13 nt, Molluscum contagiosum virus
cccgcggcgugcc

SEQ ID NO: 4043992 - RNA, 23 nt, Molluscum contagiosum virus
cccgcggcguucccgcucaaccu

SEQ ID NO: 4043993 - RNA, 13 nt, Molluscum contagiosum virus
cccgcgggccgcc

SEQ ID NO: 4043994 - RNA, 23 nt, Molluscum contagiosum virus
cccgcguggcaagggcuccuucu

SEQ ID NO: 4043995 - RNA, 22 nt, Molluscum contagiosum virus
cccgcuaaagaucgugcgcuuc

SEQ ID NO: 4043996 - RNA, 16 nt, Molluscum contagiosum virus
cccgcugagcgcagca

SEQ ID NO: 4043997 - RNA, 18 nt, Molluscum contagiosum virus
cccgcugcgcauggccac

SEQ ID NO: 4043998 - RNA, 20 nt, Molluscum contagiosum virus
cccggacagagccccguuca

SEQ ID NO: 4043999 - RNA, 21 nt, Molluscum contagiosum virus
cccggaucagccccgcgccag

SEQ ID NO: 4044000 - RNA, 22 nt, Molluscum contagiosum virus
cccggcagcgacuacgcgcugc

SEQ ID NO: 4044001 - RNA, 21 nt, Molluscum contagiosum virus
cccggccucgccuccgggcgc

SEQ ID NO: 4044002 - RNA, 16 nt, Molluscum contagiosum virus
cccggcucgcucauca

SEQ ID NO: 4044003 - RNA, 20 nt, Molluscum contagiosum virus
cccggcugccgcugccugug

SEQ ID NO: 4044004 - RNA, 17 nt, Molluscum contagiosum virus
cccgggcccgcaugcag

SEQ ID NO: 4044005 - RNA, 22 nt, Molluscum contagiosum virus
cccguccuugcucuggcucucg

SEQ ID NO: 4044006 - RNA, 22 nt, Molluscum contagiosum virus
cccguggugggccgcggcgcgg

SEQ ID NO: 4044007 - RNA, 22 nt, Molluscum contagiosum virus
cccuaagggcccgcuggcggcg

SEQ ID NO: 4044008 - RNA, 17 nt, Molluscum contagiosum virus
cccuccccagcgccgcc

SEQ ID NO: 4044009 - RNA, 22 nt, Molluscum contagiosum virus
cccuccuaucucaaagaacgcg

SEQ ID NO: 4044010 - RNA, 15 nt, Molluscum contagiosum virus
cccucgcaagcugag

SEQ ID NO: 4044011 - RNA, 15 nt, Molluscum contagiosum virus
cccucgcgcgcagcu

SEQ ID NO: 4044012 - RNA, 14 nt, Molluscum contagiosum virus
cccucggcgcgccg

SEQ ID NO: 4044013 - RNA, 15 nt, Molluscum contagiosum virus
cccucggcgcgccgu

SEQ ID NO: 4044014 - RNA, 16 nt, Molluscum contagiosum virus
cccucgucgcgcuucc

SEQ ID NO: 4044015 - RNA, 17 nt, Molluscum contagiosum virus
cccucguguacgagaag

SEQ ID NO: 4044016 - RNA, 13 nt, Molluscum contagiosum virus
cccugcgcgagca

SEQ ID NO: 4044017 - RNA, 14 nt, Molluscum contagiosum virus
cccugcgggcgcuc

SEQ ID NO: 4044018 - RNA, 13 nt, Molluscum contagiosum virus
cccugcugcucgc

SEQ ID NO: 4044019 - RNA, 20 nt, Molluscum contagiosum virus
cccuggcugcugcgcgaccg

SEQ ID NO: 4044020 - RNA, 22 nt, Molluscum contagiosum virus
cccuucgcuugucgugcuuccu

SEQ ID NO: 4044021 - RNA, 18 nt, Molluscum contagiosum virus
cccuugauccaggcccgu

SEQ ID NO: 4044022 - RNA, 22 nt, Molluscum contagiosum virus
cccuuucgcggauucccauucc

SEQ ID NO: 4044023 - RNA, 21 nt, Molluscum contagiosum virus
ccgaagccgcaggccaggugc

SEQ ID NO: 4044024 - RNA, 11 nt, Molluscum contagiosum virus
ccgaaggaaag

SEQ ID NO: 4044025 - RNA, 17 nt, Molluscum contagiosum virus
ccgaaggaaaggccccc

SEQ ID NO: 4044026 - RNA, 16 nt, Molluscum contagiosum virus
ccgaagucgcagcagc

SEQ ID NO: 4044027 - RNA, 22 nt, Molluscum contagiosum virus
ccgaauggugcgguacaugcug

SEQ ID NO: 4044028 - RNA, 20 nt, Molluscum contagiosum virus
ccgacaccggacgaaagguc

SEQ ID NO: 4044029 - RNA, 12 nt, Molluscum contagiosum virus
ccgaccaccagg

SEQ ID NO: 4044030 - RNA, 20 nt, Molluscum contagiosum virus
ccgacccaucggagaagugc

SEQ ID NO: 4044031 - RNA, 15 nt, Molluscum contagiosum virus
ccgacccggcucgcu

SEQ ID NO: 4044032 - RNA, 17 nt, Molluscum contagiosum virus
ccgacccggcucgcuca

SEQ ID NO: 4044033 - RNA, 17 nt, Molluscum contagiosum virus
ccgacgccagcgcgccc

SEQ ID NO: 4044034 - RNA, 20 nt, Molluscum contagiosum virus
ccgacgcgggcgcgcacccc

SEQ ID NO: 4044035 - RNA, 12 nt, Molluscum contagiosum virus
ccgacgggcccc

SEQ ID NO: 4044036 - RNA, 23 nt, Molluscum contagiosum virus
ccgacgggccccuguuggccccg

SEQ ID NO: 4044037 - RNA, 15 nt, Molluscum contagiosum virus
ccgacucggugcuca

SEQ ID NO: 4044038 - RNA, 22 nt, Molluscum contagiosum virus
ccgagaucacggcgugcgcgag

SEQ ID NO: 4044039 - RNA, 20 nt, Molluscum contagiosum virus
ccgagcaauugcugggcaca

SEQ ID NO: 4044040 - RNA, 21 nt, Molluscum contagiosum virus
ccgagccaaggaugccugcca

SEQ ID NO: 4044041 - RNA, 14 nt, Molluscum contagiosum virus
ccgagcccggccag

SEQ ID NO: 4044042 - RNA, 16 nt, Molluscum contagiosum virus
ccgagcgcacgccgcu

SEQ ID NO: 4044043 - RNA, 15 nt, Molluscum contagiosum virus
ccgagcgcgcgugcu

SEQ ID NO: 4044044 - RNA, 22 nt, Molluscum contagiosum virus
ccgagcggcaagccgugcuuug

SEQ ID NO: 4044045 - RNA, 12 nt, Molluscum contagiosum virus
ccgagcggggac

SEQ ID NO: 4044046 - RNA, 21 nt, Molluscum contagiosum virus
ccgagcgugggcgagcgcacg

SEQ ID NO: 4044047 - RNA, 18 nt, Molluscum contagiosum virus
ccgaggacgacgccgagc

SEQ ID NO: 4044048 - RNA, 15 nt, Molluscum contagiosum virus
ccgaggacgcgcccg

SEQ ID NO: 4044049 - RNA, 20 nt, Molluscum contagiosum virus
ccgaggagagcggcgccccu

SEQ ID NO: 4044050 - RNA, 17 nt, Molluscum contagiosum virus
ccgaggccgcgcucuuc

SEQ ID NO: 4044051 - RNA, 13 nt, Molluscum contagiosum virus
ccgagggcgugcg

SEQ ID NO: 4044052 - RNA, 18 nt, Molluscum contagiosum virus
ccgaguaccgcgcgcacg

SEQ ID NO: 4044053 - RNA, 18 nt, Molluscum contagiosum virus
ccgauuuggacgcggcac

SEQ ID NO: 4044054 - RNA, 21 nt, Molluscum contagiosum virus
ccgcaaauuccguccccucuc

SEQ ID NO: 4044055 - RNA, 15 nt, Molluscum contagiosum virus
ccgcacgcugcugcg

SEQ ID NO: 4044056 - RNA, 17 nt, Molluscum contagiosum virus
ccgcacgcugcugcgug

SEQ ID NO: 4044057 - RNA, 18 nt, Molluscum contagiosum virus
ccgcacucgccgcggaac

SEQ ID NO: 4044058 - RNA, 15 nt, Molluscum contagiosum virus
ccgcagccgcgcucg

SEQ ID NO: 4044059 - RNA, 22 nt, Molluscum contagiosum virus
ccgcagcgcuggagcuggcugg

SEQ ID NO: 4044060 - RNA, 18 nt, Molluscum contagiosum virus
ccgcaggaaaggcacccc

SEQ ID NO: 4044061 - RNA, 17 nt, Molluscum contagiosum virus
ccgcaucggcgccgccc

SEQ ID NO: 4044062 - RNA, 20 nt, Molluscum contagiosum virus
ccgcaugcaccuacgcgccg

SEQ ID NO: 4044063 - RNA, 16 nt, Molluscum contagiosum virus
ccgccagaagugaaau

SEQ ID NO: 4044064 - RNA, 21 nt, Molluscum contagiosum virus
ccgccagcgacgagcagcugc

SEQ ID NO: 4044065 - RNA, 12 nt, Molluscum contagiosum virus
ccgccaggaacg

SEQ ID NO: 4044066 - RNA, 15 nt, Molluscum contagiosum virus
ccgccaugcugcgcg

SEQ ID NO: 4044067 - RNA, 13 nt, Molluscum contagiosum virus
ccgcccgaguccg

SEQ ID NO: 4044068 - RNA, 21 nt, Molluscum contagiosum virus
ccgcccgcgcuucugccugcu

SEQ ID NO: 4044069 - RNA, 20 nt, Molluscum contagiosum virus
ccgccgacaacgcacccgcg

SEQ ID NO: 4044070 - RNA, 20 nt, Molluscum contagiosum virus
ccgccgcggcgcccacggcg

SEQ ID NO: 4044071 - RNA, 13 nt, Molluscum contagiosum virus
ccgccggcgccgc

SEQ ID NO: 4044072 - RNA, 21 nt, Molluscum contagiosum virus
ccgccucgagcacgccuccaa

SEQ ID NO: 4044073 - RNA, 20 nt, Molluscum contagiosum virus
ccgccugccgcgagcacugg

SEQ ID NO: 4044074 - RNA, 17 nt, Molluscum contagiosum virus
ccgccugcugcagcucc

SEQ ID NO: 4044075 - RNA, 15 nt, Molluscum contagiosum virus
ccgccuguaccugcu

SEQ ID NO: 4044076 - RNA, 20 nt, Molluscum contagiosum virus
ccgccuuuguggacgcgcaa

SEQ ID NO: 4044077 - RNA, 23 nt, Molluscum contagiosum virus
ccgcgaaagaggaaagcgcacac

SEQ ID NO: 4044078 - RNA, 14 nt, Molluscum contagiosum virus
ccgcgaaggagaga

SEQ ID NO: 4044079 - RNA, 22 nt, Molluscum contagiosum virus
ccgcgacaugccucgcggcccg

SEQ ID NO: 4044080 - RNA, 16 nt, Molluscum contagiosum virus
ccgcgagauugagagc

SEQ ID NO: 4044081 - RNA, 23 nt, Molluscum contagiosum virus
ccgcgagcacguggacagcaucc

SEQ ID NO: 4044082 - RNA, 17 nt, Molluscum contagiosum virus
ccgcgauucugcucuuu

SEQ ID NO: 4044083 - RNA, 17 nt, Molluscum contagiosum virus
ccgcgcaagagccgccg

SEQ ID NO: 4044084 - RNA, 22 nt, Molluscum contagiosum virus
ccgcgcaccgcguugccgcccg

SEQ ID NO: 4044085 - RNA, 17 nt, Molluscum contagiosum virus
ccgcgcaugccagaccc

SEQ ID NO: 4044086 - RNA, 19 nt, Molluscum contagiosum virus
ccgcgcccaagaagaagca

SEQ ID NO: 4044087 - RNA, 20 nt, Molluscum contagiosum virus
ccgcgcccgacucgcagcuc

SEQ ID NO: 4044088 - RNA, 19 nt, Molluscum contagiosum virus
ccgcgcccgccagcauggc

SEQ ID NO: 4044089 - RNA, 14 nt, Molluscum contagiosum virus
ccgcgccgggcgcc

SEQ ID NO: 4044090 - RNA, 17 nt, Molluscum contagiosum virus
ccgcgccuagccgugcg

SEQ ID NO: 4044091 - RNA, 17 nt, Molluscum contagiosum virus
ccgcgcgccgcgcgccg

SEQ ID NO: 4044092 - RNA, 13 nt, Molluscum contagiosum virus
ccgcgcgcgcgcg

SEQ ID NO: 4044093 - RNA, 15 nt, Molluscum contagiosum virus
ccgcgcgcgcgcgug

SEQ ID NO: 4044094 - RNA, 15 nt, Molluscum contagiosum virus
ccgcgcgcgcuccga

SEQ ID NO: 4044095 - RNA, 22 nt, Molluscum contagiosum virus
ccgcgcgcggcuaagcucugcg

SEQ ID NO: 4044096 - RNA, 17 nt, Molluscum contagiosum virus
ccgcgcgcucgcgcuuc

SEQ ID NO: 4044097 - RNA, 19 nt, Molluscum contagiosum virus
ccgcgcgcucucacgcuuc

SEQ ID NO: 4044098 - RNA, 21 nt, Molluscum contagiosum virus
ccgcgcgcucucacgcuucgu

SEQ ID NO: 4044099 - RNA, 21 nt, Molluscum contagiosum virus
ccgcgcggcuuggcgcccuuc

SEQ ID NO: 4044100 - RNA, 22 nt, Molluscum contagiosum virus
ccgcgcgggccaugucugugcg

SEQ ID NO: 4044101 - RNA, 16 nt, Molluscum contagiosum virus
ccgcgcugaugcuagc

SEQ ID NO: 4044102 - RNA, 13 nt, Molluscum contagiosum virus
ccgcgcugcuccg

SEQ ID NO: 4044103 - RNA, 20 nt, Molluscum contagiosum virus
ccgcgcuuugucgaggccuu

SEQ ID NO: 4044104 - RNA, 19 nt, Molluscum contagiosum virus
ccgcggaagugcgagccgu

SEQ ID NO: 4044105 - RNA, 15 nt, Molluscum contagiosum virus
ccgcggacgcgcccu

SEQ ID NO: 4044106 - RNA, 13 nt, Molluscum contagiosum virus
ccgcggagggagg

SEQ ID NO: 4044107 - RNA, 13 nt, Molluscum contagiosum virus
ccgcggccugggc

SEQ ID NO: 4044108 - RNA, 15 nt, Molluscum contagiosum virus
ccgcggcgacgucaa

SEQ ID NO: 4044109 - RNA, 16 nt, Molluscum contagiosum virus
ccgcggcgcgcagcuc

SEQ ID NO: 4044110 - RNA, 20 nt, Molluscum contagiosum virus
ccgcggcgcggcggaagugg

SEQ ID NO: 4044111 - RNA, 17 nt, Molluscum contagiosum virus
ccgcgggcgcacgcuug

SEQ ID NO: 4044112 - RNA, 16 nt, Molluscum contagiosum virus
cacagacauggcccgc

SEQ ID NO: 4044113 - RNA, 13 nt, Molluscum contagiosum virus
cacagagggacag

SEQ ID NO: 4044114 - RNA, 16 nt, Molluscum contagiosum virus
cacagcaggagcacgc

SEQ ID NO: 4044115 - RNA, 19 nt, Molluscum contagiosum virus
cacagcaggagcacgccug

SEQ ID NO: 4044116 - RNA, 16 nt, Molluscum contagiosum virus
cacagccccugcugcu

SEQ ID NO: 4044117 - RNA, 19 nt, Molluscum contagiosum virus
cacagucuugcgcagcgcc

SEQ ID NO: 4044118 - RNA, 20 nt, Molluscum contagiosum virus
cacaguucacggcgcucgcc

SEQ ID NO: 4044119 - RNA, 22 nt, Molluscum contagiosum virus
cacaguucacggcgcucgccuc

SEQ ID NO: 4044120 - RNA, 17 nt, Molluscum contagiosum virus
cacaguucggccgcacg

SEQ ID NO: 4044121 - RNA, 13 nt, Molluscum contagiosum virus
cacaucaugggcu

SEQ ID NO: 4044122 - RNA, 13 nt, Molluscum contagiosum virus
cacaugcagcugc

SEQ ID NO: 4044123 - RNA, 13 nt, Molluscum contagiosum virus
cacaugccuucag

SEQ ID NO: 4044124 - RNA, 13 nt, Molluscum contagiosum virus
cacaugugcugcc

SEQ ID NO: 4044125 - RNA, 16 nt, Molluscum contagiosum virus
caccaaggacguguac

SEQ ID NO: 4044126 - RNA, 13 nt, Molluscum contagiosum virus
caccacaacugaa

SEQ ID NO: 4044127 - RNA, 13 nt, Molluscum contagiosum virus
caccaccagcacg

SEQ ID NO: 4044128 - RNA, 14 nt, Molluscum contagiosum virus
caccaccagcacgc

SEQ ID NO: 4044129 - RNA, 17 nt, Molluscum contagiosum virus
caccaccuccagguccc

SEQ ID NO: 4044130 - RNA, 15 nt, Molluscum contagiosum virus
caccacguggaccug

SEQ ID NO: 4044131 - RNA, 16 nt, Molluscum contagiosum virus
cauacuccugcuggcg

SEQ ID NO: 4044132 - RNA, 15 nt, Molluscum contagiosum virus
cauagcccaugcgca

SEQ ID NO: 4044133 - RNA, 14 nt, Molluscum contagiosum virus
cauccgcgagcacc

SEQ ID NO: 4044134 - RNA, 12 nt, Molluscum contagiosum virus
cauccgcgcgcu

SEQ ID NO: 4044135 - RNA, 16 nt, Molluscum contagiosum virus
cauccggccgaggcac

SEQ ID NO: 4044136 - RNA, 19 nt, Molluscum contagiosum virus
cauccggccgaggcacgcg

SEQ ID NO: 4044137 - RNA, 14 nt, Molluscum contagiosum virus
cauccuccacgcug

SEQ ID NO: 4044138 - RNA, 14 nt, Molluscum contagiosum virus
cauccucuaccgcc

SEQ ID NO: 4044139 - RNA, 14 nt, Molluscum contagiosum virus
cauccugccacacc

SEQ ID NO: 4044140 - RNA, 18 nt, Molluscum contagiosum virus
cauccuggggaaccgcug

SEQ ID NO: 4044141 - RNA, 15 nt, Molluscum contagiosum virus
caucgacgagcacga

SEQ ID NO: 4044142 - RNA, 20 nt, Molluscum contagiosum virus
caucgacgugcagacgcuca

SEQ ID NO: 4044143 - RNA, 14 nt, Molluscum contagiosum virus
caucgcugcacgcg

SEQ ID NO: 4044144 - RNA, 17 nt, Molluscum contagiosum virus
caucggcuccgcgcccg

SEQ ID NO: 4044145 - RNA, 16 nt, Molluscum contagiosum virus
caucuccacgucggcc

SEQ ID NO: 4044146 - RNA, 13 nt, Molluscum contagiosum virus
caucuccuugucu

SEQ ID NO: 4044147 - RNA, 19 nt, Molluscum contagiosum virus
caucucgagacgcugccug

SEQ ID NO: 4044148 - RNA, 17 nt, Molluscum contagiosum virus
caucugcgagcgcgaau

SEQ ID NO: 4044149 - RNA, 23 nt, Molluscum contagiosum virus
caugcagcugcaggaccugcugg

SEQ ID NO: 4044150 - RNA, 15 nt, Molluscum contagiosum virus
caugcagucacgacu

SEQ ID NO: 4044151 - RNA, 13 nt, Molluscum contagiosum virus
caugcccacgcgc

SEQ ID NO: 4044152 - RNA, 22 nt, Molluscum contagiosum virus
caugccggggaugaacgcgcug

SEQ ID NO: 4044153 - RNA, 14 nt, Molluscum contagiosum virus
caugcgcgcagugc

SEQ ID NO: 4044154 - RNA, 16 nt, Molluscum contagiosum virus
caugcgcgcgcagcag

SEQ ID NO: 4044155 - RNA, 15 nt, Molluscum contagiosum virus
caugcggcaggcgcu

SEQ ID NO: 4044156 - RNA, 23 nt, Molluscum contagiosum virus
caugcucgagccugccagcgcca

SEQ ID NO: 4044157 - RNA, 20 nt, Molluscum contagiosum virus
caugcugcccgcgcgcgacu

SEQ ID NO: 4044158 - RNA, 15 nt, Molluscum contagiosum virus
cauggaccgcgucaa

SEQ ID NO: 4044159 - RNA, 16 nt, Molluscum contagiosum virus
cauggaccgcgucaag

SEQ ID NO: 4044160 - RNA, 18 nt, Molluscum contagiosum virus
cauggacgugcugcuggc

SEQ ID NO: 4044161 - RNA, 22 nt, Molluscum contagiosum virus
cauggacgugcugcuggcccug

SEQ ID NO: 4044162 - RNA, 22 nt, Molluscum contagiosum virus
cauggaggacggcgcgggcgcg

SEQ ID NO: 4044163 - RNA, 13 nt, Molluscum contagiosum virus
cauggccacgccc

SEQ ID NO: 4044164 - RNA, 14 nt, Molluscum contagiosum virus
cauggcgccacacc

SEQ ID NO: 4044165 - RNA, 12 nt, Molluscum contagiosum virus
cauggcgccgcu

SEQ ID NO: 4044166 - RNA, 14 nt, Molluscum contagiosum virus
cauggcgccgcugc

SEQ ID NO: 4044167 - RNA, 22 nt, Molluscum contagiosum virus
cauggcucccgcacgcaccgcg

SEQ ID NO: 4044168 - RNA, 19 nt, Molluscum contagiosum virus
cauguccuuucagacagcg

SEQ ID NO: 4044169 - RNA, 17 nt, Molluscum contagiosum virus
caugucgcggugcgugc

SEQ ID NO: 4044170 - RNA, 17 nt, Molluscum contagiosum virus
caugugcgagaacuggc

SEQ ID NO: 4044171 - RNA, 14 nt, Molluscum contagiosum virus
caugugcgugcacc

SEQ ID NO: 4044172 - RNA, 23 nt, Molluscum contagiosum virus
cauguguuuguagccgcgcgaac

SEQ ID NO: 4044173 - RNA, 23 nt, Molluscum contagiosum virus
cauuacccccccuucugucccaa

SEQ ID NO: 4044174 - RNA, 20 nt, Molluscum contagiosum virus
cauucccggcgcgcgcggcg

SEQ ID NO: 4044175 - RNA, 15 nt, Molluscum contagiosum virus
cauuccuuguccugg

SEQ ID NO: 4044176 - RNA, 15 nt, Molluscum contagiosum virus
cauuuucucuggaga

SEQ ID NO: 4044177 - RNA, 21 nt, Molluscum contagiosum virus
ccaaaucgcguuugccaggca

SEQ ID NO: 4044178 - RNA, 15 nt, Molluscum contagiosum virus
ccaacccucgcaagc

SEQ ID NO: 4044179 - RNA, 20 nt, Molluscum contagiosum virus
ccaaccuccugcaccugcug

SEQ ID NO: 4044180 - RNA, 22 nt, Molluscum contagiosum virus
ccaacgacuagcgugcgcagca

SEQ ID NO: 4044181 - RNA, 14 nt, Molluscum contagiosum virus
ccaacgccagcugu

SEQ ID NO: 4044182 - RNA, 20 nt, Molluscum contagiosum virus
ccaacucugugaccugcgcc

SEQ ID NO: 4044183 - RNA, 18 nt, Molluscum contagiosum virus
ccaagaacaagcucgagg

SEQ ID NO: 4044184 - RNA, 22 nt, Molluscum contagiosum virus
ccaagaacaagcucgaggcgcu

SEQ ID NO: 4044185 - RNA, 13 nt, Molluscum contagiosum virus
ccaagaacaauac

SEQ ID NO: 4044186 - RNA, 19 nt, Molluscum contagiosum virus
ccaagaagaggccggcaca

SEQ ID NO: 4044187 - RNA, 18 nt, Molluscum contagiosum virus
ccaagaggacgagcugcu

SEQ ID NO: 4044188 - RNA, 17 nt, Molluscum contagiosum virus
ccaagcucuggcuugcg

SEQ ID NO: 4044189 - RNA, 13 nt, Molluscum contagiosum virus
ccaaggggagaca

SEQ ID NO: 4044190 - RNA, 23 nt, Molluscum contagiosum virus
ccaaggucgagcugacucggaca

SEQ ID NO: 4044191 - RNA, 23 nt, Molluscum contagiosum virus
ccaaugcuuucccguuagagaca

SEQ ID NO: 4044192 - RNA, 19 nt, Molluscum contagiosum virus
ccaauggagccgcugcugc

SEQ ID NO: 4044193 - RNA, 16 nt, Molluscum contagiosum virus
ccacaugccgcgcugc

SEQ ID NO: 4044194 - RNA, 14 nt, Molluscum contagiosum virus
ccaccagcgcggcc

SEQ ID NO: 4044195 - RNA, 14 nt, Molluscum contagiosum virus
ccaccggcagcgca

SEQ ID NO: 4044196 - RNA, 19 nt, Molluscum contagiosum virus
ccaccuggaaaagcgcgag

SEQ ID NO: 4044197 - RNA, 18 nt, Molluscum contagiosum virus
ccacgaacgacagcgccg

SEQ ID NO: 4044198 - RNA, 17 nt, Molluscum contagiosum virus
ccacgaagaacgcggcg

SEQ ID NO: 4044199 - RNA, 16 nt, Molluscum contagiosum virus
ccacgacauggaccgc

SEQ ID NO: 4044200 - RNA, 18 nt, Molluscum contagiosum virus
ccacgaccgcaagugcac

SEQ ID NO: 4044201 - RNA, 18 nt, Molluscum contagiosum virus
ccacgagagaggcuuugc

SEQ ID NO: 4044202 - RNA, 13 nt, Molluscum contagiosum virus
ccacgagcgccgc

SEQ ID NO: 4044203 - RNA, 18 nt, Molluscum contagiosum virus
ccacgaugaacggcuccu

SEQ ID NO: 4044204 - RNA, 14 nt, Molluscum contagiosum virus
ccacgcagcuggcg

SEQ ID NO: 4044205 - RNA, 22 nt, Molluscum contagiosum virus
ccacgcaggacuggcaccugcg

SEQ ID NO: 4044206 - RNA, 11 nt, Molluscum contagiosum virus
ccacgcgcccg

SEQ ID NO: 4044207 - RNA, 22 nt, Molluscum contagiosum virus
ccacgcucgcgcgcaugcucgc

SEQ ID NO: 4044208 - RNA, 22 nt, Molluscum contagiosum virus
ccacggcgagcugccauggcag

SEQ ID NO: 4044209 - RNA, 13 nt, Molluscum contagiosum virus
ccacggcugcaag

SEQ ID NO: 4044210 - RNA, 21 nt, Molluscum contagiosum virus
ccacguacgagcagcugcugc

SEQ ID NO: 4044211 - RNA, 14 nt, Molluscum contagiosum virus
ccacgugccagagu

SEQ ID NO: 4044212 - RNA, 14 nt, Molluscum contagiosum virus
ccacgugcgcuggc

SEQ ID NO: 4044213 - RNA, 22 nt, Molluscum contagiosum virus
ccacgugcuccgugugccaguc

SEQ ID NO: 4044214 - RNA, 14 nt, Molluscum contagiosum virus
ccacucuccuucag

SEQ ID NO: 4044215 - RNA, 21 nt, Molluscum contagiosum virus
ccacugggaacaccacacgcg

SEQ ID NO: 4044216 - RNA, 14 nt, Molluscum contagiosum virus
ccacugugccagca

SEQ ID NO: 4044217 - RNA, 22 nt, Molluscum contagiosum virus
ccagagucgccgcugcgcaucu

SEQ ID NO: 4044218 - RNA, 17 nt, Molluscum contagiosum virus
ccagauguucucgccag

SEQ ID NO: 4044219 - RNA, 13 nt, Molluscum contagiosum virus
ccagcagccaggc

SEQ ID NO: 4044220 - RNA, 16 nt, Molluscum contagiosum virus
ccagcagcgccagcuu

SEQ ID NO: 4044221 - RNA, 12 nt, Molluscum contagiosum virus
ccagcagcuccu

SEQ ID NO: 4044222 - RNA, 19 nt, Molluscum contagiosum virus
ccagccaggcgccggcgcg

SEQ ID NO: 4044223 - RNA, 19 nt, Molluscum contagiosum virus
ccagccgcugcgccgccag

SEQ ID NO: 4044224 - RNA, 15 nt, Molluscum contagiosum virus
ccagccugacggcag

SEQ ID NO: 4044225 - RNA, 21 nt, Molluscum contagiosum virus
ccagccugcuggcaccgcgcg

SEQ ID NO: 4044226 - RNA, 15 nt, Molluscum contagiosum virus
ccagcgauugcccgc

SEQ ID NO: 4044227 - RNA, 14 nt, Molluscum contagiosum virus
ccagcgccagccug

SEQ ID NO: 4044228 - RNA, 19 nt, Molluscum contagiosum virus
ccagcgccagccugcuggc

SEQ ID NO: 4044229 - RNA, 15 nt, Molluscum contagiosum virus
auggacgucgcggcc

SEQ ID NO: 4044230 - RNA, 14 nt, Molluscum contagiosum virus
auggacgugcuccg

SEQ ID NO: 4044231 - RNA, 18 nt, Molluscum contagiosum virus
auggcauucucggacagu

SEQ ID NO: 4044232 - RNA, 17 nt, Molluscum contagiosum virus
auggccgagaaaaagcu

SEQ ID NO: 4044233 - RNA, 16 nt, Molluscum contagiosum virus
auggccggcaacuggc

SEQ ID NO: 4044234 - RNA, 20 nt, Molluscum contagiosum virus
auggcgauagcgauggcugu

SEQ ID NO: 4044235 - RNA, 15 nt, Molluscum contagiosum virus
auggcggccugcccu

SEQ ID NO: 4044236 - RNA, 22 nt, Molluscum contagiosum virus
auggcucccgcacgcaccgcga

SEQ ID NO: 4044237 - RNA, 16 nt, Molluscum contagiosum virus
auggcugcgaccaaga

SEQ ID NO: 4044238 - RNA, 19 nt, Molluscum contagiosum virus
auggcugcucucggcagcg

SEQ ID NO: 4044239 - RNA, 14 nt, Molluscum contagiosum virus
auggggauguggac

SEQ ID NO: 4044240 - RNA, 19 nt, Molluscum contagiosum virus
auggugcgguacaugcugu

SEQ ID NO: 4044241 - RNA, 16 nt, Molluscum contagiosum virus
auguagaacgccagga

SEQ ID NO: 4044242 - RNA, 15 nt, Molluscum contagiosum virus
auguagccuacgugg

SEQ ID NO: 4044243 - RNA, 14 nt, Molluscum contagiosum virus
auguccggcgcugg

SEQ ID NO: 4044244 - RNA, 13 nt, Molluscum contagiosum virus
augucgagcccug

SEQ ID NO: 4044245 - RNA, 21 nt, Molluscum contagiosum virus
augucgccgcguagccgccgc

SEQ ID NO: 4044246 - RNA, 18 nt, Molluscum contagiosum virus
augucuccccuugggcuc

SEQ ID NO: 4044247 - RNA, 15 nt, Molluscum contagiosum virus
augugaacacgacau

SEQ ID NO: 4044248 - RNA, 16 nt, Molluscum contagiosum virus
augugcuggucaagaa

SEQ ID NO: 4044249 - RNA, 20 nt, Molluscum contagiosum virus
auuacgcugccgugagcacg

SEQ ID NO: 4044250 - RNA, 13 nt, Molluscum contagiosum virus
auucccguggacc

SEQ ID NO: 4044251 - RNA, 16 nt, Molluscum contagiosum virus
auuccucgagagggag

SEQ ID NO: 4044252 - RNA, 21 nt, Molluscum contagiosum virus
auucucggacagugccuccgc

SEQ ID NO: 4044253 - RNA, 21 nt, Molluscum contagiosum virus
auugagccggacuuguaguuc

SEQ ID NO: 4044254 - RNA, 14 nt, Molluscum contagiosum virus
auugccccugggcu

SEQ ID NO: 4044255 - RNA, 23 nt, Molluscum contagiosum virus
auugcccgcgcgcggacagccua

SEQ ID NO: 4044256 - RNA, 21 nt, Molluscum contagiosum virus
auuguucggaggcugcucccu

SEQ ID NO: 4044257 - RNA, 19 nt, Molluscum contagiosum virus
auuucguugagaccgccgc

SEQ ID NO: 4044258 - RNA, 18 nt, Molluscum contagiosum virus
caaaaaaaagugcgcgug

SEQ ID NO: 4044259 - RNA, 14 nt, Molluscum contagiosum virus
caaaacgcgacgcc

SEQ ID NO: 4044260 - RNA, 15 nt, Molluscum contagiosum virus
caaacgcuguuuuca

SEQ ID NO: 4044261 - RNA, 14 nt, Molluscum contagiosum virus
caaacgugcaugca

SEQ ID NO: 4044262 - RNA, 15 nt, Molluscum contagiosum virus
caaagaagcgcgccc

SEQ ID NO: 4044263 - RNA, 14 nt, Molluscum contagiosum virus
caaagacgggcccg

SEQ ID NO: 4044264 - RNA, 22 nt, Molluscum contagiosum virus
caaagagacgcggccgcggagg

SEQ ID NO: 4044265 - RNA, 15 nt, Molluscum contagiosum virus
caaagcccuccugag

SEQ ID NO: 4044266 - RNA, 13 nt, Molluscum contagiosum virus
caaagccugcugc

SEQ ID NO: 4044267 - RNA, 14 nt, Molluscum contagiosum virus
caaagccugcugcg

SEQ ID NO: 4044268 - RNA, 15 nt, Molluscum contagiosum virus
caaaggaagagcccg

SEQ ID NO: 4044269 - RNA, 17 nt, Molluscum contagiosum virus
caaaggaguuggcgcgc

SEQ ID NO: 4044270 - RNA, 16 nt, Molluscum contagiosum virus
caaaggcccgcgagca

SEQ ID NO: 4044271 - RNA, 15 nt, Molluscum contagiosum virus
caaaugcgcgcgaac

SEQ ID NO: 4044272 - RNA, 23 nt, Molluscum contagiosum virus
caaaugcgucccagcagcugcuc

SEQ ID NO: 4044273 - RNA, 18 nt, Molluscum contagiosum virus
caacaaggaaaggcaccc

SEQ ID NO: 4044274 - RNA, 13 nt, Molluscum contagiosum virus
caacacgagcgcg

SEQ ID NO: 4044275 - RNA, 14 nt, Molluscum contagiosum virus
caacacggcggugc

SEQ ID NO: 4044276 - RNA, 16 nt, Molluscum contagiosum virus
caacacucgugcucgu

SEQ ID NO: 4044277 - RNA, 13 nt, Molluscum contagiosum virus
caacaugccuuuc

SEQ ID NO: 4044278 - RNA, 16 nt, Molluscum contagiosum virus
caacauggugcuggcc

SEQ ID NO: 4044279 - RNA, 18 nt, Molluscum contagiosum virus
caacauggugcuggccau

SEQ ID NO: 4044280 - RNA, 20 nt, Molluscum contagiosum virus
caacauuuacuucgggcgca

SEQ ID NO: 4044281 - RNA, 23 nt, Molluscum contagiosum virus
caaccgcaaggaaaacugcaucc

SEQ ID NO: 4044282 - RNA, 23 nt, Molluscum contagiosum virus
caaccgcauguccacggacaugg

SEQ ID NO: 4044283 - RNA, 13 nt, Molluscum contagiosum virus
caaccgggcucuc

SEQ ID NO: 4044284 - RNA, 20 nt, Molluscum contagiosum virus
caacgagcacgugugcggag

SEQ ID NO: 4044285 - RNA, 16 nt, Molluscum contagiosum virus
caacgcacccgcgcgg

SEQ ID NO: 4044286 - RNA, 14 nt, Molluscum contagiosum virus
caacgccgggcacg

SEQ ID NO: 4044287 - RNA, 11 nt, Molluscum contagiosum virus
caacugccugc

SEQ ID NO: 4044288 - RNA, 15 nt, Molluscum contagiosum virus
caacuguugccugga

SEQ ID NO: 4044289 - RNA, 15 nt, Molluscum contagiosum virus
caagaacaaccagac

SEQ ID NO: 4044290 - RNA, 21 nt, Molluscum contagiosum virus
caagaagacggcgcgcgcgcu

SEQ ID NO: 4044291 - RNA, 20 nt, Molluscum contagiosum virus
caagaagaucgcggcgccgc

SEQ ID NO: 4044292 - RNA, 19 nt, Molluscum contagiosum virus
caagacucgcccgcgcgcg

SEQ ID NO: 4044293 - RNA, 11 nt, Molluscum contagiosum virus
caagacuggca

SEQ ID NO: 4044294 - RNA, 17 nt, Molluscum contagiosum virus
caagaggacgagcugcu

SEQ ID NO: 4044295 - RNA, 14 nt, Molluscum contagiosum virus
caagaugacgacgg

SEQ ID NO: 4044296 - RNA, 14 nt, Molluscum contagiosum virus
caagcccagcagcg

SEQ ID NO: 4044297 - RNA, 21 nt, Molluscum contagiosum virus
caagcccgaguucgcggcgcg

SEQ ID NO: 4044298 - RNA, 17 nt, Molluscum contagiosum virus
caagcccggcaugggca

SEQ ID NO: 4044299 - RNA, 22 nt, Molluscum contagiosum virus
caagccguccgccucgagcacg

SEQ ID NO: 4044300 - RNA, 16 nt, Molluscum contagiosum virus
caagcgccgccaugcu

SEQ ID NO: 4044301 - RNA, 18 nt, Molluscum contagiosum virus
caagcgcguucgcgcgug

SEQ ID NO: 4044302 - RNA, 22 nt, Molluscum contagiosum virus
caagcuuugcacgcacgcgcuc

SEQ ID NO: 4044303 - RNA, 19 nt, Molluscum contagiosum virus
caaggaaaggcaccugcag

SEQ ID NO: 4044304 - RNA, 23 nt, Molluscum contagiosum virus
caaggaaaggcaccugcaggaaa

SEQ ID NO: 4044305 - RNA, 13 nt, Molluscum contagiosum virus
caaggacaccgcg

SEQ ID NO: 4044306 - RNA, 16 nt, Molluscum contagiosum virus
caaggagcugcgcgag

SEQ ID NO: 4044307 - RNA, 13 nt, Molluscum contagiosum virus
caaggcgcacgag

SEQ ID NO: 4044308 - RNA, 17 nt, Molluscum contagiosum virus
caagggccugcgggcgg

SEQ ID NO: 4044309 - RNA, 14 nt, Molluscum contagiosum virus
caagggcguagagc

SEQ ID NO: 4044310 - RNA, 18 nt, Molluscum contagiosum virus
caaguagguugcgucccg

SEQ ID NO: 4044311 - RNA, 13 nt, Molluscum contagiosum virus
caagucacugcua

SEQ ID NO: 4044312 - RNA, 17 nt, Molluscum contagiosum virus
caagugcacgcggcgcg

SEQ ID NO: 4044313 - RNA, 17 nt, Molluscum contagiosum virus
caaguucgcugcuggca

SEQ ID NO: 4044314 - RNA, 18 nt, Molluscum contagiosum virus
caaugcagugcaccagca

SEQ ID NO: 4044315 - RNA, 18 nt, Molluscum contagiosum virus
caauggacacgcacuggc

SEQ ID NO: 4044316 - RNA, 21 nt, Molluscum contagiosum virus
caauggcgcgcgagcacagcg

SEQ ID NO: 4044317 - RNA, 22 nt, Molluscum contagiosum virus
caauggcgcgcgagcacagcgc

SEQ ID NO: 4044318 - RNA, 16 nt, Molluscum contagiosum virus
cacaaagacggggccg

SEQ ID NO: 4044319 - RNA, 16 nt, Molluscum contagiosum virus
cacaaaggcgggcccg

SEQ ID NO: 4044320 - RNA, 14 nt, Molluscum contagiosum virus
cacaagcaccgccu

SEQ ID NO: 4044321 - RNA, 22 nt, Molluscum contagiosum virus
cacaagggcagcucaagcugcu

SEQ ID NO: 4044322 - RNA, 12 nt, Molluscum contagiosum virus
cacacacacucg

SEQ ID NO: 4044323 - RNA, 20 nt, Molluscum contagiosum virus
cacacacuugcacgcgcacg

SEQ ID NO: 4044324 - RNA, 12 nt, Molluscum contagiosum virus
cacaccagcugg

SEQ ID NO: 4044325 - RNA, 20 nt, Molluscum contagiosum virus
cacaccgucgcguggugcuu

SEQ ID NO: 4044326 - RNA, 14 nt, Molluscum contagiosum virus
cacacgcaccgccu

SEQ ID NO: 4044327 - RNA, 21 nt, Molluscum contagiosum virus
cacacgcaccgccuggugcug

SEQ ID NO: 4044328 - RNA, 13 nt, Molluscum contagiosum virus
cacacgcgcggcg

SEQ ID NO: 4044329 - RNA, 22 nt, Molluscum contagiosum virus
cacacgcgucgcgcaggcgccc

SEQ ID NO: 4044330 - RNA, 22 nt, Molluscum contagiosum virus
cacacgcugaguuacguggccg

SEQ ID NO: 4044331 - RNA, 14 nt, Molluscum contagiosum virus
cacacggacgagcc

SEQ ID NO: 4044332 - RNA, 14 nt, Molluscum contagiosum virus
cacacuugcgcguc

SEQ ID NO: 4044333 - RNA, 20 nt, Molluscum contagiosum virus
agguggcaugcgcccucacg

SEQ ID NO: 4044334 - RNA, 18 nt, Molluscum contagiosum virus
agguucguccgcucgugc

SEQ ID NO: 4044335 - RNA, 13 nt, Molluscum contagiosum virus
agguugcgcagag

SEQ ID NO: 4044336 - RNA, 21 nt, Molluscum contagiosum virus
agguuggggcggcggggcugc

SEQ ID NO: 4044337 - RNA, 14 nt, Molluscum contagiosum virus
aguaccagccgcug

SEQ ID NO: 4044338 - RNA, 16 nt, Molluscum contagiosum virus
aguaccgcgcgcacgc

SEQ ID NO: 4044339 - RNA, 16 nt, Molluscum contagiosum virus
aguaccggccaaggca

SEQ ID NO: 4044340 - RNA, 15 nt, Molluscum contagiosum virus
aguaccuagugcaca

SEQ ID NO: 4044341 - RNA, 17 nt, Molluscum contagiosum virus
aguacugcagcagcucc

SEQ ID NO: 4044342 - RNA, 19 nt, Molluscum contagiosum virus
aguacugcagcagcuccuc

SEQ ID NO: 4044343 - RNA, 22 nt, Molluscum contagiosum virus
aguacuucuacgggaagcugca

SEQ ID NO: 4044344 - RNA, 21 nt, Molluscum contagiosum virus
aguagcagcuucuuggagccc

SEQ ID NO: 4044345 - RNA, 19 nt, Molluscum contagiosum virus
agucacgaccgacccaucg

SEQ ID NO: 4044346 - RNA, 18 nt, Molluscum contagiosum virus
aguccgccucgagcacgc

SEQ ID NO: 4044347 - RNA, 18 nt, Molluscum contagiosum virus
agucgccuuccugcgccc

SEQ ID NO: 4044348 - RNA, 18 nt, Molluscum contagiosum virus
agucggcguggccaggcc

SEQ ID NO: 4044349 - RNA, 14 nt, Molluscum contagiosum virus
agucucuguaacaa

SEQ ID NO: 4044350 - RNA, 20 nt, Molluscum contagiosum virus
agucuuccuggggcuggaca

SEQ ID NO: 4044351 - RNA, 17 nt, Molluscum contagiosum virus
agugcacaccggcgcgc

SEQ ID NO: 4044352 - RNA, 14 nt, Molluscum contagiosum virus
agugccgagcucgc

SEQ ID NO: 4044353 - RNA, 23 nt, Molluscum contagiosum virus
agugccuccgcggacgcgcccug

SEQ ID NO: 4044354 - RNA, 21 nt, Molluscum contagiosum virus
agugcgagccgugaccuucgu

SEQ ID NO: 4044355 - RNA, 15 nt, Molluscum contagiosum virus
agugcgcgccaagaa

SEQ ID NO: 4044356 - RNA, 16 nt, Molluscum contagiosum virus
agugcucccgaggcgc

SEQ ID NO: 4044357 - RNA, 14 nt, Molluscum contagiosum virus
aguggccggcaagg

SEQ ID NO: 4044358 - RNA, 22 nt, Molluscum contagiosum virus
aguggcgcgcauuuaccggcgc

SEQ ID NO: 4044359 - RNA, 15 nt, Molluscum contagiosum virus
aguggcgcucgcgag

SEQ ID NO: 4044360 - RNA, 16 nt, Molluscum contagiosum virus
aguggcgugacagguc

SEQ ID NO: 4044361 - RNA, 20 nt, Molluscum contagiosum virus
aguggcuuguugucgagcag

SEQ ID NO: 4044362 - RNA, 15 nt, Molluscum contagiosum virus
agugugugcaucccu

SEQ ID NO: 4044363 - RNA, 18 nt, Molluscum contagiosum virus
aguguugucguccuuggc

SEQ ID NO: 4044364 - RNA, 12 nt, Molluscum contagiosum virus
aguguugugaag

SEQ ID NO: 4044365 - RNA, 22 nt, Molluscum contagiosum virus
aguguugugaaguccucucucc

SEQ ID NO: 4044366 - RNA, 17 nt, Molluscum contagiosum virus
aguuccagcagcgccag

SEQ ID NO: 4044367 - RNA, 19 nt, Molluscum contagiosum virus
aguucugcacagcacaggc

SEQ ID NO: 4044368 - RNA, 14 nt, Molluscum contagiosum virus
aguugcgagccagc

SEQ ID NO: 4044369 - RNA, 22 nt, Molluscum contagiosum virus
aguuggcgcgcaagcgcugcuc

SEQ ID NO: 4044370 - RNA, 20 nt, Molluscum contagiosum virus
auaaggcgguggcggcucug

SEQ ID NO: 4044371 - RNA, 20 nt, Molluscum contagiosum virus
auaaucggucagacuuucug

SEQ ID NO: 4044372 - RNA, 14 nt, Molluscum contagiosum virus
auacacuuccugcu

SEQ ID NO: 4044373 - RNA, 13 nt, Molluscum contagiosum virus
auacuccugcugg

SEQ ID NO: 4044374 - RNA, 14 nt, Molluscum contagiosum virus
auacucuguagcau

SEQ ID NO: 4044375 - RNA, 19 nt, Molluscum contagiosum virus
auacugcgggcuguuccaa

SEQ ID NO: 4044376 - RNA, 16 nt, Molluscum contagiosum virus
auagcccaugcgcagu

SEQ ID NO: 4044377 - RNA, 20 nt, Molluscum contagiosum virus
auagcgccacgagcagugcc

SEQ ID NO: 4044378 - RNA, 14 nt, Molluscum contagiosum virus
aucaccagccugcu

SEQ ID NO: 4044379 - RNA, 17 nt, Molluscum contagiosum virus
aucacgaugugcgcgcg

SEQ ID NO: 4044380 - RNA, 16 nt, Molluscum contagiosum virus
aucacggcgugcgcga

SEQ ID NO: 4044381 - RNA, 17 nt, Molluscum contagiosum virus
aucagagaagugcuccg

SEQ ID NO: 4044382 - RNA, 14 nt, Molluscum contagiosum virus
aucaucgcgcugcu

SEQ ID NO: 4044383 - RNA, 20 nt, Molluscum contagiosum virus
auccagcccugugcccgagu

SEQ ID NO: 4044384 - RNA, 19 nt, Molluscum contagiosum virus
aucccacguacgagcagcu

SEQ ID NO: 4044385 - RNA, 23 nt, Molluscum contagiosum virus
aucccacguacgagcagcugcug

SEQ ID NO: 4044386 - RNA, 17 nt, Molluscum contagiosum virus
aucccugcgcaccugca

SEQ ID NO: 4044387 - RNA, 21 nt, Molluscum contagiosum virus
auccgcaauuacgugcgcgag

SEQ ID NO: 4044388 - RNA, 20 nt, Molluscum contagiosum virus
auccgcaauucuagcgcgag

SEQ ID NO: 4044389 - RNA, 13 nt, Molluscum contagiosum virus
auccgcuaccugg

SEQ ID NO: 4044390 - RNA, 19 nt, Molluscum contagiosum virus
auccucaccuuccugggcg

SEQ ID NO: 4044391 - RNA, 17 nt, Molluscum contagiosum virus
auccuggggaaccgcug

SEQ ID NO: 4044392 - RNA, 15 nt, Molluscum contagiosum virus
aucgacgagcacgag

SEQ ID NO: 4044393 - RNA, 13 nt, Molluscum contagiosum virus
aucgcgcaggcgc

SEQ ID NO: 4044394 - RNA, 13 nt, Molluscum contagiosum virus
aucgcgcugcugg

SEQ ID NO: 4044395 - RNA, 15 nt, Molluscum contagiosum virus
aucgcgcugcuggug

SEQ ID NO: 4044396 - RNA, 18 nt, Molluscum contagiosum virus
aucgcggagcugcgcgcg

SEQ ID NO: 4044397 - RNA, 20 nt, Molluscum contagiosum virus
aucgcucgcggugcagcugc

SEQ ID NO: 4044398 - RNA, 17 nt, Molluscum contagiosum virus
aucggagaagugcuccg

SEQ ID NO: 4044399 - RNA, 16 nt, Molluscum contagiosum virus
aucggcacugcucacg

SEQ ID NO: 4044400 - RNA, 17 nt, Molluscum contagiosum virus
aucgucacgugaacucc

SEQ ID NO: 4044401 - RNA, 19 nt, Molluscum contagiosum virus
aucgucgcggccguggcac

SEQ ID NO: 4044402 - RNA, 12 nt, Molluscum contagiosum virus
aucgugcuggag

SEQ ID NO: 4044403 - RNA, 17 nt, Molluscum contagiosum virus
aucgugggcaucgaccc

SEQ ID NO: 4044404 - RNA, 14 nt, Molluscum contagiosum virus
aucucugcccucag

SEQ ID NO: 4044405 - RNA, 20 nt, Molluscum contagiosum virus
aucuucgaaguggccgucgc

SEQ ID NO: 4044406 - RNA, 20 nt, Molluscum contagiosum virus
augaaccacuucgucaagca

SEQ ID NO: 4044407 - RNA, 11 nt, Molluscum contagiosum virus
augagcggcac

SEQ ID NO: 4044408 - RNA, 15 nt, Molluscum contagiosum virus
augagcguggagaag

SEQ ID NO: 4044409 - RNA, 23 nt, Molluscum contagiosum virus
augcacacacucgcgcguccaca

SEQ ID NO: 4044410 - RNA, 17 nt, Molluscum contagiosum virus
augcacuuucaacucuc

SEQ ID NO: 4044411 - RNA, 16 nt, Molluscum contagiosum virus
augcagauuggaggag

SEQ ID NO: 4044412 - RNA, 17 nt, Molluscum contagiosum virus
augcagugcaccagcac

SEQ ID NO: 4044413 - RNA, 12 nt, Molluscum contagiosum virus
augcccagccug

SEQ ID NO: 4044414 - RNA, 19 nt, Molluscum contagiosum virus
augcccgcaaugcaagccc

SEQ ID NO: 4044415 - RNA, 21 nt, Molluscum contagiosum virus
augcccggccucgccuccggg

SEQ ID NO: 4044416 - RNA, 10 nt, Molluscum contagiosum virus
augccgccgc

SEQ ID NO: 4044417 - RNA, 16 nt, Molluscum contagiosum virus
augccgcgugcucugc

SEQ ID NO: 4044418 - RNA, 21 nt, Molluscum contagiosum virus
augccggggaugaacgcgcug

SEQ ID NO: 4044419 - RNA, 19 nt, Molluscum contagiosum virus
augccuuucaggggucugu

SEQ ID NO: 4044420 - RNA, 21 nt, Molluscum contagiosum virus
augccuuuccgagcucgcaaa

SEQ ID NO: 4044421 - RNA, 22 nt, Molluscum contagiosum virus
augcgcgccgcgcugcuggcca

SEQ ID NO: 4044422 - RNA, 19 nt, Molluscum contagiosum virus
augcgcgggcuacuuuucg

SEQ ID NO: 4044423 - RNA, 14 nt, Molluscum contagiosum virus
augcgcuucggcuc

SEQ ID NO: 4044424 - RNA, 20 nt, Molluscum contagiosum virus
augcucaagcaccugcgcuu

SEQ ID NO: 4044425 - RNA, 15 nt, Molluscum contagiosum virus
augcucaagcacugc

SEQ ID NO: 4044426 - RNA, 13 nt, Molluscum contagiosum virus
augcucgccagca

SEQ ID NO: 4044427 - RNA, 12 nt, Molluscum contagiosum virus
augcucgcgcuc

SEQ ID NO: 4044428 - RNA, 20 nt, Molluscum contagiosum virus
augcucgucgccgggccccu

SEQ ID NO: 4044429 - RNA, 22 nt, Molluscum contagiosum virus
augcucgucgccgggccccugu

SEQ ID NO: 4044430 - RNA, 18 nt, Molluscum contagiosum virus
augcugcucgacgggcgc

SEQ ID NO: 4044431 - RNA, 19 nt, Molluscum contagiosum virus
augcugcucgacgggcgca

SEQ ID NO: 4044432 - RNA, 17 nt, Molluscum contagiosum virus
augcugugcggcacgcc

SEQ ID NO: 4044433 - RNA, 24 nt, Molluscum contagiosum virus
augcuugcuuccggugccggccgc

SEQ ID NO: 4044434 - RNA, 22 nt, Molluscum contagiosum virus
augcuuuuguuacucucagagc

SEQ ID NO: 4044435 - RNA, 21 nt, Molluscum contagiosum virus
auggaccgguuccgugcgcuc

SEQ ID NO: 4044436 - RNA, 15 nt, Molluscum contagiosum virus
auggacgcgccgcgc

SEQ ID NO: 4044437 - RNA, 12 nt, Molluscum contagiosum virus
uucgagcugcug

SEQ ID NO: 4044438 - RNA, 13 nt, Molluscum contagiosum virus
uucgaucgcgcuc

SEQ ID NO: 4044439 - RNA, 17 nt, Molluscum contagiosum virus
uucgccggaggaaggac

SEQ ID NO: 4044440 - RNA, 22 nt, Molluscum contagiosum virus
uucgccggcaucgcgcugcugg

SEQ ID NO: 4044441 - RNA, 14 nt, Molluscum contagiosum virus
uucgcgagccacuc

SEQ ID NO: 4044442 - RNA, 13 nt, Molluscum contagiosum virus
uucgugcugugcc

SEQ ID NO: 4044443 - RNA, 12 nt, Molluscum contagiosum virus
uucguggccaac

SEQ ID NO: 4044444 - RNA, 13 nt, Molluscum contagiosum virus
uucguggcgcugg

SEQ ID NO: 4044445 - RNA, 17 nt, Molluscum contagiosum virus
uucuacgggaagcugca

SEQ ID NO: 4044446 - RNA, 16 nt, Molluscum contagiosum virus
uucucagguacguguc

SEQ ID NO: 4044447 - RNA, 19 nt, Molluscum contagiosum virus
uucugcguugccagcguaa

SEQ ID NO: 4044448 - RNA, 15 nt, Molluscum contagiosum virus
uugaacucgagcacg

SEQ ID NO: 4044449 - RNA, 13 nt, Molluscum contagiosum virus
uugagagcgcugg

SEQ ID NO: 4044450 - RNA, 22 nt, Molluscum contagiosum virus
uugagcucgcgcgcaagaacaa

SEQ ID NO: 4044451 - RNA, 21 nt, Molluscum contagiosum virus
uugaggaacuagugcugcugg

SEQ ID NO: 4044452 - RNA, 19 nt, Molluscum contagiosum virus
uugagugguacuaccucuu

SEQ ID NO: 4044453 - RNA, 18 nt, Molluscum contagiosum virus
uugcacgcgcacgcgccc

SEQ ID NO: 4044454 - RNA, 23 nt, Molluscum contagiosum virus
uugccgugcccaucuccuugucu

SEQ ID NO: 4044455 - RNA, 16 nt, Molluscum contagiosum virus
uugcgagccagccagg

SEQ ID NO: 4044456 - RNA, 17 nt, Molluscum contagiosum virus
uugcgagccagccaggc

SEQ ID NO: 4044457 - RNA, 14 nt, Molluscum contagiosum virus
uugcgcgagcgcgu

SEQ ID NO: 4044458 - RNA, 23 nt, Molluscum contagiosum virus
uugcgcgcggggcacugcgcacg

SEQ ID NO: 4044459 - RNA, 23 nt, Molluscum contagiosum virus
uugcgcggauauggcgcgccgag

SEQ ID NO: 4044460 - RNA, 17 nt, Molluscum contagiosum virus
uugcgcguccacaaagg

SEQ ID NO: 4044461 - RNA, 13 nt, Molluscum contagiosum virus
uugcggcgccgcc

SEQ ID NO: 4044462 - RNA, 16 nt, Molluscum contagiosum virus
uugcguaucggaguca

SEQ ID NO: 4044463 - RNA, 15 nt, Molluscum contagiosum virus
uugcuacaggacguc

SEQ ID NO: 4044464 - RNA, 22 nt, Molluscum contagiosum virus
uugcugucccaagacucugccg

SEQ ID NO: 4044465 - RNA, 13 nt, Molluscum contagiosum virus
uuggaggaggaag

SEQ ID NO: 4044466 - RNA, 21 nt, Molluscum contagiosum virus
uuguccgcggacgcgggccug

SEQ ID NO: 4044467 - RNA, 11 nt, Molluscum contagiosum virus
uugugcugcug

SEQ ID NO: 4044468 - RNA, 14 nt, Molluscum contagiosum virus
uuguguuggccagg

SEQ ID NO: 4044469 - RNA, 13 nt, Molluscum contagiosum virus
uuuacugcaagau

SEQ ID NO: 4044470 - RNA, 24 nt, Molluscum contagiosum virus
uuucaaugcaguaugugaacacga

SEQ ID NO: 4044471 - RNA, 15 nt, Molluscum contagiosum virus
uuuucccgggcggcg

SEQ ID NO: 4044472 - RNA, 22 nt, Molluscum contagiosum virus
uuuucuggcgcguaaggcggcg

SEQ ID NO: 4044473 - RNA, 18 nt, Molluscum contagiosum virus
uuuuugcggcgccgccgc

SEQ ID NO: 4044474 - RNA, 23 nt, Molluscum contagiosum virus
uguaaugugcuggucaagaacau

SEQ ID NO: 4044475 - RNA, 13 nt, Molluscum contagiosum virus
uguacaaagagcu

SEQ ID NO: 4044476 - RNA, 16 nt, Molluscum contagiosum virus
ugucaguggacaagcu

SEQ ID NO: 4044477 - RNA, 20 nt, Molluscum contagiosum virus
ugucaucaccccgcugggcc

SEQ ID NO: 4044478 - RNA, 17 nt, Molluscum contagiosum virus
uguccacgacacuggcg

SEQ ID NO: 4044479 - RNA, 22 nt, Molluscum contagiosum virus
uguccgaggacuuccgcgcgcu

SEQ ID NO: 4044480 - RNA, 14 nt, Molluscum contagiosum virus
uguccgcaagcacg

SEQ ID NO: 4044481 - RNA, 14 nt, Molluscum contagiosum virus
uguccgcacgcaca

SEQ ID NO: 4044482 - RNA, 16 nt, Molluscum contagiosum virus
uguccuacacgccgcu

SEQ ID NO: 4044483 - RNA, 17 nt, Molluscum contagiosum virus
uguccucuuggccccuc

SEQ ID NO: 4044484 - RNA, 13 nt, Molluscum contagiosum virus
ugucgagacaggc

SEQ ID NO: 4044485 - RNA, 21 nt, Molluscum contagiosum virus
ugucgagaccuuccuccaggg

SEQ ID NO: 4044486 - RNA, 23 nt, Molluscum contagiosum virus
ugucgcucguggaucgcgcgcac

SEQ ID NO: 4044487 - RNA, 20 nt, Molluscum contagiosum virus
ugucggcacaucucucaggg

SEQ ID NO: 4044488 - RNA, 17 nt, Molluscum contagiosum virus
ugugacaacaugugauc

SEQ ID NO: 4044489 - RNA, 21 nt, Molluscum contagiosum virus
ugugcacgcuguccaggcgcu

SEQ ID NO: 4044490 - RNA, 21 nt, Molluscum contagiosum virus
ugugcauggcggcggccacgc

SEQ ID NO: 4044491 - RNA, 13 nt, Molluscum contagiosum virus
ugugccagcagca

SEQ ID NO: 4044492 - RNA, 13 nt, Molluscum contagiosum virus
ugugcgagccagu

SEQ ID NO: 4044493 - RNA, 13 nt, Molluscum contagiosum virus
ugugcgcgcacgg

SEQ ID NO: 4044494 - RNA, 13 nt, Molluscum contagiosum virus
ugugcggacaugc

SEQ ID NO: 4044495 - RNA, 17 nt, Molluscum contagiosum virus
ugugggucucgagccgc

SEQ ID NO: 4044496 - RNA, 19 nt, Molluscum contagiosum virus
ugugguucaugacggcgug

SEQ ID NO: 4044497 - RNA, 19 nt, Molluscum contagiosum virus
ugugugcuuauaccaugga

SEQ ID NO: 4044498 - RNA, 13 nt, Molluscum contagiosum virus
uguguugagccuu

SEQ ID NO: 4044499 - RNA, 22 nt, Molluscum contagiosum virus
uguucaccaccaccagcacgcu

SEQ ID NO: 4044500 - RNA, 18 nt, Molluscum contagiosum virus
uguucaccauccagccgu

SEQ ID NO: 4044501 - RNA, 20 nt, Molluscum contagiosum virus
uguuccaagaagacuaccac

SEQ ID NO: 4044502 - RNA, 22 nt, Molluscum contagiosum virus
uguuccacgaccgcaagugcac

SEQ ID NO: 4044503 - RNA, 22 nt, Molluscum contagiosum virus
uguucccggcugccgcugccug

SEQ ID NO: 4044504 - RNA, 12 nt, Molluscum contagiosum virus
uguuccugccgg

SEQ ID NO: 4044505 - RNA, 21 nt, Molluscum contagiosum virus
uguucgcgcuucugccccguc

SEQ ID NO: 4044506 - RNA, 15 nt, Molluscum contagiosum virus
uguucggcaugcagc

SEQ ID NO: 4044507 - RNA, 16 nt, Molluscum contagiosum virus
uguucuggucuggaaa

SEQ ID NO: 4044508 - RNA, 12 nt, Molluscum contagiosum virus
uguugaccaaag

SEQ ID NO: 4044509 - RNA, 16 nt, Molluscum contagiosum virus
uguugccuggagggca

SEQ ID NO: 4044510 - RNA, 17 nt, Molluscum contagiosum virus
uguuuccuugccuucuc

SEQ ID NO: 4044511 - RNA, 22 nt, Molluscum contagiosum virus
uguuucucgcgaaucacaaaca

SEQ ID NO: 4044512 - RNA, 15 nt, Molluscum contagiosum virus
uuagccacugugcug

SEQ ID NO: 4044513 - RNA, 16 nt, Molluscum contagiosum virus
uuagccacugugcuga

SEQ ID NO: 4044514 - RNA, 19 nt, Molluscum contagiosum virus
uucacgcccgcaaugcagu

SEQ ID NO: 4044515 - RNA, 18 nt, Molluscum contagiosum virus
uucacuccgcacagcuuc

SEQ ID NO: 4044516 - RNA, 12 nt, Molluscum contagiosum virus
uucagcgcacgc

SEQ ID NO: 4044517 - RNA, 18 nt, Molluscum contagiosum virus
uucaugugcgagaacugg

SEQ ID NO: 4044518 - RNA, 17 nt, Molluscum contagiosum virus
uuccacgucuccaacaa

SEQ ID NO: 4044519 - RNA, 15 nt, Molluscum contagiosum virus
uucccaagcaaagcc

SEQ ID NO: 4044520 - RNA, 16 nt, Molluscum contagiosum virus
uucccgggcacuguaa

SEQ ID NO: 4044521 - RNA, 15 nt, Molluscum contagiosum virus
uuccgagcgcgcacg

SEQ ID NO: 4044522 - RNA, 23 nt, Molluscum contagiosum virus
uuccggcaccacgugcgcuggcc

SEQ ID NO: 4044523 - RNA, 16 nt, Molluscum contagiosum virus
uuccugaacaagcugc

SEQ ID NO: 4044524 - RNA, 15 nt, Molluscum contagiosum virus
uuccugcgucgccug

SEQ ID NO: 4044525 - RNA, 19 nt, Molluscum contagiosum virus
uucgaaguuucacgcguga

SEQ ID NO: 4044526 - RNA, 19 nt, Molluscum contagiosum virus
uucgagacgcugcgcgacg

SEQ ID NO: 4044527 - RNA, 13 nt, Molluscum contagiosum virus
ucagcagcgcgag

SEQ ID NO: 4044528 - RNA, 21 nt, Molluscum contagiosum virus
ucagccgagcgccgccagcuc

SEQ ID NO: 4044529 - RNA, 20 nt, Molluscum contagiosum virus
ucagcggcggccccugccuu

SEQ ID NO: 4044530 - RNA, 14 nt, Molluscum contagiosum virus
ucagcuucauggag

SEQ ID NO: 4044531 - RNA, 20 nt, Molluscum contagiosum virus
ucaggaacaaggccaaagcc

SEQ ID NO: 4044532 - RNA, 23 nt, Molluscum contagiosum virus
ucaggacgcaggacgcggucgcg

SEQ ID NO: 4044533 - RNA, 14 nt, Molluscum contagiosum virus
ucaggccagcaucu

SEQ ID NO: 4044534 - RNA, 17 nt, Molluscum contagiosum virus
ucagggcuucuggcaaa

SEQ ID NO: 4044535 - RNA, 19 nt, Molluscum contagiosum virus
ucaguacaugcccggccuc

SEQ ID NO: 4044536 - RNA, 15 nt, Molluscum contagiosum virus
ucauacuccugcugg

SEQ ID NO: 4044537 - RNA, 14 nt, Molluscum contagiosum virus
ucaucgccagcauc

SEQ ID NO: 4044538 - RNA, 15 nt, Molluscum contagiosum virus
ucaucuucgugcuga

SEQ ID NO: 4044539 - RNA, 13 nt, Molluscum contagiosum virus
ucaugcugcucau

SEQ ID NO: 4044540 - RNA, 14 nt, Molluscum contagiosum virus
ucauucgcuggugc

SEQ ID NO: 4044541 - RNA, 17 nt, Molluscum contagiosum virus
uccaagaacgagaagag

SEQ ID NO: 4044542 - RNA, 22 nt, Molluscum contagiosum virus
uccacgaugaacggcuccuuga

SEQ ID NO: 4044543 - RNA, 14 nt, Molluscum contagiosum virus
uccacgcgugcgcg

SEQ ID NO: 4044544 - RNA, 19 nt, Molluscum contagiosum virus
uccacggguaccgugcgcg

SEQ ID NO: 4044545 - RNA, 12 nt, Molluscum contagiosum virus
uccagcagcgcc

SEQ ID NO: 4044546 - RNA, 20 nt, Molluscum contagiosum virus
uccagccgcagccgcgcuag

SEQ ID NO: 4044547 - RNA, 22 nt, Molluscum contagiosum virus
uccagcguuuccucuggcucca

SEQ ID NO: 4044548 - RNA, 21 nt, Molluscum contagiosum virus
uccaggaacgccgccacgccg

SEQ ID NO: 4044549 - RNA, 13 nt, Molluscum contagiosum virus
uccaggcgccgca

SEQ ID NO: 4044550 - RNA, 15 nt, Molluscum contagiosum virus
uccagguccuccagc

SEQ ID NO: 4044551 - RNA, 16 nt, Molluscum contagiosum virus
uccaggugcugggcga

SEQ ID NO: 4044552 - RNA, 21 nt, Molluscum contagiosum virus
uccaguaagcgacaggucagg

SEQ ID NO: 4044553 - RNA, 13 nt, Molluscum contagiosum virus
uccaguggcgccc

SEQ ID NO: 4044554 - RNA, 15 nt, Molluscum contagiosum virus
uccaugagcaucucc

SEQ ID NO: 4044555 - RNA, 22 nt, Molluscum contagiosum virus
uccauugcauggacauccucac

SEQ ID NO: 4044556 - RNA, 23 nt, Molluscum contagiosum virus
ucccaagcaaagccucucucgug

SEQ ID NO: 4044557 - RNA, 15 nt, Molluscum contagiosum virus
ucccacguacgagca

SEQ ID NO: 4044558 - RNA, 11 nt, Molluscum contagiosum virus
ucccagcaccg

SEQ ID NO: 4044559 - RNA, 19 nt, Molluscum contagiosum virus
uccccguccuugcucuggc

SEQ ID NO: 4044560 - RNA, 12 nt, Molluscum contagiosum virus
gugcgccuucgu

SEQ ID NO: 4044561 - RNA, 16 nt, Molluscum contagiosum virus
gugcgccuuuccucuc

SEQ ID NO: 4044562 - RNA, 22 nt, Molluscum contagiosum virus
gugcgcgcugcacgccgccagc

SEQ ID NO: 4044563 - RNA, 14 nt, Molluscum contagiosum virus
gugcgcuacguggc

SEQ ID NO: 4044564 - RNA, 18 nt, Molluscum contagiosum virus
gugcgguacaugcugucc

SEQ ID NO: 4044565 - RNA, 19 nt, Molluscum contagiosum virus
gugcgucgacguggagccu

SEQ ID NO: 4044566 - RNA, 19 nt, Molluscum contagiosum virus
gugcgugcccaagugcgcg

SEQ ID NO: 4044567 - RNA, 21 nt, Molluscum contagiosum virus
gugcgugcccaagugcgcgug

SEQ ID NO: 4044568 - RNA, 14 nt, Molluscum contagiosum virus
gugcgugcccagca

SEQ ID NO: 4044569 - RNA, 20 nt, Molluscum contagiosum virus
gugcgugguguccacgcgcg

SEQ ID NO: 4044570 - RNA, 22 nt, Molluscum contagiosum virus
gugcucggugucgguaccugca

SEQ ID NO: 4044571 - RNA, 16 nt, Molluscum contagiosum virus
gugcucguguguccgc

SEQ ID NO: 4044572 - RNA, 15 nt, Molluscum contagiosum virus
gugcucugugcgcgc

SEQ ID NO: 4044573 - RNA, 21 nt, Molluscum contagiosum virus
gugcucugugcgcgcagacgu

SEQ ID NO: 4044574 - RNA, 23 nt, Molluscum contagiosum virus
gugcucuuggcguucgcagugcc

SEQ ID NO: 4044575 - RNA, 14 nt, Molluscum contagiosum virus
gugcugagccacaa

SEQ ID NO: 4044576 - RNA, 22 nt, Molluscum contagiosum virus
gugcugcgucacaagcaccgcc

SEQ ID NO: 4044577 - RNA, 17 nt, Molluscum contagiosum virus
gugcuggagcagacgua

SEQ ID NO: 4044578 - RNA, 22 nt, Molluscum contagiosum virus
gugcuggagggcacgcugcaca

SEQ ID NO: 4044579 - RNA, 19 nt, Molluscum contagiosum virus
gugcuggcggggcuggcag

SEQ ID NO: 4044580 - RNA, 20 nt, Molluscum contagiosum virus
gugcuggucaagaaggcgcu

SEQ ID NO: 4044581 - RNA, 21 nt, Molluscum contagiosum virus
gugcuugcgcacggaccucaa

SEQ ID NO: 4044582 - RNA, 22 nt, Molluscum contagiosum virus
gugcuugcuucggcggcugugc

SEQ ID NO: 4044583 - RNA, 14 nt, Molluscum contagiosum virus
guggaccuuggcgc

SEQ ID NO: 4044584 - RNA, 19 nt, Molluscum contagiosum virus
guggaccuuggcgcgccgc

SEQ ID NO: 4044585 - RNA, 20 nt, Molluscum contagiosum virus
guggacgcgcaagugugcgc

SEQ ID NO: 4044586 - RNA, 21 nt, Molluscum contagiosum virus
guggacgcgcgagugugugca

SEQ ID NO: 4044587 - RNA, 15 nt, Molluscum contagiosum virus
guggaggugcgcgac

SEQ ID NO: 4044588 - RNA, 18 nt, Molluscum contagiosum virus
guggaggugcgcgacucc

SEQ ID NO: 4044589 - RNA, 14 nt, Molluscum contagiosum virus
guggaucgcgcgca

SEQ ID NO: 4044590 - RNA, 19 nt, Molluscum contagiosum virus
guggcaaaccacgagcgug

SEQ ID NO: 4044591 - RNA, 13 nt, Molluscum contagiosum virus
guggccagcgcgc

SEQ ID NO: 4044592 - RNA, 23 nt, Molluscum contagiosum virus
guggccgcgcgcgcacgcaagcc

SEQ ID NO: 4044593 - RNA, 16 nt, Molluscum contagiosum virus
guggccuacguggcgu

SEQ ID NO: 4044594 - RNA, 19 nt, Molluscum contagiosum virus
guggcgccgaugcagugcg

SEQ ID NO: 4044595 - RNA, 17 nt, Molluscum contagiosum virus
guggcgccgcugcugga

SEQ ID NO: 4044596 - RNA, 15 nt, Molluscum contagiosum virus
guggcgccugcgcgc

SEQ ID NO: 4044597 - RNA, 13 nt, Molluscum contagiosum virus
guggcgcugcugc

SEQ ID NO: 4044598 - RNA, 13 nt, Molluscum contagiosum virus
guggcgcugugcg

SEQ ID NO: 4044599 - RNA, 22 nt, Molluscum contagiosum virus
guggcgcuuggcgagcgcugcc

SEQ ID NO: 4044600 - RNA, 16 nt, Molluscum contagiosum virus
guggcuugcgggacag

SEQ ID NO: 4044601 - RNA, 15 nt, Molluscum contagiosum virus
guggcuugcugcagu

SEQ ID NO: 4044602 - RNA, 14 nt, Molluscum contagiosum virus
gugggcaccugcau

SEQ ID NO: 4044603 - RNA, 18 nt, Molluscum contagiosum virus
gugggcagccgccuggcc

SEQ ID NO: 4044604 - RNA, 14 nt, Molluscum contagiosum virus
gugggccgcggcgc

SEQ ID NO: 4044605 - RNA, 23 nt, Molluscum contagiosum virus
gugggugaggagcucgacucgag

SEQ ID NO: 4044606 - RNA, 15 nt, Molluscum contagiosum virus
gugguccaccagcac

SEQ ID NO: 4044607 - RNA, 18 nt, Molluscum contagiosum virus
guggucgccuacgaggug

SEQ ID NO: 4044608 - RNA, 23 nt, Molluscum contagiosum virus
guguaguuaaaugacggagccgc

SEQ ID NO: 4044609 - RNA, 19 nt, Molluscum contagiosum virus
guguaugcucgucgccggg

SEQ ID NO: 4044610 - RNA, 20 nt, Molluscum contagiosum virus
gugucagccccgggcccgca

SEQ ID NO: 4044611 - RNA, 14 nt, Molluscum contagiosum virus
guguccgcacgcac

SEQ ID NO: 4044612 - RNA, 17 nt, Molluscum contagiosum virus
guguucggggccgcgag

SEQ ID NO: 4044613 - RNA, 14 nt, Molluscum contagiosum virus
guguugcugaugcc

SEQ ID NO: 4044614 - RNA, 22 nt, Molluscum contagiosum virus
guguuuuaauuuuccaaccugu

SEQ ID NO: 4044615 - RNA, 15 nt, Molluscum contagiosum virus
guguuuugugccugc

SEQ ID NO: 4044616 - RNA, 21 nt, Molluscum contagiosum virus
guuaaaaaugagaauaaaaua

SEQ ID NO: 4044617 - RNA, 22 nt, Molluscum contagiosum virus
guuccacgaccgcaagugcacg

SEQ ID NO: 4044618 - RNA, 15 nt, Molluscum contagiosum virus
guucccauguaggag

SEQ ID NO: 4044619 - RNA, 20 nt, Molluscum contagiosum virus
guucccggugcugcugccaa

SEQ ID NO: 4044620 - RNA, 15 nt, Molluscum contagiosum virus
guucgcagugcccgg

SEQ ID NO: 4044621 - RNA, 13 nt, Molluscum contagiosum virus
guucgcgcgccag

SEQ ID NO: 4044622 - RNA, 16 nt, Molluscum contagiosum virus
guucgcgcgugcugga

SEQ ID NO: 4044623 - RNA, 14 nt, Molluscum contagiosum virus
guucuagcagcgug

SEQ ID NO: 4044624 - RNA, 21 nt, Molluscum contagiosum virus
guucugcacagcacaggcccc

SEQ ID NO: 4044625 - RNA, 15 nt, Molluscum contagiosum virus
guucuggacgugucc

SEQ ID NO: 4044626 - RNA, 19 nt, Molluscum contagiosum virus
guugacgagcgcgugcccg

SEQ ID NO: 4044627 - RNA, 23 nt, Molluscum contagiosum virus
guugccaguagcgaaugcagugc

SEQ ID NO: 4044628 - RNA, 23 nt, Molluscum contagiosum virus
guugccgcccgccgaguaccgcg

SEQ ID NO: 4044629 - RNA, 14 nt, Molluscum contagiosum virus
guugccggagcuga

SEQ ID NO: 4044630 - RNA, 13 nt, Molluscum contagiosum virus
guugccuggaggg

SEQ ID NO: 4044631 - RNA, 14 nt, Molluscum contagiosum virus
guugcgagccagcc

SEQ ID NO: 4044632 - RNA, 16 nt, Molluscum contagiosum virus
guugcgcaugcgcaag

SEQ ID NO: 4044633 - RNA, 12 nt, Molluscum contagiosum virus
guugcugcugcc

SEQ ID NO: 4044634 - RNA, 13 nt, Molluscum contagiosum virus
guugcugcugccg

SEQ ID NO: 4044635 - RNA, 16 nt, Molluscum contagiosum virus
guuggcccgcaaacac

SEQ ID NO: 4044636 - RNA, 16 nt, Molluscum contagiosum virus
guuggcgugcucgcuc

SEQ ID NO: 4044637 - RNA, 20 nt, Molluscum contagiosum virus
guuggcuuucugugcgcgac

SEQ ID NO: 4044638 - RNA, 23 nt, Molluscum contagiosum virus
guuggggcggcggggcugcuggc

SEQ ID NO: 4044639 - RNA, 14 nt, Molluscum contagiosum virus
guuuccgcgccucc

SEQ ID NO: 4044640 - RNA, 23 nt, Molluscum contagiosum virus
guuuccguguccgguacugcugc

SEQ ID NO: 4044641 - RNA, 16 nt, Molluscum contagiosum virus
guuucgcaugcacagc

SEQ ID NO: 4044642 - RNA, 17 nt, Molluscum contagiosum virus
guuuguggcgacacgga

SEQ ID NO: 4044643 - RNA, 19 nt, Molluscum contagiosum virus
guuuucacgcaaggaagca

SEQ ID NO: 4044644 - RNA, 20 nt, Molluscum contagiosum virus
uaaagaccgugucuggugua

SEQ ID NO: 4044645 - RNA, 21 nt, Molluscum contagiosum virus
uaaaguacgagagcgcaugcc

SEQ ID NO: 4044646 - RNA, 16 nt, Molluscum contagiosum virus
uaacaaggaaaaggca

SEQ ID NO: 4044647 - RNA, 12 nt, Molluscum contagiosum virus
uaaccaugaaga

SEQ ID NO: 4044648 - RNA, 16 nt, Molluscum contagiosum virus
uaaugaagcgcugugc

SEQ ID NO: 4044649 - RNA, 15 nt, Molluscum contagiosum virus
uaaugacgcgcacgc

SEQ ID NO: 4044650 - RNA, 23 nt, Molluscum contagiosum virus
uacaacucgguggugcgccugca

SEQ ID NO: 4044651 - RNA, 14 nt, Molluscum contagiosum virus
uacacgcagagcca

SEQ ID NO: 4044652 - RNA, 16 nt, Molluscum contagiosum virus
uacacgcagagccagc

SEQ ID NO: 4044653 - RNA, 14 nt, Molluscum contagiosum virus
uacaucgacaagca

SEQ ID NO: 4044654 - RNA, 23 nt, Molluscum contagiosum virus
uacauggacgugcugcuggcccu

SEQ ID NO: 4044655 - RNA, 21 nt, Molluscum contagiosum virus
uaccaagaacagagaaaggca

SEQ ID NO: 4044656 - RNA, 22 nt, Molluscum contagiosum virus
uaccagaggguggcuugcugca

SEQ ID NO: 4044657 - RNA, 13 nt, Molluscum contagiosum virus
uaccagcucgcgc

SEQ ID NO: 4044658 - RNA, 17 nt, Molluscum contagiosum virus
uacccuuggcagcaacu

SEQ ID NO: 4044659 - RNA, 20 nt, Molluscum contagiosum virus
uaccgcaaccagcugcuguc

SEQ ID NO: 4044660 - RNA, 18 nt, Molluscum contagiosum virus
uaccgcgacggcgugcug

SEQ ID NO: 4044661 - RNA, 17 nt, Molluscum contagiosum virus
uaccgcgcgcgcaagcg

SEQ ID NO: 4044662 - RNA, 16 nt, Molluscum contagiosum virus
uaccggagacaccagc

SEQ ID NO: 4044663 - RNA, 14 nt, Molluscum contagiosum virus
gcugcgcuaccacg

SEQ ID NO: 4044664 - RNA, 14 nt, Molluscum contagiosum virus
gcugcgcugcaacc

SEQ ID NO: 4044665 - RNA, 20 nt, Molluscum contagiosum virus
gcugcgcuucgccgcgcgcg

SEQ ID NO: 4044666 - RNA, 20 nt, Molluscum contagiosum virus
gcugcuacaagcggugcagc

SEQ ID NO: 4044667 - RNA, 19 nt, Molluscum contagiosum virus
gcugcuccccgccagcacc

SEQ ID NO: 4044668 - RNA, 23 nt, Molluscum contagiosum virus
gcugcucccucucgaggaauuug

SEQ ID NO: 4044669 - RNA, 22 nt, Molluscum contagiosum virus
gcugcucgcugccuggugcaca

SEQ ID NO: 4044670 - RNA, 15 nt, Molluscum contagiosum virus
gcugcucgcuugccc

SEQ ID NO: 4044671 - RNA, 19 nt, Molluscum contagiosum virus
gcugcucgugcugcucugc

SEQ ID NO: 4044672 - RNA, 15 nt, Molluscum contagiosum virus
gcugcugcacagcuu

SEQ ID NO: 4044673 - RNA, 15 nt, Molluscum contagiosum virus
gcugcugcucgcacc

SEQ ID NO: 4044674 - RNA, 20 nt, Molluscum contagiosum virus
gcugcuggaacaggugcgca

SEQ ID NO: 4044675 - RNA, 13 nt, Molluscum contagiosum virus
gcugcuggagcua

SEQ ID NO: 4044676 - RNA, 19 nt, Molluscum contagiosum virus
gcugcuguuucugugucac

SEQ ID NO: 4044677 - RNA, 22 nt, Molluscum contagiosum virus
gcuggaccccgagcugcggcgc

SEQ ID NO: 4044678 - RNA, 14 nt, Molluscum contagiosum virus
gcuggacgggcacg

SEQ ID NO: 4044679 - RNA, 18 nt, Molluscum contagiosum virus
gcuggacgggcacgagca

SEQ ID NO: 4044680 - RNA, 19 nt, Molluscum contagiosum virus
gcuggagaaagaagugugc

SEQ ID NO: 4044681 - RNA, 12 nt, Molluscum contagiosum virus
gcuggagcagac

SEQ ID NO: 4044682 - RNA, 16 nt, Molluscum contagiosum virus
gcuggaugcugcucga

SEQ ID NO: 4044683 - RNA, 14 nt, Molluscum contagiosum virus
gcuggccgugcccg

SEQ ID NO: 4044684 - RNA, 17 nt, Molluscum contagiosum virus
gcuggccgugcccgccg

SEQ ID NO: 4044685 - RNA, 14 nt, Molluscum contagiosum virus
gcuggccucugcca

SEQ ID NO: 4044686 - RNA, 15 nt, Molluscum contagiosum virus
gcuggcgcccgcgga

SEQ ID NO: 4044687 - RNA, 15 nt, Molluscum contagiosum virus
gcuggcgcgcgcgca

SEQ ID NO: 4044688 - RNA, 17 nt, Molluscum contagiosum virus
gcuggcgcucgcgcgca

SEQ ID NO: 4044689 - RNA, 17 nt, Molluscum contagiosum virus
gcuggcgcucggcgugg

SEQ ID NO: 4044690 - RNA, 20 nt, Molluscum contagiosum virus
gcuggcgcucggcguggugc

SEQ ID NO: 4044691 - RNA, 17 nt, Molluscum contagiosum virus
gcuggcggcgcacgcga

SEQ ID NO: 4044692 - RNA, 13 nt, Molluscum contagiosum virus
gcuggcggggaaa

SEQ ID NO: 4044693 - RNA, 16 nt, Molluscum contagiosum virus
gcuggcgggugccgug

SEQ ID NO: 4044694 - RNA, 15 nt, Molluscum contagiosum virus
gcuggcugggcacuc

SEQ ID NO: 4044695 - RNA, 21 nt, Molluscum contagiosum virus
gcugggaaagggcugcuugcg

SEQ ID NO: 4044696 - RNA, 18 nt, Molluscum contagiosum virus
gcugggcgugggcagccg

SEQ ID NO: 4044697 - RNA, 18 nt, Molluscum contagiosum virus
gcuggggccugugcugug

SEQ ID NO: 4044698 - RNA, 14 nt, Molluscum contagiosum virus
gcugucaacagugc

SEQ ID NO: 4044699 - RNA, 17 nt, Molluscum contagiosum virus
gcugugagcgcgccgcu

SEQ ID NO: 4044700 - RNA, 21 nt, Molluscum contagiosum virus
gcugugcgcuacguggcgcga

SEQ ID NO: 4044701 - RNA, 20 nt, Molluscum contagiosum virus
gcuguucaacaucguggcgc

SEQ ID NO: 4044702 - RNA, 18 nt, Molluscum contagiosum virus
gcuuccgcgagucugcca

SEQ ID NO: 4044703 - RNA, 19 nt, Molluscum contagiosum virus
gcuuccgcgagucugccag

SEQ ID NO: 4044704 - RNA, 23 nt, Molluscum contagiosum virus
gcuuccggcaccacgugcgcugg

SEQ ID NO: 4044705 - RNA, 20 nt, Molluscum contagiosum virus
gcuucgcuggcggggacagc

SEQ ID NO: 4044706 - RNA, 19 nt, Molluscum contagiosum virus
gcuucgucuucaccugcau

SEQ ID NO: 4044707 - RNA, 21 nt, Molluscum contagiosum virus
gcuucucgaacuccaggcgca

SEQ ID NO: 4044708 - RNA, 18 nt, Molluscum contagiosum virus
gcuucucgccagaaguca

SEQ ID NO: 4044709 - RNA, 22 nt, Molluscum contagiosum virus
gcuucucuucaugaaauacuuc

SEQ ID NO: 4044710 - RNA, 22 nt, Molluscum contagiosum virus
gcuugaaggacgcguucuccag

SEQ ID NO: 4044711 - RNA, 14 nt, Molluscum contagiosum virus
gcuugagcagcaaa

SEQ ID NO: 4044712 - RNA, 17 nt, Molluscum contagiosum virus
gcuugccgcuugagcag

SEQ ID NO: 4044713 - RNA, 15 nt, Molluscum contagiosum virus
gcuugcucagcagcu

SEQ ID NO: 4044714 - RNA, 11 nt, Molluscum contagiosum virus
gcuugcugcug

SEQ ID NO: 4044715 - RNA, 16 nt, Molluscum contagiosum virus
gcuugcuuccggugcc

SEQ ID NO: 4044716 - RNA, 16 nt, Molluscum contagiosum virus
gcuuggccauggugga

SEQ ID NO: 4044717 - RNA, 18 nt, Molluscum contagiosum virus
gcuuggugcgcucgagcu

SEQ ID NO: 4044718 - RNA, 23 nt, Molluscum contagiosum virus
gcuuguucaccaccaccagcacg

SEQ ID NO: 4044719 - RNA, 15 nt, Molluscum contagiosum virus
gcuuuaguccaugcc

SEQ ID NO: 4044720 - RNA, 23 nt, Molluscum contagiosum virus
gcuuucagagugacgcugcaaga

SEQ ID NO: 4044721 - RNA, 15 nt, Molluscum contagiosum virus
gcuuucucacgcgcu

SEQ ID NO: 4044722 - RNA, 19 nt, Molluscum contagiosum virus
gcuuugugcgucucccagg

SEQ ID NO: 4044723 - RNA, 20 nt, Molluscum contagiosum virus
gcuuuuugccgcucacagcu

SEQ ID NO: 4044724 - RNA, 22 nt, Molluscum contagiosum virus
gcuuuuugccgcucacagcuuc

SEQ ID NO: 4044725 - RNA, 23 nt, Molluscum contagiosum virus
ggaaaacuguaggggagggcggc

SEQ ID NO: 4044726 - RNA, 12 nt, Molluscum contagiosum virus
ggaaaaggcaca

SEQ ID NO: 4044727 - RNA, 19 nt, Molluscum contagiosum virus
ggaaacacucgauggcgag

SEQ ID NO: 4044728 - RNA, 20 nt, Molluscum contagiosum virus
ggaaaggcacccaccaggaa

SEQ ID NO: 4044729 - RNA, 14 nt, Molluscum contagiosum virus
ggaacaaugcugca

SEQ ID NO: 4044730 - RNA, 19 nt, Molluscum contagiosum virus
ggaaccguggugcgcgacc

SEQ ID NO: 4044731 - RNA, 22 nt, Molluscum contagiosum virus
ggaacgaggaaaggcacacccc

SEQ ID NO: 4044732 - RNA, 15 nt, Molluscum contagiosum virus
ggaacugacugcugc

SEQ ID NO: 4044733 - RNA, 19 nt, Molluscum contagiosum virus
ggaagagcguccgcggugc

SEQ ID NO: 4044734 - RNA, 16 nt, Molluscum contagiosum virus
ggaagcugcacgugca

SEQ ID NO: 4044735 - RNA, 22 nt, Molluscum contagiosum virus
ggaagcuggcgcgguccagccg

SEQ ID NO: 4044736 - RNA, 13 nt, Molluscum contagiosum virus
ggaaggagcuggg

SEQ ID NO: 4044737 - RNA, 21 nt, Molluscum contagiosum virus
ggaagucggcguggccaggcc

SEQ ID NO: 4044738 - RNA, 18 nt, Molluscum contagiosum virus
ggaagugcgagccgugac

SEQ ID NO: 4044739 - RNA, 17 nt, Molluscum contagiosum virus
ggacaaagucgcgcgcg

SEQ ID NO: 4044740 - RNA, 16 nt, Molluscum contagiosum virus
ggacaagucacugcua

SEQ ID NO: 4044741 - RNA, 13 nt, Molluscum contagiosum virus
ggacaccgcgggc

SEQ ID NO: 4044742 - RNA, 13 nt, Molluscum contagiosum virus
ggacacgcgcacg

SEQ ID NO: 4044743 - RNA, 16 nt, Molluscum contagiosum virus
ggacacgggugagcuc

SEQ ID NO: 4044744 - RNA, 20 nt, Molluscum contagiosum virus
ggacacgggugagcucgcca

SEQ ID NO: 4044745 - RNA, 18 nt, Molluscum contagiosum virus
ggacacguugcagcagca

SEQ ID NO: 4044746 - RNA, 21 nt, Molluscum contagiosum virus
ggacacguugcagcagcacag

SEQ ID NO: 4044747 - RNA, 14 nt, Molluscum contagiosum virus
ggacacucgcggca

SEQ ID NO: 4044748 - RNA, 15 nt, Molluscum contagiosum virus
ggacacuggagguga

SEQ ID NO: 4044749 - RNA, 22 nt, Molluscum contagiosum virus
ggacagcaugaacucgcugcug

SEQ ID NO: 4044750 - RNA, 13 nt, Molluscum contagiosum virus
ggaccccgagcug

SEQ ID NO: 4044751 - RNA, 16 nt, Molluscum contagiosum virus
ggaccucaaggaggcg

SEQ ID NO: 4044752 - RNA, 18 nt, Molluscum contagiosum virus
ggaccucaaggaggcgug

SEQ ID NO: 4044753 - RNA, 14 nt, Molluscum contagiosum virus
ggaccucgcgcgcc

SEQ ID NO: 4044754 - RNA, 17 nt, Molluscum contagiosum virus
ggaccugcgccagcgcc

SEQ ID NO: 4044755 - RNA, 21 nt, Molluscum contagiosum virus
ggacgagcugcuucgcgacca

SEQ ID NO: 4044756 - RNA, 12 nt, Molluscum contagiosum virus
ggacgcacuaga

SEQ ID NO: 4044757 - RNA, 21 nt, Molluscum contagiosum virus
ggacgcggaauuggcgucagg

SEQ ID NO: 4044758 - RNA, 22 nt, Molluscum contagiosum virus
ggacgcgugcaagcccagcagc

SEQ ID NO: 4044759 - RNA, 15 nt, Molluscum contagiosum virus
ggacggcgcgcagcg

SEQ ID NO: 4044760 - RNA, 20 nt, Molluscum contagiosum virus
ggacggcgcgcagcgcguga

SEQ ID NO: 4044761 - RNA, 18 nt, Molluscum contagiosum virus
ggacgucgcggccacgca

SEQ ID NO: 4044762 - RNA, 13 nt, Molluscum contagiosum virus
gcgcauccucucc

SEQ ID NO: 4044763 - RNA, 14 nt, Molluscum contagiosum virus
gcgcaucugcgagc

SEQ ID NO: 4044764 - RNA, 15 nt, Molluscum contagiosum virus
gcgcaugacagccau

SEQ ID NO: 4044765 - RNA, 12 nt, Molluscum contagiosum virus
gcgcauggagag

SEQ ID NO: 4044766 - RNA, 13 nt, Molluscum contagiosum virus
gcgcauggccacg

SEQ ID NO: 4044767 - RNA, 16 nt, Molluscum contagiosum virus
gcgcauggccacgccc

SEQ ID NO: 4044768 - RNA, 23 nt, Molluscum contagiosum virus
gcgcauucccguggaccucauca

SEQ ID NO: 4044769 - RNA, 14 nt, Molluscum contagiosum virus
gcgcauucgcgcgc

SEQ ID NO: 4044770 - RNA, 16 nt, Molluscum contagiosum virus
gcgcauuuaccggcgc

SEQ ID NO: 4044771 - RNA, 21 nt, Molluscum contagiosum virus
gcgccaagguggccaagcgcu

SEQ ID NO: 4044772 - RNA, 20 nt, Molluscum contagiosum virus
gcgccacgugcgcaucccug

SEQ ID NO: 4044773 - RNA, 18 nt, Molluscum contagiosum virus
gcgccagaacauugccac

SEQ ID NO: 4044774 - RNA, 15 nt, Molluscum contagiosum virus
gcgccagcaagcucg

SEQ ID NO: 4044775 - RNA, 15 nt, Molluscum contagiosum virus
gcgccagccugcugg

SEQ ID NO: 4044776 - RNA, 19 nt, Molluscum contagiosum virus
gcgccagggcggagccccg

SEQ ID NO: 4044777 - RNA, 13 nt, Molluscum contagiosum virus
gcgccauccacgu

SEQ ID NO: 4044778 - RNA, 22 nt, Molluscum contagiosum virus
gcgcccaccagcagccaggcua

SEQ ID NO: 4044779 - RNA, 14 nt, Molluscum contagiosum virus
gcgcccaggaacag

SEQ ID NO: 4044780 - RNA, 14 nt, Molluscum contagiosum virus
gcgcccccgcuugc

SEQ ID NO: 4044781 - RNA, 15 nt, Molluscum contagiosum virus
gcgcccgcagcgcgc

SEQ ID NO: 4044782 - RNA, 19 nt, Molluscum contagiosum virus
gcgcccgcguacacgugca

SEQ ID NO: 4044783 - RNA, 20 nt, Molluscum contagiosum virus
gcgcccgcugcgcgcucugg

SEQ ID NO: 4044784 - RNA, 17 nt, Molluscum contagiosum virus
gcgcccucgcgcgcagc

SEQ ID NO: 4044785 - RNA, 14 nt, Molluscum contagiosum virus
gcgcccuuccugga

SEQ ID NO: 4044786 - RNA, 23 nt, Molluscum contagiosum virus
gcgccgaaacacggccuccagca

SEQ ID NO: 4044787 - RNA, 18 nt, Molluscum contagiosum virus
gcgccgacagcgcgcgca

SEQ ID NO: 4044788 - RNA, 16 nt, Molluscum contagiosum virus
gcgccgacaugcgcac

SEQ ID NO: 4044789 - RNA, 15 nt, Molluscum contagiosum virus
gcgccgaugcagugc

SEQ ID NO: 4044790 - RNA, 16 nt, Molluscum contagiosum virus
gcgccgcaaaagcaag

SEQ ID NO: 4044791 - RNA, 14 nt, Molluscum contagiosum virus
gcgccgcacgugcu

SEQ ID NO: 4044792 - RNA, 17 nt, Molluscum contagiosum virus
gcgccgcacgugcugcg

SEQ ID NO: 4044793 - RNA, 13 nt, Molluscum contagiosum virus
gcgccgcagaaca

SEQ ID NO: 4044794 - RNA, 23 nt, Molluscum contagiosum virus
gcgccgcagaacacgggggcugc

SEQ ID NO: 4044795 - RNA, 16 nt, Molluscum contagiosum virus
gcgccgccgacgccuu

SEQ ID NO: 4044796 - RNA, 12 nt, Molluscum contagiosum virus
gcgccgccgcag

SEQ ID NO: 4044797 - RNA, 16 nt, Molluscum contagiosum virus
gcgccgccggugcgug

SEQ ID NO: 4044798 - RNA, 17 nt, Molluscum contagiosum virus
gcgccgccucgcgcgca

SEQ ID NO: 4044799 - RNA, 12 nt, Molluscum contagiosum virus
gcgccgcggcgg

SEQ ID NO: 4044800 - RNA, 23 nt, Molluscum contagiosum virus
gcgccgcggcgguugcccgccug

SEQ ID NO: 4044801 - RNA, 14 nt, Molluscum contagiosum virus
gcgccgcgggcaca

SEQ ID NO: 4044802 - RNA, 17 nt, Molluscum contagiosum virus
gcgccgcguacgcacgu

SEQ ID NO: 4044803 - RNA, 13 nt, Molluscum contagiosum virus
gcgccgcuaccag

SEQ ID NO: 4044804 - RNA, 13 nt, Molluscum contagiosum virus
gcgccgcugcgcc

SEQ ID NO: 4044805 - RNA, 19 nt, Molluscum contagiosum virus
gcgccggaaacggaccugg

SEQ ID NO: 4044806 - RNA, 14 nt, Molluscum contagiosum virus
gcgccggacuacua

SEQ ID NO: 4044807 - RNA, 19 nt, Molluscum contagiosum virus
gcgccggcacccgugcgcg

SEQ ID NO: 4044808 - RNA, 23 nt, Molluscum contagiosum virus
gcgccggcacccgugcgcgcgcu

SEQ ID NO: 4044809 - RNA, 17 nt, Molluscum contagiosum virus
gcgccggcugcgccacc

SEQ ID NO: 4044810 - RNA, 17 nt, Molluscum contagiosum virus
gcgccgggcgccagaac

SEQ ID NO: 4044811 - RNA, 14 nt, Molluscum contagiosum virus
gcgccgggcgcgcc

SEQ ID NO: 4044812 - RNA, 17 nt, Molluscum contagiosum virus
gcgccgggcgcgccaac

SEQ ID NO: 4044813 - RNA, 13 nt, Molluscum contagiosum virus
gcgccgugcugcg

SEQ ID NO: 4044814 - RNA, 17 nt, Molluscum contagiosum virus
gcgccgugcugcgucac

SEQ ID NO: 4044815 - RNA, 17 nt, Molluscum contagiosum virus
gcgccgugucggcaccg

SEQ ID NO: 4044816 - RNA, 21 nt, Molluscum contagiosum virus
gcgccugcacuacugcuccau

SEQ ID NO: 4044817 - RNA, 12 nt, Molluscum contagiosum virus
gcgccugcgcga

SEQ ID NO: 4044818 - RNA, 14 nt, Molluscum contagiosum virus
gcgccugcuugcgc

SEQ ID NO: 4044819 - RNA, 17 nt, Molluscum contagiosum virus
gcgccuuuccucucccg

SEQ ID NO: 4044820 - RNA, 17 nt, Molluscum contagiosum virus
gcgccuuugccacgcca

SEQ ID NO: 4044821 - RNA, 18 nt, Molluscum contagiosum virus
gcgcgaacucgcggcagu

SEQ ID NO: 4044822 - RNA, 14 nt, Molluscum contagiosum virus
gcgcgaagcaggcg

SEQ ID NO: 4044823 - RNA, 16 nt, Molluscum contagiosum virus
gcgcgaauuggccgcg

SEQ ID NO: 4044824 - RNA, 15 nt, Molluscum contagiosum virus
gcgcgaccgcaccga

SEQ ID NO: 4044825 - RNA, 16 nt, Molluscum contagiosum virus
gcgcgacgccaucagg

SEQ ID NO: 4044826 - RNA, 13 nt, Molluscum contagiosum virus
gcgcgacgucguc

SEQ ID NO: 4044827 - RNA, 19 nt, Molluscum contagiosum virus
gcgcgacgucgucaaggau

SEQ ID NO: 4044828 - RNA, 14 nt, Molluscum contagiosum virus
gcgcgacuacgcac

SEQ ID NO: 4044829 - RNA, 18 nt, Molluscum contagiosum virus
gcgcgacuggcacgcgcc

SEQ ID NO: 4044830 - RNA, 15 nt, Molluscum contagiosum virus
gcgcgagcccaccga

SEQ ID NO: 4044831 - RNA, 15 nt, Molluscum contagiosum virus
gcgcgagugccagcg

SEQ ID NO: 4044832 - RNA, 15 nt, Molluscum contagiosum virus
gcgcgagugugcgug

SEQ ID NO: 4044833 - RNA, 17 nt, Molluscum contagiosum virus
gcgcgauggcgccugcu

SEQ ID NO: 4044834 - RNA, 19 nt, Molluscum contagiosum virus
gcgcgcacaaacgcgcgca

SEQ ID NO: 4044835 - RNA, 17 nt, Molluscum contagiosum virus
gcgcgcagacguggugc

SEQ ID NO: 4044836 - RNA, 13 nt, Molluscum contagiosum virus
gcgcgcagcacac

SEQ ID NO: 4044837 - RNA, 14 nt, Molluscum contagiosum virus
gcgcgcaugcucgc

SEQ ID NO: 4044838 - RNA, 14 nt, Molluscum contagiosum virus
gcgcgccagcagcg

SEQ ID NO: 4044839 - RNA, 20 nt, Molluscum contagiosum virus
gcgcgcccccgagcugcgug

SEQ ID NO: 4044840 - RNA, 15 nt, Molluscum contagiosum virus
gcgcgcccggcgccc

SEQ ID NO: 4044841 - RNA, 14 nt, Molluscum contagiosum virus
gcgcgccgagcgca

SEQ ID NO: 4044842 - RNA, 15 nt, Molluscum contagiosum virus
gcgcgccgcgccgca

SEQ ID NO: 4044843 - RNA, 13 nt, Molluscum contagiosum virus
gcgcgccgcgcgc

SEQ ID NO: 4044844 - RNA, 15 nt, Molluscum contagiosum virus
gcgcgccgcucgucg

SEQ ID NO: 4044845 - RNA, 17 nt, Molluscum contagiosum virus
gcgcgccgcugcccgcg

SEQ ID NO: 4044846 - RNA, 15 nt, Molluscum contagiosum virus
gcgcgccggcccgag

SEQ ID NO: 4044847 - RNA, 14 nt, Molluscum contagiosum virus
gcgcgccgggccgc

SEQ ID NO: 4044848 - RNA, 21 nt, Molluscum contagiosum virus
gcgcgcgacuuuguccugagc

SEQ ID NO: 4044849 - RNA, 14 nt, Molluscum contagiosum virus
gcgcgcgagcacag

SEQ ID NO: 4044850 - RNA, 19 nt, Molluscum contagiosum virus
gcgcgcgagcacagcgcgc

SEQ ID NO: 4044851 - RNA, 12 nt, Molluscum contagiosum virus
gcgcgcgcacgc

SEQ ID NO: 4044852 - RNA, 14 nt, Molluscum contagiosum virus
gcgcgcgccagcag

SEQ ID NO: 4044853 - RNA, 13 nt, Molluscum contagiosum virus
gcgcgcgccagcu

SEQ ID NO: 4044854 - RNA, 18 nt, Molluscum contagiosum virus
gcgcgcgccugcucuccg

SEQ ID NO: 4044855 - RNA, 14 nt, Molluscum contagiosum virus
gcgcgcgcgcaagu

SEQ ID NO: 4044856 - RNA, 14 nt, Molluscum contagiosum virus
gaagcuccugcugg

SEQ ID NO: 4044857 - RNA, 12 nt, Molluscum contagiosum virus
gaagcugcacgu

SEQ ID NO: 4044858 - RNA, 18 nt, Molluscum contagiosum virus
gaagcuugcucagcagcu

SEQ ID NO: 4044859 - RNA, 21 nt, Molluscum contagiosum virus
gaaggagcccgucuacauuuu

SEQ ID NO: 4044860 - RNA, 22 nt, Molluscum contagiosum virus
gaaggaucccugcccgcgugag

SEQ ID NO: 4044861 - RNA, 22 nt, Molluscum contagiosum virus
gaaggcauaccagauguucucg

SEQ ID NO: 4044862 - RNA, 17 nt, Molluscum contagiosum virus
gaaggcauaccugugcc

SEQ ID NO: 4044863 - RNA, 14 nt, Molluscum contagiosum virus
gaaggccaccucgc

SEQ ID NO: 4044864 - RNA, 23 nt, Molluscum contagiosum virus
gaagggcgcggacgccuucuucc

SEQ ID NO: 4044865 - RNA, 23 nt, Molluscum contagiosum virus
gaagggcgggaagaaggugcuca

SEQ ID NO: 4044866 - RNA, 14 nt, Molluscum contagiosum virus
gaaggguguggccu

SEQ ID NO: 4044867 - RNA, 12 nt, Molluscum contagiosum virus
gaaggugcucag

SEQ ID NO: 4044868 - RNA, 23 nt, Molluscum contagiosum virus
gaaguacuucgcgaugugcaccu

SEQ ID NO: 4044869 - RNA, 19 nt, Molluscum contagiosum virus
gaagucguuaggcggcucc

SEQ ID NO: 4044870 - RNA, 12 nt, Molluscum contagiosum virus
gaaguugccgca

SEQ ID NO: 4044871 - RNA, 22 nt, Molluscum contagiosum virus
gaauaccggagacaccagcucc

SEQ ID NO: 4044872 - RNA, 23 nt, Molluscum contagiosum virus
gaauaccggagacaccagcuccg

SEQ ID NO: 4044873 - RNA, 18 nt, Molluscum contagiosum virus
gaauccuuuacugcaaga

SEQ ID NO: 4044874 - RNA, 23 nt, Molluscum contagiosum virus
gaaugacuuagccacugugcuga

SEQ ID NO: 4044875 - RNA, 23 nt, Molluscum contagiosum virus
gaauguagccuuuguucuuagca

SEQ ID NO: 4044876 - RNA, 24 nt, Molluscum contagiosum virus
gacaacucauagcgccacgagcag

SEQ ID NO: 4044877 - RNA, 19 nt, Molluscum contagiosum virus
gacaaggaaaggcacccac

SEQ ID NO: 4044878 - RNA, 20 nt, Molluscum contagiosum virus
gacaaggaaaggcacccacc

SEQ ID NO: 4044879 - RNA, 15 nt, Molluscum contagiosum virus
gacaaguacaugcac

SEQ ID NO: 4044880 - RNA, 17 nt, Molluscum contagiosum virus
gacaaucucugcgccgc

SEQ ID NO: 4044881 - RNA, 19 nt, Molluscum contagiosum virus
gacacaaggaucucugccc

SEQ ID NO: 4044882 - RNA, 19 nt, Molluscum contagiosum virus
gacacgagccgugugcucg

SEQ ID NO: 4044883 - RNA, 15 nt, Molluscum contagiosum virus
gacacgagggccuug

SEQ ID NO: 4044884 - RNA, 21 nt, Molluscum contagiosum virus
gacacgagggccuuggcggcg

SEQ ID NO: 4044885 - RNA, 18 nt, Molluscum contagiosum virus
gacacgcugcgcgugcug

SEQ ID NO: 4044886 - RNA, 20 nt, Molluscum contagiosum virus
gacacguuccagagcacugc

SEQ ID NO: 4044887 - RNA, 22 nt, Molluscum contagiosum virus
gacacucuucgcaggcgugcuc

SEQ ID NO: 4044888 - RNA, 15 nt, Molluscum contagiosum virus
gacacugugcuggcg

SEQ ID NO: 4044889 - RNA, 14 nt, Molluscum contagiosum virus
gacagagcccggga

SEQ ID NO: 4044890 - RNA, 17 nt, Molluscum contagiosum virus
gacagccugcaccgagu

SEQ ID NO: 4044891 - RNA, 13 nt, Molluscum contagiosum virus
gacagcgcgcgca

SEQ ID NO: 4044892 - RNA, 20 nt, Molluscum contagiosum virus
gacagcgugcgcgggcacgc

SEQ ID NO: 4044893 - RNA, 13 nt, Molluscum contagiosum virus
gacagcuugcugc

SEQ ID NO: 4044894 - RNA, 22 nt, Molluscum contagiosum virus
gacaucaucgcggagcugcgcg

SEQ ID NO: 4044895 - RNA, 14 nt, Molluscum contagiosum virus
gacaugcacacuca

SEQ ID NO: 4044896 - RNA, 22 nt, Molluscum contagiosum virus
gacauggaccgcgucaagauca

SEQ ID NO: 4044897 - RNA, 20 nt, Molluscum contagiosum virus
gacauggagcgcaucauguu

SEQ ID NO: 4044898 - RNA, 15 nt, Molluscum contagiosum virus
gaccaccagcaccag

SEQ ID NO: 4044899 - RNA, 16 nt, Molluscum contagiosum virus
gaccagauccgggcgc

SEQ ID NO: 4044900 - RNA, 12 nt, Molluscum contagiosum virus
gaccagcucuug

SEQ ID NO: 4044901 - RNA, 22 nt, Molluscum contagiosum virus
gaccagcugguccugaacagca

SEQ ID NO: 4044902 - RNA, 20 nt, Molluscum contagiosum virus
gacccagaagcgagagcgcg

SEQ ID NO: 4044903 - RNA, 18 nt, Molluscum contagiosum virus
gacccagcaaggcccacu

SEQ ID NO: 4044904 - RNA, 17 nt, Molluscum contagiosum virus
gacccaucggagaagug

SEQ ID NO: 4044905 - RNA, 22 nt, Molluscum contagiosum virus
gacccaucggagaagugcuccg

SEQ ID NO: 4044906 - RNA, 21 nt, Molluscum contagiosum virus
gaccgcaagugcacgcggcgc

SEQ ID NO: 4044907 - RNA, 15 nt, Molluscum contagiosum virus
gaccgcgcacgcagc

SEQ ID NO: 4044908 - RNA, 17 nt, Molluscum contagiosum virus
gaccgcuagagugcgcg

SEQ ID NO: 4044909 - RNA, 15 nt, Molluscum contagiosum virus
gaccgucaccgcagu

SEQ ID NO: 4044910 - RNA, 14 nt, Molluscum contagiosum virus
gaccgugcccugga

SEQ ID NO: 4044911 - RNA, 19 nt, Molluscum contagiosum virus
gaccuacgaggugcugcgc

SEQ ID NO: 4044912 - RNA, 16 nt, Molluscum contagiosum virus
gaccuacuccuggcca

SEQ ID NO: 4044913 - RNA, 19 nt, Molluscum contagiosum virus
gaccucgcugcugagcccu

SEQ ID NO: 4044914 - RNA, 22 nt, Molluscum contagiosum virus
gaccugcgccauccacgugggc

SEQ ID NO: 4044915 - RNA, 17 nt, Molluscum contagiosum virus
gaccugggcgucgugca

SEQ ID NO: 4044916 - RNA, 15 nt, Molluscum contagiosum virus
gacgacacagcccug

SEQ ID NO: 4044917 - RNA, 22 nt, Molluscum contagiosum virus
gacgacaugcacacgcaccgcc

SEQ ID NO: 4044918 - RNA, 13 nt, Molluscum contagiosum virus
gacgacggcacgc

SEQ ID NO: 4044919 - RNA, 18 nt, Molluscum contagiosum virus
gacgacggcugcucgcug

SEQ ID NO: 4044920 - RNA, 13 nt, Molluscum contagiosum virus
gacgacucgcugc

SEQ ID NO: 4044921 - RNA, 16 nt, Molluscum contagiosum virus
gacgagagggcgcgcg

SEQ ID NO: 4044922 - RNA, 13 nt, Molluscum contagiosum virus
gacgagcugugcg

SEQ ID NO: 4044923 - RNA, 12 nt, Molluscum contagiosum virus
gacgaggagcug

SEQ ID NO: 4044924 - RNA, 19 nt, Molluscum contagiosum virus
gacgaggccuacagcgcgc

SEQ ID NO: 4044925 - RNA, 14 nt, Molluscum contagiosum virus
gacgagugcgccgc

SEQ ID NO: 4044926 - RNA, 13 nt, Molluscum contagiosum virus
gacgauggccacg

SEQ ID NO: 4044927 - RNA, 17 nt, Molluscum contagiosum virus
gacgcaaaagaggccug

SEQ ID NO: 4044928 - RNA, 18 nt, Molluscum contagiosum virus
gacgcaggacgcggucgc

SEQ ID NO: 4044929 - RNA, 13 nt, Molluscum contagiosum virus
gacgccagcgcgc

SEQ ID NO: 4044930 - RNA, 19 nt, Molluscum contagiosum virus
gacgccauuuucgugcgcg

SEQ ID NO: 4044931 - RNA, 14 nt, Molluscum contagiosum virus
gacgcccggugccu

SEQ ID NO: 4044932 - RNA, 20 nt, Molluscum contagiosum virus
gacgcccuccucgaccugca

SEQ ID NO: 4044933 - RNA, 15 nt, Molluscum contagiosum virus
gacgccgagcccgag

SEQ ID NO: 4044934 - RNA, 16 nt, Molluscum contagiosum virus
gacgccgauguccugc

SEQ ID NO: 4044935 - RNA, 20 nt, Molluscum contagiosum virus
gacgccggggggcgccaagu

SEQ ID NO: 4044936 - RNA, 15 nt, Molluscum contagiosum virus
gacgccguccgcgca

SEQ ID NO: 4044937 - RNA, 16 nt, Molluscum contagiosum virus
gacgccguccgcgcag

SEQ ID NO: 4044938 - RNA, 15 nt, Molluscum contagiosum virus
gacgccuuccugcug

SEQ ID NO: 4044939 - RNA, 20 nt, Molluscum contagiosum virus
gacgccuuccugcuggcgcg

SEQ ID NO: 4044940 - RNA, 17 nt, Molluscum contagiosum virus
gacgcgaacugcccgag

SEQ ID NO: 4044941 - RNA, 18 nt, Molluscum contagiosum virus
gacgcgaauacgcgcucc

SEQ ID NO: 4044942 - RNA, 22 nt, Molluscum contagiosum virus
gacgcgaguugcgucucccgcg

SEQ ID NO: 4044943 - RNA, 17 nt, Molluscum contagiosum virus
gacgcgcaagugugcgc

SEQ ID NO: 4044944 - RNA, 18 nt, Molluscum contagiosum virus
gacgcgcacgcgggacgc

SEQ ID NO: 4044945 - RNA, 13 nt, Molluscum contagiosum virus
gacgcgcagcugu

SEQ ID NO: 4044946 - RNA, 15 nt, Molluscum contagiosum virus
gacgcgccucgagca

SEQ ID NO: 4044947 - RNA, 20 nt, Molluscum contagiosum virus
gacgcgccucgagcagguca

SEQ ID NO: 4044948 - RNA, 17 nt, Molluscum contagiosum virus
gacgcgcgagugugcgu

SEQ ID NO: 4044949 - RNA, 18 nt, Molluscum contagiosum virus
gacgcgcgagugugcgug

SEQ ID NO: 4044950 - RNA, 23 nt, Molluscum contagiosum virus
gacgcgcguucuuugugcggcuc

SEQ ID NO: 4044951 - RNA, 18 nt, Molluscum contagiosum virus
gacgcggaugccacgcag

SEQ ID NO: 4044952 - RNA, 14 nt, Molluscum contagiosum virus
gacgcggccgcgga

SEQ ID NO: 4044953 - RNA, 19 nt, Molluscum contagiosum virus
gacgcggucgcgcccuugc

SEQ ID NO: 4044954 - RNA, 14 nt, Molluscum contagiosum virus
cggauacgcgcaca

SEQ ID NO: 4044955 - RNA, 16 nt, Molluscum contagiosum virus
cggauauggcgcgccg

SEQ ID NO: 4044956 - RNA, 15 nt, Molluscum contagiosum virus
cggaucggcacugug

SEQ ID NO: 4044957 - RNA, 19 nt, Molluscum contagiosum virus
cggaugcagaacagcacgu

SEQ ID NO: 4044958 - RNA, 15 nt, Molluscum contagiosum virus
cggaugccacgcagc

SEQ ID NO: 4044959 - RNA, 16 nt, Molluscum contagiosum virus
cggaugccacgcagcu

SEQ ID NO: 4044960 - RNA, 18 nt, Molluscum contagiosum virus
cggcaaaugcgucccagc

SEQ ID NO: 4044961 - RNA, 17 nt, Molluscum contagiosum virus
cggcaacaacgucacgc

SEQ ID NO: 4044962 - RNA, 15 nt, Molluscum contagiosum virus
cggcaacacaaaugc

SEQ ID NO: 4044963 - RNA, 15 nt, Molluscum contagiosum virus
cggcaacgcugccgc

SEQ ID NO: 4044964 - RNA, 18 nt, Molluscum contagiosum virus
cggcaagccgugcuuugc

SEQ ID NO: 4044965 - RNA, 15 nt, Molluscum contagiosum virus
cggcaccacgugcgc

SEQ ID NO: 4044966 - RNA, 23 nt, Molluscum contagiosum virus
cggcaccacgugcgcuggcccac

SEQ ID NO: 4044967 - RNA, 14 nt, Molluscum contagiosum virus
cggcacccgugcgc

SEQ ID NO: 4044968 - RNA, 19 nt, Molluscum contagiosum virus
cggcacccgugcgcgcgcu

SEQ ID NO: 4044969 - RNA, 19 nt, Molluscum contagiosum virus
cggcaccguaccgcgcccg

SEQ ID NO: 4044970 - RNA, 23 nt, Molluscum contagiosum virus
cggcacgccgcucggcacugcug

SEQ ID NO: 4044971 - RNA, 14 nt, Molluscum contagiosum virus
cggcacgcugagca

SEQ ID NO: 4044972 - RNA, 17 nt, Molluscum contagiosum virus
cggcacgcugagcaagc

SEQ ID NO: 4044973 - RNA, 21 nt, Molluscum contagiosum virus
cggcacgugcguacgcggcgc

SEQ ID NO: 4044974 - RNA, 15 nt, Molluscum contagiosum virus
cggcacugcucacgg

SEQ ID NO: 4044975 - RNA, 15 nt, Molluscum contagiosum virus
cggcacugcuggcgc

SEQ ID NO: 4044976 - RNA, 18 nt, Molluscum contagiosum virus
cggcacuguguccccuga

SEQ ID NO: 4044977 - RNA, 22 nt, Molluscum contagiosum virus
cggcagacaacaccagcgugcc

SEQ ID NO: 4044978 - RNA, 16 nt, Molluscum contagiosum virus
cggcagacgccagcga

SEQ ID NO: 4044979 - RNA, 17 nt, Molluscum contagiosum virus
cggcagcgacuacgcgc

SEQ ID NO: 4044980 - RNA, 21 nt, Molluscum contagiosum virus
cggcagcgacuacgcgcugcu

SEQ ID NO: 4044981 - RNA, 17 nt, Molluscum contagiosum virus
cggcagcgccagcgaga

SEQ ID NO: 4044982 - RNA, 16 nt, Molluscum contagiosum virus
cggcagcgcgccuagc

SEQ ID NO: 4044983 - RNA, 19 nt, Molluscum contagiosum virus
cggcagcgucgcggagcgc

SEQ ID NO: 4044984 - RNA, 14 nt, Molluscum contagiosum virus
cggcagcuggagcu

SEQ ID NO: 4044985 - RNA, 17 nt, Molluscum contagiosum virus
cggcaguccgagcuguu

SEQ ID NO: 4044986 - RNA, 20 nt, Molluscum contagiosum virus
cggcaugcgcgcgcugccag

SEQ ID NO: 4044987 - RNA, 12 nt, Molluscum contagiosum virus
cggccagcaccg

SEQ ID NO: 4044988 - RNA, 14 nt, Molluscum contagiosum virus
cggccagcgugcag

SEQ ID NO: 4044989 - RNA, 15 nt, Molluscum contagiosum virus
cggccauggucacgc

SEQ ID NO: 4044990 - RNA, 17 nt, Molluscum contagiosum virus
cggcccgaaggccaccu

SEQ ID NO: 4044991 - RNA, 19 nt, Molluscum contagiosum virus
cggcccgcggacgcgcagc

SEQ ID NO: 4044992 - RNA, 13 nt, Molluscum contagiosum virus
cggcccgcggcgc

SEQ ID NO: 4044993 - RNA, 12 nt, Molluscum contagiosum virus
cggcccgcgggc

SEQ ID NO: 4044994 - RNA, 19 nt, Molluscum contagiosum virus
cggcccgcgggcugcaaga

SEQ ID NO: 4044995 - RNA, 14 nt, Molluscum contagiosum virus
cggccgccaccgcg

SEQ ID NO: 4044996 - RNA, 21 nt, Molluscum contagiosum virus
cggccgggaucggacgcagac

SEQ ID NO: 4044997 - RNA, 14 nt, Molluscum contagiosum virus
cggccgugcagagc

SEQ ID NO: 4044998 - RNA, 15 nt, Molluscum contagiosum virus
cggccgugcagagca

SEQ ID NO: 4044999 - RNA, 14 nt, Molluscum contagiosum virus
cggccguggcgugc

SEQ ID NO: 4045000 - RNA, 15 nt, Molluscum contagiosum virus
cggccuagagcuggc

SEQ ID NO: 4045001 - RNA, 17 nt, Molluscum contagiosum virus
cggccuagagcuggcac

SEQ ID NO: 4045002 - RNA, 16 nt, Molluscum contagiosum virus
cggccucgccuccggg

SEQ ID NO: 4045003 - RNA, 19 nt, Molluscum contagiosum virus
cggccuguucuuccagugg

SEQ ID NO: 4045004 - RNA, 16 nt, Molluscum contagiosum virus
cggcgacaacgacaga

SEQ ID NO: 4045005 - RNA, 21 nt, Molluscum contagiosum virus
cggcgagaugcgagcgcgucu

SEQ ID NO: 4045006 - RNA, 19 nt, Molluscum contagiosum virus
cggcgagcugccauggcag

SEQ ID NO: 4045007 - RNA, 19 nt, Molluscum contagiosum virus
cggcgauguacgcgugcag

SEQ ID NO: 4045008 - RNA, 20 nt, Molluscum contagiosum virus
cggcgcaacgagcagcccgu

SEQ ID NO: 4045009 - RNA, 15 nt, Molluscum contagiosum virus
cggcgccaccggcag

SEQ ID NO: 4045010 - RNA, 14 nt, Molluscum contagiosum virus
cggcgccacgagcg

SEQ ID NO: 4045011 - RNA, 23 nt, Molluscum contagiosum virus
cggcgcccgcgugcacccuccgc

SEQ ID NO: 4045012 - RNA, 15 nt, Molluscum contagiosum virus
cggcgcccgugagca

SEQ ID NO: 4045013 - RNA, 15 nt, Molluscum contagiosum virus
cggcgccgcgcaaga

SEQ ID NO: 4045014 - RNA, 22 nt, Molluscum contagiosum virus
cggcgccuguuuccgcucgcgc

SEQ ID NO: 4045015 - RNA, 14 nt, Molluscum contagiosum virus
cggcgcgaaaaguc

SEQ ID NO: 4045016 - RNA, 15 nt, Molluscum contagiosum virus
cggcgcgaagcaggc

SEQ ID NO: 4045017 - RNA, 15 nt, Molluscum contagiosum virus
cggcgcgcagcgcgu

SEQ ID NO: 4045018 - RNA, 13 nt, Molluscum contagiosum virus
cggcgcgcagcuc

SEQ ID NO: 4045019 - RNA, 14 nt, Molluscum contagiosum virus
cggcgcgcagcucg

SEQ ID NO: 4045020 - RNA, 18 nt, Molluscum contagiosum virus
cggcgcgcagcucgccgc

SEQ ID NO: 4045021 - RNA, 13 nt, Molluscum contagiosum virus
cggcgcgccgccc

SEQ ID NO: 4045022 - RNA, 19 nt, Molluscum contagiosum virus
cggcgcggccuggccacgc

SEQ ID NO: 4045023 - RNA, 14 nt, Molluscum contagiosum virus
cggcgcggcuagca

SEQ ID NO: 4045024 - RNA, 15 nt, Molluscum contagiosum virus
cggcgcgugagcgcc

SEQ ID NO: 4045025 - RNA, 22 nt, Molluscum contagiosum virus
cggcgcgugccagucgcgcgag

SEQ ID NO: 4045026 - RNA, 17 nt, Molluscum contagiosum virus
cggcgcgugcugagcua

SEQ ID NO: 4045027 - RNA, 19 nt, Molluscum contagiosum virus
cggcgcguuucggccugca

SEQ ID NO: 4045028 - RNA, 18 nt, Molluscum contagiosum virus
cggcgcguuuucgcggcc

SEQ ID NO: 4045029 - RNA, 16 nt, Molluscum contagiosum virus
cggcgcuagcgcccgu

SEQ ID NO: 4045030 - RNA, 14 nt, Molluscum contagiosum virus
cggcgcucgccccu

SEQ ID NO: 4045031 - RNA, 16 nt, Molluscum contagiosum virus
cggaagcuccugcugg

SEQ ID NO: 4045032 - RNA, 22 nt, Molluscum contagiosum virus
cggaagcuugcucagcagcuuc

SEQ ID NO: 4045033 - RNA, 18 nt, Molluscum contagiosum virus
cggaauuccuugugcaau

SEQ ID NO: 4045034 - RNA, 15 nt, Molluscum contagiosum virus
cggacaagacaacac

SEQ ID NO: 4045035 - RNA, 21 nt, Molluscum contagiosum virus
cggacacguugcagcagcaca

SEQ ID NO: 4045036 - RNA, 20 nt, Molluscum contagiosum virus
cggacagugccuccgcggac

SEQ ID NO: 4045037 - RNA, 14 nt, Molluscum contagiosum virus
cggacucgagcccc

SEQ ID NO: 4045038 - RNA, 16 nt, Molluscum contagiosum virus
cggacugggagcaccg

SEQ ID NO: 4045039 - RNA, 18 nt, Molluscum contagiosum virus
cggacuucucgcucacgc

SEQ ID NO: 4045040 - RNA, 16 nt, Molluscum contagiosum virus
cggagaagugcgcagc

SEQ ID NO: 4045041 - RNA, 14 nt, Molluscum contagiosum virus
cggagacaccagcu

SEQ ID NO: 4045042 - RNA, 17 nt, Molluscum contagiosum virus
cggagacaccagcuccg

SEQ ID NO: 4045043 - RNA, 17 nt, Molluscum contagiosum virus
cggagagccgccuuugc

SEQ ID NO: 4045044 - RNA, 18 nt, Molluscum contagiosum virus
cggagagcuccggcugcu

SEQ ID NO: 4045045 - RNA, 15 nt, Molluscum contagiosum virus
cggagaucaggcagc

SEQ ID NO: 4045046 - RNA, 14 nt, Molluscum contagiosum virus
cggagcagauucgg

SEQ ID NO: 4045047 - RNA, 22 nt, Molluscum contagiosum virus
cggagcucgccaaagcgcgccu

SEQ ID NO: 4045048 - RNA, 16 nt, Molluscum contagiosum virus
cggagcugcgcgcgcu

SEQ ID NO: 4045049 - RNA, 12 nt, Molluscum contagiosum virus
cggagcuggccg

SEQ ID NO: 4045050 - RNA, 18 nt, Molluscum contagiosum virus
cggaggcacgggcucgau

SEQ ID NO: 4045051 - RNA, 12 nt, Molluscum contagiosum virus
cggaggcagcgc

SEQ ID NO: 4045052 - RNA, 15 nt, Molluscum contagiosum virus
cggaguccgcgccca

SEQ ID NO: 4045053 - RNA, 22 nt, Molluscum contagiosum virus
cgggagaguggccgcuccagag

SEQ ID NO: 4045054 - RNA, 16 nt, Molluscum contagiosum virus
cgggagcucacggcug

SEQ ID NO: 4045055 - RNA, 18 nt, Molluscum contagiosum virus
cgggauacagcgcggaga

SEQ ID NO: 4045056 - RNA, 18 nt, Molluscum contagiosum virus
cgggaugcuggacgggca

SEQ ID NO: 4045057 - RNA, 23 nt, Molluscum contagiosum virus
cgggaugcuggacgggcacgagc

SEQ ID NO: 4045058 - RNA, 20 nt, Molluscum contagiosum virus
cgggauggucucgcugcugg

SEQ ID NO: 4045059 - RNA, 21 nt, Molluscum contagiosum virus
cgggauggucucgcugcuggg

SEQ ID NO: 4045060 - RNA, 22 nt, Molluscum contagiosum virus
cgggauuugccgguugcgcgug

SEQ ID NO: 4045061 - RNA, 14 nt, Molluscum contagiosum virus
cgggcacgcagcuc

SEQ ID NO: 4045062 - RNA, 19 nt, Molluscum contagiosum virus
cgggcacgccgcagcgcug

SEQ ID NO: 4045063 - RNA, 17 nt, Molluscum contagiosum virus
cgggcacgcgcgcgccu

SEQ ID NO: 4045064 - RNA, 22 nt, Molluscum contagiosum virus
cgggcacuucucgcgcgacacg

SEQ ID NO: 4045065 - RNA, 15 nt, Molluscum contagiosum virus
cgggcagacaggcuc

SEQ ID NO: 4045066 - RNA, 21 nt, Molluscum contagiosum virus
cgggcauguccuuggcggugc

SEQ ID NO: 4045067 - RNA, 23 nt, Molluscum contagiosum virus
cgggcccgacacguugcacugcg

SEQ ID NO: 4045068 - RNA, 16 nt, Molluscum contagiosum virus
cgggcccgagcagaag

SEQ ID NO: 4045069 - RNA, 19 nt, Molluscum contagiosum virus
cgggcccgcaugcagucac

SEQ ID NO: 4045070 - RNA, 17 nt, Molluscum contagiosum virus
cgggccuguccgcgggc

SEQ ID NO: 4045071 - RNA, 19 nt, Molluscum contagiosum virus
cgggcgaaagcgccgcgcg

SEQ ID NO: 4045072 - RNA, 13 nt, Molluscum contagiosum virus
cgggcgcaggccc

SEQ ID NO: 4045073 - RNA, 18 nt, Molluscum contagiosum virus
cgggcgccaacacgagcg

SEQ ID NO: 4045074 - RNA, 13 nt, Molluscum contagiosum virus
cgggcgccagcua

SEQ ID NO: 4045075 - RNA, 16 nt, Molluscum contagiosum virus
cgggcgccgcggcugc

SEQ ID NO: 4045076 - RNA, 13 nt, Molluscum contagiosum virus
cgggcgcugcacc

SEQ ID NO: 4045077 - RNA, 15 nt, Molluscum contagiosum virus
cgggcgcugcaccgc

SEQ ID NO: 4045078 - RNA, 15 nt, Molluscum contagiosum virus
cgggcgugcgcagca

SEQ ID NO: 4045079 - RNA, 23 nt, Molluscum contagiosum virus
cgggcguggggagcuggagcgag

SEQ ID NO: 4045080 - RNA, 13 nt, Molluscum contagiosum virus
cgggcucgggcag

SEQ ID NO: 4045081 - RNA, 16 nt, Molluscum contagiosum virus
cgggcugucgcccggc

SEQ ID NO: 4045082 - RNA, 21 nt, Molluscum contagiosum virus
cgggcuucgcugcgcaggugc

SEQ ID NO: 4045083 - RNA, 23 nt, Molluscum contagiosum virus
cgggcuugcucccucgcgcgcag

SEQ ID NO: 4045084 - RNA, 14 nt, Molluscum contagiosum virus
cggggaggagcucu

SEQ ID NO: 4045085 - RNA, 15 nt, Molluscum contagiosum virus
cggggcaggcagugc

SEQ ID NO: 4045086 - RNA, 23 nt, Molluscum contagiosum virus
cggggcccaugcucaccgccgag

SEQ ID NO: 4045087 - RNA, 19 nt, Molluscum contagiosum virus
cggggcccucggcgcgccg

SEQ ID NO: 4045088 - RNA, 15 nt, Molluscum contagiosum virus
cggggcuggcagaag

SEQ ID NO: 4045089 - RNA, 20 nt, Molluscum contagiosum virus
cgggggcucggaagagcguc

SEQ ID NO: 4045090 - RNA, 19 nt, Molluscum contagiosum virus
cggguaguugcgagccagc

SEQ ID NO: 4045091 - RNA, 16 nt, Molluscum contagiosum virus
cgggugccgugccccu

SEQ ID NO: 4045092 - RNA, 19 nt, Molluscum contagiosum virus
cggguguugaccaaagguc

SEQ ID NO: 4045093 - RNA, 13 nt, Molluscum contagiosum virus
cgguacugcugca

SEQ ID NO: 4045094 - RNA, 19 nt, Molluscum contagiosum virus
cggucgacgacgcgcgcac

SEQ ID NO: 4045095 - RNA, 22 nt, Molluscum contagiosum virus
cggucgccuucuugcuggcgcu

SEQ ID NO: 4045096 - RNA, 17 nt, Molluscum contagiosum virus
cggucggguacacgugc

SEQ ID NO: 4045097 - RNA, 23 nt, Molluscum contagiosum virus
cggucugauugagccggacuugu

SEQ ID NO: 4045098 - RNA, 21 nt, Molluscum contagiosum virus
cggucuuccagcacugcgcca

SEQ ID NO: 4045099 - RNA, 16 nt, Molluscum contagiosum virus
cggugagugcgcgcac

SEQ ID NO: 4045100 - RNA, 20 nt, Molluscum contagiosum virus
cggugcaaccgcugcucgac

SEQ ID NO: 4045101 - RNA, 15 nt, Molluscum contagiosum virus
cggugcagccgcugc

SEQ ID NO: 4045102 - RNA, 16 nt, Molluscum contagiosum virus
cggugcagcuacugcg

SEQ ID NO: 4045103 - RNA, 14 nt, Molluscum contagiosum virus
cggugcagcugccg

SEQ ID NO: 4045104 - RNA, 14 nt, Molluscum contagiosum virus
cggugcucgccccu

SEQ ID NO: 4045105 - RNA, 14 nt, Molluscum contagiosum virus
cgguggacgcacag

SEQ ID NO: 4045106 - RNA, 14 nt, Molluscum contagiosum virus
cgguggcggcucug

SEQ ID NO: 4045107 - RNA, 17 nt, Molluscum contagiosum virus
cgguguccucuucacau

SEQ ID NO: 4045108 - RNA, 19 nt, Molluscum contagiosum virus
cguaaagagcguccagccg

SEQ ID NO: 4045109 - RNA, 23 nt, Molluscum contagiosum virus
cguaacaauggacacgcacuggc

SEQ ID NO: 4045110 - RNA, 16 nt, Molluscum contagiosum virus
cguaagccaccgcgca

SEQ ID NO: 4045111 - RNA, 18 nt, Molluscum contagiosum virus
cguaaugauugucaagca

SEQ ID NO: 4045112 - RNA, 18 nt, Molluscum contagiosum virus
cguacagcgcgcgugccg

SEQ ID NO: 4045113 - RNA, 20 nt, Molluscum contagiosum virus
cguacagcuccccgcgcaag

SEQ ID NO: 4045114 - RNA, 14 nt, Molluscum contagiosum virus
cguaccgcgcccgc

SEQ ID NO: 4045115 - RNA, 21 nt, Molluscum contagiosum virus
cguacucaacaagcugcuggc

SEQ ID NO: 4045116 - RNA, 16 nt, Molluscum contagiosum virus
cguacugggagcuuuc

SEQ ID NO: 4045117 - RNA, 17 nt, Molluscum contagiosum virus
cguagcaaaugcgcugc

SEQ ID NO: 4045118 - RNA, 13 nt, Molluscum contagiosum virus
cguagccuagcca

SEQ ID NO: 4045119 - RNA, 19 nt, Molluscum contagiosum virus
cguaguacugcagcagcuc

SEQ ID NO: 4045120 - RNA, 15 nt, Molluscum contagiosum virus
cguaguccagcgcgu

SEQ ID NO: 4045121 - RNA, 18 nt, Molluscum contagiosum virus
cgucacaagcaccgccug

SEQ ID NO: 4045122 - RNA, 14 nt, Molluscum contagiosum virus
cgucaccaccgcuu

SEQ ID NO: 4045123 - RNA, 23 nt, Molluscum contagiosum virus
cgucagccucugugcggcgccgu

SEQ ID NO: 4045124 - RNA, 15 nt, Molluscum contagiosum virus
cguccacgacgagcc

SEQ ID NO: 4045125 - RNA, 18 nt, Molluscum contagiosum virus
acagccgcuuucugggcg

SEQ ID NO: 4045126 - RNA, 22 nt, Molluscum contagiosum virus
acagccuagaaacgacgggcgc

SEQ ID NO: 4045127 - RNA, 12 nt, Molluscum contagiosum virus
acagcgcaagcu

SEQ ID NO: 4045128 - RNA, 16 nt, Molluscum contagiosum virus
acagcgcgcgugccgc

SEQ ID NO: 4045129 - RNA, 16 nt, Molluscum contagiosum virus
acagcgggcgcugcuc

SEQ ID NO: 4045130 - RNA, 12 nt, Molluscum contagiosum virus
acagcugcugcu

SEQ ID NO: 4045131 - RNA, 23 nt, Molluscum contagiosum virus
acaggagcauuccuuguccuggc

SEQ ID NO: 4045132 - RNA, 19 nt, Molluscum contagiosum virus
acaggcgcgcaagugcgug

SEQ ID NO: 4045133 - RNA, 16 nt, Molluscum contagiosum virus
acagggauucgccgcg

SEQ ID NO: 4045134 - RNA, 22 nt, Molluscum contagiosum virus
acaggggggagacgguggaggu

SEQ ID NO: 4045135 - RNA, 14 nt, Molluscum contagiosum virus
acaggugcguaaug

SEQ ID NO: 4045136 - RNA, 21 nt, Molluscum contagiosum virus
acaguaccagauuagcaacug

SEQ ID NO: 4045137 - RNA, 17 nt, Molluscum contagiosum virus
acaguccaacccgcggc

SEQ ID NO: 4045138 - RNA, 20 nt, Molluscum contagiosum virus
acagucgcgcgccugccgcc

SEQ ID NO: 4045139 - RNA, 19 nt, Molluscum contagiosum virus
acagucuagugcguccgcc

SEQ ID NO: 4045140 - RNA, 17 nt, Molluscum contagiosum virus
acagucuugcgcagcgc

SEQ ID NO: 4045141 - RNA, 16 nt, Molluscum contagiosum virus
acaguggcugugcgcc

SEQ ID NO: 4045142 - RNA, 15 nt, Molluscum contagiosum virus
acauaguaccaugac

SEQ ID NO: 4045143 - RNA, 22 nt, Molluscum contagiosum virus
acaucaucgcggagcugcgcgc

SEQ ID NO: 4045144 - RNA, 23 nt, Molluscum contagiosum virus
acauccugccacaccagcuggcu

SEQ ID NO: 4045145 - RNA, 15 nt, Molluscum contagiosum virus
acaucggcacugcuc

SEQ ID NO: 4045146 - RNA, 23 nt, Molluscum contagiosum virus
acaucuucgugcccacgcuggcg

SEQ ID NO: 4045147 - RNA, 16 nt, Molluscum contagiosum virus
acaugcaacgcaggac

SEQ ID NO: 4045148 - RNA, 16 nt, Molluscum contagiosum virus
acaugcagcugcagga

SEQ ID NO: 4045149 - RNA, 16 nt, Molluscum contagiosum virus
acaugccgcgcugcuc

SEQ ID NO: 4045150 - RNA, 15 nt, Molluscum contagiosum virus
acaugcggagacugu

SEQ ID NO: 4045151 - RNA, 19 nt, Molluscum contagiosum virus
acaugcgugcuagcccgca

SEQ ID NO: 4045152 - RNA, 22 nt, Molluscum contagiosum virus
acaugcucgcgcucuacgccag

SEQ ID NO: 4045153 - RNA, 19 nt, Molluscum contagiosum virus
acaugcuguccaccuccuc

SEQ ID NO: 4045154 - RNA, 12 nt, Molluscum contagiosum virus
acaugugccugc

SEQ ID NO: 4045155 - RNA, 23 nt, Molluscum contagiosum virus
acaugugcgugcaccucaagaag

SEQ ID NO: 4045156 - RNA, 12 nt, Molluscum contagiosum virus
accacacgcgcg

SEQ ID NO: 4045157 - RNA, 19 nt, Molluscum contagiosum virus
accacccgaaagucccgcu

SEQ ID NO: 4045158 - RNA, 21 nt, Molluscum contagiosum virus
accacuggacacgugccuucu

SEQ ID NO: 4045159 - RNA, 13 nt, Molluscum contagiosum virus
accagaggguggc

SEQ ID NO: 4045160 - RNA, 15 nt, Molluscum contagiosum virus
accagauccgggcgc

SEQ ID NO: 4045161 - RNA, 10 nt, Molluscum contagiosum virus
accagcagcc

SEQ ID NO: 4045162 - RNA, 15 nt, Molluscum contagiosum virus
accagcagccaggcu

SEQ ID NO: 4045163 - RNA, 22 nt, Molluscum contagiosum virus
accagcgcggccguggcugcgg

SEQ ID NO: 4045164 - RNA, 21 nt, Molluscum contagiosum virus
accagcgugcccuucuccgag

SEQ ID NO: 4045165 - RNA, 16 nt, Molluscum contagiosum virus
accaguacaucaccgc

SEQ ID NO: 4045166 - RNA, 16 nt, Molluscum contagiosum virus
accaguaccugcugcc

SEQ ID NO: 4045167 - RNA, 14 nt, Molluscum contagiosum virus
acccagcaaggccc

SEQ ID NO: 4045168 - RNA, 17 nt, Molluscum contagiosum virus
accccaagaagaacguc

SEQ ID NO: 4045169 - RNA, 18 nt, Molluscum contagiosum virus
accccaagaagaacgucu

SEQ ID NO: 4045170 - RNA, 20 nt, Molluscum contagiosum virus
accccgcgcguacgcugcuc

SEQ ID NO: 4045171 - RNA, 14 nt, Molluscum contagiosum virus
accccucgugcugg

SEQ ID NO: 4045172 - RNA, 19 nt, Molluscum contagiosum virus
acccgcaggaaaggcaccc

SEQ ID NO: 4045173 - RNA, 20 nt, Molluscum contagiosum virus
acccguggccgagccgcugg

SEQ ID NO: 4045174 - RNA, 21 nt, Molluscum contagiosum virus
acccucgcaagcugagcgcgc

SEQ ID NO: 4045175 - RNA, 23 nt, Molluscum contagiosum virus
acccugcacgcuacggcugccgg

SEQ ID NO: 4045176 - RNA, 22 nt, Molluscum contagiosum virus
acccuggcugcugcgcgaccgc

SEQ ID NO: 4045177 - RNA, 23 nt, Molluscum contagiosum virus
acccuuggcagcaacugcacagg

SEQ ID NO: 4045178 - RNA, 17 nt, Molluscum contagiosum virus
accgacaaggagggaga

SEQ ID NO: 4045179 - RNA, 17 nt, Molluscum contagiosum virus
accgacgaggugcgcgc

SEQ ID NO: 4045180 - RNA, 15 nt, Molluscum contagiosum virus
accgagugcuggccg

SEQ ID NO: 4045181 - RNA, 16 nt, Molluscum contagiosum virus
accgcaagcucauggu

SEQ ID NO: 4045182 - RNA, 17 nt, Molluscum contagiosum virus
accgccgcggccgcgag

SEQ ID NO: 4045183 - RNA, 23 nt, Molluscum contagiosum virus
accgccgcggccgcgagacgcag

SEQ ID NO: 4045184 - RNA, 14 nt, Molluscum contagiosum virus
accgcgcagaagcc

SEQ ID NO: 4045185 - RNA, 16 nt, Molluscum contagiosum virus
accgcgcgcgcuccga

SEQ ID NO: 4045186 - RNA, 18 nt, Molluscum contagiosum virus
accgcggcgggugccgcc

SEQ ID NO: 4045187 - RNA, 13 nt, Molluscum contagiosum virus
accgcgugcgcag

SEQ ID NO: 4045188 - RNA, 21 nt, Molluscum contagiosum virus
accggcgcucacugcgaucgc

SEQ ID NO: 4045189 - RNA, 15 nt, Molluscum contagiosum virus
accgggcacuucucg

SEQ ID NO: 4045190 - RNA, 20 nt, Molluscum contagiosum virus
accgggcacuucucgcgcga

SEQ ID NO: 4045191 - RNA, 17 nt, Molluscum contagiosum virus
accgguuccgugcgcuc

SEQ ID NO: 4045192 - RNA, 17 nt, Molluscum contagiosum virus
accgucaaccugcugcc

SEQ ID NO: 4045193 - RNA, 14 nt, Molluscum contagiosum virus
accuacgcgccgac

SEQ ID NO: 4045194 - RNA, 22 nt, Molluscum contagiosum virus
accuacgcuaccugaagcugga

SEQ ID NO: 4045195 - RNA, 15 nt, Molluscum contagiosum virus
accuacuccuggcca

SEQ ID NO: 4045196 - RNA, 18 nt, Molluscum contagiosum virus
accucaacuguugccugg

SEQ ID NO: 4045197 - RNA, 12 nt, Molluscum contagiosum virus
accucaccgcgc

SEQ ID NO: 4045198 - RNA, 17 nt, Molluscum contagiosum virus
accucaccucugcgcgg

SEQ ID NO: 4045199 - RNA, 14 nt, Molluscum contagiosum virus
accucaucaagccc

SEQ ID NO: 4045200 - RNA, 23 nt, Molluscum contagiosum virus
accucccugugaacgcaccgccg

SEQ ID NO: 4045201 - RNA, 14 nt, Molluscum contagiosum virus
accuccugcaccug

SEQ ID NO: 4045202 - RNA, 18 nt, Molluscum contagiosum virus
accuccugcaccugcugg

SEQ ID NO: 4045203 - RNA, 20 nt, Molluscum contagiosum virus
accuccugcaccugcuggaa

SEQ ID NO: 4045204 - RNA, 24 nt, Molluscum contagiosum virus
accucugcuucacgcugcucgugc

SEQ ID NO: 4045205 - RNA, 16 nt, Molluscum contagiosum virus
accugagccucuggaa

SEQ ID NO: 4045206 - RNA, 18 nt, Molluscum contagiosum virus
accugcacgagccggcgc

SEQ ID NO: 4045207 - RNA, 19 nt, Molluscum contagiosum virus
accugcgacagcugcugcu

SEQ ID NO: 4045208 - RNA, 17 nt, Molluscum contagiosum virus
accugcgcaacgugcug

SEQ ID NO: 4045209 - RNA, 17 nt, Molluscum contagiosum virus
accugcguucgcuccgu

SEQ ID NO: 4045210 - RNA, 19 nt, Molluscum contagiosum virus
accugcucgggcugcgcgg

SEQ ID NO: 4045211 - RNA, 12 nt, Molluscum contagiosum virus
accugcugcgag

SEQ ID NO: 4045212 - RNA, 13 nt, Molluscum contagiosum virus
accugcugcugag

SEQ ID NO: 4045213 - RNA, 17 nt, Molluscum contagiosum virus
accugcugguggugcug

SEQ ID NO: 4045214 - RNA, 13 nt, Molluscum contagiosum virus
accuggaguacuu

SEQ ID NO: 4045215 - RNA, 18 nt, Molluscum contagiosum virus
accuggcgagcgcucugc

SEQ ID NO: 4045216 - RNA, 20 nt, Molluscum contagiosum virus
accuggcgagcgcucugcau

SEQ ID NO: 4045217 - RNA, 14 nt, Molluscum contagiosum virus
accugggcgccgcg

SEQ ID NO: 4045218 - RNA, 14 nt, Molluscum contagiosum virus
accugggcgucgug

SEQ ID NO: 4045219 - RNA, 16 nt, Molluscum contagiosum virus
accugguucaugcugg

SEQ ID NO: 4045220 - RNA, 15 nt, Molluscum contagiosum virus
accuguuaaauggac

SEQ ID NO: 4045221 - RNA, 18 nt, Molluscum contagiosum virus
accuuggacacgugcgug

SEQ ID NO: 4045222 - RNA, 16 nt, Molluscum contagiosum virus
accuuggcgcgccgcu

SEQ ID NO: 4045223 - RNA, 22 nt, Molluscum contagiosum virus
accuuggcgcugcacaguucac

SEQ ID NO: 4045224 - RNA, 20 nt, Molluscum contagiosum virus
accuuucuuccgacgggccc

SEQ ID NO: 4045225 - RNA, 16 nt, Molluscum contagiosum virus
acgaaaucgcaaagca

SEQ ID NO: 4045226 - RNA, 23 nt, Molluscum contagiosum virus
acgaacaugggguuucggaacgc

SEQ ID NO: 4045227 - RNA, 18 nt, Molluscum contagiosum virus
augcgguccgacucggug

SEQ ID NO: 4045228 - RNA, 20 nt, Molluscum contagiosum virus
augcgguguguguucucaaa

SEQ ID NO: 4045229 - RNA, 14 nt, Molluscum contagiosum virus
augcucgagccugc

SEQ ID NO: 4045230 - RNA, 18 nt, Molluscum contagiosum virus
augcucuacgugcugcag

SEQ ID NO: 4045231 - RNA, 22 nt, Molluscum contagiosum virus
augcugcucauggucgucuccg

SEQ ID NO: 4045232 - RNA, 19 nt, Molluscum contagiosum virus
augcuuuuguuacucucag

SEQ ID NO: 4045233 - RNA, 18 nt, Molluscum contagiosum virus
auggacaaagaugcagcc

SEQ ID NO: 4045234 - RNA, 15 nt, Molluscum contagiosum virus
auggacacgcugcgc

SEQ ID NO: 4045235 - RNA, 22 nt, Molluscum contagiosum virus
auggacgugcugcuggcccugc

SEQ ID NO: 4045236 - RNA, 15 nt, Molluscum contagiosum virus
auggccgcgccgcgc

SEQ ID NO: 4045237 - RNA, 11 nt, Molluscum contagiosum virus
auggcugcuca

SEQ ID NO: 4045238 - RNA, 12 nt, Molluscum contagiosum virus
auggcugcucuc

SEQ ID NO: 4045239 - RNA, 14 nt, Molluscum contagiosum virus
augggcacggcaac

SEQ ID NO: 4045240 - RNA, 17 nt, Molluscum contagiosum virus
augggcacggcaacgag

SEQ ID NO: 4045241 - RNA, 20 nt, Molluscum contagiosum virus
auguacuucuacgagcagcg

SEQ ID NO: 4045242 - RNA, 18 nt, Molluscum contagiosum virus
augucacgcgucgcgcgc

SEQ ID NO: 4045243 - RNA, 14 nt, Molluscum contagiosum virus
auguccacggacau

SEQ ID NO: 4045244 - RNA, 18 nt, Molluscum contagiosum virus
auguccaugucgcgcauc

SEQ ID NO: 4045245 - RNA, 23 nt, Molluscum contagiosum virus
augucgcgacggagauggacaca

SEQ ID NO: 4045246 - RNA, 21 nt, Molluscum contagiosum virus
augugagcaagcugcaagcca

SEQ ID NO: 4045247 - RNA, 15 nt, Molluscum contagiosum virus
auguugugcucgugu

SEQ ID NO: 4045248 - RNA, 12 nt, Molluscum contagiosum virus
auguuguuugaa

SEQ ID NO: 4045249 - RNA, 18 nt, Molluscum contagiosum virus
auucacuuucgucgccuc

SEQ ID NO: 4045250 - RNA, 19 nt, Molluscum contagiosum virus
auucgcgcgcccccgcaaa

SEQ ID NO: 4045251 - RNA, 23 nt, Molluscum contagiosum virus
auucuugcacgggcaugcacagc

SEQ ID NO: 4045252 - RNA, 14 nt, Molluscum contagiosum virus
auugccacgcaaaa

SEQ ID NO: 4045253 - RNA, 21 nt, Molluscum contagiosum virus
auugcccgcgcgcggacagcc

SEQ ID NO: 4045254 - RNA, 20 nt, Molluscum contagiosum virus
auuucguugauuugcgcacc

SEQ ID NO: 4045255 - RNA, 19 nt, Molluscum contagiosum virus
auuucuuuuuccgggacgc

SEQ ID NO: 4045256 - RNA, 14 nt, Molluscum contagiosum virus
auuuuuugccccgc

SEQ ID NO: 4045257 - RNA, 15 nt, Molluscum contagiosum virus
caaaagagcgcgccu

SEQ ID NO: 4045258 - RNA, 15 nt, Molluscum contagiosum virus
caaaagaggccugcu

SEQ ID NO: 4045259 - RNA, 16 nt, Molluscum contagiosum virus
caaaagcacagcagga

SEQ ID NO: 4045260 - RNA, 14 nt, Molluscum contagiosum virus
caaacagccugugu

SEQ ID NO: 4045261 - RNA, 15 nt, Molluscum contagiosum virus
caaagaaugcaugcg

SEQ ID NO: 4045262 - RNA, 19 nt, Molluscum contagiosum virus
caaagacgagggaugcgca

SEQ ID NO: 4045263 - RNA, 12 nt, Molluscum contagiosum virus
caaagcggggcg

SEQ ID NO: 4045264 - RNA, 20 nt, Molluscum contagiosum virus
caaagcugugcguacaccua

SEQ ID NO: 4045265 - RNA, 18 nt, Molluscum contagiosum virus
caaaggcccgcgagcacg

SEQ ID NO: 4045266 - RNA, 14 nt, Molluscum contagiosum virus
caaaggugcucacc

SEQ ID NO: 4045267 - RNA, 23 nt, Molluscum contagiosum virus
caaaguacuugccgucacggccg

SEQ ID NO: 4045268 - RNA, 20 nt, Molluscum contagiosum virus
caaaucuguucgagcaacag

SEQ ID NO: 4045269 - RNA, 15 nt, Molluscum contagiosum virus
caacaacgagagcgg

SEQ ID NO: 4045270 - RNA, 19 nt, Molluscum contagiosum virus
caacacgaucaaggugcag

SEQ ID NO: 4045271 - RNA, 20 nt, Molluscum contagiosum virus
caacacgcuguugcugcugc

SEQ ID NO: 4045272 - RNA, 18 nt, Molluscum contagiosum virus
caacacuaccacagccau

SEQ ID NO: 4045273 - RNA, 12 nt, Molluscum contagiosum virus
caacagcagcug

SEQ ID NO: 4045274 - RNA, 23 nt, Molluscum contagiosum virus
caacaggaauguguacgacgcgc

SEQ ID NO: 4045275 - RNA, 14 nt, Molluscum contagiosum virus
caacauccaaacca

SEQ ID NO: 4045276 - RNA, 15 nt, Molluscum contagiosum virus
caaccacagcucucc

SEQ ID NO: 4045277 - RNA, 19 nt, Molluscum contagiosum virus
caaccacucuuucacgcug

SEQ ID NO: 4045278 - RNA, 22 nt, Molluscum contagiosum virus
caaccaguacuucaucuucaag

SEQ ID NO: 4045279 - RNA, 23 nt, Molluscum contagiosum virus
caaccccgcgcguacgcugcucg

SEQ ID NO: 4045280 - RNA, 15 nt, Molluscum contagiosum virus
caaccccgcgcugcg

SEQ ID NO: 4045281 - RNA, 20 nt, Molluscum contagiosum virus
caaccccgcgcugcgcggcg

SEQ ID NO: 4045282 - RNA, 15 nt, Molluscum contagiosum virus
caaccuccugcaccu

SEQ ID NO: 4045283 - RNA, 19 nt, Molluscum contagiosum virus
caaccuccugcaccugcug

SEQ ID NO: 4045284 - RNA, 21 nt, Molluscum contagiosum virus
caaccuccugcaccugcugga

SEQ ID NO: 4045285 - RNA, 15 nt, Molluscum contagiosum virus
caacgacaaggaaag

SEQ ID NO: 4045286 - RNA, 21 nt, Molluscum contagiosum virus
caacgacaaggaaaggcaccc

SEQ ID NO: 4045287 - RNA, 22 nt, Molluscum contagiosum virus
caacgagcucuccgaagagcag

SEQ ID NO: 4045288 - RNA, 15 nt, Molluscum contagiosum virus
caacgccagcuguag

SEQ ID NO: 4045289 - RNA, 21 nt, Molluscum contagiosum virus
caacgccuaccaccgggcacu

SEQ ID NO: 4045290 - RNA, 17 nt, Molluscum contagiosum virus
caacgcugccgcuggcg

SEQ ID NO: 4045291 - RNA, 20 nt, Molluscum contagiosum virus
caacguaguacugcagcagc

SEQ ID NO: 4045292 - RNA, 16 nt, Molluscum contagiosum virus
caacgugcugcgccgc

SEQ ID NO: 4045293 - RNA, 18 nt, Molluscum contagiosum virus
caacguggcgccgcugcu

SEQ ID NO: 4045294 - RNA, 19 nt, Molluscum contagiosum virus
caacuacaaggugcugucc

SEQ ID NO: 4045295 - RNA, 20 nt, Molluscum contagiosum virus
caacuccgagcgcgcgcgcu

SEQ ID NO: 4045296 - RNA, 15 nt, Molluscum contagiosum virus
caacuucgcgcugua

SEQ ID NO: 4045297 - RNA, 22 nt, Molluscum contagiosum virus
caacuugcucuacuggcggcgc

SEQ ID NO: 4045298 - RNA, 14 nt, Molluscum contagiosum virus
caacuugggcccgc

SEQ ID NO: 4045299 - RNA, 21 nt, Molluscum contagiosum virus
caagaaacgggagucacuucu

SEQ ID NO: 4045300 - RNA, 21 nt, Molluscum contagiosum virus
caagaagaggccagcacaagc

SEQ ID NO: 4045301 - RNA, 21 nt, Molluscum contagiosum virus
caagacgacacgagggccuug

SEQ ID NO: 4045302 - RNA, 11 nt, Molluscum contagiosum virus
caagacuggcc

SEQ ID NO: 4045303 - RNA, 21 nt, Molluscum contagiosum virus
caagagcuuacuagacuggcu

SEQ ID NO: 4045304 - RNA, 19 nt, Molluscum contagiosum virus
caagaggacgagcugcuaa

SEQ ID NO: 4045305 - RNA, 19 nt, Molluscum contagiosum virus
caagagggggcuguuauuu

SEQ ID NO: 4045306 - RNA, 17 nt, Molluscum contagiosum virus
caagauucuucgcgaag

SEQ ID NO: 4045307 - RNA, 18 nt, Molluscum contagiosum virus
caagcaccgccugcugca

SEQ ID NO: 4045308 - RNA, 20 nt, Molluscum contagiosum virus
caagcaccgccugcugcagc

SEQ ID NO: 4045309 - RNA, 16 nt, Molluscum contagiosum virus
caagcacgagcugcug

SEQ ID NO: 4045310 - RNA, 17 nt, Molluscum contagiosum virus
caagcacgagcugcugc

SEQ ID NO: 4045311 - RNA, 23 nt, Molluscum contagiosum virus
caagcacgcaacgucgcacuggc

SEQ ID NO: 4045312 - RNA, 12 nt, Molluscum contagiosum virus
caagcacgccag

SEQ ID NO: 4045313 - RNA, 13 nt, Molluscum contagiosum virus
caagcacugccuc

SEQ ID NO: 4045314 - RNA, 20 nt, Molluscum contagiosum virus
caagcagguggccgcgcgcg

SEQ ID NO: 4045315 - RNA, 15 nt, Molluscum contagiosum virus
caagcccagcagcga

SEQ ID NO: 4045316 - RNA, 13 nt, Molluscum contagiosum virus
caagcgcugcucg

SEQ ID NO: 4045317 - RNA, 21 nt, Molluscum contagiosum virus
caagcggucaggccgggcgcg

SEQ ID NO: 4045318 - RNA, 14 nt, Molluscum contagiosum virus
caagcggugcagcu

SEQ ID NO: 4045319 - RNA, 22 nt, Molluscum contagiosum virus
caagcguuuucgucauggagca

SEQ ID NO: 4045320 - RNA, 14 nt, Molluscum contagiosum virus
caagcucgaacaga

SEQ ID NO: 4045321 - RNA, 18 nt, Molluscum contagiosum virus
caagcugagcgcgcugcg

SEQ ID NO: 4045322 - RNA, 16 nt, Molluscum contagiosum virus
caaggaaaaggcacac

SEQ ID NO: 4045323 - RNA, 17 nt, Molluscum contagiosum virus
caaggaaaaggcacacc

SEQ ID NO: 4045324 - RNA, 19 nt, Molluscum contagiosum virus
caaggaaaggcacccgcag

SEQ ID NO: 4045325 - RNA, 21 nt, Molluscum contagiosum virus
caaggaaaggcaccugcagga

SEQ ID NO: 4045326 - RNA, 13 nt, Molluscum contagiosum virus
caaggaucucugc

SEQ ID NO: 4045327 - RNA, 19 nt, Molluscum contagiosum virus
caaggauuacgcugccgug

SEQ ID NO: 4045328 - RNA, 12 nt, Molluscum contagiosum virus
caaggauuuaaa

SEQ ID NO: 4045329 - RNA, 14 nt, Molluscum contagiosum virus
gccgccggcgccgc

SEQ ID NO: 4045330 - RNA, 13 nt, Molluscum contagiosum virus
gccgccgggccug

SEQ ID NO: 4045331 - RNA, 21 nt, Molluscum contagiosum virus
gccgccggggcccaugcucac

SEQ ID NO: 4045332 - RNA, 23 nt, Molluscum contagiosum virus
gccgccugcucucgaagcagugc

SEQ ID NO: 4045333 - RNA, 18 nt, Molluscum contagiosum virus
gccgccuuugcgcugucu

SEQ ID NO: 4045334 - RNA, 12 nt, Molluscum contagiosum virus
gccgcgagcacu

SEQ ID NO: 4045335 - RNA, 20 nt, Molluscum contagiosum virus
gccgcgagcacuggcuggcg

SEQ ID NO: 4045336 - RNA, 13 nt, Molluscum contagiosum virus
gccgcgagcgcgu

SEQ ID NO: 4045337 - RNA, 12 nt, Molluscum contagiosum virus
gccgcgaggacc

SEQ ID NO: 4045338 - RNA, 18 nt, Molluscum contagiosum virus
gccgcgaggacccgcgcu

SEQ ID NO: 4045339 - RNA, 21 nt, Molluscum contagiosum virus
gccgcgcaagugggcgucgac

SEQ ID NO: 4045340 - RNA, 19 nt, Molluscum contagiosum virus
gccgcgcccgcggcgcacg

SEQ ID NO: 4045341 - RNA, 22 nt, Molluscum contagiosum virus
gccgcgcccgcgucgcgcgccg

SEQ ID NO: 4045342 - RNA, 20 nt, Molluscum contagiosum virus
gccgcgcgcgccagcuaugc

SEQ ID NO: 4045343 - RNA, 19 nt, Molluscum contagiosum virus
gccgcgcgcugcucuggag

SEQ ID NO: 4045344 - RNA, 17 nt, Molluscum contagiosum virus
gccgcgcgucugcgagu

SEQ ID NO: 4045345 - RNA, 14 nt, Molluscum contagiosum virus
gccgcgcugcuccg

SEQ ID NO: 4045346 - RNA, 13 nt, Molluscum contagiosum virus
gccgcgcugcugg

SEQ ID NO: 4045347 - RNA, 14 nt, Molluscum contagiosum virus
gccgcgcugcuggc

SEQ ID NO: 4045348 - RNA, 17 nt, Molluscum contagiosum virus
gccgcgcuucgagcacg

SEQ ID NO: 4045349 - RNA, 22 nt, Molluscum contagiosum virus
gccgcggcacugggugcccgag

SEQ ID NO: 4045350 - RNA, 16 nt, Molluscum contagiosum virus
gccgcggccugggcca

SEQ ID NO: 4045351 - RNA, 21 nt, Molluscum contagiosum virus
gccgcgugcaugcccagcaug

SEQ ID NO: 4045352 - RNA, 13 nt, Molluscum contagiosum virus
gccgcgugcucgu

SEQ ID NO: 4045353 - RNA, 11 nt, Molluscum contagiosum virus
gccgcgugcug

SEQ ID NO: 4045354 - RNA, 20 nt, Molluscum contagiosum virus
gccgcucggcacugcuggcg

SEQ ID NO: 4045355 - RNA, 15 nt, Molluscum contagiosum virus
gccgcucggcccgcg

SEQ ID NO: 4045356 - RNA, 16 nt, Molluscum contagiosum virus
gccgcucguccagcug

SEQ ID NO: 4045357 - RNA, 16 nt, Molluscum contagiosum virus
gccgcugccugugccc

SEQ ID NO: 4045358 - RNA, 12 nt, Molluscum contagiosum virus
gccgcugcgcau

SEQ ID NO: 4045359 - RNA, 13 nt, Molluscum contagiosum virus
gccgcugcgcgac

SEQ ID NO: 4045360 - RNA, 15 nt, Molluscum contagiosum virus
gccgcuugagcagca

SEQ ID NO: 4045361 - RNA, 21 nt, Molluscum contagiosum virus
gccgcuuucugggcgcgugcg

SEQ ID NO: 4045362 - RNA, 12 nt, Molluscum contagiosum virus
gccggacagcuc

SEQ ID NO: 4045363 - RNA, 15 nt, Molluscum contagiosum virus
gccggacagcucagc

SEQ ID NO: 4045364 - RNA, 17 nt, Molluscum contagiosum virus
gccggcacgagcagucc

SEQ ID NO: 4045365 - RNA, 19 nt, Molluscum contagiosum virus
gccggcaucgcgcugcugg

SEQ ID NO: 4045366 - RNA, 13 nt, Molluscum contagiosum virus
gccggccccgcga

SEQ ID NO: 4045367 - RNA, 14 nt, Molluscum contagiosum virus
gccggccgccggcg

SEQ ID NO: 4045368 - RNA, 12 nt, Molluscum contagiosum virus
gccggcgccgcg

SEQ ID NO: 4045369 - RNA, 15 nt, Molluscum contagiosum virus
gccggcgcgccgcgg

SEQ ID NO: 4045370 - RNA, 22 nt, Molluscum contagiosum virus
gccggcgcgcgcgcgcaggcuc

SEQ ID NO: 4045371 - RNA, 22 nt, Molluscum contagiosum virus
gccggcgggcgcgugcucacgc

SEQ ID NO: 4045372 - RNA, 18 nt, Molluscum contagiosum virus
gccgggaaugcugcgcac

SEQ ID NO: 4045373 - RNA, 22 nt, Molluscum contagiosum virus
gccgggccugcggcggcgcacg

SEQ ID NO: 4045374 - RNA, 19 nt, Molluscum contagiosum virus
gccgggcgucuccgcgcgg

SEQ ID NO: 4045375 - RNA, 19 nt, Molluscum contagiosum virus
gccgguacucgugcgucac

SEQ ID NO: 4045376 - RNA, 15 nt, Molluscum contagiosum virus
gccgguacugcggac

SEQ ID NO: 4045377 - RNA, 20 nt, Molluscum contagiosum virus
gccggucuccacguggccag

SEQ ID NO: 4045378 - RNA, 21 nt, Molluscum contagiosum virus
gccguacccggggagaagaug

SEQ ID NO: 4045379 - RNA, 20 nt, Molluscum contagiosum virus
gccguccccggaaagcagca

SEQ ID NO: 4045380 - RNA, 23 nt, Molluscum contagiosum virus
gccgucgcccggcaggcucccgc

SEQ ID NO: 4045381 - RNA, 17 nt, Molluscum contagiosum virus
gccgucgcgcgcugugg

SEQ ID NO: 4045382 - RNA, 20 nt, Molluscum contagiosum virus
gccgucgucaacaacacgau

SEQ ID NO: 4045383 - RNA, 16 nt, Molluscum contagiosum virus
gccgugacgcugcggc

SEQ ID NO: 4045384 - RNA, 14 nt, Molluscum contagiosum virus
gccgugagcacgag

SEQ ID NO: 4045385 - RNA, 14 nt, Molluscum contagiosum virus
gccgugcagagcaa

SEQ ID NO: 4045386 - RNA, 12 nt, Molluscum contagiosum virus
gccgugcgcgac

SEQ ID NO: 4045387 - RNA, 16 nt, Molluscum contagiosum virus
gccguggcaaacaggc

SEQ ID NO: 4045388 - RNA, 16 nt, Molluscum contagiosum virus
gccgugguacacguag

SEQ ID NO: 4045389 - RNA, 17 nt, Molluscum contagiosum virus
gccgugugaucaagagc

SEQ ID NO: 4045390 - RNA, 18 nt, Molluscum contagiosum virus
gccguuuuacacagggcu

SEQ ID NO: 4045391 - RNA, 15 nt, Molluscum contagiosum virus
gccuaccugcaggag

SEQ ID NO: 4045392 - RNA, 22 nt, Molluscum contagiosum virus
gccuacgcgcgcguaacagcgc

SEQ ID NO: 4045393 - RNA, 12 nt, Molluscum contagiosum virus
gccuacgugcug

SEQ ID NO: 4045394 - RNA, 16 nt, Molluscum contagiosum virus
gccuacgugcugcgca

SEQ ID NO: 4045395 - RNA, 13 nt, Molluscum contagiosum virus
gccuacguggcgg

SEQ ID NO: 4045396 - RNA, 22 nt, Molluscum contagiosum virus
gccuacucgcgacgcguccgcc

SEQ ID NO: 4045397 - RNA, 13 nt, Molluscum contagiosum virus
gccuagagcuggc

SEQ ID NO: 4045398 - RNA, 13 nt, Molluscum contagiosum virus
gccuaggaggaga

SEQ ID NO: 4045399 - RNA, 20 nt, Molluscum contagiosum virus
gccuaggaggagaacuccaa

SEQ ID NO: 4045400 - RNA, 18 nt, Molluscum contagiosum virus
gccucagccgagcgccgc

SEQ ID NO: 4045401 - RNA, 21 nt, Molluscum contagiosum virus
gccucagccgagcgccgccag

SEQ ID NO: 4045402 - RNA, 23 nt, Molluscum contagiosum virus
gccuccaagaagaggccagcaca

SEQ ID NO: 4045403 - RNA, 17 nt, Molluscum contagiosum virus
gccuccgagcgcgcgug

SEQ ID NO: 4045404 - RNA, 16 nt, Molluscum contagiosum virus
gccucgagcacgccuc

SEQ ID NO: 4045405 - RNA, 22 nt, Molluscum contagiosum virus
gccucggacggaggucugcuuu

SEQ ID NO: 4045406 - RNA, 15 nt, Molluscum contagiosum virus
gccucguucacggcu

SEQ ID NO: 4045407 - RNA, 16 nt, Molluscum contagiosum virus
gccucguucacggcua

SEQ ID NO: 4045408 - RNA, 16 nt, Molluscum contagiosum virus
gccucugugcggcgcc

SEQ ID NO: 4045409 - RNA, 15 nt, Molluscum contagiosum virus
gccugagaagcugua

SEQ ID NO: 4045410 - RNA, 20 nt, Molluscum contagiosum virus
gccugcaagaggcgcugucg

SEQ ID NO: 4045411 - RNA, 20 nt, Molluscum contagiosum virus
gccugcaccgagugcuggcc

SEQ ID NO: 4045412 - RNA, 13 nt, Molluscum contagiosum virus
gccugcacgcgca

SEQ ID NO: 4045413 - RNA, 16 nt, Molluscum contagiosum virus
gccugccagcagagcu

SEQ ID NO: 4045414 - RNA, 19 nt, Molluscum contagiosum virus
gccugcccgugugcgggca

SEQ ID NO: 4045415 - RNA, 21 nt, Molluscum contagiosum virus
gccugcgcaacgcgggccagg

SEQ ID NO: 4045416 - RNA, 13 nt, Molluscum contagiosum virus
gccugcgcgagca

SEQ ID NO: 4045417 - RNA, 14 nt, Molluscum contagiosum virus
gccugcgcgcaccc

SEQ ID NO: 4045418 - RNA, 23 nt, Molluscum contagiosum virus
gccugcggguaguugcgagccag

SEQ ID NO: 4045419 - RNA, 24 nt, Molluscum contagiosum virus
gccugcggguaguugcgagccagc

SEQ ID NO: 4045420 - RNA, 19 nt, Molluscum contagiosum virus
gccugcguggacagcaucc

SEQ ID NO: 4045421 - RNA, 15 nt, Molluscum contagiosum virus
gccugcucuccgcgg

SEQ ID NO: 4045422 - RNA, 15 nt, Molluscum contagiosum virus
gccugcugcagcucc

SEQ ID NO: 4045423 - RNA, 21 nt, Molluscum contagiosum virus
gccuggccgaacugcucugcg

SEQ ID NO: 4045424 - RNA, 13 nt, Molluscum contagiosum virus
gccuggcggcagc

SEQ ID NO: 4045425 - RNA, 21 nt, Molluscum contagiosum virus
gccuguaccccgaacggcgug

SEQ ID NO: 4045426 - RNA, 18 nt, Molluscum contagiosum virus
gccuguaccugcgacagc

SEQ ID NO: 4045427 - RNA, 18 nt, Molluscum contagiosum virus
gccuguaccugcucgggc

SEQ ID NO: 4045428 - RNA, 14 nt, Molluscum contagiosum virus
gccugucucgcaag

SEQ ID NO: 4045429 - RNA, 15 nt, Molluscum contagiosum virus
gccugugccugcaag

SEQ ID NO: 4045430 - RNA, 16 nt, Molluscum contagiosum virus
gccuguuuccgcucgc

SEQ ID NO: 4045431 - RNA, 13 nt, Molluscum contagiosum virus
gccuucgacggcu

SEQ ID NO: 4045432 - RNA, 16 nt, Molluscum contagiosum virus
gcgccgcagcacgcgu

SEQ ID NO: 4045433 - RNA, 12 nt, Molluscum contagiosum virus
gcgccgccagcg

SEQ ID NO: 4045434 - RNA, 14 nt, Molluscum contagiosum virus
gcgccgccagcucc

SEQ ID NO: 4045435 - RNA, 17 nt, Molluscum contagiosum virus
gcgccgcgcgcgccggg

SEQ ID NO: 4045436 - RNA, 16 nt, Molluscum contagiosum virus
gcgccgcgcggcuccu

SEQ ID NO: 4045437 - RNA, 18 nt, Molluscum contagiosum virus
gcgccgcggcgggggcag

SEQ ID NO: 4045438 - RNA, 21 nt, Molluscum contagiosum virus
gcgccgcgugcaugcccagca

SEQ ID NO: 4045439 - RNA, 13 nt, Molluscum contagiosum virus
gcgccgcucgcac

SEQ ID NO: 4045440 - RNA, 21 nt, Molluscum contagiosum virus
gcgccgcucgucgcugcggac

SEQ ID NO: 4045441 - RNA, 23 nt, Molluscum contagiosum virus
gcgccgcugcccgcgcacgagcu

SEQ ID NO: 4045442 - RNA, 16 nt, Molluscum contagiosum virus
gcgccgcugcucgcuu

SEQ ID NO: 4045443 - RNA, 13 nt, Molluscum contagiosum virus
gcgccgcugcugg

SEQ ID NO: 4045444 - RNA, 20 nt, Molluscum contagiosum virus
gcgccggcacccgugcgcgc

SEQ ID NO: 4045445 - RNA, 15 nt, Molluscum contagiosum virus
gcgccgggccgcggu

SEQ ID NO: 4045446 - RNA, 17 nt, Molluscum contagiosum virus
gcgccggggcgcgcgcu

SEQ ID NO: 4045447 - RNA, 16 nt, Molluscum contagiosum virus
gcgccuacucuugcgc

SEQ ID NO: 4045448 - RNA, 12 nt, Molluscum contagiosum virus
gcgccucucgag

SEQ ID NO: 4045449 - RNA, 13 nt, Molluscum contagiosum virus
gcgccugaaccug

SEQ ID NO: 4045450 - RNA, 16 nt, Molluscum contagiosum virus
gcgccugcgcgagcaa

SEQ ID NO: 4045451 - RNA, 12 nt, Molluscum contagiosum virus
gcgccuugcagc

SEQ ID NO: 4045452 - RNA, 22 nt, Molluscum contagiosum virus
gcgcgaaacgguaagcucgacg

SEQ ID NO: 4045453 - RNA, 14 nt, Molluscum contagiosum virus
gcgcgacaugcugc

SEQ ID NO: 4045454 - RNA, 16 nt, Molluscum contagiosum virus
gcgcgacaugcugccc

SEQ ID NO: 4045455 - RNA, 18 nt, Molluscum contagiosum virus
gcgcgaccuacuccuggc

SEQ ID NO: 4045456 - RNA, 21 nt, Molluscum contagiosum virus
gcgcgacuccaucugcgcgac

SEQ ID NO: 4045457 - RNA, 20 nt, Molluscum contagiosum virus
gcgcgacuuggggcucgccg

SEQ ID NO: 4045458 - RNA, 20 nt, Molluscum contagiosum virus
gcgcgagacgcugcugcaca

SEQ ID NO: 4045459 - RNA, 15 nt, Molluscum contagiosum virus
gcgcgagaugcucgc

SEQ ID NO: 4045460 - RNA, 18 nt, Molluscum contagiosum virus
gcgcgagcagcugcugcg

SEQ ID NO: 4045461 - RNA, 12 nt, Molluscum contagiosum virus
gcgcgagcgacg

SEQ ID NO: 4045462 - RNA, 15 nt, Molluscum contagiosum virus
gcgcgagcgcgcgcu

SEQ ID NO: 4045463 - RNA, 14 nt, Molluscum contagiosum virus
gcgcgagcugcugc

SEQ ID NO: 4045464 - RNA, 17 nt, Molluscum contagiosum virus
gcgcgaguacaagcucg

SEQ ID NO: 4045465 - RNA, 24 nt, Molluscum contagiosum virus
gcgcgcaaaaggcacgaggcagcc

SEQ ID NO: 4045466 - RNA, 21 nt, Molluscum contagiosum virus
gcgcgcaagucgcgcgcugcg

SEQ ID NO: 4045467 - RNA, 20 nt, Molluscum contagiosum virus
gcgcgcacaaacgcgcgcac

SEQ ID NO: 4045468 - RNA, 16 nt, Molluscum contagiosum virus
gcgcgcacacgacgcu

SEQ ID NO: 4045469 - RNA, 14 nt, Molluscum contagiosum virus
gcgcgcacaucggc

SEQ ID NO: 4045470 - RNA, 12 nt, Molluscum contagiosum virus
gcgcgcacgcga

SEQ ID NO: 4045471 - RNA, 18 nt, Molluscum contagiosum virus
gcgcgcacggcuaggcgc

SEQ ID NO: 4045472 - RNA, 19 nt, Molluscum contagiosum virus
gcgcgcacucgggugcccg

SEQ ID NO: 4045473 - RNA, 13 nt, Molluscum contagiosum virus
gcgcgcagcgccc

SEQ ID NO: 4045474 - RNA, 15 nt, Molluscum contagiosum virus
gcgcgcaggaaaggu

SEQ ID NO: 4045475 - RNA, 19 nt, Molluscum contagiosum virus
gcgcgcaggcucgcaccgu

SEQ ID NO: 4045476 - RNA, 19 nt, Molluscum contagiosum virus
gcgcgcaucgcgggcacgc

SEQ ID NO: 4045477 - RNA, 20 nt, Molluscum contagiosum virus
gcgcgccaacgacuagcgug

SEQ ID NO: 4045478 - RNA, 16 nt, Molluscum contagiosum virus
gcgcgccagcagcgcc

SEQ ID NO: 4045479 - RNA, 15 nt, Molluscum contagiosum virus
gcgcgcccaccagca

SEQ ID NO: 4045480 - RNA, 18 nt, Molluscum contagiosum virus
gcgcgcccaccagcagcc

SEQ ID NO: 4045481 - RNA, 22 nt, Molluscum contagiosum virus
gcgcgcccaccagcagccaggc

SEQ ID NO: 4045482 - RNA, 22 nt, Molluscum contagiosum virus
gcgcgcccucgcgcgcagcaca

SEQ ID NO: 4045483 - RNA, 22 nt, Molluscum contagiosum virus
gcgcgccgcacgcugcugcgug

SEQ ID NO: 4045484 - RNA, 15 nt, Molluscum contagiosum virus
gcgcgccgcgcgccg

SEQ ID NO: 4045485 - RNA, 14 nt, Molluscum contagiosum virus
gcgcgccgcgcgcu

SEQ ID NO: 4045486 - RNA, 16 nt, Molluscum contagiosum virus
gcgcgccgcgggccgc

SEQ ID NO: 4045487 - RNA, 19 nt, Molluscum contagiosum virus
gcgcgccgggaaugcugcg

SEQ ID NO: 4045488 - RNA, 15 nt, Molluscum contagiosum virus
gcgcgccgggccgcg

SEQ ID NO: 4045489 - RNA, 21 nt, Molluscum contagiosum virus
gcgcgccucucgaggccggca

SEQ ID NO: 4045490 - RNA, 13 nt, Molluscum contagiosum virus
gcgcgccugcugg

SEQ ID NO: 4045491 - RNA, 12 nt, Molluscum contagiosum virus
gcgcgccuuccg

SEQ ID NO: 4045492 - RNA, 17 nt, Molluscum contagiosum virus
gcgcgccuuccgcgcgg

SEQ ID NO: 4045493 - RNA, 15 nt, Molluscum contagiosum virus
gcgcgcgcagcgcgc

SEQ ID NO: 4045494 - RNA, 14 nt, Molluscum contagiosum virus
gcgcgcgcauggag

SEQ ID NO: 4045495 - RNA, 14 nt, Molluscum contagiosum virus
gcgcgcgcgaacgc

SEQ ID NO: 4045496 - RNA, 15 nt, Molluscum contagiosum virus
gcgcgcgcggcgcag

SEQ ID NO: 4045497 - RNA, 15 nt, Molluscum contagiosum virus
gcgcgcgcggucgac

SEQ ID NO: 4045498 - RNA, 14 nt, Molluscum contagiosum virus
gcgcgcgcucugcc

SEQ ID NO: 4045499 - RNA, 19 nt, Molluscum contagiosum virus
gcgcgcggaagcccgccuc

SEQ ID NO: 4045500 - RNA, 15 nt, Molluscum contagiosum virus
gcgcgcggcgcgccc

SEQ ID NO: 4045501 - RNA, 16 nt, Molluscum contagiosum virus
gcgcgcggugcugcgc

SEQ ID NO: 4045502 - RNA, 20 nt, Molluscum contagiosum virus
gcgcgcguuuccguggcgug

SEQ ID NO: 4045503 - RNA, 18 nt, Molluscum contagiosum virus
gcgcgcuccgagacugcu

SEQ ID NO: 4045504 - RNA, 15 nt, Molluscum contagiosum virus
gcgcgcucgaggcgc

SEQ ID NO: 4045505 - RNA, 18 nt, Molluscum contagiosum virus
gcgcgcucgaggcgccgu

SEQ ID NO: 4045506 - RNA, 20 nt, Molluscum contagiosum virus
gcgcgcucgccaccgcgccc

SEQ ID NO: 4045507 - RNA, 15 nt, Molluscum contagiosum virus
gcgcgcucgcgcagg

SEQ ID NO: 4045508 - RNA, 15 nt, Molluscum contagiosum virus
gcgcgcugcgccgcu

SEQ ID NO: 4045509 - RNA, 14 nt, Molluscum contagiosum virus
gcgcgcugcgcgcg

SEQ ID NO: 4045510 - RNA, 12 nt, Molluscum contagiosum virus
gcgcgcugcgug

SEQ ID NO: 4045511 - RNA, 15 nt, Molluscum contagiosum virus
gcgcgcugcucugga

SEQ ID NO: 4045512 - RNA, 12 nt, Molluscum contagiosum virus
gcgcgcuggccg

SEQ ID NO: 4045513 - RNA, 16 nt, Molluscum contagiosum virus
gcgcgcuggcgugcgc

SEQ ID NO: 4045514 - RNA, 20 nt, Molluscum contagiosum virus
gcgcgcugguuaccaagggc

SEQ ID NO: 4045515 - RNA, 22 nt, Molluscum contagiosum virus
gcgcgcuuuuugccgcucacag

SEQ ID NO: 4045516 - RNA, 17 nt, Molluscum contagiosum virus
gcgcggaagaagcugcg

SEQ ID NO: 4045517 - RNA, 18 nt, Molluscum contagiosum virus
gcgcggaagcccgagcgc

SEQ ID NO: 4045518 - RNA, 19 nt, Molluscum contagiosum virus
gcgcggaagcccgagcgcg

SEQ ID NO: 4045519 - RNA, 18 nt, Molluscum contagiosum virus
gcgcggacagccuagaaa

SEQ ID NO: 4045520 - RNA, 13 nt, Molluscum contagiosum virus
gcgcggagcuggc

SEQ ID NO: 4045521 - RNA, 19 nt, Molluscum contagiosum virus
gcgcggcaacagcacgacg

SEQ ID NO: 4045522 - RNA, 21 nt, Molluscum contagiosum virus
gcgcggcccgagcaggacgug

SEQ ID NO: 4045523 - RNA, 15 nt, Molluscum contagiosum virus
gcgcggcgagccgcg

SEQ ID NO: 4045524 - RNA, 19 nt, Molluscum contagiosum virus
gcgcggcgagccgcgcgag

SEQ ID NO: 4045525 - RNA, 13 nt, Molluscum contagiosum virus
gcgcggcugcucg

SEQ ID NO: 4045526 - RNA, 22 nt, Molluscum contagiosum virus
gcgcgggaggcguccugcggga

SEQ ID NO: 4045527 - RNA, 22 nt, Molluscum contagiosum virus
gcgcgggccaugucugugcgcg

SEQ ID NO: 4045528 - RNA, 14 nt, Molluscum contagiosum virus
gcgcgguccugucc

SEQ ID NO: 4045529 - RNA, 22 nt, Molluscum contagiosum virus
gcgcggucgcccgccgagcucu

SEQ ID NO: 4045530 - RNA, 13 nt, Molluscum contagiosum virus
gcgcggugagccg

SEQ ID NO: 4045531 - RNA, 15 nt, Molluscum contagiosum virus
gcgcggugcugcgcc

SEQ ID NO: 4045532 - RNA, 19 nt, Molluscum contagiosum virus
gcgcggugcugcgccagga

SEQ ID NO: 4045533 - RNA, 18 nt, Molluscum contagiosum virus
gcgcgguggugcugggcg

SEQ ID NO: 4045534 - RNA, 20 nt, Molluscum contagiosum virus
gcgcguacgcgugcgcuggc

SEQ ID NO: 4045535 - RNA, 13 nt, Molluscum contagiosum virus
gcgggcgcaggcc

SEQ ID NO: 4045536 - RNA, 17 nt, Molluscum contagiosum virus
gcgggcgcaggcccgcc

SEQ ID NO: 4045537 - RNA, 15 nt, Molluscum contagiosum virus
gcgggcgccgggcgc

SEQ ID NO: 4045538 - RNA, 12 nt, Molluscum contagiosum virus
gcgggcgcgcac

SEQ ID NO: 4045539 - RNA, 21 nt, Molluscum contagiosum virus
gcgggcggcacacacuugcac

SEQ ID NO: 4045540 - RNA, 14 nt, Molluscum contagiosum virus
gcgggcggcggccc

SEQ ID NO: 4045541 - RNA, 20 nt, Molluscum contagiosum virus
gcgggcgucaagacucgccc

SEQ ID NO: 4045542 - RNA, 20 nt, Molluscum contagiosum virus
gcgggcguggggagcuggag

SEQ ID NO: 4045543 - RNA, 20 nt, Molluscum contagiosum virus
gcgggcguguccgcgggcgc

SEQ ID NO: 4045544 - RNA, 16 nt, Molluscum contagiosum virus
gcgggcuacucgagca

SEQ ID NO: 4045545 - RNA, 16 nt, Molluscum contagiosum virus
gcggggcccucgagca

SEQ ID NO: 4045546 - RNA, 17 nt, Molluscum contagiosum virus
gcggggccggcuuugcg

SEQ ID NO: 4045547 - RNA, 13 nt, Molluscum contagiosum virus
gcggggcugcugg

SEQ ID NO: 4045548 - RNA, 16 nt, Molluscum contagiosum virus
gcggggcugcuggcgg

SEQ ID NO: 4045549 - RNA, 21 nt, Molluscum contagiosum virus
gcgguccgacucggugcucau

SEQ ID NO: 4045550 - RNA, 22 nt, Molluscum contagiosum virus
gcggugcggcgcacgcugcugu

SEQ ID NO: 4045551 - RNA, 14 nt, Molluscum contagiosum virus
gcgguggcaggcgc

SEQ ID NO: 4045552 - RNA, 22 nt, Molluscum contagiosum virus
gcgguggucuccgcgggcagcc

SEQ ID NO: 4045553 - RNA, 14 nt, Molluscum contagiosum virus
gcgguggugcuggg

SEQ ID NO: 4045554 - RNA, 21 nt, Molluscum contagiosum virus
gcgguucacuagcgcaggcag

SEQ ID NO: 4045555 - RNA, 16 nt, Molluscum contagiosum virus
gcguacauccgcgagc

SEQ ID NO: 4045556 - RNA, 19 nt, Molluscum contagiosum virus
gcguaccaagccgugacgc

SEQ ID NO: 4045557 - RNA, 14 nt, Molluscum contagiosum virus
gcguacgcgugcgc

SEQ ID NO: 4045558 - RNA, 22 nt, Molluscum contagiosum virus
gcguacucgugucacaauggca

SEQ ID NO: 4045559 - RNA, 11 nt, Molluscum contagiosum virus
gcguagagcaa

SEQ ID NO: 4045560 - RNA, 20 nt, Molluscum contagiosum virus
gcguagcuagcucugcgcgc

SEQ ID NO: 4045561 - RNA, 21 nt, Molluscum contagiosum virus
gcguaguaguagcgcucgccc

SEQ ID NO: 4045562 - RNA, 21 nt, Molluscum contagiosum virus
gcguauucgcgucuugaaaug

SEQ ID NO: 4045563 - RNA, 21 nt, Molluscum contagiosum virus
gcgucaagaucaaccgcaagg

SEQ ID NO: 4045564 - RNA, 14 nt, Molluscum contagiosum virus
gcgucaccaccgcu

SEQ ID NO: 4045565 - RNA, 18 nt, Molluscum contagiosum virus
gcgucaugcgcgcgcgcu

SEQ ID NO: 4045566 - RNA, 15 nt, Molluscum contagiosum virus
gcguccggcgcucgc

SEQ ID NO: 4045567 - RNA, 17 nt, Molluscum contagiosum virus
gcgucgacguggagccu

SEQ ID NO: 4045568 - RNA, 17 nt, Molluscum contagiosum virus
gcgucguagacgcgccc

SEQ ID NO: 4045569 - RNA, 14 nt, Molluscum contagiosum virus
gcgucuccgcgagu

SEQ ID NO: 4045570 - RNA, 15 nt, Molluscum contagiosum virus
gcgucugggugccca

SEQ ID NO: 4045571 - RNA, 21 nt, Molluscum contagiosum virus
gcgucuuugucacaauguuug

SEQ ID NO: 4045572 - RNA, 13 nt, Molluscum contagiosum virus
gcgugagagccau

SEQ ID NO: 4045573 - RNA, 21 nt, Molluscum contagiosum virus
gcgugaggaggcggcacugcu

SEQ ID NO: 4045574 - RNA, 18 nt, Molluscum contagiosum virus
gcgugcaggaacgcgcgc

SEQ ID NO: 4045575 - RNA, 23 nt, Molluscum contagiosum virus
gcgugccagcguacggcccgaag

SEQ ID NO: 4045576 - RNA, 23 nt, Molluscum contagiosum virus
gcgugccgcccgaguccgcgcuc

SEQ ID NO: 4045577 - RNA, 17 nt, Molluscum contagiosum virus
gcgugcgagcggcgcgc

SEQ ID NO: 4045578 - RNA, 14 nt, Molluscum contagiosum virus
gcgugcgccgugcg

SEQ ID NO: 4045579 - RNA, 14 nt, Molluscum contagiosum virus
gcgugcgugcacag

SEQ ID NO: 4045580 - RNA, 16 nt, Molluscum contagiosum virus
gcgugcuagcccgcac

SEQ ID NO: 4045581 - RNA, 14 nt, Molluscum contagiosum virus
gcgugcucacgccc

SEQ ID NO: 4045582 - RNA, 13 nt, Molluscum contagiosum virus
gcgugcucgacuc

SEQ ID NO: 4045583 - RNA, 19 nt, Molluscum contagiosum virus
gcgugcucgacucggaugc

SEQ ID NO: 4045584 - RNA, 17 nt, Molluscum contagiosum virus
gcgugcucggugucggu

SEQ ID NO: 4045585 - RNA, 16 nt, Molluscum contagiosum virus
gcgugcugcgcggcgc

SEQ ID NO: 4045586 - RNA, 19 nt, Molluscum contagiosum virus
gcgugcuuguagcgcaagg

SEQ ID NO: 4045587 - RNA, 21 nt, Molluscum contagiosum virus
gcgugcuugugcgccugugcu

SEQ ID NO: 4045588 - RNA, 20 nt, Molluscum contagiosum virus
gcguggacuuuggcgugacc

SEQ ID NO: 4045589 - RNA, 15 nt, Molluscum contagiosum virus
gcguggccaggccgc

SEQ ID NO: 4045590 - RNA, 16 nt, Molluscum contagiosum virus
gcguggcgcaccugcu

SEQ ID NO: 4045591 - RNA, 21 nt, Molluscum contagiosum virus
gcguggggagcuggagcgagu

SEQ ID NO: 4045592 - RNA, 22 nt, Molluscum contagiosum virus
gcguguacucgaaggugcucag

SEQ ID NO: 4045593 - RNA, 15 nt, Molluscum contagiosum virus
gcgugucuggagccc

SEQ ID NO: 4045594 - RNA, 15 nt, Molluscum contagiosum virus
gcguuccaggaacgc

SEQ ID NO: 4045595 - RNA, 14 nt, Molluscum contagiosum virus
gcguucgacagcuc

SEQ ID NO: 4045596 - RNA, 18 nt, Molluscum contagiosum virus
gcguucgcgcgugcugga

SEQ ID NO: 4045597 - RNA, 22 nt, Molluscum contagiosum virus
gcguugccggcgaaccgacugc

SEQ ID NO: 4045598 - RNA, 21 nt, Molluscum contagiosum virus
gcuaccacgggcccgcgcgug

SEQ ID NO: 4045599 - RNA, 16 nt, Molluscum contagiosum virus
gcuaccgcagccacgg

SEQ ID NO: 4045600 - RNA, 24 nt, Molluscum contagiosum virus
gcuaccgcgacggcgugcuggcca

SEQ ID NO: 4045601 - RNA, 16 nt, Molluscum contagiosum virus
gcuaccgcgcgcgcaa

SEQ ID NO: 4045602 - RNA, 15 nt, Molluscum contagiosum virus
gcuaccugcgcaagc

SEQ ID NO: 4045603 - RNA, 19 nt, Molluscum contagiosum virus
gcuaccugguggagcacuu

SEQ ID NO: 4045604 - RNA, 22 nt, Molluscum contagiosum virus
gcuacgacgacaugcacacgca

SEQ ID NO: 4045605 - RNA, 16 nt, Molluscum contagiosum virus
gcuacguuccgcgcgg

SEQ ID NO: 4045606 - RNA, 14 nt, Molluscum contagiosum virus
gcuacugcgcgcgu

SEQ ID NO: 4045607 - RNA, 21 nt, Molluscum contagiosum virus
gcuaggggugccgcugcgcug

SEQ ID NO: 4045608 - RNA, 23 nt, Molluscum contagiosum virus
gcuaguuaccagaggguggcuug

SEQ ID NO: 4045609 - RNA, 15 nt, Molluscum contagiosum virus
gcuaugcgcagcugc

SEQ ID NO: 4045610 - RNA, 12 nt, Molluscum contagiosum virus
gcuaugcuuugc

SEQ ID NO: 4045611 - RNA, 19 nt, Molluscum contagiosum virus
gcucaagacgcugcuggcg

SEQ ID NO: 4045612 - RNA, 14 nt, Molluscum contagiosum virus
gcucaagcacugcc

SEQ ID NO: 4045613 - RNA, 14 nt, Molluscum contagiosum virus
gcucaagugcgucg

SEQ ID NO: 4045614 - RNA, 18 nt, Molluscum contagiosum virus
gcucaaucucgcccagca

SEQ ID NO: 4045615 - RNA, 21 nt, Molluscum contagiosum virus
gcucacgcugcccgcgccgcc

SEQ ID NO: 4045616 - RNA, 15 nt, Molluscum contagiosum virus
gcucacggcugugga

SEQ ID NO: 4045617 - RNA, 20 nt, Molluscum contagiosum virus
gcucauccucccugcgggcg

SEQ ID NO: 4045618 - RNA, 20 nt, Molluscum contagiosum virus
gcucaucggcgagcucuuuu

SEQ ID NO: 4045619 - RNA, 16 nt, Molluscum contagiosum virus
gcucaugcgcaagcag

SEQ ID NO: 4045620 - RNA, 17 nt, Molluscum contagiosum virus
gcuccaugagguacucc

SEQ ID NO: 4045621 - RNA, 17 nt, Molluscum contagiosum virus
gcuccauggagcgccuu

SEQ ID NO: 4045622 - RNA, 14 nt, Molluscum contagiosum virus
gcuccccgccagca

SEQ ID NO: 4045623 - RNA, 16 nt, Molluscum contagiosum virus
gcuccccgccagcacc

SEQ ID NO: 4045624 - RNA, 15 nt, Molluscum contagiosum virus
gcuccccgcgcgcag

SEQ ID NO: 4045625 - RNA, 15 nt, Molluscum contagiosum virus
gcucccgcacgcacc

SEQ ID NO: 4045626 - RNA, 17 nt, Molluscum contagiosum virus
gcucccgcgccacgagc

SEQ ID NO: 4045627 - RNA, 20 nt, Molluscum contagiosum virus
gcuccgaaccccucgugcug

SEQ ID NO: 4045628 - RNA, 22 nt, Molluscum contagiosum virus
gcuccgcgcccggcgggcacau

SEQ ID NO: 4045629 - RNA, 20 nt, Molluscum contagiosum virus
gcuccgcgcggcgcucugcc

SEQ ID NO: 4045630 - RNA, 14 nt, Molluscum contagiosum virus
gcuccggcugcucc

SEQ ID NO: 4045631 - RNA, 15 nt, Molluscum contagiosum virus
gcuccggcugcuccu

SEQ ID NO: 4045632 - RNA, 22 nt, Molluscum contagiosum virus
gcuccggcugcuccucgagcgc

SEQ ID NO: 4045633 - RNA, 17 nt, Molluscum contagiosum virus
gcuccucgagcgccgcc

SEQ ID NO: 4045634 - RNA, 17 nt, Molluscum contagiosum virus
gcuccucgcacgggcgc

SEQ ID NO: 4045635 - RNA, 19 nt, Molluscum contagiosum virus
gcucgcacuugccgggcga

SEQ ID NO: 4045636 - RNA, 22 nt, Molluscum contagiosum virus
gcucgcaggcggugggcgccgc

SEQ ID NO: 4045637 - RNA, 18 nt, Molluscum contagiosum virus
ugaguuucuggugccgcg

SEQ ID NO: 4045638 - RNA, 16 nt, Molluscum contagiosum virus
ugauccuugccaagcc

SEQ ID NO: 4045639 - RNA, 23 nt, Molluscum contagiosum virus
ugcaaagacgguacauauucccu

SEQ ID NO: 4045640 - RNA, 13 nt, Molluscum contagiosum virus
ugcaaagcgcggc

SEQ ID NO: 4045641 - RNA, 18 nt, Molluscum contagiosum virus
ugcaaauugaaaaaacau

SEQ ID NO: 4045642 - RNA, 19 nt, Molluscum contagiosum virus
ugcaagguuuacgccgugc

SEQ ID NO: 4045643 - RNA, 17 nt, Molluscum contagiosum virus
ugcaaguucgcugcugg

SEQ ID NO: 4045644 - RNA, 18 nt, Molluscum contagiosum virus
ugcacaccggcgcgcuga

SEQ ID NO: 4045645 - RNA, 22 nt, Molluscum contagiosum virus
ugcacagcacaggccccagcaa

SEQ ID NO: 4045646 - RNA, 18 nt, Molluscum contagiosum virus
ugcacaguucacggcgcu

SEQ ID NO: 4045647 - RNA, 22 nt, Molluscum contagiosum virus
ugcacaugcccgugcaccuccc

SEQ ID NO: 4045648 - RNA, 13 nt, Molluscum contagiosum virus
ugcacgagccggc

SEQ ID NO: 4045649 - RNA, 17 nt, Molluscum contagiosum virus
ugcacgcuguccaggcg

SEQ ID NO: 4045650 - RNA, 22 nt, Molluscum contagiosum virus
ugcacggcuaccgcgacggcgu

SEQ ID NO: 4045651 - RNA, 15 nt, Molluscum contagiosum virus
ugcacgucgacaagu

SEQ ID NO: 4045652 - RNA, 15 nt, Molluscum contagiosum virus
ugcacguggcgcaca

SEQ ID NO: 4045653 - RNA, 22 nt, Molluscum contagiosum virus
ugcacuacaaccauggcgcgcu

SEQ ID NO: 4045654 - RNA, 13 nt, Molluscum contagiosum virus
ugcacuacugcuc

SEQ ID NO: 4045655 - RNA, 14 nt, Molluscum contagiosum virus
ugcacuacugcucc

SEQ ID NO: 4045656 - RNA, 12 nt, Molluscum contagiosum virus
ugcacugcgcgg

SEQ ID NO: 4045657 - RNA, 18 nt, Molluscum contagiosum virus
ugcacugcgcggcgugcg

SEQ ID NO: 4045658 - RNA, 19 nt, Molluscum contagiosum virus
ugcacuucggacaccucac

SEQ ID NO: 4045659 - RNA, 21 nt, Molluscum contagiosum virus
ugcacuucggacaccucaccu

SEQ ID NO: 4045660 - RNA, 21 nt, Molluscum contagiosum virus
ugcagagcaaggcgagucaau

SEQ ID NO: 4045661 - RNA, 17 nt, Molluscum contagiosum virus
ugcagagcgugcugguc

SEQ ID NO: 4045662 - RNA, 15 nt, Molluscum contagiosum virus
ugcagaugaggcugc

SEQ ID NO: 4045663 - RNA, 18 nt, Molluscum contagiosum virus
ugcagcagguugaagcuc

SEQ ID NO: 4045664 - RNA, 17 nt, Molluscum contagiosum virus
ugcagccgcugcugcug

SEQ ID NO: 4045665 - RNA, 15 nt, Molluscum contagiosum virus
ugcagcgccgcgcgg

SEQ ID NO: 4045666 - RNA, 12 nt, Molluscum contagiosum virus
ugcagcgcgugc

SEQ ID NO: 4045667 - RNA, 15 nt, Molluscum contagiosum virus
ugcagcugcaggacc

SEQ ID NO: 4045668 - RNA, 21 nt, Molluscum contagiosum virus
ugcagcugcaggaccugcugg

SEQ ID NO: 4045669 - RNA, 13 nt, Molluscum contagiosum virus
ugcaggaaaggca

SEQ ID NO: 4045670 - RNA, 16 nt, Molluscum contagiosum virus
ugcaggaacgcgcgcu

SEQ ID NO: 4045671 - RNA, 14 nt, Molluscum contagiosum virus
ugcagggcgugcuu

SEQ ID NO: 4045672 - RNA, 18 nt, Molluscum contagiosum virus
ugcaggucgaggagggcg

SEQ ID NO: 4045673 - RNA, 14 nt, Molluscum contagiosum virus
ugcaguacggcgcg

SEQ ID NO: 4045674 - RNA, 15 nt, Molluscum contagiosum virus
ugcaguugagagcag

SEQ ID NO: 4045675 - RNA, 14 nt, Molluscum contagiosum virus
ugcaugcccagcau

SEQ ID NO: 4045676 - RNA, 15 nt, Molluscum contagiosum virus
ugcaugcggagcugg

SEQ ID NO: 4045677 - RNA, 19 nt, Molluscum contagiosum virus
ugcaugcggagcuggccga

SEQ ID NO: 4045678 - RNA, 20 nt, Molluscum contagiosum virus
ugccacggccgcgcgcgacu

SEQ ID NO: 4045679 - RNA, 21 nt, Molluscum contagiosum virus
ugccagauugccggcgcgcgc

SEQ ID NO: 4045680 - RNA, 17 nt, Molluscum contagiosum virus
ugccaggcggucuucca

SEQ ID NO: 4045681 - RNA, 12 nt, Molluscum contagiosum virus
ugcccacgcgca

SEQ ID NO: 4045682 - RNA, 14 nt, Molluscum contagiosum virus
ugcccagccugacg

SEQ ID NO: 4045683 - RNA, 18 nt, Molluscum contagiosum virus
ugcccccgagguggccaa

SEQ ID NO: 4045684 - RNA, 17 nt, Molluscum contagiosum virus
ugccccgcgcgugcagu

SEQ ID NO: 4045685 - RNA, 17 nt, Molluscum contagiosum virus
ugcccgccaagagcugg

SEQ ID NO: 4045686 - RNA, 14 nt, Molluscum contagiosum virus
ugcccgccugccgc

SEQ ID NO: 4045687 - RNA, 13 nt, Molluscum contagiosum virus
ugcccgcgccgca

SEQ ID NO: 4045688 - RNA, 14 nt, Molluscum contagiosum virus
ugcccgcgcgcugu

SEQ ID NO: 4045689 - RNA, 16 nt, Molluscum contagiosum virus
ugcccggacagagccc

SEQ ID NO: 4045690 - RNA, 14 nt, Molluscum contagiosum virus
ugcccggcagcgag

SEQ ID NO: 4045691 - RNA, 19 nt, Molluscum contagiosum virus
ugccgaggcgcugccgcgg

SEQ ID NO: 4045692 - RNA, 19 nt, Molluscum contagiosum virus
ugccgccgccgcgaggacc

SEQ ID NO: 4045693 - RNA, 14 nt, Molluscum contagiosum virus
ugccgccucggacg

SEQ ID NO: 4045694 - RNA, 20 nt, Molluscum contagiosum virus
ugccgccugcgcgcacccga

SEQ ID NO: 4045695 - RNA, 15 nt, Molluscum contagiosum virus
ugccgcgcgcgccgc

SEQ ID NO: 4045696 - RNA, 17 nt, Molluscum contagiosum virus
ugccgcgcgcugcucug

SEQ ID NO: 4045697 - RNA, 14 nt, Molluscum contagiosum virus
ugccgcggcagugg

SEQ ID NO: 4045698 - RNA, 12 nt, Molluscum contagiosum virus
ugccgcgugcuc

SEQ ID NO: 4045699 - RNA, 18 nt, Molluscum contagiosum virus
ugccgcugccugugccca

SEQ ID NO: 4045700 - RNA, 14 nt, Molluscum contagiosum virus
ugccgcugcgcugg

SEQ ID NO: 4045701 - RNA, 23 nt, Molluscum contagiosum virus
ugccgcugcgcuggaugcugcuc

SEQ ID NO: 4045702 - RNA, 13 nt, Molluscum contagiosum virus
ugccggcgcguga

SEQ ID NO: 4045703 - RNA, 16 nt, Molluscum contagiosum virus
ugccggcgcgugagcg

SEQ ID NO: 4045704 - RNA, 22 nt, Molluscum contagiosum virus
ugccgggcuugcucccucgcgc

SEQ ID NO: 4045705 - RNA, 17 nt, Molluscum contagiosum virus
ugccucugccagccgcu

SEQ ID NO: 4045706 - RNA, 19 nt, Molluscum contagiosum virus
ugccugcaagaggcgcugu

SEQ ID NO: 4045707 - RNA, 15 nt, Molluscum contagiosum virus
ugccugucucgcaag

SEQ ID NO: 4045708 - RNA, 21 nt, Molluscum contagiosum virus
ugccuuggcgcccgugccgcc

SEQ ID NO: 4045709 - RNA, 23 nt, Molluscum contagiosum virus
ugcgaacgcgcaagugugcgcau

SEQ ID NO: 4045710 - RNA, 18 nt, Molluscum contagiosum virus
ugcgagaacuggcgcagc

SEQ ID NO: 4045711 - RNA, 14 nt, Molluscum contagiosum virus
ugcgagcagcccgc

SEQ ID NO: 4045712 - RNA, 12 nt, Molluscum contagiosum virus
ugcgaggccugc

SEQ ID NO: 4045713 - RNA, 14 nt, Molluscum contagiosum virus
ugcgaggcgcgcac

SEQ ID NO: 4045714 - RNA, 16 nt, Molluscum contagiosum virus
ugcgaggcgcgcacgc

SEQ ID NO: 4045715 - RNA, 13 nt, Molluscum contagiosum virus
ugcgagucucugu

SEQ ID NO: 4045716 - RNA, 14 nt, Molluscum contagiosum virus
ugcgaguggcgcgc

SEQ ID NO: 4045717 - RNA, 21 nt, Molluscum contagiosum virus
ugcgcaaagcaacugcggacu

SEQ ID NO: 4045718 - RNA, 20 nt, Molluscum contagiosum virus
ugcgcaacgugcugcgccgc

SEQ ID NO: 4045719 - RNA, 15 nt, Molluscum contagiosum virus
ugcgcaccagcugca

SEQ ID NO: 4045720 - RNA, 17 nt, Molluscum contagiosum virus
ugcgcaccgcgggcugg

SEQ ID NO: 4045721 - RNA, 13 nt, Molluscum contagiosum virus
ugcgcacgcugac

SEQ ID NO: 4045722 - RNA, 15 nt, Molluscum contagiosum virus
ugcgcagcauccucg

SEQ ID NO: 4045723 - RNA, 22 nt, Molluscum contagiosum virus
ugcgcaguuuuuuuccgcaaga

SEQ ID NO: 4045724 - RNA, 13 nt, Molluscum contagiosum virus
ugcgcauggccac

SEQ ID NO: 4045725 - RNA, 18 nt, Molluscum contagiosum virus
ugcgccagcgccuguccg

SEQ ID NO: 4045726 - RNA, 19 nt, Molluscum contagiosum virus
ugcgccuucugccugcccg

SEQ ID NO: 4045727 - RNA, 22 nt, Molluscum contagiosum virus
ugcgcgaccgcaccgagcccgc

SEQ ID NO: 4045728 - RNA, 16 nt, Molluscum contagiosum virus
ugcgcgacgaggaggc

SEQ ID NO: 4045729 - RNA, 17 nt, Molluscum contagiosum virus
ugcgcgcccaggcgcgc

SEQ ID NO: 4045730 - RNA, 15 nt, Molluscum contagiosum virus
ugcgcgccgcgccgc

SEQ ID NO: 4045731 - RNA, 15 nt, Molluscum contagiosum virus
ugcgcgccgcgcugc

SEQ ID NO: 4045732 - RNA, 20 nt, Molluscum contagiosum virus
ugcgcgcgcucgcgcagguc

SEQ ID NO: 4045733 - RNA, 23 nt, Molluscum contagiosum virus
ugcgcgcgguaacgcgcgcgccu

SEQ ID NO: 4045734 - RNA, 13 nt, Molluscum contagiosum virus
ugcgcgcugcgcg

SEQ ID NO: 4045735 - RNA, 15 nt, Molluscum contagiosum virus
ugcgcggacagagcc

SEQ ID NO: 4045736 - RNA, 23 nt, Molluscum contagiosum virus
ugcgcggcccgcgggcugcaaga

SEQ ID NO: 4045737 - RNA, 21 nt, Molluscum contagiosum virus
ugcgcgucaugcgacugccag

SEQ ID NO: 4045738 - RNA, 14 nt, Molluscum contagiosum virus
ugcgcgucugugcg

SEQ ID NO: 4045739 - RNA, 15 nt, Molluscum contagiosum virus
ugcgcgugcugggcc

SEQ ID NO: 4045740 - RNA, 17 nt, Molluscum contagiosum virus
uugacgcccggugccug

SEQ ID NO: 4045741 - RNA, 23 nt, Molluscum contagiosum virus
uugcaccggcaacagcgcgacgc

SEQ ID NO: 4045742 - RNA, 11 nt, Molluscum contagiosum virus
uugcacgugcg

SEQ ID NO: 4045743 - RNA, 20 nt, Molluscum contagiosum virus
uugcccccgagguggccaag

SEQ ID NO: 4045744 - RNA, 16 nt, Molluscum contagiosum virus
uugccgcgcgcugcuc

SEQ ID NO: 4045745 - RNA, 12 nt, Molluscum contagiosum virus
uugcgaggcacc

SEQ ID NO: 4045746 - RNA, 24 nt, Molluscum contagiosum virus
uugcgcagagcuccccgcgcgcag

SEQ ID NO: 4045747 - RNA, 22 nt, Molluscum contagiosum virus
uugcgcgcggugcgggcgcgag

SEQ ID NO: 4045748 - RNA, 14 nt, Molluscum contagiosum virus
uugcgcguccgcaa

SEQ ID NO: 4045749 - RNA, 18 nt, Molluscum contagiosum virus
uugcgugcgccucgcagg

SEQ ID NO: 4045750 - RNA, 24 nt, Molluscum contagiosum virus
uugcgugggugaggagcucgacuc

SEQ ID NO: 4045751 - RNA, 20 nt, Molluscum contagiosum virus
uugcuauuaccugaccgacg

SEQ ID NO: 4045752 - RNA, 15 nt, Molluscum contagiosum virus
uugcucgcuugccgc

SEQ ID NO: 4045753 - RNA, 21 nt, Molluscum contagiosum virus
uugcucggggcugucgcugga

SEQ ID NO: 4045754 - RNA, 12 nt, Molluscum contagiosum virus
uugcucucuuuc

SEQ ID NO: 4045755 - RNA, 19 nt, Molluscum contagiosum virus
uuggcgcccgugccgccgg

SEQ ID NO: 4045756 - RNA, 11 nt, Molluscum contagiosum virus
uuggcgcgcaa

SEQ ID NO: 4045757 - RNA, 13 nt, Molluscum contagiosum virus
uuggcgcgccgcu

SEQ ID NO: 4045758 - RNA, 16 nt, Molluscum contagiosum virus
uuggcuaugaggaggc

SEQ ID NO: 4045759 - RNA, 14 nt, Molluscum contagiosum virus
uugggcacuuccug

SEQ ID NO: 4045760 - RNA, 16 nt, Molluscum contagiosum virus
uuggucaccacgaucu

SEQ ID NO: 4045761 - RNA, 19 nt, Molluscum contagiosum virus
uuguagcgguugaccagcu

SEQ ID NO: 4045762 - RNA, 21 nt, Molluscum contagiosum virus
uuguccucuuggccccucccg

SEQ ID NO: 4045763 - RNA, 13 nt, Molluscum contagiosum virus
uuguccugagccu

SEQ ID NO: 4045764 - RNA, 23 nt, Molluscum contagiosum virus
uugugcaauuccguccagugaaa

SEQ ID NO: 4045765 - RNA, 18 nt, Molluscum contagiosum virus
uuuccgcgaaguccuggg

SEQ ID NO: 4045766 - RNA, 22 nt, Molluscum contagiosum virus
uuuccugucaucaccccgcugg

SEQ ID NO: 4045767 - RNA, 20 nt, Molluscum contagiosum virus
uuucgccggaggaaggacag

SEQ ID NO: 4045768 - RNA, 21 nt, Molluscum contagiosum virus
uuugcgagcacuguacgcacg

SEQ ID NO: 4045769 - RNA, 17 nt, Molluscum contagiosum virus
ccgugggcagcuucugc

SEQ ID NO: 4045770 - RNA, 22 nt, Molluscum contagiosum virus
ccgugguacacguagaggaagu

SEQ ID NO: 4045771 - RNA, 15 nt, Molluscum contagiosum virus
ccguggugcgcgacc

SEQ ID NO: 4045772 - RNA, 19 nt, Molluscum contagiosum virus
ccguguccuacacgccgcu

SEQ ID NO: 4045773 - RNA, 16 nt, Molluscum contagiosum virus
ccgugucggcaccgcg

SEQ ID NO: 4045774 - RNA, 15 nt, Molluscum contagiosum virus
ccguucacgggcacg

SEQ ID NO: 4045775 - RNA, 21 nt, Molluscum contagiosum virus
ccuaccugcaggaggaccgcg

SEQ ID NO: 4045776 - RNA, 22 nt, Molluscum contagiosum virus
ccuacgcgcgcguaacagcgcg

SEQ ID NO: 4045777 - RNA, 20 nt, Molluscum contagiosum virus
ccuacguggcgucgcgccgc

SEQ ID NO: 4045778 - RNA, 19 nt, Molluscum contagiosum virus
ccuagacacgagcgcggca

SEQ ID NO: 4045779 - RNA, 13 nt, Molluscum contagiosum virus
ccuagcuccagcg

SEQ ID NO: 4045780 - RNA, 20 nt, Molluscum contagiosum virus
ccuaggcacuccgcgcaccg

SEQ ID NO: 4045781 - RNA, 20 nt, Molluscum contagiosum virus
ccuaucucaaagaacgcgcg

SEQ ID NO: 4045782 - RNA, 19 nt, Molluscum contagiosum virus
ccucaaggaggcgugcguu

SEQ ID NO: 4045783 - RNA, 15 nt, Molluscum contagiosum virus
ccucaccgcgcacau

SEQ ID NO: 4045784 - RNA, 16 nt, Molluscum contagiosum virus
ccucaccucugcgcgg

SEQ ID NO: 4045785 - RNA, 19 nt, Molluscum contagiosum virus
ccucagccgagcgccgcca

SEQ ID NO: 4045786 - RNA, 16 nt, Molluscum contagiosum virus
ccucaggggcucuccu

SEQ ID NO: 4045787 - RNA, 21 nt, Molluscum contagiosum virus
ccucgaagcgagagguugggg

SEQ ID NO: 4045788 - RNA, 14 nt, Molluscum contagiosum virus
ccucgaccugcacg

SEQ ID NO: 4045789 - RNA, 13 nt, Molluscum contagiosum virus
ccucgagagggag

SEQ ID NO: 4045790 - RNA, 13 nt, Molluscum contagiosum virus
ccucgagcacgcc

SEQ ID NO: 4045791 - RNA, 17 nt, Molluscum contagiosum virus
ccucgagcacgccucca

SEQ ID NO: 4045792 - RNA, 19 nt, Molluscum contagiosum virus
ccucgagcacgccuccaag

SEQ ID NO: 4045793 - RNA, 20 nt, Molluscum contagiosum virus
ccucgagcgccgugcaguug

SEQ ID NO: 4045794 - RNA, 22 nt, Molluscum contagiosum virus
ccucgcaagcugagcgcgcugc

SEQ ID NO: 4045795 - RNA, 19 nt, Molluscum contagiosum virus
ccucgcgagggcucguccu

SEQ ID NO: 4045796 - RNA, 15 nt, Molluscum contagiosum virus
ccucgcgcgccgccg

SEQ ID NO: 4045797 - RNA, 15 nt, Molluscum contagiosum virus
ccucgcggcucuggu

SEQ ID NO: 4045798 - RNA, 22 nt, Molluscum contagiosum virus
ccucgcgggaggcuccugccgu

SEQ ID NO: 4045799 - RNA, 21 nt, Molluscum contagiosum virus
ccucgcucgagggcgccgugc

SEQ ID NO: 4045800 - RNA, 13 nt, Molluscum contagiosum virus
ccucggccagagc

SEQ ID NO: 4045801 - RNA, 15 nt, Molluscum contagiosum virus
ccucggucaacggca

SEQ ID NO: 4045802 - RNA, 15 nt, Molluscum contagiosum virus
ccucgugcugggccu

SEQ ID NO: 4045803 - RNA, 21 nt, Molluscum contagiosum virus
ccucuccggucgcccuccgcc

SEQ ID NO: 4045804 - RNA, 13 nt, Molluscum contagiosum virus
ccucugccagccg

SEQ ID NO: 4045805 - RNA, 14 nt, Molluscum contagiosum virus
ccucugcgcggccc

SEQ ID NO: 4045806 - RNA, 22 nt, Molluscum contagiosum virus
ccucugcuucacgcugcucgug

SEQ ID NO: 4045807 - RNA, 19 nt, Molluscum contagiosum virus
ccucuuggcaaaggcaggg

SEQ ID NO: 4045808 - RNA, 19 nt, Molluscum contagiosum virus
ccugagauccacgcgugcu

SEQ ID NO: 4045809 - RNA, 14 nt, Molluscum contagiosum virus
ccugagcuucuuug

SEQ ID NO: 4045810 - RNA, 23 nt, Molluscum contagiosum virus
ccugaggaagcaagacccagcaa

SEQ ID NO: 4045811 - RNA, 13 nt, Molluscum contagiosum virus
ccugcaaacgcga

SEQ ID NO: 4045812 - RNA, 23 nt, Molluscum contagiosum virus
ccugcaaacgcgaaacuggacug

SEQ ID NO: 4045813 - RNA, 21 nt, Molluscum contagiosum virus
ccugcacaagcaggaguccgu

SEQ ID NO: 4045814 - RNA, 16 nt, Molluscum contagiosum virus
ccugcacgacccucuu

SEQ ID NO: 4045815 - RNA, 16 nt, Molluscum contagiosum virus
ccugcacgagccggcg

SEQ ID NO: 4045816 - RNA, 15 nt, Molluscum contagiosum virus
ccugcacuacugcuc

SEQ ID NO: 4045817 - RNA, 18 nt, Molluscum contagiosum virus
ccugcaggaaaggcaccc

SEQ ID NO: 4045818 - RNA, 15 nt, Molluscum contagiosum virus
ccugccacaccagcu

SEQ ID NO: 4045819 - RNA, 18 nt, Molluscum contagiosum virus
ccugccacaccagcuggc

SEQ ID NO: 4045820 - RNA, 17 nt, Molluscum contagiosum virus
ccugccagcagagcugc

SEQ ID NO: 4045821 - RNA, 18 nt, Molluscum contagiosum virus
ccugccgccugcaggcaa

SEQ ID NO: 4045822 - RNA, 13 nt, Molluscum contagiosum virus
ccugcgcaacgcg

SEQ ID NO: 4045823 - RNA, 22 nt, Molluscum contagiosum virus
ccugcgcaacgugcugcgccgc

SEQ ID NO: 4045824 - RNA, 19 nt, Molluscum contagiosum virus
ccugcgccauccacguggg

SEQ ID NO: 4045825 - RNA, 20 nt, Molluscum contagiosum virus
ccugcgcuuccucuacacca

SEQ ID NO: 4045826 - RNA, 20 nt, Molluscum contagiosum virus
ccugcucgggcugcgcggcg

SEQ ID NO: 4045827 - RNA, 18 nt, Molluscum contagiosum virus
ccugcucuccgcgggaag

SEQ ID NO: 4045828 - RNA, 20 nt, Molluscum contagiosum virus
ccugcugaagaaggagcccu

SEQ ID NO: 4045829 - RNA, 16 nt, Molluscum contagiosum virus
ccugcuggcgugcgua

SEQ ID NO: 4045830 - RNA, 17 nt, Molluscum contagiosum virus
ccugcuuccuccuccaa

SEQ ID NO: 4045831 - RNA, 13 nt, Molluscum contagiosum virus
ccugcuugcccgc

SEQ ID NO: 4045832 - RNA, 14 nt, Molluscum contagiosum virus
ccugcuugucugcc

SEQ ID NO: 4045833 - RNA, 18 nt, Molluscum contagiosum virus
ccuggaacucuacgccgc

SEQ ID NO: 4045834 - RNA, 19 nt, Molluscum contagiosum virus
ccuggagggcagugccaag

SEQ ID NO: 4045835 - RNA, 21 nt, Molluscum contagiosum virus
ccuggagggucacgcgcacau

SEQ ID NO: 4045836 - RNA, 14 nt, Molluscum contagiosum virus
ccuggcagccgagc

SEQ ID NO: 4045837 - RNA, 21 nt, Molluscum contagiosum virus
ccuggggaaccgcugcuucgu

SEQ ID NO: 4045838 - RNA, 22 nt, Molluscum contagiosum virus
ccugguacgcgcgcgcgcucac

SEQ ID NO: 4045839 - RNA, 14 nt, Molluscum contagiosum virus
ccugguaguccugc

SEQ ID NO: 4045840 - RNA, 21 nt, Molluscum contagiosum virus
ccuggugcugcgcgacaugcu

SEQ ID NO: 4045841 - RNA, 19 nt, Molluscum contagiosum virus
ccuggugugccagcggcgc

SEQ ID NO: 4045842 - RNA, 14 nt, Molluscum contagiosum virus
ccugguuugcgcuc

SEQ ID NO: 4045843 - RNA, 19 nt, Molluscum contagiosum virus
ccugucaagacgggcacgc

SEQ ID NO: 4045844 - RNA, 23 nt, Molluscum contagiosum virus
ccugucaucaccccgcugggccg

SEQ ID NO: 4045845 - RNA, 21 nt, Molluscum contagiosum virus
ccugucggcacaucucucagg

SEQ ID NO: 4045846 - RNA, 14 nt, Molluscum contagiosum virus
ccugucgugcaaug

SEQ ID NO: 4045847 - RNA, 16 nt, Molluscum contagiosum virus
ccugugcccuggaagc

SEQ ID NO: 4045848 - RNA, 17 nt, Molluscum contagiosum virus
ccugugccucuugugag

SEQ ID NO: 4045849 - RNA, 17 nt, Molluscum contagiosum virus
ccugugcuacgcgagca

SEQ ID NO: 4045850 - RNA, 23 nt, Molluscum contagiosum virus
ccugugcugugcagaacuucucg

SEQ ID NO: 4045851 - RNA, 19 nt, Molluscum contagiosum virus
ccuucaacgcgcgugcgua

SEQ ID NO: 4045852 - RNA, 22 nt, Molluscum contagiosum virus
ccuuccggagacaccagcuccg

SEQ ID NO: 4045853 - RNA, 23 nt, Molluscum contagiosum virus
ccuuccggagacaccagcuccgc

SEQ ID NO: 4045854 - RNA, 14 nt, Molluscum contagiosum virus
ccuucgcggagcgc

SEQ ID NO: 4045855 - RNA, 20 nt, Molluscum contagiosum virus
ccuucuucgugcugugccua

SEQ ID NO: 4045856 - RNA, 13 nt, Molluscum contagiosum virus
ccuugcagcgcag

SEQ ID NO: 4045857 - RNA, 15 nt, Molluscum contagiosum virus
ccuugucgagacagg

SEQ ID NO: 4045858 - RNA, 12 nt, Molluscum contagiosum virus
ccuuucuuccag

SEQ ID NO: 4045859 - RNA, 18 nt, Molluscum contagiosum virus
cgaacaaaaaacaacucu

SEQ ID NO: 4045860 - RNA, 13 nt, Molluscum contagiosum virus
cgaacaccuccug

SEQ ID NO: 4045861 - RNA, 21 nt, Molluscum contagiosum virus
cgaacaccuccugcuuugcac

SEQ ID NO: 4045862 - RNA, 16 nt, Molluscum contagiosum virus
cgaacagagcgccagc

SEQ ID NO: 4045863 - RNA, 17 nt, Molluscum contagiosum virus
cgaacgagaaaugcgca

SEQ ID NO: 4045864 - RNA, 22 nt, Molluscum contagiosum virus
cgaacgagaaaugcgcacacuu

SEQ ID NO: 4045865 - RNA, 23 nt, Molluscum contagiosum virus
cgaacgagagacacgcacacucg

SEQ ID NO: 4045866 - RNA, 21 nt, Molluscum contagiosum virus
cgaacgagggaugcacacacu

SEQ ID NO: 4045867 - RNA, 17 nt, Molluscum contagiosum virus
cgaacggaacacagugc

SEQ ID NO: 4045868 - RNA, 18 nt, Molluscum contagiosum virus
cgaacuccaggcgcaccu

SEQ ID NO: 4045869 - RNA, 14 nt, Molluscum contagiosum virus
cgaacugcccggcg

SEQ ID NO: 4045870 - RNA, 18 nt, Molluscum contagiosum virus
cgaagaaggggccgaagu

SEQ ID NO: 4045871 - RNA, 19 nt, Molluscum contagiosum virus
cgaagaccaccagcaccag

SEQ ID NO: 4045872 - RNA, 18 nt, Molluscum contagiosum virus
cucgagacccacaauggu

SEQ ID NO: 4045873 - RNA, 21 nt, Molluscum contagiosum virus
cucgagcgcgcgccugcuggc

SEQ ID NO: 4045874 - RNA, 22 nt, Molluscum contagiosum virus
cucgaugccaacagacuugucc

SEQ ID NO: 4045875 - RNA, 16 nt, Molluscum contagiosum virus
cucgaugggcuccagg

SEQ ID NO: 4045876 - RNA, 17 nt, Molluscum contagiosum virus
cucgcacacgugcacgu

SEQ ID NO: 4045877 - RNA, 21 nt, Molluscum contagiosum virus
cucgcagccuccgugcgccag

SEQ ID NO: 4045878 - RNA, 20 nt, Molluscum contagiosum virus
cucgcagcguuccaggaacg

SEQ ID NO: 4045879 - RNA, 19 nt, Molluscum contagiosum virus
cucgcaggcggugggcgcc

SEQ ID NO: 4045880 - RNA, 14 nt, Molluscum contagiosum virus
cucgcccagcucga

SEQ ID NO: 4045881 - RNA, 20 nt, Molluscum contagiosum virus
cucgcccgacuuuucgcgcc

SEQ ID NO: 4045882 - RNA, 14 nt, Molluscum contagiosum virus
cucgcccgcgcgcg

SEQ ID NO: 4045883 - RNA, 17 nt, Molluscum contagiosum virus
cucgcgacgugcgcgcu

SEQ ID NO: 4045884 - RNA, 15 nt, Molluscum contagiosum virus
cucgcgagugugcau

SEQ ID NO: 4045885 - RNA, 20 nt, Molluscum contagiosum virus
cucgcgcaauacugcgggcu

SEQ ID NO: 4045886 - RNA, 17 nt, Molluscum contagiosum virus
cucgcgcacgaccacgu

SEQ ID NO: 4045887 - RNA, 15 nt, Molluscum contagiosum virus
cucgcgcgacuggca

SEQ ID NO: 4045888 - RNA, 20 nt, Molluscum contagiosum virus
cucgcgcgcagcucgcacac

SEQ ID NO: 4045889 - RNA, 18 nt, Molluscum contagiosum virus
cucgcgcgccagcacgcg

SEQ ID NO: 4045890 - RNA, 17 nt, Molluscum contagiosum virus
cucgcgcucuacgccag

SEQ ID NO: 4045891 - RNA, 19 nt, Molluscum contagiosum virus
cucgcggaagaauuccuuc

SEQ ID NO: 4045892 - RNA, 15 nt, Molluscum contagiosum virus
cucgcggucaauguu

SEQ ID NO: 4045893 - RNA, 19 nt, Molluscum contagiosum virus
cucgcgugccgcggacgcc

SEQ ID NO: 4045894 - RNA, 23 nt, Molluscum contagiosum virus
cucgcugccuggugcacacacac

SEQ ID NO: 4045895 - RNA, 14 nt, Molluscum contagiosum virus
cucgcuuagccaac

SEQ ID NO: 4045896 - RNA, 19 nt, Molluscum contagiosum virus
cucggaaaauccgcgcccg

SEQ ID NO: 4045897 - RNA, 19 nt, Molluscum contagiosum virus
cucggagaagaacagcacg

SEQ ID NO: 4045898 - RNA, 21 nt, Molluscum contagiosum virus
cucggagaagaacagcacgaa

SEQ ID NO: 4045899 - RNA, 13 nt, Molluscum contagiosum virus
cucggaggcgcag

SEQ ID NO: 4045900 - RNA, 18 nt, Molluscum contagiosum virus
cucggaggcuugccccgc

SEQ ID NO: 4045901 - RNA, 19 nt, Molluscum contagiosum virus
cucggcugccgugcgggcg

SEQ ID NO: 4045902 - RNA, 13 nt, Molluscum contagiosum virus
cucgggcugcgcg

SEQ ID NO: 4045903 - RNA, 22 nt, Molluscum contagiosum virus
cucgggugcccggacagagccc

SEQ ID NO: 4045904 - RNA, 18 nt, Molluscum contagiosum virus
cucgguagcguggagcug

SEQ ID NO: 4045905 - RNA, 18 nt, Molluscum contagiosum virus
cucguacucguugccgug

SEQ ID NO: 4045906 - RNA, 17 nt, Molluscum contagiosum virus
cucgucgccgggccccu

SEQ ID NO: 4045907 - RNA, 15 nt, Molluscum contagiosum virus
cucgugcccgcacac

SEQ ID NO: 4045908 - RNA, 15 nt, Molluscum contagiosum virus
cucgugcugcucugc

SEQ ID NO: 4045909 - RNA, 17 nt, Molluscum contagiosum virus
cucgugcugggccugcc

SEQ ID NO: 4045910 - RNA, 17 nt, Molluscum contagiosum virus
cucgugguugcgcacgu

SEQ ID NO: 4045911 - RNA, 13 nt, Molluscum contagiosum virus
cucuacgagacuc

SEQ ID NO: 4045912 - RNA, 19 nt, Molluscum contagiosum virus
cucuacgccgcgcaccugg

SEQ ID NO: 4045913 - RNA, 16 nt, Molluscum contagiosum virus
cucucgagcucacagg

SEQ ID NO: 4045914 - RNA, 22 nt, Molluscum contagiosum virus
cucucggcguccgcagcggcgc

SEQ ID NO: 4045915 - RNA, 23 nt, Molluscum contagiosum virus
cucugcacgggcacgccgugggc

SEQ ID NO: 4045916 - RNA, 19 nt, Molluscum contagiosum virus
cucugccugcaaggagguc

SEQ ID NO: 4045917 - RNA, 23 nt, Molluscum contagiosum virus
cucugcgaucgcgggcacgagca

SEQ ID NO: 4045918 - RNA, 15 nt, Molluscum contagiosum virus
cucugcguguacgac

SEQ ID NO: 4045919 - RNA, 23 nt, Molluscum contagiosum virus
cucugcucgugcccgcacacgca

SEQ ID NO: 4045920 - RNA, 19 nt, Molluscum contagiosum virus
cucuggagcggccacucuc

SEQ ID NO: 4045921 - RNA, 18 nt, Molluscum contagiosum virus
cucuggcuucuccaccuu

SEQ ID NO: 4045922 - RNA, 17 nt, Molluscum contagiosum virus
cucugggcgucgcacag

SEQ ID NO: 4045923 - RNA, 20 nt, Molluscum contagiosum virus
cucuggucgagaugcucuac

SEQ ID NO: 4045924 - RNA, 18 nt, Molluscum contagiosum virus
cucuuccccgcgggccgc

SEQ ID NO: 4045925 - RNA, 13 nt, Molluscum contagiosum virus
cugaaccugggcg

SEQ ID NO: 4045926 - RNA, 16 nt, Molluscum contagiosum virus
cugaagaaggagcccu

SEQ ID NO: 4045927 - RNA, 17 nt, Molluscum contagiosum virus
cugaauaaucucgagca

SEQ ID NO: 4045928 - RNA, 18 nt, Molluscum contagiosum virus
cugacacgcucuucggca

SEQ ID NO: 4045929 - RNA, 19 nt, Molluscum contagiosum virus
cugaccgcgggcacgggca

SEQ ID NO: 4045930 - RNA, 18 nt, Molluscum contagiosum virus
cugacgccgauguccugc

SEQ ID NO: 4045931 - RNA, 23 nt, Molluscum contagiosum virus
cugagcgugucgaagcgcgcagc

SEQ ID NO: 4045932 - RNA, 23 nt, Molluscum contagiosum virus
cugagcuagugccgagcucgccu

SEQ ID NO: 4045933 - RNA, 17 nt, Molluscum contagiosum virus
cugaggaagcaagaccc

SEQ ID NO: 4045934 - RNA, 20 nt, Molluscum contagiosum virus
cugcacgacguacgagugcu

SEQ ID NO: 4045935 - RNA, 14 nt, Molluscum contagiosum virus
cugcacgagcugcu

SEQ ID NO: 4045936 - RNA, 21 nt, Molluscum contagiosum virus
cugcacgucgaagaccaccag

SEQ ID NO: 4045937 - RNA, 15 nt, Molluscum contagiosum virus
cugcacuacugcucc

SEQ ID NO: 4045938 - RNA, 16 nt, Molluscum contagiosum virus
cugcacugcagcgagc

SEQ ID NO: 4045939 - RNA, 17 nt, Molluscum contagiosum virus
cugcacuucggacaccu

SEQ ID NO: 4045940 - RNA, 18 nt, Molluscum contagiosum virus
cugcagaaacagccgugc

SEQ ID NO: 4045941 - RNA, 21 nt, Molluscum contagiosum virus
cugcagcagcuccagcauggc

SEQ ID NO: 4045942 - RNA, 23 nt, Molluscum contagiosum virus
cugcagcugcgcgagccgcugca

SEQ ID NO: 4045943 - RNA, 22 nt, Molluscum contagiosum virus
cugcaggaaaggcacccgcagg

SEQ ID NO: 4045944 - RNA, 16 nt, Molluscum contagiosum virus
cugcaggaccugcugg

SEQ ID NO: 4045945 - RNA, 20 nt, Molluscum contagiosum virus
cugcaggaccugcugguggu

SEQ ID NO: 4045946 - RNA, 16 nt, Molluscum contagiosum virus
cugcauacacuuccug

SEQ ID NO: 4045947 - RNA, 15 nt, Molluscum contagiosum virus
cugcauccuggggaa

SEQ ID NO: 4045948 - RNA, 16 nt, Molluscum contagiosum virus
cugccacggcugcaag

SEQ ID NO: 4045949 - RNA, 14 nt, Molluscum contagiosum virus
cugccagcagagcu

SEQ ID NO: 4045950 - RNA, 22 nt, Molluscum contagiosum virus
cugccagcucgacacugugcug

SEQ ID NO: 4045951 - RNA, 13 nt, Molluscum contagiosum virus
cugccauggcagc

SEQ ID NO: 4045952 - RNA, 16 nt, Molluscum contagiosum virus
cugccauggcagcucg

SEQ ID NO: 4045953 - RNA, 13 nt, Molluscum contagiosum virus
cugccccucgggg

SEQ ID NO: 4045954 - RNA, 19 nt, Molluscum contagiosum virus
cugcccgaguuucggaaga

SEQ ID NO: 4045955 - RNA, 15 nt, Molluscum contagiosum virus
cugcccucgggagaa

SEQ ID NO: 4045956 - RNA, 13 nt, Molluscum contagiosum virus
cugccgcagagcc

SEQ ID NO: 4045957 - RNA, 15 nt, Molluscum contagiosum virus
cugccgcagagccgc

SEQ ID NO: 4045958 - RNA, 18 nt, Molluscum contagiosum virus
cugccgcuugaaggacgc

SEQ ID NO: 4045959 - RNA, 17 nt, Molluscum contagiosum virus
cugccgucgcgcgcugu

SEQ ID NO: 4045960 - RNA, 15 nt, Molluscum contagiosum virus
cugccgugcgggcgc

SEQ ID NO: 4045961 - RNA, 18 nt, Molluscum contagiosum virus
cugccuagguccacauuu

SEQ ID NO: 4045962 - RNA, 23 nt, Molluscum contagiosum virus
cugccucguggaacaaagaggca

SEQ ID NO: 4045963 - RNA, 20 nt, Molluscum contagiosum virus
cugcgcaacgcgggccaggc

SEQ ID NO: 4045964 - RNA, 13 nt, Molluscum contagiosum virus
cugcgcaagcgcu

SEQ ID NO: 4045965 - RNA, 19 nt, Molluscum contagiosum virus
cugcgcaagcucagccucu

SEQ ID NO: 4045966 - RNA, 12 nt, Molluscum contagiosum virus
cugcgcaauaag

SEQ ID NO: 4045967 - RNA, 19 nt, Molluscum contagiosum virus
cugcgcaauaaggcggugg

SEQ ID NO: 4045968 - RNA, 17 nt, Molluscum contagiosum virus
cugcgcacgggcgcgcg

SEQ ID NO: 4045969 - RNA, 19 nt, Molluscum contagiosum virus
cugcgcaucugcgagcgcg

SEQ ID NO: 4045970 - RNA, 20 nt, Molluscum contagiosum virus
cugcgccaagguggccaagc

SEQ ID NO: 4045971 - RNA, 21 nt, Molluscum contagiosum virus
cugcgcccgcaaaccuuggcc

SEQ ID NO: 4045972 - RNA, 20 nt, Molluscum contagiosum virus
cugcgcgacaugcugcccgc

SEQ ID NO: 4045973 - RNA, 18 nt, Molluscum contagiosum virus
cugcgcgagcagcugcug

SEQ ID NO: 4045974 - RNA, 12 nt, Molluscum contagiosum virus
cuuagccacugu

SEQ ID NO: 4045975 - RNA, 23 nt, Molluscum contagiosum virus
cuuagcuuccgucugcugcucga

SEQ ID NO: 4045976 - RNA, 14 nt, Molluscum contagiosum virus
cuuaugcauccuga

SEQ ID NO: 4045977 - RNA, 18 nt, Molluscum contagiosum virus
cuucaaguuccuggagcc

SEQ ID NO: 4045978 - RNA, 16 nt, Molluscum contagiosum virus
cuucaggaacaaggcc

SEQ ID NO: 4045979 - RNA, 13 nt, Molluscum contagiosum virus
cuuccagcacugc

SEQ ID NO: 4045980 - RNA, 18 nt, Molluscum contagiosum virus
cuuccccgcacaagggca

SEQ ID NO: 4045981 - RNA, 17 nt, Molluscum contagiosum virus
cuuccccguccuugcuc

SEQ ID NO: 4045982 - RNA, 20 nt, Molluscum contagiosum virus
cuucccgcugagcgcagcac

SEQ ID NO: 4045983 - RNA, 21 nt, Molluscum contagiosum virus
cuucccgcugagcgcagcaca

SEQ ID NO: 4045984 - RNA, 22 nt, Molluscum contagiosum virus
cuucccguuccugggcaacgcg

SEQ ID NO: 4045985 - RNA, 19 nt, Molluscum contagiosum virus
cuuccgcaccuggucgagc

SEQ ID NO: 4045986 - RNA, 21 nt, Molluscum contagiosum virus
cuuccggagacaccagcuccg

SEQ ID NO: 4045987 - RNA, 17 nt, Molluscum contagiosum virus
cuuccggggcgggcggc

SEQ ID NO: 4045988 - RNA, 20 nt, Molluscum contagiosum virus
cuuccucuacaccagcugga

SEQ ID NO: 4045989 - RNA, 14 nt, Molluscum contagiosum virus
cuucgaccucugcu

SEQ ID NO: 4045990 - RNA, 22 nt, Molluscum contagiosum virus
cuucgacuuacggacgcccucc

SEQ ID NO: 4045991 - RNA, 19 nt, Molluscum contagiosum virus
cuucgcgggauacgggcgc

SEQ ID NO: 4045992 - RNA, 20 nt, Molluscum contagiosum virus
cuucgcguuccggcggcugg

SEQ ID NO: 4045993 - RNA, 22 nt, Molluscum contagiosum virus
cuucggcgcaacgcuggccgcc

SEQ ID NO: 4045994 - RNA, 21 nt, Molluscum contagiosum virus
cuucgguuucuaugcccagcc

SEQ ID NO: 4045995 - RNA, 17 nt, Molluscum contagiosum virus
cuucgucaagcagcgcg

SEQ ID NO: 4045996 - RNA, 20 nt, Molluscum contagiosum virus
cuucgucaagcagcgcgcca

SEQ ID NO: 4045997 - RNA, 15 nt, Molluscum contagiosum virus
cuucgugcgcggaga

SEQ ID NO: 4045998 - RNA, 16 nt, Molluscum contagiosum virus
cuucgugcugugccua

SEQ ID NO: 4045999 - RNA, 14 nt, Molluscum contagiosum virus
cuucguggacgagc

SEQ ID NO: 4046000 - RNA, 13 nt, Molluscum contagiosum virus
cuucucgucgaga

SEQ ID NO: 4046001 - RNA, 21 nt, Molluscum contagiosum virus
cuucuggcaaacgcacugugu

SEQ ID NO: 4046002 - RNA, 14 nt, Molluscum contagiosum virus
cuucuuggagcccu

SEQ ID NO: 4046003 - RNA, 19 nt, Molluscum contagiosum virus
cuugcucacgcugcgcucg

SEQ ID NO: 4046004 - RNA, 18 nt, Molluscum contagiosum virus
cuugcucggacacacgca

SEQ ID NO: 4046005 - RNA, 18 nt, Molluscum contagiosum virus
cuugcuggcgcgcggaga

SEQ ID NO: 4046006 - RNA, 15 nt, Molluscum contagiosum virus
cuuggcagcaacugc

SEQ ID NO: 4046007 - RNA, 20 nt, Molluscum contagiosum virus
cuuggccaagcuuugcacgc

SEQ ID NO: 4046008 - RNA, 13 nt, Molluscum contagiosum virus
cuuggcgagcgcu

SEQ ID NO: 4046009 - RNA, 17 nt, Molluscum contagiosum virus
cuuggcgcccgugccgc

SEQ ID NO: 4046010 - RNA, 15 nt, Molluscum contagiosum virus
cuuggcgcccuuccu

SEQ ID NO: 4046011 - RNA, 16 nt, Molluscum contagiosum virus
cuuggcgcgccgcugc

SEQ ID NO: 4046012 - RNA, 20 nt, Molluscum contagiosum virus
cuuggcgcgccgcugcccgc

SEQ ID NO: 4046013 - RNA, 23 nt, Molluscum contagiosum virus
cuuggcggcgcggcuagcaccgc

SEQ ID NO: 4046014 - RNA, 20 nt, Molluscum contagiosum virus
cuugggcacugcuacgagcc

SEQ ID NO: 4046015 - RNA, 13 nt, Molluscum contagiosum virus
cuugggcucuggc

SEQ ID NO: 4046016 - RNA, 20 nt, Molluscum contagiosum virus
cuuucaggggucugucguuu

SEQ ID NO: 4046017 - RNA, 13 nt, Molluscum contagiosum virus
cuuuccccggcgu

SEQ ID NO: 4046018 - RNA, 15 nt, Molluscum contagiosum virus
cuuucccgggcacug

SEQ ID NO: 4046019 - RNA, 14 nt, Molluscum contagiosum virus
cuuuccgugcuuga

SEQ ID NO: 4046020 - RNA, 14 nt, Molluscum contagiosum virus
cuuucuccaugucg

SEQ ID NO: 4046021 - RNA, 23 nt, Molluscum contagiosum virus
cuuugaggaacuagugcugcugg

SEQ ID NO: 4046022 - RNA, 22 nt, Molluscum contagiosum virus
cuuuuccgcgaaguccugggcg

SEQ ID NO: 4046023 - RNA, 22 nt, Molluscum contagiosum virus
cuuuucgcgccgcgggcacaug

SEQ ID NO: 4046024 - RNA, 23 nt, Molluscum contagiosum virus
cuuuucgggcaaacgccagugcu

SEQ ID NO: 4046025 - RNA, 22 nt, Molluscum contagiosum virus
cuuuugcgcgagagcuacagca

SEQ ID NO: 4046026 - RNA, 16 nt, Molluscum contagiosum virus
cuuuuugcggcgccgc

SEQ ID NO: 4046027 - RNA, 15 nt, Molluscum contagiosum virus
gaaaaaucccccgcc

SEQ ID NO: 4046028 - RNA, 17 nt, Molluscum contagiosum virus
gaaaacuuguggcgcaa

SEQ ID NO: 4046029 - RNA, 23 nt, Molluscum contagiosum virus
gaaaaggcacaccccgggaacga

SEQ ID NO: 4046030 - RNA, 20 nt, Molluscum contagiosum virus
gaaaaggcugauccugcgcg

SEQ ID NO: 4046031 - RNA, 22 nt, Molluscum contagiosum virus
gaaaauuuaaucaaggauuuaa

SEQ ID NO: 4046032 - RNA, 13 nt, Molluscum contagiosum virus
gaaacaagcgugu

SEQ ID NO: 4046033 - RNA, 22 nt, Molluscum contagiosum virus
gaaacaguaggacauguccggc

SEQ ID NO: 4046034 - RNA, 21 nt, Molluscum contagiosum virus
gaaacgcacagccccugcugc

SEQ ID NO: 4046035 - RNA, 21 nt, Molluscum contagiosum virus
gaaacucuccgacgugcugcg

SEQ ID NO: 4046036 - RNA, 20 nt, Molluscum contagiosum virus
gaaacugcugcccgcgcagc

SEQ ID NO: 4046037 - RNA, 19 nt, Molluscum contagiosum virus
gaaacuggacugagccgca

SEQ ID NO: 4046038 - RNA, 21 nt, Molluscum contagiosum virus
gaaaggcaccccgaaggaaag

SEQ ID NO: 4046039 - RNA, 18 nt, Molluscum contagiosum virus
gaaaggcaccccgcagga

SEQ ID NO: 4046040 - RNA, 22 nt, Molluscum contagiosum virus
gaaaggccccccgcaacaagga

SEQ ID NO: 4046041 - RNA, 16 nt, Molluscum contagiosum virus
gaacaagaagcgcuuc

SEQ ID NO: 4046042 - RNA, 22 nt, Molluscum contagiosum virus
gaacaaugcugcaucuagccuc

SEQ ID NO: 4046043 - RNA, 20 nt, Molluscum contagiosum virus
gaacaccccgagcuggugau

SEQ ID NO: 4046044 - RNA, 17 nt, Molluscum contagiosum virus
gaacacgggggcugccg

SEQ ID NO: 4046045 - RNA, 14 nt, Molluscum contagiosum virus
gaacaucagcacgg

SEQ ID NO: 4046046 - RNA, 21 nt, Molluscum contagiosum virus
gaaccccucgugcugggccug

SEQ ID NO: 4046047 - RNA, 23 nt, Molluscum contagiosum virus
gaaccugugcgcgguggugcugg

SEQ ID NO: 4046048 - RNA, 16 nt, Molluscum contagiosum virus
gaacgaggagggcagc

SEQ ID NO: 4046049 - RNA, 16 nt, Molluscum contagiosum virus
gaacgaggcugcugcc

SEQ ID NO: 4046050 - RNA, 17 nt, Molluscum contagiosum virus
gaacgcgcaagugugcg

SEQ ID NO: 4046051 - RNA, 19 nt, Molluscum contagiosum virus
gaacgcgcaagugugcgca

SEQ ID NO: 4046052 - RNA, 11 nt, Molluscum contagiosum virus
gaacgcgcgcu

SEQ ID NO: 4046053 - RNA, 23 nt, Molluscum contagiosum virus
gaacgcgcugcgccacugccacg

SEQ ID NO: 4046054 - RNA, 18 nt, Molluscum contagiosum virus
gaacgugacgcgccucga

SEQ ID NO: 4046055 - RNA, 16 nt, Molluscum contagiosum virus
gaacguuggcccgcaa

SEQ ID NO: 4046056 - RNA, 20 nt, Molluscum contagiosum virus
gaacucggcuucugcugcac

SEQ ID NO: 4046057 - RNA, 14 nt, Molluscum contagiosum virus
gaacugcugggcgu

SEQ ID NO: 4046058 - RNA, 14 nt, Molluscum contagiosum virus
gaagaccaccagca

SEQ ID NO: 4046059 - RNA, 17 nt, Molluscum contagiosum virus
gaagaccaccagcacca

SEQ ID NO: 4046060 - RNA, 16 nt, Molluscum contagiosum virus
gaagacggcgcgcgcg

SEQ ID NO: 4046061 - RNA, 16 nt, Molluscum contagiosum virus
gaagacgucggggcgc

SEQ ID NO: 4046062 - RNA, 22 nt, Molluscum contagiosum virus
gaagacgugcugcgcgcccagg

SEQ ID NO: 4046063 - RNA, 20 nt, Molluscum contagiosum virus
gaagacguuuacguccacgc

SEQ ID NO: 4046064 - RNA, 18 nt, Molluscum contagiosum virus
gaagacuugccgucucgc

SEQ ID NO: 4046065 - RNA, 17 nt, Molluscum contagiosum virus
gaagagggucgugcagg

SEQ ID NO: 4046066 - RNA, 12 nt, Molluscum contagiosum virus
gaagaggucucu

SEQ ID NO: 4046067 - RNA, 19 nt, Molluscum contagiosum virus
gaagcaacgacaaggaaag

SEQ ID NO: 4046068 - RNA, 18 nt, Molluscum contagiosum virus
gaagcaaugcgcaaggcc

SEQ ID NO: 4046069 - RNA, 23 nt, Molluscum contagiosum virus
gaagcaggcgccaucgcgcguga

SEQ ID NO: 4046070 - RNA, 14 nt, Molluscum contagiosum virus
gaagcagugcucgg

SEQ ID NO: 4046071 - RNA, 17 nt, Molluscum contagiosum virus
gaagcagugcucgggag

SEQ ID NO: 4046072 - RNA, 17 nt, Molluscum contagiosum virus
gaagcccgucggggcag

SEQ ID NO: 4046073 - RNA, 17 nt, Molluscum contagiosum virus
gaagcccugagaaggag

SEQ ID NO: 4046074 - RNA, 16 nt, Molluscum contagiosum virus
gaagcucucgcgcgca

SEQ ID NO: 4046075 - RNA, 16 nt, Molluscum contagiosum virus
gaagcuugcucagcag

SEQ ID NO: 4046076 - RNA, 23 nt, Molluscum contagiosum virus
gacgugcuccgaguccagcuucu

SEQ ID NO: 4046077 - RNA, 13 nt, Molluscum contagiosum virus
gacgugcugcugc

SEQ ID NO: 4046078 - RNA, 13 nt, Molluscum contagiosum virus
gacgugggcgacg

SEQ ID NO: 4046079 - RNA, 14 nt, Molluscum contagiosum virus
gacuaccugcugcu

SEQ ID NO: 4046080 - RNA, 15 nt, Molluscum contagiosum virus
gacuacgcacuggcg

SEQ ID NO: 4046081 - RNA, 18 nt, Molluscum contagiosum virus
gacuacgcgcugcggcgc

SEQ ID NO: 4046082 - RNA, 22 nt, Molluscum contagiosum virus
gacuccaaggaggucccuagcc

SEQ ID NO: 4046083 - RNA, 17 nt, Molluscum contagiosum virus
gacucgagccccagaag

SEQ ID NO: 4046084 - RNA, 17 nt, Molluscum contagiosum virus
gacucgcgucugcaagg

SEQ ID NO: 4046085 - RNA, 23 nt, Molluscum contagiosum virus
gacucgcugccagagauccgccc

SEQ ID NO: 4046086 - RNA, 17 nt, Molluscum contagiosum virus
gacuggccucguccugg

SEQ ID NO: 4046087 - RNA, 22 nt, Molluscum contagiosum virus
gacuucccgacgucuuccccaa

SEQ ID NO: 4046088 - RNA, 23 nt, Molluscum contagiosum virus
gacuuugacuacuacguggugcg

SEQ ID NO: 4046089 - RNA, 18 nt, Molluscum contagiosum virus
gagaaagaagugugccug

SEQ ID NO: 4046090 - RNA, 18 nt, Molluscum contagiosum virus
gagaacuacaaaacugaa

SEQ ID NO: 4046091 - RNA, 18 nt, Molluscum contagiosum virus
gagaagcaaugcgcaagg

SEQ ID NO: 4046092 - RNA, 20 nt, Molluscum contagiosum virus
gagaagcaaugcgcaaggcc

SEQ ID NO: 4046093 - RNA, 18 nt, Molluscum contagiosum virus
gagaccugucgugcaaug

SEQ ID NO: 4046094 - RNA, 17 nt, Molluscum contagiosum virus
gagacgcggccgcggag

SEQ ID NO: 4046095 - RNA, 23 nt, Molluscum contagiosum virus
gagacgcugccggcaacgcugcc

SEQ ID NO: 4046096 - RNA, 15 nt, Molluscum contagiosum virus
gagacgcugcugcac

SEQ ID NO: 4046097 - RNA, 22 nt, Molluscum contagiosum virus
gagacugcuacgucgcggcgca

SEQ ID NO: 4046098 - RNA, 14 nt, Molluscum contagiosum virus
gagacuucuugcac

SEQ ID NO: 4046099 - RNA, 15 nt, Molluscum contagiosum virus
gagaggagugaaggg

SEQ ID NO: 4046100 - RNA, 14 nt, Molluscum contagiosum virus
gagagugcgggagc

SEQ ID NO: 4046101 - RNA, 17 nt, Molluscum contagiosum virus
gagaguucugcgcccgc

SEQ ID NO: 4046102 - RNA, 20 nt, Molluscum contagiosum virus
gagaguucugcgcccgcgga

SEQ ID NO: 4046103 - RNA, 20 nt, Molluscum contagiosum virus
gagauccacgcgugcugcgc

SEQ ID NO: 4046104 - RNA, 17 nt, Molluscum contagiosum virus
gagaucgacaagaucaa

SEQ ID NO: 4046105 - RNA, 21 nt, Molluscum contagiosum virus
gagauggaggcccaggccaug

SEQ ID NO: 4046106 - RNA, 16 nt, Molluscum contagiosum virus
gagauggucacgcgca

SEQ ID NO: 4046107 - RNA, 15 nt, Molluscum contagiosum virus
gagauugagcucuuu

SEQ ID NO: 4046108 - RNA, 17 nt, Molluscum contagiosum virus
gagcaaggccuggccuu

SEQ ID NO: 4046109 - RNA, 22 nt, Molluscum contagiosum virus
gagcaaugcgagcaaggcgcgc

SEQ ID NO: 4046110 - RNA, 21 nt, Molluscum contagiosum virus
gagcaauggcggccugcccug

SEQ ID NO: 4046111 - RNA, 17 nt, Molluscum contagiosum virus
gagcaccugucgcgcga

SEQ ID NO: 4046112 - RNA, 23 nt, Molluscum contagiosum virus
gagcacgacuacggcgagcccau

SEQ ID NO: 4046113 - RNA, 16 nt, Molluscum contagiosum virus
gagcacggacagcacc

SEQ ID NO: 4046114 - RNA, 17 nt, Molluscum contagiosum virus
gagcacggacagcaccc

SEQ ID NO: 4046115 - RNA, 22 nt, Molluscum contagiosum virus
gagcacguuccaaaagacagag

SEQ ID NO: 4046116 - RNA, 15 nt, Molluscum contagiosum virus
gagcagaaggugcgc

SEQ ID NO: 4046117 - RNA, 17 nt, Molluscum contagiosum virus
gagcagcgcuugcgcgc

SEQ ID NO: 4046118 - RNA, 14 nt, Molluscum contagiosum virus
gagcagcugcugcg

SEQ ID NO: 4046119 - RNA, 15 nt, Molluscum contagiosum virus
gagcaggagaacuac

SEQ ID NO: 4046120 - RNA, 21 nt, Molluscum contagiosum virus
gagcaggcgcagcgcggccug

SEQ ID NO: 4046121 - RNA, 21 nt, Molluscum contagiosum virus
gagcaguccgccucgagcacg

SEQ ID NO: 4046122 - RNA, 17 nt, Molluscum contagiosum virus
gagcagugccgccgcgc

SEQ ID NO: 4046123 - RNA, 22 nt, Molluscum contagiosum virus
gagcaguucgcgcgccugcgcg

SEQ ID NO: 4046124 - RNA, 13 nt, Molluscum contagiosum virus
gagccagccaggc

SEQ ID NO: 4046125 - RNA, 13 nt, Molluscum contagiosum virus
gagccagcgcgga

SEQ ID NO: 4046126 - RNA, 19 nt, Molluscum contagiosum virus
gagcccggaucagccccgc

SEQ ID NO: 4046127 - RNA, 19 nt, Molluscum contagiosum virus
gagcccgggcccgagcccg

SEQ ID NO: 4046128 - RNA, 21 nt, Molluscum contagiosum virus
gagcccgggcccgugcccgag

SEQ ID NO: 4046129 - RNA, 18 nt, Molluscum contagiosum virus
gagccgggggaacacgcu

SEQ ID NO: 4046130 - RNA, 15 nt, Molluscum contagiosum virus
gagcgcagcugccgg

SEQ ID NO: 4046131 - RNA, 14 nt, Molluscum contagiosum virus
gagcgcaugccggg

SEQ ID NO: 4046132 - RNA, 15 nt, Molluscum contagiosum virus
gagcgcaugccgggg

SEQ ID NO: 4046133 - RNA, 19 nt, Molluscum contagiosum virus
gagcgcaugccggggauga

SEQ ID NO: 4046134 - RNA, 18 nt, Molluscum contagiosum virus
gagcgcaugcgcgccgcg

SEQ ID NO: 4046135 - RNA, 19 nt, Molluscum contagiosum virus
gagcgccgccagcuccgcg

SEQ ID NO: 4046136 - RNA, 15 nt, Molluscum contagiosum virus
gagcgccgcgugcgc

SEQ ID NO: 4046137 - RNA, 18 nt, Molluscum contagiosum virus
gagcgcgcccccgagcug

SEQ ID NO: 4046138 - RNA, 12 nt, Molluscum contagiosum virus
gagcgcgcgcac

SEQ ID NO: 4046139 - RNA, 20 nt, Molluscum contagiosum virus
gagcgcguccaugagcaucu

SEQ ID NO: 4046140 - RNA, 20 nt, Molluscum contagiosum virus
gagcggcauggaaagcuucu

SEQ ID NO: 4046141 - RNA, 17 nt, Molluscum contagiosum virus
gagcucgaaaaaguucu

SEQ ID NO: 4046142 - RNA, 23 nt, Molluscum contagiosum virus
gagcucgccaugugcgaagacga

SEQ ID NO: 4046143 - RNA, 19 nt, Molluscum contagiosum virus
gagcucgcgcgccagcacg

SEQ ID NO: 4046144 - RNA, 15 nt, Molluscum contagiosum virus
gagcucguggacagc

SEQ ID NO: 4046145 - RNA, 17 nt, Molluscum contagiosum virus
gagcucuuccccgcggg

SEQ ID NO: 4046146 - RNA, 14 nt, Molluscum contagiosum virus
gagcugcgcgcgcu

SEQ ID NO: 4046147 - RNA, 20 nt, Molluscum contagiosum virus
gagcugcuaacaacaugagg

SEQ ID NO: 4046148 - RNA, 13 nt, Molluscum contagiosum virus
gagcugcugcccg

SEQ ID NO: 4046149 - RNA, 17 nt, Molluscum contagiosum virus
gagcugcuucgcgacca

SEQ ID NO: 4046150 - RNA, 18 nt, Molluscum contagiosum virus
gagcuggagcgagugcgc

SEQ ID NO: 4046151 - RNA, 15 nt, Molluscum contagiosum virus
gagcuggcugggcac

SEQ ID NO: 4046152 - RNA, 20 nt, Molluscum contagiosum virus
gagcugggauaacaggcgug

SEQ ID NO: 4046153 - RNA, 21 nt, Molluscum contagiosum virus
gagcugugcgagccaguuucu

SEQ ID NO: 4046154 - RNA, 15 nt, Molluscum contagiosum virus
gagcuuaauuuugca

SEQ ID NO: 4046155 - RNA, 18 nt, Molluscum contagiosum virus
gaggaaaagcacgcggcc

SEQ ID NO: 4046156 - RNA, 19 nt, Molluscum contagiosum virus
gaggaaagcgcacacuugc

SEQ ID NO: 4046157 - RNA, 15 nt, Molluscum contagiosum virus
gaggaacuagugcug

SEQ ID NO: 4046158 - RNA, 22 nt, Molluscum contagiosum virus
gaggacgagccccgcgccggcg

SEQ ID NO: 4046159 - RNA, 18 nt, Molluscum contagiosum virus
gaggacuaccuggcggcg

SEQ ID NO: 4046160 - RNA, 19 nt, Molluscum contagiosum virus
gaggacuaccuggcggcgc

SEQ ID NO: 4046161 - RNA, 21 nt, Molluscum contagiosum virus
gaggacuaccuggcggcgcug

SEQ ID NO: 4046162 - RNA, 15 nt, Molluscum contagiosum virus
gaggagaaaguaaau

SEQ ID NO: 4046163 - RNA, 16 nt, Molluscum contagiosum virus
gaggagugaagggugu

SEQ ID NO: 4046164 - RNA, 20 nt, Molluscum contagiosum virus
gaggcccaggccauggagcg

SEQ ID NO: 4046165 - RNA, 20 nt, Molluscum contagiosum virus
gaggccggccgugcagagca

SEQ ID NO: 4046166 - RNA, 20 nt, Molluscum contagiosum virus
gaggccuacgugcugcgcac

SEQ ID NO: 4046167 - RNA, 19 nt, Molluscum contagiosum virus
gaggcgcuagugcagauga

SEQ ID NO: 4046168 - RNA, 14 nt, Molluscum contagiosum virus
gaggcgcugccgcg

SEQ ID NO: 4046169 - RNA, 19 nt, Molluscum contagiosum virus
gaggcggagcugcccgcga

SEQ ID NO: 4046170 - RNA, 21 nt, Molluscum contagiosum virus
gaggcguacuccguggugcgc

SEQ ID NO: 4046171 - RNA, 18 nt, Molluscum contagiosum virus
gaggcguccugcgggagc

SEQ ID NO: 4046172 - RNA, 17 nt, Molluscum contagiosum virus
gaggcucgagcgcgcgc

SEQ ID NO: 4046173 - RNA, 16 nt, Molluscum contagiosum virus
gaggcucucgagcacu

SEQ ID NO: 4046174 - RNA, 14 nt, Molluscum contagiosum virus
gagggagccucgcu

SEQ ID NO: 4046175 - RNA, 16 nt, Molluscum contagiosum virus
gagggaugcacacacu

SEQ ID NO: 4046176 - RNA, 14 nt, Molluscum contagiosum virus
gagggucgugcagg

SEQ ID NO: 4046177 - RNA, 14 nt, Molluscum contagiosum virus
gagguacugccgcc

SEQ ID NO: 4046178 - RNA, 14 nt, Molluscum contagiosum virus
gcaagcgcaccuuu

SEQ ID NO: 4046179 - RNA, 22 nt, Molluscum contagiosum virus
gcaagcgggcuucgccgccgga

SEQ ID NO: 4046180 - RNA, 14 nt, Molluscum contagiosum virus
gcaagcucccgcug

SEQ ID NO: 4046181 - RNA, 19 nt, Molluscum contagiosum virus
gcaagcugagcgcgcugcg

SEQ ID NO: 4046182 - RNA, 18 nt, Molluscum contagiosum virus
gcaagcuucgggccgcug

SEQ ID NO: 4046183 - RNA, 17 nt, Molluscum contagiosum virus
gcaaggcaugcgcgcag

SEQ ID NO: 4046184 - RNA, 11 nt, Molluscum contagiosum virus
gcaaggcccac

SEQ ID NO: 4046185 - RNA, 22 nt, Molluscum contagiosum virus
gcaaggccguccccggaaagca

SEQ ID NO: 4046186 - RNA, 13 nt, Molluscum contagiosum virus
gcaaggcgcgcgc

SEQ ID NO: 4046187 - RNA, 22 nt, Molluscum contagiosum virus
gcaagggccugcgggcggcaca

SEQ ID NO: 4046188 - RNA, 18 nt, Molluscum contagiosum virus
gcaaggugugcgcgcugc

SEQ ID NO: 4046189 - RNA, 19 nt, Molluscum contagiosum virus
gcaagucaccgcuccgcag

SEQ ID NO: 4046190 - RNA, 16 nt, Molluscum contagiosum virus
gcaagucgcgcgcugc

SEQ ID NO: 4046191 - RNA, 20 nt, Molluscum contagiosum virus
gcaagugggcgucgaccugg

SEQ ID NO: 4046192 - RNA, 18 nt, Molluscum contagiosum virus
gcaaguucgcugcuggca

SEQ ID NO: 4046193 - RNA, 15 nt, Molluscum contagiosum virus
gcaauagcgcccgua

SEQ ID NO: 4046194 - RNA, 21 nt, Molluscum contagiosum virus
gcaauccugguacgcgcgcgc

SEQ ID NO: 4046195 - RNA, 20 nt, Molluscum contagiosum virus
gcaaucgcgugcuugcugcg

SEQ ID NO: 4046196 - RNA, 16 nt, Molluscum contagiosum virus
gcaaugcagugcacca

SEQ ID NO: 4046197 - RNA, 16 nt, Molluscum contagiosum virus
gcaaugcgcaaggccg

SEQ ID NO: 4046198 - RNA, 15 nt, Molluscum contagiosum virus
gcaauugcugggcac

SEQ ID NO: 4046199 - RNA, 23 nt, Molluscum contagiosum virus
gcacaacgggcucgugcuggagc

SEQ ID NO: 4046200 - RNA, 21 nt, Molluscum contagiosum virus
gcacacacuugcacgcgcacg

SEQ ID NO: 4046201 - RNA, 13 nt, Molluscum contagiosum virus
gcacaccgagcgc

SEQ ID NO: 4046202 - RNA, 18 nt, Molluscum contagiosum virus
gcacaccgucgcguggug

SEQ ID NO: 4046203 - RNA, 17 nt, Molluscum contagiosum virus
gcacacgaaucgcucgc

SEQ ID NO: 4046204 - RNA, 19 nt, Molluscum contagiosum virus
gcacacgacgacggcugcu

SEQ ID NO: 4046205 - RNA, 15 nt, Molluscum contagiosum virus
gcacacgagugcccg

SEQ ID NO: 4046206 - RNA, 16 nt, Molluscum contagiosum virus
gcacacgagugcccgc

SEQ ID NO: 4046207 - RNA, 14 nt, Molluscum contagiosum virus
gcacacgcaccgcc

SEQ ID NO: 4046208 - RNA, 17 nt, Molluscum contagiosum virus
gcacacgcgcgcgcagg

SEQ ID NO: 4046209 - RNA, 19 nt, Molluscum contagiosum virus
gcacacgcgcgcgugcugc

SEQ ID NO: 4046210 - RNA, 19 nt, Molluscum contagiosum virus
gcacacgugcacguccugc

SEQ ID NO: 4046211 - RNA, 16 nt, Molluscum contagiosum virus
gcacacuccucggcgc

SEQ ID NO: 4046212 - RNA, 23 nt, Molluscum contagiosum virus
gcacacuugcgcguccacaaagg

SEQ ID NO: 4046213 - RNA, 15 nt, Molluscum contagiosum virus
gcacagccccugcug

SEQ ID NO: 4046214 - RNA, 20 nt, Molluscum contagiosum virus
gcacagccccugcugcucgc

SEQ ID NO: 4046215 - RNA, 17 nt, Molluscum contagiosum virus
gcacaggguuccgcgcc

SEQ ID NO: 4046216 - RNA, 22 nt, Molluscum contagiosum virus
gcgugcgcgccaggugcgaagg

SEQ ID NO: 4046217 - RNA, 19 nt, Molluscum contagiosum virus
gcgugcgcgugccucugcc

SEQ ID NO: 4046218 - RNA, 18 nt, Molluscum contagiosum virus
gcgugcgcuggcgcgcgc

SEQ ID NO: 4046219 - RNA, 14 nt, Molluscum contagiosum virus
gcgugcggcgcacc

SEQ ID NO: 4046220 - RNA, 21 nt, Molluscum contagiosum virus
gcgugcucgguagcguggagc

SEQ ID NO: 4046221 - RNA, 13 nt, Molluscum contagiosum virus
gcgugcucggugu

SEQ ID NO: 4046222 - RNA, 13 nt, Molluscum contagiosum virus
gcgugcugggccc

SEQ ID NO: 4046223 - RNA, 14 nt, Molluscum contagiosum virus
gcgugcugggcccc

SEQ ID NO: 4046224 - RNA, 17 nt, Molluscum contagiosum virus
gcguggagcgcgcggac

SEQ ID NO: 4046225 - RNA, 19 nt, Molluscum contagiosum virus
gcguggcgcgcgagcugcu

SEQ ID NO: 4046226 - RNA, 19 nt, Molluscum contagiosum virus
gcguggugcuuacugcggg

SEQ ID NO: 4046227 - RNA, 18 nt, Molluscum contagiosum virus
gcgugguguccacgcgcg

SEQ ID NO: 4046228 - RNA, 22 nt, Molluscum contagiosum virus
gcguguaucaugcacaugcgcu

SEQ ID NO: 4046229 - RNA, 23 nt, Molluscum contagiosum virus
gcgugucgcggagcaacgcgacc

SEQ ID NO: 4046230 - RNA, 16 nt, Molluscum contagiosum virus
gcguucgcagugcccg

SEQ ID NO: 4046231 - RNA, 19 nt, Molluscum contagiosum virus
gcguuggucuugugacccg

SEQ ID NO: 4046232 - RNA, 16 nt, Molluscum contagiosum virus
gcuacaccgagaucau

SEQ ID NO: 4046233 - RNA, 23 nt, Molluscum contagiosum virus
gcuaccacgagcacugccugccg

SEQ ID NO: 4046234 - RNA, 15 nt, Molluscum contagiosum virus
gcuaccgcgcgcgca

SEQ ID NO: 4046235 - RNA, 14 nt, Molluscum contagiosum virus
gcuaccugaagcug

SEQ ID NO: 4046236 - RNA, 17 nt, Molluscum contagiosum virus
gcuaccugguggagcac

SEQ ID NO: 4046237 - RNA, 22 nt, Molluscum contagiosum virus
gcuacgaggccuacgugcugcg

SEQ ID NO: 4046238 - RNA, 13 nt, Molluscum contagiosum virus
gcuacguggcgcg

SEQ ID NO: 4046239 - RNA, 20 nt, Molluscum contagiosum virus
gcuacguuccgcgcggggac

SEQ ID NO: 4046240 - RNA, 13 nt, Molluscum contagiosum virus
gcuacuggccgcg

SEQ ID NO: 4046241 - RNA, 14 nt, Molluscum contagiosum virus
gcuacuugcuggcg

SEQ ID NO: 4046242 - RNA, 19 nt, Molluscum contagiosum virus
gcuagagaaccugugcgcg

SEQ ID NO: 4046243 - RNA, 18 nt, Molluscum contagiosum virus
gcuagcgugugccgccgc

SEQ ID NO: 4046244 - RNA, 15 nt, Molluscum contagiosum virus
gcuagcucugcgcgc

SEQ ID NO: 4046245 - RNA, 17 nt, Molluscum contagiosum virus
gcuagcucuggcagccc

SEQ ID NO: 4046246 - RNA, 19 nt, Molluscum contagiosum virus
gcuagcucuggcagcccgu

SEQ ID NO: 4046247 - RNA, 14 nt, Molluscum contagiosum virus
gcuagcugcgugcg

SEQ ID NO: 4046248 - RNA, 19 nt, Molluscum contagiosum virus
gcuaggauccugcucaaga

SEQ ID NO: 4046249 - RNA, 15 nt, Molluscum contagiosum virus
gcuaggggugccgcu

SEQ ID NO: 4046250 - RNA, 19 nt, Molluscum contagiosum virus
gcuaggguccaccugcgac

SEQ ID NO: 4046251 - RNA, 12 nt, Molluscum contagiosum virus
gcuaguccgcgu

SEQ ID NO: 4046252 - RNA, 17 nt, Molluscum contagiosum virus
gcuagugccgagcucgc

SEQ ID NO: 4046253 - RNA, 15 nt, Molluscum contagiosum virus
gcuaguggcgcucgc

SEQ ID NO: 4046254 - RNA, 13 nt, Molluscum contagiosum virus
gcucaacgugggc

SEQ ID NO: 4046255 - RNA, 17 nt, Molluscum contagiosum virus
gcucaagacgcugcugg

SEQ ID NO: 4046256 - RNA, 18 nt, Molluscum contagiosum virus
gcucaagacgcugcuggc

SEQ ID NO: 4046257 - RNA, 20 nt, Molluscum contagiosum virus
gcucaaggacuaccagcucu

SEQ ID NO: 4046258 - RNA, 12 nt, Molluscum contagiosum virus
gcucaccgccga

SEQ ID NO: 4046259 - RNA, 21 nt, Molluscum contagiosum virus
gcucaccgcgcagaagccaac

SEQ ID NO: 4046260 - RNA, 17 nt, Molluscum contagiosum virus
gcucacgcugcccgcgc

SEQ ID NO: 4046261 - RNA, 17 nt, Molluscum contagiosum virus
gcucagccucuacucca

SEQ ID NO: 4046262 - RNA, 13 nt, Molluscum contagiosum virus
gcucagcgccgcg

SEQ ID NO: 4046263 - RNA, 12 nt, Molluscum contagiosum virus
gcucaggccagc

SEQ ID NO: 4046264 - RNA, 14 nt, Molluscum contagiosum virus
gcucaggccagcau

SEQ ID NO: 4046265 - RNA, 18 nt, Molluscum contagiosum virus
gcucauacuccugcuggc

SEQ ID NO: 4046266 - RNA, 21 nt, Molluscum contagiosum virus
gcucauagcccaugcgcagug

SEQ ID NO: 4046267 - RNA, 12 nt, Molluscum contagiosum virus
gcucaugcgcgg

SEQ ID NO: 4046268 - RNA, 21 nt, Molluscum contagiosum virus
gcuccacgcgcagcuucucug

SEQ ID NO: 4046269 - RNA, 17 nt, Molluscum contagiosum virus
gcuccagagccgcgugc

SEQ ID NO: 4046270 - RNA, 15 nt, Molluscum contagiosum virus
gcuccagggcucaag

SEQ ID NO: 4046271 - RNA, 16 nt, Molluscum contagiosum virus
gcuccgacgcgguggu

SEQ ID NO: 4046272 - RNA, 14 nt, Molluscum contagiosum virus
gcuccgaguccagc

SEQ ID NO: 4046273 - RNA, 16 nt, Molluscum contagiosum virus
gcuccgccaacgcgga

SEQ ID NO: 4046274 - RNA, 21 nt, Molluscum contagiosum virus
gcuccgccaacgcggacgcgc

SEQ ID NO: 4046275 - RNA, 19 nt, Molluscum contagiosum virus
gcuccgccgggaauaccgg

SEQ ID NO: 4046276 - RNA, 14 nt, Molluscum contagiosum virus
gcuccgcggaggcc

SEQ ID NO: 4046277 - RNA, 23 nt, Molluscum contagiosum virus
gcuccgcuggaccccgagcugcg

SEQ ID NO: 4046278 - RNA, 23 nt, Molluscum contagiosum virus
gcuccggcuuagcuggcgcccgu

SEQ ID NO: 4046279 - RNA, 21 nt, Molluscum contagiosum virus
gcuccggcuuuauuuccggcu

SEQ ID NO: 4046280 - RNA, 12 nt, Molluscum contagiosum virus
gcuccucuucag

SEQ ID NO: 4046281 - RNA, 13 nt, Molluscum contagiosum virus
gcuccuucuucag

SEQ ID NO: 4046282 - RNA, 22 nt, Molluscum contagiosum virus
gcucgaagccuucgcagagacc

SEQ ID NO: 4046283 - RNA, 20 nt, Molluscum contagiosum virus
gcucgacacugugcuggcgc

SEQ ID NO: 4046284 - RNA, 23 nt, Molluscum contagiosum virus
gcucgagcgcgcgccugcuggcg

SEQ ID NO: 4046285 - RNA, 13 nt, Molluscum contagiosum virus
gcucgaggcgccg

SEQ ID NO: 4046286 - RNA, 16 nt, Molluscum contagiosum virus
gcucgcacggcgacuc

SEQ ID NO: 4046287 - RNA, 14 nt, Molluscum contagiosum virus
gcucgccuuucccc

SEQ ID NO: 4046288 - RNA, 18 nt, Molluscum contagiosum virus
gcucgcgacgugcgcgcu

SEQ ID NO: 4046289 - RNA, 22 nt, Molluscum contagiosum virus
gcucgcgagcguuucugccgga

SEQ ID NO: 4046290 - RNA, 23 nt, Molluscum contagiosum virus
gcucgcgcaauacugcgggcugu

SEQ ID NO: 4046291 - RNA, 18 nt, Molluscum contagiosum virus
gcucgcgcaucugccgcg

SEQ ID NO: 4046292 - RNA, 12 nt, Molluscum contagiosum virus
gcucgcgccgcc

SEQ ID NO: 4046293 - RNA, 13 nt, Molluscum contagiosum virus
gcucgcgcgcaag

SEQ ID NO: 4046294 - RNA, 17 nt, Molluscum contagiosum virus
gcucgcgcgcacgcgca

SEQ ID NO: 4046295 - RNA, 15 nt, Molluscum contagiosum virus
gcucgcgcgcagcuc

SEQ ID NO: 4046296 - RNA, 23 nt, Molluscum contagiosum virus
gcucgcgcgcaugcucgcgcucu

SEQ ID NO: 4046297 - RNA, 17 nt, Molluscum contagiosum virus
gcucgcgcgcgcacgcc

SEQ ID NO: 4046298 - RNA, 15 nt, Molluscum contagiosum virus
gcucgcgcgugcucg

SEQ ID NO: 4046299 - RNA, 20 nt, Molluscum contagiosum virus
gcucgcggcuaggacuagca

SEQ ID NO: 4046300 - RNA, 19 nt, Molluscum contagiosum virus
gcucgcggcucggcucuug

SEQ ID NO: 4046301 - RNA, 13 nt, Molluscum contagiosum virus
gcucgcgugcgug

SEQ ID NO: 4046302 - RNA, 16 nt, Molluscum contagiosum virus
gcucggaaagagcgcg

SEQ ID NO: 4046303 - RNA, 17 nt, Molluscum contagiosum virus
gcucggaggcuugcccc

SEQ ID NO: 4046304 - RNA, 17 nt, Molluscum contagiosum virus
gcucggagucggagaaa

SEQ ID NO: 4046305 - RNA, 16 nt, Molluscum contagiosum virus
gcucggcacugcuggc

SEQ ID NO: 4046306 - RNA, 17 nt, Molluscum contagiosum virus
gcucgggaagcacguag

SEQ ID NO: 4046307 - RNA, 15 nt, Molluscum contagiosum virus
gcucgguagccaggc

SEQ ID NO: 4046308 - RNA, 13 nt, Molluscum contagiosum virus
gcucguccagcug

SEQ ID NO: 4046309 - RNA, 13 nt, Molluscum contagiosum virus
gcucguccccgug

SEQ ID NO: 4046310 - RNA, 18 nt, Molluscum contagiosum virus
gcucguccccgugcacga

SEQ ID NO: 4046311 - RNA, 21 nt, Molluscum contagiosum virus
gcucgugcucuuggcguucgc

SEQ ID NO: 4046312 - RNA, 13 nt, Molluscum contagiosum virus
gcucgugcuggag

SEQ ID NO: 4046313 - RNA, 20 nt, Molluscum contagiosum virus
gcucgugguugcgcacguug

SEQ ID NO: 4046314 - RNA, 17 nt, Molluscum contagiosum virus
gcucuacgccagcgacg

SEQ ID NO: 4046315 - RNA, 22 nt, Molluscum contagiosum virus
gcucuacggcgugcugugccug

SEQ ID NO: 4046316 - RNA, 13 nt, Molluscum contagiosum virus
gcucucagagcau

SEQ ID NO: 4046317 - RNA, 14 nt, Molluscum contagiosum virus
gcucucgagcacuu

SEQ ID NO: 4046318 - RNA, 20 nt, Molluscum contagiosum virus
gcucugauuacauccugccc

SEQ ID NO: 4046319 - RNA, 14 nt, Molluscum contagiosum virus
gcuugggcacugcu

SEQ ID NO: 4046320 - RNA, 16 nt, Molluscum contagiosum virus
gcuuugucgcgaacgc

SEQ ID NO: 4046321 - RNA, 18 nt, Molluscum contagiosum virus
gcuuuuguuacucucaga

SEQ ID NO: 4046322 - RNA, 21 nt, Molluscum contagiosum virus
ggaaaacgcccgagcgcgugu

SEQ ID NO: 4046323 - RNA, 15 nt, Molluscum contagiosum virus
ggaaaaggcacaccc

SEQ ID NO: 4046324 - RNA, 22 nt, Molluscum contagiosum virus
ggaaaauccgcgcccgcgcggc

SEQ ID NO: 4046325 - RNA, 23 nt, Molluscum contagiosum virus
ggaaagauauacaccaggcgcgu

SEQ ID NO: 4046326 - RNA, 12 nt, Molluscum contagiosum virus
ggaaagcgcaca

SEQ ID NO: 4046327 - RNA, 11 nt, Molluscum contagiosum virus
ggaaaggcacc

SEQ ID NO: 4046328 - RNA, 16 nt, Molluscum contagiosum virus
ggaaaggcacccacca

SEQ ID NO: 4046329 - RNA, 15 nt, Molluscum contagiosum virus
ggaacaaagaggcaa

SEQ ID NO: 4046330 - RNA, 24 nt, Molluscum contagiosum virus
ggaacaucugcaacucgcgcugca

SEQ ID NO: 4046331 - RNA, 16 nt, Molluscum contagiosum virus
ggaacccagaaagaag

SEQ ID NO: 4046332 - RNA, 19 nt, Molluscum contagiosum virus
ggaacggcgacuuguagug

SEQ ID NO: 4046333 - RNA, 16 nt, Molluscum contagiosum virus
ggaacuagugcugcug

SEQ ID NO: 4046334 - RNA, 17 nt, Molluscum contagiosum virus
ggaacucgaggcucugu

SEQ ID NO: 4046335 - RNA, 14 nt, Molluscum contagiosum virus
ggaacugacugcug

SEQ ID NO: 4046336 - RNA, 12 nt, Molluscum contagiosum virus
ggaagcgcgugc

SEQ ID NO: 4046337 - RNA, 12 nt, Molluscum contagiosum virus
ggaagcugcacg

SEQ ID NO: 4046338 - RNA, 16 nt, Molluscum contagiosum virus
ggaaggcgaccagcug

SEQ ID NO: 4046339 - RNA, 15 nt, Molluscum contagiosum virus
ggaaggggugauggc

SEQ ID NO: 4046340 - RNA, 14 nt, Molluscum contagiosum virus
ggaagucguggccg

SEQ ID NO: 4046341 - RNA, 14 nt, Molluscum contagiosum virus
ggaagugcgagccg

SEQ ID NO: 4046342 - RNA, 16 nt, Molluscum contagiosum virus
ggaauugugcugcugu

SEQ ID NO: 4046343 - RNA, 17 nt, Molluscum contagiosum virus
ggacaacucauagcgcc

SEQ ID NO: 4046344 - RNA, 21 nt, Molluscum contagiosum virus
ggacagagcccgcggcgcacg

SEQ ID NO: 4046345 - RNA, 12 nt, Molluscum contagiosum virus
ggacagcaaaca

SEQ ID NO: 4046346 - RNA, 23 nt, Molluscum contagiosum virus
ggacagccaugaggacagcuugc

SEQ ID NO: 4046347 - RNA, 15 nt, Molluscum contagiosum virus
ggacagcucagcagg

SEQ ID NO: 4046348 - RNA, 17 nt, Molluscum contagiosum virus
ggacagcuugcugcugu

SEQ ID NO: 4046349 - RNA, 23 nt, Molluscum contagiosum virus
ggaccgcgcgaacgaggagggca

SEQ ID NO: 4046350 - RNA, 20 nt, Molluscum contagiosum virus
ggaccucaaggaggcgugcg

SEQ ID NO: 4046351 - RNA, 20 nt, Molluscum contagiosum virus
ggaccucuuucucgcgccgu

SEQ ID NO: 4046352 - RNA, 12 nt, Molluscum contagiosum virus
ggaccugcgcca

SEQ ID NO: 4046353 - RNA, 19 nt, Molluscum contagiosum virus
ggaccugcugguggugcug

SEQ ID NO: 4046354 - RNA, 18 nt, Molluscum contagiosum virus
ggacgaugguggcgcugc

SEQ ID NO: 4046355 - RNA, 15 nt, Molluscum contagiosum virus
ggacgcccuccucga

SEQ ID NO: 4046356 - RNA, 13 nt, Molluscum contagiosum virus
ggacgcgcggagc

SEQ ID NO: 4046357 - RNA, 21 nt, Molluscum contagiosum virus
ggacgcgugcaagcccagcag

SEQ ID NO: 4046358 - RNA, 15 nt, Molluscum contagiosum virus
ggacgcuugcuagca

SEQ ID NO: 4046359 - RNA, 14 nt, Molluscum contagiosum virus
ggacggcgugcgcc

SEQ ID NO: 4046360 - RNA, 13 nt, Molluscum contagiosum virus
ggacgugcugcug

SEQ ID NO: 4046361 - RNA, 15 nt, Molluscum contagiosum virus
ggacuuccgcgcgcu

SEQ ID NO: 4046362 - RNA, 20 nt, Molluscum contagiosum virus
ggagaacaugcucgccagca

SEQ ID NO: 4046363 - RNA, 20 nt, Molluscum contagiosum virus
ggagaccggcgucggcaaga

SEQ ID NO: 4046364 - RNA, 18 nt, Molluscum contagiosum virus
ggagacgucguggauggc

SEQ ID NO: 4046365 - RNA, 15 nt, Molluscum contagiosum virus
ggagaucgccgcgca

SEQ ID NO: 4046366 - RNA, 15 nt, Molluscum contagiosum virus
ggagcaacgcgaccu

SEQ ID NO: 4046367 - RNA, 18 nt, Molluscum contagiosum virus
ggagcacuuccgcgcgcu

SEQ ID NO: 4046368 - RNA, 18 nt, Molluscum contagiosum virus
ggagcagacguacgagca

SEQ ID NO: 4046369 - RNA, 14 nt, Molluscum contagiosum virus
ggagccgcugcugc

SEQ ID NO: 4046370 - RNA, 18 nt, Molluscum contagiosum virus
ggagcgcacgaagcggcg

SEQ ID NO: 4046371 - RNA, 18 nt, Molluscum contagiosum virus
ggagcgcuucuagcucgc

SEQ ID NO: 4046372 - RNA, 17 nt, Molluscum contagiosum virus
ggagcggccacucuccc

SEQ ID NO: 4046373 - RNA, 20 nt, Molluscum contagiosum virus
ggagcguccacgacgagccu

SEQ ID NO: 4046374 - RNA, 15 nt, Molluscum contagiosum virus
ggagcuccgugcugc

SEQ ID NO: 4046375 - RNA, 15 nt, Molluscum contagiosum virus
ggagcugcgcgcgcu

SEQ ID NO: 4046376 - RNA, 14 nt, Molluscum contagiosum virus
ggagcuggagcgag

SEQ ID NO: 4046377 - RNA, 17 nt, Molluscum contagiosum virus
ggaggaccgcgagcgca

SEQ ID NO: 4046378 - RNA, 12 nt, Molluscum contagiosum virus
ggaggacggcgc

SEQ ID NO: 4046379 - RNA, 11 nt, Molluscum contagiosum virus
ggaggcagcgc

SEQ ID NO: 4046380 - RNA, 15 nt, Molluscum contagiosum virus
ggaggcggcacugcu

SEQ ID NO: 4046381 - RNA, 16 nt, Molluscum contagiosum virus
ggaggcguccugcggg

SEQ ID NO: 4046382 - RNA, 20 nt, Molluscum contagiosum virus
ggaggcgugcguuccgggcc

SEQ ID NO: 4046383 - RNA, 14 nt, Molluscum contagiosum virus
ggagggucacgcgc

SEQ ID NO: 4046384 - RNA, 22 nt, Molluscum contagiosum virus
ggagggugcacgcgggcgccgg

SEQ ID NO: 4046385 - RNA, 20 nt, Molluscum contagiosum virus
ggagguacugccgccaggaa

SEQ ID NO: 4046386 - RNA, 19 nt, Molluscum contagiosum virus
ggagguaguaguacggcac

SEQ ID NO: 4046387 - RNA, 22 nt, Molluscum contagiosum virus
ggaggucugcuuugucugcagg

SEQ ID NO: 4046388 - RNA, 18 nt, Molluscum contagiosum virus
ggagucacgaccgaccca

SEQ ID NO: 4046389 - RNA, 12 nt, Molluscum contagiosum virus
ggaucaccacug

SEQ ID NO: 4046390 - RNA, 20 nt, Molluscum contagiosum virus
ggaucacgaugugcgcgcga

SEQ ID NO: 4046391 - RNA, 17 nt, Molluscum contagiosum virus
ggaucagccccgcgcca

SEQ ID NO: 4046392 - RNA, 21 nt, Molluscum contagiosum virus
ggaugaacaccauccugcgcu

SEQ ID NO: 4046393 - RNA, 15 nt, Molluscum contagiosum virus
ggaugaacgcgcugc

SEQ ID NO: 4046394 - RNA, 19 nt, Molluscum contagiosum virus
ggaugccacgcagcuggcg

SEQ ID NO: 4046395 - RNA, 14 nt, Molluscum contagiosum virus
ggaugccugccagc

SEQ ID NO: 4046396 - RNA, 12 nt, Molluscum contagiosum virus
ggaugcgcacac

SEQ ID NO: 4046397 - RNA, 18 nt, Molluscum contagiosum virus
ggcaaaagggcucugcca

SEQ ID NO: 4046398 - RNA, 17 nt, Molluscum contagiosum virus
ggcaaccgcgacgagca

SEQ ID NO: 4046399 - RNA, 21 nt, Molluscum contagiosum virus
ggcaacgcugccgcuggcgcu

SEQ ID NO: 4046400 - RNA, 22 nt, Molluscum contagiosum virus
ggcaacugccugcgcuagugaa

SEQ ID NO: 4046401 - RNA, 17 nt, Molluscum contagiosum virus
ggcaagcgcgcucgggc

SEQ ID NO: 4046402 - RNA, 20 nt, Molluscum contagiosum virus
ggcaagcuucgggccgcugc

SEQ ID NO: 4046403 - RNA, 19 nt, Molluscum contagiosum virus
ggcaaggcguaagagcgug

SEQ ID NO: 4046404 - RNA, 15 nt, Molluscum contagiosum virus
ggcaaucgcgugcuu

SEQ ID NO: 4046405 - RNA, 13 nt, Molluscum contagiosum virus
ggcaaucugucca

SEQ ID NO: 4046406 - RNA, 13 nt, Molluscum contagiosum virus
ggcaaugggcacg

SEQ ID NO: 4046407 - RNA, 20 nt, Molluscum contagiosum virus
ggcacaccccgggaacgagg

SEQ ID NO: 4046408 - RNA, 22 nt, Molluscum contagiosum virus
ggcacaccccuguaacaaggaa

SEQ ID NO: 4046409 - RNA, 18 nt, Molluscum contagiosum virus
ggcacaugcagcugcagg

SEQ ID NO: 4046410 - RNA, 13 nt, Molluscum contagiosum virus
ggcaccacgugcg

SEQ ID NO: 4046411 - RNA, 18 nt, Molluscum contagiosum virus
ggcaccacgugcgcuggc

SEQ ID NO: 4046412 - RNA, 14 nt, Molluscum contagiosum virus
ggcacccaccagga

SEQ ID NO: 4046413 - RNA, 15 nt, Molluscum contagiosum virus
ggcacccaccaggaa

SEQ ID NO: 4046414 - RNA, 19 nt, Molluscum contagiosum virus
ggcacccaccaggaacagg

SEQ ID NO: 4046415 - RNA, 18 nt, Molluscum contagiosum virus
ggcaccccgaaaggcacc

SEQ ID NO: 4046416 - RNA, 22 nt, Molluscum contagiosum virus
ggcaccccgaaaggcacccgca

SEQ ID NO: 4046417 - RNA, 19 nt, Molluscum contagiosum virus
ggcaccccgaaggaaaggc

SEQ ID NO: 4046418 - RNA, 20 nt, Molluscum contagiosum virus
ggcacccgcaacaaggaaag

SEQ ID NO: 4046419 - RNA, 16 nt, Molluscum contagiosum virus
ggcacccgcaggaaag

SEQ ID NO: 4046420 - RNA, 14 nt, Molluscum contagiosum virus
ggcacccgccagcu

SEQ ID NO: 4046421 - RNA, 19 nt, Molluscum contagiosum virus
ggcacccgugcgcgcgcug

SEQ ID NO: 4046422 - RNA, 16 nt, Molluscum contagiosum virus
ggcggagguggcggag

SEQ ID NO: 4046423 - RNA, 15 nt, Molluscum contagiosum virus
ggcggcacccgccgc

SEQ ID NO: 4046424 - RNA, 23 nt, Molluscum contagiosum virus
ggcggcagcgccagcgagaucaa

SEQ ID NO: 4046425 - RNA, 14 nt, Molluscum contagiosum virus
ggcggccguguccu

SEQ ID NO: 4046426 - RNA, 21 nt, Molluscum contagiosum virus
ggcggcgcgaagcaggcgcca

SEQ ID NO: 4046427 - RNA, 16 nt, Molluscum contagiosum virus
ggcggcguaggccugc

SEQ ID NO: 4046428 - RNA, 13 nt, Molluscum contagiosum virus
ggcggcugugccc

SEQ ID NO: 4046429 - RNA, 21 nt, Molluscum contagiosum virus
ggcgggaagaaacucaggaag

SEQ ID NO: 4046430 - RNA, 23 nt, Molluscum contagiosum virus
ggcgggcacauccgcuaccuggu

SEQ ID NO: 4046431 - RNA, 18 nt, Molluscum contagiosum virus
ggcgggcgaaagcgccgc

SEQ ID NO: 4046432 - RNA, 17 nt, Molluscum contagiosum virus
ggcggggaucuugcgug

SEQ ID NO: 4046433 - RNA, 13 nt, Molluscum contagiosum virus
ggcgggugccgcc

SEQ ID NO: 4046434 - RNA, 13 nt, Molluscum contagiosum virus
ggcgggugccgug

SEQ ID NO: 4046435 - RNA, 18 nt, Molluscum contagiosum virus
ggcggugggcgccgcggc

SEQ ID NO: 4046436 - RNA, 18 nt, Molluscum contagiosum virus
ggcgguguaugcucgucg

SEQ ID NO: 4046437 - RNA, 20 nt, Molluscum contagiosum virus
ggcguaugcgccaagccugc

SEQ ID NO: 4046438 - RNA, 18 nt, Molluscum contagiosum virus
ggcguccggcgcucgccc

SEQ ID NO: 4046439 - RNA, 18 nt, Molluscum contagiosum virus
ggcguccggcgcucgccu

SEQ ID NO: 4046440 - RNA, 18 nt, Molluscum contagiosum virus
ggcguccggugcucgccc

SEQ ID NO: 4046441 - RNA, 22 nt, Molluscum contagiosum virus
ggcguccuucuuugcgugcgcc

SEQ ID NO: 4046442 - RNA, 20 nt, Molluscum contagiosum virus
ggcgugcagggcgugcuugc

SEQ ID NO: 4046443 - RNA, 13 nt, Molluscum contagiosum virus
ggcgugcgcagca

SEQ ID NO: 4046444 - RNA, 13 nt, Molluscum contagiosum virus
ggcgugcugugcc

SEQ ID NO: 4046445 - RNA, 14 nt, Molluscum contagiosum virus
ggcgugcugugccu

SEQ ID NO: 4046446 - RNA, 17 nt, Molluscum contagiosum virus
ggcguggccaggccgcg

SEQ ID NO: 4046447 - RNA, 16 nt, Molluscum contagiosum virus
ggcguggugcuggcca

SEQ ID NO: 4046448 - RNA, 16 nt, Molluscum contagiosum virus
ggcgugugcgggcucu

SEQ ID NO: 4046449 - RNA, 18 nt, Molluscum contagiosum virus
ggcguguuccggcagcgc

SEQ ID NO: 4046450 - RNA, 13 nt, Molluscum contagiosum virus
ggcguugcugcug

SEQ ID NO: 4046451 - RNA, 16 nt, Molluscum contagiosum virus
ggcucaagucgcccuu

SEQ ID NO: 4046452 - RNA, 14 nt, Molluscum contagiosum virus
ggcuccgcuggacc

SEQ ID NO: 4046453 - RNA, 14 nt, Molluscum contagiosum virus
ggcuccugugucgc

SEQ ID NO: 4046454 - RNA, 22 nt, Molluscum contagiosum virus
ggcucgagcgcgcgccugcugg

SEQ ID NO: 4046455 - RNA, 20 nt, Molluscum contagiosum virus
ggcucgcgugccccgggaag

SEQ ID NO: 4046456 - RNA, 19 nt, Molluscum contagiosum virus
ggcucgggcucgaggugug

SEQ ID NO: 4046457 - RNA, 15 nt, Molluscum contagiosum virus
ggcucgucguggacg

SEQ ID NO: 4046458 - RNA, 19 nt, Molluscum contagiosum virus
ggcucuaagcgcacgcgcg

SEQ ID NO: 4046459 - RNA, 21 nt, Molluscum contagiosum virus
ggcucucgcggaacuggacgc

SEQ ID NO: 4046460 - RNA, 20 nt, Molluscum contagiosum virus
ggcucuggagcggccacucu

SEQ ID NO: 4046461 - RNA, 21 nt, Molluscum contagiosum virus
ggcucuuccuuugcucuacgc

SEQ ID NO: 4046462 - RNA, 16 nt, Molluscum contagiosum virus
ggcucuucucgcagcg

SEQ ID NO: 4046463 - RNA, 23 nt, Molluscum contagiosum virus
ggcugcccgcggagaccaccgcu

SEQ ID NO: 4046464 - RNA, 15 nt, Molluscum contagiosum virus
ggcugcucgcugccu

SEQ ID NO: 4046465 - RNA, 20 nt, Molluscum contagiosum virus
ggcugcucucggcagcgucg

SEQ ID NO: 4046466 - RNA, 13 nt, Molluscum contagiosum virus
ggcugcugcgcga

SEQ ID NO: 4046467 - RNA, 15 nt, Molluscum contagiosum virus
ggcuggacugugcuu

SEQ ID NO: 4046468 - RNA, 23 nt, Molluscum contagiosum virus
ggcuguagaagagcgguuccugc

SEQ ID NO: 4046469 - RNA, 18 nt, Molluscum contagiosum virus
ggcuguuguacuggagac

SEQ ID NO: 4046470 - RNA, 15 nt, Molluscum contagiosum virus
ggcuucgccgccgga

SEQ ID NO: 4046471 - RNA, 13 nt, Molluscum contagiosum virus
ggcuucugcgcgg

SEQ ID NO: 4046472 - RNA, 20 nt, Molluscum contagiosum virus
ggcuugcggcacgcacggcc

SEQ ID NO: 4046473 - RNA, 17 nt, Molluscum contagiosum virus
ggcuuuucaugugcgag

SEQ ID NO: 4046474 - RNA, 22 nt, Molluscum contagiosum virus
gggaaaaaucccccgccaggaa

SEQ ID NO: 4046475 - RNA, 14 nt, Molluscum contagiosum virus
gggaacccguggcc

SEQ ID NO: 4046476 - RNA, 17 nt, Molluscum contagiosum virus
gggaccgcccuugugga

SEQ ID NO: 4046477 - RNA, 20 nt, Molluscum contagiosum virus
gggaccugguucaugcuggc

SEQ ID NO: 4046478 - RNA, 15 nt, Molluscum contagiosum virus
gggagaagaugcugc

SEQ ID NO: 4046479 - RNA, 21 nt, Molluscum contagiosum virus
gggcaagcgccgccaugcugc

SEQ ID NO: 4046480 - RNA, 12 nt, Molluscum contagiosum virus
gggcaauguuug

SEQ ID NO: 4046481 - RNA, 14 nt, Molluscum contagiosum virus
gggcacaagcuuuc

SEQ ID NO: 4046482 - RNA, 20 nt, Molluscum contagiosum virus
gggcacggcacccgccagcu

SEQ ID NO: 4046483 - RNA, 16 nt, Molluscum contagiosum virus
gggcagcuucugcucg

SEQ ID NO: 4046484 - RNA, 13 nt, Molluscum contagiosum virus
gggccaggcacug

SEQ ID NO: 4046485 - RNA, 12 nt, Molluscum contagiosum virus
gggccgcgcgca

SEQ ID NO: 4046486 - RNA, 15 nt, Molluscum contagiosum virus
gggccgcgguggccg

SEQ ID NO: 4046487 - RNA, 15 nt, Molluscum contagiosum virus
gggcgcacgcuuguc

SEQ ID NO: 4046488 - RNA, 19 nt, Molluscum contagiosum virus
gggcgcagccacgacucgc

SEQ ID NO: 4046489 - RNA, 20 nt, Molluscum contagiosum virus
gggcgccaaguccgagcaag

SEQ ID NO: 4046490 - RNA, 18 nt, Molluscum contagiosum virus
gggcgccggcucugccuc

SEQ ID NO: 4046491 - RNA, 21 nt, Molluscum contagiosum virus
gggcgggaagaaggugcucag

SEQ ID NO: 4046492 - RNA, 19 nt, Molluscum contagiosum virus
gggcgugacucggccgcgg

SEQ ID NO: 4046493 - RNA, 16 nt, Molluscum contagiosum virus
gggcuccuucuucuuu

SEQ ID NO: 4046494 - RNA, 20 nt, Molluscum contagiosum virus
gggcucgggcucgaggugug

SEQ ID NO: 4046495 - RNA, 20 nt, Molluscum contagiosum virus
gggcugcaucuucagcacca

SEQ ID NO: 4046496 - RNA, 21 nt, Molluscum contagiosum virus
gggcuucgcugcgcaggugca

SEQ ID NO: 4046497 - RNA, 19 nt, Molluscum contagiosum virus
ggggaacucggcuucugcu

SEQ ID NO: 4046498 - RNA, 22 nt, Molluscum contagiosum virus
ggggaacucggcuucugcugca

SEQ ID NO: 4046499 - RNA, 17 nt, Molluscum contagiosum virus
ggggccacaagcacgca

SEQ ID NO: 4046500 - RNA, 13 nt, Molluscum contagiosum virus
ggggcccaugcuc

SEQ ID NO: 4046501 - RNA, 19 nt, Molluscum contagiosum virus
ggggcucuccuacacauuc

SEQ ID NO: 4046502 - RNA, 13 nt, Molluscum contagiosum virus
gggguccgcuccu

SEQ ID NO: 4046503 - RNA, 15 nt, Molluscum contagiosum virus
ggggugauggcggug

SEQ ID NO: 4046504 - RNA, 13 nt, Molluscum contagiosum virus
gggucgugcaggu

SEQ ID NO: 4046505 - RNA, 23 nt, Molluscum contagiosum virus
gggugaggagcucgacucgagcg

SEQ ID NO: 4046506 - RNA, 14 nt, Molluscum contagiosum virus
gggugccuacucgc

SEQ ID NO: 4046507 - RNA, 14 nt, Molluscum contagiosum virus
gguaacgcgcgcgc

SEQ ID NO: 4046508 - RNA, 20 nt, Molluscum contagiosum virus
gguacaagucaucggagagc

SEQ ID NO: 4046509 - RNA, 16 nt, Molluscum contagiosum virus
gguaccgugcgcguga

SEQ ID NO: 4046510 - RNA, 21 nt, Molluscum contagiosum virus
gguacggugccguccccgcgc

SEQ ID NO: 4046511 - RNA, 17 nt, Molluscum contagiosum virus
gguacguacagugcgcg

SEQ ID NO: 4046512 - RNA, 22 nt, Molluscum contagiosum virus
gguacugaacgucuucgagagc

SEQ ID NO: 4046513 - RNA, 19 nt, Molluscum contagiosum virus
gguacuuguugugcacgcu

SEQ ID NO: 4046514 - RNA, 17 nt, Molluscum contagiosum virus
gguagagcgugaugugc

SEQ ID NO: 4046515 - RNA, 17 nt, Molluscum contagiosum virus
gguagugguccaccagc

SEQ ID NO: 4046516 - RNA, 22 nt, Molluscum contagiosum virus
ggucaagaacaugugcuccgcc

SEQ ID NO: 4046517 - RNA, 23 nt, Molluscum contagiosum virus
ggucaccaccaccuccagguccc

SEQ ID NO: 4046518 - RNA, 14 nt, Molluscum contagiosum virus
ggucaccacgaucu

SEQ ID NO: 4046519 - RNA, 11 nt, Molluscum contagiosum virus
ggucccuagcc

SEQ ID NO: 4046520 - RNA, 14 nt, Molluscum contagiosum virus
gguccuguccgcgg

SEQ ID NO: 4046521 - RNA, 13 nt, Molluscum contagiosum virus
ggucgaggagggc

SEQ ID NO: 4046522 - RNA, 18 nt, Molluscum contagiosum virus
ggucuccgcgggcagccg

SEQ ID NO: 4046523 - RNA, 20 nt, Molluscum contagiosum virus
ggucugcuuugucugcaggc

SEQ ID NO: 4046524 - RNA, 20 nt, Molluscum contagiosum virus
ggucuucccgcuggcggcac

SEQ ID NO: 4046525 - RNA, 15 nt, Molluscum contagiosum virus
cgcacgcacggagca

SEQ ID NO: 4046526 - RNA, 17 nt, Molluscum contagiosum virus
cgcacgcacggagcaca

SEQ ID NO: 4046527 - RNA, 14 nt, Molluscum contagiosum virus
cgcacgccagccug

SEQ ID NO: 4046528 - RNA, 13 nt, Molluscum contagiosum virus
cgcacgcgagcac

SEQ ID NO: 4046529 - RNA, 20 nt, Molluscum contagiosum virus
cgcacgcuuguccgcggacg

SEQ ID NO: 4046530 - RNA, 16 nt, Molluscum contagiosum virus
cgcacggcagcggcga

SEQ ID NO: 4046531 - RNA, 14 nt, Molluscum contagiosum virus
cgcacggccugcgg

SEQ ID NO: 4046532 - RNA, 13 nt, Molluscum contagiosum virus
cgcacggcuaggc

SEQ ID NO: 4046533 - RNA, 14 nt, Molluscum contagiosum virus
cgcacgggccugcg

SEQ ID NO: 4046534 - RNA, 16 nt, Molluscum contagiosum virus
cgcacgggccugcgcg

SEQ ID NO: 4046535 - RNA, 12 nt, Molluscum contagiosum virus
cgcacgggcgca

SEQ ID NO: 4046536 - RNA, 22 nt, Molluscum contagiosum virus
cgcacggugugcuacugcacug

SEQ ID NO: 4046537 - RNA, 16 nt, Molluscum contagiosum virus
cgcacguaggggacgc

SEQ ID NO: 4046538 - RNA, 19 nt, Molluscum contagiosum virus
cgcacucgcuggccucugc

SEQ ID NO: 4046539 - RNA, 22 nt, Molluscum contagiosum virus
cgcacuugccgggcgacggcgg

SEQ ID NO: 4046540 - RNA, 21 nt, Molluscum contagiosum virus
cgcagaacacgggggcugccg

SEQ ID NO: 4046541 - RNA, 19 nt, Molluscum contagiosum virus
cgcagaacugcugcgcgcu

SEQ ID NO: 4046542 - RNA, 19 nt, Molluscum contagiosum virus
cgcagaccacggcgcgccg

SEQ ID NO: 4046543 - RNA, 18 nt, Molluscum contagiosum virus
cgcagacgcagcgcgagc

SEQ ID NO: 4046544 - RNA, 16 nt, Molluscum contagiosum virus
cgcagacgcgcguccg

SEQ ID NO: 4046545 - RNA, 21 nt, Molluscum contagiosum virus
cgcagagccugcugcucuucg

SEQ ID NO: 4046546 - RNA, 22 nt, Molluscum contagiosum virus
cgcagagcuccccgcgcgcagc

SEQ ID NO: 4046547 - RNA, 16 nt, Molluscum contagiosum virus
cgcagcaagcagccgc

SEQ ID NO: 4046548 - RNA, 23 nt, Molluscum contagiosum virus
cgcagcacaaacucgcagaacug

SEQ ID NO: 4046549 - RNA, 20 nt, Molluscum contagiosum virus
cgcagcacaugcaggccgag

SEQ ID NO: 4046550 - RNA, 13 nt, Molluscum contagiosum virus
cgcagccacgacu

SEQ ID NO: 4046551 - RNA, 18 nt, Molluscum contagiosum virus
cgcagcccacgugccagc

SEQ ID NO: 4046552 - RNA, 19 nt, Molluscum contagiosum virus
cgcagccuccgugcgccag

SEQ ID NO: 4046553 - RNA, 20 nt, Molluscum contagiosum virus
cgcagccuccgugcgccagu

SEQ ID NO: 4046554 - RNA, 16 nt, Molluscum contagiosum virus
cgcagcgcggccuggu

SEQ ID NO: 4046555 - RNA, 20 nt, Molluscum contagiosum virus
cgcagcgggcuacucgagca

SEQ ID NO: 4046556 - RNA, 16 nt, Molluscum contagiosum virus
cgcagcuccuagcgcg

SEQ ID NO: 4046557 - RNA, 16 nt, Molluscum contagiosum virus
cgcagcucgccgcgcg

SEQ ID NO: 4046558 - RNA, 19 nt, Molluscum contagiosum virus
cgcagcucgccgcgcgccg

SEQ ID NO: 4046559 - RNA, 19 nt, Molluscum contagiosum virus
cgcagcucuuccacgaagu

SEQ ID NO: 4046560 - RNA, 21 nt, Molluscum contagiosum virus
cgcagcuguggcgccugcgcg

SEQ ID NO: 4046561 - RNA, 13 nt, Molluscum contagiosum virus
cgcaggaaaggca

SEQ ID NO: 4046562 - RNA, 13 nt, Molluscum contagiosum virus
cgcaggaaaggua

SEQ ID NO: 4046563 - RNA, 22 nt, Molluscum contagiosum virus
cgcaggaaagguacccgcagga

SEQ ID NO: 4046564 - RNA, 19 nt, Molluscum contagiosum virus
cgcaggaaccgcgugcgca

SEQ ID NO: 4046565 - RNA, 15 nt, Molluscum contagiosum virus
cgcaggaccgcgacc

SEQ ID NO: 4046566 - RNA, 16 nt, Molluscum contagiosum virus
cgcaggaccuggcugg

SEQ ID NO: 4046567 - RNA, 22 nt, Molluscum contagiosum virus
cgcaggacgcggucgcgcccuu

SEQ ID NO: 4046568 - RNA, 15 nt, Molluscum contagiosum virus
cgcaggaugcugggg

SEQ ID NO: 4046569 - RNA, 19 nt, Molluscum contagiosum virus
cgcaggcccggcggcccgc

SEQ ID NO: 4046570 - RNA, 13 nt, Molluscum contagiosum virus
cgcaggccgcgcc

SEQ ID NO: 4046571 - RNA, 18 nt, Molluscum contagiosum virus
cgcagugcucgcacacgu

SEQ ID NO: 4046572 - RNA, 13 nt, Molluscum contagiosum virus
cgcaucagcacac

SEQ ID NO: 4046573 - RNA, 17 nt, Molluscum contagiosum virus
cgcaugcacagccgcuu

SEQ ID NO: 4046574 - RNA, 15 nt, Molluscum contagiosum virus
cgccaacacgagcgc

SEQ ID NO: 4046575 - RNA, 17 nt, Molluscum contagiosum virus
cgccaagagcuggucgc

SEQ ID NO: 4046576 - RNA, 16 nt, Molluscum contagiosum virus
cgccaccaugcuuguu

SEQ ID NO: 4046577 - RNA, 14 nt, Molluscum contagiosum virus
cgccaccgcgcccu

SEQ ID NO: 4046578 - RNA, 21 nt, Molluscum contagiosum virus
cgccaccucggcguuggccac

SEQ ID NO: 4046579 - RNA, 17 nt, Molluscum contagiosum virus
cgccacugccacggcug

SEQ ID NO: 4046580 - RNA, 13 nt, Molluscum contagiosum virus
cgccagcaguccg

SEQ ID NO: 4046581 - RNA, 14 nt, Molluscum contagiosum virus
cgccagccugcugg

SEQ ID NO: 4046582 - RNA, 15 nt, Molluscum contagiosum virus
cgccagccuggcggc

SEQ ID NO: 4046583 - RNA, 20 nt, Molluscum contagiosum virus
cgccagcgacgagcagcugc

SEQ ID NO: 4046584 - RNA, 19 nt, Molluscum contagiosum virus
cgccagcgcgcccaccagc

SEQ ID NO: 4046585 - RNA, 22 nt, Molluscum contagiosum virus
cgccagcuaagccggagcagcc

SEQ ID NO: 4046586 - RNA, 18 nt, Molluscum contagiosum virus
cgccagcuccgcgcggcg

SEQ ID NO: 4046587 - RNA, 15 nt, Molluscum contagiosum virus
cgccagcucugggcg

SEQ ID NO: 4046588 - RNA, 20 nt, Molluscum contagiosum virus
cgccagugcgugcacugucu

SEQ ID NO: 4046589 - RNA, 17 nt, Molluscum contagiosum virus
cgccauccagcgcauca

SEQ ID NO: 4046590 - RNA, 21 nt, Molluscum contagiosum virus
cgccauuuccgagcgcgcacg

SEQ ID NO: 4046591 - RNA, 23 nt, Molluscum contagiosum virus
cgccauuuccgagcgcgcacgag

SEQ ID NO: 4046592 - RNA, 13 nt, Molluscum contagiosum virus
cgcccaaggccgc

SEQ ID NO: 4046593 - RNA, 17 nt, Molluscum contagiosum virus
cgcccagcaccuggaac

SEQ ID NO: 4046594 - RNA, 16 nt, Molluscum contagiosum virus
cgcccgaggacgagcc

SEQ ID NO: 4046595 - RNA, 14 nt, Molluscum contagiosum virus
cgcccgcagcgcgc

SEQ ID NO: 4046596 - RNA, 14 nt, Molluscum contagiosum virus
cgcccgccagcaug

SEQ ID NO: 4046597 - RNA, 20 nt, Molluscum contagiosum virus
cgcccgccagcauggcgagc

SEQ ID NO: 4046598 - RNA, 22 nt, Molluscum contagiosum virus
cgcccgcgaaagaacacggaca

SEQ ID NO: 4046599 - RNA, 23 nt, Molluscum contagiosum virus
cgcccggcagcgacuacgcgcug

SEQ ID NO: 4046600 - RNA, 15 nt, Molluscum contagiosum virus
cgcccggcgugaucu

SEQ ID NO: 4046601 - RNA, 20 nt, Molluscum contagiosum virus
cgcccggugcggcguguucc

SEQ ID NO: 4046602 - RNA, 13 nt, Molluscum contagiosum virus
cgcccuggagcgc

SEQ ID NO: 4046603 - RNA, 14 nt, Molluscum contagiosum virus
cgccgaagagccgc

SEQ ID NO: 4046604 - RNA, 23 nt, Molluscum contagiosum virus
cgccgagauggagcucacgcuca

SEQ ID NO: 4046605 - RNA, 22 nt, Molluscum contagiosum virus
cgccgagcccgagcccgggccc

SEQ ID NO: 4046606 - RNA, 20 nt, Molluscum contagiosum virus
cgccgaggacuaccuggcgg

SEQ ID NO: 4046607 - RNA, 22 nt, Molluscum contagiosum virus
cgccgagugcgacgcgcgucac

SEQ ID NO: 4046608 - RNA, 12 nt, Molluscum contagiosum virus
cgccgaugcagu

SEQ ID NO: 4046609 - RNA, 20 nt, Molluscum contagiosum virus
cgccgcaaacacugucucug

SEQ ID NO: 4046610 - RNA, 21 nt, Molluscum contagiosum virus
cgccgcagcgcuggagcuggc

SEQ ID NO: 4046611 - RNA, 15 nt, Molluscum contagiosum virus
cgccgccgcaggccc

SEQ ID NO: 4046612 - RNA, 17 nt, Molluscum contagiosum virus
cgccgccgcgccgcugc

SEQ ID NO: 4046613 - RNA, 20 nt, Molluscum contagiosum virus
cgccgcgcaauagcgcccgu

SEQ ID NO: 4046614 - RNA, 21 nt, Molluscum contagiosum virus
cgccgcgcgcgauguacaagc

SEQ ID NO: 4046615 - RNA, 15 nt, Molluscum contagiosum virus
cgccgcgcgcgccgg

SEQ ID NO: 4046616 - RNA, 14 nt, Molluscum contagiosum virus
cgccgcgcgcggcu

SEQ ID NO: 4046617 - RNA, 15 nt, Molluscum contagiosum virus
cgccgcugccgcgcg

SEQ ID NO: 4046618 - RNA, 15 nt, Molluscum contagiosum virus
cgccgcugucacgcg

SEQ ID NO: 4046619 - RNA, 14 nt, Molluscum contagiosum virus
cgccggcucugccu

SEQ ID NO: 4046620 - RNA, 21 nt, Molluscum contagiosum virus
cgccgggaaacgcacagcccc

SEQ ID NO: 4046621 - RNA, 20 nt, Molluscum contagiosum virus
cgccgggaauaccggagaca

SEQ ID NO: 4046622 - RNA, 20 nt, Molluscum contagiosum virus
cgccgggcaccggcgcucac

SEQ ID NO: 4046623 - RNA, 18 nt, Molluscum contagiosum virus
cgccggggcgcgcgcugc

SEQ ID NO: 4046624 - RNA, 13 nt, Molluscum contagiosum virus
cgccguccgcgca

SEQ ID NO: 4046625 - RNA, 15 nt, Molluscum contagiosum virus
cgccgucgcagaaga

SEQ ID NO: 4046626 - RNA, 13 nt, Molluscum contagiosum virus
cgccgugcgcgug

SEQ ID NO: 4046627 - RNA, 21 nt, Molluscum contagiosum virus
cgccguguaccgccgcggccg

SEQ ID NO: 4046628 - RNA, 14 nt, Molluscum contagiosum virus
cgcgcgcgcgcgag

SEQ ID NO: 4046629 - RNA, 16 nt, Molluscum contagiosum virus
cgcgcgcgcgcggcgc

SEQ ID NO: 4046630 - RNA, 16 nt, Molluscum contagiosum virus
cgcgcgcgcucacccu

SEQ ID NO: 4046631 - RNA, 14 nt, Molluscum contagiosum virus
cgcgcgcgcucugc

SEQ ID NO: 4046632 - RNA, 21 nt, Molluscum contagiosum virus
cgcgcgcggucgacgggaacg

SEQ ID NO: 4046633 - RNA, 23 nt, Molluscum contagiosum virus
cgcgcgcguaaagagcguccagc

SEQ ID NO: 4046634 - RNA, 18 nt, Molluscum contagiosum virus
cgcgcgcuagccgccgcu

SEQ ID NO: 4046635 - RNA, 20 nt, Molluscum contagiosum virus
cgcgcgcuagccgccgcugc

SEQ ID NO: 4046636 - RNA, 21 nt, Molluscum contagiosum virus
cgcgcgcuauucaaagcugug

SEQ ID NO: 4046637 - RNA, 12 nt, Molluscum contagiosum virus
cgcgcgcucgcg

SEQ ID NO: 4046638 - RNA, 14 nt, Molluscum contagiosum virus
cgcgcgcucgcgcu

SEQ ID NO: 4046639 - RNA, 13 nt, Molluscum contagiosum virus
cgcgcgcucugcc

SEQ ID NO: 4046640 - RNA, 16 nt, Molluscum contagiosum virus
cgcgcgcucugccgcc

SEQ ID NO: 4046641 - RNA, 22 nt, Molluscum contagiosum virus
cgcgcgcucugccgcccgcgcc

SEQ ID NO: 4046642 - RNA, 19 nt, Molluscum contagiosum virus
cgcgcgcugagcgcggagc

SEQ ID NO: 4046643 - RNA, 15 nt, Molluscum contagiosum virus
cgcgcgcuggcgugc

SEQ ID NO: 4046644 - RNA, 18 nt, Molluscum contagiosum virus
cgcgcgcuuuuugccgcu

SEQ ID NO: 4046645 - RNA, 16 nt, Molluscum contagiosum virus
cgcgcguacgcgugcg

SEQ ID NO: 4046646 - RNA, 19 nt, Molluscum contagiosum virus
cgcgcguacgcgugcgcug

SEQ ID NO: 4046647 - RNA, 17 nt, Molluscum contagiosum virus
cgcgcguacgcugcucg

SEQ ID NO: 4046648 - RNA, 17 nt, Molluscum contagiosum virus
cgcgcgugccgcccgag

SEQ ID NO: 4046649 - RNA, 14 nt, Molluscum contagiosum virus
cgcgcgugcucgac

SEQ ID NO: 4046650 - RNA, 17 nt, Molluscum contagiosum virus
cgcgcuaccugcgcaag

SEQ ID NO: 4046651 - RNA, 16 nt, Molluscum contagiosum virus
cgcgcuagcuccacgu

SEQ ID NO: 4046652 - RNA, 18 nt, Molluscum contagiosum virus
cgcgcuccauguacgucg

SEQ ID NO: 4046653 - RNA, 20 nt, Molluscum contagiosum virus
cgcgcucgaacgcgcgugcg

SEQ ID NO: 4046654 - RNA, 16 nt, Molluscum contagiosum virus
cgcgcucgacgcgugc

SEQ ID NO: 4046655 - RNA, 17 nt, Molluscum contagiosum virus
cgcgcucgacgcgugca

SEQ ID NO: 4046656 - RNA, 20 nt, Molluscum contagiosum virus
cgcgcucgucaaugcgcacg

SEQ ID NO: 4046657 - RNA, 15 nt, Molluscum contagiosum virus
cgcgcucgugccgcc

SEQ ID NO: 4046658 - RNA, 13 nt, Molluscum contagiosum virus
cgcgcucucacgc

SEQ ID NO: 4046659 - RNA, 22 nt, Molluscum contagiosum virus
cgcgcucugccgcccgcgcccg

SEQ ID NO: 4046660 - RNA, 20 nt, Molluscum contagiosum virus
cgcgcugaucaccgaggagc

SEQ ID NO: 4046661 - RNA, 13 nt, Molluscum contagiosum virus
cgcgcugcgcacg

SEQ ID NO: 4046662 - RNA, 24 nt, Molluscum contagiosum virus
auggaaggcgaccagcugguccug

SEQ ID NO: 4046663 - RNA, 17 nt, Molluscum contagiosum virus
auggacacgcacuggcg

SEQ ID NO: 4046664 - RNA, 20 nt, Molluscum contagiosum virus
auggagcaggagaacuacaa

SEQ ID NO: 4046665 - RNA, 20 nt, Molluscum contagiosum virus
auggagcgcccgcugcucua

SEQ ID NO: 4046666 - RNA, 19 nt, Molluscum contagiosum virus
auggcaggugcgcaacugc

SEQ ID NO: 4046667 - RNA, 15 nt, Molluscum contagiosum virus
auggccggcaacugg

SEQ ID NO: 4046668 - RNA, 17 nt, Molluscum contagiosum virus
auggccggcaacuggcu

SEQ ID NO: 4046669 - RNA, 19 nt, Molluscum contagiosum virus
auggcgcgcaaccagcugg

SEQ ID NO: 4046670 - RNA, 14 nt, Molluscum contagiosum virus
auggcgcgcagcuc

SEQ ID NO: 4046671 - RNA, 16 nt, Molluscum contagiosum virus
augggcucgggcaaga

SEQ ID NO: 4046672 - RNA, 14 nt, Molluscum contagiosum virus
auggucucgcugcu

SEQ ID NO: 4046673 - RNA, 19 nt, Molluscum contagiosum virus
auguacaagcccguacgca

SEQ ID NO: 4046674 - RNA, 21 nt, Molluscum contagiosum virus
auguccaugucgcgcaucacc

SEQ ID NO: 4046675 - RNA, 18 nt, Molluscum contagiosum virus
auguccggcgcuggagaa

SEQ ID NO: 4046676 - RNA, 18 nt, Molluscum contagiosum virus
augucgaacaccuccugc

SEQ ID NO: 4046677 - RNA, 23 nt, Molluscum contagiosum virus
auucucguggcguugcugcugcg

SEQ ID NO: 4046678 - RNA, 17 nt, Molluscum contagiosum virus
auucucucgagagacaa

SEQ ID NO: 4046679 - RNA, 19 nt, Molluscum contagiosum virus
auugcgucuuacugcugca

SEQ ID NO: 4046680 - RNA, 16 nt, Molluscum contagiosum virus
auugcguguuggcuuc

SEQ ID NO: 4046681 - RNA, 22 nt, Molluscum contagiosum virus
auugcugggcacaagcuuucuc

SEQ ID NO: 4046682 - RNA, 20 nt, Molluscum contagiosum virus
auuucguucgacuacacgcg

SEQ ID NO: 4046683 - RNA, 21 nt, Molluscum contagiosum virus
caaaagaggccugcugaagaa

SEQ ID NO: 4046684 - RNA, 22 nt, Molluscum contagiosum virus
caaaauggcugcgaccaagaca

SEQ ID NO: 4046685 - RNA, 13 nt, Molluscum contagiosum virus
caaacgccagugc

SEQ ID NO: 4046686 - RNA, 23 nt, Molluscum contagiosum virus
caaagaccacuugugaaauguug

SEQ ID NO: 4046687 - RNA, 15 nt, Molluscum contagiosum virus
caaagacggggccgc

SEQ ID NO: 4046688 - RNA, 23 nt, Molluscum contagiosum virus
caaagaucgcgguggcaggcgcg

SEQ ID NO: 4046689 - RNA, 14 nt, Molluscum contagiosum virus
caaaggcgggcccg

SEQ ID NO: 4046690 - RNA, 15 nt, Molluscum contagiosum virus
caaaggcgggcccgc

SEQ ID NO: 4046691 - RNA, 14 nt, Molluscum contagiosum virus
caaagggcggccgc

SEQ ID NO: 4046692 - RNA, 16 nt, Molluscum contagiosum virus
caaaugcgcugcucgc

SEQ ID NO: 4046693 - RNA, 17 nt, Molluscum contagiosum virus
caaauuccucgagaggg

SEQ ID NO: 4046694 - RNA, 18 nt, Molluscum contagiosum virus
caaauuccucgagaggga

SEQ ID NO: 4046695 - RNA, 21 nt, Molluscum contagiosum virus
caacaagcucgaacagagcgc

SEQ ID NO: 4046696 - RNA, 19 nt, Molluscum contagiosum virus
caacaaggaaaggcacccg

SEQ ID NO: 4046697 - RNA, 14 nt, Molluscum contagiosum virus
caacacgagcacga

SEQ ID NO: 4046698 - RNA, 20 nt, Molluscum contagiosum virus
caacacugacgcucgggccg

SEQ ID NO: 4046699 - RNA, 19 nt, Molluscum contagiosum virus
caacagcacgacggucuuc

SEQ ID NO: 4046700 - RNA, 18 nt, Molluscum contagiosum virus
caacagcagcuggcgcgc

SEQ ID NO: 4046701 - RNA, 15 nt, Molluscum contagiosum virus
caacagcgcgacgcc

SEQ ID NO: 4046702 - RNA, 15 nt, Molluscum contagiosum virus
caacagugcgugcca

SEQ ID NO: 4046703 - RNA, 22 nt, Molluscum contagiosum virus
caacauccugccacaccagcug

SEQ ID NO: 4046704 - RNA, 14 nt, Molluscum contagiosum virus
caaccacagcucuc

SEQ ID NO: 4046705 - RNA, 14 nt, Molluscum contagiosum virus
caaccagacgugcu

SEQ ID NO: 4046706 - RNA, 16 nt, Molluscum contagiosum virus
caaccagcuggcgccc

SEQ ID NO: 4046707 - RNA, 21 nt, Molluscum contagiosum virus
caaccauggcgcgcucuuuug

SEQ ID NO: 4046708 - RNA, 14 nt, Molluscum contagiosum virus
caaccgccugcucu

SEQ ID NO: 4046709 - RNA, 18 nt, Molluscum contagiosum virus
caaccucgagaagaccug

SEQ ID NO: 4046710 - RNA, 14 nt, Molluscum contagiosum virus
caacgacagagccc

SEQ ID NO: 4046711 - RNA, 19 nt, Molluscum contagiosum virus
caacgacuagcgugcgcag

SEQ ID NO: 4046712 - RNA, 16 nt, Molluscum contagiosum virus
caacgagcagcccgug

SEQ ID NO: 4046713 - RNA, 15 nt, Molluscum contagiosum virus
caacgagcgcaucag

SEQ ID NO: 4046714 - RNA, 23 nt, Molluscum contagiosum virus
caacgagcucuccgaagagcaga

SEQ ID NO: 4046715 - RNA, 18 nt, Molluscum contagiosum virus
caacgcgacgauggccac

SEQ ID NO: 4046716 - RNA, 16 nt, Molluscum contagiosum virus
caacgcuuggcaagcu

SEQ ID NO: 4046717 - RNA, 14 nt, Molluscum contagiosum virus
caacgugcugcgcc

SEQ ID NO: 4046718 - RNA, 13 nt, Molluscum contagiosum virus
caacgugcugcuc

SEQ ID NO: 4046719 - RNA, 14 nt, Molluscum contagiosum virus
caacgugcugcuca

SEQ ID NO: 4046720 - RNA, 11 nt, Molluscum contagiosum virus
caacuuccaca

SEQ ID NO: 4046721 - RNA, 13 nt, Molluscum contagiosum virus
caagaacagagaa

SEQ ID NO: 4046722 - RNA, 17 nt, Molluscum contagiosum virus
caagaagcgcuucuuug

SEQ ID NO: 4046723 - RNA, 15 nt, Molluscum contagiosum virus
caagaagcggcccug

SEQ ID NO: 4046724 - RNA, 17 nt, Molluscum contagiosum virus
caagaaggcgcuggugg

SEQ ID NO: 4046725 - RNA, 18 nt, Molluscum contagiosum virus
caagacccagcaaggccc

SEQ ID NO: 4046726 - RNA, 15 nt, Molluscum contagiosum virus
caagacgcugcuggc

SEQ ID NO: 4046727 - RNA, 16 nt, Molluscum contagiosum virus
caagacgcugcuggcg

SEQ ID NO: 4046728 - RNA, 13 nt, Molluscum contagiosum virus
caagacgggcacg

SEQ ID NO: 4046729 - RNA, 18 nt, Molluscum contagiosum virus
caagaggggagccagccu

SEQ ID NO: 4046730 - RNA, 15 nt, Molluscum contagiosum virus
caagaucaaccgcaa

SEQ ID NO: 4046731 - RNA, 14 nt, Molluscum contagiosum virus
caagauucugcgga

SEQ ID NO: 4046732 - RNA, 17 nt, Molluscum contagiosum virus
caagcacaacgggcucg

SEQ ID NO: 4046733 - RNA, 19 nt, Molluscum contagiosum virus
caagcaccgccugcugcag

SEQ ID NO: 4046734 - RNA, 20 nt, Molluscum contagiosum virus
caagcacuacauggacgugc

SEQ ID NO: 4046735 - RNA, 16 nt, Molluscum contagiosum virus
caagcagcgcgccacc

SEQ ID NO: 4046736 - RNA, 15 nt, Molluscum contagiosum virus
caagcaggcaugcaa

SEQ ID NO: 4046737 - RNA, 14 nt, Molluscum contagiosum virus
caagcaguaccugc

SEQ ID NO: 4046738 - RNA, 15 nt, Molluscum contagiosum virus
caagcaguaccugcu

SEQ ID NO: 4046739 - RNA, 13 nt, Molluscum contagiosum virus
caagcagucucau

SEQ ID NO: 4046740 - RNA, 14 nt, Molluscum contagiosum virus
caagcccgaguucg

SEQ ID NO: 4046741 - RNA, 16 nt, Molluscum contagiosum virus
caagcccgcgcgcgag

SEQ ID NO: 4046742 - RNA, 15 nt, Molluscum contagiosum virus
caagccguccgccuc

SEQ ID NO: 4046743 - RNA, 21 nt, Molluscum contagiosum virus
caagcgagaucccuccgagac

SEQ ID NO: 4046744 - RNA, 16 nt, Molluscum contagiosum virus
caagcgcaacacggcc

SEQ ID NO: 4046745 - RNA, 14 nt, Molluscum contagiosum virus
caagcgcccgcgag

SEQ ID NO: 4046746 - RNA, 16 nt, Molluscum contagiosum virus
caagcgcccucgugua

SEQ ID NO: 4046747 - RNA, 21 nt, Molluscum contagiosum virus
caagcgccgccaugcugcgcg

SEQ ID NO: 4046748 - RNA, 16 nt, Molluscum contagiosum virus
caagcgccgcucggua

SEQ ID NO: 4046749 - RNA, 18 nt, Molluscum contagiosum virus
caagcgcuacuugcuggc

SEQ ID NO: 4046750 - RNA, 21 nt, Molluscum contagiosum virus
caagcgcuacuugcuggcgcg

SEQ ID NO: 4046751 - RNA, 17 nt, Molluscum contagiosum virus
caagcugcaccggcgcg

SEQ ID NO: 4046752 - RNA, 10 nt, Molluscum contagiosum virus
caagcugccc

SEQ ID NO: 4046753 - RNA, 19 nt, Molluscum contagiosum virus
caagcuggaggcugccccu

SEQ ID NO: 4046754 - RNA, 20 nt, Molluscum contagiosum virus
caagcuucgggccgcugccg

SEQ ID NO: 4046755 - RNA, 14 nt, Molluscum contagiosum virus
caaggaaaggcacc

SEQ ID NO: 4046756 - RNA, 21 nt, Molluscum contagiosum virus
caaggaaaggcacccaccagg

SEQ ID NO: 4046757 - RNA, 23 nt, Molluscum contagiosum virus
caaggaaaggcacccaccaggaa

SEQ ID NO: 4046758 - RNA, 18 nt, Molluscum contagiosum virus
caaggaaaggcacccgca

SEQ ID NO: 4046759 - RNA, 19 nt, Molluscum contagiosum virus
caaggacaucuacagccgc

SEQ ID NO: 4046760 - RNA, 16 nt, Molluscum contagiosum virus
caaggaucucugcccu

SEQ ID NO: 4046761 - RNA, 21 nt, Molluscum contagiosum virus
caaggccgcgcccaagaagaa

SEQ ID NO: 4046762 - RNA, 21 nt, Molluscum contagiosum virus
caagggcagcucaagcugcuc

SEQ ID NO: 4046763 - RNA, 12 nt, Molluscum contagiosum virus
caagggccugcg

SEQ ID NO: 4046764 - RNA, 23 nt, Molluscum contagiosum virus
caaggugcuguccuucugguucc

SEQ ID NO: 4046765 - RNA, 12 nt, Molluscum contagiosum virus
uucguggccaaa

SEQ ID NO: 4046766 - RNA, 16 nt, Molluscum contagiosum virus
uucuaggccucagccg

SEQ ID NO: 4046767 - RNA, 11 nt, Molluscum contagiosum virus
uucugccugcu

SEQ ID NO: 4046768 - RNA, 14 nt, Molluscum contagiosum virus
uucugcgcagggac

SEQ ID NO: 4046769 - RNA, 14 nt, Molluscum contagiosum virus
uucugcugcacaca

SEQ ID NO: 4046770 - RNA, 23 nt, Molluscum contagiosum virus
uucugcuugcggcacacaugcua

SEQ ID NO: 4046771 - RNA, 23 nt, Molluscum contagiosum virus
uucugguuccugcgcuccgacgc

SEQ ID NO: 4046772 - RNA, 22 nt, Molluscum contagiosum virus
uucuugguguucugcgcgccgc

SEQ ID NO: 4046773 - RNA, 13 nt, Molluscum contagiosum virus
uugaccagcucca

SEQ ID NO: 4046774 - RNA, 19 nt, Molluscum contagiosum virus
uugaucgacauggagcgca

SEQ ID NO: 4046775 - RNA, 12 nt, Molluscum contagiosum virus
uugcacauuaaa

SEQ ID NO: 4046776 - RNA, 16 nt, Molluscum contagiosum virus
uugcacgugcgugccc

SEQ ID NO: 4046777 - RNA, 16 nt, Molluscum contagiosum virus
uugccgcgccuugagc

SEQ ID NO: 4046778 - RNA, 17 nt, Molluscum contagiosum virus
uugccgcuugagcagca

SEQ ID NO: 4046779 - RNA, 13 nt, Molluscum contagiosum virus
uugccugagaagc

SEQ ID NO: 4046780 - RNA, 16 nt, Molluscum contagiosum virus
uugccugcacugagaa

SEQ ID NO: 4046781 - RNA, 13 nt, Molluscum contagiosum virus
uugcgagccagcc

SEQ ID NO: 4046782 - RNA, 12 nt, Molluscum contagiosum virus
uugcgcgcgccc

SEQ ID NO: 4046783 - RNA, 22 nt, Molluscum contagiosum virus
uugcgcgcgcccucgcgcgcag

SEQ ID NO: 4046784 - RNA, 14 nt, Molluscum contagiosum virus
uugcgcguccacaa

SEQ ID NO: 4046785 - RNA, 23 nt, Molluscum contagiosum virus
uugcguguugaacucgagcacgu

SEQ ID NO: 4046786 - RNA, 20 nt, Molluscum contagiosum virus
uugcucgcgcuccugcguga

SEQ ID NO: 4046787 - RNA, 20 nt, Molluscum contagiosum virus
uugcugcugccgcgcggcac

SEQ ID NO: 4046788 - RNA, 17 nt, Molluscum contagiosum virus
uuggacagcaagcagcg

SEQ ID NO: 4046789 - RNA, 16 nt, Molluscum contagiosum virus
uuggacgagcugcuuc

SEQ ID NO: 4046790 - RNA, 10 nt, Molluscum contagiosum virus
uuggccaggc

SEQ ID NO: 4046791 - RNA, 16 nt, Molluscum contagiosum virus
uuggcgagcgcugccg

SEQ ID NO: 4046792 - RNA, 16 nt, Molluscum contagiosum virus
uuggcgcgcaagcgcu

SEQ ID NO: 4046793 - RNA, 13 nt, Molluscum contagiosum virus
uugggcacugcua

SEQ ID NO: 4046794 - RNA, 21 nt, Molluscum contagiosum virus
uuggggcggcggggcugcugg

SEQ ID NO: 4046795 - RNA, 12 nt, Molluscum contagiosum virus
uuguccaaugcu

SEQ ID NO: 4046796 - RNA, 21 nt, Molluscum contagiosum virus
uugucgagacaggccggggcc

SEQ ID NO: 4046797 - RNA, 24 nt, Molluscum contagiosum virus
uugugaugauuugauggcugcuca

SEQ ID NO: 4046798 - RNA, 12 nt, Molluscum contagiosum virus
uugugcucgcuu

SEQ ID NO: 4046799 - RNA, 21 nt, Molluscum contagiosum virus
uuguuuuucgggaagcacagu

SEQ ID NO: 4046800 - RNA, 23 nt, Molluscum contagiosum virus
uuuccggacgauaaauggaccuc

SEQ ID NO: 4046801 - RNA, 18 nt, Molluscum contagiosum virus
uuuccuugccuucucgaa

SEQ ID NO: 4046802 - RNA, 15 nt, Molluscum contagiosum virus
uuucgggaagcacag

SEQ ID NO: 4046803 - RNA, 15 nt, Molluscum contagiosum virus
uuucguacgcggagg

SEQ ID NO: 4046804 - RNA, 18 nt, Molluscum contagiosum virus
uuugacacgcucaucucg

SEQ ID NO: 4046805 - RNA, 21 nt, Molluscum contagiosum virus
uuugcaaguucgcugcuggca

SEQ ID NO: 4046806 - RNA, 20 nt, Molluscum contagiosum virus
uuuucccgaggcguccagcg

SEQ ID NO: 4046807 - RNA, 18 nt, Molluscum contagiosum virus
uuuugcacagugugccga

SEQ ID NO: 4046808 - RNA, 14 nt, Molluscum contagiosum virus
uggcgggcgugccc

SEQ ID NO: 4046809 - RNA, 18 nt, Molluscum contagiosum virus
uggcggggaucuugcgug

SEQ ID NO: 4046810 - RNA, 14 nt, Molluscum contagiosum virus
uggcggugagcgcc

SEQ ID NO: 4046811 - RNA, 14 nt, Molluscum contagiosum virus
uggcguucgacggc

SEQ ID NO: 4046812 - RNA, 18 nt, Molluscum contagiosum virus
uggcguugccgagcgagc

SEQ ID NO: 4046813 - RNA, 14 nt, Molluscum contagiosum virus
uggcguugcugcug

SEQ ID NO: 4046814 - RNA, 16 nt, Molluscum contagiosum virus
uggcucuucucgcagc

SEQ ID NO: 4046815 - RNA, 14 nt, Molluscum contagiosum virus
uggcuucuccaccu

SEQ ID NO: 4046816 - RNA, 17 nt, Molluscum contagiosum virus
uggcuugcugcaguaug

SEQ ID NO: 4046817 - RNA, 14 nt, Molluscum contagiosum virus
accugcggcugcgg

SEQ ID NO: 4046818 - RNA, 17 nt, Molluscum contagiosum virus
accugcggcugcggcgc

SEQ ID NO: 4046819 - RNA, 15 nt, Molluscum contagiosum virus
accugcucgggcugc

SEQ ID NO: 4046820 - RNA, 14 nt, Molluscum contagiosum virus
accuggaacgcgag

SEQ ID NO: 4046821 - RNA, 12 nt, Molluscum contagiosum virus
accuggccuucg

SEQ ID NO: 4046822 - RNA, 22 nt, Molluscum contagiosum virus
accugggcgucgugcaccugga

SEQ ID NO: 4046823 - RNA, 21 nt, Molluscum contagiosum virus
accuggucguugucgggaaug

SEQ ID NO: 4046824 - RNA, 15 nt, Molluscum contagiosum virus
accuguaugaucugc

SEQ ID NO: 4046825 - RNA, 19 nt, Molluscum contagiosum virus
accuguucuuucagcgcgc

SEQ ID NO: 4046826 - RNA, 18 nt, Molluscum contagiosum virus
accuuggcgcugcacagu

SEQ ID NO: 4046827 - RNA, 12 nt, Murray Valley encephalitis virus
aaccccaggagg

SEQ ID NO: 4046828 - RNA, 18 nt, Murray Valley encephalitis virus
aagaggagucccugccaa

SEQ ID NO: 4046829 - RNA, 13 nt, Murray Valley encephalitis virus
aagcuguaaggcg

SEQ ID NO: 4046830 - RNA, 15 nt, Murray Valley encephalitis virus
aaggacuagagguua

SEQ ID NO: 4046831 - RNA, 18 nt, Murray Valley encephalitis virus
aaggcaccgagcgccgaa

SEQ ID NO: 4046832 - RNA, 23 nt, Murray Valley encephalitis virus
acaccugggaaaagacuaggaga

SEQ ID NO: 4046833 - RNA, 14 nt, Murray Valley encephalitis virus
accaaccccaggag

SEQ ID NO: 4046834 - RNA, 15 nt, Murray Valley encephalitis virus
acggacuagagguua

SEQ ID NO: 4046835 - RNA, 12 nt, Murray Valley encephalitis virus
acuggguaaaca

SEQ ID NO: 4046836 - RNA, 22 nt, Murray Valley encephalitis virus
agaaccgucucggaagaggagu

SEQ ID NO: 4046837 - RNA, 15 nt, Murray Valley encephalitis virus
agaagaccacaggau

SEQ ID NO: 4046838 - RNA, 14 nt, Murray Valley encephalitis virus
agaggagaccccac

SEQ ID NO: 4046839 - RNA, 13 nt, Murray Valley encephalitis virus
agagguuagagga

SEQ ID NO: 4046840 - RNA, 17 nt, Murray Valley encephalitis virus
agcccgggccgggagga

SEQ ID NO: 4046841 - RNA, 11 nt, Murray Valley encephalitis virus
agccucccaga

SEQ ID NO: 4046842 - RNA, 22 nt, Murray Valley encephalitis virus
aggccagccgguuaggcugcca

SEQ ID NO: 4046843 - RNA, 15 nt, Murray Valley encephalitis virus
aggcccccgcagccc

SEQ ID NO: 4046844 - RNA, 20 nt, Murray Valley encephalitis virus
agucacaaggcaccgagcgc

SEQ ID NO: 4046845 - RNA, 19 nt, Murray Valley encephalitis virus
aucugugaggccccaggag

SEQ ID NO: 4046846 - RNA, 19 nt, Murray Valley encephalitis virus
caagcucgccgaagcugua

SEQ ID NO: 4046847 - RNA, 22 nt, Murray Valley encephalitis virus
caccgagcgccgaacacuguga

SEQ ID NO: 4046848 - RNA, 20 nt, Murray Valley encephalitis virus
cagaucgcgaaagcgccacu

SEQ ID NO: 4046849 - RNA, 15 nt, Murray Valley encephalitis virus
caggaggacuggguu

SEQ ID NO: 4046850 - RNA, 19 nt, Murray Valley encephalitis virus
ccacgguuggaaagccucc

SEQ ID NO: 4046851 - RNA, 23 nt, Murray Valley encephalitis virus
ccccaggaggacuggguaaacaa

SEQ ID NO: 4046852 - RNA, 23 nt, Murray Valley encephalitis virus
ccccaggaggacuggguuaccaa

SEQ ID NO: 4046853 - RNA, 19 nt, Murray Valley encephalitis virus
ccugcgaccaaccccagga

SEQ ID NO: 4046854 - RNA, 13 nt, Murray Valley encephalitis virus
ccugggaaaagac

SEQ ID NO: 4046855 - RNA, 15 nt, Murray Valley encephalitis virus
cgaccaaccccagga

SEQ ID NO: 4046856 - RNA, 18 nt, Murray Valley encephalitis virus
cgaggagugcaaucugug

SEQ ID NO: 4046857 - RNA, 13 nt, Murray Valley encephalitis virus
cgccgaagcugua

SEQ ID NO: 4046858 - RNA, 16 nt, Murray Valley encephalitis virus
cgccgaggagugcaau

SEQ ID NO: 4046859 - RNA, 18 nt, Murray Valley encephalitis virus
cuagagguuagaggagac

SEQ ID NO: 4046860 - RNA, 16 nt, Murray Valley encephalitis virus
cugugaggccccagga

SEQ ID NO: 4046861 - RNA, 21 nt, Murray Valley encephalitis virus
cuucugcucuauuccaacauc

SEQ ID NO: 4046862 - RNA, 15 nt, Murray Valley encephalitis virus
gaaaagacuaggaga

SEQ ID NO: 4046863 - RNA, 17 nt, Murray Valley encephalitis virus
gaccaaccccaggagga

SEQ ID NO: 4046864 - RNA, 22 nt, Murray Valley encephalitis virus
gcccaagcucgccgaagcugua

SEQ ID NO: 4046865 - RNA, 16 nt, Murray Valley encephalitis virus
gccccaggaggacugg

SEQ ID NO: 4046866 - RNA, 21 nt, Murray Valley encephalitis virus
gccgaacacugugacugaugg

SEQ ID NO: 4046867 - RNA, 19 nt, Murray Valley encephalitis virus
gcgaccaaccccaggagga

SEQ ID NO: 4046868 - RNA, 21 nt, Murray Valley encephalitis virus
ggacuagagguuagaggagac

SEQ ID NO: 4046869 - RNA, 15 nt, Murray Valley encephalitis virus
gggccgggaggaggu

SEQ ID NO: 4046870 - RNA, 18 nt, Murray Valley encephalitis virus
gguuggaaagccucccag

SEQ ID NO: 4046871 - RNA, 22 nt, Murray Valley encephalitis virus
gguugguagacggugcugccug

SEQ ID NO: 4046872 - RNA, 15 nt, Murray Valley encephalitis virus
guaaacaaagccgua

SEQ ID NO: 4046873 - RNA, 16 nt, Murray Valley encephalitis virus
gugaggccccaggagg

SEQ ID NO: 4046874 - RNA, 15 nt, Murray Valley encephalitis virus
gugcugccugcgacc

SEQ ID NO: 4046875 - RNA, 19 nt, Murray Valley encephalitis virus
guggacggacuagagguua

SEQ ID NO: 4046876 - RNA, 18 nt, Murray Valley encephalitis virus
guuaccaaagcugauucu

SEQ ID NO: 4046877 - RNA, 20 nt, Murray Valley encephalitis virus
guuggaaagccucccagaac

SEQ ID NO: 4046878 - RNA, 13 nt, Murray Valley encephalitis virus
uagagguuagagg

SEQ ID NO: 4046879 - RNA, 16 nt, Murray Valley encephalitis virus
uagagguuagaggaga

SEQ ID NO: 4046880 - RNA, 18 nt, Murray Valley encephalitis virus
uaguauagguaaaauuuu

SEQ ID NO: 4046881 - RNA, 18 nt, Murray Valley encephalitis virus
ucugugaggccccaggag

SEQ ID NO: 4046882 - RNA, 22 nt, Murray Valley encephalitis virus
ugacugaugggggagaagacca

SEQ ID NO: 4046883 - RNA, 21 nt, Murray Valley encephalitis virus
ugcaaucugugaggccccagg

SEQ ID NO: 4046884 - RNA, 16 nt, Murray Valley encephalitis virus
ugcgaccaaccccagg

SEQ ID NO: 4046885 - RNA, 19 nt, Murray Valley encephalitis virus
ugcugccugcgaccaaccc

SEQ ID NO: 4046886 - RNA, 23 nt, Murray Valley encephalitis virus
uguaauauaguauagguaaaauu

SEQ ID NO: 4046887 - RNA, 20 nt, Murray Valley encephalitis virus
aaccgucucggaagaggagu

SEQ ID NO: 4046888 - RNA, 15 nt, Murray Valley encephalitis virus
accaaccccaggagg

SEQ ID NO: 4046889 - RNA, 17 nt, Murray Valley encephalitis virus
accugggaaaagacuag

SEQ ID NO: 4046890 - RNA, 22 nt, Murray Valley encephalitis virus
acgguuggaaagccucccagaa

SEQ ID NO: 4046891 - RNA, 18 nt, Murray Valley encephalitis virus
acuagagguuagaggaga

SEQ ID NO: 4046892 - RNA, 20 nt, Murray Valley encephalitis virus
agaaaugaguggcccaagcu

SEQ ID NO: 4046893 - RNA, 22 nt, Murray Valley encephalitis virus
aggacuagagguuagaggagac

SEQ ID NO: 4046894 - RNA, 11 nt, Murray Valley encephalitis virus
aggaggacugg

SEQ ID NO: 4046895 - RNA, 22 nt, Murray Valley encephalitis virus
aggagugcaaucugugaggccc

SEQ ID NO: 4046896 - RNA, 21 nt, Murray Valley encephalitis virus
aggccagccgguuaggcugcc

SEQ ID NO: 4046897 - RNA, 13 nt, Murray Valley encephalitis virus
aggccccaggagg

SEQ ID NO: 4046898 - RNA, 15 nt, Murray Valley encephalitis virus
agugcaaucugugag

SEQ ID NO: 4046899 - RNA, 21 nt, Murray Valley encephalitis virus
aucugugaggccccaggagga

SEQ ID NO: 4046900 - RNA, 23 nt, Murray Valley encephalitis virus
auguaauauaguauagguaaaau

SEQ ID NO: 4046901 - RNA, 17 nt, Murray Valley encephalitis virus
auuaaguagcaagacuu

SEQ ID NO: 4046902 - RNA, 22 nt, Murray Valley encephalitis virus
auuuaauguaauauaguauagg

SEQ ID NO: 4046903 - RNA, 22 nt, Murray Valley encephalitis virus
caaucugugaggccccaggagg

SEQ ID NO: 4046904 - RNA, 13 nt, Murray Valley encephalitis virus
ccaggaggacugg

SEQ ID NO: 4046905 - RNA, 21 nt, Murray Valley encephalitis virus
cccagaaccgucucggaagag

SEQ ID NO: 4046906 - RNA, 21 nt, Murray Valley encephalitis virus
cccaggaggacuggguuacca

SEQ ID NO: 4046907 - RNA, 21 nt, Murray Valley encephalitis virus
cccccgcagcccgggccggga

SEQ ID NO: 4046908 - RNA, 17 nt, Murray Valley encephalitis virus
cugccugcgaccaaccc

SEQ ID NO: 4046909 - RNA, 12 nt, Murray Valley encephalitis virus
gaacacugugac

SEQ ID NO: 4046910 - RNA, 16 nt, Murray Valley encephalitis virus
gaccaaccccaggagg

SEQ ID NO: 4046911 - RNA, 17 nt, Murray Valley encephalitis virus
gacugaugggggagaag

SEQ ID NO: 4046912 - RNA, 20 nt, Murray Valley encephalitis virus
gacugaugggggagaagacc

SEQ ID NO: 4046913 - RNA, 13 nt, Murray Valley encephalitis virus
gaggccccaggag

SEQ ID NO: 4046914 - RNA, 15 nt, Murray Valley encephalitis virus
gagucccugccaaca

SEQ ID NO: 4046915 - RNA, 19 nt, Murray Valley encephalitis virus
gccugcgaccaaccccagg

SEQ ID NO: 4046916 - RNA, 20 nt, Murray Valley encephalitis virus
gccugcgaccaaccccagga

SEQ ID NO: 4046917 - RNA, 15 nt, Murray Valley encephalitis virus
gcgaccaaccccagg

SEQ ID NO: 4046918 - RNA, 18 nt, Murray Valley encephalitis virus
ggaaaagacuaggagauc

SEQ ID NO: 4046919 - RNA, 17 nt, Murray Valley encephalitis virus
ggaagaggagucccugc

SEQ ID NO: 4046920 - RNA, 14 nt, Murray Valley encephalitis virus
ggaggaggugaugc

SEQ ID NO: 4046921 - RNA, 16 nt, Murray Valley encephalitis virus
ggcgaaggacuagagg

SEQ ID NO: 4046922 - RNA, 17 nt, Murray Valley encephalitis virus
gguggacggacuagagg

SEQ ID NO: 4046923 - RNA, 13 nt, Murray Valley encephalitis virus
gugaggccccagg

SEQ ID NO: 4046924 - RNA, 19 nt, Murray Valley encephalitis virus
ucucaaaagcaucaaacaa

SEQ ID NO: 4046925 - RNA, 13 nt, Murray Valley encephalitis virus
ugaggccccagga

SEQ ID NO: 4046926 - RNA, 22 nt, Murray Valley encephalitis virus
ugccugcgaccaaccccaggag

SEQ ID NO: 4046927 - RNA, 18 nt, Murray Valley encephalitis virus
ugcgaccaaccccaggag

SEQ ID NO: 4046928 - RNA, 20 nt, Murray Valley encephalitis virus
ugcgaccaaccccaggagga

SEQ ID NO: 4046929 - RNA, 15 nt, Murray Valley encephalitis virus
ugcucuauuccaaca

SEQ ID NO: 4046930 - RNA, 15 nt, Murray Valley encephalitis virus
uugauagaaaauuuu

SEQ ID NO: 4046931 - RNA, 17 nt, Murray Valley encephalitis virus
aaccccaggaggacugg

SEQ ID NO: 4046932 - RNA, 21 nt, Murray Valley encephalitis virus
aaucugugaggccccaggagg

SEQ ID NO: 4046933 - RNA, 22 nt, Murray Valley encephalitis virus
acagcauauugacaccugggaa

SEQ ID NO: 4046934 - RNA, 23 nt, Murray Valley encephalitis virus
acugaugggggagaagaccacag

SEQ ID NO: 4046935 - RNA, 17 nt, Murray Valley encephalitis virus
acuggguuaccaaagcu

SEQ ID NO: 4046936 - RNA, 14 nt, Murray Valley encephalitis virus
agacggugcugccu

SEQ ID NO: 4046937 - RNA, 16 nt, Murray Valley encephalitis virus
agagguuagaggagac

SEQ ID NO: 4046938 - RNA, 12 nt, Murray Valley encephalitis virus
aggccccaggag

SEQ ID NO: 4046939 - RNA, 14 nt, Murray Valley encephalitis virus
aggccccaggagga

SEQ ID NO: 4046940 - RNA, 19 nt, Murray Valley encephalitis virus
agguuagaggagacccugc

SEQ ID NO: 4046941 - RNA, 11 nt, Murray Valley encephalitis virus
aaccccaggag

SEQ ID NO: 4046942 - RNA, 13 nt, Murray Valley encephalitis virus
aaccccaggagga

SEQ ID NO: 4046943 - RNA, 18 nt, Murray Valley encephalitis virus
aaccccggcgaaggacua

SEQ ID NO: 4046944 - RNA, 13 nt, Murray Valley encephalitis virus
aagccguaaggcc

SEQ ID NO: 4046945 - RNA, 22 nt, Murray Valley encephalitis virus
aagcgccacuucgccgaggagu

SEQ ID NO: 4046946 - RNA, 18 nt, Murray Valley encephalitis virus
accccaggaggacugggu

SEQ ID NO: 4046947 - RNA, 23 nt, Murray Valley encephalitis virus
acggacuagagguuagaggagac

SEQ ID NO: 4046948 - RNA, 14 nt, Murray Valley encephalitis virus
acuugauagucagg

SEQ ID NO: 4046949 - RNA, 14 nt, Murray Valley encephalitis virus
agccguaaggcccc

SEQ ID NO: 4046950 - RNA, 18 nt, Murray Valley encephalitis virus
aggagaucuucugcucua

SEQ ID NO: 4046951 - RNA, 13 nt, Murray Valley encephalitis virus
aggaggacugggu

SEQ ID NO: 4046952 - RNA, 18 nt, Murray Valley encephalitis virus
aggccccaggaggacugg

SEQ ID NO: 4046953 - RNA, 22 nt, Murray Valley encephalitis virus
aucuucugcucuauuccaacau

SEQ ID NO: 4046954 - RNA, 22 nt, Murray Valley encephalitis virus
caacaucagucacaaggcaccg

SEQ ID NO: 4046955 - RNA, 13 nt, Murray Valley encephalitis virus
caaccccaggagg

SEQ ID NO: 4046956 - RNA, 20 nt, Murray Valley encephalitis virus
caaucugugaggccccagga

SEQ ID NO: 4046957 - RNA, 20 nt, Murray Valley encephalitis virus
caccugggaaaagacuagga

SEQ ID NO: 4046958 - RNA, 14 nt, Murray Valley encephalitis virus
caggaggacugggu

SEQ ID NO: 4046959 - RNA, 15 nt, Murray Valley encephalitis virus
caggccagccgguua

SEQ ID NO: 4046960 - RNA, 15 nt, Murray Valley encephalitis virus
ccacuucgccgagga

SEQ ID NO: 4046961 - RNA, 21 nt, Murray Valley encephalitis virus
cccaggaggacuggguaaaca

SEQ ID NO: 4046962 - RNA, 23 nt, Murray Valley encephalitis virus
ccgcagcccgggccgggaggagg

SEQ ID NO: 4046963 - RNA, 19 nt, Murray Valley encephalitis virus
cggguggacggacuagagg

SEQ ID NO: 4046964 - RNA, 22 nt, Murray Valley encephalitis virus
cgucucggaagaggagucccug

SEQ ID NO: 4046965 - RNA, 21 nt, Murray Valley encephalitis virus
cuagagguuagaggagacccu

SEQ ID NO: 4046966 - RNA, 16 nt, Murray Valley encephalitis virus
cuucgccgaggagugc

SEQ ID NO: 4046967 - RNA, 14 nt, Murray Valley encephalitis virus
gaggccccaggagg

SEQ ID NO: 4046968 - RNA, 15 nt, Murray Valley encephalitis virus
gaggccccaggagga

SEQ ID NO: 4046969 - RNA, 13 nt, Murray Valley encephalitis virus
gaucuucugcucu

SEQ ID NO: 4046970 - RNA, 17 nt, Murray Valley encephalitis virus
gcagcccgggccgggag

SEQ ID NO: 4046971 - RNA, 14 nt, Murray Valley encephalitis virus
gccgaacacuguga

SEQ ID NO: 4046972 - RNA, 18 nt, Murray Valley encephalitis virus
gcgaccaaccccaggagg

SEQ ID NO: 4046973 - RNA, 13 nt, Murray Valley encephalitis virus
ggccccaggagga

SEQ ID NO: 4046974 - RNA, 21 nt, Murray Valley encephalitis virus
ucugugaggccccaggaggac

SEQ ID NO: 4046975 - RNA, 17 nt, Murray Valley encephalitis virus
ugaaauuaaguaaaauu

SEQ ID NO: 4046976 - RNA, 19 nt, Murray Valley encephalitis virus
ugcgaccaaccccaggagg

SEQ ID NO: 4046977 - RNA, 15 nt, Murray Valley encephalitis virus
uggagaugaagcccg

SEQ ID NO: 4046978 - RNA, 19 nt, Murray Valley encephalitis virus
ugguagacggugcugccug

SEQ ID NO: 4046979 - RNA, 21 nt, Murray Valley encephalitis virus
caaucugugaggccccaggag

SEQ ID NO: 4046980 - RNA, 15 nt, Murray Valley encephalitis virus
caggaggacugggua

SEQ ID NO: 4046981 - RNA, 14 nt, Murray Valley encephalitis virus
ccaaccccaggagg

SEQ ID NO: 4046982 - RNA, 21 nt, Murray Valley encephalitis virus
ccagccgguuaggcugccacc

SEQ ID NO: 4046983 - RNA, 14 nt, Murray Valley encephalitis virus
ccaggaggacuggg

SEQ ID NO: 4046984 - RNA, 15 nt, Murray Valley encephalitis virus
ccccaggaggacugg

SEQ ID NO: 4046985 - RNA, 13 nt, Murray Valley encephalitis virus
ccguaaggccccc

SEQ ID NO: 4046986 - RNA, 17 nt, Murray Valley encephalitis virus
ccugcggaagaaaugag

SEQ ID NO: 4046987 - RNA, 17 nt, Murray Valley encephalitis virus
cuagagguuagaggaga

SEQ ID NO: 4046988 - RNA, 21 nt, Murray Valley encephalitis virus
cuagagguuagaggagacccc

SEQ ID NO: 4046989 - RNA, 22 nt, Murray Valley encephalitis virus
cugccugcgaccaaccccagga

SEQ ID NO: 4046990 - RNA, 17 nt, Murray Valley encephalitis virus
cugcgaccaaccccagg

SEQ ID NO: 4046991 - RNA, 22 nt, Murray Valley encephalitis virus
cugcgaccaaccccaggaggac

SEQ ID NO: 4046992 - RNA, 16 nt, Murray Valley encephalitis virus
cugggaaaagacuagg

SEQ ID NO: 4046993 - RNA, 20 nt, Murray Valley encephalitis virus
cugugaggccccaggaggac

SEQ ID NO: 4046994 - RNA, 15 nt, Murray Valley encephalitis virus
gaagaggagucccug

SEQ ID NO: 4046995 - RNA, 22 nt, Murray Valley encephalitis virus
gaccaaccccaggaggacuggg

SEQ ID NO: 4046996 - RNA, 24 nt, Murray Valley encephalitis virus
gacuagagguuagaggagacccug

SEQ ID NO: 4046997 - RNA, 16 nt, Murray Valley encephalitis virus
gacugaugggggagaa

SEQ ID NO: 4046998 - RNA, 18 nt, Murray Valley encephalitis virus
gacuggguuaccaaagcu

SEQ ID NO: 4046999 - RNA, 20 nt, Murray Valley encephalitis virus
gagucccugccaacaaugga

SEQ ID NO: 4047000 - RNA, 22 nt, Murray Valley encephalitis virus
gagugcaaucugugaggcccca

SEQ ID NO: 4047001 - RNA, 20 nt, Murray Valley encephalitis virus
ggacuagagguuagaggaga

SEQ ID NO: 4047002 - RNA, 15 nt, Murray Valley encephalitis virus
ggagaagaccacagg

SEQ ID NO: 4047003 - RNA, 19 nt, Murray Valley encephalitis virus
ggagugcaaucugugaggc

SEQ ID NO: 4047004 - RNA, 15 nt, Murray Valley encephalitis virus
gguagacggugcugc

SEQ ID NO: 4047005 - RNA, 12 nt, Murray Valley encephalitis virus
gucucggaagag

SEQ ID NO: 4047006 - RNA, 14 nt, Murray Valley encephalitis virus
guuaggcugccacc

SEQ ID NO: 4047007 - RNA, 15 nt, Murray Valley encephalitis virus
ugaggccccaggagg

SEQ ID NO: 4047008 - RNA, 16 nt, Murray Valley encephalitis virus
ugaggccccaggagga

SEQ ID NO: 4047009 - RNA, 16 nt, Murray Valley encephalitis virus
ugaguggcccaagcuc

SEQ ID NO: 4047010 - RNA, 21 nt, Murray Valley encephalitis virus
ugcgaccaaccccaggaggac

SEQ ID NO: 4047011 - RNA, 16 nt, Murray Valley encephalitis virus
ugugaggccccaggag

SEQ ID NO: 4047012 - RNA, 19 nt, Norwalk virus
aacacaucuagccccuucu

SEQ ID NO: 4047013 - RNA, 16 nt, Norwalk virus
aaccaggcccuucaca

SEQ ID NO: 4047014 - RNA, 17 nt, Norwalk virus
aacucacgugccccucu

SEQ ID NO: 4047015 - RNA, 20 nt, Norwalk virus
aacucacgugccccucuccc

SEQ ID NO: 4047016 - RNA, 20 nt, Norwalk virus
aagccugugggaacugccag

SEQ ID NO: 4047017 - RNA, 22 nt, Norwalk virus
aaucuuggggaauucaaagcau

SEQ ID NO: 4047018 - RNA, 12 nt, Norwalk virus
acacaucuagcc

SEQ ID NO: 4047019 - RNA, 18 nt, Norwalk virus
acacucccaaaucugcca

SEQ ID NO: 4047020 - RNA, 17 nt, Norwalk virus
acacugucuucugugcc

SEQ ID NO: 4047021 - RNA, 19 nt, Norwalk virus
acaugugauugcugauguu

SEQ ID NO: 4047022 - RNA, 14 nt, Norwalk virus
accacauugagauc

SEQ ID NO: 4047023 - RNA, 18 nt, Norwalk virus
accccaguuucauuguca

SEQ ID NO: 4047024 - RNA, 22 nt, Norwalk virus
accccauugaggugccuuugga

SEQ ID NO: 4047025 - RNA, 16 nt, Norwalk virus
acccgucuggcuccca

SEQ ID NO: 4047026 - RNA, 13 nt, Norwalk virus
acugccagcucgg

SEQ ID NO: 4047027 - RNA, 16 nt, Norwalk virus
acugucuucugugcca

SEQ ID NO: 4047028 - RNA, 13 nt, Norwalk virus
agacaccaccccu

SEQ ID NO: 4047029 - RNA, 21 nt, Norwalk virus
agagugugcaguuccaaaaug

SEQ ID NO: 4047030 - RNA, 22 nt, Norwalk virus
agccccuucuguauaccccccu

SEQ ID NO: 4047031 - RNA, 22 nt, Norwalk virus
aguaguaucggcauuuccccag

SEQ ID NO: 4047032 - RNA, 18 nt, Norwalk virus
agucgcgacugcuggaca

SEQ ID NO: 4047033 - RNA, 16 nt, Norwalk virus
agugugguugacucca

SEQ ID NO: 4047034 - RNA, 18 nt, Norwalk virus
aguuaugacuugccccag

SEQ ID NO: 4047035 - RNA, 22 nt, Norwalk virus
auaccacgcggaggcucucaau

SEQ ID NO: 4047036 - RNA, 19 nt, Norwalk virus
auaugacacaguuuggcca

SEQ ID NO: 4047037 - RNA, 11 nt, Norwalk virus
aucaauuauug

SEQ ID NO: 4047038 - RNA, 19 nt, Norwalk virus
caguaguaucggcauuucc

SEQ ID NO: 4047039 - RNA, 17 nt, Norwalk virus
caucaagcguggauggc

SEQ ID NO: 4047040 - RNA, 18 nt, Norwalk virus
ccaauggggcuagcucgg

SEQ ID NO: 4047041 - RNA, 17 nt, Norwalk virus
ccauucuagccagaccc

SEQ ID NO: 4047042 - RNA, 19 nt, Norwalk virus
ccauuggguuuccagaccu

SEQ ID NO: 4047043 - RNA, 22 nt, Norwalk virus
ccauuggguuuccagaccucgg

SEQ ID NO: 4047044 - RNA, 18 nt, Norwalk virus
cccaaguugaccuuugga

SEQ ID NO: 4047045 - RNA, 18 nt, Norwalk virus
ccccaaggugaauuuacu

SEQ ID NO: 4047046 - RNA, 15 nt, Norwalk virus
cccugucuauuacca

SEQ ID NO: 4047047 - RNA, 23 nt, Norwalk virus
ccuacgguggagcagaaaaccag

SEQ ID NO: 4047048 - RNA, 21 nt, Norwalk virus
ccucuaagcaaaaacagguuc

SEQ ID NO: 4047049 - RNA, 21 nt, Norwalk virus
cgaucaauggggucuuugucu

SEQ ID NO: 4047050 - RNA, 15 nt, Norwalk virus
cgcggaggcucucaa

SEQ ID NO: 4047051 - RNA, 19 nt, Norwalk virus
cgcuaguggcgcuggucag

SEQ ID NO: 4047052 - RNA, 20 nt, Norwalk virus
cgggcauacagguugguggc

SEQ ID NO: 4047053 - RNA, 14 nt, Norwalk virus
cugaauuggauggc

SEQ ID NO: 4047054 - RNA, 14 nt, Norwalk virus
cuucacacucccaa

SEQ ID NO: 4047055 - RNA, 19 nt, Norwalk virus
cuuggggaauucaaagcau

SEQ ID NO: 4047056 - RNA, 20 nt, Norwalk virus
gacaaguuaauccuauugau

SEQ ID NO: 4047057 - RNA, 19 nt, Norwalk virus
gagcuccagucacccgcau

SEQ ID NO: 4047058 - RNA, 15 nt, Norwalk virus
gagguuaaugcuucu

SEQ ID NO: 4047059 - RNA, 16 nt, Norwalk virus
gauccgguggcuucau

SEQ ID NO: 4047060 - RNA, 15 nt, Norwalk virus
gcaagaaaauucuuu

SEQ ID NO: 4047061 - RNA, 14 nt, Norwalk virus
gcugcccugcucca

SEQ ID NO: 4047062 - RNA, 14 nt, Norwalk virus
ggauggcacacccu

SEQ ID NO: 4047063 - RNA, 18 nt, Norwalk virus
ggcaggagcuccagucac

SEQ ID NO: 4047064 - RNA, 13 nt, Norwalk virus
ggcaucauauuca

SEQ ID NO: 4047065 - RNA, 15 nt, Norwalk virus
gggcccugcccccau

SEQ ID NO: 4047066 - RNA, 17 nt, Norwalk virus
ggguccacaacagcugc

SEQ ID NO: 4047067 - RNA, 22 nt, Norwalk virus
gguuuccucacuugugucccca

SEQ ID NO: 4047068 - RNA, 17 nt, Norwalk virus
guccucugcuaccacau

SEQ ID NO: 4047069 - RNA, 14 nt, Norwalk virus
guuugaccagugcu

SEQ ID NO: 4047070 - RNA, 14 nt, Norwalk virus
guuuuuagucccuc

SEQ ID NO: 4047071 - RNA, 23 nt, Norwalk virus
uaaacaugacagggaaaugauug

SEQ ID NO: 4047072 - RNA, 16 nt, Norwalk virus
uaauaauuuugugcaa

SEQ ID NO: 4047073 - RNA, 13 nt, Norwalk virus
uaaugcuucugac

SEQ ID NO: 4047074 - RNA, 18 nt, Norwalk virus
uaauuagguuuaauuuga

SEQ ID NO: 4047075 - RNA, 19 nt, Norwalk virus
uacacugucuucugugcca

SEQ ID NO: 4047076 - RNA, 17 nt, Norwalk virus
uaccacgcggaggcucu

SEQ ID NO: 4047077 - RNA, 13 nt, Norwalk virus
uacuauuucccca

SEQ ID NO: 4047078 - RNA, 18 nt, Norwalk virus
uaguaucggcauuucccc

SEQ ID NO: 4047079 - RNA, 19 nt, Norwalk virus
uaguaucggcauuucccca

SEQ ID NO: 4047080 - RNA, 13 nt, Norwalk virus
uaucaauaugaca

SEQ ID NO: 4047081 - RNA, 20 nt, Norwalk virus
ucaaucaucugguauuagua

SEQ ID NO: 4047082 - RNA, 15 nt, Norwalk virus
ucacgugccccucuc

SEQ ID NO: 4047083 - RNA, 18 nt, Norwalk virus
ucaggauuaugcuagcug

SEQ ID NO: 4047084 - RNA, 17 nt, Norwalk virus
uccgguggcuucauguc

SEQ ID NO: 4047085 - RNA, 16 nt, Norwalk virus
uccuccgugcuggggg

SEQ ID NO: 4047086 - RNA, 17 nt, Norwalk virus
ucucccaaucaguagua

SEQ ID NO: 4047087 - RNA, 20 nt, Norwalk virus
ucugcgccgauaauggccca

SEQ ID NO: 4047088 - RNA, 21 nt, Norwalk virus
ucuggauggccgccugguugg

SEQ ID NO: 4047089 - RNA, 23 nt, Norwalk virus
ucuugcuagugaacaagccccua

SEQ ID NO: 4047090 - RNA, 14 nt, Norwalk virus
ucuugguucaauuc

SEQ ID NO: 4047091 - RNA, 14 nt, Norwalk virus
ugaccuuuggaaga

SEQ ID NO: 4047092 - RNA, 22 nt, Norwalk virus
ugaugcagcaagaucuguggca

SEQ ID NO: 4047093 - RNA, 19 nt, Norwalk virus
ugcauacccccugguuuug

SEQ ID NO: 4047094 - RNA, 17 nt, Norwalk virus
ugcuuccacagcaggua

SEQ ID NO: 4047095 - RNA, 19 nt, Norwalk virus
uggauaauuaauaauuuug

SEQ ID NO: 4047096 - RNA, 19 nt, Norwalk virus
uggcacacccuuucacccu

SEQ ID NO: 4047097 - RNA, 16 nt, Norwalk virus
uggccauucuagccag

SEQ ID NO: 4047098 - RNA, 18 nt, Norwalk virus
ugguuauuucaauacaga

SEQ ID NO: 4047099 - RNA, 19 nt, Norwalk virus
uguaaucaaccuuacugaa

SEQ ID NO: 4047100 - RNA, 22 nt, Norwalk virus
uguacucuggauggccgccugg

SEQ ID NO: 4047101 - RNA, 19 nt, Norwalk virus
ugucuucugugccacgugg

SEQ ID NO: 4047102 - RNA, 17 nt, Norwalk virus
uguggcaggagcuccag

SEQ ID NO: 4047103 - RNA, 15 nt, Norwalk virus
ugugguugacuccac

SEQ ID NO: 4047104 - RNA, 16 nt, Norwalk virus
uguguccccaaugggg

SEQ ID NO: 4047105 - RNA, 23 nt, Norwalk virus
uguuguaauaugaaaugugggca

SEQ ID NO: 4047106 - RNA, 18 nt, Norwalk virus
uucccauaccauuugccu

SEQ ID NO: 4047107 - RNA, 19 nt, Norwalk virus
uucuuguuuuuagucccuc

SEQ ID NO: 4047108 - RNA, 19 nt, Norwalk virus
uugagauccgguggcuuca

SEQ ID NO: 4047109 - RNA, 19 nt, Norwalk virus
uuuaauuagguuuaauuug

SEQ ID NO: 4047110 - RNA, 17 nt, Norwalk virus
acugucuucugugccac

SEQ ID NO: 4047111 - RNA, 16 nt, Norwalk virus
agcaacucucuuucca

SEQ ID NO: 4047112 - RNA, 16 nt, Norwalk virus
agcagguucuucgaca

SEQ ID NO: 4047113 - RNA, 21 nt, Norwalk virus
agcuggauuucccccccauca

SEQ ID NO: 4047114 - RNA, 17 nt, Norwalk virus
aggaauguucucuuuca

SEQ ID NO: 4047115 - RNA, 17 nt, Norwalk virus
aggacucuagaccccau

SEQ ID NO: 4047116 - RNA, 14 nt, Norwalk virus
agggcccugccccc

SEQ ID NO: 4047117 - RNA, 21 nt, Norwalk virus
agguuuaauuagguuuaauuu

SEQ ID NO: 4047118 - RNA, 16 nt, Norwalk virus
aguccucugcuaccac

SEQ ID NO: 4047119 - RNA, 11 nt, Norwalk virus
auauucauuua

SEQ ID NO: 4047120 - RNA, 13 nt, Norwalk virus
auauucauuuaau

SEQ ID NO: 4047121 - RNA, 14 nt, Norwalk virus
auccgguggcuuca

SEQ ID NO: 4047122 - RNA, 20 nt, Norwalk virus
auggcgugagagugucugcu

SEQ ID NO: 4047123 - RNA, 20 nt, Norwalk virus
auguccagagugugcaguuc

SEQ ID NO: 4047124 - RNA, 17 nt, Norwalk virus
auguuguaauaugaaau

SEQ ID NO: 4047125 - RNA, 14 nt, Norwalk virus
cacaucuagccccu

SEQ ID NO: 4047126 - RNA, 12 nt, Norwalk virus
cacuuuuguccc

SEQ ID NO: 4047127 - RNA, 16 nt, Norwalk virus
cagcaagaucuguggc

SEQ ID NO: 4047128 - RNA, 17 nt, Norwalk virus
cagcagguagugcucug

SEQ ID NO: 4047129 - RNA, 20 nt, Norwalk virus
caggcccuucacacucccaa

SEQ ID NO: 4047130 - RNA, 19 nt, Norwalk virus
cagguugccauuauucgca

SEQ ID NO: 4047131 - RNA, 18 nt, Norwalk virus
caguuucauugucacaug

SEQ ID NO: 4047132 - RNA, 23 nt, Norwalk virus
cauaauuggugcaauugcugcuu

SEQ ID NO: 4047133 - RNA, 18 nt, Norwalk virus
aacaaaauuugcaacugc

SEQ ID NO: 4047134 - RNA, 16 nt, Norwalk virus
aacagccucuucuaca

SEQ ID NO: 4047135 - RNA, 12 nt, Norwalk virus
aaugauagaaau

SEQ ID NO: 4047136 - RNA, 18 nt, Norwalk virus
aauuggugcaauugcugc

SEQ ID NO: 4047137 - RNA, 15 nt, Norwalk virus
acaaaauuugcaacu

SEQ ID NO: 4047138 - RNA, 13 nt, Norwalk virus
acaccccccuccg

SEQ ID NO: 4047139 - RNA, 15 nt, Norwalk virus
accccauugaggugc

SEQ ID NO: 4047140 - RNA, 23 nt, Norwalk virus
accucggugguugugauuggcau

SEQ ID NO: 4047141 - RNA, 15 nt, Norwalk virus
acgcggaggcucuca

SEQ ID NO: 4047142 - RNA, 18 nt, Norwalk virus
acucaucgagauuuggaa

SEQ ID NO: 4047143 - RNA, 13 nt, Norwalk virus
caucuuaauccuu

SEQ ID NO: 4047144 - RNA, 18 nt, Norwalk virus
caugcgccuugugugcau

SEQ ID NO: 4047145 - RNA, 14 nt, Norwalk virus
cauguugccaagau

SEQ ID NO: 4047146 - RNA, 20 nt, Norwalk virus
cauuuccccagacaaugucc

SEQ ID NO: 4047147 - RNA, 15 nt, Norwalk virus
ccagagugugcaguu

SEQ ID NO: 4047148 - RNA, 15 nt, Norwalk virus
ccagauuuuaucaau

SEQ ID NO: 4047149 - RNA, 17 nt, Norwalk virus
ccaggcccuucacacuc

SEQ ID NO: 4047150 - RNA, 14 nt, Norwalk virus
ccccaucacacccg

SEQ ID NO: 4047151 - RNA, 16 nt, Norwalk virus
ccugauuuuaauuucu

SEQ ID NO: 4047152 - RNA, 14 nt, Norwalk virus
ccuucacacuccca

SEQ ID NO: 4047153 - RNA, 20 nt, Norwalk virus
cgagucacaaaacucaucga

SEQ ID NO: 4047154 - RNA, 13 nt, Norwalk virus
cgaguuaugacuu

SEQ ID NO: 4047155 - RNA, 17 nt, Norwalk virus
cggaggcaacacaucua

SEQ ID NO: 4047156 - RNA, 12 nt, Norwalk virus
cuccauaccacg

SEQ ID NO: 4047157 - RNA, 13 nt, Norwalk virus
cugguuggcacca

SEQ ID NO: 4047158 - RNA, 22 nt, Norwalk virus
cuuuggaagauccccaauuaug

SEQ ID NO: 4047159 - RNA, 20 nt, Norwalk virus
gaagauguuaggaauguucu

SEQ ID NO: 4047160 - RNA, 18 nt, Norwalk virus
gcaacacaucuagccccu

SEQ ID NO: 4047161 - RNA, 20 nt, Norwalk virus
gcacuguaaucaaccuuacu

SEQ ID NO: 4047162 - RNA, 13 nt, Norwalk virus
gcaguuccaaaau

SEQ ID NO: 4047163 - RNA, 21 nt, Norwalk virus
gcugccgaucaauggggucuu

SEQ ID NO: 4047164 - RNA, 13 nt, Norwalk virus
ggaaaucuuucuc

SEQ ID NO: 4047165 - RNA, 19 nt, Norwalk virus
ggagcgggcauacagguug

SEQ ID NO: 4047166 - RNA, 20 nt, Norwalk virus
ggauccuguagcagguucuu

SEQ ID NO: 4047167 - RNA, 16 nt, Norwalk virus
ggcaagagguaggcuu

SEQ ID NO: 4047168 - RNA, 17 nt, Norwalk virus
ggcccuucacacuccca

SEQ ID NO: 4047169 - RNA, 18 nt, Norwalk virus
ggccgccugguuggcacc

SEQ ID NO: 4047170 - RNA, 14 nt, Norwalk virus
gggcauacagguug

SEQ ID NO: 4047171 - RNA, 14 nt, Norwalk virus
gguucaacagccuc

SEQ ID NO: 4047172 - RNA, 18 nt, Norwalk virus
guaucggcauuuccccag

SEQ ID NO: 4047173 - RNA, 20 nt, Norwalk virus
gucugcucccgaguccucug

SEQ ID NO: 4047174 - RNA, 20 nt, Norwalk virus
gugccuuuggaagauguuag

SEQ ID NO: 4047175 - RNA, 15 nt, Norwalk virus
guggcuucaugucag

SEQ ID NO: 4047176 - RNA, 16 nt, Norwalk virus
guugaccuuuggaaga

SEQ ID NO: 4047177 - RNA, 16 nt, Norwalk virus
guuggcaccaccccag

SEQ ID NO: 4047178 - RNA, 15 nt, Norwalk virus
uaauccaaauuauuc

SEQ ID NO: 4047179 - RNA, 15 nt, Norwalk virus
uaauuugcccugucu

SEQ ID NO: 4047180 - RNA, 15 nt, Norwalk virus
uacacugucuucugu

SEQ ID NO: 4047181 - RNA, 19 nt, Norwalk virus
uacagugugguugacucca

SEQ ID NO: 4047182 - RNA, 23 nt, Norwalk virus
uacuguaggugaggcugcccugc

SEQ ID NO: 4047183 - RNA, 13 nt, Norwalk virus
ucaaagcauaccc

SEQ ID NO: 4047184 - RNA, 19 nt, Norwalk virus
ucacacccgucuggcuccc

SEQ ID NO: 4047185 - RNA, 21 nt, Norwalk virus
ucacacccgucuggcucccaa

SEQ ID NO: 4047186 - RNA, 22 nt, Norwalk virus
uccaaauuauuccccuucaucc

SEQ ID NO: 4047187 - RNA, 13 nt, Norwalk virus
uccacaacagcug

SEQ ID NO: 4047188 - RNA, 13 nt, Norwalk virus
uccgcacuggugg

SEQ ID NO: 4047189 - RNA, 21 nt, Norwalk virus
uccgcacugguggugguacug

SEQ ID NO: 4047190 - RNA, 12 nt, Norwalk virus
ucucaauacagu

SEQ ID NO: 4047191 - RNA, 23 nt, Norwalk virus
ucugggagcgggcauacagguug

SEQ ID NO: 4047192 - RNA, 21 nt, Norwalk virus
ucuuaauccuuucuugcucca

SEQ ID NO: 4047193 - RNA, 13 nt, Norwalk virus
ucuuuguuucaug

SEQ ID NO: 4047194 - RNA, 13 nt, Norwalk virus
ugaacaagccccu

SEQ ID NO: 4047195 - RNA, 13 nt, Norwalk virus
ugacuccacccgg

SEQ ID NO: 4047196 - RNA, 18 nt, Norwalk virus
ugccagguccuggugcuu

SEQ ID NO: 4047197 - RNA, 12 nt, Norwalk virus
ugccccaguccu

SEQ ID NO: 4047198 - RNA, 13 nt, Norwalk virus
ugccuuuggaaga

SEQ ID NO: 4047199 - RNA, 22 nt, Norwalk virus
ugcgccgauaauggcccaagcc

SEQ ID NO: 4047200 - RNA, 18 nt, Norwalk virus
ugcugaugcagcaagauc

SEQ ID NO: 4047201 - RNA, 13 nt, Norwalk virus
ugggucaaguauu

SEQ ID NO: 4047202 - RNA, 15 nt, Norwalk virus
uguauaccccccugg

SEQ ID NO: 4047203 - RNA, 16 nt, Norwalk virus
ugugauuggcauauca

SEQ ID NO: 4047204 - RNA, 21 nt, Norwalk virus
uuaccacaagaguacauuuca

SEQ ID NO: 4047205 - RNA, 16 nt, Norwalk virus
uuagcuggauuucccc

SEQ ID NO: 4047206 - RNA, 19 nt, Norwalk virus
uucuuagcuggauuucccc

SEQ ID NO: 4047207 - RNA, 18 nt, Norwalk virus
uuguaauaugaaaugugg

SEQ ID NO: 4047208 - RNA, 20 nt, Norwalk virus
uuuccccaaauaauaccccc

SEQ ID NO: 4047209 - RNA, 16 nt, Norwalk virus
uuuccugcauaccccc

SEQ ID NO: 4047210 - RNA, 16 nt, Norwalk virus
aucauauucauuuaau

SEQ ID NO: 4047211 - RNA, 21 nt, Norwalk virus
augaaaugugggcaucauauu

SEQ ID NO: 4047212 - RNA, 17 nt, Norwalk virus
auggcgcuaguggcgcu

SEQ ID NO: 4047213 - RNA, 20 nt, Norwalk virus
auuaguaauccaaauuauuc

SEQ ID NO: 4047214 - RNA, 17 nt, Norwalk virus
auuuaauuagguuuaau

SEQ ID NO: 4047215 - RNA, 20 nt, Norwalk virus
auuucaauacagacagguug

SEQ ID NO: 4047216 - RNA, 22 nt, Norwalk virus
auuugaguuuggguccccaucu

SEQ ID NO: 4047217 - RNA, 19 nt, Norwalk virus
auuuggaaaucuuucucca

SEQ ID NO: 4047218 - RNA, 21 nt, Norwalk virus
caaagguaucaacaaaauuug

SEQ ID NO: 4047219 - RNA, 14 nt, Norwalk virus
caacucucuuucca

SEQ ID NO: 4047220 - RNA, 17 nt, Norwalk virus
caagauaagagggaccu

SEQ ID NO: 4047221 - RNA, 14 nt, Norwalk virus
caaguuaauccuau

SEQ ID NO: 4047222 - RNA, 18 nt, Norwalk virus
caaguugaccuuuggaag

SEQ ID NO: 4047223 - RNA, 19 nt, Norwalk virus
cacagcagguagugcucug

SEQ ID NO: 4047224 - RNA, 21 nt, Norwalk virus
cacccuuuugagggcccugcc

SEQ ID NO: 4047225 - RNA, 22 nt, Norwalk virus
cacugguggugguacuggugau

SEQ ID NO: 4047226 - RNA, 19 nt, Norwalk virus
cacuuuugucccccaucuu

SEQ ID NO: 4047227 - RNA, 22 nt, Norwalk virus
caggcaaauggcauuggcagug

SEQ ID NO: 4047228 - RNA, 14 nt, Norwalk virus
cagguccuggugcu

SEQ ID NO: 4047229 - RNA, 12 nt, Norwalk virus
cagguucaauca

SEQ ID NO: 4047230 - RNA, 17 nt, Norwalk virus
cagucgcgacugcugga

SEQ ID NO: 4047231 - RNA, 21 nt, Norwalk virus
caguucccauaccauuugccu

SEQ ID NO: 4047232 - RNA, 14 nt, Norwalk virus
caucauauucauuu

SEQ ID NO: 4047233 - RNA, 13 nt, Norwalk virus
caucuagccccuu

SEQ ID NO: 4047234 - RNA, 12 nt, Norwalk virus
caucuaucacaa

SEQ ID NO: 4047235 - RNA, 13 nt, Norwalk virus
caugcgccuugug

SEQ ID NO: 4047236 - RNA, 16 nt, Norwalk virus
caugcuguacaccccc

SEQ ID NO: 4047237 - RNA, 20 nt, Norwalk virus
cauugaggugccuuuggaag

SEQ ID NO: 4047238 - RNA, 16 nt, Norwalk virus
cauuguagauuggaau

SEQ ID NO: 4047239 - RNA, 20 nt, Norwalk virus
ccaggcccuucacacuccca

SEQ ID NO: 4047240 - RNA, 11 nt, Norwalk virus
ccaguuucauu

SEQ ID NO: 4047241 - RNA, 20 nt, Norwalk virus
ccaugcgccuugugugcaug

SEQ ID NO: 4047242 - RNA, 14 nt, Norwalk virus
ccauugaguucucu

SEQ ID NO: 4047243 - RNA, 20 nt, Norwalk virus
cccaguuucauugucacaug

SEQ ID NO: 4047244 - RNA, 19 nt, Norwalk virus
ccccaguccugauuuuaau

SEQ ID NO: 4047245 - RNA, 15 nt, Norwalk virus
ccccaguuucauugu

SEQ ID NO: 4047246 - RNA, 13 nt, Norwalk virus
ccgcacugguggu

SEQ ID NO: 4047247 - RNA, 15 nt, Norwalk virus
ccgucuggcucccaa

SEQ ID NO: 4047248 - RNA, 13 nt, Norwalk virus
ccuucacacuccc

SEQ ID NO: 4047249 - RNA, 14 nt, Norwalk virus
cgcuggucaguugg

SEQ ID NO: 4047250 - RNA, 11 nt, Norwalk virus
cgucuggcucc

SEQ ID NO: 4047251 - RNA, 12 nt, Norwalk virus
cgucuggcuccc

SEQ ID NO: 4047252 - RNA, 16 nt, Norwalk virus
cgugccccucucccaa

SEQ ID NO: 4047253 - RNA, 17 nt, Norwalk virus
cuaaaaauuuggcaacu

SEQ ID NO: 4047254 - RNA, 20 nt, Norwalk virus
cuacacugucuucugugcca

SEQ ID NO: 4047255 - RNA, 12 nt, Norwalk virus
cuagccccuucu

SEQ ID NO: 4047256 - RNA, 20 nt, Norwalk virus
cucacgugccccucucccaa

SEQ ID NO: 4047257 - RNA, 18 nt, Norwalk virus
cucaucgagauuuggaaa

SEQ ID NO: 4047258 - RNA, 23 nt, Norwalk virus
cuccaaagccaaagguaucaaca

SEQ ID NO: 4047259 - RNA, 21 nt, Norwalk virus
cuccacccgguucaacagccu

SEQ ID NO: 4047260 - RNA, 17 nt, Norwalk virus
cucccgaguccucugcu

SEQ ID NO: 4047261 - RNA, 14 nt, Norwalk virus
cuccgcacuggugg

SEQ ID NO: 4047262 - RNA, 20 nt, Norwalk virus
cucugucuaacucacgugcc

SEQ ID NO: 4047263 - RNA, 22 nt, Norwalk virus
cugacacuuuugucccccaucu

SEQ ID NO: 4047264 - RNA, 19 nt, Norwalk virus
cugccauugaguucucugu

SEQ ID NO: 4047265 - RNA, 16 nt, Norwalk virus
cugguuggcaccaccc

SEQ ID NO: 4047266 - RNA, 13 nt, Norwalk virus
cugucuauuacca

SEQ ID NO: 4047267 - RNA, 15 nt, Norwalk virus
cugugggaacugcca

SEQ ID NO: 4047268 - RNA, 15 nt, Norwalk virus
cuucuguauaccccc

SEQ ID NO: 4047269 - RNA, 16 nt, Norwalk virus
cuucugugccacgugg

SEQ ID NO: 4047270 - RNA, 14 nt, Norwalk virus
cuuucuugcuccau

SEQ ID NO: 4047271 - RNA, 13 nt, Norwalk virus
gaaaugugggcau

SEQ ID NO: 4047272 - RNA, 23 nt, Norwalk virus
gaaaugugggcaucauauucauu

SEQ ID NO: 4047273 - RNA, 12 nt, Norwalk virus
gaacaagccccu

SEQ ID NO: 4047274 - RNA, 15 nt, Norwalk virus
gacuugccccagucc

SEQ ID NO: 4047275 - RNA, 19 nt, Norwalk virus
gagauuuggaaaucuuucu

SEQ ID NO: 4047276 - RNA, 15 nt, Norwalk virus
gaguuugggucccca

SEQ ID NO: 4047277 - RNA, 18 nt, Norwalk virus
gcaauugcugcuuccaca

SEQ ID NO: 4047278 - RNA, 23 nt, Norwalk virus
gcacugguggugguacuggugau

SEQ ID NO: 4047279 - RNA, 23 nt, Norwalk virus
gccaagauaagagggaccuccaa

SEQ ID NO: 4047280 - RNA, 15 nt, Norwalk virus
gcccccauuggguuu

SEQ ID NO: 4047281 - RNA, 23 nt, Norwalk virus
gcccccauuggguuuccagaccu

SEQ ID NO: 4047282 - RNA, 16 nt, Norwalk virus
gcggcccuccaaagcc

SEQ ID NO: 4047283 - RNA, 17 nt, Norwalk virus
gcuuauaauuugcccug

SEQ ID NO: 4047284 - RNA, 14 nt, Norwalk virus
ggcaggagcuccag

SEQ ID NO: 4047285 - RNA, 18 nt, Norwalk virus
gggaacugccagcucggc

SEQ ID NO: 4047286 - RNA, 13 nt, Norwalk virus
ggguaucagguug

SEQ ID NO: 4047287 - RNA, 23 nt, Norwalk virus
gguauuggucuuuuucaugucaa

SEQ ID NO: 4047288 - RNA, 15 nt, Norwalk virus
gguccacaacagcug

SEQ ID NO: 4047289 - RNA, 15 nt, Norwalk virus
ggugccuuuggaaga

SEQ ID NO: 4047290 - RNA, 16 nt, Norwalk virus
gguggcuucaugucag

SEQ ID NO: 4047291 - RNA, 21 nt, Norwalk virus
guaccggagguuaaugcuucu

SEQ ID NO: 4047292 - RNA, 15 nt, Norwalk virus
guaucagguugaagc

SEQ ID NO: 4047293 - RNA, 14 nt, Norwalk virus
gucgcgacugcugg

SEQ ID NO: 4047294 - RNA, 17 nt, Norwalk virus
gugauugcugauguuag

SEQ ID NO: 4047295 - RNA, 13 nt, Norwalk virus
gugccuuuggaag

SEQ ID NO: 4047296 - RNA, 23 nt, Norwalk virus
gugcuggggguuugaccagugcu

SEQ ID NO: 4047297 - RNA, 15 nt, Norwalk virus
guugaccuuuggaag

SEQ ID NO: 4047298 - RNA, 17 nt, Norwalk virus
uaagcaaaaacagguuc

SEQ ID NO: 4047299 - RNA, 13 nt, Norwalk virus
uaauccaaauuau

SEQ ID NO: 4047300 - RNA, 13 nt, Norwalk virus
uacauuucacauc

SEQ ID NO: 4047301 - RNA, 18 nt, Norwalk virus
uaguaauccaaauuauuc

SEQ ID NO: 4047302 - RNA, 17 nt, Norwalk virus
uaguuuccugcauaccc

SEQ ID NO: 4047303 - RNA, 15 nt, Norwalk virus
uaucggcauuucccc

SEQ ID NO: 4047304 - RNA, 20 nt, Norwalk virus
uaugacuugccccaguccug

SEQ ID NO: 4047305 - RNA, 17 nt, Norwalk virus
ucaauacagacagguug

SEQ ID NO: 4047306 - RNA, 12 nt, Norwalk virus
ucaaucaucugg

SEQ ID NO: 4047307 - RNA, 15 nt, Norwalk virus
ucccaaucaguagua

SEQ ID NO: 4047308 - RNA, 13 nt, Norwalk virus
ucccccccaucac

SEQ ID NO: 4047309 - RNA, 14 nt, Norwalk virus
ucgagauuuggaaa

SEQ ID NO: 4047310 - RNA, 15 nt, Norwalk virus
ucuaagcaaaaacag

SEQ ID NO: 4047311 - RNA, 19 nt, Norwalk virus
ucuaagcaaaaacagguuc

SEQ ID NO: 4047312 - RNA, 17 nt, Norwalk virus
ugaauuuacuauuuccc

SEQ ID NO: 4047313 - RNA, 16 nt, Norwalk virus
ugagagugucugcucc

SEQ ID NO: 4047314 - RNA, 12 nt, Norwalk virus
ugcaagcccccc

SEQ ID NO: 4047315 - RNA, 20 nt, Norwalk virus
ugcaugcuguacaccccccu

SEQ ID NO: 4047316 - RNA, 15 nt, Norwalk virus
ugccgaucaaugggg

SEQ ID NO: 4047317 - RNA, 18 nt, Norwalk virus
ugcuagcugguaaugccu

SEQ ID NO: 4047318 - RNA, 14 nt, Norwalk virus
ugcucccgaguccu

SEQ ID NO: 4047319 - RNA, 19 nt, Norwalk virus
uggaagauccccaauuaug

SEQ ID NO: 4047320 - RNA, 19 nt, Norwalk virus
uggagcagaaaaccaggcc

SEQ ID NO: 4047321 - RNA, 15 nt, Norwalk virus
uggcaggagcuccag

SEQ ID NO: 4047322 - RNA, 23 nt, Norwalk virus
uggcccaagccauaauuggugca

SEQ ID NO: 4047323 - RNA, 16 nt, Norwalk virus
ugggaacugccagcuc

SEQ ID NO: 4047324 - RNA, 20 nt, Norwalk virus
uguaggugaggcugcccugc

SEQ ID NO: 4047325 - RNA, 14 nt, Norwalk virus
ugugguugacucca

SEQ ID NO: 4047326 - RNA, 15 nt, Norwalk virus
uucauaauaaugaua

SEQ ID NO: 4047327 - RNA, 23 nt, Norwalk virus
uugaagcuucaaaucaauuauug

SEQ ID NO: 4047328 - RNA, 22 nt, Norwalk virus
uuguaauaugaaaugugggcau

SEQ ID NO: 4047329 - RNA, 14 nt, Norwalk virus
uugugcaagccccc

SEQ ID NO: 4047330 - RNA, 15 nt, Norwalk virus
uuucacaucuugcua

SEQ ID NO: 4047331 - RNA, 22 nt, Norwalk virus
uuucacaucuugcuagugaaca

SEQ ID NO: 4047332 - RNA, 16 nt, Norwalk virus
aaucaucugguauuag

SEQ ID NO: 4047333 - RNA, 13 nt, Norwalk virus
aauuggauggcac

SEQ ID NO: 4047334 - RNA, 15 nt, Norwalk virus
acaugugauugcuga

SEQ ID NO: 4047335 - RNA, 15 nt, Norwalk virus
acgugccccucuccc

SEQ ID NO: 4047336 - RNA, 14 nt, Norwalk virus
acucuggauggccg

SEQ ID NO: 4047337 - RNA, 15 nt, Norwalk virus
agacagguugccauu

SEQ ID NO: 4047338 - RNA, 15 nt, Norwalk virus
agacccaguaugaug

SEQ ID NO: 4047339 - RNA, 23 nt, Norwalk virus
agcaacucucuuuccacauguga

SEQ ID NO: 4047340 - RNA, 21 nt, Norwalk virus
agccagacccaguaugaugua

SEQ ID NO: 4047341 - RNA, 19 nt, Norwalk virus
agccucuucuacacugucu

SEQ ID NO: 4047342 - RNA, 17 nt, Norwalk virus
agcgggcauacagguug

SEQ ID NO: 4047343 - RNA, 22 nt, Norwalk virus
agcgggcauacagguugguggc

SEQ ID NO: 4047344 - RNA, 15 nt, Norwalk virus
aggcaaauggcauug

SEQ ID NO: 4047345 - RNA, 17 nt, Norwalk virus
aggcugcccugcuccac

SEQ ID NO: 4047346 - RNA, 13 nt, Norwalk virus
agggaaaugauug

SEQ ID NO: 4047347 - RNA, 19 nt, Norwalk virus
aguaauccaaauuauuccc

SEQ ID NO: 4047348 - RNA, 14 nt, Norwalk virus
auccauuucucgaa

SEQ ID NO: 4047349 - RNA, 18 nt, Norwalk virus
auucuagccagacccagu

SEQ ID NO: 4047350 - RNA, 12 nt, Norwalk virus
auuggauggcac

SEQ ID NO: 4047351 - RNA, 19 nt, Norwalk virus
auuggcagugguaauuaug

SEQ ID NO: 4047352 - RNA, 16 nt, Norwalk virus
auuuaauuagguuuaa

SEQ ID NO: 4047353 - RNA, 21 nt, Norwalk virus
auuucccccccaucacacccg

SEQ ID NO: 4047354 - RNA, 19 nt, Norwalk virus
caaagcauacccugauggu

SEQ ID NO: 4047355 - RNA, 15 nt, Norwalk virus
caagagguaggcuug

SEQ ID NO: 4047356 - RNA, 14 nt, Norwalk virus
caauuaaagccugu

SEQ ID NO: 4047357 - RNA, 20 nt, Norwalk virus
cacaagaguacauuucacau

SEQ ID NO: 4047358 - RNA, 19 nt, Norwalk virus
cacaucuagccccuucugu

SEQ ID NO: 4047359 - RNA, 17 nt, Norwalk virus
cacccuuuugagggccc

SEQ ID NO: 4047360 - RNA, 15 nt, Norwalk virus
cacgcggaggcucuc

SEQ ID NO: 4047361 - RNA, 11 nt, Norwalk virus
cagacagguug

SEQ ID NO: 4047362 - RNA, 12 nt, Norwalk virus
cagagugugcag

SEQ ID NO: 4047363 - RNA, 18 nt, Norwalk virus
caggcccuucacacuccc

SEQ ID NO: 4047364 - RNA, 18 nt, Norwalk virus
cagguagugcucugggag

SEQ ID NO: 4047365 - RNA, 20 nt, Norwalk virus
aaaugugggcaucauauuca

SEQ ID NO: 4047366 - RNA, 22 nt, Norwalk virus
aacagccucuucuacacugucu

SEQ ID NO: 4047367 - RNA, 14 nt, Norwalk virus
aagauguuaggaau

SEQ ID NO: 4047368 - RNA, 19 nt, Norwalk virus
aagcaacucucuuuccaca

SEQ ID NO: 4047369 - RNA, 14 nt, Norwalk virus
aagcuucaaaucaa

SEQ ID NO: 4047370 - RNA, 17 nt, Norwalk virus
aagguaucaacaaaauu

SEQ ID NO: 4047371 - RNA, 18 nt, Norwalk virus
aauucaggcaaauggcau

SEQ ID NO: 4047372 - RNA, 23 nt, Norwalk virus
acaaauguauaaugguuggguug

SEQ ID NO: 4047373 - RNA, 23 nt, Norwalk virus
acaagcaacucucuuuccacaug

SEQ ID NO: 4047374 - RNA, 22 nt, Norwalk virus
acacaguuuggccauucuagcc

SEQ ID NO: 4047375 - RNA, 16 nt, Norwalk virus
accacuaguugggucg

SEQ ID NO: 4047376 - RNA, 15 nt, Norwalk virus
accagugcugaugca

SEQ ID NO: 4047377 - RNA, 18 nt, Norwalk virus
accuccaauggcacugua

SEQ ID NO: 4047378 - RNA, 11 nt, Norwalk virus
acucuggaugg

SEQ ID NO: 4047379 - RNA, 18 nt, Norwalk virus
acugccagcucggcaaga

SEQ ID NO: 4047380 - RNA, 17 nt, Norwalk virus
acuguaggugaggcugc

SEQ ID NO: 4047381 - RNA, 19 nt, Norwalk virus
agcuccagucacccgcauu

SEQ ID NO: 4047382 - RNA, 16 nt, Norwalk virus
aggcugcccugcucca

SEQ ID NO: 4047383 - RNA, 19 nt, Norwalk virus
agggaccuccaauggcacu

SEQ ID NO: 4047384 - RNA, 17 nt, Norwalk virus
agggcccugcccccauu

SEQ ID NO: 4047385 - RNA, 15 nt, Norwalk virus
aggugaggcugcccu

SEQ ID NO: 4047386 - RNA, 20 nt, Norwalk virus
agguuaaugcuucugacccu

SEQ ID NO: 4047387 - RNA, 13 nt, Norwalk virus
agucaggauuaug

SEQ ID NO: 4047388 - RNA, 20 nt, Norwalk virus
auaauuuugugcaagccccc

SEQ ID NO: 4047389 - RNA, 13 nt, Norwalk virus
auaugaaaugugg

SEQ ID NO: 4047390 - RNA, 20 nt, Norwalk virus
auccuauugaucccuggaua

SEQ ID NO: 4047391 - RNA, 20 nt, Norwalk virus
augcuguacaccccccuccg

SEQ ID NO: 4047392 - RNA, 12 nt, Norwalk virus
auggcacacccu

SEQ ID NO: 4047393 - RNA, 15 nt, Norwalk virus
auuuaauuagguuua

SEQ ID NO: 4047394 - RNA, 15 nt, Norwalk virus
caaagcauacccuga

SEQ ID NO: 4047395 - RNA, 19 nt, Norwalk virus
caaaucugccauugaguuc

SEQ ID NO: 4047396 - RNA, 20 nt, Norwalk virus
caacagccucuucuacacug

SEQ ID NO: 4047397 - RNA, 23 nt, Norwalk virus
cacaagaguacauuucacaucuu

SEQ ID NO: 4047398 - RNA, 15 nt, Norwalk virus
cacgugccccucucc

SEQ ID NO: 4047399 - RNA, 21 nt, Norwalk virus
cacugguggugguacugguga

SEQ ID NO: 4047400 - RNA, 19 nt, Norwalk virus
cagucgcgacugcuggaca

SEQ ID NO: 4047401 - RNA, 24 nt, Norwalk virus
caucaagcguggauggcgcuagug

SEQ ID NO: 4047402 - RNA, 15 nt, Norwalk virus
caucugguauuagua

SEQ ID NO: 4047403 - RNA, 20 nt, Norwalk virus
cauuucacaucuugcuagug

SEQ ID NO: 4047404 - RNA, 19 nt, Norwalk virus
ccaaaucugccauugaguu

SEQ ID NO: 4047405 - RNA, 12 nt, Norwalk virus
ccaauggcacug

SEQ ID NO: 4047406 - RNA, 14 nt, Norwalk virus
ccaccccaguuuca

SEQ ID NO: 4047407 - RNA, 18 nt, Norwalk virus
ccaucuaucacaaaugua

SEQ ID NO: 4047408 - RNA, 21 nt, Norwalk virus
ccuggauaauuaauaauuuug

SEQ ID NO: 4047409 - RNA, 19 nt, Norwalk virus
ccugguuggcaccacccca

SEQ ID NO: 4047410 - RNA, 15 nt, Norwalk virus
cggcccuccaaagcc

SEQ ID NO: 4047411 - RNA, 18 nt, Norwalk virus
cgguguacucuggauggc

SEQ ID NO: 4047412 - RNA, 15 nt, Norwalk virus
cgugccccucuccca

SEQ ID NO: 4047413 - RNA, 15 nt, Norwalk virus
cuauagcacaagcaa

SEQ ID NO: 4047414 - RNA, 15 nt, Norwalk virus
cucaauacagugugg

SEQ ID NO: 4047415 - RNA, 21 nt, Norwalk virus
cucaucgagauuuggaaaucu

SEQ ID NO: 4047416 - RNA, 21 nt, Norwalk virus
cuccauaccacgcggaggcuc

SEQ ID NO: 4047417 - RNA, 21 nt, Norwalk virus
cucggguccacaacagcugcc

SEQ ID NO: 4047418 - RNA, 13 nt, Norwalk virus
cucuuuccacaug

SEQ ID NO: 4047419 - RNA, 23 nt, Norwalk virus
cugaugcagcaagaucuguggca

SEQ ID NO: 4047420 - RNA, 14 nt, Norwalk virus
cugcccugcuccac

SEQ ID NO: 4047421 - RNA, 18 nt, Norwalk virus
cugguuuugguucacaua

SEQ ID NO: 4047422 - RNA, 15 nt, Norwalk virus
cugucuucugugcca

SEQ ID NO: 4047423 - RNA, 21 nt, Norwalk virus
cugugggaacugccagcucgg

SEQ ID NO: 4047424 - RNA, 12 nt, Norwalk virus
cuugcuagugaa

SEQ ID NO: 4047425 - RNA, 19 nt, Norwalk virus
cuuuugucccccaucuugg

SEQ ID NO: 4047426 - RNA, 19 nt, Norwalk virus
gaaaucuuucuccauacca

SEQ ID NO: 4047427 - RNA, 15 nt, Norwalk virus
gaaaugugggcauca

SEQ ID NO: 4047428 - RNA, 16 nt, Norwalk virus
gaauuuacuauuuccc

SEQ ID NO: 4047429 - RNA, 19 nt, Norwalk virus
gaauuuacuauuuccccaa

SEQ ID NO: 4047430 - RNA, 17 nt, Norwalk virus
gacacuuuuguccccca

SEQ ID NO: 4047431 - RNA, 20 nt, Norwalk virus
gacagcagucgcgacugcug

SEQ ID NO: 4047432 - RNA, 14 nt, Norwalk virus
gauaauaguuuccu

SEQ ID NO: 4047433 - RNA, 17 nt, Norwalk virus
gcuucaugucaguuccc

SEQ ID NO: 4047434 - RNA, 16 nt, Norwalk virus
ggacucuagaccccau

SEQ ID NO: 4047435 - RNA, 13 nt, Norwalk virus
ggcaccaccccag

SEQ ID NO: 4047436 - RNA, 20 nt, Norwalk virus
ggcgcuaguggcgcugguca

SEQ ID NO: 4047437 - RNA, 18 nt, Norwalk virus
ggcuucaugucaguuccc

SEQ ID NO: 4047438 - RNA, 16 nt, Norwalk virus
gguccacaacagcugc

SEQ ID NO: 4047439 - RNA, 13 nt, Norwalk virus
gguccuggugcuu

SEQ ID NO: 4047440 - RNA, 14 nt, Norwalk virus
ggugcaauugcugc

SEQ ID NO: 4047441 - RNA, 22 nt, Norwalk virus
gucgcgacugcuggacaaguua

SEQ ID NO: 4047442 - RNA, 14 nt, Norwalk virus
gucuauuaccacaa

SEQ ID NO: 4047443 - RNA, 18 nt, Norwalk virus
gugagagugucugcuccc

SEQ ID NO: 4047444 - RNA, 14 nt, Norwalk virus
gugaggcugcccug

SEQ ID NO: 4047445 - RNA, 20 nt, Norwalk virus
uaauccuauugaucccugga

SEQ ID NO: 4047446 - RNA, 19 nt, Norwalk virus
uaauccuuucuugcuccau

SEQ ID NO: 4047447 - RNA, 22 nt, Norwalk virus
uaaugcuucugacccucuugca

SEQ ID NO: 4047448 - RNA, 22 nt, Norwalk virus
uacaccccccuccgcacuggug

SEQ ID NO: 4047449 - RNA, 15 nt, Norwalk virus
uauaauuugcccugu

SEQ ID NO: 4047450 - RNA, 20 nt, Norwalk virus
uaugacacaguuuggccauu

SEQ ID NO: 4047451 - RNA, 23 nt, Norwalk virus
ucauauucauuuaauuagguuua

SEQ ID NO: 4047452 - RNA, 19 nt, Norwalk virus
uccacagcagguagugcuc

SEQ ID NO: 4047453 - RNA, 22 nt, Norwalk virus
uccacccgguucaacagccucu

SEQ ID NO: 4047454 - RNA, 15 nt, Norwalk virus
uccagaccucggugg

SEQ ID NO: 4047455 - RNA, 20 nt, Norwalk virus
uccagaccucggugguugug

SEQ ID NO: 4047456 - RNA, 15 nt, Norwalk virus
ucccccaucuugguu

SEQ ID NO: 4047457 - RNA, 20 nt, Norwalk virus
ucuacacugucuucugugcc

SEQ ID NO: 4047458 - RNA, 17 nt, Norwalk virus
ucuaucacaaauguaua

SEQ ID NO: 4047459 - RNA, 22 nt, Norwalk virus
ugaagcuucaaaucaauuauug

SEQ ID NO: 4047460 - RNA, 17 nt, Norwalk virus
ugaggcugcccugcucc

SEQ ID NO: 4047461 - RNA, 20 nt, Norwalk virus
ugaguuuggguccccaucuu

SEQ ID NO: 4047462 - RNA, 20 nt, Norwalk virus
ugccacgugguuauuucaau

SEQ ID NO: 4047463 - RNA, 20 nt, Norwalk virus
ugcgccuugugugcaugcug

SEQ ID NO: 4047464 - RNA, 12 nt, Norwalk virus
ugcuggacaagu

SEQ ID NO: 4047465 - RNA, 19 nt, Norwalk virus
ugcuggggguuugaccagu

SEQ ID NO: 4047466 - RNA, 17 nt, Norwalk virus
ugcuuauaauuugcccu

SEQ ID NO: 4047467 - RNA, 17 nt, Norwalk virus
uggcagugguaauuaug

SEQ ID NO: 4047468 - RNA, 15 nt, Norwalk virus
ugugcaugcuguaca

SEQ ID NO: 4047469 - RNA, 14 nt, Norwalk virus
uguuaggacucuag

SEQ ID NO: 4047470 - RNA, 21 nt, Norwalk virus
uuaauuagguuuaauuagguu

SEQ ID NO: 4047471 - RNA, 13 nt, Norwalk virus
uuacuauuucccc

SEQ ID NO: 4047472 - RNA, 21 nt, Norwalk virus
uucaauacagacagguugcca

SEQ ID NO: 4047473 - RNA, 19 nt, Norwalk virus
uucacauaaucuuacuaua

SEQ ID NO: 4047474 - RNA, 20 nt, Norwalk virus
uucauugucacauguugcca

SEQ ID NO: 4047475 - RNA, 16 nt, Norwalk virus
uucuucgacagcaguc

SEQ ID NO: 4047476 - RNA, 14 nt, Norwalk virus
uugaggugccuuug

SEQ ID NO: 4047477 - RNA, 20 nt, Norwalk virus
uuggguccccaucuuaaucc

SEQ ID NO: 4047478 - RNA, 17 nt, Norwalk virus
uuuaauuagguuuaauu

SEQ ID NO: 4047479 - RNA, 14 nt, Norwalk virus
uuuacuauuucccc

SEQ ID NO: 4047480 - RNA, 12 nt, Norwalk virus
uuucaauacaga

SEQ ID NO: 4047481 - RNA, 14 nt, Respiratory syncytial virus
aaaaagaucucaaa

SEQ ID NO: 4047482 - RNA, 18 nt, Respiratory syncytial virus
aaaaauggggcaaauaaa

SEQ ID NO: 4047483 - RNA, 13 nt, Respiratory syncytial virus
aaaaauucccaua

SEQ ID NO: 4047484 - RNA, 23 nt, Respiratory syncytial virus
aaaagugcucuacuauccacaaa

SEQ ID NO: 4047485 - RNA, 20 nt, Respiratory syncytial virus
aaaauaccaauguaacauua

SEQ ID NO: 4047486 - RNA, 20 nt, Respiratory syncytial virus
aaaaucacucuacaaaacaa

SEQ ID NO: 4047487 - RNA, 13 nt, Respiratory syncytial virus
aaacccaucugga

SEQ ID NO: 4047488 - RNA, 22 nt, Respiratory syncytial virus
aaacuaagugauucaacaauga

SEQ ID NO: 4047489 - RNA, 17 nt, Respiratory syncytial virus
aaagaucucacuaugaa

SEQ ID NO: 4047490 - RNA, 23 nt, Respiratory syncytial virus
aaagcccuauaacaucaaauuca

SEQ ID NO: 4047491 - RNA, 15 nt, Respiratory syncytial virus
aaauaaagaucugaa

SEQ ID NO: 4047492 - RNA, 13 nt, Respiratory syncytial virus
aaauaauauugca

SEQ ID NO: 4047493 - RNA, 21 nt, Respiratory syncytial virus
aaauccagaacacacaaguca

SEQ ID NO: 4047494 - RNA, 21 nt, Respiratory syncytial virus
aaaucguggaaucauaaagac

SEQ ID NO: 4047495 - RNA, 12 nt, Respiratory syncytial virus
aaaugaaauuug

SEQ ID NO: 4047496 - RNA, 14 nt, Respiratory syncytial virus
aaauucccauagcu

SEQ ID NO: 4047497 - RNA, 15 nt, Respiratory syncytial virus
aaauuuucuacaaca

SEQ ID NO: 4047498 - RNA, 23 nt, Respiratory syncytial virus
aacaauaccaaaaauaccaaugu

SEQ ID NO: 4047499 - RNA, 11 nt, Respiratory syncytial virus
aacaaugccag

SEQ ID NO: 4047500 - RNA, 16 nt, Respiratory syncytial virus
aacacacuugaaaaua

SEQ ID NO: 4047501 - RNA, 19 nt, Respiratory syncytial virus
aacaccaagugucaaguca

SEQ ID NO: 4047502 - RNA, 15 nt, Respiratory syncytial virus
aacacucaauccuaa

SEQ ID NO: 4047503 - RNA, 15 nt, Respiratory syncytial virus
aacagagcuaccaaa

SEQ ID NO: 4047504 - RNA, 15 nt, Respiratory syncytial virus
aacaucaaaaaaagu

SEQ ID NO: 4047505 - RNA, 12 nt, Respiratory syncytial virus
aaccaaacaucu

SEQ ID NO: 4047506 - RNA, 16 nt, Respiratory syncytial virus
aaccacugaauucaaa

SEQ ID NO: 4047507 - RNA, 12 nt, Respiratory syncytial virus
aaccagcaaagu

SEQ ID NO: 4047508 - RNA, 14 nt, Respiratory syncytial virus
aacgccaaaacaaa

SEQ ID NO: 4047509 - RNA, 15 nt, Respiratory syncytial virus
aacuaagugauucaa

SEQ ID NO: 4047510 - RNA, 15 nt, Respiratory syncytial virus
aagaugcaacaagcc

SEQ ID NO: 4047511 - RNA, 19 nt, Respiratory syncytial virus
aagauggggcaaauacaaa

SEQ ID NO: 4047512 - RNA, 16 nt, Respiratory syncytial virus
aaguaaccaaagaaag

SEQ ID NO: 4047513 - RNA, 21 nt, Respiratory syncytial virus
aagucaacccugcaauccaca

SEQ ID NO: 4047514 - RNA, 13 nt, Respiratory syncytial virus
aagucauuguuca

SEQ ID NO: 4047515 - RNA, 22 nt, Respiratory syncytial virus
aagugaaauacuaggaaugcuu

SEQ ID NO: 4047516 - RNA, 23 nt, Respiratory syncytial virus
aagugcucuacuauccacaaaca

SEQ ID NO: 4047517 - RNA, 18 nt, Respiratory syncytial virus
aagugucucucaauccaa

SEQ ID NO: 4047518 - RNA, 18 nt, Respiratory syncytial virus
aaguuagauuacaaaauu

SEQ ID NO: 4047519 - RNA, 18 nt, Respiratory syncytial virus
aauacaaugucuuagaaa

SEQ ID NO: 4047520 - RNA, 16 nt, Respiratory syncytial virus
aauauacaaguaugau

SEQ ID NO: 4047521 - RNA, 22 nt, Respiratory syncytial virus
aaucaacucuggggcaaauaac

SEQ ID NO: 4047522 - RNA, 22 nt, Respiratory syncytial virus
aaucaagaucuauaugaugcug

SEQ ID NO: 4047523 - RNA, 20 nt, Respiratory syncytial virus
aaucauuggaggaaauccaa

SEQ ID NO: 4047524 - RNA, 16 nt, Respiratory syncytial virus
aauccaauuucacaac

SEQ ID NO: 4047525 - RNA, 15 nt, Respiratory syncytial virus
aauccacaacaguca

SEQ ID NO: 4047526 - RNA, 16 nt, Respiratory syncytial virus
aaugagacagaugaua

SEQ ID NO: 4047527 - RNA, 20 nt, Respiratory syncytial virus
aauggagccugaaaauuaua

SEQ ID NO: 4047528 - RNA, 20 nt, Respiratory syncytial virus
aaugucuuagaaaaagacga

SEQ ID NO: 4047529 - RNA, 12 nt, Respiratory syncytial virus
aauuugaaaaua

SEQ ID NO: 4047530 - RNA, 21 nt, Respiratory syncytial virus
aauuuguuugacaaugaugaa

SEQ ID NO: 4047531 - RNA, 23 nt, Respiratory syncytial virus
aauuuuuuaauaacuuuuaguga

SEQ ID NO: 4047532 - RNA, 14 nt, Respiratory syncytial virus
acaaagcacacucc

SEQ ID NO: 4047533 - RNA, 12 nt, Respiratory syncytial virus
acaaucugaaau

SEQ ID NO: 4047534 - RNA, 23 nt, Respiratory syncytial virus
acaaucugaaauaacaacuucau

SEQ ID NO: 4047535 - RNA, 17 nt, Respiratory syncytial virus
acaaugaccaauuauau

SEQ ID NO: 4047536 - RNA, 19 nt, Respiratory syncytial virus
acaauugugaaauuaaauu

SEQ ID NO: 4047537 - RNA, 19 nt, Respiratory syncytial virus
acacaagagucacacaauc

SEQ ID NO: 4047538 - RNA, 13 nt, Respiratory syncytial virus
acacuaacacugu

SEQ ID NO: 4047539 - RNA, 22 nt, Respiratory syncytial virus
acacuaacacuguauucaauua

SEQ ID NO: 4047540 - RNA, 12 nt, Respiratory syncytial virus
acacuaauacac

SEQ ID NO: 4047541 - RNA, 17 nt, Respiratory syncytial virus
acacucaacaaagauca

SEQ ID NO: 4047542 - RNA, 21 nt, Respiratory syncytial virus
acagaagauaaaaauggggca

SEQ ID NO: 4047543 - RNA, 16 nt, Respiratory syncytial virus
acagcagaagaacuag

SEQ ID NO: 4047544 - RNA, 15 nt, Respiratory syncytial virus
acaucaauaaguuau

SEQ ID NO: 4047545 - RNA, 11 nt, Respiratory syncytial virus
acaucagugag

SEQ ID NO: 4047546 - RNA, 15 nt, Respiratory syncytial virus
acaucauggaaaagu

SEQ ID NO: 4047547 - RNA, 20 nt, Respiratory syncytial virus
acaucauugcuuuaugugaa

SEQ ID NO: 4047548 - RNA, 13 nt, Respiratory syncytial virus
acaucucaccaug

SEQ ID NO: 4047549 - RNA, 24 nt, Respiratory syncytial virus
acauuccuggucaacuaugaaaug

SEQ ID NO: 4047550 - RNA, 15 nt, Respiratory syncytial virus
acauugacauauuca

SEQ ID NO: 4047551 - RNA, 18 nt, Respiratory syncytial virus
accaaaauaaccauauau

SEQ ID NO: 4047552 - RNA, 16 nt, Respiratory syncytial virus
accaaacaaaaaaccu

SEQ ID NO: 4047553 - RNA, 13 nt, Respiratory syncytial virus
accacaaaaccaa

SEQ ID NO: 4047554 - RNA, 13 nt, Respiratory syncytial virus
accaccaccaagc

SEQ ID NO: 4047555 - RNA, 23 nt, Respiratory syncytial virus
accauauauacucaccgaaucaa

SEQ ID NO: 4047556 - RNA, 22 nt, Respiratory syncytial virus
accauauauugaacaacccaaa

SEQ ID NO: 4047557 - RNA, 16 nt, Respiratory syncytial virus
accauuaguuaauaua

SEQ ID NO: 4047558 - RNA, 14 nt, Respiratory syncytial virus
accauucaaugaaa

SEQ ID NO: 4047559 - RNA, 15 nt, Respiratory syncytial virus
acccauggaagauua

SEQ ID NO: 4047560 - RNA, 17 nt, Respiratory syncytial virus
acccucaccucuuuaca

SEQ ID NO: 4047561 - RNA, 16 nt, Respiratory syncytial virus
accuauugugaacaag

SEQ ID NO: 4047562 - RNA, 22 nt, Respiratory syncytial virus
acuauguauaaucaaaagaaca

SEQ ID NO: 4047563 - RNA, 19 nt, Respiratory syncytial virus
acucuugaagaaauuaaug

SEQ ID NO: 4047564 - RNA, 13 nt, Respiratory syncytial virus
acuuauaauugca

SEQ ID NO: 4047565 - RNA, 14 nt, Respiratory syncytial virus
agaacacacuauau

SEQ ID NO: 4047566 - RNA, 15 nt, Respiratory syncytial virus
agaauucucaagcaa

SEQ ID NO: 4047567 - RNA, 19 nt, Respiratory syncytial virus
agacuauaauaauaucacu

SEQ ID NO: 4047568 - RNA, 19 nt, Respiratory syncytial virus
agagacaucauaacacaca

SEQ ID NO: 4047569 - RNA, 21 nt, Respiratory syncytial virus
agauacuauaguuacaaaaaa

SEQ ID NO: 4047570 - RNA, 12 nt, Respiratory syncytial virus
agaucaacuucu

SEQ ID NO: 4047571 - RNA, 16 nt, Respiratory syncytial virus
agaucaucccaaguca

SEQ ID NO: 4047572 - RNA, 21 nt, Respiratory syncytial virus
agcaagcccaccacaaaacaa

SEQ ID NO: 4047573 - RNA, 15 nt, Respiratory syncytial virus
agcacuaaauacaaa

SEQ ID NO: 4047574 - RNA, 22 nt, Respiratory syncytial virus
agccaauccaaaacuagccacc

SEQ ID NO: 4047575 - RNA, 15 nt, Respiratory syncytial virus
agccugaaaauuaua

SEQ ID NO: 4047576 - RNA, 19 nt, Respiratory syncytial virus
agcucgagucaauacauag

SEQ ID NO: 4047577 - RNA, 19 nt, Respiratory syncytial virus
agcuucaacaacaccaagu

SEQ ID NO: 4047578 - RNA, 21 nt, Respiratory syncytial virus
aggaaucaagaucuauaugau

SEQ ID NO: 4047579 - RNA, 16 nt, Respiratory syncytial virus
agguauguuauaugcu

SEQ ID NO: 4047580 - RNA, 19 nt, Respiratory syncytial virus
agguauuacugaugauaua

SEQ ID NO: 4047581 - RNA, 13 nt, Respiratory syncytial virus
agguuuaugaaua

SEQ ID NO: 4047582 - RNA, 19 nt, Respiratory syncytial virus
aguaaguuucaaagaagac

SEQ ID NO: 4047583 - RNA, 19 nt, Respiratory syncytial virus
aguaguuaauuaaaaauaa

SEQ ID NO: 4047584 - RNA, 15 nt, Respiratory syncytial virus
aguauugauacuccu

SEQ ID NO: 4047585 - RNA, 23 nt, Respiratory syncytial virus
agucaacacgccaggcaaaauca

SEQ ID NO: 4047586 - RNA, 13 nt, Respiratory syncytial virus
agugaacaacccu

SEQ ID NO: 4047587 - RNA, 21 nt, Respiratory syncytial virus
aguugccaauccucaaaacaa

SEQ ID NO: 4047588 - RNA, 15 nt, Respiratory syncytial virus
auaaaaauauccaca

SEQ ID NO: 4047589 - RNA, 17 nt, Respiratory syncytial virus
auaaacccaacaaauga

SEQ ID NO: 4047590 - RNA, 19 nt, Respiratory syncytial virus
auaacaauagaauucucaa

SEQ ID NO: 4047591 - RNA, 19 nt, Respiratory syncytial virus
auaacaugcuauacugaca

SEQ ID NO: 4047592 - RNA, 15 nt, Respiratory syncytial virus
auaacuauagaauua

SEQ ID NO: 4047593 - RNA, 20 nt, Respiratory syncytial virus
auacaacacaaaauauggca

SEQ ID NO: 4047594 - RNA, 19 nt, Respiratory syncytial virus
auacacucaacaaagauca

SEQ ID NO: 4047595 - RNA, 20 nt, Respiratory syncytial virus
auacauuauauuauguaaau

SEQ ID NO: 4047596 - RNA, 18 nt, Respiratory syncytial virus
auagaguuccaacaaaag

SEQ ID NO: 4047597 - RNA, 18 nt, Respiratory syncytial virus
auaguuagacagcaaagu

SEQ ID NO: 4047598 - RNA, 18 nt, Respiratory syncytial virus
auauacuugauaaaucau

SEQ ID NO: 4047599 - RNA, 15 nt, Respiratory syncytial virus
auaucaacuagcaaa

SEQ ID NO: 4047600 - RNA, 18 nt, Respiratory syncytial virus
auaucaacuagcaaauca

SEQ ID NO: 4047601 - RNA, 15 nt, Respiratory syncytial virus
auaugcccaaaaauu

SEQ ID NO: 4047602 - RNA, 14 nt, Respiratory syncytial virus
auaugcugaacaac

SEQ ID NO: 4047603 - RNA, 23 nt, Respiratory syncytial virus
auauggaaacauacgugaacaaa

SEQ ID NO: 4047604 - RNA, 18 nt, Respiratory syncytial virus
auauuaaugggaaagaaa

SEQ ID NO: 4047605 - RNA, 18 nt, Respiratory syncytial virus
auauuucaaucaaaacaa

SEQ ID NO: 4047606 - RNA, 15 nt, Respiratory syncytial virus
aucaaauucaaccau

SEQ ID NO: 4047607 - RNA, 18 nt, Respiratory syncytial virus
aucaacuagcaaaucaau

SEQ ID NO: 4047608 - RNA, 14 nt, Respiratory syncytial virus
aucaagaucuauau

SEQ ID NO: 4047609 - RNA, 22 nt, Respiratory syncytial virus
aucaagaucuauaugaugcugc

SEQ ID NO: 4047610 - RNA, 23 nt, Respiratory syncytial virus
aucauauucauagccucggcaaa

SEQ ID NO: 4047611 - RNA, 20 nt, Respiratory syncytial virus
auccaauuucacaacaaugc

SEQ ID NO: 4047612 - RNA, 15 nt, Respiratory syncytial virus
auccauucuggcaau

SEQ ID NO: 4047613 - RNA, 18 nt, Respiratory syncytial virus
aucugucaacauagacaa

SEQ ID NO: 4047614 - RNA, 15 nt, Respiratory syncytial virus
aucuguuaaaaagau

SEQ ID NO: 4047615 - RNA, 15 nt, Respiratory syncytial virus
augauaacaacaaua

SEQ ID NO: 4047616 - RNA, 13 nt, Respiratory syncytial virus
augauacacucaa

SEQ ID NO: 4047617 - RNA, 19 nt, Respiratory syncytial virus
augauacacucaacaaaga

SEQ ID NO: 4047618 - RNA, 16 nt, Respiratory syncytial virus
augauagugacaauga

SEQ ID NO: 4047619 - RNA, 21 nt, Respiratory syncytial virus
augauugcaauacugaacaaa

SEQ ID NO: 4047620 - RNA, 15 nt, Respiratory syncytial virus
augccaucacaaaug

SEQ ID NO: 4047621 - RNA, 20 nt, Respiratory syncytial virus
augcuaaucauaaauucacu

SEQ ID NO: 4047622 - RNA, 16 nt, Respiratory syncytial virus
auggacacaacacaca

SEQ ID NO: 4047623 - RNA, 20 nt, Respiratory syncytial virus
auggccuaauagaugacaau

SEQ ID NO: 4047624 - RNA, 22 nt, Respiratory syncytial virus
auguauagcggcauuaguaaua

SEQ ID NO: 4047625 - RNA, 15 nt, Respiratory syncytial virus
auguguucaaugcaa

SEQ ID NO: 4047626 - RNA, 22 nt, Respiratory syncytial virus
auuaaauucuccaaaaaacuaa

SEQ ID NO: 4047627 - RNA, 14 nt, Respiratory syncytial virus
auuaucaaagaaaa

SEQ ID NO: 4047628 - RNA, 17 nt, Respiratory syncytial virus
auucaaaucaacauuga

SEQ ID NO: 4047629 - RNA, 14 nt, Respiratory syncytial virus
auucauacaaacuu

SEQ ID NO: 4047630 - RNA, 23 nt, Respiratory syncytial virus
auucauaugaagaaauaaaugau

SEQ ID NO: 4047631 - RNA, 21 nt, Respiratory syncytial virus
auugcaauacugaacaaacuc

SEQ ID NO: 4047632 - RNA, 14 nt, Respiratory syncytial virus
auuguuuaugaaug

SEQ ID NO: 4047633 - RNA, 16 nt, Respiratory syncytial virus
auuuauacacaaaauu

SEQ ID NO: 4047634 - RNA, 13 nt, Respiratory syncytial virus
auuucacaacaau

SEQ ID NO: 4047635 - RNA, 21 nt, Respiratory syncytial virus
auuugugcauguuauuacaag

SEQ ID NO: 4047636 - RNA, 23 nt, Respiratory syncytial virus
caaaaaaaugcuaaaagaaaugg

SEQ ID NO: 4047637 - RNA, 17 nt, Respiratory syncytial virus
caaaaagauacaaucaa

SEQ ID NO: 4047638 - RNA, 22 nt, Respiratory syncytial virus
caaaagaacacacuauauuuca

SEQ ID NO: 4047639 - RNA, 21 nt, Respiratory syncytial virus
caaaauuuguuugacaaugau

SEQ ID NO: 4047640 - RNA, 12 nt, Respiratory syncytial virus
caaagaaaaugg

SEQ ID NO: 4047641 - RNA, 20 nt, Respiratory syncytial virus
caaagaaagcccuauaacau

SEQ ID NO: 4047642 - RNA, 23 nt, Respiratory syncytial virus
caaagaucaacuucugucaucca

SEQ ID NO: 4047643 - RNA, 15 nt, Respiratory syncytial virus
caaauaaaacaucau

SEQ ID NO: 4047644 - RNA, 16 nt, Respiratory syncytial virus
caaauucacaucaccu

SEQ ID NO: 4047645 - RNA, 17 nt, Respiratory syncytial virus
caacaaugaccaauuau

SEQ ID NO: 4047646 - RNA, 15 nt, Respiratory syncytial virus
caacacacaaugaca

SEQ ID NO: 4047647 - RNA, 12 nt, Respiratory syncytial virus
caacaccaccaa

SEQ ID NO: 4047648 - RNA, 13 nt, Respiratory syncytial virus
caacagaagacca

SEQ ID NO: 4047649 - RNA, 13 nt, Respiratory syncytial virus
caaccaaacaucu

SEQ ID NO: 4047650 - RNA, 18 nt, Respiratory syncytial virus
caaccauggacacaacac

SEQ ID NO: 4047651 - RNA, 21 nt, Respiratory syncytial virus
caaccauggacacaacacaca

SEQ ID NO: 4047652 - RNA, 15 nt, Respiratory syncytial virus
caacccugcaaucca

SEQ ID NO: 4047653 - RNA, 20 nt, Respiratory syncytial virus
caacgccaaaacaaaccacc

SEQ ID NO: 4047654 - RNA, 21 nt, Respiratory syncytial virus
caacuaaucaaacaaaaccca

SEQ ID NO: 4047655 - RNA, 20 nt, Respiratory syncytial virus
caacuagcaaaucaauguca

SEQ ID NO: 4047656 - RNA, 15 nt, Respiratory syncytial virus
caacugaaauucaaa

SEQ ID NO: 4047657 - RNA, 22 nt, Respiratory syncytial virus
caacuucaugcauaaccacacu

SEQ ID NO: 4047658 - RNA, 19 nt, Respiratory syncytial virus
caagaccaaaaacacaaca

SEQ ID NO: 4047659 - RNA, 17 nt, Respiratory syncytial virus
caagcagaaauggaaca

SEQ ID NO: 4047660 - RNA, 13 nt, Respiratory syncytial virus
caagcccacaaaa

SEQ ID NO: 4047661 - RNA, 21 nt, Respiratory syncytial virus
caaggaccaacgcaccaccaa

SEQ ID NO: 4047662 - RNA, 18 nt, Respiratory syncytial virus
caagucauuguucaucag

SEQ ID NO: 4047663 - RNA, 21 nt, Respiratory syncytial virus
caauaaagggcaaauucacau

SEQ ID NO: 4047664 - RNA, 14 nt, Respiratory syncytial virus
caauauuuaucaau

SEQ ID NO: 4047665 - RNA, 16 nt, Respiratory syncytial virus
caauccucaaaacaaa

SEQ ID NO: 4047666 - RNA, 19 nt, Respiratory syncytial virus
caaucugucugaaacuaca

SEQ ID NO: 4047667 - RNA, 13 nt, Respiratory syncytial virus
caaugacaccaca

SEQ ID NO: 4047668 - RNA, 11 nt, Respiratory syncytial virus
caaugaugaag

SEQ ID NO: 4047669 - RNA, 20 nt, Respiratory syncytial virus
caauguaacauuaagcaaga

SEQ ID NO: 4047670 - RNA, 14 nt, Respiratory syncytial virus
caaugucacuaaca

SEQ ID NO: 4047671 - RNA, 15 nt, Respiratory syncytial virus
caaugucacuaacac

SEQ ID NO: 4047672 - RNA, 17 nt, Respiratory syncytial virus
cacaaaaaaaccaacca

SEQ ID NO: 4047673 - RNA, 13 nt, Respiratory syncytial virus
cacaaucugaaau

SEQ ID NO: 4047674 - RNA, 12 nt, Respiratory syncytial virus
caccaagcccac

SEQ ID NO: 4047675 - RNA, 14 nt, Respiratory syncytial virus
caccaugcaagcca

SEQ ID NO: 4047676 - RNA, 20 nt, Respiratory syncytial virus
cacccugugaaaucaaggca

SEQ ID NO: 4047677 - RNA, 15 nt, Respiratory syncytial virus
caccuguaagcacuu

SEQ ID NO: 4047678 - RNA, 16 nt, Respiratory syncytial virus
cacuaaauacaaaaaa

SEQ ID NO: 4047679 - RNA, 13 nt, Respiratory syncytial virus
cacuaauacacau

SEQ ID NO: 4047680 - RNA, 20 nt, Respiratory syncytial virus
cacuagcugaaacauguaaa

SEQ ID NO: 4047681 - RNA, 20 nt, Respiratory syncytial virus
cagaauacaggcaugacucu

SEQ ID NO: 4047682 - RNA, 22 nt, Respiratory syncytial virus
cagagacaucauaacacacaga

SEQ ID NO: 4047683 - RNA, 23 nt, Respiratory syncytial virus
cagagcuaccaaauuccuagaau

SEQ ID NO: 4047684 - RNA, 13 nt, Respiratory syncytial virus
cagaucaagaaca

SEQ ID NO: 4047685 - RNA, 14 nt, Respiratory syncytial virus
cagauguaagcagc

SEQ ID NO: 4047686 - RNA, 12 nt, Respiratory syncytial virus
cagcaagcccac

SEQ ID NO: 4047687 - RNA, 22 nt, Respiratory syncytial virus
cagccaauccaaaacuagccac

SEQ ID NO: 4047688 - RNA, 22 nt, Respiratory syncytial virus
caggaaaaacaauaaacaaacu

SEQ ID NO: 4047689 - RNA, 15 nt, Respiratory syncytial virus
augaucacagacaug

SEQ ID NO: 4047690 - RNA, 15 nt, Respiratory syncytial virus
augcaauucaaaauu

SEQ ID NO: 4047691 - RNA, 20 nt, Respiratory syncytial virus
augcauaaccacacuccaua

SEQ ID NO: 4047692 - RNA, 19 nt, Respiratory syncytial virus
augccaguguuacaaaaug

SEQ ID NO: 4047693 - RNA, 14 nt, Respiratory syncytial virus
augcuaaaagaaau

SEQ ID NO: 4047694 - RNA, 13 nt, Respiratory syncytial virus
augggacaaaaug

SEQ ID NO: 4047695 - RNA, 20 nt, Respiratory syncytial virus
augucuagauuaggaagaga

SEQ ID NO: 4047696 - RNA, 15 nt, Respiratory syncytial virus
auuaagacuaacaau

SEQ ID NO: 4047697 - RNA, 17 nt, Respiratory syncytial virus
auuaaugggaaagaaau

SEQ ID NO: 4047698 - RNA, 16 nt, Respiratory syncytial virus
auuacauaauguaaau

SEQ ID NO: 4047699 - RNA, 13 nt, Respiratory syncytial virus
auuaucaaagaaa

SEQ ID NO: 4047700 - RNA, 19 nt, Respiratory syncytial virus
auucaaaaaugccaucaca

SEQ ID NO: 4047701 - RNA, 20 nt, Respiratory syncytial virus
auugauaaaacaagaauuag

SEQ ID NO: 4047702 - RNA, 18 nt, Respiratory syncytial virus
auugcaauacugaacaaa

SEQ ID NO: 4047703 - RNA, 16 nt, Respiratory syncytial virus
auuuacuuaaaaagau

SEQ ID NO: 4047704 - RNA, 14 nt, Respiratory syncytial virus
auuuacuuauaaaa

SEQ ID NO: 4047705 - RNA, 17 nt, Respiratory syncytial virus
auuuguaagugaacaac

SEQ ID NO: 4047706 - RNA, 17 nt, Respiratory syncytial virus
caaaaacacaacaacaa

SEQ ID NO: 4047707 - RNA, 18 nt, Respiratory syncytial virus
caaaauggaucccauuau

SEQ ID NO: 4047708 - RNA, 11 nt, Respiratory syncytial virus
caaaccaccac

SEQ ID NO: 4047709 - RNA, 22 nt, Respiratory syncytial virus
caaagacugaugaucacagaca

SEQ ID NO: 4047710 - RNA, 19 nt, Respiratory syncytial virus
caaagucacacuaacaacu

SEQ ID NO: 4047711 - RNA, 13 nt, Respiratory syncytial virus
caaauaaucauug

SEQ ID NO: 4047712 - RNA, 13 nt, Respiratory syncytial virus
caaauacaaaaau

SEQ ID NO: 4047713 - RNA, 15 nt, Respiratory syncytial virus
caaauacaaaaaugg

SEQ ID NO: 4047714 - RNA, 17 nt, Respiratory syncytial virus
caaauauggaaacauac

SEQ ID NO: 4047715 - RNA, 18 nt, Respiratory syncytial virus
caaauggagccugaaaau

SEQ ID NO: 4047716 - RNA, 15 nt, Respiratory syncytial virus
caaauuggaagcaca

SEQ ID NO: 4047717 - RNA, 20 nt, Respiratory syncytial virus
caacaaagaucaacuucugu

SEQ ID NO: 4047718 - RNA, 18 nt, Respiratory syncytial virus
caacacaagagucacaca

SEQ ID NO: 4047719 - RNA, 16 nt, Respiratory syncytial virus
caacaggaaaaacaau

SEQ ID NO: 4047720 - RNA, 19 nt, Respiratory syncytial virus
caaccaucaagacaaccaa

SEQ ID NO: 4047721 - RNA, 15 nt, Respiratory syncytial virus
caagcccacaaaaaa

SEQ ID NO: 4047722 - RNA, 17 nt, Respiratory syncytial virus
caaggaaucaagaucua

SEQ ID NO: 4047723 - RNA, 19 nt, Respiratory syncytial virus
caagucauuguucaucaga

SEQ ID NO: 4047724 - RNA, 23 nt, Respiratory syncytial virus
caagucauuguucaucagaucua

SEQ ID NO: 4047725 - RNA, 17 nt, Respiratory syncytial virus
caauauuuaucaaucau

SEQ ID NO: 4047726 - RNA, 15 nt, Respiratory syncytial virus
caaucauccaugcca

SEQ ID NO: 4047727 - RNA, 18 nt, Respiratory syncytial virus
caauccaugaauuucaac

SEQ ID NO: 4047728 - RNA, 17 nt, Respiratory syncytial virus
caaugacagacuagaag

SEQ ID NO: 4047729 - RNA, 22 nt, Respiratory syncytial virus
caaugagggguucuacauaaua

SEQ ID NO: 4047730 - RNA, 15 nt, Respiratory syncytial virus
caaugaucuaucacu

SEQ ID NO: 4047731 - RNA, 22 nt, Respiratory syncytial virus
cacaaugacaccacaccacaaa

SEQ ID NO: 4047732 - RNA, 17 nt, Respiratory syncytial virus
cacacaacaccaacaga

SEQ ID NO: 4047733 - RNA, 14 nt, Respiratory syncytial virus
cacacuaagcaagg

SEQ ID NO: 4047734 - RNA, 14 nt, Respiratory syncytial virus
cacagaagaugcua

SEQ ID NO: 4047735 - RNA, 15 nt, Respiratory syncytial virus
caccaccaaaacaaa

SEQ ID NO: 4047736 - RNA, 15 nt, Respiratory syncytial virus
caccaccaagacacu

SEQ ID NO: 4047737 - RNA, 23 nt, Respiratory syncytial virus
caccaccaagcccacaaaaaaac

SEQ ID NO: 4047738 - RNA, 17 nt, Respiratory syncytial virus
caccggcaaccaacaau

SEQ ID NO: 4047739 - RNA, 20 nt, Respiratory syncytial virus
caccucuuuacaaaaccaca

SEQ ID NO: 4047740 - RNA, 16 nt, Respiratory syncytial virus
cacuuaaauuuaacuc

SEQ ID NO: 4047741 - RNA, 16 nt, Respiratory syncytial virus
cagaagauaaaaaugg

SEQ ID NO: 4047742 - RNA, 22 nt, Respiratory syncytial virus
cagacguauugaagaaaaccau

SEQ ID NO: 4047743 - RNA, 15 nt, Respiratory syncytial virus
cagaucaagaacaca

SEQ ID NO: 4047744 - RNA, 16 nt, Respiratory syncytial virus
cagauuuauauacuug

SEQ ID NO: 4047745 - RNA, 13 nt, Respiratory syncytial virus
cagucagcaaagg

SEQ ID NO: 4047746 - RNA, 17 nt, Respiratory syncytial virus
cauagcuacacacuaac

SEQ ID NO: 4047747 - RNA, 19 nt, Respiratory syncytial virus
cauagcuacacacuaacac

SEQ ID NO: 4047748 - RNA, 17 nt, Respiratory syncytial virus
cauauauugaaagcaac

SEQ ID NO: 4047749 - RNA, 13 nt, Respiratory syncytial virus
cauaucugcucau

SEQ ID NO: 4047750 - RNA, 20 nt, Respiratory syncytial virus
caucaacaucucaccaugca

SEQ ID NO: 4047751 - RNA, 14 nt, Respiratory syncytial virus
caucaucaaacuau

SEQ ID NO: 4047752 - RNA, 20 nt, Respiratory syncytial virus
cauccaacggagcacaggag

SEQ ID NO: 4047753 - RNA, 20 nt, Respiratory syncytial virus
caucuauaaaccaucucacu

SEQ ID NO: 4047754 - RNA, 20 nt, Respiratory syncytial virus
caugaauuucaacacaagag

SEQ ID NO: 4047755 - RNA, 18 nt, Respiratory syncytial virus
caugcaagccaucaucca

SEQ ID NO: 4047756 - RNA, 18 nt, Respiratory syncytial virus
caugcauaaccacacucc

SEQ ID NO: 4047757 - RNA, 19 nt, Respiratory syncytial virus
cauuaccaagugaaguaaa

SEQ ID NO: 4047758 - RNA, 14 nt, Respiratory syncytial virus
cauuugauaacaau

SEQ ID NO: 4047759 - RNA, 19 nt, Respiratory syncytial virus
ccaaaaauuggguggagaa

SEQ ID NO: 4047760 - RNA, 13 nt, Respiratory syncytial virus
ccaaaacaaacca

SEQ ID NO: 4047761 - RNA, 15 nt, Respiratory syncytial virus
ccaacacaacaaacc

SEQ ID NO: 4047762 - RNA, 14 nt, Respiratory syncytial virus
ccaaccaaacaucu

SEQ ID NO: 4047763 - RNA, 18 nt, Respiratory syncytial virus
ccaauauuuaucaaucau

SEQ ID NO: 4047764 - RNA, 18 nt, Respiratory syncytial virus
ccacaaaaaaaccaacca

SEQ ID NO: 4047765 - RNA, 18 nt, Respiratory syncytial virus
ccaucaagacaaccaaaa

SEQ ID NO: 4047766 - RNA, 15 nt, Respiratory syncytial virus
ccaucacaaaugcaa

SEQ ID NO: 4047767 - RNA, 16 nt, Respiratory syncytial virus
ccaucagugucagaaa

SEQ ID NO: 4047768 - RNA, 13 nt, Respiratory syncytial virus
ccauccaaccaaa

SEQ ID NO: 4047769 - RNA, 12 nt, Respiratory syncytial virus
ccucaaaccaca

SEQ ID NO: 4047770 - RNA, 17 nt, Respiratory syncytial virus
ccucguuagaacagauu

SEQ ID NO: 4047771 - RNA, 20 nt, Respiratory syncytial virus
ccucuuuacaaaaccacauc

SEQ ID NO: 4047772 - RNA, 18 nt, Respiratory syncytial virus
ccuggaaagaaaaccacc

SEQ ID NO: 4047773 - RNA, 17 nt, Respiratory syncytial virus
ccuuguaguauaaauuc

SEQ ID NO: 4047774 - RNA, 15 nt, Respiratory syncytial virus
cgggauaucauguaa

SEQ ID NO: 4047775 - RNA, 18 nt, Respiratory syncytial virus
cuaaaauuaucauuuuga

SEQ ID NO: 4047776 - RNA, 15 nt, Respiratory syncytial virus
cuaacacuguauuca

SEQ ID NO: 4047777 - RNA, 21 nt, Respiratory syncytial virus
cuaagauauuaagacuaacaa

SEQ ID NO: 4047778 - RNA, 20 nt, Respiratory syncytial virus
cuaagugauucaacaaugac

SEQ ID NO: 4047779 - RNA, 17 nt, Respiratory syncytial virus
cuaaucauaaauucacu

SEQ ID NO: 4047780 - RNA, 16 nt, Respiratory syncytial virus
cuacaaagcacacucc

SEQ ID NO: 4047781 - RNA, 18 nt, Respiratory syncytial virus
cuagcaaaucaaugucac

SEQ ID NO: 4047782 - RNA, 13 nt, Respiratory syncytial virus
cuauaaaccaucu

SEQ ID NO: 4047783 - RNA, 16 nt, Respiratory syncytial virus
cucaacaauaccaaaa

SEQ ID NO: 4047784 - RNA, 18 nt, Respiratory syncytial virus
cucaccaugcaagccauc

SEQ ID NO: 4047785 - RNA, 20 nt, Respiratory syncytial virus
cucaccgaaucaaccauuca

SEQ ID NO: 4047786 - RNA, 17 nt, Respiratory syncytial virus
cucccuugguuagagau

SEQ ID NO: 4047787 - RNA, 15 nt, Respiratory syncytial virus
cugaaauaacaacuu

SEQ ID NO: 4047788 - RNA, 14 nt, Respiratory syncytial virus
cugaauacaacaca

SEQ ID NO: 4047789 - RNA, 19 nt, Respiratory syncytial virus
cuggaaagaaaaccaccac

SEQ ID NO: 4047790 - RNA, 21 nt, Respiratory syncytial virus
cuguauucaauuauaguuauu

SEQ ID NO: 4047791 - RNA, 23 nt, Respiratory syncytial virus
cugugauagaguuccaacaaaag

SEQ ID NO: 4047792 - RNA, 23 nt, Respiratory syncytial virus
aaaaaguuaauguccaacaaugu

SEQ ID NO: 4047793 - RNA, 23 nt, Respiratory syncytial virus
aaaacuaagugauucaacaauga

SEQ ID NO: 4047794 - RNA, 22 nt, Respiratory syncytial virus
aaaaguuaauguccaacaaugu

SEQ ID NO: 4047795 - RNA, 13 nt, Respiratory syncytial virus
aaaaucaaccaau

SEQ ID NO: 4047796 - RNA, 18 nt, Respiratory syncytial virus
aaaaugcuaaaagaaaug

SEQ ID NO: 4047797 - RNA, 22 nt, Respiratory syncytial virus
aaaauugauaaaacaagaauua

SEQ ID NO: 4047798 - RNA, 19 nt, Respiratory syncytial virus
aaaauuuguuugacaauga

SEQ ID NO: 4047799 - RNA, 19 nt, Respiratory syncytial virus
aaacaaucagcauguguug

SEQ ID NO: 4047800 - RNA, 13 nt, Respiratory syncytial virus
aaacauacgugaa

SEQ ID NO: 4047801 - RNA, 23 nt, Respiratory syncytial virus
aaacuaagugauucaacaaugac

SEQ ID NO: 4047802 - RNA, 13 nt, Respiratory syncytial virus
aaacuauugcaca

SEQ ID NO: 4047803 - RNA, 12 nt, Respiratory syncytial virus
aaagaaaaagac

SEQ ID NO: 4047804 - RNA, 21 nt, Respiratory syncytial virus
aaagaucugaacacacuugaa

SEQ ID NO: 4047805 - RNA, 12 nt, Respiratory syncytial virus
aaagauggggca

SEQ ID NO: 4047806 - RNA, 13 nt, Respiratory syncytial virus
aaagcaaauggag

SEQ ID NO: 4047807 - RNA, 18 nt, Respiratory syncytial virus
aaaguuagauuacaaaau

SEQ ID NO: 4047808 - RNA, 12 nt, Respiratory syncytial virus
aaauaagcaaga

SEQ ID NO: 4047809 - RNA, 21 nt, Respiratory syncytial virus
aaauauggaaacauacgugaa

SEQ ID NO: 4047810 - RNA, 22 nt, Respiratory syncytial virus
aaaucaaccagaaucaaaauca

SEQ ID NO: 4047811 - RNA, 21 nt, Respiratory syncytial virus
aaaucaguuaaaaauauuaug

SEQ ID NO: 4047812 - RNA, 19 nt, Respiratory syncytial virus
aaaucuuauauuaaaaauu

SEQ ID NO: 4047813 - RNA, 20 nt, Respiratory syncytial virus
aaaugaucagacaaacgaua

SEQ ID NO: 4047814 - RNA, 14 nt, Respiratory syncytial virus
aaaugauggaauua

SEQ ID NO: 4047815 - RNA, 14 nt, Respiratory syncytial virus
aaauggagccugaa

SEQ ID NO: 4047816 - RNA, 21 nt, Respiratory syncytial virus
aaauuaauacauuuaacuaau

SEQ ID NO: 4047817 - RNA, 14 nt, Respiratory syncytial virus
aacaaauauccaca

SEQ ID NO: 4047818 - RNA, 13 nt, Respiratory syncytial virus
aacaccaacagaa

SEQ ID NO: 4047819 - RNA, 19 nt, Respiratory syncytial virus
aacacgccaggcaaaauca

SEQ ID NO: 4047820 - RNA, 17 nt, Respiratory syncytial virus
aacauaccuaagaucca

SEQ ID NO: 4047821 - RNA, 11 nt, Respiratory syncytial virus
aaccaaacauc

SEQ ID NO: 4047822 - RNA, 17 nt, Respiratory syncytial virus
aaccacacuccauaguu

SEQ ID NO: 4047823 - RNA, 15 nt, Respiratory syncytial virus
aacguuggggcaaau

SEQ ID NO: 4047824 - RNA, 21 nt, Respiratory syncytial virus
aacuaagugauucaacaauga

SEQ ID NO: 4047825 - RNA, 20 nt, Respiratory syncytial virus
aacuagcuaaugucaacaua

SEQ ID NO: 4047826 - RNA, 15 nt, Respiratory syncytial virus
aacucaaacaauuca

SEQ ID NO: 4047827 - RNA, 23 nt, Respiratory syncytial virus
aacuucaugcauaaccacacucc

SEQ ID NO: 4047828 - RNA, 14 nt, Respiratory syncytial virus
aagaaaauggugug

SEQ ID NO: 4047829 - RNA, 22 nt, Respiratory syncytial virus
aaggcauguagucuaacaugcc

SEQ ID NO: 4047830 - RNA, 15 nt, Respiratory syncytial virus
aaggcuccacauaca

SEQ ID NO: 4047831 - RNA, 16 nt, Respiratory syncytial virus
aaguaccacuuaaauu

SEQ ID NO: 4047832 - RNA, 13 nt, Respiratory syncytial virus
aagucaaguugaa

SEQ ID NO: 4047833 - RNA, 20 nt, Respiratory syncytial virus
aagucacacuaacaacugca

SEQ ID NO: 4047834 - RNA, 13 nt, Respiratory syncytial virus
aagugaacaaaau

SEQ ID NO: 4047835 - RNA, 14 nt, Respiratory syncytial virus
aagugaacaaaauc

SEQ ID NO: 4047836 - RNA, 14 nt, Respiratory syncytial virus
aaguguuugaaaaa

SEQ ID NO: 4047837 - RNA, 16 nt, Respiratory syncytial virus
aaguugaaugauacac

SEQ ID NO: 4047838 - RNA, 18 nt, Respiratory syncytial virus
guaccuaccaccaagccc

SEQ ID NO: 4047839 - RNA, 21 nt, Respiratory syncytial virus
guaccuaccaccaagcccaca

SEQ ID NO: 4047840 - RNA, 16 nt, Respiratory syncytial virus
gucaacuaugaaauga

SEQ ID NO: 4047841 - RNA, 15 nt, Respiratory syncytial virus
gucaagucaacccug

SEQ ID NO: 4047842 - RNA, 12 nt, Respiratory syncytial virus
gugaaacaaaua

SEQ ID NO: 4047843 - RNA, 11 nt, Respiratory syncytial virus
gugaacaaacu

SEQ ID NO: 4047844 - RNA, 17 nt, Respiratory syncytial virus
guuaaaucuuaaaucua

SEQ ID NO: 4047845 - RNA, 15 nt, Respiratory syncytial virus
guucaaauggagccu

SEQ ID NO: 4047846 - RNA, 17 nt, Respiratory syncytial virus
guucaaauggagccuga

SEQ ID NO: 4047847 - RNA, 22 nt, Respiratory syncytial virus
guucaucagaucuaguacucaa

SEQ ID NO: 4047848 - RNA, 23 nt, Respiratory syncytial virus
guugccaauccucaaaacaaaug

SEQ ID NO: 4047849 - RNA, 22 nt, Respiratory syncytial virus
uaaauaucaacuagcaaaucaa

SEQ ID NO: 4047850 - RNA, 17 nt, Respiratory syncytial virus
uaaaugcugguaaaucc

SEQ ID NO: 4047851 - RNA, 23 nt, Respiratory syncytial virus
uaaggaacucaaaagaauuacug

SEQ ID NO: 4047852 - RNA, 16 nt, Respiratory syncytial virus
uaagugauucaacaau

SEQ ID NO: 4047853 - RNA, 21 nt, Respiratory syncytial virus
uaauaguaugcucaacaacau

SEQ ID NO: 4047854 - RNA, 16 nt, Respiratory syncytial virus
uaaucaaaagaacaca

SEQ ID NO: 4047855 - RNA, 22 nt, Respiratory syncytial virus
uaaucauaaucuccaucaugau

SEQ ID NO: 4047856 - RNA, 15 nt, Respiratory syncytial virus
uaaugggaaagaaau

SEQ ID NO: 4047857 - RNA, 13 nt, Respiratory syncytial virus
uaauuaugaugug

SEQ ID NO: 4047858 - RNA, 19 nt, Respiratory syncytial virus
uacaaaaccacaucaacau

SEQ ID NO: 4047859 - RNA, 19 nt, Respiratory syncytial virus
uacaagaugcaacaagcca

SEQ ID NO: 4047860 - RNA, 18 nt, Respiratory syncytial virus
uacacaugauaacaacaa

SEQ ID NO: 4047861 - RNA, 14 nt, Respiratory syncytial virus
uacacucaacaaag

SEQ ID NO: 4047862 - RNA, 14 nt, Respiratory syncytial virus
uacacucaacaaua

SEQ ID NO: 4047863 - RNA, 23 nt, Respiratory syncytial virus
uaccacaggaaauccagaacaca

SEQ ID NO: 4047864 - RNA, 17 nt, Respiratory syncytial virus
uagaaguaaccaaagaa

SEQ ID NO: 4047865 - RNA, 19 nt, Respiratory syncytial virus
uagaggcuaucaaacauca

SEQ ID NO: 4047866 - RNA, 23 nt, Respiratory syncytial virus
uagaguuacuauguauaaucaaa

SEQ ID NO: 4047867 - RNA, 14 nt, Respiratory syncytial virus
uagauuccuaguuu

SEQ ID NO: 4047868 - RNA, 16 nt, Respiratory syncytial virus
uagcuaaugucaacau

SEQ ID NO: 4047869 - RNA, 13 nt, Respiratory syncytial virus
uagcuacacacua

SEQ ID NO: 4047870 - RNA, 14 nt, Respiratory syncytial virus
uaguagacaaaauc

SEQ ID NO: 4047871 - RNA, 23 nt, Respiratory syncytial virus
uauaacaaccacugaauucaaaa

SEQ ID NO: 4047872 - RNA, 22 nt, Respiratory syncytial virus
uauaacaucaaauucaaccauu

SEQ ID NO: 4047873 - RNA, 11 nt, Respiratory syncytial virus
uauaacuaaac

SEQ ID NO: 4047874 - RNA, 14 nt, Respiratory syncytial virus
uauaguuauuuaaa

SEQ ID NO: 4047875 - RNA, 15 nt, Respiratory syncytial virus
uauauuucaaucaaa

SEQ ID NO: 4047876 - RNA, 23 nt, Respiratory syncytial virus
uaucaacuagcaaaucaauguca

SEQ ID NO: 4047877 - RNA, 17 nt, Respiratory syncytial virus
uaucauuaaucaaugau

SEQ ID NO: 4047878 - RNA, 18 nt, Respiratory syncytial virus
uaucauuggauuuucuua

SEQ ID NO: 4047879 - RNA, 19 nt, Respiratory syncytial virus
uauccauucuggcaaugau

SEQ ID NO: 4047880 - RNA, 17 nt, Respiratory syncytial virus
uaucucaagucaaugag

SEQ ID NO: 4047881 - RNA, 15 nt, Respiratory syncytial virus
uauuaacucaaacaa

SEQ ID NO: 4047882 - RNA, 16 nt, Respiratory syncytial virus
uauuaacucaaacaau

SEQ ID NO: 4047883 - RNA, 21 nt, Respiratory syncytial virus
uauuaaugggaaagaaaugaa

SEQ ID NO: 4047884 - RNA, 14 nt, Respiratory syncytial virus
uauuucaaucaaaa

SEQ ID NO: 4047885 - RNA, 23 nt, Respiratory syncytial virus
ucaaaacaacacucuugaagaaa

SEQ ID NO: 4047886 - RNA, 17 nt, Respiratory syncytial virus
ucaaaccacaaaaccaa

SEQ ID NO: 4047887 - RNA, 22 nt, Respiratory syncytial virus
ucaacaccaccaaaacaaacau

SEQ ID NO: 4047888 - RNA, 18 nt, Respiratory syncytial virus
ucaaccaauggaaaauac

SEQ ID NO: 4047889 - RNA, 15 nt, Respiratory syncytial virus
ucaagaacacaaccc

SEQ ID NO: 4047890 - RNA, 21 nt, Respiratory syncytial virus
ucaagaccaaaaacacaacaa

SEQ ID NO: 4047891 - RNA, 21 nt, Respiratory syncytial virus
ucaauaaagggcaaauucaca

SEQ ID NO: 4047892 - RNA, 17 nt, Respiratory syncytial virus
ucacacaaucugaaaua

SEQ ID NO: 4047893 - RNA, 21 nt, Respiratory syncytial virus
ucacccagaauccccagcuug

SEQ ID NO: 4047894 - RNA, 21 nt, Respiratory syncytial virus
ucagugaguugauucauacaa

SEQ ID NO: 4047895 - RNA, 19 nt, Respiratory syncytial virus
ucauaaucaccaacccucu

SEQ ID NO: 4047896 - RNA, 18 nt, Respiratory syncytial virus
ucauagacaacccaucua

SEQ ID NO: 4047897 - RNA, 20 nt, Respiratory syncytial virus
ucauagccucggcaaaccac

SEQ ID NO: 4047898 - RNA, 13 nt, Respiratory syncytial virus
ucauaugaagaaa

SEQ ID NO: 4047899 - RNA, 14 nt, Respiratory syncytial virus
ucaugauaaacuca

SEQ ID NO: 4047900 - RNA, 14 nt, Respiratory syncytial virus
ucauguucuuacaa

SEQ ID NO: 4047901 - RNA, 10 nt, Respiratory syncytial virus
uccaacaaug

SEQ ID NO: 4047902 - RNA, 15 nt, Respiratory syncytial virus
ucccauagcuacaca

SEQ ID NO: 4047903 - RNA, 16 nt, Respiratory syncytial virus
ucuaaagaaacuaaau

SEQ ID NO: 4047904 - RNA, 20 nt, Respiratory syncytial virus
ucuaacaugccuaaaaucaa

SEQ ID NO: 4047905 - RNA, 17 nt, Respiratory syncytial virus
ucucaaaccucaaacca

SEQ ID NO: 4047906 - RNA, 18 nt, Respiratory syncytial virus
ucugaaacuacaucacaa

SEQ ID NO: 4047907 - RNA, 17 nt, Respiratory syncytial virus
ucuggagccucagauca

SEQ ID NO: 4047908 - RNA, 15 nt, Respiratory syncytial virus
caacagucaagacca

SEQ ID NO: 4047909 - RNA, 19 nt, Respiratory syncytial virus
caaccaaaauaaccauaua

SEQ ID NO: 4047910 - RNA, 17 nt, Respiratory syncytial virus
caaccauggacacaaca

SEQ ID NO: 4047911 - RNA, 22 nt, Respiratory syncytial virus
caacgccaaaacaaaccaccaa

SEQ ID NO: 4047912 - RNA, 14 nt, Respiratory syncytial virus
caagacacuagaaa

SEQ ID NO: 4047913 - RNA, 16 nt, Respiratory syncytial virus
caagcccaccacaaaa

SEQ ID NO: 4047914 - RNA, 15 nt, Respiratory syncytial virus
caaucagccaaucca

SEQ ID NO: 4047915 - RNA, 23 nt, Respiratory syncytial virus
caauccuaaugcuuaccacauca

SEQ ID NO: 4047916 - RNA, 17 nt, Respiratory syncytial virus
caaugaucuaucacuug

SEQ ID NO: 4047917 - RNA, 21 nt, Respiratory syncytial virus
cacaaaauuaaacaacauauu

SEQ ID NO: 4047918 - RNA, 15 nt, Respiratory syncytial virus
cacaaaccaccacca

SEQ ID NO: 4047919 - RNA, 22 nt, Respiratory syncytial virus
cacaaagacugaugaucacaga

SEQ ID NO: 4047920 - RNA, 19 nt, Respiratory syncytial virus
cacaaaucacauuauccau

SEQ ID NO: 4047921 - RNA, 16 nt, Respiratory syncytial virus
cacacaaucugaaaua

SEQ ID NO: 4047922 - RNA, 14 nt, Respiratory syncytial virus
cacauggggcaaau

SEQ ID NO: 4047923 - RNA, 16 nt, Respiratory syncytial virus
caccauuaguuaauau

SEQ ID NO: 4047924 - RNA, 19 nt, Respiratory syncytial virus
cacuaacacuguauucaau

SEQ ID NO: 4047925 - RNA, 16 nt, Respiratory syncytial virus
cacuguauucaauuau

SEQ ID NO: 4047926 - RNA, 23 nt, Respiratory syncytial virus
cacuuauaauugcagccaucaua

SEQ ID NO: 4047927 - RNA, 18 nt, Respiratory syncytial virus
cacuugaaaauauaacaa

SEQ ID NO: 4047928 - RNA, 15 nt, Respiratory syncytial virus
cagaaacacaucaau

SEQ ID NO: 4047929 - RNA, 15 nt, Respiratory syncytial virus
cagaaucaaaaucaa

SEQ ID NO: 4047930 - RNA, 16 nt, Respiratory syncytial virus
cagccaauccaaaacu

SEQ ID NO: 4047931 - RNA, 19 nt, Respiratory syncytial virus
cagugauacauacaaucaa

SEQ ID NO: 4047932 - RNA, 23 nt, Respiratory syncytial virus
caguguauuagacuugacagcag

SEQ ID NO: 4047933 - RNA, 23 nt, Respiratory syncytial virus
caguuaaagaucucacuaugaaa

SEQ ID NO: 4047934 - RNA, 13 nt, Respiratory syncytial virus
cauaaaaaccaca

SEQ ID NO: 4047935 - RNA, 16 nt, Respiratory syncytial virus
cauaaaaauacucaga

SEQ ID NO: 4047936 - RNA, 20 nt, Respiratory syncytial virus
cauaaaaauacucagagaug

SEQ ID NO: 4047937 - RNA, 23 nt, Respiratory syncytial virus
cauagcuacacacuaacacugua

SEQ ID NO: 4047938 - RNA, 18 nt, Respiratory syncytial virus
caucuauaaaccaucuca

SEQ ID NO: 4047939 - RNA, 20 nt, Respiratory syncytial virus
caugagaccauugucacuug

SEQ ID NO: 4047940 - RNA, 20 nt, Respiratory syncytial virus
cauggagaagaugcaaacaa

SEQ ID NO: 4047941 - RNA, 22 nt, Respiratory syncytial virus
cauggagaagaugcaaacaaca

SEQ ID NO: 4047942 - RNA, 17 nt, Respiratory syncytial virus
cauuaaucaaugauaug

SEQ ID NO: 4047943 - RNA, 23 nt, Respiratory syncytial virus
cauuuguaagugaacaacccuca

SEQ ID NO: 4047944 - RNA, 21 nt, Respiratory syncytial virus
ccaacaaaugagacagaugau

SEQ ID NO: 4047945 - RNA, 13 nt, Respiratory syncytial virus
ccaacccucugug

SEQ ID NO: 4047946 - RNA, 18 nt, Respiratory syncytial virus
ccacagaaaagccaacca

SEQ ID NO: 4047947 - RNA, 22 nt, Respiratory syncytial virus
ccagaagcacaccagucacacu

SEQ ID NO: 4047948 - RNA, 16 nt, Respiratory syncytial virus
ccauagcuacacacua

SEQ ID NO: 4047949 - RNA, 16 nt, Respiratory syncytial virus
cgaggucauugcuuga

SEQ ID NO: 4047950 - RNA, 20 nt, Respiratory syncytial virus
cgaugacccugcaucacuua

SEQ ID NO: 4047951 - RNA, 11 nt, Respiratory syncytial virus
cggagcacagg

SEQ ID NO: 4047952 - RNA, 15 nt, Respiratory syncytial virus
cggcaaccaacaauc

SEQ ID NO: 4047953 - RNA, 13 nt, Respiratory syncytial virus
cuaauaauaauau

SEQ ID NO: 4047954 - RNA, 15 nt, Respiratory syncytial virus
cuaaucaaacaaaac

SEQ ID NO: 4047955 - RNA, 16 nt, Respiratory syncytial virus
cuacacacuaacacug

SEQ ID NO: 4047956 - RNA, 14 nt, Respiratory syncytial virus
cuacaucacaaacc

SEQ ID NO: 4047957 - RNA, 23 nt, Respiratory syncytial virus
cuagaggcuaucaaacaucagcu

SEQ ID NO: 4047958 - RNA, 18 nt, Respiratory syncytial virus
cuagugaaacaaauaucc

SEQ ID NO: 4047959 - RNA, 15 nt, Respiratory syncytial virus
cuauauuucaaucaa

SEQ ID NO: 4047960 - RNA, 14 nt, Respiratory syncytial virus
cuaucauuggauuu

SEQ ID NO: 4047961 - RNA, 15 nt, Respiratory syncytial virus
cuauggcaagacuca

SEQ ID NO: 4047962 - RNA, 20 nt, Respiratory syncytial virus
cuauugugaacaagcaaagc

SEQ ID NO: 4047963 - RNA, 14 nt, Respiratory syncytial virus
cucaaacaauucaa

SEQ ID NO: 4047964 - RNA, 19 nt, Respiratory syncytial virus
cucucaauccaacaucaga

SEQ ID NO: 4047965 - RNA, 19 nt, Respiratory syncytial virus
cugaaauaacaacuucaug

SEQ ID NO: 4047966 - RNA, 16 nt, Respiratory syncytial virus
cugaacucaacaguga

SEQ ID NO: 4047967 - RNA, 19 nt, Respiratory syncytial virus
cugaugauauauacacaau

SEQ ID NO: 4047968 - RNA, 16 nt, Respiratory syncytial virus
cugcucaccaacaaua

SEQ ID NO: 4047969 - RNA, 20 nt, Respiratory syncytial virus
cugcucauagacaacccauc

SEQ ID NO: 4047970 - RNA, 21 nt, Respiratory syncytial virus
cuggaaagaaaaccaccacca

SEQ ID NO: 4047971 - RNA, 17 nt, Respiratory syncytial virus
cuguacaucaacacaca

SEQ ID NO: 4047972 - RNA, 14 nt, Respiratory syncytial virus
cuuaaagcagucaa

SEQ ID NO: 4047973 - RNA, 14 nt, Respiratory syncytial virus
cuuagaaugcauug

SEQ ID NO: 4047974 - RNA, 24 nt, Respiratory syncytial virus
gaaaacacucaacccaacacauga

SEQ ID NO: 4047975 - RNA, 21 nt, Respiratory syncytial virus
gaaaauacauccauaacaaua

SEQ ID NO: 4047976 - RNA, 15 nt, Respiratory syncytial virus
gaacaacucaaagaa

SEQ ID NO: 4047977 - RNA, 18 nt, Respiratory syncytial virus
gaacaacucaaagaaaau

SEQ ID NO: 4047978 - RNA, 22 nt, Respiratory syncytial virus
gaacaagcccaauuaucaaaga

SEQ ID NO: 4047979 - RNA, 22 nt, Respiratory syncytial virus
gaagaaaaccauaaaaaccaca

SEQ ID NO: 4047980 - RNA, 23 nt, Respiratory syncytial virus
uuaaccuuuuucuucuacaucag

SEQ ID NO: 4047981 - RNA, 19 nt, Respiratory syncytial virus
uuaaucacagaagaugcua

SEQ ID NO: 4047982 - RNA, 17 nt, Respiratory syncytial virus
uuaauuuauacacaaaa

SEQ ID NO: 4047983 - RNA, 13 nt, Respiratory syncytial virus
uuacaaaaccaca

SEQ ID NO: 4047984 - RNA, 22 nt, Respiratory syncytial virus
uuacaaaaccacaucaacaucu

SEQ ID NO: 4047985 - RNA, 20 nt, Respiratory syncytial virus
uuaccaagugaaguaaaucu

SEQ ID NO: 4047986 - RNA, 12 nt, Respiratory syncytial virus
uuagaaaaagac

SEQ ID NO: 4047987 - RNA, 16 nt, Respiratory syncytial virus
uuauuaauggaaauuc

SEQ ID NO: 4047988 - RNA, 13 nt, Respiratory syncytial virus
uucaaauacauaa

SEQ ID NO: 4047989 - RNA, 19 nt, Respiratory syncytial virus
uucaugcauaaccacacuc

SEQ ID NO: 4047990 - RNA, 19 nt, Respiratory syncytial virus
uuugauaacaaugaagaag

SEQ ID NO: 4047991 - RNA, 14 nt, Respiratory syncytial virus
uuugcuaaucauaa

SEQ ID NO: 4047992 - RNA, 12 nt, Respiratory syncytial virus
acaaacaaacca

SEQ ID NO: 4047993 - RNA, 22 nt, Respiratory syncytial virus
acaaagacugaugaucacagac

SEQ ID NO: 4047994 - RNA, 17 nt, Respiratory syncytial virus
acaaaugcaaaaaucau

SEQ ID NO: 4047995 - RNA, 15 nt, Respiratory syncytial virus
acaacacacaaugac

SEQ ID NO: 4047996 - RNA, 23 nt, Respiratory syncytial virus
acaagagucacacaaucugaaau

SEQ ID NO: 4047997 - RNA, 18 nt, Respiratory syncytial virus
acaagcccaauuaucaaa

SEQ ID NO: 4047998 - RNA, 13 nt, Respiratory syncytial virus
acaauauauauau

SEQ ID NO: 4047999 - RNA, 18 nt, Respiratory syncytial virus
acaaugaagaagaaucua

SEQ ID NO: 4048000 - RNA, 14 nt, Respiratory syncytial virus
acaaugaucuauca

SEQ ID NO: 4048001 - RNA, 21 nt, Respiratory syncytial virus
acaaugccaguguuacaaaau

SEQ ID NO: 4048002 - RNA, 16 nt, Respiratory syncytial virus
acacaucgucaagaua

SEQ ID NO: 4048003 - RNA, 19 nt, Respiratory syncytial virus
acacuguauucaauuauag

SEQ ID NO: 4048004 - RNA, 14 nt, Respiratory syncytial virus
acagcaaaguuacu

SEQ ID NO: 4048005 - RNA, 18 nt, Respiratory syncytial virus
acaucaaauucaaccauu

SEQ ID NO: 4048006 - RNA, 16 nt, Respiratory syncytial virus
acaucaucaaacuauu

SEQ ID NO: 4048007 - RNA, 18 nt, Respiratory syncytial virus
accaacgcaccaccaaga

SEQ ID NO: 4048008 - RNA, 13 nt, Respiratory syncytial virus
accaagacacuag

SEQ ID NO: 4048009 - RNA, 19 nt, Respiratory syncytial virus
accaugcaagccaucaucc

SEQ ID NO: 4048010 - RNA, 21 nt, Respiratory syncytial virus
accauggacacaacacacaau

SEQ ID NO: 4048011 - RNA, 15 nt, Respiratory syncytial virus
acccauccaaccaaa

SEQ ID NO: 4048012 - RNA, 14 nt, Respiratory syncytial virus
accuaccaccaagc

SEQ ID NO: 4048013 - RNA, 14 nt, Respiratory syncytial virus
accuagaaaaagaa

SEQ ID NO: 4048014 - RNA, 16 nt, Respiratory syncytial virus
accuagaaaaagaaag

SEQ ID NO: 4048015 - RNA, 18 nt, Respiratory syncytial virus
accucuuuacaaaaccac

SEQ ID NO: 4048016 - RNA, 22 nt, Respiratory syncytial virus
acuaacaacugcaaucauacaa

SEQ ID NO: 4048017 - RNA, 22 nt, Respiratory syncytial virus
acuagcaaaucaaugucacuaa

SEQ ID NO: 4048018 - RNA, 14 nt, Respiratory syncytial virus
acucacccauccaa

SEQ ID NO: 4048019 - RNA, 15 nt, Respiratory syncytial virus
acucucaucuauaaa

SEQ ID NO: 4048020 - RNA, 12 nt, Respiratory syncytial virus
acuugaugaaag

SEQ ID NO: 4048021 - RNA, 20 nt, Respiratory syncytial virus
acuugauugaugcaauucaa

SEQ ID NO: 4048022 - RNA, 17 nt, Respiratory syncytial virus
agaaacacaucaauaag

SEQ ID NO: 4048023 - RNA, 21 nt, Respiratory syncytial virus
agaacuagcuaaugucaacau

SEQ ID NO: 4048024 - RNA, 13 nt, Respiratory syncytial virus
agaaucaauaaag

SEQ ID NO: 4048025 - RNA, 18 nt, Respiratory syncytial virus
agagaugcgggauaucau

SEQ ID NO: 4048026 - RNA, 17 nt, Respiratory syncytial virus
agagaugggcagcaauu

SEQ ID NO: 4048027 - RNA, 20 nt, Respiratory syncytial virus
agagaugggcagcaauucau

SEQ ID NO: 4048028 - RNA, 19 nt, Respiratory syncytial virus
agauauagaaguaaccaaa

SEQ ID NO: 4048029 - RNA, 19 nt, Respiratory syncytial virus
agaucccaagaaaaaagau

SEQ ID NO: 4048030 - RNA, 14 nt, Respiratory syncytial virus
agaucuauaugaug

SEQ ID NO: 4048031 - RNA, 15 nt, Respiratory syncytial virus
agaucugaacacacu

SEQ ID NO: 4048032 - RNA, 18 nt, Respiratory syncytial virus
agauggggcaaauacaaa

SEQ ID NO: 4048033 - RNA, 21 nt, Respiratory syncytial virus
agauuaggaagagaagacacc

SEQ ID NO: 4048034 - RNA, 17 nt, Respiratory syncytial virus
agcaaaucaaugucacu

SEQ ID NO: 4048035 - RNA, 22 nt, Respiratory syncytial virus
agcacacucccauaauauacaa

SEQ ID NO: 4048036 - RNA, 16 nt, Respiratory syncytial virus
agcagacguauugaag

SEQ ID NO: 4048037 - RNA, 21 nt, Respiratory syncytial virus
agccucggcaaaccacaaagu

SEQ ID NO: 4048038 - RNA, 19 nt, Respiratory syncytial virus
agcuacacacuaacacugu

SEQ ID NO: 4048039 - RNA, 22 nt, Respiratory syncytial virus
aggcuccacauacacagcugcu

SEQ ID NO: 4048040 - RNA, 14 nt, Respiratory syncytial virus
agugaguugauuca

SEQ ID NO: 4048041 - RNA, 11 nt, Respiratory syncytial virus
aguuaauuaaa

SEQ ID NO: 4048042 - RNA, 16 nt, Respiratory syncytial virus
aguucaaauggagccu

SEQ ID NO: 4048043 - RNA, 23 nt, Respiratory syncytial virus
aguugaaugauacacucaacaaa

SEQ ID NO: 4048044 - RNA, 14 nt, Respiratory syncytial virus
aguugccaauccuc

SEQ ID NO: 4048045 - RNA, 22 nt, Respiratory syncytial virus
aguugccaauccucaaaacaaa

SEQ ID NO: 4048046 - RNA, 19 nt, Respiratory syncytial virus
auaaauaucaacuagcaaa

SEQ ID NO: 4048047 - RNA, 15 nt, Respiratory syncytial virus
auaaccauauauacu

SEQ ID NO: 4048048 - RNA, 16 nt, Respiratory syncytial virus
auaacuauagaauuaa

SEQ ID NO: 4048049 - RNA, 16 nt, Respiratory syncytial virus
auaagaauuugauaag

SEQ ID NO: 4048050 - RNA, 20 nt, Respiratory syncytial virus
auaaugauacuaccugacaa

SEQ ID NO: 4048051 - RNA, 15 nt, Respiratory syncytial virus
auaccaaacaaaaaa

SEQ ID NO: 4048052 - RNA, 20 nt, Respiratory syncytial virus
auacucaccgaaucaaccau

SEQ ID NO: 4048053 - RNA, 18 nt, Respiratory syncytial virus
auacuccuaauuaugaug

SEQ ID NO: 4048054 - RNA, 19 nt, Respiratory syncytial virus
auacugacaaauuaauaca

SEQ ID NO: 4048055 - RNA, 19 nt, Respiratory syncytial virus
auaguucaaauggagccug

SEQ ID NO: 4048056 - RNA, 17 nt, Respiratory syncytial virus
auaucauguaaaagcaa

SEQ ID NO: 4048057 - RNA, 13 nt, Respiratory syncytial virus
auaugcccaaaaa

SEQ ID NO: 4048058 - RNA, 21 nt, Respiratory syncytial virus
auauuaaugggaaagaaauga

SEQ ID NO: 4048059 - RNA, 18 nt, Respiratory syncytial virus
aucaaaagaacacacuau

SEQ ID NO: 4048060 - RNA, 16 nt, Respiratory syncytial virus
aucaaacaaaacccau

SEQ ID NO: 4048061 - RNA, 14 nt, Respiratory syncytial virus
aucaaagaaaaccu

SEQ ID NO: 4048062 - RNA, 21 nt, Respiratory syncytial virus
aucaaugucacuaacaccauu

SEQ ID NO: 4048063 - RNA, 19 nt, Respiratory syncytial virus
aucagugucagaaauaaag

SEQ ID NO: 4048064 - RNA, 16 nt, Respiratory syncytial virus
auccgaugaauuauua

SEQ ID NO: 4048065 - RNA, 20 nt, Respiratory syncytial virus
aucugaacacacuugaaaau

SEQ ID NO: 4048066 - RNA, 20 nt, Respiratory syncytial virus
aucuuaaagcagucaaaaau

SEQ ID NO: 4048067 - RNA, 20 nt, Respiratory syncytial virus
augauacacucaacaaagau

SEQ ID NO: 4048068 - RNA, 19 nt, Respiratory syncytial virus
augcauaaccacacuccau

SEQ ID NO: 4048069 - RNA, 11 nt, Respiratory syncytial virus
aaaaaaaaugg

SEQ ID NO: 4048070 - RNA, 20 nt, Respiratory syncytial virus
aaaaaugcuaaaagaaaugg

SEQ ID NO: 4048071 - RNA, 17 nt, Respiratory syncytial virus
aaaaccauaaaaaccac

SEQ ID NO: 4048072 - RNA, 15 nt, Respiratory syncytial virus
aaaacccaucuggag

SEQ ID NO: 4048073 - RNA, 21 nt, Respiratory syncytial virus
aaaaccuggaaagaaaaccac

SEQ ID NO: 4048074 - RNA, 17 nt, Respiratory syncytial virus
aaaacuaagugauucaa

SEQ ID NO: 4048075 - RNA, 12 nt, Respiratory syncytial virus
aaaacuauacaa

SEQ ID NO: 4048076 - RNA, 12 nt, Respiratory syncytial virus
aaaagucauaau

SEQ ID NO: 4048077 - RNA, 13 nt, Respiratory syncytial virus
aaaaguuagauua

SEQ ID NO: 4048078 - RNA, 19 nt, Respiratory syncytial virus
aaaauggcucuuagcaaag

SEQ ID NO: 4048079 - RNA, 12 nt, Respiratory syncytial virus
aaacaaaaagau

SEQ ID NO: 4048080 - RNA, 13 nt, Respiratory syncytial virus
aaacaacauauua

SEQ ID NO: 4048081 - RNA, 13 nt, Respiratory syncytial virus
aaaccaaccauca

SEQ ID NO: 4048082 - RNA, 19 nt, Respiratory syncytial virus
aaacccaucuggagccuca

SEQ ID NO: 4048083 - RNA, 14 nt, Respiratory syncytial virus
aaagaaaugggaga

SEQ ID NO: 4048084 - RNA, 21 nt, Respiratory syncytial virus
aaagaaaugggagagguagcu

SEQ ID NO: 4048085 - RNA, 12 nt, Respiratory syncytial virus
aaagaacaacag

SEQ ID NO: 4048086 - RNA, 20 nt, Respiratory syncytial virus
aaagucauaauaccaacaua

SEQ ID NO: 4048087 - RNA, 16 nt, Respiratory syncytial virus
aaaguuagauuacaaa

SEQ ID NO: 4048088 - RNA, 13 nt, Respiratory syncytial virus
aaauaaagaucug

SEQ ID NO: 4048089 - RNA, 14 nt, Respiratory syncytial virus
aaaucagaacugaa

SEQ ID NO: 4048090 - RNA, 13 nt, Respiratory syncytial virus
aaaugcaaacaug

SEQ ID NO: 4048091 - RNA, 15 nt, Respiratory syncytial virus
aaauuaauacauuua

SEQ ID NO: 4048092 - RNA, 15 nt, Respiratory syncytial virus
aaauuuaaauccaaa

SEQ ID NO: 4048093 - RNA, 13 nt, Respiratory syncytial virus
aacaacccaaaag

SEQ ID NO: 4048094 - RNA, 20 nt, Respiratory syncytial virus
aacaaugccaguguuacaaa

SEQ ID NO: 4048095 - RNA, 16 nt, Respiratory syncytial virus
aacaccaccaaaacaa

SEQ ID NO: 4048096 - RNA, 22 nt, Respiratory syncytial virus
aacauacuagugaaacaaauau

SEQ ID NO: 4048097 - RNA, 18 nt, Respiratory syncytial virus
aacaugccuaaaaucaaa

SEQ ID NO: 4048098 - RNA, 23 nt, Respiratory syncytial virus
aaccacugaauucaaaaaugcca

SEQ ID NO: 4048099 - RNA, 17 nt, Respiratory syncytial virus
aacuugaugaaagacag

SEQ ID NO: 4048100 - RNA, 22 nt, Respiratory syncytial virus
aagaacacaaccccaacauacc

SEQ ID NO: 4048101 - RNA, 16 nt, Respiratory syncytial virus
aagacaaccaaaaaag

SEQ ID NO: 4048102 - RNA, 22 nt, Respiratory syncytial virus
aagcacacucccauaauauaca

SEQ ID NO: 4048103 - RNA, 18 nt, Respiratory syncytial virus
aagucaaguugaaugaua

SEQ ID NO: 4048104 - RNA, 21 nt, Respiratory syncytial virus
aagucauaauaccaacauacc

SEQ ID NO: 4048105 - RNA, 21 nt, Respiratory syncytial virus
aaguguuagaccucaaaaacu

SEQ ID NO: 4048106 - RNA, 14 nt, Respiratory syncytial virus
aaguuacauauuca

SEQ ID NO: 4048107 - RNA, 14 nt, Respiratory syncytial virus
aauaaccaaauuag

SEQ ID NO: 4048108 - RNA, 15 nt, Respiratory syncytial virus
aauacaaaaaauaua

SEQ ID NO: 4048109 - RNA, 15 nt, Respiratory syncytial virus
aauacaaaaauggcu

SEQ ID NO: 4048110 - RNA, 20 nt, Respiratory syncytial virus
aauacauuuaacuaaugcau

SEQ ID NO: 4048111 - RNA, 15 nt, Respiratory syncytial virus
aauagguauguuaua

SEQ ID NO: 4048112 - RNA, 17 nt, Respiratory syncytial virus
aauaucaacuagcaaau

SEQ ID NO: 4048113 - RNA, 14 nt, Respiratory syncytial virus
aaucauaaucucca

SEQ ID NO: 4048114 - RNA, 15 nt, Respiratory syncytial virus
aauccaauuucacaa

SEQ ID NO: 4048115 - RNA, 20 nt, Respiratory syncytial virus
aaucuagcuauucauaugaa

SEQ ID NO: 4048116 - RNA, 19 nt, Respiratory syncytial virus
aauggggcaaauaaaacau

SEQ ID NO: 4048117 - RNA, 18 nt, Respiratory syncytial virus
aauguccuaaaaaaugaa

SEQ ID NO: 4048118 - RNA, 20 nt, Respiratory syncytial virus
aauugcagccaucauauuca

SEQ ID NO: 4048119 - RNA, 21 nt, Respiratory syncytial virus
acaaaauuuguuugacaauga

SEQ ID NO: 4048120 - RNA, 21 nt, Respiratory syncytial virus
uauaacaucaaauucaaccau

SEQ ID NO: 4048121 - RNA, 23 nt, Respiratory syncytial virus
uauaauaaauaucaacuagcaaa

SEQ ID NO: 4048122 - RNA, 13 nt, Respiratory syncytial virus
uauaguaacauca

SEQ ID NO: 4048123 - RNA, 16 nt, Respiratory syncytial virus
uauauuaaaaauuccc

SEQ ID NO: 4048124 - RNA, 21 nt, Respiratory syncytial virus
uaucaacuagcaaaucaaugu

SEQ ID NO: 4048125 - RNA, 15 nt, Respiratory syncytial virus
uauuaaucacagaag

SEQ ID NO: 4048126 - RNA, 16 nt, Respiratory syncytial virus
ucaacacacaacacca

SEQ ID NO: 4048127 - RNA, 12 nt, Respiratory syncytial virus
ucaacaccacca

SEQ ID NO: 4048128 - RNA, 18 nt, Respiratory syncytial virus
ucaacaucucaccaugca

SEQ ID NO: 4048129 - RNA, 21 nt, Respiratory syncytial virus
ucaacuaugaaaugaaacuau

SEQ ID NO: 4048130 - RNA, 22 nt, Respiratory syncytial virus
ucaagaucuauaugaugcugca

SEQ ID NO: 4048131 - RNA, 15 nt, Respiratory syncytial virus
ucaaucaugaugggu

SEQ ID NO: 4048132 - RNA, 12 nt, Respiratory syncytial virus
ucacccauccaa

SEQ ID NO: 4048133 - RNA, 13 nt, Respiratory syncytial virus
ucacuaacaccau

SEQ ID NO: 4048134 - RNA, 14 nt, Respiratory syncytial virus
ucaugcauaaccac

SEQ ID NO: 4048135 - RNA, 21 nt, Respiratory syncytial virus
uccacaaacaaggcuguaguc

SEQ ID NO: 4048136 - RNA, 11 nt, Respiratory syncytial virus
uccuacaaaaa

SEQ ID NO: 4048137 - RNA, 11 nt, Respiratory syncytial virus
ucuaacaugcc

SEQ ID NO: 4048138 - RNA, 21 nt, Respiratory syncytial virus
ucugaacuucaucgaaacucu

SEQ ID NO: 4048139 - RNA, 21 nt, Respiratory syncytial virus
ucuuaaaucuauagcacaaau

SEQ ID NO: 4048140 - RNA, 17 nt, Respiratory syncytial virus
ugaaaauauaacaacca

SEQ ID NO: 4048141 - RNA, 21 nt, Respiratory syncytial virus
ugaaauaacaacuucaugcau

SEQ ID NO: 4048142 - RNA, 18 nt, Respiratory syncytial virus
ugaaauucaaaucaacau

SEQ ID NO: 4048143 - RNA, 19 nt, Respiratory syncytial virus
ugaacacacuugaaaauau

SEQ ID NO: 4048144 - RNA, 17 nt, Respiratory syncytial virus
ugaauacaacacaaaau

SEQ ID NO: 4048145 - RNA, 15 nt, Respiratory syncytial virus
ugaaugauacacuca

SEQ ID NO: 4048146 - RNA, 10 nt, Respiratory syncytial virus
aucagugagu

SEQ ID NO: 4048147 - RNA, 16 nt, Respiratory syncytial virus
aucauaacacacagau

SEQ ID NO: 4048148 - RNA, 19 nt, Respiratory syncytial virus
aucaugauugcaauacuga

SEQ ID NO: 4048149 - RNA, 19 nt, Respiratory syncytial virus
auccaauuucacaacaaug

SEQ ID NO: 4048150 - RNA, 19 nt, Respiratory syncytial virus
aucgaaacucucaucuaua

SEQ ID NO: 4048151 - RNA, 18 nt, Respiratory syncytial virus
aucgucaagauauuaaug

SEQ ID NO: 4048152 - RNA, 13 nt, Respiratory syncytial virus
aucucaccaugca

SEQ ID NO: 4048153 - RNA, 16 nt, Respiratory syncytial virus
aucugaaauaacaacu

SEQ ID NO: 4048154 - RNA, 17 nt, Respiratory syncytial virus
augaccaauuauaugaa

SEQ ID NO: 4048155 - RNA, 18 nt, Respiratory syncytial virus
augccaauauuuaucaau

SEQ ID NO: 4048156 - RNA, 22 nt, Respiratory syncytial virus
augcuuaccacaucaucaaacu

SEQ ID NO: 4048157 - RNA, 17 nt, Respiratory syncytial virus
auggaauuaacacacug

SEQ ID NO: 4048158 - RNA, 20 nt, Respiratory syncytial virus
auggacacaacacacaauga

SEQ ID NO: 4048159 - RNA, 16 nt, Respiratory syncytial virus
auggagccugaaaauu

SEQ ID NO: 4048160 - RNA, 19 nt, Respiratory syncytial virus
auguuauuacaaguaguga

SEQ ID NO: 4048161 - RNA, 23 nt, Respiratory syncytial virus
auuaaaaauaaucauaacaauga

SEQ ID NO: 4048162 - RNA, 16 nt, Respiratory syncytial virus
auuaagacuaacaaua

SEQ ID NO: 4048163 - RNA, 14 nt, Respiratory syncytial virus
auuauuacauaaug

SEQ ID NO: 4048164 - RNA, 20 nt, Respiratory syncytial virus
auuauuaucauuaaucaaug

SEQ ID NO: 4048165 - RNA, 15 nt, Respiratory syncytial virus
auucaaaucaacauu

SEQ ID NO: 4048166 - RNA, 23 nt, Respiratory syncytial virus
auucacccaagauaagaguguac

SEQ ID NO: 4048167 - RNA, 20 nt, Respiratory syncytial virus
auuuauuuugaaucaauaug

SEQ ID NO: 4048168 - RNA, 14 nt, Respiratory syncytial virus
auuuuaucaaacaa

SEQ ID NO: 4048169 - RNA, 12 nt, Respiratory syncytial virus
caaaaacagaug

SEQ ID NO: 4048170 - RNA, 17 nt, Respiratory syncytial virus
caaaacccaucuggagc

SEQ ID NO: 4048171 - RNA, 14 nt, Respiratory syncytial virus
caaaacuauacaaa

SEQ ID NO: 4048172 - RNA, 23 nt, Respiratory syncytial virus
caaaacuuuauguuaaacagaau

SEQ ID NO: 4048173 - RNA, 14 nt, Respiratory syncytial virus
caaaauauggcacu

SEQ ID NO: 4048174 - RNA, 17 nt, Respiratory syncytial virus
caaagaaaccauagaaa

SEQ ID NO: 4048175 - RNA, 14 nt, Respiratory syncytial virus
caaauaaaacauca

SEQ ID NO: 4048176 - RNA, 13 nt, Respiratory syncytial virus
caaauaacaaugg

SEQ ID NO: 4048177 - RNA, 15 nt, Respiratory syncytial virus
caaauucacaucacc

SEQ ID NO: 4048178 - RNA, 22 nt, Respiratory syncytial virus
caacauaccuaagauccaucag

SEQ ID NO: 4048179 - RNA, 14 nt, Respiratory syncytial virus
caaccaacacaaag

SEQ ID NO: 4048180 - RNA, 20 nt, Respiratory syncytial virus
caacccugcaauccacaaca

SEQ ID NO: 4048181 - RNA, 23 nt, Respiratory syncytial virus
caagaaaaaagauaguaucauau

SEQ ID NO: 4048182 - RNA, 19 nt, Respiratory syncytial virus
caagauuaaauccaacaau

SEQ ID NO: 4048183 - RNA, 15 nt, Respiratory syncytial virus
caagcagaaauggaa

SEQ ID NO: 4048184 - RNA, 20 nt, Respiratory syncytial virus
caaguaugaucucaauccau

SEQ ID NO: 4048185 - RNA, 19 nt, Respiratory syncytial virus
caauagaauucucaagcaa

SEQ ID NO: 4048186 - RNA, 13 nt, Respiratory syncytial virus
caaucaaaacaac

SEQ ID NO: 4048187 - RNA, 18 nt, Respiratory syncytial virus
caaugucacuaacaccau

SEQ ID NO: 4048188 - RNA, 17 nt, Respiratory syncytial virus
cacaacaacaaccaaaa

SEQ ID NO: 4048189 - RNA, 15 nt, Respiratory syncytial virus
cacaauauauauauu

SEQ ID NO: 4048190 - RNA, 12 nt, Respiratory syncytial virus
cacaaucugaaa

SEQ ID NO: 4048191 - RNA, 24 nt, Respiratory syncytial virus
cacaaucugaaauaacaacuucau

SEQ ID NO: 4048192 - RNA, 21 nt, Respiratory syncytial virus
cacaaucuucuaccagaggug

SEQ ID NO: 4048193 - RNA, 15 nt, Respiratory syncytial virus
cacacuauauuucaa

SEQ ID NO: 4048194 - RNA, 18 nt, Respiratory syncytial virus
cacacuccauaguucaaa

SEQ ID NO: 4048195 - RNA, 15 nt, Respiratory syncytial virus
cacaugacaucauug

SEQ ID NO: 4048196 - RNA, 23 nt, Respiratory syncytial virus
caccaaucugauggcacaaaaca

SEQ ID NO: 4048197 - RNA, 14 nt, Respiratory syncytial virus
caccacaaaacaac

SEQ ID NO: 4048198 - RNA, 22 nt, Respiratory syncytial virus
cacuaacacuguauucaauuau

SEQ ID NO: 4048199 - RNA, 17 nt, Respiratory syncytial virus
cacugcucaccaacaau

SEQ ID NO: 4048200 - RNA, 15 nt, Respiratory syncytial virus
cacuguauucaauua

SEQ ID NO: 4048201 - RNA, 22 nt, Respiratory syncytial virus
cagacaugagaccauugucacu

SEQ ID NO: 4048202 - RNA, 20 nt, Respiratory syncytial virus
cagagacaucauaacacaca

SEQ ID NO: 4048203 - RNA, 14 nt, Respiratory syncytial virus
cagaggaugguacu

SEQ ID NO: 4048204 - RNA, 13 nt, Respiratory syncytial virus
cauaauauacaag

SEQ ID NO: 4048205 - RNA, 21 nt, Respiratory syncytial virus
cauaaugggagaauacagagg

SEQ ID NO: 4048206 - RNA, 17 nt, Respiratory syncytial virus
cauacuaauaacaagua

SEQ ID NO: 4048207 - RNA, 16 nt, Respiratory syncytial virus
cauagcuacacacuaa

SEQ ID NO: 4048208 - RNA, 16 nt, Respiratory syncytial virus
cauaguucaaauggag

SEQ ID NO: 4048209 - RNA, 18 nt, Respiratory syncytial virus
cauaguucaaauggagcc

SEQ ID NO: 4048210 - RNA, 18 nt, Respiratory syncytial virus
cauaugcugaacaacuca

SEQ ID NO: 4048211 - RNA, 18 nt, Respiratory syncytial virus
caucaacacacaacacca

SEQ ID NO: 4048212 - RNA, 22 nt, Respiratory syncytial virus
caucauuauugucuuugacuca

SEQ ID NO: 4048213 - RNA, 22 nt, Respiratory syncytial virus
cauccaacggagcacaggagau

SEQ ID NO: 4048214 - RNA, 16 nt, Respiratory syncytial virus
cauccaugccagcaga

SEQ ID NO: 4048215 - RNA, 21 nt, Respiratory syncytial virus
caugagaccauugucacuuga

SEQ ID NO: 4048216 - RNA, 20 nt, Respiratory syncytial virus
cauggaaaaguuugcuccug

SEQ ID NO: 4048217 - RNA, 20 nt, Respiratory syncytial virus
cauguuauuaaucacagaag

SEQ ID NO: 4048218 - RNA, 20 nt, Respiratory syncytial virus
cauuaauagaacacauaaau

SEQ ID NO: 4048219 - RNA, 19 nt, Respiratory syncytial virus
cauuauaaacccaacaaau

SEQ ID NO: 4048220 - RNA, 12 nt, Respiratory syncytial virus
ccaaaacaaaca

SEQ ID NO: 4048221 - RNA, 12 nt, Respiratory syncytial virus
ccauaacaaaac

SEQ ID NO: 4048222 - RNA, 16 nt, Respiratory syncytial virus
ccauccaaccaaacau

SEQ ID NO: 4048223 - RNA, 22 nt, Respiratory syncytial virus
ccuagaaggggaagugaacaaa

SEQ ID NO: 4048224 - RNA, 23 nt, Respiratory syncytial virus
ccugaaaauuauaguaauuuaaa

SEQ ID NO: 4048225 - RNA, 14 nt, Respiratory syncytial virus
cgauaauauaacag

SEQ ID NO: 4048226 - RNA, 12 nt, Respiratory syncytial virus
cuaaacaaucag

SEQ ID NO: 4048227 - RNA, 17 nt, Respiratory syncytial virus
cuaaagaucccaagaaa

SEQ ID NO: 4048228 - RNA, 20 nt, Respiratory syncytial virus
cuaaucaaacaaaacccauc

SEQ ID NO: 4048229 - RNA, 20 nt, Respiratory syncytial virus
cuacacacuaacacuguauu

SEQ ID NO: 4048230 - RNA, 16 nt, Respiratory syncytial virus
cuagcaaaucaauguc

SEQ ID NO: 4048231 - RNA, 15 nt, Respiratory syncytial virus
cuauaugaugcugca

SEQ ID NO: 4048232 - RNA, 14 nt, Respiratory syncytial virus
cucuacaaaacaaa

SEQ ID NO: 4048233 - RNA, 11 nt, Respiratory syncytial virus
cugaacaaacu

SEQ ID NO: 4048234 - RNA, 13 nt, Respiratory syncytial virus
cugaacaacucaa

SEQ ID NO: 4048235 - RNA, 17 nt, Respiratory syncytial virus
cuggaaagaaaaccacc

SEQ ID NO: 4048236 - RNA, 16 nt, Respiratory syncytial virus
cugucauccagcaaau

SEQ ID NO: 4048237 - RNA, 21 nt, Respiratory syncytial virus
cuuaaagcagucaaaaaucac

SEQ ID NO: 4048238 - RNA, 16 nt, Respiratory syncytial virus
cuugauaaaucaugaa

SEQ ID NO: 4048239 - RNA, 16 nt, Respiratory syncytial virus
cuugaugaaagacagg

SEQ ID NO: 4048240 - RNA, 17 nt, Respiratory syncytial virus
cuuucuaccuacauucu

SEQ ID NO: 4048241 - RNA, 19 nt, Respiratory syncytial virus
gaaaaccaccaccaagccc

SEQ ID NO: 4048242 - RNA, 22 nt, Respiratory syncytial virus
gaaaaccaccaccaagcccaca

SEQ ID NO: 4048243 - RNA, 15 nt, Respiratory syncytial virus
gaaaacuugaugaaa

SEQ ID NO: 4048244 - RNA, 21 nt, Respiratory syncytial virus
gaaagauggggcaaauacaaa

SEQ ID NO: 4048245 - RNA, 18 nt, Respiratory syncytial virus
gaacacaaccccaacaua

SEQ ID NO: 4048246 - RNA, 19 nt, Respiratory syncytial virus
gaagauaaaaauggggcaa

SEQ ID NO: 4048247 - RNA, 15 nt, Respiratory syncytial virus
gaagcacuaaauaca

SEQ ID NO: 4048248 - RNA, 15 nt, Respiratory syncytial virus
gaaguaaccaaagaa

SEQ ID NO: 4048249 - RNA, 15 nt, Respiratory syncytial virus
gaauuacugugacaa

SEQ ID NO: 4048250 - RNA, 14 nt, Respiratory syncytial virus
gaauuugaaaauau

SEQ ID NO: 4048251 - RNA, 17 nt, Respiratory syncytial virus
gacuucaaaaacagaug

SEQ ID NO: 4048252 - RNA, 16 nt, Respiratory syncytial virus
gagaagacaugauaga

SEQ ID NO: 4048253 - RNA, 17 nt, Respiratory syncytial virus
gauaggauugaugaaaa

SEQ ID NO: 4048254 - RNA, 20 nt, Respiratory syncytial virus
gauaucauguaaaagcaaau

SEQ ID NO: 4048255 - RNA, 20 nt, Respiratory syncytial virus
gaugaaguagcauuguuaaa

SEQ ID NO: 4048256 - RNA, 21 nt, Respiratory syncytial virus
gaugacaauugugaaauuaaa

SEQ ID NO: 4048257 - RNA, 21 nt, Respiratory syncytial virus
gaugauauauacacaauauau

SEQ ID NO: 4048258 - RNA, 22 nt, Respiratory syncytial virus
gauggcaaaagacacaucagau

SEQ ID NO: 4048259 - RNA, 20 nt, Respiratory syncytial virus
gauggggcaaauacaaaaau

SEQ ID NO: 4048260 - RNA, 16 nt, Respiratory syncytial virus
gcaaauacaccaucca

SEQ ID NO: 4048261 - RNA, 23 nt, Respiratory syncytial virus
gcaaauucacaucaccuaaagau

SEQ ID NO: 4048262 - RNA, 14 nt, Respiratory syncytial virus
gcaaugauaaucuc

SEQ ID NO: 4048263 - RNA, 14 nt, Respiratory syncytial virus
gcacuaaauacaaa

SEQ ID NO: 4048264 - RNA, 16 nt, Respiratory syncytial virus
gccaaaacaaaccacc

SEQ ID NO: 4048265 - RNA, 10 nt, Respiratory syncytial virus
gccacccgga

SEQ ID NO: 4048266 - RNA, 16 nt, Respiratory syncytial virus
gccaucacaaaugcaa

SEQ ID NO: 4048267 - RNA, 14 nt, Respiratory syncytial virus
gccuacaaagcaca

SEQ ID NO: 4048268 - RNA, 18 nt, Respiratory syncytial virus
gcuauucauaugaagaaa

SEQ ID NO: 4048269 - RNA, 14 nt, Respiratory syncytial virus
gcuuaacaacugaa

SEQ ID NO: 4048270 - RNA, 18 nt, Respiratory syncytial virus
ggaaaauaaguguaaugg

SEQ ID NO: 4048271 - RNA, 17 nt, Respiratory syncytial virus
ggaacccuccacucaac

SEQ ID NO: 4048272 - RNA, 22 nt, Respiratory syncytial virus
ggacugcuccuauacugcaagg

SEQ ID NO: 4048273 - RNA, 11 nt, Respiratory syncytial virus
ggagccucaga

SEQ ID NO: 4048274 - RNA, 18 nt, Respiratory syncytial virus
ggagcuuaccuagaaaaa

SEQ ID NO: 4048275 - RNA, 16 nt, Respiratory syncytial virus
guaaccuugcauuugu

SEQ ID NO: 4048276 - RNA, 16 nt, Respiratory syncytial virus
guaauuuaaaauuaag

SEQ ID NO: 4048277 - RNA, 12 nt, Respiratory syncytial virus
guauuacugaug

SEQ ID NO: 4048278 - RNA, 22 nt, Respiratory syncytial virus
guauuacugaugauauauacac

SEQ ID NO: 4048279 - RNA, 19 nt, Respiratory syncytial virus
guauucaauuauaguuauu

SEQ ID NO: 4048280 - RNA, 17 nt, Respiratory syncytial virus
gucauaauaccaacaua

SEQ ID NO: 4048281 - RNA, 17 nt, Respiratory syncytial virus
gucugaaacuacaucac

SEQ ID NO: 4048282 - RNA, 12 nt, Respiratory syncytial virus
gucuuagaaaaa

SEQ ID NO: 4048283 - RNA, 16 nt, Respiratory syncytial virus
guggcauugcuguauc

SEQ ID NO: 4048284 - RNA, 20 nt, Respiratory syncytial virus
gugucucucaauccaacauc

SEQ ID NO: 4048285 - RNA, 17 nt, Respiratory syncytial virus
guuaaaaauaacaugcu

SEQ ID NO: 4048286 - RNA, 20 nt, Respiratory syncytial virus
guuacuauguauaaucaaaa

SEQ ID NO: 4048287 - RNA, 18 nt, Respiratory syncytial virus
guucuacauaauaaaaga

SEQ ID NO: 4048288 - RNA, 18 nt, Respiratory syncytial virus
guugaaugauacacucaa

SEQ ID NO: 4048289 - RNA, 15 nt, Respiratory syncytial virus
guuggggcaaaugca

SEQ ID NO: 4048290 - RNA, 23 nt, Respiratory syncytial virus
guuugaacacauuaaauaaaagc

SEQ ID NO: 4048291 - RNA, 16 nt, Respiratory syncytial virus
uaaaaauacucagaga

SEQ ID NO: 4048292 - RNA, 17 nt, Respiratory syncytial virus
uaaaaauucccauagcu

SEQ ID NO: 4048293 - RNA, 23 nt, Respiratory syncytial virus
uaaaaauucccauagcuacacac

SEQ ID NO: 4048294 - RNA, 19 nt, Respiratory syncytial virus
uaaaacaauugaauaccag

SEQ ID NO: 4048295 - RNA, 21 nt, Respiratory syncytial virus
uaaauaucaacuagcaaauca

SEQ ID NO: 4048296 - RNA, 19 nt, Respiratory syncytial virus
uaaauccgaugaauuauua

SEQ ID NO: 4048297 - RNA, 16 nt, Respiratory syncytial virus
uaaauuccauacuaau

SEQ ID NO: 4048298 - RNA, 20 nt, Respiratory syncytial virus
uaacaacugcaaucauacaa

SEQ ID NO: 4048299 - RNA, 14 nt, Respiratory syncytial virus
uaacaaugaagaag

SEQ ID NO: 4048300 - RNA, 15 nt, Respiratory syncytial virus
uaacaccauuaguua

SEQ ID NO: 4048301 - RNA, 16 nt, Respiratory syncytial virus
uaaccauauauacuca

SEQ ID NO: 4048302 - RNA, 19 nt, Respiratory syncytial virus
uaauauuguagugaaaucc

SEQ ID NO: 4048303 - RNA, 15 nt, Respiratory syncytial virus
uaaucacagaagaug

SEQ ID NO: 4048304 - RNA, 22 nt, Respiratory syncytial virus
uaauccaaaagauaaugaugua

SEQ ID NO: 4048305 - RNA, 22 nt, Respiratory syncytial virus
uaaugcuuaccacaucaucaaa

SEQ ID NO: 4048306 - RNA, 10 nt, Respiratory syncytial virus
uacaacccag

SEQ ID NO: 4048307 - RNA, 17 nt, Respiratory syncytial virus
uacauaaagccacaaag

SEQ ID NO: 4048308 - RNA, 15 nt, Respiratory syncytial virus
uacauuuaacuaaug

SEQ ID NO: 4048309 - RNA, 24 nt, Respiratory syncytial virus
uaccaagagcucgagucaauacau

SEQ ID NO: 4048310 - RNA, 12 nt, Respiratory syncytial virus
uacgugaacaaa

SEQ ID NO: 4048311 - RNA, 20 nt, Respiratory syncytial virus
uacuaggaaugcuucacaca

SEQ ID NO: 4048312 - RNA, 16 nt, Respiratory syncytial virus
uacugaauacaacaca

SEQ ID NO: 4048313 - RNA, 18 nt, Respiratory syncytial virus
uacuguuagucaucacag

SEQ ID NO: 4048314 - RNA, 20 nt, Respiratory syncytial virus
uagcauuuauucguaaaucc

SEQ ID NO: 4048315 - RNA, 15 nt, Respiratory syncytial virus
uagcuacacacuaac

SEQ ID NO: 4048316 - RNA, 20 nt, Respiratory syncytial virus
uagcuacacacuaacacugu

SEQ ID NO: 4048317 - RNA, 14 nt, Respiratory syncytial virus
uaguauaaauucca

SEQ ID NO: 4048318 - RNA, 19 nt, Respiratory syncytial virus
agcuauucauaugaagaaa

SEQ ID NO: 4048319 - RNA, 17 nt, Respiratory syncytial virus
agcugaaacauguaaag

SEQ ID NO: 4048320 - RNA, 19 nt, Respiratory syncytial virus
agcugcuguucaauacaau

SEQ ID NO: 4048321 - RNA, 23 nt, Respiratory syncytial virus
agcuggcauaugauguaaccaca

SEQ ID NO: 4048322 - RNA, 16 nt, Respiratory syncytial virus
agcuuaauccaaaaga

SEQ ID NO: 4048323 - RNA, 13 nt, Respiratory syncytial virus
aguaaccaaagaa

SEQ ID NO: 4048324 - RNA, 14 nt, Respiratory syncytial virus
aguacucaaauaag

SEQ ID NO: 4048325 - RNA, 11 nt, Respiratory syncytial virus
agucaaaacau

SEQ ID NO: 4048326 - RNA, 22 nt, Respiratory syncytial virus
agucaaaacaucacugaagaau

SEQ ID NO: 4048327 - RNA, 20 nt, Respiratory syncytial virus
agucaacccugcaauccaca

SEQ ID NO: 4048328 - RNA, 23 nt, Respiratory syncytial virus
aguguaguauuaggcaaugcugc

SEQ ID NO: 4048329 - RNA, 14 nt, Respiratory syncytial virus
aguguuacaaaaug

SEQ ID NO: 4048330 - RNA, 16 nt, Respiratory syncytial virus
aguuacaaaaaaagau

SEQ ID NO: 4048331 - RNA, 20 nt, Respiratory syncytial virus
auaaauuuaaauccaaaucu

SEQ ID NO: 4048332 - RNA, 22 nt, Respiratory syncytial virus
auaaggaacucaaaagaauuac

SEQ ID NO: 4048333 - RNA, 16 nt, Respiratory syncytial virus
auaaucccuuuucaaa

SEQ ID NO: 4048334 - RNA, 17 nt, Respiratory syncytial virus
auaaucucaacuucacu

SEQ ID NO: 4048335 - RNA, 12 nt, Respiratory syncytial virus
auacaaagaaac

SEQ ID NO: 4048336 - RNA, 15 nt, Respiratory syncytial virus
auacauaaagccaca

SEQ ID NO: 4048337 - RNA, 17 nt, Respiratory syncytial virus
auacuauaguuacaaaa

SEQ ID NO: 4048338 - RNA, 21 nt, Respiratory syncytial virus
auacuugauaaaucaugaaug

SEQ ID NO: 4048339 - RNA, 13 nt, Respiratory syncytial virus
auagaaguaacca

SEQ ID NO: 4048340 - RNA, 17 nt, Respiratory syncytial virus
auagaugacaauuguga

SEQ ID NO: 4048341 - RNA, 22 nt, Respiratory syncytial virus
auagcuacacacuaacacugua

SEQ ID NO: 4048342 - RNA, 18 nt, Respiratory syncytial virus
auaguucaaauggagccu

SEQ ID NO: 4048343 - RNA, 12 nt, Respiratory syncytial virus
auauaaaacaau

SEQ ID NO: 4048344 - RNA, 19 nt, Respiratory syncytial virus
auauaguaacaucaaaaaa

SEQ ID NO: 4048345 - RNA, 18 nt, Respiratory syncytial virus
auaugcuaugucuagauu

SEQ ID NO: 4048346 - RNA, 12 nt, Respiratory syncytial virus
auauugaacaac

SEQ ID NO: 4048347 - RNA, 17 nt, Respiratory syncytial virus
auauuugcccuaauaau

SEQ ID NO: 4048348 - RNA, 14 nt, Respiratory syncytial virus
aucaaacuauuaac

SEQ ID NO: 4048349 - RNA, 14 nt, Respiratory syncytial virus
aucaacuagcaaau

SEQ ID NO: 4048350 - RNA, 20 nt, Respiratory syncytial virus
aucaaugucacuaacaccau

SEQ ID NO: 4048351 - RNA, 20 nt, Respiratory syncytial virus
aucacaauaucugucaacau

SEQ ID NO: 4048352 - RNA, 19 nt, Respiratory syncytial virus
aucagaucuaguacucaaa

SEQ ID NO: 4048353 - RNA, 14 nt, Respiratory syncytial virus
aucagcuucuccaa

SEQ ID NO: 4048354 - RNA, 23 nt, Respiratory syncytial virus
aauagcaccuaaucauguucuua

SEQ ID NO: 4048355 - RNA, 22 nt, Respiratory syncytial virus
aauauacugaauacaacacaaa

SEQ ID NO: 4048356 - RNA, 19 nt, Respiratory syncytial virus
aauaucugucaacauagac

SEQ ID NO: 4048357 - RNA, 11 nt, Respiratory syncytial virus
aaucaaaacaa

SEQ ID NO: 4048358 - RNA, 21 nt, Respiratory syncytial virus
aaucaauaaagggcaaauuca

SEQ ID NO: 4048359 - RNA, 15 nt, Respiratory syncytial virus
aaucagccaauccaa

SEQ ID NO: 4048360 - RNA, 21 nt, Respiratory syncytial virus
aaucauuggaggaaauccaac

SEQ ID NO: 4048361 - RNA, 22 nt, Respiratory syncytial virus
aauuaaaaauaaucauaacaau

SEQ ID NO: 4048362 - RNA, 15 nt, Respiratory syncytial virus
aauugauaaaacaag

SEQ ID NO: 4048363 - RNA, 17 nt, Respiratory syncytial virus
aauuuacuuaaaaagau

SEQ ID NO: 4048364 - RNA, 14 nt, Respiratory syncytial virus
aauuucaacacaag

SEQ ID NO: 4048365 - RNA, 18 nt, Respiratory syncytial virus
aauuuguuugacaaugau

SEQ ID NO: 4048366 - RNA, 15 nt, Respiratory syncytial virus
aauuuucuacaacau

SEQ ID NO: 4048367 - RNA, 22 nt, Respiratory syncytial virus
acaaaaccuuugagcuaccaag

SEQ ID NO: 4048368 - RNA, 16 nt, Respiratory syncytial virus
acaaacgauaauauaa

SEQ ID NO: 4048369 - RNA, 15 nt, Respiratory syncytial virus
acaaagugggaagca

SEQ ID NO: 4048370 - RNA, 23 nt, Respiratory syncytial virus
acaaaugaucagaaaaaguuaau

SEQ ID NO: 4048371 - RNA, 15 nt, Respiratory syncytial virus
acaacccaucuauca

SEQ ID NO: 4048372 - RNA, 22 nt, Respiratory syncytial virus
acaagauuaaauccaacaaugg

SEQ ID NO: 4048373 - RNA, 15 nt, Respiratory syncytial virus
acacaacacacaaug

SEQ ID NO: 4048374 - RNA, 18 nt, Respiratory syncytial virus
acacaacacacaaugaca

SEQ ID NO: 4048375 - RNA, 19 nt, Respiratory syncytial virus
acacaugauaacaacaaua

SEQ ID NO: 4048376 - RNA, 16 nt, Respiratory syncytial virus
acacgccaggcaaaau

SEQ ID NO: 4048377 - RNA, 14 nt, Respiratory syncytial virus
acacucaacaaaga

SEQ ID NO: 4048378 - RNA, 20 nt, Respiratory syncytial virus
acacucccauaauauacaag

SEQ ID NO: 4048379 - RNA, 15 nt, Respiratory syncytial virus
acagcagaagaacua

SEQ ID NO: 4048380 - RNA, 23 nt, Respiratory syncytial virus
acaggccacauuuacauuccugg

SEQ ID NO: 4048381 - RNA, 16 nt, Respiratory syncytial virus
acaucaacaucucacc

SEQ ID NO: 4048382 - RNA, 16 nt, Respiratory syncytial virus
acaucagugaguugau

SEQ ID NO: 4048383 - RNA, 21 nt, Respiratory syncytial virus
acaucgucaagauauuaaugg

SEQ ID NO: 4048384 - RNA, 23 nt, Respiratory syncytial virus
acaugcagugcagucagcaaagg

SEQ ID NO: 4048385 - RNA, 15 nt, Respiratory syncytial virus
acauguccaaaaaca

SEQ ID NO: 4048386 - RNA, 19 nt, Respiratory syncytial virus
acauugagauagaaucuag

SEQ ID NO: 4048387 - RNA, 14 nt, Respiratory syncytial virus
accaaaauaaccau

SEQ ID NO: 4048388 - RNA, 23 nt, Respiratory syncytial virus
accaacauaccuaagauccauca

SEQ ID NO: 4048389 - RNA, 18 nt, Respiratory syncytial virus
accacaucaacaucucac

SEQ ID NO: 4048390 - RNA, 21 nt, Respiratory syncytial virus
acccauccaaccaaacaucua

SEQ ID NO: 4048391 - RNA, 15 nt, Respiratory syncytial virus
acccaucuggagccu

SEQ ID NO: 4048392 - RNA, 23 nt, Respiratory syncytial virus
accuagaaggggaagugaacaaa

SEQ ID NO: 4048393 - RNA, 19 nt, Respiratory syncytial virus
accuaucacaaccuccauc

SEQ ID NO: 4048394 - RNA, 20 nt, Respiratory syncytial virus
acgccaaucagccaauccaa

SEQ ID NO: 4048395 - RNA, 23 nt, Respiratory syncytial virus
acuaacaccauuaguuaauauaa

SEQ ID NO: 4048396 - RNA, 16 nt, Respiratory syncytial virus
acucaaauaaguuaau

SEQ ID NO: 4048397 - RNA, 23 nt, Respiratory syncytial virus
acucaggaaugaggaaagugaaa

SEQ ID NO: 4048398 - RNA, 13 nt, Respiratory syncytial virus
acucuugaagaaa

SEQ ID NO: 4048399 - RNA, 13 nt, Respiratory syncytial virus
acuugaugaaaga

SEQ ID NO: 4048400 - RNA, 21 nt, Respiratory syncytial virus
agaaaauggugugauuaacua

SEQ ID NO: 4048401 - RNA, 21 nt, Respiratory syncytial virus
agaagacccuacgccaaguga

SEQ ID NO: 4048402 - RNA, 17 nt, Respiratory syncytial virus
agacaucauaacacaca

SEQ ID NO: 4048403 - RNA, 16 nt, Respiratory syncytial virus
agacguauugaagaaa

SEQ ID NO: 4048404 - RNA, 22 nt, Respiratory syncytial virus
agagcucgagucaauacauagc

SEQ ID NO: 4048405 - RNA, 12 nt, Respiratory syncytial virus
agauaaaaaugg

SEQ ID NO: 4048406 - RNA, 19 nt, Respiratory syncytial virus
agauauuaagacuaacaau

SEQ ID NO: 4048407 - RNA, 22 nt, Respiratory syncytial virus
agauauuaaugggaaagaaaug

SEQ ID NO: 4048408 - RNA, 19 nt, Respiratory syncytial virus
agaucuaguacucaaauaa

SEQ ID NO: 4048409 - RNA, 24 nt, Respiratory syncytial virus
agaugcuaaucauaaauucacugg

SEQ ID NO: 4048410 - RNA, 16 nt, Respiratory syncytial virus
agauggcaaaagacac

SEQ ID NO: 4048411 - RNA, 17 nt, Respiratory syncytial virus
agauggcaaaagacaca

SEQ ID NO: 4048412 - RNA, 14 nt, Respiratory syncytial virus
agcauaucaaacau

SEQ ID NO: 4048413 - RNA, 22 nt, Respiratory syncytial virus
agcauaugcugaacaacucaaa

SEQ ID NO: 4048414 - RNA, 14 nt, Respiratory syncytial virus
agccacaaagucaa

SEQ ID NO: 4048415 - RNA, 22 nt, Respiratory syncytial virus
agccuacaaagcacacucccau

SEQ ID NO: 4048416 - RNA, 17 nt, Respiratory syncytial virus
agcuauucauaugaaga

SEQ ID NO: 4048417 - RNA, 17 nt, Respiratory syncytial virus
aaugggaaagaaaugaa

SEQ ID NO: 4048418 - RNA, 20 nt, Respiratory syncytial virus
aaugucaacauacuagugaa

SEQ ID NO: 4048419 - RNA, 17 nt, Respiratory syncytial virus
aauguccuaaaaaauga

SEQ ID NO: 4048420 - RNA, 18 nt, Respiratory syncytial virus
aaugucuuagaaaaagac

SEQ ID NO: 4048421 - RNA, 15 nt, Respiratory syncytial virus
aauuaaauucuccaa

SEQ ID NO: 4048422 - RNA, 13 nt, Respiratory syncytial virus
aauucaaaaaugc

SEQ ID NO: 4048423 - RNA, 11 nt, Respiratory syncytial virus
aauugaacaac

SEQ ID NO: 4048424 - RNA, 13 nt, Respiratory syncytial virus
acaaagaaaccau

SEQ ID NO: 4048425 - RNA, 14 nt, Respiratory syncytial virus
acaacaauaaucuc

SEQ ID NO: 4048426 - RNA, 21 nt, Respiratory syncytial virus
acaacaucuagguauuacuga

SEQ ID NO: 4048427 - RNA, 19 nt, Respiratory syncytial virus
acaacucaaagaaaauggu

SEQ ID NO: 4048428 - RNA, 16 nt, Respiratory syncytial virus
acaagagucacacaau

SEQ ID NO: 4048429 - RNA, 21 nt, Respiratory syncytial virus
acaaguaugaucucaauccau

SEQ ID NO: 4048430 - RNA, 21 nt, Respiratory syncytial virus
acaaguuaaaucuuaaaucua

SEQ ID NO: 4048431 - RNA, 19 nt, Respiratory syncytial virus
acaauauauauauuagugu

SEQ ID NO: 4048432 - RNA, 16 nt, Respiratory syncytial virus
acaccaccaaaacaaa

SEQ ID NO: 4048433 - RNA, 16 nt, Respiratory syncytial virus
acacuguauucaauua

SEQ ID NO: 4048434 - RNA, 15 nt, Respiratory syncytial virus
acagcuucuaugaag

SEQ ID NO: 4048435 - RNA, 19 nt, Respiratory syncytial virus
acagucaagaccaaaaaca

SEQ ID NO: 4048436 - RNA, 20 nt, Respiratory syncytial virus
acauacuagugaaacaaaua

SEQ ID NO: 4048437 - RNA, 16 nt, Respiratory syncytial virus
acaucaaaaaaaguca

SEQ ID NO: 4048438 - RNA, 23 nt, Respiratory syncytial virus
acaucagugaguugauucauaca

SEQ ID NO: 4048439 - RNA, 16 nt, Respiratory syncytial virus
acauguccaaaaacaa

SEQ ID NO: 4048440 - RNA, 17 nt, Respiratory syncytial virus
acauguccaaaaacaag

SEQ ID NO: 4048441 - RNA, 14 nt, Respiratory syncytial virus
accaaacaucuaua

SEQ ID NO: 4048442 - RNA, 22 nt, Respiratory syncytial virus
accaagcccacaaaaaaaccaa

SEQ ID NO: 4048443 - RNA, 20 nt, Respiratory syncytial virus
accacacuccauaguucaaa

SEQ ID NO: 4048444 - RNA, 13 nt, Respiratory syncytial virus
acccaacaaauga

SEQ ID NO: 4048445 - RNA, 20 nt, Respiratory syncytial virus
acccuccacucaaccuccuc

SEQ ID NO: 4048446 - RNA, 22 nt, Respiratory syncytial virus
accucuuuacaaaaccacauca

SEQ ID NO: 4048447 - RNA, 22 nt, Respiratory syncytial virus
accuggaaagaaaaccaccacc

SEQ ID NO: 4048448 - RNA, 14 nt, Respiratory syncytial virus
accuguaagcacuu

SEQ ID NO: 4048449 - RNA, 15 nt, Respiratory syncytial virus
acgauuugcaaucaa

SEQ ID NO: 4048450 - RNA, 18 nt, Respiratory syncytial virus
acuacaguuaaagaucuc

SEQ ID NO: 4048451 - RNA, 17 nt, Respiratory syncytial virus
acuauuaacucaaacaa

SEQ ID NO: 4048452 - RNA, 17 nt, Respiratory syncytial virus
acucaagaagugcagug

SEQ ID NO: 4048453 - RNA, 19 nt, Respiratory syncytial virus
acucaggaaugaggaaagu

SEQ ID NO: 4048454 - RNA, 15 nt, Respiratory syncytial virus
acucuacaaaacaaa

SEQ ID NO: 4048455 - RNA, 22 nt, Respiratory syncytial virus
acugaugauauauacacaauau

SEQ ID NO: 4048456 - RNA, 14 nt, Respiratory syncytial virus
acuguauucaauua

SEQ ID NO: 4048457 - RNA, 22 nt, Respiratory syncytial virus
acuucaugcauaaccacacucc

SEQ ID NO: 4048458 - RNA, 18 nt, Respiratory syncytial virus
agaaaacuugaugaaaga

SEQ ID NO: 4048459 - RNA, 21 nt, Respiratory syncytial virus
agaaacauuugauaacaauga

SEQ ID NO: 4048460 - RNA, 20 nt, Respiratory syncytial virus
agaauaccaaacaaaaaacc

SEQ ID NO: 4048461 - RNA, 12 nt, Respiratory syncytial virus
agacaaacgaua

SEQ ID NO: 4048462 - RNA, 17 nt, Respiratory syncytial virus
agacauaagaugaaaga

SEQ ID NO: 4048463 - RNA, 12 nt, Respiratory syncytial virus
agacuaacaaua

SEQ ID NO: 4048464 - RNA, 22 nt, Respiratory syncytial virus
agacuugauugaugcaauucaa

SEQ ID NO: 4048465 - RNA, 19 nt, Respiratory syncytial virus
agagaagacaugauagaaa

SEQ ID NO: 4048466 - RNA, 17 nt, Respiratory syncytial virus
agaggcuaucaaacauc

SEQ ID NO: 4048467 - RNA, 14 nt, Respiratory syncytial virus
agaguuccaacaaa

SEQ ID NO: 4048468 - RNA, 22 nt, Respiratory syncytial virus
agauaguaucauaucugucaac

SEQ ID NO: 4048469 - RNA, 14 nt, Respiratory syncytial virus
agcaacaauccaac

SEQ ID NO: 4048470 - RNA, 12 nt, Respiratory syncytial virus
agcacaaaucac

SEQ ID NO: 4048471 - RNA, 21 nt, Respiratory syncytial virus
agcacuaaauacaaaaaauau

SEQ ID NO: 4048472 - RNA, 22 nt, Respiratory syncytial virus
agcacuuauauguuaacaaaua

SEQ ID NO: 4048473 - RNA, 13 nt, Respiratory syncytial virus
agcagaagaacua

SEQ ID NO: 4048474 - RNA, 21 nt, Respiratory syncytial virus
agcagauuuacuuauaaaaga

SEQ ID NO: 4048475 - RNA, 22 nt, Respiratory syncytial virus
agccacccggaaaaaauagaua

SEQ ID NO: 4048476 - RNA, 13 nt, Respiratory syncytial virus
agccaucauccau

SEQ ID NO: 4048477 - RNA, 17 nt, Respiratory syncytial virus
agccaugaccaaaucaa

SEQ ID NO: 4048478 - RNA, 16 nt, Respiratory syncytial virus
agcccacaaaaaaacc

SEQ ID NO: 4048479 - RNA, 18 nt, Respiratory syncytial virus
agcccaccacaaaacaac

SEQ ID NO: 4048480 - RNA, 22 nt, Respiratory syncytial virus
agcccuauaacaucaaauucaa

SEQ ID NO: 4048481 - RNA, 21 nt, Respiratory syncytial virus
aggaaauccaacuaaucacaa

SEQ ID NO: 4048482 - RNA, 21 nt, Respiratory syncytial virus
aggggaagugaacaaaaucaa

SEQ ID NO: 4048483 - RNA, 15 nt, Respiratory syncytial virus
aguaaccuugcauuu

SEQ ID NO: 4048484 - RNA, 17 nt, Respiratory syncytial virus
agucaaguugaaugaua

SEQ ID NO: 4048485 - RNA, 21 nt, Respiratory syncytial virus
agucacacaaucugaaauaac

SEQ ID NO: 4048486 - RNA, 15 nt, Respiratory syncytial virus
agucucuauguaaaa

SEQ ID NO: 4048487 - RNA, 16 nt, Respiratory syncytial virus
agugaaauacuaggaa

SEQ ID NO: 4048488 - RNA, 12 nt, Respiratory syncytial virus
agugaauuauua

SEQ ID NO: 4048489 - RNA, 22 nt, Respiratory syncytial virus
agugucauaacacucaauccua

SEQ ID NO: 4048490 - RNA, 20 nt, Respiratory syncytial virus
agugucuuaaccagcaaagu

SEQ ID NO: 4048491 - RNA, 13 nt, Respiratory syncytial virus
aguucaaauggag

SEQ ID NO: 4048492 - RNA, 23 nt, Respiratory syncytial virus
aguuguuaccuauugugaacaag

SEQ ID NO: 4048493 - RNA, 15 nt, Respiratory syncytial virus
aguuugcuccugaau

SEQ ID NO: 4048494 - RNA, 18 nt, Respiratory syncytial virus
auaaaaaucuuauauuaa

SEQ ID NO: 4048495 - RNA, 18 nt, Respiratory syncytial virus
auaaacccaacaaaugag

SEQ ID NO: 4048496 - RNA, 18 nt, Respiratory syncytial virus
auaaagggcaaauucaca

SEQ ID NO: 4048497 - RNA, 15 nt, Respiratory syncytial virus
auaacaaugaacuaa

SEQ ID NO: 4048498 - RNA, 15 nt, Respiratory syncytial virus
auacacucaacaaua

SEQ ID NO: 4048499 - RNA, 19 nt, Respiratory syncytial virus
auacauagcauucaccaau

SEQ ID NO: 4048500 - RNA, 17 nt, Respiratory syncytial virus
auacauccauaacaaua

SEQ ID NO: 4048501 - RNA, 13 nt, Respiratory syncytial virus
auacauuuaacua

SEQ ID NO: 4048502 - RNA, 17 nt, Respiratory syncytial virus
auacgccaaucagccaa

SEQ ID NO: 4048503 - RNA, 21 nt, Respiratory syncytial virus
auacucaccgaaucaaccauu

SEQ ID NO: 4048504 - RNA, 14 nt, Respiratory syncytial virus
auagcuacacacua

SEQ ID NO: 4048505 - RNA, 18 nt, Respiratory syncytial virus
auaugggaaaugauggaa

SEQ ID NO: 4048506 - RNA, 23 nt, Respiratory syncytial virus
aucaaaaaacugagggacaauga

SEQ ID NO: 4048507 - RNA, 17 nt, Respiratory syncytial virus
aucagugucagaaauaa

SEQ ID NO: 4048508 - RNA, 14 nt, Respiratory syncytial virus
aucauauauugaaa

SEQ ID NO: 4048509 - RNA, 19 nt, Respiratory syncytial virus
aucaucgugcuuauacaag

SEQ ID NO: 4048510 - RNA, 22 nt, Respiratory syncytial virus
aucaugauggguucuuagaaug

SEQ ID NO: 4048511 - RNA, 19 nt, Respiratory syncytial virus
auccaucuguuaaaaagau

SEQ ID NO: 4048512 - RNA, 17 nt, Respiratory syncytial virus
aucccaagaaaaaagau

SEQ ID NO: 4048513 - RNA, 13 nt, Respiratory syncytial virus
auccuacaaaaaa

SEQ ID NO: 4048514 - RNA, 18 nt, Respiratory syncytial virus
aucucaccaugcaagcca

SEQ ID NO: 4048515 - RNA, 15 nt, Respiratory syncytial virus
aucuuauauuaaaaa

SEQ ID NO: 4048516 - RNA, 18 nt, Respiratory syncytial virus
augaaauuugaaguguua

SEQ ID NO: 4048517 - RNA, 22 nt, Respiratory syncytial virus
augauacuguagggaacaagcc

SEQ ID NO: 4048518 - RNA, 12 nt, Respiratory syncytial virus
augauauauaca

SEQ ID NO: 4048519 - RNA, 16 nt, Respiratory syncytial virus
cuuauauuaaaaauuc

SEQ ID NO: 4048520 - RNA, 17 nt, Respiratory syncytial virus
cuugauugaugcaauuc

SEQ ID NO: 4048521 - RNA, 14 nt, Respiratory syncytial virus
cuugcugcagucac

SEQ ID NO: 4048522 - RNA, 14 nt, Respiratory syncytial virus
gaaagauggggcaa

SEQ ID NO: 4048523 - RNA, 20 nt, Respiratory syncytial virus
gaaagauggggcaaauacaa

SEQ ID NO: 4048524 - RNA, 22 nt, Respiratory syncytial virus
gaaauccaacuaaucacaauau

SEQ ID NO: 4048525 - RNA, 17 nt, Respiratory syncytial virus
gaaauucaaaucaacau

SEQ ID NO: 4048526 - RNA, 18 nt, Respiratory syncytial virus
gaacacacuugaaaauau

SEQ ID NO: 4048527 - RNA, 19 nt, Respiratory syncytial virus
gaacacauuaaauaaaagc

SEQ ID NO: 4048528 - RNA, 16 nt, Respiratory syncytial virus
gaagcacuaaauacaa

SEQ ID NO: 4048529 - RNA, 17 nt, Respiratory syncytial virus
gaaguagcauuguuaaa

SEQ ID NO: 4048530 - RNA, 21 nt, Respiratory syncytial virus
gaaucgaguauuuugugacac

SEQ ID NO: 4048531 - RNA, 16 nt, Respiratory syncytial virus
gacaaacgauaauaua

SEQ ID NO: 4048532 - RNA, 16 nt, Respiratory syncytial virus
gaccaacaaacaaacc

SEQ ID NO: 4048533 - RNA, 19 nt, Respiratory syncytial virus
gaccucguuagaacagauu

SEQ ID NO: 4048534 - RNA, 22 nt, Respiratory syncytial virus
gacugaugaucacagacaugag

SEQ ID NO: 4048535 - RNA, 17 nt, Respiratory syncytial virus
gacuugauugaugcaau

SEQ ID NO: 4048536 - RNA, 21 nt, Respiratory syncytial virus
gagaaaacuugaugaaagaca

SEQ ID NO: 4048537 - RNA, 15 nt, Respiratory syncytial virus
gauaacaaugaagaa

SEQ ID NO: 4048538 - RNA, 16 nt, Respiratory syncytial virus
gauaacaaugaagaag

SEQ ID NO: 4048539 - RNA, 20 nt, Respiratory syncytial virus
gauauagaaguaaccaaaga

SEQ ID NO: 4048540 - RNA, 17 nt, Respiratory syncytial virus
gaucuaguacucaaaua

SEQ ID NO: 4048541 - RNA, 13 nt, Respiratory syncytial virus
gcaaaccacaaag

SEQ ID NO: 4048542 - RNA, 22 nt, Respiratory syncytial virus
gcauguuauuacaaguagugau

SEQ ID NO: 4048543 - RNA, 17 nt, Respiratory syncytial virus
gcauuaagccuacaaag

SEQ ID NO: 4048544 - RNA, 16 nt, Respiratory syncytial virus
gccaguguuacaaaau

SEQ ID NO: 4048545 - RNA, 17 nt, Respiratory syncytial virus
gcuacacacuaacacug

SEQ ID NO: 4048546 - RNA, 20 nt, Respiratory syncytial virus
ggaugauaauauuauguaua

SEQ ID NO: 4048547 - RNA, 14 nt, Respiratory syncytial virus
ggcaaauaaaucaa

SEQ ID NO: 4048548 - RNA, 18 nt, Respiratory syncytial virus
ggggcaaaugcaaacaug

SEQ ID NO: 4048549 - RNA, 16 nt, Respiratory syncytial virus
guauuacugaugauau

SEQ ID NO: 4048550 - RNA, 17 nt, Respiratory syncytial virus
gugcuagcacaaaugcc

SEQ ID NO: 4048551 - RNA, 23 nt, Respiratory syncytial virus
guuaauagguauguuauaugcua

SEQ ID NO: 4048552 - RNA, 20 nt, Respiratory syncytial virus
guuaccaaucuguacaucaa

SEQ ID NO: 4048553 - RNA, 14 nt, Respiratory syncytial virus
guucaacuaaucaa

SEQ ID NO: 4048554 - RNA, 21 nt, Respiratory syncytial virus
uaaaaaaaauggggcaaauaa

SEQ ID NO: 4048555 - RNA, 13 nt, Respiratory syncytial virus
uaaagaucucacu

SEQ ID NO: 4048556 - RNA, 13 nt, Respiratory syncytial virus
uaaauuccauacu

SEQ ID NO: 4048557 - RNA, 14 nt, Respiratory syncytial virus
uaacaacugaaauu

SEQ ID NO: 4048558 - RNA, 12 nt, Respiratory syncytial virus
uaaccacacucc

SEQ ID NO: 4048559 - RNA, 19 nt, Respiratory syncytial virus
uaacguuggggcaaaugca

SEQ ID NO: 4048560 - RNA, 22 nt, Respiratory syncytial virus
uaauaauguccuaaaaaaugaa

SEQ ID NO: 4048561 - RNA, 20 nt, Respiratory syncytial virus
uacacaugauaacaacaaua

SEQ ID NO: 4048562 - RNA, 18 nt, Respiratory syncytial virus
uacuagcuucaacaacac

SEQ ID NO: 4048563 - RNA, 20 nt, Respiratory syncytial virus
uagaaacauuugauaacaau

SEQ ID NO: 4048564 - RNA, 14 nt, Respiratory syncytial virus
uagcaaaucaaugu

SEQ ID NO: 4048565 - RNA, 16 nt, Respiratory syncytial virus
uagcuacacacuaaca

SEQ ID NO: 4048566 - RNA, 18 nt, Respiratory syncytial virus
uagcuacacacuaacacu

SEQ ID NO: 4048567 - RNA, 23 nt, Respiratory syncytial virus
uagcuacacacuaacacuguauu

SEQ ID NO: 4048568 - RNA, 15 nt, Respiratory syncytial virus
uaguauuaggcaaug

SEQ ID NO: 4048569 - RNA, 15 nt, Respiratory syncytial virus
uagucauaauuauuu

SEQ ID NO: 4048570 - RNA, 13 nt, Respiratory syncytial virus
uauaacaaccacu

SEQ ID NO: 4048571 - RNA, 16 nt, Respiratory syncytial virus
uauaauaauaucacua

SEQ ID NO: 4048572 - RNA, 19 nt, Respiratory syncytial virus
uauagaaguaaccaaagaa

SEQ ID NO: 4048573 - RNA, 24 nt, Respiratory syncytial virus
uauaugaugcugcaaaagcauaug

SEQ ID NO: 4048574 - RNA, 16 nt, Respiratory syncytial virus
uaugaaaacacucaac

SEQ ID NO: 4048575 - RNA, 22 nt, Respiratory syncytial virus
uaugccaauauuuaucaaucau

SEQ ID NO: 4048576 - RNA, 13 nt, Respiratory syncytial virus
uauggauaaaagc

SEQ ID NO: 4048577 - RNA, 14 nt, Respiratory syncytial virus
uauguuauaugcua

SEQ ID NO: 4048578 - RNA, 16 nt, Respiratory syncytial virus
uauuaauggaaauucu

SEQ ID NO: 4048579 - RNA, 19 nt, Respiratory syncytial virus
uauuauguuacaacaaauu

SEQ ID NO: 4048580 - RNA, 16 nt, Respiratory syncytial virus
uauucauaugaagaaa

SEQ ID NO: 4048581 - RNA, 15 nt, Respiratory syncytial virus
uauugcacaaagugg

SEQ ID NO: 4048582 - RNA, 13 nt, Respiratory syncytial virus
uauuucaaucaaa

SEQ ID NO: 4048583 - RNA, 20 nt, Respiratory syncytial virus
uauuuguaaaaaaugagaac

SEQ ID NO: 4048584 - RNA, 12 nt, Respiratory syncytial virus
ucaaaacaacac

SEQ ID NO: 4048585 - RNA, 20 nt, Respiratory syncytial virus
ucaaaacaucacugaagaau

SEQ ID NO: 4048586 - RNA, 22 nt, Respiratory syncytial virus
ucaaaacuauacaaagaaacca

SEQ ID NO: 4048587 - RNA, 13 nt, Respiratory syncytial virus
ucaaaccacaaaa

SEQ ID NO: 4048588 - RNA, 21 nt, Respiratory syncytial virus
ucaaacuauuaacucaaacaa

SEQ ID NO: 4048589 - RNA, 23 nt, Respiratory syncytial virus
ucaaagucuaugcuauauugaau

SEQ ID NO: 4048590 - RNA, 18 nt, Respiratory syncytial virus
ucaaauggaguuaguguc

SEQ ID NO: 4048591 - RNA, 19 nt, Respiratory syncytial virus
ucaacaaagaucaacuucu

SEQ ID NO: 4048592 - RNA, 23 nt, Respiratory syncytial virus
ucaacacaagagucacacaaucu

SEQ ID NO: 4048593 - RNA, 15 nt, Respiratory syncytial virus
ucaacuguuagugau

SEQ ID NO: 4048594 - RNA, 17 nt, Respiratory syncytial virus
ucaagauauuaauggga

SEQ ID NO: 4048595 - RNA, 15 nt, Respiratory syncytial virus
ucaagcuuaacaacu

SEQ ID NO: 4048596 - RNA, 11 nt, Respiratory syncytial virus
ucaauacauag

SEQ ID NO: 4048597 - RNA, 15 nt, Respiratory syncytial virus
ucaaugucacuaaca

SEQ ID NO: 4048598 - RNA, 18 nt, Respiratory syncytial virus
ucacacaaucugaaauaa

SEQ ID NO: 4048599 - RNA, 16 nt, Respiratory syncytial virus
ucaccaacccucugug

SEQ ID NO: 4048600 - RNA, 20 nt, Respiratory syncytial virus
ucaccucuuuacaaaaccac

SEQ ID NO: 4048601 - RNA, 18 nt, Respiratory syncytial virus
ucagagaaauugaacaac

SEQ ID NO: 4048602 - RNA, 18 nt, Respiratory syncytial virus
ucagaucuaguacucaaa

SEQ ID NO: 4048603 - RNA, 22 nt, Respiratory syncytial virus
ucagugaguugauucauacaaa

SEQ ID NO: 4048604 - RNA, 21 nt, Respiratory syncytial virus
ucaugauugcaauacugaaca

SEQ ID NO: 4048605 - RNA, 22 nt, Respiratory syncytial virus
ucaugcuauggcaaaacuaaau

SEQ ID NO: 4048606 - RNA, 18 nt, Respiratory syncytial virus
ucauguaaaagcaaaugg

SEQ ID NO: 4048607 - RNA, 18 nt, Respiratory syncytial virus
ucauuguucaucagaucu

SEQ ID NO: 4048608 - RNA, 17 nt, Respiratory syncytial virus
uccaacacaacaaacca

SEQ ID NO: 4048609 - RNA, 22 nt, Respiratory syncytial virus
uccauaguucaaauggagccug

SEQ ID NO: 4048610 - RNA, 15 nt, Respiratory syncytial virus
uccaugccagcagau

SEQ ID NO: 4048611 - RNA, 18 nt, Respiratory syncytial virus
ucuacuauccacaaacaa

SEQ ID NO: 4048612 - RNA, 19 nt, Respiratory syncytial virus
ucuaugacccauuaguguu

SEQ ID NO: 4048613 - RNA, 13 nt, Respiratory syncytial virus
ucucaauccauga

SEQ ID NO: 4048614 - RNA, 23 nt, Respiratory syncytial virus
ucuuaaaucuauagcacaaauca

SEQ ID NO: 4048615 - RNA, 15 nt, Respiratory syncytial virus
ucuuuacaaaaccac

SEQ ID NO: 4048616 - RNA, 19 nt, Respiratory syncytial virus
ugaaagauggggcaaauac

SEQ ID NO: 4048617 - RNA, 22 nt, Respiratory syncytial virus
ugaaauccaauuucacaacaau

SEQ ID NO: 4048618 - RNA, 23 nt, Respiratory syncytial virus
ugaagaauuuuaucaaacaacau

SEQ ID NO: 4048619 - RNA, 15 nt, Respiratory syncytial virus
ugaugcaauucaaaa

SEQ ID NO: 4048620 - RNA, 13 nt, Respiratory syncytial virus
ugcagaaacacau

SEQ ID NO: 4048621 - RNA, 11 nt, Respiratory syncytial virus
ugccaucacaa

SEQ ID NO: 4048622 - RNA, 15 nt, Respiratory syncytial virus
ugcuagcacaaaugc

SEQ ID NO: 4048623 - RNA, 19 nt, Respiratory syncytial virus
ugcucuacuauccacaaac

SEQ ID NO: 4048624 - RNA, 15 nt, Respiratory syncytial virus
uggcuaaggcaguga

SEQ ID NO: 4048625 - RNA, 19 nt, Respiratory syncytial virus
uggggcaaauaaaacauca

SEQ ID NO: 4048626 - RNA, 19 nt, Respiratory syncytial virus
uggucaacuaugaaaugaa

SEQ ID NO: 4048627 - RNA, 17 nt, Respiratory syncytial virus
ugucauccagcaaauac

SEQ ID NO: 4048628 - RNA, 18 nt, Respiratory syncytial virus
uguuaacauugucaagcu

SEQ ID NO: 4048629 - RNA, 18 nt, Respiratory syncytial virus
uuagauaaauauaaaagu

SEQ ID NO: 4048630 - RNA, 18 nt, Respiratory syncytial virus
uuaucaaagaaaaccucu

SEQ ID NO: 4048631 - RNA, 10 nt, Respiratory syncytial virus
uucaacaaug

SEQ ID NO: 4048632 - RNA, 21 nt, Respiratory syncytial virus
uucaacacaagagucacacaa

SEQ ID NO: 4048633 - RNA, 21 nt, Respiratory syncytial virus
uucaacuuuguaccuugcagc

SEQ ID NO: 4048634 - RNA, 18 nt, Respiratory syncytial virus
uuccauggagaagaugca

SEQ ID NO: 4048635 - RNA, 19 nt, Respiratory syncytial virus
uucuuacaaugguuucaua

SEQ ID NO: 4048636 - RNA, 18 nt, Respiratory syncytial virus
uugauugaugcaauucaa

SEQ ID NO: 4048637 - RNA, 18 nt, Respiratory syncytial virus
uuuauauguauauuaacu

SEQ ID NO: 4048638 - RNA, 22 nt, Respiratory syncytial virus
uuugaacacauuaaauaaaagc

SEQ ID NO: 4048639 - RNA, 15 nt, Respiratory syncytial virus
uuuuaauaacuuuua

SEQ ID NO: 4048640 - RNA, 17 nt, Respiratory syncytial virus
aaaaagucauaauacca

SEQ ID NO: 4048641 - RNA, 14 nt, Respiratory syncytial virus
aaaagaauaccaaa

SEQ ID NO: 4048642 - RNA, 19 nt, Respiratory syncytial virus
aaaaucagaacugaagcau

SEQ ID NO: 4048643 - RNA, 14 nt, Respiratory syncytial virus
aaaccacaaaguca

SEQ ID NO: 4048644 - RNA, 14 nt, Respiratory syncytial virus
aaagccaaccauca

SEQ ID NO: 4048645 - RNA, 22 nt, Respiratory syncytial virus
aaauacaccauccaacggagca

SEQ ID NO: 4048646 - RNA, 23 nt, Respiratory syncytial virus
aaauacauaaagccacaaaguca

SEQ ID NO: 4048647 - RNA, 23 nt, Respiratory syncytial virus
aaauaucaacuagcaaaucaaug

SEQ ID NO: 4048648 - RNA, 15 nt, Respiratory syncytial virus
aaauauggaaacaua

SEQ ID NO: 4048649 - RNA, 12 nt, Respiratory syncytial virus
aaaucaacauug

SEQ ID NO: 4048650 - RNA, 19 nt, Respiratory syncytial virus
aaauccuacaaaaaaaugc

SEQ ID NO: 4048651 - RNA, 19 nt, Respiratory syncytial virus
aaaucuauagcacaaauca

SEQ ID NO: 4048652 - RNA, 22 nt, Respiratory syncytial virus
aaaugagacagaugauacugua

SEQ ID NO: 4048653 - RNA, 21 nt, Respiratory syncytial virus
aaauggcucuuagcaaaguca

SEQ ID NO: 4048654 - RNA, 16 nt, Respiratory syncytial virus
aaauuccauacuaaua

SEQ ID NO: 4048655 - RNA, 22 nt, Respiratory syncytial virus
aaauucccauagcuacacacua

SEQ ID NO: 4048656 - RNA, 17 nt, Respiratory syncytial virus
aacaacugaaauucaaa

SEQ ID NO: 4048657 - RNA, 22 nt, Respiratory syncytial virus
aacacacuauauuucaaucaaa

SEQ ID NO: 4048658 - RNA, 13 nt, Respiratory syncytial virus
aacagcaagauua

SEQ ID NO: 4048659 - RNA, 15 nt, Respiratory syncytial virus
aacaggaaaaacaau

SEQ ID NO: 4048660 - RNA, 16 nt, Respiratory syncytial virus
aacauacgugaacaaa

SEQ ID NO: 4048661 - RNA, 22 nt, Respiratory syncytial virus
aacaucagagaaauugaacaac

SEQ ID NO: 4048662 - RNA, 19 nt, Respiratory syncytial virus
aacaucagcuuaauccaaa

SEQ ID NO: 4048663 - RNA, 19 nt, Respiratory syncytial virus
aaccaucaagacaaccaaa

SEQ ID NO: 4048664 - RNA, 18 nt, Respiratory syncytial virus
aaccaucaauaacccaaa

SEQ ID NO: 4048665 - RNA, 13 nt, Respiratory syncytial virus
aacucaaagaaaa

SEQ ID NO: 4048666 - RNA, 14 nt, Respiratory syncytial virus
aagaccaacaaaca

SEQ ID NO: 4048667 - RNA, 18 nt, Respiratory syncytial virus
aagaucugaacacacuug

SEQ ID NO: 4048668 - RNA, 20 nt, Respiratory syncytial virus
aagaugcaaacaacagagcu

SEQ ID NO: 4048669 - RNA, 15 nt, Respiratory syncytial virus
aagcacacagcuaca

SEQ ID NO: 4048670 - RNA, 16 nt, Respiratory syncytial virus
aagcacuaaauacaaa

SEQ ID NO: 4048671 - RNA, 17 nt, Respiratory syncytial virus
aaggggaagugaacaaa

SEQ ID NO: 4048672 - RNA, 17 nt, Respiratory syncytial virus
aaguaguuaauuaaaaa

SEQ ID NO: 4048673 - RNA, 13 nt, Respiratory syncytial virus
aagugauguuacg

SEQ ID NO: 4048674 - RNA, 18 nt, Respiratory syncytial virus
aaguuaauguccaacaau

SEQ ID NO: 4048675 - RNA, 12 nt, Respiratory syncytial virus
aauaaccaaauu

SEQ ID NO: 4048676 - RNA, 22 nt, Respiratory syncytial virus
aauacaaaaaauauacugaaua

SEQ ID NO: 4048677 - RNA, 13 nt, Respiratory syncytial virus
aauacaaaaaugg

SEQ ID NO: 4048678 - RNA, 23 nt, Respiratory syncytial virus
aauauccacauggggcaaauaau

SEQ ID NO: 4048679 - RNA, 22 nt, Respiratory syncytial virus
aauauuguuaucauuaauugcc

SEQ ID NO: 4048680 - RNA, 12 nt, Respiratory syncytial virus
aaucaaaacaac

SEQ ID NO: 4048681 - RNA, 22 nt, Respiratory syncytial virus
aaucaaugucacuaacaccauu

SEQ ID NO: 4048682 - RNA, 14 nt, Respiratory syncytial virus
aaucuuauauuaaa

SEQ ID NO: 4048683 - RNA, 23 nt, Respiratory syncytial virus
aaugaaacuauugcacaaagugg

SEQ ID NO: 4048684 - RNA, 23 nt, Respiratory syncytial virus
ugacaacaaaggagcauucaaau

SEQ ID NO: 4048685 - RNA, 14 nt, Respiratory syncytial virus
ugauaaaucaugaa

SEQ ID NO: 4048686 - RNA, 20 nt, Respiratory syncytial virus
ugaucuaggaggaauaaauu

SEQ ID NO: 4048687 - RNA, 16 nt, Respiratory syncytial virus
ugaugcaauucaaaau

SEQ ID NO: 4048688 - RNA, 20 nt, Respiratory syncytial virus
ugaugugcagaaacacauca

SEQ ID NO: 4048689 - RNA, 18 nt, Respiratory syncytial virus
ugcauguuauuacaagua

SEQ ID NO: 4048690 - RNA, 18 nt, Respiratory syncytial virus
ugcauuuaguaacuaaau

SEQ ID NO: 4048691 - RNA, 19 nt, Respiratory syncytial virus
ugccaauauuuaucaauca

SEQ ID NO: 4048692 - RNA, 23 nt, Respiratory syncytial virus
ugccaauccucaaaacaaaugca

SEQ ID NO: 4048693 - RNA, 16 nt, Respiratory syncytial virus
ugccaucacaaaugca

SEQ ID NO: 4048694 - RNA, 13 nt, Respiratory syncytial virus
ugcuagcacaaau

SEQ ID NO: 4048695 - RNA, 23 nt, Respiratory syncytial virus
uggaaacauacgugaacaaacuu

SEQ ID NO: 4048696 - RNA, 21 nt, Respiratory syncytial virus
uggaaauucugcuaaugugua

SEQ ID NO: 4048697 - RNA, 21 nt, Respiratory syncytial virus
uggagaagaugcaaacaacag

SEQ ID NO: 4048698 - RNA, 23 nt, Respiratory syncytial virus
uggcaaugauaaucucaacuuca

SEQ ID NO: 4048699 - RNA, 19 nt, Respiratory syncytial virus
uggcauuguauuugugcau

SEQ ID NO: 4048700 - RNA, 20 nt, Respiratory syncytial virus
uggcuaaggcagugauacau

SEQ ID NO: 4048701 - RNA, 20 nt, Respiratory syncytial virus
uguaccuugcagcauaugca

SEQ ID NO: 4048702 - RNA, 12 nt, Respiratory syncytial virus
uguauucaauua

SEQ ID NO: 4048703 - RNA, 12 nt, Respiratory syncytial virus
uguccaacaaug

SEQ ID NO: 4048704 - RNA, 18 nt, Respiratory syncytial virus
uuaaaaauucccauagcu

SEQ ID NO: 4048705 - RNA, 22 nt, Respiratory syncytial virus
uuaaauucuccaaaaaacuaag

SEQ ID NO: 4048706 - RNA, 18 nt, Respiratory syncytial virus
uuaacucaaacaauucaa

SEQ ID NO: 4048707 - RNA, 20 nt, Respiratory syncytial virus
uuaagucuauggauaaaagc

SEQ ID NO: 4048708 - RNA, 16 nt, Respiratory syncytial virus
uuaaucacagaagaug

SEQ ID NO: 4048709 - RNA, 20 nt, Respiratory syncytial virus
uuaccagggaauuuaguguu

SEQ ID NO: 4048710 - RNA, 24 nt, Respiratory syncytial virus
uuauauuaaaaauucccauagcua

SEQ ID NO: 4048711 - RNA, 12 nt, Respiratory syncytial virus
uucacaacaaug

SEQ ID NO: 4048712 - RNA, 13 nt, Respiratory syncytial virus
uucaccaucauaa

SEQ ID NO: 4048713 - RNA, 13 nt, Respiratory syncytial virus
uuccauacuaaua

SEQ ID NO: 4048714 - RNA, 16 nt, Respiratory syncytial virus
uucccauagcuacaca

SEQ ID NO: 4048715 - RNA, 18 nt, Respiratory syncytial virus
uuccuagaaucaauaaag

SEQ ID NO: 4048716 - RNA, 17 nt, Respiratory syncytial virus
uucuacauaauaaaaga

SEQ ID NO: 4048717 - RNA, 18 nt, Respiratory syncytial virus
uugccaauccucaaaaca

SEQ ID NO: 4048718 - RNA, 13 nt, Respiratory syncytial virus
uugucaagcuuaa

SEQ ID NO: 4048719 - RNA, 16 nt, Respiratory syncytial virus
uuguuugacaaugaug

SEQ ID NO: 4048720 - RNA, 17 nt, Respiratory syncytial virus
uuucaaaacuauacaaa

SEQ ID NO: 4048721 - RNA, 16 nt, Respiratory syncytial virus
uuugcccuaauaauaa

SEQ ID NO: 4048722 - RNA, 15 nt, Respiratory syncytial virus
uuuguuugacaauga

SEQ ID NO: 4048723 - RNA, 13 nt, Respiratory syncytial virus
ucugucaacucaa

SEQ ID NO: 4048724 - RNA, 15 nt, Respiratory syncytial virus
ucuuagcaaagucaa

SEQ ID NO: 4048725 - RNA, 18 nt, Respiratory syncytial virus
ugaaaauauaacaaccac

SEQ ID NO: 4048726 - RNA, 20 nt, Respiratory syncytial virus
ugaaauaaaaauagaagaac

SEQ ID NO: 4048727 - RNA, 13 nt, Respiratory syncytial virus
ugaaauaacaacu

SEQ ID NO: 4048728 - RNA, 16 nt, Respiratory syncytial virus
ugaaauaacaacuuca

SEQ ID NO: 4048729 - RNA, 17 nt, Respiratory syncytial virus
ugaacaacccucaccuc

SEQ ID NO: 4048730 - RNA, 13 nt, Respiratory syncytial virus
ugaagaaaaccau

SEQ ID NO: 4048731 - RNA, 15 nt, Respiratory syncytial virus
ugaauuugaaaauau

SEQ ID NO: 4048732 - RNA, 21 nt, Respiratory syncytial virus
ugauacauacaaucaaauuga

SEQ ID NO: 4048733 - RNA, 16 nt, Respiratory syncytial virus
ugauagaaaaaaucag

SEQ ID NO: 4048734 - RNA, 16 nt, Respiratory syncytial virus
ugaugaucacagacau

SEQ ID NO: 4048735 - RNA, 12 nt, Respiratory syncytial virus
ugcaaaaaucau

SEQ ID NO: 4048736 - RNA, 15 nt, Respiratory syncytial virus
ugcaagcagaaaugg

SEQ ID NO: 4048737 - RNA, 19 nt, Respiratory syncytial virus
ugcauuggcuaaggcagug

SEQ ID NO: 4048738 - RNA, 23 nt, Respiratory syncytial virus
ugccagcagacguauugaagaaa

SEQ ID NO: 4048739 - RNA, 15 nt, Respiratory syncytial virus
ugccaucacaaaugc

SEQ ID NO: 4048740 - RNA, 13 nt, Respiratory syncytial virus
ugcuaaucauaaa

SEQ ID NO: 4048741 - RNA, 19 nt, Respiratory syncytial virus
ugcuaaucauaaauucacu

SEQ ID NO: 4048742 - RNA, 15 nt, Respiratory syncytial virus
uggaaagaaaaccac

SEQ ID NO: 4048743 - RNA, 18 nt, Respiratory syncytial virus
uggaaauucugcuaaugu

SEQ ID NO: 4048744 - RNA, 13 nt, Respiratory syncytial virus
uggacacaacaca

SEQ ID NO: 4048745 - RNA, 18 nt, Respiratory syncytial virus
uggagaagaugcaaacaa

SEQ ID NO: 4048746 - RNA, 11 nt, Respiratory syncytial virus
uggagccugaa

SEQ ID NO: 4048747 - RNA, 17 nt, Respiratory syncytial virus
uggauguaacaacacau

SEQ ID NO: 4048748 - RNA, 14 nt, Respiratory syncytial virus
uggauuuucuuaaa

SEQ ID NO: 4048749 - RNA, 17 nt, Respiratory syncytial virus
uggcacuuuuccuaugc

SEQ ID NO: 4048750 - RNA, 23 nt, Respiratory syncytial virus
uggcauuguauuugugcauguua

SEQ ID NO: 4048751 - RNA, 17 nt, Respiratory syncytial virus
ugggcagcaauucauug

SEQ ID NO: 4048752 - RNA, 21 nt, Respiratory syncytial virus
uggguuaauagguauguuaua

SEQ ID NO: 4048753 - RNA, 20 nt, Respiratory syncytial virus
uguagucagcuuaucaaaug

SEQ ID NO: 4048754 - RNA, 15 nt, Respiratory syncytial virus
ugucacuaacaccau

SEQ ID NO: 4048755 - RNA, 13 nt, Respiratory syncytial virus
uguuacaacaaau

SEQ ID NO: 4048756 - RNA, 23 nt, Respiratory syncytial virus
uguuggaucugcaaucgccagug

SEQ ID NO: 4048757 - RNA, 17 nt, Respiratory syncytial virus
gaagagaagacaccaua

SEQ ID NO: 4048758 - RNA, 11 nt, Respiratory syncytial virus
gaauguaaugc

SEQ ID NO: 4048759 - RNA, 16 nt, Respiratory syncytial virus
gaauuaacacacugcu

SEQ ID NO: 4048760 - RNA, 13 nt, Respiratory syncytial virus
gacaauugugaaa

SEQ ID NO: 4048761 - RNA, 14 nt, Respiratory syncytial virus
gacaucaaaaaacu

SEQ ID NO: 4048762 - RNA, 20 nt, Respiratory syncytial virus
gagagacauaagaugaaaga

SEQ ID NO: 4048763 - RNA, 13 nt, Respiratory syncytial virus
gagcuaccaaauu

SEQ ID NO: 4048764 - RNA, 21 nt, Respiratory syncytial virus
gagcuaccaaauuccuagaau

SEQ ID NO: 4048765 - RNA, 18 nt, Respiratory syncytial virus
gaguuacuauguauaauc

SEQ ID NO: 4048766 - RNA, 17 nt, Respiratory syncytial virus
gauggcaauccaagccc

SEQ ID NO: 4048767 - RNA, 15 nt, Respiratory syncytial virus
gauggcacaaaacag

SEQ ID NO: 4048768 - RNA, 14 nt, Respiratory syncytial virus
gcaaauaacaaugg

SEQ ID NO: 4048769 - RNA, 17 nt, Respiratory syncytial virus
gcaagcccaccacaaaa

SEQ ID NO: 4048770 - RNA, 19 nt, Respiratory syncytial virus
gcacaaagugggaagcacu

SEQ ID NO: 4048771 - RNA, 16 nt, Respiratory syncytial virus
gcacaaaucacauuau

SEQ ID NO: 4048772 - RNA, 15 nt, Respiratory syncytial virus
gcaccuaaucauguu

SEQ ID NO: 4048773 - RNA, 16 nt, Respiratory syncytial virus
gcacuaaauacaaaaa

SEQ ID NO: 4048774 - RNA, 18 nt, Respiratory syncytial virus
gcauuaguaauaaccaaa

SEQ ID NO: 4048775 - RNA, 13 nt, Respiratory syncytial virus
gccaaaacaaacc

SEQ ID NO: 4048776 - RNA, 13 nt, Respiratory syncytial virus
gccaguguuacaa

SEQ ID NO: 4048777 - RNA, 17 nt, Respiratory syncytial virus
gccucagaucaucccaa

SEQ ID NO: 4048778 - RNA, 24 nt, Respiratory syncytial virus
gcuaaucauaaucuccaucaugau

SEQ ID NO: 4048779 - RNA, 17 nt, Respiratory syncytial virus
gcuauucauaugaagaa

SEQ ID NO: 4048780 - RNA, 17 nt, Respiratory syncytial virus
gcugaacaacucaaaga

SEQ ID NO: 4048781 - RNA, 17 nt, Respiratory syncytial virus
gcuuaacaacugaaauu

SEQ ID NO: 4048782 - RNA, 15 nt, Respiratory syncytial virus
ggagccugaaaauua

SEQ ID NO: 4048783 - RNA, 11 nt, Respiratory syncytial virus
ggcaaaugcaa

SEQ ID NO: 4048784 - RNA, 15 nt, Respiratory syncytial virus
ggcuaaggcagugau

SEQ ID NO: 4048785 - RNA, 12 nt, Respiratory syncytial virus
ggggcaaauaaa

SEQ ID NO: 4048786 - RNA, 13 nt, Respiratory syncytial virus
gguacugugacaa

SEQ ID NO: 4048787 - RNA, 19 nt, Respiratory syncytial virus
gguucuacauaauaaaaga

SEQ ID NO: 4048788 - RNA, 12 nt, Respiratory syncytial virus
guaaaagcaaau

SEQ ID NO: 4048789 - RNA, 19 nt, Respiratory syncytial virus
augguugguuuaagagaag

SEQ ID NO: 4048790 - RNA, 22 nt, Respiratory syncytial virus
auguaacaacacaucgucaaga

SEQ ID NO: 4048791 - RNA, 16 nt, Respiratory syncytial virus
augugaauuugaaaau

SEQ ID NO: 4048792 - RNA, 16 nt, Respiratory syncytial virus
augugcagaaacacau

SEQ ID NO: 4048793 - RNA, 15 nt, Respiratory syncytial virus
auguggcauguuauu

SEQ ID NO: 4048794 - RNA, 18 nt, Respiratory syncytial virus
auuaaacaacauauuaac

SEQ ID NO: 4048795 - RNA, 17 nt, Respiratory syncytial virus
auuaaauccaacaaugg

SEQ ID NO: 4048796 - RNA, 21 nt, Respiratory syncytial virus
auuaagccuacaaagcacacu

SEQ ID NO: 4048797 - RNA, 20 nt, Respiratory syncytial virus
auuaaggagagacauaagau

SEQ ID NO: 4048798 - RNA, 15 nt, Respiratory syncytial virus
auuaccgcaauccuu

SEQ ID NO: 4048799 - RNA, 15 nt, Respiratory syncytial virus
auuauguaucaaaua

SEQ ID NO: 4048800 - RNA, 15 nt, Respiratory syncytial virus
auugaagaaaaccau

SEQ ID NO: 4048801 - RNA, 23 nt, Respiratory syncytial virus
auugcuuuaugugaauuugaaaa

SEQ ID NO: 4048802 - RNA, 19 nt, Respiratory syncytial virus
auuuuagucauaauuauuu

SEQ ID NO: 4048803 - RNA, 12 nt, Respiratory syncytial virus
caaaaaaaccaa

SEQ ID NO: 4048804 - RNA, 16 nt, Respiratory syncytial virus
caaaaauaaugauacu

SEQ ID NO: 4048805 - RNA, 16 nt, Respiratory syncytial virus
caaaagaacacacuau

SEQ ID NO: 4048806 - RNA, 16 nt, Respiratory syncytial virus
caaaauuaaacaacau

SEQ ID NO: 4048807 - RNA, 21 nt, Respiratory syncytial virus
caaaauuuucuacaacaucua

SEQ ID NO: 4048808 - RNA, 13 nt, Respiratory syncytial virus
caaagaugauaua

SEQ ID NO: 4048809 - RNA, 22 nt, Respiratory syncytial virus
caaaggaaguaccuaccaccaa

SEQ ID NO: 4048810 - RNA, 16 nt, Respiratory syncytial virus
caaagucacacuaaca

SEQ ID NO: 4048811 - RNA, 17 nt, Respiratory syncytial virus
caaauaaaucaauucag

SEQ ID NO: 4048812 - RNA, 18 nt, Respiratory syncytial virus
caaaugcaaaaaucaucc

SEQ ID NO: 4048813 - RNA, 13 nt, Respiratory syncytial virus
caaauggagccug

SEQ ID NO: 4048814 - RNA, 15 nt, Respiratory syncytial virus
caaauggagccugaa

SEQ ID NO: 4048815 - RNA, 14 nt, Respiratory syncytial virus
caacaauccaaccu

SEQ ID NO: 4048816 - RNA, 13 nt, Respiratory syncytial virus
caggcaaaaucaa

SEQ ID NO: 4048817 - RNA, 18 nt, Respiratory syncytial virus
cagugauacauacaauca

SEQ ID NO: 4048818 - RNA, 21 nt, Respiratory syncytial virus
cauacaagaugcaacaagcca
